United States Patent Application Publication US 2007/0083945 A1 - sequence listing, part 21

SEQ ID NO: 141644 - DNA, 458 bp, Glycine max
  unsure (1)..(458): unsure at all n locations
actatcaaactaagcttggtaagaactgaggaaaaatcaagaacaagctggtacgctcatcgttcgcgtgtatgatatccactccacaaggtttgaagtagaggagagcttcaaccctataacgcaacgtggcggacaaaagtgggcagtaaacttgaatggtcgtcatagtcaatgcggaaggtattctgcgcttcactatccatgtttacacattattgcagcttgtggttacgtgagcatgaactactaccaatatatagatgttgtttatacaaacgagaacatcttanaagcttactccgcacaatggtggcctcttgggaatgaagcagctattcctccttctgatgacgcatggacacttatccctgacccaactacaattcgtgcgaaaggtcggccaaaatcaacaaagataagaaatgagatggattgggtcgaaccatctgagcacc

SEQ ID NO: 141645 - DNA, 426 bp, Glycine max
  unsure (1)..(426): unsure at all n locations
agctntggagcttctttatgttaaacaatgtctgacttagtatttcttgagttgcatcacttgcacgtacaaggacactggtgcagtggcaatttttttttcttacgtcatgatctcaggattagtcttcaatgcagggtaactcaccttccttcagactcttgtcaacctgaacctatcctcacaaacgtctcatagcagaaacatctctgccttcaacaacctgaagaaacccttcttgtcactgtggtaaactgattggaagtaaagatcgtgggggcttcaccctggtgatcaacaataggaaatgcctcagcaaaaaatgctcctacagttttactccacccataacgaagctgttcctatagtcttaccccaaccataatgaaaaaccaacaccaaaatatgacgtnctacatctccatc

SEQ ID NO: 141646 - DNA, 407 bp, Glycine max
  unsure (1)..(407): unsure at all n locations
tgagtgataagcaacgtttggttntcttttttgcattcaaggatgattnttcttggaggtttaaactttaagagatataggtagatgcatctttggtggagatgtgaatacaaggtgggtatagcctgagtctaaaaggtctgaaattgtatctttagaatcactagggtgcgtgatccttaggggttgagacaagggtgttcaccatagaagcgtcccaagtggggttactcaaagtggacgatcttgagtaaaaactccctgctgtgtaatactttgatttagtgaaatattcaagcggttttttcttaaatatatgaataagtgatttaaataattaaaaataaatttaattttttgctaaaataattaattaaaatatatgttgctttntgtgcttgaatttt

SEQ ID NO: 141647 - DNA, 281 bp, Glycine max
  unsure (1)..(281): unsure at all n locations
gtagatgcantaacattattataccgacacttttttttgttatgncnaganagcnggagatactcccagtgagaaggagagtgagggaaactctaactcccatgcatacctctgaccttacatgcatccacctgggatggctgagcaatgcccaaactatgggctcgcaatctgggatggaacatctcctccaccaccttctctccctttgtaatacataatcatgaacacccatttacgattggagtattggacctctnttttcacccgcaccaatgaaa

SEQ ID NO: 141648 - DNA, 283 bp, Glycine max
agcttagactaagttcaacctaccattcttatactgatggccaaactgaacggaccattcaatcattggaggactttttaagggcatgtgtcttatagcacaagagaagttgggagagtttcctgccattgatagagttcacttacaacaacaggtttcactctaccattggcatggatccctatgaagctttatatggtagaaggtgtaggacatctttatgttggcttgagccccgagaaaaccttcccttatgacctgaagtggggcagcaaaccaccca

SEQ ID NO: 141649 - DNA, 339 bp, Glycine max
aaataagatgtgcacgttcgctaatcgcaccgcgttatctcactaagcgcatagctttagtccatccactatgcgagagaggcgtgtgctcagcccaaattcactaatgtgtgctcagcactttataattatgctcatcgcacgggcgcgaacaaagccgcctatatgagcccgaaatcatattatgtgaaggaggttatgctgaaagctgaagcttcgcatgtctagtgattctacagagagaacgagtgcacgttctacaagagttgtgagagaatatgctgtgtgaagatctgttgagaccacagcttgtagaggaagctattctgagagcttgag

SEQ ID NO: 141650 - DNA, 388 bp, Glycine max
agctttgacataaggttttatgttctttaataaattttcactgcagctcttagagaagttaaaatggaagcatctttattaattacaattgaagtatataagttggttttaacatatatgagaataagtttaattacaacagggagtggttattcaaaataacatgaggtggaaggtgggggatggagagaaaattagattctgggaaaacaaatggattaatcaacaagaatgactagtataaaggtaccccacgctggttatcttatcctcacagcagaatcacaccattaggcaaatgggaattcacaatgacaagggctgggaatggaaattttcatggagaagactgctttttgacaatgaaattgatacaaccatcaaattt

SEQ ID NO: 141651 - DNA, 460 bp, Glycine max
  unsure (1)..(460): unsure at all n locations
acacatgaaactaagctatgctgaaatattacaatagacctcctcaacctcagtctctatttcaaccacagcagaaaaattatgacctctccagcaacagatacaaccctggatggaggaatcaccctaacctcagatggtccagccctcagcaacaacaacagcagcctgctccttccttccaaaatgctgctggcccaagcagaccatacattcctccaccaatccaacaacagcaacaaccccagaaacaaccaacagttgaggcccctccacaaccttcccttgaagaacttgtgaggcaaatgactatgcagaacatgcagtttcagcaagagaccagagcctccattcagagcttaaccaatcagatgggacaattggctacccaatngaatcaacaacagtcccagaattctgacaagctgccttctcaagctgtccaaaatcccaaaaatgt

SEQ ID NO: 141652 - DNA, 441 bp, Glycine max
  unsure (1)..(441): unsure at all n locations
atcctctgagtcacctgcggcagcaagcntgaattgtaagtaggttaaactattgaaagggggcaaatattaattataatctgagttcaattttgaattattaccaaaaatagaataaattataatataatgtataaggtttgagttgaaagtcgtcattgatattacgatttttattttgttaactaaagtcaaaaacttttttacaatttattttattttttaattttatgacttctaagtggtaggattttactttttttactactttaaagtcattttttattttttttagaagccgtaaatttaagacttctatttcttcatatatatatttctttaaatgtaaatattttcttaattcaattatttaataaataaatactttttacttcttgcagtttattaatattttatataatattatatggtttatataaa

SEQ ID NO: 141653 - DNA, 438 bp, Glycine max
  unsure (1)..(438): unsure at all n locations
ntactaaaccaatcacacacacgcgcgggcgaacatgcatgcacatagcacaaaattctatgattaaaaacatataactactgaaattaaattcttacatgcacaaatgacaatacacgaagttttctctattagtctgaattgtaatttttcagggtgtcacaactctaacttattttaattattttagatcatataactagacactataattagtcaccaactaattaaactaaaattctatttttaaactaattgtatagtcatttacaaaaatgccttccactttaaaatcttattacttaattaccccttntttaattctatgaaatctagattaacattaatcaaccttaattgtctccacttaatttatatccttacttacatcaattactaattttggtcttcaaacttctaatttctatttctagacca

SEQ ID NO: 141654 - DNA, 422 bp, Glycine max
agcttatattaccaggaacaaggctaaagcgagaaaggaatcggcttgaagggttcaaggactgatttgaagaagaatgtgcagagctgctaccagttctggatgcagtgtggccccactcctcaaggtcaatgttggaaggcacacaaggcacttcatcagatttatcagatttaacctttctaaaagactctgtcttcacctcatctgaatctatttcattgccactactgtatgtcacatcctctccatttactttattctgatcacaaacctaaatcatgtgtttcaaactacagttaggcagttagtaccacaaaactttgaccaattccaaaactgtttcaatgcttgacagttacacacggaaacaaattataagaacaaatggggaagagaaactattccattatattattttc

SEQ ID NO: 141655 - DNA, 434 bp, Glycine max
  unsure (1)..(434): unsure at all n locations
ngacagcaatatcattgagtatcaacaacctgagtggaacatttcatttccttgtttggataatatgtcatctcttactggaatctcaactccagtgaatcaattttataactctcttccacccaacatgttccacactctcccaaatctccaagtacttgctatcggtggcaatcaaatttcaggtccaatcccaccttccatcacaaatgcatctttcctagttttagttgatattagtggaaaccttttcactgaccaagtttctaagtctaggaaagctacaagatcttcaacaaatatcttttaattggtttttttagcttaattgcattttccacactttttatttttttaagcgttacttcctaaaagttaatttagctcattttatcctcaatctttaaaactaccaatttccttcattattaagt

SEQ ID NO: 141656 - DNA, 437 bp, Glycine max
agcaagcttgcaactttatgtccctggcacaattgtcaggattcaaactattcctatactggacgagtccaaccaaccaatcccaaacaaggtcatattccatcgacttttttggtcatttaaggcatgcattgatgtgtttgcattttgtaaacccattgtgcaaatcgatggaacatggctatatggaagatacaaaaggacattgttagttgcaattggacaagatggtgctaataacatatttccattggcatttgccattgtcgagggtgagatagcagatgggtagcactttttttttgcaaaacttgatagcacatatgacaccacaacatggtatatgcttaatctctgacaggcacgattcaatcaaaagtgcatacagatgacttgacagtgggtggacagcagacaactacatgtgttctatattc

SEQ ID NO: 141657 - DNA, 413 bp, Glycine max
agaaggcaaactagatgcattggttaactgggtgaccttgctggccttgaatcagaaatctgtacctgtcgcaatagtctgtggtttatgctcctctgctgaccaccatacagacctctgcccttccatgcaacaacctgcagcaattgagcagcctgaagcttatgctgcaaacatttacaatagacgtcctcaacctcagtagcaaaatcaaccacaacagaacaattatgacttctcaagcaacagatacaaccctggatggaggaatcaccctaatcacagatggtctaggcctcaacaacaacaacaacagcctacttcttccttccaaaatgttgttagcccaagcagaccatacattcctccaccaatccaacaacagctacaggcccagaaataacaaacagttg

SEQ ID NO: 141658 - DNA, 417 bp, Glycine max
agcttgtcacccagcccgcccaggcgagcatggttgcttcctccaaaagcaacaaccttctggaggaaccttctggagggcccaagtgggcctggttgatatttgcacccctatttttactaagtacaccccttgccttttttttggtgattcttttttttgtaaaattacggaaacttacgaatttcgtaacgatacttgttttctttccgtaatgttacggaaccttgcggattacataatcatcccctttttgacttacggaatgttacggaacctcactaattgtgcaacgatgcttccatttgatttccggtgtgtcacggaacattacggattgtgcatcaatattttcttttgtttccggcatgtcccgaaatctcacaaattgctaatgatgggtgccaagcacctcac

SEQ ID NO: 141659 - DNA, 439 bp, Glycine max
tcaacttacagtgagtgattcaggcttagcgccactacatgtgctaagcgcacttccaatgacttcaaaatagaatgatgttggcgcttagcgcatcctttcccgctaaacccagcttgatagctcatcttatagaatgaatctggggcttagcgcagctataataaattttcacagagaggaagtggcgtttagcgcatcatccacgctaagcccactgcttaaggtgcaacttacagtgaagatgttgggcttagcgcagcgatgtgtgctaagctgaaccattcagccaatcaatcagggttctttgcacttagcgcaaggtttgcacttagcggatatgcaatctaaaaattttctgagtcattctctacttatctcttcacacataatgttaacaaccctttttgttcattactaaacaagctgaaatcaatca

SEQ ID NO: 141660 - DNA, 422 bp, Glycine max
agcttctaaactttgtacaagaatgaagctctgataccacttgttagacaagtggcctcagatatcttaagaaggggggggttgaattaagatattccaaactgtttcccctaattaaaaatctatttcactttttactcaagttatgaattcccttaatgacaatcttcttaaatattaattcaaacgaagcaacttgaatatgaatataaagcaataataaataaaggagattaagggaagagaaaatgcaaactcagttttatactggttcggccacacccttgtgcctacgtccagtccccaagcaacccgcttgagagttccactatcttgtaaattccttttacaagttctaaacacacaaggacaatccttcctttgtgtttagatatcctttacaacaagagactcacagtctc

SEQ ID NO: 141661 - DNA, 438 bp, Glycine max
  unsure (1)..(438): unsure at all n locations
tgngtgaagaantcatttgttaaatatgatgctatctctattaatagtatgtggggttcaacttttaagttaagaaaagggaaacaatctagttatgaggaatggctcaataaagagaggagcacccaaaaggaacaacagccaatgattactgagatggaagaggtcttgtgtcttcctaatagacatttcaagtgtggggtgatagttaaaaagctccacaaagtagacatgactggcttggctcagttttggactactttcatcctggataacattgttcctaattcccacaagccaaatattcctatgaagagagctcaactcctctatgctattatcaaggatctttctattaacattggccaaatcctttcctacaagatattcacaatctctaggaagaaatgttctccacttggccttccatgtcttatc

SEQ ID NO: 141662 - DNA, 248 bp, Glycine max
  unsure (1)..(248): unsure at all n locations
agctntaggctattcaacagtggccgaagcctcgatcggcgcgtgcacttcgcagctttttgggactcgcgggattctacagaagattcatctatggctacgcgacaattgttgcacctctcaccaagcttctcacattggaacctttttagtggacccaagatgctcgtgcaacttttgctactcttaaacagatcctaacctcaacccctgttcttcggttgccggacttcacccttcctttcacg

SEQ ID NO: 141663 - DNA, 288 bp, Glycine max
  unsure (1)..(288): unsure at all n locations
ntatcttgaaatgcttagttgtgccatgaaacaccggatcattatcaattgttattgcaacctggttgtccacaaaaatctgtgtgctttcttcttgtttcatatgcaatattggcataattctcctgatccatagagcttgattcactgcagcaacaacagctacatactatgtttatgcagttgattgagctacaacttcttgctgtttagaacaccaagataagactccaaaaccaaaggaaaaacagtaaccaaaggtgcttctcatgtcatcaatacaacctg

SEQ ID NO: 141664 - DNA, 299 bp, Glycine max
  unsure (1)..(299): unsure at all n locations
ggatctcctggacgnnagnaagactacacatctcccaaatagcagtgcatttgtcggggttggcttctattccccgatgcatgatcataaagcccaagaattttccttcacagacctcgaaagtacatatttttgggttgaggcgcatatcatatttgtagagctcttcgaacacctctttcangtctaccacatgttgggcaatgctctaagaattaacgaccatgtgggcaacataaacttccgtctcgtgtgtaaaattccatccatcaatctctatcatgttgcgcctgcctttg

SEQ ID NO: 141665 - DNA, 429 bp, Glycine max
agcttagaacataatgtgacaattactatgactaaacatgactctaagacaacatggattaagtgatttacacttagatttttgtgttttttttttctaatcaatattttggaagaaaatttagatctaacattcagcacaataatattatgaatgaaaaatgatagaacctaaaatcaacacaaaaacatgattcaagagtagatctacaaaatttgaaccatagaaatgcaagaacaagtgtagatctaagatttaatcggtttatttttttttgaatctactctaaatagaaccaaaccacaagacaatggaggatatacatggagaataagatgaagaacaaggaattgaagagaattccccaaacaaaaagatagaggaagcaaaaacacatcacctagatgaagatgctcttgataccacatg

SEQ ID NO: 141666 - DNA, 441 bp, Glycine max
taatacccaaaatcacatctacaggaccaaggtccttcatatcaaaattatatacaagaaagacttcacatcatttatgaattgcatattactaccaaatattaatatgtcatccacatacaaacataaaatgatacatcccctatcatcaaattgtttcacatacacacatttatcactattattgatttgaaaaccatacgaaagaacaacttgatcaaacttttcgtgtcattgctttggagcttgtttcaaaccatataaagatttaacaagtttgcaaattttattttccttccccggttctacaaagccttcaggttggctcatataaatttcttcttctaattcaccatttaaaaagacgggttttacatccatttgatgaatttctaaattaaaaacacaagcaagtgcaattaaaaccctaatggcagtaac

SEQ ID NO: 141667 - DNA, 430 bp, Glycine max
  unsure (1)..(430): unsure at all n locations
agctntaacctcattgtctctcacagtctttagatttgggagcaaatccaatccttgtgtccggactctcagccacttatggtagccgccgatgatcccgttactgcttcccctaagctctctgtcctttcttcacaccgcatcacctgccttgcgaactccttggagtacctttgcattggggtcactgaaaccccgtgtcatgaaaggcgtgatgctttcgtctaatggcgctcctctcatggggtagccaagctgtcttatggcgaggacgggattataattaatacaaccccttgttccatcaagggaacatttggacatccttcgcatgaagatagaatcctgaatcttccttccttctagcgagggaaccaattaacaaacgcctctctatgctagccaagagtgggacccatttcgtctcttt

SEQ ID NO: 141668 - DNA, 436 bp, Glycine max
  unsure (1)..(436): unsure at all n locations
tagacaaccacaaagaagaatgaatccagttatgaaggataaagtgcagaaggaagtacttaaattgctagaagcaggcctcatttatcccatttcagatagtgcttgggttagtctcgtgcaggtggttcccaagaaaggaggcatgacggtaatcaggaatgagaaaaatgatttaattcccacaagaaccgtcactagctagaggatgtgtattgattatagaaaattgaatgatgccaccagaaaagatcactacccacttcccttcatggatcaaatggttgaaaggctggcagaacaatcattctattgctttttagatggatactctggctacaatcagattgttgtggatccaaatgaccaaganaagacaacattcacttgtccctttggtgtgtttgcctataggcgaatgccattcggtctttgc

SEQ ID NO: 141669 - DNA, 443 bp, Glycine max
  unsure (1)..(443): unsure at all n locations
agctnttcatccatctcccaagatgttccattgaagaaaaaagtgaagggaaataacaacaaaaatgaagacaaagggagtattgtcaatctgtttctcagattcaagagtttgttattggcaagtattgacttttaaactaaggaaaaaattattttccttctatcttctataaatgaatgacaacataatgaaaaaaaaatataagattattagagtatacaccagtcaagatgcttatgactcatgcatgttattttagagctacactattataaaaattaaaacacaactttttgtagtttaccaagtaacatatgtgtatgtgtaattaagagttgaaacttacaacaacaacttcttcttctagaagatcttcaacaaaaatagttcccttcttagaagtcttcaaaacttcatcagttgtacccatcctgcattgg

SEQ ID NO: 141670 - DNA, 435 bp, Glycine max
  unsure (1)..(435): unsure at all n locations
ctcaccatanaccttgacccattgtgagaatgttcattcttgcactcgaaaganaacaaaaaaaagaaaaagaaagttcccgatcaaagatcggaagaaaaaaaaagaagaaaattcccaatcaaagattgggagaaagcaaaaaagaaagaaaaattcccgatcaaagatcggaagaaaacaaaagaaatatacacaaaggtctttggaccagacaatatctgaacaatacaaaattgtcacaagtaaacaagaaaaggaaggaaaccacgacttggagtggtcctctccctttgatcgccaaccaaaatcctgtgcgctagcgactttctcgccctgcactaaacaaaaacagaaaaggaaaagacccaaacactcagagctaaattcctcaccaaaacaccattcccaaaaagtcctattgatccatgatca

SEQ ID NO: 141671 - DNA, 417 bp, Glycine max
agcttgatttaaaatgttcaaaaatacttttaattaatattcgaatctctattcctttattaatatatatgtgaggggtagagggtgtcacataaatacgtacagaatattagtcttttagtttaatatgtatcatttttgtgtctttcctacgaaatttcttattttgattcttaatgagtgaattaagtcattgagaagttgtttctcataaaaaagaactagccttacttttgtgaaatatagatatgattctcaaatcacaatagttcactcgtataagtatatgactaccttgttttatggcccacacatctctatagtactggtagttttatttttttacttataatactaatgctggtaactctatactactcagatatttcttgtaacacgtacagtatatatgttgat

SEQ ID NO: 141672 - DNA, 426 bp, Glycine max
  unsure (1)..(426): unsure at all n locations
agctntattgtacgacaccttgtaggcaaattcactgttaatcctctcttgaatcaaagaaacttttattgatggatcttctctgatcatgtctgtcaacagaataacaaaatttaaatgacaattaacgcaaaagtaacataatatgaacatcaaatacgtacctactacacaagtgacattaaatctgaatcaagcttctcgtaatcttgtgtcatggtcatattgagacatgtgtgtggtccaccccattgagtgactttccatgaatcaatttttttagataaaatttccctcatatagaaagggcaaggacactctgtgcttttattcaagcagtaaatgacatacttgttcgatttgctttcaacaactttgaaactntgatgcaccttcataacatattgtttgactgcattcttgacc

SEQ ID NO: 141673 - DNA, 399 bp, Glycine max
tatctgtatgtattaaataacagtgatgacattttaccatacatactttgtcatgaaggtttagcgaaagaaagtaatccacaaatatcgaagaacagggtgttgaaagagcataacaagactttcctaatctggtttaaagatacaatctttggagaagataatgcttcttaaacgttaagaaagctaacaaatgggcctaaaagaaatgttataacttggcaaggatacaatataaataagtattccttctatacaaaagcataacacaagaaaagtataatgcaaaacaggggggttaccctaagggctgaatctcaacacttcgctagtgtacatgattattatttcagtgtagcttccatcccttactttgcgttcgttaagaaaattgggagc

SEQ ID NO: 141674 - DNA, 428 bp, Glycine max
  unsure (1)..(428): unsure at all n locations
agctntcctctgtatgccaagatggccacctattgcggaagaatgacagaattgcaggactgagtcaatctcatggtctagaatgcatctcctaataacctggtcactgcacaacttccacaaataggggtcatcccaaatataatgctaaacatcactcttaattttatcattttgagctttacatgcttagggaggaaaaatagaagcaaccaaataattcacaatattaaaaaaccaaggagtggggaaggaatcagaaatactatacagaatgtacaaatgatcatctggaaaatcatcccgaatgggtgagtcctcagacgcacgctcaatcctactcagatggtcaaccacgaggttctgtgtaccactccgatcacggatctctaaatcaaactcttggagccaaagcatccacctgatca

SEQ ID NO: 141675 - DNA, 404 bp, Glycine max
agcttgcgcttgagatagctaatgaatatactatgcaacctatcaaggcacctaaccaagctctagatgctttagatgcaggacatagctaaagacacacttggcttgaagctgagatgaagatgctctatgcgcgaggccaatctaacgatgttttatgctcgaggtgcacggatatgctaagtgataaagttcaatatcacaataaggggggtggaattgtgatttaaagaatttttgtaaaccttttttacaaagaacgttatgatctgatacaatgtgtagagagagaaaatactcatagttggaagataactagaagattctggaaaacactcttctaaaacaaatttagatataaacgcttgatagctcacgccgataagatagataggttaacacag

SEQ ID NO: 141676 - DNA, 389 bp, Glycine max
  unsure (1)..(389): unsure at all n locations
agcttatatatttgtgttctttattgatatactaattaacttttatttttatttatattataattttagtttttttcttatcttgttaaaaaataaacttaatcatatatatatatatatatatatatatatatatatatatatatatgtatatatatatattatgaggcattatggagcactgaaaatttatttaatataaatntatgaatataatacatcataaaaaataactagcaaccaaaacagtgatatatcacaatttaatttgaataaaaaatacatgaaataaaataataatttttatttatttattaatataaaataaaataatatacaaaatattattatataattttatntaatattgtgagtcttttttaacctgt

SEQ ID NO: 141677 - DNA, 356 bp, Glycine max
atcccatcctagcgaggatccatcgtatcaagatgctcacccacaaatgctcgaagatcgctgagctttgtgtggactctattccacagagaacaacaagcgtgcctttgtggtggaggacatggggtacctttatcaggaattggtggtggcgagtcttgtttgcgaactcactgaccattaacatccttcccataaccaaaggaggtcacatcaccggcaccaatggagaaagaccttttcaccttgacatatggttcatcctccaaaggaacatttgattgatgacgacatagagtatcaaggcggggatacctgagaggtgcatatgacccgtatgccttatgcattctata

SEQ ID NO: 141678 - DNA, 309 bp, Glycine max
agctttacaactagctaggaccttggtcatattgcctcaactttccacaactagaccgattctaatgagattttatctcgcctagttgcaagcagacaaggcgttgcaaaaattaacgcgaaatatatacactaaacttacagaaaatagtgtatatatatgcaataaaggatttatacattattatccaattctaaattatcatatatatatatatataattttttacactaaaagtaaacggaaattaatatgatttactaacatatctttgctcgtgtttggccgcatcaaatcttcaaaaagacg

SEQ ID NO: 141679 - DNA, 390 bp, Glycine max
tgtatatgacgctgacaccggaacaaactaatcaagggatcaccaagagaacacaggccgtgcgaaaccatcaacaatgttttcagcaacctttgcaatatctgatcaagtcatatcatccaaaaacaccgtctcttccatgctcgggtacagtgtgaacaacaccgaaacaactgaagctagccatgtagagaacacaaccatcaacaatctctttagcaacagctcgcaataactgatgaaaccgtgtcagcaaaaaacaccgtagctttcaagctcggatatggcaacaacactgaaacaaaaacaactcaaaccactcaatatgagcctctgctatagctgataaagatttattcagcaaaaacacctgagcttctaagcttggtt

SEQ ID NO: 141680 - DNA, 303 bp, Glycine max
tgcaagcttcacttattatgcacaacgtctcagaattagcatatcttggaattagctttattgcgtccaatagaggtatgtatacctctactttgctaaatgttaccaagatctccttctctgcctcttccatttttttgttgaaaacctctcttggacggaatggaacagggatatgctgcttctgtaaatcagaattaccaatggaagattcacccgcctagaaattgctatgtaacttactctttaaatcctcgtcatcatcctcttctggaccacaatgaagactggcacgttcatttg

SEQ ID NO: 141681 - DNA, 339 bp, Glycine max
  unsure (1)..(339): unsure at all n locations
ntgcgattcattgtatgaacgcgaggcggtgcacattgtgtctcgtgtattcagatgcacacttcatttacattttatacccactcctgacgtgcttgagccattttattaaagacactgctggcttgacctaaaaataaaataaatttgcaccgatcattcgaattgtattatccagtcacttcggttaaaatgaattccgaccgttcggtcgtgccgtaaccacgctggaactaaaaaaacagaggtggaatgatgatctactaatcgaaagagtatctcttagtcatgataagcggacaatcgatcggacagttctctctttgggagtggccattc

SEQ ID NO: 141682 - DNA, 289 bp, Glycine max
  unsure (1)..(289): unsure at all n locations
agcttattntatatagctcatgagagatgtactatcttaaaagctactaccgntcttaattctctcattttattttcattaacttatttgaaattttattttattattgtattcaattcaaaattcttgttacttattttaacatttttatcaacactatatgacatttttaaatttcctaagttttattaaacctggaagtctaacttgacctaaataaagtaccatttttcacagcctattttacatctatccggttactttttcaaataatcttacccaaaatttt

SEQ ID NO: 141683 - DNA, 348 bp, Glycine max
cagcttccataagatctacaccaatcctacatatgaatcgaatcttttgtgagattcttattttaaaaatgtgtacaagtacacatgcttggcccgaaatatattttctgaaaaagtgtagacgtaaaagttaactataaatataattaattactaagggatttattgttttgtactataaaattattgatagttataataattttttaaaaaaatttattgaaaatatttttttacattaacattacataaagattaaatacttgagatatatatatatatatatatatattattgggaaaaatttctgtacatacatacaataaaaatttcccttatcgtcacatc

SEQ ID NO: 141684 - DNA, 418 bp, Glycine max
  unsure (1)..(418): unsure at all n locations
tggcanacatagttgacacagaagggatatctcctctagtatttatcataatatcatcggcaaaagccaaatgagatagctgaatacctacacagttgggatgaaatttaaaattggcatcatccttgaggctgctcatatatctggaaaagtactccaaacagagcacaaacagataaggggagagaggatccccttgtccaagaccccgctgccctttgaagtgaccataaatggatccattgactgccacactaaaggaagtggaagaaacacattccatgatccaagtacagaactaggctgggaagccaatggacttaagcatccaatccaagaattcccaggaaatggaatcataagctntatgcaagtcaattttcaggagacatctcggagaggatctttttccggcata

SEQ ID NO: 141685 - DNA, 431 bp, Glycine max
  unsure (1)..(431): unsure at all n locations
agctntcatcaaataacaaggaggtacatcggttattattggatataagcaactctacaataatgttttatgatttcttcaagaaccttataatcccgtagccataattgcttccttacaatgatgacctcataggtttctttggtcaccacataactccaataggatacatgaagttgtatgtaacctttggttaaatgcaaataatcagaatgactgttgtcagattcattggggtaaagccagtttttttttaaaatcaacctggtcaaggcactgggtcattagtcgaaccaatggggtcactgattgacttgcatgacccactctatattaaaaaaatatgaaaatttcatacctatcttagaaaaaaaactcaaaacaaattaatacaatcccataagctcattcttcaagttcaattttgcaaa

SEQ ID NO: 141686 - DNA, 429 bp, Glycine max
actaagcttgctgagaagctttatggggctgatctttagcttattgatgtccttcaatggtgattttcaaccgtggagttggagtggaaaatgaaggagaagaggtgccatacactagagaataagccatagaaggaggagcttcaccaccaagtgagtgtcttggataagaagcttaaagagggagcttcaatggaggaagaatataagagagagaaagtggcatggaaaattgaaggaagaaagggcgagaagttgaactttgaagtgtgtctcacaagactctcattcatcaaagttgtgacatgtgttacacatgtttctatttatagcctaggtcactaactaaatgaagttcactttcatgtgaatctaaaaagaatattctaaggatatgccaaaggcatcttagcatattctaaaaatatg

SEQ ID NO: 141687 - DNA, 428 bp, Glycine max
agcttcccagatatggagagctaaatcctctgttggttcttccttgtaggtacatgatgtaaatattgtatatctatttaatgatgttttatgtgttctctgtgctatcagtacgtcatttcagtgtgtttttgccttgatcacataaatgcatgctttgtaaggatcattaaacagtgaaaactggtctgattcttaaaacttgataggacagggctagtttatcatattatcacgagggatcggggtacggtaacctagttgtttgtatgtttgtcttaatgcggttctggtcaagtttagtccaacaagaggaatctgaggacgatgcttgatcaagattatgctagactatcatgagaaatcggggtttatcatttcatgagacaccatagaacatatgagcattgttaagtagagaatatcct

SEQ ID NO: 141688 - DNA, 440 bp, Glycine max
tactaagcttgcatgttcaaatatcacatatgaaaatcgatgataccttgtatataatagcctcatgaattgattatcatgactcaaaattaaaagtagcaccgttacattgtcataccatttaaccacaagagaggatttaatacaaagtcacactaaacttgatttacactacatttgcttaagacactgagtataaacattgcatgaagtatacatgcattcaacataaaactaaaacctagtggctgataaacattggtgcatcaaaatatcagttgaatttacttaggcatacaacagtgatgtttttattcaatgagtaacaccaaactcttacattgttaatacaatattgcacacaggaactaacaaacacatgtagtcttaaaatgaaacccagtgaataaaccatatttattaaactcatgttgcaagct

SEQ ID NO: 141689 - DNA, 418 bp, Glycine max
  unsure (1)..(418): unsure at all n locations
agcttaggctanattagtgtgaactttcgtgatctctttaagccgagactactccaacaagagggatctgagaacgattcttagtttaacgtgagctaaacataggagggttgtctatattaatcctattccagccagagggatctgaggacccacctctgattgatacaggctaactggggactgcggtttactaatttatgctacaccatgaaacacatcggcctgaataattatagaaacatctttatatacatcatctggtttgttagaaagacccaacatatttacatactgatgacaatcctacttacttgcattattactgtttttagcctacacctaatactatgttgttctaaaacatcaaattatcaatgtttgtttcaacagtgccttatttctgaatataaccatg

SEQ ID NO: 141690 - DNA, 398 bp, Glycine max
  unsure (1)..(398): unsure at all n locations
tcttcgaagggcatggntatttctagtttcttgaatatatctaagaatctcgccaaatggcggtccttctccttcttggaaggtaccacaggatatggtactttcgtaccttcattcacagctntttctcttttcttctctctagcttgttcacttttactcctctcttcattcttatttttttcatctttttcattttctttttctttttctacttcttttaattcttttttcttgaccattatttgtttttctttttcctagttcatttcacctctcacatcatctttcttttcatcagtacctgtcttttcagtagctctcttcttggatacaacactatcctcattctccgcctccacaaacctgttactccttgtcatcacagctttgcattc

SEQ ID NO: 141691 - DNA, 431 bp, Glycine max
agcttgcttgtaaatattatatggaggctatatctttgagcttcaatgaggtccttcaatggtgattttccaccatggaggtgcaacggaagacaaaggaaaaaaagtgagaggagacgccaaccactagggaataagccttggaagaagtagcttccccaccaagaatgtgccttggataagaagcttggagaggatgcttcaatggaggaaaagaaagagagagagagagagaaagagagagggggagcacgaaattgaaggaggaaaagggggagagaagttgaactttgagttgtgtctcacaagactctcattcatcaaagttacaacaagtgttacacatgcttctatttatagcctaggtagcttccttgaaatgcttccttgagaagcttctttgagaagctctcttgagaagctagaactta

SEQ ID NO: 141692 - DNA, 405 bp, Glycine max
tatcatggatagttttcaaggacttccatcaaaatcatttttcatttctagatcattttctgttcacaaaacaaacaataaaggcttaaacagaacatccaacaaaaggtcattttgtaagaataataacaaattcatttctcactcaaattgaacatattttatatggatttatatgccccaaaagtctattttcataatataattttaattttatcaaaaaaagtctcagtaagtcccagcattcaattttgtgacacatgtcaccatagaaattttcacaaacacttcatatgcacaatttttaatactaaacaacataacaatcatatatatcaaactttaaattaataaagaaacttaaaccttgttaggttcctgaataaaatattaagcatcaaattt

SEQ ID NO: 141693 - DNA, 386 bp, Glycine max
tatgtcttcctgctcccacatctactcgagtattcaatgggaaatcacaattactacaagaagtcccacttgcataaaattttttgttaagaagctatttcttttgtgctactatctcatcctctttttcaggtgtaaaatgatacttgacatgtctatgagcaggtgctgctactggtggaggcactctaatttggtgccagaccccagggtgatggcactcacatatctcggatcctgcacagtatgtgaaggcaaatagttaaaaattttgggactgtacttgattcatctgagtatccatctgccccatctgattcgatagacactgaatgaaagccctaggctcttgctgaaacttgataatctggatggccatttacctc

SEQ ID NO: 141694 - DNA, 418 bp, Glycine max
  unsure (1)..(418): unsure at all n locations
ntaggatcaaacttntttctctctgtttctctcaactgttcttcattcttcttcctcttttcacttctattcttcctttatcttgcacaaattatgtggcttttccattggtgatgatcattgaagattaaacacttaatcaatccaagaatccactccaagcaaaggtgaatntgagttctagtttagtatttctaatgtctatgaatgctcattttttcttcaatcctatcttcaatttttatgattatgattatgcataagattgaagatggattaggccatggattcatttcctaatttcaaaattcaatcacagactgtttgaatgattctccaacctaatttgtgatctcaaacaatttacggactgattcaaatgaattaatcctaatgcatttgactgaacttcaaactc

SEQ ID NO: 141695 - DNA, 415 bp, Glycine max
  unsure (1)..(415): unsure at all n locations
agcttatcagcttgtaagataactgtttcatattgatgttnggagatatttttattcttatttggcatatacatgttataatttttcataaatgttagataaattcatgtagtttcttccacataaatgcttgattcatgtgtataacaacataactgtaagagggcttatgtttttatatcatttaagttgcttcataatatgtcggcatcctgtgtggcttcctcatctttgtcttataatgtgctgaatgtgtaatgtgttatactaaacatggccttcaggttagccaacaattactgacttgaccacttttttcctacacaatatgctntggttctagaatttggagaaaaagtacgtacatgtctcacctgtacataaatatcaaaccaaagaaaaaacatttgtcaac

SEQ ID NO: 141696 - DNA, 413 bp, Glycine max
acactatgaatactaagccttctaacaggcttctttgaaagctagatccttatctatccacacccctgtattaactaaattaacttccttaaaaataattacggatgaaaataacgcaacacgtaatcaaacataattactaataatatatacatatatatatcagggtgttacattgcacgcctaggcagacgcagggtgatgcaccgcatgctgcagacgcaccgacaccacctcatcaggctgataccgctgcgttattagggatggagcggtatctacaacacttggtttgccagcaggcgggcaaccaccgggggcaggtgcagatacatgagtgtctctaccaactcagcctcagtcaatagggccagggattcgctccttttgcgtgccctactccatatcaattt

SEQ ID NO: 141697 - DNA, 377 bp, Glycine max
agctatgtataaatatagagctactctatatattacgtgactcaatcggacatacaatttaaaagttattgtcggttgaaattgctcacatgcttctgtattcaattgcgagcatctggatatattatgtgacccaatcggatatccgagtaaaaagttattgacgttagaatttgctcacagcatctggattctatatcgagtgtctcgatatattacgggactcaatcgaatgtgcgagctaaaaggcattctcatttgaattttctcacagcttctgtattcaatttccgagtgaatataaatatcacgcgcttcacttggaaatccaagtaagaaattatagtcgatataacttgttcagagcttctgtactg

SEQ ID NO: 141698 - DNA, 425 bp, Glycine max
  unsure (1)..(425): unsure at all n locations
ntgagcaaattgaaatgacaataactntatacacggatgtccggntgagtcccacaatatatcgagacgctccaaattgaaaatggaaactcttataaaattcaaacgacaataactttttactcggatgcccgacagagtgtcgtaatttatcgagggatgctccaaattgaaaacggaagctcgtatcaaattcaaacgaaaataactctttacttggatgtctgattgagttctgcaatatatcgagacgctcaaaatttagatccgaagctctgagaaaattgaaatgacaataactttatacacggatgtccggttgagtcctgtaatatatcgagacgcttcaaattgaagaccgaagctcataggaaattctaccacaattactttttacttggattctccattgaatccggaatata

SEQ ID NO: 141699 - DNA, 349 bp, Glycine max
  unsure (1)..(349): unsure at all n locations
agcttgtagtaccacactattacaaaaagtattttctacccacnannaaaggtttgggtggtcttttggagactcccaatccacccctacaaatgtgtcaacattgtaagcgctctttaaaaaggtgagcactctattgttttattacaagaaaatcactaagcgcttacggccttcaaatttggcttgcatgcttgattgttctcttaagtgtttaactctaaattcggagaggctttggttattccaaatccaatggggctcctatgagtctagatgcttatgtgttattaatatctatattatttattattggacatataaataattgttcttcattaacttttgt

SEQ ID NO: 141700 - DNA, 425 bp, Glycine max
tgcatcaatattatataattataaagtagtccaagctaagtcaattccatcaccaacagagcaagcaagcaagctaataaaaaatggaaacaacataactgtagatgactaattaaatttaatctcaagaagatgcggtcacgaatcaagatataaacgagtaaaatatttcattggaaaaatcacaagtattcacacgtaggactctctttgtatggcacctgtcttaatgtcttaactatactctcgaaattgaaataagcattgtgtagctgtgaattacagaaaacttgtgcataccttctattattgattgtggcagcttcagagactcgtggtgttggggcatagtcaatctgagtaccaacttttgccttaaaagtgatatgactctcatgagaatggctggaaagaagaaatttttg

SEQ ID NO: 141701 - DNA, 418 bp, Glycine max
  unsure (1)..(418): unsure at all n locations
agctngtggataaaatggaatgttgcagatattgtctatttggtgatgaaacaaaaagactataaatattttcattagttttaatctgtaagttttacctgttttatataagggtgattgttttcatttgtctttttatatgtatgccccactttattcgatagcttgacaatcacttcttctcttcttttaatcagttaatacaaataatgtatatcattgtgatatgaagacattagttaaggtgacatatgagaccagaatcatgttcattagaatgtatgtcatttatttgtggctatccagaggccctcgccattttttttttttaacgtttttatgttagaatgatttgaagtgccaatttttggtatgactttgtgaagatgttgttgtatttgttgattttgtttctgat

SEQ ID NO: 141702 - DNA, 437 bp, Glycine max
  unsure (1)..(437): unsure at all n locations
taatgtacatgatatatatgctctagctngaggggaaatgttgaactattgtacataactcgtgaaatgaaatccatgtttaggttgatttgtttcctgaatatttacctaaatagattgattctaattccataaacttatttactgtacaattatcattgaaatacagcacacgttattcagtccaatcaatggagtgatttttggtttttctagttcatagtcatagcagacccatgcattagcgccccctaacccacatatactaaagggataaattgatttgggccattttgttcttttattaagtgaatggttagtgctaggtgggttaaaaacaaggctaggtagggttaacccttaggccaaaacccacatcgataactctacataaaaggagacaatagatttgagaaataagaacacacaagcaaatg

SEQ ID NO: 141703 - DNA, 422 bp, Glycine max
agcttataataagtgatacgctcgagattaatcatcggaaactctcgagaaattcaaatggccataacttttcacacggatgtccgattcgggcgcataatatgtcgagaggctcgaaattgaacaacggaagctcttgagaaattcaaatggtcataactgaaattctgataccaatgccagatgtcgtaccggatgtcacgacatcacgcttcagaacatgcagattatatttgacagtatgaacagattaaacaagtaaataacacaagagaattgttaacccagttcggtgcaacgtcacctacatctgggggctaccaagccagggaggaaatccactaaaatagtgttatgtcgaagatctaacagccacttgttaccaccttctgacctaaccactacccgtgcaatctctacct

SEQ ID NO: 141704 - DNA, 435 bp, Glycine max
tcacaggtatggcggtgctaagggatgtttcccttgatatgataatgtagaaagattgtttaagaaggagtgctattttaatatcacattttgttgcaaaatgattttccttgttaacaatcttcttggaggaatccttttcctccttttccttccccttggcctttgaacacaaggccttactatccttctttttcttttgattctctagattttcttcctcatccctcttatctttcatagttagctgatctttggccacctgtgaaagtgtttgaggatgcaacacaaatttagtgccaagatgggtgagggtaatttcattagttaggccattgtaaatgatcttcctatcaaattgccatggccttcctaaaagaatatgtcctgcctccatgggaactatatcacaattaacttcattcttatatgtcc

SEQ ID NO: 141705 - DNA, 418 bp, Glycine max
  unsure (1)..(418): unsure at all n locations
agctngtagctntcaggacttcagaaaagccaaagatttcccccatcctagttctaaatttcaaatgctatcaaagcttaatttaaaatatgtgtgcactttggaccacaatgtgtgcaatttctgaaatggggttcaatttattataacaaatagtgatgtacataatgtttgtacacatttatatatgtgtggcataatgaattatactcgtaaatgaaatatactggtttaggatttgttttatttctgcataccttagcaaaggaaacaactcttgtaaatttgtcaagttaatatccaaaagctttagctacttgagacgcacgatctgcatatgccaaaaaatattatcgttttctccatcatccaaacttttcagttntcctcctgttatatttagttgtgtaaatccttc

SEQ ID NO: 141706 - DNA, 428 bp, Glycine max
  unsure (1)..(428): unsure at all n locations
ntccacgtgctagagtcacaccttccatgcttgtggcatcgaaagggaatatgctaagatgcctttgacatattcttgaaatattccttttagattcacatgaaatgaaaatagaaacatgtctaacacttgtcacagctttgatgaatgagaaacttgtgagagacacttcaaagttcaacttctctccctattctccttcaatttccacgccacacaaacatacacactctctttctctcattcttcctctattgaagcttcctctctaagcttcttatccaagacactctcttggtggcgaaacttctccttccatggcttattctctagtgaatggcgcctcctctcacctcttctcctttatcttttgctgcaactccatggctgaaaatcaccattgaaggaccttattaaagctcaaagat

SEQ ID NO: 141707 - DNA, 428 bp, Glycine max
agcttccatcacacccccacctgcttaggtgatttgtcctcggggtcatagaggtttgcatagaattcttttacaatggcaacatcaatgttgccgtccagatagtcagtaaggtcttccctccagtgtcttctatccagctcatctaggaattcatcaaattttatggtgtagaccaccacatttctctcaggtagcaatttcctaggcacaataatgtctatgtatctctccccaacttcctgggatgtgaatcttgatctatcatatcgcacttgagagggtgtagaaggtgcctttcttttcctaggagccatctgcaaaatataagacaaaacacaagagattagcacatgtttattctcaagaaaacagaaaaattaaaactgaaaataaagctgggcgcttagcgcagcaatctggcgctt

SEQ ID NO: 141708 - DNA, 415 bp, Glycine max
  unsure (1)..(415): unsure at all n locations
atctgaatttagtggtacttggaggttcacaggagctaatcctattttgaaatgtcatttatgacttatgaaaaactttctgttgtgcaagatagaaaaacaaatgacccaagtgaaggcaggagccatttctagggtaaaattgggtgttgaggagtcaaattttgattcagcataattttaggcataaaaccagtttgagcaagtgttgattgatgttatagactcgtgtgaggtgagagtttgctccaaatgtaccccattctcatattcacttctcaaatcttgaaaatccattaaattgaggggttctggatacctagattntgagttgctatggtctgaaactagtacttggtttagacatgattggatgaacgtaagagtggttttcaaatctgcctttatgcaaatt

SEQ ID NO: 141709 - DNA, 452 bp, Glycine max
ttaagtcacctgcggcatgcaagcttctttactgcaactattgttccatctggcagccaacctttgtaaacacacccaaaccctccttccccaataacattttgagtagaaaatgcattggtcatttccataatcatttcataggtaaaaaatatctgatcacttttgaattgagttgagttgaaaaaagcgcctaaatgccgcatgctcatattcccatttccatagttgtttaccaggggaggcgatgggataggcttgtgtacatagtaatgcccattagaacctggtggccatcacaattagacaagaaaatcaaatgtagcaaggcaatgaataagtaaagagaaatgtcgattggtatgaaaacttagtgaaagacatgtctgaaagtgaaatttctctctctcaacaataatttctctcccaggataaaaaattatttgtacaaa

SEQ ID NO: 141710 - DNA, 405 bp, Glycine max
  unsure (1)..(405): unsure at all n locations
tgaagtgggattccncaacaatgaacccataccagcctatttccagtacgtaagcttgggctccacttctccattgaatagaacatcggtgagcttctatcttgtcccccatgcataatttgttcttcatcctcttcactaaggccaagaagcagaaccaaatcatctcctatgtatttaggggctattttcaatcctatctcccaccagagatcatcctccaatctgtcaaaagtagctgggtttctgaggcgttctacccacgcacccttcagccatttagtgtcttcaggttcgatgtcgatgtggattgaagaaggtgggttatggcggctatcggcttggatattgggattcgttcactgtctcggagccctgttatttctcattaccacctncctgtat

SEQ ID NO: 141711 - DNA, 331 bp, Glycine max
taaaagtaaccagtcttcggcaaaaccaggtgaaataacttgggtcctcctcttgaaacctgaattggctgccaaaatttaaatggaccctttggtgaataagaattgcaagctttttcatggcccacacacaaagaagggagacattgtgatttcttggttcaaactttcttaatgtgaagggggccacctcttttgttccctttaaaacatcgggtgggttgtatacacatctgtgagtgtccacagtttcgggggaaccactctttggggggttggtgaaaatcttccccaaccaatgaggtctttaaaaaaactctcactttgatac

SEQ ID NO: 141712 - DNA, 370 bp, Glycine max
  unsure (1)..(370): unsure at all n locations
ntgctcaccaaatataatatccttttccgacaaccgcataccttaccaccggaacgcacaacagaccatcatattcaccttttacctcaagctactccggtgaatgtccgtccgtatcgatacccacattttcaaaagcaggaaattgagcagcaagtcgagaccatgcttcagaaagggctgatacaacctagtaacagccccttctcttctccggtcctcttggtcaagaagcacgacggaacgtggcgcttctatgtagattatcgtgcgttgaactcactcaccatcaaggaccgcttccccattccgaccattgatgagttgcttgacgaattgggcggagcacagtgtttttcaaagcttgatc

SEQ ID NO: 141713 - DNA, 412 bp, Glycine max
agcttgaagatgttcgtattaagaagttgaatcacatgacaataatctgatacaaaacgaacaaagtgatgtaacggtgttggtcttactggacgaaagaaacttgagcgaattgagtgaatcttagttgtagtaacttagcaagtttcattgtattcaagataattgtgtaaatcaagcaacataactcattcaacattgttttagcaacagaaccaacttgcacagggtacaactcactcatttctcagtgttttaacatgaatcttaagtcctttcaaaaaggctttgagtcaactttttccaatgaaacaaaaatcaacacaaaaagataactatgcatatttctttaacacatgttcagtacgaaaatgcctaagcagcatcactagttatcaacaaccttttgtat

SEQ ID NO: 141714 - DNA, 422 bp, Glycine max
ccattcaaagagaactaaagcacctatttgtgtatatatcaggaaaaaacaccaacacagctattttccaaataatactgccattcatagttctcttgtatatgtggggggtttgttgttttaatcctgtattggtgggcggttttagatgcattgcatctatgtaaatcaccagcagtacttctggtgctgctgtgtcccttatgattaatatatatattatcttttgcctttcaaaaaaaaaataaaaatactgccattcataaaataagacatttcaaatatgatgtagagttttaaaacaacaaaaatgggggttgcctgaatatgatttaatcactttgatgatcaaggacagatccactaatgaatagaattgccaacctatgatagcctcataacagatcattaactttgtttaa

SEQ ID NO: 141715 - DNA, 430 bp, Glycine max
gcttgtcattaacaatcacctaagaactcatttaaggtccaacgccttgaatggtcctctttgcttttatttggttaaacgtggatttttgaaagcctaaagccaacacataactttgtcactactttcaacaaaccacgagatcattaatggtccaatgccttaatgtattctctcctttcaaaaaagaatcaaaagatagtttaaatggtccaacgccttaaaacgacttttttgtttggtcataatatatcttgcaaaaaagataaaaactacttaaccaacgtttagttctcaaagaactacgtacgtctgatttccttatcacaattgaggaatacgtaggagcaagggaaacacccttgtcgaccactaaaagataaataaaatacaaataatggcttacaaagacaaacatataaaaggggaa

SEQ ID NO: 141716 - DNA, 430 bp, Glycine max
  unsure (1)..(430): unsure at all n locations
tgccctntaggccaacaatcaactntgggttgcaccgtgatgttgccttacacctagaggtttgaaaatgttgctcatcatgtacttgtaagtgtaggataggtagccaaattaccttaggtagcgaaaatacctcacttagcttaggtagcaaaaatgccgttgttgatttattcatttaggtagcaaaaatacctttattgatttacaccttttaatatgtacatatgtaatttaggtagcaaaaatatttgaatgtgtgtatataaatgtttggtagcaaaaatgcctcataaagtgtatatatgttgcatgttaggtagccaaaatacctcacaaaaatcatatgtttaggtagcaaaaataccttgtcaatttaggtagcaaaataccttgttaaaaattaattaatttaggtagcaaaaatacc

SEQ ID NO: 141717 - DNA, 433 bp, Glycine max
  unsure (1)..(433): unsure at all n locations
agcttgtgcgaatcaagtcactcccgcattntatctctagcatgcattgtatgttggtctcgtcctttgtcacgggaagccggaaggtccatatcaccttcttaattgtacacatggggcactgcgcccccaaatgcgcaagtaagaagagataattttccgggctctcgtgtccgtaaaatgcattcatatcataagcatctcttcataacatcataatggacatatcctgcatttgtccgttatcatattccagcctcacattttgcatgagtcatggcatcatcatgcatatgcgttcaacaaactttttggtctgcaaaattgcataccatttgttttcatgtttgctcatccttgcgttttcctctacaaaacaaaaacaaaaaagggggaagcgtgaaacttcacactacattcttagtttcatgtg

SEQ ID NO: 141718 - DNA, 426 bp, Glycine max
  unsure (1)..(426): unsure at all n locations
nntgcggattggtctntgccagtgaaaggatcgatgtgggtctgaaaaaaggcaaatttagtcatcctgcttggacgaatgagaaaactggggcaaatgaagagggtgaggatgaaggagaagcccgtgctgtgactgccattccaatacagccaagtttcccaccaacccaacaatgtcattactcagccaataacaaaccttctccttacccaccgcccagttatccacaaaggccatccctaaaatcaaccacaaagcctacctaccgcacttccaatgacaaacaccacctttagcgtaaaccaaaacaccaaccaagaaatgaattttgcagcgagaaagccttagaattcaccccaattctagtgtcctatgctgacttgctcccatatctacttgataattcaatggtagccataaccc

SEQ ID NO: 141719 - DNA, 435 bp, Glycine max
agcttcgaatggtcatcgctttattcttgtggcgatagattacttcaccaaatgggtcgaagcggcttcttatactaatgtcatgagaagtgtggtggttagattcataaagagggagctgatttgtcgatacggactccatatgaagatcattattgacaatggcaccaatctgaacaacaagatgatgcaggaaatgtgctgggatttcaggatccagcatcataactctaccccttatcggccaaagatgaatggggctgtagaggctgcaaataaaaatattcagaaaattcttcagaagatgacggtgtcatacaaagattggcatgagatgctgcctttcgccctgcacgaatgtagaacctcggtacaaacttctactgtggcagcgccatattccttggtttatgggatggaagcggtactcccatt

SEQ ID NO: 141720 - DNA, 446 bp, Glycine max
cttgacttgagtcatcaagagattataaatatgtgacttttcttgaatcaatctttcaacatccttgaatcaatctttcaacatctctcaatattttcttttatctctttcaacactttcaaaagaactttctaattgatttctcttcatcattctaaaagtttttgttcaacactttctcttccaagaaaagttctttgataaaaaacttgggctattcatctttttcattctcttctccctttgccaaaagaacgaaggactaaccgcttgaattcttttgtgtctctcttttcccttacaaaagattcaaaggactaacctcctgagaattcttttgattcttcccttccccttaagaaaaagatttcaaaggactaaccacctgagatatcttttgttcccccttacaaagattcaaaggactatctgcctgagaattcttt

SEQ ID NO: 141721 - DNA, 420 bp, Glycine max
  unsure (1)..(420): unsure at all n locations
agctntagcttatttcagtaactntaactacaccaagcatgtgtctgaacttctcaaattgatcgagcttcacaactttagtcatcacgttagccacttgttaattagtattgcagtatttcagttgaactacttgattattcaccagatctctgagaaagtgaaatctcattgcaatatgcttacttcttccatggagaacaggattcttggatagttgaattgtagacttgttgtcacataaaatttcggtggctcctttttctcctaacccaagatgctctagaattcttctaagccaaatgcattgacatgcacaagatgctgcaacaatgtattcagcctcagtagtagataaactaactataggctgctttttcgaagcccatgatacagctgcagttcccatcataaatattg

SEQ ID NO: 141722 - DNA, 380 bp, Glycine max
  unsure (1)..(380): unsure at all n locations
actaagctggaatatgggtcaacggacagtgttgttggtctagcaaactanacaaatcttgacctgaaggacgtatgacgtggggtcggcgtagccttatagcattatgggccttcacaaagggtgttgtagtttggtgtgaaggcctgcctagtgccatcatcgaatcaacaacctcaattggggaggaccccgagagatactgtgtgttatagctccattccgccaatggaaggaatgagtaccagagagtangccgatcatggacgaatgaacggaggtattgttcgagagtccgattaaggacttcagtttgcccatcggactcanggtgataggtagtgctgtaacggaatttggtgtcacttaagcagaacaat

SEQ ID NO: 141723 - DNA, 428 bp, Glycine max
  unsure (1)..(428): unsure at all n locations
agctngcctgtccgatgcagcagtaatgatgggccgagttatgttggggaacggttactaacccggaatgggtttaggcaaagacaacggcggcataactagcctgataaatgccaaaggaaatcgtgggaagtatggtttaggctataagcccactcaggcagatataaagagaagcatcgcgggaaggaagagcggtggtcaaagctcgcggttgagacaagaaagtgaaggaaacccgccctgccacataagtagaagctttataagcgcgggtctgggagacgaaggtcaagtggtcgcgatatacgaagatgatgttccgagtacattggatttggtacgaccatgccctcctgatttccaactgggaaattggcgagtggaggaacgccccggcatttacgcaacgagcataatgtaaacct

SEQ ID NO: 141724 - DNA, 393 bp, Glycine max
  unsure (1)..(393): unsure at all n locations
ntgcgttcaattgctttcaaagaatcatcccaaggcaggttttgtcctttgtcatccttcaacctaggttcaaatttagaattggggtaggttttgcttttgtttggtttgatagatggtgtcctccaggtcctctctgtaatctggtttattatgttaatatatcttatgttaactagcaggttaaggatattcattctcgaggtgccctttgaacattacagtctcttgtcttatcagtagcatttttatcaaccccaacatgaatgatactatcatttgggatgcttctgcgaatggtgcttattcaaccgaattagcctataagtggatcactgaagcctactttacccgtaacaacctcttagatgttgaatccttggtttggcaact

SEQ ID NO: 141725 - DNA, 409 bp, Glycine max
agcttgtataattccccaatttatggttattttggagtaaatttagtaaatgaatcttgttttatggttaacgctatctctagaatattttcattggattgaatgatgaaatctgtgcattttcaggtgaaaaagaggctaagttttgaattgcaaaaagtagcagttgggctaagcgcttattcaccgctaagcgtagcttcagagtgcttagcgcaaaggagaatctggcagagcatcaggatcaaagctgcgcgctaagcgtgagatcagtgtgctaagcgtagtaggtgccttcagccaggctaagcgcgagactggcgctaagcccaattccacttactcgcgctaagagcgaaggtggcactaagcgcaatgtcgcgatttcacggcctatttaaagcctatc

SEQ ID NO: 141726 - DNA, 464 bp, Glycine max
  unsure (1)..(464): unsure at all n locations
actatacaacactcaagcttggagaagatgcttcaatggagganaagaaagagggagagaaatatagatgggggagcatgaaattgaaggaagaaaaagggagagaagttgaactttgagttgtgtctcacaagactctcattcatcaaagttacaacaagtgttacacatgcttctatttatagactaggtagcttccttgagaagctttcttgagaaaacttccttgagaagcttctttgagaaaacttccttgagaagctagagcttagccacacacacccgtctcataactaagctcacctccttgagaagcttccttaagaagattcctaaagaagctagagcttagctacacatacctctctaatagctaagcttacctccttgagatgagaagctagagcttagctacacaccccctataatagctaagctcaccccatgacnaaaaacatgaaaat

SEQ ID NO: 141727 - DNA, 146 bp, Glycine max
  unsure (1)..(146): unsure at all n locations
taccggatcttaagtcacctgcggctgcaagcttgatngagaaagtgtggaagagtcactttttctactnttattctttgaccacatagtgagacctagagatatttttccagggtgaagagaacctggggaaggcctgggggggg

SEQ ID NO: 141728 - DNA, 117 bp, Glycine max
tgtcttgctgagcgagagtccactttactcgctcagcgtgttatttcttgttcacagaaacgtcttgtacactatgggtcactcagccgaattacctctcggttggaattggcttac

SEQ ID NO: 141729 - DNA, 433 bp, Glycine max
agcttcgatattcagcttcagtgctggaccttgccatgactttttgcttcctggaccatcaggatatcaagtttgagccaagaaagatagtcgctcctgatgtggaatgtctgtcatcaatatttgatgcccaatcagcatcacagaaaacatagagtgccataggttttgaaacagaagcaggttgaaggaataaaccatgaaatacagtaccttgagatatcttaatatccttttggccacagcccaatgagaatccaatggattagccatatactgacaaaccttattaacaacataactaatcttaagtctagtaagggtagcatactgcagggcacccactactggcctatagagagttggatcatgaaatagatcagctccatgtttggacagtttgcagtttgtaaccatatgagtatagatagag

SEQ ID NO: 141730 - DNA, 361 bp, Glycine max
ggtaatattaggccttatttggtaattattggacgccatggtatcattggttttgcctcagtgatgaccacctttgaagtgcaaattttgaatgaatctggctgacaacttatttcccaggtaattgagataaccttggtgttctttggttgttcatttcatccctaaatttgggttcaacacttgttttctttttgtttaagattttgaggaggatttcacgattttctacattcaaaaaggtcttgaaatgatacgtttttattattttattgcttccctcttgacttgagtgtttgttcaataatttgggatttcaccccacgtatgtttcatgcattgatatatatatatatatata

SEQ ID NO: 141731 - DNA, 480 bp, Glycine max
acacctgcggcatgcaatcgagcttgtacaatcttggcagatgttatgatgaccaaccttagaccgtgagacgcatacacattctttgttctaatcgatcactaacgttaatatatccatatgtcatccccctcttgtggattagagtgttaactctaccactgggacaagcaaatgagcttagattataatcagctccttgagctaaatctcctatatgtctcatacggtctgttgtgcatcaacgacaaatgtcaaaagtgtgtacatacataacatatattaaaaagagaacatggcacacccgtcattcatatgcaagatctaaaccaggtcatgaagcaaaggcatgaatcactccgattatgatataaaccacataggcatataacataattcatagatgtttcagcatactaagcaattaggagaagaagtcttaagtgtgtcaatgtcatagaaatatagccaaaatacacg

SEQ ID NO: 141732 - DNA, 444 bp, Glycine max
  unsure (1)..(444): unsure at all n locations
taagcaatgatcaaacttgctcttcggaactagctntgtgaacatatcagcaggattgtgcagagtgctgatcttatgaactttgattcttctttctgaccgaatgaagtgatatctaacatctatatgcttggttctatcatgatgaacctggtccttggccaagcatatagcactaaggctgtcacagtagatgttagcatattcttgattaattccgagatcatttatcagacctctcagccaaattccttccttcgcagcttcagtaagagccatatattcagcctcagtagttgagaaggcaacagaaggttgaagtgttgccttccaactcaccaagcagccaccaagggtgtaagcataccctgttaatgaccttctcttgactagatcagcagcaaaatctgcatcagaatagccagtgaggcagcaatttggatg

SEQ ID NO: 141733 - DNA, 438 bp, Glycine max
agcttgtggaagataatgctagggtggatccctgtcatgttagatgaatatcaagcgagcaggtctgtgtttctgtgtaggacattagtgatgcgcttgtgctcatggctggtgaggtccctactgagcagcatacactgcctgggtttgggctcgagctacaacttgatgagctcttcaataggctttgggcctctatcagaagtgtcgtcacacaaacctatattgaatttgtcatccaggcttatctggtaaatggtcagggctcgggtttgaggctctttgtccacacttatgacttgagtaccttcagccactgtggggtgaggataaggtgcaacctttaagctttctgcatagcactgtcatgcttgctaaatttgacttaacgattacaatctcccccgtcagggtggggaacttcatcttcagatgcag

SEQ ID NO: 141734 - DNA, 442 bp, Glycine max
tgagactgagaatgactgtcccttcatcaacagaccatgtattttctctcgaaccagatatgcagatatcaattaaaatttgtcaagttgaatcctagtaacacaagcagatgcatttaaaccatgatgatgtataatgacacccatttgccatgtgagcatcatccttgcaaaagttttaataaatgttatgtaaaaacctggcaaatgcagcatttgatatcatccttatcctcattacaacactcatgtgtatatgcagactgatatatacttcttttaagacattcagcaaatgcttcctccggcaaagcggtgctcacagttcccatcctctcttctagagctaaaagttcctgtcattcaatcagaaactttggagctaagataacactagaaaaagaaaacttatagatttttaataccaagcatgctacatcat

SEQ ID NO: 141735 - DNA, 231 bp, Glycine max
agcctctgtactggaactaccgctccatgttgaccccacctatgagaaccacctcatcactccttgcccaataacaatttgagtacaaaaggctttgttattccataaccatttataggttaaaaagatctgatcactttcctatggactagagtcgaaaaatgcgcttaaatgacgaagcgttagtttccccatttgagtagtggtaaccagggaaggccccggaaaagg

SEQ ID NO: 141736 - DNA, 425 bp, Glycine max
agcttgtagcacggctggacatgatatatgtcagggtttggtttaattaaaggataaaaatggaatgtcccacattatttccatgacacaaatgcaacaatgatgatttggaaattttatgcaaaactagtcatgcatgcacctatgtcgacattcaagtgtcaaacttttatggtcatgtgatgtcagggctcacgattcatttcctctattttagtcaacccagtgtttccaaaatatgttcttttatcaatttgtgcattcatccaaatctattttgggtgttcaaaaaactttcacggcatttacccttcaggcgtacacattttttttcaaaaactggttatgatcagtgaattctttcaaagaaaagttggaagttatctcttttcacaagcatgttgttttttagctagacaactttt

SEQ ID NO: 141737 - DNA, 431 bp, Glycine max
taactttgctagacatatgatgtgtaggacaacagtcttttcggctcgcaggcggcttattcattataactaattgagaagaaaagaaaatgcactctccaaaaaatatagcagggcgatgatggttggtctatattttcccgcctttttaaggagaaggtatatcaaatgacagaaacccgttaaaggaaaaggactttgtttattattaacaaataacaatttaagagcttggaaaagatggcttttctatctaaatggctgctttttggtgacgtcttggagacttgctgtgcggattaattttacattctttttaaggacctcttactttctttcccctttttcttttgaataaatcactgcgctctaatattatcaatgggttcatatttataaaacttctcagtaacatgaaaaataacccatct

SEQ ID NO: 141738 - DNA, 432 bp, Glycine max
  unsure (1)..(432): unsure at all n locations
agcttgtcctttctcgcgtgctaggctcatattactcctatcaggtatgggacaagattcacgagcatttcagccttcacaccaagtctagagcacgacaattacggaccgcgatgtgtgctgtctcattcgaaggcaaaacaatggatgagtaccttcacaaaatcaaaggctacatcgacgagcttgctggcattggagttctagtacgacatgtcgacgctattcttgaaggtctaccttcgaactatgcgccagtagttttcgtgattgaaagaaagaaacgtacaccatccattgcagagattgcggctctgctttatggccacgaaactcgccttgttcgatacaatcgagacactcagatgcttgtgtctncatccctgaattacactcaaggttatttgtatggaagctcatataaaggtaatg

SEQ ID NO: 141739 - DNA, 436 bp, Glycine max
  unsure (1)..(436): unsure at all n locations
tgcttctacagaanagagtttacgacacagacgatcggtttttatttatttaaatagtgattaagtgagattacaacacaaacgatcggttgaataagtgagattacaacatatacgatcggttgaatcttattttaaaggtgattaagtgagattacaacacaaacaatcagttgaatcttattttaacgatgattaaatgagattatggtatgaacgatcggtcaaaactttctttgaacaaagaaaaagatcaccgatgatcgaagaaggagatgaagatgcacaaaaaataaaggggacccctaagggtccataaatcaaattcaaatccttaaagcaagcactaatcggacgaagaacaaagaacaaatgaagaacgaacaagaacgaccgaagaacgaacgacgaatggtgtaggaatcgatcactgatg

SEQ ID NO: 141740 - DNA, 375 bp, Glycine max
gcgggctcttagcgcagctattaagtaggtcatgtgctccatccggcaatgcatctctaccagaaatatccaccctgctatcatactgcgcatctatgggggtaaacccaaatacatgatccattttgtggaaagcctctatccttcttgtacgatcctttttgagtactagcatgaatagcttccatgactgtcatgctattaggggcaagacctagtgcttctatttttttaaagagatataaagctgtcttaccgtgatcttgcctcgcataaccagatatcatggccttcaccactgaaaggtatctgcccgcggcctctgtgagcaatatattagcgagtatcatgactccacatcgggatacatgtcca

SEQ ID NO: 141741 - DNA, 411 bp, Glycine max
  unsure (1)..(411): unsure at all n locations
agcttatgcacggaaaatgtaattatgaaattgagatgcccgaagaanaaccatttcctagttaaccatgcattaggtaccatgttcaattattttgtttttaagtgaaacgggtttatgatcccaacatggttggctcgtggtgcctaacacatgaaactaagaatgtagtgtgaagtttcacgcttcccccttttttgtttttgttttgtagaggaaaacgcaaggatgagcaaacatgaaaacaaatggtatgcaattttgcagatcaaaaagtttgttgaacgcatatgcatgctgatgccatgactcatgcaaaatgtgaggctggaatatgataacggacaaatgcaggatatgtccattatgatgttatgaagagatgcttatgtggtgcatgatatgaatgta

SEQ ID NO: 141742 - DNA, 426 bp, Glycine max
agcttaagaggtatggcagagctaacggatgtttccctcgataggataaggtagaaagattgtttaagaaggagtgctattttaatatcaccttttcttgcaaaatgattttccttcttaacaatcttcttggaggaatccttttcctccttttccttccccttggactttgaagacaaggccttactatccttctttttcttttgtttttctagattttcttcctcatccctcttatctttcatagttagttgatctttggccacctgtgaaggtgtttgaggatgcaacacaaatttactgccaagatgggtgagggtaatctcattagttacgccattgtaaatgatcttcctatcaaattgccacggtcttcctaaaagaatatgtcctacctccatgggaactatatcacaattaactttc

SEQ ID NO: 141743 - DNA, 436 bp, Glycine max
tatccctcttaagttattgaggccacaaggtctatcatttttgagaccccaatcggctaaagcgggttgtcacagtatgggaaattttgttttaccccaaatgcatatataataatagtcattctgacacccggagcaaaagttatggccgttttatgttttgctaaaaacaagttcccaaaattttggtctctctcaaatactgccacacccagtgctcctagtatttttcacacaaaatatggatcaaaagaagctaccacacaaaaaatcatccaaaaataacaactctaactatcaaaacaaaaatcgccaattaaattgcaaaatcaatcgctgaaatagtcactaaaaacagtcgctaaacaggggacgcaactgatatacaaaacagaacgctacacaaaacaagacaactaaacactattatgaacct

SEQ ID NO: 141744 - DNA, 423 bp, Glycine max
agcttcacacaacttatttttctcaaacttgagttttggaagaccaattactaagtctttcctaactagatgattgacatgagacatgtttatttgtgcaatcctacgatgccataactaagaatcatctatcttacttaccaaatagctaagctcatgaaatgatgcatgttcaatgttcaaaggagatgatatggactaagatgcaaaattcaatataacaaccaataaaaatgccactcaaaggagttgggcatgtaaaaaacaaaacatcttcaagcttttctccaagcttcaagctttagtcttcatgttgcttcccttatctctaacagttctcggttagttttaccccaatataagggagttcattagaaacactctgagatagatagatagatatatatagagagagagagagtt

SEQ ID NO: 141745 - DNA, 438 bp, Glycine max
  unsure (1)..(438): unsure at all n locations
tagcgcgaggctngcgcttagcgaaggactngattttcagaatatgttntctacgttatttttcagtcccttccttagtaaattgaaacctttatatctaacattcaaagataggctgatatactcctatgtacaaattataaagcaagttccacatgatataatgcatgaaaaacagacataacagaaatgaaaactgggttgcctcccaggaagcgcttctttaacatcattagcttgacgcttttacctcactgggcgatcttacgttttggttcttacttttagaacctcttgatctccttccattacttgtaagcagacattgtgttctggagcacgctngtcttcaagaatggatgcaactattctatcttgcagaagttttcttctcctctcggccctgttcctttgcaatgtagcttcatttctaagtct

SEQ ID NO: 141746 - DNA, 433 bp, Glycine max
atccttaagtgagctgcggcatgcaagcttacacaacttaattgactataacatgagttttggaacacctattactacaactttactaactagatgatggacatgagacatgtttattggcgccatcctactatgccataactaagaataatatatcttacctaccgaatagctaagctcatgaaatgatgcatgttcaatggtcggacgacatgatatggactaagatgctgaagtgaatatttccaccaattaaaatgccactcaaaggagttgggcatgtaaaaaacaaaacatcctctagcttatttccaagcttcaagctctactcttcatgaggcttcccttatccctatcagaaataggatcgttttacccccgtatcagggagataactacacacactgtgccacttattgatagatttcactca

SEQ ID NO: 141747 - DNA, 353 bp, Glycine max
  unsure (1)..(353): unsure at all n locations
gacctatgaaactaagctgcgccagttgctctanctaaagactgatggtacatattatgtcgcctacgttatttttcggccccttccttagttaattgtaaccgctttgtctggcacacaaagatcggctgatatactcctactgtcaaattagaaagcacgttccacatgatataacgcatgaaaaacagacatagcagaaatgaaaactgggttgcctgccaggaagcgcttacttaacatcagtagcttgacgcttttacctcactgggcgatcttacgcggtggcgcttacttttataacctcttgatctccttccattgcttgatagcagacatagcgttcttgagca

SEQ ID NO: 141748 - DNA, 422 bp, Glycine max
agcttaagatgaataaaagtcagaagtgaatctttttgacagatagctctatccttgcaatcaagagcgaaaaggaaagataatactagcctctgaaattcctctttcaatgaccaaagttcacaaaaaataaaccttctccaaggatttcatgcttgtgacaataaagcaacctcaatgctttcaatgtttattgatcaattttcttttcctctttcaagacgagaattaaaatctgattttacattttgatatgctcaacaattgggccactgctatttttattaaaattgaaaattgttaaatatacctccataaattattaaccatacctcaactttataatttttttttcaaaagtatcttcttctcttgcgcacgattcatactttagcggaaactaataacacaccaacacttaa

SEQ ID NO: 141749 - DNA, 451 bp, Glycine max
agctcgatcatgttgatcatcaccaccatcttagtactcttagtcttacaactatagtcgtcctatgagttcctctgaggctgaaccatcattaagggtgggtctttcccgggagagatacctcaaagtccccaaaagcatcataggacacaacaacaacacagtctcatcctgtgatgaccctcttgacttgtccacacagactaattcacctcatcacagagctgtttcctccttctccagtggcagggtcaagagggagagggatctcacctgtgaagaagttgtggatgcaaaagagattgatcagagggatcttagctgtgaaggaataatgagagctcccgcagaagaagaatacggcgccgccaccagagagaaacttatgctcaccacagaacaatctgtcttgttcgaagaaagcttcaaacaacatatcaccgtcaatcct

SEQ ID NO: 141750 - DNA, 428 bp, Glycine max
  unsure (1)..(428): unsure at all n locations
agctnttatattgtgaaaacgacgcccaatattaatctctcctctcactcaaatatgaggttctctttatgtggccatggaattggtagggtttggttcccccttgaataaaacataagatatggaaatgagtatatagtttttatttatttacgtacaaattgatatgtgattaatttacattatatgtatttggtcctattaggctactgcctaagtatatctagtgagagattctgagattgagcaaaatgagtaactagtaatgggtgggaatatgggattgggaccaataatgaggcatgtcgcgtaggatttaggaatgttcctccatactgcagttggatgcattgcaaggcttgccttgtggtttttctctaaaatatatgaatataaaatgtgttgcacatgaacataattgaatccaa

SEQ ID NO: 141751 - DNA, 435 bp, Glycine max
  unsure (1)..(435): unsure at all n locations
ctcagcttctataatggtgcggnttatcgtaagaacaaatatgtcgtcttaagcatcaagggtgataatgcatcaaactccttgctggttggtagggaagggtggtgatttttcgtattccttttttacatcattttacttcatgaggaagattaaaaaaaaaaaaaagagtgtaaagtggatgtaaaatgtgcggaacgaaaaaatcaaagttttagttgtaagtataaaaataacggtgattaaaaaaagatacatgatacttatttttatttgatctctttgcatttcctttattatcacctacaatacttcttatcttttttccttcaaaataagttgaacgataagagtataaatgatttgagttagattcactctttgtataatttactaccagattcaataaatttacagttnttttttttttttttg

SEQ ID NO: 141752 - DNA, 414 bp, Glycine max
agcttataactgttgtgggagacatcctatatggactgccagcggacccccaaaataggaaggtatgcaattcctctaatcatgcatttattggaaatttattttcaagtacattttttcctacttttcttggggaatattatgttgttgtctttggtttacttcattcatttgctaatggatcaaatcctttaattttttttcctaaatttatgtctatgattctttttgtggtagaaaatgatgcatatggttgtgaagatggaaaagattcctatttttcttgtatgttgatttgcaaatgctagagaaaactaacgtctattctttcattagcttcttggaattttccttatcttaaataatcggtagaaagctggaaaatattttgcagttttttccaaccattaaaat

SEQ ID NO: 141753 - DNA, 425 bp, Glycine max
tcaagcatcaataagatataataccaatatttatcctcaatcctttcaacctggcgacataaggtggcgagtctgaggtgaagcaaggaaagacccacaggcacgaaagctagggcccaactgggaaggtccatttatgatcgtggcaagcttagacagtgaagcatagatggaaaagcaattccaagaacatggaatgctacccatctaaagttctatatgagttaacctacaacaagaccaggtgttgtacactttttcctactctagtcttttttctcgaaagataaaaatcacggttttggcttgaaaggttttaacgaggcacacctgggggatgaagggagtttgtactcaaatgatcaaagtggaaagctctttatcaatacaatttctataatccttcttccacatgtatgaacttt

SEQ ID NO: 141754 - DNA, 373 bp, Glycine max
  unsure (1)..(373): unsure at all n locations
cagcctccccaacatctaagtaatacaacattctaacagcacaaactatcacagcccagaaaacatagcaaatgcagaatactctgcctaaacaccaaccaaaatcacagctnttcttacttaaagaccccagtaacaattccttcgttccaattcgttaaccgttggatcgactccaaatttttactggaagtctctagtacataagcctacattttgaccgttgggatctactagcaaacatccagaactcattctgcactgctctttccacaaccagcaaatgcctagtatttttctgcacttgtgcaaaatcctgctgcacaatttcacagccaaaatctgcacaaaatgcagatttcgaaaaccacac

SEQ ID NO: 141755 - DNA, 445 bp, Glycine max
  unsure (1)..(445): unsure at all n locations
aaaactcagcttccttagtacatctcactgctttcatattgtgtacttggagataaatgcaaaatgttgctgaaattttatcaaatttaacctaaccaacttaattggtacgtaacaatcaagtattaaaaatgtcttcctgaatgggatagggccatacctattttatcaaaaaagtgagattntgcatacatgtgggataacctagttagtatcacagaacaagaaaaatgaattgaacttggatgaaagcatcacgcataagtgaccagtatgagaatgtggttgaataattcttgcaatttatgcaacgaaatgcaccagtgatgggtggaaaatattttngttcatgtgttaaatgtgcaaatgggagatgatagttagtcaatgacgtaagatctcgtcttatatgtgaaagggatcattcctagttatacaaaatgga

SEQ ID NO: 141756 - DNA, 396 bp, Glycine max
agcttgtaggatgatagtgctcccatcacatggtgcactacgtggcggacacgtcacggagctcaactcgctttcttgataaactgcctttgcaataaccctccatacgctggtgcccacctacaactgacttgatggaggctcacctggcccatgtgcgaggagatgttagagccgagttccccgccgcctttcctagcttagcgcacgtccatgtcagacaacatgaatgcggcacatactatcgctgtcaacaaatacaggccaaagcggaacgctctgcccggatgacaccccagactctgagcatggctgacgtacagagcctagtcgcaagatctacctatccttgtgtttacggatggaagcaggcacatacttgaccggagatctcta

SEQ ID NO: 141757 - DNA, 313 bp, Glycine max
  unsure (1)..(313): unsure at all n locations
tattacggacactatgaatctcagcttggatatctttcactagggaccttgcctggctaacatggttgctgctccagtcactctagggaagaggtggctcatctcgtactgtattgccctgactggggatcaacgttgactggttctctatacgagatttaaccctctagtgcgactgctttgcaaactgtgacctaaactcccctgttgtatgtctgaagagacatgtcaagtgtcaccgtagatgacgcttaagggtgcaggcggattgatccccttgaacacctgngaaggggatagcttggtggctata

SEQ ID NO: 141758 - DNA, 413 bp, Glycine max
  unsure (1)..(413): unsure at all n locations
agctttgtattccagggcacgaatntgttcttaatgctgaaggagcgccctgngagctcttgaggatggacttgaccaccctggcccagacttggagtgtattatcatactctaacctcgccaccacctctcacacgttcgaccttaatatggacagggcgaggttattccatgggctagttatgaagatggacatggatgtgggcttcctcatatcacatcagatcttgcaaatggcccaatccaactcctcacggctcggtttcccaaccttgatcaccgcattatgcgtagcccaaggagttatctcagattctctgactttctagtccttcagccctgtcattaatttggaatacataaagaagaactgctagaacttggatgacccttcattcacatttctagggact

SEQ ID NO: 141759 - DNA, 355 bp, Glycine max
gggctatatttcgcgggttgatatgtgctgactcatagaatggcatgatcactggctgacatgttcttagttagcatcaattacttctttcggggtcttcacttctatctttccccctgcagaagcatctaattttgctaggcttgtggtctcatcccatctattgacatattcaatcggattggctcggaaaacccatgaatgggagttcttatcaacacgcctctgaacctctcctatgcttcactccgagattcatctagatacttatgaactgaagagatcgcagcttgtccttacgcacactcggactctgggaagtatttacttatgaaccttctaacaacttcttcct

SEQ ID NO: 141760 - DNA, 431 bp, Glycine max
agcctgtgaagtaatgctgaaagcaatattattttttcttgtcggtttgtgttgcagagtgtgtaaataaacttaacggccaagattctgagcttattcagaagtttgagtggtgaacgtaagcacacactgcaatgctaagttttggcatataatataataataacgaaagtgattaaaaattctggtaaaaatcctaagctttacaaaaggctgagaacaagagaaaagccatagggatgaggaaaagctgatctgaaggaaattctgttctgaaacccacactcagcctctctctctaaaaaataaacactctctttctctctttacaaaatagagagaagtgaaatgagcgtgttgtttaatgagtgtcttattggaatggtgaaattaccgttgccacgctccctgttggacgcggttactactct

SEQ ID NO: 141761 - DNA, 401 bp, Glycine max
  unsure (1)..(401): unsure at all n locations
nggatgaaggaagcagaggcagccgagcgtgctgggtctattgtaacttgccaagcaataattcataatactattggggttggagttgaagaagaagatacgaagaggacatgggttgctgatgcggaggaatgtaagaaaagaggttctattgagactgccagagctatatatgctcatgccttgactgtcttcttaactaagaagagcatatggatcaaagcaccacagctggaaaagagtcatggtaccagagaatctcttgatgcattacttcgttaagcagttacctacagaccacaggctgaagttctttggcttatgggtgccaaagagaagtggcttgctggagatgtgcgcgcaactcgagctattcttcaagaagcttatgctgccattcc

SEQ ID NO: 141762 - DNA, 426 bp, Glycine max
  unsure (1)..(426): unsure at all n locations
agcttctccgaagggcatggttgtttcctatttcctganaatatctaacaatctcgctagatgacgatctttttctttcttggaaggtaccacaggatatggtacttccacaccttcatccacagctttttcacttctactcttctttgcattcttattattttttctcttaattttcattttttttcattttctatttctttttctttttcttggtccttcaattctttattcttgaccattatttgttcttccttttcttgattactttcacctctcacctcatttttcttaccatcagtacctttcttgtcagcagttttcttcttatgcacaacactatccgcatccttagcctccacaaaccttttactccttgtcatcacagctttgcattcttccttaagatttgttctatattttcac

SEQ ID NO: 141763 - DNA, 444 bp, Glycine max
  unsure (1)..(444): unsure at all n locations
tagatgcattagcattattataccgacacgtttctaatgaaaggtagagaaagtgtgagagactcacagtgagaaggagagtgagggaaaaaagaagccatgatgataatctgaattgttagctgtggacgcttgggatgggattgaaatgataaattatgggtacgctatcggcaatggatcagctcctccaccaccttctctcaatttgtaatacataatcaggaacacgcatttaggattggagtattggacctcttttttcacccgcgccaatgaaaacgtggcttggtgcacttgttttttttttaatggacaaaactagngntttgttttgtattttctatattccgctctgattntgattgtttttttcccaatcaaatcaaactcatcacttttctctctttttcttcatcttttactatttagtcaatcttatag

SEQ ID NO: 141764 - DNA, 370 bp, Glycine max
  unsure (1)..(370): unsure at all n locations
tgtacatcanatatcccctataaaagtcttttcaagagttgtgcatggtataatttatcagaggttcaaccctccactaggccacctaaaatcattgtttaaactaaaataatgataaaagaccaagataatagctagtaggattcatatgaggggtttcggtaattgatagttatatataagaaaaatattcaagttcagatacttttcaaatcttaaaatcatcttctaattacaatattaaaattaaaaaaaaattcaatacatattattgtcttaatttttaaaattacggaaaaaataatataggaaacatcctttatttatgacaaagagatcttattacaaagcaagagacaattataacaac

SEQ ID NO: 141765 - DNA, 279 bp, Glycine max
agcttgtagaatggccagacatgatacatgttaaggtttggtttggctcaaggattaaagggatgccccacattatttccaccacacaaatgcaaaaatgatgagtcggaaattttatgcaaaactggtcatgcatgcacctatgtggaggcttaagtgtcaaatatttatggtcatgtgacgctcaggctcacgattcatttcctctattttatatgaacccaatgcttccaaaatatgttctcttatcaatttgtgcattcatccgactccatttcg

SEQ ID NO: 141766 - DNA, 394 bp, Glycine max
  unsure (1)..(394): unsure at all n locations
tcctcgtggcttctttgagaagctntctcaagaggcttctttgagaagctagatccttatctatccacacccctcttttaacttaattaacctccttaaaaataattacggatgaaaataacgtaacaaataatcaaacatcaaacataattactaataatatatagatatatatatcagggtgttacaactctctcacccttttagaaattttgtcctcgaaatttaccttactcaaacaaggaagggtgagcttctcgcatctaactttctaattcccacgtggcatcttctcctgatgcacctccccaaatcaccttgaccaacggaatctctttccctcttaggtgttntgttcgcctatcctcgatcctcaaagggcaatgttcatatg

SEQ ID NO: 141767 - DNA, 416 bp, Glycine max
  unsure (1)..(416): unsure at all n locations
aatgatctatacaagtctctagtcctacaaaggcgttatttggtaagatgggacttccaattgacgtacctgaacgtttggccaacaaatctaagttaaaaagtcttttacaagaaatttactctctggtatggaaaccacatgatgtaatcgattaccagtggccaaaactgatttacaatagctattaaaatttgaattcaaaatttgcattgtgtaatcgattacacatatatggtaatcgattaccagcagcttctgaacgttttaattcaaattttaaagcttgtaatcgattacacatatactgtcatcgattaccagaagagattntcagaaaacattttcaacagtcacatctntttgtgtggatctcgaatggctatcaaaggcctatatatatgtgacttgagaga

SEQ ID NO: 141768 - DNA, 447 bp, Glycine max
tctttactggtaaactccttcctggattggcacttatgcttgtattggtgttgccagcgaggcgaaattgtgcgggagccgagttttgagtgggaggcctttgtggttgagcgagactctttgctggatgagtgctggaatggaagggtttccagcatgggccaaaaagcttggttggtgtggggaatattggtaagtgttgtgaggggtttgttgggatttatgccaagtacgagatgaagtcacagcgtgggtatctccttccttcttcttgaccccacttgctccgaatatactattgctcatgctagcaggagcggcataatcgaactttccccttctcaagcctaccgcgatcctctcacccgcaaataccaaatctgcaaagctagagggcatgtaacccaccatcttctcatagtagaacattggcagcgtgtccactat

SEQ ID NO: 141769 - DNA, 460 bp, Glycine max
accttgatactcagcttctattttagcagatgaagatgaatctgtggccacatcatggtctcctctaaggacaatagcatcatttcttgcactgaatagttgggagttggaagccatcttctcaaccagattcctagcctcaacaagagtcatatcaccaagagctccaccactggcagcatcaatcatactcttctccatgttgctaagtccctcatagaaatattgtagaaggagttactcagaaatctggtggtgaggacaacttgcacacaatttcttgaatttttcccagtactcatacaagctctctccacttgcctgatgcctgaaatatcttttctgatgacaatggtcctagatgcagggaagaatttctccaagaacaccctcttaaggtcatcccagctggtaatggacctgtgagcaaggtagtacagtcaatctttcgccactccct

SEQ ID NO: 141770 - DNA, 453 bp, Glycine max
  unsure (1)..(453): unsure at all n locations
ggtatatgattaattaacgtngtgttgtaccaattgaaaaggctgtatattggagctattcaaaattagttcgtaatggatgagaactggaaagtaactattaaggaataaggatataggaggggccataaagagggaagtgggcgtgagacgccataaagtgtgtgtaaaatttagagttagtatatgtcgataataagttctttgtgttggggagattcgagggctcaggtttatgggtcttctcctcacttatatggtgttcaacctttccacatggtagtctccccctcgaggggaagtttttatcatccacgagtatagccatggccacctgcggtacttgccctgcccgctagccattctggccacctgcggtacttacatactcatctaagccggtcactaacttgaaccatcagttatgataccaattgttggggagattcgagg

SEQ ID NO: 141771 - DNA, 278 bp, Glycine max
gtgactctacagtgctgaaaatgttgatgattcatttggaagtctctcaagagcgtgtcgttgtatagagggcaatcgtctccacatttgatgtgccctaatcggatctgcgagcgtatggttatgactctttgtactcttcccaatctgcatgcgtctagtttaactggctttgacctctaatgtgcctgagtgatagatgatcactatgagtgacgacaatcttaatttctcgggagcgttcgtcggtcagtagggctcgtattaatgcataatgc

SEQ ID NO: 141772 - DNA, 441 bp, Glycine max
tgtggtggtcattctctacgccattttcatcgctgccgtatgttaaatgacggtcaaggctcttaagacagcaatgtaaagatgtagggtatgataatagcaaggcaaattgaaatagaatatgtatattgttatttcattgatcctttgcatgatatatataatacatgtacaagaatgttctataccaattctaaggcatgacagacgtgatccataatcagtggcatctgatttattctatgcattataaggtaaataaatatagaatcaaggtaacataggaaagtaaatatatacacagcatatttgcaatcatgtagaagatatttcctaatactccccctcaagttggtgagtgaatatcgtgaagtcccaacttgttgcgcaatgtcacatattgatcttttcacaaagcttttgtaaacacatctgctagct

SEQ ID NO: 141773 - DNA, 449 bp, Glycine max
  unsure (1)..(449): unsure at all n locations
tataagaacgaaatngcctaaatcatttccaaatatgcatgtgaattagcaagcaatcaatggggcaaaacacaccaaaagattatgatgatggatggctcgaattctcacaaaaggtaaacttatcactttcaaattgagctttcaaaactatcatgacatgtaaaggaaaaacaaggatttcaagtcacaaaatgtcaagagacttttattttcagaacaattacccattacttgaacatatcctataattcaaagacaaacatgcaaatttaacacaacaaaactaacaaaattaaactagaacccaacaaaactaacaaaattaaactaatttaacacgactaacaaaaccaaaaccaaagaacacactcccccccatacttaaacaacacattgtcctcaatgtggcacaattaaaagattaaaagcaattaaaccatcaaata

SEQ ID NO: 141774 - DNA, 275 bp, Glycine max
tccacaatatccaagcaattcaatgtccaaatatcttgatctaccctaaaccaagaaaacagggcagaggcagaaaactctgcccaaaacacattcacatattacaactgtccttactcaaatatcccagtaacattctctttgttccggttcgttaaccattggatcgacttgaaaattttactggaggttcctagtacatacatctaaattttgaccgatgggatctgctataaaatgttcaaaacccactatgtactacctttttcataacc

SEQ ID NO: 141775 - DNA, 400 bp, Glycine max
  unsure (1)..(400): unsure at all n locations
tctatcttctgtatagattttaagaacgttttatgttgtgttatatcttgatttaattgactatggaaatcttaatctttagataacaacggcttatgttgngctttatattgttataattgattgcggagatcttgaatctcaagaaaagatgggtccatgttgtgttattattggtggggaatcgaatgtggagatcttgaatatggagaacttgaatgtacagatctcatccatgtctgcattatttttgcgtcaactaacttcggagatgtttaaaccatcacaattgtaacttgattatcttattgaatgcatgtggtttgcacaattaccaacaatcatttgcaaatctaactaacatgtcaacacttaatagtactaacctaactgtagggac

SEQ ID NO: 141776 - DNA, 466 bp, Glycine max
  unsure (1)..(466): unsure at all n locations
acctaacatactcaagctgctaggatgctgggtaggttaggagaatcaaaatccatggttttatgcacaactatgattggccactctgatttgaatggagatggcctgctttgctttgatgaatttagagtcatgatgcagtgatgagtctttgtctttatttgatttaatgggggatggggttgaatttcattcatttatttgtaattagattttaaatcttgtgtgatgcacgaattctattaaattatatatttttttatatttatataaaaatgaatatgcattaataaaattaaattttaaaatatttattagaatataaatgtaattatactaaaattgagaaattaaatgtatttttaattgaggaaatgttattaatattaagtctaatgaaatttatttttaggcttaaaaaagttggattggactggtttgacccaattaagctcanatgtaaaat

SEQ ID NO: 141777 - DNA, 443 bp, Glycine max
  unsure (1)..(443): unsure at all n locations
tggttcaactgagtagccatctgccccatctgatttgtcagactctgaatggaggctcttgtctctggctgaaattgcatattctggatggtcatttgcctcactaacttttctaaggaaggttgaggaggggcctcanttgcatgttgtgtttgttgttgctgctgttgttgctgcattaaaggaggaacatatggcttgcttcgaccagtaacattctggaaaggagggacaggctgctgttgttgtggaggacttgtacatctcagatttggatgattcctccagcctggattgtatctgttgcttgaaaggtcataattattctgttgttgttggttttgctgctgagggggtctattataaatgtttgcagcataagcttcaggttgctcattgactccagattgctgcanagaaggacaaagatctgtatggtgatc

SEQ ID NO: 141778 - DNA, 446 bp, Glycine max
  unsure (1)..(446): unsure at all n locations
ntctctnttctctcttcttctctctttatctctcaatggtttcttattatttgtcatcttttcacttctgttccaccattttcttacacaaattttgtggtttctccattggtgatgatcatggagggctaaacaattaatcaatccaaggatccattccaagtaagattgaatttgagtccttgtttgatttttctactctttgtgaatgttcttgatgcaatcctcccaaggaggggacccgtcactagagccatggctaggggactccaggaagattatgccagggatacaggagaaggccctatgattctcatgagccttagggtaaattttgggcccttgtgctaagtatgagcccacttatctttatatatattagattaagcgttcattactttttgggctggtattcatggctccatagtgtacggagcataccccat

SEQ ID NO: 141779 - DNA, 454 bp, Glycine max
tcgaagttgagaaccttgtacaccctatactacaaatttacctgaagcccataattgctgaaatgacatttatccaaacagaaaacccatgacattaccaaaaatgtcaaatgatgttctctagttgcaacccaaacactttaatttcttaactcagcaaaaaggtcataatttaaacaaaacaggaattttctttccacataaccttacatactaagaatgagttttcaacgtttagttttaccactaaagagtagttcatgctgagctgaaacttactgtcatagtacccccaccctgatatgatgacaagtccacaaattgtaacatatcccgttgataaggttaatgacgtgttataaaatttaaatccaaaatacatatctttgaattcaggattgctttagtaacatttgatttaccggcaaattgtaacagtaaattcaacaccaca

SEQ ID NO: 141780 - DNA, 462 bp, Glycine max
atactcagcttacatgttccttatatggtgctcactgatcaagtccgtttgcaaaaaatttaaacatgttttaacacaaaacgaaaactgaaaataaagaaataaaaacaaataaaaatcttttaattaagaaaaatcagttagcattaaaatacttttttaaatttgcaacgtttataaatctggtgcttaatgattttgaaaatataaaaggaaacttaaaagccgttaatattacctagcttatcctaattttaggctgaaaaattaaaatgtcaaaaataccctattgttttcaaattaaatgccattaacattacgttttcaaattaatttttatttccaattgttttcaaattaaatgccattaacattacgttttcaaattaatttttatttccaatcaattaaagcctattttttttcacttcatattgcaaagaatattttcaatactacccc

SEQ ID NO: 141781 - DNA, 451 bp, Glycine max
tgtccacaaaaatagggttttgaagtttgtcatttcaatttctcactaagtaaaatggatcattttcaaggtccaacgccttaaaatgatcacctcttaaggtaaaaaagaatcacttgataagcaagaactacgtaggtctgatttcctcatcgcaattgcggatacgtaagagcaaaagccctgcttttgtcgaccaccccaagagatcgctaatggtccaatgccttaatgtttctctcctctcaaaaaaacaagagatcgttaatggtccgagctcatgcttttataaaaaggttcatcaagtcaagttgaaatatgaaagtgaccgtcttgcacaattggggcataagatgaatcgagtcacatcactgcttcgtctactgccacacatatttatgattgttgatgtccttgttacttccagtttcaccttgacaaagatgtcatg

SEQ ID NO: 141782 - DNA, 443 bp, Glycine max
  unsure (1)..(443): unsure at all n locations
tcggaagaaagtgatgaggtacaagccctaaaggcagatcttgtaagagcctgngtagtcgaagagaagttcaagtccatagccatcaaagtctgaaaagagtatgatgaactaagggatgtcaatatggccaccgatgaagccttggaatgagaaaccaagaaggcccgaaaggaagaacacgaccaaagcaaagttttgaggggctttatagggcagcaatagtgagctcaagctccgaagaggtgaaaggaatcatcacgggtcaaaggcatgatcttgaaggacgagctaaaggtttgccttatgtcgaaaagaaatttgtcccaacagttaagcgagactgaagggaatatgtgggccatcatcgataagtgcaaagagaagctaaatctagcggcgactcacgagcaaaggctagaggatgagtacgccaagatatc

SEQ ID NO: 141783 - DNA, 439 bp, Glycine max
  unsure (1)..(439): unsure at all n locations
ntgcggatntggtcttcgccagtgaaaggattgaagtggatctgaaaagaggcaaatttaatcatcctgcttagacgaatgagaaaactggggcaaataaagagggtgaggatgagggagaaacccatgctgtgactgccattcctatacggccaagtttcccaccaaacccaacaatgtcattactcagtcaataacaaaccacctccttacccaccacccagttatccacaaaggccatccctaaatcaaccacaaagcatgtctaccgcacttccaatgacgaagaccacctttagcacaaaccaaaaaaaaacaccaaccaagaaatgaattttgcagcgaaaagcctgtaggattcaccccaaattccggtgtcatatgctaacttgctcccatatctacttaataacgcaatggtagccataacccctgctag

SEQ ID NO: 141784 - DNA, 454 bp, Glycine max
  unsure (1)..(454): unsure at all n locations
ntcaccccataattccnnccaaattgggcagaattgctttgaaccaaaatttccttttatgaatgatgctctcctacaacctaagacaaggtagaaggagataaactgtacaggctttaggttcattcaaacaatcatactttcagctcaaaatgggtgcaagggataaatcaatcatacacaaggtaagcttttttagctaagtggctatcttcaatcgaaacatggccttcatcatcttcaatttcatgcattcattccatactcagagattcatgcaaaaatcagtactcaatgttagtcattctctcacaattaaagatcacactctcatcgggttgcggctaatgcgttccttcacaatcaacttgacaaactgactaacattttttgtcatgatcataattccatgttctttctcttctaatgactgcatgctcattcaaggcatatg

SEQ ID NO: 141785 - DNA, 446 bp, Glycine max
  unsure (1)..(446): unsure at all n locations
taactanntttgtaaatgtcatatctaaactaaatcatgtttgtgttaataagaattgtcttagaccagtacaatcatattcatcaaagtttgaaagctttcataaaacatgaaaatgattttgtgcatgaaaagttggaaacaacgtgttgaacaaaaactttctaaacatagcatcctagacaatgtcattttgagtaacaacattctgagtactgtagtcaacacaacaactttctaagtgttgatttatcattacataataactaaaatatatatttatttatgtgatgatcttctaaacatgagcaaatgcacattgacattaggttttcataatcatatccaacatttaataatgagtgttgtgactaagctaaccacttaaaaagtcaaactccgtaagtgcttggacctttgtgtcaaaactttctaaacaccaagtt

SEQ ID NO: 141786 - DNA, 441 bp, Glycine max
tgaccaatcccgacccaacccgggcatagtctgtcagtgagaacctgtgatgtacctaaacaggcgagctcctggctgtcaacagattaaaggaacaaagaccacaaagcaaggaggcttgtggtggctggccagctgtgaactttgattgatatgtgggttatggcctctggtaatcgattaccaagggagggtaatcgattacaaggcttaaaaatgaagacaggaggctaagatggtctctggtaatcgattaccacggggtgtaatcgattaccaggcttgaaaacgaggtcaggaagctaaggaagcctctggtaatcgattaccaaggggtgtaatcgattaccaggcttaaaaagggaactgggagatggtagaggcctctggtaatcgattaccagcctgtgtaatcgatacacagaggaatgggtcactggt

SEQ ID NO: 141787 - DNA, 459 bp, Glycine max
  unsure (1)..(459): unsure at all n locations
cagcttgtgggttaaagtctcacgattgtcatgtgttgatgcaacaattgttagccatggttatacgagacatctngccaaacaaagtcaagttagccataactcgcatgtgctttttcttccatgccatatgtagcaaagtcgttgatcctgtcaagtttgatgagctggaaaatgatgccgcaattatactatgccagttggagatgtattttccccctgctttctttgacatcatgattcacttgattgtgcatctggttagagaaatcaaatgttgtggtcctgtttatttgcggtggatgtacccgattgagcgatacatgaagatcttaaaagggtatacaaagaatctataatgtccagaagcatctattgttgagaggtacattgcagaagaagcgattgaattttgttcagaatacattgagaagggctaaacctgtggccttcctgagt

SEQ ID NO: 141788 - DNA, 457 bp, Glycine max
ctagtgcagagaatatgattagggaaatgataaaatttgcatgctttatattgataaaaatgtgcggcagctaagaaagatagcataatggcactaagtgaggcaagagctaaatcatttgatgcattataccaaatcctaaggcaccagagaaggaaagagacatttatagcctatctaaaagtagagcttaactggaataatcatcagcacaaatttcttggcaagtgaattatacacaacatcaactagaatactccaaattcaccaagaactaaaaacacatgaaaaatggtattatgcagcccaagggagcaaaaaacaaaaaacaacaaataatgtggtgttgcatctaaagattgactcataatacaatgaggtgtttactagagaatgacatggcacataatgaggagattaataatgctgagaattgcttaaagagatcgcataatac

SEQ ID NO: 141789 - DNA, 453 bp, Glycine max
cctataaaactcagcttctcgatatattatgcccctgaatcggacttccgttagataagttattaccatttgaatttctcgagagctttggttgttcaatttcgagtgtctcgatatattatgcacctgaatcggattgtcgtgagacaagttatgaccatttgaatttctcgacagcttccgttgttcaatttctagcttctccatatattatgcgcctgaatctgacttccgtgtgaaaagttatgaccattggaatttctcgagggcttccgatgttcgatttcgagcatctcgatatattatgtgcttcaattggacatccgtgtgacaagttatgaccatttgaatctttcgagcccataccgttgtcaatttccagcgtctcgatatattatgcacctgaatcggactttagtgtgacacgttatgaccatttgagtttctcgagag

SEQ ID NO: 141790 - DNA, 442 bp, Glycine max
  unsure (1)..(442): unsure at all n locations
ntgtgcctnntattaaatatttttntcttttctatttaatgcaaatacattttcccttctcttctctttctctctcatgaaattacgttcccactctttcttttctatcattaccttctctctctttctctcttcccctttctttttgcgtctttgttaatcttccgttcctctctctttctctccctcgtcttctcctcttttcttccgcttaagggccttctttgttcgatttttttcgctttgatttttatattgctttggatagaaaaaaggtgtgaccttttgtctattttattcctttttttgtctaattttttgtggtgatttttgggacaggctaacggcggtgctgaaggtcacagcgctntgcccatgcaagggccttctttgttcggttttttccctctntggttattatattgctttgtacgggaaaaag

SEQ ID NO: 141791 - DNA, 400 bp, Glycine max
tgagataatacgcgggggtcgcttacagctgcgtggagcgtgctttgactgtgcgtagaatatcgatttgcgagacgtgactaaggagaggacctcattggacgtgtatggcctaacacatattctagcccttggtcaatccgatatggagacacaaactcgttgagatggatcatattatacagtcttagcaaggttataaggcgtggatgactttgcactgtctatggatcgacctagaacatcggctactcatatataaagtcgagctggctattcaacggagaacatccatgctctatgataatatgactgcgtcacatgccgttaagcctctgattgttaatcagaccaagtgcctaggccagactaaggcgccactgtagctgaattgaatata

SEQ ID NO: 141792 - DNA, 448 bp, Glycine max
ggttggtttcgtatgaagtaaacgacgaagctgcgaatgtgttacctgttcaaggtccctctcgcgatctccttttagttcgatgagcttgcctcccgtgatgaacttcatgtttaatgaagtgtagtcagtgagtactgggcctaatgtcttcaaccattgtactcccaataccacatcagcaccacacaacgacattaccacagcgtaaatgagtgtcactggatctgcaccgtgacattaccacagcgttgttggcatctaatttcgtcaccgttacccaccgtgactcgtagtgggactatgtcttgcgtggggagctttaaagctgtgaccacacgatgatggaggaaattgtgtgtacttcctccatcaattaagatgctaacatggagatcattaatagtgtctttcatgcgtagagtctcgggggctgagtgtcctgaca

SEQ ID NO: 141793 - DNA, 449 bp, Glycine max
  unsure (1)..(449): unsure at all n locations
tatgttcgtaagctatggcagtgttgctgggttttagtttttttacttggtttgcggttatgcacgtggaagttaaattatacttgtgtttttaagctatagtagtgcattattttgtgtagttgtggccttgtgggttatgtatatggtagcaacttcatgtacataacatggggttaatggtagttcttaataaaactttggtgacacaattatgtttctgtaatgatgcatatatggtggctttataaaatttgcataagtggcaatgcacctaatacataacaggtcatacgaagctctagtagctacggtagttagttctaccaatggttacaatttagttgcattagctggtctcaatcaattaagatgtataaattagatgataaccaatcatgcgatcatgttttatggttgttggttntcttccatatgtggtatagact

SEQ ID NO: 141794 - DNA, 440 bp, Glycine max
  unsure (1)..(440): unsure at all n locations
tcaggccaaagcaactcanaatctaggtatctaaaacccctcaatttagtggattttcaaggtttgagaagtgaaaatgagaatggggtaattttggagcaaactctcatctcacacaagtctataacattaatctaaactcgctcaaactggttttacgacgaaaactctaccgaatcaaaatttgactcctcaacacccaatttaccctagaaatggctcttgccttcactttggtcactcattttcctcctttgcacagcccaagctttctcacagtcctaaataacatttcaaactaggattaactcactctaacctccaattaccactaaatccagatttggcttttcaaatcctcaaagcatcacacttttccactcatatcactacattctcactttttaaccctaggttaactctacccttcatctctatca

SEQ ID NO: 141795 - DNA, 445 bp, Glycine max
  unsure (1)..(445): unsure at all n locations
ntagttatcaaatcaaactatcacagattagttacctccatccagggatttgaattttcaatataactntcattaaatgttcagtttgttctctttgaagttgaaatattcttcttccttcttcatagctacttccgaatgctgatcgagcaataacatcgctagtcagattctgaaggaaaggccatgcatccatttcacatgatccctctgaagacaacattccttcccatttgctaaccagatcattgcaactttggaggaacaatggtaacatgatctgtgttgtaacatggaaataacttgtagttaaaattccctcagtcaaactaaccgcaaaaacattcagactgcagagcatgttgcttataaaccaaacctatgttgtttacaaaagtatatgcttggaagaatctatggttgcatagaaatagtgggaacaatc

SEQ ID NO: 141796 - DNA, 455 bp, Glycine max
  unsure (1)..(455): unsure at all n locations
ntgaagggacgaaagggatgagtcaaaggtgtaaagcatggttntaggggataaattgaaggcttgtcaaaggtcgaagagaagtttgactaaacagttgagtagaacagaagacaatatgctgacaatcatttaccagtataaggagaaggtaaacctagctgctagttatcaatagagactagaggacaagcatgcaaaggtatcggctttgcaaatctaaagggaaccaagagagagagtgatagaatcattgcacagggaggcaatgaaatggatggatagattcactttcactctgaatgggagtcaagagcttccaaggcagttagtcagagctaaggcaatgtcggatgtatacccggctcccctatgaagttcatgggctttttgattattgccaacacatgatcaagttgatgtcccacataattagtaactattgaggcatttgt

SEQ ID NO: 141797 - DNA, 435 bp, Glycine max
ttgacttgagtcatcaagagattataaatatttgaccatggcatgagtttcaataattatcaatcatctttgaatcatcaatctttcaatcttttttcaacatcatctctcaaacatctttcaatcaatctttcaatatctttctacaaaattttctgattcatttctcttcatctttctaaaagttttttatcaacacattctcttccaagaaaagttctttgttcaaaaacttgtgttattcatctttttcattctcttctccctttgccaaaagagcgaaggactaaccgcctgaattcttttgtgtctctcgtctcccttacaaaagattcaaaggactaaccgcctaagatatcttttgttttcccctttacaaagattcaaaggactaaccgcctgagaattctttgtcccaaaacattggagggtaca

SEQ ID NO: 141798 - DNA, 430 bp, Glycine max
  unsure (1)..(430): unsure at all n locations
tcaatacatggccatcatagctttgccacacatacgactcagttaatatatatataaatctttagggaaacgatgattttttagattgattatcatctcaacatttccctcaagtaggagcataaaaatcatatgcaaaaaacttgttataaatgtagataatccaaggatcacgaaaagactgataagatatcttattagtcatttaagtgacaaaaaagtaaaaatacagtgacaaaatttctttcatgaaaaggaaaacctacctcctttttgtttggttggtcctcacagaaaatagtttaaattggaacaagcatgtaaggctacttgattatcagtttgtcaaatatcaatagttntagacaaaagagttgacatgttgccattgcttctgcatttgacaaggcaataataccccgattcatac

SEQ ID NO: 141799 - DNA, 453 bp, Glycine max
  unsure (1)..(453): unsure at all n locations
ntatcaattatntacccatgatcattgctaacttgatcatcatcatcactcttggaaaagaacaatgacaaattttattgatcatcgtcatcacttcttcaagctntatcaatgtaatcgaatatcaaaaggctataaccgattaattcaacaaatttcacttagaatgagaaataaacctctctgtatcaatcttgatcgtgatattgatacgaagttgtcccatcgaaagcagtgacaaatcttcatcgggaaccatgagtgcacacaaggtgggtattttcttcctgacatgatttatttcatatccaagggttaaccaaaattcaaattttgaaccacttagttaaagaacacaagtcgctaccacttgtttcaaccagacttggtatacctatttactctntaacttctatagagttngaaaagttagaaaataaagatctacacact

SEQ ID NO: 141800 - DNA, 447 bp, Glycine max
  unsure (1)..(447): unsure at all n locations
ntgtgtaatcgattacactgatttggtaatcgattaccagtgattgtttctgaataaaatcaaaagatgtaactcttcaattggtttttgactttttcaaattggttttaagtttttctaaaagttataactcttctaaatggtcttcttgaccagacatgatcgaagagtctataaaagcaaggctttgttttgcattttcattcattcattctatcaatcaatcttttccaattcattctttacacaagcaagttttccacattgatttctgagtctctttgaacttcttcttcttcttcttccttttgccaaaagctttccaaagttttctggtttttctaaaccttgaaaacttgtgctattcatctttttcattcccttctccctttgccaaaaagaattcgccaaggactaaccgcctgaatttttntgtgtctctcttct

SEQ ID NO: 141801 - DNA, 439 bp, Glycine max
  unsure (1)..(439): unsure at all n locations
tctcagcttccctattntatctaatctttcgttgantttatgaaattatacagtaatatatttttcatattggtgttttcaggattcctagtgaggatgcagagtctcaactcttaaaaggcagaaaaaagtgcagtggaagcttttgagacagcccaggttatgggtgttattatgtttgacttgccaaattgccctaagaaacattgtcaactagagacatccactgttaatggagaaggatcatctacccatactgttactgcatcttttgaaactaccttgaggtgggcagagaagtagttgttgcagtcaaaactgcatttataaggcttgcaaattgtccttcttttagtaacggtgaattcaaggaactactaagaaaaaatagtgaaaatccagatacagtggaaggtaatatggacttgtctgagttctc

SEQ ID NO: 141802 - DNA, 438 bp, Glycine max
cgcgtttatcttatgggcagctctgctcagacgtaccatctgtttcttcacttggatggatcgctcatgaaagatcactatactgtgactgtgacaaaatgagggaggaccttgagaaagcaagtaaatacggatcctactcttatatattcttacacctacagggctgcctctttaatgaaaacctaaaacgctcaagctgctctaaccgacacaagcctgattcttgggatcacactcccaccagaatgtgtggaagtactatttgtcatccacctttctcttgaggactacgaagcagatctatgcgatgatcaaacgactgttactttggggtcacatcatacaatggatgaggagcgcgttgcttgattccaagtctcgacatattgtgcgtgagcatcgtgatgcgtaggacaactgcagaatgttgcgcac

SEQ ID NO: 141803 - DNA, 444 bp, Glycine max
ctgttcttttttataaaacgagaagttctaaaactcatcacactatctaaaaaagggccttgaggtggatccaagtgctttgatcattcattagcatattcatgttttggtggcatactcaccattgtttgtttctttagggaactcaccataactaagaaagcgcaaaggcacccctataacacttgatccagaaaaatggataatgaagagggagtgcaagaacagatgaaggccaacctatcggccttaaaagatcaaatggcttctatcacggaggccatgctaaagcttcagaaaactatagaagataatgccacggtggccgcctccaatacagctagggaagcggaaccggtgctacagcccgcaataaacttgggccgagacaaaaacatgacggtcttcagtcggagatatagtcctcaagcttacccttatggt

SEQ ID NO: 141804 - DNA, 442 bp, Glycine max
  unsure (1)..(442): unsure at all n locations
cttaattaatggcaattgacgtgaagatgtaagcagttttattcttttgataataaaatatcaatttattatcctttaatatgttatcaatttaaaattacaaatatgattttaatgacaatagaggtgaagatataaggaaacgaggattgaggttggcaagagatgcataaaaaagaagatttatatataatataaatagataactataaatgcattttatccattaaagtgtttttcttttcgggggagcaagaaacagattgacacccatttatccttgttcatatcaatcttaaagcaatacataccaatatttacagttcatcctaagttcttctcttaaataattttgtttattaccaacacattattgttctaaaaatttatactttgtaagagaatattaagagaaggacctangacgaactataacacaact

SEQ ID NO: 141805 - DNA, 444 bp, Glycine max
  unsure (1)..(444): unsure at all n locations
ntcaacaagttcttcactataactatcatgaagcattttatctagctgactacccatcatatctcccaaaaccccatacccacgaaatttaagagagaaagaagtccacccaaacctgaattttcgaagtcccactcgtagccacgcacttcacgaccccgaaaatgccctcctttcgcgatttggggcagaaatgatggccaaaggttgaagctttgcttggagcttcaatggagaatgaagaagaagaaaatggcaacgtgagggagagagagagctgtctgaaaaagtgtggggctgagtgaagagagagaaaagctctttggttataaataaaagggtgttctctttttctattattttatttaagcaatgccacatgtctccatttgagtggagcaaaaagggcccactttccctttttgactgtgacccatactcagt

SEQ ID NO: 141806 - DNA, 415 bp, Glycine max
tggttcgaggtacttacccgctgaagatcgaagaacgatgattaacgaatgaagaacaccgaagaacggttgaaacctttgcgaaattcctcacggaaaacgttacggaaacgtttcggaagcgcctcggcttagattttcttcacggaaaaaatttatccaagcaaattcgaaagagagagaagtgccaaaggggctgaacccttttcttcttcacttcctcccctatttatagcaaaataagggaggtgggtgccgcccagctcgcccaggcgagctcagctcgcccaggcgagccaggttgcttcctccagaagcaacagccttctggaggaatattcttgagggcccaagtgggcctgggtgctatttgcacccccatttttactaagtacaccccctctgcttatttttt

SEQ ID NO: 141807 - DNA, 448 bp, Glycine max
  unsure (1)..(448): unsure at all n locations
ntgtgtgtgcatttatttgaactgtggaaaatgtaaataactgttgtctattntgcattctttacactgcattctaagcacccacgggtttgagtaataaaagggccctacactcgggttcatgggaatttaaggagtggaggtgaatctatcatcatgctaggtctctgacttgcttgataatagtgaaacctcgtctagagctttctctctttataatgtgttgtcactggtattccataccgccacaacattattatcttgagtgatgatacctctagaaaacagccgtgtgagttatgaatggttggggaaatagttattagagacctctagatgttgtcctataagttcccaaataggggcaaagagcaaacacgctcctgtgccattctttctcatgcatgttttggtttatagttcttgctagtaatgtttgttttcttta

SEQ ID NO: 141808 - DNA, 445 bp, Glycine max
  unsure (1)..(445): unsure at all n locations
ntgaaagctgagctcgaaaagacaagagtagcttatgagatgccgaaggtggcagtcactagagttaggaaagaatgtgatgagttgaaagatatcaacatgaccacggctgaagcgctagagcgggaaacaaaaaaagctagaaaggaagagtggagcaggaacaagttctaaggggctttgttaggtagcagtaatgagctcaaacttagaatggccaagagggacaaatcaaggatggagagcatgatgttagagcataagttaaagagttgtcagaggtcaaagagaagtttgaaagaacaattgagcaagacggaagagaatgtgttgataatcatttatcaatataaagagaaggtgaacctagttgctagtcacgggcagatgctggaagacgaaacaggcgaagtgtcggccttgcgggttgaaagggaagcgagag

SEQ ID NO: 141809 - DNA, 82 bp, Glycine max
ctattaggaccttgaaactcagcttggtcaaatgtcgcgccgggggttctgattatgcgcatccgacgacacttattgacat

SEQ ID NO: 141810 - DNA, 442 bp, Glycine max
  unsure (1)..(442): unsure at all n locations
tcttacaatgaagtcaacaccaacaacaaaaatgcactttcttatcttatcatcatatactctagccctgagtgcaccaaagaaatctgcaatcataaattgcataccattagtcttattgtaatgtaagaacatctaagagctaaatgacagctagagaaaagtgttatttagttgctattaaaaattgcatttatatgtaaattgaattatatttggtgtgatttatatatgcatttgtatgtcaattatttggataaattatgttgaactaaatatataatttgtggatttggataaattatgtggattagttaggattccaaagctttgttacaaattatttgaatgtttaatttgacgaataaaagtaaatgttcttcacgatttcagatcatggntagaacacgagtctacgtctgtgttatgctgggtagagcag

SEQ ID NO: 141811 - DNA, 385 bp, Glycine max
taagcttctttcttggaaagactttattctctgcatcatggtttatgcccaatagattaaataagtgatttcgaacatggttttgtaatcttttcaggtttatgcatggcccaaatcactcctcaaggaggttgaatgttgggtccataatttccttttgagttgggacattgctattatgaagttggtcaccgtgaagtgaaacaaaatctaatgcctacttgatgaacgtggccttgacatttcctctatctcttccattaatagagtggtgtctttgaagctctgttgaaacttttgccactcaaaagatctttaaattccttaacatcaatgacttattctcttagttattgttagcaattttcagcaaccctttcatggt

SEQ ID NO: 141812 - DNA, 450 bp, Glycine max
  unsure (1)..(450): unsure at all n locations
accttgaatctaagctttgagcaattcaacaacaataactattgactcggatgttcgattgtgtcccgtagtatatcgagacgctcgtaattgaaaacagaagcactgagcaaattcaaacgacaataactnnttactcggatgttcgattgagttacgtaatatatcgagacgcttgaaattgaaaacagaagctttgagcaaattcaaacgacaataacttctaactcgggtgtccgattgtgtatcgtagtatatcgagaccctcgtaattgaaaacagaagctctgagcaaattcaaacgacaataacttttgactcggatgtccgattgagtcccgtagtatatcgagacgctcgtaattgaaaatagaagctctgagcaaattcaaacgacaataatctttaactcggatgtccgattgtgtcccgtatatatcgagacgctcg

SEQ ID NO: 141813 - DNA, 302 bp, Glycine max
tttagggcgtattgactaatgagggtttatggacagttgagtaattatggtttagtgttacttgaccacacatgatttaggggtatttgactaattagaggttatgggtctttcaaaaagtaaactttattgtttcttgaccagttatggtttaagattgtgagacaatttatagttacttgattgatcactgataatgggtataactaattttgtgataactatgtcacttgacatattgcgatttattggtgtttatctaatcagggttatgaatacttgactaattagcggttttattc

SEQ ID NO: 141814 - DNA, 222 bp, Glycine max
catgacgcgagggccaagcaacaactccacatcctgggtcacagcagaacgcgcgcagtttgccaacccaccggtcaaacgtcccacaaactggcaaatacgtgatcgacaaacgcgcaaaaggagaacgagaaagcgcacccaagacgaagagtctaacaactcgagctccaaaggcagagaggcaataacaaagaatgccgaccagaacagccccccaca

SEQ ID NO: 141815 - DNA, 442 bp, Glycine max
  unsure (1)..(442): unsure at all n locations
tatgctgcagacatntattatagacctgctcaacagtctatttcttcaactgctgaataattatgacctttgcaagcaacaaatacaaggggaaacaacatgtnttaattctgttatattctaattcaaatttgcttgctgtataattcacaaaaacaaacaccctcccaattcgttactattttatcactatctgttatgaacgttttggtgaccattactcgttgggagacgacctangatcacttcctagatactgcattattaatgtttatttgattctggtacggtctcgatcactcttcctaatggcactcttaagatcattccaatactctactggaggatcctcatgaattcttccttccctaacaagggaagttcaccaatagagggcatacccttgaaagctaatggtagccaatggaactattttctcttc

SEQ ID NO: 141816 - DNA, 424 bp, Glycine max
  unsure (1)..(424): unsure at all n locations
tgtccggtataagcctcatgattgacacgtgctcatgcttatttgtnggncgnggctatatgagacatcttgccaaacaaagtcaaggtagcgataactcgcctatgctttctcttgcatgctatatgtagaaagtcattgatcctgtcaagtttgatgagttggaaaatgaggccgcaattattctgtgccagatggagatgtgttttccccctgctttctttgacatcatgattcacttgattgtgcatctggtcaaagaagtcaaatgttgtggtcctgtttatctaccgcggatgtacccgattgagcgatacatgaagatcttaaaagggtatacaaagaatctatattcgccagaagcatctattgttgagaggtacattgcacacaaagccattgatatttgttcagaatacttaga

SEQ ID NO: 141817 - DNA, 349 bp, Glycine max
ataccagctatattgcacaacgagtaagagtatcaaacctttatgttgatgactcatgccagtcagtcacctcccagaagagacactactgtattaaattaccaagctcatgctaacgaaaagtatcgttctccatttatcttggctttcactgcactggtcaacaggggaaaaagaataacttgactcataaagaggcagattcagtattttgaacacaaagccccaaggcaagcaccatgagttaaagactgcaacaactacagggattgttgattggataacatggacaacttacattaccacagaaaatatgataacatccatatgataacaatagaaagtggat

SEQ ID NO: 141818 - DNA, 414 bp, Glycine max
tgtaatactctatggaagtgaagactaacagtttcaccatagtgtttaaagaaaatggacatcatatggtttatgacattatccctactatgtaaagaaactttgctacttgttcttaattgttgctcgtcgtgtatgtcgaactccacttcaatctcttaatatggtgcatagatttgagaattgttgaggacccatatgaattacatcacaacatcgatcattgtcgcaaatgtatttcattatttcatctctaactctctccccgtgttctcttattctagaaggtatttgtgttcttctttgattgtttttcaatgcacaaattaaccatatcatgaacattacttgcatgatcaccatttgaactagaaaaaatatttgaatttaatatcttcactggccatctatgat

SEQ ID NO: 141819 - DNA, 440 bp, Glycine max
tgaagactctcaggccattctatgtaccgcggagcggacacattttgctgcatgtagagatgatctcgatatccttgactacctacaccctgttgtgacgtgctcatcccatgaatggtaagacatctctcgcctattctaataattacataaacaatctccgcccgtatgaattgtgtcatgctcatacaatcgtacacttgaagaacgatctgtcagtctggccttatcgacgatgagattacataagcaggtgctgatataatccaatcttgcattcttccttctagtacaaatatgagaacaacatatctgacgatgtctcttcgggatgatgggagctctactgtactgactcatctctatggcgaagctaaggctgaggtcgatctcccctcaacaggctcgcacacacaaatacgtgatataaagtcatgatt

SEQ ID NO: 141820 - DNA, 443 bp, Glycine max
  unsure (1)..(443): unsure at all n locations
cttgtcactccacccatatctggccttcacattaaccaaacttaacaccaccgacaacaacgtcaacgaattgttgcaccctagatacaaaggcttctttgaatcactttgtaatgtatcatacataggggcatgtgcttgctgaaaagactcttgtccaaggtcacaaatcatagcctccaagcgatctcctatttctacatcaaatggttcagattggggctcactatgcatgtctatcatttcaccatgccatatccacgtcgtataattcctcttaattccatcacataatagatggtcccgaatgtcgttgactttntgctgtatctcgttcaaacaatttatgcacggacaaaaaaaacttcccatattcatctggtcgacttctttttgaagcaaattgtatgaactattccacgccttcctcatatacagagctc

SEQ ID NO: 141821 - DNA, 404 bp, Glycine max
gatcaaggctctggttatctattaccacgcagtgtaattgattaccagaagacaattttgaaaaatcagcttttagagagatcttgaaatctgaatttaaaaggtgtaatcaattaccattgatgtgtaatcgattaccagcaacggaactcttgaaatacaatttgaaaagtcatgacccttcaaaatataattgtgtaatcgattaccataaacctgtaatcgattaccagcgaagaatttcagaaaaaactttttgaaaagactcatctcttcaaaccattttgaataggcacgataggcctatatatatgtgtgtctaacttcgaaaagcaagagagagatattctaagagatcttaattgtcaaatgctctatcaacaactcttggacaaacactcgta

SEQ ID NO: 141822 - DNA, 348 bp, Glycine max
gcctctcgacatatcatgcgcccgaagcggacatacgtgcgaaaggtgctgaccattgggagatcgcgcgagcatctcgtgtgcaatttcgagcgtgtcgatatgctagtaagcctgaatcggacctgcgtgtgagaaattgtgaccattctatattgcctagagcttccgtggggcatgtcccagcgtctccatattttatgcgccgaagtctaacctcccggtgaccaagtgtgaccatatgagcctctctagagcttgcgctggacaattgcgagcctaccaacctttgatccacccgaatcgcacatacgtgtgagaagttcttaccatttcgattacctagag

SEQ ID NO: 141823 - DNA, 447 bp, Glycine max
  unsure (1)..(447): unsure at all n locations
tctgaagcctacttacatcaaaagccccaacatgggaactctcattctctttcccaataccaccactatgcttagcattaacattggctacaacaaaactataagtttcttaagaatttgatgcccagaaaggttgtttctcatatttgatttatttttattttttttataaataatatccccgagaaataatgatttcaggaatagttttagtgtttctcataacaggaatttaaccctctctagttaaaaaaataaatttaaaaaattaaaaaatgttatcgacatttttttaacattttctttttattattacaagtataatctataacaacatttttttgtttaatacttagtaaaaatgtcactaaaattcttcacgacattttttaaatattactataagtttttaacaacattntttaattttgtaatgttaaataaaaa

SEQ ID NO: 141824 - DNA, 446 bp, Glycine max
  unsure (1)..(446): unsure at all n locations
tatcttgctaagcccagataacttagaaaatgcttggaaatgccatctcgcgctaagcgcagccatcctgagctaagcgctattccttgcagcctgcattgggctaaacaagcttgaactcgctaagctcatataacttagacaattttttttatttttgccttgcgctaagcgcctcacttttgcactaagcgttattcattgcggtttgtataaggctaagcgagacttgctcgctaagcccaatagcgtctagtagtcgagtcgcgctaagcgagcacctctcgctaagcgcatgtttaaaactgtttttccctgagctaagagagtgcctatctcgctaagccaattatgcagaanagattttctgtcataactcgctaagcctatgagttatttctcataaggcacgctaagcgagcatgatctcgttgagcgcccactgt

SEQ ID NO: 141825 - DNA, 432 bp, Glycine max
tagacatatcacacatatcaacttattgtgggtgtataattcaataattgcatgatctactggacaaaattaatgcacaagtacaaagtttaccttgtggattttcagaaatatttcttcaacaaatacttaaaatgatatgcgttagtatcaattgtttgactttatccttgacaattgattgtgtgttatgttgtcttgtttcatgccaggtatgtccttgttttagtgtgattattgaggtatatgatatgatattattactttaaattttgaatcttatcatttatgtgtttatttctttggttctattatattttagattctgttatagacaacttgtttttaaaagctgagatgtgatgtttttttatttaaagaaaattttagtttaatttgaaattaatctttaatattcatcaaatcaagtgt

SEQ ID NO: 141826 - DNA, 440 bp, Glycine max
  unsure (1)..(440): unsure at all n locations
tattccanatgctactgacaaagggcaagcggttntgtgttttaacagtggtccattctgttgccccaggataacaagtgctaatagctacaacagtaggactaacatgcttaacagtaaacagaacacagccaggtgatgttggagcacaagagaaggccacaatctggtatgtcatctcaaatcttggcagtttgatcagctcccgagtaaagggattaaagaagaatactctgtgagttctgggccggtatagcaataaccaaccatcttttgtataacaaactctagatccattcaactctggcaactcgaaggtgtgtgtcttacgctgcacagggtcatagaattcataacagtcaccgaattttggaaaatacataagccatggtgattggtttactacacgtacatcactggcaacagaatgccatctcctg

SEQ ID NO: 141827 - DNA, 428 bp, Glycine max
  unsure (1)..(428): unsure at all n locations
tganatgaggaagtgtggaagggtgagatttcctacttttattcgttgaccacaaagtggtacctggagatatgtcgcgggggtcaggagaccttggggacatcaggtggggtgctattgcccaaaaccaagcttgaccaatcctgacccaacccgggcatagtcagtcagtgagaacctgtgatgtacctaaacaagcgagctcctggcagtcaacagataaaagaacaaagaccacaaagcaagggggtttgtgtggtggctggccagcaatgcatcaggagtgagatttgggatatggcctctggtaatcgattaccaagggtagtaatcgattacaagacttaaaagtgaagacaggaagctaagatggcctctggtaatcgattacaaagggagtgtaatcgattaccaggcttganaacgag

SEQ ID NO: 141828 - DNA, 407 bp, Glycine max
  unsure (1)..(407): unsure at all n locations
tagtgctngattaattgtctctacgcttaatttacgttcatgcttaatgatcgtttatgattaattgatgtatgtgatgcttaatcacataatgaatgccttatgctaaatctcacttagtaatttaatttagggttggattaagtggttgaactgataaaggataaactctcgtaacctatgataagagacatgcttgtgaatcaaggggaagcaacatgtattaattctgatattttctaattcacatctattcactgtttaatttacaaaagcaaacaacccccccccccactccccctattttgttctatttcctactatctgtataaacatttggttatcatgctcctagggaacgacctggatcacttctattactactttttatgttttttgatccggta

SEQ ID NO: 141829 - DNA, 454 bp, Glycine max
  unsure (1)..(454): unsure at all n locations
tgtagaaacacacctcaatagtctttcttcaaatgcatatgaaagtaggctttcataagaagataatgaaacaagacagttctatttattaaattttcaaaatataagaataataatctattactagctagttgtaattggttattttattcttcgtggacctgggtttaagactttaaatgcatttacaattaattggacatgtaatcaattaaaacatgaacttgtatttcaataacaaacaaagctttatttgtaatcgattaaaacacgaccggttctagttttagattcaagccctagcttgtgtaactgatttacctggtaggtaatcaattaccacaactttatgtgtcttaattttcatattacaataagaacaatgtaatcaatgactacttattttcaatcgattaccatttgttaaatntgaaatactcttatattttcaagg

SEQ ID NO: 141830 - DNA, 324 bp, Glycine max
  unsure (1)..(324): unsure at all n locations
tattanggacctatgaatctcagctgctgacagatggaagattgttgataggcatctctttcgcacatgaacgatctcttgaacagcacccattgttgcgactctcttagcaactgcataagacccacccattagatcaacatattgctttgagagccagcaatcttgaaatgagctctaggactgatgccatgtcataacggcaacaacaccattcatagaggatacttcgcttgaatcttctatgctgctcatccttagtctatggtctaccacagattaaactactgccacgtgataggatctgagagatgcacctctatt

SEQ ID NO: 141831 - DNA, 439 bp, Glycine max
tcaccaccaagattgccttggataaaaagcttagagaggatagcttcaatggaggaaaagaatgagagaaagggggggggggggggcacaaaattgatggataaaatgatcgagagaagttgaactttgacgtgtgtctcacaagcttttcattcatcaaaggtatgacaggtgtttcacattcttctatttttagcctaggtcactaactaaatgaaagctaccttctgaaacttccttgagaagcttccttgacaagctagagctttgctacacacacccctctaatagctaagctcacccttatgccgaaatacatgaataatacaaaaaagtccttactacaaagactactcaaaatgccctgaaatacatggctaaaaccctatactactaccatggtcaaaatacaaggcctcaaagatggaacacctattct

SEQ ID NO: 141832 - DNA, 433 bp, Glycine max
  unsure (1)..(433): unsure at all n locations
tggagacaacgcttcaatggtngtaaagaatgagggagagattgagagatgggggagcatgaaatcgaaggatgaataagggagagacgttgaactctgagtagtgtctcacaaaactctcattcatcaaagctacgacaagtgttccacatgcttctatatatagactatgcagcttccttgagaagctatcttgacaaaacttcctcgataagcttctacgagaaaacttccttgagaagctagagcttagccacacacacccgtctcataactaagctcacctgcttgagaagcttcctttagaatattcctattaaactagagcttaactacacatacctctctcatagctgagctcacctcttgaaaagagaagctagagcttacttcacatnccatatatagctttcttacccctgacatataactg

SEQ ID NO: 141833 - DNA, 434 bp, Glycine max
  unsure (1)..(434): unsure at all n locations
tctcagctctgtgagggttcaagctcgtgttcgggctatgcgtgtttgcatggcattggaaactcaagcatcacaacagaagcatcagcaaaaccttgcaaatgaagctcgagttcgagaaacagaagtaaggactaagaagtactgttcttacagtgacattactttttttaaattgtggaatatcttcatctctttcactattatctcctgtaatccattttcgtggaggatgggtattgagaaattgaacatgaatttgagatagatgtttgattgttaagtttatgaaagaggaactaggttttccctccttgctactcatcactngggtctagttagtcttttggatccaatggtttgttggcattttctgggcaatctgtcatattctatacttagtttactttgctgtggctacatgcttggcctgt

SEQ ID NO: 141834 - DNA, 445 bp, Glycine max
  unsure (1)..(445): unsure at all n locations
tattccgaggataatntattatcatgcacaacctgcaagagttggctcacaataggccaatcatatctatggagcattttcttgagaaagtagcctgggctgaagatcaacttcctttggtgagacccaaagaggctgctccgcctgagcccacatctgtgcaggcaatccagagccagctgacccacaatctccaggggtgaattcaccttcttctcctgagcttgaagcagttcccccatctcctcctctgattgtcatctctaacgcatcatcagatgaagtggctgcccctcctgattcaccagttgcaaaaacagttgaccccctgcttccccagttggaggaattgctgatctttctgattcgtcatctggggaagttgttgctctcactgattccccagtttagacactgttgagaatgttgattcttgatgatactt

SEQ ID NO: 141835 - DNA, 413 bp, Glycine max
tatccttatggcctaccttcgaacttcaccctccgtgccaccccggaagagttaagccaagcccctacttttgaggggcaactcccaccttatgaagactatcccgggcaagacgatggggaaggagatacccatcttggccccctgctccacctcaaagatccgtccccgcatgaactaccccaaccgaacatagtccgtcataccccggcctcacccacacccgtaaaagaatctgttccctatgcagacgataagggaaagattgaggcgcttgaagagaggttgagagcaatcgagggcctcggcaattacccattctcggatttagtggatttatgtctcgtgcccaacatcgtcatccctcccaagttcaaagtactggactttgataagtacaaaggtacaacatg

SEQ ID NO: 141836 - DNA, 443 bp, Glycine max
  unsure (1)..(443): unsure at all n locations
taccagaagcgccaatcagtggactntgttgttggcgattttgtctgagctatcatgagtaaagatcgtttacccactcattaatacaactagcttattgctagaaaaatcgagtcatattcatagttctaatgctttcaatgttaatttccttattgtggtaatgcttcttctgatgatgagatggcttttgatctgtggatgaatcttctccaccccgaaaaggatcctgcagtgcaagattgaccaaagttgacccaaaaaagtcattcgtgtccatttttttacaaaggagtacacttttttgaatggaaatgaccttctaaggagactgcattccctactagcaatgtgttgattgatattttagccaaattctattgttaaagggtaaaatttgcaattntatctttattgttttttagtcaaattctatcgtttaa

SEQ ID NO: 141837 - DNA, 438 bp, Glycine max
  unsure (1)..(438): unsure at all n locations
nggactttccttaggtgcttctagattaatgtcctcggtctgaaaagtctcaccagaattagtatgatcccaaggaagaacaccattcagggcacaaatgagacccatcaattgttaaagatctaggggagtagagaaggacatctcaaaatgttatgcttacctacatttctagacaatggtgttaggaggatattcctttcttgttattgacttatgctcaaagacaagattgtttgggttaggagcaacaatctatctaatgaggaactgttgaaaaactggttctattttcccgtagcaccatagagcatctacctcttcatcaaggtgctcttccctaatgtagttgtagggataattgaaaggacctatcccatggaagtcttctttccataggtttagcagactgagcttatctaactccacttcttgcat

SEQ ID NO: 141838 - DNA, 405 bp, Glycine max
  unsure (1)..(405): unsure at all n locations
ntaatgtctntgaatacttatttgctattataatttgttgttatgtgtgtgtagattgtcaattcgtatgttttgaatcttatcatatatctataaacaacgttcgtgcacgaccgacgactacaaacactcacaaaaggacactaacaaaaacaagttataataaaagagtacaaaaatggaaaaactaatatactatttgtaacctaaaatacccattatataagagaatttttatattttgaaaaactactaggtgtactagaattcgcgtgccaagattacaggtagttgggcctatgttgctatcaatattttcttccaatcatacttatatattttttttcttttgtgatgaatagatttttgaatctaaaattactcttcacacatttgttggacata

SEQ ID NO: 141839 - DNA, 340 bp, Glycine max
  unsure (1)..(340): unsure at all n locations
tactcaagctgaatgatatctctgcatgaactacagaggagatgccctgtctgggggtgttataatattggggctctattccaaagagattgccaggcggttctggtggttctctagggagcaaacaatgtgaacaaccaactgtaagaagggggttctttcatccccagataaaattgggcttacctatgggatataacctctcttgtttttgacccacaccctaatgtgatattttgccccncttacttactctcgtgaccctatatatatatatagggggcgctattagtgagaggaagtgttttctctctctactattgtcttaattctatctccc

SEQ ID NO: 141840 - DNA, 412 bp, Glycine max
tctagccagatggacttaccttgacttaatgtctttgatagcccttttgagccttgtttccctttccttcttttgaagctcactacaagccttaagtgaaaaaccatgatatcaccatatccttaaggaattttggagctttggaattgttttgggaataagtgtgggggtttttgtttcatgggataacatgttttgttggccatgtttgagccatacttgatgtacattgcatattggttaaatgttggacatgctgaatatgatgctgtttctcaaaggctacagactaaaaaaaaaattattaataaaaaatcaagaaagaaaaagaaaaagcagtaaagttgagtgaataagatcttaaatgacaaaagaatgatgaggcgctcggctctactctttatgtttaaat

SEQ ID NO: 141841 - DNA, 449 bp, Glycine max
ttttaatattatagaaaaaaattgattgagagggggaaggtggtaaatgatcggaatctgcatatgtatgatctaataatctgctatgttcagttatatatccaaagaaagatctttagtgctagtctgatgtggtgttaatttagtttccattgtgatctttagtactatatgccaagcttaaatttgtactagtgatggtcaaattgaaatgatgcataatgcacgcagaatcttattgtgattcatgtttgcataatctttagttatttgtttctggggcttggaaaatgaaacatgccaggtagtattttcacgattgcattaacctgtgttggtcttagaagacaaatctaggcctgctgtagcttgtgcttctcccccttaaatattattcttgtcaattgagtgcaggaaagttgaatagggaatcatccacgatatccaaa

SEQ ID NO: 141842 - DNA, 454 bp, Glycine max
tagagggtttggaggagaacatcaatcacctagacttgaaagattaagtggacgaactcacctatgaagtggctctggaaagagaagagaaaataaaagagttttggaggattgcaaaaatacaagagtcaatcttatgccaaaggtctagatttaaatggattaaagagggagatgtgaatacaaaattattccatggcattgttaattggaggaaaaggagcaacaacattatgggctcaaaagtggatggggagtcgtgtgaggagcccaaaaaaaaattaaacaattaattaaggagtactttcaagtgaaattcaaggataatgagattatgcaagtaaagcttgatggaggtgaactttaaggaaatcaatgaggaagacaatttcttgcttattgattctttctccgagtttgagattaagaaggtggtttggggttgtaatggaag

SEQ ID NO: 141843 - DNA, 434 bp, Glycine max
  unsure (1)..(434): unsure at all n locations
gcttataaccaataagctcttggttgaacacaagctattatgttttcttcaatcatcaatttcatggactctaaagttgttgatactttatcattcaatcatttgataacaccttctaataacttcctcttaatgagtcataaatttataaaatctaatggaagcatatgggctcaatacaagattaatgacaacacttctataattggataaatcattttatacaaacctgtgttttcaatgaaaaacaatgtaaccgattaccgaanacttgtaatcgattaaaccattcttacaaaaccatatatgaaaatcagaagcaatgtaattaattaacaaatagttataattgattattttgatcaacaaaatactttctattctatgagaagcaatgtaatcgactacacaatgttgtactagttaattcgcta

SEQ ID NO: 141844 - DNA, 389 bp, Glycine max
  unsure (1)..(389): unsure at all n locations
ggtccctctattggtcctcttttcttgtgcaaggggttcttataacaatcacagggccacagcataatgtaatgcatatggatcttgataatgagaagtgggctacggaagtggatcaaatggacttgattgtgctgtctgacgagaattggtttttggttccttcagtttactatgagggcggtaaggacttatgttgcctaaagtgtcatggacttaagtacagtgatgttagttcttatgggtcacataaaaaagctntgaagattgctctntataacattattgagaggaaggtgggcaaaagaaatggagttgatgtaatttgagaacattctcaccttccccattttaaagtgattgggataagggtggtagctgtccaaaac

SEQ ID NO: 141845 - DNA, 410 bp, Glycine max
  unsure (1)..(410): unsure at all n locations
nngacatacatgtaatttagggttgcttttctttattttgacatgacagagtatttctattccatcctctgatttatactttgtgttctttgaataaatttcttttacaaaaaaaagtgaattaaggttatgcctgaagcactgaaataacaaagtgtcttttacatatattcgttcagtctgtgctatgaagctatgctccataataactctgtagtcattaaaaaatctgagatttaaaaggataacttgtaatttctctgggatagaataatttttctctttgatgcttactagggggtttggtcagaacgtaattgcttcatcggtgactaatttttctctttgatgcttcttggaagttggaattttcgctcaactgaggattttattctacaataattgtgttc

SEQ ID NO: 141846 - DNA, 447 bp, Glycine max
  unsure (1)..(447): unsure at all n locations
nttagtttcaatgcaaggaaacatggcttatgtctaataatctataattttgttctgaaagtggaaaggcatgaaaattaggacatgcttgtgagagtttttactcgaatttggctgccccatgaggggtactttgcacctaggtagcatggaaaatacctttcaatggtatgtaaatatgtgtataaatataggtaccatggaaaacacctttcaatggtgtgtatatatgtgaatatatggcataaaattccttgcaaagtgtgaacaagtagcaaaaaaatgtctttcaacatatgcgtatttgaggataggtagcattatgagccttttagaaaatgtacccatgtcaaaaagggcctaggacgcttcctaaatgaatatatgatggcatggaatttcctttcaaatgcaagtatgtgcatgacgtaattagctttccaatgt

SEQ ID NO: 141847 - DNA, 458 bp, Glycine max
  unsure (1)..(458): unsure at all n locations
tatanatactcaacttcttgagataatttgcacgaggccattacatagntggtatgatgtatatcgcaaacgctatgtgtataaaagtattattatgagggatttttaccttatatatatatatatatatatacatatatatatatatatatatataaaatatgtatcttccatgaagataatctatatccaatcatataaaattattgtatataacaaaattttttttcaaataattcaactgcatatttatgactcaaatttaaaatgtagctcatataactcatataagttgagtcatatgcgctccatactataaatttatttatttttcctctaaaataagtctatatattaattacaagatgtgattatatttataaaatgatatagaaataactatatttgtttattctaaaataaattcattcaggggtttttgttaattttttctctat

SEQ ID NO: 141848 - DNA, 445 bp, Glycine max
tagatgcattagcattattataccgacacgtttcgaatgataggtagagaaagtgtgagagactcacagtgagaaggagagtgagggaaaaaagaagccatgatgataatctgaattgttagctgtggacgcttgggatgggattgaaatgataaattatgggtacgctatcggcaatggatcagctcctccaccaccttctctcaatttgtaatacataatcaggaacacgcatttaggattggagtattggacctcttttttcacccgcgccaatgaaaacgtggcttggtgcacttgttttttttttaatggacaaaactagtgttttgttttgtattttctatattccgttctgattttgatttttcttttcccaatcaaatcaaactcatcacttttctctctttttcttcatcttttacttattaggcaatcttatagt

SEQ ID NO: 141849 - DNA, 450 bp, Glycine max
ctattagcgacctatgaatctcagcttcttatccaggctcatcttggtggtgaagctccttcttccatggtttattccctagtggatggcgcctcctctcaaagagcttaggggaagtagtaatgggatcatcggcggctatcgtaaagtggctaagagtccgcacacaaggcttggattggctcccaaagccaagggctatgagagaggaagaggccgaagctccagaaaagagtgaggaggtacaagccttaaaggcagagcttgagaaggcttaagcagtcaaggagaagttcaagtcaacaaccatcaaagtccaaaaggagtatgatgaactgaaggacattaacatggccaccaccgaagccttggaacaggaaaccaagagggcccggaaggaagaacatggccaaaacaagttccgaggagctttatggggcagcaacaatg

SEQ ID NO: 141850 - DNA, 443 bp, Glycine max
  unsure (1)..(443): unsure at all n locations
tagcctataaggttntccagaagtggctaaggaacttattatctctatctgacacaatggtcctaggcaaaccatagagtctcacaacttccctgaaaaagagttttgagatgtgggaagcatcatccaccttgtggtatagtataaagtgtgccatcttgctaaacctacccaccaccacaaagatagagtctacacctcttttggttctaggaagcccaaggacaaagtccatactaatgtctacccaaggtgcacaggggatgggtaagggtgtgtatagtgcataaggcatcaccctagacctggcttgtaaacaagccacacacctagtgcaatgcttatggacatctttcttcatatggggccaataaaactattctttgagtaagacaagggtcttgtctatcccacagtggcccatgagcccaccctcatggctc

SEQ ID NO: 141851 - DNA, 364 bp, Glycine max
  unsure (1)..(364): unsure at all n locations
acggctttcaagagaaatgccgagtccaccgtattgggaactcaaaaaacgagaacggcaaaatttcagtcgagtgtttcgtgagaagttttaccttacgttgtacaaggacaacagtcattttataattgtgtgaaatatgagggactcttaacctctaatttccttttntaattttttgagggtcgaacaaaatgcgggtgcttcttggctctctatggtacctttctcactctaaagaggaataatagtaccataccgtagntcttttttaaggggggaataatgcgattttttgtttattggagggggtatttaaaggggtggacctccaatgttcttttcccccccccccccccccccc

SEQ ID NO: 141852 - DNA, 193 bp, Glycine max
  unsure (1)..(193): unsure at all n locations
caatgcctatanggtggacctcccaaaagagtatggagtcaacaccacttntaacaattctgatttaattcctttngcaggtggagctgatattgaggaggaggaactaacagatatgaggtcaaattctcttcaagaggaaggtgatgatgcaatcctccctatgaagggaccagtcactatagccatgagc

SEQ ID NO: 141853 - DNA, 373 bp, Glycine max
atcttatactagctgcactcgagaagtgtgagtcagccttttgctagcttgaaacccggtagtcaaaaattcaagtcatacctaaagttgaaaatatatactaaggactcatatgcccgtaacctgaatgaaaccaaagcccaagaaaacacacaactgtttgagggcttttggcacaatagtagctcaaactctgaaaggtgaaaggaatcatcatgggtcaaaggcatgaactagaaggacgagctaaggcttgctcttagtctaaaagaaattttgtcccaacagttaaagttaatactgaatggaaatattgggcatcatctatgattgcaaaagaactaatttacgggactacagcaagctgaaatag

SEQ ID NO: 141854 - DNA, 376 bp, Glycine max
atcatcatatagcagcgcacagttatctctatatagaggtacacccatcttaatacctatgaactccatcttaaaagtcatcatgcaagactaaagtcacatattctatcacctagtgtcacacgctaatagattaagaacgagttgtatcatgaagcctatctatacatatatcgtaatatgaatagcatgttaacttgccattactctgtgacactcatattccatatatacgaattgctgattaaaccactcacactccgtccttttaaagcttgcagcgcttggttactctattactataagctgtgaacagcctactttttgcggaatcctatatatattttattaccctttgcataattttatatattgt

SEQ ID NO: 141855 - DNA, 445 bp, Glycine max
  unsure (1)..(445): unsure at all n locations
gctgttgattggtggatgatagagataatgtggtcaacacagtcggtcatctggtccaatactgttgtcttttgtatagatcatacaatcttctgtaacctagtggagcatccagtcacgtagaaatgagtgtctagtctagtgagtcattaacataagttatgttgtaactaattgtttttatttgtctgttgaactattttcattagatagttagtatntttcctttatattactagtttagnaagccaagagagtgcctttgaacctccttcattgtaaaatttgtcttattctgcaatataactttaaacaaatattgtacaaatattctatttgcttccttcttatcattctgaaacttttcttatttggaatataaatttttggaatctttttccccaaaattggttttaaagcttcattcaaatcagttcccattttt

SEQ ID NO: 141856 - DNA, 286 bp, Glycine max
  unsure (1)..(286): unsure at all n locations
tacttacccgttgaatatctattaacgatgaagaacgaatgaagaacgtcggtaaacggttgatagctgtgcgagattcctcacggaanacattacgggaacgtttcggaagcgcctcggcttatatattcttcacggaaacaagttttccaagcgaatttcaaagagagagaagtgcctaaagtggctgggatctctttcttcttattttctcccctatttatagcanaataggaggagatgcnttgccgtcccatgctcgtcccagtgcgaagcatcagcttcg

SEQ ID NO: 141857 - DNA, 271 bp, Glycine max
  unsure (1)..(271): unsure at all n locations
gcttgaagtgaggaagtgtggaagggtgaaactttctactnttattcgttgaccacagagtggtacctgtagatatgtcgcgtgggtcaagagaaccttgggacgttaggtggggtgctatagcccataaccaagcttgaccaatcccgacccaacccgggcatagtcagtcagtgagaacctgtgacgtacctaaacaggcgagctcctggcagtcaaccgacaaaagaacaaagaccacaaagcaaggagggcttgtgtgtatggctgg

SEQ ID NO: 141858 - DNA, 359 bp, Glycine max
gtatttccccaccatagagctgtgaaataagatattagacactggttacgtcatctatcctgcttaccgttgagcgacctagacaaataataaacgggcccagggatccccttgcctcaatcttctccgaggcttagaatcatgagatgggcttacatttacaacgattgatattgaagctgatgtgaagcatcctttaccccaaccagtcgatcttttgtgagacctccttcttctgatcatataaaatatgaatagcctaggctctgagtcataatatccttcggagtgcactttatacaccaggctagatttgtttagcctactatcctactgaacatcctcactagctatcaaga

SEQ ID NO: 141859 - DNA, 448 bp, Glycine max
  unsure (1)..(448): unsure at all n locations
tgcaagctgcatgatttacattgctcccctttcttattcaaatacttaattcttcttgacatcatcaaaatcttcatgatttacacaaatagttttgtctagttatgttgctagaagtataccaattttatataccttcaaatatgcacatgcatatttcctttctaaataaaagtatactaatctggttgaattaatgggtaaaattatnttcttaatctattggaattaatattaaaagttaatctataatattaagtattcaagatgattgagttagaatatataatatatagcataagactccctctaatttttattttaaatatcattcactttcaagatgatcttacttttattcaggactaaacattgttaacccacttataaaattaaattaacatatcatgcctaantatattattattttttaattatttatcatttt

SEQ ID NO: 141860 - DNA, 277 bp, Glycine max
acgttgtagaacgggtgaaacctttgctagattactcacagagaacggtacagttacgttgctgaagcgcctccgcttatattttctttacagaaaccacattgccttgctacattctaaagagagagaagtgcctaaggggctggacccggtacatcttcatttcttaccctattgtaagcaatatagggatgtggttgccgaccagctctgccaagggagcacaacttgtccatgcgacgtaggccgcttactccaaaagcaaacgtcatctgga

SEQ ID NO: 141861 - DNA, 195 bp, Glycine max
  unsure (1)..(195): unsure at all n locations
aatacacacgtgtaaaaaatcatgtactggttgagatctantaggtttctctgatcaactaatataaactacaataacaccaataatagttgtagtgggtatgcatgattataattatgatctatttctagtggtgaatgtaacatgtgtatcatatattggcatgtcattaaagggggtggactatatataatg

SEQ ID NO: 141862 - DNA, 247 bp, Glycine max
  unsure (1)..(247): unsure at all n locations
agcttctntgagataacgtgcgtgagatgcttctttgcgaaaacttccttgagaagctagagcctatctacacacacgcctcccataaccaagctcagctgcttgagaagctagagcttagctacacacacccctcccataagctcacctccttgagaagctctcttaagaagattcctaaagaagctagagcttagctacacgtacctctttaatagctaagctcacctccttgagatgagaagct

SEQ ID NO: 141863 - DNA, 229 bp, Glycine max
  unsure (1)..(229): unsure at all n locations
tggaggaatcattccaaccttagatggctaatccttccaatgcngcacacacacacctatttcgatgctgtgccagaaacatcttctcccatcacacacacaacacacacctcaaatacaacagtgaggctcctccgcaaccttcccttgataaacttgtgaggaaaatggctatgcaaaacatgcagtttcaacaagagaccagaacctttttttctagttaactaat

SEQ ID NO: 141864 - DNA, 178 bp, Glycine max
  unsure (1)..(178): unsure at all n locations
tcctaactgtactggagggcggtgccatggctttatcctctatagtattctggagttataacatgacctccgagatggaagccatttgatcttttaaggccgatagatcggccttcatactgtcctgcacgccctcttcattatccatttttctggatcgagtgttantagtggtgcc

SEQ ID NO: 141865 - DNA, 353 bp, Glycine max
  unsure (1)..(353): unsure at all n locations
gaacaagagagaaataaggaacagattatgtgacatcaaaatgtctcttttttctgtgctgactgctcagactgangactcatgatgaatctgtantncttatattgagtgtgactggaccacatctatcatgcctgggtttggtaaacttaaggaatctccactgtcccaaacccatttactacttttctggatcgttgaaaattgagaaacatagttgaatttctaaaagtaaataatatatatatatatatatatatatatatatatatatatattatatatatatgatcacggaccaacgtttaataaggccggtgtgacaaatatattctacatagttttgttttcta

SEQ ID NO: 141866 - DNA, 352 bp, Glycine max
  unsure (1)..(352): unsure at all n locations
tacatganaaattcaaatttcaagactgaagagtcacaactcttcanaaactatctgtgtaatcgattaccacttttatgtaatcgattaccagtaagggaattttgaaaataactcccaagattacaactgtttaaaaattntgtatgaccatctaggcctataaaggtgacttggatcanaattgtaagagtgttttgaacaaaattgtcttatcctctcataaccaaattgtcttatcactctcaaaatattccttggccaaacacttgcaaattcaataaggaatcttgagggagctttacattggaatatccttctttaaaagagaaacttcttttttttcattaag

SEQ ID NO: 141867 - DNA, 349 bp, Glycine max
  unsure (1)..(349): unsure at all n locations
tccttaccctcggaagcaaaaaagagaaggataatttccaatgaaagcaaaaaagaaaagaaggaatattcctcgatcaaagagtgtgagaaagcaataagaatagaaaggaaattcccaatcaaagaatgggagaaagtaaataagggaatganagatagttcttgaatgataaacagaangaatatgcagagaggtctttggaccagacaatatctgaacaatacagaattgtcaccaaatgaacgaaaaaagaaggaaagggaaccacgacctaaaatagtcttctccctttgattannnaanaaaatccccgcgcacccactttttttttgcccccctttccaaa

SEQ ID NO: 141868 - DNA, 405 bp, Glycine max
  unsure (1)..(405): unsure at all n locations
ttcttacaagaagcaagattatgatatttcattccanatcacagacttaatatacgagggaataggatgaanatgttggctacaagtgtgaaatcttgatgctcttgctagtgtgttagtagttgattttgttggcactgaataaaactcacccaagagtttgaaagatntgagataagaggtctacatntagccaaaattacatggaaatcagaaacaccactgtaagtagaagcattattgtcaacaacctatcttacgaccagtctttaaataatcatgtttctgatagtcccagggtcccattattcattgtaagagcttgactaagagcccaaccttcaacctttactggttttgcatgccttaaagngtattgcttgaaaaattgcatctctcctttac

SEQ ID NO: 141869 - DNA, 354 bp, Glycine max
cgtatgcctgcctactattctcttgtctactaagccacagtatgttctacagaaatcaaacgagaagcaggatgtttgtacaatgactccactctcaatcactttacatctgggtatacggtctcaacacttggcctcttctgtcaagtgttcaacgcgttctgaaagctttattgaactatacggaggaccttgtacataactaacccgcatgaagatgcatttgttcatgaacgtgtcctttaagctcatggtatatataagctatcttcaacacttgtctattgactcttatcggatacatccattcacttacgcttgtgtatgatcatggtcgtcattgcagcgtccatt

SEQ ID NO: 141870 - DNA, 251 bp, Glycine max
cggcagcacaagcgaaaaaagagggcgaaaccgcaaacaccaaacacagggcagcaaaacccgacagcgcgccgaagaacgcgaagatcaattacggagcacggcaaccacagagacgtgacacagagcgcaaacgaacacacacgcgccacaccacagccacaggagcaccggacccgcgccaacaaagcagacacatcgccacagaaaggggaaaaaaagaaggctaaaaaagggttaaatgaacaacc

SEQ ID NO: 141871 - DNA, 433 bp, Glycine max
  unsure (1)..(433): unsure at all n locations
atgcttctttggccgtcgttgtgtttgatatcttctcaaatatatcttcatccacaaattgataaatgagaaagagagctctcttgtctctctntcttgactccttcaacgtctcctttacaccttggcttagcgaggcttcatcttgctcctcgaagccattctctacgatatcnacacatctgagctcctagagcgcttatctgatactcaatatcatagttgttctttgtgagcatcggcatntggaaaggaaaacctccattcgctatcttttgaggatcttgaaagctctgaaaccactttggtggaaataatgctttttatgtttaggaaaagtgtttaggaatattgaaactttgaatgaaacttgattgaagatattttttgaagaagatttttgtttgntggaaaaagtgacaccccccccccc

SEQ ID NO: 141872 - DNA, 304 bp, Glycine max
  unsure (1)..(304): unsure at all n locations
atgagtgtntatgaatctgtcattctagcgtatgactgcttatggatatcatgaacnacaaaccacgttctttgatgtgggatgtagtgacatgatntaatgaattggctagacaacaaaattttattatattcgacacaaggatggtgtgacaggtaccatatatggcactactacaaaaaatatattttacatcgcacgattaacatacagttttgcaaaaaaccgacgttaaaaaaaagcaccctatgtttaaaaaaaaaacatanatttgaatatctgatgtttatattaagggttaaat

SEQ ID NO: 141873 - DNA, 237 bp, Glycine max
agctcgtatcggagctgcgtgagatttgttctgtctatctgaactgtcccagagcttccggtgatcaatgaacaccatctcgactaatcatgctctctgaatagtgcatctatgtgaataggtgtgactatatgtattatctgtaagtgtactacgtaaagttctagcgtttgagtttatggtaagcaagaaacctacctacgtgtgatatgtaggaccgatagatgtatagaagag

SEQ ID NO: 141874 - DNA, 200 bp, Glycine max
tcgccatattatgcgcccgaatcggacatgcgtgtgataagctatggccatttgaatatctcgagagcttccgacgctgaatttcgagcgtatcgctatattatacgcccggatcggacctccgcgtgaaaaggtatgaccatatgaatttcgcgagagctttcgttgtgcaagttcgagcgtctctatatatgatgcgc

SEQ ID NO: 141875 - DNA, 243 bp, Glycine max
  unsure (1)..(243): unsure at all n locations
ggagataattggaaaaaagggggaaaatataaaaanagagtatgtgagtcggctaatgacgagagagtggcaaaaagaggttattagtggaggagaaagaagtaaagaggatgaaataaaaaatattaaggagggagggaaaatggagaaggaggaatgagataaaaaagtaaggaggaggagaaaaggggtagaggaagaagggaaaaaaaggaaaaggggaaaggggggaaaaaggggaaa

SEQ ID NO: 141876 - DNA, 325 bp, Glycine max
aagagaatagggagagaagttgaactctgaagtgtgtctcacaagtttcttattcatcaaagttatgacaagtgttacacatgtttctatctatagcctagcacatgggaagcttccttgagaagcaaggaaggtagcttccttgtgaagctagaggaagatagcttccttgagaagctagaggggggctactcacactcctgcaatagctaagttcacctctatgccaaaatacatgaaaatacaatgagaagattccttgagaagcaacgcccgccgcccccccccccagcccgaggggggctatttaaatttttaattgtta

SEQ ID NO: 141877 - DNA, 394 bp, Glycine max
  unsure (1)..(394): unsure at all n locations
taaagttatatgaagtattatttaatgttgttntgaaatatctatactactgcacctacattnntactaaccatattttctttataatgcaagtatactaaactacantttatgaaaatgtgtgaaagtctatgaattcaagtggtggtccctgatatctatataatgacaaatgtatgacattgatttaaccgctcttgtatagtcagattacatcaagaactttgtattgataaggctaggtgaaatgttcttcctaaagaatttaagggatccaagtaatgttgtaaatttatccacagttcatactgggttgaccaccgccaaatggtgatttttacgatttttctaagatgacatgcttctttacctgtaccgtgaatctacaaagtca

SEQ ID NO: 141878 - DNA, 276 bp, Glycine max
  unsure (1)..(276): unsure at all n locations
tacctaacgctgatggccaataattatgctagcgcaccaaaggttacattatctgatactacttatcatcaatttgctaaactcagatactaactgatgacattcataacatctaagctggaacatgggnttcatcttctgagacaagtatgacatagatagaaccggaagtgtctagactaactgcataattagatcttcttaggactggcgttataactgtaatgtcaaaagatacagatcattcttctaccatgcatgataatatagaactgt

SEQ ID NO: 141879 - DNA, 324 bp, Glycine max
  unsure (1)..(324): unsure at all n locations
atcctaccagataagactggaatntctcaagtgcaaacacaatatccagtaattctttttcagttgtggcatatgtaatctaagcatcattcagaactctgctagcataatagatggtatggaacattctgcctgtccgctgctcaagtattgcacctactgcataatagcttgcaaacacatatattaaactcttgcccccagtttggtgacttaatcactagagcaaaaaccaatttaactttgagagtgtgtaaaggcttctataacacttttcattaaatacaaacacatattttcttgtcaacaaattgcctagggttt

SEQ ID NO: 141880 - DNA, 168 bp, Glycine max
  unsure (1)..(168): unsure at all n locations
aatgatgagaaaatcaatagtgaatagtacgtacacatatatgataagttatgaaaggattgaaacgtatattattaatntaatcctcctcaaggaccgagattatgtatattcctatgcacatttaacagaatatttgcaagtagtgagtagacattgagactctat

SEQ ID NO: 141881 - DNA, 189 bp, Glycine max
  unsure (1)..(189): unsure at all n locations
attggatttaatgatgaaatttgtggattnttaggtgaaaaagaggaaagtntgaattgaaaagtagatggagtagtagattagtaggattaacgtaggagttagggtaggaaggaattggaatatatgataaagttgacgctaatgatgagataagtgtggtaagaggagtagggtgtttttaggtag

SEQ ID NO: 141882 - DNA, 385 bp, Glycine max
  unsure (1)..(385): unsure at all n locations
ccgccttctggaggatatttctggaaggtccaagtgggcctggttgcttattgcacccncatttttactaaataaacccncttgctcttttatggtgattctttttccgtaacgttacgaaactttacgaatntcgtaacgatgcttggtttctttccgttatgttacgaaaacttacggattacgtaatcatccactttttgccttccggaatgttacggaactttacggattgcgcactaacacttccttttaattttcggcatgtcgcggaacttcacggattgtgctataatgctttcttttgactttggcacgtcacggaacttcactaattgctaacatgggccagtcctgaatgtaaacaggtgatccacactgtgtc

SEQ ID NO: 141883 - DNA, 356 bp, Glycine max
ttttgattctcccaaggcaccattcagcaggtttatcaagagccatcgctattttaccttaccccccatctactacccatacaacgcttatcatgtggtgaggaaacatgtgtctaaggggaataatcctcaagaactttgattaccacactcgttaccttaccccattgatgataaggcgaaacgtaatgatgaacatgaggttaatacactgctgaaagtcagtgaacgatagcgttggcacgcgagcacttagcctacattgaacaatgatgctggatcagaactgaaggctctgatattgatgtaactatactctgacgaacataacggacgcttactatgggccttactac

SEQ ID NO: 141884 - DNA, 386 bp, Glycine max
  unsure (1)..(386): unsure at all n locations
gatgaagaacaaacaaagaacgacgaacaacattcacggaatttggcacggaaacgttacggaagtgcctcggccttgattttctccttctttcttcttctcctcanctaatttaagtgaaatttgaataccaagggtgttgatcccttcccctcagtctcccatgtgcaattatagaanaaataggggaggaggttgctgcccatctcgtccaggcaagctggaggcttcctccagaagcaacctactcgcccaagcgagctggttgcttcatgttgaagcttcctaatgggcctaaatgggcccagtgcttataaaacccctaaattgatttttacccaataagacctatgtactaccactcttaaataaaatttcatgtgggt

SEQ ID NO: 141885 - DNA, 222 bp, Glycine max
ggcctggagcctacccatcaatagccctaactttgtagactggtgactactaagatcttgaccttgacttgatacaaccttctctgaattggaagcggctgactccataccatgccttactcaagatgaaacaaaacccactgtgaatcacaactcttacatatatcataggtggaaccgatgaatgcgataccaaacgcatatgacacaaatgcattttat

SEQ ID NO: 141886 - DNA, 481 bp, Glycine max
  unsure (1)..(481): unsure at all n locations
cttgtgaatggctagacatgatacattgtttttgttttgtttggctcaaagataaaaggggatgccccacattatttccatgacacacatagcaaaatgatgatttggaagatttatgcaaaactggtcatgcatgcacctatgtggacgctcaagtgtcaaaattttatggtcatgtgatgctagggctcaggattcatttcctctatattagtcaacccaacgtntccaaaatatgtgctcttatcaatttggagcattcttgctgagtcccattttggtgcggtctggggaaaaattctttaacatgcatatcaccccctttaagggtggtttaacacaattttttctaaaaaacctaagttattgaataaaagtgaaatttttttccaaataaaaagttggaaagttatttttttttcaaaagaatgtaggttttgagggtgaaaattatttttttttttattggttttttatcata

SEQ ID NO: 141887 - DNA, 333 bp, Glycine max
ccccactcggcagcgacttttttgccagcagcaggtgcttctcaaacacacctttgagaactcggaggcaatggccggtgcattgcctccatttacaagacaccccgccttttttggatcttttcgaagaatgaactacaatttgtacgaacttgtttcttctgaatgtacggaaccttgtggattacataatcaacccctcttgaattacggaatggtaccgaacctccctaattgtgcaacgacggcctccattaaaaattcctgggtggtcaaaaaaccctttcggaatgagcaaaaaatactttggtttcgggtgtttgattttaaatt

SEQ ID NO: 141888 - DNA, 205 bp, Glycine max
gcaaattatgtgctctaagtgagaaaaaatgcttatgtctacacttgcgaagatgttcttagctcggctatgaatacggttcacactgacaaacatttggtatgtgcattggtttataaacttatcgagctacctatgatattggcggcgacgacaacattcgttgaaagatctttctgagccatgaagattatctagtcttact

SEQ ID NO: 141889 - DNA, 299 bp, Glycine max
  unsure (1)..(299): unsure at all n locations
ctgcaagcttctggtgggacatctagacttgcttttcttctgacattcaccacagattctgccttcttctattttcagattgggaatgcctctaacagcacctttgtcaatgattntcttcatgcctcttaagtgcagatgaccaaatctttgatgccatatattgacttcatcttctttggagactagacatgtggaggagtaactggtttcttgagggtgccatatgtaacgagttgtccctttgatcttgctgcaccttcaattagggacattcacatctttctcaaatttggtca

SEQ ID NO: 141890 - DNA, 256 bp, Glycine max
  unsure (1)..(256): unsure at all n locations
aacccaaatgagatcgagttgaaattggcttaacttaaccttggtcaacttaaccgatcaaatcaacctaagatgcaagggtttgtccacctggacctcatggtttttcaatgctgactcaatgcttttatgatttgacattgttacctgcataaactgagtcaaagtctcctccaacttagtagtcctctgagagatgttangcccttgttggattggcctgctcgaaagtccagcctggtctttgttgacttga

SEQ ID NO: 141891 - DNA, 209 bp, Glycine max
  unsure (1)..(209): unsure at all n locations
caatcagacatccgagtaanaagttatggtcctntgtattggatcagagcttcaacattcaatntcgagcgtctcgatatgttacaggactcaatcagacatcagagaataaagttattcgtcgttgagttggctcagagattcaacattcaatntcgagcgtctcgatatgttacnggactcaatcagacatnctcgagaaaaagtta

SEQ ID NO: 141892 - DNA, 229 bp, Glycine max
  unsure (1)..(229): unsure at all n locations
atgtatctacaatgccaacagcaatgctggaacatctaaacacatgaacctncttctncgtacaagcaccaccaacatcataacccatgttagctttgtcctctctcgcacaaccaccacctacaacaacacccaggtcaactccgttctgctgctgacaaccactaccaacagcagtacccacgttaactacgccttccttaggtgtatcccagcatctccaaactca

SEQ ID NO: 141893 - DNA, 245 bp, Glycine max
  unsure (1)..(245): unsure at all n locations
tgaaccaccttcacctccaccacaacaacaagatcaagaactatcatcaccagagtctactccaagacgagtaagatctttggtggacatatatgaaacctgtaacttggccatacttgaacctagaagctntgaagaagcgtcaaagcaggaagtatgggtcaaggcaatggaagaagagatacagatgatcgagaaaagcaacacatgggagttagtaaatcatccccatggaaaagatatca

SEQ ID NO: 141894 - DNA, 182 bp, Glycine max
ttccttttttcttaactcctaacatataatgtctgagaatgtaatattatattttaaaataaggatttattattggtcccatgataattgctcttggcctctaccaagggaattgtgattcttgtacaaactagttccctcccttccttctcctccttatacacaacaataatgtgattttg

SEQ ID NO: 141895 - DNA, 378 bp, Glycine max
  unsure (1)..(378): unsure at all n locations
attccatggtatggatagcctaagatcatatgttgcaacctttcccaaactttatgtagactctgatacttccttgtcaccaagataacaatatctgtgatgtatcgatgcgatttgataggagagaaatgctagatccagtggcctcacaataattaagaagggggggttgaattaattattcctaaacctttactaattaaaaaattactcttctaaggcttttacttatgttgtttgagagaataacgagtagaagagaaacttaaccaanagtaaaagcggatattaaatacacagcgaanagtagaagagtagggaagaaagagacaactcacaagaagttttatactgggtcagcaacaacccatgcctaca

SEQ ID NO: 141896 - DNA, 342 bp, Glycine max
  unsure (1)..(342): unsure at all n locations
gatggaccaaaatactgtgcaacgaacgacatgatggtagtttactctggcatancgctatgatctacttcacggcgctatggcgacctatgatcttatatgaaaagagcacttttgctttcagaactgatagcataactcgtccgcgaatccttcatgtgtacgaacacaatgatatacccgagttccctaatattgtataacgcgaccctttgatctgtcataacttctgatttaacattaaccgagcgatttgtttcatggatcagtttctcttacgtgacagcttcttctcttaatcatcaatacatatgttcatcacgatcaaatgctatgcctacg

SEQ ID NO: 141897 - DNA, 355 bp, Glycine max
  unsure (1)..(355): unsure at all n locations
ggtcttaactatcataccctaatttcgtccggcgaccatttgtttggtaagatgcaacacttcgtttgagcgctctgaggtacttaacacccatcgataggcaattcgtgaagtatcgtgacatgccggaagtcgaaagcatgcattgntgcacaatccgnaatgttccgtatcattccaatagtcaaagaggggatggttgctttatccatgaagtttctcgacattacgaaaagaaaacaagtatcgttatcgaatccgtaaagttttccgtaatggttacggaaaaaagaaatcattaaaaaaagcaaagggggagtgtatttaataaacaggggggtgcaatagcaccatc

SEQ ID NO: 141898 - DNA, 373 bp, Glycine max
  unsure (1)..(373): unsure at all n locations
ttctgcctgaaaatgggatagagtcgttacatgccctatgttatgtgctgatattatttntctcattgaataaccttaaattcactggtgatttgaaagtggaagacattttgaagacagaaaaaacttggaatgtagtaccaggtgtgttgtgtctacaacactctgaagcgcgccgtctcgacaccaaaggaaacatttatgcttttgcagtacttctattggagataatcagtgggagacctccatactgcaaggacaaaagggtacttggtgggattgggtaaaaattccaaaattttgaattttttaaggctcttantaaagagatatggataaattttcttgtgaaaatactattatagacttttat

SEQ ID NO: 141899 - DNA, 264 bp, Glycine max
acatggctgaaaataggagaggttacatgatcttcatgcacactcgaacatgtgctgattatatgataatttgatgggaacgatgcgcacactagacttggttgtggaacacacatgagtgactattcttcgaaagataataattacactatggagctgcttgtagccacagtgatggaagtgcattcccagacacatttgtatactactttaacgggatcataggaatgcttagtgcaattgactcacttatatatgaaatca

SEQ ID NO: 141900 - DNA, 277 bp, Glycine max
  unsure (1)..(277): unsure at all n locations
gctgaccaatccacccacctgtgtcttattattcagtgagaacctgtgatgtacctaaacaggcgagctcttggcagtcaaccgattaaagaataaagaccacaaagcanggaggcttgtgtggtggctggccagctatgaatcttgagtatatattggaatagggcctctggaatcgataccaagggtgggtaatcgattacaaggcttataaatgaagacaagaagttaagatggcctctggtaatcgattaccaatgctgtgtaatcgattacc

SEQ ID NO: 141901 - DNA, 64 bp, Glycine max
ttctctcagtaaacctgcgatctttcatggaaagggatccctttgctgtgaaaccctaaagcaa

SEQ ID NO: 141902 - DNA, 136 bp, Glycine max
gtttccccccccgccccccccccccccccatcaccttggttttttttgccccttaatatattgattgggtaggaaggtggaaaatggaaaggaaaagggtggaaagaagggaagagccaaccccccccccaccccc

SEQ ID NO: 141903 - DNA, 77 bp, Glycine max
gccaggtagagttattttttggtttagaaagaagaaaagggcccgccccagcaaaaaaaaatgtagaagagaagaaa

SEQ ID NO: 141904 - DNA, 315 bp, Glycine max
  unsure (1)..(315): unsure at all n locations
tattcaccacccgtagtagcgcgagacagacctcatattttgcagcagcttctgcaattctgttttgtacccaanaaagttaaattcatgttcacacttttggtacatcaatgatcaatcaatcaaacattgntntcctcttgtttttcttcttctttaactaagaaaaactaccttgttcatcgaaaataatagttgcgttgtgtcatccagaagggaaaacacgaagttccaaaatactctcgatttatttactactaatattttatttcatcacataacgtagatggttatttatttacttaaggttatata

SEQ ID NO: 141905 - DNA, 368 bp, Glycine max
  unsure (1)..(368): unsure at all n locations
tggaccttccaccaaaactttgagtccgaaacacatcttatatttctgaactaattcctttttcaggtggagccccaactgaggtggaagaacctaccaaattgaggtcaatcctgttcagggggacgggatgatgcaacctctcctatgaatggacctttcactggtgccatgaccaacatgtttcatcaggaatgagctatagcttgtgtcatccgcaatggaaaacaagagatcccaaagtactctcgatttattcactactaatattttattcatcacataacgtanatgattatttattgacttaagcttatgatccatgaatatgtgtcatatatagaatatatgataccctactttttaat

SEQ ID NO: 141906 - DNA, 288 bp, Glycine max
tttaatactggtgaagtgactactataattggcgacattgctttcgagattgaggagccacttgagctgacacgttctccacctttgggtgtatactttgaaagagaccaacccccacatagcacatgtattgcaattgcatcctatcagaagcccttataccgactctgcctatctaaggctaccatattgactctctgtagtgactcaggaccgttcaagttatcgaccacagacacactaccggataagacttgatggaaagaatgtatacaatccctatatttg

SEQ ID NO: 141907 - DNA, 277 bp, Glycine max
  unsure (1)..(277): unsure at all n locations
tgcattcgtcattgattagcccggctagttgttgcttatgccgtgactgctcttaccacctattttacctgcttcagatgcgcgctgcagggcattcttgaaatacccctgtggctgccaccttnttacctgctttgatgctcttcgcggcttctgcaaattgccggaaccgcctcgatggtttgccattactgacctccgtttgggtatagacatcatattgcatataattaacgcggcgtatggcggctgccatatttttcgctacntgggacta

SEQ ID NO: 141908 - DNA, 303 bp, Glycine max
cctatgcgataggatgtctatgagcaaacggaggtaatgcattgccaaccattaggccgttcggcattttcagaaaactgaaatacatctaatcagctgcttaggatgaccgctgagcgtgggtaattacaataatgacccgcagctcgcatcttaagcaagctacaaatgagtgcctagcagtcactgtctaagcgactactagacgcgcttataaatgacgaatgcattgacctccgtatctcgatagacagccatcaccgacggatacccggcggctgatactgattacaaattgtatct

SEQ ID NO: 141909 - DNA, 357 bp, Glycine max
caaaaaccaaaattaagcacagtgaagtctcaccctaaaggaagacagagaagagaaaagaatctggaactacttggaggggatggtgagctcaagtgaaatgcccagaaagcacaagcaaaggcatgtttggaaagagaagagagacagttccgaatctccagactaagagaactgctgtacaccactaagcaattttagacactttcgcttaacggaaccgctggcgctaagccaaacaagagagaacgcttgggtttcttaacaaggaatggtaatggacccgtgcgcttagccgacgttcaaatcaaatagttttgttggaaaaaattgggagcggaggccgccccccccccc

SEQ ID NO: 141910 - DNA, 152 bp, Glycine max
ttcaaagataaaaaggatgccccacattatctccatgacacatatgctaccctgatgatttggcaactttatgcgaaactggacctgcgtgctcccatgcatgcacgtaagtggcagatttttatgggcatgtgacgctagggctcacgaat

SEQ ID NO: 141911 - DNA, 157 bp, Glycine max
  unsure (1)..(157): unsure at all n locations
acgcatcaacaagaatcaagccgaggctattgtgcaagcactcaatggggcataacacaccatatgattatgatgatggatggctcatattctcacaaaggtaaactcatcactatcaaatngagcgttcaaaactatcatgacatgtagagaagaa

SEQ ID NO: 141912 - DNA, 169 bp, Glycine max
cattatgcttgtgaatacagacgcctcgctaaccttcaagatggaggcactgacctggctctcgatgaggcattctacgctaatttattctccatatgggacgctgctactctaccagccgtaatctggtgactcccgatctgaacttatgcaaatatgctgacatgaa

SEQ ID NO: 141913 - DNA, 188 bp, Glycine max
  unsure (1)..(188): unsure at all n locations
atgcctaaatagtttgttgataacctaatccctaanttggtgcagcccaatgtatgatgaatnttagcaaggttatggaattggactgcctgtaatatagtcttagaatcttagaatgtgagtttatgcctaactcaaccncanaagctagctcaaggtgtgagaagttccnctcacttatatactct

SEQ ID NO: 141914 - DNA, 203 bp, Glycine max
aaatctcaatcacttgggctccaatgaatccccctatccaagtaagagaccataaggtcttgccacctctgtctcacctgagatatagacttgaatcatatacttctctttcgcaaacaaaccaataaacaataaaccctaagtgccacacatcccacgcaattgggctgcttctaatggatcatcatataggtgccacaatg

SEQ ID NO: 141915 - DNA, 394 bp, Glycine max
  unsure (1)..(394): unsure at all n locations
caacatagaacacanaagcatgattgattagagaaacatccttgtatgcatcagctggtctgttagaaagacccaacaattctacctactactatcaantcacttacttcattttactattttatccagacctatttaattctattttaaaccatcaatatcaatgttctttcaacaatgccttattttttaatttaacccggtcttagactagtttccatgagttcgatacttggattcataccgttttaatttttaaaaatacttgacgatcccgtgtcgcttttctagcaaaaccggatttcccttgaatatattcgtaccaagaaaaagtggaacaaaaataatcgcagtaaatcaacatatgcccgctgaaatcaagacaatgatgatc

SEQ ID NO: 141916 - DNA, 233 bp, Glycine max
  unsure (1)..(233): unsure at all n locations
catcgaccagtcaaggaatagctaagcctatcagcgactcatgagcaaaggctataggacgagtatgctaaggtatcantcctgcaagcggaaatggaagcaagggatatggtgatctattctttgcacatagaagcaatgatgtggatggacaggtttgcctttagtntgaatgggagtcaagagctntcccgactgttagccaagagccaaggcaatggcgaatagtgtac

SEQ ID NO: 141917 - DNA, 230 bp, Glycine max
agcttatacaacataagtgctgaagaggtttgttactttaaaatcacattggtagtgcattccaatgtttgaatgtctctagatgtaaactaagatccgttccaatcttgagaaaatgatgaagagatacttggtcctaaagtatcacatctcactattattgaaacactaatgtatgttattatgcatagacaatttgtccctatgatacactagtagaatatagttat

SEQ ID NO: 141918 - DNA, 147 bp, Glycine max
  unsure (1)..(147): unsure at all n locations
cgattcaagcgcatcacatatggagacgttcgaaattgaaccacgaaagctctngagaaattgaaattgtcataactcttcactcggatgtccgattcagacacatctgatatcgagacgctcgatatggaacaacagatgatctcg

SEQ ID NO: 141919 - DNA, 442 bp, Glycine max
agcgtgcattctattatgacccactacgctaaatttatttcacttaatgccatttacctaacgaattaaaataacttaatggctgtgtgtaactgaaattgtggcaaccaaaagtcacccccaacagcctacaagtcatccaccatttggtctcccaaaaggctgatgcctatgttgccaattgggcccttattaccacttgaactaaacctaactaaagcccttttagttgattaacccaaaacatatttttggtcagccaactttacaaggattgggccattatttagacaaactaaacactctaaaattgaaacaaagtggtgtcatttagtcctcctccatttgggccatgatacaactcacaaccttggacctttctacttgaaacttgggcttgatttaaatagtatggacaacacttgttgaatagcattcttgc

SEQ ID NO: 141920 - DNA, 185 bp, Glycine max
cagcgtgactatcctcctacctctccaagaaaactattgattgtcacttttacacaccatgcaacacatattagacaaaatttgaaacattggccaagctgtaattctcaactacactatcaaaataacaaatggcgcgcaaaataatacaaatgataccactcctcaagtttctttatggttac

SEQ ID NO: 141921 - DNA, 409 bp, Glycine max
  unsure (1)..(409): unsure at all n locations
ctaaacttcnttatcatcatagcataccacgaaagctgacacttaatactcagatccctgttgtgagaccaagggtgaatcctgctggtgtgctattacccggcaacaatccatttccctatgctcccagcccctgactagacatacaaaaataggctatgataccaataacctggcgaacttctgccttgcaacatgcattgagcactagaaacacaatccattggagcttgaagggatgacatccagcggtccatataaagtcccaactagagtgtggagcctggcatacaaaaaaacccgtgcgcgaatgagattcagagtctagaatatctgctccttaagctaaaaggggggttcctactcctcttcttagggtgtacaatcactctacaactgactaatatgt

SEQ ID NO: 141922 - DNA, 353 bp, Glycine max
  unsure (1)..(353): unsure at all n locations
tatctgcaagttgatcatttgagctgacaaattcagtactgactccttggatatctgtttctccctaacaaagtggcaatcaatctctatatgtgtgtgtctntcatgaaacactgcattggaagcaatgtgaagagctgccgggttgccactattacaattgttgactgaatgtcgtgtgtcagaatagaccacatcttatcttatcacataatgaaaaggaatcagttattgattacaaaatcaatcaattactgattaaaaaaaattacaataattccttaataatacaatatctgattaatctcacactcctcttagctggtcattattgtatttatctgactatacaa

SEQ ID NO: 141923 - DNA, 116 bp, Glycine max
gccccactccatcattacgattagttcctgacatctcaaacttacaattcttacgtatcaagacaattattgatgctgtctgactctctcacccgatcaagagcatacacacatat

SEQ ID NO: 141924 - DNA, 227 bp, Glycine max
  unsure (1)..(227): unsure at all n locations
cttctatggaggctggatcttttgatcttaatgaggtccattaatggtgagtttccaccatggagatgctgcagaagacaaaggaatataggtgagaggatgcgccatncattatggaataagccatggaagacggagcttcaccaccaagatgagccttggataagaatgctggagaggatgcttcaatggatgaaaagataaagggagagatagagagagggggg

SEQ ID NO: 141925 - DNA, 391 bp, Glycine max
  unsure (1)..(391): unsure at all n locations
gcttgttacaaaatgaccattctaaaatctttatttgtattcagaacagtctacctgtaacaaatacaataacattctcgaatgttgctgtttctattccanatagaccattccanaattctaattggtgttcgatatagcctaattggaatataaataacagtttggaatagttattctggaatgttgtngtntctattccagaatccttatngtgatctntcggaaccaattaggattccaaaatggtcatttcgtacacaattcaaaatgtnttgccatcgtttctcttctagaatgcgtaatccacaaattaattttcacaatatgagaagggtttggagtgtcctccacagatttttggacaatttttttcaaaatgtcagctatg

SEQ ID NO: 141926 - DNA, 365 bp, Glycine max
  unsure (1)..(365): unsure at all n locations
tcaccgctttaggagcgcggtacaccagcagcgcttctaagccatcaaggtgtggtcgtttctccgggagcgacgcgttcagctcanggacgacgagtatactgatttccaggaggaaatagggcgccggcggtgggcaccactggttactcccatggccaagttngatccagaaatagtccttgagttttatgccaatgcttggccaacagaggagggcgtgcgtgacatgagatcctgggttaggggtcagtggatcccgttcgatgccgaccctatcaaccaactcctgtgaatccatggttttgaagagggcaggatgcatatggcaagagaaccgctatggtcatgagagcatgccactg

SEQ ID NO: 141927 - DNA, 378 bp, Glycine max
  unsure (1)..(378): unsure at all n locations
caaaatctgtcttgctacgcttatactgaccgctcctttcacaagcaattaacacagaagatgttcttcctctactaccagtatgtgtgctatacctcataatgattgcaacatattctgtttcatgggcaaccgatcgagctcacaacaaaacatcatnttgggtaccaaagacctacaacacatgccctgacatattaatttgttatacaaatacatacatttcaaccacaatgatctcatacctatattgaacattcattaccctgaggaagtgatttaaaaggctctcccatacaattcaaaatatgttggcgtgggtttaatttcacaaccatatattcttgtttcatttttattaattccatattatctttt

SEQ ID NO: 141928 - DNA, 401 bp, Glycine max
  unsure (1)..(401): unsure at all n locations
ctcaagaaagcttnctaaggaagctacctattctattaatagaagcatgtgtacacttgttgtgactttgatgaatgagatgcttatgagacatactttaaagttccacttatcttcctcttttattccttcaatatacgtgctcacccccctcttctctattcatctcctctctatttcttattccttccagttgaaagcatttctttccaatgccttgcttatctcagacgacatcaatccttgngatgtgttgaaaagcttcccntttctttccattgtgcnttatttctcctaagtggattggagcctttctttaacacttttctcctttgtttgccggtgctactcgtggggccctcaggattaaagaattattgagccaacaacccccccccccc

SEQ ID NO: 141929 - DNA, 254 bp, Glycine max
atttaccctttcctttgtgtcacccgaagtgccgtagtcaacgttattaatatctgtcttaatgcaacctcccacctatatcccttttataatccatcaataataagacccccccaatctgtttgactcgcattaacttaagggacaacgaaacacatctactatcttattatactataactattaaaggactgaagatgcattattgatcgtctttgatctattagcatgtggatatcattaactcactctta

SEQ ID NO: 141930 - DNA, 201 bp, Glycine max
  unsure (1)..(201): unsure at all n locations
agacgacaatatacctgctaatatgtcagagaaaaattatcagaagccacatactaatgctcctttatgtagtctcttacagataccgtctatatcttgcactgaccagaaaggttcatctntaacatctagaagaaatagaatgctccttagagatggtgcttgtggagatcctctgttgctcaacacacaaaaatttaa

SEQ ID NO: 141931 - DNA, 251 bp, Glycine max
  unsure (1)..(251): unsure at all n locations
ttgtgagctgttcgataacctngaattcgctctactaaattatatggaggaactcanctggcttctctagcgagcacctacttttaccatcctgtttctccggaagacctttcgccggaatatctgtatntgaagcgtggggtgcttcaccatcttgttcctacaccactgttcctatccctngacgttctctggttggactggtaggttctgaggtgcaaacacacgaccgctacgggtcacaccactca

SEQ ID NO: 141932 - DNA, 198 bp, Glycine max
tagtattgtagatgggtgcttggaaataatgtcaagtcgtgttgcaatgttgaacactttgagtgtatatgtcagattgcttacatgttatgttcatatttctcgttgtggtggttcgccctagagagatgcctaataccatttgttaatttcttttctggcagggtgggctgtagatatcaattagatcatttcttc

SEQ ID NO: 141933 - DNA, 220 bp, Glycine max
tgatccataggcgatgagtacctttgcaacaacatggtccatacatctcaccgacacatgtagagccttgttgtgtcctctcccctcaacgggaatctcttctttcgcaaacgcgatgtaattattgggtgtatatgataatgatgccttcaaacccttcactgagatatcatgggctacatgggcaatcgtgaggacctttatcaaacagcgcacgatg

SEQ ID NO: 141934 - DNA, 403 bp, Glycine max
  unsure (1)..(403): unsure at all n locations
cttcttccatggcttattccctagtggatggcgcctcctctcacctcttctccttagtcttccactgcacctctatggtggagaatcaccattgaaggacctcattgaagctcaaagatccaacctctatagaagccccccaagtaagcttccatcatgtcttcccaacgttcctcaaaggggtggcattgacatggttcaatggactccctccaagggtcattgacagcttcaacactcttgtcaagcgcttgaatgtgtaacgtgcaactagccggtcacattgtatgaacatctgccacaaaggccagtctgtgacagaaaaaatgaatcttttnaaaattatggatagtggacctacttcaatcccattaacctaagaaatacctttgctctgcttaag

SEQ ID NO: 141935 - DNA, 325 bp, Glycine max
taataaataaagtgaacttattaattagccgtgaatagtttaatcttgcgaaaaaatgtaatatattctccaaaaaacactattaaaacggttaaggagacataatataaccggaaagtctatctgatagaaaggggaataaatcattcgttaacaattagccgtctcttgtccagctagcccatgagagcgattaaaaagaataaatcgggggccaaccgtaagccacgattctactttgcccacccagcccaaattaggtgctaaaacagtttacacattctacttgtgaataaaaatactgtgaggagaatctccaccaaac

SEQ ID NO: 141936 - DNA, 209 bp, Glycine max
ggtgctttgcccaaaccaagcttgaccaatcccgacccaacccggacatagtcagtcagtgagaacctgtgatgtacctaaacatgcgagctcctgtcagtcaacagataaaaggaacaaagaccacatagcaaggaggcttgtgtggtggctggccaactgtgaactttgattgatatatgggatatgggctctggtaatcgattacc

SEQ ID NO: 141937 - DNA, 128 bp, Glycine max
catcacgaccacatagcttgtacaccacaaactatggcgtgtgttacgaaacctttcccacccattttggagggctatctctccataggcatgctcgcttacctccacacataccctgagtatttttg

SEQ ID NO: 141938 - DNA, 298 bp, Glycine max
tgcatgtgaattaggaagcgtcaacaagaataagccaagctatgtgcagcaacaatgggcaacaaccaagaatgatgaggaggcgatccacaagaaaatatcaatggctcaacaaactgaagaacagtcagccaaagcaaaacttattcaaaaataccatactgaacaaccataatcaaacaaacagcaaataacacacaaaacaaccaaataaactagaacccaacaaactaaccaataaactaattaacacacaacaaaccaacaaagacaccccccaactaacacacatgctcag

SEQ ID NO: 141939 - DNA, 108 bp, Glycine max
gtgctaagggaacatctaggcttctactctccacttgtctatcaactttatttaccactacaatatcccctatgttgtacctttccacatgatgcatgaccctcatgc

SEQ ID NO: 141940 - DNA, 297 bp, Glycine max
tttaagtatatgaaaattcttcaacggatacgtatgaaattatctatcgtgtgattgatgctagaaccaggtgtcaaaataaagggctaataaggaatattatcttttacgatgatcagctttcataatatccttagaaaaaaaaaactgcagcactataatactgagaaagtgatgttgaacagctcgaatgaatcctaccatatgaaaggaaatcaaaggctgtatatgcacgagatagtgtagtcgagtttgcattaaatgaaccaaatgggtactacctataccaataagatg

SEQ ID NO: 141941 - DNA, 255 bp, Glycine max
tgactatgaaagaataaccccatcaataatggtgacataagtgatcaaatcatgattatcttagaaactttcgaatgttggcaattcataatgcacttatggtgcaatctaccttttatcatatgaatgaaactaaagcatgaaatatgggatttaattaaactacattaaagtgtatgccacactctacttggaatgcatcactttcactatgtacatcacagactgactcccccctatcattctacatattga

SEQ ID NO: 141942 - DNA, 360 bp, Glycine max
catctaaggcgatatcatatctattgtgtatcacgcatcatcatgagtaagtgagaagaaaattttgaagttaaaaattttcttcaaaggaaaaactctttgttttatcgatgacaccttattgtaatcaatacacaagttttctgaagcttgcataatattgtctcgaatcgggtaattgttacagccttctcgtatcgatagatagttgttctaagccatgactgatttatcaatagtcttgctttaatcaataccatgtgatataatcatactttctcttttatagtagtcaaagtgaacaaacactttaatcatactttagttctatcatacttgtttgagcagtgttgaaaacct

SEQ ID NO: 141943 - DNA, 461 bp, Glycine max
  unsure (1)..(461): unsure at all n locations
agcaccgcagctgcagcttctccgcaatcctaataagactttgtctatcttatcggcatnatgggaacagcataattaaaaccaaaaattaatccgcgtatccctcatttaagactaagtttcgatcctgtttcagtcaagttctaaggcaacagtacatttcccaatgctaaagtcacctaatcgtgcacacaattgggtgatcaaaccaaaagcttacaaccattaagcattgaatgaagcattcaacacagaaaacacaatcaattagatataacgtatttacatcagttgttcattagaaatccccaactagggtgtttagccagccactacaaagaaaccctaacaataaatgagaataaaagcagagaatgatagtttcttacacaagaagggggattcctcctcctcttctcagcatctcacactcgatctctactcaataatctctctcaaat

SEQ ID NO: 141944 - DNA, 463 bp, Glycine max
  unsure (1)..(463): unsure at all n locations
agcaccgcngctgcagcttgatgcaacattgagaggtaatgattcgagatgatgcgctctattgagagggggatcaaatggagaatagagatcataatgaagaagaaaggaggagaagagggaatgatggtgttcctagacaaaaccgaattgatggtattaaactcaacattcctccatttaaaggaaagaatgatccggaggcctacttggagtgggagatgaaaatagagcatgttttctcatgcaacaactatgaggaggaccagaaggtgaagcttgccgccacggagttttccaactattctcttgtgtggtggaacaagctactaaaggagagagtaagaaatgaagagccaatggttgatacatggacggagatgaaaaagatcatgatgaagcagtatgtgccggctagttactcaagggacttgaaattcaagctccaaaaactaacgcaggg

SEQ ID NO: 141945 - DNA, 432 bp, Glycine max
  unsure (1)..(432): unsure at all n locations
agcaccngaagctgcagcttataacctaccagcagaaatcattctaaattatattatatagcaactagactaatcggggattagcatgcaataatcatcctcataaatatttagacggtcatcaccctatgtttttgtatccaagttgcaacgtgtgccaccacactttaattcctctccctagttttttttcaatttttttgttttaatcaaattcgcggaagtcgatcaccaaagtcatatctcttattatctctctcaaaagtaaacaaattctgcgagagaattgagaccatcatagaagaatagccttttcttaaaataaaaaatagcctttcctagaaattcaccatgacatcatagttggtttattttgtggagaccaaaactgggtcttcgatataatcgaagaccgatttagaattgcgactg

SEQ ID NO: 141946 - DNA, 353 bp, Glycine max
tttttttaccgaggcaatatgaatggggattgagaagagtttttccatgattaaagatatccacccaaactctccgtctcaaagtcttgtgagtgcccaatgataattatgtgtaaaactcgacagaaaaatatctgctgcttctttaaactctaatgccaaaaaagaattggcaaaacagcatgctaaagttgccgaagaagctgtctcaggtatctgttgtttggctggccatcttgcatctcaataacttcaccttgatttgacaaacaaggttatttaaatgagatatctgttgaggcattgagcagctgcaactgagtgttttttggtctgataagtgtgtttgctca

SEQ ID NO: 141947 - DNA, 302 bp, Glycine max
cataaaccacacaatctggcgacaggtgcatattttttatttctgggcagttgggttaccaggttaaccaaggcatctagtttacccttaagcttcttatcttaactgatgaagatgaaatcgtggctactttatgcattccctctaatgacaatagcatcatttctggcactaaattactgggagattgaagccatcttttcaattaaatttttggctccagcaagggtcatgtctccaagggcttcaccactggcagcatctatcatacttctttctatggtactgaggccttcataaaa

SEQ ID NO: 141948 - DNA, 456 bp, Glycine max
tctaagcacctgaggctgcagcttgcaggagcttgatttttatatattctcctaaagccagattatcaacaccactcgaccaagtggactaactgtgttttctcctgaaacaataataaagaagcttatctgtttctagtcacaaacatgaataggacatgaaatgtcaaaatgggtggacaacttactgtgcgcaaagaacatggttgagaaactaaacctgcaacagcatacacagatgagttatgactagactagctatgtgcacaagctacaagattacttaccaaagaactgtaactatctgtttcctcggtgacccccgaaactcatcgtttgttctatgttcaagaatccacaccactgctccaacaaaaaggaaaaaaaatgcagtgacaccccacatctgtggagtaaatggtcccaagaaagcccaaccatttgacttcaattttt

SEQ ID NO: 141949 - DNA, 438 bp, Glycine max
  unsure (1)..(438): unsure at all n locations
agctngccaattctgttatttagttgttagcctattctgggagagactaacaaaattcactaacaactaactaacagaatagagtcaataaatggtattttatttctccattctctctcaattctcttagtcgagaaactctatgatggtatgtagagcttagttgatcatcaatggtgacaaactgtatcgcatcttctttcgcttccgctttttcaaattcaatctcaaagaagcttgataaactaaattttcttctttggcgacaataaattgaacctgtcatcaagtcatacaaacttcaaaggtttgtcgcgaatccacaaattcccttacaattccttactgaagcaaatcacgatgtaggaattgagaatcctgcatacgaggcatgggaacaacaagactangttcttcttgctagttgcaatcgactat

SEQ ID NO: 141950 - DNA, 348 bp, Glycine max
  unsure (1)..(348): unsure at all n locations
cggttttggttttatgcaaagaaaanggnancaccaatatccacccagcaacaacatcggtgtatctgtgaactcggaaagaaacacttcttgcggaatcatcttcacaattgccctatgtcaggatgcctcaagaaattgtgtgctgcgagtgcccgcatctctttcaacaccgtanatgttgcgaagatgggtcctcatttcggttacttgcattcaaacactctggttccgctcgagcatgcccagacctcctcaagaccagaattctcctctcttgatcagatgagaatgtcttgttcgtctctggttgcggcctttcttggggtcgccatatttgtcaaatat

SEQ ID NO: 141951 - DNA, 456 bp, Glycine max
  unsure (1)..(456): unsure at all n locations
tgcaagctncttacatagtccgactttgcangactttcttaatgtttaattaaagaaacaataggcatacgcaaaagatcaagagaaattagtgggttaaaaccataaacaactttaaaaggagaacaattagtggtgctatgaacaactctattgtaagcaaattcaacatgggctaaacaagccttccaagtgtataagttcttcctcaaaattgttctaagcaaattttccaaagtcctattaacaacttttgtttgcccatcagtttgtgggtgacaagtggttgaaaataacatattagtgtccaacttgctccacaaagtcctccaaaaatggcttaggaacttagagttcctatcactaacaatgcttcttggcaaaccatggagtctcacaatctccttgaaaaacaaattcaccacaagggaagcatcatcaacttttttacatgga

SEQ ID NO: 141952 - DNA, 306 bp, Glycine max
gcatgcaagcttgagtgagatgcacctgaggatcaaaatttaccacagtgttcatctgcgagtgggaataattcgaattggccatggaattaaagttacactcagcaaggtttacagggccaagaaagttcttattgagtttgccaagtcgcaattcatgagtaagcagtagggattcaacttcatacaacatagcttaattattgtaaaaagtaccgggactcaattcgtgcagctcatggatagaactgccttgaaataactcatgagacacaataggtgaataaaaaacgattggaaaaaaaa

SEQ ID NO: 141953 - DNA, 396 bp, Glycine max
  unsure (1)..(396): unsure at all n locations
atttagccatatgtttcactttatttattagncaanncaannaagaatgagaaatcccaaagagaaaacgtccgattgatttttcgctttattatactaaaaggtatttttttgattattatattattattttacctcttttttgatttccaacgtggttaccgcacgacctaacggtcggaattcattttaatcgaatttaacggatgatacaattcaaacgatcggtggaaatttgttttatttttagattaggcgagaaatgacttaaataaatgacttaagcacgtcaaaaggggttttaaaagcgaatgaaagcgagaataaaaatacatgaaacaaaatgtggaccaccaccggtacatagaatgaattgaaaagctcgggttgaggtac

SEQ ID NO: 141954 - DNA, 395 bp, Glycine max
  unsure (1)..(395): unsure at all n locations
cctatagtaatatcaacgtcagcagtctcactctcaatcttactcaaattggtggctgacccaaaccaatatcaaagtcaagtattttctcaggctccaatattagttttggtgaggagttggacgcacattatatgcttcataatgaaataaaaagcatactcgacagttcttgaaaaacaatgcctgcacaccagtgcacccactttatgttaatatcatatccagatatgagaaattatgctattgcaagtttgcaactaaagcaacaggttaaattactatgaacaaacatgcatgggatggtatctgagntcatganctatgagaaanttatggtcacttacagctacagatcaaatgtgatatacatacacaatacattattgcacaca

SEQ ID NO: 141955 - DNA, 390 bp, Glycine max
  unsure (1)..(390): unsure at all n locations
ccctcaatttaatgggatttctaggtttgagaagtgaaattgagaatgagataaatttgaagcaaactctcacctcacacaagtccataacatcaatctaaacttgctcaaactggatttacacctaaaattccaccgaatcaaaatttgactcctccacacccaattttgccctagaaatggctcttggttcactttggtcatttgtttttctctctagcacagtccaagctttctcataagtcctaaatgacatttcaagctaggattaactcactttaacctccatttaccacagaatccagaattaaccttcctactctcaaggcctcactctntttccactcataacaccacattctcactttctaaccctaggttaactctacc

SEQ ID NO: 141956 - DNA, 303 bp, Glycine max
atatttattggatattcatcgattgagaagagcaagagacattgagagagaattgaatcaatctctacacttcacttaatacatcacttaaatctatacatgctctatctggatgtacccaattaaatcacctataatgaatggaatatccctcgagaaaaacagaacctataaaagggaaccggtcatttcacattatagttctaccaacacacgcatggcgcgcgtacaaatattgtctatatgacgcgtatgagaatggatatatagctccctcctgagatcctatccgaagttatacat

SEQ ID NO: 141957 - DNA, 419 bp, Glycine max
  unsure (1)..(419): unsure at all n locations
agcttcattgctnnaggaggatttatctagattgattcaagggggtatgangatnacaaagatgatgaccaaaagccccagagaatgatttctagattgagtctagaacaattcaagaatttagagaaagattctagagaaggttccaggttcaatttgatgaatacaaagatgatgaccacaagcccaagagaatgattcaagttgagtcaagaacaattcaagaatcaagagaaagattcaagttttcaagaatcaagaatcaagaattatcaagatcaagatttaagactcaagatttaagaatcaagaaaagactcattcaagataagtacaaaaaaagttttcaaaacaccgagtagcacatgatgttttctacaaagctcttaccatagnagttttactttctggtaatcgat

SEQ ID NO: 141958 - DNA, 299 bp, Glycine max
  unsure (1)..(299): unsure at all n locations
gcgcgcatganagnacaccaatgctgatgtttacttaatgaagatttctaactaagtgatatgacatatgatctatgagagtgactactcagcaccgaagggatgatgccttgattgagtccatatcatctatggaaagcttagaagccttggagaatagttatcaattgagtccattgataactgtgagccttgcttatgaccgaaaaaagatatatcctgttgtctccacaacaactcgattctcgagtggatcttccaagtttgaaccattcaaatgcaagaacaatcgagatcta

SEQ ID NO: 141959 - DNA, 440 bp, Glycine max
  unsure (1)..(440): unsure at all n locations
agcttctcgatatattatacgcttgtattcggtcttccttgtgaaaagnnatgaccattggaatttgtcgagagcttccgatgtccaattttgactgtctggatatattatatacctgaatcggacatccgtgtgacaagttacgaccatttgaatttctcaagagcattcgttgttcaatttcgagcgtctcgatatattatgcgcctgaatcggacttctatgtgacatgttatgaccatttgaatttctcgagagctttcggtgttcaattcagagcatctcgatttgtgatgcgccagaatcggacttccgggtgaaaagttctgacaattggaatttctcgagagcttccgatgttcaaattccagcttctcgatatattatgctcctgaatcggatgtccgggtgacaaggtatgaccatttgaatttctcgag

SEQ ID NO: 141960 - DNA, 456 bp, Glycine max
gatccttaagcaccgcggctgcaagcttcatcagtggaatcttatccaatatttttgtaggtgctccttaaacctccattaattttttgctttaccttctcttccattgttgtttcttcatttttctccatgtatctcctcacgtgtcttgtgataaatgttgttaacatgattctttatagtttccaccgattaaacttgctatagaagctagatttgattttctatggttcaaatttcttgttcttgttcttgaaccatgaattgtgttgagtttaggttcctttgagtttttgtcttgttattttttgtggctaaaacctaaaccataaaattcttacaaaaccattaaagtataataaaacctcaaaaatctagagtgacttgttcacctattgtagttttgtcatagaaatcatgtctagtcgtgaaacttgtcacataagatttcttatg

SEQ ID NO: 141961 - DNA, 357 bp, Glycine max
  unsure (1)..(357): unsure at all n locations
aaacttgcctcaatcattttcattatgcatgttctttangacgcgcaccatgaatcaagccaatgctatggtgcacctactaatggagagaaacacaccatatgatcttcatgatggatggctcaaatcctgacataagtgaaatcaacactatccaatagagctttcaccactatcatgacgctgtagagaacaatcaatgatttccaatcgcacaaagtccataactttgatcttgaacacaagaacgcatttattgaacatatcctatgattcaaagaaaaacatgaaaaggcggacgcgtcctcaacattgaccctcttactaaactataaatgctacgaaactcccacattt

SEQ ID NO: 141962 - DNA, 396 bp, Glycine max
  unsure (1)..(396): unsure at all n locations
cccacggctgtatgaagactctcccaaaatctagaggtaaatctaggatctctatcagagactatgctagaaggaacaccgngtagtctaactatctcactgacatacaagctagtcaacctctctaaggaatatctgatgttaattgggatgaagtgagcagatttggtcaacctgtctacaataagccaaatggaatctaaacctttgggggtcctaggtaaccccaccacgaaatccatcgagatgctatcccacttccactcatgtatctctaaaggttacaacttccctgaaggcttctggtgttctatcttagctgtctgacatactatgcacgcaaggacaaactcatttacttcttttttcatacccggccaccaaaacatatgccta

SEQ ID NO: 141963 - DNA, 409 bp, Glycine max
  unsure (1)..(409): unsure at all n locations
accttaagtcacctgagctgcagcttaaanatctattatggtntaaacattctttctttcagnggnaccttaagtttcatgggataatttcttcatttggttttgaggaaaaccccatggatcaatgcatataccacaaggtcagtgggagtaaaatatatttccttgttttatatgtagatgatattntacttgcagccaatgatcggggtttgctacatgaggtgaaacaatttctctctaacaattttgacatgaaggatataggtgatgcatcttatgtcatcgacattaagattcatagagatagatcttgaggtattttgggtctctcacaggaaacctatattaacaaaattctagagagatttcagatgaaagattgttcaccaagtgttgctcccattgt

SEQ ID NO: 141964 - DNA, 437 bp, Glycine max
  unsure (1)..(437): unsure at all n locations
agctgtgtaattgatcaaactcttccaatttatggttattttgtagtgttataagnattttctgttaagtatagataataaatacttagtacttccattttgtgtgtttaataatcattttctctcaatttcaggttaattaggcaagctttgaaaagtgttgtttttcaccttctcgctaagccaatctgctggcttagcgagcatccgctaagcgcaacactcatgggggctaagcgcaaggaagactcttctaattaagaaggggggttgaattaattattcctaaacctttactaattaaaaatttactcttctatggcttttactatgttgttaagtaaatgaagaatagaaaataaacttaaccaaaagtaaaagcggaattaaagtgcacagcggaaattaaaaagagtgggaagaaggagacaaacaca

SEQ ID NO: 141965 - DNA, 401 bp, Glycine max
  unsure (1)..(401): unsure at all n locations
tctaacactttatgcgccattntatattcgaaaccagagactcatattcctaggcatgagtcatactttaggcacttcagtctatctgctacaaactacccacacactcacaatgcgcacaatatatttgccaagctaagtgccacaaaataatgctcaaatgccatagacgaatggcaccgaacacttggtgggcgcatgtctaatcatgaaggataagggaatgggggcaatgtggcatgcacaatgatgtcagaacgcaccactaggtctatggccattcactacaacccctcaattctacagatacaagcaataagttaaggatatgtccatcacgttttgagcatatctgtgcagcttagagcacctaaatgtgtcaatggaaagccaaagagccc

SEQ ID NO: 141966 - DNA, 466 bp, Glycine max
gcacctgcggctgcagcttattaggaacacgttgtctcaatgagttgtttagtcattgcatattaagggtctcgactttcttatgttgtggtcattgaattatgaacatggctcaatttgatttttcgatagggaatttgagttgtgcaatctggaaaccatattattttaaaaaaaaatgttaaaattacgtttaattattcatttgggcattatagttgcaataacttttcattttagttcctatagtttaaaacatctcatataattgtcatctttttctcttttcatcttcattgtctaaagtcacctaacgtttgttgagatgaacattacaagacttatcattgtcaaagtgtcaccttggtttcaaaggtaacatttttgacatggcaagaacttgtattttttgaacaaaacccagaatgagttttgctcatcaccccacgagttccattggacatgt

SEQ ID NO: 141967 - DNA, 230 bp, Glycine max
gtgtataaagaacatacatgcagatgatatatataaaaggaatgggaggagagcaatgaagaatgcaaattcaattcagagacaacgtagaatagacgtgaatcgagatcaacggtctaaacaggccctcacgaccgtgatttatacggctacatcaagaaacaaacgaatcgaatcgcatggtatatctgagtacaaaccattgttgatatgctcctggcgatgaacag

SEQ ID NO: 141968 - DNA, 172 bp, Glycine max
tataaatggaatcacctatgtcccaagttgaccatttactagtccctagccacattctctctagacctccagaaataggaggggttcacgagcctgaaaactttaaactgtggggcataccctgcatacctttagattttccaatctcaatctaattgcagattacgctatg

SEQ ID NO: 141969 - DNA, 281 bp, Glycine max
ccatgacaaatcttcacataggaaatgaacgtgcacgtatagataaagacactaatgtgatgctaacaatcttatcattcgaacagctcctaacggacacccacttagtgaatcccgtgcacagaaagaatgaaagaggtattatgttcatcaaacataaagacccttatgtcttgaaagatataggcgacattgttgtctcgacaaaagactttgatagcccctttgtaaaataaatgatacattgcaacatcgacaatatactctgataattgcggaaa

SEQ ID NO: 141970 - DNA, 103 bp, Glycine max
atggagagggttacaacaactggaaaacccgaattgcaattttcattgatgcaatagacttaaacatttgtgaagccatacaaggtggaccttatgtgcccac

SEQ ID NO: 141971 - DNA, 347 bp, Glycine max
  unsure (1)..(347): unsure at all n locations
tcaatggggcaaaacacaccaaatgattattatgatggatggctcaaattctcacaaagggtaaatcatcactttcaaattgagcttttcaaactatcatgacatgtagagaagaatcaaagatttcaagtcacaaaatgtcaagaacttttattttcaaaacaattacccatttcttgaacatatcctataattcaaagaaaaacatgcaaagtcgtacgtgcacacaaaattgacccanaatattaaacttgaaattcgacgaaacttacaacattaacaaattaacacaactaacatatttaccaaaccacaaaacttgcaaaccaagaacacttccccccccc

SEQ ID NO: 141972 - DNA, 365 bp, Glycine max
catgtgcacactcgtagtcactctgatgaatatagagtcttgagagacacggcgtcaaacaccacctactatccctatgatggcttggatatcatgctccacccgctatatcactattcctcaatcgagccctccatagaagcaccatctgcaaacaacatatacagagctcatgtcgcgggagaagagactctttacatggcttacaccctaccggatggcgcccactctcaactattctactatgaacatgcgatgcatctacatgcgcgcaaaatacgcctaaaggacctcattgaagctcaacgatcctgcctccatatacgccccaccagcacgatccgatcaacatgagcatcccctcc

SEQ ID NO: 141973 - DNA, 409 bp, Glycine max
  unsure (1)..(409): unsure at all n locations
taagtcacctgcggcatgcaagcttcttctggtacatgtgacttntgaagcacttatatccagatatattgcggatcattctcctccaccacatgtaacttctcgctgcctagacactaatgaagttgtagaaggggatacagtgtcaggttatgattttgacactgatcagtatatagagcgacaggcatcacggggacataatcgccggcgcataatggctgccagatggcaagggctgccaaaatcacaatgggccaaagccaatggttcgcatgcaggccagaattctcaaatgtcaaagcttggagttattcaaaaacatggaaccaaccgtgatcaaagggcagctcctatagttaatggtagtaaggtttggagccgaaaacctaaaccagaaactaatggg

SEQ ID NO: 141974 - DNA, 431 bp, Glycine max
ggatccttaagtcacctgcggcatcaagcttaaaataaatactaacctgttgaagatcgacaaagaacgtccacgaaattgatcacgaaaacatctcagaagtgttacggaagctcttaggctttgatttttttcttctttcttcttctcctcactaattttaagtgaattttgaataccaagggtgctgaaccccttcccctcaacccctaatgccattttatagaaaaaatgaaggaggtggttgctgcccagctcgcccaagcgagctaagtagcttccacctgaagcaacctccctccagaatattccagatgggcccaaggctagatacaccccccataattgatcagttcaccccccattttggggtttttttggcttgatttcttccgaaatgtcatgaaactttacggattgcacggcgatga

SEQ ID NO: 141975 - DNA, 170 bp, Glycine max
atagagagcacgagcactgagcagaaatacatctgacataagaaacggaggcgatactgaccatgatgatgcatgatgccatatacatctccaatgttctaagagagcaacagcctacatgaggtgctgtaccaatgtcattcaacggagaagggcatgttatagacaaa

SEQ ID NO: 141976 - DNA, 417 bp, Glycine max
  unsure (1)..(417): unsure at all n locations
agcttgccacccagctctcccaggctagctcttttcgcccaggcgagcagggttgcttcctccagaagcaacagccttctggaggaatcttctggagggccaagtgggcctggttgctatttgcactcccatttttactaagtacaccccctgcctttttttttgtgattcttttttcgtaaagttatggaaacttancgaatttgtaacgatacttgttttctttccgtaatgttacggaaccttgtggattacataatcatcccctttttgaattacggaatgttacggaacctcactaattgtgcaacgatgcttccattagaattccggtgtgtcacagaaccttacggattgtgcatcaatattttcttttgttattccgcatgtcccngaattcacaaattgcctaatgat

SEQ ID NO: 141977 - DNA, 343 bp, Glycine max
tttctgtgacaaaatttcacttactgggatgactgtgtgatacttaaagagaatcacaaaggacgacagtttatccggcccgaagtttgcataacatataattttggtgagcatgtaagtttgcttatagttctcagaagatcgaccttttataccaataagttatattctgtagaacctgggcaggctttgaacctcataatttaaagaatgtttattggactagtaaaaacaaatgaatttgtgctgcgtgataaactttttatttgcagatggcgtgcattcatgagtaatctggaataggatacacttttgtatgctaaagtttattatggcatattca

SEQ ID NO: 141978 - DNA, 376 bp, Glycine max
ggccaatattacgcgcacaaatcatataatgtggacaatggggacagatttcaagtaccaatatgcacaaacctggtttcggcaattggacaagtttattcactatgttaatcaagttacttatcctcaactccttgcttaattgacaattttcttttttggctgtttacttaattattgcattttaggcatctaacattcttctccttgacctgctaagtttgactgatccaatgcaagttaaatattcacttgtcatgtaaatgacattatatatgtttctttaggctgcctaattttccataatccatcttctcatgagtttaaatcaagctcaactaattttgatttggaggattggcatactaatgcttat

SEQ ID NO: 141979 - DNA, 453 bp, Glycine max
  unsure (1)..(453): unsure at all n locations
acctgaagcatgcaagcttggctgagagatctctcatgcttaaggaaatngctactctttgcttctggcaaagaaatgtccgagttggctaatcacgtgtcactctattcaggatgttcacaccatgggtgagtgagttttcttgcagcgattatataattgcgttagttctctcttaagggatggtagctgggtatagttgtttgtaactagacagattgtaacaagaatcaaagatatttatggataattatctttcgaaatagatataattataaattccaagcttaaactgtgttgtccttactggtactgtatatgataacagtcaacgactgttactggtttagcgaagatttagagaatgattgtgaaagcataaaaattatttcattcccactgaatcactacaacagttttggcatttatacaagtaggttaattaaaactgcc

SEQ ID NO: 141980 - DNA, 452 bp, Glycine max
  unsure (1)..(452): unsure at all n locations
gcttctctgcttttgtgcttcttgcatatattctgaaaggtcttttgctgatcattataaggccattcattataggagttataaagatgatttggtcattgaaagaaagggagagagatatataaagttaatttggtaattgaaagaaagggagagagataggttgtgtgttcgaatctgtcctactataaaaaactgacaaactaacaatttacgttagttgatgtaaaaaatgcatttattataaaaattgggatgctgagcttgttctccgtattaattngggtaacctacacatggtgacttagataattcagacagaatttgtggagaatttaataaacttgtgtttggaacatatattgcaacttgcgttttagtattttccatggtgttctccatgtcagatatcctcttcacagcatngtccttcacaattttgttatcttttt

SEQ ID NO: 141981 - DNA, 455 bp, Glycine max
  unsure (1)..(455): unsure at all n locations
gcacctgaggctgcagcttaccacttgaattatacaagttattatgtttgttgtgtatcttagatgaccacatctcatctttatttataatggagaaatcagaatcaatgttgattacatattaatcaattaccgattattatgcaattacataccaatcataatcataagtttctatgtaataataaatacaagataatgtaaagataaatataatctaacactctccctcaagctcgagcatatatgccatatgaatcgagctntttacaaatgttgtcagccagataaaaactaaagatgatttgttatagacccatcacacgtcgtgtgcgtgaacttcacacgctaagaccctgtgtgggtcacatgtggtggtgttttgagttggttgtgcatgttgatggtgtggtaatcttcaacggtggcaataaatactattcacctatgaaaaa

SEQ ID NO: 141982 - DNA, 363 bp, Glycine max
cccccgaggggaacgcaagctctggaataaggcaggttttccgaggttagtattaagggaccgcgtatggtagaaataaaggagaggtataggcctgtgcttacgttagtgcatacctatcgtatacggttcaggccaccattatggttgtactatgtactccaactcatatctgtatgaatatatttcttcacattccgtatctcggcatgatccccatgaagcaggcattactatgctgctccccataaacctgaatcactcgttcgcccacaccgttgagagctgacccacacactaaccggactgcaacaatcatttggttccgcagccgcatgatgtcccatgactatcatggtggct

SEQ ID NO: 141983 - DNA, 429 bp, Glycine max
  unsure (1)..(429): unsure at all n locations
agctngcaacggaacacagtgttagccaggtatcagtatataagtnggngagggaagctttaatctctgcgtatgacaagaacatagccactaggctgaaagatgagctatgtagctttgaagttaataactacaaagtcattaaggattcttccacaagtaggtgttctagctgtttagttaaaaacattcatatgcatatccttgaaaagttagtttttgtttattaagtcttgaaatgcatttgttgctaaattgatgcaggaaatcacataaaaccggagcaatggtgcacaagttggtggcatcagttcaaagtgctgttgcaaagggggctgagggagagnaaggttgaagccttcaacaggctgagaatattccaagtcataagtgtcgctttccttggtggactcctgtggtggcacaccc

SEQ ID NO: 141984 - DNA, 447 bp, Glycine max
ttaagcaccgcggctgcagcttgatggtgcgagagaaatacattttgttatatctaaaagggggagaatgtgaatgtatgtatacatgatttttatgatgtcaaagaagaatctaacaaggctgcttcaaatgataagcatttgcttcaagaataattcaagattgcttcaacaaacaaagccttgtcttaagattcactaaagaccaagccttgccttaaaacaaagtgctttcaagacatgcaaggctctggtaatcgattaccaagaagtgtaatcgattaccagaaaacagggttgagaaatatctgttgaaaaaggttttgaatttgaattttcaacatgtaatcgattactagcaacgaaactttggaaattcaaattcaaaagtcataaccctctcaaatataactgtgtaatcgattacacaaacattgtaatcgatca

SEQ ID NO: 141985 - DNA, 197 bp, Glycine max
cactacaatagtgcccatacgctgaacattaagtcatgagggctgctactcatgatccccatatgctttatctattgttcaacacagactcaacataccaattcgcgtattattattcgattaataccagccctagccttatatctgtgatcgttcgagacatacaatgatctagtgatgcacgacctacatgggct

SEQ ID NO: 141986 - DNA, 152 bp, Glycine max
  unsure (1)..(152): unsure at all n locations
tatttacatcacacacgcctccttggctgaattacatacatacatacttcaagcattttggggtaccaaaaattgcacatgcgcccatcttgggatttctaatacccatacatatacaaaacttgnnangaatcttgactacctacacaata

SEQ ID NO: 141987 - DNA, 365 bp, Glycine max
acacacaaaacaaaattactaagtatttattacctatctttaactaaaagaacttattacactacaaaataaccattaattggaggagttggatacaatttacacttactttatacacaaaagttaatcatattcaccgactaacaactccctcaagtttacaagtttgcttgtccttcagcaaaataaaaacatagcactagtccccaagtgacaaaaatatgcagtgattatgtacaaaggtggatgccgcaaaagtcactgattgcatgatacaataatgaagcaaaatgctctcatcagttgtcttttacaaaatatgcagttatcaaagagaagaatagaatgtacctgtcaattagatg

SEQ ID NO: 141988 - DNA, 439 bp, Glycine max
agcttctacttatgtggtagggcggtctctctcattttcttgtctccaacgcgagttgtgaccactgctcttccttcccgcgatgcttcttttcatgtccgcctgagtgggcttatagcttaaaccatacttcccacgatttccttgggcatttatcaggctagttatgccgtcgttgtctttgcctaaacccattccgggttcataaccgttccccaacataactcgggccatcattactgctgcatcggacagacaaggctgcccagagaaggagtccacggaggaaatgctgaccacctcaaaagactggaaagcggtttctaacgattcttctgcggcttccacataaggcatagaggatgggcaacttaccaagacgtcttcctcgcctaacacgatgaccaagtacccctccactacgaatttcaacttttgg

SEQ ID NO: 141989 - DNA, 440 bp, Glycine max
  unsure (1)..(440): unsure at all n locations
agcttctggtgggacatcttgacttgctntcttatctgacattcaccacagatnctgccttcttctattttcagattgggaatgcctctaacagcacctttgtcaatgattttcttcatgcctcttaagtgcagatgaccaaatctttgatgccatatattgacttcatcttctttggagactagacatgtggaggagtaactggtttcttgaggtgtccataggtaacagttgtcctttgatctgctgcccttcattaggacttcactcttctcatttgtcaccaagcattctgactttgtgaagtttacattgagtccttcatcacacaactgactgatgctgatcaagttcgcagtcagtcccttcaccagcagtactttgttcagactaggaagtccttcatggactagctntcccattccagtgatctttccttt

SEQ ID NO: 141990 - DNA, 435 bp, Glycine max
  unsure (1)..(435): unsure at all n locations
acctgaagcatgcaagctnggaggcaagttcctgaggatccatgctctacctacattaaatatagtatgaggggtactgctcccctggctgaattactggtggcgtctccataaaggcattcaacgacacagcatcaaatttaatcagcctccctctaactcgaacctgttttggtgatttggcttcagggtcatacaggttccaataaaactccttgaccagggccacatcaatgtgcctgttcatgaactggatcaagaccttgtgccagttccgctgatcagctcccggtggaattcatcatattatgtgatgaaaagattaacattcctctacggaaggatgttccgggagtgaatgttctatgagtaatgttcccacgccccttcaatagtgaatctggtggtatcatatggctcctgcgccgngatgct

SEQ ID NO: 141991 - DNA, 348 bp, Glycine max
caactcaacttccctttcctgtaaccatctcccctgaaaagtgacatttctagaactttgtatttccttcctccagctttatacgtgaaggtaatgcatccagctcttcgtccacctagaagatgaatcacatttaagtttaggcattatatattaaagatctagacgaagagaaaacaaaaaggtatttaaataaaacaaatgaagaatcaacatataaggttgtttcttttccacgaacatcactaagtgagtcatagttctgagttcgcgacgaaccctagggatctcaagcttttcctctctggtcggggggtggtcatcccgacaaaacgcgtggttcccatt

SEQ ID NO: 141992 - DNA, 418 bp, Glycine max
  unsure (1)..(418): unsure at all n locations
agcttctatgaaggtttgagagnnnatggtatcttatatattttgatatcggngangggtnttgttcgtcatcatatgcaaatatgttagagtagctaacaaggatttcgtatcattgcatacttatttggaaaagttcaagtcctacattgactaaagagatgttctaaaaatcatttggagatgtaccgaatgaggggtgagagagggaggtgcatggatggaggggtaagggaacctgacacaaacaaaggtcctgctgctaacggtgtttgaggtagaatttatggaaacaactatgacaacactaatagagttatgaaacaaaacaatttgcaatgatgtctttattctattttgagggattcacatataacatctcagaaaaagagctgtgggaggtgttccataaatggga

SEQ ID NO: 141993 - DNA, 244 bp, Glycine max
tgggcttagcgagcctgcttgctaagccaattctgcagaaaaaattggatctgtgttcactcgctaagcgtgtggctatcgcgcttaacgcatgagtcattttttctaaagcgcgctaagcgccgagtctaatttttaggtttattttctgctttttattttgaataaattactgtctaatcttgtggtttgattcttttgtattggagatgccttcccgtaagaaaaaaaccataactttagt

SEQ ID NO: 141994 - DNA, 337 bp, Glycine max
gaggtccgaggcacgcgcataatatatcgagacgctggaaattgaacaacggaagctctcgagaaattcaaatggtcattactttttactctgaggtccgatgcatgcgcataatatatcgagacgcttgaaattgaacaacggaagctctcgtgaaattcaaatggtcataactttcaactcggaggtccgattcacgcgcataatatatcgagacgcacgaaattgaacatcggaagctttctagagattcaaatgatcattacatttctcaccgaggtcagattcaggcgtagtatattctgagaaccttgagattaaacaactgaagctctcg

SEQ ID NO: 141995 - DNA, 424 bp, Glycine max
  unsure (1)..(424): unsure at all n locations
aatgcctcaatcattttcaattatgcatgtgaattatgaagcatcaacaagaatcaagccaaggctattgtgcaagcaatcaatggggcaaaacacaccaaatgattatgatgatggatggctcaaattctcacaaaggtaaacttatcacttccaaattgagctttcaaaactatcatgacatgttgaggaaaaagaaggactccaaatcacaaaatgtcaaaagacttttattttcaaaacaattacccatttcttgaacatattctattattcaaagaaaaacatgcaaagttgtacatgcaaaccgaattgacctaaaatattaaactangaacccaacacaaataacaaaattaacacaacttacaaaattaacaaaacctacaaaactagcaaaccaaagacaactccccatactaaa

SEQ ID NO: 141996 - DNA, 477 bp, Glycine max
cgacccgggacctctgagtcacctgcggcatgcaagcttaccttgaattatatgatatttatcatttaattctaactaaaacaacaaagaagcctggatatgccattcgtggaggtaaactatacttcaaggatagattagttctgtcaaaaaactccactaaaattcctctacttttgaaagaattgcaagactcccctttgggaggacactcagggttttttagaaccttcaagagagtggcaaatgtggtgttttggcaaggaatgaagaaaactactagggattatgttgctgcatgtgaaatctgtcggagaaataagactagtacattatcccctgcagggctgctataactactgcctattccaactaaggtgtggactgatatctctatggatttcattggaggcttaccaaaagctcaagggaaggacaatatattagtggtagtggataggctgactaagtatgctc

SEQ ID NO: 141997 - DNA, 334 bp, Glycine max
ttcgtgaccacagagtggtatctggagatatgtcgcgggggtcaggagaccttggggatgtcaggtggggtgctattgcccaaaaccaagcttgaccaatcccgacccaacccgggcatagtcagtcagtgagaacctgtgatgtacctaaacaggcgagctcttgacagtcaaccgattaaagaacaaagaccacagagcaaggaggcttgtgtggtggctggccaactatgaatcttgagtgatatttggaatatggcctctggtaatcgattaccaagggtgtgtaatcgattaccaggcttaaaaatgaagacaggaagttaagatggcc

SEQ ID NO: 141998 - DNA, 383 bp, Glycine max
tactcctgcataaggagtgatattgagaagtgtgcttgacagaaaaattgaagctgaaaagataactgtttagaaaagttagtgcacccttcttatgaatggagacttccccctacaggctactaaaatacaattccgcaagaaaaaaagaaagcctaattgggattttgattatctagcaaaatgagaataacatttaatgttgcattatgagctccaacattcctattttctagtgttgaatgggaataacttcaactcatgatgaaataaaaggtctctctaatgaccattttccaatggttataaatagtcaatatagtttgctcttgagaagttaatggacacatttgttttcaggttagtgagtaaacattctctta

SEQ ID NO: 141999 - DNA, 373 bp, Glycine max
agctttaaagactttgagatctacagctatcaaattgagagttaccactctctagaacccttataacctcgtgagtgtgaaacaaccagcgaaatagcggagcatattatgttgtgatttaacactgcctaccagattactcaagtcgtcacataacttttgctttaatgagtcctcatctcttactactttatatggaagcaatgctttccaagattattttgatgatgcctaagactcctgtctagaatcaagagtcaagaaagttctccgagtcaaagattcattctatccaagcacgtttcaagaatcgaagagtcgctcaatctcgattccagattccagtggagattccagagaagactcgatcaag

SEQ ID NO: 142000 - DNA, 224 bp, Glycine max
tcgacccggatccttaagtcacctgcagctgcagcttatattgcctattctaaacttatattttctttacataaacaccctagaaatctataggaccgatgaagtcctctaccctaatgtgtagacaagataaagaaagcaagcatgttggaacataccttgacggtgtctggacgatgcttccaaacattaactgcccacccaatgctcagaagcacaatgtg

SEQ ID NO: 142001 - DNA, 441 bp, Glycine max
  unsure (1)..(441): unsure at all n locations
gcttctncatcatggttccaaaattcatgttcattctttgtatcttgtatacatcaaggattgagctccttgttcatctaagcaatttcatgtagcctcatcaaggtaaggtgggtctcttgaattcttggaccctaatcttgttgtctttggaagctaagcttcattgaatgttgttttgatgttcaaaattcgtagcaactgccttgtctggaactgtatgatgtgttagttttcttgaaattttaaagttaaaaatgagttccttgggtgtcaaaacctagggttagccttaaattttaccaaaatcggagttttcaagtaaaaattatgaacaaaacaagtttaaagatntttttatgactaaattgtcacgaaaataaacatgttctggttctatggacgggctttcttaaaaaattgaattcaaaaatgagtttt

SEQ ID NO: 142002 - DNA, 440 bp, Glycine max
  unsure (1)..(440): unsure at all n locations
gatcctccgagacacctgcggcatgcaagcttggtgtttcacctatggagattatgaattaatggggtgtgttagttataattcagaatattagttgtaaagtttggtagtttgtttagttagttgagtgtgataagacagtgattgaggctgaacttgagttgtataaatagcctctgtgtaatttagttcataatgcaattcatctcattntagtatatgctntttcctggctttctctctttctccccaacatagattaggtacttattacaatcattagatcttaaaaaaatatatgataaaaatgatgagtaactttaaaatcctccatctattactctgtgttggctagaaggaagagagaatgaagttagaagttacaaaaaattgaacaaggtgggatccaagaacaagaatttttatggtcatgtaactct

SEQ ID NO: 142003 - DNA, 221 bp, Glycine max
tgtgacttggaatgtattggactagtgtggggagttatgatgcattggaccacatgttatcttgggcatgcttcatgatgtattctgggccacacttgatgtacattgtacatagtgcaaacgttagacctgctgaatgaattggagtttctcgatggctatctagtcaatcctccatctttctctctgtgtaggctgaaaagcatagagttgagtgtata

SEQ ID NO: 142004 - DNA, 425 bp, Glycine max
  unsure (1)..(425): unsure at all n locations
agctngancaanncnncngctttcttctntgtgtcttctccatccgcagtatgcagcattgtcgnattggatgatattgtttcttctctcattggagttgcagagccatagattgctggaacaatataagaaaagagaggggaatttgagaagtcatttgattttagattctgggtgatgtttaaacacttgttaaatagtaagaaatgaaagttctttttggtctgcccaataaagaatatattatacaagtattatataatcatatattactattactgtgtgaattttaaaaatcaacaaataaattatcatgatagattatgattgaatgttagtttataatatttcattttttaattcacaattgaatatgttaaaagttaaaaacatatttgaaattgtgtatcgaatataatctaata

SEQ ID NO: 142005 - DNA, 403 bp, Glycine max
  unsure (1)..(403): unsure at all n locations
gcacctgcggctcagctgctctaatacattttggtgtttttttaagaagtgaagaccatttgtaaaagggtacatttcttggttaaactaactctccaaatgattgccttcgcaagaaatggccccgacgaagccttcctcaaagaggtccangaaggacatggcggccatacgaactagtttcgctcctgattatgacagtcaccgcttttggagcgttgtacaccaacagtgcttcgaggccatcatgggatggtcgtttctccgggagcgacgcgtccagctcatggaccaccagtattctgattttcangaggaaatatggcgccggcggtggacatcactggttactcccatggccaagttcgatccagaaatagtccttgattttatgccaatgctt

SEQ ID NO: 142006 - DNA, 209 bp, Glycine max
ggttgaagatgggctaagcagcggggaagacaaaccaaccttcgctatgctcgacgaagcgcgtactgacgcacctgatccatctcttcctgacgttcctgaaacgcatgagcgccaatgggacgcctctcgagtgggagtatgacctgcaccgctacaaggtcggcgcccacctgcttagcttagtggacaacttcggatggccgccc

SEQ ID NO: 142007 - DNA, 376 bp, Glycine max
cttgcaatgggtttggaactgatatgggctgtggagctttttaagtgccatgttttaacctctactaaaaacaactttgtgaaaactttcatgttatgaaaaagattccaaaagttgcattaactcactattctaccccatttctagtgtgttgctcatatttcaatgacaacaatcatgtgacttttttaagttgccatgtgatcattaaataactttttatcttaatcacttatgtatgatttacatttaggatttaattagatacaagttaaaaaagcttttgagaaaataggccacaattacattggaaaactattataggtttgatcccaagatctaatgaaagaaatatgtttttttctagtggagaaac

SEQ ID NO: 142008 - DNA, 459 bp, Glycine max
tcgacccggatccttaagcaccgcggctgcagctgactctgccctcattatccaaaattcatattagtttcattttttgtcttgattcaacactcattttttagttatttcataagtgagcattctatatgtatcatgtcattatagtaaatgtaagtttgtaggagttctatgctttacatgtaggttctcaagtaatcaactgaatgcgaacaaaccatttttgcctcatctattacttgttgtttttaccaagagatgaaccttctgattctggactaaacaagtggaaatgtagatgctcttcattacaagggaaccatatataccctcttgctaattggtagaagtcatgtgatttccattcgagtatgcttgaagctcttcatctatgttgtccatccctaagatgcatagtcttctttatagctaatcccatgtttcctcttaaatgtctta

SEQ ID NO: 142009 - DNA, 402 bp, Glycine max
  unsure (1)..(402): unsure at all n locations
agacttgatttcctttgttcctgatacctttcttttttatgtgctcccaaacccaatctccgggttcgaagacaaatttctttctccctttgttggcttgtttaagatagcttttatttttcctctcaatttgatctttgactcgctcatgaagcttcttcacatagtccgcttttgcttgacctttatgcttaaaaatagaaacattaggcatagacaaaagatcaagatgagttagtaggttaaaaccataaacaacttcaaaaggagaacaattagtagtgctatgaacaactctatttgtagcaaactcaacatgtggtaaacaagcnttccaagtctttaagttcttccttaaaactggcctaagcaaaagttccaatgtcctattaacaacttctg

SEQ ID NO: 142010 - DNA, 429 bp, Glycine max
agccttctcccctatttgctataaataggggttgaagtgaagaagaaaagggttcagccccttaggcacttctctctctttcgaatttgcttggaaaaattgtttccgtgaagaaaatctaagccgaggcgcttccgaaacgtttccgtaacgtttctgtaaggaatttcgcgaaggtttcgaccgttcttcgacgttcttcattcattcttcatcgttcttcgatcttcaacgggtaagtacctcgaaccaagcttttcaattcactctatgtacccgtggtggtccacatttcgtttcatgtatttttattctcatttccatttactttttatacccccttttgacgtgcttaagccatttatttaagtcatttctcgcttaatgtaaaaatgaaataaatttccaccgatcgcttgaattgtatca

SEQ ID NO: 142011 - DNA, 436 bp, Glycine max
agctggcttctacaatctcccccttttttatgatgacaaacctaaaatcaagaaatgcatacaagctctatcttctaatcgatcactcacataattctccccctttgtttttgagtttaagctctacttgaaattaagttatttaattatatgagttcttgatttaatcccaactttctctccccttttggcatcaacaaaaagccaaattgcgttcagagacataaaatcatacattcattcataatcatccaagcaaggaagacaataatgcatacataaactaagcaaggatgataataattcattcataaactataatataatgtcagatactttagagagtcatcccagataaccaaattaaaacaactaaattagaaagtaacatactaataagtgttgtaaaacatatccaaatacacagcttgaaaat

SEQ ID NO: 142012 - DNA, 442 bp, Glycine max
agcttcgtgatgatgaatcaagaaagtttgatgtatacaaagatgatgacaaaaagctcaaaagtcaagaacacttcatgataacaaagatgatgacttcaagaatcaaagaataagttcaagattgaataaagaacacttcaaggatcaagaggaaattttatttcaagaatcaagtttcaagaatcaagaatcaagaatagacaagttgaagattcaagaatcaagagaagactcaatcaagataagtagtaaagagtttttcaaaacattgaatagcacatgaatttttcacaaaacctattgccaaagagtttttactctttggtaatcgattaccagtttattgtaatcgattaccagtagcaaaatggttttcaaaaagctttcaactgaatttacaacgttccaattgatttaaaatgttgaatcgatacaatga

SEQ ID NO: 142013 - DNA, 445 bp, Glycine max
  unsure (1)..(445): unsure at all n locations
atcctccgagtcacctgcggcatgcaagctnnggaaaatntaagataaanaatctcttgtcctatcatttgttcttttcaaaatcttttctaataggctatcttaaaacctatcttaattcttttcttgagacctttgcctttgcttgaaatcttgctttcttcattcttgaatgatctttataattccttggcatcatcaaaataattcttgaagctttgcttctacaaacttattttgaaactcaatttgtgttttagaatggtcattccataagctattcaagaaggtacaaactatcttttgaaattaccattctagaataagatgtgctctgaaaacctattccaaaagataaaaatcaccttccagaattgggggttccctatagaaagggctatttttgtccataaaaaataaaatgggaagtgcacggtcaaaatgc

SEQ ID NO: 142014 - DNA, 391 bp, Glycine max
  unsure (1)..(391): unsure at all n locations
agcttatgaattcctttataactaattacatgttctgcatgangctggaaacactctatcatttgccaggagtaatatatagtggttcaatcaccaaagcaaagggaccttcaagttctttttggtttggtactaactcccctgacaaagttctttttcttcttattgcacctatggataatggatctggattttttttttcatcccatgttcattaatggcaataaatgttcccttgattgtgtcatgttcttgatgggatgggatcatacgtatcttctaatctacatgtgtatgaggtgctttttgaaaatgaatggaactatgtggaagttacatgtgcaagtttaaattgtgaatatacagaaaattttcttatttgttctaaata

SEQ ID NO: 142015 - DNA, 457 bp, Glycine max
  unsure (1)..(457): unsure at all n locations
catgcaagcttaaaggcgtgtaacccaccatcttctctagtagaacatgtttatgtgcctactatcattgtcatctccctctctatcattgagggcgctacttgagctgctagatccctccaactttgggcgtattctttgaaagattcatgctcctttttacacatgttctgtagcaacattctatccgaagccatatcataattgtattgatactgtctaatgaaggcaaccattatgtccttacaagaatggacccgagaaagttccagattagtataccaggtgacggctgccccagtaagactttcttggaagaaatgcatcaacagtttctcatctttcacacatgcccncatcttctgacagtacattttcaagtgattctcgaggcaagttatccccttgttcttatagaaatccngcatcttgaacatataatggatgacaacgtccg

SEQ ID NO: 142016 - DNA, 424 bp, Glycine max
  unsure (1)..(424): unsure at all n locations
agctngctgcaccatngacagatttacttatttatttagcatncaagnggacaccagaggcagagacaacatttgttcaattgcagaaagtcatgacttcagctccagtgttagctcttcctaatttccagctgcccttcattctggaaactaatgcttccgacactggtattggagcagtattacatcagaatggccatccaatagcatttttttccaagaaacttgcacctagagtgcaaaagaaatctgactaatttagagagatgttagcaattgttgaagctatagctaagttcagacactacttgctgggacacaaatttattatcaaaactgatcaaaaaagcttgagatcattgatggaacaacccctacagacacctgaacaacagcagtggttacacaaggttttgggatatga

SEQ ID NO: 142017 - DNA, 278 bp, Glycine max
gacacacgtgcaaaaacagaaaccaaaagctgcgcatgaagggatagaatataaacttctgccgaaactccatcgataggggggatgcaccacaaaaagttcaataaatgtgggtatactaagctcccagtgcaaaccaaatacatgctatcaaacgctattgcaggattttgttccaaagccgcgacattcataatcaaacggtggacagatatgatcgagaaacctgtgaacagaaggggataatcatacatctatcaacacaggcgaggacgtac

SEQ ID NO: 142018 - DNA, 448 bp, Glycine max
  unsure (1)..(448): unsure at all n locations
ggatcctctaagcactgcggctgcagctttccccatttcttattttagggggttatttgaagagaaatttcgntcagccctcctggttattcagaatcacttaaaattagtgaaaaaaattggtttcatgaagaaaatccaagccgaggcgctttcgtaacgtttctgtaacgtttccgtgggtgatttcgcgaaggttttcgaccgttcttcgacgttcttcattcgttcttcatcgntcttcggtcttcaaccggtaagttccctaaatcaaacttttcaattcattctatgtacccttagtggtcctcatttgcttttacgtgctttcatttacatttcatttactttctggacccncttttgacgtgcttaagtcatttatttaagtcatttctcgcttaacctaaaaataaataaatatcccccgatcgtttgaattgtatca

SEQ ID NO: 142019 - DNA, 399 bp, Glycine max
gggtagcacgaaattgaaggaataaaagaaggaaagaagtggaactttgaagtgtatctcataagactttcattcatcaaagttaccacaagtgttacacatgcttctatttatagactaaggtagcttccttgagaagctttcttgagaaaacttccttgagaagcttctttgagaaaacttccttgagaagctagagcttagctacacacacccctctcataactaagctcacctccttgagaagcttctttaagaagattcctaaagaagctagagcttagctacacatacctctctaatagctaagctcacctccttgagatgagaagctagagcttagctacacaccccctataatagcttagctcacccccatgacaaaataaaacatgagaa

SEQ ID NO: 142020 - DNA, 450 bp, Glycine max
  unsure (1)..(450): unsure at all n locations
cgacccgngatctctgagtcacctgcggcatgcaagcttaanaaactatataagattatgctactgcgaccgcttccaatacagctagggaagcggaaccggtgctacagcctgcaataaacttgggtcgagacagaaacacgatgggtttcaatcggaggtatagtcctcaagcctacccttatgatttgcctccagacttcactccccgtaccgctccaaacgatttgagccaagcccctaccttcgaggggcagctcccttctcatgccgactatcctctgcaagaagatgatgaaggagatgctcatttaggccctctacttctcctcaaggattcggccccccatgagttgccccaaccaaacatagtccgccacgtcctgtctccatcctcacccgttaaggaacttgttccctttgcaatagacaagggaaagattgatttac

SEQ ID NO: 142021 - DNA, 412 bp, Glycine max
acccggatccttaagtcacctgggctgcaactggagggtgatgggacccttgcttttatgaacgaggataaaagctacgtaggagtgcgtgagctcaatgtaaaggtgggcaactggggatggtgtgcttatgcctggcttgtagaagtgggatagttgatttgtgccatcgcccgatcgccacctagtgccacatatgatgggtgcccataatccaataagcttgatgtgagaaagcatggtagaaacggtcttcctacttttgtttgttgaccacagagtggtacctggagatatgtcgcgggggtcaggagacctttgggacgtcaggtggggtactattgtccaaaaccaaacttggctaatcccgacccaacttgggcatagccagtcagtgagaacctgtgacgta

SEQ ID NO: 142022 - DNA, 434 bp, Glycine max
  unsure (1)..(434): unsure at all n locations
agcttttaaacacttgagtctcaagtgtacttgtttgtttnttctctccctaaattgttaaaatacacctgtatcttgagaatctgtggaagtgaatgatagaaattttgatccttttctatgcttgagcatttaggggcatcatgcatgaccctttgttcaatagttagttctagaagttcatttagttctagccgcatgaccttcttgttcttgtattcatcttttcacattattgcttcaagttgatgaattgtaggctgttcattagtgtctgatagctttcattttgagaaaaataggtttacattttcaagctttttagtttcaaattttaacagatggtgtagagaacccaaactattcagcacctacgtggggttgatctttgttctaattattttaaaatggaatatagattgagcgaatttttc

SEQ ID NO: 142023 - DNA, 464 bp, Glycine max
  unsure (1)..(464): unsure at all n locations
atcctcaagcaccngangcatgcagctcagcactgttttattactaagttacagcattttatatgtncttatcacgggaggaatggcatgaaaatgaaatgggtcatttgtcttcttgacatcttatatctcacattgcaattgtagtcttgtgtagtatgacatgttaatcgtaactggagtatttttactttggtcttaactgcatttgcttaaacttttgtaggtgggcatgaactcattttgacaactggaaatgctggtggaagattagcatgtggtaccaaaaaaaaaaatataaattcgatcaggtctattcttttcatattcacctattcatccattccaacatgatgatatttgagttactctttgcctcaatgttctaagatgaactatnttctataacatcatgatccattttcgttttatgataaaaaaaagtacaacgtatttctcacaaa

SEQ ID NO: 142024 - DNA, 439 bp, Glycine max
  unsure (1)..(439): unsure at all n locations
agctngcctcanagaggtccaggaaggacaatgtggncgattgttctatttccgccccggagtatgacagtcaccgctttatgagcgttgtacaccagcagcgcttcgaagccatcaagggatggtcgtttctccgggagcgacgcgtccagctcatggacgacgagtatactgattttcaggaggaaataaggcgccggcggtgggcaccactgattactcctatggccaagtttgatccagaaatagtccttgaattttatgccaatgcttggccaacagaggagggcgtgcgtgacatgagatcctgngttatgggtcagtggatcccgttcgatgccgacgctatcagccagctcctgngatatccgatggtgttggaagagggccacgaatgcgagtatggccagaagaagaaccggtctgatgggttctatga

SEQ ID NO: 142025 - DNA, 202 bp, Glycine max
  unsure (1)..(202): unsure at all n locations
gtataccgacttacantacgagatatttcagccgcggtgggcatcactggttacccccattgcctacttctacccacacatattacttaaatttatgctatgcttggtctacgaggatggcgtgcgagaatgcgatcctgaggaagagtcagggatcccgttaatgcggatgctctcagccgatcttggataccctttttgc

SEQ ID NO: 142026 - DNA, 441 bp, Glycine max
  unsure (1)..(441): unsure at all n locations
gcaagctntgcagatntggtcttcgccagagaattgtatctaagtgttgtcttttaagangcaaatttaatcatcctgcttgggcgaatgagaaaactggggcaattgaagaaggtgaggatgaaggaaaaacccatgctgtgactgccattcctatacgaccaagtttcccaccaaaccaacaatgtcattactcagccaatgacaaaccctctccttacccaccacccagttatccacaaaggccatccctaaatcaaccacaaagcctgtctaccacactttcaataacgaataacacttttagcacagaccaaaacaccaaccaagaaatgaattttgcagcgaaaaagcctgtatgttcaccccaaattccggtgtcatatgctaaacctgctcccatatctacttgatactgcaatggtagccataacccctact

SEQ ID NO: 142027 - DNA, 427 bp, Glycine max
cctgcggcatgcaagcttaatactactcaaatctgaaattccaagtttaaaaacttaaatcagtcaaagtagactgattccaaatcaagatacttatttaggaaaaatattttccaaattacactgattatattttccaaatcaggatacttcaaatttatatttcttaaaaaatacttatattatagggtcatgtctaattttaaaaattacactatcgtcacacaagagataattaatgttaattctgctacttggggatggcttgcaggtaatatcatggattttcattacttttaaaagcaatggctagttaatccaggggagtgtctttggctcggacatgactaaattatgcttgctgttaacattttgtgtcattgaatgggtggtgtttcatcgggaggcaatctgatgtgattgtgtg

SEQ ID NO: 142028 - DNA, 419 bp, Glycine max
agctctctttggaccttgaacaggcaactattttctctttcaaaaccatgctatgtgctcgcgactggtccctttcttcctttcgcaacttgagttcactattgctaccccatagaactccgcgaaatttggtccggccatactctttcctgcgagccctcttggtctcttgttcgagggctcttgcggtgattgcattctcttcccgtaacccggcacactccttccgaacgtgtgtagcggccaacttgaacttctccttggcaaggtttgcctttcctaactcgcttttgagagcttggacttcttcgtcctcttccggtgcttcaaaactctcttcgctgacgacctttaacttggcgagccaatctaaacctcgtatatgaactttcagccattcgtggtacccaccaatgatg

SEQ ID NO: 142029 - DNA, 348 bp, Glycine max
  unsure (1)..(348): unsure at all n locations
cgagcgacgcaatatattattgtcctgaatcagacatccgaatcacaagttatggctgtntaactttgccatgtgcttccatgttcaattttgagcatctcgatatattatgcacctgaatcgggcatctgagtgaagaggtatgccatatgagttagccgagagcttcgttgttcgatttctagcgtcttgatatattattggcctgaatcggacatcctagtccaaagatatggcagtttagactctccatgtgcttccatgtctaattttgaacatctcgatatattatgcacctgaatcgcacatcttagagaaaagatattccatatgagatagccgagagct

SEQ ID NO: 142030 - DNA, 445 bp, Glycine max
  unsure (1)..(445): unsure at all n locations
agcttccatcagtgtntaatgagaagggctattattggctgagtattgatattgttgagctggtgggaaatttggccacataggaacggcagtcacagcatgggttcctcgctccttctcattctctccatttgccccaggcttcctattcatcaaagcagaataatcaaatttgcctcttctcaaacacacttcgatcctttcgccggcgaaaactaaattggcaaagcttgaaggtgtgtaacccaccatcttctcatagtagaacagtggtaacatgtccactatcattgttatcatctcctattccatcattgggggcactacttgaggtgccagatccctccacctttgggtgtattctttgaaagattcatgctcctttttacacattgatgtaagctccattggagcttgtaggcctaggatcttcttcatcaatgga

SEQ ID NO: 142031 - DNA, 450 bp, Glycine max
  unsure (1)..(450): unsure at all n locations
gcacctgggctgcaagctggagaaagctngaagaagtttgcttttcttgcctaactctctngactggcatttgtattgcttgttatattgaatgttgcatcttattctttaacatatcattagtgcgtcatgcatcatcatgagtgagaagaaaatttctaaagttagaaaatttcttctgaaggcaaaactctctattttaattgattacaaccttattgtaattgattacacaagttgtttaagcttgcaaagttatgtctcgtattagtttgattgattacaagcttatcataatcgattacatagttatttttgagacaatgactgatttattcaggagtctctgccttaatcaattaccatgtgatataatcgattacttctctttctataagtgtttcagaagtaaacaagaacactctaatcgattactttgagtatctaatc

SEQ ID NO: 142032 - DNA, 241 bp, Glycine max
  unsure (1)..(241): unsure at all n locations
acacacaaaacagaattactaagtgtttattatctatctctaactaaaataacttataacactacaaaataaccataaattggaggagtttgatacaatttacataagttntatacacaaaagttaatcatattcaccgactaacaaactccctaaagtttacagttttgcttgtcctcaagcaaataaaaaacagagcattggttcccaagtgacaaaaatatgcagtgattatgtacaa

SEQ ID NO: 142033 - DNA, 381 bp, Glycine max
  unsure (1)..(381): unsure at all n locations
attttataaataaaaatatattttggtgttattattttagtgtttttaattaattttaaacctttgtaatttttatttatagataaactattttaagagcttaatttatatacattgaaagtacaaaccagttttatattatcatcaaataacaaacaaaatagaattttatgtcatatcaccacattttcattaaattaattagggtaatggtttaaaatattaaaactctacgttatgagtggaagtagagagcaaaagaaaatataataaaatattacctatagaaaagatntagaagagaatgtacaaaccagttttattttataaataaaaatatattttggtgttattattttagttgtttaattaatttaaacc

SEQ ID NO: 142034 - DNA, 100 bp, Glycine max
agtcaaatatgaggagggaatattacgttagatctgttgattcatacgcatccccagcagtataaagataaggattgacattctgactaacatggtgcac

SEQ ID NO: 142035 - DNA, 430 bp, Glycine max
  unsure (1)..(430): unsure at all n locations
agctntaaaatgatatatggcatgtatgaaacttataatttntgggcactaaaaactttactgaactttgaaagataaatagcaaaaccctcaatatttcaatatgcttatcatcaatttggaatcgctctggataggatcctgctatagttcttgactgaacaaggataagtgttgtactttgttaataagagttatttgtgtcgtgactcttggcgttgttgatggtgatgtgtttgtgcatatgtgcatgaatcaacggcttcggccaagttgttgcagtatgtgttgtgccctgatagattcaactatattacacatacacatcaagtttgggttgcttagtgggactccatacctaatgtaggagagtttggtataggatggactttcttgtgtatggatgaangggctactctgcatcataaac

SEQ ID NO: 142036 - DNA, 313 bp, Glycine max
  unsure (1)..(313): unsure at all n locations
tttgtggcaaatcctttttcggcttatcaattctccatgggtcngggtggcggactattcatctttttcatcttttctattttttgatcttgagttcttggtaaggtcaacaatggtaggtcttgaatttgcattcataatgatccgaaccaagcgtccatggcttggattgatcaaaaagggatataaatggcaaccttatctcgagaaagggttatataaattttataattattggtcacttggcaaccaaagttacctctattatctagcactcccttttactatttaggtatgtagatattgatacctg

SEQ ID NO: 142037 - DNA, 298 bp, Glycine max
aattgtctaacctcttctcgagccctgataaccaaattacataacggcatgtaatatatcaaaaaaacaattttactaacatgtcagcatatgacaagctccagctgtagttgtgaaataatggtaagataaagacaaaggaacagctttctgaagcctaattgttgaagctacatttaaaatggtaggggattacacagtaccaagtacccacctacattgatttcttgcagaagaaccttttattttaaatcccaagaagttcttagaatctttcagatcttttaacaactaaact

SEQ ID NO: 142038 - DNA, 447 bp, Glycine max
  unsure (1)..(447): unsure at all n locations
agcctttcttacaaaaaagctatagtacttattctgcncccactgaggcggtcactacttcccctanagtgaggcacacatgtctgtcttatgatctgtagaaattcacaacgatttacttgctaaatgtaggttggggatgtcaatggagtaaaagttttgcagcatgatctcttcaccaatgatgtcctttacactgaaatagtattcaacatgaaattattgaagcgagagctttttccattggtgccactgttttggtaactataaagcctttggaagatgatatacattctgtttccattcatctttagttcctaatattagggaagcttgggtggaaaaggttgtgaagacaccatatatgacacctactacttctccacctttctttactcctgctttcattacttctatcagtccctataaccaacgtggattaatcct

SEQ ID NO: 142039 - DNA, 449 bp, Glycine max
  unsure (1)..(449): unsure at all n locations
agctntataatgcanagataattcctaaataatcacatgattaattacgataaataatcacaatagaatcttattttgattttatggacaacttttacatttataaatgatactctttgtttatattaattatattcttgatgctagcaaagaatataatattattccactaaaatatttatgtgattaaattaaattctctaatctaattatcaaataaattattttcttttgaaaagattgaaatacttgtttgtgtgtgatcccataggttcaacactaaaccagtagtaattaatcataattaatttactaatcaaggtaatcgtctagcaacacttcttaacgtctaaataacatgaagtaacattatttacattcaagaactaatagaagaataatataatattttgtttcatcatgtacaactcagagtaacacattgtatt

SEQ ID NO: 142040 - DNA, 470 bp, Glycine max
  unsure (1)..(470): unsure at all n locations
nganagacgtggccagatccacttgcaaaatattntatcatatatgcctgtaatcttgctgatagggttccaaatcctctgttaagacttttgcataaagttgcccctgagatcaaaagaatgttagaaattgaggccatttatactaggtgttcatgtaatatagttcgtttttaagcatgtgtcatttttcaattagaggaacagagacaccagataactagtccctatatttctatcgcccaagttatattaattgatacgagcttttcaatttagataagtatttcatttttagcatataaaccaagttttttttattacaatatcattggtatggagtgtacactattttgcctatggttaatctttattaggaatactcctttcaaccactttntttacgttcattaactcgagctagggaccttacttaaagattttgagttccgtattattcggaccaatga

SEQ ID NO: 142041 - DNA, 452 bp, Glycine max
  unsure (1)..(452): unsure at all n locations
ttatatcgactgcagcatgcaagcttgagtgtgaagctactgtactagatttaaaataatttaagtcaacgaaatgtgtatacgaacacatgcctttatatattggtataaatatattaaaacaactcttagaaaggctataaagcatataaattaaactctactaaataatcaacgtgaatatataacccagtaaaggtatggaaagtctggacaagatcctactttaactttgttactaccattggaaaaaagatgtgaatatatttcatgtctttaccacacaccgtcgtgtaatcatgttccatgcggcgtgaatatgaacttcgttnctttattggacattcttttatcttcttaggaggtaggtaattgttttgataccgtacctttgcaggtttgttttccccttgagttatgagtggccgcaaaaatttaattttaaattcaga

SEQ ID NO: 142042 - DNA, 460 bp, Glycine max
  unsure (1)..(460): unsure at all n locations
actagcttttacatgatgatgatgatgattgtatgctggattttaactattgtttggaggagnacatactggagaaataagcgacggttacgatgaacagttgcagcgggaattatgtggctgtttggcgcatgcaataagatttgtttcagctaatgccgatatgcgcatcgaggtcttgctcgcgcgagtccttcttctcgcttacttctctgctcttaactcttaccacttctttctgttagtacaacgatgaatgtatcgtatgcgtactcgtttgtatacataacatattctctctctcacacacacgttaattatgagatgcggaggctaatcaaatctaaccatcaccgatcgttccatgaaagaaattggacgcctagcgtgcgttgcacttgttttatataactcaccgccctatatatgagagttgacatatctggatatagaagatgat

SEQ ID NO: 142043 - DNA, 443 bp, Glycine max
  unsure (1)..(443): unsure at all n locations
agcttctgatntcaatttcgatcgtctcgatctatgacgagtactaatcggacatccgagttaaaagttattgccgcttacatttgctacgagcttccgctttcaactatgatcgtctcgatatattactggactcaatcgaacatcggagtaaaaagttattgtcggtagaatttgttcagtgcttccgttttcaatttagagcgtctcgatatattacgggactcaatcgaacatccgagtaaaaagttattgtcgttagattttgctcatagcttctgtttgaatttgctacgagcttccgttttcaatgtggagcgtctcaatatattacgggattcaatcggacattcgagtaanaagttattatcgtttgaatttgctcagagcttctatttccaattcgagtgtctcgatatatacgggactcaatcagacatcga

SEQ ID NO: 142044 - DNA, 448 bp, Glycine max
  unsure (1)..(448): unsure at all n locations
gattgaacatttcctattagatattgtccaaatattatttatggattgaaaagaaaatacaataaccgacatcggtcgttgtaaagtcgcgactcagattttcctcccgacattgagcaattttttttacaaacgctggccgataaaatttttttacggtagatgatgctttntagttcggtgttgccgtaaaaatttacaatgtacgtcgactaggttttttcgttcgagctcaaccgaagttgtggttcgaccgacaccagcatgttttcattttctcggcaacgaatacattagccctcctcggaagaaaacttgattcaccaatactgataaaaaaaatgctagccgacgtcaacgagggacaatcaacgaccgaggttaaaaaaagaagcttcaccgaatgacaccgattgaacattttctattaaacatcatccaaatatta

SEQ ID NO: 142045 - DNA, 222 bp, Glycine max
ctctttcatggcttattccctgagggatgacaccggctcttacctcttctcctttgactttcactgcatctccatggttgaaaattcccattataggacctcattgaagctcaaagatccaaccttcatataagctccacaagccaagctttcattcaccttgcccttgttgtggtggagtatccatgtccttgtggttagaatgaacttctatcccttact

SEQ ID NO: 142046 - DNA, 461 bp, Glycine max
  unsure (1)..(461): unsure at all n locations
agcttatcaaggaagctacctagtctataaatagattcatgtttatcacttgntataacttggaggaatgagagtcttgtgagacacaactcaaatttcaacttatctcccttnttattccttcaatttcgtgctccccccttctctctttcttttcctccattgaagcatcctctccaagcttcttatccaaggctcatcttggtggtgaagctccttcttccatggcttattccttaatggatggcgcctcctctcacctcttctcctttgtcttccgctgcatctccatggtggaaaatcaccattaaaggaccccattgaagctcaaagatccagcctccatagatgccccacaagcaagcttccatcacggtgggggtaccgtacgcgtcgagtaaaattgaacaaacacttggttaattgttgcgcctaatgaatggtcaatacaagcatgcatg

SEQ ID NO: 142047 - DNA, 324 bp, Glycine max
agcttatgacaaaaacgaaatataaactcgttgccatctgaaagtttaggccttggaccaactttatgaatgatgatgaccactgcttacgtattcataaacctaaggagataagttctgatggatgaaaaatagttaaacttgacatgtttatgtatcactactagaaataatatttactaagtcagttaaatagggcatatcatgatggttttgaactgttgtaaaaggtgatgtcgaacaatggcaaaaaaaataatgacggcctcgataaccgtcttagtatactcaactttttaaaaggttattccaataaccggtcta

SEQ ID NO: 142048 - DNA, 451 bp, Glycine max
aatcgatatggaagacttgcaactgccttattttgcattaccagcacaatgcggatatggctcccgatcggaaccagcttcagagtatgactaagcgagagcatgagtccattaaggaatatgcccaaagatggagagatctcgcagcccaagtcgtaccacccatgacggaaagggagatgatcacaattatggtagatacgttacccacgttctactatgaaaagctgataggctacatgccagctaactttgcggatctcgtcttcgccggagaaaggattaaatctggactactgaaaggcaagttcgaatatgcttccaatgtggcccccaacaacaacagaagagcctcagtagtgggcgcgaggaaaaaggaaggagacgcccacgcggtcaccaccgccccgacgtggatgaaagcactcccaaatatccaaagcttatacca

SEQ ID NO: 142049 - DNA, 403 bp, Glycine max
ctgcttatgtatattatatgttgtcttcacatcaattttcaataccaaaccaatgttatccaatcgatgtgaatgttcacatcggttttatttgaaacacccaatgtttgccgttgataaagttgacatctgttctgcaaaaaaccgatggcaagtaatgcacattttttacaattttgccccccgatttatgttaatatcggtgttgtaaaacctgatgtaattgacgatgttaatctacatcttgtgatagggatatcatgactgcttgtttgcttttcagatttttatggcttgcttttttttttgtagttttatgacaaatatgcccgtggctttcttgattacgacaataaagaatgacccaacaacaattgatgcaattgttctccactctaaattg

SEQ ID NO: 142050 - DNA, 442 bp, Glycine max
  unsure (1)..(442): unsure at all n locations
tgaagtgaggaagtgtggaagggtgagacttcctactntttttcgtcgaccatagagaggtacctagagatatgtcgcgggagtcaggagaccttgcggacgtcaggtggggtgctattgcccaaaaccaagcttgaccaatcccgacccaacccgggcatagtcagtcagtgagaacctgtgatgtacctaaacaagcgagctcctggcagtcaaccgattaaagaacaaagaccacaaagcaaggaggcttgtgtggtggctggccagctatggatcttgagtaatatttggaatatggcctctggtaatcgattaccaagggtggttaatcgattacaaggcttaacaatgaagacaagaagttaagatggcctctggtaatcgattaccaaggatgtgtaatcgattaccacgcctacaaatgggatcaggaacgtga

SEQ ID NO: 142051 - DNA, 422 bp, Glycine max
agcttttgctgcgactgcttgaaggaatggatgaatgggcatgtttttaatgggagaccttgtgttgttgcatttgcatcgccttttacggttaaaaaaatgggggaggctcatataaacaggaatcagcagatgaaccaaactgctgttcctcagggaaggaggggacctgctgatgcaggggctaagcctggtgggagtaatatttcgacaggtggtaattaccaaggtggagatggaaatataagttatggaagaggaggaggaggtaattgggggagaggaaataatcctggtatggggaatagagggcctattaatccaatgacgaacatgggtggtggcatgggtgggagaggtataatgggtaatggtggaaatgggtttggacagggtatgggtgctactccatcacttgtgca

SEQ ID NO: 142052 - DNA, 458 bp, Glycine max
ctagtgttggaattatcatacactcatggatgttctaatgtttttaaatatagctatacctacaaagcgtctagaatattcatcgtggatatcctcgagaaatagtaataaggaaaaataattgttgactattcttcttctataaaactcaccaaaccatcgcgtgcatttccttgttggacttttctaatgccaatcataagggtttcttttttcatcgtatatctgaagctttcatgtcggctcaattacttaattcaataaaattaagaaaaataattaatttaattgataataataaattatcttaaatttatattctttaaataatctttattattaatatttatatttcttctaatgagttgtttgtatatttattcttaaggagaaatatctctaatataaaaataattaatataagtattataaattaaatcttataaatagatatcata

SEQ ID NO: 142053 - DNA, 309 bp, Glycine max
gcaggcaagcagaaaaaaaacccagatctatatgctaatccccccagacacaaaagccattcctgatattactggaccaaccgtggaaacggacgtcaaatcctttgtccagggttattagcaatgtgcagcagaaaaataaagcatcctacagctaatagggggtacttaacaacttgcagaagttgggatgccctacggcatttcttccatcaattggactaaagttagattatattctctgcactcagtacaaagaataaagctcctctaaaattctaatatcgtaagtgcacgactaagagtgca

SEQ ID NO: 142054 - DNA, 208 bp, Glycine max
tgcacgaaggccggggcttaatacaattaacccaaatagatgctctacctactatggtggaatcttgatctaaaaataatcctctgtacgttgctacttatcaaaatgccaagtcaatccacttagtaaacttacactaaaacatcatcgagtggacaaaggcactgtgttacaagttaggaaaattactatatacatccaaaaaaaa

SEQ ID NO: 142055 - DNA, 266 bp, Glycine max
agctagttcgcacatcgttcgcgtgtatgatatccactccacaagtttgaaggtgaggagaccttcaatcctattacgcaacgtggcggacaaaagtgggctgttaacttgaatggtcattattgtcaatgcggaaggtattttgcgcttcactatccatgttcacacattattgcagcttgtggttacgtgagcatgaactactaccaatatatagatgttgtttacacaaatgaacacatcttaaaagcttactccgcacaatg

SEQ ID NO: 142056 - DNA, 448 bp, Glycine max
  unsure (1)..(448): unsure at all n locations
ttatgattagagctacaaagtgcacatttattttccaannnaaaggacactgaatactgaagcatatagaatatcttaatgacctncaaatatattggaacaaaatgatngagcagcagacaagtcatagcaataatattttgctcgagtcatccaccattttcatgcaacacatgttctattaatctcctatgcttctcactttaacacaaaatttcacttataaagacccaaaatttcccattttctaatcaaatagatcttccttgttattcacatttgaataatataatggcaagtctcgtgtatatatataaaataaanattccacttagccaatccaattcctttaccttcttccattacacaactcngagaaccaaaaatgacatctctagcatgagagtgagattctctggagaatgagttatctcaatcttacacactg

SEQ ID NO: 142057 - DNA, 343 bp, Glycine max
ccccaccataccccctttccccttatcacaaaactttgtggaatacttattgctactccaaaacaatggactttatataatccacactctagggtaaattcattatctaattaccttgcagaccctaaaatcagaaaaaattgagtttggtggaactccatatgaaacagatgctcagttagcgtacatgtctcagcttggagtaaaaaatggtggaagtgcagcggtgatcacagaaaatagtgatctaatagcatatggcttgccacactgtaaaactcctccaatactgtgatattgtgcatggaggttactgcctttttgatatcttgattattaactg

SEQ ID NO: 142058 - DNA, 337 bp, Glycine max
atttgaaagtaaatgttaataaaggttaagagtgcgttgctagctttggacatgtaatacatcgattatattataataaacaaatattagagcgaagagtactcaaatctatcaaaagagtagacaaggaatatggtgtggaaaataataagggatgagactcaaccttttatataacataaaaataagatcaccaatggtggaatcttaactaacacttaaggatcgagcatttaatcatgagatcaatagaaaaagattaaaattgtaaaaagatatcaatatagtgattgaaacaatactaaattttatttaaccttatattaataacataata

SEQ ID NO: 142059 - DNA, 358 bp, Glycine max
  unsure (1)..(358): unsure at all n locations
atcatnctgcgttgatgaatgctataactgcggctaatgaacaggatgagaatgagggagaaacccttgttgtgactgcctttcctacacgaccaaatgtcccattcacccaacaattttcttactcagcctcttacagtccctctcacccaatcattcacaaaggccgtccctaaatcaaccacaaagcctgtctaccacacgttcaatctcatacaccacctttagtacgaacctaaacacctactaacgaagagatcttgcagtaaaacaaaggcctattaaattcacccaaattccggtgtcatatgcttactcgctcccatatctattcgaccattctaatggttgctataac

SEQ ID NO: 142060 - DNA, 474 bp, Glycine max
  unsure (1)..(474): unsure at all n locations
nggtcggttcagttntaattaagcgcttgtggcatcctcttggaatgttctaaaaggctcgggtcattaaaagactacacatcttttaaggcacaaagaaaggatcggaataacgaatcaccaatcccacattctttaaaagattgcaacaaaaaatattacagaggacaggaatccctgggggaaaccacagaaaataaaaacatgcagtgacttccttaattgccccaagtcttaagtgtagtatcgcttgacgacgtcggagtttatgggtgaaggtagttcctcgtcatccatgttggtgagcacaagggcccctctggagaaagccttttttacgatgaaaggcccttcgtagttcgggacccactttcccctattgtcttttatggcttgggagactatcttcagtaccaggttctcttcactgaacctgcacgagtctaacttattgtcgaaagcattcttcacccg

SEQ ID NO: 142061 - DNA, 437 bp, Glycine max
agctttatcatagatcatggagagctggattttgtgtttgttcaagatgggaaggttatccatgtaagggtcatattcttgagataaagcatttttagttatgggtgaatttatatttatatatcaaacacttgaaaggcaaatagaggtacttattaggtacatgtactattttcagcttttgaatcctgattgtaaatctgctcaacgactcaaaggtaaattgggctactttaatgtttatgtattgcaacctacaacagaaagcagttttaactgagtttggttttgatacagcaatggtgtccttcacttcattcacagaggaagagaaagataaggccatcagtattaactcagtgcaggaagttaatgaagtttgtgcactccatgatccagatcacatgactgtaaaaattctttctcatgccgatggg

SEQ ID NO: 142062 - DNA, 444 bp, Glycine max
  unsure (1)..(444): unsure at all n locations
tcagattaagctcnaagggtgcaatgtcatcattcacaaacagggtaagctatttggctaagtggctaattcaatcaatcacagccttcatcatttccaaatcatgcattcattaattattcagagattcatgcaaaaattggtactcaatgctagtcgttctctcacaattaaagttcacacaactcactgggttatggctaatgattacattcactatttatctatcaaacaaactaacaatttcactcatgcccctaattcatgttctttctcttctaattacctcatacttattcaaagcatgtgatctaacatcgcaattcactcaagtcatgcaatcaatcaaattcaaaaccaatcacaaacaccagatatttaaaccaaaacataccactgcataaaattaaaaaaactgtagaatgttcaaaatctgtgaaatgt

SEQ ID NO: 142063 - DNA, 320 bp, Glycine max
  unsure (1)..(320): unsure at all n locations
caagcaaaggggaccaaatcgcgcgctgcagagtactcaatgccataagcagaancacctggaaacaagcacagaagctcaatcgacaacagaggcaccaaaaacagcaccaacggtgcagaacccacaccagagcttcggaagccatccacatacactcagcgaacccagcgcaaacataacacacgcgggccggagcgaaaaaactcactcacgctcacacacgcccgacgtcctgtacacctaacacagaagaaagccgccgacgcggctgcatacgccgcgcaagggaaaaaaaggaagagagagagacaaccccc

SEQ ID NO: 142064 - DNA, 387 bp, Glycine max
tgagatgcccgctgagaatggctgacatgatcatgtattggtgtgttggtcaagataaaagggatccccacattattccatgacacaaatgcaaaaatgagatttgaaacttcatgcaaacttgcatgcatgcattatcggacatcaaatgtaaattttatggtatgtgatgctgggctctgattcatttcctctattttaataacccaagtttcaaaaatgtcttttatcaattggcatcatcgagtcattgggcgtcggaaatttcacagcattaccctcagggtgaccatttccaaaatggtatggcatgaattttcaagaaagttgaatgttcttcaaagctgtatttactaacactattcttttctcttctttttttatata

SEQ ID NO: 142065 - DNA, 418 bp, Glycine max
  unsure (1)..(418): unsure at all n locations
aaactaagctacatagccctaatcttaaactaattctaacaaaacatattatcccgttattctatagctacagntaaagtcttctaccctaaagttaagacaagaaaaagagaaaaagaatcaaggaacttacttggatggtgtaaaaatgatacttcaaagtcgaaaatgcacaaagagagtatagatgcaaaatgtgcaaatttttggagagatagaatgcagaggcaaggtttctataatctgacaaatgtgagtgtaactgctgttacactcacttaagcagtttttggataccttcgcttagcggaccgttgcgctaagcgagcaagacagacgtttggtttctcaactaagctcgcttatcgaacacgtgcgcttagccgatgtttcaaattcgataacagaaactcggctt

SEQ ID NO: 142066 - DNA, 309 bp, Glycine max
  unsure (1)..(309): unsure at all n locations
ncaagcttggtgaagaggtgaacagattattacttataannattgtcagttgttcactcgctaagtgccaagtattcatacgctaagcgagcccctgctcacgctaagcgcttaaacccctgattagtggctggatggtagcgctaagcccaattatctctctagaatctgaatttctcgaattatgcttagcaaggtgatgcgctaagcacaattccctctctattgtggaaatctttggaatagcactaagcgcaagccatcactgcatggaggagcatgtttatgcgctaagccccacctttagca

SEQ ID NO: 142067 - DNA, 400 bp, Glycine max
gaactatagacaactcaagcttagatcacatttctcattccagacaaacttcttattctttttagtcagtttagttaagggcagggccaatttagaaaatccctccatgaattttctataatagccagccaaccccaagaaacttcgaacttccgttggagatgtcggttcttgccactccataaccgactcaactttaattggatccaccgcaaccccgtctttaaaaatcacgtgccccaagaactgcactttctccaaccaaaattcacatttcgacaatttggcgaacaatttcctatccctcacgatatgcaaaacaattctcaagtgcttctcatgctcctacttattccttgaatatactaggatatcatccatgaacacaaccatgaactga

SEQ ID NO: 142068 - DNA, 444 bp, Glycine max
  unsure (1)..(444): unsure at all n locations
actcagcttcagacaactgggagaatctatacaacgatgttgaattttatttaaatagagcgcncttgcctctaaagaaatttgtctaacttagaaaactgcctccacacatactatgatgatgcacaatacaaaacaaatatcaaatatactaaggtgcaacaaccaagataacaaccaatacaaatgccattcaagggagttaagcatgtgaaagccacaacttcttcaagcttttccttaagcttcaagctttagccttatgatgttcaccatggtgcacatgctgctccccctatctctaacaactatttttacacttagagaaaaaaatggaaagaaatagagcaaatggtatagtaatgaacccaacggagatacccacattactacactatgtcccaaaaaacatatccattcttccaaaatcttggtttagcctaa

SEQ ID NO: 142069 - DNA, 418 bp, Glycine max
agcttgttcgcacatcgaacgcgtgtatgattttcactccataagggttgaagagaggagacacttaatcctattatgcaacgtgacgaacaaaagtgggcagttaactcgaatggtcattattgtcaatgcggaaggtattctgcgattcactatccatgtacacatattattgcagcttgtggatacctgagcctgaactactaccaatatatagatgttgttcatacaaatgagcacatcttaaaatcttactccgcacaatggtggcctcatgggaatgaagcggctattcctccttctaatgacgcatggacacttattcctgacccaactacaattcgtgcaaaaggtcgactaatatcaacaacgataaggaatgagatggatcatgtcgaaccatctgagcactgacaaa

SEQ ID NO: 142070 - DNA, 414 bp, Glycine max
  unsure (1)..(414): unsure at all n locations
tatgaggaattggccttntgtattaaatataacctatattggcaatgtttctcactaatgaaaacaaaacaaataaataaaataacaattttttaatcagtaaaaagtagatgtaaattggtacaagggtaacaaaacccatatacaaaacttgtgaaaccacacaccctactgtccacttcactggttatttaatattttgctcaacacagagagaaaaaatattttccttcataataaaaagttaacgtcttattattatttatttgtaattattctttaaaaaataaattaaaagaaaacgaaaaataggataataatcttttgattttatcccagattctatcccgataattgtgaaaatcatctcaccataactaaagaaacaatttcacacagcacattctacaattc

SEQ ID NO: 142071 - DNA, 408 bp, Glycine max
  unsure (1)..(408): unsure at all n locations
atatacattaatcaaggctccaataaactaattgcaaatgtcnaacacgaatattgcaggcaatatggccaggtcttagaattttggtaatttatgtatgcaaagaaactaaaagtgtaaccataacctgtattttgactgaagcaccttgcattcctccaagtgaatttctttttggtaacaactaaatttttttgtagatataataatagactcacccctccagtgagtatcttttccggttatctggtttgctgcttcttggctgcttctagtaagggtaacaacgtctggatcatcataaattaatctaggttgtcaaactatattacaacacaagatattatagtgcatccaataacaagttcaaatcagcagatgcaatctatattgaacagaagtaccttg

SEQ ID NO: 142072 - DNA, 347 bp, Glycine max
  unsure (1)..(347): unsure at all n locations
ttcttttttcacccacgtaaccttcatgaggagctctcatacccactatcacattcaatcttatctcgatatcaaaacttgtctcttccactaattgcgaattaattttttcttccacatcgtgtgtgttgtaggaaacgaacaatcatatgtagatcggtatacgtgaagcatagcatggtctctaccacctgataccaaaccaaatacccaccaaagccatatattnnagcatcactcatcctcgatgcaacatctttcccattgacctatggcattttataatgggacacccgtctattgaaagactactatgtatgaataaacattatcctcttctgtgaacg

SEQ ID NO: 142073 - DNA, 231 bp, Glycine max
  unsure (1)..(231): unsure at all n locations
gaccttaaacgacagngctgcaactgcaagaacgatatgtttgcttccaataacagggaggactgtatccacagaaatattgactcacaatataagctgactggacctttccgctactaaggaattaacgagatctcttaatgtatattctaccctgcctcttataatgcttcattctgggggtgagattgggcatatacttatctataatgaacggtgcttctatagaga

SEQ ID NO: 142074 - DNA, 293 bp, Glycine max
ttcacattactagaaaaaaattgaccggtatttaacagaccaacttttaatcttggcacctccaatccttgaagagaatttaagtgcttgagatccttggatttggactgattatccagaatctggttaacagattggatttcaccaatgtcattgtttggcaaaactcttgtgtatgcaacctaaactaacaaatagtaatgtgaggtccagtgcgttaacaaatagtgtaatgtgaccaatcttgtagacctctcatgaagttcgaatgtaaaggattattacatcaagta

SEQ ID NO: 142075 - DNA, 380 bp, Glycine max
caacccaagtcaggggtacctctccttctatacatcttagtcacgtcagaggccatcggttatgccctagactaggaagagggaaaacaccaaattcctgtctactttgctagcaaaatccttcataacacggagaagcagtaccagatgatataaaaggtagcactgacactcataaccttggtccgatgcctcaggccgtatttccagagccactatgtcattgttaaaagagatcatcctatcaagcgggtgttgaaaaagccttaaccttctaaaagaatggtagcatggtccatagaactatcagaatttgacatccaatatgaaacataaggtcctatgatgaccaagttcatagcagactttatagcggagtt

SEQ ID NO: 142076 - DNA, 375 bp, Glycine max
  unsure (1)..(375): unsure at all n locations
aactantgactgtgtggacacgggttttagtattttttcatgacgaaaccggggagaccagcccaattgaagtcaagtgttcttgctgtttctatcgccattgaagagaattctgccataactcgagttggtgtggatgcacttgacaaaaatggtcatctcaataaactctaggatggccctccgttacactttctttcttatatatatctcttgcctttgtaacttatgagttaaagaaatgtgtcactagccattgtaatgcttccgccctggtattggattgtcacagctgataaacaaccatgcgttgggactggtggtatgataacctggatactacacctaccgtgaggtctatcatagtggattact

SEQ ID NO: 142077 - DNA, 475 bp, Glycine max
gacctgcggcatgcaagcttgaccggatgtaagatacatacttttcaatcttattcattctcgactccatttcattgaagcgcatattacttgcagttccaaagtatcaaacctctcaccaacaaaggtttgaagaccatcaaacctttccataatcttcgaaagaagagatgaatcttctccttcatttccttcttcaccaacatttctagcacccttcttcacccaagagccatcatgctcctttatataaccaaaggatgctatgactgaagcgcctataacgaatgatctcttgattggaacatagggttcataatcaagagggatgttgaagtgttgaaggaaaagagtaactagatgacgatagggcaatggggctttcaatcgcaatgccttatgcatgcgatatctaacaagatgtgcacaatcatattgtaacccttatgaagggccacatgacaatgagatcttg

SEQ ID NO: 142078 - DNA, 428 bp, Glycine max
  unsure (1)..(428): unsure at all n locations
actaagctnctacaagaagagatgtccaagagaaccaaggatgaactatctcatctatggcttgaaaggaggaagccacaaggagctaaattggagcaccttggagatttgttgaatggctcgcttggcgacactagctcgctaagcttaattccatccataggaaataattctcttagcgacaccagcttgctaagtgcaattcctacatgaggagaaattgtgcttagcacanatgtcttgcttagtggcaaccttctgacagttaaagttaaatttctcttatcaacaccagctcactaagcgagtcttgcaagttataaatatgtccagtagcgagaaaaataagatattgtacccttccctaaacgctcacctaaaccttaagccacctctttctccacagttgccaccgctttccaccggac

SEQ ID NO: 142079 - DNA, 449 bp, Glycine max
  unsure (1)..(449): unsure at all n locations
agctngaagagatcttcaatggctacgaacaacaacgcatttcattttgcttcttctttccccaattacatatcacataaagtagaagattcaagctttcttttatggcgtcaactagttaagcctattatcaaatcaaacaaacttcaatgattcattgctaatccgcaaattccactgtgatttctctttaaagaagatcatgaagttggacgtgaaaatctagtttatgaggcatgggagtagcaaaattaggtgttattaatttggcttcaatccattctttctacactgattttttctcatgtaatccggtataatcactcctatgaagtctangagcacatccatgattacttncacaagcagagcatcgccacaacgcgtcagttgcacattcaacttcgagcaatgaaactnggaaagcagtngatgcaatagtttctatc

SEQ ID NO: 142080 - DNA, 470 bp, Glycine max
tgtgagctgtgcgctctccagtccatatgtggttttctcttacttgctacatagctaatattttttgtgttctatttattctgttgttgataatcaaactatttgttttacttttaggtattataaagtttgtatggtatatctgttttaggtattaatattatttgttttaggtattctaagcttgtatgctattatttgtgttacatatatatggcaccttactttgtatgttaatagcatttattttaggtattctaagttattcaaatatacggcatgttagtttgtaataatttggtatatatattgtttacatttttctttgcatattaactttcgttattcaaatatatattgtgttatttatttaaatttgtgtgtacatgtattctaatttatttgtagaatatatgtaaatttttgttatatcgataacactattaaatattgctattcaaatatatata

SEQ ID NO: 142081 - DNA, 379 bp, Glycine max
agcctggagatgatgcttcaacggaggattatatttatattggggggagcacgaaattgaaggaatcaaagatggagagaatctggaactttgaagtgtgtctcataagacattcattcatcaatgttacaacaagtgttacacatgcttctatttattgactatgttgctctccttgagatgcttcctaagaaaacttccttgaaagcttctttgagaaaacttctgataagctgagctttctaccacacccatctaaaactaagctcacctccttgcaaatcatgaaacacaaaaaaagttctactacaagactactcaaagccctaaatcaggctaacccttctactaaaggcaaatcaagccaaaaagaaaactt

SEQ ID NO: 142082 - DNA, 394 bp, Glycine max
agcacatcagctgatagcaacacgaacaccaagagagtctatgatacttgctctttacagcgcagacgctcggattctggctgatgatgatctgtctggtgtgcctcggcaatcatttgactactcaaggatgggtcttgatccttccaggttagtgtctgaacataaaatgacctgcatatattatcaaaatccaaaggggtgcgcttataccaccctctggatgtatgcttgcaattgacgaatccacttctaggatcattgggtacagtgattaatgcttacaattgttgggtttggagaggcaaattgatccaaagcagttcatgaatctaattgaggatgatgccacaacccttatcactcccccttctgggctgtacttgcataaact

SEQ ID NO: 142083 - DNA, 420 bp, Glycine max
  unsure (1)..(420): unsure at all n locations
agcttatgctgcaaatatttacaatattatcttctcaacctcagcagcaaaatcaaccacagtagagcaattatgacctttccagcaacagatacaatcctggatggaggaatcaccctaacctcagatggtccagccctcagcaacaacaacagcagcctgctccttcctttcaaaatactgctggcccaagcagaccatacattcctccaccaatccaacaacagcaacaaccccagaaacagccaacagttgaggcccctccacaaccttccctcgaagaacttgtgaggcaaatgactatgcagaacatgcaatntcagcaagagaccagagcctccattcagagcttaaccaatcagatgggacaattagctacccaattgaatcaacaacagtcccagaattctgacaagctgg

SEQ ID NO: 142084 - DNA, 405 bp, Glycine max
tatgacactcagcttaatgatgtaggcatattggaggagctgtgaggggtttgctgggtttccgcaagtaagagtcgaatcatggtgtgggcatacctttccttctttgccccacttgctccaaatcttctgctgcttgtaccggcaggggcaacatagtcgaacttttctcttttcaagcctacttcgatcctcttgcctgcaaatactagatctacgaagctagagggcatgtagcccaccaactcttcgtagtagaacattgacagcgtgtgatgcaatcctaccccccaagggcattggatagaagacttcaagaagattgggccaaagatgcaagagaaggccctagggttctcatgagcactatggtagatttcgggcccatgggctaagtatgagccc

SEQ ID NO: 142085 - DNA, 247 bp, Glycine max
atctatgtggttgattaccacattacactttggaaacattctttaggggacaagtgtatacagtaatcctctcccaaacttgttgagaaatgaacctaaaacggccaattttgacttgtgaaggagataaatgagacctccttttgttatatgccatttgcataatattttgaacaacacatgaattatcgcatggagcttctctataatatatattatagctactttgtgacttgtcacttagcgt

SEQ ID NO: 142086 - DNA, 376 bp, Glycine max
  unsure (1)..(376): unsure at all n locations
aaaactaagctgccaccaagcataccttatgaaaatatgagtatcaaattccaaganaaaaacggaccaggcactgatctctggtgtccaacttacattgaacgacttgagaaagcacattctagcaagcttagtatgtatttcacaacgataattcgatatttgaaatacttcatcgaggagtttgagagtgccctgtatgagaaatttctagtatgacctcattgaagcaaattgacaatattcttcaatgtaacaatagctccaattatataacaagtcatacaaatatctcctatatggcatgtctatttgaatgtgtactctatactttactgtcaatgccctgaggagttattatcaagatagtatatgt

SEQ ID NO: 142087 - DNA, 413 bp, Glycine max
  unsure (1)..(413): unsure at all n locations
agcttctgaatgtacattattactgttgtttttttaattctcaagttccctgttacccattctttaggagaatcagagggttgcctatatttgaggcatttgtcggctttgtggtcgccagttgttggtctttgatcatgaagagtttgcagttntgaagtgctcggagctctgtgcaccgaagttgccattgtccagagagaggattgcattcgaggaactgtggagtcagcagtttctccaggtcttagttcacagcttattgtttggtgctttggggctatccttttggaggaaagtgcccattcttgccaagactgtgttgtccccttcctcccctttcccttttgtgggctccttttatagtctccatgtatgtgccaactatttgttcatggatccaactctgtaat

SEQ ID NO: 142088 - DNA, 337 bp, Glycine max
  unsure (1)..(337): unsure at all n locations
ccttcacgcatattattctgttggctnancgagcatccactaagcacaacactcctgggctatgcacatggaataatccagaagaagatgagctgtacaggttcgctaagcgcaccggttcatctctctaagtgcaccacttcagttcatccgctaagcgagaaaggcacactttagccaataattactaacgtgcgctaagcgcacgagcactaacaaggccacctatttaagcctaaaatcacattttgtgaagagagtctggactgggattcagagcttagcatgtttaaggtttctagagagagaaatgtccaagttccacagagttctgtag

SEQ ID NO: 142089 - DNA, 437 bp, Glycine max
  unsure (1)..(437): unsure at all n locations
tctctcaacccgaaggcccgctgatgggttatggnctcttttttcctcatcactagttccagggcatgtgagtatgtttgtagacctaacatggttcatatgtctccttgtgttggtgtgctgactattacttattggcagtataaaagaaagaatatatctcggtccaccaccaaaagaaaagcttcccaaggtacactgctatccattgtcaacgtctcacatatttccactgacagtaatgactacaattgtaatatttctgcagaattctccacaatgatctgttctgctacgggcaattccatatgggaagctgtcctttgttggtcagggagagaataaaagctctgatagcaccctgcatatatcagatatctatatatgccctcaaataatgttacctctgcctataaagtacctgccccattattgtg

SEQ ID NO: 142090 - DNA, 371 bp, Glycine max
gcgcctgcggcatgcaagcttctagaatgagataactgttattttgtatcattaaaggccctggttggtactattctctaaaacagtttactattttctaagacttgtcccctatggactccctccgaattcctttctaatctatttctagatgcatataattattttttttctatatatacctacctgaatattccttttcaaaacattaatgatgaagtaattgtgtgaatagagaacttacgataaaggttattttgaaatgatagttcaattaatcgacaaattttatttgagtaactaaatcaacttatttgcttaggggtgtgatataattgaaagggcttataattatggacagagggagtatt

SEQ ID NO: 142091 - DNA, 438 bp, Glycine max
  unsure (1)..(438): unsure at all n locations
tggaagaaagagcatgagagtgcgnctattccttatcttttaacannnncncgagaggcggaacacatgaatactatatctggccacacccaccagaaggaaaaaaagtaaaacttgcatatggaagagaagatcaatattttttatctttcgtactggtccgaactagatgtcagacattgtattgatgttatgcatgtagaaaacaaacgtgtatgatatggtcatcaagacgctccttaacatttaaggcgcgacaaaagatagtttgaatactcgttaagatccagctgagatgggtatatgagactatgtgcatccaagtctgatggtataaaatatattacctccactggtctacttttgttaaaaggagaaataagtttatgtcagtgtgcatcgtcgcaatgtccattggatacttccaatattagagcc

SEQ ID NO: 142092 - DNA, 157 bp, Glycine max
aaaacaaaggggtatcggcttaagaaaatggaaagaggcacacctgagtacctttgaaaaggaccaaccctaataaagttgaatcaccaacgaagaccttttaccccacacaatatacataccttctcgccatcttaatagcactatggaaacgaaa

SEQ ID NO: 142093 - DNA, 403 bp, Glycine max
tcaacactccttggctctttattttggaaactttcatatggtgggctattcaactgctgaagaaagtggtttgcacacaaagtggcctcaaaagaaacaacagcaacaacagcaccataagttttgtaatggaggaaaaaatcaacggccaatatgatcgctagatgacatcatttggtaggtcaaattctttctatgcagaagctattgcagattgcttatagttcattaaacgaacatctatatcatctatggatcaaagtcaagacccaattatccatattcaagatatatagatactcttgattgctttcttggtcgatagaaatatagaataatatatctttatattaggttcatatatctatgcagaactatcagctttgttccttcattgttggtg

SEQ ID NO: 142094 - DNA, 481 bp, Glycine max
ctcaagcttgtccataatagtcaatgaatatctttaagatggagctttctttgtcttttgccctgcaaaatataaaacaatcattaaaaattaacaggtgcatgagggtagaaacccatatacatactctgattccatgagtgtcagatctcctctcatgatcatttattaatgaagaaagtccttatgtacagatgatgagtatgttggacgacagcgagttactctgcctaagtcctcaccctataacttattgtagacaaaagtcaccacaaattataaatctcttattctccttttgactcattgtgaaaatatattgaaattcaaagattgaaagagcaactttaaatttaaatggctaaaaaaataatccaaattttaaaaaagaacttagaaagacaaaataactatctctatattcctttttgaagcatatatacactcttaaaacttatagtaaaagtgtcataagatcatt

SEQ ID NO: 142095 - DNA, 421 bp, Glycine max
  unsure (1)..(421): unsure at all n locations
agcttgtcgctggagtngacccatcaactgtcctatctcttttagactggtgattcctaggctcttgaccttaacttgatagaacctctttttaagcaaaggtgcttgactcgaccccatgttttactaaagtgaaacaaaacccagtgcaaatcaaaactccaacatctatcatgggtgggatgaatgcatgaagaaattcatatgacatagatgcaatttatgaatacgggagcccgggaaattgtccccttcttagatacaatgtttgggcagcatggcgcccgacgtatgtatttaagaaggcgacatggaccctccgtcggtttaacaaagggaggggatcaagacggaatccgcgcatgatgcatatgccaagggcacaacacgatgatgtacatagtacgacaatatccacaaa

SEQ ID NO: 142096 - DNA, 470 bp, Glycine max
  unsure (1)..(470): unsure at all n locations
gcttagaatgggattgtagagggtgtaatatctcaccacaacgtaagcaaatgcttttttttactcaatgaactcagggtaaaagaggtgatgaaaccctttttcatcttttctgttgagactctctaatgttgggacaccagtcacaacacaaagcacaaacaaacgcgcttatgaagcaaataaataaatatcaatagatgcgtgtagtggtntaatgacttaccaatacgacttgacaagatgcgctttccatggccaaacggcgctagctcagtatgaggaatcttcaatgcgcgagctccacaccgacaatcttcatggtgcgagatccacaaggttcacgggttactgctntttggggcgaggtagagtgtttggggcttcacctatggcatagcggtgtagactgtatgtgctcgaaaatgttcgcaactacattcaaggcgtgtgtgggacaagatattaac

SEQ ID NO: 142097 - DNA, 297 bp, Glycine max
  unsure (1)..(297): unsure at all n locations
ctgcagcatgcaagcttttntgagcaaagcaaggcttgtttttgtctctttatccangtaatgccacattcttcttcaccagctacatgggaggtgatgcaattgctgagaaatcatgaacaaaccttctatagaagcttggtaacccatgagaacccctaatatcccccacacttgttggggtgggccattcttggaagggcttgaattatctcaaggtccacttggaccccatttctaccaactacaaaaactaagaaaactatattatttacacaagaaggacacttctctata

SEQ ID NO: 142098 - DNA, 424 bp, Glycine max
  unsure (1)..(424): unsure at all n locations
tgaccaccaagagagtgccttggataagaaacttagatatgtatgcttcttggttgataagaangagagaggggggggggggagggggctccaaattgtacgagaaaaagagggagagaaattgaactctgaagtatgtctcacaagtttcacattcttcagagcaatgaccagtgtaacatatgcttcttttgatagccttcgtcactaactaaatgagagctcctttgagaagcttctctgagaagcttactcgagaagctagaggttagctacacaccccctctaatagctaagctctactctttgagaatttagagcttatcttcactcacccctttatgctaagctgatatacatgataataccaaaaggtcctactattagaactactcataatgccctgaaatacaacgctaaaacc

SEQ ID NO: 142099 - DNA, 429 bp, Glycine max
  unsure (1)..(429): unsure at all n locations
agcttccttcagaagctagagggggggctattcacagccctgcaatagctaagcttccatgccaagatacatgaaaatacaaaaaagtccttactacaaagactactcaaaatgccctgaaatacaaggctaaaacactatactattagggtacccttaacttttacccttaatttgtagggtaccctataaacctaaaatgacataaatacaaggtccaaaagaaggaaaacctattctaatatttacaaagaaaagtggacccaaacttggcccatgggctcagaaatctaccctaaggttcatgagaaccatagggccttctttagcagctctagcccaatcctcttggaacctcttgctcatggcaccagtgactggtccttcctagggaggatngcatcatccncttccccttgaagaggattg

SEQ ID NO: 142100 - DNA, 355 bp, Glycine max
ttccatcttttcactcctctttcactttcaccgattgaaattcactaaaacttcctcgattggcagaaccatccaagaagagaaagggatcattcttcaccaccgctgctgatacccaacgtcgcctaggaccatccgaagcacccacagcacctatccatccttctctgtcatctccaagatcatccactctatcttctttcgatgatcagcgtctatggtacctctctcaattttcttctaggatcattatagacccttagtacctagacgcagatatctttaatgatgagacatttgatttccatcaagtgtttcacaactctggcttggttgatttcatgcttttaaattg

SEQ ID NO: 142101 - DNA, 437 bp, Glycine max
  unsure (1)..(437): unsure at all n locations
agcttaacaagattgattatagtttggctttggccttatctaaaaaaagctttttaaaaagtttgagcttgacctttatagtaaataagccaagccttaaatagactaagccataagctcttgacaaacggctcgactcattttcatctctaatgataataaatgcattatggctgtctatttgtcttttatatttctagtaataattattatttgatggataagtcaatagttagcaatatcatatgggatgatgaagtcgtttaaagtgtttacaacagaacaacattatctggtaatttgataacacaaaaatattaggattaataaaanatattatctgtgcaagtatatagagtattggatgtatgaattatttgtccaatttgtgaaggtgtgaatagacactatggtgggaatgttggaggttctcacag

SEQ ID NO: 142102 - DNA, 459 bp, Glycine max
  unsure (1)..(459): unsure at all n locations
tgttcttggattttcctaagttctttaacaagcttagatttatatacttggccttcgtttaattgtctttgagtttggcggccatgatcaacaaagtactttcgacacctactatatgttgacttaaccaacgctgttattggtatgctgcgacaatctttcaacaccttattcacacattctgagaggttggttgtcatgtgaccatatcttcatccaaatgtatcgtaagccatgctccatttttcctttgaaatgctatcaatccatgttactatggctggactcaattgacgaaatttttctaagttttgatcaaacacatgcttgcaaggagtgtacgctgcgacaatctttcaacaccttattcacacattctgagaggttggttgtcatgtgaccatatcttcatccaaatgtatcgtaagccatgctccatatntcctttgaaatgctatc

SEQ ID NO: 142103 - DNA, 420 bp, Glycine max
  unsure (1)..(420): unsure at all n locations
agctttgacaacaatagccatcaatgggtttttgtcttttaatcctgagaaagttnttcatttttacgatgaactccactcatatttggcatctgctggtattgatggtgtcaaagttgatgttcagaatatccttgaaactcttggagcaggacatggtgggagggtgaaacttgcaaggaaataccaccaggcattggaggcatcaatcgctangaacttccctgacaatggaatcatttgttgcatgagtcacaacactgatggattatacaggtatggattgcttataaaacttcagtgaatgctttcattaacacaataacaatagatttatttattcatgatgacgattttcttttataaattacttgtgtagcgcacagcgttcagcttgttattatggcatcagatgatttc

SEQ ID NO: 142104 - DNA, 425 bp, Glycine max
  unsure (1)..(425): unsure at all n locations
tgccattacatcttatttttttagtgttgacgtganatatataagcacaggattaaaggtactgcattgtgggttaactgtgtactggattggctttcagatcttaacactacttgtgttaggtttgcttacatgctttataaatgtattttttatcttttaaaagaaaaagtaaatcttaccaaacacttttttatcacgaaatctgaatgaaataaatattttctttacgtggaatgaggaaaagcaaattgtttgccaattgaggaaaggcccacatcataccatggcaatagcatatgcactaccatgcgataagggacaattattaacatgattagacgaagagttcatattaaataactgtatttgaacacatttagcgatgaaatgcatttacctgaataaggaatatttgcacaaag

SEQ ID NO: 142105 - DNA, 217 bp, Glycine max
caaaggagacttaccaccatggatatgcagcggaagacaaaggaaaagaggtgaaaggaggcgccctccattaacgaacaagccatggaaaaaggacctcccccaccaaatgagcctcggagaaaaagcaaggagaggatgccccaatgcaggaaaagacgaagggagagaaagagaggggggagcacaaaactgaacgaagaacaagggagagaag

SEQ ID NO: 142106 - DNA, 263 bp, Glycine max
gactgtctgtcctgatatgcttggcctgcttatcgatggcaaacattatcatgtgctataaaactatgacaaccgatttcttatatgcgatagatttgctctgtttttgtgaaatattatatctcacaaaacatagtacgcattatgctgtagttatatgtctcgtggtaatacatcttgtcataatatttcgctaatatagtaacacagacttatcttttataaggattattttaataagttttttatgtttgtgaaatgca

SEQ ID NO: 142107 - DNA, 289 bp, Glycine max
gggtagtcaaagagaagttcaagtccctaaccatcaaagtctggagaagagttgatgaactaagggatgtcaatatggccaccgctgaagccttggaacgagaaaccaaaaaggcccgaaaggaagaacacgaccaaaacaagttttgaggggctttatagggcagcaatagtgagctcaaactccgaagaggtgaaaggaatcatcacgggtcataggcatgatctggaaggaccagctaaaggcttgccttaggtcgaaaagaaatttttcccaataatttaagtga

SEQ ID NO: 142108 - DNA, 372 bp, Glycine max
gaaagatgggctgaattaattcttcttccgtcctgactaattaaaaattcaacctccttagtgttactagattcaattaggctttactactaagttgtgaggatgtaacgaacaaatacactaacttagaccaaagtatagcgaaaattagagaacacggcggaaattaaagagtgtagggaagaatcagacacacacaggatctatacttgttcgggcacaacccgtgcctacgcccaatccccaagcaaccaaccggttcttgagaattcattcaaccttgtagaatcctttacaagccatagatccacaacggatgtaccctacagtgatctctttgtataaccaagaggttgtaccctccacttgaaa

SEQ ID NO: 142109 - DNA, 365 bp, Glycine max
ctcccctatattgctatagataaggtatgaagcgaatatagaaagggttcagccccttagcacttctctctctttctaatttgctgaggaacattagttccgtggaaaaaatcccagccaaggcgcttccgtaacgtttccgtaacgtttccgtgagtaattacgcgaagattctcgaccgttcttcaagattaatcgttcggtcttcgttttcttcagtcttcaacggggtaagacctcaaaccaagcttttcaattcattctatgtacccgtggtggtccacattttgcttatgtattattattctcgattcattacttttataccccttttgacggcttcatcattatttagtcgttctccc

SEQ ID NO: 142110 - DNA, 426 bp, Glycine max
  unsure (1)..(426): unsure at all n locations
agatgatgcatatgattntgtggctaccttatgcactcttcattagatctatagcatcatttctggcgccaaactgttgggagttggaagccatcttctcaattaaattcctggcttcagcaggggtcatgtctgcaatggctccaccactggcagcatctatcatacttctccccatgttaccaagtccttcataataatatcggagaagaagcttcttcccatgctcaaaaagtacaaaatgttcacggtaatcaggatgcacactatgcctaactaatctatgaaatgtcctatctatttcaaggtcaaatggttgtaagtcacctggattgcctctagtcatgcactatatgcagtagtccatgtgtttctcacacaggcacaagagatggttaaaactacaactattccaaacaatatcca

SEQ ID NO: 142111 - DNA, 411 bp, Glycine max
cttaattactgagcttcagcttaataaaatgttagagacaatatttcttcctcaatgcggttgaaactatagtcattgtatatgaaaaagtccttttcaaatcggctatgcttgaagcaacaaatggtcaccttcaagatgaccgagtcaataacaaccactaaacaattggttgatttcaacaagaatcttgatgatttggaaaatattgaagttaagcttgtagagaaggataaagctctcttgcttccaaattcctttgaacattgcaaggatgcaattctttatggcaaagatcaagacattaccctagaaggtgcacacctcaataatgaccaaggaaatgcaatacaacaagacttcaaatctgaggataatggtgaaagccctaatatttcaaggggaaggagt

SEQ ID NO: 142112 - DNA, 335 bp, Glycine max
  unsure (1)..(335): unsure at all n locations
agtactgcccatatatatgntgcataacaacgaaagcaataatggctttttttcttgctaatccagatactcttttccacacctgccacatttgagcctcgcaacttttagcatatatcgcccacgcttcttgaccaccgtcttacttgactgtatgaccaaatatttgctgaccctcactgtcagcaaagacacattttctaacctgtggagactcagatatgcttcatcttgctgcagctgctgacatagccttttttcttgcgctatcaccttcacggatatcacatatgcgctgcccaacaaaaggagttgtgtaacagcccgtctatgaa

SEQ ID NO: 142113 - DNA, 465 bp, Glycine max
  unsure (1)..(465): unsure at all n locations
gctgttcttctttctgtttgtggngggagggacaccctagtgttaccttgttgtttcgcaattaggctcattttccatataatgaacaattgatttgagatcatttgcataatctctttgatactctattaggctcatcattatatcttacacggaatgagttcaggccttacattcgtctctctttatttgtgctatcaattcaatgcgatgttcaaacaaattgcattgtaattctttctttctgaatctgaaatgctgattgctgatacgattctgttctttaatatttttttttttgcatttgtgccattttttggctatcaaactcaatttactgtgaaccaaaggggatcttttaacgatgagtgctaccatatgccacacatgtgcatagccgcggtggtggtgtggttatctaccatgaattgcatttacttaataacactagcccctgtggctggc

SEQ ID NO: 142114 - DNA, 444 bp, Glycine max
  unsure (1)..(444): unsure at all n locations
ctaagcttanctctggccgctcttgatggatctaaacatgcgcattttcttggttctcttagacggaagaaggaacaatcaactagaccttctttggatagagggccaatgatcctaccagcagttggcctgactgtggctttggctctgcctactatcgaggctcatcatcacagcgctagcatgtcttccccttgctatgataggtcctcatgggaggggtcgcgccaataaaatatgatgtgtgcttcatgcgaaccatctataacaaatgaaaaaaaaaagctattataataaacaatcatatttaactgacacaataatatcaattaaaaaacattaaatgctggtaacagtgatgaaaaaatatacatcagaatgatatcgttgcgtgttgcatcataatgcacataggaatcacnatgtcattgcgtatagaatacg

SEQ ID NO: 142115 - DNA, 367 bp, Glycine max
agcttgcatagcagtttctactacttaagctgaatacatagttgtaggaagttgttgtactcaaagtctttggatgaagcaacaacttgaagactttggagtaaaccttgatcacattcctctaaaatgtgacaacacaagtgctaccaatctaacaaaaaacccagtcaagcattctaggactaaacacatagaaataaggcatcattttcttagagatcatgtgttaaaaggtggctgctgcattgagttcattgatagtgagcatcaactagaagaaattttcactaaatcttttgctagagaatagttttttattagaaatgaactaggcatgttagatgcatctagcataaaatgacattct

SEQ ID NO: 142116 - DNA, 452 bp, Glycine max
tccatcaagtggtaatcagagcagaagagcttcaagtaggtgctcctttatctctccattaattttttgctttaccttctcttccattattttttcttcattttttctccacgtatctcctcaaatgtcttgtgctaaatgttcttaacatgattctttagagttttcaccgattaaacttgctagagaagctagattttattttctatggttcaaatttcttgttcttgttcttgaaccatgaattgtgttgagtttaagttcctttgagttttgtcttgttattttttgtggctgaaatctaaaccataaaattcttacaaaaatattaaagtagaagaaaacctcaaaaatctagagtgacttgttcacctattgtagtcttgtcataaaagtcatgtctagtcatgaaacttgtcacataagatttcttatgttgtgctgaatttatt

SEQ ID NO: 142117 - DNA, 383 bp, Glycine max
  unsure (1)..(383): unsure at all n locations
ctatttgattattgggcttgaaacaatttaaaggtatgttatttagttatatataactttttatatctacaccacttagaaactctatctttactatttttcatatatatatatatatatatatatatattattttgcatatgatattgataaatttgtcttttttttagcctcgattttattttaagattaatgaagctggtgcaaaacagtattgcaaattgagtatgggaagaaaatgggttgaaataggcaaagcttatggaatgaattcaacgatccaaccaaaacaagagatgaaatcataaaaaatgtgccgataggcataaataaaaatcaatgggctcgttntgttcattatcgtcataaaccatcaacattgg

SEQ ID NO: 142118 - DNA, 334 bp, Glycine max
  unsure (1)..(334): unsure at all n locations
cattaatttcagcctctcgatatattacnggacttattttacatccgagataaacgttattgtgcgttcaatttgctcagaggctcaacattcaatatcgagcgtctcgatatattacgggactcaatcagacatccgaggaaaatgttattgtcgtttgaattggctcagaggttcaacattcaatttcgagcgtttcgatatgttacgggactcaatcagacatccgagtaaaaagcaattgtcgtttgaatttgctcacagattaaacattcaatttggagcgtctcgatatattacgggactcactcagacattcgagtaaaaagttatt

SEQ ID NO: 142119 - DNA, 128 bp, Glycine max
aaaaatatttacttggtgagcggctgtaactttacaatcactacaatccttaataacgaaagaagcccattgctattgcatgaacacaaaatcgaatccttcgcaccttgaaaacttctcatgctttc

SEQ ID NO: 142120 - DNA, 460 bp, Glycine max
  unsure (1)..(460): unsure at all n locations
caatanagaagattctataaaatcatctttagcacttttttttaaagacgggttttcaaattaaaaaatattagtcaattattgtttcataaaataaaatagtaaacaaaatgaaaaattatttaaaacgaatttttgtaaccatttttctggcaatttgatttgttttgaaccgacttgacttgttcatcatcaatttctttcttttttcttcttgggttttcttgaccaatgacatggacaattcatgtgttttccaaaaaataaaattatggttttcatcagttttcaattgaattgactaatattcttttattttttcctatatattaatcagaatatgctagactcatagaagattcatattttataagagatgtaacttcttaattgtcaaagagcatttgctcttatcatagaaatattggagtatttggtaataataataataataataata

SEQ ID NO: 142121 - DNA, 379 bp, Glycine max
ctattcatgtcgcgtgtgattaaactaattatctgctcaagagaattctttagatgatgaatatgccggtcttcaaaataaggattctacttttgacgatgataccaaagttgaatagcttggacagagcaaagatatcactgccacacctcctaaagacctccctagagaatgaagaactcaaaaagatctctccttatgcaacatcatctggagaaatatcaaaggaatattttactcgctctatactcaggattttatgcaataacatggcttttgtctctcatatggaactaagaaacatatatgaagccttcgacgatgaacactagataatggctatgaatggagatctacatcaatctaacaggaatgaagt

SEQ ID NO: 142122 - DNA, 463 bp, Glycine max
  unsure (1)..(463): unsure at all n locations
tctgcttgtcaatntgctgagccgggtagtttgtctagttttccttattgtagttgcgcttggagcatctaaaggtggaggggaactcangggtgttgccatgtgcctgtaaaaaataaaaatgaaaatgaaacacaacttaattaaaacaacatgtaagcatgaaattgtaaataaagacaattaattgtaaataaaccaaatataatttttcaacatgttaaacattatttgggtatataccatagttatgtagccgtattctcccataaaccttcatcatgatcgttacaatttgcatgtacatcattctcctcattttcaatatttgtggaaggcatctgtggggagaatgtcgacatctcattaaaatcaagagttgaagcatcaatatcataagggataccacttgttttcccatatagaacaacaaaccatcttgagtcactcgaatcttgaacat

SEQ ID NO: 142123 - DNA, 375 bp, Glycine max
agctttaactgacaggtaatttttggtttataagttcataaagcttttcttgatataaaaaagaatttgtagtgcataattatgtacagtttattttcttagttattgtaattaggattaacatcctcaatttccctcttaccattcttgtgtacagatatgtagcctataaatacctaggttagcattcattttcttgtccatatatacgttgtactcactgctgtaaattatcagaaaatagtaatatcattcaagttctcttttttcaagttaatttattgaaaaacctgagaaaaactgaatatgaagatcaggaatcctcctaacaacagaagaggatactgaaaacaagataccaggatccagctcaaa

SEQ ID NO: 142124 - DNA, 452 bp, Glycine max
  unsure (1)..(452): unsure at all n locations
aacaactacgtctaacttatagcctttccactttctattttacacganaaaattactgccaggagtgttcttcttttgccctttcagggtttggggtcaatttcgactccaaactgatttagacataatctacttttcagcgacaaaagagtttaagttaagctatgaactctgctctacaataccaaaacgctcaaaagctgctcatgatcatagatcttcttggtgaaatgattctaaaaagtccgcatgtagtagtaacagaaactactttaacacttanacatggggttaaaaaaggaattggatttacaattcaagattccatcacttatctaatatgaacttttgtccaaagcttcaacaactgtctagttaatactaatagacaggtctacaacattcagcaatcactttgtgacttctactcaattttgattaaaccagcaaag

SEQ ID NO: 142125 - DNA, 308 bp, Glycine max
aatagctcaatacttggattgttcatggaacgatcattacatgttcacccacaaatatgtatagaatatgcacttgattcgtaaattcaaggatggctcatatcattgttttacaattttgaaaatgttatcatttctatgtccaaggggaaaagtgtttttaaaaacattgtcaagactttacactttgcaccgacatcatctaacttgatccattcaactttttgctatatcgagaagacttaatctaacctaagtaatacgaatggactttatttttcccattctaactccatgcaatatatctg

SEQ ID NO: 142126 - DNA, 458 bp, Glycine max
  unsure (1)..(458): unsure at all n locations
tacccatntntntatataaaataacctaacttattttgtatttcaacggtattgaattactactatgtgtgtggttggattatctttgtgaatacaacgtttagatgcaaaagaagaatgaaatagagaacaatataagcaaaaaaaaaaaaaaattcttctgaaaaacaaaattacaatataaactcttcaaaaaaattcactcattgaaaaacattgtagatttgtagtcgtataattcttatttaaagaccaacaacatgaagagtacctattcaccaacactaatgaacttcaaagtgacctcttcaaatgacaaaatataattgattagcaattcataaacaaaaccatctacaatattcattggactatctttacggagagatgtttcttatatgaaaaagttgtgattgtttacatatggatctccatgtttgaagaagattcattaggaa

SEQ ID NO: 142127 - DNA, 372 bp, Glycine max
  unsure (1)..(372): unsure at all n locations
gcttttacccctcaacaaaagtaatttctatgcagcaaagcactttctgcacacaccttttggacagccagtacaatgaaacttagaatgttcattacaggcgaaacaaaaatggcgaccttgaatttgaaaatatatagaaagaaaagcgcatcattatatgttaaactatatttgcataaacctctcactacagctaatcactcccaaaaagagaatactgactacaaaacttggaaatattcagtaggaaaccgagaatgtggcaaatagaacttatcccctccccacatgcaaaacgttactcttatatttctatcacatgatggaccaagtatcttcgttagtactaattaataantaatactaatg

SEQ ID NO: 142128 - DNA, 429 bp, Glycine max
  unsure (1)..(429): unsure at all n locations
gcatcacggacactacagatactaagcctgtaatgttcaggaatgtgtganagttgcctcttctcttttgctactatcaacaaatccaatgctgaaacttacaggttattggtgggtaaattangggagggatctgtgaccagattcgatcaggatccattacttggtgaaaattcaaagtgctgttcttgttgtaatgagcaatgggttttaaaaggttatgatcgaaggttggtaattaccaagtcaattgggtctggcaatgctgattttgatgaatcaaacgttgttggaaacaaatttcacaagataagaagagctaaaccatttgtatcatccagagctacacaccttataaataaacaggcagatcctatgtctcatgtcggttacactgagctatacatcactttggatactgagtctgaa

SEQ ID NO: 142129 - DNA, 336 bp, Glycine max
  unsure (1)..(336): unsure at all n locations
agcttgnnaggttaaagtcatacgattgtctcgttctcatgcaacaattgttaacccgggctatacaagacatcatgcccaacaaagtcatgttaacgataactcgcctgtggcttttcttccatgctatgcgtagcaaagtcattgatcctgtcaaggttaatgagttggaaaatgatgccccaattatactgtgccagttggagatgtattttccccctgctttctttacatcatgaatcacttgattgtgcatctggacagagaaatcaaatgatgtggtcctgtttatctacggcggatgtacccggttgagcgatacataaagatcttaaa

SEQ ID NO: 142130 - DNA, 447 bp, Glycine max
ctaagcttagaatgccagacatacaagaagcaccaacatcaatggtgtctggagttgattggaccaagagaagagtagtgaagcctacttattacgtgtaaggggtagaattggaagatcgaactagcaaaatcagcccaaaatcctgcttgtagtggttgctccctcataggcagtcatgcatatcaaaaccgttgttagattcctcttggataaaaatcatacaaatctgttaaggggaattcctctatatatagctatgtaaataatcaagcacgaaaaaataatatttccttcttaccttggtatttacccctttcttatcttcattatggaggccgctgccctcgaagccagcactggatttcttactcataacaacattcaaaatatattataataataataaagagagaaaatcagaattatgtttccggttatgtgctc

SEQ ID NO: 142131 - DNA, 450 bp, Glycine max
  unsure (1)..(450): unsure at all n locations
agcttgtcatcgtgagacatcagaggctattatttttatntatgtgggtaagaaaaactcaccaaattgatagagaaaaatctaagatcatacatcttaggcaaataaggcatgctagcccccaacattattgcattttgattccatctttagacattcaaattggtgtttatttttcctgttatcttttcctttgccttagtctaaatttcaaacttacaattcggtatctctgtcttcttttgtttctcctcatttcttaataattggatttgcatcacttaagtacaaccaaagtccctctggatttaattgttgaacttcaaattcaatctttactacttgtgataaaattacgacacttgtcaatctattaacaagtttttggcgttgatgatggggactcttggtttcgtacttggttgatacaatcccaatttgaagcaatca

SEQ ID NO: 142132 - DNA, 479 bp, Glycine max
  unsure (1)..(479): unsure at all n locations
tcaacctcagctttacatgcatgtgcacaccatatttactaaacttagatcaactgatgctatctattngantgacaagataatttatactactcttataatgtagtgtacaactaacaaaaataatataatagaaaatagtgcttaagccattcaagtcaagtcattttgaatctcatcattagtatcatacatctatatgtgtcaaagagaaggagaaacatgcatggtgatgcataacacaacaaaacattataagaaaacatgctttctaaacccaaccaaggtaaaaatgttttcatatttcatgaaatagcatggcttcctatggtggaacaatgatattaatctggtgagtaagtctcgagaatgttgatatgattgttattatgaatctgaaaatattactcgaaatacacaaatggtctcatgaatggaacgacttcctatgctcaaaaataagaattgacacacctcta

SEQ ID NO: 142133 - DNA, 471 bp, Glycine max
  unsure (1)..(471): unsure at all n locations
actcagctntctcattctaggattgatgctctaagacggctgttatgtatttatctgtataccaaccaaggctgtccttaagacatcttatgagttgcacacgggttggaaaccaagattgcgacatatacgcgtttggtgatgcccgtttgaagtaataatttattatcctcaagagaagaaactagaccctaagactattactgggtatttcattgtatatgctgtaaggtctatagggtataggttctattgtccatcccacaacactatgattgtggaatcatagaatgcaaagattcttgaaaatgacttgatcagtgggagtgatccaatttagaacatctcttttgtaagggatcactatgaagctataccttctgtgacaagtgatatgcttggtagtcatttccaccgctcttagtaatatgggagttagacaaacatggatctaattctacatgctgtgaa

SEQ ID NO: 142134 - DNA, 390 bp, Glycine max
agctttaaacatgaaggataatgaagagtttctttttatacacataaaaaacaaacacaaaggtgaatgttttttaacacatgcatgcaaacaaacataaaggccaaaacgagcacatgcatgcaaacctgtttaaaaaaaacaaaatagaaacagttgtaggcatcaaaacgaacagaagggcataaacagtaacaatgtaaatcagaatcaagcaaagctcacgcatgttctcagcaaaagaaactaaaaaagctaaactgacaattaacacataaccaaaaataaaaaaaagcaaatgcaacacaaaccaatagttcataaagcaagcgcaaaggagagaaattatgaacgaaatgagcacaatatatgcaaaaagataaatgggaa

SEQ ID NO: 142135 - DNA, 425 bp, Glycine max
  unsure (1)..(425): unsure at all n locations
aactcaagctntacttaggagctgtccttgccacgggtactctaattacttccaatcttcatgtttataaaaggaacaactaatgaatatagacgaatgataaacgcttcaacaagaggatactatgtcaatggaaccatgaccaaattaaagaaaattatagaagatgtagcagctaatgaatgggcccgtgattgcaactgcaactctccaaaggatgttcccaaagaagacaccgaagatgaatccctcaaacaacaaacacaaatgaaagctatgatggaaaacataaccaaaagcatagtaaaacaacttcaatcgttgataccgccaaaacaaccaatactctcatgtgaagagtgtggaggtaaccaccacacctcttattatatgaaggaagtagcctaggaagccaaattcatgag

SEQ ID NO: 142136 - DNA, 464 bp, Glycine max
  unsure (1)..(464): unsure at all n locations
ntatagagcagctcccacaacctgcaataaatatcatgttttatganaaatcaaatgaactcttaattattccttgtgtgtgagagcaaaatagataaaaataaatttttttgaaatttattaaaaattataaaatttggtgggatgattcaattcgaaagagatacaggttgaaccactttggcatttccacaaaggcacaaacactaacatattnttccatataatcaaaaagttcatgacacttctatatagtttttaacttagttaaacatgttaaattgagtgtcaacacaagattaagcaataacttagtaaacatgctaaaattattatattcaaagaagcattaaaacaacttcaaatatagttactatttgaatattgaatttagtaatcgtaaaattaaaattacactagtattagttaattctctcacttataaatatatatgatgaatcaaa

SEQ ID NO: 142137 - DNA, 244 bp, Glycine max
ttgcactccatatagcagaccgggaacggccttcttcttcaccaagtcgatagaacactgttaagtgattgtgcctcaatgaacccactaacatcatagacgaagccacaaaattccattctgaaatgcgaaatgtgatcgtgattacgttccatgaaccatagcttgcatccatggcgaagtggcgcgcgttggaaggagatcaccggtgagctggattctggtgaattggacctcactggac

SEQ ID NO: 142138 - DNA, 463 bp, Glycine max
  unsure (1)..(463): unsure at all n locations
taacattacaataaacgcataanaaaagagagcatgcatttattataataaacataataataagtataatattgattaataagcataatttgtcagttactctgaaatttctattgtgacaacattaggtagtggcaaaattaagttgaatctcattctttttaaggattaacttaatgattgagtatttttttgtttgagtctcatcttttggataagctactgtgacattagaaatttcagagcaataaatagattatgctcattaatcaatattattcttattattatgtttgttctaacttacgcttgtattttttaagtgtttattgtaatgttatgcttacaatgattaaaaaaagggagaagatgaagattatattatatgtttggtaaatagtcattttcatccttgaatgtatagagcgtcgacaaatttgtccctaaatatgtcacgtacact

SEQ ID NO: 142139 - DNA, 438 bp, Glycine max
  unsure (1)..(438): unsure at all n locations
gcttgcacctnttcactctcctcaggcatagcatatctttccttattttatctcttagctgttggagccaagatatcccttgtgatctaattacaaccatttgtgataaccgcctatgacaccattgctacttaccctaagctctttatcttttccttccactttattccatgccttagagatcctctaaagtatattcacattagcttcattgaaacctcacgtgaagaaaggaacgaaggtctcttttaatggcgcgcctctcatagggtatcctaactgtattactgccaacacgagattataattaatacataccctcatccctatcaaagggacacttggaaatcctcacatgaacataacactcctaccgcttcttctttccaccatgggaaccaactaatgaacgcttctgtcatgcctgccaaaagattt

SEQ ID NO: 142140 - DNA, 396 bp, Glycine max
  unsure (1)..(396): unsure at all n locations
agcttagcaaatggacctgngtgttgccctattttttcatatcatccgcaatactcatcacctctatcatatctaataatcttcacatttatgtctaatatcccttttacttcattgtagtaaatttctaaggcatccattgcccaagagatctcgggcagtaagtacacataaccgtgacgtgaataatcatcattaatggagataaagtatcattcctttccgaaagaactaacatcaaaaggtccacatatatcagtatgcacaatttcaagaagctgagtgcttcttgtagctcttttctatatatgatgtgcttgttttcccttaatacgaccgacacaaatatttagatcccgtaaatctaaataaggaagaattncattctctattaat

SEQ ID NO: 142141 - DNA, 363 bp, Glycine max
  unsure (1)..(363): unsure at all n locations
ancntaacataatgcatgccaagtgggtgttattctcatagcaattcccttatgttatcaaacataataagggaaaatattatattgtactcgatgctcttattcggcgtcatgcactactttctatgcttgcaacaaaattgattgatcctgaatgtctgaaaagcatgaatgacagtgatgaaactttggtgaaattttcaaaaaatggtttctatagacatgaaggcgttcttttcaaaaaaacaaaatgagtgcgcctaaatgcctacaaaaaacatgcttgctcgtgacacacatgaacggggttaatgggggcatattggagccaaaagactctactaacattactagaacatttta

SEQ ID NO: 142142 - DNA, 421 bp, Glycine max
gctaacactatggcctgctataggaggtgcatgagaaacatgcactattattatctcccacaccaagtaagcctcaggatcaatctttccaatatatggaggaccgtagagtaaaatacccacaatgcggtatggcctaggaacaccatcattacctctcatcctccattcttaatcatcaagatctctattctccatgtgatccaacctctcatggagcgcaacatctagttgattcattaaccaccccaaatggtgcatcaaagcacgcatttggaaatgcgaaaacaccactccaccatcaggaatagtacctgacatcttcgacaaactaatcaaaccgtacaagaacattatatgtgctgcgtgaatacctaacccacacagtgtatcacacaatagggctttctctaaagaaaca

SEQ ID NO: 142143 - DNA, 479 bp, Glycine max
  unsure (1)..(479): unsure at all n locations
ctcaagcttgttcatcaacgtaaannagcttatgcataaattaaatattatattatttataagcagcccttcaaaaagaatatatatcataaacatgttcaacttacattaacaaagcagtcatgaaaatgcaaacgcagcaaggatgctccaatgcgttttttacgaataattgcctgcttaacaattgactctatgattggcaacgccttagggcaaagctttgtcataataataatgagtgagctgagcaaaggtagggatcataaatgttgccaaagtgaccataacaagcacaaggaaagataattggagatgagaacccatttgcgcgtgtgatgctctatgaggtctatagctaataagatattgctttgtgagtcaagcaaacaggtatatgtagggtttatatatgacggaatgaagtacagcacctttactctgtctagctagcatatttctttgatgagttatcaaca

SEQ ID NO: 142144 - DNA, 386 bp, Glycine max
ctgtagcatgcaagcttgaatgaagctgtaatgaatactgattatactatatattataaccaaacttggaagtttaacaaaattcagagatacagataacaataaaaatactactgaagtattcttaaatggtattcaaaggaagcacatatattgatcaacaatgacataccccctttcttttaacaagtttatctaaggctaattcatcaaatacctatctgttcctgctcccttatatatttatgtttctgagctctgtatacatagataacacatcttttttctaacgaaaacaaggaaagggaagtgggtgtaccatcttttaaccctcaagtagttctggtttctatctcacttatttatgggatcacaattgttcaggg

SEQ ID NO: 142145 - DNA, 414 bp, Glycine max
gctttgactaagatcgctataaatgatcaggaaagaagatattgcttagcttcttttttatataaatgtgatccacgtcaactataagataaatcatgattgtccaaatgttaactcatgcatgttatcattcacaaaatgtcttaactaacacattgagtgtctttatgacacacatgttctattcaacaaagactagggctttgcatggcatactatacctttatgccaagaacaaattcattggtacctcttcttgaattcttgttccacccttggggttcacctctaatatctcttccactcttgtgccttagatctttgcatggcataatttaatttaaggttcagagagaaagagaattatctgaaagttaaggttagaggttcacctacggccgctgaaatggaaat

SEQ ID NO: 142146 - DNA, 228 bp, Glycine max
agcttgatgtgagaaagtgtggaagagtttttcttctttctttcgtttgatgaccacattatggtacctggagatatgttgcggggatcaggagacctttgggacatcgggaggggtgctattgcccctaaaccaacttggctaattccgacccaacctaagcatattcagtcaaggatgaacctgtgacgtacctaaaccagcgagctcctggccgcaacccttata

SEQ ID NO: 142147 - DNA, 457 bp, Glycine max
ctcaagcttgtagcaatcactagtaattaagattagtactgtataaatataaaactttttattgtttgggggttatggaagtgtcggcgctgcatgattgaaaatctgtcaactttatatggactattatggtactgatttcaagcttcgattcagggagttaatttgtttcttgtgtatttcgatgattgaaaactttctaaatcttactgtaagggtatgtgaccaaacttttcattttcaagtgcttataacaagtatctgtggcttttttctgcataattatccagagcagataagctgcatatatgtttctgttaacaagtttatagttgcataaatgatgcttgataatgacctaagtgaatattgttgcatgattatgatattatggattattcgctagaattggcaatgctttttatgtttaaattaaatcaaagagttggttaagatg

SEQ ID NO: 142148 - DNA, 351 bp, Glycine max
  unsure (1)..(351): unsure at all n locations
agctttgagccggcttgcgggcgaaagatgttattctatgttgaagtagattgtctcgcgtcgaaggagtctgtttggtgtatggggtagtaatcttgacaagtagagggtgacgagtttgtcaagccccccaagtgtggacgagtgttgttcggtgtcaggcgtggtagccttgactaatgtgaaagttgcatatcgatgaggcttgtcaatcccccaagcctgaacatgtgttgtctaggctacctttgtcaagttgtccgagatgaacatatttttggtgtgccaggttatgtaaatcattaaattngacaactctaccctttttctgactgttggagagtgcattga

SEQ ID NO: 142149 - DNA, 448 bp, Glycine max
ctaagctgatgaaactgtcgaaaatgtcactaaaggatataattatattgagaaagataagaggaaaaaaagacaaatagcacgagaagattgaggaagagaaagataataatgatggagtgtaacggcctcgtaggaacatgattgacgaagaagaaaggaggtggctctagcagtgcaaccagcgagcaagaggcaaaatggtgtcgtttgggtagagaaatgaggaactgtacagagagaggggttctagaaaggtcaaggagatgcatacggtcctaagagtagcaacgtcactctcaaacgcaaaagcaaaataaacaaggattgtggaaatatcataaatgccactgttttataccaagtgtcaacaattgaacatatccattatggacattttcttggttggactataaagaccataaagtcaaaaaaattaacatgtgtc

SEQ ID NO: 142150 - DNA, 389 bp, Glycine max
agcctaactacttattgttatgattacagtatatttcttctagaataactctaaatccttctatggtattctcctaacaatcatcttatataacattactaacaaaacatagttaaggaggggaaaaaagaataggttatatttatctgttaaatgctttaattattaacgtattaaactatacagcacatcagttgctaccgaacttgattgatagtggtatttaatttgcatttaacagaaaatctcttacaaacaaaacacgctccattatgtgatagggggtggagaacaactgcctcttcaatgttcatttcacattcacatagggttctaaaatttgactcttagttaccattctatggtgagcccctgaataataataaaaa

SEQ ID NO: 142151 - DNA, 470 bp, Glycine max
atactcaccttcattgccataccaaccacaaactctagaattgtaacttcgctgtggcattctcagcataaactggagagaatgagaatgcatgcttgcagacctgcagcacatatgaagcacatttagaaaaaataaaaggctctacctaaaaaaaaggaagacatcaaatacaaaaaaacgaggcagcagtacatctgggagggtttatctgacctttgacatattaggagtaggtgcaaagcaaaacctactattgaacatatgatatgcataacatttaaaacatacctactgtatcagtatgctaagaagtctaacgcataattacacgtgtccatttagctcttgcaagaccaagagtgattcattatctcctctctttgattatgctgagaagatcaaactattattatcttcctaacaatattgagctgctacagaaaatagctgcgcctcatcacatcact

SEQ ID NO: 142152 - DNA, 400 bp, Glycine max
tgaatggcatgctttggcgctgaagaatctgtaatagcttctctacacaagatctgttcactggctcataaagagtatgagacaaagcagatacttgaccaccagtaggagacaaagcagagacttgaccaccacgagatgaatattgagaggactcatgagaaagatatactctgaaatacaataaatatgatctcagagataagcatcaccatagctaagatatcccacaatatgggtgggtgggtgtgtgcacacatgaaaaatatcctcaaccggacaaaagcagcaagggtcataatgcaaaaacataattattgttccccaaattgcactcttgagtcttgaccctggtaagggaatacattaaatataacttcatcaagcattaacttcttga

SEQ ID NO: 142153 - DNA, 341 bp, Glycine max
  unsure (1)..(341): unsure at all n locations
agctntctagcttntcattggtgtatttttttctcctcttggcgctctaaattgtgggaatgtgctcaaatatgtggggcaattttggtttgttttcttacttgattaggttgaattgggggtttgtatgagatggccctatgcctataatgcattttgaagtaatggggcatgccacattgtccccgttctcttgctattgatgcctaaacgcgcgcccaccaagtgttcgatgaaatgcctcaatggcattagcgcgtgatttttgtaaggaaacaacccatggggcattttgggtttgcacatattttccatttttttgngacatgcattcattttcg

SEQ ID NO: 142154 - DNA, 310 bp, Glycine max
gtccaattctctacattgctttctttattgagcggtgaaaaaatgggcgtttcctgggtaaaaacatagcagccttgcttgctcaagaaaagcttatatggcactagggcagctctccggactttgctaaactttggactagaatgtgagcctcctgaagggagttggagctgtctgttacaatgtgggcaccctatagctgattatgggaaataatattagtgccgcccttactactccaccaatgattagagctttagcgttttgagagccttgcaactcgggaacattctcttgttacatgaatttc

SEQ ID NO: 142155 - DNA, 352 bp, Glycine max
  unsure (1)..(352): unsure at all n locations
catgcaagctaatagaatatatattaagtatactattattanngaagaatctattcgtgttccctttgaagattctaatagattatcctccaagaagagatattttagatgatattgcagaatctttagaacaaatgcgtacttatggaatagattctaaaggaaaagggaaaggaagcaatgaatatcctccataaaaagccaaataaaatgatgaacttcttagagaatggaaagcttcaagagatcatccccttgacaacattattggtgatatctcataaggggtaacaactacacattctctttaagatttatgccataatatggctgttgtgtctatgggtgaacc

SEQ ID NO: 142156 - DNA, 350 bp, Glycine max
gactgcagctgcagcttgaccatcccaaaccaacccgggctatattagtcaatgagaacctgggatgtacctaaacaggcgagctcctggcagtcaacagataaaaggaacaaagaccacaaagcaaggatgcttgtgtggtggctggccacctgtgaattctgattgatatatgggatatggcctctggtaatcgaataccaataggtgtgtatatcgattacaaggcataaaaatgaagacaggagactaagatggtctctggtaatccattaccaaggggtgtaatcgattaccaggcttgaaaacgaggtccggaagctatgaaagcttctggtaattgattacca

SEQ ID NO: 142157 - DNA, 366 bp, Glycine max
ttagaatcctctcacggtgtggacgttgtgccatgttcttataatgatcaatactatcatgcttaaaatcagatgtcaagattaccaaccacaaaatgctcagactcaccaataataaaatgctcaggatgctcaaaaggtaccatatgatgcctaactaatctatgaaatgtcctatctatcttatgatcaaagggttgctagtcagatggattgcctctagttatacactacattcaccatgcacaactagatgcctacttatgcaagttacagtgtaggttagaactacaccacccctaatgatatccaaatgacctgacattttgtggcaccaccctaaatcatgaaatatggacaaaattt

SEQ ID NO: 142158 - DNA, 437 bp, Glycine max
agcatcaaatccaatctatctctcacaatttataatataattatcaacatatattcatatccatcattaatatcatctcttgaaattcacaagatattctataaaaatgaaaatggagtgattccaactctcagagatccataaacaagtttatttccacctaaaaatacaagccaagttataacacacatgaaagatcattgttcactaattatcaaaactttatctcaagaaaaattgctctcgtaatattaggatgaggaaaactattgtcttgcttatttggcttgcattgataggttaagaaagaaatcatatacttttatcttgcgcacaaaattgaatcaaccgctaaatatgcaaagctgtctgtcgttggctttttgctcatcaacctaaatataagaaataaacaaatttcaattatactttcatgc

SEQ ID NO: 142159 - DNA, 475 bp, Glycine max
  unsure (1)..(475): unsure at all n locations
cctcaagctntcaagagttntctggttntctaaaccttgaaaacttgtgctattcattcttttcatcncttctcccttggccaaanagaattcgccaagaactaaccgcctgaattctttntatgtctctcttctcccttttttaaaagaacaaaggactaaccgcctgaattcttttgtgtctcccttctcccttgtcaaagaattcaaaacgacacagtctgagaattcttttgattcttccctttcccatatacaaaagatttcaaaggactaaccgcctgagaatttttttgtacccctattcacaaagtttcaaaggtttaaccgcctgagaactttgtcttaacacattggaggtgccataccctaatttcgtccggggacctttgcttgatgacatgcgacctttctttggtccttgtgaggtgcttggcacccatcattaggcaatttgcgaaattccaggacatgc

SEQ ID NO: 142160 - DNA, 470 bp, Glycine max
gtcacctgcggcatgcaagcttgtgaagtctgcagtttgaccaatcatctctctggctagtggctagtggccaaagccctcatcagtgaggcagcataatcctaaggcgccaactgtatccaaacgtgaaaagctgcatcaccgcaaagagtttcttgcctgtaaagatcatactccacgagggagataattcaacaagaaaactatctttcacggacccagttgcagttctttacacctgccaacttcattggagcaacatcacgtgcttcatgctcttgaactcttgatgcagttgctgcctctatctggcgcctgggactttgcgaccataacttagttttcctaatgtgctcagtggccttttacttgctagtcgctattcttcatatatattcttgatctagttaaaatcaatgaaatcatatgggagaatatgagatatcaatcatatcatgatgcaagttagt

SEQ ID NO: 142161 - DNA, 470 bp, Glycine max
  unsure (1)..(470): unsure at all n locations
tattattaattntaacaaatttatatattatgatgtgtaataataaattaaataaaaactttatactgatcctagatattcttttttgatcatataaaactagagtttattaatcaacatattttttttcaaatgaaactaaactaaatccctctaatcaagcttacaattcaatttgagtattggaaattaaaaaaataatgtgatttggagtagtctagtcatggtgatgaaacctgtggatatcggctcaaacatatcccgattttaatggaaaatatctgaattgattgggtacgggtcggttcagattcaaaaattacctgattttttttaattgggaaagtcgaagatggggatgtcactatctgttacatatttatcctcctctattcatccggtgataaaattatntaaaatttattaatttttacagaaacaaatgcattacaaatatgactgatacatga

SEQ ID NO: 142162 - DNA, 416 bp, Glycine max
  unsure (1)..(416): unsure at all n locations
agcttctatataagccgaaccatattatctattatcaccagttgagcnttactcagaaaaatagaggttatctcttttatcgtagcgagagcgagtctcctaaattcttgagtgattcaagaacaccctggctgtatcaaacgactttcacaacctttgtggggtgccctcgctggaaagagggatactttccttccaatcatctccacccttattctttcaaaccacaatcccagaagatccacctctgcccaaaattatctcgtgaccataactcccatcttacacactcaaattaagtggatcttgagcctaaatgaatgtcaaacgagaccttcacctcgttgggaatcacctatttggagcccggggctctcgtagtgccattctatattgtggcggccccactaacctac

SEQ ID NO: 142163 - DNA, 331 bp, Glycine max
  unsure (1)..(331): unsure at all n locations
acatgcgagtgaaaagnttttaccatttgatttctctggagagtccggagcacaaatacgagcgtgagcatatattgtgcaccttaatctgacatcctatataaagcgctggacatttgcatattattggagcgttatgagattaatatttatcgcgtgcatatattgtgcgcctgaaatcgacacgcgatagtaaagacttgaccatttgattttttcgaaaggctctgacggttataatttaccgagagcttttttttatcaccttcaagcgacttccgtgttaagaacttgaacagcactaatcttcgaaagacttggagattataat

SEQ ID NO: 142164 - DNA, 335 bp, Glycine max
  unsure (1)..(335): unsure at all n locations
gaaagagacgactgaacgatagaacaanacttgcatgtattccctagagtgcaggattgtcatcaacaaaaaaggggagattgtggaagcaactgttttccaagtttatcttgacgaagccaaagactcaagtgaagaatcaagagtcaagcaagtctcaagaatcaaagagtcgttcaatcaaagcatgtttcaagaatcaagatcaaagcgaagattcaagagaagactcactcaagataagaattaaaagagtttttcagaatattgaacaacacaactttgctcaagagaatttccaaagaaaaacctttacacaagaagtttactctctg

SEQ ID NO: 142165 - DNA, 271 bp, Glycine max
acagaaggacttataactctataaataacatacaatgggagagtttgtactacttatcaagttttaacacactaattagatgttttcatcaattaacaacatgaaacccttcgaacgcgaagacgtgaagtcctgtgaaagcgagggcatgcatccctcagaacgcaagggtgtgttgtcctctgaaggcgaggacgtgtatccctttgaaggagaggacgtgtattcctctaaacgtgatggtactagtacccagagtacacccttatga

SEQ ID NO: 142166 - DNA, 372 bp, Glycine max
  unsure (1)..(372): unsure at all n locations
agcnnctaaaaaaacttatgtattatactatctaacaagttncccgggtagtaaaaaaactaaaaactaattaaaatgtcttgtgaaacataaattatatcccttatcatatttacttttaagctagtcatgaccgatatcagtagaaaaaatctaaccaacgtcggccaaaaaaattattagtcaacatcaactgaaaaaacctggatgacaacgacaaaaaaaatctttggccgacgtcagcaaaaaattcctattacttatgtcagtgagagaataaccctaactaatatcatctaaaaaaatctgagccgatatcgaacaaaaatagccttggttgacatcatacaaataaagtctatccgaaaaaac

SEQ ID NO: 142167 - DNA, 376 bp, Glycine max
ctcagcttggtgttacatgttcgattcagatcaagaggtcatggttattctttataagtttcctaaaggccttcactgcatagccttggtggatcttcccttttccaagactccggatgtagacttagatttggattgtgagtctttcgctcaacctctttattattacttttcttttggttattattctaaccctgcctttctttttgttttatagggaatgggaaaatttgactatcgatttatcaagaaagctcatgccgagaaggttgaaagggctaaggccgagaaagcttataatgatatagaccaagagaagcataaatagaatcctcaagatgactaggttcctcctcctcctccttctgttattact

SEQ ID NO: 142168 - DNA, 390 bp, Glycine max
agcttcttatccatggcacattcttggtgtgtgaattccttcttccatggcttattccctagtggatggtgcctcccctctcctcttctccttcgccttccgttgcatctccatggtggaaaatcaccattgaaggacctcattggagctcaaagatccagctaccatataagctccacaggcaagcttccatcaacgaagctttagtcaaacaaaataatccaaaaatgtcaaagaactgggtgttgaaaaagcataacaagactttctctgattggtttaaagatacaatctttgctgatgaaaatgcttcacaaacattaagaaagctatcaaatgggattaaaggaaatgtataacttgcgaggataccacataacagttttcttt

SEQ ID NO: 142169 - DNA, 462 bp, Glycine max
  unsure (1)..(462): unsure at all n locations
tgtaggattatggggtacccatcacatgtggtactaggttgcggtcgggcgatggtgcacaacaagtttttccacatccacaaatcgcgcataaacccaccatcccctgttgcccacctccaactgagctgacgtactcccacgtagcccatatccttgtttctctcaacaccgggtccccatcaatcctcccaagcttccccaacatccaattaatgcaacatccaaatcatcacaaactaacaaaccaagcaaaacatggcaaaggcagaaaactctgcccaaaactcaaaccaaaatcacagctttttctcacttaaagaccccagtaacatttccttcgttccaattcgttaaccgttggatcgacccgaaaattctactggaagtctctagtacataagtatacattttgaccgttgggatctactagcanacatccagaactcattctgtactact

SEQ ID NO: 142170 - DNA, 363 bp, Glycine max
  unsure (1)..(363): unsure at all n locations
agcttcaaacttgcaacaaaggattgtgtctgttaaaagatcgtcttcaactcttagaggtgactttgaacgtttgtttatggaggagtccgagtcaatttctaattatttttctcgagtattgggcgtagtcaatcaacttataagaaatggtgaagatgttgatgaagtgaaagtcatggaaaaaatacttcgaactttaaatccatagtttgacttcattgntaccaacattgaagaaaacaaggatntaaagaccatgactattgagcaactcatgggttccttacaagcataccaagaataacaaaagagaaaaattaaacaaaaggaggctacggagcaactactactactcaacat

SEQ ID NO: 142171 - DNA, 386 bp, Glycine max
  unsure (1)..(386): unsure at all n locations
tatgcntaaatattcacatgttacttaatgaatgaggttatttaactacctatgaattgacatggtgttgttaattgtattaatacatattgaagtgaaataagaatcactagaaatagggatggaacatataacatgcttacatattaccaattatttgctgagaatgtatgtatacatgattttgatgatgccaaagaagaatcaaataagactgttacatttgcttcaagattaatacaagattgtttcaacaaacaaagccttgcttcaagatttcttcaagatcaagtcttgtctcaaaacaaagggtttcaaagtcatccaaggctctggtaatcgattaccattcctggtaatcgattaccagaagggaagtttgagaa

SEQ ID NO: 142172 - DNA, 337 bp, Glycine max
  unsure (1)..(337): unsure at all n locations
agcttgaacttccggctgtgcgatactggtgatattatgtggcacagtanaacttgaataatcctccacgggtactcttcttggctcttcagccatgattgggtcttcaacaagttctatatgagaatgccctgcaataggaaaactagaagatgcctcggaagatcgaggttattcttctagagttgtcgatgcttctaaatcctgcaaaaaagttctgattctctctgaactacgccttctacaagtggtgttaatctccaaatcaatgggaatcaaatcacctacagtggatcttctttgcatacaananaacagaacaacaattatccagttc

SEQ ID NO: 142173 - DNA, 410 bp, Glycine max
tgacagtcagatattggctggatgtgttttcttgtgcaggaacaggggcagtttggttgttgtttggtgcggcaaaaggacgtgcgtgagagcacagtttggctgttgtttgtgacagaaaggtcattggagctccgacagtggccagaaaagtcattgggaaagcttaaacagcttaaacagtgggtccccaatgagacacaattttcatgatacctcaatcaaaaatatcaagctttgataccatagagaagtttttattataattgtgtgtgtaggatgaccatactaatcctttatttataatgagcaaaagagcatctacattaattacatagaatcaatctaacatgagtgataatgaacaaatccctaattgctctctaatcataaataagagaataatatgt

SEQ ID NO: 142174 - DNA, 408 bp, Glycine max
  unsure (1)..(408): unsure at all n locations
tcaagctttgcacaagctatttttttcngttttaagtttaatncaattgaccttcttattcatctggtcctaaagagcctattcacaagtgtatcatagcaaatcctcagtttataaaccacactagaagatacaatgttatacaaatttcctctgtaatcctctgtgaagttaacagcgagccatatcaatcaccaaataaactagcagaacctcagaaacttcacacagagaagcatgaaagaacttaaacacacacaacacaacaggaccacatgatcactagcagtcaactaaccttccaatcccaagtcaaacattttaatattataagttaaagctagccaagacacaaacaactcatattcatcatggcctgctactatttaccgatgcggttatattttc

SEQ ID NO: 142175 - DNA, 282 bp, Glycine max
agctttggaaaggggtgtttttcaccttcttccttagccaatatgctggcttagcgagcatccgcttagcataacactcctgggctaagcacaaggaagaatctataagaagatgagttgtacagattcgctaagcgcactgcttcatctctctaagcgcactgcttcagttcatccgctaaacgagaaaggcgcgctaacccaaaaatcactaacgtgcgctaagcagtccataagtgcattaagcgcacgagcatgaacaaagccacctatttaagcctg

SEQ ID NO: 142176 - DNA, 348 bp, Glycine max
  unsure (1)..(348): unsure at all n locations
agcttcnggggggacatcttgacttgctttccaatctgacattcaccacagattctgccttcttctattttcagattgggaatgcctctcacagcacctttgtcaatgattttcttcatgcctcttaagtgcagatgttcgaacctttgatgccataatttgacttcatcttctttggaggatagacatgtggaagagtagctggtttcttggggtgtccataggtaacaattgtcctttgatctgctgcccttcattagaacttcactcttctcatttgtcaccaagcattctgacttagtgaagtttacattgaatccttcatcacacagctgactgatgctgatc

SEQ ID NO: 142177 - DNA, 75 bp, Glycine max
agcttaacagcagttaccaaccaatgacctggattattgtgcgggcccctcacaacctcacttgtatccacatta

SEQ ID NO: 142178 - DNA, 228 bp, Glycine max
tagctggcttagctataaagttatttggctcgtctgtcttttaaagcctacctggctgatagccttttaaaagccttcttcacattaaacctgtaatgtcctttgctatgaagtaagaatgtaataggaaagctaatggaaaaggatacgttaacatacatatgaaaccgctatcagaatatatgacgaaaatataacgggcacgatgagtcacacctaaattggaat

SEQ ID NO: 142179 - DNA, 359 bp, Glycine max
ctctgagtcacctgcacgctgcaagcttgtggaagaatgtggatacctctgtattattctggagatgtgcggaaccttctagaaccttatggaagagtatggaaaggagcagaagagtgtatagactcctagaatgtgtgaagcattctagagaattaatctccaccctaggatacaagtaatctccaccattcattgggaaggtggagtattataaataagggtaggagcctttattcctaacaatccaatgagatagcctctctgagagagaagataaatagcttggaaagtctctatcatcaagcttgagtaagcctctccgagagagaagataactagcttgggaagtctctatc

SEQ ID NO: 142180 - DNA, 376 bp, Glycine max
  unsure (1)..(376): unsure at all n locations
cgagcagccagtagagtatttttctcatctacaataatatctctaaaaatgacggagataaaaaaaataaccacggtaaatttcctcacaatagaggaggagcatttactaaatcgtggtaaaaggagcggaaagcaatgtagtcataatgcttcaagctcctattgcaaattatgcaagaaaaataatcatgatacacatgattgtcggtacaaatgcaaaaagtgcaaaagacacctacgctacgaaaaagatcgtttttaccgacaaaaagacgaagcaacatttctaaaaaataaagaatactttgatcatactttgtactccgctntatcctctcaagaattaagagatgtatggtatgttgatagtgggt

SEQ ID NO: 142181 - DNA, 434 bp, Glycine max
catgcaagctgtgatgcaacattgggagaggagaatgatttctcgttatgatgcgctccatgagaggttggatcaaatggtgaatagagatcataatgaagagaacaggaggagatcatggaatgatggtgttcctagacaaaaccgaatcgatggtatcaaactcaacactcctccatttaaaggaaagaatgatccggccgcctacttggagtgggagatgaacatagagcatgttttctcatgcaccaactatgaggaggaccaaaaggtgaagctttgccccacagagttttcccactatgctcttgtgtggtggaagtgattatgccagttgaagtggacgcttccattgggaaatacaatgataacgtactttgtgatgcttgtctatggaggcgcaccacttacttttggcgagaccatggcaattt

SEQ ID NO: 142182 - DNA, 431 bp, Glycine max
tgtaaatgaacaactgaagctctcgagaaattcgatatttcatatcttttcacacggatgtccgattcggggacataactgatctagaccctcgaaattgaacaacggaagctctctacaaattcgaatggtcataacttttcacaccgatggtcggttctgggacataacacatctagacgctcgaaatgaacaacgaaagctctagagaaattccaatggtcataacctattacacgaatatccgatttgggaaaattatatatcgagatgctcaaaaactaacaacggaagctctacagaaattccaatggcataacttatccacagagtcccattcgggataaatctccgagacgccaaaatgacaacagaactgtcgaaaattaatggcatactttcacccgatgtccattttggacttaccatct

SEQ ID NO: 142183 - DNA, 384 bp, Glycine max
cctaaaccagagtagagttatttttaataaggcaataaatattataaaactatgatcattatatgccacaaatattattgttgtgacatccagctatactcattccttatagttttaaatttatgtagatcgtgcttgatttcttcatctctctttctaatttaaatgaatttaaataagatgccttatactttaattcattttatatttcctaaatgccatggtgatgacatatttctcataggtagcccaatacacattctctcaggatcatgtagtcttaactaaacttcatgtagtgttaaccaaacttctcttcaggactaatggtatcaagggctggaattggaaacaagagctacacatataacaatgcagaaaatg

SEQ ID NO: 142184 - DNA, 438 bp, Glycine max
ctgagctgcagctgagggcttcggcctgcatttttttgtttttgacaaaaggggccggggactaggtggtaaaaagaacgatggctaaagacaaagtatgtatatgcgttcatatccatgatgcatctatatagtcctttgctataacacagctgttaattctctaatataacattatagttcaacgtttaaaactactctcatttttttttcctagggctaatgatcgcaacaataattatacaggtggaatacatactctgacaaaaggaaaagcttcaaggccacctcgaactggtgcgttgatggctggaaactcatcttctgttccttgttcttctgaaactcttgatgctgaagaacaacctttaaatgtgaacaagcctcattcagtaagtggtactataaatcgtaagcgtcctttgcttgtagatcatc

SEQ ID NO: 142185 - DNA, 399 bp, Glycine max
tgttcttagttgatggatgttaaacggctcacgattttcatcttatgaccatcttcacgttagaaacatagaataaaatgtttttttaatgagtagtccaagttttggtgatgcatggttatttttaatatcgggtggtgcttactaatattgggtttctctctttatccaaaccagatgtacagaagcatgaggggtgacattggcagacaaggtaccgaaccttctttactgctaaagcacatgaacaaggagagagcatatattaatctttagtcccctgatgatgatatatgatcatggctcctcaatgccttctccttctgcttatagtaatcctatttgtctgtcatatatacgccgggaattaatttataccatgctttgtgcattgaatgc

SEQ ID NO: 142186 - DNA, 359 bp, Glycine max
tagcttctatataagctgaaccattttatttatatagacaagtcgagttctattcagaaaattagagcttatctcttttatctcagagagagtgatactcctctatactggagtgatccaagaacaccctggctgtatcaaaggactttcacaacctttgtgtgttgccctcgctggaaagagtgattctttccttgctttcatcttcacccttgttctttcaaaccacaattccagaaaatccacctctgcccagaattatctcgtggccataactcccattttacgcactcaaattaagtgattcttgagcctaaattgacattcaaaacgagacctttcacctcgtttggaatcac

SEQ ID NO: 142187 - DNA, 365 bp, Glycine max
  unsure (1)..(365): unsure at all n locations
tattggatagaatactccaagaggattgggctatagcattttaagaaggccctacgattctcatgaacctcanggtagatntctgagcccatgggccaaggctgggtccactcttctttgtaaatattagaataggtttctttcttttaggccttgtattttgatgcaatcctacccctcaagcttattggatagaaaactccaagaggattgggctagagcagctaaagaaggctctangcttctcatgtacctcanggtagatttctgagcccatgggccaacgctgggtccactcttctttgtaaatattagaatagtcgttccttcttttaggccttgtattttgaccattctagtagtat

SEQ ID NO: 142188 - DNA, 262 bp, Glycine max
  unsure (1)..(262): unsure at all n locations
agcttgtatctgtcgaaccaaatattgaatcttcttatgctncgggcctaatatctctaagacacattaaaattgcagtatctatgcccatgtctatcataggtttgatggctacctggacacatcctatatgtaggtatctgtattttcaactgtgtccataaatggaattttttgaaagtaaatgaaattcaggccctatgtcttgtcctataggaataatattttctacagttttgagatataatctgcataccctaat

SEQ ID NO: 142189 - DNA, 404 bp, Glycine max
tatggggtacccatgacatgtggttctatgtgtgtttctggcgatggtgcaaaacaattctccacatccacaaatcacgtataaacccaccatcccctgttggccacctccaactgagctcacgtacttccacgtagcccttatcctcgttcctctcaacgccgggtccccatcaatccttccaagctttcacaacattcaagtaatttcacatccaatcatcaagaactaacaataccaagcataataggcaaaggcagaaaactcttgccacaacaccaaccaatatcacaagctttcacatacaaataccccagtaacattctctctgtttcaatcttttaaccgttggatcgacttgaaaattttactggaagtctctaacacataaatctacattatga

SEQ ID NO: 142190 - DNA, 207 bp, Glycine max
tcgcacatcgttcgcgtgtatggtatacactccacaaggtctgaagtagaggaaaccttcaaccctataaggcaacgtggcggacaaaagtgggcagttaacttgaatggtcattattgtcaatgaagaagggattctgctcttcactatgcatgttcacactttattactaatttgtgttacataagttctctttcctctaattta

SEQ ID NO: 142191 - DNA, 279 bp, Glycine max
tgtagaacatataggtgggcgaatccctagatatgttataggtctttgcaagcctaaccaacggaagccattattcacacttatccattctttataatattgcactttcttcgcaagaataatttgagtctccccaaatggtcaaagaagtgaccatgttaaagaatgtacttgggtatgtaattgggctaaaagctcataaagtgaaatccccttgagtatagcgtcaacacggcatatcaagaacctagatatgtcactcacacttatgactaaaga

SEQ ID NO: 142192 - DNA, 459 bp, Glycine max
agcttctacctttatccttcctttctaccttaaatgtggagttattccacatacataaaaggccaccagcagcttccacagatggaacaaaatcccaatgaccagtggagtctcccgaaatggcctggcaaatacttttattaaagttctccctcttggtttcttggaggcagacaagatgcactgtgtgctttacaatgagccttctagcagcagcccacttgactcccctccccaaacctctaaaattataggagagaattatcataattgttgagatataattcccttctctgctgccatcaaatcatctttattctccatatccagcagcagccccttaaccttgctatcttcttccttataagacaagcccatttccttcaagatgtcacattgcagcagtatagggtcctcgtataagaagcccatttccttaccattccacaatcagagtga

SEQ ID NO: 142193 - DNA, 347 bp, Glycine max
ctaagcttgaaatgagtaagtgtggaaaggtgagacttcctacttttattctttgaccataaaagggtacctggagatatgtcgcgggggtcaggagaccttggggacgtcaagtggggtgctattgcccaaaaccaaacttgaccaatcccgacccaacccgggcataatcagtcagtgaaaacctgtgatgtacctaaacaggcgagctcctgacagtcaacaaataaaagaacaaagaccacacagcaaggaggcttgtgtggtggctggccaactgtgaactttgaatgttatatgggatatggcctctggtaatcgattaccaagggtgggtaatcaattac

SEQ ID NO: 142194 - DNA, 368 bp, Glycine max
agcttatgattgtacgaaatggacttctttatctcgtgttcttgaagaagtgggtctgcctcaagaacctcatttttctcattataagacgtatagcaatggtggaaactaatgttacgtagaacggaaagcgatctcccatgtgtgctcctaataaaggggtgcacaaaggtgatttgctattaccttacctctttgttttacgtatgaacaaactctcccacattatcttgaaagcagtggaagcttggaaacctttttgtatgggaagaaagggccccctcatctcgcacttcatgtttgcggatgacttattattgtgtggtcaggcttctactaagcatatgaaatgtactttggacactatg

SEQ ID NO: 142195 - DNA, 389 bp, Glycine max
ttaataaaattgagtatgcagtatataagataaatatttatatgagcaagtctgtcattcgtatcaatttaattaatttgagtagaattgtcttttatggaaaatacaggtgatttggtataaaaaaatataattgactctaaatatattatttttagaacaataatataattactatatatattctataaatattctttaagactctcattcctaaaaacctaatttaattttcaacaaaaaaaataataatgtagtgagaataaaacaaatcctaatattaagtgtcaccttatataaaaataccatctaacctttttatttaattttaaatgattctaaaaaaccatgacaagaattaacagtattttattggatcatactttttt

SEQ ID NO: 142196 - DNA, 362 bp, Glycine max
  unsure (1)..(362): unsure at all n locations
ctacttgagctgagtctagtcttaaatgagagatctgcacacgaaacttagtttaagttagtataaatctaaaagggctggctatatcatgcctactccaactaattcggtctaacgagggatcaagggtttagtaatttaggctacaacattgaacataagaacacgattgattagagaaatatatttctatgcattagctngtttgttagaaagacccaacatttctacctactgctgtcattttatttacttgcactttatagtctttagcataaaaggttagtttaaattttgtttgaaattatcactcatacatgttctctcaacaatgcttcgattctgaacttattcacgcaaca

SEQ ID NO: 142197 - DNA, 380 bp, Glycine max
  unsure (1)..(380): unsure at all n locations
cgcatgacttacattctcccctttttgatgatgacaactccccgcnggnaggagcaacaagaataacatcaacaacaaagaatatccatttatatatagtgttactccccctttgtattgcaatgatttcttatatgagatatgaagaattcatagaattcatatataaaaagctgtctcataaagagttcatatatcgtttatctatctctccccctttgtcaacatcaaaaacaaatcatgaatagaaaggagaaagatgttactgttggatcgagtggcctcagaataattaagaagaggggggtgaattaattattcctatacctttactaattaaaaaattactcttctaaggctttactaagttgtaagagaat

SEQ ID NO: 142198 - DNA, 436 bp, Glycine max
agcttcaagaaatagaacctaacttttattatacctgaccggactacccttagccaagacatgattggtgccaaggctagatacccatattcccatcactgaagaaaaaattaataaaacatatataaatgagaaattttcaacttctttttctggctcatagtggcctatcggaatcaattagaatcactcgagctcgagctggaactggaactacattttctactgtgagatttactaaaatataacagaattcaaattcataaacatgaccaaagtaccatatttcataatgagtaaacatgaaagttggtcctaatatattgtaggagtattaacttggtccctacaattaacgaaatattaaaatgaatttctcttacaagataaagtttgaacatgttagtaacttagttttctccttctctttgtaact

SEQ ID NO: 142199 - DNA, 407 bp, Glycine max
  unsure (1)..(407): unsure at all n locations
ctctaagtgacctgacgcatgcaagcttaccttactagatattngcttggtttgtctctgttaatcccgngacacactgcagttgggactaagatgagactacactgtagttgaaatgttgtatctatgaaatttatagttatcttttttgttgtatgctaaatatttttttgggcctttatacttgttgtcaattatttgtagtttagacatgcaatacttttgtatttactgcacttttcatatttgggaacattctacaaagttattgtggaataggatttcatttgaacacttgcttttccatttatactacttcaagtggtagcagtagcatttgtagactacacnncttttttctctgccatgtgatgaggcaaaatctcacaaatattataacttttgat

SEQ ID NO: 142200 - DNA, 439 bp, Glycine max
tacttaagcttagcatcaatcacctagctgaccaaaccaatgaggaatttgtgttctttcataatggatacaaatacaagggatcacatttacaaacaccattcaagtatggaaacgttactgatatccctactgcagtggattggaggctaaatggagctgttactgcagtcaatgaccaatgccaatgtggtaatcacgtaacagtagaacttttatttattcttttatcatctggaatcaaagacaggtaccatggatgttacaataactcacgtaccttgctcaatcatcttagctagaccacctggattaacacatagagaatgaaccataaattaactgacactattttcttttgtatatatcatcgtcatgatggcattaattaatattggttatttgcaatgaataaacaagtagctgttggcactttaac

SEQ ID NO: 142201 - DNA, 266 bp, Glycine max
  unsure (1)..(266): unsure at all n locations
ggttaaactgcgccctctccgtcaaatgtccatcatcggatcagccaactcttaattggcaaaatgttattacggcccattccaggtcttacagaaaattggcccagttgcttaacaattaaaacttccccctgattctcgaatacaccctatatttcattgctccctccttanacctttccaccactctccaatttgactgacatgtctttacttacctcccagccaaagataatgaccttgtgtgctctctcgaatcctaacac

SEQ ID NO: 142202 - DNA, 467 bp, Glycine max
  unsure (1)..(467): unsure at all n locations
tggataagaaatctgtctctgtacttgtcagcaagaaatttgtttctcacaaactgaaggacatgataantttggtctggtcagagatcacccaactaatatatattgagatgatgaatgatctagattttggatttctttacattggttgaagtaaaattttaactgttaatcactattgtatatcaattttagaaaagagaaactatttaccattactttcccaagcagtttgatgctgaccaaagtttatataactcactttagaacctttattttcgtgaagcttgggcaagcatttgtggctcactgactcctgtttatgcttctagttagcttgattgtgacaatcatgctaggacctatgtttcagtatgtatgataatgagtatgataagaggataacatttgaggaactaaactacctatcatttgtttgacatatattataagctcttcgttgtcaa

SEQ ID NO: 142203 - DNA, 200 bp, Glycine max
cttcttgcaattgggatgaagaaaaagtggacaagaatgttcttatacccgctcaactacctcaaaaagaagctgttctagaagacccatgtgaaccacgcttaccttcaccacatcaacgagatcaagaactatcatgaccagagtctactcccagacgagtaagatctgtggtggacatatatgaaacctgtaacttg

SEQ ID NO: 142204 - DNA, 374 bp, Glycine max
  unsure (1)..(374): unsure at all n locations
gcttgccgaaagagatctcataggggtctttcttgttactgagtgagnccatgtattgtatgaccactcttgccaaatcaagaatcgtccctatgtagacggcttttgatgcacaaaggctcttaaatattgctcaataacgcgattcatggcctccgtttgttcgttaaattgacgatggtacgctgagctcattcggagcttggtaccactcatttctaatagttcctgccagaaacggctaacaaatagtgggtccttatcggagaccacactgtgtgacatgccgcgaaacttgccctaaatttccatgatcaattgacaacgtctgaagctgtgtgatatggggtattggtcctaataaattccttttt

SEQ ID NO: 142205 - DNA, 373 bp, Glycine max
  unsure (1)..(373): unsure at all n locations
gagttttctggatntctaattctttttattttgtgtnatncattctttgtatctcttctcccattgccaaaaagaattcgccaaggactaatcgcctgaattcttttgtgtctcccttctcccttgtcaaagaattcaaaacgacacagtctgagaattttttttattcttctctttctcttatacaaaagtgttcaaaggactaaccgcctaagaattctcttgtatccccattcacaaagtatcaaaggtttaaccgcctgagatctttgtcttaacacattggagggtacatcctttgtggtacaagtagagggtacatctacttgtgtttaactgagaacaagagaaggtacatctcttgtggatcact

SEQ ID NO: 142206 - DNA, 334 bp, Glycine max
cctgatcttagcatgtttcttttgatgatcgacaaatttgaagaaacctggtatcttgctagcataaacctggttattctctcaaatgacaacataaaacccttctcaacccctctttatattcatacacaactactgatctgcttgcataaacccactcttaatgggactcatcaattgctggctcattccactctgttctaacataaccccttgtattacgctgactcactgattcaacattactctatggtatctcaccaattcacatgactctaatggatccaaccaatccaagagattggaatgttgataccatcctacatgcccttta

SEQ ID NO: 142207 - DNA, 322 bp, Glycine max
tgcagcttttggtgtgcggctagtttgtctcttgattccacagataagaatgggtgggtatgacattccgaataccgcactttgaacacttaaggggcattacgacattccctaacactgatcccatggtcgtcaaactggagatgtctaactttatcgggtgccgagtcttgatagaccagacgagctcgaccaatattctctattggtctaccttcaaaacagtcgatattacaacatgtcagatcaagccattctctgaacaactcataggcttcttgggagagacatcttacacaatgggacatgttgacttgctaac

SEQ ID NO: 142208 - DNA, 429 bp, Glycine max
  unsure (1)..(429): unsure at all n locations
ttaagactaagtcttcatgttgctccgcatatctctatttaacatcattaatccattttcaacacaaattttcctaagcacacaanatatcccccacaattgcattataacacaaaatgatgggacctaatgattctagaaattaaccctacgatgttgtatatgtattccaatgttttccaacccataatactcaatgttgaggtctaaacacataaacaaacactattttttactgcaatgaanacaatggcccattacaagggtcacaatgacccattcgacagagtcatgctccatagaaacacaaacaacatgagaagagatagaagatcccttataccttacaagaactaactagaaaggcgacaataatggattccccttgtgagcaactctttcactaaacatacttaaactgatggatgg

SEQ ID NO: 142209 - DNA, 392 bp, Glycine max
agcttgtaacacatttaaagaggtttctctctttattatagccaaattatatattgattgagtcatcatttttcactttttaattttttatgaaaaaacaccatattgctctactgtactctaaaaaaaaatgaatgatagaatgggatcccaaaaatataaacaacatcattatctaaatatttaaatacctcatttaacctatgttaatattaaaggggggagcagctctttttatatagtacgaaatatttgtctaatttattgactgaacaaaattgaccctagaaactactaacactctactttttttaagactccatataaacggttacagcgctagtccagagtttcttacactgtaatagaaatatcactctatccatatgata

SEQ ID NO: 142210 - DNA, 343 bp, Glycine max
tgccacccagctcgcccaggcgagcaagatgcttccttttatgcaacagccttctggaggaatcttctggagggcccaagtgggcccggtttctatttgcacccccatttttactaagtacacccccctgcccttttttttgtgattctttattcgtaaagttacggaaacttacgaatttcgtaacaatacttgggttctttccgtaatgttacagaaccttgcggattacataatcattccctctttgacttacggaatgttacgaaacctcactaattgtgcaacgatgcctccatttgatttccggtgtgtcacagaaccttacggatggtgcatcaat

SEQ ID NO: 142211 - DNA, 422 bp, Glycine max
  unsure (1)..(422): unsure at all n locations
cctgcacgatgcaagctntgcacagaatntattcaacttatattataagaacacataacaagagcaacatgctttcccataaagacctttactcccaatatgctttctaagtcaatggcataacaaaatacctaatggaccacacaatccataaaaaagcaccctctgccatggcgaagactaaatctaagatcaacactaatgacaaaggaagacaaagatgacagagactttttttctttttttcatccttttttttccttttctcaattcttcctaaacggtcgcgtgatattgtcaaaaaactcataccatatatgccaaattaaactatatatacaaacaaagtaaatgtaacttaaatctacaacttanactcatacccacgccgtcgtgcttttgggtgcattatgatggggagc

SEQ ID NO: 142212 - DNA, 433 bp, Glycine max
  unsure (1)..(433): unsure at all n locations
tccaattgatgatgaattttgaactgtgtacgtcttgtgtgtatgtatgttgcctttgtctttgcaacgatccatacaagtggttgtatgaataagccgtcgtgaagtatacaacgtacgaagcaagaccttgttgatgtataaagactgtggtggtcttgtaaagagtagaatgacatggagtcatctcaagtttgatttcaacctgattaaagatcttgtcacccatctgttggggcttccttttgttttaaggagcttgtcccctgataattgtgagaactttgtgtttgaatcgcccctagttgaaagtcctgcctaaccagtgtggggatagtcgctngactttgtgagttccttctctgatgattataatgagtaagtgtgagctacacctgattgaggtcttgccatacaattgggtggtgggtcc

SEQ ID NO: 142213 - DNA, 343 bp, Glycine max
  unsure (1)..(343): unsure at all n locations
atgcaagcttccattgttgagtattggctttcttttttacgctttgntncactccctacgagtaagtgcactttgccttggttatttggctctccattgttgtgttttggtgctttagttgctcatattatgcgaaattcgtgaagcaattcacatatgaaaccatacttgttttcgctaaattaaggggttgtaagggatggccttaagcctatgttgcattctggagtaatggggcatgccacattgcccccattctcttgctattcatgcctaaacatgtgcccaccaagtgctcggtatatggacaacatgtagaggttaaaatgagtgcctgaatgcg

SEQ ID NO: 142214 - DNA, 393 bp, Glycine max
  unsure (1)..(393): unsure at all n locations
tcctgcgaaagcaacatttggaaatttatttttattgggacattactcttaaagcacaaatggcatgtaacctcctcccatcaatacaaacatcaatgtaaatttaaagcaagcttatgcgcatattttcctacgaacgttcacttgcacaagacatcctattaactaagaaaaatgcacccatatacaatcaaggtagcttccttacctagattatntacatgtacttccaaagtgtatttgttatttacatcatacacgccatctttgtaaaatttacacacatgcatactcaaagcatttcggggtaccaaanattgcacatgcgctcatcttggtatttctaatatctatacatatacacacttcatgatgaatcttgactatctacac

SEQ ID NO: 142215 - DNA, 331 bp, Glycine max
  unsure (1)..(331): unsure at all n locations
cacctgcngcatgcaagcttgagatgaggaagtgtcgattgggatatcttctgcttttattgttgaccacagagtggtacctggagatatgtcgcgggggtcaggagaccttgtggacgtcaggtggggtgctattgcccaaaaccaagcttgaccaatcccgacccaacccgggcatagtcggtcagtgagaacctgtgatgtacctaagcaggcgagctcctgtcagtcaacagataaaaggaacaaagaccacaaagcaaggaggcttgtggtggctggccagctgtgaactttgattgatatgtgggttatggcctctggtaatcga

SEQ ID NO: 142216 - DNA, 332 bp, Glycine max
agcttatactctctacgttctattatattttttgacaccaggtatatgggtgtatttctgatgattgtcaaactctatcactcttagtgcctacagcatataggatttttaatccctagagtttatgaaatatattatctagtgagacaggttatattctaattctacacaaatctacttaataattataatagctgggagagataaagttaagagactatgagagttaaacatatgtaccgtataagttgaccagacaaagaagaaactatatacgagcaaaagtatcactctatctcttcgaaataaataccatcttaagatatgataca

SEQ ID NO: 142217 - DNA, 469 bp, Glycine max
  unsure (1)..(469): unsure at all n locations
tcaacatctntaataagaattaattgatgcttgtatgttttcaaaatcactctgggaggcaagaaaagggagaaagtccaattcacaatgacaagatgggaagtaaatgatcgccagaatgcatgacaatccatggttgccgattttcaaacttaaaaataaagaatttaattaaaatgtattgatagtataaagattatatatattgttacctaattctaatttgtcatatatggtaattagtttgttattcttataatattagttaatagtgtaacttttttacatacatgacagttaaactctaaagtaaaagcaaaatttattatttaatgttaacctagttgtacgacatgtgtaatttgcctttacggatttctttggtgtctctgatggagatttccaatggaatatatcattataattatcgagttgattataaaattatataatactaaatcataatatt

SEQ ID NO: 142218 - DNA, 409 bp, Glycine max
  unsure (1)..(409): unsure at all n locations
acctgcngcatgcaagcttgacaaaatataggatgctattctaatttatgaagngggccgaaaggcatcaatctcgcaaggatctgcattaatgagggtggcctcagctgtgttttctgaggtcccctccctcataaccatgagagatacttctctgggtttagggactgtatcttttcatcatgctcctgnacttggactaatatgtggagcactaggatttgataaaactagttctcagagagcttacatgtccatcacaatgagagacgtgatttctgctgctacaaggctaaatttgataggaccccttggcgcagcattgttgcagcatcacgttgcccctaatgctgaagtnatattataaaaatggatgaatcgagctggtgacgacgcatgccaaactatg

SEQ ID NO: 142219 - DNA, 271 bp, Glycine max
  unsure (1)..(271): unsure at all n locations
catatatattatgctttattaatagntagggcttatagacacactagtttataaggactctagagtttaaggagaaaaaaacccgtgagttcgatctttgtttccaacataattatcattctaataaaataatatttattgataaaaaaaccttatccttgcgagttactccatatgccacataattaaattatttgcagacaaatttactcattatctactactatattatatgccttacataaatagaaaaagttagattctcgttata

SEQ ID NO: 142220 - DNA, 376 bp, Glycine max
  unsure (1)..(376): unsure at all n locations
catgcagctatgcagctgaaacccttattgttgttcaacctattgtcccacgtaagatagttntcatatgtgtttgtttgtagtcggcacacgttttgatgcatgcttagatcaatccaagaatcttgtgacattggattcaactagcgtttgagacttgttaatactaaaacaaacacacccttcctcgtctaattttaggtttgggatgcaattgataagatactaggcagagttatgtttgatcattcaaggtctgatataaagatatgtaagcagtaattaataaatgagagaaggactatggataaattatacgctataaaattcattgggttaatgtatatcncatagttcaaagactaattcaatcctg

SEQ ID NO: 142221 - DNA, 417 bp, Glycine max
  unsure (1)..(417): unsure at all n locations
ataaaaataagagggcttcatgcaagcatttnccatatgtctcatgcatgatatatgaatctaagtgacgatattattggtgctcttagttccaagtagaatatgaaccttgcaagattgaccagccaagtattgagaagccttgcaagcctttaggaagatgtattaaagtggtatacgtcaacatcgaaattgtagatgatagtgattgttaacaatatgctcgaaacccatacaagcacgcccaagaggaatacggcgtgaaaacaaatcatatatttgacatgaaaatgtaaaaaacaggctccctttgctcgactatttatgtgtgtgtcatgagaaactaaataaatccagaaacatactctgatattcgtaatttattaggcgcagacctataattcattaattccttat

SEQ ID NO: 142222 - DNA, 490 bp, Glycine max
  unsure (1)..(490): unsure at all n locations
cctctgagtcacctgccgcatgcaagcttctcctagatntgttacatacatcttatgtttatacttgcccagatcatgtaaatcttctatccttagcttcaaatatgaagttgtagggttaataggaaattatttggtaacatgcatccacaaatgaatatccttctcttatctaattattggagtttgactgcccatggatggatccaagttgctccttggaataggtgaaagtgttttttcgcctttagaccttgtaacttgagcaatttcctcatcctctggtaatggatgcatgattttccagttccaaaggatacctaatgtggttgcatcttgatcaggttaggatacactagtatcatccaagagggagtctccatagagactattgcatcatgtaaaaaagcttggaaaatagaagatggattgtgctaataatcacacctcatccatggtgtaaggacacatatatggattgtatctggat

SEQ ID NO: 142223 - DNA, 466 bp, Glycine max
  unsure (1)..(466): unsure at all n locations
ttgtcaattctcttagtgttggtaaggaatgtgtcactatggttgtatttaaatctagcttatactcgagggaacttctatctaaagcacctggaaattctgaagaatcaaatggatctggtcttgttgtctctaactctaacaagaacatcaagaaaaaggtgtttaaaggaaagaagaagacttatgtcaatccaaaggatatttgtaactactgcaaggatccacgtcattggaagaaagattgtcccaagaaaaagggcagaccatatgttgttgttgccaaggaaggttccacatctgaaaatgagtttattctctcaggtgctgatcatcaccaacattctgaaaatcagtggatattagactctggttgttcctttcatatgtgtcctaacaaaacttggtttgacacctatgaagagagnatcggtggaaatgccctcattggaaatgatgtctcatg

SEQ ID NO: 142224 - DNA, 375 bp, Glycine max
ttcaaagattagtgatgggtcgccatcaatacgcaatttgagatacggatacaagcttattctatttattcctttgggtgtataagactccaattgtcctacttgaaaatggagcagagaccctgctcaatgcattaaaaggttataaaagtcaacggtttcctccttggctcttaaatgattttcactcttctcatttcatttaacttttgaacacagtgtctctagtaagagcttgatttacttgctttggcagagttataatttcctatcaatggtaattttgagattgaacgataaattaaacttttagtaaacatataattatctctatgaattccaattcatcctatttgtaaacttggaaattacgtg

SEQ ID NO: 142225 - DNA, 389 bp, Glycine max
  unsure (1)..(389): unsure at all n locations
tcacctagtgggagcggagaacgctcatttgggacatgctcgacaaactgtcatttcatgaaaatttgtacatcagatcatattatcagcaactcaggcagatcctagcgatacgtttgtgtgcaatcactaatttcaaacatcttgtggcgagaagccgctgatacttaacttcagcattaaagttcctcatatgtcaattatcgcaatgtcttgacgcttgcatctgagtttctcaacaaattgaactcaatcactcaacaactaaatacagaatccttgaagtgactctaggagctggttcttcaactcatctgcaaacgctctcattngcaagcagggctggtacacagaaatgtgaaactacagctacaaatactcattgttag

SEQ ID NO: 142226 - DNA, 300 bp, Glycine max
  unsure (1)..(300): unsure at all n locations
ccaaggaaaaatacccgtatatatactcgggcgcttattgcgacctggtaagaataatagttaaacaaaatcaagaaatattttctttattaaaaatcacgcatgcattgaacacaattaaatactcttaataaagttcatcacactacttaagcactattcttaaaaaagggtgtagaaaactatctattaatcaatgtataagcatgggttcaaactctctaagtaactcgctattntacgagctactaagccgttactctctacggtgactgtggtaaacttcttttagagagcctg

SEQ ID NO: 142227 - DNA, 342 bp, Glycine max
  unsure (1)..(342): unsure at all n locations
gcatgcaagcttgcttgagagactttcttgttatttttctatgagaaactccattgagaagctagagctttttacacacccctctaataactaagctcacctgcttgagaaggttccttgagaaacttccttgagaagcttccttgaaaaacttccttgagaagcttccttgagaatattcctagagaagttagagcttttgtacacacacccctctaatagctaacttcacctccttgagatgagaagctagaagttagctatacacctcctataatagctaagttcactcccatgccaaaatacatgagaatacaaanacatttctactacanagactac

SEQ ID NO: 142228 - DNA, 445 bp, Glycine max
  unsure (1)..(445): unsure at all n locations
actaagcttaacttcacttgtcaaaggaattccattgttttattataatatgattctcaacactagtatcactcaatattattggtgtcactactaatgtcattgttatcactgttattgtcactaccacatcattatattgtcatcaacataatcttgtcattgttactgaaatcactattgatgtcatcaccacctttattatctctatcgtagttgntatcaccatcacaatcgttattttttactattatcattattattggtattagtgtcattatcacttgttaaggcaaaacaattaaataaacatgtccttacactaattttaacatgataggaaactttcaaagtgagtttattttataattaaaaattagaagaaagaaactagagaaatgttataaacatactgttangcacacactctttaaacacatcatct

SEQ ID NO: 142229 - DNA, 297 bp, Glycine max
ccccatccatttgatgtggtatcgtgcccgccgcatttgatggaggatgataaatgaggcttattatgggcacatgcatccacaacagaatatcattctcttgcctgagcttatggaggagggcgtcgccgggaacattctggtggctcctgcggaatgagggaagggtctgatgatcatgaaagctgtgtacccgaacacattcgctcatctctcgtctatggatgcagactgtccagacgcaaggaatccgaatgtggttgcgtcttgatcaagtgatgatgcactagtatcatc

SEQ ID NO: 142230 - DNA, 339 bp, Glycine max
agcttcctcgggccattcctgcgattgttttcatttggaaagataattttaccagtgggacactactcttaaagcaaaaatggcatataacctcctcccataaatacaaacatcaatgtaaatttagagcaagcttatgcgcatattttcttacgaacgttctcttgcacaagacattctattaactaagaaaaatgcacccatatacaatcaaggcagcttcgttacctagattatttacacgtacttccaaggtgtatttgttacttacatcacacacatctccttggctaaatttacatacatgcatactcaaagcattttggggtaccaaaaatt

SEQ ID NO: 142231 - DNA, 403 bp, Glycine max
  unsure (1)..(403): unsure at all n locations
agctntanaaataaaaggaagcactgtagatgttgtttatcaaaaannnatagaccaaacgggcaaactaaataaaaaacgtatcaccaaattttttatataaaatattgatttaaaataaaacgagcttgaacacctttcattaaatgaatatgagactatttcgatccattaaaacttttgaaatagttatacatattttgagttgttttagatatctacattaattttttcgttgcttatattcttccttacactacctcatctttttgcccacttttgttatctaaaaatgagtatatgaatggtgcaaatgacatttgtgaagttagaatatgagtttatgcttaagttaattgcaaacgttaattgataagataagagtgatcggccatttatatat

SEQ ID NO: 142232 - DNA, 295 bp, Glycine max
acttcaattatacaaatgtgtggaccatgcctcgttagatcctacagcgaactcatcatgctgtgtgtcctacaactggtatgcacacgtcacatacaatttacacacatcacacatgttcacactatttatgctttcgggggataacctctgccctgttctcatatgggtgtatctgcaaccggagccaagtgtgctccaagtttcaacaagccacgaaaatgctttctagagtaaaccaacactctgcgttcagctaacacgcttggcgatcatttcagatggaactaatgat

SEQ ID NO: 142233 - DNA, 367 bp, Glycine max
  unsure (1)..(367): unsure at all n locations
gctttggagaaagaggagaccatatctttttttttcttccaagttttttaccaagtattcttgagcccttcttccaccaagcttaggtaagtgacctccattttcaactctaaacttgattatcacttcatttttttgctctattctcactcgtagtttcaaaaccttattttgaactctctaaggttggaaacttgaatctcaactccctcattcttccttataaacttttataagcctacaagaggtaaggggggtctcaaactctcgaaccatgtgcttgctgttgaacttccatgaacatgttgcttcgaaattcttgagcctgttgtcatgtcctgaatctatgtgctgacgtngttttctt

SEQ ID NO: 142234 - DNA, 409 bp, Glycine max
  unsure (1)..(409): unsure at all n locations
tgcttggctgatgtagctcaagcaatcttggctatattttattgatccacacactggtgaataaggaagagagccctacaatccattttcttggattctttgaacatccttctttgtgcttcacctgcatctttcttcaactcctgaagccctatcatagcagactcaagaacatcctgcattccaaagatcactttcatttgaatgcactatgtattgtagttcttcccatccacgattggtagatgcgttgaagtccgttcccattcatctttgaacactgaagcttcagggatcccacactgtgaccaaacaagactctcccaagactgttgaaaccagcngctctttataccactattggaactagtgcttacacacccttcagctagaaatacaaactaatttg

SEQ ID NO: 142235 - DNA, 452 bp, Glycine max
  unsure (1)..(452): unsure at all n locations
agcttatcctgtagctgcctaattcnctctattaatcaancacaacctattgtaatcaattacaggggcgtgttctatgacaattgattacagggggtggtaattgattaccagaccctaaaacatggattttcaagtaaaataagcattaaaactaactattttacacccacaaaagtacacattcaatataagtaagcaaaatatataataataaaaaacaatcatcaaaagcaatcaacaatcatcataactctcaaacacaatcatcaaagacaatcaaaactcaataaataacaatcatcaaaagcaatcaataatcatcataactatcaaacacaatcatcaaagacaatcaaaactcaagctaaacaataataaaaactcaatcaaaacatcatcaaaagcatcattatatcataactattaacacaatatcatgaaatcaaact

SEQ ID NO: 142236 - DNA, 404 bp, Glycine max
  unsure (1)..(404): unsure at all n locations
tctctcttcttggctaaagaagatagtttatttctaattcttgtattccgggatgtctttatgacatttaaatacttagtatttcttttattatttgattagtatgactgaacatgatgattatatttacttgctcttggttgtttacggctatgagttttaaactcaattattttgatgatatatgactagtggtatgtacttttatttggttattatgaatgactntcttgattatatgacattctatgaagtattatnattttagtgtgatgaatggttatgatatcttgtttgattattttctattctcatgtattttggctatattagtatggcatttcgacaaattattatatccttatttgcatggtttgtttggaccaatataaatatattatttg

SEQ ID NO: 142237 - DNA, 376 bp, Glycine max
  unsure (1)..(376): unsure at all n locations
agcttattgacattcctatgaactctcatgttattttgtattaaataaaattataagacataattgactaatnttagttaacttaattattagcattaaatntataatacttttccaaatttatctttatatttataggggacctattcatcttctctaatcttcataagagagagaaagagataattcatggtattctagtcaaaatagttaatgcaccatatagatgaaataaaatcttataataagaaacaaaaaaatttgttgactatgtcttgtaaataaggactaagttagtattttaattaaattgatgtttgacagtataagtagttggatcacgtcttggtgccattgttggaggcacgaatttgga

SEQ ID NO: 142238 - DNA, 319 bp, Glycine max
tagaacaatatacttgtccttcacttaattgtctttggttttggcgaccacgatcaacaaagtactttcggcacctgctatatgttgacttgaccaatgctgttatgggtatgctgcgacaatccttcaacaccatattcacacattctgagagattggttgtcatgtgaccatatctttgtccaaatgtatcgtaagtcatgctccatttttcctttgaaatgcgatcaatccatgttgctatggctggactcaattaacgaattttttctaaattttgatcaaacacatgctttgcaggagtgtacgctgcatcaag

SEQ ID NO: 142239 - DNA, 462 bp, Glycine max
  unsure (1)..(462): unsure at all n locations
agcttagatcagtattcagaataagttgtttacttttnttttaggttgagaattgagattgctatcctcgaaaaaaactaaattagcacacatatgagtttgattattcggcaatctgcatagtgaatcgtttaagaaagcttgaactagctaagcttcaaattgaatctaaacacacagtttcttcaaaacaaatctaaaacatgataataatagaaatcaatgaagtcacaagtgaaattaaaaagctaacaatagaaaaaatatattgaatcgcaaattcttatacagttatacaaatcaaagctcattggaaaagaagaaagaaagaagagaaatactgaccacaagaataattaaggataacactaagccacctgacacaaagctcaaccgatgtggaacttgcaaaggccctgagaagaaacaaaggttatgcttatttccaaacagaatgaaact

SEQ ID NO: 142240 - DNA, 462 bp, Glycine max
ctaagcttgctgagcttgccttagttgatcccaagcgggctatgatgttattctatatttcacaaaacaaatagtgccggttaatattgttgttattctacatatgtacatcacaatggattcaattgccaatgtcttatgtttgagtcttgtggatggaaaaaacatagttggaggggagaaccccactaaaggtggccagccagtttctccaatgaatattattaattggcaaaacctgtagatactccataccaataacgtgatttgattaaaaaaatggatccaatattcttaagaacttgtttaaaggttatattcttcgtggccaatccttggtgtttttatatcatccttagtgcaacacgggagaactgccgtgttattgtgtggcccaatgcgtgcttgttccgcatttattacatatttgagacgcgatcctccctgctgctcagctatata

SEQ ID NO: 142241 - DNA, 460 bp, Glycine max
agcttataagaacaaaattgcctcaatcatttctctttatgcatgtgaattaggacgcatcaacaagaatcaagccaaggctattgtgcaagcaatcaatggggcaaaacacaccaaatgattatgatgatggatggctcaaattctcacaaaggtaaactcatcactttcaaattgagctttcaaaactatcatgacatgtagagaagaatcaaggatttcaagtcacaaaatgtcaagaacttttattttcaaaacaattacccatttcttgaacatatcctataattcaaagaaaaacatgcaaagtcgtacgtgcacacaaaattgacccaaaatattaaactaaaaatccgacgaaactaaaaacattaacaaattaacacaactaacaaattaacaaaaccaacaaaactagcataaccaaataacactcctccccatacttaaacaacacatt

SEQ ID NO: 142242 - DNA, 373 bp, Glycine max
  unsure (1)..(373): unsure at all n locations
tcttatccaaggctcatcttggtggtgaaactccttctttcattgcttattccctagtggatggcgcctcctctcacctcttctcctttgtcttccgctgcatctggaaaatcaccattaaaggacctcattgaagctcaaatatccagcctccatagaagccccacaagcaagctttcatcagaatggcaggggaaaatggtcctttttggtaacctggttcaacctgctatagtcaatgcagactctccaactgttctgcacccaagtaggaatcagctccttcttctcattttttatcacggtgaggccggttttcttcacgattacctggacagaactcacccattggctgtcngagataggataaatg

SEQ ID NO: 142243 - DNA, 433 bp, Glycine max
agcacctgagctgcagcttcccaacatccaagcgaaacaacattcaatcttgtttatctatcacagccaagcaaaacagagcaaaggctgaaaactctgctcaacacaccaaccaaaatcacagcttttctcacttaaagaccccagtaacaattcctttgttgcggttcatcaaccgttggattaactcgaaacttttactggaagtctatagtgcataagcctacattgtgaccgttgggatctactagcaaacatctagaactcattctacattactctttccacaaccagcaaaaacatagcatatgtctgcacttgtgcaaaatcctgctgcacaatttcacagcaaaaatctgcacaaagtgcagatttcgaaaatcacactgcctctcatccaattttgccgcaatcaatgtctacaagtgccaaa

SEQ ID NO: 142244 - DNA, 368 bp, Glycine max
actcagctaatgaggcgtttcaaatatgtacgagaagccgtcgatagccatctttgttacacgacgcgtcggatgatcaaccttgaaatgggagaatgtatctctataactaatcatattagtgaatttaatactattcttgcccagctgaagtcggagcagatcaaatttgaggatgaggtgacagcattgattctattggcatcactatcagatagttgggttgcaactgttactgcagttagtagttctacaagagagaacacattaaagcctagtgacattcgtgactggatcttaaatgaatatgttcgcaagagacatttatgagaatcttctctcatgtttcctatgtagcattgaatact

SEQ ID NO: 142245 - DNA, 273 bp, Glycine max
acatacccagtgtggttgacacatttactcctgcgtataaaacatttgtaatttgcacaaaaaaaagctgaaccttcattgatcattccctatttaaattttactcattgggatgtattattattaaagtgaatgacttgatcaaaatgaattctttttttacgacaagtttctttgatgccaatgctggcattgcactaagtgcttcctttggtaagctactttcgtggttagacaatgagtggggatacactactgtgtgcattatgtgta

SEQ ID NO: 142246 - DNA, 400 bp, Glycine max
taagtaccttcgccattggagacccttatctgtcatctactattgtttacggtgactgctcgtaggagtggaaaaactatcttcctcttgctcattatctttaccctatatgaaaatatgtaatgggttttacctcaaatcttgaatgatcgatgaagacttaattaaagcttattctggtatggacctacgtttatactaatgggatatatacaaaatgttgggtaaagatgaacactcatatttaaaactattaaatggcttccaaatcaattttaattggaattattaccatggtatgagtatgataaagatgtcacaaacagtctacagctatgttatgagatacatattatggtgaaggttaatattgtgatgtgggtcgggatccaagtgtgag

SEQ ID NO: 142247 - DNA, 282 bp, Glycine max
  unsure (1)..(282): unsure at all n locations
tgaattgtgtgagagtgagatgttgtattgtacttaagatgtgttattctgaacatgtgatcaatgtgtaggtgtggaatgtgattttgtgattaaatccttggaacaaatgatgttatgcaatgagtggtaaaatgatgcaaattaagctaagttaggcttgctatacttatattggatgtgtgtgtgtgtgcttttgtttatctttacctgtttaggaatatgataactcatttcctgtgtgttggttctttttnggatccagtgatgatctccaatctt

SEQ ID NO: 142248 - DNA, 389 bp, Glycine max
cttgtgtcagtgataaagcactgcttaaccttcgtatggctgttgatgttgtcctgaacgccaccttggttgattattctatggcatcaccatgatcgtgtgttcatacattcacatttgccacccgtttgcgaggaacgtgatgtctctattccttcttgatatgtatagagaagtcttcgtatcaccgtccatatttgaccagtctatagctgccaatcgaagatcgaaccatttgcatattttcgttatgagaaggatgaccatgcaaactcattattgcgcactatttatgtattcaatggataaacatatattctcttgtcactatctttaataacaaatttacttcactaacatattattatattatactccactaggcttac

SEQ ID NO: 142249 - DNA, 462 bp, Glycine max
cacaaaaactaagcttgagcgcaggaaagcttgagaaggctagcttttatatgcccaactccctcgagtcgcatttgtatcggatgttatcttggttgttgtatcctagtacattagatatctattttgcatcgtgtatcatcatagtgtgtgtgaagaaaagtttctcacctacataagtttctttagtggcagaaactctctatttgtatccattacagagtcgtcggtatcgagttcaacaagttatctgaagcctttagagttatgtctcgtatcgattaaccaattatagtagtatttcaattcattactctgttgtttgagaccatgactcatttagttacgagtctctactctattcaataccaagtggataatcgctacttctcttcgtcaatggttaaagtgacaatacacttcatcaatgcttgggcatctatcgatacatgtcctgagtgg

SEQ ID NO: 142250 - DNA, 408 bp, Glycine max
agcttaacacaacagatatcctgatttgttatttttatgagcagaaaggatgcacaacagaacataaatccagatctcagttcacacacaacatacattgtttcaaaccgaaaacgctccaaatatgcagatttgattcatacactttttaaaaatttaaatgcgggagaaggtatacggtgcgataaatgcaccatagtgattgtgaatatgattaatctaaggactaaaataatttgtgtaccatacacaaattctcatacccaactactgtagccttgttcccgagaggtttaaggcattgtgctaaaaagtttatatcggctcaaactcataaattaagtttataacattattggtgtgtgtaaactctttattaaagtttgttatctaatgaaatcgttactt

SEQ ID NO: 142251 - DNA, 305 bp, Glycine max
cactatgtttgttacaataagtatgtggttatgaaacaccacttcagacatgaaagcctcattcttagtaatgacacccttgtcattcatgactctataagtctgaacaattgcatcctcaatggaattatataagcttccaagaatttcaccaatagctcccaagagaagtactacatatgtatcaacaacactatatgtaatattggttgaactaacatcgtacattatcatacaacctttcccaaatagcacacgtccatgtggcacaaaacagaattgcaactctgaacacaatatcaatt

SEQ ID NO: 142252 - DNA, 314 bp, Glycine max
agcttgtatgactatggggcgcccgtcacttgtggtactatgtggcgatcgggcgatggtgcacgatggctctccacatcgccaaatcacacatgaatccaccatgcccagttgcccaccttccactgagcacacgtactcccacgtagcccttatcctgatggctctcatcaccgggtcctcaggaaccccttcgagcttcctcaatatccgagcacttcagtgatcaaacatcatgaactaccctaaaccaagacaacagggtagaggcagaaaactctgccaaaaacacattgcactccagagattcctta

SEQ ID NO: 142253 - DNA, 354 bp, Glycine max
  unsure (1)..(354): unsure at all n locations
tgaaccataaccggtgagagagtgatcttagactatgtgtgaacgactagctttgagtaataggctttgcatcaatctttgaattttagaatgaaatgtatgaataaggccatgattgtatatacaagccaattgaccaaaaagcttaccttgaattataaatgtatactttgcaccctttgtgatttgaatgatattttcaaaattgaaccctgaacttaaatgactatctctagataccttgcttagattctatgagagcagaagggtcaaggcgatntacccctaactgggatgcacagtgaaatggtaagcacatcagcacacgcaactaataagttatgttttaaaaaa

SEQ ID NO: 142254 - DNA, 465 bp, Glycine max
  unsure (1)..(465): unsure at all n locations
agctngatatcataacacagtatggtgactttgtctctcacaagtcctgcctcctgcattnttttaagataagatatggcaatgtgtggcttgtcagcactggccaaaatatgaatgagagaactgtcgctgcatttgtctgcaacaacaccaaattttttcatactatcaaacaattgacatgctntatcatagcattttcctatcccatatgccttaatcatcacattaaactcaaggacagtgagcttcttcttttctttgcagcaaataaagactntctcggctgctaaagtatacccccgctttccatatgcatcaatattggcataataacaatcagaattgatatttccagctaggtgaaacctcctgaaccacaccacgactgctcaagcatacctgattctacatacattctagtcaacgcaaattgtgtgaatcatcaatctcaagatccctttt

SEQ ID NO: 142255 - DNA, 402 bp, Glycine max
gttagaggagtgcacgatttgttaaatgttccacggattttgtactccatccacccctcgggcaagtattagactagctcatgtgtttatgatttgactcgagaaggaccgacaaagagttgtgccaaatctgccaaaggaagattttaatgttttggtggacattgcacttccaaatccaattgaagtcgaaattttgtaccactgtagagttatcttattagttttgcaaccaagcataagctgaatgagtggtataaataccatatttattgccatcccaagcaaatgagtcatgaacatcttgatgaagatatggggatgagagataaacttttattactcatcattaaaatataacctctacccattcatttacctcgtattaaattgacaaataat

SEQ ID NO: 142256 - DNA, 371 bp, Glycine max
  unsure (1)..(371): unsure at all n locations
agcttattgcatccggatggcgattcctcttcnttgttgatttaaaaaaggttggagaaagagcaaggacctttgtgcaagggcaaaagaaaaggataatgatctgactgagatagagtaagagtgcaacaagcactagtgtccccaaaataaatccaatcttcattacaaatagatctatccaatctcatttgggtatgagtagtacccctacgaccattaaaccacgtataattaatgccacaagtgtcaaaattcaagatgaataagatcataactattagtccaaagtcgaaagtcatcacaaaagtttttgttgggataaagaccttctgtcttctcgtgagccccaagaatggtgttgaaatccc

SEQ ID NO: 142257 - DNA, 311 bp, Glycine max
  unsure (1)..(311): unsure at all n locations
ctaagcttctagttgtgcggatagtctactctttntagatgtagtcttataatgatatgccgactggggaggggaccttgggagtgttgccattactttgtgcaaataaaacaaatttaaattaaacatccactacaaagttacaaaagtaataaggtgtgaatttacactttaaaatttttaatacaaatattgttatatcataaacattactttcatataacgcagntacgttggcatgttctcccgtaaccttcatcatgatcagtgcgagttgcaaccacattattgaccacttgttcttcaattat

SEQ ID NO: 142258 - DNA, 404 bp, Glycine max
atacttaaagcacctgcggcatgcatgcttgaatggagaacgattttatataattacttcagagagggagagacaaggcttctgaatctctgctttggctgagtgacgagagagaaaagctgtttggattacaacaaaagaagggttcccctcttttccattattttattcaagctctgccacatgtacctattctatcggagcaacagggcccactttctctttctgactgtgacccatactcagtcacaaaagtgagaaacatctgacctttggaacgcctaaatcctgcctcgggttgcgtgtagtgtctctgattccagattcttgcgatacatttgcgtccgaccgggccagttttccaaagcaagcacttgtctatctaaacgctcagaatgaaaccc

SEQ ID NO: 142259 - DNA, 242 bp, Glycine max
  unsure (1)..(242): unsure at all n locations
ggggagcacgatattgaaggaagacaacgggagagaagttgaactttgagctgtgtctcacaagactctcattcataaatntacaacaagtgttacacatgcttctatttatagactaggcatctctcttgagaagctctcttgagagaacttccttgagaagcttctttgagaaaacgttcttgagaatctagagcttagctgcacacacccctgtcataactaagctcgcttncttgaga

SEQ ID NO: 142260 - DNA, 365 bp, Glycine max
  unsure (1)..(365): unsure at all n locations
agcttaaaagtgcnatgctgttttttttgttcagacaattctaatggatccacagatgatgaagaggccctcatgttcaaaaggttcaaactgatgatgaaaaagaaagaaaagttccaacactcctctatatgaaaagattcaagatttcataagataaacgaggaaaacaatgagatcatgtactttaagtgtacgaaacctataattatgaagactgaatgtccccaattgaaaaagataagatactctggggacaagaaaaagaatagtctgatggtcatctagatgactcanacaatgagaagagtaacaattcaaacgataacgttgagggaaaaaacttattctgaaactggactttt

SEQ ID NO: 142261 - DNA, 253 bp, Glycine max
  unsure (1)..(253): unsure at all n locations
gagcttctctcgcntagcatagcctttaaggagcttagcgcatatccttgcggcagatgttcagcttagcgggcactggtcagctaagccaattcttcaaaagctgaatttctacaacttccgctaagcgtcttcacatgtcgctaagcggtagtggtttttttttttttngcaaaggccagctaagcggccagtgtctttttcacgtttgatattttataaaatgggccctgatcaactatttgggttcttt

SEQ ID NO: 142262 - DNA, 386 bp, Glycine max
  unsure (1)..(386): unsure at all n locations
agctnttactctctggtaatcgattaccttatgatgtattctattaccagtggccaaatacgttttataacagctataaaaatttgaattcgaaattgtaaaagctgtaatcgattacacaattgtggtaatcgattaccagcagttagtaaacgttttaattcaaattttaaaagctgtaatcgattacacaattgctgtaatcgattaccagacaggaatttcagaaaaataatttcaagagtcacaacttttcaaaggctntactcatgaccaccaatggtctatatatatgtgacttaaacatgaaattgctcagagattttcagaacaacaaagtgtttatcctctcanaaagcaatttcattttatcctcttaaagaatt

SEQ ID NO: 142263 - DNA, 393 bp, Glycine max
  unsure (1)..(393): unsure at all n locations
gtgtatttgggcacctattttgaatctcctatgttgtttcttatataagaaacagtcccactctcccaattntacacaatcatattcatacatcattggggcatttcaccgagcacttggtgagcgcatgtttggacataaattgcaagaggatggggacaatgtggcatgccccattgcttcaaaatacagcataggcctaaggccttctcaatcaaatcctcaattcaaaaaaatcaagcataaagacaacccaaaactaccccacaaatataagcacattctcacaatttggagcaccaanagatgaagaaaatataccaatgggaagctaaaaacattcaggatngaatacttacttgttggagtgaattattacacaaaanatgaaag

SEQ ID NO: 142264 - DNA, 467 bp, Glycine max
  unsure (1)..(467): unsure at all n locations
agctttggcaaaggaagaagaagaagatgttcttatagattcagaaatggattggcaaaagtttgttgtctaaaaatgaatgaattggaaaagatagatgtgtagaatgattgatagattgaatgaaatgcaaaacaaagccttgcttttatagactcttcatgtctggtcaagagaaccattagaagagttataacttttagaaaaacttaaaaccaatttgaaaaagtcaaaaaccatttgaagagttatatcttttgatttgtttagaaactattactagtaatcgattaccaaatcagtgtaatcgattacacaaagctttnttgtgaaagaatgtgactcttcacatttgaatttgaatttcaacgttcaagcacactggtaatcgattacaactttttgaaatcaattggaacgttgtaaattcagttaanaactttntcaaaaacattttgctactggta

SEQ ID NO: 142265 - DNA, 376 bp, Glycine max
  unsure (1)..(376): unsure at all n locations
tcatgtngctcattgactccagattgctgcaaagaaggacatttacctgtatggtgatctgcagaagaacataaaccacaaactcttgcaacaggtgcagatttctgattcatggcaagctgagttactaggtttaccaaggcatcaagttttccctcaagctttttattttcagtagatgaagatgaatccgtggccacctcatggactcctcgaaggacaataacatcatttcttacactgaattgttgggagttggaagccatcttctcaatcaaattcctagcctcagcaggagtcatatcaccaagggctccaccactggcagcatcaatcatactcctctncatgttgctaagtccctcataaaaatatt

SEQ ID NO: 142266 - DNA, 428 bp, Glycine max
agcttctttgagaaaacttccttgagaagtttgttcttatctatacacacccctctcatagctaagctcacctccttgagaagcttctttaagaagattcctaaagaagctagagcttagctacacatacctctctaatagctaagctcacctccttgagatgagaagctagagcttagctacacgcccctatagtagctaagctcacccccatgacaaaaaaaaacatgaaaatacaagaaaaaaaagtccttactacgtagactgctcaaaatgccccgaaatacaaggctaaaaccctatactattggaatggccaaaatacaaggcccaaacgaagagtagaagcctattctattatttacaaagatgagcgggtcatgcttagcccatgggctcgaaatctaccctaaggctcatgagaacct

SEQ ID NO: 142267 - DNA, 465 bp, Glycine max
  unsure (1)..(465): unsure at all n locations
nttggtacaaagaagaagaagaagttcaaagagatttgatgcttgttaaggattggatgaaataagtgttcaagattgaaagaatgaattaattgaaaatgcaaaacaaagtcttgcttttatagactcttcatgtctggtccagaataccatttagaagagttataacttttagaaaaacttaaaaccaatttgaaaaagtcaaaacctttttgaagagttacatcttttgatttattcagaaacagtcacacgtaatcgattaccaaataagtgtaatcgattacacaaagcttttatgtgaaaggatgtgactcttcacatttgaatntgaatttcaacattcaaaggcactggtaatcgattaccaaaacattggtatcgattacagaatttttgaaattaattgaacgttgtaaatcaattttgaaaatttcaaaacaatttggtactgggtatcgatac

SEQ ID NO: 142268 - DNA, 486 bp, Glycine max
  unsure (1)..(486): unsure at all n locations
cctctgagtcacctgccgcatgcaagcttgccaacttgccacctattcttggattattttttattttnttttattagtcgtttccgcgttgcctggaattgagttattgtagtaaaatagaaaatatgttacgatggacgtttcaatattgtgggggaaagtaacggttgaaatggtttgaatatggtgcagattcgagttttgttcccccattgatatactcgctgcttggaagttctagacatcttggtgttggacctgtttccattgcgtctttggtcatgggatcaatgttaagtgataaaatttcttacactcaagaacctattctctatctgggattggctttcaccgccactttctttgctggtgtattccaagcttctctgggtatattaaggtattagttaattcaacacacccanaacaataaactaagtttaacttatctataaatatttatattaaagttgacaaacacatata

SEQ ID NO: 142269 - DNA, 446 bp, Glycine max
  unsure (1)..(446): unsure at all n locations
tgtcggggaagaagctttttgcggaagagacacagtgataatattagagaatgcttccgggaagaataaaaatactttttatttntttaactgaagggcaaaattgacctttcattgaattgctgggtgcaccaacaatattgctgggtgcacctagcatatccctacaaacatctttataaaagattattgcgaatggaaatacgatttctgtgggaaggggaatttcagaaaaaaaaatatatttaaaccccacgagggtagtgccaatagcaatccccttataagcatcgtatgtgtgatgcagagtggactggtgttctcatgtttaaaagtggctccttcattgagaggattggatctctntatgcctattgtctctaccctgttattaccttaccattcacatacaaaatgagaatangttaaataattaacaagtattt

SEQ ID NO: 142270 - DNA, 307 bp, Glycine max
  unsure (1)..(307): unsure at all n locations
atgcaagcttaagcaattcaatgacaagatttcngtatttttgnccganagagacatgtaacaactcgtgacgctagaaattgcacacacgaagctctcaccatattcaaatgacaatcactgtttactcaaaagcttgattgcggcccgcaatataactagaagctcaaaattgaaaacagaagctctgagcaaattcaaacgacatagcttttgactcggatatccgatcggtcatttataattcgagacgctaaaattgaatactaagctctaagcactttaatgacaataactttgactcaaa

SEQ ID NO: 142271 - DNA, 453 bp, Glycine max
agcttatcatcacttattagccttattagttatatttgattgagggaccatatgaaacaatgttttttgtgtatataattttccaacaaattttctaactgagtcaagagggtattgtatattccaaatttcaagtaaaatataaatatttgagcttccaaggatatatgatggctcatggctgacacaaatatttcatgcttaacatctttatacatgaaaatattggtagcacataatggattgagatctgttaggaacaaccaccgcgagctcatagcagttgtttatctttaagtgaacattgtacttcatgctcttaccgttgctacacaggcaaggagtggactgagcttgaacaccctaacctatttcttcttgttgcttttattatggcacaactgggaagtggaatgaagtaaagttcttttactaatattgtaactcttcata

SEQ ID NO: 142272 - DNA, 413 bp, Glycine max
  unsure (1)..(413): unsure at all n locations
ntagatctaaacttttcttcccaaaatattgattatattttattacgcanaaatctaagtgtaaatcacttattccatgttgtcttagagtcatgtttagtcataataattgtcacattatattctaattttgtgttgaattttgatttttttgattgaattatagatacattttttcatctattcttgtcattcttagcctatcttttgaattttgagtctaatccatgcatgttatttagttcataacatgttctaaatcaattcctagaagtagtcttgttgtttaactttgttntgttttctaagtttcctacatgatacatatgaagaaattaagttgtggtgctgagttgtggctggatttgtgaatcanaataagtcttaagctctcttgaatngtgttattcaag

SEQ ID NO: 142273 - DNA, 283 bp, Glycine max
atttaatcaaatgcacgtcagagtctcgattaatatactcttcctgactgcttcgtagacccatcgacggagtactggctcaaacaatcggctggaatcaattttaaccggtctgtaccgattttacaatttataccatcggagcgggcctaatctgttctagtaatcctaacatgactttgtaatatggctctcactctttagaggcggtattgagactcttgcattgtgattacatttcaccgtcacactgcgtgcgcccgggtcctcttttgaatcaata

SEQ ID NO: 142274 - DNA, 319 bp, Glycine max
ttacgagctgatagagaaaggacagaaatttacaactgggtgagagaatataaaagccacaattttgttttagttttgtaaacaaagtctttattaaaacacaattgggtataactttctactctctggcgtgtttgaatattatactgtgtgtcctctcttgaaaagacgattaattacacattactataataatttatgagagggataaccacattcatacaactttagagattaattaataggttcacttatattatttgaaatatcagctgataattgctcttaatgatgttcaataatgtaaaacaatccgtaa

SEQ ID NO: 142275 - DNA, 328 bp, Glycine max
aaggaagacgcatagcacacaaaccatctaatcgttaattatgtaagagaacataatcaagaatactatggacttgcttaagagggacaggtcagcacactagaagcgccttgaacacatcacatacctttttctgactcgctccttgaagagagcaaagcactgtcggtgatgccggtgttgtgagagtgcaggtggcatccatacttgatggatggacgtcagagtgttggaattaaaactgggacgaacccaagtgcaagtggaataggagactgacaaggcccaacccattaataaatacagcatcatcattcgacgatcattg

SEQ ID NO: 142276 - DNA, 350 bp, Glycine max
  unsure (1)..(350): unsure at all n locations
gaatctgactacccttctgatacacttcggataatggttctttaactagagaaatcaaagggagatagaaagagaagtggagaatttattaaacgccctcaatcaaagatgccaatgccgaatgaaagacgtttttcactccattcatctggtggtaacgttgcttcaactgttgttttgggtaggcaggttccccctgttaaggcaccatatgcagcaaatcctgataggtatccccatgatggcacaatcacatatgactatcnaagtcctggtcaatctatatacactgcagcatctaatgctcctccttctaactatggtcgttatatgggtactactactaattt

SEQ ID NO: 142277 - DNA, 429 bp, Glycine max
  unsure (1)..(429): unsure at all n locations
agcttggagaaccacgaagcaccatctcaatttattttctattcgncgatggttggaatggaaaatctgtcacggatcgttatcgcattcaaggctaggaaatccaagtgccacctttcttcttcaccaagagtaatggagaagaataggggctccgacttggctggataaggcattcacacaataattcatcaacctaacattcaatttcgcatttatgaaaatgtgggtaccgacagggacgaacattggtcggagaggcattgggtgaaggtgaatttggtggttcgtaagacaatcatgtgggagaccggtgggagtagtgaatacatgttgaaatatgtgtagcacagatgatgggtgagggtcggagtggtcatgacagtctatggcgacagaatgcttgngtgttggaagcaattgcatgtg

SEQ ID NO: 142278 - DNA, 346 bp, Glycine max
  unsure (1)..(346): unsure at all n locations
tactcagctagcatgcttggagcaagtacagctcctttaccttatattccatattcatgtcaccntccctaatattcgtgtacgtgaaatataaaaactgccagcctcacactcttatgggataatttacttcttacattgcagatgagcgtacaatcatgaagcacatacattccaaactcttattgctttggcgttacaaactgccttcatatttatattagatactgatatgacactcatactatatcttatatgttgaacattaccaatatccacatcgtatatgtgtctgtatgccagcgtcggcggttcacatatgctgatacatgttcacatgagtctg

SEQ ID NO: 142279 - DNA, 371 bp, Glycine max
  unsure (1)..(371): unsure at all n locations
gcttgactatgcgaggtttttttatccttttttccaccttaantattagncaattccgttaagaatgagaaatcccaaagagaaaatgtccggntgatttttcgctttattttactaaaagacggttttttttattattaatatattatttcttacctctttttttgatttccaacgtggttacggcacgaccgaacggtcggaattcattttaaccgaagtttacggataatacaattcaaacgatcggcggaaatttattttatttttatgttaagcgagaaatgacttaagtaacatggcttaagcaccgtcagaaggggtttaaacagttaatgacatgagaataaaattccgaaacacaatgtgga

SEQ ID NO: 142280 - DNA, 346 bp, Glycine max
  unsure (1)..(346): unsure at all n locations
tgccacccagctcgcccaggcgagcagggttgttttctttataagcaacagccttctggaggaatcttctgcaaggcccaagtgggcctgtgtgctatttgcacccccatttttactaagtacacccccctgcctttnttttatgattcttttttcgtaaagataccgaaactcacgaatttcgtaacgatacttggtttctttccgtaattttacggaaccttgtggattacataataatcccctttntgacttacggaatgttacggaacctcactaattgtgctacgatgcttncatttgattttcggtgtgtcacggaaccttatggattttgcatcaaaat

SEQ ID NO: 142281 - DNA, 397 bp, Glycine max
  unsure (1)..(397): unsure at all n locations
agcttccttaagaagatcataatgaagctatgcttagccacacatacctctctaatagctaagctcacctccttgagatgagaagctagagcttagctacacaccccctataatagctaagctcacccccatgacaaaaaacatgaaaatacaaaaaaagagtccttactacaaagactactcaaaatgcgccaaaatacaaggctaaaaccctatactactagaatggccaaaatagaaggcccagacgaaggaaaaacctattctaatatttacaaagataagcgggctcatacttagtccatgagcttgaaatataccctaaggctgatgagaaccctagggccttcccttggatctctagcccaatctacttggagtctnntacccaataccc

SEQ ID NO: 142282 - DNA, 195 bp, Glycine max
atgggacttccttaccctcggtttcatccttttcaaattttttattttttttctttttcctgggcattaaattctttttgcttgaccattaattttttctctttatcttgaatgctttcacctctcaccttatttttcttgccatcaatacctttcttttcaacagttttctctttgtgcacaatactcttcttc

SEQ ID NO: 142283 - DNA, 405 bp, Glycine max
  unsure (1)..(405): unsure at all n locations
tcaacattataaaggaagtatcactttaagatggcacacccctttaagaaaatgtaacgttgctaatatattcattctcaaatatgagactatattaacaatattaaatattttgtactatcatattttgagaaaggaccatgttctctcatagatagacactacgtactttaacaaatgacattttttagcatttaacacagctctactcttatgactatatataaaaaaaaatccttgtaatcgatagcaatggtcctcacacaatacttaacaagcatgaattgagtgattttacatgaaatgacgccagaaactacgcagtgttagtagaaggccaactcagttgtacatagtgttcttattatgaanaaacattattgtcgagagcgatgtgatacttaa

SEQ ID NO: 142284 - DNA, 481 bp, Glycine max
tactcaagcttgtgcatgagagcgagaatgctagtgggtttgatagttcttggtggtatctcttaacgggagggctagaaaataagataaaaaattgagaaagtggaaatagttaatttaaggggtgaaatgagagaactacagataaaatgagattgtgcatgttgttgttgcgagcgatgacttggagcctggagacggcgtcctcattgacgacagcgtcggcgaccttgatgggatgatacttttctacccatggaacgttgtacgcattgcttgatgatgacaatgacatgcttctgccaacggcgaacaaaggggtttaagtttcagaccagagcggagaataaacgttctaaagcccaaaccctatgtgcctaaaaaccacttcaacgttcatcacttcttatatcaaacggcatgtgctctactggtttcttttgcgtttgcgaaaacgcatattcatttgggtgctcgtgtt

SEQ ID NO: 142285 - DNA, 469 bp, Glycine max
gctttcatatgtgaaatcaggagcagccttttttcttattagtcctctcacgagggggagggggtgccatgttctcaaaatgtgcaacatcacaatgctcaaaattagaatgctcaaaattataatgctcaagatcaggatgttcaaaatcaccaatatcagaatgcacagattcaccagctatggaatgctcagaatgatcaaaaggtataaaatgatgcctaactaatctatgaaatgtcctatctatctcaggatcaaagggttgtaagtcagatggattgcctctagtcatacactacattcagcatgcacacaactagttgccttgtcatgtaaataaaggtgtagggttgaactacagctaccctcaaatgatatccaaatgactcgaaattttgtgagcaaccctataaaatgatgagaagatagctcaatataattttagacaaacatgttaaagtcttac

SEQ ID NO: 142286 - DNA, 307 bp, Glycine max
  unsure (1)..(307): unsure at all n locations
ggattgaagagttggtttgtgagttttgggacttgagtgttttgtgagccaccttgatgtcaccctaacatcaagtgttggacctgagtgtgtagagttgatctctattgttcagagagcaatctctggtgtgtatttgatttaattggtaacaccggagagtgattgagagggagtgagaggggttctcatatctaagagtggctcttaggtagaggttgcacgggtagtggttaggtgagaaagttgtaaacagtggctgttagatcttcgaactaacactattttagtggatntcctccctggc

SEQ ID NO: 142287 - DNA, 306 bp, Glycine max
gacccactaactcgagacaaaaaagaaccgaacgccagcaacctagggaattcagaaaaaccgaatggctgagcggaactgaaagagaggcaaccaaaagacacccacaacagccaacaagtgagccaccattaggacccccaaaaggccgacgcctaagatgccaattgcgccctcattacaacttgaactaaacccacccaaagcccttataatcgaagaacccaaaacaaatctacggtcagccaaccttacaaggattgggccgacatacagacaaactagacactctaaaaaacgagacaa

SEQ ID NO: 142288 - DNA, 368 bp, Glycine max
  unsure (1)..(368): unsure at all n locations
aaacttccaaagaaaaacgttcgattgattatttttattatttcattcaaagatattctaattatttgcttattacttttcaagatatttcgattattgcactattatttcgctttttttttgcttaaccgaggttacagcgtgaacgattgggttgattttgttttaaccagtgataaacgagaatacaacacaaatgatcggttgacaatcattttatcatttattatgcgagacaacggcttaaacgatcggctaaagcttgttacaaacggaagacaagaaatccgataatgaaccaaatgaagatgaaagcttacaaaatagaactgaattgaaagcctcggattcanaacttacccgctgta

SEQ ID NO: 142289 - DNA, 387 bp, Glycine max
  unsure (1)..(387): unsure at all n locations
ttaagngacctgccgctgcaagctttgataatgagaacctgtccttcattcnatcttntaaatanggcatctgaagtctgagagctttgggcagataactctgctaaagatggaggtggggctaaagtagaagatgcagagatgccaactattggtgtaaaggaagagggaatatcagctgctctgagcttagtcttctttggctctggaaaaataactatttggtcatttgcattccaaaagttccttatgatgtaagctaagtcaatggtcggtcttacattttcataggaggtaagggcatcaaatcccactcccctcgatctacacaaggctgtgattaaagctgggaagcctaatcgagaagagttagactgagcgatcatg

SEQ ID NO: 142290 - DNA, 363 bp, Glycine max
ctaagctttgaagtgcgtagcccaccattttccataggagaattcttgttatgtgtctactatcaatggcatcgcgtttttttttggcattgaggtgccactttgagctggcagggtctccacctttgagcggtttctttgaaagaattgtgccccctttttgcacctgttctgtagttgcattctatctgaagacattattctgacactggctaacgaaggcaaccacttagtccttcccagaatggactccggaaagttcccaggtagcgtaccaggtaacagctacccagtaagactttcttggaggaatggtttagaattcttatctttgcgcatgcccccattttcgaaatacatctt

SEQ ID NO: 142291 - DNA, 438 bp, Glycine max
ctgcacttactctcacccaacttttctttctatatctgatttcaggcttaaataggtggtcttgttcgtgctcatgcgctcaccacaactatgatccgcttagcgcacattagtgaatattggcttaacgtgtgctcttctcgctcagtgaatggagtgaagtggtgcgcttaacgagatgaagcggtgcgctcaacgaacatgtacaactcatctttttccagattcttcctcgcgcttagccaataagtgttacgcttagcggacgctcgctaagccaaaagattgtcttagcgagaaggtgatacataacacttttcagaatcaccttattaccctgaaattgagagaaaatgattatattacacacaaacacggaagcactaagtatttattacctatacttaacaaaaagttcttataacactacattaatac

SEQ ID NO: 142292 - DNA, 302 bp, Glycine max
tagccgagaaggtcgcggatctcctcgggggcggagtaagtgtccaccattgctttggccttggctagcaatccgggaagttcttgactcccgttcaaggtaagagcaaatcggtccatccacattgttgcatcttgatgtaacgagtcgatcacccttcctctaacctttttttccgcatacacttgggcatactagtccgccactctatgctcgtgggcccgggccagatttaggtcttcttgatacttgctgatgatagctaacattgttgtctctgtctcgcataaccgctgagacat

SEQ ID NO: 142293 - DNA, 317 bp, Glycine max
  unsure (1)..(317): unsure at all n locations
gcactgcctaagagatcagatgattatctctgaagaaccgttccgctcccgaatatgacagtcatcgttaggagcgctgacaccagcaacactttgaggccataagggatggtcatttcttgggagcgacgcgtcagcttaggacgacgagttactaacttnaggaggagatagttcccggcggtgggcatcagtggtacccccatggccaagtttacctagacatagtcctcgagtttatgccaatgcttggcctcagaggaggggtcgagatctggatcctggtgaggggtagtgatcccattcatgcgatgctc

SEQ ID NO: 142294 - DNA, 130 bp, Glycine max
tttttgttaagctagaaccttatctatccacaccgcgctattaactaaattaacttcctgaaaaacaatttcggatgaaaataacgccacaagatatccaacatcaaacataattactaatatatatata

SEQ ID NO: 142295 - DNA, 456 bp, Glycine max
  unsure (1)..(456): unsure at all n locations
agacttgcggatttggtctttgcctgtgatttgatcgatgtgggtctgaaaagaggcaaatntagtcatcctgcttggacgaatgagaaaactggggcaaatgaagagggtgaggatgaaggagaagcccgtgctgtgactgccattcctatacagccaagtttcccaccaacccaacaaatgtcattactcagccaataacaaaccttctccttacccaccacccagttatccacaaaggccatccctaaaatcaaccacaaagcctacctaccgcacttccaatgacaaacaccacctttagcgtaaaccaaaacaccaaccaagaaatgaattttgcagcgagaaagccttagaaatcaccccaattccagtgtcctatgctgacattgctccatatctacttgataattcaatggtagccataaccccaaccaaagctcatcaacctccatt

SEQ ID NO: 142296 - DNA, 456 bp, Glycine max
  unsure (1)..(456): unsure at all n locations
tcaacacatttaagggttggctgcatttagagtttgttctttagtttactgaccacccactgtctatttgcttgtttgttggtcacttctctgcagcaattatggttatgcttaaatgtctttatctgaaaagagtttctaacttcattctttgcacagtagatttcccaatcacaaaatgccttcttgcattttgctctagccctctgtttatcatttttcttccacttgaactccctgcccatcaatatgctatactccctcaacgcagatttaaattcatctagagtaccaaactccatccctaattccaacttctgttcaccaactccactactttgactatattgaggataaacttcaacatcctcatcttcatcatcactactaatggggatattaagctnctctgaatgataaccatctgtctcaacttcagcttcaacttcattcaac

SEQ ID NO: 142297 - DNA, 450 bp, Glycine max
  unsure (1)..(450): unsure at all n locations
agctttaatctatttatctagtataaacttgtcatatgactntgacaaaaaaattagtgagacttgttaaggcactaaagcattaagtagtttatgatacatgtttgcactttgcacaattagttggaaatttctgcattgttttccattcattattcctggttcattccaaatgttggtgcatttttttagtttgtttacactaagattgcagccacattaagaaatggaaagcgttgtttctcgggcagtgttccacctgatccagatggaatagaccattggactcacctaaaacaaggtgctattgtgccagtaactcaaatgtggaaccaaccatatatctgtatattttcaattcctggccctgttatgccaggttgacctcactgcatgtctgcatacctcttcttgtggtcttgcattaatcacttctgtatctctagtact

SEQ ID NO: 142298 - DNA, 438 bp, Glycine max
  unsure (1)..(438): unsure at all n locations
ctacctataaatactgtgtaatcatccgttaaatgtgttttaataatacttgatcatttcttccttctcttgcttctgggaggtttgcttgggcctcgaaagccaagctataatagtggtgttttcattgagcatcaatggcgaatggaacacgtttgaaggcatcattagagcgtttggaagatgcaattgccaagctcactgcctcgcaacttgctatgaattcgaagattgatgatcttctccaacgaatgtctcagcttgaggcgaatcaacagcaaccgcagtctccgccgtcgtcatccgcaagacacacgccacagactcaaacctcttttcaccatatgaagctngatgtcccgaggtttgatggatcggatccaattggctggaccttcaagattacgcaattctttgagttcactctacgccgatcat

SEQ ID NO: 142299 - DNA, 394 bp, Glycine max
catgcaagctttataagcgcgggtctgggatacaatggtatttgttcgcgatatgcgaagatgatgttccgagtactttggatttagtacgaccatgccctcctgatttccagctgggaaattggcgagtggaggaacgccccggcatttacgcaacgagcataatgtaaacctttacggttttaaaagctctatagttgggcctaggctttagagtttttccttttgttaaggctttgtgtcttttgtttttgaatttataatacaaggatctttcttcatctgttcctggtctctacccattctcattcatttgtatgtttacttctttttctgaaacggcagatccgatgacgagtccccgaaagtactaatacctgggacccgcctatcg

SEQ ID NO: 142300 - DNA, 111 bp, Glycine max
acattctttcctttaatggggaatgggagtttaataccataattccgtttgtctggaacaccatcttccctcttctctcctttttcttcttatgaagctattcccatttga

SEQ ID NO: 142301 - DNA, 178 bp, Glycine max
atctatgttcaattaaacacgacgcctacaccaaggatctgtgattcggcgaggaggtcatgctaagatgagctcagctccattcatggacacgtttatgcatctcccccaacaatataagcctacgcgtgtcttcaaaaggtccttctgactttataactccatctccattgagctt

SEQ ID NO: 142302 - DNA, 352 bp, Glycine max
  unsure (1)..(352): unsure at all n locations
ctataaaactaagctgtcagtccattggacactcaccaagttgttattttatattatncgctgaaccaacattggaagcagcctgaagatgataaagtaatggcttcattgtcatgaacaatgtacctggccttatgtcttaaattcctaaatatattaatattcctcttaagttttggtatgctggaacaattaatttcaacttttatgcaactatttacttgctagttttactattggcttattgatgtcaagtatatacaattgtcaaccaattcatcttcatgagagccatttcagttagtggtacataaccatcatcccatcttttaggtccgcttcttgctcaatc

SEQ ID NO: 142303 - DNA, 378 bp, Glycine max
  unsure (1)..(378): unsure at all n locations
agcttctcccccaattttctatattttgtttgagaagngaacagaaaaagggtgcagccccttatgcacttctctctctttcgaatatgcttggaaaaatcgcttccgtgaagaaaatccaagccgaggcacttccgaaacgtttccgtgaggaatttcgcgaaggtttcgaccgttctttgacgttcttcattcgctcttcaccgtgcttcgatcttcaacgggtaaggacctcgaaccaagcgtttcgattcattctatgtaccccgggtgggccacatcgcgtatcgagtatttatattctccgtgcacttactttatatgcccccctttgacgtgcttaagccattttatttaagtcatttgtcgctaacctaa

SEQ ID NO: 142304 - DNA, 298 bp, Glycine max
ggaatatgtgggccatcatcgatgagtgcaaagagaagcttaatcttgcaccgactcacgaacaaaggctagaggatgaatacgccaagatatcagcaaaaagggaagccagggaaagggtaattgattcattgcaccaagaggcaacaatgtggatggaccactttgctcttactttgaacaggagtcaagaacttccccgattgctagccaaggccaaagcaatggcggacacctattctgcccccgaggagatccacggacttctcagctattgtcagcatatgatagacttaat

SEQ ID NO: 142305 - DNA, 485 bp, Glycine max
  unsure (1)..(485): unsure at all n locations
tctaagtcacctgacgcatgcaagcttattggattatggngcacccgtcatatgttgtactatgtggcgatcgggcgatggtgcaaatcaactctcccatttccacaagtcaggcataagcacaccatccccagttgcccacctttaaattgagctcacgcactcctacgtagcccttatcctcgttcctttcagcaacgggtccccatcaacccctcaaagctttcacaatatccaaaaaattcaatttcatttgtcatgaaactaccctaaaccaagaaaacaaagtagaggcagaaaactctgcccaaaactcattcaaattccacagtttttcctactcacatgccccagtaacattctcttcgttctgattcgttaaccatnggatcacctngaacattttactggaggttcctaatacagaaatctaaattttgaccgttgggatctgctagaaaatatctagaacacgagatgtacta

SEQ ID NO: 142306 - DNA, 380 bp, Glycine max
taagaaacaacttcgtcgaccgtggagattcttgactttatctcattgaagcgcatgtgcactttggattccaaagtatcaaacctttcaccaacaaagggttgaagaccatcatacctatccgaaatcttttgaagaagagaataaatctctccaccatgtacttctttatcaacagggcatgcacctttttcacctaagagccatcatgctctatctgatagccaaaggatgcaatgacagccgcgcctattagaaaggatctcttgattggaacataaggctcacaatcaagagggatgttaaagtgttgaatgtaacattctggaaatttctaccctgaattcttggaaacgatggtatttgaatgattatatata

SEQ ID NO: 142307 - DNA, 387 bp, Glycine max
agcgttttttgttcgatgtcgcctaaaattatatttgcagttcggctaggtttcttcgtgcgaactgaaccgaagttgtgtctcggccgactggcatgttctcattttgtcggccagcaaaacattatcccacctcggcataaaaaacatgattcaccgatatttgacaggaaaagaaaaatgctaaccgacgtcggccatgaaagatgaccgaccgaggtctgaaaaagaagcatgaccggatgactccggtcgaacatttcctaactgatatcatccaagtattattcagggattgaatagagaaaacattagccgacatcggtcgttaaatagccgtgactgatattattcggccgacattgcgcaatttcttttacaaacgct

SEQ ID NO: 142308 - DNA, 465 bp, Glycine max
  unsure (1)..(465): unsure at all n locations
tactcagcttcaccaaggggagatggaccatttcaagtgcttgaaagaattttgacaatgcttacaaagttgagctgcccggtgagtataatgttagttcaaccttcaatgtctttgacttatctctttttgatgcagatggagaatccgatttgaggacgaatcattctcaagagggagagaatgatgaggacatgaccaatagcaagggcaaggatccacttggaggacctatgacaagggttagagcaaggaaagcccaggaagctcttcaacaagtgttgcccatattattngaatacaagcccaagtttcaaggagaaaagtccaaggctgtgagttgtatcatggcccacatggatgaggactaaatggcaccactttgtctcaatttatagtgtttagttgtctaataatggaccaatccttgtaaagtggctgacaaaaatatgtttgggtaatcac

SEQ ID NO: 142309 - DNA, 382 bp, Glycine max
tgaaacggcatgaaggtgttgaacccatacctgaactatctagtactaataatatcctgtatgtcacagaacctgcctcagacaattcatctgacgaccctatcgtggcccatgggaaaagcacgatggtttcacccgtatcttcatgatcatgggacaactgctccgagcatccaatgagaaaattggctagcctgaagtgtctgcatcttcataatatggccttggatttgtggctcggaacaaagggaaggtaaatacacctagtatttcatgactcgctatcatgatatgttgccagctccaactctctcctttggagaataaataatgctgcctctaaatccaaaaaagggggcctgatcatgaaagtgagaatgtg

SEQ ID NO: 142310 - DNA, 483 bp, Glycine max
  unsure (1)..(483): unsure at all n locations
tctgagtcacctgacgcatgcaagcttcctagagaagctagagcttagctactcactttncttcaaatagataagctcacctccttaaaatcagaagctagagcttagctacacacaccccctataatagctaagttcacccccatgccaaaatacatgaaatacaaaaaagtccctactacaaagactactcaaaatgccctgaaatacaaggctaaagccctatactaccagaatggccaaaatacaaggcccaaaaaaaggaaaaacctattccaatatttacaaagaagagtggactcaaccttggcccatgggctcagaaatttaccctaagattcatgagaaccctaaggccttctttagcagctctagcccaatcctcttggagtcttctatccaatacccttggggggtaggattgcatcatcccctcccccttggaaaggatntgacctcanatcctgaggttcttgatactct

SEQ ID NO: 142311 - DNA, 411 bp, Glycine max
  unsure (1)..(411): unsure at all n locations
ctttcgattcattctatgtacccgtagtggtccacattgtgttttttgcatttacatncacgcattggctactttttataccccctgttgacgtgcttaagccttttcacttaagtcgcttctcgcttaacttaaaaataaaataaatttccaccgaacgtttgaattgtattatccattaacttcggttaaaataaattccgaccgttcggtcgtgccgtatccacgttggaaatcaaaaagaggtaaaaaaataatataataatcagaaaatatctctctagtataataaagcggaaaatcaatcgggcgttgtctctttgggatttctcattcttaatcgaattgattaataactaacgtgaaactaatggctaaatcaactcggctatgcaagctcgtcacaaaaat

SEQ ID NO: 142312 - DNA, 433 bp, Glycine max
  unsure (1)..(433): unsure at all n locations
agcttgaaaggccatggtgattggaatgttatttttctttcttgggatgtaaacattatcaccaacattttttcctgaaatgatttcagctgcaatgacatgtttagctagtctagtaactattaatctagtaccattacagagcccttggcgttggtctaagtttcttagcaacattataggactaccgatttttagcttgatacgatgatttggcanaccagatgtgtttagtgaaattgagaaattcagttgtgattgattggaaatgccaactgtcaatggtctttgacttctctatataatcatagcttaagtattccatttgttcacctattatatctatntgaggtaccatacaaagttaaatagagaataaatactgagtagacctttagttntgtaatntcatatgtgcataaatacctggaaa

SEQ ID NO: 142313 - DNA, 318 bp, Glycine max
  unsure (1)..(318): unsure at all n locations
gcttctgatgatttcactgcttgtagcttcaaaagggtgaattaattttttatttacacaccgtaggttcacctagattgttttttaaatcctttctttttagtgacatcatttattagtatttagtatatcttcaatctgtattttctttgtttttttcattctatccttccaaaatcagctgtgccaaaacagagggagtgtttttngatgagtaacagaggaagtgttttcctattacatggtaacaatgctcagtatgtgggaaagcagcaagctggttcaattcactagcctcattaattcatttatttctat

SEQ ID NO: 142314 - DNA, 69 bp, Glycine max
ataattcattttttgtgtctgggccaactgaaatgcatcaatgtgatgggtcaaaatatggttgcctcc

SEQ ID NO: 142315 - DNA, 316 bp, Glycine max
aatcccccattagggagggataattttctacccacattatgcgaaccgatggtgcgtcgtctcaatgtagcatatttacaacatgcttaccaaacacataagttaaatctattcaaccaaaacaattaagtacaataccactatacaacactatgatgcatatctatctccccctgttggaatcacaaagccaaaaaagtatgtgtcacatatgaataatcaattatagccagacacacaaggcaggaaacacagagatatcatattacatcctaaaaaagaatattacaatatgataatcatacacatcattcaa

SEQ ID NO: 142316 - DNA, 438 bp, Glycine max
agcttaacattttccatgggtactactagtatgtttaacctaataaaaatgaataatctgttgagaatgtccacgaagcaatgctccaaagaatagtacttaccaaataaaactacactaacactaagtgtgagggtaagtatgaaaatgatcacagatgctctccctaatatggcaatagcctctctcaccaaatgttgtccaacaagtgcaatagtagtggctataactacgaggtaaagagctgcaagataatatcgaaagttgaacattaaagttccatatgataatagcaagttatggcttccttaacctattaattagtccataagataatgctcttgggccagtttgagttttgacttaaaaactggtcagtaaaatttaagtgattactaacaacaatgttagtgaggacctcttaccaagttagtcaat

SEQ ID NO: 142317 - DNA, 417 bp, Glycine max
  unsure (1)..(417): unsure at all n locations
tcacttgagatgggactaacatcaactaccttgtgcatggtatgaaatccgccatcttgctgaacctattcaccaccacaatgataaagtctacacccttctgggctctatgaagcctaacgacaaagtccatacttatatctacccacgggtcaaatggaatgggtaatggtgtgtatagcccatgaagcatcaccctaaacttggcttctaaacaagccacacacctaatgcaataccaatggacatattgtttcatatggggacaaaagaatttttccttgatgaaagacaagagtcttatcaattccaaaatgccctattagcctacccttatggctctctttgaccaacaactttctaatggatcnattgggtatacaaagccttcccttcttgacaaataccccttacaat

SEQ ID NO: 142318 - DNA, 314 bp, Glycine max
aacaacaccgccaccagacaagccacaaagaagaacaaccaagcacgagcctgaaaatataggactacattgcccaaggatatgagaaaccaacaactcaaatgtgaatgaatggagaaaaatatcacactcagcacacctagctttgtaataacacacacacacacatatatatacacgccacacaaagagagagagagaacgggaaagccgcttcggataaggataaacactcagcttccacacactcacctaaagcgaacagacactcaacgcaacatacactcacactttttcgaacagatgcaacaaaa

SEQ ID NO: 142319 - DNA, 324 bp, Glycine max
  unsure (1)..(324): unsure at all n locations
agncgagatgacataggaacttcattcaatagggagaaacattctttcttagtgagatattggtttattatcaccagtatccctaactatgtcttttaattattgtttacacccttcgcattccaagtgttcgaactttcgctgatgcgaagattgtcatgcatatatgtcgcttgcagagcatagcctttaagattttgcacctttacattaaaataaaacaaacttatccttttcaatcgctgaaaaattaggttatacacaaattggcttacataaacatgagttttatagacacgatacctagntctaccacttttacta

SEQ ID NO: 142320 - DNA, 336 bp, Glycine max
atgcacatgcgtattttctatcttgtgaatcctaagacagggacaagattgctttaagtgatggttaaataccgcgccaaattcaagacagagatcaaccgaggtaagtggtatcgtatccacgtcttgctacacaatgtcatttactggctttacgtgctctgggacaagtacaagtaaacgctatgcccgtgatcaacagatcgtcgtgccgtgtccagctcaagacgttaaaaaagcactagtatgaggcaacctagtaccttttaaaactctgcttgtatttgatcaacctttgttctcaagtcatagtaggacacaccgtagtgctcatga

SEQ ID NO: 142321 - DNA, 244 bp, Glycine max
gagccaagtatacctcgacgtcttactgcacagttgcgaacccgccacgacgccttgctacttaattaagcctttattggtctgctactctatacatgctaatggatcctgtgcagtactttccataacgtaataagaccgcctcgagaaaatgggatgagtcctcggaagaaccctctcataggaaccgagcatattatggcgccacgaatactattatacccctctcatctgagaagggact

SEQ ID NO: 142322 - DNA, 316 bp, Glycine max
  unsure (1)..(316): unsure at all n locations
ntggttatattggagcatttncacctagactcggacatttactttggngaatgaagataaacctggattctttatcagctaagaagtaactagtcgtgttgtccatgtgcatatgttggtatgtctggcgggctaggaatgcacaagctattcaaagatatgtttggatgacttggtacatagctaactagattcaagtgcacaaggagattatctcggcagcaactacctcaacaacccctgcgccacctagagaagttgtttggaagccacccactaattgcaacttgaatctgaatatggatggtagcgcaat

SEQ ID NO: 142323 - DNA, 392 bp, Glycine max
  unsure (1)..(392): unsure at all n locations
agctaggagggattgatggtgacttggtgttgataagaacgaggataagggctacgtgggagtacgtgagctcagtngaaggtgggcaactggggatggtggatttatgtgtgatttgtggatgtggatagttgacttgcaccatcgcccgatcgccacctagtaccacatgtgacgggtaccccataatcccataagctcgaagtgagaaggtgtggaagagttagtcttcctacttttattcgttgaccacagagtggtacctggagatatgtcgcgggggtcaagagaccttggggacgtcatgtggggttgctattgccacaaccaatattgaccaatcccgacccacccgggcatattcaatcagtgagaacctggatgtacctaat

SEQ ID NO: 142324 - DNA, 388 bp, Glycine max
  unsure (1)..(388): unsure at all n locations
ggaccttaaatctcagcttatgatgaatcaagattgattcaaagaagtcttgatgattacaaaggtgatgaccaaaagctcaaaggtcaagaacacttcatgataacaaagatgatgatctcaagaatcaaagaataagttcaagattgaatcaagaacacttcaaggttcaagaggaaattcgatttcaagaatcaagtttcaagattcaagcttccaagaatcaagatcaagattcaagactcaagatttaagaatcaagagaagacttaatcaagatgagtatgaaaaagttttttcaaaaactgagtagcacatgggattttctcaaaacctttntaccaaagagnttttactctctggttatcgattaccagaatattggaat

SEQ ID NO: 142325 - DNA, 372 bp, Glycine max
  unsure (1)..(372): unsure at all n locations
agcttgcacttcttcactttcctcaagaatttcattctttttcccacttagactttctagctttgggagccaagtcatcccttgcggtctagacttcaaccacttgtgatagccgccaatgacgccattgctacttcccttaatctctttatcttgtcttcctactctatttcatgctttatgggatttntgaagtatcttcccattacgttcattgaaacctcgcgcgatgaaagtggtgatgatttcctccgacggaacacctctcagagggtagcctaactatcttatggccaacacaagattataattaatacaacctctcatccccatcaaggggacatttaggaatccctccatgagcatacactc

SEQ ID NO: 142326 - DNA, 389 bp, Glycine max
atccctattatgttagtgagagtgattctcctaaattcttgaggggatcaagaacaccccggctgtatcaaaggactttcacaacctttgtgtgttgccctcgctggaaagagtgagtctttccttgctgtcatcttcacccttgttctttcaaaccacaattccagaaaatccacctctgcccagaaatatctcgtggccataactcctattttacgcactcatattaagcgattcttggagcctaaattgactttcaaaacgagacgcttcacctcggtttggaatcacctcattcggagccttgaacctcagtattgccattctatattctggccaccaccacttaactactttacctccattctccattatgcaaaaccactatt

SEQ ID NO: 142327 - DNA, 464 bp, Glycine max
  unsure (1)..(464): unsure at all n locations
agcttaggttaaattagtctaaacttaagatggtttaggtttantattctaggctacaacatagaacacaaaggcatggttgattagagaaatatctttatatgcatcagcttgttggttagaaagacccaatgctttttacctattcctgtcaacttttacttgcattttctgtttttaccatagaagtagtttatttctgttttgaaccatcgtttatgaatgttgctccaacaatgctttacttctgaataaaactctgtctaataagaaagttccttgagttcgatacttggatcactccattttaattttaaatacttgacgacccggtgtgctttccagtatctcatttcccttctatatatttgttgaaaattggagaaaaaggaacaatatgggaaattgaacaaagtatttatagcaccgtagtcggtgaacttaattcattagaagaagtcagt

SEQ ID NO: 142328 - DNA, 463 bp, Glycine max
  unsure (1)..(463): unsure at all n locations
agtcacctgacgcatgcaagcttcaacattcaacttcgagcgtctcgttatattatattattcaatnagacatccgagtgataagttattgtcgttgaatttgctcagagcttcaacattcaatttcgagcgtctcgataaatgacgggactcaatcaggcatccgagtaaaaagttatagtcgtttgaattggctgagagcttcaacattcattttccagcgtctcgatatgttacaggactcaatcagacatccgagtaaaaagttattgtcgattgaatttgctcacagcttcaacattcaatttcgagcgtctcgatatatgacgggactcaatcagacatccgagtaaaaagttattgtcgtttgaatttgctcacagcttcaacattcaacctcgagcgtctcgatttattatgcgactcaatcagacatgcgagtaaaaagttattggtcgttgaa

SEQ ID NO: 142329 - DNA, 444 bp, Glycine max
  unsure (1)..(444): unsure at all n locations
agcttgttggtctagaatccggaacatcttctttctaaattctaatccaagtataagaacaaagactcacaaaaaactgtcacaaaaacagtacagtaacattccccagatcgttgcacaaaacacaggcttcatcacacccctaattcttcactaatgatctaggtcaagtacaagcattctataactagtacaagctgtcacaaaaacaatatagaaacattcaggattgttgcacaaaacacaggcttcacagctctaattgtttgataataatctaggtcaattactagtgttctattactagtataaatgatgttcaataacattgttaatactatttactactgaatactctaatatttntaacaaataaaagacanaactaatctgagtagggtatcaagggcaaaatatanattttacaacagcttcatcaattgg

SEQ ID NO: 142330 - DNA, 405 bp, Glycine max
  unsure (1)..(405): unsure at all n locations
tcgttgcaagccagtggctggaggagaaagctggattgttaatttgatttgtggagtgcataatcatgaattgaccaagtcattagttggacatccatatgcggggtaattgactaaagctgaaaaaacacttattgctgatatgacgaagtccatggtgaagccaagaaacattttgctaactctgaaggaacacaatgccaatagctgtacgactattaaacagatatacaatgcaagaagtgcattccgttcttccataagaggaagcgatcttgaaatgcaacatctgatgaagcttcttgaacgtgatcaatatatntattggcacagaataaaggatgaagacgtggttcgtgatatcttttggtgtccncctgacgtcagtgaagtagtccatgcatg

SEQ ID NO: 142331 - DNA, 390 bp, Glycine max
agctttgaatgctctatttttgtgtttgtttagaatatcttcagactgatcaacacatgtacagtggccaaagatgcatgggagatcctgaaaatcactcatgaaggaacctccaaagtgaagatgtccaggttgcaactattggctacaaaattcgaaaatctgaagatgaaggaggaagagtgtattcatgacttccacatgaacattcttgaaattgccaatgcttgcactgccttgggagaaagaatgacagatgaaaagctggtgagaaagatcctcagatccttgcctaagagatttgacatgaaagtcactgcaatagaggaggcccaagacatttgcaacatgagagtggatgaactcattggttcccttcaaacctttgag

SEQ ID NO: 142332 - DNA, 195 bp, Glycine max
acagctggacaagacaagccatactgctgtcttctaccacaagctaagcaggagactaaggaagctaaaaacaaaaaatctatcaaaagatacacattattataacattctccctcaagctggagcatataaatcatatgctctaagcttggaacatataaactgaatcctaagccccctaatgacttagtcaaa

SEQ ID NO: 142333 - DNA, 436 bp, Glycine max
  unsure (1)..(436): unsure at all n locations
agctaacctggatgagccaaattggttcatctttacagctcacaacctattagctagtctggttaaaatagttgctcaaaagattccattttggagatgctggacaaatgaccccctgtgcgtgatattaccttgaaaccaatcatgcatgaaaaaagcaaacatattgaaatctattgacattttataagtgacaaaatccatttagatgacattgtcacaacttttgtcaactcaaatgaccagctngtagacatcctcataaatcatttggagaacattatttttacaataagcttggatcatatgatatatatatacatacatacactccaactagagaggtagtgttagacatataaggatgattcagttagtcatattattttctgcatctttagcttaatgtgggttttcttacagcagtaaaacaagc

SEQ ID NO: 142334 - DNA, 369 bp, Glycine max
  unsure (1)..(369): unsure at all n locations
ttatgctcctccaatgcctgcttggtaaatctactttttgtttcatatatntgactctaatccatgtaggatgatggcttaaatcctaacccatgttgaacaaccaaattccaacttcttgtcaaattcttcaatctttgtcacgttgaagggaatgacattgttgtaaaataacagagaaatttcttgactagcttcctccctcaaattattgaaaatgttactgatggtgtattgagtccccactcctctttccttaaaaatattgtcatgactcccaaccacttattgctttgtatcctttctcaccaccatcttctacattttctttgggccttggtcctccctcatacncccttaattttttca

SEQ ID NO: 142335 - DNA, 449 bp, Glycine max
  unsure (1)..(449): unsure at all n locations
agcttatngacaaagaataaggaatgttatgtccatatttcacttattatatagatgtataaataaatcttataacatttatatatataatcataaatataatatactatatattatttcataaaaaaagtgttttttttcaattatagctattacaacgtttagaattaatctatgcttttgacctcttttacgttacaaaaggatgtatatattcacattaagttaatctgcttttaagacaacatgaagttaagttaagcctaaagaatataaaaaaaaagcttattataagtaatgccggaaatttcatattgactaacgaccggagtaaaatagatcacataaataagagacagtatctaacttttaagttaagttttaaaggtaagataatcccaaattcaaatttaagatactagagttttggtgtattgagacaaatgaca

SEQ ID NO: 142336 - DNA, 481 bp, Glycine max
  unsure (1)..(481): unsure at all n locations
atcctctgagtcacctgctgcatgcaagcttgatgttattaaagggcttgttctctttctctatcactaacagagacaaagatgatcataagtacgtttacaacttgacatcaaatcttacttgagattttatagtttctgatacttggtttacttggacataacagtggggagcaattgatggaatatgaatctcaaagatctccatgagaagttggtttgagcagatcataactttgtctaaactctggagcatgatttaaattagagccttgcaaaaaaattcagtcttttttattttattntttttacatcattggtacaaacattcttaagaggagtgagcaagatagatcaattcatagctgttcaatattttggtgaatttcattatctgtactggtattcaattcatagcttntcttgactaaattaacctgggttataaatttcaaaattaaaaaaaataacatatttacat

SEQ ID NO: 142337 - DNA, 350 bp, Glycine max
cttgatggtgtcgagaagaaatcacatgttcgttgtcattttataaggggagaatgtgaatgtatgtatacatgattttgatgatgtcaaagaagaatctaacaaggctgcttcaaatgataagcatttgcttcaagaataattcaagattgcttcaacaaacaaagcctcgtttcaagattcactaaagaccaagccttgccttaaaacaatgtgctttcaagacatgcaaggctctggtaatcgattaccagacagtgtaatcgattaccagacgacagggttgagaaatagctgttgaacaacgttttgaatttgaattttccacatgtaatcagataccatatgtc

SEQ ID NO: 142338 - DNA, 428 bp, Glycine max
  unsure (1)..(428): unsure at all n locations
ttaagtcgcctgcggcatgcaagctngaacttccggctgtgcgattctgtttttatattgtggctcagtagaactagaataatcctccacggttactcttcttggctcttcaaccatgattgggtcttcaacaagttctatatgagaatgccctgcaatacgaaaactataagatgcctcggaagatcgaggttattcttttagagtagtcgatgcttctaaatcctgcaaaaaagttctgattctctctgaactacgccttctacaagtggtgttaatcttcaaatcaatgggaatcaaatcacctacagcggatcttctttgatacaaagaaacagaacaacaattattcagttcaaaagaataatgaattttcaggaccaatagctacacacaagaattcatgtatctacagaaaatgataaaat

SEQ ID NO: 142339 - DNA, 370 bp, Glycine max
agcttgagactggtgctatatcctttttgttcttactcgcgctaagcgcgagggtggcgctaagcgcaacgtcgcaatttcatagcctatttaaagcatgtcttgtgcagaattaaggtaccacttttatgaccacttctaaggacggccagggcacaaaattcgagagcagccacaggcctatttggggaaaagagccctcgaagcataaaagaggagcagctcgtgcattgaagcctatggtttgtcattttgagagagattattgagtatagagtgagtgtgagatgctgagaacaggaggaggaaatcccattcttgtgtgaagaactatcaatctctggtttaaacttatttatagtaagggttc

SEQ ID NO: 142340 - DNA, 331 bp, Glycine max
ggacgaccaaagccacctcccatggtgcatacatttcttttaaaatagagacggctatgtgaaccattggcttcttattcccgacgaccttatctttgaatagaacacgtttatcgacacccccgccatctggtggctcttttctgaagccgccaccacccataccacttgcagagaatacaaagtcctgagccattttaacttagcctgcgcggttcctcgttacatattagattgaggacaaaaatagtaaaccgaacttcaattagaaagaatgcagtactcaataagcgtaaacgaatgaaataaaaatagccattaagtttctact

SEQ ID NO: 142341 - DNA, 471 bp, Glycine max
atactctaagtcaccgcggctgcaacttgcttataaggctatgttttctcttttcacaatcaaggaagagatggatataatatataaaagattcgaggaactcgatgtttgagggaaagttactttcaagagtacactccgagaattcacgtttcccgatgagacctctacgtgtcctcctccaacaaaggttaagacgaaaggtgccccgaacaaggtgatgaaaagaagcgaatgatcgacaaagcgtgatccatcttattgggagtatgttgatgcttatcattcggttcaaaacaacaacacctcagtcagacccagtgcatcatcttttgaaccaccgaagccagacaggatgatccccatgttggatcaatctccgccatttatgcatggtttcattgaggatgttgttgatgttaaagcggatggtattgtggatatccgcactttctctttgtaagtttggag

SEQ ID NO: 142342 - DNA, 421 bp, Glycine max
  unsure (1)..(421): unsure at all n locations
tcaccttnggccgctcttgaaggaactaaacattcttatccaatggaccccatagactgaagaacgaacaatcaactatacctcctttggatagaggtccaatgatcctaccaccacatggcctgactgtggctttggctctgcctactatcgaggctcatcatcacagcgctagcatgtcttccccttgctatgataagccatcatgggaggggtcgtgtccaataatatatgatgtttgcttcatgcgaaccatctataaaaaatgaaaaaacaaaggcactataattaacaattatatttcactaagacaataacacaaataaaaaaacattgaatttgtctaaaggtatataaaatatacacagaatgatttcgtgggtgttcataatatgcacaataaacaccattcattggtatt

SEQ ID NO: 142343 - DNA, 363 bp, Glycine max
agcttgcttcaggccactttgctatatctgttataaaccgggcgcgtttatgacctttgtacttgccaacaagcttaggatcaccttcaatgttccatagatgaatttcttggttcaaaagattaaccaacaagaatttgttatcatttgataaagaaaacgaggttattgtttcatactcttcaataaatctctcatcctttggttctctattgaataacagcaccacattggctttacaaatacttagaatctcttccccgtcatctgttatttccaaatcagatatcttaagggttttttgacctttccaagacatcacttcttttccatctaattcccacatgcaaatgcctctgtcac

SEQ ID NO: 142344 - DNA, 316 bp, Glycine max
attttaataactactagacatgttctcaccaggatgatcaagtgagggtccatgacacaatcaatctgaaataatgtacattcaattgaaacccacaacgcttacctggactttgaatggaaaccgatgagtttttacttctgcacctgaaagaactctaacatccacaccaaggctgtcaaccccaaccaggtaagctccctggaaaccatgtaacaacatcgaaataaacaatttggctattaacagtagacatacaacatcaaagtataataatataacctaccaaataattgtcatctcctatgtgtgagtg

SEQ ID NO: 142345 - DNA, 453 bp, Glycine max
gatccttagtcacctgaggcatgcatgctttatgatatggtcttctccgacgaattgttcaacgtgtgtctaaaaagaggcaaatctgatcatcatgctttgaaagcgcagagaataaaaaaaaaaactagggcaaatgaagagggtgataatgagggattttcaagctttgaatgctgttgatacatgtctctaatgactcatcacgattttcaagtttgtaccattattgtaatccacagttacaatgttaaatgaaatggataaagttgatatcattgttcctcatcctctcacatacgcatctttgcttattcaactatcacctaaatgttggtgcaagccatggatctgcttgctcaatcgacctgtgctcctaatttggacttccaagactgtccaaccagagatatctcgtcttgcacgtcggtaggagtgccgctaatacactag

SEQ ID NO: 142346 - DNA, 194 bp, Glycine max
  unsure (1)..(194): unsure at all n locations
accacanttacaatgttaaatgaaatggataaagttgatatctttgtccctcatcctctcacaaacgcatctttgcttattaactttaaccacaatgtatgtcaagccattggtctgtttgctaagcgacctgtgctcctgagtttggacttccaagactgttcaatcatagattactcctcttgcacgttggt

SEQ ID NO: 142347 - DNA, 405 bp, Glycine max
  unsure (1)..(405): unsure at all n locations
ctcatcttnaantttgcatcaattttctccaaagcacttgtaatttacttctttngaatcttgttggtaaaaaattaacatgatattaaatttctcattatttcattaagaacaacagtaaagcaaaggaattctaatcaatcatagtcaaaattgactatcaattaaacctaaattccacaattatcatgcctataaacatcagatatatttttattctaatatccatttcctatatcctatattaggcttgcacagtccttgtgcaactgtgctagggtttcccncaaagccctttcattcaaggtctttaccaccgccatcattgccctcgatgctttcttgtgcctccgcccaaaacttaacatngctcccaaagacgacactcgcacaccttcaatgaaa

SEQ ID NO: 142348 - DNA, 199 bp, Glycine max
cctccacttgaattttctttatgatatccatggacaatctaaatgattgttcttcctttttttcacattaacagcgttttttgaggagtctactcttgatgatacaactgactataaataatcccgaattcacccgttatcgtgccttttgacatggtatgtctgattattcaatctccatataacatatcgtatgaaa

SEQ ID NO: 142349 - DNA, 274 bp, Glycine max
gcttttctttacaagattatttaatgtttgggaagaagattaaaagaaatcgaggagacaggcaactatttgacatttaagaaatgcaaagacggcgtttatgccaaatagacaacgcaaggatcgcatatgattatggtgaaagcataaaagctttttcatgtcgtgccaaatctgcattggtataagacaaaggcggtgtcaaaagttggctaaagggtttttttgtcgtaccgcgttcttaatcttatcagcagggtgaacaagacaatgt

SEQ ID NO: 142350 - DNA, 407 bp, Glycine max
  unsure (1)..(407): unsure at all n locations
ataaggcgacnaacacacttcatgtncctnctattagtaagacatctatatgattaatcaatgctttttccgaaggagagtgcagtaccatggccatagtagctaattctatntcatgttctaccttgtctagatcaaagcaagctttcttatcatttggatgcttcattgcttcaaataagttgaatgagactntctgatcctccacacccagttctaacttgtctttccccatatctactatacagttggtcatggacatgaaaggacgtcccaagattatgggaatgttatgatcctcctctatatccataaccacaaaatctacagggaatacaagctgcttgacctatatcaacacattctcaaatcactcatatggtctagcaatggagcgatctgcaact

SEQ ID NO: 142351 - DNA, 248 bp, Glycine max
cctgctactataaccattcttatgcataagcatggctatttccgtatgtaaaagacgccacatgcccctacgagctccttgtatgtactgatacctgttgcctcgaccatcgacttgcatacattatacgtttgatgcatcattaggaagaagacgatgatgtgagactttcctatgcttcagaaacgatactcacccgtcatgacccatatatgctgcaccatcgggaatagacatgactagtcgac

SEQ ID NO: 142352 - DNA, 112 bp, Glycine max
gccgttacttgggtagaacatcaaaagattagtaccatgctcacatctactacacacggagtatctgatttttcaaatccgctgctaacgcatgccatcgattcggaatatg

SEQ ID NO: 142353 - DNA, 429 bp, Glycine max
  unsure (1)..(429): unsure at all n locations
agcttcggcagaaacgaacacttggatcaaggtancatttcaatcaccaaacaaaaatattcacacaatcacacagatccaacaaaaggagcaacacccagatcacaaaaaccacccattagtccaaatttcaaaactttccacaacaaaattaagaaacaccaaatggggtagcacccagatcatcatccacaaacagatatagaaacggagaanaacagaggaatgagagtagaaaataacttacgaattggcaagcgatgaagcgaagaagaaggagaaaacacgaagacaagatagagataattttcagacacagaagaaatggaaaatggtagttctcagatntagatttggactctacacactntctctgtatatatatnagacgcggttttatgcatgaattatttgatcaactcttgagtc

SEQ ID NO: 142354 - DNA, 172 bp, Glycine max
gctcgatcaccgccgtactcgttccattcccaccacacttttgacacccattccttcttgtaacaaatattgcgacctctctctgacggacaaccaactggtgcccaacgatacacatacaccctcttcatctgggcagctgtgaatgcacgacgtatgacatgacgtgtta

SEQ ID NO: 142355 - DNA, 293 bp, Glycine max
  unsure (1)..(293): unsure at all n locations
gcttctgatgacacatttgtctttgaccaaaaaattgataaagctggtctctagtttttcattaattggagatntgatattctggagcgatttcaccaaatccctcccaatatctccaccctttcctgtccaaagcgtacgagaattttaatgaaaataaaatatttgaatagggaaagaaattggataagtaaacaaacaagtatactatggtaaccggcatttatattaaatgatacaggtaaaaaagaatctatgatagctgcacgtgtgtcataatgactaatgataaa

SEQ ID NO: 142356 - DNA, 461 bp, Glycine max
  unsure (1)..(461): unsure at all n locations
agcttgaataacataatgattnnacanaattttctttacatgttttcgcaaggngncttacttaatacacaggacnattatattactgtactatgctaggtttatagaaatgtgaaaatttcataaatacaaaacaatatcaatatcatgcggaagctaaacaattaactatacaaatataccatacattttatataaggaaaaatccagaataaatatgaataattttaaattgttaaaaaaatttactatttaaatttttattttattcttcccgggaatagttccaagtctatacataaaaccaaaaagattattttctagacaacacaggtgggaatatcccttcccctcgtccttcactctgtataaatagctagcctggtgggtgttgtagtacaattggttgtgacacaaaggcatatttgtgtttagcagtgtgactcagtgaagtgtgtgag

SEQ ID NO: 142357 - DNA, 493 bp, Glycine max
  unsure (1)..(493): unsure at all n locations
ttagtcacctgaggcatgcaagcttatttcagctaataaaaagagnncaagactcttataaagtttttgaacttaagggtntattgaagcttatcaaaataatttttgttattgtaataaattttattatcaaatttatgacacaaatcctcgtaaacaagaacttattaaatataggctaaatgatattttatagtttatcttatttttttaatttaatactagttcaataccccaaaatcacacataattaaatctacagtatagttataacatcacacataattttttggcacttgattggaaacttagaaaaggaaaactaaaattaatataaaataaaatatttcagataaagatgttaaaattgatttcaaaatcaagcaaaacacaacacattntatantgacaaatgtctattgacaaaatgataaatntaaaaagattgttngtagcangattccaaccagcatatctcanaaattacatcatg

SEQ ID NO: 142358 - DNA, 246 bp, Glycine max
agccttgttccttttggactagaagtcactacaagccttaagtgaaaaaccatgatatcaccatatcctatatgaattttggagctttggaattgctctgggaataagtgtggcgggcttttgcttcattggacaactcgttttgttggctatgcttcatgatgtattttgggccatacttgatgtacattgtatattggctaaatgttggacatgctgaatgaaatgttgcttctcataggctat

SEQ ID NO: 142359 - DNA, 201 bp, Glycine max
aacatatgtgggggcagtcgtccattagacaacctaatttgttagatatccattgacttaaaattgccgccttctgaaacatgagtgagaactgactaatacctgtgacagacgttgcgaaaaagattaatcaaagcaatatattgctaatatgatgggagtctatttaagcacatgaacacactatacatttaattgtac

SEQ ID NO: 142360 - DNA, 349 bp, Glycine max
  unsure (1)..(349): unsure at all n locations
gcttttttggcttatttgaaacattcttttatatcacatattatagaatagatgatgactttacaatgtcaacgtgaaattaactttattcatgcaaactttgtgtacaaataataataaaaagcgtgacatgagggttttttttttatgtcgtgtagactaaattaccatgagcatcgatcattattccttggttcacatgataagggaattgatttatcattttattatgtatagcaatagcaaataccttgcataagcacgacgtatngtcaccttggaaagcatgaaataactcctgtcccttcacaaccctcgttttcttccaacagcaacaacagattccccc

SEQ ID NO: 142361 - DNA, 421 bp, Glycine max
  unsure (1)..(421): unsure at all n locations
aaccgaacatcttcaaaacaaccttaacaatcgaagttctggtcggtgttgattcttggtatacccctttaacaccttcatgtatcactcgactggatacatccaccgtaaaaaaacaagaccacacaactggatctccctcactagatgaagaattaagtgaaccattatgtcaaaaaatgatggaggaaagtacatctccatttgacaaaggacaatggcagccttgttctccagttcatccaatcttctagggtcaaggactttgctactaatagcattaaaaacaaagcatagatgagttatggcaacccgaactttgtcaggcaagattccccgaatcgctacaggcaataattggtgcattaatacatgaaaatcatgagatttcagccaaccaatntcanatcattaatggata

SEQ ID NO: 142362 - DNA, 235 bp, Glycine max
cttgatgccctctgcatacacctccatgctgaacgcgaatgacgattcaacacctggaaatgcatcaggagacagaagaaatgaagtgagctgttgctccttacggatcaggattgaccgtgcgtaaatgatgctggccgacattatgaacgcatgatatagagcttggcattgatgcttcatcggaggtaattaagcatgctatgccccatcatagggggatctcgaaattgtc

SEQ ID NO: 142363 - DNA, 390 bp, Glycine max
  unsure (1)..(390): unsure at all n locations
tttgcatcaatgtcctctaaatcacttgaaattttcttcttttaactttgctgctaaaaaattgcaagtatattaatttcttcattatttcattaaaaacaacagtaaagtaaagaaattgcaatcattcttagccaaaattgaccatcaaattaacctcaaatttgcagttatcacctatactaattgaaaggaagcttgtgtggggcctantctcaaacataaatgatagatacactacgcattcatgatgatgcttcccccactaataccttgngatattcttcttctattaggacctataggtgggtcacccttgtgtgcatgtnggccccttgcccatttctatgtcaatttgaacatcaaccttgatgagattgttctgacttc

SEQ ID NO: 142364 - DNA, 352 bp, Glycine max
  unsure (1)..(352): unsure at all n locations
gcagctgatgngagaaagcgtggaagaacagtctttctactnttgtttgnttttcatagagnnggacctggagatatgtncggtggttaggaaccttatggacgtcatgtggggtgctattgcccaaaaccaagcttggctaatctcgacccaacccgggcatagtcaatcagtgagaacctgtgacgtacctaaacaggcgagctcctggcagtcaaccaataaaagaacaaagaccacatagcaaggaggctcgtgtggcggttggccagctatgaatcttgagtggtatctggaaaatggcctctggtaatcgattaccaacggtgtgtatcgatacagggcttaaaat

SEQ ID NO: 142365 - DNA, 370 bp, Glycine max
  unsure (1)..(370): unsure at all n locations
aacacgacnaagaacacttgttggntttattgtcaatgactaaactctatcatcttatagatgaataaataatttagcacttcgtcttttcactcaagatgagcaaagtgttttgagaccttttctgaacattacaagaatttacacaaagagtttttttaaaaaaattgaataatgagcataaaatgtgttcgttggagcattaaatgaacatacttcttcatgttgagaaaccactattcgtcattggcgtgttgaagaatacaacaggaatccacttccatntttgttagagtagaattgtacaacatagctcttcttttgatggcgattgaagaattntagagcttgacttcatttattcttcata

SEQ ID NO: 142366 - DNA, 469 bp, Glycine max
  unsure (1)..(469): unsure at all n locations
catgcaagcttgcatttggaattgcgaaagccccactctatcattaggtttttttcctgacatcncaaacaaacaaatcaaacgnccaagacaattatgttgctgtttgaatacctcacccactctcaagtgtatcacacaattatggcttttctctaatgaaacactcttgccttttaccactctaattccccttgagttcttaggcaattcaagagattatggccacaacaaagaacaattcaccaatatgtgtaaggtaaggctagagagacaaggaaaaggttaaccaagaaaaaggctaacaatgtttttaggcacaaatgaaggaaataaaattcagaatttaggaattcaagtaacaatccttcatgcaaccaatatattaccttaaagagaattttttttatagttcttcaagcatgaaccattcagcccaaatttttattttattntttaatttgctata

SEQ ID NO: 142367 - DNA, 391 bp, Glycine max
  unsure (1)..(391): unsure at all n locations
cacagnnggccgagatgtatggagatcctgatatcactcatgaaggaacctncaaagtgatgatgtccatattgcatctgttggccacataattcgtaaatctgaagatgaatgaggatgaatgcattcatgacttccacatgaacatttttgatattgccaatgcttgcactgccttgggagagaagatgacagatgataagctggtgagatagatcctcagatccttgcctaagagatttgacatgaatagtcacttgaatagaggaggcccaagacatttgcgacatgagagtagatgaactcatctgttcccttcacacctctgagctaggactctcngattgggctgaaaagaagagtaataatttggctttcatgtcaatgatga

SEQ ID NO: 142368 - DNA, 326 bp, Glycine max
agcactaccggatttgttgtcttatggggactgcgtttttacatggagttctaagaagcaaggcattgtgacactttctacttgtgaagccgagtatgtatttgcaacttcttgcacatgtcatgccatctggctaagaagatttgtggaggaacttcaattgttgcaaaaggaaagcacatagatctatgttgataatagatctgcacaagagcttgccaagaatccggtgttccatgaacgatggtagcatatagatacaaggtatcatttcattagagagtgcattacaaataaagaagtagaattgactcatgttgaaactc

SEQ ID NO: 142369 - DNA, 239 bp, Glycine max
  unsure (1)..(239): unsure at all n locations
gaacaagtctttaagagacaagaagttgagttaaaatggctcaatattaattgaagaatttaacataagagatatagtagtttatttcccaagtggctgagtctggtagattagataacagcgagcagtgattgatggcaatgaataaagtgaagccggtgtgtgagcatgagttgaatttngttgcctacgacaaaggaatagggtccgtagactttttctgcatgcacgtatatatg

SEQ ID NO: 142370 - DNA, 250 bp, Glycine max
aaccactcatattgaaagattaaatgtatataatatatatctttatatcacctgctagagctaattctgctgcttccaaagaccaaaatatgaggacctaacttagaccgtattatatacattatggtataaggtataatttttaaataaaattaatcggccaataatatgatggacataaatttttaagacgctatttccttggattgtgctgtgcttctcaggctttttgttttattgccctgacagc

SEQ ID NO: 142371 - DNA, 267 bp, Glycine max
ataatagagacgtgtgcgatcaaaaatgtcatttgagactgcatacagtttatattgatccctataccccattgtcacatcctatccaagcggctggtctcgtcatccctgaacgcattttcccttaaagcagttcaccttgttatgtgcttccacgatctcatacgtcatgatcatctcaggattgagtcacacacggctatccgggagtgagttatcacattccttacttacggacaaattggacatcgagaggtacatatcata

SEQ ID NO: 142372 - DNA, 306 bp, Glycine max
  unsure (1)..(306): unsure at all n locations
tggtattcgggcgcttgaattgcataaaaataaacatcttttaaatgtaacgtcgacaatttaattaaaagtcctttatgcgcttaaacttgaaccgactaaatttacatttgtcacaatgactatgcaggatcacgccacatttaaagaaataaaagatttagcaagaacataacacagcaatacggtacgccggatctntgcattgaagggatgccgtaaaagaacctgaaaacgatgttatttatcattcatgtgaaagcaaaacgaatttcagggtgtggataaccatgattgcttctccct

SEQ ID NO: 142373 - DNA, 341 bp, Glycine max
gcttacgcgacatgtcatattgaccagagatacttcgttgtcatccattatagagagcaccatgccgagcactctgtcatacattccgtcttcagaacgacccgttctctcacagataatgatttattaattgtgccgcaccgcctgaatcgcgatcgatgtgactgcgatcattctcggcgagacctgatatgatctaaacgctggtactctgcgaggatcgccaccctcaagaattgatgacccaccgttcatatcacacggcattctgtgcccagatctggctatgtgggagcgtacactatccttgccctgcgtattatccgactttattgcaattc

SEQ ID NO: 142374 - DNA, 468 bp, Glycine max
  unsure (1)..(468): unsure at all n locations
agcttgntacataatgaaacatatttttgtagttaanttacaaatnacaaaatctcattntctttcgatatcaataatataattgtataaaataaaattaaataatgtttgtcaataacatagatatttgtagtaattataataacaatcatatcaaacaaaaaaacatgtccaacaattgttgcaaatcttttttatatatttattttcttatatatgagttaacttttgntacattaaatatatatatatatatatatatatatatatataaagttccaggatatggttgaaagtatataaaaaattatgaatgtctaacaaagatacaagggattatataagacaaaaaaaaaacatgtcaattgagaggaaaagaatgaaataaagaaagtcccaaaatctcaagggtttgactgagaatagttgagggtgtatttctactaaaaaaattcatcgaatccatta

SEQ ID NO: 142375 - DNA, 199 bp, Glycine max
atgattttacctcgtgagagagacctgtctttatagtgtgaggattgtcatgttttgttcaccttatcgcccatcgatgttgttcacttacatggtaccacatcgcacataagatcgtgtcctacaatcgatggagaataacacttgtgtatagactgatatatattagttgactgatgttgcgtttgacccttgtata

SEQ ID NO: 142376 - DNA, 248 bp, Glycine max
  unsure (1)..(248): unsure at all n locations
gaagccatggactggagcctatgtcatggaatttcgagatctaattaattcgcctcaaatgggatgtggaaaccacgaagacaaataagcacgagtttcattcttgaagggtggataccctgtatgatttgaaaatcaagggagncncacattctattccttgcttctatgcttgcaactgaatgattaccttaattaaggactttaanacaataattatattccgacattctgagataatagaataa

SEQ ID NO: 142377 - DNA, 190 bp, Glycine max
tctggttaattttttgctattatacatgatcttacttgttagtggggcggatatttttaagatgggtgtgaagagtatcaaaactgaccagttaaatggttgtgtggtatccatcgcattgtgaatgggcttgggcaatgtatggccatgcgccaaattcaaacctgcaagtacaatgtgatgatgttta

SEQ ID NO: 142378 - DNA, 306 bp, Glycine max
  unsure (1)..(306): unsure at all n locations
cccgaaaatctntnaacacttcgcaagcaatctgccgacagtcctttaaacctagggttaccgaatgagcttccatcgaagtgtaacgcagcaatgacccaatgttctttattgctattagatgtcaactttggagtaagctttctggaagtctctatatacagttgcaatccacaggcaatgcagatacagnttgcaaattcttccaagtgaacatgaatactcctcgccttcagaaagcacgaaagagaggcaagggaattgttntacttttcatatgtaaaactaacctttctaggaaaaaac

SEQ ID NO: 142379 - DNA, 357 bp, Glycine max
atgtgcactaaggatcaccttcgaagacgctgcattacatgatttgcctgcgatattaccctgattcacatctgtctctcgtatcaatgcatgcgatcgacattccgctagtccattgggtacaccttgatctagcatcgttctgcaccgctgactgacccgatgtctctctgctatcataggtgacctgtgtggtgctcgatatggaattctctatatacaagtgcaatccgcagtgcttgcctatgcacattgacaagtcctccttgtgtacatcaatactacttcacgttcatattctcaatggagatgcaggggatgttgttgacttttcattgctcaactcacttgaccatg

SEQ ID NO: 142380 - DNA, 496 bp, Glycine max
  unsure (1)..(496): unsure at all n locations
tgaggcatgcagcttgaggattatggtgtacccatcacatgttgttctatgtgtgtttcgggcgaaggngcacaacaagttnntnanatcacaatgcgcgataaacccatcatcccctgttgcccaccttcatctgagctcacgtactcccacgtagcccatatcctcgtttctctcaacaccgggtccccatcaaccctcccaagcttccacaacatccaagcaaaacaacattcaaacagcacaagctatcacagccaagcaaaacaaggcaatggcagaaaactctgctcaacacaccaaccaaaatcacagcttttctcacttaaagaccccagtaacaattccttcgatccaatttgttaaccgttggatcgactccaaaattttactggaagtctatagtacataagcctacattgtgacgcgtgggatctactagcanacatccagaactcattctgcacaagactntccacagncaaccacacacaag

SEQ ID NO: 142381 - DNA, 337 bp, Glycine max
ctctatgtgatgactatggcgacagtgcacggcgcttaactgccgtgagctgtgcgcccttttaccaatcatactcttgggtccagctggatgtatgcttacatagtctcacaccactggatatatttatcattcttatctccatattactgtgtactctatcaaactttcggagaataagccgtatgacatctgatggtggcggcctctggcacataatctcttaaatgtattggagtactaatatgcgctatatacaatgaattgtctcataccttgtatatacttaccgaaggctgaggtcctgtaagccaggaagataaccgctggaaatact

SEQ ID NO: 142382 - DNA, 412 bp, Glycine max
  unsure (1)..(412): unsure at all n locations
ataacaagactttctgtgattggnttaagatacaactttgcatatgagaatgcttcaaaaacattaagatagctagcagatgggcctaaaagaaatgttataacctggcaaggatacgacataaacaagtattcattttacacaaaagcacaagataacaaaagtacaatgcagaacagcggggtcaccctaagggctgaatctcaacacttcgcaagtgtcaatgacgccaatccctgtgtagcttccatcccttactttgggttcattgattgaaattgggagcttaactatgtcaaatttactgtatgtgntttcaaatgtaaatggattgacaacaacaccggtgtgcgcaccgatgatataggatttacgctggtagacctatagaaacttgttaccacaatgaccc

SEQ ID NO: 142383 - DNA, 248 bp, Glycine max
  unsure (1)..(248): unsure at all n locations
gcttgagattggcttaccgacaattattttttggcnnaatgatgcaaaanngacacaactngtgaatgccaaaaactgggcaaagaaagggtgagaatgaggaaagccctgctgtgactgcttcctatagaccaagtttccgccacccaacatggcttactcagcaataacactatctcttcctacacccatattcacaaagccatccttaaataacacaagcctacctaccgacttcaatgacaaca

SEQ ID NO: 142384 - DNA, 203 bp, Glycine max
aatcttcgacgttagcaccttaactgatccatacaatgcaagatatcaaatataacttcgtcttctaacacaaaatggcaatcattgcgggtaacatgtcagaattaacattcatatctgcattcgtaggcctaatgccttctccatctgacgctgccatacagaagcaccagtctgttgcaagacacactcattttgacatc

SEQ ID NO: 142385 - DNA, 299 bp, Glycine max
tagacacaacagatgccatagttctatggcataaactgtataatgaaacatcaaatgaaaatagttttctatgttcctggccatgatgaaagattattatatataaaaaaatacaggcatttaataatctatctttcaaggaatataaagcattaataagggatttatgtttacactagtgccacatgccaaatagaaacccataagattttcggctctgggtaaatatcttaagaaataacaagataatatgctcatgattattaaaccaaacagtcattgatccaatgatccaattt

SEQ ID NO: 142386 - DNA, 396 bp, Glycine max
  unsure (1)..(396): unsure at all n locations
ttatgttatcaaacatttaaaaggaaaggttaattgtagttgatgctctttctcggcgtcatgcattactntctatgcttgaaacaaaattgattggtcttgaacgttttaaaaacatgtatgaaaattatgaaacttttggagaaacttttaaaaattgtgaaaaattttcagaaaatggtttctttatacatgaaggctttcttttcaaagaatacaaattgtgtgtgcctaaatgttctacaagaaatttgcttgtttttgaagcacatgaaggaggtttaatggtgtattttggggtccaaaagactctagaaacattacaagaaccattttatcggcctcatatgataaaggatgtgcagaaattctgcgaacatcgcattatatgtaaaa

SEQ ID NO: 142387 - DNA, 368 bp, Glycine max
  unsure (1)..(368): unsure at all n locations
tttatnacgctttgcacttaaagattctaactttccaacctaaataggtgaaatgaatacatgaaatgatacaatacatttattgtcaactatgcaatgctttacactgaataaaatatttgaattntataaaagatatgcaagggagagcgctgatttttttgtaaccttaataggtatgtgtttattgtctataaaatatatttacactatttntatattgctattataacaatataattattatacaaaatcaaaatgaatgttacaaataaaaaataaatacggcagttcaagtgcaatctctatatttgaagattcatcttgatatataaatttacatacatgaaataatacatgaaataata

SEQ ID NO: 142388 - DNA, 385 bp, Glycine max
atctcactactgcttccttgatggcattgaaagaaatcctgtcaaaatttatgttatttcatgattttcttacccctcttgcgtgcgagaggtgcgatattatcttggtcatgcatgattctacatgcgctttataagagaattatagcaaggtagccctttcactatccaacttgttgcatatggaggtggagtttgaatttaatgattaatgcaaagaggcctttcattgcctcataagagcactaactaccacccttatcattcacgcacctgattggacaaccccatttgagctaatatgcgatgcatccattacacattgtgggttgtcttgctcaaagactcctactcagctacttttttcacctgactaggagttttt

SEQ ID NO: 142389 - DNA, 467 bp, Glycine max
  unsure (1)..(467): unsure at all n locations
atgcagcttntgctcatgtatgcacccacnacgaatgtcaaatccttcactttcttgcccngcgccgtttaattgggatttatcatttgtcgatatctacatctttacaatttatttntctcagttctttattttcagctgtatttcctcttttaaattcatgcatttatctttcagcgctgtctttttaagcatcaatttacattttcaagcatttatgtttgttttcactttaattttctcgcattaacgatttcagttatttaaatttgttgcagtttacaagttcttggatttatatagttcacgtacggtctttttcattattcttaactcttcgagcattcatctttcatataatttaaactcaagtcattacatttctataacttatcattttcattgcttctatattcaagatgtttatcttcattacttttcatgcaattacttattcacattacatt

SEQ ID NO: 142390 - DNA, 228 bp, Glycine max
aaaaaaatagaaaaaaggggaaaatggaaaaaaccccacccccacgagggaaggagagaaaaaggaaagagaggggaggcgagaaagaagagagaaagaggaagggatagaaaggaaaccgaaggacggagggggaaaggaggaaggggaagaagggaaggggaggaaggggagaggcgaggaggaaggaagagaagaagagggaaggggggggggagggagagaaag

SEQ ID NO: 142391 - DNA, 315 bp, Glycine max
  unsure (1)..(315): unsure at all n locations
acactcttgntgtttcttgttcaacatcacactttctcaaattcatgaaaggaaacacacatttcataataagcatgcattcaatttaaaacaatatatacaaccattttcacaaaataaataaactacttcactgccataccatcaaaagttaagttcaactattcacgatgcttcaagatgagcaactatactactcatgcacaagactaacaaaaagtaactaatgtactaacatcaaagttaaactaataattcaaaaagcacaanatataatcaacaggaatnntaaaatcttgtgattggtcctgggtg

SEQ ID NO: 142392 - DNA, 341 bp, Glycine max
  unsure (1)..(341): unsure at all n locations
tcttgaggacttatgctgagtaacaataacatntctggttcaataccaaaagctctttccaatctcacaaacctcatacagntgcagttggatacaaatcagctatcaggttcgattccacctgagcttggaagctngacaaagctaacaatgttttttgcttggcagaacaaactngaaggtggcattccatcaacattggaaggttgtagaagccttgaggctttggatttgtcatacaatgcactcactgatagcttacccccaggcctggttaagcttcaaatattgacaaagcttctgctaatctctaatgatatttctggccccatccctcctga

SEQ ID NO: 142393 - DNA, 421 bp, Glycine max
  unsure (1)..(421): unsure at all n locations
agctagaacaccncagaggttttagcaatcangttatctctgaagcaagcaaaaccatggctctttgtgcaattgccgagtgtccctgccagcaacgtcagaactgaaacccaagcttggtgtcagatccgggtcgggtcgaaaaccaagaataaggagagtgggtttgaaagctgaaattgatacttcaccacctttagggtctgtcaaggaagcggtgagcaagagaggccttcatcaagtgggaatgtggatgcatgaatgcagntgttgggcatcctttgcttcatttgattggttagggtgtcttcatatatccttcattttctaaaattgttgctaatcaatttttaattcatattagtgatgagttcctttttgaaaaatctagtgactaagccataaataatacatctaatga

SEQ ID NO: 142394 - DNA, 243 bp, Glycine max
atacacactcgatccctttgtcgctatatcaaccatttcttctctgaatgccgcattcccatcgctcatgccgcctattggcgaatggctccatcggccttggacgcaactgataccaactacatgtgtcgcatcctgatgcgagctgataccgttacttatgacagcgggatatataaaacatatagcaacttgaacacgcttattatgagaacctgctcagcattccccactggccttcca

SEQ ID NO: 142395 - DNA, 300 bp, Glycine max
  unsure (1)..(300): unsure at all n locations
gccttcttttcttaatgccatctgttaaatataagacaaaacacangagattagcatatgttattttcacaaaaacataaaaataaaactggaattttgactagcgcttagcgcagcaggctgagcttagcgcgccttatgaaattntactcangcgctaagggcagcagactggtgcttatcctgaagacacaaaaaatantttttctgcagattaagcttagcgcaacagctgagcttagtctaagtctacaatntccaaaaccgaagagaatcagagcttaatgcagcatggcgcgc

SEQ ID NO: 142396 - DNA, 346 bp, Glycine max
gatgaggttaatttctttcttcccaagacgattttatggatatgaattaaagacaaacaaactcaaattctaatatgatattaaagtctattttatcgaataatattggatctattggttacctaatatcaaactatgattggaatacatgtataattctagttctacaaactccattattcagatgttcactccttagtatgagctgatatatgatcaaattaaagtatataagctaaaaataatccttactttatacgctaatctctgtaggatgagttagactcaacccatataattagataaattatataaatatttaaccatataatgttaattaacacta

SEQ ID NO: 142397 - DNA, 331 bp, Glycine max
aatgagaagtgtgaagggatttttttctttttgttttttcgaggggcctgtgaatttccgcgggtctgcacctcgcgacgtaagtggaggctattgccaaaacaacttgaccaacccacccacccgggcatagtctgctgtgaacctgtgatgtacctaacaaggagctctggcgcaacaataaagaaacatacctcatcatgatgcttggggctgccactgtaatttgaaaatgtgattgggccttgaatcattacaagggggaattgttcaggttaaatgaaacaggagctaaggcctggatcataccaggggaacataccgctgaaca

SEQ ID NO: 142398 - DNA, 341 bp, Glycine max
tatactggatcattactacagtatgatgggataatttggatgatggcccactcactatgcttgcacaaatgcttatatgcatatatgcatcttggttatctgcgattgcaaagtacccgccaatcttattcgctaattttatctgattgccatacatacactatgctctatggtgatgaatgtgatgctctaactggacaacatatgcatagtgtgaatgttgaatacacgagaatctcacgtaaaaatttacgtggctagagagaccatgtgtatttctcttgggtgaataggaacgcacataaactcattgataagataatgattggtgcaccggcata

SEQ ID NO: 142399 - DNA, 404 bp, Glycine max
  unsure (1)..(404): unsure at all n locations
ttgatggagacccggagcttatatgaatgagtantctgtctacgnangagnacgtgagctcacttgatgtgggcatctgcgccggtggcttcatgtttgatttgaagatgngggagagtctatttgcaccatcgaccgatcgccacctagtaccacatatgacgggtgccccataatctaacaagcttgatgtgagaaagcgtggaagagacagtctatctacttttgtttgttgaccacagagtggtacctggagatatgtcgcggnggtcaagagaccttgaggacatcaggtggggtgctattgccacaaaccaagcttgaccaatcccgacccaacccgtgcataatcagtcagtgagaacctgtgatgtatctaaacaggcgagctcctggcgtcaacc

SEQ ID NO: 142400 - DNA, 256 bp, Glycine max
tttcatgactcaaacgcgagattgatgatgtgtaaattatttgcaaaagtgatcatgcctgcacctgtgatgacgctcaagtgtcatatctatatcgtcatgtggctctagggctgacgatacattgtggccattgctaatcggcccaatgcttgcaaaagaggtacttctatcaatatgagcaatcatactaaacaacttccggcgttcggggaaagttcacagaattaaccctatacgtgtagacacatttttc

SEQ ID NO: 142401 - DNA, 327 bp, Glycine max
gaactgcatttggttgggggaagcctgcaaaggtggagataacattgatggagagaggtttcggctttcattctttaaaattaacaaaacaaacattaatgacatgaatgtgtgtgtctacatgttcagtgattaagtgtgatggcatcacattccatttgccacatcatcaattaataaatacgaactaaccgataatagtaaaatgaaacataattcttttcaatatctaaataaaaaaaggaatattagacacatttttatagcacacaatattttaaatgtgaaaaacctaattaagatattatcatctagtactttcaacat

SEQ ID NO: 142402 - DNA, 156 bp, Glycine max
ccctcgccaaaaggggtgggaagaaatctccaacttaaaatttcgaatttctctgccgccaattgcggcgcactcatgctggatgatcacaagtgatgactatcctactcttcttacagacctttcatctacctaaccacaatattcgatagatac

SEQ ID NO: 142403 - DNA, 310 bp, Glycine max
atcttatgttgcttaaccttttcttgatcctatgtttcttgaaagtgcaagcgacactatacctatggatgaagttgatctttaaaaggaggttttatcgtagagaatgagagtgagagaaacatgagatacagaagcgggcttgttcgctttgccagattcgttacttatgccacccacacgtcaacaagaatgatccgtgaattcacccttgcgtgacacgtgcttgcatatcagccacgatttgttttattaactctccccaattctagcttgtgcttctagcataaccatcgactaataaaatcaa

SEQ ID NO: 142404 - DNA, 363 bp, Glycine max
  unsure (1)..(363): unsure at all n locations
catgagagggtggatcactggtgaataagatcatactgaagaagaaaggaggagaagagggaatgatcgtgttcctagacaaaaccgaattgatggtattaaactcaacattcctccatttaaaagaaagaatgatccgaaggcctacttggagcgggagatgaaaataaatcatgttttctcatgcaacaactatgaggaggaccagaaggtgaagcttgccgccatggagttttccgactatgctctcgtgtggtggaacatgcttcataaagagagagcaagatatgaatagccaatggtngatacatggacggagatgaaaaagatcatgacgaagcggtttgtgccggctagttactc

SEQ ID NO: 142405 - DNA, 361 bp, Glycine max
  unsure (1)..(361): unsure at all n locations
gatctcatcaatggcttctagagaaaagagctcaccaaagcaagtaagtgacagctacactttttctgattgttaaaattatatctttacctgttgaaaaatttatttataactttgtctttgtatttatgggtggtttactaaagagggagtgaaatcaggcataattcatcactcctataataaaatattaagaatntagtcatatctgtatcttggaagnttcaccatttgcctttcaaactatattacagtgggctgggatagtcaatgtattgagtgtatttaacacaaaaatcaggtagggttatgacgataatangattcctgggagagggagaaagaggtatggattccatgg

SEQ ID NO: 142406 - DNA, 286 bp, Glycine max
acttatgttcctgtttttttccttcaattacgcgctccccctttctttctgacttttacgtcattaaagcatcctcttcaagcttgttatccaaagcacattctcggtggtgaagctccttcttccatggcttattcccttgtggatggtgccttccctctccttttttctctgccttccgtgcatcttcatggtggaaaatcaccattgaagctcaaagatccagcctccatagaagccttacaagcaagcttccatcactaatcatattttcgcgagtccaata

SEQ ID NO: 142407 - DNA, 354 bp, Glycine max
  unsure (1)..(354): unsure at all n locations
tttttaactttttttaagccaccgactccggctggtnctactcgttactcttgcaccgataattttttgttaaatgattgtagtcctcatttattactttattacacctacgtgatagcgtatgatactatattcatcattatcgaaaaacaaagacaaagatcctggcaaaccttagattttttaacttatgattgtctaaaagagggaacacttgactctaatatatgaagccatgtctgtaacaaacaactgttattacttgcttatatatgggtttaattacatatagatactagcttcctttataaaacttatatttctaagatagctaaaccccttacatttaatata

SEQ ID NO: 142408 - DNA, 166 bp, Glycine max
tatatctatatgaatatatggggacttggaacagggacactgaagaaaatttctatacttgtacatacaattatccttcgtcacgattggaccgcatgaataccctctgcacctaaatatccccatattacaaaacacgtgtgacaatccatctagatatatacta

SEQ ID NO: 142409 - DNA, 386 bp, Glycine max
  unsure (1)..(386): unsure at all n locations
atagagnnnggatgatgctacttcagagagggagattagtcaggatagacaccacaagaattgccttgattagtctgagattggttcaacaagaaacccagagagaagctctctccaaattttataaaatgccaaaagtacttctattgaaaatgaaacccatacatatagtgtatctgaatgaaaaaaatataaatagacaagggccttcaaataagtttgggccaaaattacaacaaaaaaattataaataaaaaatagaacatattttgcatgggccttcaaattagtttgggccttcaacaacaattaatattcttagtagtgcctctgcctttggaccttcattcttctccacttgagccgtgttaagtatgtctggtacc

SEQ ID NO: 142410 - DNA, 210 bp, Glycine max
tcatgattgtcacctcaaaacaagcctatgcgcgtatgtccttgcttacgctcacttgcacaagacattctctctaccaattttatgcacccacatacgatctttgcttgttcgtgacccacattcttgtcatgcacccgcatggtgtatttgttacttaactcagacacatctccttggctgagcctacattcctgcatactcatagca

SEQ ID NO: 142411 - DNA, 468 bp, Glycine max
  unsure (1)..(468): unsure at all n locations
catgcaagctaaaaaagnctatcttatacgagtgaatgttcaatacttcttctcatataaatacaccaantgtcaacaaaaaacaaaacaacttacaataaatatagcttataactatgtccaacatgaaaatttaatactgcactatccattccaacaccaacaaggggtcaacaatcataaccctaaaatacaacaatcacattaaaaagatgactccatttctaaatgctctcaataaacgaaaggaatattntaaataattttatttaaatatgaatggcggtagacacaggagtattaatgaacactatcttcttttatttattaaaaatattgaaattttcatgttttntcttctgcttatagatataactcggtatttttttagtactgtttgaaacagcgaacaatcatgacgcatatgcaaatgcagtcaagatcacggctgattgtttaactatttat

SEQ ID NO: 142412 - DNA, 101 bp, Glycine max
tcttgttaaagaacaattctggttatgactaaagagttcttaaatgaagggactaaacaccgctgtcgttgccatctatagccccactactataccggatc

SEQ ID NO: 142413 - DNA, 360 bp, Glycine max
  unsure (1)..(360): unsure at all n locations
agctnnganntctatctcaacaattctgtgatttttaccaccgnaggggcatagacccataacggaacctgtttttgctaaagatgcgatttttaacatcacatgtcttcatttgcccacccgtcttctgcgttttttctttttgttttttgccatttcgcttcctgtgtacgaggggttttctttgttgctttaacgtttcttttcttccatgttttttgtgggtgttcctgatacttcgagctactttgtttcgcatagaagcccaaacaacactaaagctttcatttttatctcaagaaaagcagcgatttttatcacaaagggtgtgttttcttttgagttctttcaaagcttaat

SEQ ID NO: 142414 - DNA, 333 bp, Glycine max
  unsure (1)..(333): unsure at all n locations
tgcaagcttattaatatgcttctcttatacncttttataggttctaacacactccagctttctaaagatccaacggtcggatgattgacaagtgtctttgtgaagttaagggccaaattcgagaagatcccaacggttatgaaggctgggcagctgttttaccgaagcagctgcatgtagctttctctagaaacttcattaagagacttcctccagaagcttcctcgtggcttctttgagaagctttctcaacaggcttctttgagaagctagatccttatctattcacacccctctattaaataattaacttccttaaaataattacgaatg

SEQ ID NO: 142415 - DNA, 402 bp, Glycine max
gccctgctcttcatgaactaccactccttgatcaatgaatctcagccgagaagagttgtccacgtcgtcgggttgaatggaataacaacgaagtggggctacgaggttcgaaatatctaagtgttcactcaattacgatgaagaggggctagggttaaattgaacgaagaggggggacgaggtttgaaatgtctaagtcttcactcaaatacgatgaagagtggcaagggttcaaattgtaacgatgatgggctatggttcaattgtaacaacaacgaagaggcttgctagctacttcaatgcaaggtgggaggttcagaggctattcgtgctttaatctttcccccccattatgacgatctttaacttaaacccgtcataaagttgattacatatatacat

SEQ ID NO: 142416 - DNA, 221 bp, Glycine max
  unsure (1)..(221): unsure at all n locations
ttagtcacctgatgcattgcaagcttgattaaaaatgttgtanaaatacttttaattaatattttaatttttattcccccaacaatatatatgtgagggtagagggtgtacatgaaccatagttgaaattcactaatcatagttagtaaaattttggctccaaatttgactccacaaattcaaaatccaatgtaagtcatatttgaatagaaattcacatt

SEQ ID NO: 142417 - DNA, 403 bp, Glycine max
  unsure (1)..(403): unsure at all n locations
agctnnnctcattcaaatatcaatggatnngttcttcactcngncannnngnnagaatttctcttgtgttcaacaaccttaacatgaagatttttaggctntatatagactttagagatcccagttagccattgtctaatagctctggcactttacatgaggttgttattgttcacagaaagtagggaacacaaacactttctgcaacatatctttagaggaatacaatttgctagtggttcctagtgcttagagctaaatntcagtgtacaaatcaaatataactttcaaaacacaagacaaaaggaattaaaaatgtcaagacaagatatattatatcttcccttttgtgcgctattggaacgagtgttactaaacctatggaaagtactttctgatgata

SEQ ID NO: 142418 - DNA, 224 bp, Glycine max
ttatcgttttccattaataggggggatgttataaaatatatcgttttactgcctggtaacaattgtttgtttttagaaagtttgtttgatttataccattttcgaacacttctttatcttacttcgcgtcgggcttacaacctgtctggttgacatcttgcttcttgaacaaaacttctgggtgttggaataaaactgaaactggctgtcatctttgtcacttt

SEQ ID NO: 142419 - DNA, 433 bp, Glycine max
  unsure (1)..(433): unsure at all n locations
agcttatcaatgtagcagatctctcgaccattgtctaactgtctatcaatacaaaaagaatactnnntnttgggaaaggaagaaaatcacacactttgccctaactctgctaaagcaattggatgtacagtggtcaacattggcactcaagacttcattgaatgaagggtatgtttgtaggccttctagtttccacccataaaagcagaattattgtgggcatgtacactgcaaaaccacaaaatttaagatttaatttacattataaatgaaatctggtcagatttgattatttctcgatcaaagtaattctcaatcaagttacccctnttcttatatgattccgaatgctggtaaagtatctttatagcatgctactattntttacagtcaaagcctttctctattcttttggcaatgctacacatgaaat

SEQ ID NO: 142420 - DNA, 468 bp, Glycine max
  unsure (1)..(468): unsure at all n locations
tgcagctgcaagcttggaagaagngatgttttattatcttttcatgcagagcttgaaagagcccgggtattcgaagacagttcaagtcctagccatcaaagtctgaagagagtatgatgaactaaaggacgtcaatatggccaccgatgaagccttggaatgagaaaccaagaaggcccgaaaggaagaacacgaccaaaacaagttttgaggggctttatagggcagcaatagtgagctcaagctccgaagaggtgaaaggaatcatcacgggtcaaaggcatgatttggaaggacgagctaaaggcttgccttatgtcgaaaagaaanttgtcccaatagttaaagtgagactgaagggaatatgtgggccatcatcgatgagtgcaaagagaagctaaatctagcggcgactcacgagcaaaggctagagggtgagtacgccaagatatcagcagaatgggaagc

SEQ ID NO: 142421 - DNA, 463 bp, Glycine max
  unsure (1)..(463): unsure at all n locations
cctgangcatgcaagctttttatacaaagattagctatgttttcaaattaatataaaagaacagccatnntcaccttactccttcttaaaaatagtgataatggttaaggtaaaaagaatttcaactattatgccaccaagaaagacatagagtggctcatggcatcaaagattataaataacaactgaaacctaagcctttttccactaaataaaatgagaatggctacatgaatcaaatggtaactgattcaaagnctttggcataccaatctaccataaaaaattcggcctcacattcaatggccactactttcttattcagtagtttctcttgatctaaaagggatgtcacaatatctgtattactcacatccaattccctcatcagtttatcaagttgggatcccatttcatatgacctttgcagcatcatctcctcctgaagttgaaagtctgatat

SEQ ID NO: 142422 - DNA, 260 bp, Glycine max
cttttattacttgtgattcaggttattgtccatgtatattctacattgtcgcgaggttaggtgacttttagaggctcatggcatcaaatatccgattaactcctagatcctcacccggtctcgcctttatatggcgaaaatggcatcaagatacacttggatcctgtttgcgaggcgatggcatgccactataccatatcaaattgtgcctccagtgctagaccactacatcctttttttcttgcaaacccttgtctaaa

SEQ ID NO: 142423 - DNA, 315 bp, Glycine max
  unsure (1)..(315): unsure at all n locations
ttttttttagacaacacagatgaccntatttggttccactctctactattatatataagattaaatataatgttatatttaccaattcccaagtactgntatagaagaagtccctttataattttacctacatttggactacattgtttgcaaactctctataagacaaagttatttcatacatgacattttattgtaattgacataactatgtattactaatttaaatgaactcttgctaaaaaactacatggctataggatttctattgtattttcttataaatcacctttattaagacaggataataatttc

SEQ ID NO: 142424 - DNA, 227 bp, Glycine max
ccgaaaatatcatcttggctctttatcaccgaagagagttctccgaatacttgaatgactgaataacacccggatagtgtccaaggagaattgcaacatctgcgtgatcccgtgactgtagatattgattctatacctgctggatcgtcacccttgctggccgaatccacttcatatttttacccgtgccctaaaaatgtgttgtgcagatgcgagctgacgctctc

SEQ ID NO: 142425 - DNA, 389 bp, Glycine max
  unsure (1)..(389): unsure at all n locations
gagccaaacccagnnaccttatctagaatagctcttttcttactctattgcctttagttgaatataccttngttcggttctctatatggttcttaaccctctcatgcaacttctttacaaactctgacctagattccccttctttatgtataaaagaagngtctagtgggaggggaatgaggtctattggtgttaggggatcgaacccatatacaacctcaaaaggggactgcttggtggttctatgaacccccctgttgtatgcaaattctacatgaggaagatactcatcccaagacttatggttgcctttcataaaaacccctaaaagggtggataaagacctattcactacctctgtgtgcccatcatgttgtggttgacaagtg

SEQ ID NO: 142426 - DNA, 200 bp, Glycine max
cttaagaacggtgagtagaagtactatccaggagaaaccaattctagctttgcatttctatgcatactactaagtcctgtgaccttttctgactaattaaaatttatcttacaccatgcattgaaaataatggagtgatattacatgatgcaccctaccattttcgtgcaatcttttttgcacttaactccctccgatac

SEQ ID NO: 142427 - DNA, 429 bp, Glycine max
  unsure (1)..(429): unsure at all n locations
ctgcaactgtagattgcagatcatctcctgtctactctgaaatatttttttattccaaagagatgacaatttagagagtgatccaagactttcaaatggatttccactgaatttattaatagagagattgagaattgttaaatctatctcccttgagttgcggagatttcccaaaaaagtcggaattgttccttcaagttgattatatttcaaataaagtgcaacaagagaagtcaaatttcccaaagaagttggaatggttccttcaagttgattgtttgacaaatcaagttcaacaagagaagtcaaatttcccagggcatcataaatagtcccatgcaagttgctggaatgaatttccaaagacttgagactatgaaaaccgtataagcaatctngtctagaagatgagaatgaatttcctgacaa

SEQ ID NO: 142428 - DNA, 395 bp, Glycine max
ccaattgccatcatcaatgttggggctaactcagcttagtgatgtagatatgtcatacaataaattaagatgggccaatgccccgtacaaaattagtggacttttctaatttaatgttctctggagtttgtcaactaaactccatgaatggaaacaattcctcattgggggctttctttgtcatcgttgatacaattatttcttcatgggaatcaacttacaaggtcaattggtgaattctcttctttatccttgtattattgtgatctctcttataacaagtcacaaagtaatatcccaactcaatgtttcatctacaaaatctcacttggttgagtctttcatcacacaacttgactggccatgtagatttttacaaattttcaaatatgcaa

SEQ ID NO: 142429 - DNA, 427 bp, Glycine max
  unsure (1)..(427): unsure at all n locations
catgcaagcttgctttaatcagtcctaaggagacatatatcacgccactttacactntttcctttcctttggtttttgtttttatgaatgtcaattttttatacacccaattaatttgataaaggaactctttttctgggaaaaaatgcttcctaatataattaatatgaagcatattagtcgcttcgttaatgaacttaatttactatatttaacgatgtttaaacctagaaaatnntagcttaacttgattttagttttaacaactcgtataagataggctttcatcatacataggtctcattttatatgttacaattgaaaattgactttgtaataaattaatccattgtagtttgaattcttatcaagtttgagatttttaggtaatctcactcataagatattgatttgaacttaaatttta

SEQ ID NO: 142430 - DNA, 279 bp, Glycine max
accacactctcgatatttgttataaatggacgcctacttcctattatacacgccaagatattatgtcacaaaggaacatatgcattggaaaaaaatgtcttctaaaacttatggtctgaaacttgatattcccctacctaagggaactatcttcacctaattcaactataggttaaccttctacatacatggctggctagattgtatcccaccaacccggagattcagcgctaatatggcccatgtgcaccatctcatatgtgacgatgtgtacactct

SEQ ID NO: 142431 - DNA, 409 bp, Glycine max
  unsure (1)..(409): unsure at all n locations
acccggatccttaagtcacctgctgcatgcagcttatatattcaagacgctcgaaattttatacggaagctctcgtgaaattcaaatagtcataacatttcagacggatgtctgattcaggcgcagaatatatcgatgcgctcgaaattgaacaacggaagctctcgagaaattcaaatggtaatatcttttcacacggatgtacaattcaaggacataatatatccagacgctcgtaattgaacaatagaagctctcgagaaattcaaatggttataacttttcacccggatgaccgattcggggacataatatattgagacacttgaaattgaacagcggaagctctcgacaaattcaaatggtcatcactntccacaataatgtccgattcatgggcctaatttat

SEQ ID NO: 142432 - DNA, 397 bp, Glycine max
  unsure (1)..(397): unsure at all n locations
tttttttctgcttaagagnaatgtaccactggtaaaacttactatccaaatgtgtgccatgcccagaaatggccccaacgcagcttgtctcacagaggtctacgatggacaatgcagacggaggaactagttccgcttcggagtctgacagtcgccgttttaagagcgccgctcaccaactgcgcttcgaggccatcaaaggatggtcgtttgtcctggagcgacacgtgcatctcaagaccttgaacaatcgctactaggacgctacctagtacctcttaagattctgtctgctatttgatcacgttatatctgtcgacacacctagtcgctcatgatccttagtaatttaatacaactagctccagctccgtaagtctttctacattatcaaaca

SEQ ID NO: 142433 - DNA, 385 bp, Glycine max
agcgatctaccaaattttgtatctatgctcacatcaagtgagcagtgcatataatcagtaacaacatcaaacaaaagttgacactttttgactacatcaaacacaagatgttgtacaacctgttgaacaacaaccaaaaggtgtggatgtaacattgataagatcaactataataaataaacctgtaattcctaacgattatcattgtgtattcacaaaattctcaatattactttggagttgaaaatgatcctgagtcatctatcaagcaattaacattgtgattctaaactatggtttgatgctatgaaagatgaattggaatatttgttaataacaaaatatgtgatcttcgaagtatccttatgggacaagccttttggat

SEQ ID NO: 142434 - DNA, 227 bp, Glycine max
aaacaaacagtcactgcatgctttagaattggatccctctctcagctatgcttgactcaaatattctccaaaatgtgtgcttgacactgagtgcaggtacatgtgctggtgtattagacccacactggactaacaaaactcagactgctcgaatagattcaatggctatgctacatagacttgttacagtactcagacctgctcaaaggccaagataataatcttgt

SEQ ID NO: 142435 - DNA, 410 bp, Glycine max
  unsure (1)..(410): unsure at all n locations
agctntgtgtaatcgattacactctattggttatggattaccagtgactgtttctaaaaaatcaaaagatgtaactcttcaaaaaggttttgactctttcaaatgggttataagtttttctaaaaatatataactcttctggatggccttcttgaccagacatgaagagtctataaaagcaaggctttgntttgcattttgaataaatctttctaacaacaatcttgaacacttatttcatacagtcctttacaagccttgaatctctntgaacttcttcttcttcttttgtaccaaaagcattttgaagtttnttggttttctaaaccttgaaaaccttgctattcatcttttcattctcttctccctttaccaaaaagaaattcccaaggactaaccagcctgaattc

SEQ ID NO: 142436 - DNA, 284 bp, Glycine max
ccttaaactaacgatgcacgcaacaagtgatcggaacgatatttggtattggatgaccatagaccgggacgaaataaaatctagatgaaactcatcttggatgtgatgacatttgataaaaggaaataggctgctctaatcatgtacaagcccaatggcagaccgaagcccacttgcttataaagcttctaaaagcaaagctaaaacacacaattagacaaaacgcccaaacgacaaactccatcacttatttacaactgacgctatcaatcatgaaaatggtg

SEQ ID NO: 142437 - DNA, 420 bp, Glycine max
  unsure (1)..(420): unsure at all n locations
agcttagtggattatggngcacccgtcatatgtggtactaggtggcgatcgggcgatggcgcaaatcaactctcccatttccacaagtcatgcacaagcttaccatacccagttgcccacctttaactcgaagtcacgcattcctacgcatctgttntgcccagatggcataaatagaggaaatactttattatgagccattttgatagatataatattggcctttattttatgaatgatattacatttatgatcatcaaagatgactgtataatttttatgaataagttgaccaacacttataggattttgagtaagacctgtcacataaaaaacatcnnngatattatttttgctaccattttgagttttaacagcaatggtgcctnttctctcnnacttttgaacatttccatcacc

SEQ ID NO: 142438 - DNA, 439 bp, Glycine max
agcttagctataatccaagttatacttggagaatcatttggaattcccaaccattagttaaggaaggtagttgatggttagaaatgaagcatctattaaggtttggggtgacccttcactaaaggaaaatgatgcatatgttcaaacaccacatcccaacattgaggaaatattgcatgtaagtgattttattattcatgacaaaagatgttgggatcacataaagtttcaggttgtgttggacgaaaaggatgtatctaccatcagtagcatcgatctaactagagatgattcaaggatttacaggtggagaagagatgggacctacactgaagtcaacttattatacctatgtaagtagaatccattctttgcttcattttggaaaatgaaggcgattgaaatataatatgaaggctaaagaattccctgaaagtca

SEQ ID NO: 142439 - DNA, 428 bp, Glycine max
  unsure (1)..(428): unsure at all n locations
agctntgccatgaactgtgtatggcagaacttcattactattattcagtatatacaaaggagcttgttgcaattcttctgaacttggagtgataacatgtaatcctcttgaacccttacctcccactcttttgtcatcccgagactcgagaagcccaacaagttttgcttttttaatgtactatgagcaaaactcaatagcttctttagtaatgtacctttcaataatagatacttcaagacgatgtagattctttgtataccattttaagatcttcatgtatcactcaatcgagtacatccaccacaaataaatgggaccacagaatttaatttctctcaccaaatgcaaaattaagttaaccatgatgtcaaaaaatgaagaaggaaaatacatctccaactaataaaagataatagtagtctcat

SEQ ID NO: 142440 - DNA, 450 bp, Glycine max
  unsure (1)..(450): unsure at all n locations
agctngtaaaaaatatactgtttttataggatacatttcataacaacgaataggatgaccttgcaatatgtcttgcacccatgcatggcctgtttgttggttggttatgcacaactctctacatagagttttttattgcatattcacccataaacacagccacataggatgcttgctccataagttcatcattttcattggtatttgattcaaaattttcaaccaagtcattcatttttgacctgtatagaaacaatattacaaaatacaacatatatcaagatacacatgataaaacataagttcattaccaaccataatatggttcgttacaagccaaataagaaacataaccaaatttgataacaaaacataatatgagttcaatagaacatgactcataccaccataagcaaacatctaagcactagtacataatagtaagccaat

SEQ ID NO: 142441 - DNA, 251 bp, Glycine max
gccacataccagctgacctcgcattatgtgttgctccaccacatgtgatgctataagtgtgattgtgcacctctcgataccttcatgtattggcagcaatacgaaacgtaacagatggcctaatggtgcgagatccgtatgtcaaacagttgcattggaatgtgatacataatctttatcattgtattacatctttgacactgatcttttgaattttacattatacatgctacatccatatcctcatgaaa

SEQ ID NO: 142442 - DNA, 355 bp, Glycine max
  unsure (1)..(355): unsure at all n locations
tttgaggtcattaaagtttagatgaccatacctcaagtgctacagnagggactcatgcgtatgtggcgaattaatgagcttgcgngggccgtactcttattaacatcgagtcttgttattggcactgctaatcgggtgaaacattcaantccaaaacttggtttcaaaggaataaaggtgagcagtagcagggcaagtgtttcccctgattatgacgtggggaagattnataagtgaacacaagcanttgtgttnggtatataactnnnaaagtgacagtgaaaggcctgcctcttagatttgagaaatgtcacantagtacantaattacacaaatatcatgttcgtttgcttt

SEQ ID NO: 142443 - DNA, 224 bp, Glycine max
catgaaggatctgaggacgaaacgtggatagatttaatacgaccatagatcgagggctactatttggagctacaacatatatcacattagcatgatctgtttaagacacatgcttatatgcatcgacaggcttgattgagagacccaacgcttgtacctactgctgccaatttcacttgaatgatatagctttatactaaccaaatgaattttgataaaccgaa

SEQ ID NO: 142444 - DNA, 442 bp, Glycine max
  unsure (1)..(442): unsure at all n locations
agcttgaatctatgatgattgctgtacatgctcaatcactgaagatgggcgtctggcctcctttcataaataacaaacttaaatcatactcaaacatcggattttatttttttgctaattggctcttacttggttacatatcccgtatctctgttcctancagcaccgagtccccatcaacccccccaagctttcataatatccaaacaattngattccaatcctcatgaactaccctaaaccaagaaaacagagtagaggcagaaaactctgcccaaaactcattcaaattcacatgntgccttctcatatacgcgagaacattcnnttcggtttgatcgttaccattggatcgacttgaaaattttactggaggttcctantacacaaatctacantttgaccgttgggatctgatagaaaaaatctagaacatgatatg

SEQ ID NO: 142445 - DNA, 422 bp, Glycine max
  unsure (1)..(422): unsure at all n locations
agctgtgcttctacagctaagagtaatgccccttaagatgttacacaatacatacgtcatttatttaaaaaaaaacattcatattttttttatacaaatagtgaacaattgacatttatattttattcttctctcatggagacttttcaacactttgtccaaacgttgaattgaaacaaaattggaccactcatcanatttgttttaaatttgattctaagataaatatttaatcatccaatcgttatatcatatatttcattaaacattttctgtataacactttttgttaatttccaattaacattaaaatttataaatttatatttttaatttaattctattgtgtaagacatgaataataataataataataataatgataataataataataataataatcataataataatgtgag

SEQ ID NO: 142446 - DNA, 233 bp, Glycine max
gaggaagatcatatatttatgtctcatacagataggaatgatatgtcccacctatttcaatgccctcacgaacaaactgaacagcacttataacaatgatgatattgattcgcagttactaccactgactgaagagccaactttcacctttataggaccctacatatatcgctcaaacgacagatcatatataacatttaacatcatatgatatgcccctataacaatagaat

SEQ ID NO: 142447 - DNA, 421 bp, Glycine max
  unsure (1)..(421): unsure at all n locations
agcttgtcttcttagggaccactnggactggacttacccactggctgtcagaaatggggtagatgattccagcttgtaagagcttggtcacttcctttttcaccacatctagaataacggggttgagtcgtcgctgtggctgcctcattggcttagctccatcctctaaaagtatcctatgcatgcaggtagatgggctaataccaggaatgtctgctaaagtccatccaatggctttcttgtgcttcttgagaactagcaacaacttctcctcttgcttagcagcaagggaggcagagatgatcactggaaatttttccttgtcctccaagtaagcatacttgagggttgctggtaagggcttcaactctattgtgggtggtggctgaatagtgggaggaaccaaagtaggagaagaaaa

SEQ ID NO: 142448 - DNA, 170 bp, Glycine max
aagaatgaaatctgtggctgactaaacaggcatactacagtcattgaaagtgctacttgcacgatagggaatgggctcttacgaagtatgtctgcacgagtacatacaatggctggcttgtgctggttgagaacgaactacaactttacttcttgattaattctttggag

SEQ ID NO: 142449 - DNA, 419 bp, Glycine max
  unsure (1)..(419): unsure at all n locations
agcttctgcatgtctagggttttctagagagattgaagtccaagttccagagagtttgagagattttgctgtgtgaagacctgcacgatttctgagcttaaaccangcatatcttggtaagatcaagcgaagatgtcttggtagtcttgtaacagaatcaccaactcatctcggacctttgtggacatacaagtgccgaccttgacctcctttttctctccgccaatgcctaagttcacaacctctgtctctttttggtgcggcttcacctccctttcttcttgctccatcatttttctcaaattcgggggaagtccccaatcttcattttcctccttctctgcttgacttattggccgctcaaagtcgatgtttgggtcctcgatatcgctactcccataggactcagcattggatct

SEQ ID NO: 142450 - DNA, 201 bp, Glycine max
ccttcgagacctcaggtggggcgctacatctcttgaccagacttgaccaataccgactgatcccggtcatacacagtcaccgacaacctgtgatgcttctaagccagacaactgccgaccgtgaactcatttatggataacacaaccactaagctcagaggctcgtggtggttgggcagctgcgaatcctgcgttatatgt

SEQ ID NO: 142451 - DNA, 400 bp, Glycine max
  unsure (1)..(400): unsure at all n locations
nagctcaacattagaccacttacatggtgctggaactacttcacatggacttgatggggcctatgctaagtgaaagccttggaggaaagaggtatgcctatgttgttggggatgatttctccatatatacctgtgtcaaccttttcagagacaaaattcgcttcttctaagtaattatccctatgagcctaagaccctttagatattagactgtgtaattaaaatgtctggtcaaaccatagatacagatgaaaacgtatgtcactgaattctgccatctgaagcatcctgatgagtgttgtttggcgtncaccacacanatggcatattggaatgataaatcgacctggaanaacaaaaaatgataattatgtataataaggcctttttaccaaatttt

SEQ ID NO: 142452 - DNA, 270 bp, Glycine max
  unsure (1)..(270): unsure at all n locations
ctggaccgcgcgcctattcagttgaggccattgctgtattatgtttggctgtgtgagagcatcttacacctacagaggttcctgggtcaactgtatcaaatatggaggaggcactttgtaaggattgaaatggtngaatctaatactatatacacactgcctctgtgttctgtgtataataaagactgtccgtgtcaatgaagttgataacagcgtgtgctctgatttctggtcttataactacatgcctactaagagatggccagtctt

SEQ ID NO: 142453 - DNA, 421 bp, Glycine max
  unsure (1)..(421): unsure at all n locations
agcttcttatccaaaacactctctnggnggtgaagcttattcttccatggcttactccctagtggatggcgcctcctctcacctcttctcttctatcttctgctacaactccatggcataaaatcaccattgaagctcaaagatccagcctccatagaagcttctcaagcaagcttccatcatgttgttntattgtttttattgtttttacatacagaaaatagaaaaataaataaatgaatacatattttatagctgttgttttctaatgtttttcataagatttctaacctgtataatttgtgagagatgtatcatttttagttgaaaggtttcatgcttgatgtgaaccattgttgcaattgtggaagaaataagtaggcttgaaaaatttgaggtggatcatgtgtcataaaattat

SEQ ID NO: 142454 - DNA, 234 bp, Glycine max
agcactgtcttggtggttattctttattcttccatggcttactcccgaggggatggcgccctgttatacctatgatattctatcggatgctggcactccatggcgtcacttttccattgcagctcatatattcaccctccattgaagcgtttcaagcaagccatcatcatgtagacttgtagaaattgtagcattcacgtacccattatagaaactgaacgaaccgtgtacata

SEQ ID NO: 142455 - DNA, 430 bp, Glycine max
  unsure (1)..(430): unsure at all n locations
cagtcacctgcggcatgcaagcttcttcggagccatcgcctacaaagacacatccaactaaaatttagcataaaattttttttttgcacgaaatacataaccatattattttagttatcccaagtatagcaaccaagaagttaatcaatttttgtgtggnttntattaattgtatgtgataccatacgacaaataaaaacctttgaagtatgcgtagagttgagtctaagacaatttgatattatacactgggtcatcaagagaattacgaccgtccttcagcaagagtagccaaacaattaggccaattcaatccaaacaactttaagcattcattattgactcatgtatttgcttntaacgaaatgtaatggattccatgcatagatcaacaggactctgcaagaagctgctatggtcatgcttcatg

SEQ ID NO: 142456 - DNA, 457 bp, Glycine max
  unsure (1)..(457): unsure at all n locations
gcgaccgcggctgcgctctggctggatgaaaagtaagtgcgttttaattgttaaatggcttataagaggaaaggtgaatactatgctatttcagaaagattatggaagtcaaatcctagtcgtcaagatatatgtggatgataccatattcagtgctactaatgacttgatgtgcgaggatcttatcaaacttatgcaggcagagtttgtgatgagtataatgggagaatagaagttcttcttggacttcatatcaagcaaacaaacaatggcatatacacacatcaaaccaantccatgaaggtacttctgaagaagttgcagagtggtgctgtattccaaatgagaaagctacctagtcccaccgcggcttttggaatgaatgatacagcatcctccattgttatttttggtaaatgaaaggtttttctttctcacttatatagaggagtacaat

SEQ ID NO: 142457 - DNA, 439 bp, Glycine max
  unsure (1)..(439): unsure at all n locations
agctntccaaagttttctggttttctaaaccttgaaaacttgctctattcatctttctcattctcttctccctttgccaaaaagaattcgctaaggactaaccgcctgaattcttnttgtgtctctcttctcccttttccaaaagaacaaaggactaaccgcctgaattcttttatgtctcccttctcccttgtcaaagaattcaaaatgacacagtctgagaattcttttgattcttccctttcccatatacaaaagatttcaaaggactaaccgcctgagaattcttttgtatccccattcacaaagtttcaaagatttaaccgcctgagatcnttgtcttaacacattggagggtacatcctttgtggtacaagtagagggtacatctacttgggttgttgactgagaacaagagagggtacatctcttgtggatc

SEQ ID NO: 142458 - DNA, 297 bp, Glycine max
aactctcatagaatacacgctcggccaaacagaagcttcttaggacttaaccgcgattacctcatgagtgatctgttcgatcttgttcaaacaaacatacgactagcacgttgaattcttcaatggctgccatccaccttgtcaaatattacgtgacgacacgacctgacaaaactgttgatgctcgcctttcccgtatacaaaagataccaaaggactgcgcgcctgaggattctgtacgctccacatgcacagaccactaaagatgcatccaacggatatcttgatctgatcaca

SEQ ID NO: 142459 - DNA, 454 bp, Glycine max
  unsure (1)..(454): unsure at all n locations
nagctttaatttcaatacaaggaagcatgacttacgcctaggaagctnagttttggttttgaatgtaaaaaggcatgaatattaaggacatgtttgagaggttgttattataatttaaatttggctgccccatgaggaataccttgcacctaggtagcatggaaaatacctttcaacggtatgtatatatgtgaatatatatagcatgaaaacgccttgcataatatgaatatatatagcatgaagtgccttacaaagtgttggatgggtagcgtaaaagttttttttcaaaatatgtgtatttgtgagtaggtaacaaaataagccttccaaaaaaaatgtgtgtatatatataggatgtagcatgaaaaggtttgtcncaaaaatatgtacatggataggtgtctgaatatgcctcacacaaaattattttatgtgtgcacatacgtatgtg

SEQ ID NO: 142460 - DNA, 436 bp, Glycine max
agcttgaaggtttatttctatgaattctaatataagcaacaattaccttgtatgatgtaaatatgagaaaatctaattaatttaatgatactattcttaaaacatccttcatttaattgcgaattctattttaatgactttttttttttcatgatatgaagattacatatcacaacttctaggatattattatgttttaattgagattattacaatcaacatatgttaagcgactttctcaccttatacaaaattaattatttttacttatatttgaatctggagggattatttccatataatcgtcaaggatgcgctcatgtgaaagagagaaagcgaccaagtaacatgctggcttatgctcttggcatttaatttattaacctaagttgatcatacacctaacataatggatgaacatgtgtaaagatcatta

SEQ ID NO: 142461 - DNA, 239 bp, Glycine max
  unsure (1)..(239): unsure at all n locations
acaaagaatttgcgacactttcctattcatcttctttgattctatcgatgtgggtgaactttgattcncaatgacacgcgagatcgtcatagaattgactctaactaacccatgagttacttataccacgacatcaaactggtgggctgtgacttgagacactcttacacaatctgaagactttgacagatatttcaggctgggcgttaagggatagagctacataaatgatgccttct

SEQ ID NO: 142462 - DNA, 347 bp, Glycine max
  unsure (1)..(347): unsure at all n locations
agcttgagaaggtggcaaaaagcttaaagatactttaacatgtantattgatcaaggagtatgaaaagagaggacttgaatacaggtaagtattaaagatagaccagttttgtggtgaaagaaaaaatgaaatatctggctcaaacttgattcaatgacctgaatagctcaaggaaatataagcacctatgatggttatggcacgttcttcaacaattaattcattttagaaactataataattgatactacatataatgtgtggaaatattgagaccatactgcaaatgagcaagtaatattcatcttgaggctccaagtatatatcgatggctacacagattaat

SEQ ID NO: 142463 - DNA, 428 bp, Glycine max
agctggcgcataaagctttcaattagaaaaattgctggtgtattattgaattcgaattgataactaatgagacaacaaaatatattatgcatgccttttggaaagcttcttaagccaaggtaggtcttgctttatagctctttcctttttcccttaagtgacaacaaaatataatggatcattcatgacttggatgtgaaagtttattaatttggctataaacatcatcatttgacacgtgtggttattggtgcacaatgcatatgtatgaagaacgtaacgaccatatatataacaaaatttaccacaattaattacaaattataaatataaaaatgtgtagatgatcctattctcttctgacttgttgaccatgatttgtctatacatacccaaattgcccagcagcaatcgatgacacattctct

SEQ ID NO: 142464 - DNA, 416 bp, Glycine max
atgctcagaccaaagcaacacaaaatctatgtatccaaaacccctcaatttaatggatattcaaggtttgagaagtgaaattgagaatgaagtaaatttggagcaaactctcacgtcacacaagtccataacatcaatttaaacgtgctcaaactggatttacacctaaaattctaccgaatcaaaatttgactcctcaacacccaattttaccctataaatggctctttgtcacttgtgtcatttgtgtttctctctggcacagcccaaactttctcataagtccttaatgacatttcaagctaggattaacttactgtaacctctaaataccacttaattcagatttgtgcttccaactctcaaatactcactatttgtccactcataacaccatattctcactttctaaccct

SEQ ID NO: 142465 - DNA, 94 bp, Glycine max
gaaaggcaccataacgtctgcgaactgacatccagagccatttataacatgcgcagcactttatgtatcacccacagataccattagtcaccac

SEQ ID NO: 142466 - DNA, 371 bp, Glycine max
  unsure (1)..(371): unsure at all n locations
tgcgtgnctagctgtatctggcccaataatggttgcaccttactggagcgcggagttcgagttgatgtgtgatgccagtgattattctgtgggtgtagttctaggacaatggcgagagaaagtattccatgccatatattatgcctactaggttctgaataatgcacatttgaattatgcgattacagaacaagatatactggccatagtctatgccttaaagaagttcttgtcccttctggtggggtccaaggttgtcatcttcacagatcatgcaactatcaaatatttttttccaaggcagattcaaagccaacgctgattagactggtcatgtttattctacaatttgatatctccttcctttataa

SEQ ID NO: 142467 - DNA, 418 bp, Glycine max
  unsure (1)..(418): unsure at all n locations
agcttgatgagtattgngaaagattcaagatattgtgtgcaagctgtcctcaccaccagatntctaagcaactccttcttcaatatttctatgagggacttagcaacatggagaggagtatgattgatgctgccagtggtagagctcttggtgatataacccttgctgaggctaagaatttgattgagaagatggcttccaactcccaacaattcagtgcaagaaatgatgctattgtccttagaggagtccatgaggtggccacagattcatcttcatctactgaaaataaaaagcttgaaggaaaacttgatgccttggtcaacctagtaactcagcttgccatggattagaaatctacgccttttgcaagagtctgcggtctatgttcttctgcagatcaccatacaaatctatg

SEQ ID NO: 142468 - DNA, 388 bp, Glycine max
  unsure (1)..(388): unsure at all n locations
agcttcatgatgatgaatcaagtngattcaagtagttttgattatgacaaagatgatgacaaaaggcccaaagaatgatttcaagaatgagtcaacaagttcaagatcaagtttaatttcaagtttcatgagaagaaatcaagaagattcaagaatcaagagaagattgatttcaagattcaaaagaagatgaattcaagattcaaaagaagatgaattcaagattcaagagaagaaatcaagaagacttcacaagggaagtattaaaaagatntttcaaaaaacaacatagcacaattttgtttttcaaaagagttnttctcaaaatnttcaaagttactagagtttttactctctggttatcaattaccagttctttgtaatcgat

SEQ ID NO: 142469 - DNA, 111 bp, Glycine max
aataaaaaatagtgttcctctgattatttatatggcgatgtctcgatatttgaaaagatcgttgttgcatttaaacgatcacatttgagagacttacaagggctcgatgat

SEQ ID NO: 142470 - DNA, 405 bp, Glycine max
  unsure (1)..(405): unsure at all n locations
agcttgtagctntaatcaacccatcactctcacattgcatataatttctctcataatgttgccgaaataagacaacaattatataggcattacaacttaaacgtgaaaaataaataatacaaatgtttatctagaagtagctttaatcaacccatcaccctcacctgtcaaatcatcatcatcatcatcatcatcttcaccaccactgccaccacctttattgctttcaatatccaactatttgggctaggccagagcactctcaagcccattcacagactattggtaaagaatccctccaacaatagtaaaaagaaaacaaaccaacccaatggtaaagaatccccaaataagcacattgatcgccacggtgagaaacttngtgatgtaagctcatgtggagct

SEQ ID NO: 142471 - DNA, 116 bp, Glycine max
tcgagtatcggaccgcatggatatattgcactttatcgaatgcttctaaatttgttagcatgggttatataaaagcaggtataaatgccccattacgctgcgatgtccaaatctca

SEQ ID NO: 142472 - DNA, 441 bp, Glycine max
agcttgcatacaacaatatgataaaccaagttttgtattgaatgtggtcgcacatgcacctgcacgtgtggagaatcacacaatctaatctatgacagctaagggacctcgcaatgttgggggcaaagactgtgcacgctggttaatatagtgggaggaagcttgagggaaaagcctcttgtgttgattcatattaccattataagaaaacacaaggtataatgataatcatcattacagggaaagtcaagtttgaccgtggaccagatcaagcaaaaaaaaaacaattggtgttgtttgaatatttctctaataaaaatattcaataaattaagttctttatataggtttagattaacttatataaaagttatattataaaaaaaaattcatttataattttcaaaaactatatttaattagtttatacataatttatta

SEQ ID NO: 142473 - DNA, 451 bp, Glycine max
tctacagtcacctgctgcatgcaagcttatatcatgcatatgtactatattataataaataatatgttaatgatgaaagtattatctatattcgataaggagcatgttttaatggggggaaaaaagagctacaattggatagcgagaccaaagtttaagcctaacatcaaatacttttcaaaagtacttccacgattacattcatttatagaaagatatgggtaattgcttacaaaacaagtcaaaattttaggttaacatgtgaacaagatggctacttttataatcaagctagtacgtttggaacaaaagacgaggaataaacaacttatatttttggaatttcgtcgacaataatcatgcttgcaacgtactctctatccaacggagctaatagctttgctgcataaagaggagtatgttctgactgttttatcatctataactacct

SEQ ID NO: 142474 - DNA, 443 bp, Glycine max
  unsure (1)..(443): unsure at all n locations
agctntctcccaagtcctaaatgacatttcaagctagtattaactcactttaacctccatttaccacaaaattcagacttaaccttccaaccctcaaagcctcactctttttccactcataacatcacattcttactttctaaccctaggttaactctacccttcacctctaacagttttccataagaaatttcagcatataaacatcacaaacatcatcacaaaaaccctaaaacagaatgggtatgtctaactcatccaagcatggcaatttcaacaagctttcaacaagagtcttcacaaataaccatcatgaagcagagaactaacaaaactacccatcatatctcccaaaaccccatacccacgaaaatcaaaggagaaagaagttcacccaaacctgaaattntgaagtcccactcgtagacacacacttcacgacc

SEQ ID NO: 142475 - DNA, 416 bp, Glycine max
  unsure (1)..(416): unsure at all n locations
agcttcagattgttaattgttctcatgtttcaataaagagtagagggtgccacctntgttgattggttttattagcattctgttagttgaaataaaggcccaaaattgtgttaaagtggctgtcaattctctttggatttgcaccacctatgggcttgttttaatttgaagaaattaaggtttaataaggtggaaactctangcttgtcgctgcctcttggctgaccaggagttgtgtatttttccacatgtttttgtgtcttaattctagttttaattaggtataatgacaccatcaattgttgtgattggtgatatgacaccatcaatgcatgcacacacatgaagatcacaangtgatttgcctttatttactctatttttaacctttgtttcaaattttaactgattttcac

SEQ ID NO: 142476 - DNA, 361 bp, Glycine max
  unsure (1)..(361): unsure at all n locations
agctggttgncagnggtggttcantgacatgtttgngcgacattgctnaggggggcagnttggaggcccaactgatagataaggattatcctcttggtcgtttcttaactacgcttggcctttctgttatggattggcatggagatcttgctgttgggtgcaatgtgcaatctcagatcccatttggacgacatacaaaccttgttgcccgggcaaatttgaataatcgaggggcagggcaaataagtattcgattaaatagttcacaacagcttctaattgcttngattggtctcatccctctcctaaagaagctagttggttatcatcaatcaacacacttnggacaatactcaccatg

SEQ ID NO: 142477 - DNA, 429 bp, Glycine max
  unsure (1)..(429): unsure at all n locations
agcttctcccctattttgctataaataggggaagaagtgaagaagaaaagggttcagccccttaggcacttctctctctttcaaatttgctgaggaacattagttccgtgaagaaaatccaagccaaggcgcttccgtaacgtttccgtaacgtttccgtgagtaattacgcgaagattctcgaccgttcttcaagattaatcgttcgttcttcgttttcttcagtcttcaacgggtaagtacctcaaaccaagcttttcaattcattctatgtacccgtggtggtccacattttgtttcatgtatttttattctcgttttcatttactntttatacccncttttgacgtgcttcagtcatttatttaagttgtttctcgcctaatctaaaaataaaataaatntccaccgatcgtttgaatcgcatca

SEQ ID NO: 142478 - DNA, 275 bp, Glycine max
gacccttggttctcttacatgcgctctgctctatatttgatatatcacgagagacattcactcgtgagttacaacacaacccaaggctcttactgaacttttgattgggtgcttcgtacagcatgctacgcttatcgtaccttatacaaccctcatacaacaactgctttacttgaggaataaactcaagcctaagaggcctggcaacgctcacatgtgtctattccataagagaaaatgtggacgatgtctaagacgggaaataacattaatat

SEQ ID NO: 142479 - DNA, 422 bp, Glycine max
agcttgagatgaggaagtgttgaagggtgaaacttcctgcttttattggtgaccacagagtggtacctggagatatgtcgcgggggtcaggagaccttgggaacgtcaggtggggtgctattgcccaaaaccaagcttgaccaatcccgacccaacccgggcatagtcggtcagtgagaacctgtgatgtacctaagcaggcgagctcctggcagtcaacagataaaaggaacaaagaccacaaagcaatgaggcttgtggtggctggccagctgtgaaacttgattgatatgtgagatatggtctctggtaatcgattaccaagggtgggtaatcgattacaaggcttaaaaatgaagacagggggctaagatggtctctggttatcgattaccacgcttgaaaacgaagtcaggaagcta

SEQ ID NO: 142480 - DNA, 166 bp, Glycine max
  unsure (1)..(166): unsure at all n locations
gacgtacttataccaagcctacctgtgacgtaccatagcnggcccactacgctcagattctacactgactgatagcttgccccaaggcaatgtggcttcaagtgtctggccaaataggaggcactactgatgtactatcatgctacataagccctcattgacggct

SEQ ID NO: 142481 - DNA, 435 bp, Glycine max
  unsure (1)..(435): unsure at all n locations
agcttcatgttggcgaacaacatanatcataccttngaaattnntgtcatcaacaagttgcaccattatgagcttgagcattccacgccccactacttgtgggtatcaaaatgaaatatcacatatttggtccagtggttgaaattggagcttttggtggattttttttcaaggcttcaagtgtgaggcctcattttgtttgaaagaacaatgggtgggggcattgaaatgtatctatccccttcacttgttttgactatttgaccactgtaatgcactaagcaaaaaacgacgaggacacatgattaccaatcttgctgaatcaattaatttggtactcaagaaatctgtcaataagtgggctattaaaatcaacatatataaggtgtaatgcattattcaacananaaaagagaagtcacaacaatgcttaca

SEQ ID NO: 142482 - DNA, 454 bp, Glycine max
  unsure (1)..(454): unsure at all n locations
atggtgagcaacatatatcatactttattattattagtcgtcaacaagtggcaccatacatagcatgatcattcacgcctcactactagtgggtatcatattgatctacctcatgagtcgaactaaggctgataatggagcgtatggaggaataagtttatatgcttctaaagagcagcctactactgtcagtactatctctgtgtgcctgcattgaaatgtatctatccccttcacttgttttgactatttgaccactgtaatgcactaagcaaaaaacgacgaggacacatgattaccaatcttggctgaatcaattaattggtactcaagaaatctgtcaataagtgggctattaaaatcaacatatataaggtgtaatgcattattcaacananaaaagagaagtcacaacaatgcttacatctgacccaagttatacgcaagtattaaa

SEQ ID NO: 142483 - DNA, 425 bp, Glycine max
  unsure (1)..(425): unsure at all n locations
agcttaatgtataggcattgaaaatgtaaaataagtttacattgtcattcaattacatatcaccttttgaattggtttaagataattattttaaaagttaataaacttaccatacataataaattatgattaaatgattgtataatatttttacactaccaatatataacattttttctcatatataatatttcatataataattcaaattaataattaatatatattttaaaaaaataaacaaaattntaagccttaaataatttggggcctaaagcaactgcttaaatgggcttgcagttgccacggtcgtgcatgtaatgtgatttgttggttattgcttggtgagtgaaatggtgcaaatgtggngggttatatanaaaataaaatgggactcttttgctatgggaatgtaattttgtgta

SEQ ID NO: 142484 - DNA, 250 bp, Glycine max
acatcttgcttactattggactcggaatcagacgagatgaggtagttgacgagcactccttttagaattgtgatgaagagattgtggagaataacatccctactcccgctcaactacctctcgaagatgctgtggaagatgacccaggtgaaccaccttctccttctccacttcaacaagatcaagaactatcttcagccttagatactccgggacgtgtaacatctgcggaggaggtctatgaaacctg

SEQ ID NO: 142485 - DNA, 425 bp, Glycine max
agcttgtatgattatggggtacccatcacatgtggtactaggtggcggtcgggcgatggtgcacaacaagtttttcacatccacaaagcgcgcataaacccaccatcccctgttgcccacctccatctgagctcacgtactcccacgtagcccatatcctcgtttctctcaacaccgggtccccatcaatcctctcaagcttccacaacatccaagcaaaacaacattcaaacagcacaatctatcacagccaagaaaacagagcaaaggcagaaaactctgccaaaacaccaaccaaaatcacagcttttctcacgtaaagaccacagtaacaattccttcgatccaattcgttaaccgttggatcgaactccaaaatttactggaagtctatagtgtataagcctgcattttgaccggtggga

SEQ ID NO: 142486 - DNA, 284 bp, Glycine max
  unsure (1)..(284): unsure at all n locations
actatggcatagtgccggcgctgaactgatgatagctggacgcccttttatccatcatatttttgggttcaccacgatgtatgtttacaacggctccaccactggctatacttatcatacttatcccatattacagagatcttataaagctatcggagaataaactgatctcaaatctgatcgtggcggcatctggcacataatatattaaatctctggcagaactcattcacgctatctccactgaaantgctaatatctgacatatacatcatgatggctgt

SEQ ID NO: 142487 - DNA, 373 bp, Glycine max
  unsure (1)..(373): unsure at all n locations
agcttctcactgtggtgccccaaaagcatatgtttcctgctctcttccacgtcgtgcaggtcattattggtatcaaccttgtaattcaacttcttcaactctaccaccaaattatccaacttagcataattatcatctatttgtggatgatttctctcaccaacagtaaatgaatgaattttattcttaatttcaatccaacttgtacccctctccttcctcacatcagtctctctgagaagcttccttgctcttgcaacttcatccgactttttattagctgcatatatatttgctaacaaaatgtggtttcctgcattgttaggctccatttcaaacagatgcttggcggcnatctcagcaaactcaatat

SEQ ID NO: 142488 - DNA, 430 bp, Glycine max
  unsure (1)..(430): unsure at all n locations
cgaccgcngctgcagcttcaacaatggttagtgtctcttccatttctctcgcggtttatcttcttccatgccgagacttgcttcaacctctatgctgagactgtcactgctatagcaacaaacctcatgcgtgttgctataagtaccataacctatttctccattctcatttcttgttgagaaagcttccgtcctcgcaccacgtcaacgccacgagtttctctcgcaatctttgaaccccgtggctgcttcgttcttcgtgcgcgccacttgattgactggcttgccgaggtaaacaatgattgtcgatggataacacatgttaactacaatagtattaacgttattatattgcaaatggggacatctaantaatatcttattgtcgggaacaccactggtggtcgaatattcattatcacactttttc

SEQ ID NO: 142489 - DNA, 436 bp, Glycine max
  unsure (1)..(436): unsure at all n locations
agcttcaagaaaaggccaaactccactccaaaatctgtttcatgcttaaataggtggctttgttcgtgcttgcgaacttagtgcaactctgaaccgcttagcgcgcgttagtgaattttggcttagcgcatgctnttctcactcagcggatggactgaagcggtgcgcttagccagatgaaccttcgctcagcgcaaatgcacaactcatccttcttccagactcttcctcgcgcttagccaagcaatggtgcgcttagcggatggctcgctaagccaacagattggcttagcgagagggtgaaaattaatacttcacaaacttgcctaattgacctgaaattgagagaaaatgattattaaacacacaaaatggaagtactaagtatttattacctatctttaacaaagagtaattacaaccctacaaaataacc

SEQ ID NO: 142490 - DNA, 436 bp, Glycine max
  unsure (1)..(436): unsure at all n locations
agcttagtcataaagccctttctagtaattgacttaagctgattagattacttttcatacctggtacaaagagtacatcagtgatgcaagattgacctctatccttggttttgataaggaccttcccaattcctttagcactcaaagttctatcatcagcaaatttgacttgactcttcacagattgatcaaggttgagaaaccactctcttcttcctgtcatatgagttgagcaacctgtgtctaggtacgaacatttatcacttgccccttcaatttgagtagttaccattagcagtacctgttcagtgtcatcatcttcttcctgagccaattttgcatcatcgcctttaggttctcttttgttattgggtttgctctaacactcatcagcaaaatgcccaaactttnggcagttaaagcattgaatatttct

SEQ ID NO: 142491 - DNA, 270 bp, Glycine max
agagctgctttgatacgagatacagggatgacatgtgcgttgccaggtccaccatactatgtgctgataacatggacctcacccttatcttgacctctggtataccatatatctatacactatacctgactcatttgagagtgaacaatggaaagatacctccttggttatggatggctacgaggcaaggcacgtgcaggtaggtacaatcattatgtgcacgccgctgcgcttgtactagttcccactaacgatgactgtatggggaca

SEQ ID NO: 142492 - DNA, 422 bp, Glycine max
agcttgagaagccctttgtgaaatgagatgatctattatcacattctataatcaattattatgtttctggaaatgcagaacaaagagggattttaacaaattaatcgattaccatatttgataattgattaaatatgttttgactattaaaattgttagtgtttagctctactgagctttaaaagattggctaagattttgttaaaacataagcacttatacaatgaaggaaagctggagttgctgcacatgatgtccaacgttatgtcaaggaataagatcgggctgcacaatgcacaaggcaagataaaatgtcaaatgaaaaattgaagttgcaggatccacgatgtcggatacaatgtcctgacatcctgcccgagaatactggagttgctgtacaatgcaagataaaagtcaagtgc

SEQ ID NO: 142493 - DNA, 366 bp, Glycine max
atgcaagcttatgcgcataatattctactatacgtttctagtctaagacatcctagtaactaagaaagactctcccatatactatcaaggcagctaccttacctagattaattacatgtttcttcaaagtgtatatgttatttacatcacacacatcttcttggctaaatttacatacatgcttactcaaaacactttggggtaccaaaaattgcacatgtgcacatcttggaatttctaatacctatacatacacaaacttcatgaagaatcttgactatctacacaataaggcgctacgatttatgctcttttcaagatttatgctacctaaagtcgtatgcaaactcaaggatattatcctct

SEQ ID NO: 142494 - DNA, 350 bp, Glycine max
agcttgcctcatagaggtctcaggaagacaatgcggcctatagaactagttccgccccggagtacgacagtcaccgctttatgagcgttgtacatcagcagcgcttcgaagccatctagggatggtcgtttctccgggagcgacgcgtccagctcagggacgacgagtatactgatttccaggaggaaataaggcgccggcggtgggcaccactggttactcccatggccaagtttgatccagaaatagtccttgagttttacgccaatgcttggccaacataggaaggcgcgcgtgacatgaggtcctgggttagggggcagtggatcccgttcgatgccgacgctatc

SEQ ID NO: 142495 - DNA, 429 bp, Glycine max
  unsure (1)..(429): unsure at all n locations
agctctaggtatatcatctgatggttgntgatttaaccgcgaattctgcagagaagcagagttcattgtatgtaaagtcgatgccttccancatattgatgttgaagtagtgctcgacgtgaataataggttctccatcanggtgaatggaggttgtgtcaatggtgataatggtggttgcagaaacaatgttttccctggagtttgacatggttttggagagaagagagactagtgttttagaaaggttttcttgagagagtaaatattgtgaagatgaatcatttccttgatttcttagagtttataaagggaatatgggtgattttccctaagcttttgaaaagtatttaatgtggcctgttaatgaagggtcgctcaaccatcataatgtcatattttaataagatatagggctttcaaaatatc

SEQ ID NO: 142496 - DNA, 406 bp, Glycine max
  unsure (1)..(406): unsure at all n locations
ttaagtcaccgcggctgcagcttgatggattgatcaagtggaaatattgtcttcttgatgaggaagcttgcatgatatcggacagatcagaaggaggatgggtctcgtgattgaccctcgaagagaaagaggtttatgggagattggtattcatttgaagaacgaagagacctggttgatggtgagtgaatgagaggctcgttgaatggaggattataaacatggctactgagtgaatctggtaaaggtgatgaaagggatgtggctcaaagggaacataacgtgtgttggctggtatggaaggtgaagggggtctatttcgtaagtcagcgattgaactattatgaagaggacgtgattgttggtttgatctatangagtgatgtgaaatgtaaaatatctatta

SEQ ID NO: 142497 - DNA, 323 bp, Glycine max
ctgcttctatctgtggttatgttacatatttgggggttgatcacccatttatatgttttgttaggttttgagtattagaaaatgctttaagtccttagaacttggtagaatagctagaagtctgcatttcttggaattgtgtgcagtaatctaattagtgttgcatcttgtgcgtagtgcaacccgcttaaaatgagtttgttgaggaatcaaaaacaaaacttagaggggtaggctctttcatgtgaggaattattgtttgagtaatttgacggtgcacgaacattaaagtattttgaatagagataaactcctttagttac

SEQ ID NO: 142498 - DNA, 250 bp, Glycine max
gtctgatgactagtgccctaggcatcaacactagagtgaatgatcgactcattgatgctgttctagagttggggttgctttcttagaggatgcttgaagaccttaggtcttggaagctatggttgaaacttgccttattaacactagagtacgtgtgtctgataaggtgtagatctagttggtaaaaggaccgctatctaagcggtttgacaatggaatgtaaaggaaatctgctatgaaagtgctcttt

SEQ ID NO: 142499 - DNA, 448 bp, Glycine max
agcttaagcttcttcaactgcacaaggctcttaatatttaaagagtatccttgtggaaccttcacccgacgaagacactgacaaaaacttatcttctcctttttcgacaaagtatggcaggctgggggcaagtatattttcttcccattagaccttagatgcaactgtgatcgtatgcccatatcagttagatcttaacgggtattcaagccatccttcgtcttgccttgaattttaaggagcatcccaatcacattgtcacatacatttttctccacatgcataacatcaatacaatgtctaacttctagatcagaccagtacggaagatcagagaaaatggaccttttcttccatatgcaactcttacttttatccttcttttgggtctttccaaatatagtattcaggtgttgaacctgccaatatacatgctcaccagtcaacg

SEQ ID NO: 142500 - DNA, 432 bp, Glycine max
  unsure (1)..(432): unsure at all n locations
agctttgagaananatcaanagagacantaatttttatactcggatgtccgattgagacccataatacatcgagacgctcctaattgaaaactgaagctctgagcaaatttaaaggaaaataaattttcactcggatgtccgattgtgtcccgtagaatatcgagacgctcgtaattggaaacggaagctctgagaagaatcaaacgacaataacttttaactcggatgtctgatcgagccctgtaatatatcaagacgctcctaattgaaaactgaagctctgagcaaatttaaaggacaataaattttcactcggatgtccgattgagtcccgaattatatcgaaacgctcgtaatttaaaacaaaagctctgagctaattcaaacgacaataacttttaactcggatgtccgattgagctctataatat

SEQ ID NO: 142501 - DNA, 440 bp, Glycine max
  unsure (1)..(440): unsure at all n locations
agctntaaggactgaaaacagagaatctcgtgttaaaaaattcattattctttctgcanaaattcttttataaatccttgtaaagttaaaaaaaatctcaaaataccttgaacatattgagagaaaaggactaagcacttatttgtatattcgtctataagacatttctacactactacaatttatagatttaacatcgcaaggttaacatcggttattcacaaaaccgatgttaacaaaagcacggtgacatttttgtaaataagtagacttagttaacatcggttttggaaaaaccgatgttagtatctcgttaacatcagtttgggaaaaaccgatgttatcgagttgatgttaacatcgattttcttacctagttgatgttaacatcggttattttaaaaaaaatgatgtttttatcattatatattaaaaatctg

SEQ ID NO: 142502 - DNA, 279 bp, Glycine max
ttcttggggctgcacctctattatccatcgttgataagggtaagaccatctcgaaatacctccctcatactaggagccaaggactgactagctacatttaatgctcgcaatgagacgggagatgtcacatagcctctcaataccccacaatgaaaacgctgactttgaggggtcaagacatccatggtaaccaagacgagacgacatcttggcctatctttagaggaagtgaacatgaggtaagaggtgcccagtgtattgatctagtctacctccatg

SEQ ID NO: 142503 - DNA, 381 bp, Glycine max
  unsure (1)..(381): unsure at all n locations
atgaccgtagttttatagcaaactatgagagacctcgtgtgtgtctaggtttgtcccagttcaacactanaagctcctatataaactatctttttatagactctacaatactggattgttacatatgggctgggactacaactaataccctgcatatatatatcatgcgataaaaacctttactttcaaccgttagatgtaagaaaatatcatcaatcgtaaattattgatgatgtacgggtcgaatcaaacatatacagagcggctatctcgtgtagaatgaaaatgattaattcgatgaatcgtaacccaacaaatcattatcctcacatatggtttgactaaataccttactgaccttatcgcgcatccactaacact

SEQ ID NO: 142504 - DNA, 285 bp, Glycine max
cacaatatcctcttaccagcatgactagcagctatgagtgaccgtagcctacgcacagtatctctaccactgcggtctggtgtgaacctgcagccaatcttttacaaattatgtgaggccaattcatcgtccatcacagcccgggctaagaacatagcccgctcataagaatcatacaagatgtccagtgcagaatctacagcactttacaggatcatgacagaaccaatgactatatcctctgtggagaagagccctacatgaagagcagatatcttgacagat

SEQ ID NO: 142505 - DNA, 431 bp, Glycine max
  unsure (1)..(431): unsure at all n locations
agcttgaaggcanactggatgcgttggtcaacttggttacacatctggccttgaatcagaaatctgtacctgtcacaagggtttgtggttagtgctcctctgctgaccaccatacagacctttgcccttccatgtagcaacctggagcaattgagcatcctaaagcttatgttgcaaatatttgcaatataccgacataacctaagcagcaaaatcaaccacagtctagcaattatgaccttttcagcacagatacaaccctggatggaggaatcaccctaacctcagatggtccagccctcagaacaacaacaacagccatgttccttcttcaaaatgctgctggcccaagcagccatacattcttcaccaattcacaacagcacaacccagaaacaacaaagttgggccctcccaacctctcttaagac

SEQ ID NO: 142506 - DNA, 414 bp, Glycine max
  unsure (1)..(414): unsure at all n locations
agcttgaaggtttgtacatgatttaatctttatttaatcgtctntacctaaagcagtctttgtattcatttaaaatgcatgaagatagatcagtaagagaacaattggatttgtttaataaactgattctagatcttgaaaatatcgatgtcaccattgatgatgaggatcaaactttgctattgctgcgctctttgcctaagagttactcttatttcaaatagactttattgtttggaagagactctgtttctcttgatgaagtgcaggctgctctgaattcaaaggaattgaatgaaagaaaggaaaagaagtcctctacaagtggtgaagggctaacagcaagaggcaagaccttcgagaaagatagtaaatttgataagaaaaatcaatagccacaatatcagaagaatg

SEQ ID NO: 142507 - DNA, 426 bp, Glycine max
  unsure (1)..(426): unsure at all n locations
agctngagggtattcctcatgtaaaggagttgttgaagttgtaggatgagggtttggttcataagagcttaactccttatgaggcatcgaatccctatgataggtggtatgatgaatgtgttgagtggtacaaccctcttttgtaaaatcaccaatccatccaacatcatcatgattcacatacatagggagtctttaggaaggtttgtttttatttttagtttcaatacaaacttaggtgctcatatggtataccttatgtttgtcgtactttttggtaggaataatcaacatgaaaatacagaaaaaggtatgttttattgcattactttccttaatttttaaatagtgatcaagggtttcccacaaatcctaagagaataaaggtcattcctgagtggtcactccaccaagtataatgaaaat

SEQ ID NO: 142508 - DNA, 291 bp, Glycine max
ccggagaatgatatcttgaatgcgtctgcggcatcaagatcctgattgatgtggtgattcgagatgtgacgtgaggaccaactctgattcgagagaagatgaattcatgattcatgatgctgcttgccatgacttcggaggggatgtgttggaaaggatttatctttaacctcacatcgcacagattgtgcttacaagggatgcttctcgtatgtttctctgttacgcggagatttactctttggtaatcgataccaatgtcctgttatcgactccagtgcttaatttgat

SEQ ID NO: 142509 - DNA, 432 bp, Glycine max
agcttaacccttacgagtcatcttggtcaatgttatagctaactcggagaaaccttctatgaatctttggtaatatcctgttaaacccataaaactcctaatctcaaaaccagacttatgactctcccactcagggaaagcttttatcttataggggtctacaactatacccctttgagatatcacataccctaggaaactaactttctccaaccaaaactcacacttggacaacttagcataaagttatcgattcctaagggtctgcaacacaatcctcaagtgctcctcacgtccttaagggtgatagactctattcgtgtaatccataaacacaccatgagcattagtcacaccaaagggcatgactagatactcgtagtgaccataacagttcctaaaagtagtcttcaaaatatcctataacttcac

SEQ ID NO: 142510 - DNA, 459 bp, Glycine max
  unsure (1)..(459): unsure at all n locations
ctcgacccggatccttaagcaccgcggctgcagcttgaaaaaggccaaaatcccctcagaaatatgatttcaggcttaaataggtggctntgttcgtgctcgtgtgcttagcgcaattatgaaccgcttagcgcgcattagtgaatttcggcttagcgcggctnttctcactcaacgaatggactgaagcatggcgcgtagcgggatgacccttcactcaacaaacatgcacaactcatccttcttccagattcttcctctcgcttagccgaggattggtctcgctcagcggatggctcgctaagccaatagattgtcttggcgagagggtgaaaatcagcactttaaaacttgcctaattaacctgaaattgagagataaatgattattaaacaaacaaaatggaagtactaagtacttattacctatctttaacaaaaattaattacaacactacaa

SEQ ID NO: 142511 - DNA, 441 bp, Glycine max
  unsure (1)..(441): unsure at all n locations
agcttgccacccagctcgcccaggcgagcaatgttgcatcctccagaagcaacagccttatggaggaatcttctggagggccaaagtgggccttgttgctatttgcacccccatttttactaaatgcaccccctaccttttttggtgattctttttttcgtaaagttacggaaacttacgaatttcgtaacgatacttgttttctttccataatgttacggaaccttgcggattacataatcatccccttttttaacttacggaatgttacggaacctcactatttgtgcaacgatgcttccttttgatttccagtgtgtcacggaaccttacggattgtgcatcaatattntcttttgatttccggcacgtcacggaatttcacaaattgcctaatgatgggtgccaagcaccttataatgaccaaacacaagttgcatg

SEQ ID NO: 142512 - DNA, 414 bp, Glycine max
  unsure (1)..(414): unsure at all n locations
agctggaattctattgtgagcgctgntcatgaaaaggggggtattntcttttgtcaactttggcatgcggggagagtctccaactatggtacccgcctacctacaacactatacatacattcttgaaaattttatcaatttaatcttaagattcattaaatgaagagtgggatctagataattaaaaaaattactttttctctttctctntttttcttatctcactaatgtatatatattagtattattacaacagtgtctaaacataaaagcttgcataatcatatatttatattttgtgtgcgtatacaagtgtagaataccaaccagatggtaaagccccaatatcaagcacagacaagcgacttcgcaaggatatagccaacaataaagcaacagctgataaatacccac

SEQ ID NO: 142513 - DNA, 425 bp, Glycine max
agcttctagataaaactacatgaagctgcctctgtaaaaatacttcccagccttcgttaaccgttggatcatctcgaaattttgtttgcaacttcacaagacactttaacatgatttaaccgttgggatctttgagaaaatatctggagtgtgctagaagcttcctttcccgagagcatctcttatttaagcatttcagcctttgctttcttgtagcttaggaaaaatgtcatttcttcttctttctttcttccaaatccatttctaaagttccaagtactttctccatcacccacatccaccattagccaccacaaaccatcattgttctccattgaaaacccacaccgagaggaacccttcaaccaaagcagaatttccaacttggcttggcggttcggtagagaacgaacatcctaatctga

SEQ ID NO: 142514 - DNA, 245 bp, Glycine max
atctaaacatagcatcaatctcaactaagaacattagctgatctgaccgtgccggatctcctcataacctatacaggaagcgccaggagccttgctacacgaatacctatagtatttataagtccaagcctatagtcactcggaccttcagaaagcataccccccaatataatcatttcataaagtaccattgccccagctaaaatctccatactggtagtcatgaaagatcactgagcatcata

SEQ ID NO: 142515 - DNA, 441 bp, Glycine max
  unsure (1)..(441): unsure at all n locations
agctntaactgagaagataaagaatagatntggcgatgtaaaatataagccatgtgtcaatgttataagcaaggtcatttatggcatttcaacaccctattcccttattaagatagatagtagattagaataatttttagcttgattaaaagtgtctttaggaactatttaaaagccctcttttcttttccagtttttcaatttttttataactgcttttagcattaagaccctttatcttttttaataaataatttaccaaatttatcgattgaatcgaaatgagtatttcatacatcactagataattcttataacttattgaatctattttgctattcatctacctttttgaatttaaatttaacaaataaaatttttaaggagtatattnttaggtatttttctttgacaagaatatctttagagattnttcttaat

SEQ ID NO: 142516 - DNA, 234 bp, Glycine max
gatattcaatgctgatgcatatgctttggaacttgagtaatatggtcatgaggatcaattccttccgctcctaacgtttcacaatttgtcagaccatgtgatactgcttatgccattgcgaccctctggcttgaataacttcatatacaccgcctggtgacgagtgagtagacacgattacactatacatcactcaagccgtcttgtaacgcttactatatgcctaccaagaca

SEQ ID NO: 142517 - DNA, 435 bp, Glycine max
  unsure (1)..(435): unsure at all n locations
agcttgtagataacactgcggctgcagcattcaatgctgaccttttccaacctctgtcaccctggttgcccaaattcctttgatctctaagtacatcagccaatacatgttccatttccaaattccatgtaaaataacttcttgtttcctcatntatttttcctaaaacttttcttttgtctgtcattttttcattagatgactccattgaagttaatgtcacttattcaacctgcacataacaaatagtagatatgacctactntattcatttgactagtccactgcacaatcatagaaaatatttcaagcaaagtttttatgcaatagcgaagtacataaaactctatctncaatagaaaagtacaatagtaacaaagcacacanaagttgtcagcaatagcaatatacatttaaaaagaactatccctaagc

SEQ ID NO: 142518 - DNA, 198 bp, Glycine max
catgactgcacaccaaaagaccattcacatatgacgttcatatcatgaaggaccccatccaaaactctgccacatatgtccctctgacttgaccagtagcactatatgacccaccgtatgtcatttacgagtagcactcgtcacacatcaatgttatcatctgacaggttattatccaatgtcgaactgactccacct

SEQ ID NO: 142519 - DNA, 444 bp, Glycine max
  unsure (1)..(444): unsure at all n locations
agtcacctgcggcatgcaagctntgcactttatgctngagggccacgcactgctcgaatgaatgccccagagtgcctccgtgatacgcgcaggtcacgtctgggttgtaccacctcgggaaaggagactagtagattcttccgggggtcaccactgccaacaggttggcgattaaggatggaaacaagtccctgtatgacatcggaatcaaggaaaactctggaagcttctttactgaagggttcctccccagattagaacttgtgccagaattgaaatcaccggtgggacaaggccttgcaagagccggggcttgagcgggggctctttatggtggggcagatgtcccttgccggacgggtgccgagttggaaaggtttccagcacaagccgtaaagctcggatggtgttgggcatactaatgagtattgtgaggggttgatt

SEQ ID NO: 142520 - DNA, 191 bp, Glycine max
tgcctagttgacccttattacaacgtgaactatagccctttctgttgagtaagcctcctcatattattggacctcctactttactaggattgagccattatacaaagacactcaacactctgagcttgagctagagcggtgtcatgtagtgctcatgcatctgggccatgatgcagctcacaaccttggac

SEQ ID NO: 142521 - DNA, 457 bp, Glycine max
  unsure (1)..(457): unsure at all n locations
ttacagtcacctgctgcatgcaagctatgtgaanacaatctgtgctactggtaatctattactatatgagtaaaactctttggtaaaaggttctgtaaaaaattcatgtgctactcaatgttttgaaaaactttttagtacttatctagattgagtcttttcttgattcttgaatcttgaaatcaaatttcctcttgattcttgaagcgttcttgattcaatcttgaacttattctctcttgattcttgaagtgttcttgattcaatcctgaactcattctcttcggctttttgtcatcatctttggtatcatcaaaactccttgaatcaatcttgattcaacatcatgaagctcgcttctacaatgtaagctttctttgctttcttatctttgtcggcttttctgtcatattattccattcttttcttgaaactaaggtaatcaactctcagatgt

SEQ ID NO: 142522 - DNA, 180 bp, Glycine max
catcaactgcagctagaagcgattccgaccgaacggtcatgccatactcacttgggacatgaaaaggacgtgatacatactctgaactctctctatgacgtcttttagtcatcatctgcgggataatcatcgcgccttgtctctatgggagttcatattcttaatcgaatggatctacaa

SEQ ID NO: 142523 - DNA, 433 bp, Glycine max
  unsure (1)..(433): unsure at all n locations
agcttgcattggaattgctaaagccccactctatcattaggattgggtcctgccatctcaaacaaacaaatcaaacataacaagacaattatagttgttgtttgaatacctcacccactcaagtgtatcacacaattatggcttttctctaatgaaacactcttgccttttaccactctaattccccttgagttcttaggcaattcaagagattatggccacaacaaagaacaattcaccaatatgtgtaaggtaaggctggagagacaaggaaaaggttaaccaagaaaaaggctaacaatgtttttaggcacaattgaaggaaataaaattcagaatntaggaattcaagtaacaatccttcatacaaccaatatattaccttaaagagatttttttaagttcttcaagcatgaaccattcagcccagatt

SEQ ID NO: 142524 - DNA, 425 bp, Glycine max
  unsure (1)..(425): unsure at all n locations
agctntgaagttggacttggtccttcagttagagggtcatccatcatgtaagtagccccaaaaccatgaatggaccccttaggaggcaaaacagttttcatagcagttgggtgttcccccgttatgttgttatggaaatagaagtggagttgggtgagtttttcttccacgggttctgtggatggatactgttttgcaaacacttcactagttgcgggtaaggaacttgacatgataacaatgagatggaagccaaagaggagatacacaactgaagccatcttggtactacttttcggcatgttagccaatggttgcaaacaactatatatataggcagaagatataggtaccttgtggaaaactttattaaaaatgantttgttgtaattattttaagtaaaaatgggattaaataatccatg

SEQ ID NO: 142525 - DNA, 221 bp, Glycine max
ttcacgagccaggttctcctggatgaagtgtatgtattcatctggcatggtgtaggtgaactcttgctggggccacgatgatggatattgtataactaacacattcaatggatccaccgaggttcatcccgtgcattctatgatattgtatcctaacatgttgtccacgactgagttcacagtgtatctacattaaacactgttaagctacgcgagatgtc

SEQ ID NO: 142526 - DNA, 434 bp, Glycine max
  unsure (1)..(434): unsure at all n locations
tgcaagcttgcgaaaagcttgtctctggagctgtcccatcaactgccctaactctttcagactggtgattcctagtctcttgaccttgacttgatagaacctctttttaagcgaaggcgcctgactcgatcccatgttttacaaagtgaaacaaaacccaatgtgaatcaaaactccgacatctatcatgggtggaatggatgaatgcttgaagaaatgcatatgacacagatacantttatgaatacgggagcccgggaaattgtccccttcttagatacaacattttgggcagcatggcgcctgacgtatgtatttaagaaggcgaaatggaccctccgtcggtttgacaaagtgaggggaccaagacacaatccgtgcatgatgcatatgcggaaggcacaaaacggggatgtacatagtacgacaatatc

SEQ ID NO: 142527 - DNA, 379 bp, Glycine max
agcttgcatatcctattactgagatgaggcgcggctagtgtacctaaatccagctcatgccttgtgttaaaaccagcttgcccacggatgctactaataccttctactcctgaagaagagggccatccttggatagcctctacttacttatgcatcacgatgcccgacgcatttatgaaatcatagccactaaaatctatctcatgatcccacaacgtacacttatgtctatcgacatagatagccttgttactagcaactcgtataacatctcttagactgactcatcgagttgttgctcctactctcactacatcatatgacattttcacccataattctctaatgcactcccttccactgatgcgattcctacaca

SEQ ID NO: 142528 - DNA, 429 bp, Glycine max
  unsure (1)..(429): unsure at all n locations
agctttaagaagctntttacgaataagttgaatagtatcgtccctgttagtaatcatttcctcaataacttcaatgttcgaagacccggtgatgtattctggaaaagtgaatggtttacggtcaaatgtaacttcatacggtgtgcttcctattcctgtgttccatgaagtgttatgagaccattcaacctaaggcaagagcttcccccataggcttgatcggcgatgcacaaacgcttttaagtactgttcaattatctaattcaagacctctgtttgaccatcactctggggatggtatgcagagctcatccgcagttgtgttccacttgatccgaacaacttttgtcagaaccgactaatgaatagaaggtctctatccaagactaagattttgggaattccatgaatcttcacgacaatgctgat

SEQ ID NO: 142529 - DNA, 332 bp, Glycine max
gctgcgagctagcttaagatgctaggtataccttatatgctagcatacgagctgatagaaagcgatgaatcgatatattggacgaattgatacccaagaatgtatgtcattaacagatacttttttcatactttacaaacgtcctacgcgagtgctgcaactgcggctgcccttcctgctcatttatgcaccacttgctacagggagaactatcaactttcgcgtgagctgaagagcacagacaccttataaacaggttctattatttctgctgagactttatgccgaccattactctgtctgtggtatacatacatgatacgtatttatgt

SEQ ID NO: 142530 - DNA, 424 bp, Glycine max
  unsure (1)..(424): unsure at all n locations
tgcaagctgttgcanacatttgtggtcctttctttttgtaatccatatgttatattgttccataatatagttgcatattattgttattgaattggtccaagatatcaaagattgtactgcattcaggtgaggaaactgttacagttgctactgcttcgaaagacaggacattgaggctatggaaggtaaataaaagctgttgagatacatttccttatgctgtgcttatgcttactatgttatgttttcccatttgtgttaaagctcaatgctggggatcatgttaacaatcctatgagggttagggcttacaaaatcttgcgtggtcataagtcttctgtacagtgtgttgcagtgcatacttgctgatagatggtttgtattgcttttctattnataacttctacatttttgtctccttgat

SEQ ID NO: 142531 - DNA, 473 bp, Glycine max
  unsure (1)..(473): unsure at all n locations
atctgacccggatccttaagtcacctgcggcatgcaagcttcctcggggccattntctgcgaaggcaaacatttggaaagttagttttaccaagaaatgctactcttgaaacaaaaatggcatacaacctcctccaataaacacaaacatcaatgtaaatttagagcaaactcatgcacatacttccttacgaacattcactcgcacaagatattcttctaactaagaaaaaaatgcacccatgcacaatcaaggcaccttcgttacctagattatttatatgtacttccaaggtgtatttgctacctacatcacatgcacttccttggctaaatttacatacatgcatactcaaagcatcttggctaccaaaaattgcacacgtgcacattctggtatttctaatacctatgcatatacaaactntgcgatgaatcttggctatctacacaataaggtgctacatttcatgc

SEQ ID NO: 142532 - DNA, 446 bp, Glycine max
  unsure (1)..(446): unsure at all n locations
acctgcggcatgcaagctntaatctaatagagactggtgaagcaattattgtagatttttcacacagagattaggctcaagtttctctcattggaatgcttcaacttgtctttaagatgctcttccaacgtgtcttaaagctccaaagaataccgttgaagggagctccactcaactaacagacttttggagtaagtagacaaacttgacagctgccatgaaacgacagcttgcagaaccattctaaggtagacattctgaggaacctttatgatgagcattttgaagcattatcagaatagttatttctgaagttcaaatgatatgcctttatgaagtaacacaacttcatcaatcttaanacatcttcatagcataaatcattttgaagaagattgcttcatanatactgagtgaaggtacaattgttggtgtgttagtgttct

SEQ ID NO: 142533 - DNA, 433 bp, Glycine max
  unsure (1)..(433): unsure at all n locations
gcttaacaaccaaagctggacaaagacaagaatataaatggttgaggaattcatgatcacacaagaatatatagaaaacaagtgttgttgttgcttctgcatataaatcatcaaacttctattatttatactgctgccctgcctgtttttttcttcactttcattattttttaccttttttattattgtgccaaatactaaaatatttttttaatattttaattcacttcttagaacggnttcctttatactgatgcaagtgtctttttttttttttttggcgtttcctttttttaattattgactttattatccaattctctgacttaattcttagaataggaaataattattttattaaaatcaataaaatttattgtatttcttggtttcttaaaataacttttaaaggacaaaatatcctaattaaaaa

SEQ ID NO: 142534 - DNA, 279 bp, Glycine max
gagctgatcatataatggtggagcgaaaatttgtcgcgcaagattatacctcaaacatgtgtaactgctgactttgaatctcaaagatcacacattcattatacatgctgctgcggcggatgttgatgccctcgctttccccttttaaaagcgttattgtccactgaccaaagacaaaagtaaaaactttgagtacatgacttgttgacaaccgttacatagtaatggaacggagactcttttgtttttaggcaaatgatggcttgatatggacaactt

SEQ ID NO: 142535 - DNA, 415 bp, Glycine max
  unsure (1)..(415): unsure at all n locations
agctntgagggtgcgtagcccaccattctttatagtagagttctatattgtgtctgccatcacgattatcgtctccctttccatcattgggggtaccacctgggccgccagatccctccaccttttgggcgtgttctttgaaagatccgtccccctttttgcacatgttctgtagttgcatcctatccgaaaccatatcaaaattgtactgatattgcctaacaaaggcaaccattaggtccttccaagaatggactcgggaaggttccaagttagtgtaccaggtaacagctaccccagtaagactttcttggaaggaatgtatcagcaattcctcatcttttgtgtattcccccatcttctgacaatacatctttagatggttcttgggacaagtagtccccttgtacttgtc

SEQ ID NO: 142536 - DNA, 396 bp, Glycine max
gatatgttgtgttataaacatggtctgccagtagcacaaatatgaacgggtcatatactggaggatacacctgtgaacgccttacttctacaatctcatgcgtgttatctactagagtccctatataatgagcactatcacagcaattgcactcgaatcgaaccgacatcatcaatgggatgccggtgtactccaaatgcatacattcagacctcactccaatggaatcagaatcgatctgaccatcagttccccgtatgtgaacaccctaattaaaagaattggtgcgattgtttcagctaactctcagaaattgggatcctccataatgtagacaagacatgattcaatggttctcgtagcgacccatgctcatgtaaccgataatgaaccttg

SEQ ID NO: 142537 - DNA, 430 bp, Glycine max
  unsure (1)..(430): unsure at all n locations
agcttctatataagctgaaccgttttatcaataaacacaagttgagttttattcagaaaattagagtttatctcttttatcttagtgagagtgattctcctaagttcttgagtgattcaagaacaccctggctatatcaaaggactttcacaacctttgtgtgttgccctcgctggaaagagtgatcctttccttcctttcatcttcaaccttgttctttcaaaccaaaattccaaaaaattcacttttgcccaaaattatctcgtggtcataactcccgttttacgtgctcaaattaagtgattcttgagcctaaattgaatttcanaacgagatctttcacctcgttttgaaataacctcatttggagccctgtagctntagttattgccatntctatatttctgtccagcccaccacttaacctacg

SEQ ID NO: 142538 - DNA, 428 bp, Glycine max
gactctatagagctcacgcgtggcatgcatgctacacattttgctgaaccgtggtgattcttgactccatctgagtgtatcgcatatatactagttatatccctagtgtcctacctttcacgatccaaggtttgaatgccatcaaacctgtaacaccatcgtttatatgaagagatgaatcttctccatcgtgtgctgctctacctgcatggagagcacccttctttactcaagagccatcatgtgctctttgataaccaaaggatgctatgactgctgtgcctctaaagatggatctgttgattgctacatatggttcagcttcaatatggatgttctagagcctaaggagaatagcgactcgaggacggctacgccgatgagcattcactcgctatgcctcctgcatgctatatctatcgccatgt

SEQ ID NO: 142539 - DNA, 410 bp, Glycine max
agcttcttagtctcagatgatgcagctgagtttgtagctacctcatgcactcctctaatgactatggcatcatttctggcactaaactgctgggagttggaagccatcttctcaattaaatttttggcttcagcaggagtcatgtctccaagggctccaccactggcagcatctatcatacttctctccatattactgagtccttcataaaaatattggagaagaagctgctccgaaatctgatggtgagggcaactggcacatagttttttaaatcgctcccagtactcatacaggctctttccactgagttgtctaatacctgagatatctttcctgatggctatggtcctggaagtagggaaaattttttctaagaatactctttaaaggtcatcccagctcgtgat

SEQ ID NO: 142540 - DNA, 213 bp, Glycine max
atgactgatttattcgcgactctcggctgtgattgagtaccaattggatcaatcgattacttgtctctccttgagtgatgtcaggtgagcctcaacacttggctccattactcatggcattttatctattgcagagtccttgagatatatatcgatgctgagactgactctatattcgatggcgtaggaaatcggctcgattacttcattgaa

SEQ ID NO: 142541 - DNA, 431 bp, Glycine max
  unsure (1)..(431): unsure at all n locations
agcttgtagatcaaatgtccaatntcaaggataaaaaatccaatcctttgtccattgtaagattttgataaattcaaacctaaagtctaacccaatagataagtttaaggtttttttttttcaccataattttggtatgaaatatccatcaagatttattgataactaatttttattagaaaatctaactaattacctttaattggatctccttttttaacaatattttttccatctaaaaaaaattataatttgtgaccttatttagggaaactgattccagttatacttggacacgactagagctatagggttgacctaatagtcaaaagagaagagaaggaataagaagttatatagttgaattcttcctgctaataaaaactaacaaatgataacaaatatttgtctaataaaaaaaacttttagta

SEQ ID NO: 142542 - DNA, 271 bp, Glycine max
  unsure (1)..(271): unsure at all n locations
acacatggaagaatgcctaaccgctgctatgctcctttcatgataatcatgcctaaaaaagaaaactcacttagtgtgtgggagtatcgacttatatcactgataggtagcttttacaagatcattgcacaaatctcggctaagaggatcatcatgttaacggcaatgtggtggatataagacaatcatcctttataagacgaggaatggaaacgaatgccagatatacctgacacgactggtcctgatgggttgccctcatantcccatg

SEQ ID NO: 142543 - DNA, 425 bp, Glycine max
  unsure (1)..(425): unsure at all n locations
agctntggagtttccaagtgccaattcgttctcttctttagtccagtcttcttctggcttcaattcatcagtgggctttccttctgtgtccagcatcttgggatgttcccagcctttgatgacagctttccaggttctgctatccagtgatttgaggaaggccaccattcttgctttccagtattcatagttgcttccatcaagaattggtggtctgttcactggtcctccttctttctccatgttcatcagaatttatctccccagatctcactctgtgatttcgagtgtttgctctgataccaattgaaattctgataccaggggacagatgtcgtaccggatgtcacgacatcacgcttcaaaacatgcagattgtatgtgtccgtatgaacagattaaacaagtaaataacacaagagaat

SEQ ID NO: 142544 - DNA, 435 bp, Glycine max
  unsure (1)..(435): unsure at all n locations
agctntgngtaattgattacacatatctggttatcgattgtcagcgtttgtttctgaataatctaaagatgtaactcttcaaaaaggttttgactttttcaaatgggttttaagttttactaaaagttataactcttctgaatggccttcttgaccaaacatgaagagtctataaaagcaaggctttgttttgcattntctaatcaatctttctaacaacaatcttgaatactttacttttccaatcaatcctttacaagccttgactctctttgaacttcttcttcttctttgtaccaaaagctttctgaagttttctggttttctaaaccttgaaaacttgtgctattcatcttttcattctcttctccctctgccaaanagaattcgccaaggactaaccacctgaattctctctgtgactctcttctctct

SEQ ID NO: 142545 - DNA, 434 bp, Glycine max
  unsure (1)..(434): unsure at all n locations
agcttatcaatgtagcagttccagggaccatctacgaacgggcgatcaatacaaaaagaatactcaatccatgggaaaggaatgaaaatcacacactttgcctcaactctgctaaagcaattggatgtacagtggtcaacattggcactcaggacttcattgaaggaagggtatgtttgtaggccttctagtttccacccataaaagcagaattattgtgggcatgtacactgcagaaccacaaaatttaagatttaatttaatttataaatgaaatctggtcagatttgattatttctcgatcaaagtaattctcaatcaagttacccctttntttaaatgattccgaatgctggtaaagtatctttatagcatgctacatttttttacagtcaaagcctttctctanttcttttggcaatgctacacatgaa

SEQ ID NO: 142546 - DNA, 271 bp, Glycine max
atgatatgaccatcttggctgatggtcttggacacggcatcggtctatgatgattactctctacatgggaatggttacatcatcatgcgtatgctcttaactctgcccaaaaattgcgcgatcagctttgacgactactacgccggacataccggcatgattggtgtgcaagcccgttctgtgctcataaccgagcccaaacataacatctggccccattattgtcgcgatacacatgctgtgctatcatgtgatggattctatggaggag

SEQ ID NO: 142547 - DNA, 407 bp, Glycine max
  unsure (1)..(407): unsure at all n locations
ccggattaagcctatgacagnngccattcttttcacagncgagaggaacaacagaagggttttgtgtcacatgtgactcagcatggttggctagtaaaggaagccaacaatatttatacctacattgatgaacaaagacatgcacaaacactaattattaaagcacaacctttataaataaaaggcaacttacaacaaacgaaacatgagattgcagacactgacagatatagaagttcatttacatgcctatgaaaaacttggtaagagtacatctattagtacctaaaaatactgagcactaattaagtacatcaattantacctaataatactgagcactaattaatntactctttaaattataaaattattatctttatcattaatattgtcaagcgtctatt

SEQ ID NO: 142548 - DNA, 425 bp, Glycine max
  unsure (1)..(425): unsure at all n locations
agctngtgtttttataaaactggtacttcataaaaaaatgtatctccataaattttattttatatttaatatattttctaaaatattatattaaaaatttatatattattaatcaaagagatttgaacattaatcaaataagttaatttaaaaatataaaatttctttaatggaataaataagaaaaaaattgatttaaacaaaaaacttatttcaaataggtgaatgttattattgaaactttaaatattatttaatatttgaaaantaatttatcaattaatgtttaaacatgattcgagaattaatatttccttattatacttcattcttataatttttaattacatgaattaaaatatgagtttatccttattttataaaactgatataacttaatatatattacctaaaaagatatattg

SEQ ID NO: 142549 - DNA, 186 bp, Glycine max
attatgttacgagatattctattaaaattgtagttgtttatacatcagaagaaacattgatcttttagtgattaaaaaaattaattcctttatgggattccacttcttagtggaaaatcttgtgctatctcatataggtgatgttctatagatcattatcatgaatttattttgtagaacgaatat

SEQ ID NO: 142550 - DNA, 363 bp, Glycine max
ttaagcgactgagctgcaactgaattgtgacagagaacttttggttttacttctcttgctaacatctgacctgcaatgagctcctcgactctaaagtagaactctaaggaattctctacagtgatattgtagggccttcgaggatgatccttgccctatttccatatacgttggatgcgccgtcaatgtataaggtccaccactctagggggttgagttgtctcctgtgaattctgcctgaaatcaaccatgaattatgtcttcgtgaggtcgtgtggctcgtactaaatgtcaaacactaattgtttgaaaaccaagccaccatccttcctgagaattcatcctttctcaaacctgctcgat

SEQ ID NO: 142551 - DNA, 432 bp, Glycine max
  unsure (1)..(432): unsure at all n locations
ctcaagcttgctccgagtccagctntcatgcaaaatacaaaacctcttacattttatgccaaagtacccgcaaattcaaatctacccatattttgtatccatttacaacttcagtaggcttaatgatttggaattttctaagcattactattctttagttcttttatagagatgtattgtgtgtcggttcaaatccttatagtgcttatttgtgtgtgacttacaacagagttacctccttaaatatttcatccacgcaaacttttacaggagagtatacggatgtaccaacaaacactaatcggaaatatgagctgtccagttcattgattgattgaagcagaaatacagcaaaataattatattttcgtgcataactactcagatagaatcaatactatcctcaaaatagataccatactcttctcttac

SEQ ID NO: 142552 - DNA, 231 bp, Glycine max
tctagcgacagacttcttttatggtttttgggacaaggcatcccttttacttgactaagatcggcactttgaacttccgggggataacaatcatctggtactaagcgaagatctgtcatgtctgctaacgaataggccccaaattactcacggttctaatctttcctttagaaatcaacctactccttcttcatttgcgcggcggtccttcgtggacaaactattgtttta

SEQ ID NO: 142553 - DNA, 363 bp, Glycine max
gctggagaatagtgaacaaaagcttttttttatgaattgtgagcacttgcatggcaaatctatcgaggatatgcctcacgaaaattccatttaagaatctgaaatttaatgttaactaatatcaatgccttcataccaactccatgatgagctaagagtaagctctgatatttgttatacctctgctgaaaaatgaagcattctcaccggtgattttaatttcacgatcttatctataacaaaaaaaaaaacactgttttatttggttaaacaaaatatgttgtccaggagtttcaaatatatgatttattattttagaaaatcaagttatgattataaactgggtttgtgattccaatatgt

SEQ ID NO: 142554 - DNA, 448 bp, Glycine max
  unsure (1)..(448): unsure at all n locations
tctgagggtgccctattgtgtgcaactatatntttatattgcatttctcttagcaatcccccaaattaaggacttatcataacttgaaacccttatgctctcttagaaccctaaaacaaggtcaaggatatcaaaattatgctcaggggtttattcaaacaaatcattattacttttggcttaacataggtgcaagggataaattcatcacaggttggctttttggcagaatgactaaaataaaaagaaacatggccttgatcatatccaccttatgcaaataatctaacagtctctcataattaagttcacacagctcatcgggataagatatagttatcagcttaccagaccatgatctatgtncatcaagctaaccttntctctctttgtgattcatgttccactgattgactgactcttgcttccacgaaaccagtattttcac

SEQ ID NO: 142555 - DNA, 428 bp, Glycine max
  unsure (1)..(428): unsure at all n locations
tatcaaaggtagtcatatctctcaacaaacagcaactattcaatttattcntatagcgcacacgctgtttttattattcattacttttgtctctcatactctctctgttatttcctcttattcaaatatgcatcccattcaaattgacatttaagttgtctgcttgctttaatgtaaaaaataaataattaatggcatgcatggttatattttaaatcaacaacttatatagaaagaaaagtattaaaaaaacatgtattgtatctagttttcatctgcttcctttcaattagtcgtattgtctctctaattataaatgatcattagatatctgtaatggttttcatgtgaaatcttcggccatcaattatgttatggataaatatatactgatactgcatgatcanaatatagcatatctcagtggt

SEQ ID NO: 142556 - DNA, 310 bp, Glycine max
agtctaaccatcacaaacctcctacaggtagcttaccaaggagctgtggcaacctttcacatctccaagagcttcaactaagtgccaatcagctctcacgataaaccctcctgagatttcaaatcgcactcctttgaatcaaccggaacttgaaacaatgctctctctggcgagattcctgatcttatggccaacatgaaagacttaactctttcctttgcatggaagaataagttaacacgaaacattccagatagtctttctgagtgccaagaacttgaggcaattgatctctcattacacaacttga

SEQ ID NO: 142557 - DNA, 325 bp, Glycine max
taaacaaattaatctctctgatttgcaccacgggaacaacaaaatcttcgcaacctcatttcattagcacacatctaacttattgagaggaatctacatgtacataaaaactggctgccactatcagatagcaaagaataagcattcagccctttgaagctattagcaagtcctttcctgcaattcataaataatatgtcacaatgttatctctttatcatactaataatcaaggcattgttaacatgtgctatctatgtgttttaggctcctaataccatacttttaattttattcttttcttatgattgaatacaacctgcac

SEQ ID NO: 142558 - DNA, 461 bp, Glycine max
  unsure (1)..(461): unsure at all n locations
agcttccatcaagtggtatcagagcctattatcttctgtangtgctccttaaaccgccaattttcagctttaccttctcctccattggtttttcttcatttttctccatgtatctcctcacatgtcttgtgctgaattgtgtaaacatgaatttttagaatttccactcattaaacttgctatagaagctgatttgattttctatggttcaaattccttgttcttgttcttgaaccatgaatngtgttgagttaggttcctttgagttttgtattgcacttttttggctgaaacctaaaccatataatcttcacaaaaacatttaagtagaagaaaatctcaccaaactagagtgacatgttcacctatcgtagttctgtcatagaagtcatgttgagtcatgatactttgcacgtaatgatgtagctccatgtggagctcgcacgccttggatcttattc

SEQ ID NO: 142559 - DNA, 482 bp, Glycine max
ctaagcttagtgggacgacactcaagatgagcactgcgtaccacttttatacggtcgatcaaatgtaggtcatgaaccgtgtgatcgaatagtacctcagagccttcgttcaccaaaagccaacgacatggtgccgcttcttgatatgggctgcatggtcctacaatacctcctctcacacagccaccagaatgtctccctatgagatcaccttcgggaaaaagccacccacatttcctcattatttggcttgtaacgacccgccttgtctctacgatatcaccactctaataattggaaaattaaattctttttctttcttttatgacaactccattattctgcttatgaacatcatagtaaatatgaatctcacaaatatatatgttcccaaacacgcaccaatggttaaccgaatacatgaatattaatatagtaggttagtacacatcatacacataatgaagaataaatcagttcgt

SEQ ID NO: 142560 - DNA, 285 bp, Glycine max
  unsure (1)..(285): unsure at all n locations
aggaacaaaagagagggggaccacaaatgtagacaaagggacaaattgactttgagttcgcctcacaagactcncattcctcaaaattacaacaagcgttacacatgcttctatatatagactaggtagcttccttgagaagatttcataagaaaactcccttgagaagctcctttgagaaaacttccttgagaagctagagcttatctacacacacccatctaaaaactaagctcacctccttgagaagctagagcttaacttcacactcccatatagaaacta

SEQ ID NO: 142561 - DNA, 392 bp, Glycine max
  unsure (1)..(392): unsure at all n locations
tcggttatactttgtccagccttcgcaaaccattagatcttctcgacatttcggttgcaacttcacaagacacttgtccatgatctgaccgttgggatctgagaaaagatgtcaggagtatgctagaagcttccattccaaagagcatctcttatttaagcatatcagactttgctttcgtgtancttaagaaaaacgtaatttcttcttctttctttcttccaaagccatttctaaagtttcaagcactttctccatcacccacagccaccattagccaccacaaaccatcggtgttcttcacaccgagaggaacccttcaaccgaagtggaatcttccaactttggttgcggtttcgatagagagcgaaaccctaatctgaccctttgtt

SEQ ID NO: 142562 - DNA, 344 bp, Glycine max
  unsure (1)..(344): unsure at all n locations
agcttgagaatggagaatagcactatttctctcctattcatggctgcgaactcgtgggtggaggtcgcatgaacgaaaacgcactctatggggctccgaaaaaagattgagattggagaattgcactatactatcactactcatggctccgcaggcgtgggtggatgacccctgatccaaaattgcatttcatggggctccgaaaagatgattgaaaatggagaattgcactaagcaatccactacgcatggttccaactcttggttggaggacccctgaactcaaatctctttcatggggctccnaataatcattggcaatggacaattgctctatatcatct

SEQ ID NO: 142563 - DNA, 483 bp, Glycine max
ggaccttaaatcgacctgcagctccagctatgaagaaataacgttattatttctaacaagcatgactagatgatatcaacatattttgtacaaacactctttcaaaacaaaataaaatcaaactattggttaattaaaacaatacaaataggaatacaagacgcacataattttatattggttcgtctctatcattagactacatccaattcttgacaatgagagttttataggcttgaaaaaatacatgttatgtggagtttcaattattaaatgtttaattattgctacaacttgttggctatgcatatccttcttcttctcatcccacacaaaataattggtttagagcatagaagaaacccatgtatatgtgataggatattctatatgaactactcttacacatctctcttttttaatgtattcattattactaatactgttgaagtatgtcaacaagcctagcccaaaataatctca

SEQ ID NO: 142564 - DNA, 348 bp, Glycine max
gactagtcactagagctgctgaagaaggccctcaggttctcatgaacctcagagtatatttctaagcccatgggccaaggttgggtccaattatctttgtacatattagaatatgatgtcattatatttgatccttgtatttacggctccataatgtacgtaaggtaccctagaaatatagaatttttcagcccttgtatttagggcacctagactagttttgtattatgggtagttttgaatatcacatgcctaagtgaatatttatgtgtgtgttgcgaaataaattaattcattgtagaacccatccattaaatttagaggggagtgaactttgttatacactta

SEQ ID NO: 142565 - DNA, 322 bp, Glycine max
agctatataatattacgcaaacctcactttcttctatctcctatatacttaaactctattgctgacgcaacttatatgtacagacttcctttatttatagacaatgtgcggttacataataaatcacattcgagaataaaaattctcattgcacaataagtaggagagaatgtaatgcatggtcggagattttgaatgcaaaattaatattgtagaaggttttaagcgacaattttccgtagaaaaatgttaaaatgaggtacatttaatttcaagtggacttgtgtaagtcttaaattacaccgaacaagcgttgactata

SEQ ID NO: 142566 - DNA, 394 bp, Glycine max
  unsure (1)..(394): unsure at all n locations
gaacgctttggaacagtctttaaaaatctgaactgacatctctaactctggaatcgactacagaatgtatgtcatcgatcaccacacttaaaatacagattgcacatgtgatgagtcacgactctgcagaaaacacttgtgtcgctgactacaccattctgggagaagaggaccagtgaagaactttgcaatccaactgccaaaagtcacatctctccaaatgattctggatcggcatcataggcctatatataggtgacttgggacatgaaatttatgagacggtctctgaactcgaatgtgctaccctcgtaaaaaggataccatggctaacacttgtgtattcaatagtgaatctcgacngaacatcaatataataacccctctaaagaga

SEQ ID NO: 142567 - DNA, 434 bp, Glycine max
  unsure (1)..(434): unsure at all n locations
aatctaagcttgggatattttctntggcttaaatgtaattgtgggtctcttattttttaaaattcataaatttgttctctttagtttaaaataaagacgattacttctgatatttgtataaaattacagcttgtatttctttattttgaatagagacatttagtttttacttttataaaaggtatgattttgatccttccaaaatattaattagcgagagattaatttaatgagacctaaatttagtaatgtgacacaagattatttatttaatccatatcataatcgatgttaatatgttaatgctcaacacttttagtttgactaaatgactaaaatcccaaattttggcaaattggaggttaaatgtctctattttaaaataacatgactaaaactggtaattntggaaaatataaagactaatatctcta

SEQ ID NO: 142568 - DNA, 415 bp, Glycine max
tgatcgcacatcgtacgcttgtatgatatacgctccacttgctttgtaagattggagaccttcaatcctattacgcaacgtggcggattaaagtgggcaattaacttgaatggtcattattgacaatgcggaaggtaatctgcgctttactatccatgtacacacattattgcagctgatggttacgtgagcatgaactactaccaatatatagatgttgtatacacatatgagcacatttgagaagcttactccacacaatgtgggccgtcttggaatgaaacggatattactccttccaatgactcatggacacttatctctgacgcaactacaatgtgtgcgattggtctgccaaaatatctaggatactgaatgagatggattggggcaaccatctgagcaccagcaaaaa

SEQ ID NO: 142569 - DNA, 437 bp, Glycine max
tccaagtggaccaagttagagccaaccaccagcattgttatctctgtatcctaacactatgctgtgcctaacactatgttgttcctaacaatggtatcaattgaataataactacaattaatgactctaatttgttaggactaagctcacacatatttctttctcaaagttctattccagccatgacccaagagcatttcttttagacttttccaaaagctagtgccaaataattatccaactcgaatagcagttgttggactctaaagttcagttcaagcttaacaatcagtgtcatactattgatcaaaaccaagcaggtataaatatgcaatactagactcaaaatatgcaacaaacactacacactaatcagtgtcccgaaattgaaaaagatttttatccagcacaaacttcaaccttattcatgtatgggg

SEQ ID NO: 142570 - DNA, 410 bp, Glycine max
  unsure (1)..(410): unsure at all n locations
ccttcctgcgcttacagaaagcctatntgtaagnnctaaacttatatattcagcctttagtgagcgtctaatatattgtgtggagcctagtttgtaatgaatatttggatttgggtntggtaaaacaaaaaatataagctggctataacattttctctttttttaattttatagtcgactgaaattgaaccacttactctggatatttttgtaggtgggaatatcttccggagctgcagctgctgctgcttttcacattgcaaaaagaccagaaaatgccgggaagcttattgttgtaagttgtttgtatgcctaatatttccgtgaaagtatttataaatgtctgttgagaaaagtatcagaattactagtataatccgtatgcattatacccaacaaatgaactggtg

SEQ ID NO: 142571 - DNA, 374 bp, Glycine max
tgaaaacttgtgctattcattcttttcatctcttctccctttgccaaaaagaattcgccaaggactaaccgcctgaattctttatgtgtctctcttctcccttttccaaaagagcgaatgactaaccgcctgaattcttttgtgtctcccttctcccttgtcaaagaattcaaaatgacacagtctgagaatacttttgattcttccctttcccttatacaaaagtgttcaaaggactaaccacctgagaattcttttgtatccccattcacatagtatcataggtttacccgcctgagatctttgtcttaacacattggagggtacatcctttatggtacaagtagagggttcatctacttgggttgtgactg

SEQ ID NO: 142572 - DNA, 399 bp, Glycine max
  unsure (1)..(399): unsure at all n locations
ggtatagatncccaattgatggttatataggagtaaattttgtaaataaatcctattttatgggctatgctgtctctagaacatttccattggatttaatgatgaaatctgtgcattttcacgtgaacaagaggatgagttctgaattgcaaaaagttgcagttgggctaaacgcttattcaccgctaaacacagcttcagtgcgcttagcgcaaaggagaatctggcagagcatcagcatcaaagccgcaccctatgcgcgagatcaatgcgctaagcgcaacatgtgcctttagccaggctcaacgcaagactggcgctaagccccattccacttactcgagctaagcgcgagggtggcactaagcgcaacgttgcgtattctgagcctattaaagc

SEQ ID NO: 142573 - DNA, 391 bp, Glycine max
gcttcgatgttaatgtcacattatatatttgtcttaaccatatccaattatggagatcgtggtatggtattgtaagtgacattctcggccagagtggatttgattgggatggaactaagcacatgatcacagttgagaatgataatgcttggaataaatattgcactgtaagtattctttaatatgttgctatttgttattcaaagtagattggatttgactttttctttgttttccagtcgcataaatcggctaaaccgtttcgattcaaggtgcttcaaacctgggatgatatagtggatttgtgtgctaaagatagagtcaccggtcatggagctgctatggatgctgatgaagcgatgagtatagaaacacatgaagtgggattcat

SEQ ID NO: 142574 - DNA, 479 bp, Glycine max
  unsure (1)..(479): unsure at all n locations
tcatcttcttcaccacacaacanaaaccacaactctactcttccaccactctngccattactcttacctcttcctatctttcaggagcctgaaatggcggaagaagaacatcctagaaggacacttggagactatattgcacatgcagtgcaaaggcacttcatattggaatgtgttattttggctattaaaggttgtagtttcaatctataattacgattgctcccttcaattggtcttagcacatctctcaatttcatgtaaaaaaagctaatggaccggattgggtaatgctcaccactacttactaatatattcacacaaaaaaaccactaattattaatatttgaaaatgtgtaactatacattntcattcaatattgttacttttaggtacactaattagaatcagtaaaaaaaaaatacactagttacaaatatttattatcattgatctatacattaattatcatccatat

SEQ ID NO: 142575 - DNA, 307 bp, Glycine max
cgagacactcgaatcgaaacggaagctctgagcaaactaaacgcaataacattgaatcgatgttcgattggcccaaggatatcaagacctcgcatagagacagaagctgtagaaaatcaacgatgatacttgaactggaggtccgacgaccctatataatcgagagcccggatgaaacagagctgtaaaaaagcaaacgacaatacattaactcggatggcgatgagtccgtaataatcagacgcccgaatgaaactgacctctgagcaattccacgacgagcctttgaatcgagcccgtgggtcca

SEQ ID NO: 142576 - DNA, 392 bp, Glycine max
cactcttatccaaggctcatcttggaggtgaagcttcttcttttctggcttattccttaatggatgacgcctcctctcacctatatccctttgtcttccgctgcatctccatggtggaaaatcaccattaaaggaccccattgaagctcaaagatccagcctccatagaagctccacaagcaagcttccatcacttccgttttcaatttcgagcgtctccatatattacagggcacaatcggacatacgattcaaaagttattgtcgctggaatatgctcacagcatcagctttcaattactatcgtcatacatatatttcatggctcacatgacatccgagataaacactatcgccgctgaatatcatagacctcatgtttcacttacgac

SEQ ID NO: 142577 - DNA, 432 bp, Glycine max
  unsure (1)..(432): unsure at all n locations
agcttattctatgtgatttaccaatcactttatggtcacaaaattcaaggttatctagtttatcaccacctatcaaatttatgtttctcaagttcatgtaatcctctttcactaacatgacctaatctcaaatgctagaagtttgtttagtcaattaacgtattactagctaccaatgcatgtccaacaataagtggaaccttcaagaataaacaagtcattacttttattcttgttacccttagctatgattaaagatccatttgaaatcttaagaacaccatttaaaattctagttgaatatcctatatcatcaaacatgtttatggaaataagatntcttttgagttcttggatgtaccttacattnttcagtagatactctctattatcaaacatcttaaatctcacggttcaatgccttgtaccttg

SEQ ID NO: 142578 - DNA, 422 bp, Glycine max
  unsure (1)..(422): unsure at all n locations
cccggatcttaagtcacctgggctgcagcttgatgcaacattggagatgtttttgttcaacgagatgatgcgctctatgagaggttggatcaaatggagaatagagatcataatgaagaagaaaggaggagaacagggaatgatggtgttcctagacaaaaccgaattgatggtattaaactcaacattcctcccattaaaggaaagaatgatccggaggcctacttggagtgggagatgaaaatagagcatgttttctcatgcaacaactatgaggaggaccaaaaggtgaagcttgccgccacggaagtttccgactatgctcttgtgnggtggaacaagcttctaaaggagagagcaagaaatgagaaccaatggttgatacatggcggagatgacaagatcacaagaagcggttgtgc

SEQ ID NO: 142579 - DNA, 291 bp, Glycine max
cgacggagcacaacaagtgttccacatccacaatgcgcgcataaacccaccatcccctgttgcccaccttcaactgagctcacgtactcccacgtagcccatatcctcgtttctctcaacaccgggtccccatcaatccttccaagcttccccaacattaaagtaatacaacattcaaacagcacaaactatcacatgccagaaaacagagcaaaggctgaaaactctgccaaacaccaaccaaaatacagctttctcaattaagaccccagaacaattcctttgttcaat

SEQ ID NO: 142580 - DNA, 453 bp, Glycine max
  unsure (1)..(453): unsure at all n locations
agcttgttagagactcatcattatcacttatctacctccactccttatggcttacatagacccgggtatagggcctaccatctcaatgtgtgtgcaaagtgtaggtgtcatgtgtgtgtagaaaaattatttctaactatgaatgtgattgatagacaacacacaccatacacaacaacatagcaatgtgtgtgtacaaatatggacaaaacaaaagataaaagggaagagagaacataaataaagaagaagtcatgatgagatcttgcacactgattaatnggactaacactctataaatagtcccccagtggagttgccaactgtcgcaacctaccctccggcggnggcatgaatatgcctctcagtcgggccagggtgcgtctccattgaggaaaacacatgtcaatctatgcactcattgaatgtgtcatatgaagttctaacaacatt

SEQ ID NO: 142581 - DNA, 265 bp, Glycine max
ggaactctacaacgacctggggcatgcagcttttagattattctatgtattcgtggtggacacattgtgcttcgcggattattattctcatttaatttaatttttatacccccttttgacgagcttaagccattttatttaagttattcctcgcctaacctaacaacaaaaaaatattccaccgatcgtttgaattgcattatccattatcttcggctataataaatccgaccgttcggtcgtgccatatccacgttggatactt

SEQ ID NO: 142582 - DNA, 460 bp, Glycine max
  unsure (1)..(460): unsure at all n locations
agcttcctctgggccattcctgcgaaggctaacatttggttagttagtttacaagaaatataacaatcattacaaacaagggccaaacaacactcctcatggcacgagtgtcaacatgcactttataaaataatcatattggggtcgtgctattttatgacacatacgtatttgcacacataaaaattttgtgtgaagcattttacaacacctatccatgtacatattttttgacaaaccttttctatgctacatcctatatatatacacacattntatttttttttattttttatttttttttttggaaggcttcttttgttacctactcacaaatacacatattttgaaaaacactnttacgctacccatccaacactttgtaaggcacttcatgctatatatattcatattatgcaaggcattttattcaactttctgcagggcatttattcaacat

SEQ ID NO: 142583 - DNA, 468 bp, Glycine max
  unsure (1)..(468): unsure at all n locations
gcatgattntacattctcccctttctcaagcaaattcttaattcttcttgacatcatcaaaatcttcatgatttacacgttttggtcattctatcctactgggcaatggccaaaaaccggttgtttccgaaaaggtatactctgggacgctgacaacatctattatttgtttgtctcagcatgagcctagaagatatgctagttgtggcaatgcatgaggttgttgtatttgtgggtgcatcgtgtcggcaacttacatgactgagtgttaggaagtacatgtggcagtttattgtgccattagacttccaatgtgaatgcaactgcaactgcaactccgtagcattaggaaggttattaaaaaatttaaagaaaaatggtggaaagcatgtnttaccaccaatgtgaatacactactatgcaactgcaactgcaactccaatgtgaatacactacanatgctaattt

SEQ ID NO: 142584 - DNA, 164 bp, Glycine max
aacgcgcgcacgaggaaggccaccaattattggacgcgcaggcaagacttaaacaaacgccaaaccacaacgggccaacacagcgaccgcccgaccaaccacacgccccgaccacaacgcaactccaacgcaacaacactaacagaaagcaacaccaccacaac

SEQ ID NO: 142585 - DNA, 456 bp, Glycine max
tatcagacaaaaacatgacaaagaatgtttctaaccatctaatttttatgctattatacgaaatcatgtcctattctttataaagctttatgattatccaattgattcaagagtaaagcacaaccctgcacattcccatggtatcatggagtattatatgaagatctttatgatcatcattaataatcaaaatatggaggtcgttggtagctaattgaacaatgatatattaaaatcaaataaatatcttgtgacacaaatatactgaaagtgcactcaattcacaataataaagcaatcaaatgtacaatctatatgtacgagaaataagagaaagacacattatcattatagataatttttctaaagcatgaaacaagggaatataacatatcaacttcacaacaatctcacatcatgacatcaattagtctgtcacacacaatcatattcgcg

SEQ ID NO: 142586 - DNA, 373 bp, Glycine max
  unsure (1)..(373): unsure at all n locations
ctgcgcgccnaactagataagctactttttttttctatcacttacgaattgggcttgagtgagcaagatgtccctaagcgcaagcggcttcttaaaacttcaaactgtcatatgtggccacgctaagcgcaatctgtgcgctaaaagcaccatacgaaactgccaaatattattaggtaccctgccgtaaggagttaccattacactcttgttggcataaaagccattcattgcatctaccactaacttgcttcaattcccttcatttctgcacctttgctattctttgcgtgcatatacacaatgcaagtaagtttctctacttaacttttttcgttctaaatcttcaaccttaggatagataatttagtga

SEQ ID NO: 142587 - DNA, 383 bp, Glycine max
  unsure (1)..(383): unsure at all n locations
tatccgaccacctactaacaaggctttcattgagaaatattgtatgtttaggcaggtgcaaggccaggcaccacaatagccagaggagggccagtagtaggcagctacagacgcaccaccgccacctccagagtccacctctgctcacctacagaggttggaacgctgtatacgacatgtggctgaccagtaggcgcccaaccatatgggtcaggtacggctgaatgagagctttttttagtacaccctacattagcagagccaagatcccagcccttacgcgtgacttactcctgagcagttcgaagctgcagtggcatggcctggagattggcccgattntcagacaggggcagggcccgcatggacctcttgagatggag

SEQ ID NO: 142588 - DNA, 455 bp, Glycine max
  unsure (1)..(455): unsure at all n locations
agctntacatggagctacatcaattactattgtttatccttatacttcggcaaagaggaagaacacagtctttgttgcagcagctaggttgagtattgattttagcatccaaccatttgaatagatggtttatcaataccaaatgagagtactcttccttttatctcatcatagaaagatgaaaagaaaaatagacattgaatttaactataaacacatctcagctagtgactntattaatgaatctattaggtttgacaatatatgggatttaattgtagtttctattataaatttaggaaacatttggttgtttttgtaagaggtctgtttaacttaaggtagacggcaggagttataacacagctttatccactactagaaactatagaattaaatatcggtctcttaacaatatgagtatattaacatctggtttgcaaaaccaaatgtac

SEQ ID NO: 142589 - DNA, 393 bp, Glycine max
  unsure (1)..(393): unsure at all n locations
tatcattgtcggtgacaatggcatatattatgttttacctgcatatgaggtgcttccaagtgaatttttccacctagctggccgtaatttcccaaagtggtcttgcttctattcacttggtaaagtagttaatggtgactaataagtacctgataggtcctaggcctttggtagtggtcccagtatgttcattcctcacatggcgaaggaccaaggggagcttatactatgaaggttgttangaggagtgtgtggcacgtctgcatctcctggtaaagtcgagggcatctgccctgagtgttggctagtaatagctagctcgcaccacttcngtggctaaagagtgtcctctgatatggagaccacagaatccttcgtgaagttctgtcatga

SEQ ID NO: 142590 - DNA, 459 bp, Glycine max
  unsure (1)..(459): unsure at all n locations
tgacaaatgaaacgggaatcttccgtctattcatgaattatagtcctaattagaacttctgttatggcacatctattatatattattatatgtgatcaacatctaatgaagtgcatggacaacacacatcgcatgacaaatcaaatataaactactagctaagaaaaaagtgcacgtggttgatgcatacatatataactttttcacgagattaaagttaaaaaaggggcagagatcaaggcagacacagcttgagatcttaatttgtctctcctattttgccttttaatntctataggtagtcacttcaattttaatcaatgaatcgctagtcatatggtgcatgaattatttctaacgtacttcactgtgtgttagttatttgtcggtacattaattgattgacattgaaatgtgtcgcatatgacgctattactatacgcccagattaaaagagat

SEQ ID NO: 142591 - DNA, 423 bp, Glycine max
tgcaagctgtgcctcttcacgtctggaatttattgtttatatagatccaaagacccttaggtgctttgctgatggcttcttcccgttccaagcttcaattggaatcttgtcttttacagacttagtcggacatttgttgagtatgtaaatacgtagtgtagagtgcttcaccccagaatgtggtaagtagtcctttcttcttgagcattgatctagccattttcataactgcacgattctttctctcggacactccattttgttgaggagaatatgcgactgtaagttgtcactcaatgccttcatcctcacaaaatctttcacactcgcgagaggtgtactttatgccgcgatcacttcttagtacttttatccatttttcacttatgatttcagcaagggcctcgaaacttttgaatactc

SEQ ID NO: 142592 - DNA, 376 bp, Glycine max
  unsure (1)..(376): unsure at all n locations
tagtagcagntgggtccttagagacttgcctcagctccttatctccgagactgaggataattgcactgtgtgccttctgtagtagtgctttcttatccctattagccatcatcttttcgagtttggcttctccatcaagtgcttccatcaggccctgctgaacaagaatggctctcatcttcaatcgtcataacccaaaatcattttgccctgtgaatttttcaacctcatacttggccgagcccatttcttgaatcgaactcaaaatcgcttcacgttcaccacaccaattngtaatgccaagatncaaatttactccacacaagaatgagtttcttgtataaacaagaataagcaaaatacagaatcatggatg

SEQ ID NO: 142593 - DNA, 456 bp, Glycine max
  unsure (1)..(456): unsure at all n locations
gcttgtttggcagctcgatcatatttttttgaaactcaattttntaatgctctgaagaaggatgatcaagagatagttgttattgacatggaacctaaggttttcaaggtgtcacattcattaaaagttcctctttatctctatacctttgtagcttgtttttgttccacacaagatatatgctatttaattcagttaaaatccggcctatcgattggtcggttatctaatactaatcgtgttctatgttgagcacgctatacttcattttgtttatagagacactcttttggaagatgaagagctctctatgttggattctaattctttccttcgtcgtctgaatcatttatagcaaaattgttatctgctggagaaaagtatcgtttgccaacactaatgttgatgtgtgaatctatacttcgtaaaaactatctgtagattctgttgcctata

SEQ ID NO: 142594 - DNA, 257 bp, Glycine max
tatgcttagagacacagatattagaatagttacactatggtacttttataggaaatgcaatcttattccatggcttgagcaatacactactttactttcatagtgaatgtgaacttactctaagcaaaagacatagaacggttccctttccaacagaatgccaccatactttacttattgcacactgggtacagaggcagagagaatctcccattacttactgtgcactatgcatggttgatacgagcaccttccct

SEQ ID NO: 142595 - DNA, 387 bp, Glycine max
tccttgagtgacatttgtattgatgttgcatcgtgtgttgtatcttacactctatcttttcatatgtgcatcaagcatcatcatgtaggagtaagacaaaaggttctaccactagaaaaattcttcagtgtatcaaactctctattctaattgaatacaagctaattataatcgattacacaagtgtttatagcttgtacataagttttttgtattgattttatcgattactagcaaatcgtaatcaattacattgttcagctgagacaatgattgtgttttcaagagtctctactctaatcgattactctgttctataagtgttcccaaagtgatcaaaccactttaatcattcattaaaatttatcaatacatgtcttgaagttt

SEQ ID NO: 142596 - DNA, 144 bp, Glycine max
cggccgcaacatgccctagggcgggcaagcgaaggcgaggctcacgggtgcaccttccaaaggaggaaagatgcgcggagtccacaccaacaaggagcaggggaaaacgcccgaaaaacagaaggaaaccgggcgaaacgaaaa

SEQ ID NO: 142597 - DNA, 331 bp, Glycine max
  unsure (1)..(331): unsure at all n locations
agctnttgcatctcaattatcttgtgatcttgtgatgaagancctcnatccgggaaagagaattcaagttcatctccatttcccagcaaacccccaaagtcctaatttttcaccacccaaacagaacccagattctgggtacacctcttcgcacgagataaagagttttagagaaaaaactaaagatgggtctctttctgttattgcttcttcaccccgtctgcttctgctattgcttcttccccttacggttctcttgctaacagttgcagaaagagggagagagagcttatggttggcggcaactattgttgcgaagagggaggaccat

SEQ ID NO: 142598 - DNA, 459 bp, Glycine max
  unsure (1)..(459): unsure at all n locations
agcttactctataggtattaattttctcttcttgtaggatttagatgagaactaaattgtagaattgtgtagtatttgcttcatgagtcaaagcagntacattttatcactacttacatagaggaaaaatatgacaagaagagcatttgttatgaaaaatataaggagtgcatcataattgttgaactgtgaattgatagacgcacctaattttcccattttttttatcttgagaaattatatctttcgaaaaattaagcttagttacttacatcttatgattttttaaaatgaatgtaaaattaacctaaaatttttttatataagggtgaatataattcttaatctctgagcactcatacaattaacttggtaggaatatcttancgttaaagtcttctgtatgggttttttatttatcttgctgaactctaatatatttatatatagattacatcg

SEQ ID NO: 142599 - DNA, 305 bp, Glycine max
cagacagcaaaaaagaatgtctatacggatcaccactcgggtatctccgcccgtcagcgtgtctcacatgtcagtatgacagatctcgtgagcgcgaaagatgacgtaaatctccgcgtgttaacgggcttgacggccgcgattgacgaaaggcgcagaaaacgatgtcagtcttcccatgctatcaagcatttcgtcttacagacagcaaataagaatgttatacggataaccactcgggtatctccgtccgtcagcgtgtctcatatgtgagtatgacagatcttgtgagccgcggaaatgac

SEQ ID NO: 142600 - DNA, 337 bp, Glycine max
  unsure (1)..(337): unsure at all n locations
agctttagaanatttatatttttctttgtttattaaagaatcgattcctgtttccttttgatgagtctaatgctatctctccaagatattntagatgatattgcagaatctttagaacaaatgcacattcttggacaagattctaaaggaaaaggagaaggaagcaatgaagatcctccagcagaagtcaaagcaaataatgattttccaagagagtggaaaacttcaagagatcatccccttgacaacattattggtgacatctcnaaagggataacaactagacactctctcaaagatttatgcaataacatggcttttttgctatgagtgaacc

SEQ ID NO: 142601 - DNA, 218 bp, Glycine max
aaactctgaccctgtactctaaaatatctcctgataccacgcctacactctactgcggatagcacaccttcatgatgaaatcacaatgattcacaggtgtcttgatcataccaacgatgacaactaaagatgatgacaacagtgatgaccataaagctcaatggaagtaaagaacatccatctcaacagaatcaagaacaagtcaagagttctaagaa

SEQ ID NO: 142602 - DNA, 457 bp, Glycine max
  unsure (1)..(457): unsure at all n locations
gacctgcggcatgccaagctttgtccacaanaatcactaaaaaccgttttattgtttacgccttaaacggtcctctttgcttttatcggttaacatgcaccgctcgaaagcatgaaatcaacatgtaactttatcgcctttttaagaactacgtaggtctgatttcctcatcgcaattgaggatacgtaggagcaaaagccccgcttttgtcgaccactccaagagatcgttaatggtccaacgccttaacgtttctctcctttaaaaaaaaagatcgttgaatggtccaatgccttanacgacatttgttcagtcaaaatatatcttgcaaacaagataaaaacaacttaaccaacgttcagttctcgaagaactacgtagatctgatttccttaccacaattgacgaatacgtaggagcaagggaaacacccttgtcgaccacaaaagataaaaa

SEQ ID NO: 142603 - DNA, 458 bp, Glycine max
  unsure (1)..(458): unsure at all n locations
taaacannaattttaatgcatttctattaacaatatttgattctgaattcattttcttaaacaaaaatgacccacaatattatggaaaattctcatagtatgcgtggaaaattcccaatgatcgcttgcttactaattaatggaaaacaaagtatactcggctgttagatttctgtctccttcactaaaatgtgcattgactgcttaattgagattaccaccatgctcctgaaatgaaacaatacttacaaatgataaaatatataacggaaaacatattaagttntaattacataagctaaacatatatcttgttctatacaaacaaatctgtcaccagatactagttttataggatgtacaataaanaaatctatctgtataaaccaattagaaccagaaattcacataagagtaatggatcactaataananaaatcttattgcaataagcaaca

SEQ ID NO: 142604 - DNA, 382 bp, Glycine max
  unsure (1)..(382): unsure at all n locations
gcaagcttgtcccgtaagcctatccaacatcttggtcttcttaaggcaaaggaaaatggtctttcctaatggcttcgntaagcttgcggtaatctatgcatattctccaaccagtgatagtccttgtcgggattaggtctttcttttcattctgaatgactatcatgccccctttctttggtaccacctgaactgggcttacccaagcactttcagaaatggggtagataagcctagcctctanagcttgaacacctctcttcgcacctcttccttcattgatgggttgagccttctcttgggttgtctgactggtctgtaatcatcctccatcattatcttgtgcatacagtaggcagggctgattcctttgagatctgat

SEQ ID NO: 142605 - DNA, 460 bp, Glycine max
  unsure (1)..(460): unsure at all n locations
tgaatgaccattgtataagccataggggatgtgcaccatcttgtttacatggatggctntatttttgaatctttagcaagaaatgactaatgtagatatagccaaaaatggtaaaaattattttttgccaaaagtggtgaatcttatcttaaacgtctagattaatgtgttaactttctagattattgtactaatcttcctagggatatgtgtactcaaagtaaacctcatacaaattctactcacaaagagataaattacattgtgactcaatgcgcagtgtaattcttggatagatggaaatctagttcagacaatttttttttgtcaagcttcactaaactattcacgtacctatataagaaagaataaatctcaataatttatttactttaactctcgttcatttattagtgttggttttatagatcacttttccaaacattacaagataataaaa

SEQ ID NO: 142606 - DNA, 441 bp, Glycine max
  unsure (1)..(441): unsure at all n locations
caagcttgatgatatggtctacactgacttattgttttattttgtctaanaagaggataatctgatcatcatgctttgataaatgcaaaataaaaaataaactacggcacatgaaaagggtgagaatgagggaaaagcccatgctgcgactgccattcctatacagccaagtttctcaccaacccaataatgccattactcagccaataacatactttgtccttacccaccacccagttatccacaaaggccatccctaaatcaaccacaaagcctgtctaccgcactttcaatgacgaacaccacctttagcacaaaccagaaacaccaacctagatatgaattctgcaacgagaaagcctgtagaattcaccnccattccagtgtcctatgctgacttgctctcatatcacttgataatacagtggtagccataacccc

SEQ ID NO: 142607 - DNA, 214 bp, Glycine max
aacttcctattgacgaagccctcaccaatagaactatttggcctttttccacactctcgaaagggggacagagacatactcgatacaatgcccatattttcaaccctagaattgagctccagggagtaaacaagtgcgcctcctaagagggcatgagcgacacatcagatttcccttccgacctgaaagatatggaaattgcctaggcctgtac

SEQ ID NO: 142608 - DNA, 393 bp, Glycine max
  unsure (1)..(393): unsure at all n locations
cgacctgcaagcatgctcagcttaaccatgcgaggactactatcttttgttgtaattanganaagggcactgaggaatgaagatggaaccagcttgagacaagctatagacccatgtattgccacgccacattctcacgaagtgagcaatatgctaacatacatagagacaccagcaagaacggcccacctgattcataacatactccttactatatgtgttaagagagagagagagagaaaagaaattcaaatcatgcaaaactccattcgtgaatataacaaaaaacgatgaactcgacaggggagtattaacccgaaaaagaaacaacgggcacctacttacaaatgtaaagatacatgaccaatcacacattgcttttgaggctacaaa

SEQ ID NO: 142609 - DNA, 440 bp, Glycine max
  unsure (1)..(440): unsure at all n locations
gcttggaaggatgcttcaaggttgttttaaagagggacagaaagagagaggggggagcactaaattgaagganaaaatgggagagaagttgaactttgagttgtgtcttacaagactctcattcatcaaagttaccacaagtgttacacatgtttctatttatagactatgtagcttccttgagaagctttcttaagaaataatccttgagaagcttctttgagaaaacttccttgagaagctagagctttgctacacacacccctctaataactaagctcacctccttgagaagcttccttgaaaagattcctaaagaagctatagcttaactacacacacctctctaatagctaagctcacctccttgagatgagaagctagaacttagctacacaccccctataatagctaagctcacctccatgaccaaatacatg

SEQ ID NO: 142610 - DNA, 416 bp, Glycine max
tcgtgggaaaccagtggttggagggcaaggttggatgtataagttgatgtgtgggattcataatcatgaattgtgcaagtcattagttagacatccatacactgagcgattgactaaggatgaaaagacaattattgctgatatgatcatgatcaagtcaatggagaaaccaagaaacatcttgctaacattgaaggagcacaatgtcaatagttgtacaaccatcaaacaaatatacaatgcaagaagtgcataccattcttccattagaggaagtgatactgaaatgcaacatctaataaagcttcttgcacgagatcaatatatttattagcatatattaaaggatgaagacgtggtacgtgatatcttttggtgtcaccctgattcagtgaagttagtccatgcatgtaatt

SEQ ID NO: 142611 - DNA, 342 bp, Glycine max
agctggcttggttagacattatttttttgatttgggacttgtaagatttgattcgggcaagattggatgaaaggaagtgcgattttcgaaatctgcacttatgcacaattttgctgtcaaaataggggcagcagaaatttggctttgtgcagaaaaatgcttgtgtgtgattgactgtggaaagagtagtgcagaatgagttctggatgatcgctagtagatcccaacggtcaaaatgtatgcttatgtactagagacttccagtaaaatcttggagtcgatccaacggttaataaattggatcgaaggaattgttactgggatccttaagtgagataagct

SEQ ID NO: 142612 - DNA, 293 bp, Glycine max
tctcagggagctacctcatctataaatagatgtatgtgtcacacttgctggaactttgatgaatgagagtcttgtgagacataactcaaagttcaacttctctctctttttcttccttaaattgcgtgctcccccctctctctttctctccctctttcttttcctccattgaagcatcctctacaagctgcttatcccagactcatctgggtggtgaagctcattcttccaaggcttattccctagtggatggcgccgcctcttacctattctcctttgtctctcgctgcctc

SEQ ID NO: 142613 - DNA, 406 bp, Glycine max
  unsure (1)..(406): unsure at all n locations
agctgtttgatgcaaccatgaatgttattgtcttctagcaaaccagncatgacatgattgctcatgtgggtaaggctcgggctgccgtggaaaaactgagaaagttccttgtagctgattcattggaagaagtgaataggaagcttgacaagttctacatggtttcttatttgaggagcttacattcggactttgatcatgtgcgtgatcaagtacttgatggggaccggattccatcaatggattccctcatcactagacttctctgcgtgcctcagttattgaaggatgagaatcctactgatggagtggagacgtcagccatggttgcgtctcgagggagaggaagcggccgcaacagtagaggaggtcgtagtggaaggagtggacgtcctcattgcaccta

SEQ ID NO: 142614 - DNA, 101 bp, Glycine max
ccccgcatccatgaacatgacctgagagccaccagccaacatgggatgaggcacggcaagctctcggaggggaggacacaacggtacccacaggccctcac

SEQ ID NO: 142615 - DNA, 348 bp, Glycine max
  unsure (1)..(348): unsure at all n locations
gagtacgtccagcatgggtagtagatgcctcatgcatcatgcattgtacgtcgaatgcatcatgcaatacgtactangcttgtgtgtgtgtgagagtgtgtgagcgtgcttcgaaacataagaaaaatactataacagcgccgtgtcttcttctctctcagaaggcttgtcttggtccttgaatttcaagacgtaacatttggtgttttcattgagagcccaatggctatcttccatggatgtcatactagctccagccacttgaacccacaccacccgtcgaaataccctttcacatgccatcctttccacacaggtatacaccaacaaccatatgtgagcacctat

SEQ ID NO: 142616 - DNA, 381 bp, Glycine max
agcttgataacacgcagagactaacgttttcttttgcggccttcgtcaatcgcgggcgacaagcccgttgacacgcagagatttatgtcatcttccgcgcttacaagatctgtcatactgagttttgagtcacgctgacgggcggaaatacccgagtggttatccgtaaaactctttggtgtgtgttagacgaaaagcctggtagcacgcagagacttacgtcgtcttctgcgcccttcgtcaatcgcggccgacaagcccgttgacacgcggagaattacgtcatcttcatgctcacaagatctgtcatactgacttttgagtcacgctgacgggcggaaatacccgagtggttatcccgataaacattttgctgtctgt

SEQ ID NO: 142617 - DNA, 354 bp, Glycine max
ctctattcgttgaccacagagtggtacctggacatatgtcgcgggggtcaagagacctttgggacgtcaagtggggtgctactgcccagaaccaagcttgaccaatcccgacccaacccgggcataatcagtcagtgataacctgtgatgtacctaaacaggcgagctcctggcagtcaatagatataaggaacaaagaccacaaagcaaggaggcttgtggtggctggccaactgtgaattttgtgtgatatatgggttgtggcctctggtaatcgattacacagggtgggtaatcgattacaaggcttgaaaatgaagacaggaggctcagatggtctctggtaatccatta

SEQ ID NO: 142618 - DNA, 402 bp, Glycine max
aacgttcagaaacagctggtaatcgattatctatatatgtgtaatcgattacacagggcaaattttgaattcaaattttaatagctgttgtaaatcaatcttggccactggtaatcgattacatcctctggtaatcgattaccagagagtaaatttcttgtaaaagacttcttaacttaattttcttggccaaaccttttgctacttcaattggaattcccttcctatttaatataccctatctaagactctatagactgtcttgatcatctatcttgaatatctttaatttctttgtcttgaataaagctttgagacgcatgtgatcttttggcatcatcaacatatcggcttgatcctttgtctacacactataaccgttctggttatggacatggtggg

SEQ ID NO: 142619 - DNA, 462 bp, Glycine max
  unsure (1)..(462): unsure at all n locations
gaccttagatactaagctttcatcaaggctcatctnggtggtgaagctctntcttccatgtcttattccctagagganggcgcctcctctcacctctnttcctttgtcttccgctgcatctccatggtggaaaatcaccattaaaggacctcattgaagctcaaagatccagcctccatagataccccacaagcattnttccatcacttgcacctcctcatccttactaagccattgaagtttgtatggcctatgatgtggtttagtagctaaatttagctttgacactaatctagcactagccacattggtgcaactacctctatcaatgatcaccatgcacaccttgccattgattaaacatctaatgtgaaagatgtattctctttggctcctctcctcatgcttcaattgaccaccaagttaccgcctaatcatcaaatctcccttccgagtctcctc

SEQ ID NO: 142620 - DNA, 290 bp, Glycine max
  unsure (1)..(290): unsure at all n locations
cgcgtgaatcggacatccgtgtgaanatttatgaccatctgtttttcttattgagcttccgatggccagtttcgagcttctcgatatgtgattcgcctgaatcggacatcccggtgaaaagatataccagtcgaattactcgcgagcttccgttgttcagttttgagcgtgtcgattgtgatttgcctgaatcggacgttcgtgtgaaaagtcatgaccctttgatattctcaagaccttccggttgtcaacttcgagcctctcaacttatgatgcaccgatttggacat

SEQ ID NO: 142621 - DNA, 368 bp, Glycine max
  unsure (1)..(368): unsure at all n locations
ctctgctggcaccgtcactgactattatgtattttcttcctttaactntattactattatattattgtagaataataaaaatactaataacccattaatggcgtttacttttttttatccctttattataaacactgtcattcaaagntaataatagaaaacatgccttttgtttgcatttgcatttgcagttatcttcaaaaggatcaactcgggatgaaatagactatgaatttcttggaaatctgagtggtgatccatacatccttcacacaaacgtttncagccaatgcaagggggacagggaacaacattctatctatggtttgaccaactgctgatttcacactacttcatcatgttgaacc

SEQ ID NO: 142622 - DNA, 203 bp, Glycine max
ctcatcttaatccacatacagaaaattttttttttttaattcccacaacatccctcttcatttccacctatcttctctttttcccttattcaacatcctctgaaaattactaacatctcaattttttaaatttcaaggaggagttcatccatcctctttattaaccctcattcgtccctacataaaacaatgacctttaaatt

SEQ ID NO: 142623 - DNA, 303 bp, Glycine max
  unsure (1)..(303): unsure at all n locations
atgcgcccactcgacatcaccgtgacaagctctggtgattttcacatcgccagagctncccacgcagaagttcgagccgggcgcaatataagaagccaggctcggacttgcgcgtgacaagctctggccatatgaaactggcgagagcttccgcagtgaagctccgagcatatccatatgtgatgcgctctaatcgcacatgcccgggaaaaggtatgaccattcgaatcactcgagaacttccgtcgtcaactcccacctatcgaaagttataacccgaacacggcttcctgggaaaaccat

SEQ ID NO: 142624 - DNA, 455 bp, Glycine max
  unsure (1)..(455): unsure at all n locations
tacgcttaagagaaagtattagaaataatgtcatttgtgaaatttttccataganaatngagtgtcattaatcaaccccacttctagtgaccctctgaactacttcaattggtatcaaagctcaacccttgagagttgagcgcacttaatagtgtggtacgaaatgatcatgaagaagtgatgatgagcacatgcagtgaaatattcatccaaaaggaataacccatcaaactttgatgggaaggactactacaactagaaagaaaaaaatgaattacttcatgaatctcaaaatgtaaacatgtaggacattatctagtaaaatccatacattcctatcaagaaaaactctggagaagtcaaaaaatattgcagaagccaatggagctaacaaagaatgaaagtatcttctgactcaaagcaaatacttctatggtgcttgataaagtatttgt

SEQ ID NO: 142625 - DNA, 471 bp, Glycine max
  unsure (1)..(471): unsure at all n locations
actaagcttttnaatggaagaccctggaacttcctggaaagcattttaaatggttatgaaacaagaaaaaaaaaagatacttcgattatttgagagaaaagtggaaaacaataagagctgaaaagataaatcatattcacgtttgaaaaggcacctacaaccttcgtcaaacgcaggacagtttcctaatccaatatggcaaagaaaaagaactttaatagtcacaaatacagcacacaaaactatagcataaacagaagagcacatttatgaaaggatttcatatctacaaaaccttataatatggcaaactaacaaaagcttatcttaattgaagtgagagtgtgaaatggaatgtagaggctaatgtactcaattgcccccactttcatttctaccaatcatagtagtctaacatattgacatatcaccagcactcgagtagggcaatcaattaacataacttatata

SEQ ID NO: 142626 - DNA, 341 bp, Glycine max
tttcaccggcaagtagtcagattctgaagtgatcttctttatcactaaaggtgtctccatttgaggagtacttcccttaacactccgtttgagactgaaatgtttgctataaacttcctatcctacaaataaggacaagattacattatatggcgttagtggaggcttcttttcactgaaaatgtaattatctttcttgtttcattatggtcctcaatgtggagcataaaaacgagaatctcatgtgcgcacaggaataaatcatttatattttaaataaagaatcatacatgaaaagttcagagcgtagtggaaaatactctactagtccacaaaagttg

SEQ ID NO: 142627 - DNA, 332 bp, Glycine max
  unsure (1)..(332): unsure at all n locations
agcttagcttacaaaaggatccatctcgttttataatattcgctagactatatcggggatagcttcaatatttatataagcccgcctcacaatgaatgactgttaagaaaactggagaaacacttaaaaaaatttaaccataatcctctaatatttttcaaccaaagcctagtatttatatttatcacgcattttctaatgggggattgaacttatctacaagctattcaatataatgtttataaatatatgtcatggattggaattatatatcagtttaatggtatttaattgttgaagtctntattaaatattaggggaactggagggaa

SEQ ID NO: 142628 - DNA, 427 bp, Glycine max
agcttgttccatgcaactaatataatatttatagcaatgatgtctgtagaagtaaaatgaaggggtagaaactaaaaacttgggtaacatttataatttttgacgcagtgcagtacctttcaaactcaattcttatatgcctcaaatggcaaagttccttggatacttcaagatagaatttgactactatacgtttaagtggcgagtctttttacattccacatttatgcttcaaaagcatgatagatttgccttaacaatatgatatcaatacatttttatcgtacaactggaacccagtggacaatgatagttgaaaaaggcttgaaggcattctatctctggcacatcatgagaatttttatagatcacgtgttgtaccacgtccatttgattatgtatagaacttaaaaaaatccagcgtcga

SEQ ID NO: 142629 - DNA, 475 bp, Glycine max
  unsure (1)..(475): unsure at all n locations
taaaactcagctaacactgctaccattaccaaanaatggaaagctctataaactattattatgtcttcaataaaagaaaaaaaagaatttactcaaagcataaaaaaaaaaaaactatacacccccacaaggtaaagtgcaaaactttgctagttggagaaaaaaccactgcaaaggatttgcatggtcatccaccactgcagatggaattggtagtggtagttcaggaggtagatgacggtgaaatgaatcaactgcagcagtaacaccatcttcattctcgatcaactttgccacttccattgcccgtgattttacctgaagaatttgtatctcattactactaaaactttgtaagcacaagtacaatatcatagttataaatatccgaagccagtggtgaaaagtgaaaatgataactataaatnttacattgcatgtcctttattttattgttcatgagttccaacttaag

SEQ ID NO: 142630 - DNA, 457 bp, Glycine max
  unsure (1)..(457): unsure at all n locations
tcccccgcactctgacctgcctcggagatntatccttctgattatatagattagcataaaattccttgaccaaggccacgtcaatgtgaccgtcaagcttcctggtcaaggctttatgccaactccacctcttaagctcccgacggaactcatcatactctgaaatgtataaaatggcgttcctctccggggaaggatgttccaggagtgaacattttgtgcatagcgctcccaggcacccttggaaatgaatctcgtggtgtcatagggctccataggtctggaggcggtagctttcctcttcctataggccatcttcatcanaagaataatacgaattgaaaatatacaggttttatttcaactcaagacatatatataaaacataanaatagactgggcgcttagcatgccttatgaaaataacagcatatacttagcgcgacaacatagaaac

SEQ ID NO: 142631 - DNA, 259 bp, Glycine max
cctacggtaatactaactatgaaggagccaggttcattttatgtttcctgaaacaagtcgaactattctagctcaacacatgggagaacatcatgttgataacacttgtcatgacataggtaatgaggtgccctagctggttctacttcaaattctttttcctcccaaatatgaggaaaaaacggctaatataagaccaagcgaattggatacataattctcaggatttaaattgatgggccttaacaatgacatacac

SEQ ID NO: 142632 - DNA, 360 bp, Glycine max
ttagatccctcttgttggactaaactcagcttatatattttacgacagtctagactaatttagcctaagctttatcctcatatccctcttgttggactagacttatactaaccaacattattgtaacaacatatttaaaaccacaacttattccgtagatccctcatttaagactaagtttcaatcctgcttcatttaggttctaaggcaacagtacatttcccaatgcttaagacacctaaccaggcacacaaatggttgatcagaccaagagcatatagaatttaagcactgagagaagcattgaacacaataaatacaatcaattagatattaaagtaagtacatcaactggttctt

SEQ ID NO: 142633 - DNA, 366 bp, Glycine max
  unsure (1)..(366): unsure at all n locations
agcttcaaaagatcatccnctngacaacattattgttgatatctccaaaggggtaacaactagacattctcttaaagatntatgcaataatatggcttttgtatctatgattgaacctaaaaatataaaagaagccatagtagatgataactggatcattgccatgcaagaaaaactaaatcaatttgaaagaaacaatgtgtgggaacttgtagagaaacctaaaaattatcccatcataggaacaaaatgggtgtttagaaataagttagatgaacatggaataatcattagaaataaggctagaatagttgcaataggatataatcaagaagatnggtatagatatgaggaaacatatgcttc

SEQ ID NO: 142634 - DNA, 405 bp, Glycine max
  unsure (1)..(405): unsure at all n locations
ntacacaaccatgggcanaacgccatatggagatcatgttcaaaattttttcacataatagatntagggacaaagaggcaccattgaagatacaagcattgcaaaatgcatcaaagcagaggcataatactaaaacaactggccaagaaaggggctgctactagttaaacaaatagaatatataaattaaggtatgaaggcaccaagtgaaaatttatcaagtaccatgataattactaaggaataaaaacacaggctggctttaaataacacacacaatacttaaattaaaaatatgatggtgccacaagcaaattatgccaaacccaggagaccttaacctgatgtgcaactctcacnggaatatctcctcttttctcanacaaatattatcaaagagatatg

SEQ ID NO: 142635 - DNA, 412 bp, Glycine max
  unsure (1)..(412): unsure at all n locations
ntttctcattatccaaactccgtattagtaatagaagtatactaatagtagggatatcagtacacaccaaaacagtgtggttttttcttatactttttcagtggggaaatttttccaatctcttagtcagtaccaagtctttccaaatgacatgacatacgaaaaactaaagtattatatggcacaagtaacaagatagatccatgtatataaaacagttagtttaatttcagaagtacttgcaagttgttcatcttgttataaaatctaaaggcattataaaatcaccagctagctgcaccttcgagagccactagattattaatgctccatttcacttatctaacatgcttctgctaagtgctttagatatcttcaatgatgtaagctcatctatcaactgaatcaaatt

SEQ ID NO: 142636 - DNA, 338 bp, Glycine max
  unsure (1)..(338): unsure at all n locations
agcttggatgtggntcttgcattatntgctaagatatgttacttcacaaccaaatttgtgtattacatcagacaggggaaccaatttggtagcagttttacaatccgaacgcgttggctggaatggaccagatgtttcgtctgtgtattgcattcgccacattgcatcaaattgtaacaaacatttttaaaatgttgacttaataaaacaagtcatcaatatgggtatgtctcttcctatttcatgcatcatattcttgctttattacatgttaactaaatttgttactcattattttatctcttcgcacaaggtatgagatgaggaaaccatgattt

SEQ ID NO: 142637 - DNA, 438 bp, Glycine max
tgttgcttgtgtgctaagtgtgtgatgggatgtgtattgtgttcgatggaacctatacttatagtatttgagcgtgactattggtccttgtttgtaggggctattatagtttttgtagataattcctaacttgcagataatagctgggagcttacagataatgttagagataaacatttgcttgtagataaaaggtagaagataatcgtaccttgtagataatgtgtgaccttatagataattaattacctgccaatagataagatattcaaacacatttgaatattagtaggttagagataacctgtttgtttgggagcccaactgctaagggctaggtgttcgctctcttgtggcatggttgacgtggagggtggacatgtgtctttgagtgtcatgtaagatgtcctacgtatattttgggttctggatagtaca

SEQ ID NO: 142638 - DNA, 371 bp, Glycine max
  unsure (1)..(371): unsure at all n locations
tctcagctcatactgggaatacctctagttctacactcttgcaacctaangcacccacccagagggaagctccccaagttccaactccgaacacgactcgaccggccggtaattccaacacgacaaggaacttccctccgaggccatttccggaattcaccccactcccaatgacgtacgaagatcttctgccatccctcatcgccaatcatttggccgtggtaactcccggaagggtcctcgaaccccctttcccgaagtggtatgaccctaacgcaacttgcaagtaccatgggggtgttccggggcattccgtcgaaaatgcttggccctaaattacaagccaacatttaatggatgctggatggctg

SEQ ID NO: 142639 - DNA, 391 bp, Glycine max
tgccaaccagctcacccaggcgagctaggttgcttcctttataggttccgccttctgggggtgtagaagcaaagcttcatgatgaatcaaagatgattcacaggtgttttgatgataaaaatgatgataacaaaagatgatgacaaaggtgatgacaagaagctcaaagatcaatcaaagaacaactcaggtgaatcaaagatcaatcaagaacaattcaagagttcaagataagaatcaagaagaattcaagactcaagaagagagtctagagaccatgattaagattcaaggttcaaagatctcaagaatcaagatcaagattctagactcaagattccagaatgaagaaaagactcattcagataagtattaaaatgatttcaaaaca

SEQ ID NO: 142640 - DNA, 461 bp, Glycine max
  unsure (1)..(461): unsure at all n locations
agcttccccagaatacaaagtgaaaatattttcttaacaaacttcttgatatgtaaaggatttcttgaacacaaccacacatggttgttacgatcagaaaactgtgaaccacaggaaccttggatcctaataacacagcatctgttaactaccaggtttcctactccacctatttgcagatcttgatgaacttagattcgagtcacggggctctgagaacctatcatttctagttgcagatctaggtgaacttagatttgagtcacggggctccgagaacctatcatttctagttgcagatcttggtgaatntagatttgagtcatggggctctaagaacctatcatttctagttgcagatcccattgcatcattcctgccacctcctctcctgtctttatgtctctttgtgtgacgactangtctgtgcccacttgatnntctttcctgctcaacttcat

SEQ ID NO: 142641 - DNA, 324 bp, Glycine max
tactcattcaccctcaccctttgacaacataaaaaaaccaaagttcgtaaaaataaaatcatacataaataattttaaaacatacacaaagcataattcgaatatcataaaatttagatacatatcactagtcatatatcatcgaaataactaagttaaaaaacacatacttataaacaactaagagcaaataaatataattaccatgtttagtcataatcaaccaagtagaaaatagtaaagcacacccaatgttcagagaataatgtcatcaaacattaccaaatacaggggctaaaattaaatttatactactaatattat

SEQ ID NO: 142642 - DNA, 151 bp, Glycine max
ggggaaaaagaaaagacggggaaggaagaagggggaagagaggaagaagaggaagaggaacggaagagggaacaaaagaaagggaagaagaggggagggagaggaacaagaggggaagagaggagagaagaagaaagagaaaagggggagg

SEQ ID NO: 142643 - DNA, 350 bp, Glycine max
  unsure (1)..(350): unsure at all n locations
agcttaggcaactgaataacattgaagttatatatgaagaacgtgtaactcattaaactaaaacaatgcactcaatcaatctttttttgcctctcataaaaaagtagccattctaaccatcaggcaacccggtcattttaatcatagggacacatactgaagaaatncgaatttaatttgatataacaatattttaaattttaacgttacaaaaaaagtagcaaaagaaatcataaatgcgcaacaagaaaaaaaaactgctaaaaagagaataaagtgctgctacatctcatatacattatttcgttgtctacctatgctcatgctaccttatagccctgcctgccatc

SEQ ID NO: 142644 - DNA, 293 bp, Glycine max
actgcgagggatcacgacaccacgaatattccaagagagcacactcagaattgcactatccataccaaactaataaagggaggagcagatgagagccctactgagggccatgatcaaagtatctggaccatttccatggcctaaaacatggatcttctccataatggaggggagactcaacatgttcctacccaagatggagaacccgagtttagcattgggttgggaatgcttgtcactcttcttagggggtaggcctatgagtagcactacactccttgtccaaatatccc

SEQ ID NO: 142645 - DNA, 430 bp, Glycine max
  unsure (1)..(430): unsure at all n locations
tcaattaatctagaagaattataggataaatagtcatttttgttcttaaatgtgtaaagcactgacaaattcatcgtcgatagataaaaattcaaatcttagtcattgaaagtaaaaaaattatgacaaattcattcatccattaacttcagttagggagagaagataaagattaaattatattttggataaatagtcattttcattcctgtagagtgttagtaaattcgtccctcaatatgtcacgtaggctctttcatcaacggtatcagacgaanagttaacggataaatagatttgtcgcactttgttactttcggaaactagaaattatatttttatctttcagacatcagattattaatattttacatatttagaaaattaaatgactatttattccgatctatatgtcaatgacggaagtggt

SEQ ID NO: 142646 - DNA, 347 bp, Glycine max
ctacaaaccgtggggaagtaacaaagatccattgaccacttatcccttcagtaatcattacaaaacaaaagaaaagaaaagttatgactaacgtaataaattaaattgaaatttgccccaataagtaaaatatgagaaatgcctctcagacatcaattccatgtacgtaatggaaaggctttatatgttgaaggtggcattggttggcttttgcccactacgtactgctcatcaatgtcggccattggagatgtgatctcatgcgcgctaactacatcttgtaatatatgctgcattgagtctctgtattcctcgaatcgactgagtatttatgatagcaactaatg

SEQ ID NO: 142647 - DNA, 374 bp, Glycine max
  unsure (1)..(374): unsure at all n locations
agcttttcgaggcttctntgagaagctagagccttatctacccacacttctctattatctaaatgcacctcgncgaaaataattatggataaaataacacaacaaatatcatcaaacatcaaacataattactaatatatatatatatatattagggtgttacagactacatgcaaaataaaatatattatgggttggacctgaatcaagagagagaggccctgacggactctttggagtgtaggccttgagggtcatctggtatgagtgctcctttaagcctgtgccgatcccacatgggtagagtattttcgcataacagcgtgactttgactggtctccttatgattntacctagtgagagtgacctaaca

SEQ ID NO: 142648 - DNA, 425 bp, Glycine max
  unsure (1)..(425): unsure at all n locations
ggaccttagatactaagctttagctctgatatgagatcacccctcgacaagtcattctcttctgggacagccccataggaggaggagcctattgaaaagccactctgcagatatttgcagcaaatacaaaagaaaaaacataaccggaaagcgaagaactaggattctcaccatcaaatctatctcaaacttgcctactcgttaggcgttggcctttgaaaaagcaggcatcctaataaattgaatcacaacaaaatgggggcattgatcatatatcaaaataagtntattaaagaacaaagcaaaaaagctattattcattggtgctcacactctgtttgatngaagatgaatatggtttctcagcatccaaccttgagcatgatggcgattccttagtaggggaaaccgatccttcatatgct

SEQ ID NO: 142649 - DNA, 478 bp, Glycine max
cctcagagtcacctgcagcatgcaagcttcactgataacatcgcttgttgtacatttgttttataagccacctaagtaaggcattccttttattatttccttgagaatgaaatgtctgttgaaatataaacttgatttgggcctaaattaattattgagttccttggacttagttattctgggcttaagtaattatgggtcatgtctctagagaattcttgtagtgtttggagtgtctagatatttcttatagttgtaatattctctagaatactttgtggatttctagagttgagaactctctagaattagtgtgtctagagttctccttagagtagtataaatagagatgtaatcctacacatttgtatcaagcaaaaatacaaagttctctcctccataagaattctcttctatcagttttattcaagtctcaatatcctaacactttcctaacataaaaagcttatttcaacaa

SEQ ID NO: 142650 - DNA, 441 bp, Glycine max
ctaagctggggtagagttgtcttggcagtagaagcggcgttataattattctaactttgagaaagttattgaaacttggttactagctaagaactgaatgtaatcttagtggtagaaacaagccaatataattttgtgtcttatgtactcctacttataacttcgagtttgattgttcttttaaatctctattcattagacacatttgtttcatcgtctgattgtgcattttttttttttgaacatctggatctgtcttatgcaatgttctttattggttatataaaagaaaggctttaaaatttataaattacaatcaaggccttattgtgcatttgccttataatttaaaaacaataaatcaaattcaagcctattgttaaataaaaatcaaataccacaattatgaatccaaaacaatcatatgtcatttttcttatt

SEQ ID NO: 142651 - DNA, 318 bp, Glycine max
  unsure (1)..(318): unsure at all n locations
agctntgcagatttagtggttgttggcgttatgatcaaagtgggtctgagaagaggcaaatttgattatgctgctttgatgaataggaagcttggggcaaatggagagaataataaggagggagaaactcatgttgtgattgtcgttcctacatggtcaaatttcccactagctcaacaatcaatactcagccaatatttgtccttctcattatccaccaccctaccagccaagaacacacaatcatccataaaggccacccctaaatcagccacaaaacctgcctgctgcacatctgaggccaaacatcacccttaa

SEQ ID NO: 142652 - DNA, 449 bp, Glycine max
  unsure (1)..(449): unsure at all n locations
tcctctccaagcttcttatccaaggctcatcttggngtgttaagctccttcttctatggcttattccctagtggatggcgcctcctctcacctcttctcctttgtcttccgctgcatctccatggtggaaaatcaccattaaaggacctcattgaagctcaaagatccagcctccatagaagccctacaagcaagcttccatcattctgcttctctactttactcatttccttttatttagctaatacttcatttttttgctctttttcaactacttctttttcatcacttattttcataactcctgtcattgtcttgttctcactaaactcacttccatccttcaaaccaaccactatccccctcctagttgtaactgccttacactattctcttaggttgacctttgtagttgttgagaaggatccactttcatgctcagacattta

SEQ ID NO: 142653 - DNA, 112 bp, Glycine max
taatactagagtataagcggggagtaaaatctgctatgtaacaactaataaaagccatgaatatcatatgacaagacttacatgatgaacattaagatttccgagtcaaaat

SEQ ID NO: 142654 - DNA, 447 bp, Glycine max
  unsure (1)..(447): unsure at all n locations
tcagcttcgagatgaatgagtgcatcacatttttacatcagacaaaattncagtgaaattcatgataaaattaggtatgctttttctcttctctttttaactaatttaactgataggcccaactagttgattcagcccaccatcaatgcaagctaggcccaaatgagacaaactttgagggtcaagaacccttggattggatattccaggccgaacaatttttcagtctttatcaggttccttatgaccatccatgactgctttttacatgaaaggggagtctttgaactggtataaatggatgcaccacaaccaacagttaacagattggccatcttntcttagagtgttggaacagtgctttggaccttcatcttatgataaccaccgggcagagttagtaaactccggcatatggttcaccactagtatcaacactgtttgagt

SEQ ID NO: 142655 - DNA, 383 bp, Glycine max
  unsure (1)..(383): unsure at all n locations
gacactaaaaactcagcctagacaagggatccattaactccttaccttntccattggtagcggacggttcgagtgaaatgatgaggatgactactttaaagaatattttcaaggggtatatgtgtggaaatgtggaagttaatcctctccaatatgcagatgatactattgttattgcacaaatatctatccaatatgtggaggtcaataaaagtatgttgaggtgctctgaactagcctacgggcctaagttgaatttttccaaaagtatatgcaggacaattggagtggatgaccttgaggtggaaagcattggccggagtcttacatcgaaagagaatatattcctttatgatctaaggattctattggtccaatccaag

SEQ ID NO: 142656 - DNA, 419 bp, Glycine max
  unsure (1)..(419): unsure at all n locations
gaagctttaacctcatcatctctcacagtctttagatttgggagccaatccaatccttgtgttcggactctcagccacttatgatagccgccgatgatcccattactgcttcccctaagctctctgtcctttcttccccccccaaggtagtcatatctctcttaatggtttctagaggtattatccccttcgaagaacatattgcagcagtagggactactagcaacgatatattntcaaagaggaaaactctagatgagggttcactgtaatcaagcaagtcggagacctagcatgatcacagattcacctccactccttatgttcccatgaacccggggtatagggcccttttcactcacagtgtgtgcaaatagtgttggtgcttgtgtgcatcaaatgataaatatttacttcat

SEQ ID NO: 142657 - DNA, 333 bp, Glycine max
  unsure (1)..(333): unsure at all n locations
gcccgggagactaaggataagtggtttctatacgcgaagaagaagntccaagaactctggatttggtccgaccatgccctcctgatttccagctgggaaattggcgagtggaggaacgccccggcatttacgcaacgagcataatgtaaacctttacggttctaaaagctctatagttgggcctaagctttagaagtttcattttgctaaggctttgtgtcttttgtctttgaatttataatacaaagatctttcttcatctggtgctgggctctacccattctcatttaattggcatgttacttctttttcttgaacgggagatcctatgac

SEQ ID NO: 142658 - DNA, 329 bp, Glycine max
  unsure (1)..(329): unsure at all n locations
agcttctagcacactacagatatttcctcctagatcccaacggntaaatcatggtacattgtcttgtgaagttgaaaacccaatttagagaagatccaacgggtaacgaaggctggacagtgtttctaccgaggcagcttcatgtagttctctctagaagcttcattaagaggcttcctccagaagcttcattaagaggcttctagcacactacagacatcttctaaacgatcccaacggtcagatcatggaaaagttttttgtgaagctgcagaccacatttcgagaagatccaacggttaatgaaggctgggcagcgttttaccgag

SEQ ID NO: 142659 - DNA, 334 bp, Glycine max
aagacattattaaggaagccgtcatttcaatatggacctggactcttggagcttataggctatagcccacatagaatcatctattcatattcgacatcattttatgagatattccccttgagaaaatcattgaatttcacgcgtgttctccggatctcatcttttgcattttgcaagggataaaatattaatgactacacaacataacacagaaatcacttgtgcatccaaccatccacttttatcagttgcaggagataatatcacacccctattagagatgaaaaatatataagcatggaataaattgattatatggatgcataaacatact

SEQ ID NO: 142660 - DNA, 309 bp, Glycine max
ggagtcaaatgaggcattcagattcaatcagaaaataagtaaacttatgcaatcaatctacacaacaaaaagcgattatcaatacaacgtcgaatgtatccccagaagggcaacaaatacaagttgcgggagttctcggaatagtgaatttgagaggttgctcgccaatcaagagcataggaacgaaggaagatatcttggaaatagatacctccgatgagcgacttctactaaaatacatactgcaggtctctacgtgaggtgagaaagatagactccttactgaagagacatacaaagaagcatgag

SEQ ID NO: 142661 - DNA, 458 bp, Glycine max
taagcacctgcagctgcagctgatttgaaaatgaaattttggttttaattttatactaatgaagtgagggcgagccctggtgcaacggtaaagttgtgccttggagacttggtggtcatgggttccaatccggaaacagcctctttgcatatgcaagggtaagggtgcgtacaacatccctcccccataccttcgcatagcgaagagcctctgggcaatggggtacgacatttttttttagactaatgaagtaaatcacttaagccgctaactgcatacttctcttagttgatgtgttatctagtagcctattgtgaagatatagccaatcacgaaatgatctactaaaattctcatttaaaaacccttatcaccccctttgggtctgaataaattgggatgaaagacttctacccttggggacttactctcaaattcccttcccctatctcttatct

SEQ ID NO: 142662 - DNA, 399 bp, Glycine max
  unsure (1)..(399): unsure at all n locations
tctacttatgtggcagggcgggcttccttcaccttcttgtctctttcgcgaactatgaccattgttcttccttcccgcaatgcttcttttcatgtctgcctgagtgggcttatagcctaaaccatacttcccacgatttccttgagtatttatcaggctagctatgccaccgttgttttttcctaaacccatcccgggttcaaaaccgttccccaacataactcgggccatcattaccgctgcatcggacagacaaggttgcccaaagagggagtccacggaggaaatgctgaccacctcanaagactgganagcagtttctaacgattcttctgcggcttccacataaggcatggaggatgggcaagctaccaagatatcttcttcgctgacacgatg

SEQ ID NO: 142663 - DNA, 291 bp, Glycine max
tatccacatagcctttgaagttccattaagtgcttattgttcggcaagtattcgcaaatgtgtttcttaatgaaattgattttttaaaatttattctgatctaaaatcaatctccgaaacttatcacgtattcatgtctacgatgttctccattataaaatcaacttactcgtttatgaaaatatagtataaatttctttatcttacgaaaaaattgcctaaaactatttcaattccaaatacatcttttgactagaatctactattcactgaagaactaaacatatgaat

SEQ ID NO: 142664 - DNA, 181 bp, Glycine max
aatcttcgatttctctgtttgctgctaatcataatggatctgtcgcgtgtatgagcgagaagtccctgagaatactactctgctctttctgtcggatgcttcttgttctgcagtgacactgaatcatcgcagccaatggttgttactaatctattttcctgtgttgagatgctctcagata

SEQ ID NO: 142665 - DNA, 418 bp, Glycine max
tgagatgaggaagtgttgaagggtgaaacttcctgttttattttgaccacagagtggtacctggagatatgtcgcgggggtcaggagaccttgcggacgtcaggtggggtgctattgcccaaaaccaagcttgaccaatcccgacccaacccgggcatagtcggtcagtgagaacctgtgatgtacctaaacaggcgagctcctggcagtcaacagataaaaggaaaacaagaccacaaagcacggaggcttgtggtggctggccagctgtgaattttgtgtaatatgtggatggtggcctctggtaatcgattaccaacggtgggtaatcgattaaaggcttaaaattaggacaggacgctaagatggtctcttgtaatcgattaccaagggggtgtatcgataccacgcttgaaac

SEQ ID NO: 142666 - DNA, 384 bp, Glycine max
  unsure (1)..(384): unsure at all n locations
ttactagactagaaagtttctttgctctgtaaacaacttgcaaatgtccttcgttggataaaacataataacaacctactctaattatgccatgagattgaatgtttaaaatgagttgatcttaatatcctagagttggcaaggtgtcctgttgataacgagacaccatcctattgagtctaaggtctagcctagactcctaagataaatctgtttcaacatggcacttaacataagaaatcttggccattgacttaatcatgcaatacaacattggttataagttactatgacaatcatatattaagactaacctgatcgggattagataccttaggaaacacaacacaagtgtncttcctgattaataccaaaaatttgtat

SEQ ID NO: 142667 - DNA, 321 bp, Glycine max
  unsure (1)..(321): unsure at all n locations
agctgnntattctgcattngatgagtgtttaattgactcaatataagtgtgggaattataaataattgcacttcattataaagagtttctatctgtaatttaagtaacacgtttaatcataaagtaaatagtatatactccagaaaatggtggaaacaaaactaactatgattgacatggtaattactggacttatagatatactacagcataatgacaaaaggattaacacaacaattgattcgggggaaaataaagagataaattaacttgcgtgatagacatggatttatctctatctngaaagacatacaccttgat

SEQ ID NO: 142668 - DNA, 412 bp, Glycine max
  unsure (1)..(412): unsure at all n locations
actaagcttggatgatgcttgcagcatatgctttgaagatttttgttaaagtgatcctgccattgtaatatgcagctttttcgctttcctctttccttttgacatagaattataggcagggatggcttcatttgaaaaacatttgtttactccttttccttgtatttgttttcaggtcactaattgcaagcatgagttccacctgtagtgcattcttgaatggtacgttttaatattttttcatgtgtgtctttcacaaaacaaatatatttagtgttatttttacctctatgttgtcatagggtaatatanttttggttcaattggttcctgtgtattaaaatggcttctagctttcggcattctcatgaaaagttagatttgaagtctaataaatgcattggtttggaca

SEQ ID NO: 142669 - DNA, 390 bp, Glycine max
  unsure (1)..(390): unsure at all n locations
agctatataagcgcgggttcgggagacatatgtaagcgttcgcgatatgcgaagatgatattccgagtacattggatttggtacgaccctgccctcctgatttccagctgggaaattggcgagtggaggaacgccccggcatttacgcaacaagcataatgtaaacctttacagttntaaaagctctatagttgggcctaggctttagagttnttccttttgttaaggctttgtgtcttttaatttataatacaaggatctttcttcatctgttcctggtctctacccattctcattcatttgcatgtttacttctttntctgaaacggcagatccgatgacgagttccccgaaggtactaatacctgngacccgtctatcgacttcgag

SEQ ID NO: 142670 - DNA, 401 bp, Glycine max
  unsure (1)..(401): unsure at all n locations
gacctataaaactaagctatgttgcatcatttgaatagactccatcagcagcatatccaacaacaacaaaataattatgacctttcaagaaatagatacaatccaggttggaggaatcatccaaatctgagatggacaagtcctccacaacaacaacagcctgtccctccttttcagaatgctgctggtccaagcaagccatatgttcctcctccaatgcagcaacagcagcaacaatcacaacaaagacaacaagcaactgaggctcctcctcaaccttccttagaagagttagtgaggcaaatgaccatccagaatatgcaatttcaacaagagacaagagcctccattcagagtctgacanaccagatgggacagatggctactcagatgaatcaagc

SEQ ID NO: 142671 - DNA, 450 bp, Glycine max
  unsure (1)..(450): unsure at all n locations
gacactactagaaaactacgctttcccttatggcacttcctgtaccaccaagttcctattctaatcacttttaaaggcactcactgagtacaaagtgacttgcagcaatntggtgagtaattaagcactcgtctctgtatgtcaaattttgatatcatatagttatctaatatgaatttcttttgtatttcaagatgtgtcgagtaccatatacttatttatgaaaactgtaagattcactcatttgaacttggaagggacatagtgtagaatagtttataatcatcatagaaagaccgcaaaaattgaaaatggatagagggcttttgcacaaacatnagaattgcttcctaaaactcaaattatatttgaattcccatatgcaacttctaactttggtttattctagctttatttggaaataaagtacattaccactctaatatatta

SEQ ID NO: 142672 - DNA, 379 bp, Glycine max
  unsure (1)..(379): unsure at all n locations
tcaggaaatcgcaacagtggaagatattctctgatcaatccgtgtttgaaatttcttgaagaaattaagttgatggcactgagcttttgacttttgagggattacattactgtcgttactttgactagagtcaagaaaagatattatgcatgttgttgtcttacaccaaacaataataaatgtagtcttgaataaaatacactcaataaattatttataaacagataaagtttgggcttgagcctactatagccatgttgggctaanaacttgcctctagattaacaattataattntaaataacaacgaattctaaaatgaagaaagccaatatgaatcttatgaagggattaactgagtgttatgacttgcagcgtt

SEQ ID NO: 142673 - DNA, 358 bp, Glycine max
ccgagtagtcccaagagaattcacggtcataagccatcaaaagtctgaaaaagagtattgaaatgaacctaaacgggaaccgtcacatatggcgcacccgctgaaagccttggaacgagaaaccaagaaagcccgaaaggaaaaacacgtgccagcaaagttttgaggggctttatagggcagcaataagaagctcaagctcgaagagtgaaagaacatcacggtcaaagctgatctgaagacagctaaggctaccttagtcaaaaaattgcccacgtaacgaacgaagaaatgggcctatgagaggcaaagaacaattacgcactacacaagctaagatatcccaaatacaaaggac

SEQ ID NO: 142674 - DNA, 234 bp, Glycine max
tatatgaatggccagtcttattggcatctatgtcggcaatgagtaagctgaaaaaacttttgtgattgatgaatcaatggtaaacctagaaacattctgttgactctaaaggagcacaatgcaaatatttgtacgaccattaaacatatatacaatgccagaagtgcataccgttcttccataaaggaagtgtttgaatgcaacatctaatgaagcttcttgaacgggatcagt

SEQ ID NO: 142675 - DNA, 286 bp, Glycine max
tctcaagactggactaatacatttgctgcccaagtttcatggtcttgcacgtgacgatcctcataagcatcttaaagaattccatattgtctgttccaccatgaagccccttgatgtccaagaatatcatatctctctaaaggcttttccttattcttctgtagggagtggcgaaagattgcttgactaccttgctcccaggtccattaccaactgggatgaccttaagagggtgttcttggaaaaattcttccctgcatctaagaccactaccatcaaaaaagac

SEQ ID NO: 142676 - DNA, 232 bp, Glycine max
tatccacatagtcttgctatacgtacagactactgatcaatgctagctgggttaccaggttaaccaaggcatctagtttaccctcaagcttattatattcagctgatgaagatcaattagtgactacttcatgcactcctttaaagacaatagccattatatttgcactaaactggtgggagttggaacccattctctcaataaaatttctacctttagcagaggtaatgtc

SEQ ID NO: 142677 - DNA, 439 bp, Glycine max
  unsure (1)..(439): unsure at all n locations
gcacggctgcactaccactaagccgatgtttttattatgataaacgatntcaccgatttgtgtgaatctcgttaatcactgtaaaaacaaaatctaaccgatcgttcacactgtaacctcggttaaaccaaaaaaaagcaaaataataataaaataatcaaaatatattgaacaataataataaaataatcaaaatatctttgaataaaataatcaaaaaaatcaatcggacgtttttctttgaaagtttccttggataaattgactaataatcaaagtgaaactaaggctaaaatcaactcacaaatcaagctttgtgccgcaaaatcactaaaaaccattttaaggtccaacaccttaaacggccctttttgcttttatcgggtaacatagaccgttcaaaagcatgaaatcaacatgtaactttaccgcttttgca

SEQ ID NO: 142678 - DNA, 234 bp, Glycine max
  unsure (1)..(234): unsure at all n locations
ttacacggcgtggttcaaactgtagctgattctatcttgtatgcgtttgctgccctgcatcatagtttaacacgccgttcagtctctgcgatggctgcgtcacctctagatgctgcaacctgatgtgatggttcgncttatagcactgaaaactagacctaaatcttttaatgtttctggaagagcctgtggagaacctgactggagcgtattatgtgacagactcccttggat

SEQ ID NO: 142679 - DNA, 137 bp, Glycine max
  unsure (1)..(137): unsure at all n locations
aacaaatccctcttattactagctattntgaattctttagttcctgaatgtacaaccttcaaatttttgctcgttcccctctttgagaatgacgaggatcttataggacttcatccagctaatgttggtcgccatat

SEQ ID NO: 142680 - DNA, 238 bp, Glycine max
atgacttgtatagaagagattaggatttaagggacaaaatgtcaagaactattattttcaaaacaattacccatttcttgaacatatcctataatacaaagaaagacatgctaagtcgtacttgcacactgaatggaccctgaatgttaaactaataatctgacgaaactatcaacattaactaatttacacaactaacgaattaacaaaaccgacaaactagcataaccaagaacac

SEQ ID NO: 142681 - DNA, 397 bp, Glycine max
ttatcatagtaataagtgaaacaaacaaagcaaaacatacccatgaagaattcaaaccagtaattattctctattgcatccttgaactgtttcacctttgcttcatcgagatctatctggcaaaagacagtcttatccacatttcctgaaaacaatagcatgcattaaagccattttgccatccaacagctcttctattaaatacatagtacgaaagaaaccttcatactttggaacttaatttcaagttggctatcgatgagctcattgccacccaggacctcaccaagaccaccccatttgtgtgcagcactagcactactagatggatgacaaaatgggaggctgtaatagttgtatgtttcttgtggatggttataaggaccaactttgttca

SEQ ID NO: 142682 - DNA, 394 bp, Glycine max
acttatgatactcataagtggaacatacaaagcttgacgtacccatgaagaattcaaacccgggattattctctattgcatccttgaactggctcacctgagcttcatcgagatctatctggcaaaagacagacttatccacatttcctgatagctatagcatgcattaaagccattttgccatccaacagctcttctatgaaatacatatgacgaaagacaccttcatactttggaacttaatttcaagttggctatcgatgagctcattgccacccaggacctcaccaagaccaccccatttgtgtgcagcgctagcactactagatggatgacagaatgggaggctgcaataattggatgtttcttgtggattgtataaggaccaactttg

SEQ ID NO: 142683 - DNA, 439 bp, Glycine max
  unsure (1)..(439): unsure at all n locations
gatcttaagcaccgcggctgcagctgcaattcacccctgttggagtntttgttgggttacaattccacatgttaaaccttttcaaaacatctaaaatatacttcttttggtgcatgaaaattccctgttcactgtgtgcaaactccaatcctagaaagtatgataatgttcccaggtctatcatttcaaattccttcttcaaattctgttttagtgagtcaatcccaattgagctactcctagtaagtgatagatcatccacatatagacaagtgatagatcaatcccaattgagctactcctagaaagtatgataatgttcccgctccttcagcttgcataactctattgtctgcaaaccttacattactcttctgcattgcatcaaaattgacaagccaatccctatgtccagtcatttggtttgagcttccaaatc

SEQ ID NO: 142684 - DNA, 385 bp, Glycine max
gcgtacatacatacgtacacatgtggaccatgctgttcttaaccacactcgatcgttaagcgctgaaaacgtctatatataacagctctacgggcatgataattaaatgtttatacgtgatctctctccgctccttcaaagtttgacattgctttcacctctgctatgtatgcttgatccatactcaatcggaatcccgactcttctaaacagaaccacctaatgcttgtgacctaacgtcccgactatgcattaagaatgacatctacctattgagcaacccactcaatgtatactgagtgcctctgtacttactaaagcaacaatgctcatttgcgaacgatactgtacgccaatagactggcttgcatagactctctcacct

SEQ ID NO: 142685 - DNA, 450 bp, Glycine max
ccggatccttaagcaccgcggctgcagcttccttggcttgaagtattgaaggtctcttgatcactatggatgacaaactctttgggtaataggtaatgctgccaagtttgtaaagccctaaccaaagcatacaattccttatcataagttgaatagttaagggcagcggctcctaacttttcactaaaataagctatcggatgtccctcttgcaataaaacagccccaatgcccacatttgacgcatcacactcaatttcaaatgattttgcaaaattaggcatagcaagaatgggtgcattatttaacctatgtttgacggcagcaaaagcctcttcttgatctttaccccatatgatacccacattctttttaacaacttcagttagacgaccagcaatgaactaaatcctaaacaatctctatagaactgctaacccatgaatccct

SEQ ID NO: 142686 - DNA, 276 bp, Glycine max
ctttccatggccgtaatagatgaataattcttgagatcgctcttgtgaacaccattggggtaactctgattgcatttcattttgtcagcgcctatcgcaaggactctttgccttcttgtaagtgaattgccatatggggaattgtgcttgctgattggtagccttccctttcgaattcgactctagaatacaagagcccccctgcttacaagctatgcgactcacatactctccaatgattttgacaaaccaagcatagaacaaccgccgacattg

SEQ ID NO: 142687 - DNA, 447 bp, Glycine max
atccttaagcaccgccgctgcagctgtattatttgacatggtcctttttatctttgacaataggaactttttagagaccttaatagagcattatttagacacaatgttaattctgattgaaaaacttggttgtttgcctttgtttttgtatatggtatgtaacatcctaaaattttataatatttattgttattagttttagtataaaaattattagtataagagtttatctaaattaaaatgattatgatgatatatatatatatatatatatatatatatatatatatatatatatatatatattatcatgattattgggtgtaggtttttttctcaaactacaccttttctctcctatacttttccaaattacacatgtttttggaaaaaatttctatatacaccatcttcttgctacattgggaaaccccaaccacgaacctt

SEQ ID NO: 142688 - DNA, 253 bp, Glycine max
actgatgaagacgccatcatatcttgaatgttgcacattggtgagtgaaactctacaacctgtgatgtgagtatattgtttggattaagagagtacgctcccatgaaattatattctttacagatatacgaaggtgatcagaattcattagtgtagcattctgtgttggaaagaatgattactatgaactcataatgaagtatggatgtcagaatcatcgtttctaacatgtcaaaatattttaatcgattac

SEQ ID NO: 142689 - DNA, 407 bp, Glycine max
  unsure (1)..(407): unsure at all n locations
gggagagaaagagagaggggggagcacgaaattgaaggaagaaaaacggagagaattngaactttgaggtgtgtctcacaagactctcattcatcaaagttacaacaagtgttacacatgcttctatttatagactaggtagcttccttgagaagctttcttgaaaaaacttccttgagaagcttctttgagaaaacttccttgagaagctagagcttagctacacacacccctctcataactaagcttatctccttgagaagcttccttaagaagattcctaaagaagctagagcttagctacacatacctctttaatagctaagctcacctccttgagatgagaagctagagcttatctacacaccctctatagtagctaagctcaccctcatgacaaaatacat

SEQ ID NO: 142690 - DNA, 174 bp, Glycine max
ggcgcgactgtaagggaaaatttttttatagggcccaaaagggggggacacaacgggggaagaacctgagactcagtgtgtgcttcccaagcctccttgcctaaccacccaccagtgcctatcttcgtgaaacaggtacccccttcagcgactctgcaacattcatgaagccca

SEQ ID NO: 142691 - DNA, 443 bp, Glycine max
  unsure (1)..(443): unsure at all n locations
agctnggaaggaaacaccactgtcgttgtgttttatggatccatttggaaaaataaaacctaatgtggagttcacaactgtctgactgcttgtctctcccaagaatgccatagttttttgtaagacttgggttgatactgaaacttgtgctttcttacaaggttaggttgtgccatatatatagatgagttttaatatcaatgctgcattttttaaagattgaanatacgcatgcacatgctttctgtatgtgttgtcaactacacgaatgacatgacatgctttagcttgcatcagatctgcatgtgtagtcatgctgtgcagggtcctttcatgcgctttatgttaatgcagacaacaatttatcatacacgggtttccacaatgtgtaatcaagtcagaccaccatatatcatacatgcttttttaagaataaagtaata

SEQ ID NO: 142692 - DNA, 411 bp, Glycine max
ctacgcgccgtatgcggctaggaagaggagcacaggaatcattcaatgggccctgcggaacgatggacctaaaggcaaattacgccgcggtgactggtctgacaatcaaaaatgccttttttatgatgagtgagacctacactaacgaaaagttgtgccacacttcagaggtttgtcctgtaccatctatactgtgagtacaagtatctgtgggggattacctacattagtgatattgcgcgtgcacactgcttactgtttatctattccacttcattagtggcgcgacttgctgaatctatctacaccactgaatgataagtcttgctgtgctaggatcttacctgcactgaacgtttgtgcgtacgagtcattatcatgccctgttatcatatgtgggtgctgccatga

SEQ ID NO: 142693 - DNA, 440 bp, Glycine max
  unsure (1)..(440): unsure at all n locations
ctagcacactatacctttctaccatctgttccatgaatntggttttgttgttaaatccatgccatccatgttggctctgcataccaagttgttatgaactttcacataagatcagatcacaagtctagatattaaaggcttgttttgacttatagtgaaaacaagaagtagactcgtccttgacaaaaactcttcctaaacaaatacacgttttagtaatagtgagaaagtagactcgtccttgacagagttcctcctaagctgacacanatttttctacacaagtctttctgaatatttctccttcattaaatttcaatcaaagtttgcctttaaataaactacaaatctattgctaatagttatcttaattgataaaataaatataaagagaattctaattgataggattaattatactaattggtaaaaatatatat

SEQ ID NO: 142694 - DNA, 407 bp, Glycine max
ctatctgctactatcgttgcacaaccttgtagcaagaagaaatggaaggaaagaagaaatgaaagaaactgtgcaggttctcgaaaaagaattttcaaggacaagaaaaatttaaaggaatttcaattgagagaataagtcaaatgattcttgctcttcacaaatcttttttttaagaaagacgacttttaagaaagataagatgaggtcacatgaatgtctatacttcttatttttgatttggaaacacaatcaatcaaatgtttattcaactttactcgccacttatgacacccccaccaaacatgtagaacatgcaatttctaattgggagggcaagtcacttgagcaaacaaaccaatgacgtacattcacattccagtgaaagttaaataagcaaagatgta

SEQ ID NO: 142695 - DNA, 239 bp, Glycine max
aaccaggtacactcccatctactcgaagcataatatcagagacatcgtgcgggatattgccaaatcacagagcgcgacaaagcataattaaacgatttataattcccaatttaagactgggggagcgtgactttcgcacatctatattggaagagagctcctttctaggatagattgaaccctgaccaacttttccgagtggtctttggaccggacattatcacatccatacataattg

SEQ ID NO: 142696 - DNA, 308 bp, Glycine max
  unsure (1)..(308): unsure at all n locations
gcttcccaaatccgatcatggaaggacttgtttctgttttcattatgcagtaccagtacaatacggatatggctcccgatcggaatcagcttcatagtatgactaagcgagagcatgagtccattaaggaatatgcccaaagatggagagatctcgcagcccaagtcgtaccgcccatgacggaaagggagatgatcacaattatggtagatacgttacccacgttctactatgaaaagctgataggctacatgccagctaactttgcggatctcgtcttcgccggagaaaggatcgaatncggacta

SEQ ID NO: 142697 - DNA, 331 bp, Glycine max
  unsure (1)..(331): unsure at all n locations
ttttcagcacattcaggccatggagatatcgtntctaataccgccaaccatccccatatacactaaacgatgacccgaatgctcatcagatgatacccaggtactgtaagggctctgattttgcagcttcatctttggcctcgctggggatagaatctctcttgttgttaagacctcccttccagtctattatcaatggcatattcgttatttgccactttacacacccttttacttattagtcatcaatgtgatcgtatccaaccttctaaaaaggcagtataaatttgccttaattgcacacaacaatgtgctctacaaagtgtgacct

SEQ ID NO: 142698 - DNA, 436 bp, Glycine max
  unsure (1)..(436): unsure at all n locations
actctgagctatttattatgttaatcataaatatttcatggaagttgcaattcttcagcattcaatcatgttgaagacttcaaaatgaaatggaaaagcctatgttggctatatgagttggaaggaaggggaagaatgctaacaataccgacctcatgtcccggagcatcaatgtgataaatgcagaagttatgaagcaacaaagaagctgcctctgggcagaacaacagaccctggaaacaagagacatctgcagaanaggccaaaatcaagttgtggtaattatacagtaatccaaaattgcaaaaacaaaaggttgctttgcttctaattctaaacatcttcaccaaaccgcatagacaagacatggaacattttgtgagcaaatccattcatattanaaacaaaagcaatataaataagggtacaaacttac

SEQ ID NO: 142699 - DNA, 380 bp, Glycine max
taacactgatgtcgtcaagagaagctctctatatgcgcaggacatcaatgacgaggacattctgaacaaccttgtactgctgtacagacggatataggagatgcgaacgtgtggaatacatggatgcccgccctgatgcatttgtaactccatgcgagacgagtctatgtgcttggacgtgcaatacactgcctaagggtcaaccgactacccctgtatactactgacttttgcatcttctgcttattatctgcagacgcctatatacgacataccactggtgcagttcagagagttgctcattttatcgatctatacacttctgcaccaccagatcgactctgcatatcacctaatgtgatacttatcatccatattgc

SEQ ID NO: 142700 - DNA, 478 bp, Glycine max
  unsure (1)..(478): unsure at all n locations
atccttaagtcacctgcggcatgcangcttgtccanaataggactcaagccttattgtttcatgtgtgtactaaagtaatgcttagaaagccaaataggttttgtatgagtgtctatgaatctgtcattctagcgtatgactgcttatggatatcatgaacatacaaaccacgtttctttgaatgtagggattgtaagtgactaggtatttcaatgacattgtgcatagcacaaacaaaaatctctaattaaattcgacaacaaggatggtgtgacaggtactatatatggcactactacaaaatataaatttaacatcgcacgaataacatcggtttttcaaaaaaccgatgtttagaaaagcacctatgtcataaaaaaaatatagatctaaataactgatgttaatatcaagtagttaacatcgtgtttgacaaaaccgatgttaacataatataagttacatcggttattgaaa

SEQ ID NO: 142701 - DNA, 445 bp, Glycine max
agcttatactaatgttaatggaagatcttccttgtttaattttatctcatagtttgaaatcgccaaaataatgttatttcaacttatataaatctctcatgaaggttaattttgtttcgttgtttgcaattgccacaataatcaggaactgagcgtggtagtagggttgcttctatgcgtgcagcaataaatgacactttccctcgaccaaatcgccgctactgcaaaggtatttgattgataacaattattttttctcatttcttcctttcggtatacccattgattgctctctttgggtatctaatttctgaatttgagggtttaacgtttagaatactcttattctttagttagttcatttaatcagtgaattatatattgctgatttgggatagtcttctgtgtttcacaaacctactacgtacacaaggtacgattagtc

SEQ ID NO: 142702 - DNA, 407 bp, Glycine max
ccggatcttaagtcacctgcggctgcagcttctcggctatactgagaatgcctctatttatcacccgtgcagcctaaggcacccacccagagggaagctccccaagttccaactccgaacacgactcgaccggccggtaattccaacacgacaaggaacttccctccgaggccatttccggaattcaccccactcccaatgacgtacgaagatcttctgccatccctcatcgccaatcatttggccgtggtaactcccggaagggtcctcgaaccccctttccggaagtggtatgaccctaacgcaacttgcaagtaccatgggggtgtcccggggcattccgtcgaaaaatgcttggcccttaaatacaaggtccaacatttaatggatgctggatggctgacttt

SEQ ID NO: 142703 - DNA, 361 bp, Glycine max
  unsure (1)..(361): unsure at all n locations
agtcacctgcggctgcagcttactgtcaccctttcactngttttttttaattatatnggtttgcttatgtttacacatatgattgttagtcattaatttgagtttcgtgtattatacttctgtatgccttgataaattntattattttagttgttctttattaaaatttctgagtctgagagtgcaatttttatttgttgtggtctgaattgggtggtctcaatgaacgaatactggttgcaaaagaggcatcttgtgtggtaggtacttttttctttaattcgtggttcgaaagggcgtggtgtggcaactctggtgtttctgtgacacgaagtatgacactcctttctggtattggtat

SEQ ID NO: 142704 - DNA, 228 bp, Glycine max
ttatatctaatagcaggcttgtgtgggtgaacacataagataggatgatacacatttgcgctttatacactattcatagacatgccgtgctatatttcatcaccaaacaccgtattaaccatataaactaaattatctagggcttctctctttattatgtctttgagttcggtgagctcaagtggagtattcatgtccacacatcaggtattgtgagtggatggtacc

SEQ ID NO: 142705 - DNA, 396 bp, Glycine max
accagcgggacactactcttaatacaaaaatggcatacaacctcctcccataaatacacacatcaatgtaatattagagcaagcttatgcgcatatttccttacgaacgttcacttgcacaagacattctattaactaagaaaaatgcacccatatacaatcaaggcagcttcgttacctagattatttacatgtacttccaaggtgtatttgttacttacatcacacacatcttcttggctaaatttacatacatgcatactcaaagcattttggggtaccaaaaattgcacatgtgcacatctttgtatttctaatacctatacataacacaaactcatgatgaatcttgactatttacacaataagggctacatttcatgtcctttcaaattt

SEQ ID NO: 142706 - DNA, 178 bp, Glycine max
gcctctgccagttgggacacttggaggatagcagaaagccgatgcagccgtggatgatcaattcagactcacctggaggaccattgtcggatgatgcgcagacacccttgaaagcgtgcacgagtccaggacatgacattaaatagaaaaaaagcgcgcgatcctagcacgcgagtga

SEQ ID NO: 142707 - DNA, 397 bp, Glycine max
ctgcactattccccctattataattatttttttcatgtatttctgttaaaatataaaaatttaatttttattaactaattacattcgtatatatgtatggttttagcttgtggctccaagtcccatgtgtgggtgtctgtctggaacaggcatgcacgtaaacaagaagcaccttcaaaatgcctccacaaatatatataaaaaaattcattgaatgaagaagcgtgaggaaggtgtaaacgtgtaaagaagggttggactaaactaataaaggaccaagtccaactcttccatccaatataacccccaacattatatcatatcaaaactattaattcaacaaaacccccattcctcatcattattatttaattatcatccttcaatcacaacatca

SEQ ID NO: 142708 - DNA, 293 bp, Glycine max
  unsure (1)..(293): unsure at all n locations
gctatttgcacccncatttntactaagtaccacccctgctttnttttggtgattctttnttcgtaaagttaccgaaacttacgaatttcgtaacgatacttgttttctttccgtaatgttacggaaccttgtggattacataatcatcccctttttgacttacggaatgttacggaacctcactaattgtgcaacgatgctcccatttgattcccgtgtgtcacggaaccctgcggattgtgcatcatatatttcttttgtatcccggcccgttccggaatttcacaaattgc

SEQ ID NO: 142709 - DNA, 287 bp, Glycine max
gactaccagtgactgtttctgctaaatcaacagacgtaactctgcaaaatgtgagacccaacaaaccggtttcatttttccacagttataactcttatcaacggtcttcttggttagacgtgaatagtctataaaagctacgctttcatacgcttttcaatacactactacacttattcaatcaatctttcacaaccatgaatctctatgaacttcccttcttctatgaccgaagctttctgaatttttcaacctcgaaacgcgtgcattatcttccattcttatct

SEQ ID NO: 142710 - DNA, 251 bp, Glycine max
  unsure (1)..(251): unsure at all n locations
cagagtacggattatattcatgggcttgactgttgagacacacaagacttctttatgatttaatttgatgctaaattctgagtctgggtaccagcggccttcatactgtgtgnggctaccatcctttataagctcatacaggacactatgaacttatctcggaaataatttgctatatatctgcatgtggtggcagcgaggcccctacattatggatatgtcgcctatatcgacagatgcctcctgagcat

SEQ ID NO: 142711 - DNA, 420 bp, Glycine max
  unsure (1)..(420): unsure at all n locations
ctcaatcattttttattattcatgtgaantaggaagcatcaacaagaatcaagccaaggttattgtgcaagcaatcaatggggccaaacacgccaaatgattatgatgatggatggctcaaattctcacaaaggtaaactcatcactttcaaattgaggtttcaaaactatcatgacatgtagaggagaatcaaggatttcatgtcacaaaatgtcaagaacttttattttcaaaataattacccatctcttgaacatatcctattattcaaagaaaaacatgcaaagtcatacatgcacacataattgacccataatattaaagtagatatccgacgaaactaacaacattaacaaatttacacaactaacaaattacaaaaccaccaaactagtaaacccaagacactcccccatact

SEQ ID NO: 142712 - DNA, 360 bp, Glycine max
tgctgcaacatatcagaacacacccgtcatcctcatctgcaaaatctgacgcgacataacgatcatgacctttatatcaacacgtgctatcgcgcgtggaggaatcatgcccaccctagacggatgagtcttacacaatgacggctcacaacatcactaacgactgctatatccctataaatagcggatacatgacgctcctgccctgcctaggatagaagaagttgtgatgaaaatgactatgcaaaacatgcattttcaacatgagaccacatccttcgttcatagcttatcttatcagataggacatgcggctacacacttgcatacacaacagacctagaattctgacagattacc

SEQ ID NO: 142713 - DNA, 379 bp, Glycine max
  unsure (1)..(379): unsure at all n locations
tagactgaagctccataaatataaaatatgtcaaacacctatgatattgttcaacaaaatttgttagattaatcttggaatgcataaatttggttgtggttgaggaaagcttcacatcgtgatgtagtcctaattccagtaaagaatttctcacgaatataagttatggaccacatgctccttttttggtacaactctttgatccagatttgttctctaaaccaaattcagcaaccatttcaccccatatgttgtcanattctataacatcataggcacccaacatacatcttttatagttgggcaaaaaaccaagaatattgacattaatccgtgcattacgcaatagatgtcatgcacataacctgtgatgagcatt

SEQ ID NO: 142714 - DNA, 357 bp, Glycine max
cgtacatctggctcgctcgatccatcatatacgcggcctactcaatagaatcaagtgcgctctcctgagatgtggagcaactcatggaagtgaatcaaacatggattgcatggttgtctgataacattatgtgaccaatgattgtccatgtacctgtactccctctaaatatggtctaactgagccttcatatgcaccacttgcgcctgcaagcgtgctaccttcatatccaactgtggactctaatcctgatctgtcagacatgagactccatgagctattaaattgactgcttatataacttccttatatgatgattgggagattgggcactatactcataatgagatgattcac

SEQ ID NO: 142715 - DNA, 447 bp, Glycine max
  unsure (1)..(447): unsure at all n locations
gcttgaggganaacttgatgccttggcaatttattatctcagctgccatgaatagaaattgcacctgttgtaagagtctgtggtctatgttcttccgcagatcaccatacagatctttgtccttctttgcagcaatttggagtcaatgagcaacctgaagccatgctagatctaggagcatcggttagtgtcatgcctatgtcccttttcaattctttatctcttggacctttgtaatcttcaaatgtggtgattcatttggcaaatagaagtgttgcttaccccacaggtttcatagaggatgtgctagttcgggttggtgaacttatttttcctgtggatatttatgttcttaatatggaagaagggatttcccatggttcagttccaattattttaggtaggccatttatgaaaacaacctgaaccaagatagattgttatgct

SEQ ID NO: 142716 - DNA, 351 bp, Glycine max
cactgctctaatgagccatgcatcataactggcactcagatgctgagagttggaagccatcttctccataaaataccttacattatcatgggccatgtctccaaaggctccaccactgacaacatctatcatacttctctacatgtgaccgattccttcataaaaacactggacgacaatctgctcataaatctgttggacatggcaactggcacatagtttctataatctctgctagtatacatataacctctctccactgagtaatataagacctgatatatcctgtctgataaccgatgtcctctaagcatggaaatgttcttcttataatacactcatgatgtcatg

SEQ ID NO: 142717 - DNA, 410 bp, Glycine max
  unsure (1)..(410): unsure at all n locations
taatnttttgaatttcaaatgattttagaaagacaaataaataaaaactagttgtgccctctgggttagatcccaaatgtggtaattgattatcttgtttcacagagagcttctcaagcttttgtggttctagaataatcaattaccaaatgtggtaatcaattattttgacacacaaagggctcctaaagtttctagatgcaatctaattgattactaaatgtggttataaattatctttagttattgcgacttccttcttctgaaactggattatgtaattgattactaaaattggtaatcaattaatttaatgattcttgcaaaatttcatgtagaagggagttcntgtgcttggtctaacactttgtaattgattactaaactttataattgattacactatgttg

SEQ ID NO: 142718 - DNA, 384 bp, Glycine max
tcaagaaatgaaaggatgttatcgagacaaatagatagtaactccttgtgcccaatgggttataaccctagagaggttctacgtactcctacatgacgaagcgcgatgcatatctgagatgatctagactaatatgccacacacagtgcgactctcattttttgtgccactaaagagtgctgggatgtgaaagagcaaactaattgagcacttctgtagctataaggttaagtcattaagtggctcccctatctctagcacatggatcatccatcttattacgataatagataatcatgattgagatgatatatgcaaatttccaagtagaatggagtatatcatctagtctttacaagattgaccttgaaacatacacatcta

SEQ ID NO: 142719 - DNA, 420 bp, Glycine max
  unsure (1)..(420): unsure at all n locations
agcttgaagaaattgtttcttgtacatgctctactttctcgagtggcatntgtatngattgtcctattatgtgttgcatcttaattctatctttttcatatgtgcatcatgcattatcatgtgagagtaagaagagaggttctaaaatcagaaaatttcttttgtgtttaaaactctctgttttatttgattataggttgatcgtaatcgattacacaagtgtttgtagcttgcagagaagtttctcatatcgatttaatcgattacaaggtaatcataatcgattacacaattcaaatgagacaatgattggtttttcaggagtctctactttaatcaattaccaggcgatcataatcgaatacttctctcttaaaactgcttcagaagtgatcaagaacactttaattcgatacatca

SEQ ID NO: 142720 - DNA, 373 bp, Glycine max
  unsure (1)..(373): unsure at all n locations
acactatatnaactgaagctctgcgcctcaacctagaggataaatatgcgtggccatgcctaatactgtaaaagccattgatttaaggcacacctatgatccatccatctcttgctaggaaaaacacaatatgggcatcatggcttctcatgatccacaattagcatgagcattaccctcgcatatgtcaatctgtgaggccacctcctcccttcctttcattctacattggacataatggattaccctagtcgacaccaactcattatacattatgggtatctcttctatgaatgtcgctggctccttcacaatacactcactatagaccctactcatattggttgcacgggcattcataatattatcgaag

SEQ ID NO: 142721 - DNA, 363 bp, Glycine max
  unsure (1)..(363): unsure at all n locations
ctgcagcttgtacgttctgatttctgagattttcttgngtgatacttgntagtttagaattgggctggttntgtactcacatttgggtgaataagattctaaaaaaggcatgaaagcagcaattgtggtcacaatttttgtttttttaattatttttttattctgatgaacctgtcagaaatttatgtgagtttgcgcaaataagcaagtcatgaagtggcaaaataacttaataactttcaaggattgtggtattgcgtgctgcttatttgaaacttgaacctacatgtngttcgaagccaattattatgcaattatgcatttccagaggtgagggactaaatggttcctttgttataattt

SEQ ID NO: 142722 - DNA, 204 bp, Glycine max
cattctttaactagcacccaatctccgatagtggacacgtgatctgcgcgatgctcatctgctatgttcttcaagcgtgcttgggcctttatcgatctttgcctaaattacgcgatcacttgctgcctttgactgtgccaatctttcactgattgtatatgcgcagaaccttatacttaacgtgggccatcgggagggtttcat

SEQ ID NO: 142723 - DNA, 192 bp, Glycine max
  unsure (1)..(192): unsure at all n locations
tctatggaaaatgcgcatatgacaggatggggangaagaggaatggaggtttaggagaaaaaatctaaaatatgaagttgaaaaaaggaatggttgcggagtgtggtgaagatcctacttttaagggacttgagatccaaaaatgtatcttgagttgagagatgaacgttgagcacattctttgctttgtta

SEQ ID NO: 142724 - DNA, 369 bp, Glycine max
cgtgcagactctatggatgctggatcatagatctatttttagtccatcaatggtgattttattccttggatagtcaacacgaggcatatgaaaatacgtgaggagaaaggccatctcctagggatttggccagagaagatagtgcttcatctccaagaattgacttggatgacaagcttgacgaagtttcttgtatgagagataatattgagaggacgtgggagcccaaaattgctcgtgttttatacgggaagagttggcacttcttagttgtctcatcacacttgcttacacaaaattactatctgcttactacatgctttagtatatgacttagcatgctggcttcagacgccttattaagaaaac

SEQ ID NO: 142725 - DNA, 473 bp, Glycine max
  unsure (1)..(473): unsure at all n locations
gatcctcttagtcacctgcggcatgcaagcttaataaaaccttaagttcaaaatctttattagagtcttgaactctntttattagctgaaataagcttctaattaactgttctaaattctgtcaaaaataaaaataaactcttccaaatgtctcttagagtgcgtttgaatagaaaattttaactaaggaaactaatttatcagagaatttgaatttctgtaatttagaattcattgtttgaatgtcttttatgaaaaatttaaaattttggaattctaaaacagaattttgaacaactaaaaatctggaatttcaatttccttctagaaggtgagaaattgaaattctcttattacaatcttcttcaagaaacaccgttttagcttttaaaatattgatcgggtgtgagcatagaagaacacatataactagcacatcaattataatctctctttttttcttcattcatttt

SEQ ID NO: 142726 - DNA, 279 bp, Glycine max
ctaagcgatgcgccttgctcctatcaacgttaacttgcacatgatctttctatttactgagatctatgcacctcatatgcaatcaacgtgtacttaatctgctatattatctacatgaactaccaaagagcttttgctattgtacttttaacacgcgttcgaggctaaaattacatccatggacactcatagcatttagggtgtccataaatggcacatgcactcatctggggaatgtaatacctaacatatgcaacttctgatgaatcttactaccta

SEQ ID NO: 142727 - DNA, 333 bp, Glycine max
  unsure (1)..(333): unsure at all n locations
aatatactaagtatgggagttgtcgcaacgaaatgcgcttagctcacgtaagctccgcttagcgcgcggcttccaacaaaaaaatcgactaagttacctgggcttagcgattcagcctcgcttagccacatgtatctcaacaagaggatgagtgttcatcctcaaaagatgaactngcttaccatggtaggcgtgcttaacaagttcttccaacaacgcgtatattcaatgaatactgatgaactcccttagcataacaagctctcttagcaaatcatcgcgttttccagaaaaacgcatagaacccaattgatttcttgcactttgtgagct

SEQ ID NO: 142728 - DNA, 309 bp, Glycine max
  unsure (1)..(309): unsure at all n locations
gtcgtatctagtcaaggtctgagagaccatacaagtttcctaacgatntctaattatgtgggccattaagtctatcatatgctgacaatagccgagaagcccgtgaatctcttcgggggcggagtaggtgtctgccatcgctttggccttggctaacaatcggngaagttcttgactcccgttcaaggtaagagcaaaccgatccatccacatggttgcctcttggtgtaaaaagtcgatcacccttcctctagcctctttttccgcgtatacttgggcatattcgtccgcaatcctatgctcgtgggc

SEQ ID NO: 142729 - DNA, 420 bp, Glycine max
  unsure (1)..(420): unsure at all n locations
acactctatagagctcacgcgtttgcatgctatctcttaggaactatgacttggaccaattattcatttgtatttaggagactaaccctataaggtctacaagagaaacccttgatgatatcacagattctttatgagatccgctcattcataaagatgggcacaatggccaagaaaacggaaataatgaacactgtcagattgatgagactgacacaagtacatattctgatcttcctcaagagtagagaactctccgatatcatgctttagataatatcatcagcgacatatcataacgggtgacgactagacactctctcacagatgcatgcaataatatggcttatgcttgtttaattgaacctcanaacttaaatgaagccgtcattgatgaacattggatcatcgctgtgctag

SEQ ID NO: 142730 - DNA, 220 bp, Glycine max
caatatattctgcttcacatgttgacaacgcaactacactttgcttctttgagcaccaagagattggtgatgttccaaattggaaaacatacccagtagggcttttcctatcatccttatcaccacaccaatctgaatcactataaccaaacacttctccttctatattcttctgactgtaaggatataaaatgccaagatccaatgttcctttcacata

SEQ ID NO: 142731 - DNA, 207 bp, Glycine max
atgacaaccacactctactctttgtcactccgttatactgatgcagacataaaatgacacactcattaatcttagattgttttacatacactcatatatcactattattaattagtatatcctaccacagaatcacttattctattttgagtgtcaaggctttggagctcgttacacaccgtaccttgatcttacattttatttctc

SEQ ID NO: 142732 - DNA, 267 bp, Glycine max
atagtcggcgacttatattgacactttatatatctcaggaaaattaaaagctacggggtttgttatgatgctcttgataagagtgcttgagagagttgggtattgtgtgggagatgtatttatcaaatgatggcattcctagcaggagtcagccatattaatgtttataatcttacaattctataatcggagccatattatttggtttattattccaattatatcgagattatacccattagttctcactactaatggtgttaactg

SEQ ID NO: 142733 - DNA, 381 bp, Glycine max
atggctaggaactagggtgttctgccttgcttcaacctgatgctttaagtgtgacatacaccagcctgtaattgcttttggtttctggtctttctctcttttagcttttgcatttatcaaaagaaaatctttatataactatcttagatgcaatatctttatgttacataaatataatttaaatataaactagctctttttatattagtcaattcaatgactaattttaccgagtatttgttgtttattaaattaatttaatagtctttagttaaaaataactttgtttgttaatttactttgccaaacataatatgttggaatttgggtgtttcatataagaataattttttttagaagaaaatgggaataactaaattt

SEQ ID NO: 142734 - DNA, 318 bp, Glycine max
tgctactatcaaacaaagctgcgaggctacggtgatcgtgtcttgctatacgccgatgcagataatgtgtcttacaccaaactgtaaaagcttatgataacagaaccatctaatataaaacatttgcgcgaatacattaataaactatatctaactatcaattatgctttatgaaatatttacaacaaaagaggttattctgaggcattcatactactatacaaatgactgttatgacacataaatcctggtaataagacgggatgagatgaatgtatgacgtgttatccgatgaatggaagattctgaaatagcatg

SEQ ID NO: 142735 - DNA, 417 bp, Glycine max
  unsure (1)..(417): unsure at all n locations
atatgcatttttatcttttctatntacaaatgcatgtggttctagtaatggcatccaatattactattcatgtntccacttactcacaccccttagtttctaactaatcctataacttatcatcctcaagacatgagaagtgcatcacgtatacggcaactggcagttatttcacaaaataaaaagcaaacttcaattgaatgataaccagtaaacatcccaaagagcgaacttattcaaaaacttcaaaaaatctagagtctctaaactntccccttttagttctgcatgtacatatacacttcaactacaactataataaagaggttcagcacanaattccatcatctntgcttccagttccagactcatatttgcacccacaggacagaattagtaacccaattttaaaacata

SEQ ID NO: 142736 - DNA, 141 bp, Glycine max
tctatgatatagatgccactaaagcttttatgtttaccttactggaccaatttcttattcttagagtatcttaatcaccacgggaatgagaattgcttctctatactgctgcaggcagaaagaaatactatttgcattcca

SEQ ID NO: 142737 - DNA, 246 bp, Glycine max
  unsure (1)..(246): unsure at all n locations
agcttggagttaagaaagtgcacaactttattttctttcatatnaccccccttcttntatgactgtattaattctagctgggtgtgaagacataagacaccttcgtatatgcctagttataattntctcaactggcaccaggagaaaagaaatagaaaaaccattttcaaaatctgcttaactcttttacttccttctgtccacttcagaaaagggaccaaaaatctacaatggatgaatcgtgac

SEQ ID NO: 142738 - DNA, 171 bp, Glycine max
gtcttagacagaccaccacgtgatctcttggctgaataaactctgattcaccctgatgaagctgcgactgatgagaacctttcgacaacaaccatcggcttcgacacaaaacaaaatggcagctctccgctgggtaacggtggcttcattatcactatagtcacgccctgc

SEQ ID NO: 142739 - DNA, 456 bp, Glycine max
  unsure (1)..(456): unsure at all n locations
ggatccttaagcaccgcggctgcagctcatggggttggtctttgactttatgttngccttcaatgctaattttccaccatggagatgcagcggaagataaaggagaaaaggtgagaggaggcgccatccactaggaaataagccatggaagaagaagcttcaccactaagagagtgccttggataaaaagcttagagaggaagcttcaatggaggaaaagaaagagagagagaggggaggggagcataaaattgaaggaggaaaagagagagagaagttgaactntgaaatgtgtctcacaagactctcattcatcaaagttacaacaagtgttacacatgcttctatttatagcctaggtagcttccttgagaagcttctttcataagcttccttgagaagttagagcttagctacacacacccctctaataacttagctcacctccttgagaag

SEQ ID NO: 142740 - DNA, 357 bp, Glycine max
tcaagtcattcaagacacatgtaatcaattaccaatacatgtaatcgattacaaatggtttgaaagtatgtaatcgattacacatcatatgtaatcgattaccagagactatgaacgctgggaattcaaattttaaatgaagggtcacaactattcaagaaaaacaactgtgtaatcgattacactaattctgtaatcgattaccagagaggattttcaaggaatatcgccaacagtcacatcttatcatttgaattttgaatggccatcaaaggcctatatatatgtgtgacttgggacgaaattgaagatagagttttgcttggaaaaaatatcttatccttttaaaagacaatg

SEQ ID NO: 142741 - DNA, 241 bp, Glycine max
gcgagcatggtgtgcccatcaatgtggaactaggtgtctgtccgtccatggtgcagaacaaggtgttcacatacacatggcgcgcattacccctccatgccctgtggtacacctggatcggaggtatcgtactccctactcgtccattgtcttctatctcttaacaccgggaacgcttcgatactacaaatcttccagaacggtccacactattcaagattaacaactgcgagctatatta

SEQ ID NO: 142742 - DNA, 426 bp, Glycine max
  unsure (1)..(426): unsure at all n locations
agctngctctaaatatacattgatgtttgtatttatgggaggaggttatatgccatttttgctttaagagtaatgtcccactaaaactaactttccaaatgtttgccttcgcaggaatggcaccgaggaagcttgcctcaaagaggtccaggaaggacaaggcggccgaaggaactagttccgccccggagtacgacagtcaccgctttaggagcgttgtacaccagcagcgtttcgaagccatcaagggatggtcgtttctccgggagcgacgcgtccagctcagggacgacgagtatactgatttccaggaggaaatagggcgccggcggtgggcaccactggttactcccatggccaagtttgatccaaaaatagtncttgagttttacgccaatgcttggccaacaaaagaaggcgtgcctg

SEQ ID NO: 142743 - DNA, 219 bp, Glycine max
acgaatgactgacctggtgcaactgactatggtgagatgactggaaagcatgctccactgaactgcttataagaagtcccctaccgactcagcggacatcagtactcatcccatctcggaccttctcattccccaccatccgatcgtccgtaacggccatccctaaatcaaccacaaaggctgtctatctctcaaccaacgataactccacctttggac

SEQ ID NO: 142744 - DNA, 415 bp, Glycine max
  unsure (1)..(415): unsure at all n locations
tcgagacagagtcttttgtttatgcttaattgcaaaaagtgtccccctattnttttcatttcactaaatcggtccccatattttttaattcatatcatgttatttttcaaaattcactagcttagaacattgaccgccacgtgtccgcatataattggtcatttaagaaatattcatgtgtttaggaaatatcattattagtaactaaagtgattaattatttaagttatctccaatttatcatcattactaattaggtcactaacaattatctcacaaataattaccccaacccagaatgtaaacttcatccactcaaaatctttaaccttcctattaccaaaaattcttaattcttaaaatcagtaacacgaacccaaactgaataccagaacctgaaacgcgtaatacaagc

SEQ ID NO: 142745 - DNA, 246 bp, Glycine max
gaagatgatccactatttctgcctgtctgtaaagcttgctcattatgtgccttaccatatcatgaagtttttatgatactcctgcctgaacacaactaccctcatactaacgcatacttatgttaaggtacaatatattgaagaagttaataatacatagtctacacttatagggtgatacattttctaggatatcttcaatctaccaagacctcatatgcattcactccacaaacatgtgacatt

SEQ ID NO: 142746 - DNA, 402 bp, Glycine max
  unsure (1)..(402): unsure at all n locations
caacaaccttccatcgttgtggtgctgattctgtaatgttgaatctttctaagctctctcttgtcgagtgtttacctctgtatgtgcttaaaacttgttagaatttcaagcattttagtttgaagaaattgtctctaaaggaatggagtcgaatgatttcccctaacttaatttgaaatcagctggggattttagccactaaattgggttgtaggagatattggtagtggcctgaactttagtcaatggcttttcttaaaacctatntagtccacactgtttgtattggtccaaatttcccatatagagcacactgtatatgactgaaaaaactcatctgagaatctcacttttaagctagagatgccatttttggttctgtaagttgtacaatgtgaggtg

SEQ ID NO: 142747 - DNA, 362 bp, Glycine max
  unsure (1)..(362): unsure at all n locations
aaacgttttttcgtgtcatgagtacgtatcatcaaacgctcaaattgaaacagaagctctgtgcaaattcaaacgacaatacattttaactcggatgtccgattgagtcccgtaatatatcaagacactcgaaattgagaataaaagctctgaacatattcagacgacaataactttttactcggatgtccgattgagtccagtaatatatctagacactctaaatttgaaattgaagagctgatcaaattcaaacgacaataactttntactcggatgtccgatggagtcccgagcgtctcaatatattatgcgccttaattggacatccgagttaaaagttatgaacattttaattgctc

SEQ ID NO: 142748 - DNA, 275 bp, Glycine max
tagcttgcatgctcgaatcggcgcataagtataacgttctctatgttgattgattgagactcttgatacatccaaacggtccaaacttatcacacaggcgtccgactcaggcacacgagatgacatgtcacctcatatggaccatcggatacctctccaataatacactcgtcataactattatatcagacgcccgaatctggcgcctacaataactttacgctccaatgtgaacttcagaagatctctagaaattcaaatgggcataacttatt

SEQ ID NO: 142749 - DNA, 123 bp, Glycine max
aaaactacaacaaaaaaaaaacacccgaaaacacaaacacaaggacagatcaggccccaacccaacacggagaaaaagcgccaaacgaacgaccaaccaaaaaccaaagccaggaccaccaga

SEQ ID NO: 142750 - DNA, 259 bp, Glycine max
aaaaaaaaaaggtcacaacagacgagagaggggggaaaaaacaccctctgggccagaccaccaccagcacaccagcctacccaaggataaaatcagggacaacggaccgacagagcgcagatggcaactccttacaacacagcaggaaatagaaagcaaggtgaatccaaccaccagatagacacccctccccctaacactggcacgccaacagctcaacctcaaacaaacagaacacccaaaaaacgcctagcataga

SEQ ID NO: 142751 - DNA, 352 bp, Glycine max
accaactctgatccccatcacatacatttgatgtactaacacaatgccttcttgcaccaaatactgacatatgtgccaggaaaacacaaacaaggtatctgcacacctacctaactctctctgcaaatatatagatatcatttatgagaagatacattcatggagaactcatgcatacacatcttgatacgcttctccgcgatatctgaaatgattgccatcatgcatctatgatacaatgtttgatcattacttatgccaaaaggcatctcggctattagcaaacacactacctcgtttagtaaatgcagtctcctcctgatgattacggtttacaacaacttgattatac

SEQ ID NO: 142752 - DNA, 395 bp, Glycine max
  unsure (1)..(395): unsure at all n locations
tgtcaattcttaccctcggaagctaaaaaaaggggagagggaaaatttccaatcaaagaggaagcaaaaaaggagagaaggaaaatctccaatcataggaaataaagagaggaaagggaattcccaatcaaagagtgggagatagcaaaaagaaaagaaagaaaattcccaatcaaagaatgggagaaagataaaagagaagaagaatgggaagaaagttcccgatcaaaaaaaaataatatgcagaaaggtctttggaccggacaatttctgaacaattcagaatcgtcaccaaatgaataaaaagaaggaaagggaaccatgacctaaaatggtcttccncctttagtngccacgcaaaatcttgtgcgctatcaaccttttttccccccact

SEQ ID NO: 142753 - DNA, 213 bp, Glycine max
  unsure (1)..(213): unsure at all n locations
gtcattgattatagccagngttatgccgtctgaagaaactctctaactagaaataatagtgtcactcacacatgatgatgcatgatgcaccaaaaataggaacagggctaatattcaatcattcgtataacagatatgtaaaggtgcccctcatcatagattggcatacaacagacaaaacttattgaagcttcccgcttaaagattgggatg

SEQ ID NO: 142754 - DNA, 245 bp, Glycine max
  unsure (1)..(245): unsure at all n locations
ccaaagcaccgcagcagagcnacaaccgaagaagcagtgttgtccccagccacgccaaccagaagagtgggccccancaagaacggtaggcacacaagcgcccacagagacagcaaaacacgcggcacagaagcaggccgagagctactccaacagcgtaggggcggaaaagcccgaacagggacccaccaaaagcaagcaagaccggcatcaaacacccaacccccgaaagccaccaaggagag

SEQ ID NO: 142755 - DNA, 448 bp, Glycine max
  unsure (1)..(448): unsure at all n locations
agcttaacaaccttgatggaggtgcagactttttctatagaatnnggagtgtctgtcacttatattttcaccatactggctactagttgatgtcaccccctcagggtgagagttcgatacacagcatgtggtctgataatggcctgacagcatgtggccctataggccaacaacaaccattattttgaagccatattagaattactgcttaggtcttactaaactcctaaaagctagtttaagagctgaaattaccccatatatcactagtttatgtgtgatttcctacacaacggtataattaattttcagtgttacgtaaattaatcatcttagatgatcaaaaaaatctctagccataagcctcatgccaactccaatacacaccaacataaaaagatactataaaaaagaaattccatagttgaatattatattagactcatac

SEQ ID NO: 142756 - DNA, 246 bp, Glycine max
taggcgtgactgtcacttgtatgaaaacggtcaggctcctagaactgtcgcgcgctgaagttgagagaacaatctacaactgtggtgggataaaggtcggacaacatgttggcctctatgcgcgctatatccgatataagaatcccgaactatcatgactgtaatcgatcatgaaactcttaaagacctaagtatcgtaaacatcccaccttgaaggttgtgacgtacccataacggaatggttgt

SEQ ID NO: 142757 - DNA, 418 bp, Glycine max
  unsure (1)..(418): unsure at all n locations
agcttncttgagaagctagagcgtagctattctttcccatctaaaaactaagctcacctccttgagaagctttcttgagaagctagagcttagctacacacccctataatagctaagctcacccccatgacaaaaaaacatgaaaatacaaaaaaaatcctactacaaagactactcaaaatgccctgaaatacaaggctaaaaccctatactactagaatggccaaaatacaaggcccaaaataagaaaacaacctattctactatttacaaagaagagtggacccaaccttggcccatgggctcaaaaatctaccctaaggttcatgagaaccctaaggccttctttatcaactctagcccaatcctcttggagcctcttgctcatggctctggtaactggtcctttcctagggag

SEQ ID NO: 142758 - DNA, 107 bp, Glycine max
tcacccatccaagcactgcgccatgtccctgttagactggagcgaaaagggcccactttccttttttgactgataaccattcttcttccccacatgggggaaaatct

SEQ ID NO: 142759 - DNA, 238 bp, Glycine max
caacaaaggagaatcacattcctgagctatctagctctccattggtgcatcttggacatcttttatgtgctatcaattgtgtgaattcggccaattccgcgagacaatttggggcaagtccgtgctttgattctctgaatcgaggggttgaacgggatggccttaagcctaggctaatgctgagaaataatgtgacaaagccacattgaccctattcccataatattaggcacccaaa

SEQ ID NO: 142760 - DNA, 163 bp, Glycine max
  unsure (1)..(163): unsure at all n locations
tgcggcaaaaaggaggggcgagggcttctttttttgcgcaggccgcaaaaaatatgtcgtgcttagaacgaccgaggtctgattggttgttcatgtctctcctggtgatttagggtntgacatgtgaaatgcttatacgctctgcaggatgtcgtgtttttta

SEQ ID NO: 142761 - DNA, 382 bp, Glycine max
acttcaaggaattaggtgtcatcaattagccattcaacgcagatatctctctaattaacttctgaccttaatatagaaattgattcgtagtttgcacaggtttcttcaaaatggcattaaaacttggactattaattaaaattagacgagggtaaataaaatatgtctagaaaattacagaaggattaaaaatttgaatattctttgttaacaaaaatgaagaaaaaagattcacggatggttggaaatatatctatctattcagaataattcaacactcagaaatgatcaagacccaacgatactctttctaaaaattttctagaaatggatttgacaaacataaaaatctccatcccctttctaggattcttaggctata

SEQ ID NO: 142762 - DNA, 285 bp, Glycine max
  unsure (1)..(285): unsure at all n locations
agattggattatacttctgatcgtatcgggcttaatatgtgagaaatagacttatgtaacatgccccagagagaactangagataggagtctacatccactatgcataatacaagaggacacaaataattctgtgtggtgaagtgttaaatactagggcacgagtggaacagatcatatggtggtcagtgcatggcttcctgccatttatcataatactcgaacttatatgaacgttgctggagatggctctagatgctcccgatagacactcttatacactatc

SEQ ID NO: 142763 - DNA, 287 bp, Glycine max
taacttcccacgtgttttggacatgttaacagctgatgaaaatatggaagttgttatcaaaattgccataacattaagaacaagcagaagagcatatgacttccttggtctgaagcctaacacgagtaagagggaagtttctaagaacacacaaaaagaaaatgctataccttgggtagaacttgtaaattcatgacgaggtttcaatttctagctaccttttaggggttatattggattattgtttgatgcaatcctaccccgcaagggctatttatagaaaacct

SEQ ID NO: 142764 - DNA, 318 bp, Glycine max
atgcgtgcccacggtggagactcttggtgatatgacccctgttgcatcgtcggatacctatgacaagatagatggcaacttctaacaactcactgcaagaaatggcgttatcgttcgtagaagagtccatgacgtggccacggatccatctctatctactgtatatagagaatttgaaggtaaagtttgatgcatggtcaacctagtaactcaacttgtcatgaatcaaaaatctacacatgttgcaagagtcggtggtgtatgttcttctacagaacaccatatagatctctgccttctttgcacaatctggagcca

SEQ ID NO: 142765 - DNA, 307 bp, Glycine max
gagactggtggaagtctgcctcattgtcatcacatttctcacctaccttgcattgataagtggctgatcaagcatggttcttgcccattatgcataatggatcttgtaattttgatctgcaaagtatacaaaccgtaaaaattgctcggttaactctttcattttttatatataagggaatctacttttaggaatgtacactatggataaatgtagtctgaactaagaaccaaccatcccatgtctttcatgagtggcataattgttataagttactagagagaaagtattgacataaattagctgc

SEQ ID NO: 142766 - DNA, 431 bp, Glycine max
acactttatactacgctaagctgccggcttggacgaacacagactatgatatgtttttgacaatgaaaaactgatggacgaattgtgggcaaatgtcgcgcctgctatctattacatgagtactgcaaagacgctactgattgccagggggatgacccacaaaatacgattaatctcattatggggaattaatctattgccattcatggatggtcgaactatgttgattgatatctacactgctagaactgcatgaatagctctctctgatctaagcggttgtgctatattagaggatctctatcccgacttaatcaagaatacctaatcaattgcaatgtctacgcaaaaaacagtgctgctgtgaatttatcttggaataaacacctaaccggagtagcgtatagccaatctctactactcgaaatatg

SEQ ID NO: 142767 - DNA, 368 bp, Glycine max
  unsure (1)..(368): unsure at all n locations
gtccccatacaaaacaatatntatttntacttgttcgcttttgataatcctatgatgttatacaaactgtctgattgtgtagcttggcaatatggcaaacaaattagattatcattttcccaaacaaggaggagagcaacacaaaaattgcagttagtacatacagatgtatgtcggaggacctcaaagaacaacatctttgaatggtaatagatattatatacatttattgatgaaatcctagattttgtagattattattaaatcaagactgagtataacattctggaatataacattggggaaataaagggtggaggtaccatataaatcaatatggaatgaattgaatgacccttcacaatttg

SEQ ID NO: 142768 - DNA, 186 bp, Glycine max
gtgtgtgcttggatccgattggtgtgcgacgcacactgatttatgatcacgtgcaggccactagttttaattacaatgacgcgatgaaatatgatatgatatacttgaagctgttctatctgctaaactgctcgaaaggctacacgcattttatcatcatttttgcggtggatgccgataggctct

SEQ ID NO: 142769 - DNA, 257 bp, Glycine max
gacatactttatacgcacaaatcaatgagtgactattcgtgtgtggatggatatagtgcattcattagaaacaattataagatacaccttgcatgggaaatgctttcattgaaagacgtcgctcattgggaacatgggataagaaaaactcgttcaacttgtacacacatatggcgtcttgctcataaagaagggataggatctagaaaacaatgatgggttgtgatagattaatgatatctgttaggcaggagagg

SEQ ID NO: 142770 - DNA, 452 bp, Glycine max
  unsure (1)..(452): unsure at all n locations
agctgcagctgagatgagaaggttgaaggtttttctttctgccttnattggagaccacagagtggtacctgtagatatgtcgcgggggtcacgagaccttggggacgtcaggtggggtgctattgcccaaaaccaagcttgaccaatcccgacccaacccgggcatagtcggtcagtgagaacctgtgatgtacctaagcatgcgagctcctggctgtcaacatataaagtgaacaaagaccacaaagcatggaggcttgtggtggctggccatctgtgaaacttgattgatatgtgagatatggtctctggttatcgattaccaagggtgggtaatcgattacacgcttaaaaatgatgacaggaggctaagatggtctctggtaatcgattaccaaggggtgtaatcgattaccaggcttgaaaacgatgtcaggaagccatgatggctt

SEQ ID NO: 142771 - DNA, 440 bp, Glycine max
agcttcccagatccgatcatggaaggacttgtcttctgccttcattaggcagtaccagtacaatacggatatggctcccgatcggaatcagcttcatagtatgactaagcgagagcatgagtccattaaggaatatgcccaaagatggagagatctcgcagcccaagtcgtaccgcccatgacggaaagggagatgatcacaattatggtagatacgttacccacgttctactatgaaaagctgataggctacatgccagctaactttgcggatctcgtcttcgccggagaaaggattgaatccggactacgaaaaggcaagttcgaatatgcttccaatgtggcccccaacaacaacagaagagccgcagtagtgggcgcgaggaaaaaggaaagagacgcccacgccgtcaccaccgtctcgacgtggatgaaagcac

SEQ ID NO: 142772 - DNA, 188 bp, Glycine max
taatcactaaacgatgacctcaatgctcatcagatgatacccaagttctgtaagggctctgtttctgcagcttcctctttggcctcgctggggatagaatctctcttgttgttaagacctccattcacgtctacattctatggcatattcgccactggacactttactcagcctatttctacttagtc

SEQ ID NO: 142773 - DNA, 416 bp, Glycine max
cctacttggatcaattgcaaatcaatacttgcaacctattgtcatccaacaaccctttgttcaagctgcacctacctctataccagcaaccttcgaacaagttgaacatgatcaaccttaacatccacatccaaaatcaccacgaaatgaagatccacctcagcagccataaatgataatgatagtttatcattttccatctttcaaacctgtatttgttgattacataagagggagaaattggaattttgatgtatcatgagcttagacttatctttcatctttatatgccttggtgtaatatatatgttgtaacatatgttatgttgcttttataaatgagttgggtggattattcaatttcgcctcttaactatgctttttacatatgtatgcatgtccactttgatcttata

SEQ ID NO: 142774 - DNA, 222 bp, Glycine max
tcactatattgttttcaacgcgagctgagaccactggtattacttcccgcgacgctttgttatatgacagcccgatggggcatctggccttaactctatttcccacgacttcctaggggttgaatcagaccaaccttgccagccacgtccttgactacaccaattcggggatcatcatccgccccctacatgactaggaccatcattacctgcgcatctgac

SEQ ID NO: 142775 - DNA, 303 bp, Glycine max
gaaaatgctacatgtgaagcatgaaatgttcattaaaaattcacaagtgcataatagacatttaacgacggttgatagagatatctaacaacgattgctaatcatctctacatcgaatgttgttgaaagttgaaatttttaacaacgaatataaaataactgttgtagaaaaatcaaactttctaagatagttgttagcttataacccgcttagaaatgatactttctaagacgatctttacctaggaccgtcttagaaagtgttagactagcaaccttttaagacggttgtttgctaacaac

SEQ ID NO: 142776 - DNA, 419 bp, Glycine max
gacactttaatctacctggcaccatgcagctacaaatatgcatctttttgcggagaggggggcatgtaacaagaatgttcattaaaaattccacgtgcaaaacatacatttaacgacggttgattaagatatctaacaacgatagccaatcatctttacatccaatgttgtcgaaagttgaaatttttaacaacgattataaaataactgttgtagaaaaatcaaactttctaagatagttgttagccactaaccgtcctagatatgatactttcttagacaaactttacctatgaccgctctaaaaagagtttgactatcaaccttttaaaacggttgtttgctaacaaccgtcttagatagctccctttctaagacggttgttcactaacataagtcttaattggaccatcttagaa

SEQ ID NO: 142777 - DNA, 288 bp, Glycine max
acccaaccggccatgaataaaaaatctgcacctgtcgcaagactctgtggtttatgctcctctgccgaccaccatacagacctttgcccttctatgcaacaatctggagcaactgaacagcttgaagcatatgctgcaaacatctacaatagacctccttaacctcagcaacacaatcagccacatcagaacaattatgacctctccagcaacaggtaccatcccgggtggaggaatcactccaaccttagatggttgagtccccacaacagcacgcacaaatataac

SEQ ID NO: 142778 - DNA, 205 bp, Glycine max
gagcctacctatacctcttgggaccttcaattactctggggggtggacttctcctccaccaaattctagggtgttggccttctttggagctataatggacaactgtactacgttattgctttactgcagacgattgtgatagaaattgttgatcttatgctcaacttgagccgctttatgtcaactataacgcccccgtcgacta

SEQ ID NO: 142779 - DNA, 312 bp, Glycine max
ggcatgagaacgcctatcatcattacggtgactttctttcgtctttgcgaacaaccagctgaaaatagtgatactctgtctgaacgagatcaagcattgattctgcggggctcatttgcatatcatggctaagaccacaagatcagggcggtccttagggctcactactgacatatgcgttgtgacaggatatcgtgatgattccgattatgctacatatcgtctaacgtttaccttatgctcaccgtggctgcatgctcctactgctgtgaggcaccacaatgcaatggtctctgtcccatactattatgc

SEQ ID NO: 142780 - DNA, 425 bp, Glycine max
atcctcatagtcacctgcggcatgcaagcttgcatatgtagcatggctatatttatttatttgagatgacacaaaatcattaaaacaatatcaagttgacttaaaatctcaaatctattgttgatttctttgaattgtaacatgatcttatatgacacaaattgattatcccgataatagtaatcaacattaaatttagtattaaaaagaagattaatgctatcaacacactctctagcacattcttttaatcacactctaccgtattggttgaaatttattgaaaaagacaaaatttagaaggtcctacatcatatctaaacacattttaaaaggcactcaagagattagaaagtgtattttaatattgaggctcattaattttggagtctccaaaacaaaaaagggagaatgatatataatac

SEQ ID NO: 142781 - DNA, 229 bp, Glycine max
cacagatgttgtttcaagtctcatgagggtcatggcgcctcatgctttgcatggggagaggaattgtaacatgaacgtatatgaacatggttggctattgccaatatggtgttccacatttaagatcatgaaccatttattaatgatgcttttgacacactctctatcccatttaataaatcacactcctccgtctagggagagatgtattgggatctaccataataaa

SEQ ID NO: 142782 - DNA, 399 bp, Glycine max
  unsure (1)..(399): unsure at all n locations
ctcagtactagttaccaataaattttctgaaagaactntttccacttgctagtagtcactggttacactcttaatttgtctctttttcctttttcaaatgcatgttgtcactctcttcctatgtgatggaagctactaagttctttctaactgccatgttgaaatattctttcccattttgttgaaattacttttcttgttttaactagaacaccaaaaagaatccatgttctgcttctatcgtatagtgtgatattatatatgtagcagtagcacaataatttatgaatcagctgagaacattaaagtagaatctcttgtgtttgggaccctaaccaactgtttcttcttaattttcttatttgtttccaagttatgtaactgtcaagtctgatgcat

SEQ ID NO: 142783 - DNA, 318 bp, Glycine max
cattctacattggttctcaaaccgatgttgaagtgactatgttcaatggctgaattttaacatcagctctggagaaccaatgctaacatactatatgacaagcatcgtggtctcctaataccctatgtgaagcacactgcacaacactatataactggcatgcatgatgaacgttgacatttgtgttgcaataataccgatgtgtaatatgtaaaacaaacatcagatttctagatcaccgctatagtgtatgcgataacatacgtgtttctggaacaccgatgtctacgattatgatgctaacacttatgtggagtc

SEQ ID NO: 142784 - DNA, 447 bp, Glycine max
  unsure (1)..(447): unsure at all n locations
gcttctgagcgcaccctacaatgtgatgagttttttctcctctaggngcttaaagatcaaggttcttgagcgcaccccaatttgatgagtgcacccctacaaaattatctagatggtcctgatgctagttacacccccaagtttgataagtgcagccccatttttgtgtttttggctaatttctttccgaaatgttgcaaaactttacggattacacgtcgatgggtgttaatcgtctcaaagtgatcaaccaaggtccatacgctgacaaaaattgtccccaaatgaaattagggtatgacatcattattcgtcacagggcctattttctccctttcgaccacatcctccctcgcctttcccttgtcattcgactttgtcggtagttcaggaggagcaaaaatatagccgctatgtgtcatgccactcataccgaatatattcgtg

SEQ ID NO: 142785 - DNA, 335 bp, Glycine max
ctcacttgttgctctttcgaatatacatacgtgcgcactccaaacttatgattgcaacacatgcttcacctattcatggtaccgactctcaacacccatttcacaaagaaaaaaagcatgccagcactgcgtacccggataatcaattcaaactgtgcaggatgcttttaacgtgcatactattatggacgttcatcagttcaccaatatcacaacaagacgtgtacctgagacataattgtcatcattataatatttgttcagacatcacaataacatgaatggactactcttgtgactgggcatacagctctgcgtcccgatctttagtgccc

SEQ ID NO: 142786 - DNA, 400 bp, Glycine max
tctcatcactgccgctgcagcttcagaaattctaatagagggtactattttttctaccatggccttcaccccgaataaattatatgtggctgaatgtgtgcatgtgtatgtctcataataataaaatatatctgtgtcaattaatttagattttactttgtgaaacttagttgtgtgaatcaattaaaattgtccttaatccttattcctaatagaattttttaaattttacacgagtatattttataatagaacaaattattatattttaacatatatttataattggatattttttacatttctactttgataaaaaaagcatatcataaattaaatattaatttatatggctcttatctattatgactagtctaagattctataattaatttaatga

SEQ ID NO: 142787 - DNA, 431 bp, Glycine max
  unsure (1)..(431): unsure at all n locations
gcttcttataaataaccaatggtgggttatttatctcactngaacgactagcttcaatgtccatgttcttctgccctccaaccatttctagcagcatcattccatagctgtaaacatcagacttgtgtgaaacacctccaaaacttttactgaacacttcgggagccacgtaccctactgtccctctagcatttgacattgaaatgatgctttcatctcttgtgctgagcttagcaagtccaaaatccgatatcttggggcgataaacttcgtccaataggatgttatgtggtttaatgtcgaaatgcagaatccgagtgttgcatcctttgtgccagtactcaaagtcttgagctatgcctaatggaatctggtgcaatctcttcaagctcaaggatggggtaatagttttgccttcaactgatgctttc

SEQ ID NO: 142788 - DNA, 401 bp, Glycine max
  unsure (1)..(401): unsure at all n locations
taagntccttatacttgaaaccttgaacctttgacattattttctccttctccactatgtagaaggaatgaaggagtaagccatttagaaattttttccataaaaaaatattctagtttaatactaagtatattagaatacaataaatacatatatatttaagaaccaaaacatgaaaataaattactattcataaaaccatatattaacatttgagaggaaaatcatatacctcatcatctcggttaagaaaggcaattntttcctaatggtaatagggatcctaactaactcacgctatcataacctgattagttgattcatgtaaaatttgaaaacaattgattcaacaggccaataaaaaaaagtagagaaaatcattagtaataaaaattattctt

SEQ ID NO: 142789 - DNA, 122 bp, Glycine max
gccgtagacttgaagcacggaacctgtcgcatgagtgactgcgttaccgctattgcgaaggaatgagggcttacgcctctattaatatggtacgatatgaatatattgaaccagactactta

SEQ ID NO: 142790 - DNA, 464 bp, Glycine max
  unsure (1)..(464): unsure at all n locations
cggaccttaagcaccgcagctgcagcttntcctanaaaaatatctatgtctatgcttaaaatatctaactatagcaatcatcaatactgatactcatttaattcaatcaaacatgcatcaatcacataataacacaccaatcaaacacaatcaaaatcttataatcaaatacaatcaatcaatcattaaccataaatatttcaatcaaccaatcaatccttatttatccaaatcactaatatctaagaggcctaattctcttctaatggaaaataatgtttctttggggagatgttttgtgaagatatcagcaagctgattctttgtatcaacaaattctagcacacaatctcccttcagaatatgatctcttgcctaatttctatatgcttggttctagagtgttgaactggatttttggaaagattaattgcacttgtattatcacacctaataggtatatg

SEQ ID NO: 142791 - DNA, 221 bp, Glycine max
gtgcttttctcacagctggcactacaccaatcaacaaatctgttgctcgtttgcacaatgactccctccttatcatcctatattccactctactatctcaccacttaaattttaatatcaaagtcgctcaggcgttcagaatccattcatactttactccaccttacaatccttctttataccgaaagaattagatgagaggcatttgtcattacataaaa

SEQ ID NO: 142792 - DNA, 294 bp, Glycine max
aagcatttcccaatgacaactcaaatcacaacatcaagcagagggtgatcaagccaaagcaagcattaccgcgtagaaaagaacactcaatagcgaacaatagacatagactaacaatcaaagtgtaaacacaagaataagttccatcacatcaacctccaaaagatgtaaatctaactacatgactacataaccacaagaagaaaataagaaaatagacgaaagagactatgagaaatggcagggaagccatggagaggagggagaaaacttcttagtctgaccctcaaccct

SEQ ID NO: 142793 - DNA, 447 bp, Glycine max
  unsure (1)..(447): unsure at all n locations
agctngtgcgacttggaggctataacactatctatttctttcgggtatgggtctctggaaacaaagctagtgagcattgagttttatgaagttggtgggtattgtatagctctgtgagtaagtggttttgaattcaatacctaggtggataagggattcgtggcccaagtagcagatgttacaaatggaagatcagctccaatgaacgaggaacaaagaagggaagctgtaaagactgttgttggtgaatttactgaagtcaaacatgttcggggtattctttccatgggaaggttaggtctctctagacagcaactgatggttgtagcttcattatatctgcttaagttcttgatttcatgtcattcttgtcactttnttgtttgccattaagttgcatttatatatggtttaacaacttaatagctattagttccagtctgtgct

SEQ ID NO: 142794 - DNA, 299 bp, Glycine max
caagctcctggatacaaaggactcacgcattcaccctatcaatcattgcggacttcgtaagccattccggcatgacgggggaactaaaccgagcccacttgcattggcttaaaggcctccaacaaccgtgctatcaatagcccactaactatcctgaacactggacgggtagacacatacgatggaccttgtgtacaggagcttacgcaatgggcccatgtactaggtgtacacaccattgtagagtgatgggtctctatacaggaggaatatgaccttcaagacaatgtgatgcttaa

SEQ ID NO: 142795 - DNA, 439 bp, Glycine max
  unsure (1)..(439): unsure at all n locations
caagcttgatctaccaccaccgccgtcttcattatcttagttttctatcattntatattactagtactttgtttcctagccgtgtatttggctatattatgacatttggataatttagaatttctttatttgcatggtttgattgaaaaattatgaattatgttatatgactatgtggtttttatatatttgatccattcatgtttcttgcttcatgattggtttatattcttcaatatatgtcttgtgaatgaatatgtttgtcttatacttgttatgcactttggctttttgttgatgccaaagggggagagataatagaattatatcaagaactccacatagtaatcaccttaatttcagtaaagcataacctcaaaccaagggagagaatttaatgattgaccactaggaaaaatatgtgttgtgtttttgattt

SEQ ID NO: 142796 - DNA, 443 bp, Glycine max
acgcgcgcgcttgaagacggaatgatatccgcagcgcatgaacatctttcttaactattagtcctttagattacactgacttttgttcctatccgtgaatatggctaatataaggctatggcatatggacaaggtcatttatacccctggcaagcttggaagtttatgtataccgtgttatgacgctagtcccttataccatttaagaaaaagaagatatcttgctgtggagtcggattctttagatctgtatgagcagaagatgagagctaaagatcaatgctggataccttcagacattagttgactcttatggggatatatggatgactgataaagataagtcctataatgatcaactaactttatactaaagcatatactatgagtccattggatagaaactttgatgttatcaactatgaaaaatatggtatgtgact

SEQ ID NO: 142797 - DNA, 384 bp, Glycine max
  unsure (1)..(384): unsure at all n locations
tgcatgtgaattaggaagcatcaataagaatcaagccaaggttattgtgcaagcaatcaatggggcaaaacacaccaaatgattatgatgatggatggctcaaattctcacaaaggtaaactcatcactttccaattgaactttcanaactatcatgacatgtagaggagaatcaaagatttcaagtcacaaaatgtcaaaaactttttattttcaaaacaattacccatttcttgaacatatcctataattcaaagaaaaacatgcaaagtcctacatgcacacagaattgacccaaaatttaaactagaatccgcgaaactacaacttaacaattccacactaacaattaaaaaccgcaaactgcaaaccaaaacacttccc

SEQ ID NO: 142798 - DNA, 426 bp, Glycine max
agactctatagtactcacgcgtctgcatctctgccaataatgacactctgatccacttgtttacaagtggccgtcgatatcgtaagataggggggaggggtgccattgttattgtgcaaacaatcaatggggctaaacacaccatatgactatgatgatggatggctcatattcttacagaggataactctttactttccatttgagctttcaaaactatcatgacatgtagaggagaatcaatgattgagattcacggatgacaaaaacttttattttcaaaacactgacccatttattgaacatatcctataatcaaaacaaaaacatgcagagtgctacatgcactctgaattgaccccctatattaagctctaaattcgacgagaactaacatccttaactgattaccacaccttaccaatt

SEQ ID NO: 142799 - DNA, 268 bp, Glycine max
  unsure (1)..(268): unsure at all n locations
atttcacgagagcttccgtgtttcaatttctagcatctcgacatattatgcgcccgaatcggacatccgtgtgaaatgttatgaccatttgaatntctcgagagcttccgatgtttaatttcgagcgtatcgatttattgtaagcctgaaccggacatccgagtgaaaatttatgaccatttgaatttcacgagagctttcgttgttcaatttcgagtgtcactatatgtgatgcgcccaaattagacattcgagttaaatgttatga

SEQ ID NO: 142800 - DNA, 335 bp, Glycine max
ttcgagtgccaaggcatattctctgaatatattatcgatcgtcacatcttcttatgtggaccttgaacggctatcacacgcctatatatatgtgactcgagacacgaatacgcttagagttctttagaacactaacgtcgtatcctctcaaacagttaaatcattttatcctctgacccattccttggccagattacttgtgacccaataaggaattctagaacttctcgagttgaacaatctatctctttcaagagagatctcttctattcttcttcttcattctgaagagggatccatagaccgatcgtctctcattgcgaaggaattctaaa

SEQ ID NO: 142801 - DNA, 281 bp, Glycine max
actggtaaaactaacttttcaaatggttgccttcccacgaaatggcccccaggaaacttgcctcaaagaagtccaagaaggacaagggcaccgaaggaactaattcccctcccgaagatgatgtcaccgcttaagagtgtgtcaccacacgcttcagccataaggatgccttctccgagcaccgtcactcaggacacattctgattcaagaatggcccgcgtgcatatggactcatgcaattaccaaatatctattatccatgctgcaaagagcgcaaata

SEQ ID NO: 142802 - DNA, 457 bp, Glycine max
  unsure (1)..(457): unsure at all n locations
acttaagcgactgcgctgcagctattaacatggtgatacatacattatttttaaaactcagcctcactagtagcagtatctaaatcaataatttatgcttccatagtagaacgtgaaataatagtntgtttagcagaatttcatgatactacaccactagctaaagtaaaaacataaccacttgttgattttgtttcatcagaatcagaaatccaatttgcatcattaaacccctcaattactgcaggaaaacatgtataatgaatgtcataattgatgattccttttaagtatctaaaaactctttctaatgcaatccaatgagaatgatcaggattattagtataccttcctaatctaccaactgcatatgcaatgtctggcctagagaagtttgtcaaatgcaataaggaatcaatactttgagaatatttatgtgaagaaaatcctttactca

SEQ ID NO: 142803 - DNA, 414 bp, Glycine max
ctgctaggatcatagaacctgtgactcacatcattctttcctttgacactgaagactcctctgccttgactctgcatccaacttggatgccttattctttggaacatgcacaatagcctggctaccaaaatctcatgagtgttcacacgtatcattcttgccaaaccaaccactttgtgcacctcgctattcaaagcaacaacatgactaagattgattacaacgcatcaccgtgtgcagtgcctcaccccagaagagctgtgggtaactatgattacatagcatacttgtcactctctcaatcaaggtcctgttgatactgataccgaaccattctattgcgtacttatatgacgactgtatatacgatcaatagcctgcagattgcagtagacatcaaatgggacataatac

SEQ ID NO: 142804 - DNA, 270 bp, Glycine max
gggtgctctcttagctgcttagacacaacacggagaattgatttccacggatgtgatcggacgcagatgaattacttcttgatgcatgactgagggggctacggcttatgaactctgtttcgagtaaggtcattatcttcaccttatgagccttccagctatgacatgttgatcttgtatgtcccaaccgttatcagctttcatcagggaacacatcgttggacttgtcatccaggactactactctgcattgacttgatttatgttcct

SEQ ID NO: 142805 - DNA, 454 bp, Glycine max
ctaagcaccgagctgcagctatactgacatgcaatgtttttattattctactaagttattggtccaagtgccaactcaacattacatctgcattgcgaagaagaatgatcatgtgcgagtactacatttttttaagagtgaatgaacaatttacttcataaatttgtatgtttttagttctatcgactagcgaaatataattataaattaacctataatactttacttttaaactaaattatatatacatttactatgacttaataaacaaatgttatatttacattaataatattaatactattattaataataataatatatcattaaaatatatgatatgaataagtgtgagcggatacagtctgtatattagatactccacatcaacatgaatcttaatagtctcaacatttatgcaaataatattttctagcaatatcatcgatattga

SEQ ID NO: 142806 - DNA, 333 bp, Glycine max
  unsure (1)..(333): unsure at all n locations
ggctatactgaaatggcagcctctgcatgttacgctcaatgagctcggnggcaccactggacaataatctgtatggggaagaataagtggggcgtcgcctgcactaactcttttacctcaaaggaatgaaagctttctacatgactaagtgatgttctaagtgtacactgactatgcaaatataattgtaagagaacctgttcactatgcctttctaactgatgcatatccacattgacttgtggtagctctgcaggaagaatgttggcataagtgcttgctggactaactatcatcatttgaatgaatcctcacttggtatctggtcaagct

SEQ ID NO: 142807 - DNA, 347 bp, Glycine max
atcttaagcaccgcggctgcagcttggaaaccagccatcagaattttgattatatatagatgggaatagaggtaacaatggcggtaatgacggaccgaggcaaaaccgggttgagggagtaaagctcaatgttcctcccttcaaaggtagaagtgatccagatgcctacctggactgggaaatgaagactgagcacgtatttgcctgcaatgactacactgatgcgcaaaaagtcaagctagcagcagctgaattctccgactatgcccttgtttggtggcataaataccaaagagaaatgttgagagaggaacggcgagaggtagatacatggactgagatgaaaa

SEQ ID NO: 142808 - DNA, 238 bp, Glycine max
atagctgttcttacaccactaaatgggacctttgaactgggatggttgaacccctaacttatctcgatctttggactatgcctcaaggttcttcccttaagcagtaaaaatgatacacatgcgttgactatctgagaaatctacactatacactcatttacctgatagggaggaacagtagctcctatgctcaacaatccaacatatggatacagagagtagtctcttgacccggaga

SEQ ID NO: 142809 - DNA, 310 bp, Glycine max
atatgtcatctagtatttaaaagaatgttaagataggtaaaatatttagggtttttaaattgaataaaagggtaaaaaaatctaaataaattagtgaggataaaattaagaagaaaagagcagctaacagcttataaacaagtatattttttataagttatttaaaataatctataaaaaataagcttgtgtatcaaatacttatcttaatctgttcaagttaacttataagctagtcaaaagcaacttatgagctccgcagaagtctaatcacaatctcatgtaaaaaactaatattgacctaataaca

SEQ ID NO: 142810 - DNA, 289 bp, Glycine max
tgaactcctcattgttagaggataaatggccaaaccgggttcctataaacggttcatcggcccattgagacggatgaaatatttgtatccatttgtgaggctcaagagaagaccactctatctcaccccttctttttttcaatgctatggttgatgcggcatgagaaccattccagaaatgcctagcctacagatcctgaactctttgccgatgctttcactcatgtgactcatgcaaagagcttgagagctactggggaacttccttcttactgcatgtgtaataccc

SEQ ID NO: 142811 - DNA, 411 bp, Glycine max
ttttttcaacataactgatgcacacattaagttatcccaagttgatccctcgcacttggaacataagaatatttactaaatattgattccttgcatatgtagtaaataccccagcattacaattatattctcgtgctttttacaatcaaaacattatgctctattcctagcaatgtaatgtaaagaataaaatctttcagttcaaattctaagattactttccagtctcacttaaaatccaatttcatgacactagtgatcaaatagaatcaagcattacgagtagaatgaaattaccaataatgagtagaaaagaattatacatatataatatcaaaaggaatacataagggtacaaatattacatccaatccttaagaaaaactaaccgatcattatgcagagcagaag

SEQ ID NO: 142812 - DNA, 382 bp, Glycine max
agatggagccaaacccaatcaccctcattaagaactagcttttttcttcctctattgcctttagttgaatacacctttgtttggttctctatttggatcttaactctctcatgaaacttcttcacaaactctgacctagattccccttctttatgtataaaagaagtgtccagtgggaggggaatgaggtcaaacggtgttaggggattaaacccatagacaacctcaaaaggggactacatgaggaagatactcatcccaagacttatggttgcctttcagaagagctctttaaaaagtggataaagacctattcactaccactatttgccaatcagttggtggatgacaagtggtagagaaaagaagtttagttcctagc

SEQ ID NO: 142813 - DNA, 360 bp, Glycine max
gagagaggggggagcacacaattgaaggactaaacgatggagagaaggggaactttgaagtatgcttcacaagactctgattcatcaaagctacgacaagtgttacacatgcttctatatatagactgcgtagcttccttgagaagctttcttgagaaaactttcttgcgaagcttctttgagaaaacttccttgagaagctagagcttagctacacacacccctgtcataactaaactcacctacttgagaaactcgcttaacacgattcctaaagaagctcgagcttagctacacatacctctctaatagctaagctcaccttcttgagatgagaagctagagcttagcttcacacct

SEQ ID NO: 142814 - DNA, 322 bp, Glycine max
  unsure (1)..(322): unsure at all n locations
agcttattatcaatagacactatctctatttttctaccgncaataaaatactttctatagaaattaataaagattcaaaattaaaaatattgccagatcctcattactaggaggggcataagttacctcttggaggatcaaacatttgcatactaacatttcgactagccttgacgaagaaacagaaacgacacaaaaaaattactatagatgcactgatatgacttgaattaccatgtattcatatctattcgtatacagatatgaaacacgacattgaataaaatacataagataaacataagttcacgaatgatccaat

SEQ ID NO: 142815 - DNA, 350 bp, Glycine max
  unsure (1)..(350): unsure at all n locations
agcttccagaaactaagaaacacattctatctttttatccatccctagacaaggaaaaccaaaaacactaccttttcggaagatccacaagaatcttgagcagctgaagccgatgaacctaacgacaaaatcgaatcactgaatcaattaatcaacatttaaacacccaaaatcacactcttcaaaattcaatatccaaaaaaaaacccgcctttaccctcaagtcctctttttaaaaacatttgaataagacaacgaacgaccattntaacacccaaaaccacactccaatttagattatttaattcccaataagaaanaaaaactcgagaacaccaagattccccccc

SEQ ID NO: 142816 - DNA, 162 bp, Glycine max
tattatatgtgttcatacatggatcaagataataaagactctacctgttagcaggagcccctaaaatctattgccacctgggtcatatatcataacgactctatctttgaattctgtccatggatcgacagtatatctccgttacattctctctagctattt

SEQ ID NO: 142817 - DNA, 434 bp, Glycine max
  unsure (1)..(434): unsure at all n locations
agcttgaatgctgtccatgatatgacctcttattgtcattgtctgtgaagcacactcgattactattttttctaccattgacgttgtttcatcatttggcagtccagatgactgggagaggttccttcattacctaggttgtttgctagaagatgagagcatttggtgtgatgagactgttaatgatccagttcatccnccaaagtttgtcaatgaccaagtctcacacttgacagatgaacaggtgaatggttagtctatggtggcctttgtttatgacagtaatttatgcatggagggaccatttattatttgcgcagaacttgattcttgtataattacaaactactatatgaatgcagtttgacggtcaaatatcaattgcatcagcttgtgtgcagaagttacaagcagataccatcaataacttgata

SEQ ID NO: 142818 - DNA, 433 bp, Glycine max
  unsure (1)..(433): unsure at all n locations
agctttacgagcatttcgagtgtgtagaatttatttatacttaaatgtgccgtntctttataaaagtaagaagcatgttaatagacaaaagttcaatgattaaataggaacaatcgggactaacaagttttttgagaatcagcatgagagcgcttattttctgctccaactgatcagcatatgccatatgagctagaggagtcactgcatcacgcacatttcttgtctttgccaagttatcattatttgtttcaccatccaaagtcccacttgaagcaacatcaaccgcctcatctaattcttgatgggatgcaacactggcattacttttcttttcaaatgaccgaggaagaacatcaaccacctttaaccgtttgttggcaattgattttccttctaattcctattaaatngaataaattaaatcatcaat

SEQ ID NO: 142819 - DNA, 430 bp, Glycine max
  unsure (1)..(430): unsure at all n locations
agctntgcagatttggtcttcgccaggaaagatcttttgggtcttaaaaaaaaaggcaaatttgatcatcctactatgacgactgagaaaactggggcaaataaagagggtgaggattaaggagaaacccatgctgtgactgccattcctgtacgaccaagtttcccaccaacccaacaatatctttactcagccaataacaaaccttctccttacccaccacccaggtatccacaaaggccatccctaaatctaccacaaagtctgtctaccgcactttcaatgacgaacaccacctttagcacaaaccagaaacaccaaccaagaagtgaatnttgcagcgagaaagcctgtataattcaccccaattccagtgtcctatgctgacttgctcccatatcttcttgataattcaatggtagccataacc

SEQ ID NO: 142820 - DNA, 408 bp, Glycine max
gcgcgggtctggaggactaaggtcatttggtctcaatatacgaagatgatgttccgagttcattggatttgggacgaccatgcccttctgattttcagttgggaaattggcgagtggaggaacgccccgacatttacgcaacgaacataatgtaaacctctacggttttaaaaactctataattaggcctaggctctagagtttcttttgttaaggctttgtgtcttttgttttgaaattataatacaaggatctttcttcatctgttcctatgtctctacccattctcatccatttgcatgtttacttctttactttttaaaaacggtagatccgatgacgagtccctcgaagtactaataccttggacccgcctatcaacttcgagcaaaagacgaatcaaacgga

SEQ ID NO: 142821 - DNA, 429 bp, Glycine max
  unsure (1)..(429): unsure at all n locations
gatccttaagcacctgcggcatgcaagcttcttaatntcagatgatgcagatgggtttgtttctacctgtcataccctaatatcggccggggacctttgcttgatgacatgtgaccattctttggtccttgtgaggggcttggcacccatcattaggctatttatgaaattccaggacatgccgaaaaaccaaaataatgttgatgcacaatcccgaagtttccgtgacacatcggaaatcaaatggaagcatcgctgcataaataagtgaggttccgtaaccatccgtaagtcaacaaagggatgattatgttatccgcaaagtccctaacattaccgaaagaaaacaagtatcggttcgaaaatcttatagttccgtaacttttctaataaagaatcaccaaaaaatatcagatggtgtgtacttat

SEQ ID NO: 142822 - DNA, 75 bp, Glycine max
ttaaaaaaaaatccttgtagacaaacaccatgttggttcttatcacaatgggaatcgttgaccaaggaaatccct

SEQ ID NO: 142823 - DNA, 441 bp, Glycine max
  unsure (1)..(441): unsure at all n locations
agactggatttccttatagtagggaatctattctttctaagatggagccaaacccagtcacgctcattaagaactagctcttttcttcctctattgcctttagttgaatacacctttgtttggttctctatttggttcttaaccctctcatccaacttctttacaaattctgacctagattccccttctttatgtataaaagaagtgtccagtgggaggggaatgaggtctaacagtgttaggggattgaacccatagacaacctcaaaaggggactgcttggtggttctatgaacccccctgttgtaggaaaattttacatgaggaagatactcatcccaagacttatggttgcctttcagaagagcccttaaaagggtgcataaagacctattcactacctctgnnttgcccatcaattgtggatgacaagtggtagag

SEQ ID NO: 142824 - DNA, 435 bp, Glycine max
  unsure (1)..(435): unsure at all n locations
agcttgcctcaatgattgatgaaattgtatgtttctcaagtattaaacgattaactacacgaaacgagatttgtgagaagagagcgatgcagcgaaatagaaaacgaacctgaaattgaattggccgcaccagttcagtcttcgatcgccgatgggatgtacagtgttntcctccgaggactaactgcaaagtgtgaagaacgaaattcttcaaacgcaccgtttgatcgaagatgccaacgtattagaattattatacaggttaaggttatgcaccaaaaatatacaaaacatacctattaaaaattctgggttatgaattaggagatgaaaaaaaaatcaacataggtcttattattaattaaaatttattaaatacagaaaaaagatctttaagtttaacttcttaattaatactacttcatttcaaattat

SEQ ID NO: 142825 - DNA, 400 bp, Glycine max
agcttcaagaaaaggccgactccacttcttatttatttcaagcttaaataggtggcgttgttcgtgctcgtgcacttagcgcaattctgaaccgcttagcgcgtgcgtttctcgctcagcggatggactgaagcggtgcgcttagtgagatgacccttcgctcagtgaacatgcacaactcatccttctatcagattctttctcgcgctcatccgaagagttttgtgctcagtggatggctcgctaagccgacaggttggcctagcgagacggtgaaaatcagcactatacaaactctccttattaacctgaaattgagagaaaataattattaaacacacaaaatggaagtactaagtatttattaactgtctttacctaaagtaatacaattctacaa

SEQ ID NO: 142826 - DNA, 443 bp, Glycine max
  unsure (1)..(443): unsure at all n locations
cctgaggcatgcaagcttcccatctntacaagtatggaggcacaatttatatcacacaagccacatcactagaaaaccaaagttaaaaacacgtaccgttttgatacatttactaaccattatctttaatattagtatattacaactacaagttttatatatatatatattagaaggtgttgcaataagtaatagaagtggattaggcgagtcaccttagcattacaatctgcccttctcaacctggccttgatgtaagacgggcgtaagttaaaggcagtattgcaatcatttattgctttctcaaattggcctagctttgatctacaagcagctctgttgcatagtaaaacagagttatatggatcatggtcaaggcctttttcataggcaatgcaagcttcatgtaaatttgatgccttgaaaagctcatttcctttgca

SEQ ID NO: 142827 - DNA, 389 bp, Glycine max
agcttaacaattttaggatgatgagattgtttcttttgtataggttcaagttcttcatatataggacatatagtctcaaaattaggataactattaggtgggagaacctagatactataagattataatcatcatcatacaatgtctattgtaagatattgtattatttatcatgtcatgtgcaatttggtgatgatgcctcaatctaaacaaaaaaggaaatttcagcttagtcgcgtattgtattgaatagttattaagcacaagcatctgaggaagtctttgttctcatgcttaccctctgtgtgacataaaaggttaagagctaactgtcgcaacctacccttcggcgggagggcgacgcgtgactctcgggatgcgtgttgcac

SEQ ID NO: 142828 - DNA, 397 bp, Glycine max
  unsure (1)..(397): unsure at all n locations
catgcaancttgctctcacaaagcggatttttctgttgtaatgtttgccatcccagttcgatataggctacgttccccaaaaagcgataaatagaaacgccttggcagattatttggctcaacatcctttcaacgactattaacccatgcattacatagttccggatgaggacatcatggtcttatttgaggaaaagctagactttgaccgggacaagtggatcttgttgtttgatggagcgtctaacgctctaagccatggcgttgaggcggtattggtctctccggacaaataatgtatacctttctcaacccagctggggttcgactgcaccaacaacatggctgattataaacgtgcgccttggccctccatgctacaattgactccaatgtc

SEQ ID NO: 142829 - DNA, 451 bp, Glycine max
  unsure (1)..(451): unsure at all n locations
acctgcagctgcagctggctccggtgtacgaagggcagcttttttgttttaataaaagaagcggaagtggtcttccgggaagaggagcgcgtttttaaaatttttacttaaagggcaaaatgacccattcactaaaattgctggatgcacctagcatttcccaaaatttccctatgaatttggtgaatatattacaataaaaaacaacacttgatgtcttcattttagtcatcccacttgattcttgtatgtgaaatcctcatatatattatcacaatcacatttcttttccaaaatcttccacaatacttctcttaacactcgatcatttggttttccaaatcaataaaaatcacatgtaaatgaagaanataaaattctcacgtgagctcaaaggacttcttcaagatgaactatataaactgatctttctaaagttaaaaagcactgt

SEQ ID NO: 142830 - DNA, 397 bp, Glycine max
  unsure (1)..(397): unsure at all n locations
tattagccatttctagggcaaaattgtgtgtagaggggtcaaattttgattccgtggaattttacgtgtaaattcagtttgagcaagtttaacttgaggttatgggcttgtgtgaagtgagagtttgctttgaatatacctcattctaaatttcacctttcaaacctagaaaaaccattgaatggaggggtgttggacacctacattctgtgttgctgtgctctaaagcttgaatttggtttacacatgattgatacatgatttgggacttgtacgaattgatctgggcaagattggatgggaggaagtgtgattttctaaatctgcacttatgcagaatttntgctgtgaaattgtgcagcagaattttgcacaagtgcagataaatgcttgtgtg

SEQ ID NO: 142831 - DNA, 413 bp, Glycine max
  unsure (1)..(413): unsure at all n locations
agcttcagctaaattaaactattgaagatatattttttgtatctctcaacggataaaaaaaacgatataatgaagttgatgttttgctttatcaaacctgattgatcctgagcttgagtaagtagaccacccaaaaacacaacgaagaaagtcatcggcattctgtaggatgacagatatacgagcaccatgttctgactttgacctgaaacggaatcgtattggctgacaaattggatcattgaaattttatatgataacttggtccatccgaatcaatatcacactcagtaaattaatcactgtcaaaacagtgcaatgatatcaggtagacttgtcattatatgttaataggagaaatagactntttacaaaattaaaggacaaaacattattttttttcaattcaggat

SEQ ID NO: 142832 - DNA, 243 bp, Glycine max
atctatggcttcacaacttacatgaatcagggcctgcccctgcaacacactcaaaaacacgacgtattatgtcgttagaattctgatcgaggacataaatactaacgctatgatattactttgacctgttactgaatgctattggactacatcattgtataccgccaataatattgattgctatgaccaaccattgcaataacacgcttatgtacacctcactgatgcaacagagcaatgata

SEQ ID NO: 142833 - DNA, 430 bp, Glycine max
agcttgaccttcacaaagcctatgatcgaatgtgtatgtttttttgtgattgacactcttaatcaactgaagattccctcttggatgattgatattctctctaattgtatgagcacttctttaactatcaattggaattcttttgctcctacatggggattgaggcaaggggacccttcacccccttacctctttgtcttgcacatggagaggctagcatatctcatttaaaagtcagtcaatgagggtaattggaaacccttctggtttgggaatagtacaggagtcacagtgttgcatttattcttcatcgatgacataattcgtggttgaggcttctctacaacaagcttatgttatcaaaactattatggatgcttttgtagtggctcgggacaaaaaataaatgttcataaatctcgtttattct

SEQ ID NO: 142834 - DNA, 167 bp, Glycine max
taactagttgagctcgtcgaaaccatgtcccggcggtttttatatagagtctaaaaaccaaacatccttctctgatgattgactctcctctgtgaagaccacgaacggccaaaattgatattagactcttgggatgcggggggaaatacctcaactttgttttcaaa

SEQ ID NO: 142835 - DNA, 438 bp, Glycine max
agcttagaagtttagcccaatagtgttcatctattctgttgccgactgcagataatttgcagcagaatgcgggaaaattggatttcctgggaagatgtatttcagtggttatattttttccgaccattcaatgcggtccagaatgcgggattccttttgtacaataagaagtgtttttcaatatattacataaaattttgaatcttcattaacttgctaatcctagaacttatttagcatgttcttcaatatgcatgagtttatcgggtatttctgtatttcatggttgcaatttttttatagtgctttgacttagtgcaatttattttgatttaaagagataaacgagttggtaagtaaactgtaaaagtagagatgcacgatcgtgttcaggagaaataatccctgcatcatgactagtgtaccatgtgagaatat

SEQ ID NO: 142836 - DNA, 297 bp, Glycine max
catgtgtggtttactgcttatcacgactgcaagcacgtggagcaaaaactacgaaaaagtggattctgtgtgaagatgtacgctattggcatgaaaatgccacccgactcacgcagttgatgtggcggcatacacctcgtacataaaaaagcttatttgagccactttcttaaaacttagaagttaatacctcttgatttaacttaaactcatgtatgatgagcttcaacaagctctgtgaagctagtacatatggacctggagttgcaatcttatgtatatagcgctcgcgctgtg

SEQ ID NO: 142837 - DNA, 419 bp, Glycine max
  unsure (1)..(419): unsure at all n locations
agctntgggtgggagaaaagagaaacaattnngtanttctggtatgggatctgggaaagctactttcattcgccaccagtaccacttcccactttcatttcatgctagctactcaacatcaacaacaacaaactcttacagatacaaaaaaatatatatactagtgtggtagtagtagtatccattggattgacattccgcaactcatctataacattaatcatttattgtatttattaaattcaatcaaatcaataccaaaagaggtgggattaatgatggaaaaagtccaacccctagtttcatagtcaaatagattaaattcaaatttgtaaggcataatagacgactgaaacactccaattaaataaattggcaattgcgaagccacttaggattcggttaatttgggtttcttt

SEQ ID NO: 142838 - DNA, 436 bp, Glycine max
  unsure (1)..(436): unsure at all n locations
agcttataagaacaaaattgcctcaatcattttttaatatgcatgtgaattaggaagcatcaacaagaatcaagccaaggctattgtgcaagcaattaatggggcaaaacacaccaaatgattatgatgatggatggctcaaattctaacaaaggtaaactcatcactttcaaattgagctttcaaaactatcatgacatgtagaggaaaatcaaggatttcaaatcacaaaatttcaagaaacttttattttcaaaataattacccatttcttgaacatatcctataattcaaagaaaaacatgcaaagtcgtacacgcacacagaattgacccaaaatattaaactagaaacccaacgaaactaacaacattaacaaattaacacaactaacaaattaacaaaacccgcaaaactagcnaaaccaaagaacact

SEQ ID NO: 142839 - DNA, 282 bp, Glycine max
aatgtgcctgatacaaaggctacttaaagcttgacttatgcatagttatggtgacaacttgtagaagggccaaggcacccaaatgcatatcacaacgcagtgcctactttgtgacaatagctatcgaagcaataataagatcagcttttgcaaatatacctacgtgttgaggacatataatggttacggattcctctgtatcggcagactaaacaccctaaatggggacctctaatgagcagatgatgtatatactcaatatctaaatgcttatgctttctc

SEQ ID NO: 142840 - DNA, 370 bp, Glycine max
agcttcaacattcaattgcgagcgtcttgatatattacgagcctcaatcagacatccgagtaaaaagttatggtcctttgtattggatcagagcttcaacattcaatttcgagcgtctcgatatgttacaggactcaatcagacatccgagaaaaaagttatcgtcgtttgagttggctcagagattcaacattcaatttcgagcgtcttgatatgttacgggactcaatcagacatccgagaaaaaagttattgtcgtttgaattggctcagagcttcaacattcaatttcgagcgtcttgatttgttacgggactcaatcagacattcgagtaaaaaagtattgttcgttgaattggctcagagcttc

SEQ ID NO: 142841 - DNA, 218 bp, Glycine max
gccacgaccgcacgaaaatatacgacggggctgttctactaccgatgtcggctcttgtactttctattccacccctgaattatttttggatgacgcctattaagaaatgaacagacggggtcgtccggtcatgctgcttatagaggcctcaatctgtcgtcattcctagccggtcgacgtgggctaacatatacatccaaccataactgtgtgatcat

SEQ ID NO: 142842 - DNA, 425 bp, Glycine max
  unsure (1)..(425): unsure at all n locations
agcctgntattatcatattttcacttattttattttatttctctcttcatttttattatattatatttcatatttgttagttttttcattattttttatatctctttttattttcacttataaaaatgagttgtatgtgtaatttttttttcataaatgtaatgagatatgatgtgacagaaattaaagaaaaggagaatgaaatgaatgttcctatatgataatatgtatagaggggtggtttttgtatatcaacaatgataatacctcgatcaatataaacactcatttaccacattccatttctcttaatcattcccatcttgtcactctcacgttatataactcgttaaattagattatcgctcctccttggtgtgttttctctctcgtggatagatatagactacacaaaacattatctt

SEQ ID NO: 142843 - DNA, 225 bp, Glycine max
ctatattgactaaatccttataaggacccaagattcagactatatgttttaagcttggcgcatatgatttatacgctcaacatgagggggaggggtgaatattttattatttatctatggatgatagctgcgacggcaagcattaataaggaggcagcaatgaatggtcactgacaaaaaccttctctcactcgtatgtattgtatatctacgatgcatattcca

SEQ ID NO: 142844 - DNA, 425 bp, Glycine max
agcttcaaagcctctgcagcagcctcttcctcttcatcatcgatgacaaaataaggattgtgagcctcacgcttgaactcgtagcccgtaaagacatagaaagcaagtgtggccaactcaacagcaacaacactggtccaagaatagcgataggaggtaatattctccaaggcataaacgacaaccctggtgaagtaaatgttacagataacgacgacatattagtgccggaagagagtaagcttcatcaaattaacagcagccttgccgtcggtcctagcggcctcacggaggttcttgatggaccaaacaatggggaagagcacagcgcaacaacagacgacatcaacaaggaggaagatctgcttcaggtaacccattcatggccaaagggcccactctcgtcaataacgacctgagcaatg

SEQ ID NO: 142845 - DNA, 384 bp, Glycine max
  unsure (1)..(384): unsure at all n locations
ttaaaaatttaannnnnnaggctatcaacaaaaaaagacttnttttaagggcccttccataatatatatatatatatattagtcactccaaaattaaatctacgaatttttttcatggagtaagacaatttggtttaaattgagaaattaaaaaataatagggacaaaaaccaaaagacacccaacattaagggacaaaataaacattcaagcctattattaataggagatagatgataatatatcagtgtgatttgtattttttattattaataattatttataacatattgtcttattcgattaatcattaaattataactatttattaattaattatttgctgtaaatttataaaattaataaactatacgtgataatcta

SEQ ID NO: 142846 - DNA, 404 bp, Glycine max
  unsure (1)..(404): unsure at all n locations
agcttctcaccttnaccatctgcgagaatcgatagtcctcaccgctaataactatcgctcacaaagcaaaacaaagaaaccaaagctctatatggggaaactgcgttatctgcaaaaactcttcgttatctgaatagccttaaacaaacgaagaaaaaaaattaatgaagaaactaatgatttaagactagaagcatcaaattggttttgtcttttagcgaaagaaaacgttggtgttgtgttatataccagctaaaaattagtgtttgtgtcgtcgagatcgatagatttaagtcctcccttgttggatttgagaacacactgctggcaccccacacttttgagctctgtcatatcttttggcaactctcccaatataatcaatatagaggaaggcggcgatc

SEQ ID NO: 142847 - DNA, 402 bp, Glycine max
  unsure (1)..(402): unsure at all n locations
agctttatnatgttngaaggaggagtggattatgtattttatattatcaattaatcaaaatgcattgtgaatatgtaattatttcaaaataccataaattgattatacattgtaactatgaccagcatataaattatataatattttatatattcaatctaaattattatatatgataaaacttttaacttttataagaactatttttaaaattaagtgtcaaataacttttaagtatttcgtttttataattataatctattaaaattaatctcttatcagaagataagtccgtgcaaatgatgaaagatccaaaatattctttgggcttttatggtaaaaaatcgatttcttcatatgaaaatctatttggggtggtcaacctttccaatacgactttct

SEQ ID NO: 142848 - DNA, 194 bp, Glycine max
ttcaaactagcgggtatcagcatacaagccaaattggggtgtgccttaattcctaccaactcaagccggagattagatacccccaagcaacaattgatatcctggctctacgacccacaagaactacatttttactactcaactacattcttactgcaactcttaatccttacataacgtcaaaaattaaatta

SEQ ID NO: 142849 - DNA, 87 bp, Glycine max
aaaaaactggaacatgaggaggggacgtttcaccaaccccggagaggccaaacattcgaaaaaaatccccccttggaaaaacacagc

SEQ ID NO: 142850 - DNA, 298 bp, Glycine max
cgctcagctgtaaaaggagaagcttgttatacccctcgctttagaactcggggaaaacacactagctgaaaactgaaactgctgagcttaacataattgcatgtacagagtcatggtaaatttgtcagcatatttctgtttaatggagggtgtacggttattatcttatggtgtattatgttgttcgccgaagtctgccttttttgtgaaagatactgataatctttaattagcaaatttttttaaatagatttcatcctaaaaattgttattgttttgataatattttgggtttcaa

SEQ ID NO: 142851 - DNA, 434 bp, Glycine max
agcttcacaagatatacactctatctctcaagtgtctatgctactgtttactctcaaagcacccatgaaaagaaacaccacatacacttggcaaaattctaaaattgacaaacaacttgacaaacacatgcacatgaggatcaaaaggtctttaaaggttgtaatggggccaaagacaaggtaggggaaaaaatatggaataagtagctaaatcccaaaggaatagaggagcaatggggaataagtggaaattaagcacaagtagtaaacccaaaccctctaatatcaacaaaatcaaccaaggctcccaaatcaagtcctcataacaagaactcatttattcaaattcacttcttttcttcttctcttttttttttctctttttttttaacagtatgaatttgcagaatttgcacaattgaatttttttcatt

SEQ ID NO: 142852 - DNA, 425 bp, Glycine max
  unsure (1)..(425): unsure at all n locations
agcttgatcaaaacaaacatctagacattccattccactcaattcatacatttnctcattcaagtcattcacaaacactcattttatatcaaacaaaccactgaaacatgattcaatcatttcactgttcaaacaagctttttgtacaagcaatcaacactaaaataattggaatttaaatgactgaaatttaaagcaactaaataactaataactaaattgttcaaaatttgcaaaaattaaaacaaaatagaatgtaaacatcctactcatcctgtggctgatcttcatttaaatccagcattggagcaactggtacatcctgaagaatggactgctcttgctccatggctggtggtgatggcatggtgtcctcagaaatgggtgctggagagataggaactggagaagtacgctcctgagtt

SEQ ID NO: 142853 - DNA, 391 bp, Glycine max
  unsure (1)..(391): unsure at all n locations
agcttnaaaggtgctgacgtatggtatatatattatgttnggattaagtgggtctaacttatgtcttatatgtcatcaagaaaggaaactcttttccatcttttttgtgattgtatggatacttagttgatgtggcaatcttttattcgagtattaggttcaatacaacatcaattctttcattaccaaatgttgcaacctacccttttgcgggtggcgcaccttgcctctattgggctatctatgctaggttaccggtctctctctaagaggaaaatcccttgttccccctacttatttttgggtactactcaagctacgtctatctttaaatttattttatctccgttttttttcttaaagtatgttttgccttttttttttttttact

SEQ ID NO: 142854 - DNA, 440 bp, Glycine max
  unsure (1)..(440): unsure at all n locations
agctntgaaaaacactntntattgtaaatcacttggttcaaccttngctaattcaattaggaattcccttcctaatattctagtgatcatcttgatgttgtgccttgtaatcttgaagtattgtcttgaattttaatcttgaaaagcccatttgcatcaattgcaacacatcatcatgatcatcatcaaaacatcaaagccaattgcatctacaatctccccctttttgatgatgacaatacaatacctgaaatcaagattcaagcaagcaacaaacaattgtatatagataaaatgtgcatccgtttttctccccctatatttcggaatacatgatcacttgatttctaagcttggtaagctttttcttaagcttttgctacaacctttntctccccctttggcaacatcaaaaagccaaagatctcggaaatcaacac

SEQ ID NO: 142855 - DNA, 432 bp, Glycine max
  unsure (1)..(432): unsure at all n locations
agcttcatctagagttactcgggtctgngtgagccatatggaatggagggtgatctgtggtcatgctgggtctcccactcgcttgataatagccaaaactccgctaatgttttcctcttttggtgatgcattgtcactgatagtctctaaaaatcggtgaaggtacacgaaagttcccttgggatctatcactagacatggactttcggatcctttccattacgttcctgaattaggggcacagagtaaactcactctggcttgttccttgatcgcatcatgcatctcttcatggccttataatggacatatcattcctacatttatcagttatcatattcatgcattgcatttgcataagtgattgcatatgcatacatctttcattaacatgcttctgttctgccaattgcatacattctattttcatcg

SEQ ID NO: 142856 - DNA, 402 bp, Glycine max
taagtgactgagctgcagctgtggatatggggacccatcacatgttgtttatgtgctgtcgccaaagtgacaacaatttttcacgttcacaaatcgcgccataaaccaccattccctagtgtccacctgcaactgagcttacgtactcccacgtaggccataatttcctttctctcaccaccggagccccattaattcttccaaactttctcaacatccaataatacaacattcacacgctcaaattattacacccaatccaaacagggtataggcataaaattcttcctcaaataccaacccaaatcacagcttctttcactataagacaccaataacaattgcttcgtccaacttgaatccggcggacgactctgaacttactggaagttatagttctaa

SEQ ID NO: 142857 - DNA, 429 bp, Glycine max
  unsure (1)..(429): unsure at all n locations
agctntaattattttacggttacatgtcatttgattatgactgttatgggagtgtttacatctttgtttttattttttttttcaattttatcttggagccactcataagtaccaacactatgtgagtgtagactgtattctttccaaacaaacaatctcccttcttctcccttctctttctctttatttatgtgtagttgggggtaactatggtcaacacaaaataagcactactaaaaaatatgtttatacgacggttatgatattcttataagacgattatgttcctagaatattttaaaaaaacaaaaaaaaatgaggattttatgatgatttttcaaaaactataagaaaatagattttttaaaacgattctctgaaaaatcgtctttgaatccttggtgttttttaaataaacatttaaagatt

SEQ ID NO: 142858 - DNA, 237 bp, Glycine max
ctcttaacactatacatattggtgcatcgactgcatttgatacaatttctcgcgcatctggccttaccagctctatgggctcgtacactacaatttgcgcaaccatacactgtgacatcaacaaccgtgactaaatcgcgaccaacactgcaatttagaaccttacttgctgcacgaaatattcctctgggtggactatgtttgacatcccggaatgatgaacgattctgactgagt

SEQ ID NO: 142859 - DNA, 428 bp, Glycine max
  unsure (1)..(428): unsure at all n locations
tgcttgtaatgtatatgttacaatgggctctaatattctataaaagttttaagaacaacccgtctaggtaattttttcagaaagacttcttacacaataagaaaagaaaagtttttcataaataccttatcaccagctaatgatagaagccctttcatattaatttttttcaaaagatatttctaaattattgttaaactaacattaacctatagaaaggttattaatttttcttttaatttcttgtttagtagtacttctaaatacatttatccaatagacccttaattattaatatatatcaacaatacttacatcccaattattacccaatcaaggcttgaaattattntatattaaataacccgatatattaaccaattacctgcctcgttttcttttctaaaataatttagcaattatttaaa

SEQ ID NO: 142860 - DNA, 361 bp, Glycine max
atgcagtgagctcataaggggctttttttatcgacgtgtctacgtttagtgttgacatattacttctttcatgcaaaaataacaaaaaaagctcattatgtccgtaacaaccgtgggtgagagagtgactacatcatatcctttgtgctcctacgagaagaataggtgaggaaacatctcccattgactgctaaagatcagaaagaagaatctgacctcggatttgctatatagaatcattcttgcccatccataatgacaatacatactcttgattcttggtgagtgtggatatgcttacacccacacaatgcttgacaaggcgtggtgtactcacttatttttaccaaatacttaacct

SEQ ID NO: 142861 - DNA, 437 bp, Glycine max
agcttgaaagagcccgggttgtcaaagtttattttttttcatagccatcaaagtctgaagagagtatgatgaactaaaggacgtttatatggccatcgatgaaaccttggaatgagaaaccaagaaagcccgaaaggaagaacacatgccagcaaagttttgaggggctttatagggcagcaataataagctcaagctccgaagaggtgaaaggaatcatcacgggtcaaaggcatgatcttgaaggacgagctaaaggcttaccttaagtcgaaaagaaatttgtcccaacagttaagcaagactgaatggaatatgtgggccgtcatcgatgagtgcaaagagaagctaaatctagcggcgactcacgagcaaaggctagaggatgagtacgccaagatatcagcagaaagcgaagcaagggagagggtaattga

SEQ ID NO: 142862 - DNA, 423 bp, Glycine max
  unsure (1)..(423): unsure at all n locations
tcaaatcactcctacatttcttctctagcatgcattttctttctttctttacccgctcctcacgtttgttttttttagggaaaaacaccataactaaacgccccacaaggcattcctatcgcaccagatccaaatctataacgatgggtgatcaagaagagacacaggaacagatgaaagccgacatgtcggctctgaaagaacaaatggcctccatgatggaggccatgttaagtatgaggcagctcatggagaagaacgcggccaccgctgccgctgtcaattctgctgccgaagcaaacccgactctcttggcaactgcgcaccatcctccctcaaacatggtaggacggggaagggacacactggggcacgatggcagccctcacctgngatacaaccgagcggcttacccttatggat

SEQ ID NO: 142863 - DNA, 433 bp, Glycine max
agcttgatgatatggtcttcaccaacgaaaggatcaaagagggactaaaaagaggcaaatctgatcatcatgctttgataaatgccaaaacaactagggcaaacgaagagggtgagaatgagggagaagcccatgctgtgactgccattcctatccaaccaagttgcccaccaacccaacaatgtcattactcagccaataacaaaccttctccttaaccaccgcccagttatccacaaaggccatccctaaatcaaccacaaagtctgtctaccgcacttccaatgacgaacaccacctttagcacaaaccaaaaacgccaaccaagatatgaattctgcagcaagaaagccttagaattcaccccaattccagtgtcccatgcttacttgctcccatatctacttgataattcaatggtagctataaccct

SEQ ID NO: 142864 - DNA, 419 bp, Glycine max
agcttccccaacatgcaagtagtacaacattcttacagctcaagctatcacagccaagcaaaacagggcaaaggttgaaaactctgcccaaaataccaaccaaaatcacagcttttttcacttaaagaccccagtaacaacttcttcgtaccaattcgttaaccgttggatcgactcgaaaatggtactgggagtcttttgcacataaacctacattatgaccgttgggatctactagcaaacattcagaactcattttgcactactttttccacaaccagcaaaacataagcattttctgcacttatgcaaaattctgctgcacaatttcacagcaaaattctgcataaagtgtagatttcaaaatcacacttctctcatccaatcttgcccaataaatcctacagtcccaaatatgt

SEQ ID NO: 142865 - DNA, 101 bp, Glycine max
ctttttcacttaacgcatatgcacattatcacatcactgacatagtcagcatttctgtcatcacttacaactttaatgacagcttgccaatcttagataac

SEQ ID NO: 142866 - DNA, 435 bp, Glycine max
  unsure (1)..(435): unsure at all n locations
agctnggacgaataaggtgatgcatctaggatttacaacttctaacaagtatgaaaattgtgaatatatattggttttatggtttacacacgaatggataaaaataattgtttgtgttttacaaatgcagggttaagtttgcacattgggccttaaagagactactaccgaatagccttggagacctatgtagtgtttgagaagccatgaacaatatgatcactctacaacatattgaaattaaggcatcgtttgagacaactacacatgtggttgggcatgtttttaaagttaccttatacaagaaactatttggcatggtatcaaggtatgtgttaaaccacattgttgctgagtttgagcatgtaaattatgctagcattgatagttctcattatagatatataatgagaactactcacggtcttccatgtg

SEQ ID NO: 142867 - DNA, 170 bp, Glycine max
tacgtgaggcattgtgaatatcgatcttcatacggtatgacatgagacagatatttttgggcgtggggtcctcccactgagggagtagatgcattgaatgatgtttatataatcaaagatgatcttgcgcactgtgccttagacaaacttactccccactgatttctaga

SEQ ID NO: 142868 - DNA, 431 bp, Glycine max
  unsure (1)..(431): unsure at all n locations
agctngtccaagcactagttactcatgtcatttgtttatctttcaaaagcaaaatcagaattggaacaccccctatggttccaattgccactctcaaaagcaaaatcagaattggaacaccccctttggttctaattgccactctcaaaagcaaactcagatttggaacaccccctttggttccaattgccactatcaaaatcagaattggaacatggctnttggttccaattgccaccctcaatagcaaaatcagatttggaacaccccctttggttccaattgccaccctcaatagcaacccaaattctcctgtgttctgtatttctcccttttcatatatggataaatctcggtttgtcttgctaatttgcatcagttgttgttttcttcaccacaatgtctctggttctagatcattgaatcacctt

SEQ ID NO: 142869 - DNA, 422 bp, Glycine max
  unsure (1)..(422): unsure at all n locations
agcttgtcacaatgaactagtgaagatgtttgtggtcattgggcttcctttctattttgtggagaatgaaatctttctgaagtttttgagccttcttcaaccaagatttagtgttccctcaagaattgcacttgtgcgtcatatnttgacactttgggatacagaaagaacaaatttaaagaagtttctttccgagcattatcaaagagtatgtctcaccattgacatgtggagttcaagtcaaggtatgtagtttatgtgtttaactgtccactttgttgataataattggaagctacataagaagattctaatttntttcaagtcacaagccattcagttgaggttatggctaaaactgttgaattatgcatgaatggttggggattgagtggtgtttttagtgcgacaagtgataatgc

SEQ ID NO: 142870 - DNA, 438 bp, Glycine max
  unsure (1)..(438): unsure at all n locations
agcttgatcttcatgttgctccccttatctctaacaatttagaggaggatacatctattgaggaggatctgtgtatcaatgaggaggatctcatcatggattcttctgatgagttttcttctgactatacttctttttgggtataggttttccccttatatgtatttttggatgactagacttaggttcagaccttttgtatctattcagtcattatctactttatattactttacttgttactttggggttatatatgctacttactggtttcacaaagaggcttttgttttgctactcattatgatgcatgaaacttatttatttattattggtgatcaaggaggttcacctatttatcattacttgttacttgagcatgtaacatttatttatgttgcggatgtttctattntactcatgacatgaagttttaac

SEQ ID NO: 142871 - DNA, 441 bp, Glycine max
  unsure (1)..(441): unsure at all n locations
agctntatcaggctgaacgaataagaatttgctatctttaaacaccctngaataaaagtctacaacgaaggtgtatcaaaagcagaaggaagaaaagggtatatcaaatgtgaccttaagtctcaaacttgcgtttatttgaatccaatatcgaaagtaggtcacatttgttctttagatccacattttcagtaaagtgccaaacatattattagttaaataaaatttaaccagttctaaactcatattcctatattacaaatttgagtctcattcttaaatgagagagtacttcataccacgacacagatccgttttagttaacataataccttcatatggccatataagacaagcacattcgtaattaattatatattgatctagcttagataatgaaaggggactcccctggataattttattagtaagataagtgaa

SEQ ID NO: 142872 - DNA, 418 bp, Glycine max
  unsure (1)..(418): unsure at all n locations
agcttgcatgtcaaaaatgtctgctgaaagattcttattcaacatttattccactatgaccccacatttcgtgtttcttcataaggaaattaaatcatgtattccccatacaaaaccatattnctaatattattcctgtatatgcacttggggtgcaaaaactgatgaccctctagggcaatgaaaatatccctcaaagttccctccaccggctttgttgtccccacatatggcgaagaccaatacaaagtctacgcgctaggatttggtacgattactgctttttaaggtataatgaaaggagttctttggtgaggtcgaacatcttatgtataaatctatttcaacgctgaaaatatgtgagtgaccctgatgcttttaacaaaaagcttgcggctttgatgtgctctatcgtggt

SEQ ID NO: 142873 - DNA, 434 bp, Glycine max
agcttcatttctaccaaaaggtatttctcattaataatcttaaacttaaggttctatacatgcacttgtccaaaagctaaaactaacttatgataaagctaatacgtagaaattctgtcattaacttggtcaaaagctggttttaatttatgaataagctaattttaacttagggacaaacttcatttttccttccttaatttatgaagaagcttgttgttttcttttcctgtgagtgattactgacaaaaccagttttattatacggaaatgagttttggtaagtaagaaggataactcaatcaaatttggaaaactctgaacacagattaattagaagtaatggacacaatggtggtaaaattgaaaaataaatacctaatagttatcacaaagcacactaaaactttatgaaacaaagacagaggaaaaaa

SEQ ID NO: 142874 - DNA, 457 bp, Glycine max
taagtcacctgcggcatgcaagcttccacatacttgatacccattctacattttattctttatatgctcgacagaataacctccgaggtcaagatagaccaaattggagagattcccaatctgagatggaatcttccccatgaatccagtaagagagaggtcgaggtgagtcaaggaagtcattgtcccaaggaaagaaggaattgacatacctgctccaaggaaataattgccgctcaagttcaagtgattcaaatgctttaaatcagccaaacaaggacttatctctccaccaaactgggatttctcataagcttcctcatcgaagtgatagtagccatcatagaaagcagcagaatacgtagtgttgaggtgaagctgaagaacatgggaagtgacgttgtggcagaggactccataccagtggcaacagttggtatgattattattccaagac

SEQ ID NO: 142875 - DNA, 425 bp, Glycine max
  unsure (1)..(425): unsure at all n locations
agctntcattgattatgcttagctaaaatatattcattgcacttgagctttattggttaaccactcatcgagtgttattgaatacatgtattcattcaaactactatttgtgaaagccaagagtttgttaatgttaaacaatacttggattttctcatattcagtgggagactaacatagtgccagaagatggctacaagaatgtttgtatagctaggattgataggaaaaaatgctcgttttgtataaacctattgattagcgaaatcctttacgggtgtgtaaaagagaatcgaacgtagttgtatctaagtgaattaacataaatcatgtgttnctaggtctttccttaacggatttattaataatactgttagcgtctttagtcattcttgtcatacaaggggtttcttgaaaacctatta

SEQ ID NO: 142876 - DNA, 432 bp, Glycine max
  unsure (1)..(432): unsure at all n locations
agcttagnggtttaggttcctttgaataagtttctatttttttttatccatgcgatgcacgggttaacagagtgtttgagaatctttattttgattatattttgtatatattttgacaacaaataacaatttatagagaactattttattttgagaacaaataacacatgaaaaatgctggtaaaataaggacacatgacactataaaaaaaaataacattctcttcggttaattataccttttttctctgtttcataaatgaataacaaataccggaaacaaattactcaaataatgattacaacaattaaatgttatttcataaatgaataacaaataccggaaacaaattactcaaataatgattacaatagttaaatgccgaatccttcaatcgtataagacatntgcaaacaacctgatgaaagaaa

SEQ ID NO: 142877 - DNA, 433 bp, Glycine max
agcttgctaatcacagggcatttgcaaatggttttgtggagactcattttattgataactacaaagaagacctctttgttgatgctaacaattcagtgtctgtgaaagaagcatatgaagctgctagacttaatgcatccctggtggccgcatgcctcattgaaaaagagcatttcatattggctagaaatccacctggtaaattgtcccattcttgctgtgtaatggtgagttgattttgtaattttccttggtatttacataagcatgttcagggggcagcagcttgctccctatatggtattcttctccacctttcagaatccatcatcaagctaagcgtaaaatggaacttgagtgggataatgaatatggtagtggtagctcaaagatcatgaagcttaccatcacttatcagcctgatgggagatac

SEQ ID NO: 142878 - DNA, 415 bp, Glycine max
agcttagcaccactatcgcgcttagcgcgagttaatggatttggacttggcgcccatgttgcactgagcctagcaagagatggacgactcgcttagcgagctgatctcgcgcttaaggcgctgcttctattcaagtgctcttccagattcctttttcacgctaagtgcactgaagccgtgcttattgacggatacccactaagcccactgagttcgcttagtgcgacaaccactttggcacttcaagaaattagctcctttttacctgaaattgtacagattttaacattaattccaataaaagagacccccatgacagagatcaaaacacatcaaagtttatttacaattcctacaaaagaactatatatttggggaaaatatacatattttgccaaaattttctataccaaag

SEQ ID NO: 142879 - DNA, 432 bp, Glycine max
agcttcaagaaaaagatggtctcagcaaactctttatttttatataggaattctatcaatagacctccaatctttaatggagagggttaccattactggaaaacccgaatgcaaatttttattgaggcaatagacctaaatatttgggaagccatagaaatagggccttatatacccaccacagtagaaagaattacaattgatggcagttcatcaagtgaaagtataactatagaaaaacctacagatagatggtctgaagaagatagaaaacgagtacaatacaatttaaaagccaaaaacataataacatctgccttgggaatggatgaatatttcagggtttcaaattgtagaatgctaaggaaatgtgggacactctttgattaacacatgaaggaactacaaatgttaaaagatctatgatatatg

SEQ ID NO: 142880 - DNA, 255 bp, Glycine max
tatactatttttgtcataacgggttgccatcggttgacctccagacttcaatgcagagggatgctgtaactttgaaccatcggatctaatatctcatgtaggcatgaacctttgcttgttcaagaccttaaggaaatggcctgatcttccctccccacttgaaagaagcacaatagggggtatcctttactgtggaagaatctttgttgctttgctcttcgatggtcggtcttcttacgatttgctggaatactt

SEQ ID NO: 142881 - DNA, 385 bp, Glycine max
agtcttactaatgtcacgtgctcatgcaacaattgttagtcgtggctatacgagacatcttgccaaacaaagtcaggttaacaataactcgcctgtgctttttcttccattctatatgtagcaaagtcattgatccagtcatgtttaatgagttggaaaataaagccgcaattatactgggccagttggagatgtattttccccctgctttctttgacatcatgattcacttgattgtgcatctggtcagagaaatcaaatgttgtggtcctgtttatctacggtggatgtaccgggttgagcgatacatgaagatcttaaaagggtatacaaagaatctatatcgttcagaagcatctattgttgagaggtacattgcaaaata

SEQ ID NO: 142882 - DNA, 132 bp, Glycine max
  unsure (1)..(132): unsure at all n locations
cctatagtcctctcacatgcggaggttgagccacgtggctatctagacatttgcctggaatgctcngaatacaatatttcgaatgagctcttacatacatgctataatgctcaaaatgcttgaaacgaccat

SEQ ID NO: 142883 - DNA, 428 bp, Glycine max
agcttcagctcccactccttcatgaccttccacagttagctccaatactttacctgccatgttgcagatccttcataaaggccaggtcatcatcatgcagagcctatagagctcaggcctgcaacctatcatgagcatggaaaagttcattatccaggtggattgaccaggagtccaaccttctcctttgggagggggtgaggcctccgcagcccaagagcctgtgcccgaggatgaggacgagtctctcccccctgagcctttcatttatgagccagacacaaagattgctcaggaggaggcaccatcaccagagcttatttctcagtcatcaccatcaccagctttagtccttgaagacccagagccatctgcaccagcaccgatacctgatcagcctcttgctcaggaccctctagctgcactaa

SEQ ID NO: 142884 - DNA, 439 bp, Glycine max
cggatcttaagtcaccgcggctgcagcttagagaacctaaaactaaggagtttcttaacaaaaatcaattgaggaagcttcgccaagtatccccattgaaaaacctttattcaaacctttcaaagttagtgagaaggctaaacgaaaaattatggaacttagaaaacctaaatccttaattgaaggcataggtgataaccatagtgaattacttaacaagattggtagtttacttaaggtcattccaaatactccccaagcctcggaaaatacttccaaaatggtaacaagaagtacctccaaattaattaatgttattaatgaagatagtgacctaaactcatacaacacaactgaaatatgatcagtgtcagaaaagaatataagtccaattaattcccaacactgtgaaacaccctccaaattatattatcaacgt

SEQ ID NO: 142885 - DNA, 390 bp, Glycine max
acctgcggcatgaagcttccaacattcatcagttagcacagacacgtttttcttgttaacagattactcaggggtgtggtaattttggaaaagtccttgatgaatcgcggatagaatccagcgtgacccaaaaaactccgtattcctttaacattaaccttaggagaaagtttatcaataacatgatggaagcttgcttgtggggcatctatggaggctggatctttaaacttcaatgaggtcctttaatggtgattttccaccatggagatgcagcgaaagacaaaggagaagaggtgagaggagacgccatccactatggaataagccatggaagaaggagcttcaccaccaagattaaccttggataataagcttggagaggatgct

SEQ ID NO: 142886 - DNA, 436 bp, Glycine max
  unsure (1)..(436): unsure at all n locations
agcttgtcaatgacgcatctacttcaacgtcattcaaagttgattgtctcctaaatattctggatttgtttattagtcagaaatagttcaatttgaacaaaatgaacattgtctcttgaattatattatggggtgtaacttggaatcttttgagttcttgattttatgcaacaaaactaaaaactaaaatgatgtgcttttttaggggtaagggaaaaaaggaaaagtttttaaatttaaattactttattttttaaaattaaaatgtagtgacaatataattntttttacactattatctaattataaatttgttaaaatatttaatttaattntttcttctctcttccattggtactttccttttttggttcttgcattcttatatcttctctacctctttcactcgtttctgttccattcttcccagaacttg

SEQ ID NO: 142887 - DNA, 294 bp, Glycine max
tgactctactacttcaactatattcatgaaatgacgccttcataatattcaggacctgtcaactaccctggagacaagtaataaggacaaaatgatcgtagtcatttgtagtgtatgatggtgtgccacgtggattcggttgagacttagataacaagctctaatactacgtgcggcaatgacttgctgcactacgtgtattgcctctacggacccgtttgacaattacaccctctttgttactatgatgccgttgtgcacaaaccattgcatctatgaccatcacataccctt

SEQ ID NO: 142888 - DNA, 428 bp, Glycine max
  unsure (1)..(428): unsure at all n locations
agctntaagaagaggtgttgaagaagtatacctcttttatttgttgacaaatgaagaagaatcaaataatttgtatggagaatcaaacaatattgaacaagacaatgaaggggaattagaaaatgactttgaagtttacaattttgaagaggattagacattgatgtttgttagtcagctataatatttgttattagtgatatgtttgttttcttttaatacttgaaaactttgttagtgtattttatttttgttgtcatatggaagtttgttagttatataattttcattcatcccaatattttatttgagtgtttatgttaaaatattatnttctatatatagatatgtcatcaggtggtgctgaccctccccgacccccgtcttatgactccagtgggaaaaggagaactaccaaaaaaaaatta

SEQ ID NO: 142889 - DNA, 317 bp, Glycine max
ttatactacgcgtggcacgccctcctaccaaatggctgtaaaaaggccctatctatgtgaacggccctgacccctatgccatgttttcgatgtctacagaaaaacaggacttcggggaaatccaaacacgtcttcttacctcttcaaatgattccaggcagttcgtgacatttccgtagttcttcgctgtgatacgctgttttctgcatacttggaccctcccgtggttttgatcgagacttcaaacttcttatatgtggtttctctcctacatcacattcggtgttttcttctctttatggctttaccattattag

SEQ ID NO: 142890 - DNA, 397 bp, Glycine max
  unsure (1)..(397): unsure at all n locations
agctgcaanccgctgatatggacagccaaggatcttccacggagcatcttcaaaaccttacctgcaaagtgggaatagataaatgtactattcactatcttgagggggagtgatgtgatacataccataattagcaagataatatttgtaattaaaacagaatggatttttgattacctgaacagattcgttccattatatttcttttcttaaataggtcgccggcagctttaaaaaaagcctcgaattcacttcttgaagacaaaattaccataataatcaattattatcttttaagaactcaggatctacaaggaccaattctaacttngaaagggccacagtcaagcttacttttaaatgaatattataaaaccctaacttgaaggcccgttga

SEQ ID NO: 142891 - DNA, 384 bp, Glycine max
ttaaacaaaaaaaaaatttccaagaacaaaaataaaaaaacacttatttactagaataaaaaaatatatttaaacctaattatattactaaattcatttatagcaactaaattgaaattaattttactaacacttatctaaacaacccgtaaaatgtgactgcaaataaatatagtatcatagcaggggtcgatgcaagtgtgaagtgtccaaagatattaacttttccgttgctgcatcctctactgttagtaacggcaaaatgtagaattatgggtacaacatctataagctcgatcaaatatgagttcaagatgtatttataaaaagaaagtatgttatgaagttcgtcttgaagccaatataatactccctcctttcttt

SEQ ID NO: 142892 - DNA, 249 bp, Glycine max
ctcacgcgctagcttgcatgttattattgtatcatattgctactaaatctcacattcttattctttaaggtgatttcctatcccaatatttacttaacaaaccttatatttcgattgtttactatatgtcgaaagtattgagtagcctaaacatcttcggctgcgagaccatagctatatatttgagataaatattactcacacttttttttcatcccagaagatgtcactgcttatacttattgtatc

SEQ ID NO: 142893 - DNA, 380 bp, Glycine max
agcttaaagggaagagagagacctatcatgttctcatagcatgatcttgaaagaggagtttgctgcttgctcaaagtccaaaagaaacttgtctcatcgtttatgcgagacagagaccaacatgttagccatcggcagcaggtgccaagaagaattaaatctagccgcggcccacaagcacaaagtggcagacgagtatgcccaagtgtacgcgacaaaggaggctagaggaagggtgatcgacgcattacatctagaggcaacaatatggatggaccgatttgctcataccttgaacgggagtcaagaacttccccgattgctagccaaggccaaagcaatggcggacacctacttcacccccgaagagatccacggac

SEQ ID NO: 142894 - DNA, 423 bp, Glycine max
agcttcaacttatgatttataatactataaaatcccatgtcagataagtagaaacaaacaaatgtgtattgaagtatagaggaattgaatccaattggtttgaatcttttagacgatacatctttgaagcttgatacttgctagtctaatctacaccctctttaataggttcacacatcacatgcatgccaaatatgatatacacttttgtttctttatttgcccaatgtaaaacttgatgacctctaactcattgcttgagctcacttgatatatatattttaatcatatttttgcagttaatcatgatcaacttaacacatttatgaatgtgtatataaactcaaaattactataaataaaaacaattttcatttttatgcaaattcttctctaaccaattacatctcataatagaacaga

SEQ ID NO: 142895 - DNA, 437 bp, Glycine max
gcttagcagcaaaactgaaaacagaaacatcaatcaaatagtctatgcatgtcttttagcaattatacttagaaaatactagatctaaaattaaacaaaccagaagcctccactgcttatggtgatatccaattgtctgcaatagacatatgtacttgcatagacatatgtacttgcagttatttgagaaggtcctcaacgagagtatgataatttaaaaattacgcccacacttgtacaaatccagtcctggtacagtcttgctctatgctaagtaccaggtggcaaaaacatgaccacaatcaaacagtcataacttttcatttaaaaattgaaacatctcaatcaacaggccaaacaaattatccaaacagagggaccctacggaagcagatgtacatacagaacatccaagggccagaaaaaatattccgata

SEQ ID NO: 142896 - DNA, 408 bp, Glycine max
  unsure (1)..(408): unsure at all n locations
agctttctcaactaaaaaatagcataacagtggtatggctaaagtcacaaaatatcattttaaactgatgacgtaaataaatcatggtactatggtaggtcagcatacatgtcattacattnggaagaaattgctttaagcatgtaaagatagatcaccaacagaaaactgaagttaaattttcagtagaacactgctcatattcatagcagaaatagtctgtttaatgatatatatggaaaggatataatatactatagaatagaacatttcatatttcttttaattgggtgtgcatcctataaacagtaatattcatacccaagtttatgatataatccaatcagctttaacaattggctatacttattattcattccaaccacatgacatgaccagcaacattta

SEQ ID NO: 142897 - DNA, 436 bp, Glycine max
agcttaactgaaacagagaacaacactgttcttcaatgcaatgcatgcaactattcatatttctaatgaacatatcagtgaaacataaataacaacaatgaaaggctccaaatgataaaagccccaaattttccctaatttgtaaccctaaaaacctatctgaaacataaatagaatcaaaccaactaataaagttccaatatcaatgcaatacgaaactaacaacaatgaagtgctaaaagattaacttgcatctatatttgaaatgggtatttctgtaaaccctagaactatgaaactgtagaagaaaaatcagaatggaagaaaaaacaatcaacaatgaagctcaacgatgaaaatggagaagaaaaaacgatgaagattatggaaattttcagaaacagagaaggcgcaacataccttataacctcgtttc

SEQ ID NO: 142898 - DNA, 335 bp, Glycine max
gaagacccttgctcaaattcgaccagctttctcttttgcaacattacacccaccactcacacttctgaacttagcatgtctcactcccatattggttatcacataatgagccaaataggagtgaacattggatgagtattctcaagggagatgcacaagtttgtaatgaccaaatctttaaccaacccgccaaagcctcttaatattccaactgtagtacaactcttttggcctaccaatgggtaaatggtaaccatcctcacctcctcatcctcaagaaggcaaatgtttgcactacattgatcaacattggtgcaaccttgtagagtttgatg

SEQ ID NO: 142899 - DNA, 431 bp, Glycine max
agcttgtaggcctaagatcttattcattaattgattcctttgcttcttggaagatgaatggcagctgaatggataaggaagagagagaggagacgctccttcaaggagaagatgagtttataaaaagctcaccaccataggaggccatggattagagcttggaggaagaaggagatgaatgaagggagagggagagaagagcacgaaattctgtgctccaaatgagctttgaaatctgaagtctaatattcaaatgatcaaagttgaaaaaaatgcacacacatgacctctatttatagcctaagtgtcacacaaaattggagggaaattcaatattcacttgaattcgaaattgaatttgtggagccaaactctggagccaaaatttcactaattatgattagtgaatcttagttatggttcagcccact

SEQ ID NO: 142900 - DNA, 440 bp, Glycine max
agcttaagactccctagaaccatcatacaccatctagagtatgttatagtcaaacaaacaacaaatttgtaatttaaaaaaaatccagctaaaccaaacactttcaaataaaacttcaaaatgtactgcagattataaaaattacaaatattctaaatagactctaaacagaagaaaaagaaaaacgtatcaaatgaaagacctcacctcacccccgaatcctgatccaaatcttccctctcagtctcactctctccgagcaagctctttttttttttcctcttcaatttggaaactttagtgtcccaaagggttccttgaagattaagaaaagatgggtaaggctccgatcggagatccaaagcttaccctgcgaaatgcacgatgcgagaaggagatggataaaaagcacataacaaggaaattatggttcacatggg

SEQ ID NO: 142901 - DNA, 460 bp, Glycine max
gatccttaagtcacctgcggcatgcaagcttctatctcataaccaagatgggtttatttcttttcatggaagcccacgatattaaattctctgttaaaatcatatttaacacatctgaggcatgtgcaatatgttcaaactttgtatacattgatataagaacattttgtgcaatcaagtgatgatcataccctgatttaatgacatgaccatgcagctgcccacctaaatctatatcctccgcaatgcagcaagccttaattatgcttccaaaggttactggtccgggaaataacctgatcgcagcatttgaatatacatgatgatggcatcattctcttgaccattctgcgagtatccagagatcattatattccaagagaccacacttcgcagctgcatcgtgtcaatagcttttctagcatctgtcatagaaccaccatttccatacatattaaag

SEQ ID NO: 142902 - DNA, 412 bp, Glycine max
agcttcttatccaatgctcatcttggaggtgaagctcctttttccatggcttattccctagtggacggcgcctcctctcacctcttctcctttgtcttccgctacatatccatggtggaaaatcaccattaaaggacctcattgaagctcaaagatccagcctccatagaagccccacaagcaagcttccatcaagtggtaatcagagcacaagagcttcaagtaggtgctcgttaaacctccattaattttttgctttaccttcccctccattgttgattcttcatttttcttcatgtatctcctcacatgtcttgtgctaaatgttggtaacatgattctttaatgtttcaccgattaacctgctatagaactagatttgatttctatggtcaaatttcttgtcttgttc

SEQ ID NO: 142903 - DNA, 429 bp, Glycine max
  unsure (1)..(429): unsure at all n locations
agcttatggcggcaaagtgttagtctataagtttgaagcatgnngatgnnggggtttatgaacactgtatccttggaaagcagaaaaaggttagcttttcaagggcaaggaagactcctaaagttgaaatgctataattggtgcacacagatgtttgggggtcatccccagtgaaatctattggaaactcacgctattatgtcacctttatcgatgactctaccaaaaaggtatgagtttattttcttaaaaataaattcgatgtgttttttatgtttaaaaggtggaaaacagaagttgaaaatcaaacaggtctaaaggttaaaagtctgaaatctgacaatggtgaggagtatgttagtcacgagtttaaggacttatgtttagaacatgagattagaatgattaagacaataccaggaacacttg

SEQ ID NO: 142904 - DNA, 217 bp, Glycine max
gattcttggataacaaacccatgatagctattctaaggctaagtataatactaatgatgaatagccacaatctgtgctcaacaaccagatgtggtcgtccgactttatatatattgaaggactacactatgcattctcatctatcatggacgcatccttcaacggatggggaggactactagagaaaaaaatcttgtgactaatatgtccctatggt

SEQ ID NO: 142905 - DNA, 426 bp, Glycine max
  unsure (1)..(426): unsure at all n locations
agcttattcagtnaacactctgtgagtgattataatgcattttcttttaaaatatattgtttgtgaaaggaaggagtaacttattgaccaagaatactttggtcttaatcaaaaaattaattagtggaacccttcaagaattgaaggagaactggacgtaacccaagagttggggcgaactattacaatatatgtgtgtgtctctctactgcttctatataactgattcgtttctataaatcacttctacactactatccaagttttgcgaactatttttaagtacaatatgatttcgaaccccttggatgaagctcttcatccattgatatctgtttaagaaaagatttttattagactataattttatctcatcacactattcaaccccccttctaatgtgtttcaggtactttaaaaaaatgt

SEQ ID NO: 142906 - DNA, 332 bp, Glycine max
gcgtctcgtggtagcatataacgtcccgagagcgtacgcaccacttacagaccaccatgcctagcgtcctcctcaatcaattattccacggcacctcttcctacactaatgacagattcactggtgaccgctacatgtgccatcatgatcatggtactcctgtgtggacagactgaagcaatgtgaccgctgcctaagcattagaagcatctaatgtacttggcactagtggcggactatgaagcagaactatgcgatggtaaccattggacacaggcgactcatcatgtggactaagcgagtagacatcctccttcttggatctgttgata

SEQ ID NO: 142907 - DNA, 293 bp, Glycine max
agcttgtgtgataatggggttctcttcactttgttggctaggtcgccgactggcgattggtgccaacaagtcttccacatccataaagggcgcattaacacaacatattctgtagcccaccttcaactgagctcgtgtactccagctatctccaaatctcatgggacagcacatctggtccccatcgagtctgccaagcttccacaacatgcataagaaacaacatattatcctaatactctatctcagctcagcgatacagagcctacgctggaatctttgtcaatcatcaa

SEQ ID NO: 142908 - DNA, 438 bp, Glycine max
  unsure (1)..(438): unsure at all n locations
gcttcttatgatcaaagatcagacatctttngatgctctaaatttcatgctccttctttccctctcccttccttcatcttcttgaagccttacttctacaaaatccagccacaactcagcaccacaactttatttcttcataggcatcatataggaaacttagaaaacaaaacaaagttcaacacaagactacttctaggaattgatttagaacatgttatgaactaaataacatgcatgaattagactcaaaattcaaaagataggctaagaatcacaagaatacatgaacaaatgtatctagaattcaatcaacaaaatcaaaattcaacacaaacttagaacataatgtgacaattattatgactaaacatgactctaagacaacattgattaagtcgattacacttagaattttgtgtttttttctaacaatat

SEQ ID NO: 142909 - DNA, 407 bp, Glycine max
  unsure (1)..(407): unsure at all n locations
agctnganaggattgatggggacccggtgttgagataaactaggatatgggctacgtgggagtacgtgagctcaaatggaggtgggcaacaagggatggtgggtttatgcccgctttgtggatgtgaaaaacttgttgtgcaccatcgcccgaccgccacctaataccacatgtgatgggtaccccataatcctacaagcttgagatgaggaagtgttgaagggtgaaacttcctgcttttattgttgaccacagagtggtacctggagatatgtcgcgggggtcaggagaccttggggacgtcaggtggggtgctattgcccaaaaccaaacttgaccaatcccgacccaacccgggcatattcggtcagtgagaacctgtgatgtacctaaacaggcgagctcct

SEQ ID NO: 142910 - DNA, 261 bp, Glycine max
tgggacttgataactgctcttaaccagcaccttacttcttggagaagctgggatcatccgacttcgggagacattgcttgggaggtagtgataagaaacaatcctgaattggtcatgtggaagagtaaagatgacttctgtaggactgggccttatactgcgaatatgttcagtggagtatatgcgccgaggaatatcctcctttataagtggaacattgtgagtaacacaacatgaatgtatgtccaatacaccttgatt

SEQ ID NO: 142911 - DNA, 438 bp, Glycine max
gtgcaagctttcgtcttacagaatgcaaaaagttgatatggataaccactcgtgtatttccgcccgtcagcgtgactcaaaagtcagtatgacagatcttttgagcacggaagatgacgtaaatcaccgcgtgtaaacgggcttgttggccgcaattgacgaatggcgcaaaatacgacgttagtctctacgtgctatcaggcttttcgtcttacagacagcaaaaagtttatacggataaccactcgggtattttcgcccgtcagcgtgactcaaaagttagtatgacagatcttgtgagcgcggaagataacctaaatctccacgtgtcaacgagcttgtcggccacgattggcgaatggcgcagaagacgacgttagtctctgcgtgctatcaggcttttcggcttacagacatcaaaaagtttatatgaataac

SEQ ID NO: 142912 - DNA, 443 bp, Glycine max
gacctctgagtcacctgcggcatgcagcttattgggacccagaacaatttttatcttctctttcagaaccatgctatgtgctcgcgactggtccctttctttccttcgcaactagagttcactattgctaccccatatagcttacgcgaaattagttccggccatactcttccttgcgagccctcttggtctttttataagggctcttgcggtaattggattctcttcccgtaacccagcacactccttccgaacgtgtgtagcaaccaactagaacttctccttggcgaggtttgcctttcctaacttccttttgagagcttggactatctcggtctcttccggtgcttcaaaattctcttcgctgacgacttctaacttggcgagccaatcatcaacatcgaatgcgaacattcagccattcgtatacccaccaatgatgc

SEQ ID NO: 142913 - DNA, 228 bp, Glycine max
atctcatacaagtcttatgaagaagattgcaaattgaaacacacaaaaagcttgacgcaagaattgtatcctttcatatcgagattagatctctggcgatcgatcaccatcatgttgacaatgttggaaatcacatttatgacacctgtaatcgattacataagtcttgtaatcgattacacacacgggatcttcagagagttatttccacgagacatatctattcga

SEQ ID NO: 142914 - DNA, 425 bp, Glycine max
  unsure (1)..(425): unsure at all n locations
agctngcacgaccaaactgatggcatgaatcattttntaataacttatctattattcatccttaaccctaagttaaatcccaaatgaccattgcaggatttgtaacaccctgagatgttattaattataaatcgatgtttaattgtgtttagcttgttgtttgaatatatgtttgacttgaatgatttgaaatatgacttgaattagtcatgtgtgaatttcttgatgtggatgttgaattatgtggagttttgttgagcgaagttgaaattatgagattttagattttaccaaaacctatttccgtgaaatcgcgataccggattcgttaaccgttggatcatcttcaaattttgtttggatctttctaggatatgtttctacattctgactgttggaattttgaaaataatatactttggtct

SEQ ID NO: 142915 - DNA, 307 bp, Glycine max
gatatgccaccccctgatgggctaatacttctaaacagcagcttcaactgcgacaaccttgtgtttagaatgtctgtggacctgcatgccatacaatactactccaattcaacatgtgcgacttcctcgctgtagacgacgaacaattgagacttctactcgaccgtctcttgaataactagagatgcgaatgactctgcaccacatgccgtgataacaagagactcgagcctgcattccgagcttaactaatcagatgggacaagtggctacacaggataatcaactacagtcccacaagtctgac

SEQ ID NO: 142916 - DNA, 410 bp, Glycine max
agcttgaagcccactaaaagttattgaagtgatttctttcacaatagaagtgttctcgttaaaaaaaagtttaagcaaatgggctcatacatttttttgtatcctggataattgacttgtctgactttcatttcaagttggtgacttgggcctgtccaaagtgaaatgccagactttgatatctgggggtgttagaggaactctaccttggatggccccaaaactgctgaacgggagcagttaccttgtttcaaagaaggtgtatttggtgctttaacttatttgaaacattgatatattttgatgcttccttcatattttgccattctataacctacttttgtttctcatatttatcgattcaagttgacgtgttctcgtttggcattgtcatgtgggaactcttcacg

SEQ ID NO: 142917 - DNA, 93 bp, Glycine max
ccaaagcaggtgggcccatactttcctgtgcattctgtttcatggactatgtagcacaatcattgatgctggcgactttggcgatgctcaaaa

SEQ ID NO: 142918 - DNA, 322 bp, Glycine max
agctttacacaaacgagatcggtgaacgattatttttccacctgactgatgcacacattaagctatgccaagttgatccctcgcacatggaacataagaacattcacataatattagaatccgtgcgtatggggtttatacccctgcattacaaatatatagtggtgcttattacagatataacattatgctcttttgctatcgacgttaagtagagaatagaatcttcccgttcaaattctgagattagtgtccagtctcacttaagattcactttcatgacactagagatcaaatagaatctagcattaccagtttaatg

SEQ ID NO: 142919 - DNA, 418 bp, Glycine max
agcttggatttccttttagtaggaaatctatctttcctaagatggagccaaacccaatcaccctcattaagaactagcttttttcttcctctattgcctttagttgaatacacctttgtttggttctctatttggttcttaactctctcatgaaacttcttcacaaactctgacctaaattccccttctttatgtataaaagaagtgtccagtgggaggggaatgaagtcaaacggtgttaggggattaaacccatacacaacctcaaaaggggactacatgaagaagatactcatcccaagacttatggttgcctttcagaagagctcttaaaaaagtggataaagacctattcactaccactatttgccaatcagtttgtggatgacaagtggtagagaaaagaagtttagttcct

SEQ ID NO: 142920 - DNA, 427 bp, Glycine max
  unsure (1)..(427): unsure at all n locations
agcttgctatgtatgagagcatgataatcaatattgcctcttctcaaacccaagtcgatcctttcgccgcgaaaactaaatcagcaaaacttgaaggtgtgtgacccaccatcttctcatagtagaacaccggtaacgcgtccactatgattgttatcatctccttctccgtcattaggggcgctactagagctgcctgtttgctgatcggcaagtgtaccaatnttcacaagtagtatttaaacgataaaatcgagtatcgtatccacaagaaattcgtttcacttagatgatgtatattcagtatgtaaacactcttaacttttggaaatgaaataaaagattcaataatggttaacatttctgcaattaattactctacttatcaacttacgatatacacaaaatgctgtaaaatgcggtaaat

SEQ ID NO: 142921 - DNA, 169 bp, Glycine max
atcacattctttcctaagtcctctgagactaattcctgaagacacgaatgagtcttaccgaccatcttctcgtagtagaacaccgggcacgtgtccactatgatggttatcatcttcttctccgtcattaggggcgctactagagctgcctgtttgctgatccgcaagt

SEQ ID NO: 142922 - DNA, 426 bp, Glycine max
  unsure (1)..(426): unsure at all n locations
agcttgtgcgaatcaaatcactcctgcatttcatctctaccatgcattnttctttctttacccactcctcacgtttggttttttagggaaaaacaccataactaaacgcgccacaagacatccctatcgcaccagatccaaatctagaacgatgggtgatcaagaggagacacaggaacagatgaaagccgacatgtcggctctgaaagaacaaatggcttccatgatggaagccatgttagggatgaggcagctcatggaaaagaatgtggccaccgctgccgctgtcagttcggctgccgaagcagacccaactctcttagcaactgcgcaccatccttcctcaaacatagtangacgcggaagggacacactgnggcacgatggcagccctcacctgngatacaaccgagcggttacccttat

SEQ ID NO: 142923 - DNA, 386 bp, Glycine max
  unsure (1)..(386): unsure at all n locations
agcttggacaagaaggctagagtctaattctatccaactctcttccccagcaaggtggatgtctaacatagcagtgaaaacctcagctctatatatagaactcattagacctaacaattgtttctaacatactgatagcaaactaattaccctaaacaaaaatctcatgaacattgctgaatagacacacataactgaagtgcagatccaacacaatgacaagactgaacgttttgcaaaatgcaacacatcataggataagaatattttcaacttactgtcatgttgcctgcaagaatgatttctggctgctttattcatgcccaccaaccactnttaatcacatccatgtaatttatattagagaaccaaagtagtgtaacatg

SEQ ID NO: 142924 - DNA, 261 bp, Glycine max
tatgtgttggaccaacattgatcaacattggttgacgacgtgcgttatctcaaactgttctgacctatcacgattatcctgaacactgcttggggagaactcatagctaagtggcgttggcccacacaccgaccatactgatcggtttgcaaattgctcacactttatgattaaaataatgtcaactttctgtcatgatgcctgcttgagggatttgtgggtgctctattcatgctcaccaaccacttataatcacattca

SEQ ID NO: 142925 - DNA, 239 bp, Glycine max
ttctaagttagatctgaagaaagtggtcgaagaaaccattccctttcctaacctcaaagaaaaaatgaatagaactgccttagcatatgagaaatggaggatgcaagtcttcctccttttttggcttattggtctcattaatttccagattagacattatattcttttttgtctctggcctatgcataattaatgcttgtggagagagttacatttattaataattttattgcgattac

SEQ ID NO: 142926 - DNA, 445 bp, Glycine max
cctcatatcatcatgatgatttaccagccatggatgacctatgcataagatctggctattagcaacagaattaatgagataaaaaagtaagaatattgataccatatacaccaccatgggaaatggagagacatacttagtgcctgagccgcagtcaatcttttacgataatccttattcaacaacctctttacaaaatctttggcatcaaccgataaagaaggccaaggagcctcatcaaaacttggatctgccttcagtacagcccgaaatataccagattctgtccgggcccaaaagggactgctttcgcataaaagaatataagcaattacaccaatgctgcacatatctggctctgtccataagatctatgcacaacttctgagctacatgataagcactttccacaatatcattctaactctcatctgacaaaaaaaat

SEQ ID NO: 142927 - DNA, 210 bp, Glycine max
ttgatttagctaagcctcctgtggcacatggcaggagtaaacatattgaaaccaagtttcatttcctgcgtgatcaagtgagtaaggagaagcttgaattggagttttgtacgtctgaagatcaagttgcagacatactacctaagacattggaatctatctagctaatgaattgaaagacaagttatgagtgacattcctgacaaatct

SEQ ID NO: 142928 - DNA, 437 bp, Glycine max
  unsure (1)..(437): unsure at all n locations
tgccactggtaatcgatttcataatactggttatcgattaccagagagtaaaaactctggtaacttagaaaattntgagaaaaactcttttgaaaaacaaaactgtgctatgtgttgtttttttgaaaaatcttttcaatacttcccttgtgaagtcttcttgatatcttctcttgaatattgaattcatctactcttgaatcttgaaatcaaacttctcttgattcttgaatcttcttgatttcttctcatgaaacttgaaattaatcttgatcttgaacttgttgactcaatcttgaaatcattctcttgggctttntgtcatcatctttgtcatcatcaaaactacttgaatcaacttgattcatcatcatgaagcttgcttctacatattcttgcgaacatagggtcgaaccaagcgtagtcttttaagaaaa

SEQ ID NO: 142929 - DNA, 357 bp, Glycine max
  unsure (1)..(357): unsure at all n locations
tcattaggattatttcctgacatctcaaacaaacaaatgcaacatgacaagaaaattatagttgttgtttgaatacctcacccactcaagtttatcacacaattatggcttttctctaatgaaaacactcttgccttttaccactctaattccccttgagttcttaggcaattcaagagattatggccacaacatagaacaattcaccaatatgtgttatgtaaggctagagagacaaggataaggttaaccaagaaacaggctaacaatgtntttatgcacaattgaaggaaataaaattcacaatttatgaattcagtaacaatcctttatacaccaatatttaccttaaagaga

SEQ ID NO: 142930 - DNA, 381 bp, Glycine max
  unsure (1)..(381): unsure at all n locations
actaagctttatacaacaatcaactcanagtactgaaagttaaataactgatatttaaagaactgaaacagaaacactgaaatttaaatgactgaacataaatcataaaataactcaaaatactaaaatgttcaaaatgcactaatttaaatgtcctgctcttgtggttgctcctatgcatgctcattgagatccaacaccggagcagctggtgaatcctaaaggataggctgctctaactcagatggtatggcatcatcangtatatgtactggggatggctctgggatctggtttgtggaagtctcctcctcttgagccatgtgtacacctgcatcaaaataaaaaggctcatgaggggtgagctcantcctcccctct

SEQ ID NO: 142931 - DNA, 305 bp, Glycine max
  unsure (1)..(305): unsure at all n locations
tctctcattcgntgttccaccttaatgtcaaaccccgctcaatacgaaccattntcttttattcccggtgatgctttctttcttctgttttacccaaagaaacgttaacttctaatcaatttagatatttgtcttttacttactaataggagggattgcccaatgatttgcgttacaattatatatatattatttcactcgtgataaaaccttcacgtaaactctctttttatttttttttaccgggacaatcttcgtgtatcaggtaataaaaggagagaatccgcatcattttattttctcaa

SEQ ID NO: 142932 - DNA, 461 bp, Glycine max
  unsure (1)..(461): unsure at all n locations
attcttaagataaaaactcttttggccattcatttgtgctnttcaaaatctcttctggtagtctntcttaagacctatcttaattcttttcttgagacctttgcctttgcttgaaatattgctttcttcattcttgaatgatgtttataattccttggcatcatcaaaataattcttgaagctctgcttctacaatctcctcctcttttatgatgacaatacctggaatcaacaaagcatatacaatttgtattcgggtgttcactcattctaaaactccccttatctgtttagaagttatgcttaattcttctgaatttngaagagttgaaatctgagtgagaacttgagttaaaatttacgatttgaaacaaaagttaattaaaagactttaaaattgagttaaaactttgttcatatctaatttacagaattaagatttgagttaaacttgaattact

SEQ ID NO: 142933 - DNA, 258 bp, Glycine max
gtgacacacccctggtagtcgatgaaatcaactaacttttgtgtataaaacctgggtatattgcatcaaacttctccaatttataggggttttggaatattaataatacttcttattaaatatagggaatagataaattatactttttgtttgcggggttaataatcaaattctcctcaattcagggtaaatatgcaaactggtataagtggtgtttcaccttctcgttaggcaatatgtggcttaacaacattccct

SEQ ID NO: 142934 - DNA, 54 bp, Glycine max
agaaaaaggaaaagggtaattcccccccagcgggagagagggacgggcgaacac

SEQ ID NO: 142935 - DNA, 355 bp, Glycine max
aaaaataattaaaagcaaaaagatgaaggcgttgactgtacatgcctactaagctgaccaaagtggcattcatacatatcccgtaatccttcgttccactccattacagcacagcacacttatcggttcaacacttctggattggacaaaactacccctatgagtgcccgatcatggcacgcattcatattattactcactccttcctttccatttcgcgactcacacataccaaccaaccaccatggtttttctggcgttgcttcgcagaaagcttattatcaccagaaccacactcttctactcgcacgtgcgcgcacgagccttctccggggaaacacaaacaccgcatcta

SEQ ID NO: 142936 - DNA, 441 bp, Glycine max
tgaaaaagaaaagtctatataattctttctttgctccaatgacttcaaagcattgatatcactttgcacactacgaatgactgatgagagtaaaaccaacctatggatgatatggaggcagatcagttgctcctttatttgagcatcacaaaaacatgtacgaacatacacaattttggatgttgggacacacaaatcaatttgaaatttagctaactacatgtcttatcacattaatatcaaactaccaacctaatggtcccgatgagaacatacaggatcaactacaattacaacaatattgtgagcatcctgacacacaatttatctgcaggtacaccaaaggatgctatattggtacaatgacaaatctggtacattaataagaatggaacttgaaactctgtttggatggcacaccgagtaattgggagaagcttt

SEQ ID NO: 142937 - DNA, 388 bp, Glycine max
  unsure (1)..(388): unsure at all n locations
ctaagcttaacattaatntcgagcgtctcgatatatgacaggatctcattatacatccgagtaaaaagntattgtcgtttgaattagctcagagcttcaacattcaagtttgagcgtctcgatatatgacggggctcaattagacattcgagtaaaagatattgtcgtttaatttgctcagagcttcaacattcaatttcgagcgtctcgatatattacgagactctatcagacatccgagttaaaagttattgtcngttgaagttgctcaaagcgtcaacattcaatttcgagcgtctcgatatattacaggactcagtcagacattcgagtgaaaagatattgtcgtttgaattggctcagcctttcaacattcaatttcgagcgt

SEQ ID NO: 142938 - DNA, 75 bp, Glycine max
gaaagggagggttatttatgaagggggggaaaatgaagaaaacggagaaggggagggaacattaaagaggagaac

SEQ ID NO: 142939 - DNA, 325 bp, Glycine max
  unsure (1)..(325): unsure at all n locations
ttataaatatagagaaaaaacaaggatgtgaacattntcttctcttgcacaaattacaactataatgtagaaatttacaatgcaataacatcgatgaaatttagagaagactgaagcttacctacaatagcaaccacgacgacaactaaggttttaagaaagtaacaagttgtntgggaaaaaggaccatgaacgctccatgctcaagtacgagaaggcatataacctaataatctcaccgtgatggagcttctcaagagtcttgaaaagacaacaaaagaaaatggtgtctctattgaaacccattaacaaatctgacaacaca

SEQ ID NO: 142940 - DNA, 455 bp, Glycine max
  unsure (1)..(455): unsure at all n locations
actatanacactcaagctnggagtacagggtcttgttggagatcctcatgtgacttttattataatgagacatattcttgcacccaggacttgatggcatcccatatctctagcccatcagaagcataatgatagtcctcaatcaaaagacgaactccatggggagcacatgggaccttaacagcaacttctctgaattaaaacaacccgaatagcactaattagcataagagtcatatcatgcctgattaccgaagcctctttttcttttgtcgttgatgacttagatttagattcttctatttttaagcgatatatatttctaatttgctgataaactttataagattacttacctctttacaagatcattatgtaatgcttgatcagggaaaacccatgccttgtatatgacagcggacatttcatatagacctacccccacgaatgtttct

SEQ ID NO: 142941 - DNA, 479 bp, Glycine max
actcagctggcatattcttcccatggagatataaaatctatgatggtattatttctcttcctttgaagagccctgctgcgctacttatattcttcctctcgattatcatatccttcattcttacatcatgagtgaacaacaacaagatcgatcacttaatgtacacagctcgtattaccttttatctgggagaaaattcagcgatagctctggtttcttcggctcttgattcatccaattataattcatggagtcgatctatgcttatcgcattaagcgcaaagaacaaatctgagtttgtcgatggttgtattcatagacctgcatcagatcatgcacttcatgcatcggggaagaggtgcaatcatatggtgatttccggttgggtcattcatctctctttcataagcaaactactatggatggatatgcacaatgtatttggaagactcacaccacgatatcacacgagaccttta

SEQ ID NO: 142942 - DNA, 306 bp, Glycine max
  unsure (1)..(306): unsure at all n locations
accgatgacgctcaagaactgagaagtctatctgttttttagaaganaaccgaaagaaaaattctataacacgttaacaaatcagacattaacgagagataatgaatcaaggctaacttcacttgcactattttcagccctaatgataatgcaaatatgatgtagattgaacaaaaatatgactacccacgaccccgcaaacaaaacttcatttggttagtagtacacaattgacccctaattgtgttaataaaagcccgcgttcaaatatagatatacgagtggaattgaattaacttaaacata

SEQ ID NO: 142943 - DNA, 349 bp, Glycine max
  unsure (1)..(349): unsure at all n locations
tgctggggcttcttggggctggtctttttgcttcatgaggtccttcaatggtgattnttcaccatggagatgcagcggaaggcaaaagataagaggatacgggaggcaccatccactatggaataagccaatgaagaaagagcttcaccaccaagaatgccttggataaaaagcttgaagaggatgctttaatggaggaaaagaaagagagaagggaggagaacgaaattgaatgatataaagagggaaagaagtggaactttgaagtgtatctcataagactttcattcatcaaaggtacaacaagtgttacacatgcttctatttatagactatgtagctttcttga

SEQ ID NO: 142944 - DNA, 362 bp, Glycine max
  unsure (1)..(362): unsure at all n locations
cttaaaactcacttagcctttttatattgacacgtgatattttgttatattaagctatatatatatatataaacagcacatctttttcctgctacagnatattattttaatatataaaaaattaagcttcaggctttccttctaattacgcttttgataccgtatacctcttttaaaaaaatataataaaaatactattcatctatcttctctattgaacaaaacacatatataagttatgcataagcactggaatggctctcatacttaatgtaaattgaacgggtactcatctaaacatgcgaattaatttatatgacatattcagattaaacaacggaaactaaatattatgaccatat

SEQ ID NO: 142945 - DNA, 354 bp, Glycine max
  unsure (1)..(354): unsure at all n locations
tattagtgtaatacaccgtgtgcggcacggatgttgattatacaatttatgatattgtttatagtattagtattttataatatattgattaatttgtttataaattntatatatgtcaaaaaataagatgattataaatattcatatatgtttaaatagtcttagggtgttttgattttttttctaagaaatatgagattgtgtgtattgagctggacggatgtatntggatgggaaacatttttatattattatagttttattatatatacattaaattttttattgatgttatatatgtaaaaaaaaaaagataagttataatattcatattatatttaaatagcgttaggg

SEQ ID NO: 142946 - DNA, 393 bp, Glycine max
  unsure (1)..(393): unsure at all n locations
gtccttgccttgattaatagcaaaacatagtttttatctgaccatttccagaagtactggctctcaacctctgaaggatattaatagcgttagagtatgtgggttctaaattatgtgttgagcttattgagtcttaagcccacttctggctttgtactggatgtattagcaaatcaatgaaaaccaatgggatgttatcgttcctccaaaaaaacatataataacagaaatttgaccattaatcattaccaccaaaaactgatagtagaatcattcaaattaatttgaaaagttggcgatattgccagtctggcgaaaacaattagcaatgagcttatcaagacaaagttttgagcagattgcatgtgttnacaagagcagcaattagctcgt

SEQ ID NO: 142947 - DNA, 319 bp, Glycine max
  unsure (1)..(319): unsure at all n locations
ctcagcttttccnaggttacggtaaaatctgggacctatccattgtagaagtctccacagaggccattgcctccctcgcccagtattatgatcagccgctgaggtgcttcacctttgatgacttctagctatcacccatggtagaagaatttgaagagatcctgtgatgtcctctatggggaaggagaccatacctcttttcagggttctatccctcattagctagaatttctaaaatagtccaaatctcgacgcaggaattagaccacaaaaagcaagtagaaaatgggatggttggaataccgagaaaatatttgga

SEQ ID NO: 142948 - DNA, 170 bp, Glycine max
  unsure (1)..(170): unsure at all n locations
agcgtttcgattcattctatgtacccgttttgttccacatagngnnatgnatatttcgaatctcggttcatttacttttcatccccctcttggcgctgcttaaacccaattaattaagtcatttctcgcttaacctaataattaaataatttttcaccgaaccgtttgaa

SEQ ID NO: 142949 - DNA, 343 bp, Glycine max
tgtggcatctaaagggaatatgctatgatgcctctttttattctttggaatattcatttagttagtgacctatgctataaatagaaacatgtgtaacactctgtccatatgagaaacttgtgagacacacttcatagttcagcttctctccttattctccttcaatttccacgccactttctctttctctctctctcattctcttcttccattaaagcttcctctctaagctacttatccaaggcactctattggtggtgaagcttctcctttcatggcttattctctagtggatgatgcctcctctcacctcttgttctgtatcttctgctacaactccttg

SEQ ID NO: 142950 - DNA, 289 bp, Glycine max
ctaatggaaagaataagaatgatggatgaacttttctatgaccgccataccaacatgggcaaatttaccactagctccacaatatcaatactacgccaatatcagcccttctaattacccaccacccctatagccaagaacacccaattatccacaaaggccacccctaaataggccacaaaacccaactgtaggacatgcgataccaaacacctccctttacacgaaccagaacaccaatcagggaaggaactctccaaaaaataaacctgtggaatacaccccaatt

SEQ ID NO: 142951 - DNA, 437 bp, Glycine max
  unsure (1)..(437): unsure at all n locations
aactaagcttatcagtttatganacacccccaacaattctcaaatgtgaatgttttaccttctttcctgaccatacttctttgggaagctgataattcaaaggaactgatggtcctctattgatgagatatgttgatgtgtttattgcttctgcccagaaatgtttaggcaagccatattggattcacaaacaccccgctctcttgttcaagggtctaattatcctttctacaacaccattttgctcaggtgtttctagtattgtcttaataattctgattccatgttctgaacaaaaagtcttaagactctgactatcatactctctgtcattgtcagagtttacacttttaacctttagacctcgttgattgtcaactatctgttttcactttttaacccagaatacacattagatgtattgttatgaaaataaa

SEQ ID NO: 142952 - DNA, 117 bp, Glycine max
caaattgactgagcggaacccccacaaccaacaaaacagggaaagggtatttccacccaagagaaggacaaaaaaacacccccaaaaaacccacaaaacagaacaaaaacgaaaaac

SEQ ID NO: 142953 - DNA, 418 bp, Glycine max
ctttgtgcctatggtcttgaattgtaacagcccgagactcctgatcatgtgccatctggaacctaattgggacacatttggtggttctgctttctctatcttggtctttattaccaaagaaaaatctgcactcctctaattctctctattttgtatattccgtttccaacactctcgcaccttctctactacctaaatcatgctaaatcgtgctgttaacattggttatttgaaaatcaatgtcgtttaagcacttacaacatcggttttcaaataaccgatgttgatgtttttaaataacttctcgcggcgaaccctttctcggccacgaaagtcattttctctctctctcaactctctctaaacccttgaagtacaagtgcattggaacaaaggggccccttgtgtgggctctcgc

SEQ ID NO: 142954 - DNA, 348 bp, Glycine max
  unsure (1)..(348): unsure at all n locations
tcagatccttcttgttggatctagacttatacttatatcattattgcaacaacatacttaagaccaaaacttaatccgcagatccctcttgtaagactaagtttcaattctacttcattcaagctctaaggcaacaatacatttcccaatgttaaatcacctagctaannccacaaatggttgatcaaaccaagagccaacaaaattcaagcactaacgtattcttaacacatacatataaattttattgatatgatatcttcattgtttgcttttataaatactctaatggcttctactacattgttcattttattttatacgttatattagttctattcacattta

SEQ ID NO: 142955 - DNA, 428 bp, Glycine max
  unsure (1)..(428): unsure at all n locations
tctcactctttntcctataaatagggggaggagggcagttcttatatgttcaaccctcttggtatctgagaatcacttataattagtgagaaaatatgtttccgtgaagaaaattcaagccgaggcgcttccgtaatgcttccgagacgtttccgtgggtgatttctcaaagattgtaaaccgatcttcagtcttcaaccggtaagttcctgaaatcgaacttttcaattcattctatgaatcctcagtggtccccacttgtttcgcatgcttctattttcattttcatttactttacataccctcttttgacatgctttagtcacttatttgaggttatttctcacctaatcaaaaataaaataaaattccaccgatcattcgtattgaacagtctttaatatctcttaaatgaaatccaatcgttc

SEQ ID NO: 142956 - DNA, 403 bp, Glycine max
  unsure (1)..(403): unsure at all n locations
actatanacaactcacgcttgtggctctctgaatccactgtattgctatgtttatattatgtgtattcatcaacggagcagttcaagctctattgtatctattaatcattcacttaataaatcatagtcccctttaaacaactaatgttgtgaccagtcaagcacgtttacatctcttgaatgcatatataaaaaaagattttgctgagttgctatacatattnttgaagaattaaactaataaaatatagaatataaataatttccaaaaacggaaattaaaaattttagtttctaattatacgtaatataaaattgcaattgtaataaaaaaatgcttgtgaaatacatattcattcttatttaatagttttgtgaatcggaataatgtttctttaattat

SEQ ID NO: 142957 - DNA, 309 bp, Glycine max
atcctgactcaccatagaccttgaccttgtgttgtattgtcaatccttaccctcgaaagcaaaaaaggagataatgaatatttccaatcgaatgaaatatatagaggaaatgaaatttctcatcctataatgggagaaagaatgggagaaagttaataaagatataaataaagcccctggtcattagaccacaatacatgttcttagaggtctttatacctgacagtatctgaacattacagaattgtcgccaaattgaccaaaataaggacaggaaaccattacctaaaatggtcttctcccttaatt

SEQ ID NO: 142958 - DNA, 392 bp, Glycine max
  unsure (1)..(392): unsure at all n locations
ngtaaattttttacacccgagctggttgaattaattattattgttcaccttccacaatatatatttgtatatcatcattcatattggtgtctttcctctgcgggcatggggatattgtcctaatctctcttataatgcatttaaattcataattttactcgaggaaaggaatttattatataacttaaatttccttaatctaaaattgattgtttgaatgtgtttttataaagaatttaaatttttataattctaaacaattaaaaatatagaatcttaatttccttctataaagtgagaaaatgaaattttcttcttgataaaagagccttaaaaaatatttgcgtattttcttataacctccgctctctcttccaccgaaagttatcctg

SEQ ID NO: 142959 - DNA, 420 bp, Glycine max
  unsure (1)..(420): unsure at all n locations
tnctcgggccattcctgcgaaggcacacatttggaatgttagtttacaagaaatatgacaatcattacaaacaagggccaaacaacacttctcatggcacgagtgtcaacatgcactttataaaataatcatattgcggtcgtgctatattatgacacatacgtatttgcacacataaaaattttgtgtgaagcattttacgacacctattcatgtacatattntttgacaaactgtttcatgctacatcctatatatatatacacacattttttggaaggcttcctttgttacctactcacaaatacacatattttgaaaaacacttttacgctacccatccaacactttgtaaggcacttcatgctatatatattcatattatgcaaagcagtttcatgctatatatattcatatttt

SEQ ID NO: 142960 - DNA, 169 bp, Glycine max
  unsure (1)..(169): unsure at all n locations
agcttggtagagntcaaggatttccacatttgnttttctacgatataaacctacacgtgccaatgtgaggagaagtgccttataaagaaggggtaaaagcatgggccaatagcaaggacaacaagtgaaagggattcccttatgtcacatcagcggaagctttgttagc

SEQ ID NO: 142961 - DNA, 373 bp, Glycine max
taagtctccacagaggccattgcctccctcgcccagtattatgatcagcccgtgaggtgcgttacctttgaggacttctagctattacccatggtagaagaatttgaagagatcctgtgatgtcctctatggggaaggagaccataccttttttcaaggttctatccctcattagctataatctctaaaatagtccaaatctcgacgcacgaattagaccacaaaaagcaagtagaaaatgggatggttggaataccgagaaaatatttggaggcgaaagcaagaaatcttggcaggtaaatgcgaatgggcccccgtcatagacatactctcactggtgatcttctgaggagttcctatttccaaagtggat

SEQ ID NO: 142962 - DNA, 274 bp, Glycine max
agcttcatacaatttatatagaacctatatcatatatcacatcccatcagagcactgtgtcacgacgtccttcagcacaaggttccttaaatcacttcacctagccatctgctcccccgaacacaaggttcaagatcatcacaggatccaaacacaaacaacacacagggagtgagttatcacattcctaactaatagagaaaaatcaatcccctcttattcctaacattctctatacacaatctctcctcctccctcctacataacttttctt

SEQ ID NO: 142963 - DNA, 274 bp, Glycine max
tgaagacaagactatacgagggatctttcttgtgtatttcattatctctaagggctaccgtgtctacaacttgctaactaagaaactcgtcatcaggcaaaatgttgaaggtgatgagtatgctccttggaattgcgatgaagaaaaagtggagaagaacgttcttatacccgctcaacttcctcaagaagaagctgtggaagaagacctatgtgaaccaccttctcctccaccacatcaacaagatcaagaactatcatcaccagagtctact

SEQ ID NO: 142964 - DNA, 151 bp, Glycine max
  unsure (1)..(151): unsure at all n locations
gtgaggagaaatatatctttatgccgtctgaacacataaaaccttttgttgtacaagtttatctagtgactggaaaaagttgtanacagtggtgttgctggtctaataatggctacgtgtgaagtctaatgtggttactggtaagttgttg

SEQ ID NO: 142965 - DNA, 478 bp, Glycine max
  unsure (1)..(478): unsure at all n locations
actaagcttatatatattaacttcttctctggattcctaagattgttattacttcattcactanaattatgcaatttgagataatcttttgtatgccttaataagcacctccaatactaaattaaacaagaacttaaagctgagtcttgatgtaatcttattccaatagaaaagtgtttaatttcacctcttgaatttcttacactattgattatcccttcatacaagttttgtatagcttgtatacaagccatgcacactcctttttttctccaaagttttccacaataattctttgatacatgatcataaaagtttttccccaagtcaaaaatcacatgtcggtgtctttacctaagcacaaaggtgggcantagctaaaaatacaatgtcaattttcagtacaaaacagcactcaccaataataaataacaccagcccactctcccatagcccatctgtattaattctataaatt

SEQ ID NO: 142966 - DNA, 371 bp, Glycine max
cgagaaccacctagcttcgagggctaggaacttctctattatattatgcagagagagactaaggggagaactgctgttgtattttctgatattggaagcgcttaattcatctacatatatagctgctgtccagggaacaaggccccacaagcaaaatagaaaagctaacaaaatggaatatcctaacaaccatattcccttattccactacctacatatcttctagaaagcacgatgctagtgctgtgcgcttccttcacgattatgccagctgcatgggtctcatgctatatgcttcttgcaacccccttacttcctgcagacctccctctatttccacacgtatcattccacggcccttggaaattcac

SEQ ID NO: 142967 - DNA, 169 bp, Glycine max
  unsure (1)..(169): unsure at all n locations
ancctgcaggcatgcaagctggcttctactatataccattacttttttgttaaatatcacttgagatcgtttcaaggtccaacgccttaatgattcccttccgcttttaaatattaaaacctctgttcaaggtccaacgccttaacgactcttggttcgaaactaaaat

SEQ ID NO: 142968 - DNA, 352 bp, Glycine max
  unsure (1)..(352): unsure at all n locations
agagaaaagattttttttttcttaaganngagggaaaaaaaggtgacaaggattattctagtgacaacacatgttataaatttgtgaaagaacttatttattctagacaaatatatacgagccttatttggaaatgaaataacttattttggaaagagactatttgacctatagaatatatataaagggatagaataacttgagcgtaagtccggataaagatcatatcatagtcacataaggactgatcataaaatatttggatccatggaagcaacgtctattatgatgtacctaaaaaaataaagattggtataaccaaaatgaaacaaaaaaatatttaggattatca

SEQ ID NO: 142969 - DNA, 337 bp, Glycine max
acgggcacacgcggagacccatcatacaccggtcgatcctacccactaccaaagcttttactttgaggtctctagtttcggacgaaggaggagcactcgcgcgaccaccttcgtcggaattttcggagccagattttccggcgagcttttgtcgcgggtgtgtgttctcactaaaactgtctcttttttattcttttcgtctaacttattatacttatttgctatcacattctcttattctattccattttatgtctctttctacttttctcctttttaatattctactcttcttcttcgttcttttttattttattttcattcttctctccttttc

SEQ ID NO: 142970 - DNA, 359 bp, Glycine max
  unsure (1)..(359): unsure at all n locations
actactaaataaattaaattagaatttattataatgcgtattaaaaatcattacgtaagtaaattgaataaattaattagattaatggatagttagcttaaataaattaggtttgctcatcaaaaaataatcttggtttggatagtattttcttcttttaattattattattattttcttcattggactgaaacattttcctgaagtccaattagttgcgtagttgactatgttntaattatgcagcaggctgggctactacccctcttcggcccattgatgcaatcagattttatccttntcttttttcgttagtctactaggctacagatgctattacccaataattatatttcctt

SEQ ID NO: 142971 - DNA, 288 bp, Glycine max
caaaccccaacccgggacggcaaagtcaaccgccgcacagacggcagcttacctctaccacaccccaatggcgaaaaccacaccctccaccgccaagactcagaacggacacccaaccccgtcgaaacgcacgcccagacaaacccaggcaagcccagaaaaccacccaccccatatccggctcgcccctataacaagaaaactctagaagccccgccgctgcgctctgaagcctctcgcaacaacccagatctcagcccaaacctcctgaaagaagcccgcgacacc

SEQ ID NO: 142972 - DNA, 209 bp, Glycine max
aagaatgtaattttttaaaaagaagcggggaagtttatggagtcaaagcacatcaggtacagattataagagcccacttggttacaaatatctttcagacaaactaacgtcttaaacttaagatttaccagtaccttttagccaaccctagagtcaggtaacattatattgtggtttagctgcacccactaaggtagcctatgcatgaa

SEQ ID NO: 142973 - DNA, 224 bp, Glycine max
aacaagatgatctgttagagtatcacttgaagtttcgcacatagcctttgatggcgaagagaagaatgagaagtgaaacagaccgtagagagaataagtcttcactaacattgtagatcataacaatgtgtgttgatgtggaatgtcccatacacatgtggatttgacatgttagcaaagacgtgctacgtatgcactcaacattaacagagatagaaatcact

SEQ ID NO: 142974 - DNA, 253 bp, Glycine max
  unsure (1)..(253): unsure at all n locations
atgcaagctngagaaagtccttccgagactgtttatacatntctgacatanggcatgagacgaaattcaaagaatggacctcttgctagttgttaataatgaatagcttaaacacttgtgcttgagtgaaacagtagcagtgagactgtggtttaagctactttccttgatatctgtcttatgcctaactccatctatttgttcatgttacattttaatccttcctctgaataactgcataccttgtgaaata

SEQ ID NO: 142975 - DNA, 385 bp, Glycine max
  unsure (1)..(385): unsure at all n locations
tcgaccaccaccgncgncaccatcatcttagntttctattatgttatattattagnactttgatttccagccttgtattttggctatattattatgatatttgaacaatttactatttccttatttgcatggtatgtntgaacaaatattaagtatgttatttgactatgtggattctatagttaatctattcatgattgttgcttcatggttcttgcttcatgatttggttgatattcttccatgaatgttgtatggatgcctagttatatgtgtatgcctcanatttnttacgcactttggctnnttgttgatgccaaagggggaggagaatatggattaaatcaagaactaacatgagttatctacttcaattttagagaag

SEQ ID NO: 142976 - DNA, 449 bp, Glycine max
  unsure (1)..(449): unsure at all n locations
tctatctcaatcattagttgctgggtattgccgtttatagcatgncctatactagtagcataggtgtgattctagaaactggaccagttggtctgaatggttgaaccagataagtggatcactggcagtcatgtcatgcttccagattaactaaaaaccacaatactgaaaactggcttngaaagtagtatactggggagacttccctttattgtgtcaatgactggtatggtcttcacaaaccttggatggagtgaggacgtgtctgtaatttactagttagtgaaattcttcttgataaatatatttcaaaacacactgngaaatctgattattagtactangagttcgtaggtctcgttactctttttctatagcaactgatattttaagtaatagtgttaagacctaatggagatccaatatgacagtgatatttaacatatcgg

SEQ ID NO: 142977 - DNA, 477 bp, Glycine max
  unsure (1)..(477): unsure at all n locations
acttttgtgtatgtttctttanaattagggttatccaccaaccttattagaagaggtgtcttgcctaagaattctatatatagtgatataattcctatcattntcatagntgaataatatttcaagtttactccattgtgaatgtgagtagagcattgactcctttgtttggttcttggattagaaccctatttgaatcttatcaaatgtttccatacctttgtagtgattcctcacttagcttatcactctnttgggtgtgacacattcccttccatttcttgtttattctatctcttcctattggtattcttttccatctantattntgtntatttcttacttttatgttatctaaacctaatgccatngctattagccttttatctttgccactaattccattgtcttctattattgctttattcctctaacatgataccaacttaagatgcccataaaacataaacctctact

SEQ ID NO: 142978 - DNA, 458 bp, Glycine max
  unsure (1)..(458): unsure at all n locations
ctaagcttaacgcacaatagtagtattattatacttaccgtagcttatagatatttgntcttatcttttctagatacattttccccaatataattcatgggaactgcggtgtcaagaggatcacactgtgtctatgaggaagggaaattaaatcgttgaaagaaacttgattgaaacatacacatacacatacctgttggtgttgcaaattatatggatgaggcataccaacgacactcgactgtgacagcaacngtggtgcttaacctgngcttcgcttactttgatttaactcaatctacaaacctgatgagccaagatacattattggaggtgatttgataagcaaaacgataaatatggagaattgaacactcccatatataattcaggcgactcacttcacatggtggctttgctgtggcaaacactgaactctctttcttcattttcttact

SEQ ID NO: 142979 - DNA, 415 bp, Glycine max
  unsure (1)..(415): unsure at all n locations
actaagctntgacgatntggtcttcaccgacgaaaggatcaaagtgggtctattattatgcaaatctgatcatcatgctttgataaatgcaaaaaaactggggcaaatgaagagggtgagaatgagggagaagcccatgctatgattgccattcctatacagccaagtttcccaccaacccaacaatgtcattactcagccaataacaaaccttcttcttacccaccacccagttatccacaaaggtcatccctaaatcaaccacaaagcctgtctaccgcacttccaatgacgaacaccacctttagcacaaaccataacaccaaccaagaaatgaagtttgcagcaaaaaagcctgtagaattcaccccaattccgtgtcctattgctgacttgctccatatctacttgataa

SEQ ID NO: 142980 - DNA, 353 bp, Glycine max
atagttaggtctcatgatgcacatttatgtgacactagaagaactatggtaattgagaactagacttgtattgatgcaaatctaattatgtatgcatgtacctataatatcatagatgtagcttcggaatggaaaaacattttggaggttgatatgatgtgcattttcttggtgtgattgcccctattataagaaaaagtggtgcaaccactaaacagagaagcgtcacttccaaacagcatatggcagaaatcacaactccaattatgctagttgcacagcttgagatgaagttaccctaccgtgagttaaaaattcacttgggctttagccatataacattgtgaatgaag

SEQ ID NO: 142981 - DNA, 358 bp, Glycine max
  unsure (1)..(358): unsure at all n locations
tcttacacatgcaaacttgggaccattgaatgaaatgttaaagtgacacatttgataaggccttgtgtcatgtggncttttnatgagaagcttaagagtcaaactcttatctcaagaagcgatcacacttctttccatataggaacctttataaaagttcccataataacacttaactcatattgatattcctccttagaacgatgttactcgtcctttttttattgtttgtatatcctttaatctcactccgtttttacacctattctctactttattaagtaccaatatatttcatatttatatttgtattaccctatacacgtgcccgatgtgttcagaatatttgattttataa

SEQ ID NO: 142982 - DNA, 371 bp, Glycine max
  unsure (1)..(371): unsure at all n locations
caagtgatgcttgagatgtctgatgaatatttacttctaaggnggagaaaggttaggggggaggctaaaataagaatcacaatcctttgtggaattagaagaagaaggaaaaagatcagtntatggaaatctcaacttattaaataaaacatccttatatatctaaattcaaccagaggatgacaagcacttgtgacccttgtgagacaaggaataacccagaaacaaacactcttgagatcgaataattggctcgtgtgtatgatttggccatatctaaggaaaacatctcacccaaatattcgatgaatatgatatcaggcttttattaaccagttacaaatgaaataaaacttataccagcattggaa

SEQ ID NO: 142983 - DNA, 468 bp, Glycine max
  unsure (1)..(468): unsure at all n locations
agcagttcataatctaggtatctataacctttcaatttagtggatnttcaaggtttgagaagagaaaatgagaatggggtaactttggagcaaactctcatctcaaacaagtctataacattaatttaaactcgctcaaactggttttacggtgaaaactccaccgattcaaaatttgacctctcaacaccncaattaccctagaaatggctcatgctttcacctttgtcactcatttttctcatttgctcagcccaagccttcccacaagtcctaaacgacattttaagctaggattaactcactttagcccccaattaccactaaccccaacgttagctnttcaaaccctcaaatcctcacactgttncactcacatcactaccatgctcacatttaaccctagggtaactctcccatcatctctaccagttttaccaacattctagcacaagcttccaaacatac

SEQ ID NO: 142984 - DNA, 332 bp, Glycine max
  unsure (1)..(332): unsure at all n locations
ttactatgttaataaaaagccctcacaaaaaattgaattagaaactctttaaaaatacagatatattcagaggtctaattcctattgatatcttgcaaattgtgatgaatttaaagtgagcatttactttttggtgaagcaaacctctaaagctagatatacaaaccgccaacacaatccaactggcctgtccagaactttcaatcagaattttattcctatttggcacaagtcttacacaaatctcaactttgtactcttaagtnttggggtaaggtgaaatcaaatatttagaggagtaaaacattatggacccgcccggttacattttt

SEQ ID NO: 142985 - DNA, 491 bp, Glycine max
accttaaaactaagcttgtcagcttttaccctgttcatagtggacattgcctctaccatttccacagatctattacgtattgcaagaacaacctgtatacataggtaaaaatgtcactgaaaaggataacatgttcagtaataatgttgcactatgaaattgtagtgcatcaaacaaggtagattcacaaaaaagagataaatatgttgcccatttattagataaaaacatgatggtgagattggaccaataacctttattcaataaaaagcaccttatgactaaactagaactaaccttcttccaatctctcccatatttacggtaagcttcataaaaatgctcaagctcctccttattccattgtggccctaacatgtcagccaattttctcttctgaaatcattgaatttgaaaacactattagttagaaatagattcatatgcttgacaagtaaccaaacttttcaatttttttattactaccttac

SEQ ID NO: 142986 - DNA, 226 bp, Glycine max
agctgaccgcttactttagtactgaaaaatggaacttgtgcctatattagtgaaattcatgactagtcattcaggttttcttgagtgtattttttgcaccttttggtctataaatgtctttataatcattatattatgatcaaagggaatgatgacctgatcaggaatttaataaaaatcgaaatttgtgtgtaaacgaccccttatcccattggtataattttac

SEQ ID NO: 142987 - DNA, 303 bp, Glycine max
  unsure (1)..(303): unsure at all n locations
atgagttaaacttacctattctgntntannggttttgtgatgatgtttgtgatgtttatatgctgaaattgctgatggaaatctgttagagacgaagggtagaactaacctatggttagaaagtgagaatgtgatgttatgagtggaaaaagagtgagactttgagggttggaaggctaagtctgaattctgtgggtaatggagggtaaagtgagttaatactagcttgaaatgtcatttacgacttatgaaaaagcttggactgtgctagagagaaaaattaatgaccaaaatgaacaaaga

SEQ ID NO: 142988 - DNA, 284 bp, Glycine max
taccaatggactaccttgaaataatttttcgttattccttttgagccttgtattcctttccttggtttgaagctcactacaagccttaagtgatataccatgatattaccatattcttaaggaattttggaactttggaattgttttgggaataaatgtggggggtttttgtctcattgacaacttgttttgttggctatgcttcatgatgtattttgtgccatacttgatgtacattgtatattgagtaaatgttggacatgctaaatgatatgttgtatctc

SEQ ID NO: 142989 - DNA, 424 bp, Glycine max
  unsure (1)..(424): unsure at all n locations
ntcgatgatgcaattgcagagttagacaccttgagtgtatagtcatacaatgacagcactgtgatcatgcagctgctgagagacaatctcactctctggacctccgatctacctgaggatggaggtatgatcatgagtgagacttggcataagatgcacttggactctgcctcgtaatattaccataaaacatagcaactgtcggctctaacaaaatctgctattagatatatatgtaggtctcaataaatgatatgatgcttccaccacttattggttaatgagtcctacttttattcaacatgcttttcataagntttatctaaaggtaaataaaaatgttaaaacacgtggattattatcatgattactattattattactattatcattattattattattatgtctcttaccataacat

SEQ ID NO: 142990 - DNA, 485 bp, Glycine max
  unsure (1)..(485): unsure at all n locations
cactcaagcttctgtgttactctgcatnggtctgaaaaccagaacatttatacattgatgtctgcatatcaacttattaatttcgttagttgtaatattacactcagatgactatttagcacctgatgccttgtacatcatagcaataaggataacataaagctgaatcctattaagttaatttatatgcacttatgcagtgctaagtgaattttttgtactgatatcaaataggagttcacttagctaccacattataataatgaataggatgatgtggtgataggatgaattcctattgaataaaaacagtcttatattgattgtgcatataaattaaattcaaatccttttaccagatataccatcacaaaatccctatctcactaggtgaagttgtgtacatggatcatgtgttctagacaatatactcagcccttctttgaaatgtatcaatcattgggcacgttattatgatacagaca

SEQ ID NO: 142991 - DNA, 427 bp, Glycine max
  unsure (1)..(427): unsure at all n locations
ctaagcttgaccaatcccgacccaacccgggcatagtcagtcagtgataacttgtgatgtacctaaacaggcgagctcctgtcagtcaacagataaaaggaacaaagaccacaaagcaaggaggcttgtgtggtggctggccatctgttaatcttgtgtgacatatgggttattgcctctggtaatcgattaccaagggtgggtaatcgattacaaggcttataaatgaagacaggagactaagatggtctctggtaatcgatcaccacggngtgtaatcgattaccaggcttgaaaacaaggtcaggatactatgggaagctttggtaatcgattaccagtggatgtaatcgattaccacgcttcaaatggaactgtgagactgggaaggcctctgtaatctataccaatctgtgtatcgattaca

SEQ ID NO: 142992 - DNA, 411 bp, Glycine max
ctgattgataaagtgagaagtacgtgtctgtgggttacgatctcttatccaaggcgtacaagctctattatccacatagtagatagatcgtcctatgtcgcgacgtggagtacgacgacaaagattgttgggattggagtgttcaagaagataagtatgatattcttccttattttgaagaagatgatgaaattgaacaaccaatcatagaggaacatattacaccacctggctcaccgacaccaatgctggatgaaacaagttctagtgagaggacaccgcgacttacgagcacttgagagatttatgatgtatccacaaaccttaacgacatttaccttctttgtctttttgggattgtgacctctacctatcaataaccgcggaaacttaagtggaagacccctggcg

SEQ ID NO: 142993 - DNA, 183 bp, Glycine max
  unsure (1)..(183): unsure at all n locations
acacccacccttgatggtactcacctcttgataaactgtaagatgctcttggggaaaaaaaaaagggggnccaaatctcgaataaaaggaaaaaggacttaattgctctcacttccaattcattttcctctctcccttccatattctctatcctttcttccactttccttcttccctttcctc

SEQ ID NO: 142994 - DNA, 270 bp, Glycine max
ctaacttagtgacgagaacaatatattgtttattatattagcgcaagtaaaaacgatagaacatcagaggaaatacgtaaggagatgacgactgacagcaaatgatgataccatgccacccaactatacataaaaggaaacagtagtctcagagaaacacccgctcactaaccaaccatgttgttcaaactaaccaaaaagattagatgataatgagatctctaacaagatccatgagaagaaatcttatggcacttgtcatgtatcata

SEQ ID NO: 142995 - DNA, 352 bp, Glycine max
  unsure (1)..(352): unsure at all n locations
catgcagctataaagcttggataatcctcaccttacaagcttatttgnggggntgnattgggatctaagcccaaactctaagacggatttctagatccatcaatggtcacctgcgtcgctccaagcccatatccttgggcatgagaaggtgtgtcagaaagccaacttaattgcagtcacctctagcccaccttaaatgcaacctctttgggtcgccttaatngcacccttgaaggggtatgccttgtctcacatatcctaaaaatagaactttaacacgtgttataaaagctggacaagtctcaccttcaagccagtttcgtgggactgagtatgccctaaccccaatact

SEQ ID NO: 142996 - DNA, 193 bp, Glycine max
  unsure (1)..(193): unsure at all n locations
agcnnngagctccaattattcataaaccgtatttgaaatattacacataaataggggntaaccatatacttgtcatgaatattcattatgagttaataaatcaatcacctactaaactgaatttacttacatcatacatagatgtagtatagatatgttcaaacatttgtcacctaaaataatatcagttaca

SEQ ID NO: 142997 - DNA, 237 bp, Glycine max
aaggaaggagagggagggttttgtggaagggggggggggagaaaagagagaaaggaaaaaagggaaaaaaaggaagagggggaagggggaaaggggaaaaaagaagagaagtaagaaggaaaaggagggagaggaaaggagaaagagaagaagggggggaagaaaagaaagggaaagggaagagaggagaggaagaaaaggagaaaagggaaagggggggggaaaaaaggagaagag

SEQ ID NO: 142998 - DNA, 180 bp, Glycine max
  unsure (1)..(180): unsure at all n locations
ttaatgaanatacgaagaatttaatatcatttataattttttaccagtggaattcaaaagaaaaagatttcaagtgcttcgaaggagaattgatgcaaaaacttgaagaaaaaactcttaagaaaaaagttgtagattgagacagctcggttagcacacaagataggcccaagcatcttc

SEQ ID NO: 142999 - DNA, 257 bp, Glycine max
gaaaagggggggaaaggaaaaaaaggaagggggagaagaaggaggaaaggaggggaaaaaaggggaaaagaggggggaaaaaaaaggaaaaaaaagggaaagagagggaagagggaggaaaaagaggggaaaagtgggaaaaggagggggaaaggggaagagagaaaaaaaaaaggggaaaaaagggagaaaaagggggaaaaagggggggaaaaggaggaaaaaagaggagaaaaggagaaaaaaggggaaaaaag

SEQ ID NO: 143000 - DNA, 440 bp, Glycine max
  unsure (1)..(440): unsure at all n locations
ctaacgctaacatgccttatgccacctaagcatacttagntgagaatcttggacttgatcttggactagtgggctgaaccatagctaanattcactaatcataactagtgaaatcttggctccacaaattccatttcaaattcaagtgaaatttgaatagaaattccaatctccctccaattctgtatgacacttacgctataaatagaggccttgtgtgtgcattttttgggaactncgattattttagaattaaacttcaaagttcagacctcttttgaggcacaaaatatcgtgctccttctctccctctccctgcattcatcttctgctaccttcaaagctttatccatggcttcctatggtggtgagcttcttctagactcattttctccttgaaggggcatctcctcaaaactcgtcttcttctccattctgct

SEQ ID NO: 143001 - DNA, 320 bp, Glycine max
  unsure (1)..(320): unsure at all n locations
tcaggtccgaggtgcattacagntngtaatcatgtgtttttgtactgatgctcttgaaaactgttggcaatctaattacatgtcccaggaacattacagtttggcagaagtgtggcttgtggtctcgtatcaatcccttgctgcttaatattgaatcttttatagagttggtgtgtatcttatgtggctcactcaatgaagaacaatctactttgtttgttatgactatgtggaaccttcggaggagtagaaatgagattcttgggaattcaagtgatgatcaagatattggagttttgaatatagctacattgggtctt

SEQ ID NO: 143002 - DNA, 192 bp, Glycine max
agcttgcttctactatatccattcttcttttgttaaatatcacttgagatcgcttcaaggtccaacgccttaatgattccctccgcttttcaaaaattaaaacctcgtttcaaggtccaacgccttaacgactctttgtttgaaattaaaataaatcttttaaaaaaacatgaacattcttacttaaagaac

SEQ ID NO: 143003 - DNA, 407 bp, Glycine max
  unsure (1)..(407): unsure at all n locations
tagagaggaagcttcaatggaggattttattgatagatatgggagggggggcacgacattgaaggagaataaaagagagagaagttgaactttgaagtgtgtctcacaagattcacattcatcaaagttttgacaagtgttacacatgcttctatntatagcctaggtcactaaataaatgaaagctttcttgagaagttatagcttagctacacacacccctcttatagctaagctcacctccttaatttaagaagctagagcttagctacacacacccctctaatagcttagctcacccctattgccaaatacatgaaagacataacaggccctattacaagactactcaaatgccctaaagaagaaaacctattctatattacaagacagtggcccaacctggc

SEQ ID NO: 143004 - DNA, 378 bp, Glycine max
  unsure (1)..(378): unsure at all n locations
gtnacttgagaaagattactaagagaagctagatgcttattcttctcacacntcnctataatagcataagcacacccccatgcaaaaatacatgaaaatataataaaaaagttccttatacaaagactactcaaaatgccctgaaatacaaggctgaaaccctatactactagaatggccaaaatacaaggcccaaaagaaggaaaaaccaattctaacatttacaaagaagaatgggtccaaccttgacccatgggctcaaaaatctaacctaaagttcatgagaaccctagggccttcttagtagctctatgccaaacctcttgtagtcttctatccaatacacttagggggtaggattgcatcatcccctccacc

SEQ ID NO: 143005 - DNA, 432 bp, Glycine max
  unsure (1)..(432): unsure at all n locations
tggactcacngagaacaatggcaaagctcagagatactgtgatgttgatgatgacaagaatgacatgtatctgatagtatgaaagcttctccggagataatggacacgaattttaatgagaaaggtttcataagcaaagaaagaaaaggtgttcataaactcatgaaaaagaatagtctttggaagcaaagaaacttgaacgggtttctctggtgtttttcggcgctatttatggagcttcattttttaaaggggaaaaaacaatataataatcaacggtcagaatataatcacattatattttcctcttaactcctcagcgtgacacgtgttccactctgtctatagatgtgggattaatgatgggtagtgggagatctatgctactcgttccattaaacgcgcatcgtgtcgccatccatgaaactgtta

SEQ ID NO: 143006 - DNA, 416 bp, Glycine max
  unsure (1)..(416): unsure at all n locations
gtctggatcactctgcgtctacaaatgttcttcctaaatattcatatgtttttatgtttcgtataattgaatgtccctatgtattctattctttaattaggtgagattcctctntaattgctggttatgtacaccttggtatcattttaaggcccgcagttcaaaatgggttcttccccttctattttcttggcacacctctcaaagtgctggtaacgaagttagacttatagaggtgtaaagcaacctaagtctactcttgcctttcattgtagggaggcaatcagaagtgtttggctggctatagatcagaaagacataacttaagttgttagataacatttcacccaatttatgacctcaactatttacccaaatcaaattcaacactgatattcatggaacatatagtctac

SEQ ID NO: 143007 - DNA, 321 bp, Glycine max
tgacggagaacttgatgccttggcaacctattactcatttgcataacaaaactgcatctgacctgtactgttgcagagtctgtggtctatgatcttctgctaatcaccatatagatctttgttcttctttgcagcaatctggagtcaatgagcaacctgaagcctatgctacaaacatttataatagatcccctcatcagcaaaatcaacaacagttgaataattatgatctttcaagcaacagataccatccaggttggaggaatcatcctaatcttagatgggaaaatccctcacaacaacaacagcctgtgccttctt

SEQ ID NO: 143008 - DNA, 309 bp, Glycine max
  unsure (1)..(309): unsure at all n locations
ctgcagcttttagcaatggactactttgataattctttgaagccctttgacctatgttcccttttttgtttgagctcatacaagccttaatgcaaaccatgatataccttaccttaggaatttggagctggaatgtttgggaataaggtggggggggggggatcnnnnctnananattctncttactcatctacaatactcacactcattctaatatatatttaaactatttcttaacaatcttcaatttttatactaattctatatcttaatttataacttcaactcttctcccttatataccacatt

SEQ ID NO: 143009 - DNA, 410 bp, Glycine max
gacactttaaactcagcttcttataagctgaaccatgttatctataaagactagttgagtcttattcaaacacattagagtttatctctcttatcttggtgagagtgattctcctaagatcttgagtgattccaaaacaccctggctatatcaaaggactcttacaacctctgtgtgttgccctcaccgaaaagagtgattttttccttcctttcatcttcaaccttgttctgtcagaccaccattccagaaaattcatgtctgtccagaattatcgcgtggccataacttccattgtacacgctcaaactaagtgattcttgagcctaaattgaatttcaaatgagatctttacctcattctggaatccctcatttgagccttgtactgagtattgcacttcttattat

SEQ ID NO: 143010 - DNA, 325 bp, Glycine max
  unsure (1)..(325): unsure at all n locations
ctcacgatagttacatgctcatgtctcaattngtaaccgaggctatacgagacatcttgccaaacaaagtcacgtaacgataactcgcctatggatcttcttccttgctatatatcagcaacagtcggtagatccacaacatgtcttgatgaagatggagacatgatggccgccaattataactggtgccaagatgcaagatgtaatttatcacccctgctcttcttttgacaatcatgattcaacttgagtgtgcatctggtcacagaaatcaaatagttgtgagcctgtctatctaccgtggatgtaccccgctgagcgatac

SEQ ID NO: 143011 - DNA, 264 bp, Glycine max
  unsure (1)..(264): unsure at all n locations
agcttccatcacacttctatacggatacgtgcttttatatggacttacataggttgtaacaaactttcatatgtggcaagaagtgtgaaaagcattgaaataaatttagagattgaaacgagatttatgtgaagagggaaaaaaatgaggttggcaaccaattgggtagttttgggtggctcttgcaaatgggcagagaagttnttcttctataatttcttacttcctaactctctatctattgcattttctctttccctttgt

SEQ ID NO: 143012 - DNA, 258 bp, Glycine max
  unsure (1)..(258): unsure at all n locations
agcttatatgcaatgtggtaccatgtcagtgtttaactctctctggcgcctaggagtacatgacaagacaaatcacacactancaagtcaagtcactctcactaggtaatatcataaggagaccagtcacggtcacagtgttttgcgagaatgctctaaccatatgggatcaacatatgcttaaaggagcactcaaaccgtgtgacccccaaggcctacactccgaagagtccgtcagggcctctccctcctgattca

SEQ ID NO: 143013 - DNA, 266 bp, Glycine max
agcttgtattaagtatttcaataattcatcttctgtttcgaactaggctcaagtttcaatccatataacggattacctcaactgaaaagttggatcaacctagattaataatcaagagtaagattttcaagatgaaatcatgacaagagaatattgcccttgagaggccttactccatatcaaggaatccaactcgtgttaggctcttgtaaatacaactagcatcattgtatgagcggctcatttattacacatcatcactctgg

SEQ ID NO: 143014 - DNA, 259 bp, Glycine max
ctgcagcttattcttaaaatatacaattctgtatcttttctattgtgtgacacgtcccatgaattatgagcctttattaaattattttttctccttctttaatcaatgataaaatcaaatgagacttataatgctcttaataatgttaattaatattaaaaagataaaatattaaaagttaaagttaaaaagatacttgaaatagtgttctaaccaaaccttacaagatactgtaacaaggtttatggcatgtttggga

SEQ ID NO: 143015 - DNA, 297 bp, Glycine max
acgagccgtgaggagaccacttcattgcaaccggaaggagctcgtagttcaaccgacataacctcgaaggagagctgcatcatctcctacgcattctccatatttttctcactattgcctatcaagagttgaggttcaattgatctgggataagagagataaccataccttacggacactcgctctctgtctactgtatgaacggaatgtggagagtgacccagagcacctcagttctcatgccatttcaaagcgaaacccacgtgattattatatatgatgcgtatcgcaccaaac

SEQ ID NO: 143016 - DNA, 278 bp, Glycine max
  unsure (1)..(278): unsure at all n locations
gacctgctgcatgcaagcttacgatggtggcttgcagaaagccaagtgatttattttttatctgntgaaggaaattctgtgcacaactggactatttcagaaatatatggaccaagcccctgcaatcattcaactcagtaattcttaattccattaaaataacaaaaaaaaaaatgtccctcaactattagaagggtagcaataatacaatacgccacaattagaaatattctgacaacctaaggttgtattcatggggtgggaagctctaaaagata

SEQ ID NO: 143017 - DNA, 359 bp, Glycine max
ctgaatgatagaaggcctgaccacatgtggggttcagctcaattatggaccatggcgcgggggttaatgtacacatctggccttacttacatcatgggcacagcctccgttgatgacgtctctgatagatcggggcagtgttaccacctgcctatcttatgtatgcaacgccctactggactattacgtggtgggagcggtatggattaccttttattttcaacgagaatgagctcccatgcctcatcataagcccagaattctctttgatcttacgacctgacatttcctaaaaactatcatccaaccttatgggtacagaggggctcattccttgcgctgctaatccaccaacatgt

SEQ ID NO: 143018 - DNA, 271 bp, Glycine max
  unsure (1)..(271): unsure at all n locations
ttaagtcacctgccgctgcagcttatgtaaaaactactgtttttatactntntgttatagccgctaagcttggttccttttgtaacaaactataaatgtttgaaagcactttgcgaaaaaagaagaaataatactcctttcatctatctccctctcttatctctctttgaggaggttgctgggcctcgaagaccagctactaacattggtgctttcatcatcgttgccatggctgacggcactcgttcgaaaacaagtactgaccgatggg

SEQ ID NO: 143019 - DNA, 251 bp, Glycine max
agcttgcaaggctgcacccatcatcatgttcttatttgttcatacaagtcccacaaacatgcactatattgcctataaactcaaaacgtgtttaattgaatttattataaactctggcatatgtgtttgaatacaattatgaggcatctcactgttgaatttggttcaacatggtccttttgtacttgttgccaatggtctgcataatgatagttcagtgcagagtctattctcttctagggtcaatctct

SEQ ID NO: 143020 - DNA, 260 bp, Glycine max
  unsure (1)..(260): unsure at all n locations
agctnctataccgtctcatttctctctcctcttggtaacatcaaaaagccaaagntcgtggcaatcaacacaagatgatataactaaagttcacataatcaattagaagtcaaaaccaaatataatccaatcatccataagtcaaaaaccaaatataattgatcgaggccgtacccgaatcaaattaacatgaaaatgcagtaactaggaagtgatcctaggtcgtttcccaacgagcagtgacaagccaaatgttcata

SEQ ID NO: 143021 - DNA, 361 bp, Glycine max
agtctaccatcacgattatcggctacctttccatcattgggggtaccacttgggcctactgaatcctacaccttttgcgcgtgttcttcgatagatcctgactcctttctcaaaatgatctgtcgatgcctgctctccaaaaccatatcatgattgtgctaatactgcctaacgaacgcaagcattatgtccttccacgaatgcactccggatggttataatatactgtgccaagcaacaactaccgcagggagactttcatggaaggaatgtatcaacaattcctcatcttttgcgtattcccccatcttctgacaatacatctttagatggttcttgggacaagtagtccccttgtact

SEQ ID NO: 143022 - DNA, 259 bp, Glycine max
  unsure (1)..(259): unsure at all n locations
agctngctcgctaagacaattgtgcanaagattattgttctatgttcactcgctaagcgtatggctatcacgctcaacgcatgagtagtttttggtaaggcgcgctaagcgctcagtctgattttcacatttattctgtgcttttcaatttgaataaattcctgcataatcttgggttatgaatctttcgtatcgtagatggcttcccataacagaaaagccaccactttagtgtctcaggccggttatgatagatcaa

SEQ ID NO: 143023 - DNA, 407 bp, Glycine max
ccagctagctaagcacatgtctgcggaagaaatggttccatcttcgctcgcatacaggctgggtacaactacatgcgcatgtatcacgtcttaacaaggtgccttagctgtactttatatgatgaaacagcttccacaccgactacaatggacaaaccgaggtctagtgcggcgtcttgattcttctgcatctgaaatggactttctgagtaatggcatcccaagaactcaagtctcaggcctgttaccatacaacaagataattcatgcttgtcgccaccagactgtgtcacactacatgggggagcttagaaacgtctctcatacatgtgatacgcacccagagtcgcacgactatatgactggctaatattgttgattaccatatacttccatagtatatgaat

SEQ ID NO: 143024 - DNA, 262 bp, Glycine max
agcttgaacctctacgctatttggcacctatatttcatcatcatctagatgatctgaagttttctagtttcatagagtcacaaacgataccgaattgctacataggaaacattcctccaagtctttttctaaagaagtccttaaggccaaagttctatcttgacatagtatgtccaagattgtcaactctagacgccaacaggaagaagaaggagaagcctaacaccaacaatgcctctaagaagtgtcgtaaagtggcaaa

SEQ ID NO: 143025 - DNA, 123 bp, Glycine max
  unsure (1)..(123): unsure at all n locations
acccaacacgcgcagcacagcagaacagcgccactctaancaccgagaagccgggggaccccaaaaaccacacccgaaaaaacagacaaaacaacccacaaaaaccccaagaacaaacccaaa

SEQ ID NO: 143026 - DNA, 257 bp, Glycine max
  unsure (1)..(257): unsure at all n locations
agctntgaatgctctattcaatggagttgactttaatatcttcaaactgatcaacacttgcacagtggccaaggatgcatgggagatcctgaaaaccactcatgaaggaacctccaaagtgaagatgtccagattgcaactattggccacaaaattcgaaaatctgaagatgaaggaggaagaatgtattcatgacttccacatgaacattcttgaaattgccaatgcttgcactgccttgggagagaggatgacag

SEQ ID NO: 143027 - DNA, 262 bp, Glycine max
  unsure (1)..(262): unsure at all n locations
agctntngtgaaaacttcatgtgctactcaatttnttttttatctttttagtacttatcctgattgagtcttttctcgattcttgaatcttcaatctcgaatcttgattcatgaaatttgaaacttgaaactcgattcttgaatcttgaaatcaaacttctcttgattcttgaatcgttcttgactcaatcttgaaatcattctcttgggctttgtgacatcatttttgttatcatcaaaataccttgaatcaatcttgatt

SEQ ID NO: 143028 - DNA, 273 bp, Glycine max
  unsure (1)..(273): unsure at all n locations
gagtcacctgcggcatgcaagctgcagngcatncaagtgcaaaccaattcttgttttatcacatacccgcgaatccccactgtgttgtgtgggaagcagttgctcttcattactaacattcctctcctcagactctgctgtacttgaattggtgtttgaattatcatctgggttcctcctttgcacactggccatttccaaatctagacagcggcttcgtataccacggtgtgtcacataaacaagctaaatacaaagactaaagtacttttt

SEQ ID NO: 143029 - DNA, 285 bp, Glycine max
cggatccttaagcaccgcggctgcagctttctctctttccctataatagggagaggagggaagatcaaaaatgttcaaccctcctggtatctgaggatcatttgaaattagtgaaaaaaattgtttccgtgaagaaaatccaagacgaggcgcttccataacgcgttcgaaacgttttcgtgcttgatttcgtgaagattttccgtcgtctttcgttcgttcttcgtcgttcttcggtcttcaaccggtaagttcccgaaatcaaacttttcaattgattctatg

SEQ ID NO: 143030 - DNA, 266 bp, Glycine max
agcttgtgattgatgagaatcctcatgtaagtgctctctaatgttctcttccttcaccagtgagtagttcgggttccggttcgggttcgtggtctacgaagggtgaatctcctccagctgataagcataatcctaatccatctggagattctagtcctaatccaaagtctagtagttcttttgagtcgaataagtcttccattgggaaaaaattggttccaattgtggctcctatcgcaagtgttgcagctgtggcttttgtgctc

SEQ ID NO: 143031 - DNA, 331 bp, Glycine max
ctgacggaacacatgtcagcccgcttataggtaacggatgatttattcacaatatgtgattcacgagaacatcgttatgcgattttataataccaatctaaatctgattcaggggcatgtttgcaaattgtgacactatctttacacatataaaagagaatgatacatgttgggcataccatctcatgtcccacatgataaagcgtcatgacactgatgcgtttatgtgttgagtatgaaccctaaaaattgagtctctttggtactaacatgaattgactctcctaatattctcttcattgatatttatacaaaattgtattcttctcat

SEQ ID NO: 143032 - DNA, 260 bp, Glycine max
agctttagctctcaacccaaactcttctcactttatctgatttcaggcttaaataggtggcattgttcgtgctcgtgcgcttagcacaattctggaccgcttagcgcacattagtgaatttcggcttagcgcgtgcctttctcgcttagcggatggactgaagtggtgcgcttggcaaacctgtacagctcatcttcttccagattcttccttgcacttagccaatgagtgttgcgcttagtggacgctcgctaagctag

SEQ ID NO: 143033 - DNA, 258 bp, Glycine max
agcttaaacaaacttggcttagatattttaatcttataacatacaagtcagtttggttcgtgcagtttggttttggagcagttcaattttttaaaactgagttacatttattaatgtcataagataattaattgttgtttctattcatgattaagatatacagcagctggttctttaatcttcaacatccaagctacggagtgtggattggagaggttaggctcaaacttttgggagggacttaagtgcccatgacat

SEQ ID NO: 143034 - DNA, 187 bp, Glycine max
gaaactaggcgtacattatcgatcttcgaacatacacgggcaagtgcctcgaaccaagctgttctatgaacactatgtacccgtagaggtgacacatagtgtttcatgcattaagattcatcgattgttgactctatatacacccagatgaccagcttctgcgcttttacttaagtcatttctcgct

SEQ ID NO: 143035 - DNA, 254 bp, Glycine max
  unsure (1)..(254): unsure at all n locations
agcttctccccaatnttctataaatatggggagaagtgaagtagaaaagggttcagccccttaggcacttttctctctttcgaatttgcttagaaaaattgtttccgtgaagaaaatccaagccgaggcgcttccgtaacgtttccgtaacgttttcgtgagtgatttcgcgaaggtgttcgaccgttcttcgacgttcttcattcgttcttcatcgttcttcagtcttcaacgggtaagtacctcaaaccaag

SEQ ID NO: 143036 - DNA, 261 bp, Glycine max
agctttatgagttttctggtttccaatctttgttctttcacagaaaacaaaagtgtgctattcatctttttcattcccttctccctatgccaaaaagaattcgccaaggactaaccgcttgaattctttttgtgtctctcttctcccttttccaaaagaacgaaggactaaccgcctgaattcttttatgtctcccttcttccttgtcaaagaattcaaaacgacacagtctgagaattcttatgattcttccctttccct

SEQ ID NO: 143037 - DNA, 236 bp, Glycine max
ccaaatgggcctggtcgctatccgcacacacattgttactgactacaccccctgactttttttgggattcttttctccttaagctacagaaacatacgaattccgcctcgatacttgtattgtttccgtaatgcttcacaaccaagtggattacacacacattcacaattcgaatgacggaatgctaccgcacctcactaatagtgcaacgacgctcccattaagatatctgtgtg

SEQ ID NO: 143038 - DNA, 256 bp, Glycine max
agcttagcataccaacaatataattgatatgttatcttcaaatcacaaaaatacaattgtgctacatctctagttgtcattgcatgaatgtcaaactttctaatattaacaagatgatttatacttatagcatcttctgcataaaaaccaccacttcttccacatctaatactatcaaaatcataatcctcttccaccttatactcaatcgactcctcatcttacttattgtcattgtcatcatcttcaactttat

SEQ ID NO: 143039 - DNA, 370 bp, Glycine max
agatcgccaggagaaaaatgaacttcttggggagaagacgaagatccaatagtgctacatctatatatagacatagcatgaaggtccaacaatatcaaatataccagcatattcctacttgtagcatctctcgcttaaactgcaccgcttccaactcacagagtgacatcacataaggctcctctatcatctaatactctaaccactccgtcagttcacaataagacatagtcaaatacaccatcttatcctctccaacgtatccatgatacataccataccatgccccaacgcatgcaggaagctaccatgtgtctatcccccttcactgctatagagcctcacaccctacaaacatcacatttatact

SEQ ID NO: 143040 - DNA, 257 bp, Glycine max
  unsure (1)..(257): unsure at all n locations
agctntgaacaataccatttggcagaaatgacttttgaggccataaagggaagccaacaagacaataagctcattagctcaatgtagcagcgatgagaatattttgttggataagtgaacatattagacaagataggatcgagaaaaaaatgtattagagaaaaagttggggtagcacctatagtagcaaaaatgatagaatctcctcttaggtggtttggacacatgtggagatgacctaacctgtaaaagacctt

SEQ ID NO: 143041 - DNA, 265 bp, Glycine max
  unsure (1)..(265): unsure at all n locations
agctngcatatatgtggaatcctattntaatataagtttctttctctttccatcatatccaaaattattgatgaaacataatattaaaatatgagcccacaaatatatgtaagcttaaagcttccgttcattcctttagcaggctattccttatttcctttccgtctctccttgatcattcttccctcatccactaaatcaaacattccataggagtaaaataaattacgttaacttaagctttataaaagggaaagaaaaaaat

SEQ ID NO: 143042 - DNA, 208 bp, Glycine max
tgcgcatacaaatcaatcacaacacttcattctatacaaaatcaaaccactgaatcatattcaaatagtgcactattcaatcatgcttttgttcatgctactactacaaacaaaataactgaaatttaaaagactaaaatttaaagactgaaatttaaataactaaaacataaacatgaaataaactaaaatagaataataataaact

SEQ ID NO: 143043 - DNA, 266 bp, Glycine max
  unsure (1)..(266): unsure at all n locations
agcnttgaactaaattaaatggacacagtccttatgctcattaaatattaatacttagaaagcagaaaaacaagttaaattgacttcaatttcttctccatccacatttttgtgtaaaaataagtttcattactcaccggcggagatgagtgtattgtgcataatgtagtagtgtatagatatagaccatagaaattgcaaaatccaaataacgcaataattattattattccactgaaaacaaaaattatacagagacaagaatg

SEQ ID NO: 143044 - DNA, 268 bp, Glycine max
gcatgctgtctatgaacatgcatacaaggacactgtactattgctcctgtactatttatactcatagagctaacttacaagttgtgtggatggattgagagacacctccacagagagcgtgacacttgacatgaaatactctccggatggtactgatgatttgagagctttgcaaaccttcacgagaatgagacatgcttcttactaaatggagatgacacgctctcttttattattgcactgttcatagacaaaatcccttgacatt

SEQ ID NO: 143045 - DNA, 170 bp, Glycine max
gcaagcttctcgatatattctgcacctgaatcggtcttccttttgttaagttatgaccacatgaatttctcgagtgcattcggtgctcaattccgagccacacgaagtattatgcgcccgaatcggacttccgtgtgataagtttataccatctgaatttctaaagagct

SEQ ID NO: 143046 - DNA, 234 bp, Glycine max
  unsure (1)..(234): unsure at all n locations
cgcctgaatccggcacccgaatgcagagttactgacctttgaatttaccgagagcattcgttgagcagtttcgatggtgtcgatctatcatgctcctgaaccagacttccgagtgacacgncctgaccatatgaatttacccagagctttcgctgacaattgcgagcgtcaagatctagcatgctcctgtatcgggctctcgtgtgacacgtacgaccataagaaattatcgta

SEQ ID NO: 143047 - DNA, 222 bp, Glycine max
  unsure (1)..(222): unsure at all n locations
ttagcttaanactgattaggatggatatatatatgtgacaagatcatgttatatgctctgtagacagttcgggctccgagcccttcggtcattttattacattgttattataaaaaactaattcgtattattttccatatatcatctacaccctaatggttacgagcgtacttacattcctgtacgttactgtaatggcctcatgcatacattttagctgaa

SEQ ID NO: 143048 - DNA, 210 bp, Glycine max
ctgcatgtcaaccctgatatggctgccattgaaaagcaaattccattatgcaccatagataacttgcaccacaatggaaagcgtcgaatctatgctgcctcgcattcacagttatgggatctctcttccagtgtagatcagagtataaagagccttcatgatacgaaagtcctagaacatgtgacagtggagctatatatcggcagccat

SEQ ID NO: 143049 - DNA, 255 bp, Glycine max
  unsure (1)..(255): unsure at all n locations
agcttatngngcataccatatcttatttggtattttttttccatancagcnatgtcggatgttttgtattgaacatcgcacttcctttttacctctttaattagcttttaatagaatgctttatttcctttggttgctattatattgtagcagtgcctcctcttattatatcgcttgacagttgactctctcattatttttatgctttattgcttgaaagagcccaaacggctcaatctctgtacttgtatgcgt

SEQ ID NO: 143050 - DNA, 305 bp, Glycine max
gctgcacggagcctggtgttacagataatgatgaatcaaccagccttagcctatgagtagactgtccgctcctcgtcatctgagtgattgacccaccacactaagcgtgcacttagttttgtctgcacatcacatcgtaaactggttcaccacaagatgtgacatgcaaaccctctcatcaggcatatatctacacacctcattatatgtgcagattttcttggtggaccacacaattttgggtcgagactgtgcgacgtgaaagattctatagagagatagggactcactggatcgtgggggct

SEQ ID NO: 143051 - DNA, 258 bp, Glycine max
  unsure (1)..(258): unsure at all n locations
agcttagcagaccatttagatgaagatattttaattttctcagctctatattatgtntgaatatactagtttcttgaagccgaaacctcaaccacaaaggaaatcaatattgaaggggcatgaatgagtggctgaaacattatatggtcatctaaaaaattgttatgaaacatttcaaataacgtcatcccaatttaataagttatcactactgcacatactactttttaagtcggttaaatagtgcttttaacgacc

SEQ ID NO: 143052 - DNA, 132 bp, Glycine max
gttcacgaatggatgactaattacatgttttctctcctgggaacaaacgatctctgtcttgaatggacgtgaatccatggttgccaggacttctggtcctctgagatgtaggaacataacatctcaggtcac

SEQ ID NO: 143053 - DNA, 263 bp, Glycine max
  unsure (1)..(263): unsure at all n locations
agctntatgagttntctggtttccaatctttgttctttcacagaaaacaaaagtgtgctattcatctttttcattcccttctccctatgccaaaaagaattcgccaaggactaaccgcttgaattctttttgtgtctctcttctcccttttccaaaagaacgaaggactaaccgcctgaattcttttatgtctcccttcttccttgtcaaagaattcaaaacgacacagtctgagaattcttatgattcttccctttccctta

SEQ ID NO: 143054 - DNA, 219 bp, Glycine max
agaatcttgaggccaatgcctgtcctatccgcacccaattgtactgactacaccctctgactttttttgggactctcttttcgcttagcaacagaaacatacgaataccgcctcgatacttgtatgctttccgtcatgcttcagaaccaagtggattacacacacatccacaattcgactgacggaatgctacggctcctcactaaatgtgcaacgacg

SEQ ID NO: 143055 - DNA, 257 bp, Glycine max
  unsure (1)..(257): unsure at all n locations
agcttatattgactacttagattaatacttattttctcatctattnnnnctnnatatacccgcagatattattaaaccccttctcatgttgtttatgtctctcttttcttgttattatattgttgattgatatgaaacatttattgattttattaatgattaatttttgtaaaaaaatatgttagacatctntgatgaaatcttctctctaccatatnttttacatttagaaagctcaagatgttatttaagaaaat

SEQ ID NO: 143056 - DNA, 358 bp, Glycine max
gtatgtatgattgcttggaatgagatgaaatgcataaccgggaattgattgaaccccgtttggatgaacaaacacttacctgaaacacttgtgagcttgagagaaagagttggctctgtgatgagagaagcttaatgaaccatcctgggaacttgatatacttgacaaccatgatgatctctaaagagtaccatagcatgctcctatctagagatcatgactaatgctaatatgggggagatgatgactagtgaaatgtatgcagtcatctcataaatggtggatggctctctctgaacaagtcattaatctaacttagcatagctctgtctctatcgcttgatgactagcattactt

SEQ ID NO: 143057 - DNA, 251 bp, Glycine max
agcttgcttgtggggcttctatggaggctggatctttgagcttcaatgaggtcctttaatggtgattttccaccatggagatgcagcggaagacaaaggagaatatgtgagaggaggcgccatccactagggaataagccatggaagaaggagcttcaccaccaaaatgagccttggataagaagcttggaaggatgcttcaatggaggaaaaaaaagggggagagaaagagagagggggggagcacgaaa

SEQ ID NO: 143058 - DNA, 264 bp, Glycine max
  unsure (1)..(264): unsure at all n locations
agcttgcatcagctccatccatccatcttatctctccccaagcttatatatttgattntaagnggctgcaaagaaattgaaagccttaatgttcattcaaaatctctcaatgtactgagactcagaggttgttcatctctcaaggaattttcagtgacatcagaggaaatgacacatttggacttatctcagactgctatacgtgcattattgtcgtcaatgttatttctcctgaagcttacatatttgtatttaagtggctgt

SEQ ID NO: 143059 - DNA, 273 bp, Glycine max
caaactgactccttggagatcagtctctacctaacaatgtggcgagacatctatgtatgtcagcgtctatcgagatacactggacatgaagcgatgtgacgagcttgcacgtagccaatactgctatgcgtgactgaatgtcgtgtgtgataatacaccacactctatcatatctcgatatgaatgggtgtcaagagatggttaccctatcagtccatatctgatttatccgaagtccgacacttcctagttgatacaatatctgagataatc

SEQ ID NO: 143060 - DNA, 263 bp, Glycine max
agcttgttatgtagtaggtcatcttcacttatagaatatctcattagcggtcaacaatttatacctttgtaatcatcaaaatcaaaagtaggaatggatcatctaatgatcatgcactactaaaaaaagtactttttacgacgtttcttttacgccggttcaaaaattgattttgaaagaacagggtgacatttttgaaaatagatgtaacaaatttacgacggttttgcaaaaactgtcttagacaactatcattcaaagac

SEQ ID NO: 143061 - DNA, 173 bp, Glycine max
tgttacacatttacgaccgctctgcacagctgccttacaaactatcatcacacgaccgctctcgctcatgtgcgtatgaaactgtgactcataaccatcttataatctttggcactataatgaataatgtgtccctccactctttcgcattctcatgacttcccctgacactc

SEQ ID NO: 143062 - DNA, 261 bp, Glycine max
  unsure (1)..(261): unsure at all n locations
agctttcgattcattctatgtacccgtagtttctatattgtgtatcgngcgtttatattctcattttgtttactttttataccccctggtgacgtgcttaagccattttacttaagtcggttctcgcttaacttaaaaataaaataaatttccaccgaacgtttgaatggtattatccattaacttcggttaaaatcaattccgaccgttcggtcgtgccgtaaccacgttggaaatcaaaaagaggtaaacaataatata

SEQ ID NO: 143063 - DNA, 260 bp, Glycine max
agcttgaaagaatggccgcttgaatagatattgttctgttttctgtttaacaagtgtactttaaacattaaactgttattttatgatatattcacaaacatatttgtcttttttattcgtttaaactatgtagttgcagagttcaaatgtatattgttaagcaaataagttggtaacggaagtatgagcctaaagctacagagccaatataacaagcaaacattaatttattcctaacaggcaattaagttgacaagcag

SEQ ID NO: 143064 - DNA, 166 bp, Glycine max
cacgtgaatatggaccatttataccccattgaacgatgtggaatcaaacaatcaaattatagattttatgcttatgaggatgaaactgaagtatgatcctaatgcatgtgacccaatgatacaagcaagccttgaataatttatctcacgtcatataagtgacata

SEQ ID NO: 143065 - DNA, 266 bp, Glycine max
tagcttatggtgaatcaaaggtgattcaaatgtgtcttgatgattacaaaagatgatgacaaaggtgatgacatatagctcaaacatcaatcaaagaacaactcatgtgaatcaaagatcaatctaagaacaactcaagtgaatcaagatcaatcttagaacaactcatgggaatcaagaacaattcaagagttaaagataataatcacgaagaattcaagactcaagaagaaagtgtatagtcaagaatgaagattcaaggttca

SEQ ID NO: 143066 - DNA, 262 bp, Glycine max
  unsure (1)..(262): unsure at all n locations
agcttgactcacaccatacatgacatgtttatattgttttcatcaaatttcttcacaaataaccatcacaaagcataaacctagtgaaactacccatcatatctcccaaaacccaatacccacgaaaatcatgtgagaaagaagtctacccaaacctgaaattttgaagtcccacacgttgaggtgcgcttcacgactccgaaaatggcttcctttcgcgatntggagcaaaaaaggtgtgcaaaggttggagctttgatgg

SEQ ID NO: 143067 - DNA, 154 bp, Glycine max
  unsure (1)..(154): unsure at all n locations
cttctctatgtnttttccgaaagttatctcccactctatcttgggatatcccccacactcttaattcatgcgagaatgattggtctcctattctgactatcaaggtggacaacagagatgtgcactttatgactgatcgtatggcttcctttct

SEQ ID NO: 143068 - DNA, 259 bp, Glycine max
agcttctccttccttttcctataaataggggtaggagggaagaacaaaaatattcaaccctcttggtatctgagaatcacttaaaattagtgagaaaaattgtttccatgaagaaaatccaagccgaggcgcttccgtaacgcttccgagacgtttccgtgggtgatttcgcgaagatttcaaccgttcttcgccgttctttgtttgttcttcgtcgttcttcggtcttcaaccggtaagttcccaaaatcgaactttt

SEQ ID NO: 143069 - DNA, 257 bp, Glycine max
  unsure (1)..(257): unsure at all n locations
agcttgtgcaaatcaaatcactcctactttttatctctagcatgcattntctttctntacccactcctcatgtttggttttttagggaaaaacaccataactaaacgcgccgcaagggatccctatcgcaccagatccaaatctagaacgatgggtgatcaagaggagacgcatgaacagatgaaagccgacatgtcggctctgaaagaacaaatggcctccatgatggaggccatgttaagtatgaagcagctcat

SEQ ID NO: 143070 - DNA, 258 bp, Glycine max
  unsure (1)..(258): unsure at all n locations
agcttggaaggcaccaattagtggtctctattcttccattcacctttcaactgatgaattaccaatgtcgagtccccgtataccttgagtaacttgaccctaaagtcggccactgctcagatccctagggcacatgccttatactccgcatgttgtttgtgcagtcgaaacacaacatagccatgaaaggtatatattgcttatccggngaaaccaatattgccccaatcccatggcctagtgcattagacgccctgt

SEQ ID NO: 143071 - DNA, 263 bp, Glycine max
  unsure (1)..(263): unsure at all n locations
agctnggactggttctgagaaaaaatcaacttatctgccagaattataagatctcaaggatggaaatttgttgtctcttgattgtgctgacacagttctctggggaatgagtgcaaattaatgccatgcagagagaaacacatgatcagcttgatacaacaataaggccacaagcacttggaaaatgttataaacagaatcattcaaacagaatgtttattcaccaagtttgaacaataacactcaaattaaaccaatccttg

SEQ ID NO: 143072 - DNA, 252 bp, Glycine max
  unsure (1)..(252): unsure at all n locations
agcttcttatccaggcactctcnttgaggtgaagctccttcttccatggcttattccctagtggatggcgtctcctctcacctcttctcctttatctttcgttgcatctccatggtggaaaatcaccattgaagctcaaagatccagcctccgtagaagcttcacaagcaagctntcatcatctagcaaggccgacaactgctctaatataactttgccgaccctctccacaagggtcaatggatcctcgtc

SEQ ID NO: 143073 - DNA, 255 bp, Glycine max
  unsure (1)..(255): unsure at all n locations
agcttgtcggccgcgattgacgaatggcgcattatacgacgttagtctctgcgtgctatcaggctnttcgtcttacagatagcaaaaaaagaatgtttatatggataaccactcgggtatttccgcccgtcagcgtgactcaaaagtcagtatgacagatcttgtgagggcgcagaagacgacgttagtctctgcgtgctatcaagcttttcgtcttacagatagcaaaaaaagaatgtttatatggataaccac

SEQ ID NO: 143074 - DNA, 264 bp, Glycine max
  unsure (1)..(264): unsure at all n locations
agctntctcccaagtcctaaatgacatntcaagctattattaactcactntaacctccatttaccacagaattcagacttagccttccaactcttaaagcctcactctttttccactcataacatcacattctcactttctaaccctaagttaactctacccttcacctctaacagttttccataagaaatatcagcatataaacatcacaaacatcatcacaaaaaccctaaatcagaatgggtatgtctaactcatccaaac

SEQ ID NO: 143075 - DNA, 277 bp, Glycine max
ttaagcgactgaagctgcagcttgactggcgattgatttagccttattttctctttatttattactcaattcaattaagaatgataaatcccatagagaaaatgtccgattgatatttgtgcttcattttactaaaagagatatttctttattattatattattattttacctcttgttttatatttccaacgtggttatggcacgaccaaacggtgggaattcattttaacaaaaattaacgaatactacaattcacatgatcggtggaaatttat

SEQ ID NO: 143076 - DNA, 265 bp, Glycine max
agcttgtaggattatggggtacccatcacatgttgttctatgtggcggtcgggcgaaggtgcaagacaattctccacatccacaaatcacgtataaacccgccatcccctgttgcccacctccaactgagctcacgtactcccacgtagcccttatcctcgttcctctcaatgccgggtccccatcaatcctcccaagcttccacaacatccaagtaattcaacatccaatcatcataaactaacacagccaagaaaatagggca

SEQ ID NO: 143077 - DNA, 186 bp, Glycine max
  unsure (1)..(186): unsure at all n locations
gaaaatccattatcttatgcattttggaacgccttctgtgctggatcacaactggaatcacgttctggcgggaacaaatggcatatcctggtagatcgcaaggccatgggatctatgtgcttacctgcttaccaagatgggttntgctacccacttctatatagcaaacccactcatcctgaacta

SEQ ID NO: 143078 - DNA, 259 bp, Glycine max
agcttccattggtgagtttatgcttcccttttacattttttttcactccctacaagaaagtgcactttcccttgtttatttggctctccattgatgcggtctggcgctttacatgcttattttttgcgaaaatcgcgaagcaattcacatgtgaatccattcttgtgttctctaaattaaggggttggaagggatggccctatgcctatgttgcatttgggagaatggggcatgccacattgcccccactctcttgcta

SEQ ID NO: 143079 - DNA, 248 bp, Glycine max
atgagctaatgtgccatatttgcttatgattgtcaaacatgcgactctatatacatgtgagtgcattgttgtgatcactatatgaacgggctgaaatggcaggcacatgacgcatttaatgcttggagaaatactgcattccgcgtagtcggctcggctgtgtcatatgcatgcaaggctcttatcggcgcctgcccaagcacctacgacggaaggtatgtcttttagctgtgattgaggactctcaa

SEQ ID NO: 143080 - DNA, 260 bp, Glycine max
  unsure (1)..(260): unsure at all n locations
agcttaacatctactgtganttcattgtcatattccattctactggaagatatagttctctgaaattataaacagtcagttatcataaaaattaagttcagctaccctactaaactacagtgcctgagcaggttaagggaaagagctgtcaaaacaattcatgctaaaaataaataaacagtaaacactgagccagatcttgcagaaaattaactatgaagttagtgaacattaggtgttcatgctactgtagattggct

SEQ ID NO: 143081 - DNA, 319 bp, Glycine max
gccactcatgacacagtgttctcatgcgtccctactctgcgagctataagatgcaatggctatgacagcatggcctccctacatctatgaagattaatcagcactcatgtacgttacgactgagcctgaactatataaagcacaacactgttcttgccatactccgcaagtgcatgttcattcgcctacactgacctcgaccttattaccccacatgtggacctcatatgtcaggcccgtgttattgccacagcagatgggattccattgaatagcacatcggaagcttatatataatcttgtatactgcactggacat

SEQ ID NO: 143082 - DNA, 260 bp, Glycine max
  unsure (1)..(260): unsure at all n locations
agcttggcttagaatatcaatcnggtctctatatattgtgctagggtaaaaacgtcaagctcattcccgtttcaaattaaatacattgtatactataggcataaatttatcaaggataaaaaggtgattaatgtgtaattgaattcaatcccttaggaagcgatcaaacaggttttcagcgcgaattctttgctttgtttaacttttttttccttgcgtcctcgggagtacggctatctttataataattatcaccaatg

SEQ ID NO: 143083 - DNA, 218 bp, Glycine max
catggactaagcgaataggctctagttattaaatactgcacatcttttaaggcataaagcgaggatcggaacctcaatcctacgttctttttaaaggactgtgatgagaaaatatacaaaggacaggaatccctgcgggaaaccaagataaacacataaaatataaacatgcagcgacttcctcaattgccccagatcctaagcgtaatatcgcttga

SEQ ID NO: 143084 - DNA, 249 bp, Glycine max
agcttaaaaacccaaacttgtagctttattgttttgtatcatgcttatggctaggaatccaaaatttggatttagaattagaaaagcatgaaaattatgacttgcttgtgagagtttttactctaatatgggctgccccatgtatgatactttgcatagaggtagcgaggaaaacaccttgcaatagtgtgtatacataggttaatataaggggcatgaaattctttgcaaagggtgaaggaatattga

SEQ ID NO: 143085 - DNA, 281 bp, Glycine max
ttgagcttaataaaataccagaagctagattctgtacccgttgagatagcatgaccactataacgcgctgcctcttgatgcatctcatgtgttattggagcgtgggaatcacctggactagttgagctatagagtgaattatccgtgcgcatttgcttgttgtggatggtgagtgatgtggagtgtgatttactagtatagggactgaatgatcgggagatcttcccgaaagctggttcgggcataccgcgatctctggtcaatgtgcatgagtgagagtg

SEQ ID NO: 143086 - DNA, 255 bp, Glycine max
  unsure (1)..(255): unsure at all n locations
agcttgaacgaacgtttcaaaagacactccttttctttgcttngaacagaaatatgaaaggtttggaacggaattccaaacatgatcatatatatagcataggaaacacaaatgcacatccatcggggttgtgcaaagataaccacaccaagatattaccaaggcaggtcatctaattcggcacgtgttatagcaactatgatatttaaaataatatggattgaagtaaattcttctttgttatcaatcaaaaac

SEQ ID NO: 143087 - DNA, 254 bp, Glycine max
  unsure (1)..(254): unsure at all n locations
agctntgcttctacacgtattaggactcaaaaaataagagnttttatttagcggattggttttgattgacccgcataaaatacaagcttcacgagttgggcctttaatggcttgaaaatgtttgtatatccacacctaataatgacctttattgtaaatgttaaaaaaaaacataaaaaatatatgtgtaatttcacaatgttgtagggttagttagtgtaacttactttagaaaattatcaatggaaacaaag

SEQ ID NO: 143088 - DNA, 264 bp, Glycine max
agcttgccacccagctcgcccaggcgagcagggttgcttcctccagaagcaacagccttctggaggaatcttctggagggcccaagtgggcctggttgctatttgcacccccattattactaagtacacccccctgcccttttttggtgattcttttttcgtaaagttacggaaacttacgaatttcgtaacgatacttgttttctttccttaatgttacggaaccttgcggattacataatcatcccctttttgacttacgga

SEQ ID NO: 143089 - DNA, 263 bp, Glycine max
agcttgtgctttcacgaaaaggttcatcaagttaagtttaagtatggaagtaaccgtcttgcgaaaaattggggcaaaagatggatcgtgttacatcgctccttcgtctactgccaaacacatttagggctgtcgatgtccctgttacttccagtttgaccttgacaaagatgtcatggaccaagttgaaaatctaaattgattcaaccccatgttctgtgtaaaaattcgcaatacttcaactatgcatcattcgcatacat

SEQ ID NO: 143090 - DNA, 265 bp, Glycine max
agcttcttagtctcagatgatgcagctgagtttgtatctacctcatgcactcctctaatgactatggcattatttctggcgctaaactgctgagagttggaagccatcttctcaattaaatttctggcttcagcaggagtcatgtctccaagggctccaccactggcagcatctatcatacttctctccatattactgagtccttcataaaaatattggagaagaagctgctctgaaatctgatggtgagggcaactggcacata

SEQ ID NO: 143091 - DNA, 103 bp, Glycine max
ccatacttgtcttctattactgatgtcatgataccatactgaggacaatatcatcccttaaatggcgatgcggaaggctacagaaccatacggattgagcatt

SEQ ID NO: 143092 - DNA, 266 bp, Glycine max
  unsure (1)..(266): unsure at all n locations
agcttgtgttctcaatattgagcgtttcaatatatgtattgtcccaatcggacatccgagtaacaattattgtcantttgaattgttacgaaattccgttttcaacttggagcaatttaatatattaggggactcaattggacatccgagtaaaaagttattgtcgtttgaatttggtacgagcttctattttcaatttggaatgtatcgatatattacgggactcaatcggacatccgtgtataaagttattgtcatttgaaaat

SEQ ID NO: 143093 - DNA, 306 bp, Glycine max
taagcgtacgcaagcatgctcgtgtgccattgatgcatctcaccaatcactacgcgggcgcatgttgacgcatgaataacaagagagggaggcaattggtacgccgcatcgctttaagatgcaacctatgcctaatgccatgcggtacaacccgctcattcaaaccaatcgatcttgaaaacaaaccacaattgcaccacatatttgagcacattcccgcaatctatatgcccggaagatgatcaaaacacaccagtggaaagctagagagctcaaagattacatacttacttgttggagtgagta

SEQ ID NO: 143094 - DNA, 261 bp, Glycine max
  unsure (1)..(261): unsure at all n locations
agctnggccgattctcctccagattctcccatctcactaagcgggctaagtgccttgcttagcggatgattctcgctaagcatacaagcctcgcttagcgagacaccaaccacaacaactntcttattctttatcttttcaccttcttattcttcatcttttcacctgaaactgaagttgaaagaacaattcacttgtcctcaagtgacaagctcacagtggttattcaaaattgtgtttgtttccaagcattcaatcaca

SEQ ID NO: 143095 - DNA, 282 bp, Glycine max
acactcactaatgcgggctactaagccttgattacctgatcattaccgataatacttctaacactgcttaatgacactccttcggaagagctgattcaatctacaccagttctacacactaaagttaatcgttttcactgactctgaatttgttggagcggtcacctcgtccacccatgtcgacacgtcagtggcagacaccaaaatgtgctgattacctacatttgatcggatgagacccgtgacatccatagcctagacctacaactcttaaacttacat

SEQ ID NO: 143096 - DNA, 260 bp, Glycine max
  unsure (1)..(260): unsure at all n locations
agcaaatcaggctatggaagagagctctttttatttggatcagcacccaacgtcccaacccattgtgacaaaccagtgcgctncatcttatcaagcaattctcttccactcatctcctatatgactcacatccaactcaagaagctcccaaaaccaatgacaaagaatccaatgctatctcctccgaaataggccttaccttcactgtacttgttgaacactacttccaacctctcaagcccttctactgattgctcaaa

SEQ ID NO: 143097 - DNA, 188 bp, Glycine max
acttttagtatgaattgcctggtattttgaaaaagaatgcatggaaaaaacaaaaaagagaataggatacctcatattcacgtcgggtttgtctggtacagatattcacgttggttagaatagttatagctattttgttaaaataagtttaaatgtataactagttattcgaaaaaataaatattaac

SEQ ID NO: 143098 - DNA, 218 bp, Glycine max
  unsure (1)..(218): unsure at all n locations
ctaaatttgggggagacactgcgttagaattgcaagtggtctaatgaanatagcatgcacgcactattcctggatatgcacatgctgcctcttgttatggtgtgagaaaaaaggtgcagaatttctcaaaatgtataatagtgtgtgcgctgctgatcaaatcaatggaaactgtatgctcatattatgagcaattatgtggtaagagtgaatgaaaa

SEQ ID NO: 143099 - DNA, 233 bp, Glycine max
agcttgcttgtggggcttctatggaggctgtatcttttagcttcaatggggtcctttaatggtgattttccaccatggagatgcaccagaagacaaaggagaagaggtgagaggaggcgccatccattaaggaataagccatggaagaaggagcttcaccaccaagatgagccttggataaaaagcttggagaggatgcttcaatggaggaaaagaaagagagaaggggggag

SEQ ID NO: 143100 - DNA, 254 bp, Glycine max
  unsure (1)..(254): unsure at all n locations
agctntactatttcaataaataaaagaatgttttattctctagaatattcctcctcctatatgctcattcctcacttaataattcctccctcatccacacgtcataaatttacatggagtggcaaatagtaatcattttaaaccaccatttttaattctttcaccctctgaaaatgctgcactcattgtattctgtttcaccttcattcaccaagaaaccaatgcactgcagtacaccaatgcagcacacaatt

SEQ ID NO: 143101 - DNA, 254 bp, Glycine max
agcttctacttatgtggcagggcgggcttcctttactttcttggctccaacgcgagctctgaccactgttcttccttcccgcgatgcttcttttcatatccgcctgagtgggcttatagcctaaaccatacttcccacgatttccttgggtttttatcaggctagttatgccgccattttctttgcctaaacccatcccgggttcataaccgttccccaacataactcgggccatcattaccgccgcatcggac

SEQ ID NO: 143102 - DNA, 268 bp, Glycine max
tgcaagctaaaataagagtaacgaaatttgtggtttgttattataaagggatgaccaactcaaggaaagactagatggaattaatggtaatatatttcaagagtttatttatatcatggtcagggtaaattattttacagacatttaacaggaattccaccacattatatcaaagaataggatgatgtggtgatagggtgaattcttattggatgcatgtgtaaaaaaaatttacatagtgcatataaattaaattcatattccaaac

SEQ ID NO: 143103 - DNA, 265 bp, Glycine max
  unsure (1)..(265): unsure at all n locations
agcttctcccctattntgctatagatagggggagatgtgtttaaganaaagggtcagccccttaggcacttctctctctctcgagattgttgaggaaaattagttccgtgaagaaaatccaagctgaggcgcttctgttacgtttccgtgagtaattacgcgaagattctcgaccgttcttcaagattcatcgttcgttcttcgttttcttcagtcttcaacgggtaagtacctcaaaccaagcttttcaatttattctatgtac

SEQ ID NO: 143104 - DNA, 272 bp, Glycine max
  unsure (1)..(272): unsure at all n locations
aagtcacctgaggcatgcaagctttactatatattttaaggagacaattgttaaattctatatgcaaaagggtgattaattgaacaatgcattggcattgctcttatttccaacatttatctaaatgagggacattgtgagtagagtgtaaaaaacgcgggtttgtagattaaaacaaatgccattggagctaacgagaagaaacaaataaattaacagagtcttccttattagtnttgcatataaaaggggtttctgttggtacacaagat

SEQ ID NO: 143105 - DNA, 254 bp, Glycine max
agcttgaaggtgcgtaccccaccatcttttcatagtataacactggtaatgtgtctactattattgtgatcatctccttctccatcattggaggtgccacttgagctgccaggtctctccacctttgggcgtattctttgaaagattcatgcccctttttacccatggtttgtagatgcatcctatccggagccatatcagaattgtactgatactaacaaaggtaaccattatgtccttccaagaatggactc

SEQ ID NO: 143106 - DNA, 248 bp, Glycine max
agtgtacgactagccgtgagatgtgatctctgctagagtgaccgaattcttcaacgaaatgggaagatccagatgtgatgacaggcctgattcgccatacgcgagctcttttgaccaaacaacccgccttgaatgacaattgcgtactttgctccctttctgagccgaatgatattgtcacagattcgaaccctggacttcaataagtatctcctgataccttgttaagatttgacgagagcatatgg

SEQ ID NO: 143107 - DNA, 268 bp, Glycine max
agcttcaacctatatgatgtctagtggaagataatgttcttatttcagtccatccattcccaagattgacaaaaccatggtgcacaccgagaatgaggccaccattcaagtatacatggagaccatcgcttaaggtactggttgcatgagggaaaggagtatgcatcatagtagctgggagaagacctatgaacaacatatttcaagggttcaatacaaggataacttctccaaagttaaggaccataagagggtggtgtacaatttg

SEQ ID NO: 143108 - DNA, 263 bp, Glycine max
agacttgtcgcaatcctgcccttcggcattatgttctatgtgtgactcacgggtgcgtgttccaagaatggaatactcgcggagtcgccaccaacgtttatttgaggaaagtgtctgaaaaaccgggatagacgtgatctacgaattctatgcgaaaggttctagagttgtatttacgcacaaggaaagttttaacaccccacgcgtccgttcaagagacgacaacctgtaatcaaatgtgcaaatatgacatcaatgtatat

SEQ ID NO: 143109 - DNA, 252 bp, Glycine max
atgaagaatagcgtaagaaagtaccttttacgacgacatctacgaatgccccgagatacgaggctgagacgctatactactcgagtggcgtatatacaccgcctacacgacggacaaaactattctactatttacaaagagaggtgggctgatacttagcccatgggctcgaaatctaccctaaggctcgtgagaaccctacggccttacgttggatctctagcgcggtctacttggagtgttctatccgat

SEQ ID NO: 143110 - DNA, 260 bp, Glycine max
agctttgagccaaaatcctgactcaccataatatcttgctccgggtgagaatgtctatccttaccctctgaagcgaaaaaaaagagaaggaaaatctccaatcaaaggaaaaaaggaaagaaggaagatctccaatcaaagagaaaggaaaaaaatgaatgaaggaagatttccaatctatgagaaagcttaataagaaaagaaggaaaattcccaatcaaagagtgggagaaagcaacaagaaaagaaagattattccc

SEQ ID NO: 143111 - DNA, 260 bp, Glycine max
  unsure (1)..(260): unsure at all n locations
agcttgagatattcttcattcccattgagtttatactcanaattacatcacaataaaggggaaacgaagcacgagttgatggaggcgttggctttgtatgcgagttgctggtacaagatgttgtgggttagggtgaggaagggacggtgaggctttatggtgggaggacctgtggcggtgactatgtgactttgggttcggtggcaggagtatctaagtgagcctgatcatgaaatgtggagagattcttacctaattac

SEQ ID NO: 143112 - DNA, 260 bp, Glycine max
catgacatagcgaatgaagggatggctagcgcgttgttaaagaagaatgagatttggaatctactgggtggtgcaaaaatgcgaaggttaggctatggaacatgaggctgggatcttgactgtgaagatctgagggatggatcttcttactgcctcaatagatgctttattttttctagacaccatgggataaggatgaaatgaatattttattcttaacttatctttacttctctatatgaatcaatgtcatgtaacgt

SEQ ID NO: 143113 - DNA, 260 bp, Glycine max
  unsure (1)..(260): unsure at all n locations
agctngagaataccagaatctacgagcacttttactcctgctttggtatctttaaactccttcacttccttggctctgtcatagcctgcaccctctntgtcaaaacccaccactttcatgctattgctagctatgctctttactctgaaggtatttattgcttcaaatttgatacttggtggccattcataattataccaaatatggtacaagatgccgaacattgaacgtagaaaacaataataatagtagtaataata

SEQ ID NO: 143114 - DNA, 261 bp, Glycine max
acttgagatatacaatcctgcatgctgcatgcttccttcatgctcagcaactccgcaccactatatgtaaactccaactgtaacaggctatcgctaggcttgcgcttaactactcaggcgaatatagcgatatacatgtatcgaggagggacatcattctcctcccatatacagttcttgatacctctcgttgatctttagagacattctatatagtagtaattgtaaatgctcagactaactggcatattgtataccgtt

SEQ ID NO: 143115 - DNA, 253 bp, Glycine max
agctttataagagaaatatgtgcatccgtctccctaagagtcctctcacgaggtggaggttgagccatgttctcagtatgaaaattagtaattgaatgctctaaatcagaatattcagaatcactagcaacagaatactcagaatactcaaaatgttcaaaatgcacagaatgaccaggatgcacactatgcctaactaatctatgaaaggttctatctattttatgatcaaaggggtgtaaatcacctggat

SEQ ID NO: 143116 - DNA, 251 bp, Glycine max
  unsure (1)..(251): unsure at all n locations
agcttgttgttctcgatcacactgtataccttgttcagctcgttnttgggggccatcgccaatttacctatgtacgtgtcgtctaacctgtgatgttctattgaatacctcagtctattttgggaactcgtggttaacccaatgaccttttctgagttctgctacatggtttggggaactcatggtgacctgaggttcttttcactgtcagtctttctgccattgtctcttgttgggtttgatgtaagctt

SEQ ID NO: 143117 - DNA, 319 bp, Glycine max
caacaggcaacaagggagacaccattgggtctcccaaaatgctgatgcctaggttgccaatcgtgcccttattacgacgtgcactacacctaactaaagcccttctaggtgattaacccaaaacatataatcggtcagccaactttacaacgattggaccatcatttagaccaactaaacactctataactgagacaaagagcgtgcatttagtcctactgcatttgggccatgatacaactcacaactttggacttttctccttgaaacttgggcattgatctcaacaagagggacatcacttgcagaagagcttcct

SEQ ID NO: 143118 - DNA, 246 bp, Glycine max
  unsure (1)..(246): unsure at all n locations
agcttatgcaggcataagttgagatgagtattatggaagaattgaagntcttccttggacttcagatcaagaaaatagatgaaggcatatacatacatcaaaccaagtacgtgaaggaacttttgaagaagttcaagatggacgatgcaagcccaataaagaccccatacatccaaccagtatacttggactggacgaagaatcaaagcaggtggatgaaaagacatacagaggaatgatgagatc

SEQ ID NO: 143119 - DNA, 215 bp, Glycine max
tggagatggcagtgctcttaggctacatctctctatgatagctgagagcatgtcattcaatattaccttgtagattgaggcactatcgcttaagggctcaataggagatgcgagcccaataatcaccccttacgattcaccattctactagtcctgaacgatcaatatcagcatgcgggactcaaagattccagaatgatgataagacttcttcc

SEQ ID NO: 143120 - DNA, 259 bp, Glycine max
agcttcaccggatgatgccgatcgaacatttcctaatctacatcatccaattgttattcagggattgaatagaataaacaatggccggtgtcggtcgttatatggccccgactgatatctttcagccgacattgcgcaatttcttttacaaacgctagcgataatgtgtttttttttgttttttacggtagaagaagttttttgttttggtgttgcctaaaaaatatacaatgtaggtcggctaggttcttccgtgcga

SEQ ID NO: 143121 - DNA, 304 bp, Glycine max
tggactattccaccggtcattgaggccttgaatcgtctttaccgaggcagcatgatgtatctttctctagaaactgcattaagaggctttctctataagcttccttatggcttctttgataagtgttctctagaggcttctttgagaagctacatccttatctatccatccctctatttactaaattaacttccttaaaaatgatgaccgatgaaaattacgccacacatgatcaaacatcaaacataacttctaataatgtatagatatatatatcacggtggttcacatcatatattgagac

SEQ ID NO: 143122 - DNA, 261 bp, Glycine max
  unsure (1)..(261): unsure at all n locations
agctngccacccagctcgcccaggcaagcaatggtgctttctctagaagcaacagccttctggaggaatcttctggagggcccaagtgggcctggttgctatttgcacccccatttttactaaatgcaccccccttctatttttttggtaattctttttccataacgttacgaaaatttacgaatttcgtaacgatatttattttccttccgcaaggttacgaatccttacggattatgtatttacccttttttagctttc

SEQ ID NO: 143123 - DNA, 333 bp, Glycine max
  unsure (1)..(333): unsure at all n locations
tcggaatgatgatagaaggttgtgcatggacatgcaccacctgcttgatatatacatcagcaacatcaatctcttcgcgatccctctagtaagctagcatgtcatgcaacgtaactcctcgaatgaggacaaattgatgttctatgcctattgacggtggcattcgatgaggaatcttcctgagaaagacatcacccaattctagctatcagagatcaaccctaagacaaacgtatgtacataactcactataatcatcattcacacattactgactntcactgcatgcgatagactggttcactatgaagtaccacactcctcactactctc

SEQ ID NO: 143124 - DNA, 257 bp, Glycine max
  unsure (1)..(257): unsure at all n locations
agctngcatttggaatggcgaaagccccactccatcattaggattagtacctgacatctcaaacaaacaaatcaaacgtaacaagacaattatagttgctgtttgaatacctcacccactcaagtgtatcacacaattatggcttttctctaatgaaacactcttgccttttaccactctaatttcccttgagttcttaggcaattcaagagattatggccacaacaaagaacaattcaccaatatgtgtaaggtaa

SEQ ID NO: 143125 - DNA, 177 bp, Glycine max
  unsure (1)..(177): unsure at all n locations
acgctggctattgtgattgtgcactgcctgaataatcnttctgatgatgacgaccaggaactgttcggttggctgtatactgcgacgctctctgggtgcctccacggtatcgttttggccgatgacacatctgaccatttaccaccctagttcgccatggagtcttatgcctgtcga

SEQ ID NO: 143126 - DNA, 261 bp, Glycine max
  unsure (1)..(261): unsure at all n locations
agcttgctggatactggagcattcacggcatgttgatcttgaatttactccancaatctcgctcnaacggttcatgatatatacgctcctcacagttgcacactattctccgtgatcctactgaggctgttctccagaacaacgaagacaccctgcaattttggcatcttgacggcgatgatttatgggtcattgggtatgcccactacctttatctataaacctttgcttctattatcgctatctctatcaatcgaagca

SEQ ID NO: 143127 - DNA, 258 bp, Glycine max
agcttctccctcattttcctataaatatgggaggagggaagaacaaagatgttcaaccttcctggtatctgagattcacttaaaattagtgagaaaaattgtttccgtgaagaaaatccaagtcgaggtgcttccgtaacgcttccgtgacatttccgtgggtgatttcgcgaagatattcaaccgttcttcgtcgttcatcgttcgttcttcgtcgttcttcgatcttcaaccggtaagttcccaaaatcgaacttt

SEQ ID NO: 143128 - DNA, 256 bp, Glycine max
agctttgggttgggtgaaagcctagtctgaatcattttcatgtatagggatgtccagctgaggcaaggccttataagccaaatgaaagggaaatggacttctgaataatgagcaactactttattggttattctgaaagatccaggggctagaaattttatgatcccaaattaaagacaatttttgagatgggaattgccatattcttttaggatattgagtctgggggaagaataaggttaaaaacttggtctta

SEQ ID NO: 143129 - DNA, 256 bp, Glycine max
agcttgtaccgatgtcaaggctagagatattgtttgtttgagagcaaattaattaacatgggtggtggtggtgctactgcagaaagaagcttaaaggaaacacccatatgggcagtagttgctgtttgctcagtgttcgtcatcatctctgtattaattgaacacggaatccattcacttggaaaggtacgtactaggtgtttcatcctttaattttgttttattacttgtagtaactaaatttaatcaatttcct

SEQ ID NO: 143130 - DNA, 267 bp, Glycine max
acaagggaacatgcgttgctacccgtctcctggcggaggagattgccagcatacacggccttagccaccatgccctgcattgtcgatggaatgctatagctgtgtgtggaggggcacctgaacgcgtcttgttgtacctgcacctacttggggtgccatactatatttctgtttgagaacacgccaaccatatgttctatctattttgcatcccacacactttaccctcacagtggttacttttttgatccaagcatgccattattg

SEQ ID NO: 143131 - DNA, 278 bp, Glycine max
ctgtacgcatgcgagctacgagttaagatatatataaatatgtctgtggtcatgtttacacggagctcgttattgaatatgcacatatgtttataagattcgaatgtttactgggcaccaggttgttaaaatacttgctacttgctatttggactgcatattgcatatgtgacggttggattgtttggggcttttcacaataagggtgtgtgtgcgcagttacttttttatcaagttaataggtattatttccacatttcgaacatggtttgttactt

SEQ ID NO: 143132 - DNA, 260 bp, Glycine max
  unsure (1)..(260): unsure at all n locations
agcttccaagaatcaagatcaagattcaagactcaagtattaagaatcaagagaagaattaatcaagataagtaatgaaaaagtnttntcgaaaactgagtagcacatggatttttctcaaaacatgtttaccaaatagtttttactctctggtaatcgattaccagattgttgtaatcgattaccagtagcaaaatgttttngaaaaagttttcaactgaatttacaacgttccaattgatttcaaaaagctgtaatcg

SEQ ID NO: 143133 - DNA, 289 bp, Glycine max
actaactggcgcggctacacaagaagatatatccacacctccagtcatagttcaataaacataatgttatgctcattccatcattatctactaacacagagtccaacctgatcattttatcatctgtgttaccacaatgaacacactctatggataccaatgaccttatagtcgtgttatggggccaggctcacaacgaattatagaaattctacgactgaaaagcctacgttctaagagagcattcatacctagataaaccttcactgttcattcattccacaccaat

SEQ ID NO: 143134 - DNA, 254 bp, Glycine max
agcttgtgaaatccatgtttttcataggatacagtatctcagaaacttatcctcttttacatagtggtctagagcaacaatactctgttttgtttataatgaaatctggaaccaattctaacactagcaagaaagctccaattctaagagctatggggaaatcttattgctgtgcaagaaacaaggagggttcatgatgtagcataccgaatggagggattaacagaaaagttaaaactttggagaacttggta

SEQ ID NO: 143135 - DNA, 215 bp, Glycine max
  unsure (1)..(215): unsure at all n locations
ctgtcgcctgacgttgtggagcatgctctcctggagatcaccatacagaactctatacctctttgcaacactctagaggcaatcgagcaacctgaggcctatgctgaanacatttatgctgtgctccactcacgggggaccatcaacagcataatgattgtgagcgttcacgcatagaccaatctttggcgattcggcccaactgcacagccaca

SEQ ID NO: 143136 - DNA, 260 bp, Glycine max
gtgcaagctttacgaaaaggttcattatgtcaagttgaagtatggaagtaaccatcttgcaaaattggggcaaaagatggatcgagttacatcgctgcttcgtctactaccaaacacatttaggactgtcgatgtccctgttacttccagtttcaccttgacaaagatgtcatggaccatgttgaaaatctaaattgattcaaccccatgtcttgcataaaaaattgcaatacttcaaattgtgcatcattcacatacat

SEQ ID NO: 143137 - DNA, 248 bp, Glycine max
cttatcttaatcactcaagaatgaaccatgaatgacccatgatgcgccatagagaacgtgttccttacttccaaatgtggcgccgcttcacattgaagactgtacatgtaacggctactgtcaagttctgcctgacaaatgagaaatctactatgactaaaaatgtgaaatgctacctatatgccttgactactatgatagcctctctacgaatatgtgttaccacagagaacctcacacttagctta

SEQ ID NO: 143138 - DNA, 255 bp, Glycine max
  unsure (1)..(255): unsure at all n locations
agctntagatgcctttaaagtttttaaggcttttatttgagaaacaacgtggaaaacaaattaagatcgtgagatcagatagaggtggggagtactatggtagatacacagaggatggacaagcaccaggttcatttgcgaaatttcttcaagaacatgggattgttgcccaatacactatgcctggttctccggatcagaatggtgtggcagaacgaagaaatcgaaccttattagacatggtgagaagcatga

SEQ ID NO: 143139 - DNA, 370 bp, Glycine max
aattaccggccaaacttatagttctagagggaccaaataaatcaatgtgaaatagctcaagggttttgaactagaaacaatgtttttactttgaaaagagcttttaacttgcttgccttttcgacaagcttcacacaatttatttttcccaaacttgagttttggaagatcaattactaagtctttcctaactagatgattgaaatgatgcatcgttatgtgtgcaattctacgatgccacaaccatgaatcaattatcttacttaccaaacagatcaactcatgaaatgatgcatgttcaatgcttaacatatagataatacctattctcttgccaatatggacaacatcacagagcatagcttcacta

SEQ ID NO: 143140 - DNA, 330 bp, Glycine max
  unsure (1)..(330): unsure at all n locations
accagaactagatggtaaagtaaatcccagaacatggacagctacccaatctaaagttctacttcaaatgacctattgcatgaccgggtggttgactttttttcttactcaagtcttttgtcctaaaagaaaaaaatcacatttttggcttgagaggtttaacgagagacattcggngtaatgaagggaattttacntcaatgatacattatgaaaatctgcctccttacatttattatntcttatgcaactctcaaaggctcgcaaacctaggtttatccttgggagtgtacagcacataaacccaagtcaccttgtgagtctatactc

SEQ ID NO: 143141 - DNA, 379 bp, Glycine max
gcacaaaaatttaccatctttgtttttctttaccaagaagcgccggccacttattgtagttaatttaattttccaggtagtatgcaattcttcatagttaatgcaaggaaatataccatttggtaatctgagttcatatgaaagatgggcaaattattataatatgaattagactatctgaataaaattattatatttgttaaaaaagccacactgggaagacctggtctgtctgctaatcctttaaaagcaaaacctaattttgtaaatgctatgagatctctggttaaaacaaatagaaggggtcatgatattggttcactgaagttcttaatatcttacactcggtttccaaactttggccagatatgaaataata

SEQ ID NO: 143142 - DNA, 343 bp, Glycine max
  unsure (1)..(343): unsure at all n locations
agcttctagcgtagccgnngtttgtgctcanataatcctaaaaacaaagccctcttattactagntattttgaattctttaattcctgaatgtacaacccttcaaatggtgctcggtcccctctttcttttcttgcaaaaagaaaatcaatatcaaagaaaacatggatgaagtcctaaggatgccatgtacatgtgtatttctgaagatatagtattgatattccatcaaacatacattgactgttgattacatgtaatagactttttataacatggttgccccaaatcacaattaataagcacaactaccaatctttcagagtcctttggttaaattttct

SEQ ID NO: 143143 - DNA, 341 bp, Glycine max
  unsure (1)..(341): unsure at all n locations
tattaactttatctattcttgcaatttgtttaatcacaacaatagaaacaggggatatatactactgtcgttaagcacttgagtccttaccaagagcctgcccggaaattgggacaaacattccttgaaccatcatctcgtgatgatgctctcctacaacctggaagaagggagcaaaagatacaactgaatacgctcagctttaatcaatcaatcaattcattcagctganactgggtgcaaggagaattcattcaatcacaagggtagaattttggctaagtagtattcataatcaaacttggccttcatcattctcaagtntatgcatccaatccata

SEQ ID NO: 143144 - DNA, 161 bp, Glycine max
  unsure (1)..(161): unsure at all n locations
gagcacacagcgcgcacttntgaactcaaattctaaatgctgttgttaaacgtattgggccactggtgatccaatacatcctcatgatatcagttaccaaagagaaaatctcatgatatagaaatgtgaactgcaataaaaggggccaaccattatctacg

SEQ ID NO: 143145 - DNA, 377 bp, Glycine max
  unsure (1)..(377): unsure at all n locations
cgcgagaccgcaactctagcaaatacgcaagccgatgttttatttttttatagagcgancacagcactgacgaccanaaatgccaganaccacaactnggaccttaggatnttcaccaaagatcaaacgcctctgagatggatcatgcacttttgtatttacatacatatatatgcacagcaatcttctatacttcatgtatcaaaatccgtacagtgtgtgttttattgcttatcgtttccttccatatgaacaccacgtacaagccagctcaagttacatcatcatcatattataacttttgagaaattcctataaaataaacggataacgataaagatatacgatactttaacacctttttttgggccatatat

SEQ ID NO: 143146 - DNA, 255 bp, Glycine max
  unsure (1)..(255): unsure at all n locations
cagaaaagcttgtgacggaagctacctagtctatgaacagaagcatgcgtgacacttgctggaactttgatgaatgagagtcttgtgagacatacttcaaagatgcacttctatacctcttttattccttcaagttcgggctcccncctctctctgtctctccctctttcttttcctccattgaagcatcctttcaagcttcttatccaaggcttatcttagcggcgaagctccttcttccatggcttattccct

SEQ ID NO: 143147 - DNA, 250 bp, Glycine max
cccccccccccccccccaaccccgcccccgccgaaaaacaggcccagggagaaaagcaccaagaacgcacccccaacgaaccaccaaagccccccgaacccaccccccccacaacacccaaaccaaaaaggcgccccccaccccaccccgcacccgcccacacccccccccgcccccccccccacgccccccgcacgacccaccccccccacacccccccccccccccacccacccccacccccccgccc

SEQ ID NO: 143148 - DNA, 161 bp, Glycine max
  unsure (1)..(161): unsure at all n locations
atgcacttnaaggggcgagagacaatgatactctttgaacaacgagggagacgtcgaattgaatgcttgaccccgaggactggataagccgctgggctatgaatctgctttcaacataaaggtgccacccaagctcacgaattctgctgcttcgaacgctc

SEQ ID NO: 143149 - DNA, 105 bp, Glycine max
cttacaatcaagatgaagagtcagtgacgtgcattttacctgcttgcagatgcaattgggtgatgttgtgtatataatctctggtcgctctaaattaagtgccac

SEQ ID NO: 143150 - DNA, 296 bp, Glycine max
  unsure (1)..(296): unsure at all n locations
tgcaagctgcaccagctcgcccaggcgagcaattttgcttttctataagtttttgncncgnggaggaaacttgggagggcccaagcgggcctggnngcnatccgcacccccaattttactaactacaccccctgctttttttttggtgcttctttttcgtaaagttacggaaacttacgattttcgtaatgatacttggtttcttttcataatgttacngaaccttgcggattacataatcatcccttttttgactttcggaacgttacggaacctcacgaattgtgcaacgatgc

SEQ ID NO: 143151 - DNA, 266 bp, Glycine max
  unsure (1)..(266): unsure at all n locations
tcagggcatggaaaactactcaagaggtcccgagctgaatccagaagaattcaagactctagaagaacgtttaaagtccagaatcacgaatcaaggttccagatctcaagaatcaagatcaagattcccgactcaagattcaagaatcaagagaaggcttaatcaagataagtatgaaaagtttttcttaaaaactgagtagcacatgatttttctcanaacatgtttaccaaagagcttttactctctggtaatcaattaccaga

SEQ ID NO: 143152 - DNA, 193 bp, Glycine max
tatgaacattatgattctttttccttggaataaatattccattctctctttatactctttaatgtagaacttattttattatcaaataaagcattcgggtattggtttctattacgatttcccttttataatttgttattgctatctttatggctataaatgattgcatttggaatcaaataatttcattacc

SEQ ID NO: 143153 - DNA, 267 bp, Glycine max
cactgctaacagcgcagtaaaatatctgaacctgagagaacgttgatattatgagagggtttataagaaaagcagcgtacccgagttcacaaacactggacgccgctgctccggagattcgatcgacgcattctttacttcaagatatcacaaagtctataacgcacagcctcactactccactctcttcgtcttcctctgctttcttagctccttctttcttcaattgcaggtccttacttttacttaataacctcactcttttcc

SEQ ID NO: 143154 - DNA, 362 bp, Glycine max
  unsure (1)..(362): unsure at all n locations
caccttttaaacgatatatccaggcacaacctgacaaaaaattatttaatcatggtatattgtataatgggacactgctttaatggcaatgtccatgccaataagaacacccagaacattattacgtagtaattccctttcattcagattatgtgtgacagtgattggcatacaatgaaatatgtcagagagatacctcaaccaatgtangttgacactcccctggcacacgggaaaataatcttgacagcaattcttgctgcctccatcctgtgaataatttttggccatatatacaccgctttattctcaacttttcgcactctgaccatcgcaatattcttagactgaaaactttcata

SEQ ID NO: 143155 - DNA, 371 bp, Glycine max
  unsure (1)..(371): unsure at all n locations
ctgccaatgtgctaaaatccttcacaaatcgtctataaaaacttgctaagccatgaaaactcctcacctcggtcacagacttaggggtaagccattcttgaatagccctaaccttctccatatccacttgcactccttttgaactcacaacaaaaccaagaaacacaacatgattagtacaaaagatgcatttgtcaagattggcatacaattgttcttctctaagcacagtcaagacagattttaaatgatcaatatgcaaatcaagtgaagtgctatagataagaatatcatcanagtacaccacaacgaactttcctatgaactctctcaagatatggttcattaatctcatgaaagtgctacgagcg

SEQ ID NO: 143156 - DNA, 373 bp, Glycine max
  unsure (1)..(373): unsure at all n locations
tttattgagcacaggactgagaggacgctaccaatgtgctaacaatcttcacaaatgggggccaaaaactcgatcatacgcggacacatcccgccaaggccacagatttatgtggnggccgagtatgagtgtgccaacctcctgcacatgcactagcacccgcgatgaactcacaacacaaccaagaaacacaacatgattagcacaaaagatgcatttgtcaagattggcatacaattgttcttctctaagcacagtcaagacacgatttaaatgatcaatatgcaaatcaagtgaagtgctatagatcagaatatcatcaaagtacaccacaacgaaccttcctatgaactctctcaagatatggttcatt

SEQ ID NO: 143157 - DNA, 179 bp, Glycine max
  unsure (1)..(179): unsure at all n locations
caccgttggacagacttatacagttatcctcacatgccttaggatactgaataagaactgggaaaggatggtgacacgnaaacagtgggacccatggcggagggaatgccgacttcagcacctagatgaccttatcgacttccttccctagaggagctaattcggcgagcttgagcggc

SEQ ID NO: 143158 - DNA, 427 bp, Glycine max
  unsure (1)..(427): unsure at all n locations
agcttagaatctgtcggcaattgtaagcggttgttacatttcctatccctncgaggaatngataaggaccgnagaaacgcttggccaacttaaagaaggtgggcggagagataattgccgataagggcggagccgcaggtaaacccaatcttcaacctgaaaggagacgttacggcggttgcggtcagcatatagcttcatggtggactgtgccttcaggagacgctggtgaaacttagcatgcattgcctgcctagtggacaggagagtatcggcaacttcaatgggtgatgacccgggagtgaaagggggtaaagaaggtggaggcttgccgtaagtcaactcataaggggatatgccggtactggaagggcggatgtgttgtaactccatcagctatggagagaaaagagaaccatgtgcccga

SEQ ID NO: 143159 - DNA, 298 bp, Glycine max
  unsure (1)..(298): unsure at all n locations
cgaggcgagcaagccggcaccgtgggaacacgcttattttttttgttcaagacaagaacaagcaaagcaccgaccaccaccggccccgccaggngcgcgcgcaccaaggacggctcacggcattggagcctcaccacctactctcaacgttgtacctcactgtatccgagcctcttgatacactggggcctaactgactgcttgtgggtggctgcgaaaggaggaaggagaaaacactaagagaaaccgattggcaagagaatccactgaactttgcaattaggcctgggaaggaaaa

SEQ ID NO: 143160 - DNA, 278 bp, Glycine max
  unsure (1)..(278): unsure at all n locations
aacaatctactgccaacgaaccaccacctccaccttctttatcaacctccgcattggcgncaccaccaccaccaccaatgtcacagtaccctgtgccgcagntcatgcagactgccggaaccattagtagtatggcatacaagctatggcgtgacacaacagccatcaattgcaggctatccaggtgttgggccttccctgaatagtgttgttacttctaccccgcctccaatgggtacatatcaggggtttcacgcttcagatggaaattactataa

SEQ ID NO: 143161 - DNA, 403 bp, Glycine max
  unsure (1)..(403): unsure at all n locations
cacctgaggcatgcacgctttctagctttcattggnnganaagatctccttnngttgctctaaattgcgggaatatgctcaaatatgtatggcaattttggtttgttttcttgcttgaatgggttgaattgggggtttgtatgggatggccctacgcctataatgcatttngaaacaatgggacatgccacattgtccccgttctcttgctattaatgcctaaacgtgcgcccaccaagtgttcggtgaaatgcctcaatggcattagcgcgtggttttcgtacggaaacaacccgtggggcaatttgggttgcacatattttctattttttgggacatgcattcattcccgaaaggctagagtattgcccacattatcctagcctagaaccaagtttaccaa

SEQ ID NO: 143162 - DNA, 382 bp, Glycine max
ctctcacctctgtactgtaacattggcttggtgatctaatgaggagaatgagatatgacgatgaataaaggatgaagagaatgagaaaggagaattatgatagtttgaccggaatacataagagtagtgaaactttaagtgtgaggattgaaaatatagagtgaagagatgtaagatcatctaattcttcttagagaggaagaaggaatgagagatatagggagagaagaaatcatagaagatatggaggtagacaaagagaggaagggattgagggagtgaaggtaaagatccttacttttaaagagacttatgatccagaagtgtatcttgagtgggaaatgaaggttgagcaagtctttgctcgctacgactctaatga

SEQ ID NO: 143163 - DNA, 264 bp, Glycine max
  unsure (1)..(264): unsure at all n locations
gatcgacgtccacatttaatggaggggatagaacctaagtccacaatttgaccgctgggatctactagcagacatcaagaactcattgtgtactactctctccacaaccagcaaatacatgagatttttctgcacttatgcgaatttctgctgcacatttcaacagcaaaattctgcataaagtgcagatttcgaaaaccactctttccctcatccaattntgcccaaattgaatcctacaagtcttaaatcatgtaccaatca

SEQ ID NO: 143164 - DNA, 454 bp, Glycine max
  unsure (1)..(454): unsure at all n locations
agcttggcactgcatcagntaagtgaacaaatttaattgttcacagncaantggatgggntggctggtagaaggtacccatgttattaactatataaagaatttcctgccgtgttaaggtatatattattaaagaaagaggcacctatatatataagacttttatatatataatcttattaagagttttaaacacaactcttttgtaacacctctccacttggtgggttgaaatttaattgagaattataaaatcagaagaatgactcatcaaatgactagtgggacctgccaaatttgtgatttttaagaaatttgagccaacaataaagagtgtgttcaagagaatgtgttagagacagtgttgctagcatttctatgtttaggaatggtgtttgtagtattagtgaaaataaaaatagaaaatattntccttatgtcaaacaggctcctga

SEQ ID NO: 143165 - DNA, 235 bp, Glycine max
  unsure (1)..(235): unsure at all n locations
tacatgtctgccaattaaccacgccatatacgcctcgtgtgacccctcttaattgcgtcacacaacagatgctctcgtacgtcatctagtatgtgtcggataacgtgcaacaacagatgcagggacaataatatgttccatcttcattcgggtgacctctttctgaagcaaattgtaagaatngctcgacgtcttcctcatattctgggctgatgcgactttcattcatccaact

SEQ ID NO: 143166 - DNA, 235 bp, Glycine max
  unsure (1)..(235): unsure at all n locations
aattggcgattggaagaactccgctggntttactcaacgcgtactgtgcaaacctttactggtataaaagctctattgccgtgcctggggtgtaccgttantcttatggtaaggctatgaggacttcgggtctgaagatatcatacaaggagctcctctcacctaggtgctgtctctacccattctcattcatttgcatgtctacttctttgtctaaaacggcagattcgatgac

SEQ ID NO: 143167 - DNA, 428 bp, Glycine max
  unsure (1)..(428): unsure at all n locations
agcttagactctagttttgaaaacacgtcgctttctatttatcaaagnctaacctaacatattctcatccctagctatgttagaattacgtgggggcttaaagaaaagagattaaccttaaatttccattaacttttttacttaaaaaaaaaaaaagctattcacaaaagaaaaagccaagaatacaacagaattggtatgaataatcttttggggatggcattatcttcatttatcttcatttggatttatcttttataacctctttggtaatcttggatctataaatatggtactcctcttggaaagaatacatacaattatcnatctctcttaactctcctggtctctactttctctatattattctcctcacgagttatattatatttaacacaagccttgtagagaattttatagaagaaagt

SEQ ID NO: 143168 - DNA, 271 bp, Glycine max
taacagggagagatgcgtaagtatgataggagtaccatgggactttcggtcatcagagttacaacaagtgttacacatgcttttatctatatacaaagtagcgctcttgacaagctattttgagaagaattccctgagaagctagagcttagcttctccgagacctccaataactaaactcacctacttgaataaacttcttgagaatatttcgtaagaagctagaacttaactacgcacaccctcttgataggtatagctacccccatga

SEQ ID NO: 143169 - DNA, 406 bp, Glycine max
  unsure (1)..(406): unsure at all n locations
aacctcagagacacctgcggcatgcaagcttagtctcatcgacgngattatgaatcacttgtttttcttggccncaaagagacaatcctgattttcctacccatatggagatactcaattatttgcactcttatgctaagcactttgatgtgctcaagaacataaggttcaactccaaggtggtggaaatccgctacacaggcaaccgggaagntacctgctctggaagcctactttccggtttgccgatttcgtcatatctcttcnttctatacatttcagatcccaacccagtcttgatattccacataactaacttcgtactttcatgaaactacatacttagatcattttcttctacatcgattattatctgtatcctatacgccactctcttcacttacac

SEQ ID NO: 143170 - DNA, 396 bp, Glycine max
cgtgcactgtatgcatcgcttaacgttggatgcccttctttttcttgtgtgagaaacctggccctgcctgaagggcatgtggattgagctgctttgttgacgcccatacttaccttgaggcgtgcatgcatcatcctgtatcaattgaggacccatgaatcttatgctgcaaatattaacaagagaactcctcaaccttaacttctgaatgaaccacggcctaacaattatgacatgtgcggaacagatacaaccctggatggggaacaccctaacctagatggtcatgcctatcaacacaacagcagctgctcttacttcaaaagctgtggccaacagacatacttcgtcccaatcacaacacactacccaaatagcacgtgggccctccaactt

SEQ ID NO: 143171 - DNA, 432 bp, Glycine max
  unsure (1)..(432): unsure at all n locations
agctttggctgattttcatggaaancaacatttatgtactatttttctctttattaaagcggccccngaaatacgaatttgcttaatttaaaaaaaaatcattcatttcctttggtatgatcgattgcccttcaaagtgaaaaggttttaagattgaactcgtgtgaatataatttaaaaatactttacatatgaaatttcctttatataggtattctattttcaattttatagcaatttatgattggaaaagtataaaagtagcactattggtttgttatcaatgtccaagttatttttgacaaattatatgaacgaagaaatattacttcattttattaagatatccattgttttatctgacaatctttttaatccaatttctaatatataaactgaacatcatggacacgaataaatctctcaaaaaaa

SEQ ID NO: 143172 - DNA, 432 bp, Glycine max
  unsure (1)..(432): unsure at all n locations
agctncaaaagatcatccccttgacaacattttttgtgatatttcatattgggagncnncnccnganacgcaaagcgaaatcgaaacgncaacgagggagaacaaataccgccaggcgtacaanaagcaactaagaaaggatatncgcaatcaagcaaaatactgcaaaaaatngatcaaaagatttgatatggaaagtgcaacgcacatggctacacctatgagtactgactgttaattagataaagatgaatccggtcagtctatggacatgaaacaatatcgaggtataactggatctcttttttatttatctgctagtagacctgatatcatcgttagtgtatgcatgtgtgctaggttccaatctaaccccaaacaatcacatntgagtgaagtaaaaaggatcataagatacctagtacgaacaat

SEQ ID NO: 143173 - DNA, 302 bp, Glycine max
  unsure (1)..(302): unsure at all n locations
tcgcattnggatagctcaaacccaatagtttaaattcagccatttaataattctaatatacgttgatgcatgatagagaagcaggtacttattattggttgcaacatctcttgggtgaatcaattgcatgagtgagatgaactacatactaacgaatattttgtgaaatctctgattctcatgtaagcaagtgttagtgcaagtgatggagtgtgaattaaccatgcaagagtgaagaggttagtatttctgacagaacatcatggaatgtgaacctgaatacttcatacaaaccaatgagt

SEQ ID NO: 143174 - DNA, 273 bp, Glycine max
agacgctcaacggtatacgaagccgtacacgactggcaagacttggattgtagcactttcacgaaaaatattggagagatatgataggtctatatactattcctcctaatatccatggaaaggatggtaaatgacctggtgcatgaatgatgagatagttcgacatcttgtgaagctcacaatatgttggaagccgcctgatgagtgagaaagaactacaactgtctaaaaaactctatccaattatgaagagatcagaaacaagtgaaagtg

SEQ ID NO: 143175 - DNA, 395 bp, Glycine max
  unsure (1)..(395): unsure at all n locations
caagcttacanaaccttaatttgttaatgggaattctatnatttattgngacttcattacctgcctctttttccatagagtaggtgtcttggccaactagagctccaattctgcagtcacaagttcaccaaaatacttgatggaacagaggaaatattttcaagttatgtattttcgttctctaaattggaatgtgagattcttccaaaatttagaagggaatngattatggcattggcagggatactatagcaatttctgtcttttttggcctttggtttgatctgtaatgttagaaatcactgaaggtggtggcgtgtangttttcaagtttgggttttggtttatttgtaatgccaatattttagtggactatgaaatcaccatctcaagtt

SEQ ID NO: 143176 - DNA, 173 bp, Glycine max
gcatgaacgacaactttgaagcggacacgggtggcttgtgtcttggtggaataagtgtgagaccaaccacacacagagagcgggttaacaacagacaatccgtgcactgtttttctcacacctccggtcaaaggtgtcaaacaaatctgtcaagatagccaccactggactct

SEQ ID NO: 143177 - DNA, 289 bp, Glycine max
gatcccattactgcttcccctaagctctctgtcctttcttcacgcccgatcccatgccttgcgaactccttggagtacctttgcattggggtcactgaaaccccgtgtaatgaaaggcgtgatgcttttgtctaatggcgctcctctcatggggtagccaagctgtcttatggcgaggacgggattataattaatacaacctcatgttctcatctagggaacatttggacatccttcgcatgaagatacaatcctgattcttcctccttctagcgagggaaccaattac

SEQ ID NO: 143178 - DNA, 166 bp, Glycine max
cccacggagacgcaacagacgacaaccgaaaccacgcgagaggacgggacccccaccacggaagaaaccacggcagaaggaccatcaccgccaacacgagccccggagaacaagctcggacggcgcccaagcggggcgaacaccgagggagagcaagagagagggg

SEQ ID NO: 143179 - DNA, 393 bp, Glycine max
agcttgcccagagaaggaatctctggaggatttgcttaccatctcgaaaaactggaaagccggttctaatgactcctctgcggccttcacataaggcatagaggatggccagctcaccaagattgtttcctcgcctgatacgatgaccaaatgcccttccactacgaatttcaacttttggtggagtgtagaaggaacaactcccactgagtggatccacggacgccccaacagacagctgtagggggggttaatatccattatttggaaggtaacttggcatgtgtgagggcctatctgtactggaaggtcgatctctcccctaacctcccggcgagtgccgtcgaaggcacgaaccaccattgaactcggctttaggtgggaggctttgat

SEQ ID NO: 143180 - DNA, 340 bp, Glycine max
  unsure (1)..(340): unsure at all n locations
gttgttatgactactcgggaatgaaccagctacggaaagaacctaccgagatgtcttatcgctgggcaatgaccatatctactaacactgccaacagagaacaaactgtgatgccttactacacaacaaccataaaagggaacacggaacgcccaactatatgctttcatatggggtgaacatttgatctgtgttaagataaaccatatacattgttcacggacctagcatcgatataaatttttgtattttctcaaaatgtgatacatatccttgttgtggcagtatggcccatggctaantggcctatgctttttaattttaggttaatcattactac

SEQ ID NO: 143181 - DNA, 278 bp, Glycine max
  unsure (1)..(278): unsure at all n locations
aaaancaccaanaacagaacgcacagaagcaccagnnacggaacgctcagaaggaacaaaagggataaaacgaagcccaactaatctatgaaatgtcctatctatctcaggatcaaagggttgtaagtcagatggatcgcctctagtcatacactacattcagcatgcacacaactagttgcctttgcatggtaataaagggtgaggtttgaactacagctacactcaaatgatttccaaatggacttgaatttgtgagcaccctataaaatgatgag

SEQ ID NO: 143182 - DNA, 338 bp, Glycine max
  unsure (1)..(338): unsure at all n locations
acctttcttgtccacttgttcttgttcctgaacaccggtatcaacaatntaaactaaaaaaatatctcaagtttacaaagcaagggagattattcagctgcaaaaatcaaaggggatggagtagcaacttttcctatgccttgtgttcatcacaatggtgtgtagctgtaaaacaagagaanaatcaagatgcatcaatgatgactagaggcagtattacttatccaaaagcaataaatgaatctgacacaattaatttaccttcaatntctgtttagcatcattctctaatacaagtccaacttcaacatatgcatcaatgatgacttctaaaaagc

SEQ ID NO: 143183 - DNA, 219 bp, Glycine max
gggagcaaccacggagtatttatatacattaaattaattgtaccattatggatgtttccaccacacatatgaggcttttggtggagaagaatgaatcaagaaatgcgatttctagtggagatgaactgtgggcgcataatattttgcgagggggctaaatatattatgcgtggagagaatcacgatggtgtgattaatttaaacattaaaaatgatgat

SEQ ID NO: 143184 - DNA, 349 bp, Glycine max
  unsure (1)..(349): unsure at all n locations
ttttcttcaaggcttntttatcaaagttttcatcaatttttcctccaaagcacttgtaatttccatattttgaatctccgtggtcaaaaaattaaaatgctattaaaatcctcattattcccttaaaaacaacaataaaatagaggaattctaatcattcttagtcaaaattaactatcaattaaaccaaaatttcgtagttatcaaggagcattngtattgaaaaaaaagcttaagcatctaaaacgaagttgaagaactggagtaagattaaccttggtgactgttaactcattggcaagtgtaccaaattgtcacaagtagtagagtaaaattgaaagtcgagtgt

SEQ ID NO: 143185 - DNA, 224 bp, Glycine max
ctaaattaagaagtgattattctacactttttaaggtgagtttatttaaactcataatacataattttaaaataagtattttttaaaaatacttatttaataaatagatagaatttgtttcgtttatttaataagcaattagataaacaactaaaaaactgttatctattaataataagtaaacaccactcttactctctaattactcttatctgtatcgtgag

SEQ ID NO: 143186 - DNA, 238 bp, Glycine max
  unsure (1)..(238): unsure at all n locations
aatggacttaccttgaattattttctttganatcccttttgagccttgnntccctttgcttattttgaagctcactacaagccttaagtgaaaaaccatgatattaccatatccttaaagaattttggagctttggaattgttttgggaataagtatggggggtttttgctcattagacccacttgccttgtgcgttttcttttcttgtctcttcgggccatactaaagtgtcttgtt

SEQ ID NO: 143187 - DNA, 359 bp, Glycine max
tcttcaatgagaaattttcacaaacaatttgtgaatcaacaacaatcaaagcttaaccattcatggccgaagctaagagaatacttaaccactatgaacatatgcttaaaatcattaaatcaaggcctaaaggctgaaaacaataagtcaaagtcttcaaaatcttcaaaagcatctaatcaaacaccttgtcaacataaactggcgtcgtgtctgagagcgggactcccagaagcttgcgagcactttctcaagacacataagttaattggaaaattgcaggaccaagctttgttaaaaaatacacatctctcactggagagagaaagaaagaaaatggacaaatatgaaaaagtatg

SEQ ID NO: 143188 - DNA, 303 bp, Glycine max
agccatggaagaataccaacttcgatttatatgaaaatacattacacccgcaatgtgaacttatcggcgcttctaagtcttcaatcattgcatggacgaagctcttaaatctatatccactaagagaccctagagaagcccataccttcaatgcttatgggttcgctacggaaagccaaagcacttcagataccttacaccatatgcgattacctcccgagctcacgcacagaagatgtgtttgttatccatgatcccaaaaacgtcgcaagtgttatccaacacacatatagctttggtctc

SEQ ID NO: 143189 - DNA, 330 bp, Glycine max
  unsure (1)..(330): unsure at all n locations
agcttgcggatttggtcttcatccgggaaagtttcttattgtgangaaaagagggcaaagnngatcatcttgcttggacgaatgagaaaaccggggcaaatgaagagggtgagaatgaaagagaaacccatgctgcgactggcggtccttcatggaaaattcctcaccagctcaaccacgtcaatactcaaccaatattaacccttctcagtacccaccacccagtcatccacaaacgccatccccaaatcaaccacaaggccttgcctgcttaccacacgcccaatgcccaaacactacctttagcataaaccaaaaaggagatttgca

SEQ ID NO: 143190 - DNA, 259 bp, Glycine max
tccttaccctcggaagcaaagaaagaaaagaaggaacaattcaaatcaaagaggaagccaaaagaaaagaaagggaattcccaatcaaagagtgggagaaagcgaaaagaaaagaaagaaaattccccatcaaagaatgggagaaagtgaaaaaagaagaagaaaaaggaagggaagaaagttcctgatcaaagaagcagaagaaatatgcagaaaggtggtttgaccagacaatatctgaacaatacaagaatggcac

SEQ ID NO: 143191 - DNA, 410 bp, Glycine max
  unsure (1)..(410): unsure at all n locations
agctnggncaaagctatgaacttcacacancctttcttttatattttaaaannganngcagatgaatgtttccaactgtcaacacgttgacatgatggcttatactgtatagaatatatatggcttggggtagagataaatagatgttattctaagtttcaaaacttcttcctctaccgtcaaaataaaaataaaacataatgtgggtggcacacttagtaagttgcaggaagcaaccggtttacaaaatagcccttgaagagatctttgaaaactcattntattgtaaatgattcacttgcctgaaacaggtcaaatatgccgtaatagcagtcattcttgctgtaccactatccaaattttcatcacctaccccacctataacctgctaattaccattttccatcatg

SEQ ID NO: 143192 - DNA, 249 bp, Glycine max
gggttcgtataccaatgtcaccaagagtgtggaggtcgaaatgatagctaatgctcgtgattgtctatacggactgcctaagaaaaacattactgacaatggcaccaatctgaataactccttgatccacgaaatgtgcagggatctcaagatgcagggtcctatctccaccctctattggccaaacatgaaccaggccgtggcggctgcagatcataatattactaagactattcagaagatgaccat

SEQ ID NO: 143193 - DNA, 423 bp, Glycine max
  unsure (1)..(423): unsure at all n locations
agctnnganctactcaccaccgttttcaccanctacttagntnncnannannaatagnacttggatttctagccgcgtatttggctatattattatgacatttgaacaatttagtatttcttttatttgcatggtatgattgaacaantatgaattatgntatatgaactatgtggttttatatatttgatctattcatgtttcttgcttcatgattggtttatactctttaatgaatgtcttgtgtatgattagtagtgtatggaaaagggggagagaaatagagactaaatcaagaactcacataagtaattaacttaatttcaaagtaagcataaactcaaaaacaaagggggagaatatggaaaattaagtgagagatcgactaggaaaaagtgtgtggatcgtgttcttggatntatg

SEQ ID NO: 143194 - DNA, 367 bp, Glycine max
aagaagttctctaacgtgtagaaacgatacttctatctgtacatatgacgcatgagtgtcatatggattggactggaatgagagtacataattgatacaaagtccactccatgaggtgggcatgtaaaaagacaaaacttttcaaacttgcaaactgagtcgtcatgttgcacccttatctgtaacaatctcccccttttggggtttgatgatgccaaacatgaattgccatttgagtgcattcggagaggcttaagagtaaagaattctcttgaaataaacctgaaaaatttgtacactattggcaaaagaagcaccacatcacatcaaatcatatcatcatcatcatcatcatagaggagaggta

SEQ ID NO: 143195 - DNA, 268 bp, Glycine max
  unsure (1)..(268): unsure at all n locations
gaaaatctcatggctgctcaccactgcatgaagccgtaaaaaatcccttttcgagcatacatggatgaaatcaccattaaatagcccaactacctatctttcacagtcctaagggtgagtagcctggcctctgatgtggcggggttaangncaactgctccgcaccgctattcaggattgactactatgataaagattaccgattaattttaatatattattaaagcaaaatctaagactcttatgatggcagacaaggtgactgata

SEQ ID NO: 143196 - DNA, 439 bp, Glycine max
  unsure (1)..(439): unsure at all n locations
agctntcacaatatccaaaaaattcgaacccatttgtcatgattctaccttaagnaaagaaaaacagagtggaggcagaaatctntgcacaagattcaattcaaatatacagagtttttcctacccacataccttagtaacatcctctttgttccgatatgttcaccattggatcgccttgaaaatttaactgagggttccaaatacagaaatctaagttttgaccgttgggatctactagaaaatgtctagaaaatgagatgtactacctttcccgtgactagcactgcacaaccatttttctgcataaattggcagttttgctgcacaatnntaacagcttttctgcataanntttgctgattcgaaatccaacttgcattgcatccaatttactcanattggatcctacaagtcctaaaccatgtataaatcatgc

SEQ ID NO: 143197 - DNA, 213 bp, Glycine max
ctattattctattgatcaagattaatatctacattgtattgaataatactatcgatattacatattttactgcataaattattttgattattttctttcattgaacaatttgtgtaatgaattagaccattaacccacctgtgtgtggttaagggcttgagcttaaccttttatctttgaaagggatcattcttctggaaaataaatcatttt

SEQ ID NO: 143198 - DNA, 441 bp, Glycine max
  unsure (1)..(441): unsure at all n locations
catgcaagcttctattcggaaaatcaaaaggctcaacactcacatgtcnttcattgtgggcacacaaanntcttgcctaaccaatctagaaactcgctttcagattgttgttgataagctagtcttggataagaagataaaatgctacaatgccaaagaaatattgattgaagatgaagaagatgttgattatattcattttgttaaagctcgacctggtcgttcgtcaaacatgagcttgaagcactcaaacacaagttcgagctcccatccctagatggatatgccattaagaagttctatggactacaagcatgctcctctagattggaacctaaggagaaaccacctattgatgcttatcatcatgaagttgagtggttttatcaaactctgaaccacttcttctttactcaagaaactcccttcaacatgatctac

SEQ ID NO: 143199 - DNA, 308 bp, Glycine max
atccacaacaaccacagggatttactggggacacgcatggccagcaaaggctaatctataaaggacgtgagacacgagcctgctccaacatgatggaaacaaagaggacgcatgcattgataaagcctaaccagggaatcctgttacaaaatccttggcccaaccactagcgcttcaacaaggatctatatgagagctcaaatagatcaatctatctgtttcgagggagaacacaacatgtctacttactgatgccgcaaaaacgaacaagagaccgagggtctcttattcgtaagaaatctgaacac

SEQ ID NO: 143200 - DNA, 206 bp, Glycine max
gaccattacaagcgcttgaaagaatcaatgacaatgcttacaaagttgagctgcccggagagtataatgttagttccaccttcaatgtctttgatttaactctttctgatacaaatggagaatcctatatgaggacaaattcttctcaagagggagagaatgatgaggacatgaccaagagctagggcaacgatccatctgaagga

SEQ ID NO: 143201 - DNA, 242 bp, Glycine max
gcatagggcaacaaaacgctgcctcccgacccgcaaatggtgtttgggagcacatgagagaataaaggtttccagggcaaacgcagataaggccataaccaatgggagatggaccatttcaaccgctagagcgaatcaatgacattgcttacacagttgatctgccacgggagtcaatgtagcgccaccttcaacggactcgattatctgtcttcaaacgcactgaaaaaactatttgggac

SEQ ID NO: 143202 - DNA, 131 bp, Glycine max
  unsure (1)..(131): unsure at all n locations
agcttgactaattcagaatatatcaggaattttagattctttatatggannaaagatggagnnttcaaatgcttggaagcattcaaaattctcatttgagaagaactccatatcaatggattttgggtcta

SEQ ID NO: 143203 - DNA, 390 bp, Glycine max
  unsure (1)..(390): unsure at all n locations
tttcaatccaagccnaactatcaagaggagaagctacacacgatgcttaaccactcaagacagctagcaaccaattacagtgcttaaccaccatataggtagaagcaacatatcttaaccatcgagagtagaagctaaacatggtgcttaaccactaagacagaagcaaaacaatatttgaatgcttaaccaccataaagggagaggcaacacaccaatgcttaaccaaaggcagaaatttgacatcaatacttaaccaccatggacagaagcaaatgactgttttttttataaaaaaaaataaacacctaaaacctcttgatgaatggaggggacagcaatatgtaacagagaatatatatacagctgaggcaacacaccaatgcttaa

SEQ ID NO: 143204 - DNA, 299 bp, Glycine max
ctttcgacgaaatcttcagattcataatggttgagcagtctcacaggttctggttggacactttcttttccaagaaaagttcttatgtcaaaaacttgtgctattcatatttttcaatctcttcttccttttccaaaagaacgaaggactaaccgcctgaattcttttgtggctctcttctttcttacaaaagattcaaaggactaaccgcctgagaattcttttggttcttcctcttccttaagcaaaagaattaaaggactaaccgctgaatatctttgtttcccttacaaaaatca

SEQ ID NO: 143205 - DNA, 396 bp, Glycine max
  unsure (1)..(396): unsure at all n locations
gcatgcaagctntcaacaatgccttacaaaaancatttacagcagtttacaactttaccaccccccatatctgccaaaaccccatacccacgaaaatcaagcgggaaagaagtccacccaaacctggattttcgaagtcccactcgtagccacgcacttcacgaccccgaaaatgctctcctttcacgaattggggcaaaaatgagcaccaaagggtgaagctttgtgtggagcttcaatggtgaatgaggaagaagaaagctacgtgagaaagggagagaaaaggcttctgaatttctgctttggctgagtgaggagagagaaaagcttttggtttaaataaaagttttcctcttttctatattttattcagctctgcacatgccctatttgatg

SEQ ID NO: 143206 - DNA, 90 bp, Glycine max
ccatgaatatgcttataatacttatagcatgagctaagtcaggtctgctgcaaaccattccatacattatgcttccaacaccactggcat

SEQ ID NO: 143207 - DNA, 434 bp, Glycine max
  unsure (1)..(434): unsure at all n locations
agctgggcagcgactcataagcaaaggcnagagtacgagacatcatggtatcttcctacngcagaagggaagcagggaaagggtgatcgattcattgcacagagaagcaatgatgtggatggacaagttcacctttactttgaatgggaagtaagagcctccccgactgctaaccaaggccaagcaatgggagatgagaactcgactcccaaggaggttcacaggctccttaattattgccaacaaatgattatctgatggcccacataattaggagctactatggcaattgtattgtcgctntgattttgattagataaaccctttttgttccccaataaaatgagggtgatttaatcctgtgtgttaaaactctatgtgaattcaatacttcgacaacttattcttagcatgcattcatgnttaagttttgg

SEQ ID NO: 143208 - DNA, 465 bp, Glycine max
  unsure (1)..(465): unsure at all n locations
agtcacctgaggcatgcaagcttgatctcagtgattcgcttgggaaagctatcatcaacattgattattnagnncnncncattctcattgcaataaataacaagaattatatttcaattgaagctcacaaaaatcctttcatagattcatgcgaaaatggaaacaaatatcatagtgaatgaaaaaaaattaagaaaacaagacaaatcctaagatgaagaaggttccaaatgaaacatgaacgggaaaggatagtgtggagaacactaggagctatacaatcaagaactcaacaaactcgtggaatccacataagcctttcaggtacctcactgtgaacgcgagcttcggaacattatcgacgacatggtctagttgttggatcccataggccanatccataaatgacaacaacgatgtcgtggccttgaatctcgccaggaaccaccgtgacggatctgcatg

SEQ ID NO: 143209 - DNA, 137 bp, Glycine max
  unsure (1)..(137): unsure at all n locations
aattaaaatagaatccatccggcccacgacatttaactactccacaactccacacaacatcctngagttcaagatctgctaatagggcgagcagctcctccctttctgtgtgaggaatcatattgaatcgaacccca

SEQ ID NO: 143210 - DNA, 431 bp, Glycine max
  unsure (1)..(431): unsure at all n locations
agcttcttatggaagggagatttttaagaaacttatanatttacaancnggnaggggncctacggattgccaatccgggagaaatatatggattggcaatccataagcttcttacgaattggtaattcatatgaagcttacgaattgtcaatccgtaagttatataaaacttatagattatttatttgtaaattgtatataacttaagaactatcaatccataagtattacgcgaaaaagaaattaaatcaacaacttacctccgtcggtaatggctaaaccaaccaccgtcacaaccaccacttgccgacgaaccaccgtaaacaatgcacctcgaccaaagaggacacaagaacgaacgattaactctcacagaacacctctcacgagatcgacggtgaaggaaaaataaaaacatggtcatgtgaaca

SEQ ID NO: 143211 - DNA, 283 bp, Glycine max
cggagagaaatagatctttgggttggtgtctcccatagactctcatatcatcaagagttacaactaggaggacacatgcttgtatatatagactatgtatgcttcttaagaagctttcatgagaaaacttccttgagaagctactctgagaaaacttccttgagaagctagagcttagctacacacacccctctcataactaagctcagctccttgagaagctttcttaagaagattcctaaagaagctagagcttagctacacacacctctctaatagctaa

SEQ ID NO: 143212 - DNA, 226 bp, Glycine max
gaaaaatgccaagtggctacaacgataacgagtactgacaggggcaccaccatctggaccaagattcccaaagttgagacacagcacactctctcactgacttgtcattgcgatacatggaacacattctgtcacaatccgcgactgtacgagatatcccacgcccctcttatatatggtcgccaatcaaacaggcttcgacccctttcagacacacgcctatcgg

SEQ ID NO: 143213 - DNA, 202 bp, Glycine max
  unsure (1)..(202): unsure at all n locations
attgagcaagattggatgacgagaaacgtgattttcgaaatctgcacttatgccaaattttgctgtcaaaatacgtgcagcaggatttcagcttggtgcagaaaatgcctgtgtgtggttggctgtggacagagtancaccgaatgagttctggatgtttgctaatagatcccaacggtcacaatgtaggcttatgcactat

SEQ ID NO: 143214 - DNA, 212 bp, Glycine max
gacatatctgcacttatgcttggaatatgctggcgagaccgatgcatgtctggaggaactctgagagtactgtgccaagcgagtgacgacccttgacgtgaacggacggattggcattaaggtaaattcctgcttgacaagagctctatgtttgtgacatgttacttacaagtattagctggactagttttctaacagttcctttattccct

SEQ ID NO: 143215 - DNA, 365 bp, Glycine max
taaccccttctcacaactacatgatcaccatcacaattattttattgcgtagatatatatatactctctttcaaatatgcattattttatagttgctggtaagaattatatcgatcaaaatgtcctatcgagccgagaactagcatatataatatattgcagctacaatctaaagaattattttgactcttgccaaatgcttgttagtaaacgccaaaatttctctcatgaggataacattctggtgcaatgtcttacttgttcaatttacgttttcatttgagtaatccttttatttctacactttatttcaccgttacattttaattacttcatataattaatgtgtggttgaaaatgatatg

SEQ ID NO: 143216 - DNA, 343 bp, Glycine max
  unsure (1)..(343): unsure at all n locations
agcttagcggtgttcgacatcaacaccacccctctccaccatgtattaataagccccccaatcccgtccttattctncataaactcaacatgctcgacgccactgatgcccccaatcctgggacgaggttagcaaaacacttcaagacctcaaacctgtcttgttcatagttcgggacaagctagagagacaaaaggaagagaaggaattcaccttcaagcatctttgaggactgcaactgcgtgtgtgacgtgctggacgggcacagggtggtactcgacgagcgcgacgtgttgctgcacggggtgttactgaaagaggtgaaagagctggtcgacaggga

SEQ ID NO: 143217 - DNA, 205 bp, Glycine max
  unsure (1)..(205): unsure at all n locations
acaatatttgctntatgtcaacattctaaatatttgagaatttctcaaaataacagaaatgcggggatataatcagattatagtgtaacccgccaatcatcacttattcatttctgtaaacatcttataaatgaaaaatatggtgtcaatactctcccttcaaattcttcaaacaaaactattctcacatatattaccagtcttt

SEQ ID NO: 143218 - DNA, 321 bp, Glycine max
  unsure (1)..(321): unsure at all n locations
acgaaaattataatacaggaagatgtgcgctaatgctggaaacgggcttgatgcctatagattttcgatttcatggtcaagattgttaccaagtactgtaatattgaacgcaaactcttnggaatttatgtatctatatttctttttagggtaaaagctttctcaacacttaagaaaatgctnttgtttctcctcagatggcagaggacccgtcaatcccaaaggattacagtactacaacaatctcatcaacgaacttatcagcaatggttaaacttaattaaatacgagtttcttaattagcttacanaattaatcatg

SEQ ID NO: 143219 - DNA, 360 bp, Glycine max
accattttctctccaaaaaccaaaacttggaccttcattcttctcccattgtgcgagacactcaacgagggagaggtcaccattttcatcttcttccaagctccatctgtgagacttcttctctcaaagccttggtaagaagcccttaaacctctaatttcttcttattaattttcatatttggcaaaattcttacttgaggatcccaaaattctttttcatcctttcgaagcttaagacgtcaagatctaagttttttttccttgaccattctcgggaagcttcacttaaggtaaagggagtctttccacttcttaaacactaaccttgttgtctttggaagctaggtttcattacatg

SEQ ID NO: 143220 - DNA, 190 bp, Glycine max
cctatctgctgctgctctcctaaactgagccctgcttcatttctctttctgctacctacggctaccaattggagttaattcgagaagaatggtgatgcgggaacctataatcagaaaattcgaggctaggttgaataaatggaaccagagaagcatctcgatggctggcagaatcaccctaatcaatgct

SEQ ID NO: 143221 - DNA, 228 bp, Glycine max
cgacattaacatttcaactcgaagttcgattgagtgccgctatatatcgagacgatcgaatgttaaaagcggagctcgtagccaattcgaaccacaataacatttcactccgaaagtcgattgaggtccgtaatatatcgagacgctcgaaatttaaaccgaagcccgtagcaaattcgaacgacaataacatttcactcggaagtccgattgagtcccgtaatatat

SEQ ID NO: 143222 - DNA, 222 bp, Glycine max
  unsure (1)..(222): unsure at all n locations
actcccggacctgcctactacaccaatttacttttgtgctgggaagacacanacgacacaatggatgaccatatgagcagcatgcacataccgtatatgaaggtgtcgttattcaacttttccctccttcggccactctggnacacgtctgcaaccttgagttatcgatggcgcttcactttgtatgctagagaactgcaatattctctcaactgatatcat

SEQ ID NO: 143223 - DNA, 314 bp, Glycine max
gatgctacggctgctccgactaacccgtgtttatttttagagaaggccaagcccctacttgttgatgggcgactgccaccctatgaagactatctccggcaagacgaataggaaggaagatcccatcttgggcccctgctccacctgaaaaatacattcccggatgaaccaccccagccgaacatagtccggcatatcccggcctcacccacacccgtaaaagaatttggttccttcgcggaagataagggaaagattgaagcgcttgaaaagagggtaagagcagtcgaaggcctccgcaattacccattctc

SEQ ID NO: 143224 - DNA, 292 bp, Glycine max
aacttaataaaacattgatcgcatgaaaattattctttaattgattataaaaatttttatcatcaggtctccagtgaaattcttcacacagggattttacccctctattaccaaggagtagcttttacaaattagaaaaggggtttagaaaaaattccagatttccaagccatgggggatgtttccttcacctttacctccacctcttagaaccctgaaaataacttctaaaactattatcttacctaaaagttagaaccttgcttcctttctcaacttttctctgttttct

SEQ ID NO: 143225 - DNA, 336 bp, Glycine max
ccttggtgcccatttctgctccaaatctctaaatgagggcattttccgagtcgtgaattgcgtgtctacgtgtgggacttccaaatttcacgtttgggtggacttctttctctcttgatattcgagggtattgggttctgtgaaacatgaatggtagttttgctagttttctgcgtcatgataattatttgtgaacgaacttgttgaacttgccatgttttaatgatttaaacctactcattcttgtttatggcttttatgatgaaacttgtgatgttcatgttctgaaattgcttattgaaaattgttgagataatggttgaattaccttaggtt

SEQ ID NO: 143226 - DNA, 403 bp, Glycine max
  unsure (1)..(403): unsure at all n locations
atgccaaaatcaaatggacatcaaaatatgctgaaaagtcccacttacataattcttcagatgctcagaaggcgcgaaatgatagataaaaaatgtatgaaatgtactatctatgctcacatatacaattggtntgtaagacgaaactgattgaacctacccagacactatgttcaacacgcacagctagtggcctacggatgcaaggaacattgtagggatgaactactgctaccattagatgatggccaaatgacttgaaattttgggagcaaccttctaaagtgatgagaagataacgcggtgaatttcatgcaaaaattcggagtcttactatggaagctaagnatgatctggtgataataatattagaatgatacttggaatatatcatacctttgac

SEQ ID NO: 143227 - DNA, 388 bp, Glycine max
gcaagcttcgatctaccaccaccattaccaccatcatattaattttctattatctttgatgttattaagactttgatttctaaccgtgtatttggctatattattatgacatttgaacatttagcatttcttttatttgcatagcatgactgaacaataatgaattatgttatatgactatgtggtttttatatatttgatatattcatggttcttgcatcatgattggtttagatttttcaatgaatgtcttgtgtatgattagtcatttgtgaatgttttatattagctacgcactttgtgtttttgttgatgcctaagggggagagaaatagggatttaatcaaaaactcacattagttataaccttaattttaagtgaatgctt

SEQ ID NO: 143228 - DNA, 125 bp, Glycine max
ctggccagagaacatatcaacttgattgtgcagaatgctgatcctacgaacattgataccccgttctgaccctatgaaatgatgaccaacatccatatgctaggtcctatatgacgaacctggac

SEQ ID NO: 143229 - DNA, 404 bp, Glycine max
  unsure (1)..(404): unsure at all n locations
tgccgcttgcaagcttccattacttgatattgttggtgtgaccttttagagatgacattctctactgctnttgcctatttggagggagaatgtctgaataatgttgtttgggctctacaacgggttcaaggtcttttcctcaaatgtgatgcactccctgaagttattgttaccaacagagatctaacattgatgaatgcagtgaaaactatattccctgaggctaccaattagttgggtcagtttcacattgataagaatgtgaagacaaagtgaaaaaccctagttggtcaaaaaaatgcacgggaatattgcatgaagagtttggtggattgtccttttgagcaacagatcgatgagtgccttaagaagtttgaaattgcttgctcaccatgaccaatgtt

SEQ ID NO: 143230 - DNA, 249 bp, Glycine max
gttctctggctgtcctcctgctaagctgaataagcccgcggggtcgtcttttattgatggagcaaaactagattaatggccttgataagagctcgccattaagtgatgaattcattccggaacatccactgtaaccagcttaatgctgctccgtctaggttaaaagaagctaccatgataccatcctctttcggagttccataataataaaaaaactgtgagattttgaagatccagctcagtggatca

SEQ ID NO: 143231 - DNA, 382 bp, Glycine max
gcttctaactatatttacatgtggcaaatatatattacacatcactatatatacatatatggaataaaaataatacacaagccagatattcaaactcatgaatttcctaattagttcctaaagtatacttaagcaaatacatatattttatatatgaaattgaaatctaaaacaaaatcactacagatgtatcattatatatatatatatataacacattagaatcttatatacatataattttatatatggaaaacaaatatacatatatcactaaacatattccaaggcaaccataagaatctagccacgagaagtttagtcaatagaagactatgatcaattttaattggtgaagcttcgcattctaattcacaaaaac

SEQ ID NO: 143232 - DNA, 283 bp, Glycine max
  unsure (1)..(283): unsure at all n locations
aagctcctacaatgcatgaaagatacacgacctcatatcgcgttctatgccatgagagataagactctaagtgctacgtgatgcatctctcttttatacgatctcaaattgtagtctgtgtgcaaactttctacaaatgttgattattttcttatagccaatacaggcttggatgaacataatcatactaagttttagtcggccttcaggtatagctntctcgcgtaagagcttccagtgacagcgtacaatacttgccactatgatatgtttgtggaaacca

SEQ ID NO: 143233 - DNA, 364 bp, Glycine max
  unsure (1)..(364): unsure at all n locations
gggagagattataaatgaattgtattttgttgggatgagatagattaaatatataattaagaataatttaaataaattaattaatattacttatactgataaaatacatatatatgttcaataatttataacttaaaaatttcacaattaaatatgtttgatttgaaataattatgagatgaatgatataagtattcttcaacattcaaaataaagtttcaatagtcaaatcacaaatttattaatntaatagtaagttagtaacatttttattttttttcatgtaagtttattgattattagttttttggatttggatacattcgaaacaatccgctaatggatgtttcaatccaaaaagtca

SEQ ID NO: 143234 - DNA, 282 bp, Glycine max
attaatatctgagccacagttatgcctatgatctgaggactagatactgtactgcagaataacatatatctttataataatctgatcatttgaactagcgcattactgaatgaaggggatgattagatcatgagatgaacggatcttgcactcgagcacatccaaaataactttgcctatatgttactgcaaaggctttgctggaatcattacgaatagcgactaatattttctgagatggaggagacatgatcatcacttgggtggattgggatacctata

SEQ ID NO: 143235 - DNA, 379 bp, Glycine max
  unsure (1)..(379): unsure at all n locations
agctttgagcaaattcaaacgacaataactnttttctctgatgtctgattgagtcccggaatatatcgagacgctcgaaatggaataccgaagccctgagcaaattcaaaagacaataaattttaactcggatgtctgattgagtcctgtaatatatcgagacactctaaatggattactgaagctctgagcaaattcaaacgacaataactttttactcggatgtctgattgagtcccgtaatatatcggaaagctcgaaattgaatgtagaagctctgagcaaattcaaacgacaataactttttactcggatgtctgattgagtcccgtaatatatcggaacgctcgaaattgaatgttgaagctctgagcaaatt

SEQ ID NO: 143236 - DNA, 383 bp, Glycine max
  unsure (1)..(383): unsure at all n locations
agcttcacgttcctttcttgtttgatgttccattctagaacgtngtcagtgtagcagttccaggcgtccttagaggttaatttgtgagtatcgtagtgaggttggggcctggaagttgcaactttccttttcctagaagccatctgcacaaaagaaacacagaaaccaagttaaaataggtttaatttgaaatgacaagctgaaaaatgaaactgaaattttgactgggcgcttagcgcgccttatgaaaaattacttatgcacttagcgctatagccacacgcttagcgagttgacacaaattataattttctacagaattggcttagcgagcgggcttgctaagcccaattccacaacagaaaccaaattgcgcttagcgc

SEQ ID NO: 143237 - DNA, 365 bp, Glycine max
cagcttatatatcctacattttccattttttggtccaagaactttctaaaaccctgccaaagctttagaatggatttcattcaccgttctccttggctcggttctcacattctaatactttgctcaattttaaacattattgtgccccagtaaacctaccagcaaagtggtgaaataggattaagtgtaataaaatatctctagctagattaaaggcagtccagcaaagtaaaataaagttttattcaactgtatactaactacaagaggacagatccttattcttgcagatgagtcagtggaggactctgtagctcactctgactcaaggtccctagctacccttctactcattcgggacatac

SEQ ID NO: 143238 - DNA, 195 bp, Glycine max
tttaacttgatagtgccagaaatgtcactacatgaagtcgaagaagatctttgcaggaaaatggctctaacaagatagatcgcgcatattccagaagcatgattatgtgattgatgtgtcttacaactactcgacgtgatattcttattgctgcaaacaattcatctggagacatgaattgtgcctgtgaaatgc

SEQ ID NO: 143239 - DNA, 270 bp, Glycine max
ttcctactaactcttggattaaatacgacatttattccgatcactccgttacacggaccatcttatcatgaccgagccacctgtgcgatctgagatattcaatctaccttagtaactcctctacttgcaacattccacatggtgcgatccctcgctatgtgctattgacattacaaaggtgatcatgctacgaataacttacatcaacataggcgatgtcctgactgatctgatggacctctgcgcctctataatctccctatggatgga

SEQ ID NO: 143240 - DNA, 353 bp, Glycine max
atgattctcttcctgagagggttgatcaaatggagaatacagatcataacgaagaataaaggaggataaacaggaatgatggtgttcctttaccaaaccgaattgatggtattaaactcaacattccttcatttaaaagaaagaatgatacgggggcctacttggagtgggagataaaaatataccatgttttctcatgcgccaactatcaagaggaccaaaaggtgaagcttgccgccacagagttatccgactatgctcttttgtggtggaacaagactcaaatggagagactatgacaagattagcccttggttgctacatgtactgtgatgataaagatcatgatgaag

SEQ ID NO: 143241 - DNA, 148 bp, Glycine max
actccaagaattctggtgacttaatcaccaaatgtgcataagcgcataccggcccatttcgagagaagctcactgtctctacctctccactgtaccgaagcattgctaattaaagacggagctctaattaattatatggattggtgat

SEQ ID NO: 143242 - DNA, 393 bp, Glycine max
gctttccaaatcaaccagtgcaaccatgaaacttatctcataacatatgagaataagctaagaattgtacaataccaagttttgctgtagtttgaaaagcaccaaactatgtaccaatggctcacaatataagtattataaaaaatcccctgcattgacacaagagttgcaatttatcaataaatatagctagggaactagcatgatgttttccttcttttttctgtttatcttttccccaaatatttttttacagtggttctctagattagtatgtattacaccttagaaattggtatatgttgggattatttaaagttattacaaagaatagtttgaaattgttggagctaatagagaaatggactaaagcaatgagtcaacaaatttaca

SEQ ID NO: 143243 - DNA, 393 bp, Glycine max
  unsure (1)..(393): unsure at all n locations
agcttcatgatgatgaatcaagttgattcaagttgttttgatgatgactaaaagcccaagagaatgatttcaagattgagtcaacaagttcaagatcaagattaatttcaagtttcatgagaagaaatccagaagattcaagattcaagagaagtttgatttcaagattcaagagaagatgaattcaagattcaagagaagaaaccaagaagacttcacaagggaagtattgaaaatatttntcaaaaaaacanacatagcacaatttttgtttttaaaagattttttctcaaaattttctagttaccaaagtgtttactctctagtaatcgattaccaattacctgtaatctgataccagtggcaaagtttgatttcataagcttttatttg

SEQ ID NO: 143244 - DNA, 400 bp, Glycine max
  unsure (1)..(400): unsure at all n locations
tgcaagctcgcctgtccgatgcagcagtaaggacggccttagttatgttggttttctgccacnaacttcttttgggtttaggcaaatacaacggcggcttaactagcctgataaatgccaaaggaaatcgtgggacagttggtttatgctataagcccactcaggcggatgtgaatagaagcatcgcgggaaggaagagcggtggtcaaagctcgtgttggagacaagaaagtgaaggaagcccgccctgccacataagtataagctttataagcgcgggtctgggagacaaatgtcaaatggtcgcgatatgcgaagatgatgttccgagtgcattggatttggtaacgaccatgccctcctgaattccagctgggaaattggcgagtggacgaacgcc

SEQ ID NO: 143245 - DNA, 313 bp, Glycine max
caattatgacctcttcagccacagacacaaccctggatggaggaatcaccctatatctagatggtctatccctcaacaacaacaacagcagcagcctgctccttccttccaaaatgctgctggcccaagcagaccatacattcctccgccaattccacagcagcgacagccccaataacagcaaacaggtgaggcccctccgcaaccttccctccatgaaattgtgaggcaaatgactatgcataacatgcagttttatacaagagaccagagcctccattcagagcttaactaatcagatgggacacttggc

SEQ ID NO: 143246 - DNA, 360 bp, Glycine max
aagctagagtttagctacacatacctttctaatagctaagctcacctccttgagatgagaagctagagcttagctacacatcccctataatagctaagctcatccccatgacaaaatacatgaaaatacaaaacaaaagtccctactacaaagactactcaaaatgcctcgaaatacaaggctaaaaccctatactacttgaatggccaaaatacaaggcctaaacgaaggaaaaaaacctattctaatatttacaaagataagtgggctcatacttagcccatgggctcaaaatctaccctaaggctcatgagaaccctagggccttcccttggatctctggcccaatctacttggagt

SEQ ID NO: 143247 - DNA, 381 bp, Glycine max
agcttcagaccaaagcaattttatatctaggtatattaaacccctcaatttagtggattttcaaggtttgagaattcaaaatgagaatggggtaattttgaagtaaactctcacctccaaccagtctataacattaatctaaacttgttcaaactggttttacgatgaaaactccaccaaatcaaaatttgacccctcaacacccaatttaccctagaagtggctcttactttcactttggtcactcattttcctcatttgctcagcccaagctttcccataagtcctaaatgacactttaaactatgattaactcactttagcctccaattaccactaaatccagatttagcttttcaaaccctcaaagtctcacacttt

SEQ ID NO: 143248 - DNA, 280 bp, Glycine max
ggacatcattgattgtgcaaccactgactccaagggactcacagcggccgatacttcgatgtgtatcatgagataattatacccggactatattctggtatgacacgatccccctaaaccaccctagatcgaactggctttactatgatacctccttcctactccttattcttaccttcttatctatcttaccttataaggacaccctgaaatactatgttcactcattttctacattggctcagactagactgtgccatttcactttatggacacttac

SEQ ID NO: 143249 - DNA, 239 bp, Glycine max
ctgcagctatggtaaaatttttgatcaaatgttttgctcttagaattatcaccatgagagccttcgttgctcgcatataaaacatgcctatagtagacacccgcgccacaaactatcatacaatctcttcaatcagatcccaaaaacgattttaataaatcttatattgaatactattattaaaacaacaagataagatgagcgaagcgtttctctctttctcaggaaacaaaccctac

SEQ ID NO: 143250 - DNA, 387 bp, Glycine max
  unsure (1)..(387): unsure at all n locations
tgcgctgaaacacctaaaacctgacattcgcaatacctgtgtcctctaactcacgctcacaccctgcaaaaggagggaaatagattatactatacaatcgataatagaaattattatcttcattctccacaatacaaacattcaacacacgaacntacaagtatggagggattcaactttctacttaagagaaattatgataattacatcatcaagagcctgagatttgtcatccatctcttctttaagttgctgaagttccttctcggaattagggattgtttccttgccacagttaacatattcttcataaagcatactaagcttgtccaattgctgaaaatgagactctgcatttgacgattctactgcgagaactttcatatg

SEQ ID NO: 143251 - DNA, 361 bp, Glycine max
  unsure (1)..(361): unsure at all n locations
tctctctaaacttcttatccaaggcactctcttggtggngatgcttctcctttcatggcttattctctaatggatggcgcctcctctcacctcttttccattatcttgcgctgcaactccatggctgaaaatcaccattgaaggaccttattgaagcccaaagatccagccttcatagaagcttctcaagcaagcttccatcaaccagtgtggaagatcaaagaatatcaacctcttcttccatatgcaagttttgtttgtcatcttattttaggtctttccaaatatagtattgatgtcctcaacccgctcaaaaacctattgcccagttaagggtatcaagcccaatttcatgttcctg

SEQ ID NO: 143252 - DNA, 369 bp, Glycine max
atcttgcaccaacattctgtagttcaatacacactctacaaatagtcatcatccatccacaattccaatcattcatgcttaatatgatgcatgcacctgacctcaactttcatatgcaatgtggtaccatccccaaggaagtagcctaagcgtgtccacatgacactctcacttaagaaaactaagaagtaagtgtcgaggtcaccctatcgtggacaagaaactctcccccccacatggtgatcagcctgaatctcaaaggaattccaaaccgagtgatatgccccctagtacaagtattcctcctcacaagaaactataattacttactaacaaagtttatactattttcatgtcatatgaagtata

SEQ ID NO: 143253 - DNA, 327 bp, Glycine max
tacatcattgaggctgaagcactgataatctttgaccagtgatcaccatagagaaagagcttatcccctcaccccaacctttttggttgagcatgaatcagatttggatgctgatttttttttccttttgggctgccgggtccgtcctgctttaatttgatcctctgtgtgctgaattagatactgatattcattcaagacagtttggatacttcattcctttttatattagcatttattgtatgattatgttttgcatgtgaatctcatgccaccttaatcgaaaagtgaaaagctgctcatgtgtataatttattcactctaaac

SEQ ID NO: 143254 - DNA, 311 bp, Glycine max
tatccagcccctataaaggaggggcatcacccaccttattaacactatcccgcgaaagaagattgggaatgatatacccatttggccccctgctctacattatagatccgtccccatatgaactaccccaaccgatcatatgtcgccatataccgacctcacccacacccgtaaaagaaattgtccccttctcggaaaatatagggaagattgaatgccttgaagataggtttagaactaataaaggaccttggtaattacccattttcggatttagcatacttaagtcatgagctccatatcattaatcc

SEQ ID NO: 143255 - DNA, 285 bp, Glycine max
cagctttaatggaacaaacctcctaatcacttgggtcaacctcgaccttatgatgactatcactggcttcctcatcctgttggttactctcgtctatgacgactactcgccctcaaatatgcttttccacatttattaccataacatcacttacttctgcctgtaagaaacttgatcacaccttattgacaatcttaattcttaccaaaatataatgcttggataccagctcttgtgtacacgtacatacctcttataggcgttatcgcttatgcaattttagcc

SEQ ID NO: 143256 - DNA, 323 bp, Glycine max
atccttaaattataatttcagatcttatcaaatctttactacatctgttattattaaccttttgaaactattttaattaaaaaggaaacaaaaaacaaatttattaaggtaaacaacttaatcaattaaaaaatattggtgaaattttgatgaatcaacaaaacttaccatttgttgttagatctttagatcatgtaacttttgtaatcaaaatataaccacagtttaactgttgatgatgatcttaatataattaattttctataaatttgaaacaatagtgtttgtcttttagcatctccagcacatatactttattagtg

SEQ ID NO: 143257 - DNA, 148 bp, Glycine max
gtctgaattgggaataaagaacccgctcttactttaatgatttttaaaatataaaccagacgggcaaaaaggccccatccggctagtgatcgcccctatctcattgccggggctacctgaacggaattttctttgtatttcaacaaaa

SEQ ID NO: 143258 - DNA, 350 bp, Glycine max
  unsure (1)..(350): unsure at all n locations
gcttgtgatgtagtaatacaccattaataactgtttgattcttattttttgtatgnacgttatatgcttgtggtaggaaactataagactatgtatgcttggtatataaatgggtttgattccttgttcttagcaatgctaataccctatagttcgatgacccatattgagatatatttcataaggaatactcatttgaccgtaccttccagttctagtacaacctattttcttatgctgcatgctgaagtcaagtaactcgattatacttgcaagcccaagcataattcattcggtgttgtgagcttacatcaaacagtttttgatttctgatgtttctatcacaatca

SEQ ID NO: 143259 - DNA, 164 bp, Glycine max
  unsure (1)..(164): unsure at all n locations
tgctgcgcagaacgaagatganggctacttatgagtacgatgacccaaatgtacgtgggcaactgaagattgagggtacatgtgcgatttatgaaaatgggtgagattacttgtgcctacgcccgattgacacctagtaccacatgtcacgtgtcccattatca

SEQ ID NO: 143260 - DNA, 408 bp, Glycine max
agagccaccgccgcatgcaagcttgcaccgttgcatgggctgacaaggcttgtttttcgccgggatagctccgactgaacacgctgctcacatcttctaccccatgggcaagatcctctcccgggtctttctcttatgatggacactgtttacttatagaccgaaggtatcttcttggtgatccagccatgtttttgtgtccctaccattcaagaaagaggagatgcttctctagcggcgatatggatattattatcagggtactggacctagaggatcaatggaaccccttccctaaccctaagattattgaaaaatgggttggaatatttcgctgttcatctgggcgtgattatgacgatttgaactatgttatattagggggagagagctaaatgcagtctctcc

SEQ ID NO: 143261 - DNA, 264 bp, Glycine max
tgctgcagcctttgtaaaacggcagcggggcttttgaggcggcgacagtgcctttgttgaccgctgttggccaatccccggctgtatgtagtgtataaccatgcgcctgcctgcgggcgcagtactttttgatcaaaacttcgctagtatgaggactgattaccttactgggggcaacaggcactcaccggaactggcccatgcctataattaaagctgtgaaccccatgaccctgttggaactcttccggtccactgagagtc

SEQ ID NO: 143262 - DNA, 305 bp, Glycine max
agctctagactatttacttgcgcttgggcttgtatataggtgtattaacttttcctttcatgttaattagaagtaagtaatcctcgttgagtcttaacttgacagctcttttgatttcttgtgaatcataaagtagtgctaaaggtggagttgcacgatgatagagtcaagcaaaaggctatgacaacagcctctgccctttcaggtatcataattttcacactactaatacaactttgcttttgtttccaataacaaaatacatggcatgcatcatcaaggattcaatgatttttcaacaaaaa

SEQ ID NO: 143263 - DNA, 379 bp, Glycine max
agcttatgcacggaaaatgtaatttgagatgccttataaaacaccatttcctagttaaccatgcattatgtaccatgttcaattattttgtttttaagtgaaacgggtttatgatcccaacatggttggctcgtggtgcctaacacatgaaactaagaatgtagtgtgaagtttcacgcttcccccttttttgtttttgttttgtagaggaaaacgcaaggatgagcaaacatgaaaacaaatggtatgcaattttgcagatcaaaaagtttgttgaacgcatatgcatgatgatgccatgactcatgcaaaatgtgaggctggaatatgataacggacaaatgcaggatatgtccattatgatgttatgaagagatgt

SEQ ID NO: 143264 - DNA, 382 bp, Glycine max
agctttcaacaaatgtcttcacaaataatcatcttactcagaaaactaacttaactacccctcatatctcccaaaaccccatacccacgaaaatcaagagggaaagaagtccacccaaacctgaaatttcgaagtcccactcgtagccacgcacttcacgactccaaaaatgctctcctttcacgatttagggcagaaatggtggccaaaggttgaagctttgcttgaagcttcaatggagaatgaagaagaagaaagctacgtgagagagggagagaaaaggcttctgaatttctgctttggctgagtgaggagagagaaaagctttttggttttaaaataaaaagggttttcccttttttccattattttattcaagctc

SEQ ID NO: 143265 - DNA, 173 bp, Glycine max
ctcttgcacttctctaatgactatggcctccttcttgtgtctacactgctcggagctggaaaccatcttcacggataaatttctcgctccacctggagttatgtattccaagtcttcaccactcgcttcatgaatcatactatgctctattttaccgagtacttctaaaaatg

SEQ ID NO: 143266 - DNA, 388 bp, Glycine max
agctttatattttatatttgtctttcctcacgttatccttttcttcaaagccttcaaatagttcataccgacacaggcacaatgaaaaaaagctaaagtatccatcaagagtgtctttcttcttccaagtgcaattaacatatggagataatcaaatttgactacatttttcttaagccaaaataattggttcctttcgtagttgtcatatcaagctgaaccagcttatacatcttctaagacgagtataataaataattaaccaaaggtggacctaagaataattaagataagctctttgcaataggccgtgaaccccgtggctacatgtgagcaattcgattcatacacgattatctcttaagataatattaatgtaatataaagg

SEQ ID NO: 143267 - DNA, 337 bp, Glycine max
gaaaaacatattattatcagagataaaactggggtgcctcccaagaagcgcttctttaatgccattagcttgacgcttttacctcattgagggatcttatgttttggttcttactttcagaacctcttgacctccttccattacctgtgagcagacattgtgttctaaagcaagcttgttttcaacaaacaaatcaaaatcaatcttctgatcttcaaaacctagctccagctttctcttccccatatcaactatgtagcttgcgatcaacatgaatggccttcccaatattatagggatgtcagtatcttcaaagatatccattaccacaaagttt

SEQ ID NO: 143268 - DNA, 138 bp, Glycine max
atctctgcatgctactcgtttgagctcacagatgccgtactataatgcttggatcgcagctcttctacgacaaagagagagccaatgtctatgtgcttgattctttaacgacaccaactatttacatcaccttggaga

SEQ ID NO: 143269 - DNA, 366 bp, Glycine max
  unsure (1)..(366): unsure at all n locations
agcttcaattgaatttatctttgctttgcgcatttgttgagacgagagataaaattagtgggtcttctttctaatactattaaacacaacccatttcttgtggaaaaaattcattcccagaaacgaaatgaaactccaattggatgacagattcacattgcctatcccatttcgtattaatggtggtgagagagaaagaaaatgaagatgcntccattaaattagccaagaacaaaccggtcccgatgatgagaaacaacagagcacatgacttggtaattttaatttaaatttaggtatcctatttatttaggttactaatttgatcccatggaattacaattttattatattagtcaccaactc

SEQ ID NO: 143270 - DNA, 317 bp, Glycine max
  unsure (1)..(317): unsure at all n locations
ccttgccaacacatgtcgacatgaacgacgtactcccctcttcctcctctctctggtttttgnttagtggggaatggaaacccacggtctgctcattcatagcgttcgtgctaaacacaacaaaaagagagatagtgacgtatccggaaaaggatagcacgtgaaatgagagagctttcaattttttaaaaaatttcaaattgaaacaaagacggtttcctaaaaccatttttttacattaaaatgatagtcatatttaccaacatgccactgcacgcttaataaggattgttttgaaattaccgtagttggacgga

SEQ ID NO: 143271 - DNA, 413 bp, Glycine max
accttaagtctctgccgcatgcaagctctaactattatgagccatctttagctaaagtttgcatttagatttgtaaggttcagccatcattgtatgtagacatagattttatcttgttttgcttcttcagagttttaatttggttctcattgtaagattctcttaaactaggataatgggatgaactcttgtttttttactacttctttggttgattgaagttttctcgtgctgcaggagatcaactgaaatttctctggttattcgacaaactatggaagcttgtatactgacacatttattgcctcgttcccaggtttaattacacattcagaacttattttgtataaatgtgttttgtttttaaatttctaatgatttagttattaaatttgcagatagatatttatgtc

SEQ ID NO: 143272 - DNA, 393 bp, Glycine max
  unsure (1)..(393): unsure at all n locations
gctttcataagtgaaatcaggtgcagccatcttattaagagtcctctttcaagggggagggtgagccatgttctcaatatgaaaattagtagtcgaatgctcaaattcagaatattcagaatccagcaacagaatactcataatgctcaaaatgcacagaatgaccaggatgcacactatgcctaactaatctatgaaaggttctatctatttgaggatcaaacggntgtaaatcacctggattgcccctagtcatgcactatatgtagcaaatcatgtgtttctcaaacaagcaccaggggagggttaaaactacaactatagtcaaacgatatccaaataagcttaaattttgtgagcaacaccctgaaatcatgaaaagatagaacaaaa

SEQ ID NO: 143273 - DNA, 278 bp, Glycine max
gataactttgacaactgttagaatttgctgaaaaacttatgatacatcttgcaacctctgcttaccatatatgctcttaatgctcagacagaacgctatgcacgctatgcataactcaaatattgaacgttcgcacaatacgaaggtgagccagatgtttacattctgtattgcctctgcccatgcgatttctgcaaggactaatgcgctgaatacactatgcgcctgtgtggtcctttttcaacgatcataagactatctccctgtattcttttgtg

SEQ ID NO: 143274 - DNA, 327 bp, Glycine max
gcaacttgaaagctcttgtgaaacgagaaatttttacctcttctgtaacgataccattgtttggaagtacaacatgaggatcaagtgaattaatcgtcacccaaattgttaacaatttaatctgttattcctataaaattattatatcctacttgtgtatctcattatgactcttgtacatctatctttgaaaaaatttggagcatttaaggaaccatttggatttaccaaagattcataagatctcatctggtttggcatgaaagaagcctgaaatttggatctgcctgtgctgatcaacctattcaatatgtttagttttttact

SEQ ID NO: 143275 - DNA, 266 bp, Glycine max
gggaaagctgactcaaaactcgagggctcctgtgacaactggtagccccaaacacataggcaccatttgattttcttaatttaaaaatggacaacagcgatatccttctttttttctaacaactagcgttgggtgcgaaaataataaaccaatttgaactttataacacttccccggaaaaaaaagtgcctctctttaaaattgcgagttcaaaacaaaagcaaaaccccacacaaatgaatcatttcttttatatcttaaaggta

SEQ ID NO: 143276 - DNA, 142 bp, Glycine max
  unsure (1)..(142): unsure at all n locations
atttacaaatacaattcaaagttaaacctcatttgatgcacacaaattcntgccccttctctgcctcttcctacactacatttctcctaccttcaagctctaatcatggcttcttatggaggggagcttcttctcgactcat

SEQ ID NO: 143277 - DNA, 381 bp, Glycine max
agcttgtcgagcctttcttgtatgcaaaaggcttttattctcctagggttgtttctgtaagggtggtcactacattgcattctgtcagccatgtcatggtcctcacctgtgctaacttctcctccttttatcgctggaaaccctaaaaaattttaaatgtatgggttattgtgacagaatcaaagaaaagagggagtcaaagagtgacaaaatagtaaagggatagacattaaaaacacactcacttctaatgacaaccttttaagatgatttttgcaaaaccatcatggaatggtagtttccaagacggtttttgtaaaatcatcttcattgaaaaacctcgtatttacaaaattgtcaccgcctgaatatctaagatgg

SEQ ID NO: 143278 - DNA, 130 bp, Glycine max
taatactcgattagtattggatggcgttgcctaatcgatataattatggagataattattttgaaaaatttacaggtgtgtactttgtttactctcactcttctaaagacgaccttttatgaagatgttt

SEQ ID NO: 143279 - DNA, 385 bp, Glycine max
ccgcagctgcacttaatttcggcaataatgaaggattttctctcaaagatttttttctacaaaggtcaataagctatggtgtaggctctcattgacaaggctttgtgacactagaatgaaccccttggcagccaatttgaatgtgccaagccataccacaatgggtattttgctttttgcaaaactaccaaaaatggaagggataggatttgccaaaattttgtattttcgctttttaccaaaactagtaaatctatcttaatcacctaggttattgtgctaatctccctaggaatacatgtacccacagtgatcatcacacaaataaaattctcatacagaggtaaattacactatcattcaatgcatggtgtaacttcactac

SEQ ID NO: 143280 - DNA, 366 bp, Glycine max
aagctagcacaagaattttttttaaccttttttgctcgggattttttttttcagctgagtgctggagtcaacaaagttggttgtaatttcgctggaaagcaccttttctttaacaaagtgacagttgatctttttatgcctttgatcctttcatgtgtttgtctcccaattttaactgttggagtagttgcctaagttgcataagctcacatgtggctattggcatagaacaaaatccaacttttgcactggagctagcaattatgttttccttattgctcttccatgatattaggtttcctccagcaagaacacagtatccttaagtggatcttgggtctaagggtgacctttcccagtcaacat

SEQ ID NO: 143281 - DNA, 255 bp, Glycine max
gaccccacttagcctggctacttctctatcagcgcctattcactaagaaagtggctgaacccatttcaatgcaatgagtgaattgaagtgatcagctatcgattggatctggtgtaataaatacatatcttgcgtgatacatgtgcagggcatggccatagaagagcgccgatgtttatcccagtgacaaatgacactgggatgcacatggcgataacctgatattttgtggcgatggccaagaacacggcacac

SEQ ID NO: 143282 - DNA, 153 bp, Glycine max
ctctaaaggacttttgccaactgaaaggtatgcagcggacttgcctgctttctagtcataatcatttgtgagtatacctgcctcgatcttgaagcgcttcaataatcgggagaatcctttactgcctatgcctccgtgaactgcttcttcttc

SEQ ID NO: 143283 - DNA, 327 bp, Glycine max
  unsure (1)..(327): unsure at all n locations
ttaaaaaacgcagcagcatctgtacaggagtaatgcaggcgtttttttgtgatgaccgcatgcgactgaggaggaattggcatcgttgagcgagagcaaacagatgcatgtggcgccctcgtccacagcgaaacagaggaactgaccatgcctaaggttccacaaacatgataccttccactatttccatgaaacgagaagggattcctttgcagtataacaatgccatgacatctgaacatgggacacggtgtttggcttaaagagagaagatcgaaactccagagttgtaactgcatgatgcgtancgacttggataaaagaatt

SEQ ID NO: 143284 - DNA, 351 bp, Glycine max
gaaaaccgtattttacgaaatgattatgaaagctataattattttaattgaattgaaagtctcggattcataaacttacccgttgaagaacgaataacggtgaagaacgacggaaaaccttcacggatttgcttccagaaacgttttggaaacacctcagcttggattttcttcatggaaacaattttttttcacccaaaacagctgaaatgcatatccaaagggggtagggatattaggaacaacctcccttcgcctatttataggaaaaagggggaggacgttgtccgccagctcgcccaggcgatctgggttgcttcctctagaagcaacccttgcttgaaaatattt

SEQ ID NO: 143285 - DNA, 115 bp, Glycine max
tgtttgccccgattttttctaacccggtcggcacaaagtcacaaccgactcggacactggactaaggccgaccacgagggcaacgcctgcaaacttgctaaccgagtgccgcggc

SEQ ID NO: 143286 - DNA, 380 bp, Glycine max
gtggaggacgcatgaacgaaaacttatttcatggggctctcttataaggttgaggatggagaattgcactaagcaatcactacgcatggctccaagctccagggtgaaggacgcatgaacgaaatccccattcatggggctccgaaaaagggttgaggatggcgaattgcactaagcaatcactatgcaaggctccaacctcctgggtggaggacgcatgaacgaaaacgcaattcatggggctccgaaaaagggttgaggatggagaattgcactaagcaatcacttcccatggctccaagctcgtgggtggaggacgcatgaacgaaaacgccacttatggggcttcgaaatatgattgagaattgagaattgcacta

SEQ ID NO: 143287 - DNA, 262 bp, Glycine max
actgagtttcacattgttttctcttagaacatgtctaccaaagagatgttactctctggtaatcgattaccaaagtgctgcaatcgatggccaatgaccgagaggatttcaaaaacgtttctaatgaatgttccacgctccaattgattgcacacagttgcaatcgatcataatgtttttggtcatcgattaccagtgcctttgaacgttgaaattccaattccatagtgaagagtcacattctttcgcataagagccttgt

SEQ ID NO: 143288 - DNA, 405 bp, Glycine max
  unsure (1)..(405): unsure at all n locations
taagcaccgcggctgcaacttgagaaaattaacgacaaacntaatcgttatgtcctatcgagccctggaatatatcgagacgctcgtaattgaaaacggaagctctaagaaaagtcaaacgacaataacttttaactcggatgtctgatcgagccctataatatatcaagacgctcgaacatgaaaacggaagctctaagaaaagtcaaacgacaataactcttaacttggatgtcctattgagccctgggatatatcgagacgctcgaaattgaaaacggaagctctaagaaacttcaaacgacaataaatttttactcggatgtccgattgagtgccgtaatatatggagacgctcttaattgaaaactgaagctctaaataaagtcaaacaactattacttt

SEQ ID NO: 143289 - DNA, 216 bp, Glycine max
acggcttatccacatgcagtaagccttgctttattatctagactgcctctgagctctagcgtattgatatataactggactctatctgacatgcgcaatagaacccagtgatatatgaatacgctcaaagcttatgactgcaactatgagcgactccatatgacactcgactcaatctgacatgtccagtaagaaaagcctgtgtcatatggaata

SEQ ID NO: 143290 - DNA, 376 bp, Glycine max
agcttctgtgaacttgatgtttacttgacatgtatacttcggcctgttttctattctgacatttgtttgaacattttagttctatattcctccttttaaatgcttataaggtactcccaaaattttttatcatcaatattcactttttatatttgcaggtggcagcccttcaatttgggaattattatgatctgcagtatgtctgaggtaattaggccacatttaacgtggaaaatatcacattttaaatgaaaaatattattgttttcacaagaattttttataattattttatttgtcacatcatttatttatttttttcttatctatctctattattataaaaaaagtattatgaaaataactttactcaatg

SEQ ID NO: 143291 - DNA, 319 bp, Glycine max
tcagatatgcacatggttgtactaccattacactcctgtctgactatgcatacattgcgcaaactgtgaagatgagccatttctcagcaaatatgtggcttcagcaagagtcatgtctccataggctccaccactgtcagccatgtatcataccttctatccatagaactgagatcatcatcaataatagtcggagagagaatctgccccgatttccgatggagagggcaactggcacataaattattatatcgctcccacaacaaatacatgctctctccactgagctgcataatcctgagatatctttcctagatgc

SEQ ID NO: 143292 - DNA, 355 bp, Glycine max
aatcaaactttgtcttcatcatcctcaatttcatgcattcaattcatacttcagagattcatgcacaaatcagttctaaatgatagtcgtttctctccaaatattaggatcacactctcaccgaaatacagttaatgcatttcttcacaatcaatttgacaaactgactaacattttgattcataattctagtcacaagttctttctcttctaatggctgcaagcttgctcaaaacacaatctaacattccaatccactcaattcatacaattgctcattcaaatcaatcacaacacttcatttcatacgaaatcaaaccactgaatcatattcaatcacttcactgttcaatca

SEQ ID NO: 143293 - DNA, 356 bp, Glycine max
  unsure (1)..(356): unsure at all n locations
cctctcgacatattatgcgcccgaatcggacatccgtgtgaaaagttatggccatttgaatttctcgagagcttccgatgtttaatttcgagcgtatcgatatattatgagcctgaatcggacatccgtgtgaaaagttatgaccatttgaatttcacgagagcttccgttggtcaatttcgagcgtctctatatgtgatgcgcctaatcggacatccggtgaaaagttatgaccattgaattctcagactttcgtgtcaattcgacgtntcaatgtatgcgccaatggcatccgggaaagtatgacttgaattccaagctcgtgtaattcacttcaattatcccaacgactcggg

SEQ ID NO: 143294 - DNA, 336 bp, Glycine max
  unsure (1)..(336): unsure at all n locations
tagctttntaggagaacacacagcaagataaagcttttcttcatccactttttatacaaagntagcttattgggggtatcttacacaaattatatatgtcacatttataatttataccaataatttttatattattttaaaattttaatggtttattaaatcaattaatttaaaatttaataaaattatgttaccagaaatgttaaataaaatttaaatatttttttatttttcaaccatggtccacaaaattgtaattgatgaaggagaggaatttaaggaagaatttctttaattttttgatggtttgcatggaacttcttttttacaaaaatg

SEQ ID NO: 143295 - DNA, 271 bp, Glycine max
acaccccaattgcgctgtcctatgcttactcgctcccatatctactcaataatacaatggtaaccataaccacagccaaagttcctcaacctccatttatcagtgatatgactcgtacacaacatgtgattaccatggagatattcccacgcattccattgatcattgtaggacactgaaacacaatgtgcaaggactaattgatgctggctgactaaaggcataagacaatctcttgtgaatactgacgttggaaagctgctctatacat

SEQ ID NO: 143296 - DNA, 65 bp, Glycine max
caagcaattaggaacgctattatagcatactcagttcatatagaccaggccagactcatacgtct

SEQ ID NO: 143297 - DNA, 390 bp, Glycine max
agcttaaaaaacatttcagtacttttagaagcatacgaagcatcaatggtccttaagaaaacagtccctttaggacaataaactggaaaattaatgagaggtcttttagagcggtcaatctacccatcaaccatcaaagtacatccagtttccttccaaacttctttgtaaccttcaacaagcttcctcacttcatcaacccacatatttaacaaaggaccacaaattctataaaaatttggggctttataccctggactcatgctactaatagcatcaatcataggttgataatatgtcgagttaactgcattaattgacactggagcatctatcatccattttgcaatggctttgtcacacttttctataaattgcttattttgcaag

SEQ ID NO: 143298 - DNA, 206 bp, Glycine max
agctctcttgagaaaacttccttgataagcttctctgataaaactcccttgaccagctatagcttaactactcgcggccctatactcagtaagcttgcctccttgagaagctttcttaggaagattccttgtgaagctagaggttatcttcgcatacggatcttatagcatagctcacccactggcgatgagaagctttaacttaa

SEQ ID NO: 143299 - DNA, 388 bp, Glycine max
catgcaagcttctcccgtatgttgctatgaataggggatgatgtgaagaagatttgtttcagccccttaggcacttctctctctctcgagatagctgtcgaaaattagttccgagaagaaaattcatgccgagacgcttccgtaacgtttacgtaacgttttcgtgagtaattacacgaagattctcgaccattcttgaagattcatcgttcgttcttcgttttggtcagacttcaacgggtaagtacctcaaaccaagcttttcaattcattctatggacccggggcgggccacattttagttcatgtatgactggtcgtggaatccattagtttttatacccccttttgacgtggctaagccatttatttaagtcatttctcgcct

SEQ ID NO: 143300 - DNA, 80 bp, Glycine max
tacgagaagcctcgatgaatctggcttattgtaaacgaatacactcctgtggtggccctctttttgacacatgtagttta

SEQ ID NO: 143301 - DNA, 178 bp, Glycine max
ggctaagcgcgagattggcgctaacaatttacttactaaactaagtttaaatgggttccgcccttcgggatagaagccttttaagcctgatgcaaaatggggaggttaaataacgcattgttgtaaaacaagaaagtgtcaagaacaaggcctattttaggaatgtaggaaaataaat

SEQ ID NO: 143302 - DNA, 328 bp, Glycine max
tttatgggataaaaatggtcattgaaccattccctattctatgacttaacccaattatttattgaaagtgtaccatttgaaagtacactgaatcatgattggaaatttgatttctctgtgcatgatgcccaccggttggtttgcaccaaccaagcggatatgaccggaagacttcttgccggatcattggcttttgaaagccgcatcctttactatctcattgtgcgtatgttactttcaagatcttcaaaccttgcacaagtttttgaacaagatcttcattgtatgtgggctttttatatcggccgaaaaattgatcgggcacact

SEQ ID NO: 143303 - DNA, 382 bp, Glycine max
tagctgtggaagaaagtgtttatgttcatactctttatgctgagctcgcaagagcccgggtagtcgaaaagaagttcaagtccatagccatcaaagtctgtaaagagtttgatgaactaagggacgtcaatatggccacagctgaagccttggaacgaagaggtgaatagaattattacgggtcaaaggcatgatctccgaagaggtgaaaggaatcatcacgggtcaaaggcatgatcttgaaggacgagctaaaggtttgccttaagtcgaaaagaaatttgtcccatcagttaagcgagactgaagggaatatgtgggccatcatcgataagtgcaaagagaagcttaatctagcggcgactcacgagcaaaggctaga

SEQ ID NO: 143304 - DNA, 384 bp, Glycine max
  unsure (1)..(384): unsure at all n locations
agcttcttagtttcagatgatgcagctaagtttgttgctacctcatgcactcctctaatgactataacatcatttctggcgctaaactgcagggagttggaagccatcttctcaattaaatttctggcttcaacaggagtcatgtctccaagggctccaccattggcagcatctatcatacttctctccatattactgagtccttcataaaaatattggagaagaagctgcttcgaaatctgatggtgagggcaactggcacatagttttttaaatctctcctagtactcatacaggctctctccactgagttgtctaatacctgagatatccttcctgatggctgtggtcctagaagcaggngaaattttttctaagaatact

SEQ ID NO: 143305 - DNA, 271 bp, Glycine max
ataaaaaataatttaagtatttaccctactctatactcaataagtaaaatttggcatttataaaaaaacatttattgtaagagttctgataaaagcattaaatgccttaagttttttacaaattaaatgccttatgcttaaacattgggtttaattttcttacagaaaaccttttttaattatttggagttcttgttctcttagtattaaatgcattaaaaaaaatatatggcttagaatttaaaggtttgccaggggtacctacctgcct

SEQ ID NO: 143306 - DNA, 366 bp, Glycine max
  unsure (1)..(366): unsure at all n locations
atgctttaaaaaaaaattgtaattaagttagttttatatacgacaagctagnattatatatatatatatatatatatgaccctaatagtcaaaaaagaaaaagcaaattaaccacttattttttggagcaagtgtgctacaaatccaagccgaaattgcttgcatcaatgccaaattatttatatatctgtcttaacatattcaaataggatatatatatgatatatatactctatgcacaaaaatttagcaaattgtatctaagaaaatttcaattttcacaaacgaagccttcagttaggcaaagtgtatctaagcaaatcagtgttgtgcctttgatagatcccaaaaaggtggatactgttc

SEQ ID NO: 143307 - DNA, 245 bp, Glycine max
  unsure (1)..(245): unsure at all n locations
ctattctgtatgtgctcatttatccccttgacttatctagcccctagtacttatgctccctttacccaatggacctagactgcttcttattcaagcatgttttgcatgagattattgcgcgatgagtaaatgcttgacgcaacgtgtgatgagaatgaatagntgatcaatcacactcccgatgctcaaggaatcctctacaagattccaagtaagcctattctaagtggaaacattacctggac

SEQ ID NO: 143308 - DNA, 379 bp, Glycine max
  unsure (1)..(379): unsure at all n locations
cgaggtacttacccggggaagatcttttatcgatgaatttcgaatgaacaacgtttattaacgggcgaaacctttctcgaaattccttacagaaacgttttgaaaacgtttcggaagcgcctcggcttatattttctttacggaacctatttttccaagcaaattttaaaaagagagaagcgcctaaggggctgaaccctttatttcttcactacctcccctatttatagtcaaataggggagatgcttgccgcccagctcggccagacaaacagggttgctttctccataagcaacagccttctggaggaatcttctgtgaggcccaagtgggcctggttgctttttgacccccattnttactaaatgcaccccccct

SEQ ID NO: 143309 - DNA, 390 bp, Glycine max
agcttgtaacgagcccaaaagatgctcaatggttatatcctccaagtctcttgtttcttcgattatcgcgacaatatgttcatactttggatctaatgatctaagaattttctccataatttttacatcatcaagcttttcaccatttctcttaagttgattggtgaccattatagctcttaaagtttgaagacataccttcttgaccggatctattcccttatataaggtttgaaacttctcccacgcttctttcaccgactttgctttcaaaaccttctcgaaagcatcatcatttaatccttgatagattagatagagagccttcttatctctctttcttgagtctctcaaactatctctttgagtttgagagagactatccttatt

SEQ ID NO: 143310 - DNA, 408 bp, Glycine max
ctgcatgcatgcaagctctgtgagtgtgaagacgactaaatataacttatgaactaaattttctattgctagagctattttttgactttgcaaactgataagtgacaactacttataagctaatatttcttttactttttaggccaaagcttgttcctcagctagcattgttttgcttaataacacaaacaggaaaattgttgatgttattgcatccaaactgtatttttactattcgtatagctatgaccttacaagagatcttgctgaaattcgggggtgagttaggtgctaatctttggaattttgaatttttggaattttgtgtccaacaacctctttgcattgcactgatttgtcactccctgccatgatgagctgggacaagtttgtttcaaacttacttga

SEQ ID NO: 143311 - DNA, 338 bp, Glycine max
  unsure (1)..(338): unsure at all n locations
tgatcgataaggactaattttaatcatgggttaaagagttgtacaactgatggagatatattacatttagtccgggatgcttttgaaaataagatgagattaaatggttattttcctcatgaagtataaccaatattagaagaagtctcacagatgttgtacttggaatgtgatccaattccacaagctgtngagaatgaggatgatntacatgatgtacctgttgtttgccatgaggaagggaagttttaattcatctgtacttggtccaacatggttgccataattaattaatatgattaatttttacctgatcaccattgatgcccatttggtgc

SEQ ID NO: 143312 - DNA, 371 bp, Glycine max
  unsure (1)..(371): unsure at all n locations
ttcttggtcagaagcatgttaaacattgnctctttttatcgnggactctataaganaagggggggtgttgacttagttttacaattttatttggtctttaaaataagatttgagatcgtgttaagatcaattacacacaaggaaaatattaatatcctagtccatcctaaaatggttacttttatttaaataaataaattaaaataacttaaaaaatatgtattttatcccttaagaataagaaggaaatagcttttcatatattttatttatctactatttcttattgagacttgttattatttttgaaataaataaaaatttaaaacctaatcctaatttaaaaagagcagtaaaaaaaagagtttgag

SEQ ID NO: 143313 - DNA, 267 bp, Glycine max
ttactcttaccgcactttctgccttgaccccgaattccaatgaccttaccctacctagaacgtgcgtaagatgtattagcccgattcattatatctaggaaccctgcattatatgcattacatgaagatgtgggggacgacacgaatgacttgtcaaactgcgatgcttttgggacactacgccatatccttgatagcctgttgtatacagaccctaatactcatcccatatagcactgagagaagaagtctgagtgcattcatgct

SEQ ID NO: 143314 - DNA, 388 bp, Glycine max
gaccttaaatcacccgcagcatgcatagctttgctgcgcatctatttctgatttcgggtgtttttatagaaaaagacgcattgtgatcgattacagggattggtaatcgatacaggcccaataagccttctggtaatcgattacaggatgtggtaatccattacaggctggctgttcatgtgtaatcgattacaccggatggtaatcgattaccagagcctatcctaagctagtttctaaaagaatatctatatttatgctcaaatacatcctatatgactaattttcattactaatacactaaattcaatcattcaattactatttacacaagaaatcataaattctattcttaaaaccagaattctaaccagatcaaaccaaatat

SEQ ID NO: 143315 - DNA, 208 bp, Glycine max
tcatctggtcttcaatcgttttcaacatcatctctcaaacatctgtcaatcaaactctcatatcgttctacaggaatttcttatgcatttctcttcatatgtctaaaagtcttttatcaacacctttctcttccaagaaaagttctttgagcaaaaacttggggtatccatctttttcattctcttctccctttaccaaaagaacaaa

SEQ ID NO: 143316 - DNA, 66 bp, Glycine max
tttatttttctaattcttgcgagatccagactgtgttccacgacgtgggtaatacgaatgagacaa

SEQ ID NO: 143317 - DNA, 280 bp, Glycine max
aatttttgtgggacaccattttaagaatcaagaggaaaaatgtacttgaagcgatcccatatatcttcttctctaagtacaacaaggttacacatgcttctatctaagacaggttctctctgataaaatttttgaataacttctgcaagctgaaccagtccccacccttctataactaactacctcctgagagctccttatgagattctataaactgagtttctcacacccttatatatctagccacctcctgaatagaagtgagcttctccacccctaa

SEQ ID NO: 143318 - DNA, 396 bp, Glycine max
  unsure (1)..(396): unsure at all n locations
catgcaagctcccttctacatttagctcattccttaaattttatgtaattatctctatacttntctacttacatttttttagaattacataaactttaatcatgtatatattcccttttaattgtagatattatagtcatgaatggctaattgaagattctaatccagttcctccacatcaagatatggaactcactcctgaaagattaaaatgcttcatgaggttctttcttgatgtggatgtaaggagaaaagtgaatatgagtttgccaacttttcagatggaagagaaggttttgatgatcttgattctttaaatgatagaggtcaaatggatccaaaagcttggtggcttgtccatggcgttaatgctccaataccttaaaaggttgccct

SEQ ID NO: 143319 - DNA, 304 bp, Glycine max
  unsure (1)..(304): unsure at all n locations
gctagagcatanctcacatacatgttattaacttatccacctgcctgagatgagaagctagagcacttctacacaccccctgttatagctcagctcacccgcatgacaaaatacatgagaatgcataatagagtaccttcttcaaagactccccaatatgccatctggaattaggttgagaacccttactacgcgaatggacgatattcactgccgcggctatggagaaacctattgtaatatttacgaacatctatcgggcatagactaaaccgtgggcgtgaaatctaccctatggctgatg

SEQ ID NO: 143320 - DNA, 154 bp, Glycine max
ataacgcacccttgcatgctcacatgcacgtgtatgcacacacaagcgacctcatgcaatcacattatttttaaacatcataatgaacaagaggcaatacacgttgggtctcttatggtggaaaatatgattagttgtttacttttttgggaaa

SEQ ID NO: 143321 - DNA, 220 bp, Glycine max
aaaacaattgggtttaatcattggaagacctctttcttcttttgcacttctgccagaccatggtattgtaattagtgacctccttcagaagcccataggtgcctcacacggaaataaataggaaatttgcctggttggaagaggcatttcccgagtcattgatagttcaaatagtacacccgagagtaccctccaactgaaattattgttccccaccaca

SEQ ID NO: 143322 - DNA, 355 bp, Glycine max
agcttgagtcggaccttggtgtttaaagatatgttcttttgaaatcctcttgtgcttccattagtgaatttcaaacatctcgatatattatgcgcccgaatcagacatccgtgtgaaaagatatgaccaatagaatttcctcgagagccttctgtgttcatttgtaagagcctctatattggatgcgcctgaatcggacatttgtgttaaaagttatgacttttttaatatttcaagagctgtctgtgtccaattttgagcgtctagatatgtgatttgcatgaatcggaattcgggtgaaaaggtatgactatttgaattcccaagaccttccgatgtcaattgtgatcgattc

SEQ ID NO: 143323 - DNA, 383 bp, Glycine max
agcttacccccactattatttacaaccacccattttttctatcaatgttaagaaaatgacatcggctgaaatgcagttgaaaagagaaaggggcctatgctttacttgtgatgacaagttttcccctagccatcgttgtccgaataagcaatattttgttccgcagtgggaagaagaggatgaacctgcattacaaccatatccaccatacgaggttgagacagctggggaccctagtttgcaagatcatcatttgtcttataatgctttaaaaggctcatcaagtcttggaacaatgaagtttcaaggatcaataaaatggattgggagtgcagattctactagatagtggaagttcagataacttcctccagcctagacta

SEQ ID NO: 143324 - DNA, 286 bp, Glycine max
  unsure (1)..(286): unsure at all n locations
tgtgatgacaagacactcatcagtcttatctatgtgagaaatgagacatgggctcacacgcctatcanactacaccagtgcctacgcattacgtgtgataacttgaaccctcatggcgagagactcacccatgcttaccaataccgccctcaatgtgaataacacgttcaccctgtcttaactctccaccgcccatcctacgtctaacaatggcactcctctggctggacaatcttgtctatatgaaacccaagactcggctggcatcatgaacgtcgggggattt

SEQ ID NO: 143325 - DNA, 285 bp, Glycine max
tctgatttggttcttcattgagcgcttcgcggattttgtcctcacggtctaccaagaagaagaagcctgcttgtctgagggaagtcttgatgaagatgaccgccccttgcagaggaaacctgctcggatggatgatgaagaagaaaatgccactgggaacatagccatgggtaacagataaatgaagctgatgaagcgtgatgatgatgatttgatccccgggttggagcatgtgttaagattgcgggctcagcatgttaagtctaacctcaatcctgtatgggc

SEQ ID NO: 143326 - DNA, 279 bp, Glycine max
tttattactgagcagcatttgtcgccgtttttccttgctttgttgggacaagctcaaaggagaagcagaagaaagccaggtgatcatgaccgaataaaaatctttagaaacgttgtccggcttttccagggattgaaatcaactctaaactaccaggcacaaggggttgaggagattcaggaaggaggccatgattagcaatttggaaaatgggagaacttggtctattttaaggttgactatgaatcggatatgtgagcgatgattgtgaaggtgatt

SEQ ID NO: 143327 - DNA, 234 bp, Glycine max
acgtgacgataaaaatgtcgagatcggccttctctcagacttaatactgtgctctaccaagctgcgttctggtaaccatgatagaatagcggccacctagctgtatggagaggttaccatgcccataggctcacatatttcagttgtaactaatgtaatgagggggattgccccacctgacccccacgtggtacgtctggatctgctccacgactcatttcatctgtaactaca

SEQ ID NO: 143328 - DNA, 93 bp, Glycine max
gttcctcttctcccgctgctggtgcatagctctgatcgacagctaaccggccattgctgcgcgcctgtgacttccttgcacgaccaatatacc

SEQ ID NO: 143329 - DNA, 397 bp, Glycine max
  unsure (1)..(397): unsure at all n locations
acatccacaaatcacacattaaatccatcatccccaggtgcccaccttcaactgagctcacgtactccccacgtagcccttattctcgttcctctcaacaccgggtttccatcaatcccttcaagcttccacaacatcccagcaattcaacattcaaacatcatgaactattcaaaaccaagactacagggcagaggcagaaaactctgccgaaaacacattccaataccacaacttttctctactcatatacctcagtaacattntcttcgttctgattcgctaacccgtggatcgactcgaaaatcttactggagggccttagtacatatatctacattttgaccgtcgggatgtgctagaatagtncagaaccgaatatgtgcaaccctttccg

SEQ ID NO: 143330 - DNA, 325 bp, Glycine max
  unsure (1)..(325): unsure at all n locations
tttccaggaaaaggggaatgcctacattatctccatgatacacatgccacaatgatgaatcggaaattttatgcctaactggacatgcatgcacccatgtggacactctagcatcaagtnattatggccatgtgacactcgggctcaggatttatttccctattatagtcaacccacttttccaaatattttctttatcaatttgggcttcatccaatgtatttgggtgctcaaaacttttacacattaccctcaaagtgacacaccttttttataaactggttacacataaatctttaagaaagtggaattatttttccaacat

SEQ ID NO: 143331 - DNA, 454 bp, Glycine max
  unsure (1)..(454): unsure at all n locations
agctntatataagtctggaaaagggaaattttattcttgctttgcatatctctatgactagttaatattgaaaaaggtcccatctcatacatgttaccaggatagtaaatagatttaacggtgtcttgacagtagtcttggtcccatctcatacaagcctagaagcttgaaatgtgctactaataactaataagtattggcagaagatgagagtgctgggtttgactgcagatgactggggaaaaaatggactgcaattgtcatgtgaagacaggagagggaggaatgcttgaacagagcccacatccgcagtctgttttagcctagagcttgttagttgttacccctcctgtctttgacactgacaatgacctttaattttttagcttcagcttgccttagtagaatccagtggtgcctttgattgcttacacattggctggtagtgttaaaa

SEQ ID NO: 143332 - DNA, 341 bp, Glycine max
atcaaccgtgtttcatctccacacttccacagagagtgggtcgttcctaaattttacaaccaccgcgacgatcaccatacattttcttcccgatgatggtgggcacaacaacccacacccaggtttagagttagtctgatactgtgtcactattctacgctttctttaatactattcctccgcgtatggcgtttattggatggccataatggcaccttcggcagcagtgtcttctccatccatggatgattgtcttggggttctgacaccaccgtaacatacgcactcgcattgcatatctccgtgatctaaatggctccattccgctgtgtagccatggc

SEQ ID NO: 143333 - DNA, 458 bp, Glycine max
  unsure (1)..(458): unsure at all n locations
agcttccacaggttctatgctctggccagaattattcaatttcaaggccanngcttgattcgtaatcttggaacttgttaagtaacattcagcntttacctttgcatgcagggattggacacaatgtgttgtgagcatggaactcagctgtctggtgggcagaagcaacgcattgccattgcaagagcaatcctgaaaaatccgagaatcctacttctagatgaagcaacaagtgcacttgatgcagagtctgaaagggtagtgcaagaggctctatacaggatcatggtcaacagaactactattgtagtggcacatcgcttgagcacagtgaggaatgctgatatgattgctgtcattcatagagggaagatggttgagaaaggtatgacacaagttcattgaaaacgtgctttcttttcaattttccattgattaaaccgttgatcatatatgca

SEQ ID NO: 143334 - DNA, 456 bp, Glycine max
  unsure (1)..(456): unsure at all n locations
agcttgtagaatggccagacatgatacatgtttattgttggttnggcncaaggattaaagggatgccccacattatttccacgacacaaatgcaaaaatgatgatctggaaatnttatgcaaaactggtcatgcatgcacctatgtggacgctcaagtgtcaaatttttatggtcatgtgatgctagggctcaggattcatttcctctattttaaatcaacccaatgtttccaaaatatgttcttttatcaatttgtgcattcatccgagtccatttcgggcgtccggggaaatttcacagcattcacccttcaggtgtagacacattttccaaaaattggttatgatcaatgaatttctttttcaaagaaaagntggaaatcatctcttttcaaaagcatgtcggtttttcagctagacaacttattntncttttccccatctttgtntctcact

SEQ ID NO: 143335 - DNA, 452 bp, Glycine max
  unsure (1)..(452): unsure at all n locations
agcttcatgatgatgaacctagtctttttgtttatgtcaaaagcccaagtgatagattcaatacttcaagatcaagcatcaagaatccaatccaagattcaagattcaagggaagaaatcaagaagaaacaagtcaagacttcatatggaataagtattaaaagatttttcaaaaaccaaatagcacagttttgtnttacaaaataattttctcaaattttctcaagttaccaaagtgattactctccggtaatcgattaccagttggcagtaatcgattacgagtaaccagattggttttcaaaatgttttcaaatgatttgtaacgtcccgaaatgattttcaaatagtgtaatcgattacactatattagtaatcgattacaagtgaatctgaacgttggaattcaaatccaattgtgaagagtcataactttncataaaatacattgt

SEQ ID NO: 143336 - DNA, 445 bp, Glycine max
agcttagatagaaacattgaacatattatatttatctcaaatagataataaaaatatttacatcaagttctcattagaaattcccaacaaaggattttagccctccattacaagggagcatctttacaaatatgagaagggtttcagagaaaataccagattacaaagcatctttcacattgtcatgctctccttttcttttttctgtgcaaatcacgcttaaaaagggctttctgacctcgaatgcgcgcttagcgccattctcaaacttagcgcgagtaagtgatatttggcttagcgccaatcttacgcttagcgcagaagagacaaccgcctcgcttagtgagctgcatacaagcacatactatcatggaacaactctcttcaggcttatcctcatgcgctaagccactgctgtctcgcttagcggtttggtctcgctaag

SEQ ID NO: 143337 - DNA, 292 bp, Glycine max
  unsure (1)..(292): unsure at all n locations
catattgatgcagtggcggagataagttgtggccaaggatagccatggtcccctccaatttttttcgttaaataagcttttgtaattctttgtataaataagaatcaatacatgtatttttttcttttataaataacattctcaatttttttaagcactctatatatttgattgttttggcatatcacaataccatgggatgttccgaagncataaaacacatctcgcatttaaaataattgatggaatcatatacatcttctatcgacaaaagctaaacaacaatttacta

SEQ ID NO: 143338 - DNA, 397 bp, Glycine max
  unsure (1)..(397): unsure at all n locations
atctatttgaaagtttgcttggcctattagcctatttaaagatgtatctcatattattcttttatttagaagacaattatgttggggcctagcatgcctaacaaccctttatgcaatattaatgattntctctattaaatgtttttttcaattttcactcacatatgcaaatatgttctcccatgatcctccacgatgatgaagagcctaatttatgtattctttctcccaaatccctttgtaaagatggaatcataaacaacattaggtataaagatgtatgcagaggcacaacaaagtcactttattcctagcaataaaaaacattaggtataaagatgtatgcagaggcacaacaaagtcactttattcctagcaatgcaatggtgagatgttc

SEQ ID NO: 143339 - DNA, 349 bp, Glycine max
tgtattgaatgttcaattatgtgttgcatcatactctcaatcatttcatatctgcatgatgcattatcatgtaggagtaagaaggaaaagttctaaagttagaaaatttcttcagtgggtcaaactctctattgtaatcgattacaggcttatcataatcgattacacaagtgtttgaagcttctagagaagtgtatcgcatcggtttaatgattacaggcttatagtaatcgattacacagttcttcttttgataatgacttgattttccaggagtctctcctttaatcgattaccaggtgatataatcgattacttatctcttaaaaagtgttttagaagtgatcaa

SEQ ID NO: 143340 - DNA, 357 bp, Glycine max
  unsure (1)..(357): unsure at all n locations
gaagaatggaacttatttcagatagcaaatctattatgtaaaaaatttatttaaccaacaaaacatgaaacaactatttgcacactacatgtagagaaaatcatttgctccttttttgggtttttgtcaagggaaaatagcaatttatattcctagctaggtttaatggtatttgtagcaaaatacattatatataactctgaatgcatagttnttacttccattatgaaatgaatacaattacaaattacaatgagcatgcagcatataaattaaaaacaaggattaaatatgtttttagtccctcaactaacagttgattggtcttgaaccctaaactatttttccatttgtgtc

SEQ ID NO: 143341 - DNA, 461 bp, Glycine max
  unsure (1)..(461): unsure at all n locations
gcttgcattatcaattgcaccatgtntcattatatagtatatactagagagtgccagagtgccaccttttgtgagtggttttattagcattttgttagttgaaataaaagctcaaacttgtgttaaagtggttgtcaattctctttggatttaataaggtggaaactctaagcttatggttgtctcttggctaaccaggagttgtgcatttttccacatattttgtgtcttaattctagttttaattaggtataatgacaccatcaattgttgttattggtaatcatttcatcttctcacttttataaccaatttgatgtcattcctatttatgggttgtgcattttctaataaggggagcagaccttgaattgagttntaatcaccttctaaagtgtgagaagtgagttgattaagaaattggttatctangaacaccaccttgtgtatgacactaattc

SEQ ID NO: 143342 - DNA, 454 bp, Glycine max
  unsure (1)..(454): unsure at all n locations
ctttattaaaataattaataacttctggcatatatatggcatgaaaaaggaccatttccataactgctttcgggctattcttggatcaaacctgtagtttcatctccataattatcgaaataaagatttgtattgaagtcaacataggttactaaaaccaaactccatccaattctaatagtagaataacactaaggacaaaaactatatacaaatatacaagttttgtccttaactcattcaaattttgatgaatttggacaaaattatctagaaattccttaaatactttcttttttgttatttttcactcagttttatcaccatagtttgtctcataaaggtttacataaaaagcaactattgtagttnttggatcattatatgacgaattttcaactctttaatttttagaatttttcatttatagaactaaatagattaanaatgatat

SEQ ID NO: 143343 - DNA, 419 bp, Glycine max
tacacacaccgcctctaataactaagctcacctccttgagaagcttccttgagaagattcctaaagaagctagagcttatgtacacacaccccctataatagctaagctcacccccatgccaaaattcatgaaaatataaaaaaaaagctcctattacaaagactactcaaaatttcctgaaatacaaggctaaaaccctatactacttgaatggccaaaatacaaggcccaaaagaaggaaaaaccaattctaacatttacaaagaagaatggatccaaccttgacccatgggctaaaaaatctaccctaaggttcatgagaaccctagggccttctttagtagctctagcccaagcctcttggagtcttctatccaatacccttggggggtaggattgcatcacctccaccaacgtg

SEQ ID NO: 143344 - DNA, 431 bp, Glycine max
ctatggccttaagcattctcctagagcttggtttggcagactaaaagaactgattctcaagcttgattttcaatctagcaagtgtgatccctctctttttgtctattccaaaggatcatcaactgtttgcatgctgatctatgttgatgacataattatcacaggcaacaatccaactttgctgcagcagctcatttccaagcttaataatgtgttctccctcaaggatcttggctgtctggactattttcttggaatagaagtttaaactcaacctgatattctcacacaggccaaatacattagggatcttctgaccaaaacaaatatgtctgaagctaagcctatctcctcaccaatctgagtggctgcaagctgatcaaagaaggctctgaccctctcactgatccctctatgtacagatcagtagt

SEQ ID NO: 143345 - DNA, 449 bp, Glycine max
  unsure (1)..(449): unsure at all n locations
gcttgtgagaaaatgctgattttatttttctttggtgatgactacaacaatggagtatttatgtgaatttgggttctgaagaactgtcgcctaaacatacacttttaaaggatcaaattgcattgtctatagaacttggtaaaatttttcttggactcaaaaggatgttggttactagcaagtgacactttgcatgccaattttgcttgatgaatacttacttttttagtaaaacagtaatcttgtgttaggaataaacttagtatagcgacactctatttatggttaaatttttagtgcataggtctatgttgctctaagcattattggaattgcttacaaatnggttgaaagggacttattttgctaattaatgaaaatggaagctaacatggtgacttctttcttgcttgctacccttccctacattaactaagaagatgccatga

SEQ ID NO: 143346 - DNA, 419 bp, Glycine max
  unsure (1)..(419): unsure at all n locations
agctatggttatcaatgacgagtttctcgatttcttactggacacacaaagacatccgaatcaaaagtgattactgttgactttccctatagctcccgcattcaatctctagcgtctcgatatattaaggggctcaatcggacatacgagttaaaagatattgggcgtagactttgcttaaagcttacggtgtcaattttgagcggctccatatattacagggctcgattagacatccgagtcaaaagtgattgtcggcagatttatctcagagctttcgtttctaattacgagcgtctcgatatcctacaggacacaatctgacatgcgagtcaaaagctattgacgtctgacctctcttagagcttccgttatcaatttccagcgtctngatatattaaagggctcaatccgagcat

SEQ ID NO: 143347 - DNA, 444 bp, Glycine max
agcttcttattcaaaaccaaaaatgtatgtgattgaacctctctgggagaagtgcaagagggttcagatcccatggagaacaccagcaggtacatttgcaattatttttgttggttctatcaaatatgtctataatattaggatagaaaaattggtgaaattctatgacagcccgataaaagaatgaacgacacattgagaacagaccatattaacagctttgctgatgttgagttaaaaagaggtatatcttagtcaattccctgcacattttcttggagggcaatatcagacgcttctttgctacctttgatgctaactcttattgaccgcatccccttttgcagcttttatcaccttattatataaaagtagagcaagagtcgtggtctaactctttgttctgtaagtaacttggtatattgggagttgtatatacgcctg

SEQ ID NO: 143348 - DNA, 455 bp, Glycine max
  unsure (1)..(455): unsure at all n locations
tgcagctgcttctcaaatctgaactttcatttattatgaagtaancataagacagatatcaaggaaagtagctcaaaccaaagtctcatggctaccgtttcactcaagcacaagtggttaagctattcattgataacaactaacgggaggttcaatctttgcatttcatctcatgccatcaagtcagaaatgtataaatagaaccagaaaaactttcttaggcttgtagtgaggtttggctacaaaaattcattggttctttctaggattccaaggtttagattctaagagagcacaagtcctagacttatcccaatgaccttttcttgtatcatacaagtagccttctcactatttttcttctcttaagtngcttttgaccttattgaaacatcacacttattcttctattcttcttctcactattaaactttntcttttcattctaattgact

SEQ ID NO: 143349 - DNA, 416 bp, Glycine max
agcttcttagtctcagctgatgaatatgaattcttggctacttcatgcactcctctaatgacaataacatcacttctggcactaaattgctaggagtttgaagccatcttctcaattaaatttctggcttcagtaggggtcatgtctccaagggctccaccactggaagcatctgtcatacttctctccatgttactgagtccttcataaaaatattggaggagaagctgctaaaaaatctggtggtgagggcaactggcacatagtttcttaaatctctcctagtattcatataagctctctccactaagttatctaatgcctgaaatatcctttctgatggccatggtcctggaagccagggaaatttttttctaagaatactctcttgaggtcatcccagcttgtgatggacc

SEQ ID NO: 143350 - DNA, 193 bp, Glycine max
  unsure (1)..(193): unsure at all n locations
ataaaaaagaaaaattttaatttttttttttcccaaccaaaggtgatatatggtcttcccattatataaaacactgattcacattgtaattaaagttatgttcaattttacattgaccatttggcgtttcaattgttgaacaagcctctctctttccaaaacaaatattcgtttganccagaannggccccca

SEQ ID NO: 143351 - DNA, 406 bp, Glycine max
ttaacatgacaaaaaaagtaatatgaaaaaggtgaaataaacaataatgtacctgaaagtaataccttgagaagttccaaacaactagtagtctcaacacttatagttcaacacgagtcccaatatatacactatttaacatcaaaccaaacaactctacaaacatttatcaattcgatccgggtttgataaaatctataaatgtaaacccataacttaatcggtacatgaacgatattaattagtttaattcgattctgaccgaaatacataaatgacccaattgaaattgtttcgatcgggttgggtcaattcaggttcacaggtgaccagtatccataaacactcataattaatatgttttatttaatattatctaccttaacttgatatcttatttgttata

SEQ ID NO: 143352 - DNA, 374 bp, Glycine max
ttttttggaaaaggctgagaatgcaccgagcaataacaaagactgcgttctttgaaggataaaggggaattaccttccatatctgctgaaaacacgctccaggtcacgggaacgagtcatcgaagacaagtgtccaacgttgaggcgggtattactatatttatcatcatggcgaggcatcgttgatttctttcagctctgcaaaacaagcaactgaattttgagattcaattcaagataaaaggccacacagagaccctctctttcaatggccataaacgattcatcgttgagcatatgcaaataacgtgaaggggaatggatgaattgatggtaacaaaattgaatttcaaacatgccttcattttaattct

SEQ ID NO: 143353 - DNA, 432 bp, Glycine max
  unsure (1)..(432): unsure at all n locations
tagcaaatggattcctgaatattttttttttccttttgagccngggtccctttccttgttttgaagctcactacaaaccttaagtgaaaaaccatgatatcaccatatccttaaggaattttggagcttggattgtttggaataggtgggggtttgttcatggacaactgtttgttggctatgcttcatgacgtattttgggccatacttgatgtacattgtatattggttaaatgttggacatgctgaatgaaatgttgtttctcaaaggctaaagaataaaaaaaaattgaaaaaaaaaattcgaaagaagataaagacaagcaataaagttgagtgaataagatcttaaatggcacaagaatgatgaaactcttggttctactctttatgtgtaaattatatctttacttcatcttattgtcttattct

SEQ ID NO: 143354 - DNA, 406 bp, Glycine max
  unsure (1)..(406): unsure at all n locations
cgcccncgcgaacattacatcgaaagtttatctgtcttccaagctctggtatttgagggttaatgtgatatacgcacaggacctgatgccaactgataagggtagataccctgaggtatttgtgaaggctattctggggaatcatgccttgaggactataatctctcacagtaggagtattaatccaatgtggaatgaggatttgatgtttgtggtggcaaaacacgtttgaggagccgctgatcttgagtgtggaggatagagttgcgcctaacaaggatgaagtgttggggaggtgtgccattccattgcacgatgtggagaggagactagatgagaaacctgtgaacacaaggtggttcaatctgaaaaggcatattgtgatagaacgggagaagaatgacac

SEQ ID NO: 143355 - DNA, 420 bp, Glycine max
  unsure (1)..(420): unsure at all n locations
agcttcggattcatntcgagcgtctcgattattacatgactcaancagacatccgagtaaaaagttattgtcgttcgaatttggtcagagcttcaacattcaatatcgagcgttccgatatattacgggattcaatcagacatccgaataaaaagttattgtcgtttgaatttgctcagagcttcggtattcaatttcgagcatctcgatatattacgggactcaatctgacatccgagtaaaaagttattgtcgtttgaattttctcagaacttctgcattccatttcgagcgtctcgatatattacgggactcaatcagacatccgagtaaaaatttattgtcgtttgaatctgctcagagcttcaacattcaattttgagcgtctcgatatattacgggactcaatcagacatccga

SEQ ID NO: 143356 - DNA, 396 bp, Glycine max
  unsure (1)..(396): unsure at all n locations
agctnggatttcctttagtagggaatcttttcttcctaagatggagccaaacccagtccccctcattaagaactagctcctttcttcctctattgcccttaggttaatacacctttgtttggttctctatttgggtcttaaccctctcatgcaacttctttacaaactctgacctagattccccttctttatgtataaaagaagtgtcaagtggaggggaatgatgtctaatggtgttaagggattgaacccattacaacctcaaaaggggattgttttggtggtctatgaacccccctattgtaggcaaattctacatgaggaagatactcatcccaagacttanggttgctctttagaagagcccttaaagagtggataaagacctattcacta

SEQ ID NO: 143357 - DNA, 437 bp, Glycine max
agcttggagagacaagaagccatgttatatttttatatttttttcatccccacctcctactataaaatgtctatcttccaaggaattccaagtgcggagagacagaagtttatgttatcattatgaagagaaatttcatcccaaaagtcattgtaatagcacgtacagaaattgaatcacaatacgaactctctgcactgctaatgtgtaaatcttgaagacgttgtgtggttggagaaaagaaaagagaatgaaataaaaaatttttgaattcaaggatgagacatatcagtgtcagatccacacaaaaatctgaaaattcttcttctctccttcctatttgatctaaccaaaccaaggcttactccacaccaattcatgatggaggatggtcttgaacccattatgtaccggattaatatgcctgctctaggaga

SEQ ID NO: 143358 - DNA, 419 bp, Glycine max
  unsure (1)..(419): unsure at all n locations
gcaagctngccgctggagctgacctattatctgttctatctctnttagacnggggatccctaggctcttgaccttgacttgatagaacctctctctaagcgaaggcgtttgacttgatcccatgttttacaaaagtgaaacaaaatctagtgcgaattaaaacttcgacatctatcatgggtggaatggatgaatgcatgaagaaatgcatatgacacatatgcaatttatgaatacgggaacccgggaaattttctctttcttagatacaatgtcttggggtagcacagtgtccgacgtatgtatttaagaaggtgacactgacccttccgtggtgtgcaaagagaggggtatgagacacaacccgagtatcatgcatattcgaaatgctcaacacggggatgtacctattatgacaa

SEQ ID NO: 143359 - DNA, 450 bp, Glycine max
  unsure (1)..(450): unsure at all n locations
agctnttcctctnattgctctgttagggttttcaagcgttagagagaagaagaagggattggagcctccagttcactgtctgtgtgtgatgagaatttctccctctacaaacattattttgcaaatcccaatgatgcagatgtgtggaaatgcatttcgaacccggtgtccaaatttcataatgatccaatgattaacgagtttgagatcgtagttttactagtatagatttgggtgtatgcgggaaaaacaaagagatatgtgcgagggacattcccctcaccacagacactatttaaaaaatgtgagaaaataagttccgaacatggtgtttaaatttcacgacgatccaatagataacgagtccaggatcatcgttttagtgagataggtttgggtgtatgtgggaaaaaaagagggttttgggagaggaataagggaaaacaaaat

SEQ ID NO: 143360 - DNA, 425 bp, Glycine max
  unsure (1)..(425): unsure at all n locations
agctngcagagaatgtattgaanagctcttattgtacgaaatcaatcaaataatataggatgcaaccagtcacaagatcacataaaggatgcatgcaaaaaaaaaaaaaaaaatcagcacaaattctcttccttctcatgataccataatcggtgagaagggcatggcaaatgcatttttctaatgcataaaagggctaatgtcaaatcattgttatcaccatctgctaagggtaaaaaaagaggaaagggggatgtctgctgtatttctccaaagctcaaacatagagctacaacccaaataggacaaatgaaccttataaatcacaaaacttaataacaaaataagtgatcatgaacaaatatataaaatatagcaccccatactacaaatngaacacgagtgaaaaatatgcagccacagat

SEQ ID NO: 143361 - DNA, 408 bp, Glycine max
tcttcataggcttgaagagaacccatcaattggtctacggtcattgagtctaaatccttaaactcttcaatagcacaaaccacataatcaaatttagcgattaaggagcgaaggatcttttccaccacacgaacatcttccatattttctccattaacgcttcattggttcacaatagccaacaccttgttgccaaaatctgagatagattcagattccttcatatgcaatgattcaaactctctacgtagagtttgtaggcgcaccttttttaccttatcaacaccttcaagggaggttttcaaaatctcccatgcttctttggatgtggttgcatttgacaccaactcgaacatagcttcatccaaaccttgatgaatgaaagtaagtgcttgttgatccttcttc

SEQ ID NO: 143362 - DNA, 408 bp, Glycine max
  unsure (1)..(408): unsure at all n locations
ctgaaaatatnctcgagcgggaaaagctggtcctaactaggaaggcttactcaggatcacaacaaacctaggtaacagagcctaccaactacatgaactggatgacaaagcgattctaagaacatggaacgctgcctacctgaagttctacttcagttgacctaatgcaagaccaaatgttgtactccttttcctactcaagtcttttgtcccaaaagagaaaaatcagggttttggcttgagaagttttaatgaggcacatatgggataacaaagggaatttgcactcaatcaaatacattgaataaaattctacatcccttcatttntgtaattgtcttgggtcttcaagacaggtacatccatggtcgcagctccataggctcattaaacccaaggttcacccat

SEQ ID NO: 143363 - DNA, 422 bp, Glycine max
  unsure (1)..(422): unsure at all n locations
ttctgagtccctcatgacaacccaaattttacttttttggtgttctttacagaacttgtcttttctgaatacacttaagaaaactcatcagtaggcataaattcaaaaggcttatgattcgtgttaagaaggtttgtcataattaaaacaacaagggttttggactgaacaaattgctcataaaataagatgtgaaaaacaattatcaaagagacattagagaacattcactagacagtaatagagagcacatatgaactaatcaaactaaatggtacaaatattgaaataataagggactaaacaataaatattcaaacttcatctaaccagttaaaattacctcctacaaaaaaatcaatnttggtgtttcatcgtgcattgcccatttcgaaacatttctaaacattaaagtgggtgaa

SEQ ID NO: 143364 - DNA, 448 bp, Glycine max
  unsure (1)..(448): unsure at all n locations
agcttacactnganaaggggtatagaaatcaattgtggagtatggatggaaaaaagacataaaaaaaaggaattttccctactagaaatacataggcttagatgtattcattagagagctcttagtctaaggagtgatgtttttcctccttagcttgacttatnttttataagtggtagagtggatttgagtctgatgccaaaaatcttccttattcatatttttgatattttatcgatcttntttatttttaattccttcttttcatatctgcaagccataaataagaaaatatcaattccttaatattaagtcaaaaataaatactaaataaatatttctaaaaatatttttattataaaaaaaattcatatntaacgattatcaatactataaaatgaaaaagatgaaatataatgtgatactttataaataaagaaagagttgt

SEQ ID NO: 143365 - DNA, 411 bp, Glycine max
gtgacaaatcaatctcatcagaagaatcatgactagagggtgcttcttgcttgggatgatcaccacccaagttactcaatggggctgagtttgatttcgtaacaacatttgtagaagattctccaaggaatggaatgttgtgcccaatagtaccacgatcatcttgtgtcctcaaattagtattatcactccctaggatcctagttccactatttgcatgcaaagtctccatcctcaatctatcaagagaagggtttagcatctcttgtgatcttgaccacccttgaccaaacctaaaacctagtgagggtgaaggatacgaaggcttgtggatcatagactccattctaaccccaagtgccctattatatgatccataaaaggagtgtgtgggatgataagggtaataaa

SEQ ID NO: 143366 - DNA, 432 bp, Glycine max
ctgcagctagccagaaaacccattattttattttttctcggacgccaagccgctatatataatgtgtcattgatgaatgttctactttcaatcgtacaaagcacgatgaaaattctcggctatacctgaactgcaatctatgtaagtgagcgtgaatctaactatatgctctattatctacactgtttgtggagatcactagacacgtcgcgtatgtgtctgtccctaatttaatgaaaataatctgttttcatatggaaacgcattaaattgataaaaataatatattttgcttttacacgatgttgactttaaatcacgacgttgactctaaagagactatgcaaaatcatctttcatgtgtcaaatgtattcagtgaatgtgtcttctaccagcgctaaatggtattgattcatcgagcataggacttg

SEQ ID NO: 143367 - DNA, 462 bp, Glycine max
  unsure (1)..(462): unsure at all n locations
gcaagcttgtagaatggctagacatgatacatgttttggtttgtgttggttcaaggataaaagggacgccccacactatttccatgacacaaatgcaaaaatgatgatttggaaacttttatgcaaaactggtcatgcatgcacctatgtggacactcaagtgtcaaacttttatggtcatgtgatgctagggctcaggattcatttcctccattttaaatcaacccaatgtttccaaaatatgttcttttatcaatttgtgcattcctccaagtccatttcgggcatccggggaaatttcacagcattcacccttcaggtgtagacacgtttttttcaaaaactagctatgatcagcgaatttttcttttaaagaaaagttggaaatcatctcttttcaaaagcatgtcgattntntagctagacaacttattttctctttntccacctttnttcttactg

SEQ ID NO: 143368 - DNA, 452 bp, Glycine max
  unsure (1)..(452): unsure at all n locations
agcttgtcgagctnttcttggattcataatgttgtatatcccactacggtngnttctgtaagggtggtcactacattgcattctgtcagccatgtcatggtcctcacctgtgctaactcctcctcctttcatcgctggaaaccctaaaaaatttgaaatgtatgggttattgtgacagaatcaaagaaaagagggagtcaaagagtgagaaaatagtaaagggatagacattaaaaacacactcacttctaatgacaaccttttaagatgatttttgcaaaaccatcatggaatggtagtttccaagacggtttttgtaaaatcatcttcattgaaaaacctcgtatttacaaaattgtcaccgnctgaatttctaagatggtttttggggattggcctcaaaggtgcattctaaacaactatctttntagtagtgattttgtcttggttgc

SEQ ID NO: 143369 - DNA, 447 bp, Glycine max
  unsure (1)..(447): unsure at all n locations
agctntgatgcaacattnggagaggttaatgattcaacgagatgatgcgctccatgagaggttggatcaaatggagaatagagatcataatgaagaagaaaggaggagaagagggaatgatggtgttcctagacaaaaccgaattgatggtattaaactcaacattcctccatttaaaggaaagaatgatccggaggcctacttggagtgggagatgaaaatagagcatgttttctcatgcaacaactatgaggaggaccagaaggtgaagcttgccgccacggagttntccgactatgctcttgtgtggtggaacaagctacaaaaggagagagcaagaaatgaagagccaatggttgatacatggacggagatgaaaaagatcatgaggaagcggtatgtgccggctagttactcaagggacttgaaattcaagctccaaaaact

SEQ ID NO: 143370 - DNA, 443 bp, Glycine max
  unsure (1)..(443): unsure at all n locations
agctggttcttganttttcctaagttctgtaacaagcttagaacaataaacttggccttctcttaattgtctttgggcttagcgaccacgatcaacaaagtactttcggcacctactatatgttgacttgaccaacaatgttattggaatgctgggacaatctttcaacaccttattcacaaattctgataggttggttgtcatgtgaccatatcgtcgtccagatgtatcgtaagccatgctccatttttcctttgaaatgcgatcaatccatcttgctatggctggactcaattgatgaaatttttctaagttttgatcaaacacatgcttgcaaggagtgtacgctgcatcaaatntgttatcatcaaaagttgtacgtagacatgaatctcaaattaaattaatgtataaaataaaccttacccaatttcttgaacatc

SEQ ID NO: 143371 - DNA, 423 bp, Glycine max
  unsure (1)..(423): unsure at all n locations
agctgggtcgggtataactctgccacctgtttttgcctggactttaacatagagtttgaattcttttccctttttttccccttaaatcatagtggatgatgctatcagaaattgtttataacactgaattagctaatatccctttttaatgggagttcttcccaatactgtttacctaactaaaaaattattatttcccctaacccttaaaaatagtgtgaaagtggggtggagaagaaagagatagaaataaaaaggataaaaaaatggaagagagaaaaaaaaaatgaaagatgttattagaaaagaaagagtgagtgtaaaatgaatgtgtaaagaaaactccccccctaagaatacatattacataaatcaagaggatatataanaagtaattttaaatcaagaggttaagtgtattat

SEQ ID NO: 143372 - DNA, 452 bp, Glycine max
  unsure (1)..(452): unsure at all n locations
agcttgtatntaanaatgttttaaaaatacttttaattaatatttgaatttttattcctttattaatatatatgtgaggggtagagggtgtcacacctctgatgatgcccacgaagaagaagatgctcccactgcgtccacgagacccgcacgtgctgtaaccaagcctagatacttacaggattacgttagttagttactcgttcattcattcacgagtttcacatgtaatgcatgcatgcttcttgccactcattaaacacgtgctgataagccgttaagagtttgttagatccccgatttcgttacgacggttacacgcttgtatctcagcaatatataagttgctgagtatctcataaaggaataagaacaagcatttcaaaatntagtttcaggaggaccctacctcaaataagggaaccctatcactctctcatcatctctctctt

SEQ ID NO: 143373 - DNA, 457 bp, Glycine max
  unsure (1)..(457): unsure at all n locations
gctttatgcttgtatctcatagagatagttgaacctgtatcttaagtatgaagggttaatacatgaagtttatactttgttaacatcaaaaccttagggatntaattgtttggtacaatccaatatgacttggacgcaaccagacttaacaaggattggaacgagtttgattatatttaaaagctaaacatcctaagctttctttaaatataaaatatgctcattntcattaagttttcaaatgtatataatttttataagatgcttgatgtgcactgattttagcttgtgtcaacttctcaaaaggtttataacagaaaaattgttataaatagtctatcttattttttttagtgattccaaagaatttaaaacctagactcatttatctttactgtgatataaaattagttgcattaaatatttgaagaaatagatctatactctaatcttattg

SEQ ID NO: 143374 - DNA, 272 bp, Glycine max
gcgagtcttaattcatttagcctgactcatcgtttttatgcaccttatattccatgcctaactataaaagatttcaaataatggcagtaaggagaatcttgcatggtcagaatattgcgcaagcttaatttatatgtaaaaagcctcatcattatgagaaattattaagtagttttagctaataaaatatttttgcgcaattacagagagggtcttgctaaattatatctaagatattatctaagaaactaaaagaaaaaagcttttcttat

SEQ ID NO: 143375 - DNA, 448 bp, Glycine max
agcttcatgcctcaagagggatgacataactttattactgttgtccaagagatataagtgagcttgtaacaaatcttctagacttggagtgatcacatgtagtccctttgaacccttaccacccactctgtcatcatgccgagactcaggaaggccaacaggtttagccttctcaatatattttgaacaaaattcaatggcttcttctgcaatgtacctctcaacaataaatgcttctagacaatatagattttttgtatacccttttaagatcttcatgtatcgctcaaccgggtacatccaccacaaataaacaggaccacaacatttgatttctctggccagatgcacaatcaagtgaatcatgatgtcaaagaaagcagggggaaaatacatctccaactggcacagtataatcgcggtctcattaccaactcatcaaacttat

SEQ ID NO: 143376 - DNA, 410 bp, Glycine max
tgaagccacctccccgataaatagaagatgcgcacacttgctatacctggcagaatgagagctcttgagaaacacaacttaaagttcacctcgtctaccttactgttccttcaattgcggtgcgccccctctctctgctaatctgttccgtctttccttttcctccatagaagcgtcgtctccaagctttctattcaatgttcatcgtggtggtgaagctcgcttctccatggctcattccttaatggatggcgcctcctctcaccttttgtcctttgtctttcgctgcatttccatggtggaaaatcaccattaaaggaccttattgcagctcatagatccagcctccatagaagcaccacgagctagcttcgcttacattctagcgtccctcttgatctgaaccatat

SEQ ID NO: 143377 - DNA, 434 bp, Glycine max
  unsure (1)..(434): unsure at all n locations
agcttagtcagtatccgagntgttttctccttttgctggctnaagccgactccaaatgaagtaggcttaagtcaaatcggtcaataaaaaatgtcatttatttttcttctacgttgatggtagtgttcttcaacctttttccaaatacattcttcaacaaatatcctacaaaacacaagcaaaacaactcaaggcaagtctaataaataaaaataaaaaagataaattctagataagataaacctttacggtgtgcaacttgtgtgttggagttatcacacgttgaagagtgtaaattttatacacattcgatcgtgtcaaattgatttttaatttaattcagattaatcagaggttaatgtgataacactatacattttcaaaaccaaaaccatatntatatatttctttatataatgatgacacaactatct

SEQ ID NO: 143378 - DNA, 362 bp, Glycine max
gactaactgcctgaattcctttgggcctcccttctccctttccaagagaattaaaaggactaactgcctgagatatctcttgtctccccttacaaagattcaaaggactaaccgtctaaaaattctttgtcttaacacattgaagggtacatcctttgcggtacaagtagagggtacatatactcgggttgttgtaacagagaacaggagagggtacatctcttcgggatcagctcaagtggagggtacatccacttggttgttcaaagagaacaagggagggtacatctctcgtggatcttctcttgtaaacgatcttacaagctcggaagacatctcatgaaccggtggtgcttcgggac

SEQ ID NO: 143379 - DNA, 347 bp, Glycine max
  unsure (1)..(347): unsure at all n locations
agctngtatttaataggggatgaagagaaggttgatatanataagaagaaggggaagaaggagggtgaaatgtttgacaataaagataaaatgattttttaaaaaagtttaagttttgcaaggataagaggaatgataagggccaatagtaataccctgttattaaactctattattgctaaatggatgaaagcctgngtccaacaatccgtataacagacttttttttagaggatccgtatagcattgatacattttaagggcatatttccccatctgtaccagtacgatcttaactctccctctcgaagttgtcaagacatttaaactatgtgtttataattaaa

SEQ ID NO: 143380 - DNA, 437 bp, Glycine max
  unsure (1)..(437): unsure at all n locations
acccgtgaagatcgaagaacgatgaagaacgaatgaagaacgtcggagaacggttgaaagctttgcgagattcctcaccgaaaacgttacggaaacgtttcggaagcgcctcggcttagattttcttcacggaaacaatttttccaagcaaattccaaagagagagaagtgcctaaagggctgggatccttttcttcttcattttctcccctatttatagcaaaataggggagatgcttgccgcccagctcgcccaggcgagctcagctcgcccaggcgagcagggttgcttcctccagaagcaaccgccttctggaggaatcttctggagggcccaaatgggcctgggtgctatttgcacccnccattttactaagtacaccccctctgtttttntttggtgattctttnttcgtaaagttacggaaacttacgaa

SEQ ID NO: 143381 - DNA, 352 bp, Glycine max
aaagtggtacaacacaaccactgagaaagttaagtttattgaataaaggatgagaactgctcagagtttgcagaaaagtttttcttgatatgacgaggaaatatctggaattcgaggttggtgatcatgtattcttgagagtcacttctgtggacttgtggctggtctagcattgaaatcccgaaaacttacaccagtgctttattggtccttttcatattcttaagagagtgggccctctggcataccaaattgcattaccctccttatcttctcatgttcacaatgtctttcatgtgtatcaagtccttacgtatttccgcgaccatctcatgcgattgaatcggttatg

SEQ ID NO: 143382 - DNA, 449 bp, Glycine max
agctgagaagcactctatcaaacgagataattgtttccttgtttctggaaatgtagaacaaagaaggacttgagcaagttaattgattacccaatttgctaatcgattaaatctattttatcaattaaaactataaataccctcacttattctttctcattagtgactcttgattcaatcttatcttttgaagaaaaaaatcttagagtcatctaagggaatcactctacatttcaacaagagtttcatgatgatcaagattcattcattcttcatcatggttagagaaagaaagaaagagcttaaagatattgggatttgcacattcagatgtattcaatcctattttgaattctctataggttctcactgttggacattctagtgtaattgatctctttattatgttaaaataagagtgcacgctctgtttaatgaataacgagatg

SEQ ID NO: 143383 - DNA, 244 bp, Glycine max
gagtggttcctggagatatgtctacgggggtcaggacaccttggggacatcacgtggggagcttttgccctaactctatcttgaccaatctccactcgacccgcgcatagctatcccagtgagaacctgtgatgtacctaaacaggctagctcctgtctttctaccgtataaagaacaaagaccacaaagcatggaggcttgtgtgcgtggctggccagctgcgaatctcgagtgatctatggg

SEQ ID NO: 143384 - DNA, 438 bp, Glycine max
  unsure (1)..(438): unsure at all n locations
gtgtgggaatatataacttctgacatatgagagcactttatgcttttagtaataaaaatattgtgacaattatataaaaactaattatgtattaattgagataagtttttatattttgttactgatattattagtattagtaactaaattataaatcatcactataaaattactaaaaatgacatatatatatatatatatatttatattaaatattaataagaaatcatttatcaccaggtaatatgaaatattaatatcttttacaatttaaagagtaaaaactgaatagtttcacattntataagggatgaaaaataggtgaaataataaatacatagaaagaaaggaaagaaataataaataaatgttatggaaaatgtaaaaagaatagatgtcacatataagaaagatgtaaaaactaaaattatattagag

SEQ ID NO: 143385 - DNA, 372 bp, Glycine max
  unsure (1)..(372): unsure at all n locations
agcttaaggaaaatgggagaactgtgtcttttttgtgctgcaaaaacaacatttatgggaagtgaaatgcttggactaatgggattgcaacgcctaatttgtatcttcttaatctaagcattctgaatgaccattaatttgacaaattggtagcttgaatatcncttgaggttctctctacgagctcaaccatgccttatatggcttcttgcacttttccaaaacttactaactataaaaggatcaagtagagttttgccataaatgataaaaactatttttgctaaaagttttctctattagttagagtagtaattcgggtattccaactctaactattttattattctacttctatattagacacttatt

SEQ ID NO: 143386 - DNA, 276 bp, Glycine max
tcagtaataataaaaaatcgctttcatgccattttgttctctgcttcaatctacaatttcgctttctactgattaatggaaggcttagctttcaccgttcgtttctcttgaggatcaagcacaactctctatgaggttctattattactattgaattcttatcagtttgtccttatcaccaaatacctttgttttgctgctattaatccatgcatgcttagtgcttgattaattgtctctacgcttacattacgtccatgcttaatgatcaatttc

SEQ ID NO: 143387 - DNA, 443 bp, Glycine max
  unsure (1)..(443): unsure at all n locations
agcttaaccatcaagagcagaagctagacattatgcttaaccactcaagacagaagtaaagcatgagaaaaaatgagacccaagagagtgagaaaacaggaatcccggtgaacagtagacaattttggagaccaagaccataagagacaggggaaaatgcaaacaagcaaagatccaactgaaattggggataatgttgatgttgtgttcccttgagcaagtgctggagatggagaagcttgtggagagaggcctccagcaggagcaactgcatgcattttatacaatccatagttagtggcagaaggagtagagactntgcaagcagcaaggagtagagaggccttgctgacattcaaaaccatgccccgattnttcttttattcttntggtatttgtctcaacttgctagtggttgaacatntattctttcattcattgga

SEQ ID NO: 143388 - DNA, 405 bp, Glycine max
  unsure (1)..(405): unsure at all n locations
agctntatatagactntagagcttcgatccattgatagatcccagctagtcgttgtctaatagcttggatgcttaacacgaggcacgttactatgcagagagagtgtggggaccataaacatcttactcttctttgtgtattttgaagaatgcaaatttgatatacaacaaacttgttaagcatcaaagcataaagagatctttcaaagacataatcaaagcaaatatgttattagaatgcatgagcagattatgttgagataaatgagactctctttgagttcattaccttatgcatgtataagagaatatgtattaattagaggatgcatgttaagaatttaaaaagcatgaaaacacactgtgtgaccatataacattgttttattaaaagctgtaataaaa

SEQ ID NO: 143389 - DNA, 285 bp, Glycine max
aagcgccaagtgaggatcggaaccttaaccctcatttttttatagactgcgatgagaaaattacatagaacaagaattcctagggctaacctagaagaactacacaaaaataaaacatgcagcgacttccttaattgcaccacatcttaagcgtagtatcgcttgacaacgtttgagtgcaccaaggccccttcagagatagctctatttacaatgaaaggcccttcatagttccgggcctacttttctctgttgtttttcagagtctgggagagcttattcagc

SEQ ID NO: 143390 - DNA, 441 bp, Glycine max
caagctgccgccacggagttttccgactatgcttttgtgtttgtgtacaagctaaaaaaggagagagctagaaatgaagagccaatggttgatacatgggcggagatgaaaatgatcatgaggaagcggctagttactcaagggatttgaaatttaagcttcaaaaactaaccacccaaggcaacaattgggttgaggagtatttcaaggaaatggatgtgctcatgattcaagcaaagattgaagaagatgaggaggtaactatggctcgatttcttaatggtttgactaatgatatccgtgatatcgttgagctgttggattttgttgaaatgaatgatctgcttcataaagcaattccagtataacaacaattaaaaaggaaaggagtggcttagaggagtcttacccaacttggttcttctagtggagagacaaagt

SEQ ID NO: 143391 - DNA, 447 bp, Glycine max
  unsure (1)..(447): unsure at all n locations
gttcactgcattgcatgtataaatgttacacaaattgctctatctttactngaatttgaaacatactcacaatagccatgtttgtgtttattggagtgtttgtatccattctctccttcatattcttccagattagccagagacacaagagagatgcacctattaccaattggccaatcgttggtatgctacctttggttctacaaaatctgtccaatatccacgattatgcaaccatagttttgaaacattagggaggtactctaatgtttgaaggaccctggttcacaaacaccaactttattttcaccagcaatcctatgaatgtgcaccacatcacgagcaataattttggcaacaatggtaaaggacccaattacaatgagatttttgaagttttaggagatgggattcttaatgcttgatttttatacatggaaacaagaa

SEQ ID NO: 143392 - DNA, 358 bp, Glycine max
  unsure (1)..(358): unsure at all n locations
agcttgtatttaaaaatgttntaaaaatactttttatttattttgaattttattcctttattaatatatatgtgacgggtagaaggtgtcacactttccctcttggccattctttctatcactcctggccattatgttggccattctttttttcacccctcctctattcccttgccattcttctatcaccacatctctttctccattctttccttctccataaattgcacgggtagaaccttgcgctttatgccaagtaaatctactatcgctcccatagactctaaaatcgaagctacctgtctgtcttacaacgctgcaagaagacaaatggtgcaagacatatatacttcacctc

SEQ ID NO: 143393 - DNA, 418 bp, Glycine max
  unsure (1)..(418): unsure at all n locations
agnctaaagaggcattgatggctttctctcgttttggccttacctaattttcacataccatttattgtggagaccgacgcatcgggatcaggaattggagtcgtgcttacacaagaaggacatcctatctccttcttcagtaagcaattctgcacaaagttgatgaacgcatctacctatgtccgtgaacttgccgccataaccgccaccgttaagaagtggcggcagtatttgctgggccacaagtttatcatagtgacggaccacatgagtttaagggagcttatggaccaaaccgtgcaaacgccagagcagcaccgctacttggcacgcttactaggatactatttcacgatccaatatagagcaggacgcgccaacattgtggcagacgctttgttcagaatacatgaagaac

SEQ ID NO: 143394 - DNA, 271 bp, Glycine max
agctccgccaagaaagacagattttttttttttttctacaaacctcaagttctacaccactttcctcttgtacgactcctgactaatgtcttctaataaacagcttcgctgtgttctgcttaacaacatttgcgaaaaatgtttcgctcccaaacctgaaaactgcaccaccttcttgtacaaacggctaccactaaatatgattttcatacttccctaacatttatacttaggtagctatccagggtatacacatgctctgaaaactgct

SEQ ID NO: 143395 - DNA, 408 bp, Glycine max
  unsure (1)..(408): unsure at all n locations
agcttagggctccactttatattactattatattntaggggatggatgctctaaaacaatgtaacattgagacataggttttattcatttatctaataattaaattaatgagtattttttcaccatattttatttaatatggtttgtatagactttggagcaccaagatttgtttaacatggagttacattttttattgatctttttccttaagtttacaaatatttggcatgtaatactcttacagcgaaataagtttttttttaaaaaaaattgatgcatccttttaattaaatattgctacaaacgtatttagaaaatattacaagtgtatgtgtcttggggtagaaattaccggtagatagaccagatgccatgctgtcgcaacctactcttctggtggagggc

SEQ ID NO: 143396 - DNA, 446 bp, Glycine max
  unsure (1)..(446): unsure at all n locations
agcntgaatatggttgggctttctaagaaatctatggttttctagattacaacaaatcaccaagaggacaagagagcaattatcacatgaattacataaaatctctcactctcctctntccctaatgaaaaccatccccaattcaatcaacttttccaatgaaagcatntgtcaccatgattccttgattctttttcttcctctattcttattcatatcatttttcactcacttgactagtatttcactttttgccttttattttattctaataggaactaaataaaatgagcaagtatttatttcacatgtgaagataggataaactataattggtgacaatctttttaaactcaacaattctttaccaattcaaatcaaccattaaacacaagtnttccccccaacctaaatggaaccgccttcgtgcataatgtctctcttac

SEQ ID NO: 143397 - DNA, 413 bp, Glycine max
  unsure (1)..(413): unsure at all n locations
agcttggctagattgttaagttaattttatttaagangccacaaaaaaaaagtggcataagctcaaataaattcttccatgtgcttcctttatgaattatggcgagaggaaatttcataaaacaaatgagtctgagacaggctctaaagttgagactgtctattgctcaaatgtcagcttcaatatgtgggagtggaagaataggacaagatacaacttgtgattcatgggcctcaagcctcgataagtagttcaagaccacctagtgtctatgcttcatatctacgtaatatgtattcaagtgtttcaatctactataaataattaataatatttaactatatgtgatgtaaagattaatgaagacataatggctcagagctacttaataatttctcagattatggatatat

SEQ ID NO: 143398 - DNA, 444 bp, Glycine max
  unsure (1)..(444): unsure at all n locations
gctataacctgactatgcatatacaagcaattcatgtggagaatcagactggaaggtcctcgttgatagtctacactcgattcaacatggtttctcttaatctcacaatatagttgatagatttagaaagctattgaaattaaccccaatctcattggtgagttttactaggagacaaataaaccaagtaatccactctcttgcaaagggctcttatgtttcaaaattgcacccaacattttgatcatgttccaatctgtatttccaatcttatttctattgaaatgaaatagttttatttgcctaaaaaaaatcagcatatatactatttttgctcgaataagctatggatacgtggtttcatctttcctttttacctattaactttgtggcataaaatcggatcaccctctcaatncttatgatgaatcgcaatcttataag

SEQ ID NO: 143399 - DNA, 441 bp, Glycine max
  unsure (1)..(441): unsure at all n locations
cttggataagaagcttgattatgatgctttaatggaggaaaagaaagagagaatgggggagaaccaaatcgaaggattaaaagagggagagaagtggaactttgaagtgtgtctcataagactttcattcatcaaagttacaacaagtgttacacatgcttctatttatagactaggtagcttccttgagaagctttcttgagaaaacttccttgagaagcttctttgagaaaactntcttgagaagctagagcttacacacctctctaataactaagctcacctccttgagaggcttccttgaaaagattcctaaaaaagctagagcttagctacatacacctctctaatagctaagctcacctccttgagatgagaagctagagcttagctacacacccnctataatagctaagctcaccccaattccaanaatacatg

SEQ ID NO: 143400 - DNA, 362 bp, Glycine max
  unsure (1)..(362): unsure at all n locations
ggaattaattcgttttattagttcaacaatcaacaagtgacagcctggtgaagaatggttaaacattgtcaatggggactcaaagcctgtccgcttggaagaagttaataaagtatggcaaatctgacattttaggcttatctgcattttgtatcaacttatttcgttctcatttgtccaaaattgttaaaatcaaaattgatgtctaaattttgaagtcaaatgcttaagctttctctaaaatttatgtgtcaatatattgtatctagtaaaactgattctcagctataatatacttaggaatggactcactcacgcaccattttcaactaatnatattatcgtngtgacattcatggaat

SEQ ID NO: 143401 - DNA, 415 bp, Glycine max
  unsure (1)..(415): unsure at all n locations
gggctgttgttcttgtagttcccgttattcttgttgtttttngaagtgagggggaagagtttcgggtgaagaaaatgttccccctccacccctttatattttcgtacaggggttgctcgcctaggcgagctaacctgtacttttttttgttaggggaaacattaaccatgcccccccctcccttatgggttagcgtttgtctacttgaacctacttaagttagaatcaggcgtcgattacttatttaaaacaaacaatagtaataaatactgtgaattcaaaggatactgggctgccttccagcgaagttctctgcttgtccagcgccaggaagggacaacgantcggtgatcgtgaccctatcccccatttgcatccgtccctaagtacctgcaagtaggaaacaaacaatgtg

SEQ ID NO: 143402 - DNA, 446 bp, Glycine max
  unsure (1)..(446): unsure at all n locations
agcttaagggaaaatattttatttatataatttttatttataanaaatatatacttgtgaatatataaattacattctaaatttatgataaaaaaattatattatgatataaggttatttttaactattgataatttttttaaaagataaaaaaatttaatttataaataaagattaaaagaatagattgatagagataaaatattaagaaaaatctctaaaactattatcgttgaaaagcaatacacatttaaaaatattttcattcaacaattactaattaatctaaaacaatcacatatcaattaataatcagttatatacaagtttacttataaattagtttcttagttttaattttataagacatataatatgatcatgtatgccaattaaaaatgatatgccgtataaaaatatgtatacttattcaataccaattcaat

SEQ ID NO: 143403 - DNA, 248 bp, Glycine max
attgaccaaccgctagttattgggaatcgttgctacaactccttcaaaaccttattgatacattctgagaggctggttgtcatgtggcccataccgacgaccttctctatcataagccatcgtccattcttcttgtgaaatgcgatcaatccatgttgctatggctggactcaattcacgaaatatttctagactttgatcaaaaatgtgcttgctaggagtgcacgctgcatcaattatttatgaat

SEQ ID NO: 143404 - DNA, 457 bp, Glycine max
agcttctgtaatgctgcattagttggccactattttgtctgaagaagacaattgctagaccataacaatgctacatgcggtaaaggacaacggtcttttaaataaacatgttgtatatgcaaaaacaatattaactcaactgtccacaactgattgcataaatataaaaaaaacactttatatctagaatgtatctgaacaaaatgattgtcatagatgtgaccgatacaaattatgcgatgcactgaaaaatctgctagtggttgacttctaagaggaaagaatgtcatgctttgttattgagacaatgatacaaggattacattataccttgatgcaatgacatatcccatgtcggttatatccatccacttatccatattcacctgaatgaaacaaatatagacgtcaaagttaattttaaagttaactcttaaaaaacaaaacataaattaca

SEQ ID NO: 143405 - DNA, 366 bp, Glycine max
  unsure (1)..(366): unsure at all n locations
agctnntcaaaattattttcanaacttctactcttattagaggtaacctatgcacaaaacagagaagggtgttagatatacttcttcaggaatagaggcatcttttggaccggtaaagaactggcacaacctcaaaaatataattaattgcaaatttatttgcatcatcccctctagaatcatctacccgtagtaaatgatttaccaaaccagaacaaaaattatagcattcaatatgctaacatgcagctaaggcaacaaaattgcaataaaaaccagtgaattaccagaacaaaagaacctacgatcatcctcacaaaggcctccaagatcattgccatctggaattgatttatcaaacctaac

SEQ ID NO: 143406 - DNA, 307 bp, Glycine max
agcttgtgacgattgatagttaccttgtttttatagatacgaggatcgtggttccctaggagagcgcgagcacctatggttgatgacatgctaccttggtgggattatacacacgttgtggacaccgattatgaggtgtttctagtaatcggactacaagctcgaacaccaaaaaatatcgacgcgcaactccgaggttttcgagacacacaaggaatcaaatgtgaacatcactgcatcaattattgaagatcacgagcatgtcgctatgtataaaagggatgatgatgacattcacgacgttctg

SEQ ID NO: 143407 - DNA, 439 bp, Glycine max
  unsure (1)..(439): unsure at all n locations
agcttgtaactntagatctttcatctgcacaatgctcttaatatttgaagaatatccctgtgggactttaacacaacgtagacactaacaaaaacttatcttctcctttctggaaaaagtatgacaagctggaggcaaatatattttcttaccatcataccttggatgtaactgggcttgtatacccatctcagctagatcttgacgagtattcaaaccatcttttgtcttgccttgaatgttaaggaacatcccaatgacattatcacaaacaattttctctacatgcataacatcaatacaatgtgtaacacctagatcagatggaagctcaaacaaaatcgaccttttctttcatatccaagtcttactttttttccttcttttaggtatttccaaatatagtattcaagtctttaacccgctcaaaaacctgctg

SEQ ID NO: 143408 - DNA, 443 bp, Glycine max
  unsure (1)..(443): unsure at all n locations
agctttcaagatccattcttggaatgacttgatggctgctctcatcacgcagtatcaatacaacatcgacatggctcctgatagaacccaattgcaaaacatgtgtgacaaggagcatgagtccttcaaagagtacgcccaaagatggagggatctggcagcccaagtagcacccccatgatggagagaaaaatgataaccatgatagtagacatgttgccagtgttctgctatgagaagatggtgggttatatgccctctagtttcacagatttggtgtttgtgagtgagaggattgaggtaggcttgagaaggggaaagtttgattatgccacttctataagcacaagatataggaggtttggagcaggtggagccaagaagaaggagggagacacncatgttgtaacttcatctcccacatggcctaaatcctaacaaac

SEQ ID NO: 143409 - DNA, 304 bp, Glycine max
  unsure (1)..(304): unsure at all n locations
tggattttcaagggttgagaagtgaaattgataatgaggtaattntggacaacacctccctcccacaagtctattacaatatatttaaacttgctcaaactggatttacacctataatttcaccgaattaaaatttgacttctcaacacgcaatattaccctaaaaatggcatcttgttcatttaggtattagtctntctatcttgcacagccaagctttctcattattctaaatgacatgttatctagggtatactcttttaacttcaatacaactaattaaatatggcttcgcatcgtataa

SEQ ID NO: 143410 - DNA, 395 bp, Glycine max
  unsure (1)..(395): unsure at all n locations
agcnnttctcgggccattcctgcgaaggcaaacttttggaatgttaagttttaccaagaaatgctacccttaaaacaaaaatggcatacaacgttcttncaatcataccaacatcaatgtaaaattaaaacaagcttatgcgcatacttcttcaccaacggtcacttacacaagacattcttataactaagataaatgccccatatacaatcaaagcaccttcgttacctagattatctacatgtaccttcaaggaggtatttgtacctacatcacacacatttcctttgctaaattcacatacatgcatactctaagcacttnggctaatcaaaattcacatacatgcattctttaaagccgcatgcaaattaagtattattttctttgctcac

SEQ ID NO: 143411 - DNA, 425 bp, Glycine max
  unsure (1)..(425): unsure at all n locations
agcttatcctnttcattcttgatcactgtgaggtctgtcttcttatgaaccacttggactggactcacccactggctgtcagaaaaggagtagatgatttccgcccgtcagagcttggtcactttctttnttaccatatctaaaatgacgaggttgagttaccgctgtggccacctcactggcttagctccatcctctaaaagtatcctatgcatgcacgtagatgggctaataccaggaatgtctgctaaagtccatccaatggccttcttgagcactagcaacaacttctcctcttgctcagcagcaagggaggcagagatgatcactggaaatttttccttgtcctccaagtaagcatacttgagggttgctagtaaaggctctaactctggtgtgggtggtggctgaacagtgggaggaac

SEQ ID NO: 143412 - DNA, 456 bp, Glycine max
  unsure (1)..(456): unsure at all n locations
agctntgcggatttggtcttcgccagtgaaatgatcgatgtgtgtccaaaaagaggcaaatttagtcatcttgcttggacgaatgaganaactggggcaaatgaaacggtgaggatgaaggagaagcccatgttgtgactgccattcctatatggccaagtttcccaccaacccgacaatgtcattacttagccaataacgatccatctccttacccaccacccagttatccacaaaggccatccctaaatcaaaccacaaaacccacctaccacacgaccaatgctaaacaccacttttagcatgaaccgaagcaccaaccaaaagggaattttgcacgcaaaaacctttagaattcaccccaaattccggtgtcatatgctaaactttctctcacatctactcgataattcaatggtagccataacccctgctatgtttcctcaacctctattt

SEQ ID NO: 143413 - DNA, 338 bp, Glycine max
tgtagcttaggagagctacaaccctgtggcacatcgtgagggacaggatggaggagaacacttgatggactgcacttccattctggacgtgttctgcacttcactatccatgtctcactttccgtactagcggtccgtgaccctgaactcctaccatacatataggcgttgcttatataaaccaacacatcccacctgctaactgagcactgctgtacactattggtaacgagacccgtatcaccaactatgatgaaacttggacacttatacctgtacaactaccatacatgcgagaggcctgtgctaaacttcctcgatcatatactagatggatc

SEQ ID NO: 143414 - DNA, 156 bp, Glycine max
ccgctcacttatttctgtatggaagacccctctagtcaatggctgagaaacgattcaaaattgctaacgatatataagtatgtgggccactaagtctatcctatgctgactatattacataaacccatgcatgctctacgggcggacacgtgtatg

SEQ ID NO: 143415 - DNA, 365 bp, Glycine max
  unsure (1)..(365): unsure at all n locations
gctctacatgtctagagagttctatagagttatttgttcaanctccaaagaggttgagagatattgttgtgtgaagatctgcccagactactattagaaaagaacccgccctaacagcttgagatgagttngtgagtgataatgaagtctttaaagtggaagaacatccncctacttgtattttgaatctttatcttttcttcttttgtgtaaggaagagttatggaagctaaacctttttggatctttcttgtaggtacttgattgtaatatctttctatctatctaatgatgatttgcgtattctctgtgctataagtatttcattctagtatgcttataccttgatcacgtaaaagcatgct

SEQ ID NO: 143416 - DNA, 428 bp, Glycine max
  unsure (1)..(428): unsure at all n locations
agcttgtaacatgagttttatagatatgtgttatttatnntggtttaaattaagactacatgttgttgttagttactgtgtgcaatattgtattacagcgtaaaagtatggtgttactcatttataaaaatgtcattgtggtattctaagtaaattcaactgatatttggatgcagtaatgcttatcatccatcaggtttcagttttatgttgaatgtatgtatacttcatgcaatggttatatttagtgtcttaagaagatgtggtgtaagtcaagtttagtgtgactttgtattaaatccttacttgtggttaaatggtatgacagtgtaatggtgcaacntttaattttgagtcatgataatcaacttctgacgctatatctataacacatcatcaatttgcatatgtgatattctgaacatgac

SEQ ID NO: 143417 - DNA, 354 bp, Glycine max
tgcacaaatgagagacaccgaagttggctctccctagctgcatacctatagtggacagggctatcacgtgctgcatctgacggacgaagaccgggcccattgcatcctgattcgatggatctgaaatgggtggggagaccgtgggaggaggcttcgaggtccacgttgaggcagaggtgaggtatgcggaatgctcagtgtagacgtatgcgtggatataaataccgtgtaggttaacttctccgttgccattggcggcagcctattctgcagtcaaaccgtctgacacggtgacttgacagctacaaatgcccattgatgataggagggagctgaagctcttatgagtctcac

SEQ ID NO: 143418 - DNA, 375 bp, Glycine max
  unsure (1)..(375): unsure at all n locations
ttaagtcagctgctgcatgcagcttgtatagataggggtcttacggaatttttatgttcnaaacgggggtcaatttggcacagtgtaatctattgtctttttaatcacctttagaccatcttgtttaaaacaagccatgtgatgcttatgtgttacacaagcttcgtggctatgctagattactttgttaatacaatgctaatttattcttattgagtaattatcaatgatatgagttagctttttcctttaaaaacaaatctaataaatattaaaacaagtttttgtaatatacaatatttggtactataattttaaagcacattgattgaatctattaatcttgtcgctgttagatattataaaatgaatgtt

SEQ ID NO: 143419 - DNA, 361 bp, Glycine max
  unsure (1)..(361): unsure at all n locations
agcttaaggaatgtcatggaaccattatatattctcttatcacttccggaacacacgtgaacccatttataggttaggatgagtttatcgtcattgnggtcaccacgaatatgtgtattaatccatatggaatcaaattggggtttatatcgagatgtctattgtattgaaattcttcttgtatgataatgtgaaattgtctgtgggggtttactccccatggattgagaaacatatttgcacaatctttttttgttttgataggattaacgtgataaataattatattgagatcatgaaattatgattgaaattgtgtatgaatgataaattcaatatgtgatgaattgtgggataacat

SEQ ID NO: 143420 - DNA, 77 bp, Glycine max
attctatttgtctgcagtacctctcgatatggttttgaggctatggtttctctcaaacaagaaactgggacccctga

SEQ ID NO: 143421 - DNA, 339 bp, Glycine max
actcttgtggagaaccttctttactatctaaatgaatccacaaccataaaatttatcccctcttaccatccaaataatgcgccaatggtttatcattacagttacaacaaatcaaacacaagtggtgcacaaatcatacatgaatggtgccaatggtttttcttttcaactactatccacaaagtgagatagaggttatggattaaacaaatcaaagcacaaaagtaataatgttatttgtagtgtgagaaaataacaattgaagattgcctaggcgcggaaaaaattcaattacacttctcccaaaattgagataaagcttcaagattaagacaatac

SEQ ID NO: 143422 - DNA, 365 bp, Glycine max
tagaacccatgctagtgcaattcatgaaagcaaactcacacccatatgaatgtatgaatacctgattctgatgaagccaaagtgaaatcatagtttgttgcttcaaatgagacacattgctctcagattgatgccaggttgtttctacaaacaaagacttgcttctagattgacttacgatccagcctttgaacataatgttttggagacatccaacgctttaccaatggtaataaggggtttgaatttgaattatgaacccgtaatcaatattcatatagttcggatcgattaccatccacggaactcttgaaattcatattcctaagtgatgaaccttctacatatgactgcgtaatcgatta

SEQ ID NO: 143423 - DNA, 417 bp, Glycine max
  unsure (1)..(417): unsure at all n locations
agctcgccaattntggtctagatctaaattctattattacaattcttttaggatgttcctcaattcttattaaatgctattttaatggatgcacccatcctgctttttcacagatttttaattgttttttgggggtaatttcccctccaattcacccaaaaaaatgttaattgttatggaactattaaatcaatgcaaaaatggctgaaaaattaatatcaatagataaactaagatagcataaatcttatattaacaaaaaaatcaccaactaagtctgaaatgctactcaaaagtgtgatgtgaacatgtgaattgcaacaccctgaaatggaataaaacanagaacatattttagcgttggatgtaaaagaacaaataataaccaataatgttgaccatatatgatataaaaaa

SEQ ID NO: 143424 - DNA, 374 bp, Glycine max
  unsure (1)..(374): unsure at all n locations
agcttgaaacaatcaattatgttacgagccaatactttacttttaagctaagttgggtggattcatctacatccctatttttttttgcacttctnnntacccattcatcacggttcttaatttattgcaagagtntggggaggtccattactaaatttgatctctttctttttctgagtgagggaccattaagacaagacctctggataaagcttgtctttaaaggaagttcacctttcttgagcattatatccgcattcaccttgcttaaatccttcattgatttaaaaagcttcctaatataattccatttaaacaatttcgaatgtatgagatgctgatcatatgggatcaaatacaagcctttttttcta

SEQ ID NO: 143425 - DNA, 318 bp, Glycine max
gatgtcatatgactagccagactacttctttctcagctgaggacggcggagtcaatggcctatctatagaccgtgggaatgaaaactatccgtctttcacagtgagtgaccttgatagtcttatgctgaagatgaccgttactgcaattgtcaaccttttaccctatcgtgtagggagaatcttttaagacgataccttacggattattcttctcactctaaatgaagtgaacaccattgattatgtcattgacaaacatctatatcaccatttgcttcaatgccagacattgatttttatatagtctatatcatcac

SEQ ID NO: 143426 - DNA, 438 bp, Glycine max
gcaagcttttctctgtacacctacattcctatacacgaaaaactttttctggatacacacgcattaaaaactctttctctttatatcaacatagtctaaataagacctctattccttttcaaagatttctttttttttatttctccaacatacactcattgtttatacaaaaaattttctttatatacactcattgctcacacacaagaatttcttttcacacattatttatatacacaatttttgcatacactttttatatacaaaaacttttttcttttctttatatacagattgacatttgttcacaacgcctctttcttttcctattcttggtgttatcatgatgtttgttcgttttattttaggacgacgttcctaaatgaaaactctaaacggttccagaatttcaacaaacattatcgacaataacgaagt

SEQ ID NO: 143427 - DNA, 309 bp, Glycine max
ggatctctaacacagtcttctcggagaacgataccctatgcccttgcagagacggattgcatcactttggtcagtatgaccccataagcaagatattaccggcataccatggcaaagaattgttgtgttcttttatgcaacgccactcatgtcagagccgcaaactatgtctatgcatccatcgcgcccacgcacgttaagttcttccctcggactatctccatgcacgggatatacatactctttgtctatgcacgaactgccttcattggtttatattcagatcgacattcgatagcatcgcctatc

SEQ ID NO: 143428 - DNA, 401 bp, Glycine max
  unsure (1)..(401): unsure at all n locations
agctttggacagtattagaaattaccaatgagtttgtatgtattctagaaatattctattaccttctcatatttgtaactctataaatagccttagaaaacaagtgccgatttcgagtactagctagtcttntaaagaagtttttatgtttcccttgctccctcgaaaatcaaatatggatggctccttcttccatttcaaagcttgcttttcttatttatacttgagacaacttttacttgtataggagtgagactctccttttaatactttcaaagacgacttactccactttataaacatttctgagtcaattgcacccaaatagttggagctttccataagcatatcgcaaggggtatgtacgcatctaaatatgattcttacaattgaattttttt

SEQ ID NO: 143429 - DNA, 459 bp, Glycine max
  unsure (1)..(459): unsure at all n locations
ggatcttagcactgagctgcaactttaatgctttgccaaatttatgtttatgaatagaaactcaataaccctacaaggaaataaggcatatcccaaggagcatagtgaattaatcaatcacaatgaatattacctgcattgatgacatgcctctcctttgattggatcatatatacggntcccatcttcatcatatccatctacatacaattcccaagtactctcacagtctcccagaagcttatcctgctcttcagtgtaaacttccgggtttgtaccttctggtataacaatatctacttcatctttttctttacttgctgactcacgaagaggtctctcagcatagttaattagtaccagactcattattctgcaaaccaatgaaatatttcagatatatctaatagaattactganacatcatgtcaacacaaatgatgaaatgtgataatgact

SEQ ID NO: 143430 - DNA, 152 bp, Glycine max
tatgggacacccactgatcccttcgtatgaatttacatacttggtcaaatacctgtcacgcttacttacctcgtgcatgattggaatatcattccagcatcctattatgtgatatacatctacattctacacaatcagactctctatgtctg

SEQ ID NO: 143431 - DNA, 409 bp, Glycine max
  unsure (1)..(409): unsure at all n locations
agctttaaagcaccactcatacgatcatcattatttagattagnatccattaaattaaaagatatttatcatctttaacttaagaaaaaaatatataagtaaataaattttaattaaattcacccctatatttatttaatgaaataaataaattataattttagttcctttttatttttttatatgtaattttggttttcttttttttataattntagtgctcatattttaaaaagttatattttttgtctaatattcaattntttctaattttattttttattttaattaattaaataattttttaataatatcttaaatgaatttgtaaatatataggatntaataggattaaaataaaaacaataaaaaatatacaaatttgcaattaaatcaaagttacagattt

SEQ ID NO: 143432 - DNA, 216 bp, Glycine max
  unsure (1)..(216): unsure at all n locations
ctcattaacgctttaatttatgagagaagagaaattgttttcattaagttcaccgctattttnttctactgttattcaattagacatagtcctatgccagagtaaattatactaagtaatttcgggaatctttttgttataaattcaatgcatccccatttataaagtctattttttgataactatggatatatcaatatcattcttacttatgag

SEQ ID NO: 143433 - DNA, 359 bp, Glycine max
cggatcttaaccacctgagctgcagctgaattgcagaagtgagattttgttttctccttgagctggagtttcattgtaattttacattcgtcaaacttcttcctgacaatgtctctgaaatgctggtttttttccattatctcatcttaaatttttgttaaatgtttgttttataaaatttgttaaaggtgtaattacaggattagcccttatagttaagtgtagcttctaggccagagtttattttgaacaatattggtttctgggactgcctttaataatgtagaccctatcctacctataataaattattgaaatgtgacaaatggctgataacacactgtagtgactatatatgg

SEQ ID NO: 143434 - DNA, 273 bp, Glycine max
  unsure (1)..(273): unsure at all n locations
cgacaagctagtatgacatcactctaatgaaggtgcacagtgcccatgatgataacnatattgggaatcaggctagatgctatggtcatacaattggattgacacgatatcagaacaaccagcactagcatctgcaaagatgagggcacctatcaccctgctaaccaatataacatagaccatggtgcgccatctagcctgtcacacacgctgatgccaagtctctatgaccgaatcacgaagctggaagagactctacctcaactcatgcga

SEQ ID NO: 143435 - DNA, 398 bp, Glycine max
  unsure (1)..(398): unsure at all n locations
agcttncttaatcacctcattaaggactatatcttcatgtatgatgcgtctgccttttatgaaagctgtctgcctctcattaattagaccagattcacttgcctcaatctatttgctaattacttagttatcaccttgtacatacattcaatcaaagagatgggtctgttgtcatcaaatgactggggatgtttaattttgggaatgaaagctatgaaggaagcattactgcctctagggaaactgccatgtacatggaaatcatcaacaaatcttctgaagtcagctttcagcatatcccaaaattctttaatgaatntgaagttgaaaccatcatgtccaggacatttgtccccatcacaactccatgcttgctttttgatctccaaatctgaaaa

SEQ ID NO: 143436 - DNA, 431 bp, Glycine max
  unsure (1)..(431): unsure at all n locations
gacactctctagaactcacccgtttgtatgctcgctatcgtatgcgcttatggctgactgtatctcctattacggtcgtccccttcatcacgatggctgtatgtcaattactggcactgccatcaaccactcagaacaccaccttcgctaagcacactcccgtcgacatggccttacacccagagaagggaatatgtcatgactgctatgaatgctgcggacccaaccatcattgacacgccncattctaccttctcattgccgtctatgaagactacgccatgtacacagcacccactactgacccatagccattctcttctatcgctctctcatatgactataaccaccctgctcaattaacccttcatgccctaacgtgtcaacccacttatgctaccctgcgcgttatggcctccacaatgacatag

SEQ ID NO: 143437 - DNA, 367 bp, Glycine max
  unsure (1)..(367): unsure at all n locations
agcttgagctatataagtaagacgctttatttattttatnttacatcnctaaccgccataatatttaacaatttggcacttggatgaataaatttagcttgactccctgccatctctttgtgcttgcatgtgtagaatgtgtgagatacatagaggaaatgaatgttcggagatatcgaattggaagattatatatgattnttcacatgtcaacactgactaattgcaagaaatttccccctttatctgaccttcttgtngatcttcaacagtgaacatcctgcgatcaatggattcaagtgcctatctactggaaatgggttctcaagagtcctgctgaaacctggctatacagcaatgttactgg

SEQ ID NO: 143438 - DNA, 453 bp, Glycine max
  unsure (1)..(453): unsure at all n locations
tgcaagctntactatgcagagaatatccaatgatattatcttcatctgacttagcatcaaattttcctaagttattctttccattattcaatacaaaacatntccaaccaacagatatgaagatgtgagatgtttggttttctgccattgaataaatcatatgggagtttctttaaaatgggtcttattaaagccctatttaaaatgtatcatgcagtgttaacggcttcagcccaaaagtatattggaagaggagtatcatttaataatgttctagaaatctcttccaaagatctagtttttctttcaacaacaccactttgttgaggggttcttggtgcaaaaagttatgctcaatcccatgcttaatacaaaataattcaaattctttattttcaaactcacccncatgatcactcctaatagatataatcttgagattatcttattttg

SEQ ID NO: 143439 - DNA, 349 bp, Glycine max
cattctgaaacacacttaacggtggtggagcagaacatttaccaccaaagatatgaagatgtgagatgattggttgtctgccattgaataattcatatggagtcttctttacaatgggtcttattaaagccctatttaaaatgtagcatgcagtgtttacggcttcagcccaaaagtgttttggaagaggagtatcatctaataatgttctaaagatctcttacgaagatctaattttccttataacaacaccatgttagtgaggggttcttggtgcataaacagtatgctcaatcccatgcttatcacaaaataatttcaattcttttatttcgaactcacccccatg

SEQ ID NO: 143440 - DNA, 434 bp, Glycine max
  unsure (1)..(434): unsure at all n locations
gatccttaagtcacctgcggcatgcaagctgngatgctttaatgtgttggtagatattcaaaangggtgtagaatcaaagtacttcgaactgacaaaggacaagaatatntnanttcatatacttttcttgaccagcatgggattcaacatcaattggcaacaagatacatgcttcagcagaatggagtagctgaaagaaagaatataacaatcatgtatatcgtgaagcgcatgtcgaaggccatggaaatgcctaaggagttatgggcagaagcagttgctacaattatttacatttttgaataagtgcctgactaaaagtgtttgtgacaagacgccaganaaagcctataatggacagtgaccatcaattagacatcttaaagttttgggtgcatacatatcacatgctctagataacttaggaagaaat

SEQ ID NO: 143441 - DNA, 373 bp, Glycine max
  unsure (1)..(373): unsure at all n locations
catttaatatgaatggacaaaaatacccctgctttaaaatttaaacacaaatagcgcgcgcccagcattccttacacattttggttctttttattccctggcccgatttgttcctcgtagtggcaccatttccttcaagtttggccgttggagcttcttctcctcctttgggtgtcgatattgaggacctgcattgaaagggctgctccaacgttgaggtaagtttcttctccttggtaatggcaatttcattttcgcgttttgtatgcttaccgatgtagnttgaccgtattataaataagaattatattatttaatccgatgtaggtgattcgtattacagaaataaaataggaatgatgtaacgttcata

SEQ ID NO: 143442 - DNA, 245 bp, Glycine max
  unsure (1)..(245): unsure at all n locations
aacgtggattttttaaagtctaaaatcacacagagtggggacgtgngtaagagaaattaagggcaaggcttaaggttctctcttaaaaaatgaagaacgttatggccatagcttgatgcctttatttaaatcaaattatctgcataaaggataaaaaatttaaccaacgtttatttctctaagaactacgtaagtctgtattccttatcccaattgagaaatacgtaggaacaagggaaacaccc

SEQ ID NO: 143443 - DNA, 438 bp, Glycine max
  unsure (1)..(438): unsure at all n locations
agcttatgctgcanacatctacaatagaccttctcaatcttattagcaaaatcagccacaacagaacaattatgacctctccagcaataagtcaattcccgcggaggaatcatcccaaccttagattgtcgaatccttcacaacaacagcaacaacaaccacaaccttattttcaaaatgctactggcccaagcagaccatacgttccttcaccaatccagcagcaacaatagcaacaaccctagaaacagcaaaaagttgaggctcctccgcaaccttcccttgaagaacttgtgaggcaaatgactatgcaaaacatgcagtttcaacaagagaccaaagccttcattcagagcttaactaatcagataggacaattcgctacacagttaaatcaacaatagtcctagaattctgatagaatacattctcaatctg

SEQ ID NO: 143444 - DNA, 133 bp, Glycine max
cgcacacagacactaccacatacacatgacgcgtataaacctacgatccactgttggcgagcgaaacatgagctcacttaatggcacgaatcccatacactgattgctctatcaacatcaggttaccatcaaa

SEQ ID NO: 143445 - DNA, 431 bp, Glycine max
  unsure (1)..(431): unsure at all n locations
agctntantcagctngttgaggattgtgaactttatatattttgtgtagactcanccatagctctctgtttaacatatggatgcccagactgggatcaagagactatgcccccgatcacgacatatgttgcatgtataaggtgatattgaatgggaaggtgaaaccttctactcagtctgaacctagcctacccaatactcaaactatctaacaataaaaaagacgcacctgcacatcatttgaccctaaacccttagaccaaaccaagaaacccaaaatacaaccaccatctaaccccatacgtatagatcttataacaacctaaataatgaaagaaccagactctaagtctgaacctaaatctctaccctactcaagagatcaaccattaaaatcaaacacctttattctttacctatacctacaccta

SEQ ID NO: 143446 - DNA, 214 bp, Glycine max
gttattgataatgacaggatcttaatcaatatagctatagagcctatgggagaagaagcttctactgtagagctactgtcctctctctggaataatgtggcttacactctaaaagacgtggctgcacttgttatagcgcttaaccctgtggacggtgaaaggaaaccagacatgggctatcattttgacccaatggactaggcttaagacaccc

SEQ ID NO: 143447 - DNA, 295 bp, Glycine max
  unsure (1)..(295): unsure at all n locations
cacaaaaagaaaaaacaaacatggaaaataacaaataggaacaatnntccacccccacaaaagacaacagaatggaaaaacacaaacataagcataagcaaaaaagagaaaaacggactgaaaaaacgaaacagcaggatataaagaaaggaagataaaaatccaaatgaaagcaaaccccggctcaggaagagaaaaagagcagaaaatcaagcaacgggcaacttgcacaaaaaagaaaaaaagttagagcgcagagagaaatataagggccaataaaaaaaaatcacgggaa

SEQ ID NO: 143448 - DNA, 213 bp, Glycine max
ttaccaaactaagcctatcactacatatctatcaataaatcataaggaaaatccgacaccagatacctaccgtattagggagaatttctctctatacactaggcaataaacattctctatcgcatgatcttctagaccttaaaaatacacaacaccggtatactacctcaccatatagagaaggcgtctacagatactcgtgcgttcttgagt

SEQ ID NO: 143449 - DNA, 414 bp, Glycine max
  unsure (1)..(414): unsure at all n locations
gcttataatatcggacgttaggccttctctatattttctacagctttgcacaaattattgaaacataattaaggacaaaaaaaaataccangtgcgcctcacttgcaagatttacaattggaaatatggatggaatctcaaatctgatacgtcttctattaaagggctttatctttatctttttctgcttttgatgtcaatctgcaagcaggtaattcatatatatgtatttaaagtatatacctgtcaataaagttctctttgtctaaatattactacatatccactataaatggtcacatgatctataataaagctacatgtgcttaattgatctatactttcataggagaataggaatatggtacataatatattaggtgcgctccgagtgtaattcatatagatgtaatg

SEQ ID NO: 143450 - DNA, 264 bp, Glycine max
  unsure (1)..(264): unsure at all n locations
actctcantactcacgctctgcttgcatgttataatatatgacgacacgcctcctctgtttgttaggagaagttgctctctctataataacctaattaacggcttttattaataccaggagttggaatcacactggacggttccattagaaactattgaccggattatactggtgtgacctgaccgtgtgatatgccgtacgaacacgctttcctgcgggtggctaacacactccatcgtgtttatcatatggataattatgca

SEQ ID NO: 143451 - DNA, 372 bp, Glycine max
agcttatgagagcgagacatgacgatttatgtttttttttatctaattctcacgctaatctagtaaatcttgtcatattctttatatagctctatgaatttcccaccgattcacgagtaaagcgcatccctgtaacacattcgtgtggtattatggaatattatattatgtttttttcaaccatcatcaataagccaatatactaaaatctagtagatatttcatgacacaaatatactgaaagcgcactaaattcaaaaaattaaaacaatcaaatgtacaatttataggtatgagaaacaagagaaatacccacttttataactataaaattttaagcatgaacaagggataaacacattatttcaaata

SEQ ID NO: 143452 - DNA, 390 bp, Glycine max
catgcaagcttgtgagagcaacacacgataattgctgttgttgacactcgaaatgcccgctcttctgcatgaccctgggaaccctctgcataaccgttatgtattacactttgagagtcgacaataatgggcgggacccgatacacttgcttgtggattatagaaatatggtatatgaatggtgagcggcgacaccaatagactagagaacttatgccagtgagagatatttgcaccctgatgaccgagtagcgctgtatatgaaatcacaaacaacacttatacgtacaaaatattggtatgagaatctcgtgaaatacgcacatactttaccataatccttaaaatgcttgaatcgagggattaaagcacatcaaattttctatcatg

SEQ ID NO: 143453 - DNA, 338 bp, Glycine max
  unsure (1)..(338): unsure at all n locations
cagcttcccagatatggagagataaatcctttgttggttcttccttgnaggcacttgatgtaaatacatgtatatctatttagtgaagntatcgccgctctctgcgctaataatacatnatttcagtgtgcttttgccttgatcacgtaaatgcatgctttgttaggatcattcaacaatggaaactaatctgattcttagaacttgataggacggngctagtttatcgtattatcacgagggattggggtaccggaacatagctgttgtatgtttgtcttactggcggtctggtcgagattaatccaacaagaggaatctgaggatgatgcttggtc

SEQ ID NO: 143454 - DNA, 240 bp, Glycine max
ggcctatatgtatgtgcttgaccgacttccatgagcatgagagagatgattttagataacttcattgccctatgctatcatcacaactcttgggctaacacttgcaaacaccaatacgagctcatccatgaacatcaatcgaagtatcctcttctgaagagaaaatctttcttctacttcgtattcaaagagattgattacgggaccgagagtctcttgagtagtaagaattgctgaaca

SEQ ID NO: 143455 - DNA, 378 bp, Glycine max
  unsure (1)..(378): unsure at all n locations
attgatcaaccatctctatgctctgaatcaacgcactttctgttgacaagaaacatagaaaagtgccaaagaatattggtccatcatctaaaagagggtggagctctaatctgaaatatagtgctatgtttaaccagaaaactaatatgaatgtttacaaatcaacaataaatgttaagtgcacataataagcaccaggtaccatataaaaaaagaagctatattttgattacaaaaagtacaaattaaagtatgctatcagatgtaataaaaaanaaaggatggtatcagattcattctttgaaanactaatatcctgcagcgttcctggttctgacccaacatttacctcaaatgcacaattttcttttaaaacta

SEQ ID NO: 143456 - DNA, 89 bp, Glycine max
aaagacgcatacatggtaaatgcgcagtgagtgcctctcataccatataccttacagagtactgatccatgctatcttgacgggtgtac

SEQ ID NO: 143457 - DNA, 417 bp, Glycine max
  unsure (1)..(417): unsure at all n locations
gaccttaagcacctgggctgcagcttgactcctgaacttaaacttgatttgagttcataaatccgnttaactctactatctacaagcaccacatgccaggaatttgtggctcaaatcatcttgcttgaactttaatggcttcaaattgacacaaccaaatcttttcacaccaaacatcaatctcatcatgaaatttggcggcagaatcatgatcttcaattaaatcataccttttaataagaactgtttctaatcattttaatctttatgatctcaattccatgctcatccatgataaaataatttttttctttgaaagaaacttcatatccatgtcttagcatttgtgaaacactaagcanaatttgatccaattatggaatgtaaagaacatctttaacaatcatcatatctttc

SEQ ID NO: 143458 - DNA, 407 bp, Glycine max
  unsure (1)..(407): unsure at all n locations
agcttatntgtatatgcatgtgngagttcagttgtgtttatatttctgaatctggtnctaggctcagaatcagaggttcatcgtgcttctgaggatgtgttggttcaaaaaccaggcagccagggacaaagagacaagtcgaagttgatttatatttcacaagttttgtcgagaaaaaaatatccgatatctttctcctcccaggaatcccaaatcattacagctacctgaaaatataccacctagcattacaaaacttccagaggactgccactatgaaccagaggatcttgtcaatttatttcttttgccttatgtaaaggtattttattaaagtatagaaattagtttcaaatatctctatcccgagtataattatntggttgtctgatgcttgctattctttc

SEQ ID NO: 143459 - DNA, 215 bp, Glycine max
atgacaagctcagggtctgatgtacatgtctggctaaggcgacatgccacaatgtaatggacaagactgcactgtactatagacataatacattacccccacattgctatttatcagattctaaggaaatatacgaccatttgtctcttcccaggcacgcaattcatttcagatacctgtaacagtcctatgctgattcaccaaactcaactatg

SEQ ID NO: 143460 - DNA, 404 bp, Glycine max
gctgggcccttgctaccctaggggttgatgactatctttgagccacctccacacagcacctcgcactaagtataagggagtttctaatgggaaaagagcaaattcataataagggttacaactactcttatgaaaacaacattgcacacatataaaataattatgtggaaggagaactttttctacaattctcatgatcaatgtgattgatagttgttaatctgatcttctagttttctcctgaatttgagatactcaaggtgcttgtatccttatgtgatatatatatgacgtgagtcatgtatgcatactcacgtgtcttagacctgatattctcatcaagggtcgaacatacactagatgaacacatggtagcttgagaatcatgtgagtacaactaatct

SEQ ID NO: 143461 - DNA, 364 bp, Glycine max
tcgattacacttatttggtatacttatttggtaatcgaataccagtgactatttctgaaaaaaatcaaaagatgtaactcttcaagaacgctttgactttttcaaatgggttttaagtttttttaaaaaagttataactcttctgaatggccttcttgacccgacatgaagagtctataaaaacaagccttcgttttgcattttcaatgaatctttcgaacaacaatcttatgcaatcctttataagccttgaaatctctttgaacttcttcttcttcttattctttgtaccaaaagatttcagaagttttcttggtttctaaacccttgaaaactgtgctattcatccttttcattctcttct

SEQ ID NO: 143462 - DNA, 364 bp, Glycine max
  unsure (1)..(364): unsure at all n locations
gctagagcttaactacgcatacctatctgatagctgagctcacctgactgtgatgagaagctagagcttaacgtcacaccccctgaaagagctgaactcacccccagggaccaaatacatgaaaatacaaaataaaatccctactacggagactacgtccaaagcctcagaatacatggctacaaccctatgctactagaatggccagaatacattgcccaaacaaaggaaagacctattttaatatccacgaagattatcaggctcatacttatctcatgggctcggaacctaccctaaggctaatgagaaccgtanggcctactcttgcatctctgggccaatctacctggagtcttctatc

SEQ ID NO: 143463 - DNA, 263 bp, Glycine max
ctgactgaatcacttccatatcactcccgtcattcatgaactaccgctctacattctacttcaaacaagctctaagtaagaaagtacttggggcgtgtatagatctacttaccttaataaatatatcctcaccaccaagcactatatgaataacattatcaatgcgcactttcatgttgtgacatttattaagcatgcatacccaaggacaaacacatctaaaggcccattcttgacatcagctctatatctgatactatgta

SEQ ID NO: 143464 - DNA, 391 bp, Glycine max
  unsure (1)..(391): unsure at all n locations
actttaatacacttctgagcttgtttttcttttttttgctcttacatacnaaagttcgacaattaaaaaagataatgaccccaanttcaactcttttccatctttaaaattacagtgtaaatctaagttctttcaactaaatatacattctaaatcgtaaaattatatatttgtataaataataagaaaatatatatatcggtggaaaataatttacattagcacattcttaaattacagcattgaaaattatcagtgggctttgaaaaagtgtatcctcatttcctcgatgttggctataatcacacaaaaaatttatcaggatttactacggtgtagaaaataaaaaaagaagctaattttatttttcagaagttgtgttgatgaagaa

SEQ ID NO: 143465 - DNA, 222 bp, Glycine max
gataatgaccgcgagcctacccttttgatcgattattactgtttcgagatggatgatagttggctcaccttgaactgacactgtatatcattggattctaggcttgggaagatagtgaaacttctatcccctgcatggctgaattttacatgagcacgggaaaggcgtaccgcactgactataatgccagggttaggcattagcgtcttctaatctactcaa

SEQ ID NO: 143466 - DNA, 440 bp, Glycine max
  unsure (1)..(440): unsure at all n locations
gtgcgatgcagtagacttgatacgccagagatatgttgatgaaccgtgacgaactcgagaggttatatatcttagacaacggcggggtaactagcctgataaatgccaaaggaaatcgtgggaagtatggtttaggctataagcccactcaggcagatgtaaagagaagcatcgcgggaaggaagggcggtggtcaaagctcgcggttgagacaagaaggtgaaggaagcccgccctgccacataagtagaagctttataagcgcaggtctgggggacgaaggtcaagtggtcgcgatatacgaagatgattntcgagtacattggatttggtacgaccatgccctcctgatttccagctgggaaattggcgagtggaggaacgccccgacatttacacagcgagcataatgtaaacctttacgggtttaaaagctctat

SEQ ID NO: 143467 - DNA, 422 bp, Glycine max
  unsure (1)..(422): unsure at all n locations
agctggctatctccttcttgactacattatgataattttgggcngcagccctctctggggctgtcttacttggttaactccatcttcntaaatcattccacgccatacatgtggatgggctaataccaagaatgttcgccagggtccatactataaccttcttatgctgtttgagaactgacaacaacttctcctcttgctcatcagcaagggaggcagatataatcactggaaaactcttgctatcatccaagtaaacgtattttaaatttgatggcagaggctttaattttggtgtggtccgctggacagtgcgaaaatgagatggtttctcagcccttaccttataaagaaagtcagaaggatgtgtactctctgaaacatggttagtcctatctgactctataanatcaatctcgaga

SEQ ID NO: 143468 - DNA, 450 bp, Glycine max
gatgctgcatgtgttataacttcttacacaccactaagactcgtgcagaatatattgtgttcatgtgatactggttactcgcgctcacataagtacatgccatacatacacgtggatcgtctgatacctaagacgttattcagggagcaagccattaccttcttccgcattatgagagatgacggcagatgctccttttgctcgaacactctgatgtggagtgtgtggggagagaacaattgctatcatccaagtaagcgtattttaaatttgatggcagaggcttcaattctggtgtggtcggctggacagtggtagaaggagatggtttctcaccccttacctcataaagaaagtcagaggtatgtgtacttcctgaaacagtggtagtcctatctgactctataaaatcaatctcgagaggtaaaacaccaccaccagacatgcaat

SEQ ID NO: 143469 - DNA, 348 bp, Glycine max
  unsure (1)..(348): unsure at all n locations
agcaaaattcgtcaaaactaacaatattatttctcaatctctgtaaaaaataatttttcttaaacgattcaatatgcaaagttgagtattantttaaaatatatatatatatatatatatatatatatatatatatatatatatatatatatcaaaaaatataaaaataaatatattncatcaatcagaactgagccttttttgaagggtggtcacaactttttttagggggggagataattaccaatatttgtaggagcctaagaccctaattaagtagttgtcactttgattttatttccttcattaattaagatatagagtctattacattatttaaaagataat

SEQ ID NO: 143470 - DNA, 343 bp, Glycine max
  unsure (1)..(343): unsure at all n locations
aagcgactgagctgcagctagngtatatattaaaccgaaatttatatttacttttaannaaacangcagcagtaagaaaattgtaaaactaacaatttttctccaccccttcaaaaatatttttttaacgattaatatgcaagtgagttattttaatatatatatattatatatattataataatattataattatattattaaagattaaaattatgtaatcataacaaactgagcttttgaagtggcacattttttagggggagaattacatttttagagctagacctataatagtggactgatttatttttttaatagatagagctttcatattaagaaa

SEQ ID NO: 143471 - DNA, 213 bp, Glycine max
aaaatggaccatactcaacataacatcaacacgtaactctatcgcttttgctagaactacgtacgttcagatatactcatcgctaatcaagatacgttggagcaatagccccgcttttgacaaccaccccaagagatcgttattgtgtcaacgtcttaacgatactcttctttcaaaaaccaatatgatcgttaatggtccaactccttcaca

SEQ ID NO: 143472 - DNA, 374 bp, Glycine max
  unsure (1)..(374): unsure at all n locations
agctnggngcaaattagaacatgcgaagaatttctttattttttgctnacagcccataccaacccctgaaggctactgtctactagtctggcctcccacccccgcgcctcatgacgtatttctaatgttaatgaaagaagtctttttaaaaatctattggtagggggcttatgagaaaatttacatcaacaaatacttcgtatgagtgaaaaaccatttgaaccaatgccatatggacaaatatgtgtttaaatgtatctttatttgcgcattaaactattgtgattaacgcaaagaacactttgaacaaacacatagtactaaatgaaacgttagattgaaacattcatgatccatctttggccgttgaatta

SEQ ID NO: 143473 - DNA, 281 bp, Glycine max
gcatctatccgccatgaagaccgaaacgcatatacatacatcaaatgacttccatacgcttgcattgaggcttggctacaaaaagagagagaggtcttataattgacaggcttatattctaagacagcacaaatcccagactcacccaagaaaccaatttcaatacaattagctcattcactagccattcacattaacttgtatttgaccttcttacagcaacacacactctcattggaagcactgttatattataacacttatatgtagagcgtgttgat

SEQ ID NO: 143474 - DNA, 264 bp, Glycine max
tttttggaaataaatatagttttaaacaaatgatgagatttttataatcaaataaataagggataaataaatttattaattgaaataatggtttgagagaaaattaaaaggatattcatttttttatttatatggagaaaaaaattctttataaataaaaaataataataggtaattatattggagacttctataatagaagtgtggcagttgtaatgagatgtttagctctttctttaatttttttttcctccaaactatttt

SEQ ID NO: 143475 - DNA, 209 bp, Glycine max
gggaataactactgaattttctcactaggatatctatggtaccgacgatataatgctcaatagcttcggttgcttaaaggatgctttgatatcttattacagatgctaatgtccttattactttattgatggtacataagtgattttcactctctagtataataatgctgatttgggagccaacttgatccatagagtgtcgcctagct

SEQ ID NO: 143476 - DNA, 400 bp, Glycine max
agctttacacggattttcgattctgtgacatttcttatctagacgctcaaaatttaacaacggaagctctcgagaaatttgaatggtcgtaacatttcaccgcgatgcttcgattctaggacatatattatctagacgctcgaaactgttcaacggaagctctcgagaaattcgaatggccataacatttcactcggatgtttgattcagggacataactcatctagacgctcaaaatttaacaacggaagctgtcgagaaattcgaatggtcataagttttaacacggatgttcgattcgcggacataatatatcaagaggctcgaaattgaacagcggaagctctcgagaaattcgaatggtcataacatttcacacgggatgtcgattcggggacat

SEQ ID NO: 143477 - DNA, 240 bp, Glycine max
tgttattaccatccacatatctcgacagctacagatgttcacttggtaacgacaccatggtgatgtccgcgaagcggacatgcgcgtgaaaaatcttgaccattccaattcctcgagagctttcgttggtcaattacaaacgtttagatgactaatgtccccaactcgaaccttcgagtgaagagcatgaaccattaccactcttcgaggacgctcgtggaggctgtccaaccgtgtata

SEQ ID NO: 143478 - DNA, 393 bp, Glycine max
  unsure (1)..(393): unsure at all n locations
agcttgcaaaatctataannntaattgctttttattttctctgngaangcatcaggttttggtaaaaaaaaataatttaactcattctttgcccctcccctagctcttttactttttgtcattgatctcaaagaccaggttttcaatgaggttatataaatttttacatgggacaatgtcatgacagtgagtaagaaggaattgcaaattcacttccttattatatttaattntctaatttcatgattttttcctacttataacaccaatatcaaattctgtgggattcttgctcttccatgctttatggtggtatttaacatacaccatttttgataatttagtatttttctgtacgaatttatggtgacaataacattttttgtttcatga

SEQ ID NO: 143479 - DNA, 244 bp, Glycine max
  unsure (1)..(244): unsure at all n locations
aattgcctttatattcctctgtgaaagcatgangtgtgtggagcatatatatagttaacttatttatggcccgctcccctagctgcttgacaatataggcatgatctcggagaccatgatctcagaagggatactttatctttctcatggcaccttgtctgtgacagtaagtaggaattgtatcgccatttcacttccttgattaatagatattcctaattgaagaatttatgacgcctggtga

SEQ ID NO: 143480 - DNA, 447 bp, Glycine max
  unsure (1)..(447): unsure at all n locations
gcttgttctaaatcgaaaagattaacatgactttttttctttttaataccattncccttgaaattacctttccaaatgtttgtcctcgcaggaaatgtcttcacaaagctttccacaaagagatctatgaggcacgtctcggcttaagggaccagtgtcacccccgagtttgatagccaccatttcaggagcgccgagcaccaacagcgcttcgaggccatcaaaggatggtcattccacagagagagacgcgtccagctcagggatgatgagtacacggattttcaggaagagatagctcgctgacattggaggtcgctggtgacctcccatggctaagttgaccctaagatagtcctggagttttatgctaatgcttggcccacagaagagggagtgcgagacatgtggtcatgggtgaagggtcagtggattccctttgacata

SEQ ID NO: 143481 - DNA, 185 bp, Glycine max
gcacaatcaatgcacttatgttagctacattatgaagtgtgtacctacaaagcgttctacctacacaacatgcatgtacttggctgaatataggtacatgcatgctcaaaagctcttggctaccatagttgcacactgcgcactttatgatgaatattggcttatacgaaataatgtgctacatt

SEQ ID NO: 143482 - DNA, 432 bp, Glycine max
  unsure (1)..(432): unsure at all n locations
catcactaacgagaatttcttttttcttaaataaagcnccataaccagctagcttgatattgtagtctcaaaacatggttccaaattcccctttcactggtagatgcagcaacaacttattggttttcacttcttcacgatactgctcctttggctaaaaaaaatacatatcccaagagggattttctcggatccacacataatagaaaggctattgctgaatacctaatcaccctcaggtgattagacctcctatatgtaagaatgtgggcttttgttccttgtaagtatctcaaaaacctctttgtaagctttcaatgttccattcccaggttaatttgatatcttcctatcattctagctgcaaagcttatatctgatagagtacaaatctgagcatacataatactcccaacaactgattcatacaaa

SEQ ID NO: 143483 - DNA, 385 bp, Glycine max
acggaactgacatcactatctatcattcactcctcttaaaaaccttctcttccacataacttgctttgaattgccagaccatgctacttaatcaccttgcatgcatgatgcaaaatctcctatatgattatcgagctaacacgaatctggtcctgacgccttgagaataccctccgatagtgtgtatactctcaccactgatatgcgaacgactgtgaacttattaccttaaacatgatggtaatctaaacgtctatagtcacaatgtggatggtaccaccgtgagaacactcctatgccatctgtgaggatcttctgcgatccattcgagagcctacatggatatgactataatgaagctgggcactggtgatttatacagtcg

SEQ ID NO: 143484 - DNA, 394 bp, Glycine max
  unsure (1)..(394): unsure at all n locations
gctttattcaatgggaaatgttacaatgattaanatcttttttcataacatgatcatttggatgccctaacctagcatgccaaagattagcaacattgtgagaagaaaaaccagattttgagcctttgttagagctattattgacattagcaattgaataagggaggtcaacatttgtagcagggacagaagtagcatcagcagggaagattgccttgaagttgaagattgtgaaatgaataaaagtcatcagtgcccacaacctcttgaaggaggactttatgtctctcttgagatttgcaagacaactatgaggatgaaattcaaaanacacagagttatctttggcaagctgactcacacttgacaaatttttctaaatagaagaaacatg

SEQ ID NO: 143485 - DNA, 217 bp, Glycine max
atgccctcacgctacgatgcgagcattatcagctttgatcaagtacaaagcttggtgaacactattcgctaaactacaatggacagttactctggcctatgggaggcacagaccagatacttggtcttatggaacgccaacatggatatatgtcattgataatgaatattgtcagagcagtaccagaagcactgcccacttactcatgaaggcagaa

SEQ ID NO: 143486 - DNA, 412 bp, Glycine max
  unsure (1)..(412): unsure at all n locations
agcttctgaattctaatggaattgtatttttatgtttcctgacgaattagatctggcatataaattgtatagcactgttgtcagctacttaaaattacttactctataggggtcttgctcaatattcgtttcaacgtactaaactccagcagatatgtgttggattctttgagtggccttcagagaaaacaagttcttcgtcttctttgacatattctaatagaacaattcatacctccagtggaataatttattatagtaacatgtcttaacaactaatttattttgtggtttgggggtggcctgngtgcacaactgtgagcacttactactaagtaaagactattttgttcattggtcatgtaatgatttcttagtgatttgaattataaatttgagctgtgctatgtct

SEQ ID NO: 143487 - DNA, 313 bp, Glycine max
tatctacattaaatttgctcatgtctatgagggacttgaaacatactggcgcggacgcactagctacaacttatatgtgttggatcctaagagagggcttcagacaatacgggctcttcagattaattgtcacatctatcaggaccaatacgtgccttcagccgaaatattatttactagtgcatgataatgcgggtgtgataatacgctgtttatgcgagggcggcggcgcaacatatatccctctacatatctgtgcgaccatgaagcaccaccatcatgggaagaaaactttaagagcaaacccttctat

SEQ ID NO: 143488 - DNA, 373 bp, Glycine max
  unsure (1)..(373): unsure at all n locations
ttccatcaagaagcaagcctttgtacacatttccgtaacacccttccaactatgttatctctggagaaatttttggttgcttttttaatatcaataaaagtaaacctgattaaagtatgctctgctccatggaattcaatccagaaaccagaccgatttccgctacacgaacgttcttgtcccacgcaaccttgttcttcagcttgcaataaacccaaaccccgagaacaagcagtaacacgaccaagacaccgactacagagacaacagcaataacaacctggagatatataagattggttgggtgttatacaaaaaacaatanacgatgaaaatgtaatgtgtttgatcttacctgctcataaaacatata

SEQ ID NO: 143489 - DNA, 342 bp, Glycine max
  unsure (1)..(342): unsure at all n locations
gtggacaatttcgtggacgctttactactctcatcatgtgatgtgcttgtggtgaacatgcgctggtccttgggaccctatccagaaaccattccgatgcacgcttctctaacgtgctttgccacctcatcctcgtcttactgatgagaacatactcatctctggacttccatgagtggcatgacctgggcaccgacaacgtaatcaactacgaattcctcctgtatatgcttatgtatggtagcgtgtatagtacacaacgttattagatgacactgatatgtgaatgaccttgcctgctcttacttattatagactaacttangagatctgtcgcctatc

SEQ ID NO: 143490 - DNA, 355 bp, Glycine max
ttctcactaagtaaaatggatcattttcaaggtccaacgccttaaaatgatcaccctctcaggtaaaaagaatcacttgataagaaagaactacgtaggtctgatttcctcatcgcaattgaggaatacgttggagccaagggaaacacccttgtcgaccaccaaaagagaaaaatataaaaagggtataaaggatataaggatttaaaagggaacataaaaaatcaaggtcatgtttccacatttgattaaaggttgccgtcccttgggacggacgtgtggggtgctaataccttccccgtgcgtaaatacacactccgaacctttcacttaaaagttcgtagatcgcgtcttt

SEQ ID NO: 143491 - DNA, 274 bp, Glycine max
  unsure (1)..(274): unsure at all n locations
taattctattacgcaacgtggcggtcaaaaccgcgcacctaacttgaatggtcattattgtcaatgcagaaggtattctgcgcttcactatccatggtcacacattattgcagcttgtggttacgngagcatgaactactaccaatatatagatggtgtttacaccaatgagcacatcttaaaagcatactccgcacaatggtggcctcttgggaatgaagcggcaatttctccctctgatgaggcatggacactatatcctgacccaactaca

SEQ ID NO: 143492 - DNA, 323 bp, Glycine max
tacatcttaaggacttgcaagactggcagagagttattgaaactacactatccatgtgaacccgacatctctgctggtgatgccgactacaagaaccacgtgctctatttagatgcttgttacggctgactatgatgattgaattcgtgatcaacggtcgggagccctgtattaaacgataatgctggttacacttgtgatgatgtcaagactctaaatgactattcatctgcgatcttggcaattggactgttatacattacgccgacttggatgtagaccgactggcatgtacactcatgctctattctcaaatgtattat

SEQ ID NO: 143493 - DNA, 347 bp, Glycine max
agctttgcactgtcatggatattcttattggtttatttttacagcaagactgaaaagacaaaccaatattcatcactacaaagacacgcatttgttaacggtggacacaatttgactcatccaaagcggatccagaacaagtaatactatggttccaatcccatccagaagtcctcaaagcagctgaaccagagacttctgtgtttttgaaccaaaagtcttatctggcagcattattagcaggatcgacatccaaggaggtcttagctaaaaatctgaaagaagttctacaaatgttacaacaagaagaaaaagcttcatcctcaaagaatgaagaaacaagttct

SEQ ID NO: 143494 - DNA, 213 bp, Glycine max
ctgcaatggatactctagcagtgcattatctttacttcttgaccgactccacacgtctggtccttacggaaaaacaccgtatctgtacgcgcgtggacgcattcctattgctccagagccgattctaaaacgatgggtgttcgggaggagacacatgcacaaatgatagccggccttgatgctctgacttaagagatggccatcatgatggat

SEQ ID NO: 143495 - DNA, 347 bp, Glycine max
  unsure (1)..(347): unsure at all n locations
agcttccatcaacacattagcatgtttgatgtttatttaattgggaagatgacatttcaggacctcgcattcttgctctctctctctcccacgtaagnnnccctctctctctttattttattgtatcaaaatggttgggattaggtggaaaatcccattttcgtaggcccacatgtgnttttctaatgggagttgataatggtccctactaaaactgctattggtccttacaaaactttaaaatttgaggaaaaggccaatttaccctctattaaacactccacccctccttcccccttcttcttactattgcttatgttcttctcaaccccatgttaaatatacaa

SEQ ID NO: 143496 - DNA, 282 bp, Glycine max
atcatgagatatcatcgaccctctccatcatggtggacactacttaccgtaagttactcctcacctatgagggctatctatatcaagcctggtgcgactagagggatctgacgactaagcttggatcgcttgtgtctaactaaggatcgaggattattggtcctagcttacaacgtcttcgacccttcatgactgattagagagacgtctttgtctacatcacctggtttgttagacatacccaccaccttcacctactgctgacaatctgacttactcgca

SEQ ID NO: 143497 - DNA, 409 bp, Glycine max
agcttctcaaggaattgttctcaagaaagctttctcttgaagctacctagtctataaatagaagcatgtgtaacacttgttgtaattttgatgacgagagtcttgtgagacacaactcaaagttcaacttctctccccctttttcttcttcaattttgcgctcccgcctctctcttttcctccattgaatcatcctctccaagcttcttatccaaggcacatttttggtggcgaagctccttcttccatggcttattccctagtggatggggcctcctttctcctcttcttctttccttccactgcatctccatggtggaaaatcaccaattgaaggaccttatttgaagctcaaagatccaacctccataaaagctccacaagcaagcttccatcatctaatgtcaat

SEQ ID NO: 143498 - DNA, 357 bp, Glycine max
  unsure (1)..(357): unsure at all n locations
agcttctcaagacgtaagagctctcggatatttctagttnggcaacctagggcaccattttttgcgtgctagcttccatttgttgtgtnttagtcctcccctaaaaataaatgcactataccttgattttttggttctccattgatggattttagtgctctaaatgactatatttggcaaatttcgtgaagcaatcatgcttggattcatgttgatttgtgaattgggggttggagggaatccataagccatcttgatactgaataaagggagggataatgtcnctttccattttccatgtaaaatgcaccacaagtgttggtgaatgctaatggatttgcctgatttggaaatctg

SEQ ID NO: 143499 - DNA, 437 bp, Glycine max
  unsure (1)..(437): unsure at all n locations
agcttgaaggagatgttgctgcaccaaagagctttgtatcattgtatggtcaagactctacgcagtggattgatttttctaacgtccatggccttantattaccgcggctggaccaatcgacggtagtggttctgtttggtggaaattcagtaaagagacgtttacctttttatttggatttcttacattcatattcaaaattgggatacaagaagcatccttggagttttatttactttattaatgttgttttatttgcaggtgaaaagctgctcaagaccaactgtaagatatacatgtanctcaattttgtggtgtaatggagttgaatattttctgcataaatcatttatttatagtatgcaggccctgtttattacaactgcacaaccttcgctaactggactcgtcatttaatagtgcaagaaccatatat

SEQ ID NO: 143500 - DNA, 291 bp, Glycine max
gaagaattgattagagggacttatgatgttttctttgatttcaatgtagcttatgcggatatttgtattgctaaagcatttatggattgaaaaaataaaaaaatgttgttttgggtcacagtggaatgaagggcatgctaatctaagtctcaatccctggaactattttgacactatgtgtggcgtaatttgtggatgctgaccccataaacttcataatggaagatgttatgtgattgtagaaagagttttatagtataataaagagatgttagagatgtggattttcat

SEQ ID NO: 143501 - DNA, 294 bp, Glycine max
  unsure (1)..(294): unsure at all n locations
tcttgtccgctaagttaacatcgttacccgagtaattgaaaactctgtcctatgtgtgcttccattcctactgacatgaacaaaaacagatgagaagacttgataagccattcgaaggaaatgaaaactgatgtaggcacatcgtattgaatatcaatgatcataccatggacataccacactcnaatgctctatctctagagacgacatcacacaccatgagtgtgaacaatatatgtataacaactgcatttggctcatggctgttcattgcaaatagaatagtagcaaccc

SEQ ID NO: 143502 - DNA, 433 bp, Glycine max
  unsure (1)..(433): unsure at all n locations
taagcttggccaattctaccatctgaagggtgttattgttcttgttagtcaaaacctctacacttgaagaattgggccgcgagtttgggcttttatcttgtgtaacaatccacctaggtaagtaagtacatatgtaggtaantagttactaacactctatatattagtgttagatagttagttaagaacaaaacttcatttggagaaagaactacactaaaacatcatcttgtacaaaacttgttgngcaaagtatctcctctctctcttttcctatctttttctctaaagagtgcgtcattcttcttcatcttatcactgttggtccactattttcttacacacaattcatggcttctccattggtgatgatcatggagggctaaacaattaatctatctaaggatccatttcaagccaagctgaatttgag

SEQ ID NO: 143503 - DNA, 342 bp, Glycine max
  unsure (1)..(342): unsure at all n locations
ataaggncctccttgccaaaaacttaacaatatgttgtaactatgtaatttattgcactgcctaaacacaaaattatgaacataaccgacttataaagtgtggacacctacacaaaacatgactacaattttttggtgttcagnctaattaacagcagataaccaaactatttattgtatatgcaagataaagcaacaaatgaggtatttaactttatgatagcttaaaccagaaaaataacacagaaactaatatatagttagtgttgaagatcttccatccacattactagtaatatgacaaaaatagagcatataaatgaagagtaacctaaactaatg

SEQ ID NO: 143504 - DNA, 291 bp, Glycine max
taaatattgttaatgttaaacttgttttatatgataatgttatgcatgtttaagagctacttataaaatttaagtggaaaaggaaaaattgatatttatttatatcaaaaggatatgctataattgaagttagatagttcgtatttggtatataggatacattacagatacgttattcgttaatattattagtttgagtcttgtatttatataatagatatagattagtaataaaatttatattgtagattaggaatagtcaaattttatatggtacttaggttagctaaa

SEQ ID NO: 143505 - DNA, 429 bp, Glycine max
gcctagcaggctactgatgatcgccactgctacgcgtgagaatgctacactatcatacggtcgatgcaggattatggaatatcttttgatgtgtctagcgaaatatgtgataacggttagtttgattctattattgaaggcgggaccttcatagcctggctaaggagcctactggcgtgtattgcattattgataccacttatgatgaattgtacatctgagaagaattatcagattcctgttagtgtggttagcatgatgtatctaagcccttgatcctaaagtgtcataggttgagggtgagaataattcttgggtgatgatatgtatgaaaagaggtgaatatggtccaagacttacataagaggtagttacttggctcagttcgcacaacctctttggtgaggcatacactctcaaattcagagg

SEQ ID NO: 143506 - DNA, 398 bp, Glycine max
  unsure (1)..(398): unsure at all n locations
gatcttaataanctgcggcatgaagcttcnaggtaaataagagattctttttttataacctcncacgggggaagtgtgcctgttttataaagttcacaatcanaatcccacaacactataatgcttaaatataggatgatcaaaattatcaaacacaatatgctttaactcaccaataacagaatgcccaagatgctcataaggtacaaaaatgatgtctaacaaatctatgaaatgtcctatctatctcaggatcaaagggtttgaaatcagatgaattgcctcttgtcatacactatattcaacatgcacaactaattgtcttcttatgcaagttataatgtagatttgaactacagctacccttatatgatatctaaatgacttgataatttttt

SEQ ID NO: 143507 - DNA, 303 bp, Glycine max
gcaactcaagctcgcttagcgcgcatgattgaatctctgctgatcgcgcgtatgatcactgaacatatggactcagacaggcgcttcacgggatgagcccttgctcaacaacatgcacagctcatactgattgttgactcttccttgcagctcggccatatgagtgatgagctctggggatggctcgctaagctggcgcactggttatcgagctgatgaacatgcgcactttacagacttgcctagctaacctgaatgtgaaaggaaacgactattaccctcacaagatgggagtacgacgtg

SEQ ID NO: 143508 - DNA, 354 bp, Glycine max
  unsure (1)..(354): unsure at all n locations
agcttatcattaaaataaatataaattgntgtattatgtcatgatctatanactgcgtacgattacttggtgttggatcaagaggccttgaaattattccacccagcggctgaattaattattaatgtgccttgactaattaaaaatttatccttctttatgttactagatataattaggcttttactacaaagttcagaagataaagaatagaaaaagaaacttaaccaatagtgaaagcgataataaaagtgcacagcggaaaataaagagtgtatggaagaagaagacaaacacaagagntttatactgtgttggaacaacccgtgccacattcagtccccaacgaactgc

SEQ ID NO: 143509 - DNA, 358 bp, Glycine max
  unsure (1)..(358): unsure at all n locations
agcttctcaagaggcttgagtgagattttattttcttatctatccaaacacctctattaactaaattaacttccattaaaataattacggatgatnaaaccgcaacaaataatcaaacattaataataattactaataatatatagatatatatatcaaggcgttacaaaattcaccaaggcgagttaagataacaaaagacatagatctctggattttacaagaaaggcacaaaagtgcaatgaaagaattacacaaaaagagtatagcccaacccataaagtgaaaggaacaaaatgtacgaccaatgctctcaaggttcttatttgaatgtaaccttaaacactctttgagcctc

SEQ ID NO: 143510 - DNA, 131 bp, Glycine max
actcgtccaccaccggcatggtgcgagaccatcgtccaattcgctttgacttttacgataactgcaccatgtacgattcattaaataaagcagttggaggtgtccccatccgatcattttgtatgaactat

SEQ ID NO: 143511 - DNA, 331 bp, Glycine max
  unsure (1)..(331): unsure at all n locations
agctngacaaaagaggaacagctaaggttatttattatcgaacaaaagatgacgcagaaagcgttgtagacaggagactagccttatccttcaaaaccgcgtcgatgcctctgtcagctaggaaccttatccatgataggaagatgcttttattgacatcttagagccctgatcacctgagtccttaattttttaggaggatgaagcangacccggaccatgtacttaaattgagcttgagtctgagccatatgtaccagagcgggacttgcttatctctcatgatccaccatctgtcctagcgctagacctgaacgagcatgctgaagat

SEQ ID NO: 143512 - DNA, 363 bp, Glycine max
  unsure (1)..(363): unsure at all n locations
gatccttaagtcacctgcagcatcaagctttactgagcctaagctgactaatatatcattgaactcagaatttaagccattcattgtgtttgaaggggcaaccaaatagnccatcaaggatcatcctactaccccacattgatctcggcagttaattaaggtcttatttttttggaaactgtataaggaaaactatattcctcacatgtattgacctcttcacgtatccaacaatgaatggttatgtatctgctctcatctttattgaaagcaatatgcactctataaggtaaacccacaaaatgggaatcattgccttaagatagaacatgatcgagaatttaaaacacactccatcactag

SEQ ID NO: 143513 - DNA, 310 bp, Glycine max
  unsure (1)..(310): unsure at all n locations
agcttgcacacaagattctccttgcctgtctttttataaaccttctgggagggtcatattgatgcaagctccattggagcttgttggcctangatctcttcatcaatggattcctttgcttcttggaagataaaaggcagcggaatggataatgaagagagagaggagactccacttcaaggagaagataagtctagaagaagctcaccaccataggaggccatggataaaagctttggggaagaaggagatgaatgaagggagggggagagaaaaacacgaaattttgtgctcaaaagagctctgaaat

SEQ ID NO: 143514 - DNA, 352 bp, Glycine max
gtcctataggtgcttgcttcctcagggggcgcaagcctgaggaattgatgatgattgaaggtggttagattttgaatgatggacagcaggatcttttcacaacagaggatagagaccgatacccctccctctagatatgatggcctgttgagaaactcgcctattaggaagccgtcgatcacaccttgtggcactcatgaggacactcagcggcggcgtacacctgaacgctattctacttcttcttgatcagatgagatatcccgatgcctcatgttggctatcatctactggctaccgcgctatcctgagctctagttctaggcttagtgtagcccacaatgggcagatg

SEQ ID NO: 143515 - DNA, 439 bp, Glycine max
agcttagcgcaacatgctggtgcttagctcattctcaaccgaataacactcaggcttaacgcacaggacacgcttagccgtactacaaaaacttaaaagaacccgagaacagtgagcttagcgcaacagggcgcttagctcaacacacaaccagggcttagcgcacagacgcgcttatcattattcaaatgaaaacttacagaagcaaagtggcgcttagcgggctcatcacttacgttcatcaacagggatgtacgcgcttagcgcaacatggtccgtttagcatgttcatctagaaatccaaaattttgacaactatgatgaacaagctaagcgcacatgcacacttagtgtatcattgcgatttccagatagaaccacaggggtttttaccccttttcagccacattgcccctaatgggcttctagggtacctaaa

SEQ ID NO: 143516 - DNA, 323 bp, Glycine max
  unsure (1)..(323): unsure at all n locations
ggactctcaagaggctaacactatcgttatgctctgatgactgccttanacatacggcaaatgcttaaggtgccaatgaaggatagacccatgctgtgactggcatttatatacacacacaatcaccgcttaccgcacaaagtcacttatcattctataacagaccttttacttacccaccgctgagctatccacactcagcaattactataataaccacggatgctatctaccacacttacaatgaccaacaccacctttagctcagaccaccaacaccttccaagatatgaataatgcagctagaacgcctgcacaattac

SEQ ID NO: 143517 - DNA, 337 bp, Glycine max
actatacaacctatggaactcaccctagacctggtgtcctatgaagactaggtcccatatccactcacttatataatggttgatataaccccgaccaaagctacttatcctccattttccttaagataccactcgaacgcgactgacagcttatcagtgaagatattacagcattctacctgaccactgatgaccttaaaacgtatagcgcatagactatgcgattctggcctacgtagaatccaagataactacacctcgatccttacattgactgactccactccaccttgatccttatatacctctggttgcacaaggctctattgacacatcc

SEQ ID NO: 143518 - DNA, 395 bp, Glycine max
  unsure (1)..(395): unsure at all n locations
agcgacctgaggcatgcaagcttataangagagcctatacactactactatttcgttcttcttatcattcgacaaagggtagagaaagtggagcaatcatacatgagagaagagaatcatatccccgaccaactgtcatatcattcattagtgtaaaagacccacagttgctattccagtgcttaaatttcttggggcctacactatttacaaatttcctgtcaccccaaagatattggatgaaagatgtcagacaagcctggttattctgatatggcatgggatttcatctaaaaatataaggaaacaagaattcttacggccacgggccatcaccaaagagaagaatgtcattcccttggtcaacaaatacaagctgccagtctgatctcaca

SEQ ID NO: 143519 - DNA, 482 bp, Glycine max
  unsure (1)..(482): unsure at all n locations
ttccatcggatccacttattcactactaacgaataataataacaccttgtcaacactacatgatatgtttatgggagcgaaaatatctacataccataacagggatgacagtaatatccatcagagactaattaactcgcaaagnaactgacgattctagcgtatatataatgcgtgggtctctttccttacaagttgcgctaccgcgagctatatacaatatatgtatgttattattttcaacatgccagaatgtcttaattgtatgcttaatcaagtggacctaacgtttgcaatcagaattgtgcatacgtacagtatatataggtacgtgaatatgcgtacctatatgatctagacatattcagcaacgagatatattatatatatcttggctagctgtgcttgcgcatgctcggtgaaacaaacccatatttaaattttaatatagcgcttaaatgcctcaagaacaatcatgcttc

SEQ ID NO: 143520 - DNA, 452 bp, Glycine max
  unsure (1)..(452): unsure at all n locations
tgcaagcttaagaaaaaaatagcctcagcaaattctttatttttataaggaaattctatcaatagacctccaatctttaatggagagggttaccactactggaaaacccaaatgcaaatttttattgaggcaatagacttaagtatttgggaagccataaaaatagggccatatatacccaccacagttgaaagaattacaatagatgatagcacatcaagtgaaagcaaaacaatagaaaaacctagagatagatggtctgaagaggatagaagacgagttcaatacaatctaaaagccaaaaacataataatgtctgccctgngaatggatgaatatttcaaggtttcaaattgtaagagtgctaaggaaatgtgggacactctacaattaacacatgaaggaactacagatgttaaaagatctangatatacacactaacccatgagta

SEQ ID NO: 143521 - DNA, 329 bp, Glycine max
gcgcttctcttatctatttagagtctatctatcgaggaaccaccgttcgttgatggatagggtttccactagattcaaactactatgcaactatttgttgagactatctacttaaatcttggttaaacgatgaaagaactgccatctgtgcccgccaaacctaacacaaatacacatgctgatctcgcatcgggtgttctccaatctgtgttagatgcttctatcaactgggatcttatggatgcaaaactagtgcaaatagatgataaagcgctaacggttgtttctctaccctgactgggaggatgttacagggtcttgtaacctag

SEQ ID NO: 143522 - DNA, 144 bp, Glycine max
atcatgttttgacgaccccttagctcacctaaccggtcggcatgacatcctaccgcacttcatgaattatatagacggctatgtttatcactcatgactcaacagtggatgcatggaatgcggacattattgatgcggacgcgt

SEQ ID NO: 143523 - DNA, 149 bp, Glycine max
ctacaccttggactcacgacgcgctggcaacactcggtaagtgggatctgacgtatctcctgctgacgagcgaagccaatcctgcaatctcgagccgaatgttctaatgaaacgcctaagcattcctcgcgacaccgcgactagatgat

SEQ ID NO: 143524 - DNA, 422 bp, Glycine max
  unsure (1)..(422): unsure at all n locations
accttatctatccacacccctctattaactaaattaacttccttataattaattatggatgaaaataacgcaccanataatcaaacatcatacataattactaataatatatagatatatatatcagggtgttacaactctcccacccttttagaaatttcgtcctcgaaatttaccttactcaaacaaggatgggtgagcttctcgcatctgactttctaattcccacgtggcatcttctcctgatgcacctccctagatcaccttgaccaatagaatctctttccctcttacgtgtnttgttcgcctatcctcgatcctcaaaggcaatgtttcatatgtcaaattctccttcacttgtacatcatccaattcaattacatgggatggatcacgaatatacttacggagttgagacacat

SEQ ID NO: 143525 - DNA, 300 bp, Glycine max
aacaataacacagtgttgcctaactcgagatgacaaacacaccatttaccccacacaatttttcttatgtcgagtatttgacttagtggatgaaaacaatttcaatttaacgaaccttctttatgtatttggcttaatttttattagatccgcctttcgggtgttaatctaacaagcttttttttttgcattcttatatttgcctagattgacattatgggtttctaatttaacgagctcttccttattctccttttttaaagaattgtgaatgcataatacttcctcattacatcaaat

SEQ ID NO: 143526 - DNA, 257 bp, Glycine max
gcatttgcgctcaaaacccaaagtctgcctattggaaagactgcacgactacctcctcaaaatataccctgtggcactactgagccctcaatgagaccgctacgaaatgccacctcgttatgcctttcagccaaaaaacatagatcccttcgcgagcaccaatctaacctcgtatttaaagaaaactacttagcgtaataggatggtgggagctatcacagtgtcagtgcgataataacatatctaatatgagagta

SEQ ID NO: 143527 - DNA, 369 bp, Glycine max
  unsure (1)..(369): unsure at all n locations
agcttatccataaactctctttcaaagtttgttgtgatgtgtctntncctaagggcactnttcaagtcttttcaatactctaatagaggattcccatgcatccttctttccttaacaagggaagtccaccaataaagggcatacccttgaaagctaaaggtagccaaaggaaccttccttttctcacttgtatggtgacaaactgtcgcaacgtgcccttcgcgggcgagcgagggcgaggctcacgggtgcgattntcaaaggaggaaagatgcgcggagttgccaccaacgtttatttgtggaaaacgtcggaaaaaccgaaggaaatcggtcaaaataaaaattctatagtcgggagttgtattta

SEQ ID NO: 143528 - DNA, 349 bp, Glycine max
gaaaataatgtggatctctatatactatagagagtttgaataccgtacctttactactactgaggattatcttgcatcctcctatatttgtcaacgttatctcggctattattggtgaagactcatgtattttatgcggacgaaagaaccgtgagttacatactagattagtgatatactagatcaacgtgcctttctgaatatatcgcatgtaaatgttcactctgcgcatatattaggaagaacatatgacttgagactacccatgagttaattgatgtatacattccatgttacaacagattatcgtcataatatgaattatataatcgggtattgtatatacatt

SEQ ID NO: 143529 - DNA, 417 bp, Glycine max
  unsure (1)..(417): unsure at all n locations
agctttgaaaaacagaagtatgtatcatatatattttgntctgaaacataagctaagaggaggttataggtaaataatctattaatggncnccaacataccagaatctattaatgcacttgctttcttgggcacagtacttggatctggttcaatatgagtcaatctacatatttcctctaactctgaccttttcttaaaaaacaagtctttaattctgcttggttttagtttgggaagcctgtccacttctgctgaagcctaaaaagggaaatttcagtctaagagctccatctccacagaataaattgcgaagaatgaaaaaattataataacaaagggagagggaactgaaagaagcttcaaaccttctctatatttttattgaaagaataccccgttagtgatttctgttctg

SEQ ID NO: 143530 - DNA, 296 bp, Glycine max
agcttgcttgtggagcttctatggaggttgtatctttgagcttcaatgaggtcctttaatggtgattttccaccatggagatgtgtggaaacaccgccaacacatgagaggaggcgccattcactagggaataaaccatggaagaaggagcttcaccaccaagatgagccttggataagaagcttggagaggatgcttcaatggagaaaaagaaagagggagagaaagagagaggggggagcaccaaattgaaggaagaaaaagggagagaagttgaactttgagttgtgtctcac

SEQ ID NO: 143531 - DNA, 401 bp, Glycine max
  unsure (1)..(401): unsure at all n locations
agctnttgacggactataccaagctctatgttcatgtgacggataaagatctatatataggcttgctaagggtagagagaggaagactagagatttggatcaagtaaagtgtgttaaggatgaagaaggcaaagtcttagtgcatgaaaaagatatcaaggaaaggtggaaggcgtatttccacaacttatttaatgatggatatggatatgactctagcagtctagacacaagagaagaggaccggaactataagtattatcgtcggattcagaaacaggaagtaaaggaagcgttgaaaagaatgagttatggtaaggcggtggggccagacaacatacctattgaagtgtggaaaactcttggagatagaggtcctgagtggctcaccgaactcttta

SEQ ID NO: 143532 - DNA, 369 bp, Glycine max
tacggaaccttatactgaccgggctgctgcaaaatcgtctaccgggcggatgctttgggtcggtaacgagtatgacccgtgctggtatggtgtaaaaatgggccaactggttactcatgatcgagtatacgttgttatagcttacatcagcttattctagagtcacctacaatacctcaatggtgagaggttcgcgccttgtacccactattggtatgatcgatacacatcatactgtagcaatataaactcttcctaagtcgacaagatcgttaagactaacagacgagatatatgaacgatgacatactgaagtcggagtatgattgggtaagccaaagcacgtgtggcaaacatcattcgctttga

SEQ ID NO: 143533 - DNA, 344 bp, Glycine max
  unsure (1)..(344): unsure at all n locations
ttacagtcacctgctgcatgcaagcttagacaaatatgtctgctgggccgagttctgtatgacctattacatgagaacttgacgctcttgtgatccatgaggatggtgaaggaagtgctcancaggtaatggcgccatttcttaacagaggatgtgattgcatgcaactcgctaacataagtcgatgctctctgtaactgaggacatagaaccttgctataataagcaattgggtggtcttcctgaagtaacactacacccttggcgtagcccgacttgtctgtttcaattgtaaaaggtagcaaaaagttgggagttgccaaaataggggcctgggtcatcac

SEQ ID NO: 143534 - DNA, 338 bp, Glycine max
tggccgatgtctctatctattctgacataacaccacagaggctcgtgtgatccacacacgaccgtgcgcagtacaatggtcaaacagatagactcaacctaacactagagcagtgcttgcaacaccaccattcacatcagcatctgagttctgcctctgtagacaatttatggtgatccaacgcccacactagtggaattcttacagggcaactacaccattgacgctgccgattctgtgctgaccaccaggactgagattcatgtggccctgcatcaccgttttcgcggagcgcaggatgccatgtatactacggcggacaagcatcaccacgatgt

SEQ ID NO: 143535 - DNA, 318 bp, Glycine max
  unsure (1)..(318): unsure at all n locations
agcttcaagctagtatatatagtatatgacatttatggagttgtttgtttctgactntctgtatgctttgctgactcatgctgtcggtcaacaatgtattacgcacacgaatgatttggtcagtttaataatcctctagaagaataatctacgtataaaataattacttgctctaatggtttattactccattttagagtggattttggtacaatcctgcatatatnnttagttttttcttttctatatttataaggatctcgccatgatatattatttccttttactatatacaattaaagttattctccttttcta

SEQ ID NO: 143536 - DNA, 391 bp, Glycine max
gcattcaagctatggccacgtatagtcacatgcatgacatatattgtttttgtggtagaagccaaaagagatagattgactgccctggctagaacacacacattgtctatcctgactacattattgaggccaaagtatccagctcataaacattacatcacattaatcccctcaaaaagcaatttatgtactaaacatactcctttaaacagaatcagttcgatcctacactttttatgtgattatgtggaagaacttgtgttaagatcaggccaaaatcaaaatgttgtggagtctatgtacgaaaaaatgtattgagcattgtggccaatattaatgatctttcactgagatcaagacggggatgaacgatcatgtatcttaagatcct

SEQ ID NO: 143537 - DNA, 343 bp, Glycine max
  unsure (1)..(343): unsure at all n locations
ttttgatgatttcttttgtgangaaaaaaagctcaaaggtcaataatacttcatgataacaaagatgatgatctcaagaatcaaagaataagttcatgatgcttaagattaaatcaggaacacttcaaggttcaagaggaaatttgatttctagaatcaagaatcaggattctaggttcaagcttccgagaatcaagatcaagattctagactcaagattcaagaatcaagagaagaattaatcaagataagtattaaaaagtttgttcaaaaactgagtagcatatggatttttctcaaaacattgttaccaaagagtttatactctctggtaatcgattac

SEQ ID NO: 143538 - DNA, 266 bp, Glycine max
  unsure (1)..(266): unsure at all n locations
caaaaatcttatgctcattctctctgtaatcctttccttctaataaaaagttctttcataaacaaaaagtatgcacatattttctcatgtactgaagtaagttgtatctgacaatctctagtagactccgtntccttattatcacccctttatcccacgtgtatttatatgcccctcatatcgtaatttactaagaggatatatntatgactcatcagacataataatgatgatgatgagtaacttatcacttatcagcaaaagat

SEQ ID NO: 143539 - DNA, 466 bp, Glycine max
  unsure (1)..(466): unsure at all n locations
agcttctaaggaggagagtgtttttttgttatttgtgtgngaagcgaagccctaccttctcaaggaatgtttctcaaagaagctcttcaaggaagctacctactctatatatagaagcatgtgtaacacttgttgttactttgatgaatgagagtcttgtgagacacaactcaaagttcaacttctctctctttttcttccttcaatttcgggctcccccctctctctttctatctctcatactgttcctccattgaagcatcctctccaagcttcttatccaaagctcatcttggtggtgaagctcctccttccatggcttattccctagtggatggcgccctctctcacctcttctctttgtcttccgctcatcttctggtggaatataccatttaaggacctcattgagctcaaaattcagcctcatatatccncacaacaagcttcatcagatccttttttt

SEQ ID NO: 143540 - DNA, 248 bp, Glycine max
gactcttcacggacacatatcacacataaattcaccatgcacactcgcccaccttcaactgaaccacgtgctcaccgttgcacttgctaatgtataacccggacccaatcatagctccaatcttccacatcattcaagctataaataatccatacatcatgaactttcatatccatgataacatggctgaagcgaaacactctgtccaagacacatacaaatagcacatctgggcggcgaaaatacct

SEQ ID NO: 143541 - DNA, 344 bp, Glycine max
  unsure (1)..(344): unsure at all n locations
cgaaatctgcactntatgcagatatttgctgttgaaatgtgcagcanaattttgtatatgtgcagaanaatgcttgtgtatggcttgtgtgtgaaagggtagtacatatggggttctggacattttctagcagatcccaacggtcaaaatgtatactcatgtactagagacgtctagtaacattttcgagtcgatccaacggttaacgaactggaacgaatagaatgctactggggtatttgaatgtgatattggtttgtgttttggcagaattttctgcctttgcctgtttcttggctgtgttagttgtgatgattgatgttgaattacgtggatgctgtgga

SEQ ID NO: 143542 - DNA, 387 bp, Glycine max
  unsure (1)..(387): unsure at all n locations
gtttctgcggagatattctcccaatactaccaggcattccaagaagaattcgctcttacattataaatgcaacaatcaattcgttctatctatggcatncgggtgaaatattaagcctaacaagaaacatggctttcaaagaaatgtctatcaatcgatgaacaataaactgccgcatttctaaatggatgttacacattggagatggaattattggtcatgaaaatgatgattatgctccagttgaaattcttgtcacctgctcaatctgaatcgatgatccagcaatgctataggcaatcaacattccaacttatataagaccacaatgatgctaatgctggaatccgggcgatatagcttcaccaatgaacggataacctgcta

SEQ ID NO: 143543 - DNA, 206 bp, Glycine max
taaccaggtcgggtccaatttatatcggacctctctataagtaattcttaatcaccccgtacaaaggctgcatacgggtgtactacaactatgtcaccactggatattatgggttatggatttccggcgccaatctacaatcatcatcgggagatacacagttgacacattgtcaacacgcaactacgagtatgcagaaatgaatc

SEQ ID NO: 143544 - DNA, 327 bp, Glycine max
  unsure (1)..(327): unsure at all n locations
ttccttctatgtacccgnagtggtccacattgtgtttcgtacattnttattctcgttttgtttactttntataccccctgttgacgtgcttaagccattttacttaagttatttctcgcttaacttaaaaataaaataaatttccaccgaacgtttgaattgtattatccattaacttcggttaaaatgaattccgaccgttcggtcgtgccgtaaccacgttggaaacaaaaaaaagagggtaaataataatataataatcataaaacatcttttagtaaaataaagcggaaaatcaatcggacgttttctctttgggatttctca

SEQ ID NO: 143545 - DNA, 341 bp, Glycine max
gctagatgatgcatctgtttatgtacctacctcttgcactcctgtaatgactatatcatcatttatggcgctgaaccgctgggtaccggaagccatcttccctattaacattcctactcttcagcattgagtcacttaactcaaaggctacaacactggcacacacctatcatacatatctgttcatatcactgagtccttcataaaaatattgcacaagatactgctcccaaatctgacggtgagggcaactggcacatggttttttatatcgctcccagtactcatacaggctctctccaatgaatcggataatacctgagacatcttctctgatggat

SEQ ID NO: 143546 - DNA, 402 bp, Glycine max
  unsure (1)..(402): unsure at all n locations
aaaccaacgagggaccaaaacatcaaccaccattagtcacaatgaaaatggatcaagaatacaaactaagcacgtatatcatgcaattgaattaggtctacatgcaaagatccgacgacattcaaaacccaaaccccttagcctaaataatttcaacccattcatgttgacatgatagcagtagagcaatccaatgttagaacatggcctgaagaaaatcttactaatgtaagaaagaagtacaagtttaaatgataataaggctcagtttgnggtgttcttttgagttaactttttttaaaaaaattaaaacaaccacattttaattatgttttaaaaattaggtgtggtttttctctaatctttagatttaaaataaaatcactttataaagtattttta

SEQ ID NO: 143547 - DNA, 318 bp, Glycine max
tcgaggatcatcggataccatacgagtccggtaccaccgacgaccgttaggatctgtgatcatagctcagaaagacctactaatcgactctattacgcgtgcgactccagcgtcagagccctgattcgaccacactacaaccgattacccacctgacatcatcatatcttcccttcatgtagaatggaacacagtttgagaacatgcataccttgcactgtcaacatcttcatttgtttaaagatgtcacgcccaatgacaaatagataaacggggcgtccctggtgttacctttataataaatcgatcaaccattta

SEQ ID NO: 143548 - DNA, 429 bp, Glycine max
  unsure (1)..(429): unsure at all n locations
agcttctgcgatataatcttcntggaaanggtcgattccgagttattgttttgngggactcaatggcttcgactagtaaattatgcacatggccctagtttagaaggaaaaagcagaacgtgagataagaaataccaagcaagcagatcagaggaatcaagatgttcattgacaaagccccaaaaagcttatacacgactatgataattttaagcagtttttatgaatataggaggaagcagcaaccaaagtgaaaggagtataaagtggtcatgttacagacctcagaatgtcgaagagctgattgaataacataatttgcatgtggatcttgaagcaactgttcgaagtgaggagcagagagcagttcatgaatgactctagatcgattctcatcattgaatactgcaagacatttttcaacaacat

SEQ ID NO: 143549 - DNA, 330 bp, Glycine max
aatcttatgcgatgatatatccctacggagtgtgtttctactttcaagaagtatcgcttcctgtgactcactgtgtggtgagtccactgttttctcatatgcctaacatataaggaatgaacaaatcggctgcaatctctgtccttgattgctattcacaaaaatatacatgtcatgcgtctgccacccatgcccttatacacgaatttgattctcttacactctttgtatgacaatgggagcgctctctcaccctgcttatatggagaacataatagttcatgttgcatgccttatgacatcaaacatggtatgggacaacggactgtg

SEQ ID NO: 143550 - DNA, 344 bp, Glycine max
  unsure (1)..(344): unsure at all n locations
tttatgacaaaaccttttctcccatggcaatgttcaaatcaattcaaattcttgttgctatagcaacatactatgattataaaatatggcaagnttaatttattaggtgtacaatgcactcgagtaaatcttctagagggctcatgcatngggttcatatgttgttgaattgaccctaatattagttcattaacctgattntaaactatagctagctcttgataccacaattgtggaggtgatgacctttgtggaactttagaacattaaaaaaaggtatctcaatttctttctcatagtcttgaagtgtttcattggttaattgagtttcatcaagcttaatt

SEQ ID NO: 143551 - DNA, 397 bp, Glycine max
ggtgcttgcttgcgccgttgatagagacattgacagcttgattgttttgataaggacgaaacggatgctcaccatgatgtgttgaaatcgagttcggattcttgtctacttagaatcggacgatgatgactagatagggctatcctatggaatgaagcggacaatggactcatggtgctcttgattatgccgtatgcatagggctctctgcatgacattttgacgcctttgatgttgccttaaggggagagaaaactatggttgaatctatgacgaactttggcggaagtgacaacctttagggggcatttaggacgtgagcacacagtatcacaggtcttttgtctatgtcgagagctgattcatggcgtcatcagaaatggggagactgaagata

SEQ ID NO: 143552 - DNA, 441 bp, Glycine max
  unsure (1)..(441): unsure at all n locations
tgatgcatgcaagcttcaactttatttcttgcagaaatccattaacttattgtttgtataccataagatatagaacattagttaaactcccactaaactaaggtactataaggaattacacacatatgagcaatgtgctcatgaaaaactttaagtgtcatacctttagtaagtggataagctagcatggaatgagtccctatattntctatacaaatctatatcttatgaattctttatttaacaaccaaatactttatgtcaacaaacttttacttgattaaatccttaataagaccgataagatattgtctcaataaacacccgatggctactaaatgttggcaacaatatgcaagctagttacaataatttagcaatcataaattctagtatgatgtctcatagcaaaatattaactccaccaacacgggtaaatgt

SEQ ID NO: 143553 - DNA, 358 bp, Glycine max
aatggagactttccaccatggagatgtaccggaaggcaaaggacaagaggagaggggaggcgccatccacaagggaataagccatggaataagccatggaagaaggagcttcaccaccaagaatgttccttggataagaaagcttgaaaatgatgctttaatggaggaaaacaaagagagaaggggggagcatgatatctaaggaataaaagagggagataagtggaactctgaagtgtgtctcataagactgtcattcatcaaagttacaacaagtgttacacatgctcttatttatagactaggtagcttccttgagatgctttcttgagaaaacttcctcgagaagcttctttga

SEQ ID NO: 143554 - DNA, 344 bp, Glycine max
  unsure (1)..(344): unsure at all n locations
agcttgccgccacggagttttcctactatgttcttgtgtggnggaacaagctacaaaaggagagagcaagaaatgaagagccaatggttgatacatggacggagatgaaaaagatcatgaggaagcgatatgtgccagctagttactcaagggacttgaaattcaagctctaaaaactaacccaaggcaacaaggtggttgaggagtatttaaggaaatggatgtgctcatgattcaagcaaatattgaagaagatgaggaggtaactatggctcgatttcttatatggttgactaatgatatccgngatatttgtgagctgcangaagttgttgaaatggatg

SEQ ID NO: 143555 - DNA, 229 bp, Glycine max
ctccccgacagagatgcgcgatatcaggtccaggcattctgttccttgcgagcactcatgggacttgaatcataggctcttgcagctatcgcattgctttcggggccgggacactccttgggaacgtgtgtgccaaccaacttgaacttcttcgtggagaatgatgacgttactaacgctctcttgataactgggacgactcatgatattccggagcttgacgatcttc

SEQ ID NO: 143556 - DNA, 365 bp, Glycine max
  unsure (1)..(365): unsure at all n locations
gttgttcatagttgtaatcccgataaaaggagcacactatgtnttatgcgggtatagttgttggagggagaaaaggaaacatatttattggactccttgtgcagctcattgtatngatttgatacttgaagatattgggaagcttccctcgataatgaagacaattagaagggcaattaatctagttgggtttatctatgcccattctagtaccttaagtttgctgagaaattttacaaacaagaggaaattggtgagacatgctattactagatntgccacttcttatctaaccttgaaaagggctcccaaagagaaagcaaatattagaaagatgtctacttctgatgaatggaccttgaaca

SEQ ID NO: 143557 - DNA, 282 bp, Glycine max
tcatccgacatcatgttccactatatggtcgactggaatgtgcattaggttatgacgcacgctgattgcgaacgcattgcgaccggaagtgcatcgtcgtgcccctaaatcatactaaatggcgtagcttgatttgattcactatgagaatggctacatgcccatagaacttgatctatcgccatattacaacctcttggctgctgggcaatgtgacattcaatcaagaaaattacaaacatattggctgcttatacccgaccatttgcttgagcgtgatat

SEQ ID NO: 143558 - DNA, 353 bp, Glycine max
agggggagatggtcagaattgaagcggagaaggcagtgaagcttagttttcagattggtcaattggagaaacaggttaatgaagcaaaaacaaagttggcgtttgagatttctacatttagagaggcaaccaaaaagtttgaagctgaatagcgcaaactattagctgagaaaataaatgctgagtcatggatggcaaaagcaaatgataggttagaggttgaaaaacaaaatgtcgatgaggaaaaaaggcgtgcagatgcagagatggttaaataaaggagcagaatgcacttgctgaggataactggaacaatgtcatgaaagagatatgtcttgctgatcagatgtctc

SEQ ID NO: 143559 - DNA, 403 bp, Glycine max
ctttaaactaaccgggcctgctccttgacgtactacacatgtctatttttcctgtataggagagagaagccatgatattacgtgagggcgaagatgcttctgagcaattgcccaagcctgaattctgatgatgatcatacacacccacgggacttacatgtttttacacctcaaataccaacgaatctgccatccgcacttaaacactttctattatctcatgacaattcaagctttgtgactgcggcaaatgactaatcacagcactaggtgctgatacctgatgctgaacccgtgaatttgcatgcagcaacataaaatggtaaatggagagaaccaatgctctagcagttgattacttgtacaagaacggaactagaaattggtgattgtccaattctca

SEQ ID NO: 143560 - DNA, 468 bp, Glycine max
  unsure (1)..(468): unsure at all n locations
agctnttacctctttattatgaagcatgctttattaaaaanaatattactaaaacaattatatttttattttttttttaaaaataaatacattctaagacggttcttcagagaaccgtcttagattgtctaacttctaagacggttttccaaacaccgccttagaatcattattttattttatttttttttaaaaaattatattctaagacggttctcgataaatcgtcttaaaaaacctttacattttaagacggttcttagaaaaaataaccgtcttaaaatgtatatattttctaagatggtttctaaaaaaccgtcgtaaaaaattttaactttttacgacattggcaacaaagacgggttaaaaccgtcgtaaaaagtactttagaaccgatgtaaaatgatctctttgtagtagtgctatttccagaatcattggcgtttggactatgactttattaatatc

SEQ ID NO: 143561 - DNA, 152 bp, Glycine max
ggctaagccgactacgtcgtcatgtttctccgaattgccacggcatggtgggacacctcctctaatatccagatataattgtttccactgtcgaactggctcccggagacgacactagagacctgctgacttcttggtctcatattatgaga

SEQ ID NO: 143562 - DNA, 477 bp, Glycine max
  unsure (1)..(477): unsure at all n locations
atcttaagtcacctgcggcatgcaagcttggtacatttatctaataaaactatattttttatcatgtnctaagggagtgatttaattataacaaanaacaattttttttcattatttcaaataattcgcgacaacatttatttattaaaaaaataataaaccaatacaactatgagaaaacaacaataataccatgttgtatatgcaattgtttgttcatgaatttatttccaagagagcatccattttctattacttttaaatagtttataagtgcgtgattttatttaaaaaaaaaaaaaaaccaagcgacaatgagagagcgagtaccatgtcatacatancaatgggttgtccacgactntattttcatnncgcttctcaatttttttttctcttttaatcagtttttgtatagtatgtctaagaaaaatttaagtatttgtcactctaaaaagttatagaactcaagacatg

SEQ ID NO: 143563 - DNA, 206 bp, Glycine max
gatggaatgacattatacgcggcaacatgcttctctaagcctctcatggagcatgacccctgttctatcacaacttttgtaccatgtggtatatgcaatggtgtgtccgcgaatgtttcaccatgaaagcgtacattaacgcctcttgacaagtggcactatatgcgtggccatacatcttctgaaatgatgtcgctgcgacaacg

SEQ ID NO: 143564 - DNA, 118 bp, Glycine max
cccgtttttttaatttttccccatttacttggaccctttctatttatccaacccgcctgatctagcaacctttaaaaactgtcatctccaaggtgaccgtggctcatcctcctaccct

SEQ ID NO: 143565 - DNA, 410 bp, Glycine max
  unsure (1)..(410): unsure at all n locations
agctntacgatacgtgcaccctananagcactatcatatccactcctttttctatggtaaaaaggggctggggacccaaagaaagcaacacataactacaaaaaggagttaaataatactagcatggagcaccgtacagcatcttcaaaaatcaaggatttgggaccctcaaaagcaactgantagccttgcctgggggttgaggcagtaatatgccaactatcaaccaatctctctccaaccgtgtattaacttaaccatccaatcgtggtgttttatattcgagagaggaggttagtatatagggacaggattgggatcttacagttgtgtgatgaatgatgatggccagccatccttaaaaaatggaaaagtggaaaaatgtcaaaaatcaattctggaactctcat

SEQ ID NO: 143566 - DNA, 420 bp, Glycine max
ctagcgggccatctgcttaaccccggtcccctagagacacttcatattctctcctattgatcaggagaaacgggctggtgacccatgatttgccccgactacacccattctggtacaaagtgatactctctctgtacgcggttcatcctctcatggaataccggattagagaccctgtggagcaacggttgaccgtcgccagtgggctgagggtcctgtatgctccatactgcaatcgttgtgaaccgcgtttcaatgtaagtcccatgcggtgctgacatggcacagatgaagcttctgtctggaaagatgctgatttcgctgcttcatatcatgcagcaatctccccaaaataaaaccgcagattgattatcttttcgaacctatagatacatttggacttccactttcttcgtgtaa

SEQ ID NO: 143567 - DNA, 308 bp, Glycine max
  unsure (1)..(308): unsure at all n locations
agccttcttggcgtagccgctcttggtgctctgtatatattccaaaattcattatccctcttattacgtagcctattgtgatattttttatgttcactggaatgtaccaacnncttcaaattggttgcnntcgttcccctttctttcttttctgcaaataaagataaatcaatatgcctgtcacaaacatttggatgatagtccttaagaataatcaattatcacaagaaaacaatgggatgaaatcacacattaataaagcacatacttcctatctttcagatgtcccttggttaaattgtcttggc

SEQ ID NO: 143568 - DNA, 314 bp, Glycine max
agcgtgcatgcacatgcgtgacgctcagacgctattttattccttttatcgtagcacgcgtatgcagtgaccatgcttgtcctaagtgcgtgattattcagactgcactttgcacatgatcccacttgttgatgtatacgttaggaatgaacattggccggcaagacatggttgaatttctatggattctatgtcattcaaagcaggtgggatatgacattgtacttgcacatctaccgatctatcaatgggctatggcgtatcagtgctgtgtgcttaataactgggatgatatataggatctgtgtccttaa

SEQ ID NO: 143569 - DNA, 320 bp, Glycine max
  unsure (1)..(320): unsure at all n locations
taatgaataaatgatattaatatatctggaaatgaaaaagcatatagatgaaaaattaagtctttaataaagatatttacataaattagcaaaaaaaatgatgattgtttttttacgattntagcagtgatgaaatttgcgtttatttagcatcatctagacgtttccaaattccaagttgggggagtatcggacaaggtgagtaaagaggatgtaagattagattacagcatgagtgtgacactacaaacaaagagacacgtgtcctgttatgtggcaaacgggtgtgaggtgtctgtgtgttctcctgtcacgtgttg

SEQ ID NO: 143570 - DNA, 333 bp, Glycine max
  unsure (1)..(333): unsure at all n locations
attaagcaatatataatgaacacatagtgggctgaaaaaataaatcaagactaacggttaaaccctttaaacttgcttgttatgtgtataatccatcaacccactctttataattatgtgagataaagactaataactacaatgttgttcggttcaagagatggaaattcgaacaagaggtttggtcctaagaggagatcaaagngtgtttgtgaagatgctttccaatggtggattacggtggcaccaagcaaataccacggtggtggtatgaaaattgcaatcactccatgcttaaatcataaagatcttagtggatgaagaatgaataat

SEQ ID NO: 143571 - DNA, 328 bp, Glycine max
acaaccaagtccactcaccgtgtttcgttttaataataataataatcattacaatcataatgtgaaatgagctgttgaggaattcgaataacgtatgtcgagagctaactcaagaataatcacataatttctttcgggtgaaataaagctaaccctctaatgatagatgcttgcaaaatactattttcaatgtgttgatctaatatagcccatattccccttaaatgaccatcaaatgaaagctccagtcttattaaaacaactgcagaagctgtctctttagaagtctactaaaatggacctaatgataacatcgaattgttgttct

SEQ ID NO: 143572 - DNA, 251 bp, Glycine max
  unsure (1)..(251): unsure at all n locations
gacctcaagtcaccgcagctgcaactgtactctggctattttttaaacttgtctcttaanaagnggtgacttttgaaaagatcttcagatacaagtcacttcgaagtaatataacttcttgtgaatttattgttcgaaatcagtcactggttatcaattaccatgaatgtgtgancgattacacatcaacaaatgtgactcttcatttaaaattttaaaattaatactttagaagcgctggtatcgataca

SEQ ID NO: 143573 - DNA, 289 bp, Glycine max
  unsure (1)..(289): unsure at all n locations
cctttaaacatcgaacaatgagaagaaagcgacacaaagtcgcattaacctatattaacatnggtaatctatctctctgatcttacaatggtcctaaaacgcttgctgcgtacatctattctcagaaccagtcgtaagacctcttatctcatgtgtaagatcaatacatgggcaagctgcggctatataatacaacaaccgaatatgcgatctcacaaaatgtaagagtttatacgattgaactatctcttatgacatggaactaacacgcacaaaacgaacgatcatc

SEQ ID NO: 143574 - DNA, 333 bp, Glycine max
accgctcaatgagttggtgaagaagaatgtggcattcacctgtggtgagaaacaagaacaagcctcttctttgcttcaagaaaagcttactaaggcacctgttctagcttcttctgactcttcttaaacttttgagctagaatgtgattcctcttgagtgggtactggagcttgtcttgttcaatgtgggcaccctattcttattcattgaataacttcatgtgccccccctactctccacctatgataagagctttatgccctataagacgctctgaactgggaacatatccttgtttcaggaatttgtcttcttagcatcatcatcacatt

SEQ ID NO: 143575 - DNA, 255 bp, Glycine max
gaaggtgagggagaatatttcatcatccactgattatatacataaactatcattgtggttgaacaaatgaaaattttctaaagcgaaaattctagctttttgttgctaatttaatcctttacttcatcaatgcattacccttgttgtggtgtgaatgtacctgatcataatcgttgagagcacactattgtgtgttaaactgaataattctttgacacacgaatggcctggctacatttgacacataaatttacg

SEQ ID NO: 143576 - DNA, 230 bp, Glycine max
  unsure (1)..(230): unsure at all n locations
cacacaatggagaacagagtggaggcagaatctctgcacaagaatcattcaaattccacagagtgtntcctaccctcataccgtagcgaaatcctcttcggtccaattcggtaaccattggagcgccgtgaaaatttagctggaggggcgctaatcagaaatctaaattttgaccgtggggatctgctagagaatgcctanatcacgagatggtctacccttaccatgac

SEQ ID NO: 143577 - DNA, 339 bp, Glycine max
  unsure (1)..(339): unsure at all n locations
nagcttcctcggatgttggttcgtttcattntttatcatctaatgcatttcttgtcgataaatcaacaacgatctgctntcaactttctggcacgtaggtctgatttttaataatgcatactcgaacacaaagcattaaattgattgtcaatcgaattccaaaaataatcgatattataaatttggatagtctctacattcatatatatatatatatatatatatatatatatatatttgaaataaatcttcaaatgtgaaaaacaaactgaaataaatataaaatacacaagagaataaatgcggtaataaattgcaagatatgtcaaaggacaaatt

SEQ ID NO: 143578 - DNA, 178 bp, Glycine max
gtggggaaccctcacctgtagcctgcggcatatgagtcctcccctaattgtgtactcttctacatgtatgatacaactgacagactaaacctgaaggtgaagaaactctgtcatatttactatacttgaatgccgtaatactttcctaaataagatgctgatgcgttgtatagaaaca

SEQ ID NO: 143579 - DNA, 331 bp, Glycine max
  unsure (1)..(331): unsure at all n locations
agcttgcctcanagaggtccaggaaggacattgctgtcgaatgtactatttccgctccggagtatgatagtcaccgctttatgagtgctgtacaccagcagcgcttcgaggccatcaagggatggtcgtttctccgggagcgacgcgtccagctcagggacgacgagtatactgatttccaggaggaaatatggcgtcggcggtgggcaccactggttactcctatggccaagtttgatccacaaatagtccttgagttttatgccaatgcttggccaacagaagagggcgtgcgtgacatgagatcctgtgtaagggggcagtggatccc

SEQ ID NO: 143580 - DNA, 211 bp, Glycine max
  unsure (1)..(211): unsure at all n locations
agctcgcccagagaacgagtccacgaatgatatgcttaccactnctttatgactggaaagcggttcctaatgactcctctgcggcctacacataaggcatagaggatgggtagctcaccaagatgtcttcctcgcctgatacgatgaccagatgcccttccactacgaatttgaacttttggcggagtgtaaagggaacacctcccactga

SEQ ID NO: 143581 - DNA, 79 bp, Glycine max
  unsure (1)..(79): unsure at all n locations
cttgctaagactgganagcaggttgtctccactccctcggtgcatgaacagagggcatatatgaggggtacaggaccaa

SEQ ID NO: 143582 - DNA, 380 bp, Glycine max
gcttctgtggcatgaatcttatctctcaactcacatagttgtaggggtcaatgcatgcagttgatgtcactctgctgccgtttatcactttggaaatgccacagtaagctttaggatcgaagttgtagtcaccccctccatatccacaacatgcttttataccatacttaagccctggttcaagatgaataaaaaaaaagaaaagtaagaagcataatgaagacattctggttgtatatatagcatctgttaatatgagtaaattataatagccaaagggtgtcatagaaatatcggtctaatgtcttaatattctaaataagttatcaaattattagggatgtaaatggatgtcctcctgtctccattcttataataga

SEQ ID NO: 143583 - DNA, 326 bp, Glycine max
gagcaagattgcttgatagcttcttcagcggacagaatgtctcttcctatgcacatagatgatagggtcggatgcccctaatagcacaaccacattcattatcatgaacaagtctcaattgaatactagtccagatgtgtttccaaactctacttgtccaaagatagatactctaacttactacttaactggttcgcgattgataaatccttgtaccttaatgtgaaatcctctttggaagacgtctatggctggatatattgctgcgagtaatatgtataatatatactctcggatgcgggggaattgatgacttatatccgtct

SEQ ID NO: 143584 - DNA, 426 bp, Glycine max
cgataaagtgacaatcaatttctatatgcttggtctgctcatgaaagaaggggatttgagacaatatgtaaagttgctttgattataataaatcagctttatatgatcaatattttcaaattttaactcactaagtagctattttacctatacctgctcacaagtgaccattgctcaacgctggacctctatagtggaccaagtgaccatattttgcttcttacttttccaggacacaaggtcaccctaacaaaatcatggtagactgccattcgtttggaaaaccagcctaatctgcatcaaagtacccccacaattagaagttttcctttgtctttgtataacaaccctcgactcagaacatatatagtgtattgcaagattcgtattatagtattctatttagaccccatgtcaactattaat

SEQ ID NO: 143585 - DNA, 323 bp, Glycine max
tagaacgctggaacaataactgcaagatcaacctcttatggtcgtgccagctcatgatggacgtgagagcgaggcagtatgtccaatcttttgacactccctccatagaatgaagaagagactttagaaagatatgatactcctggacatcatggggctccatggcgtgacaaacaatgtgaaacgccctgcgatgctcatgaagatctgaacctgcgacaccatgatacttgtgcatcttacgtatcactccagtcccgtgaacatatggtacacccaccgtatgatattgaatgcacaagccttcataagtgaaattacgc

SEQ ID NO: 143586 - DNA, 417 bp, Glycine max
  unsure (1)..(417): unsure at all n locations
atccttttagtcacctgcggcatgcaagcttatataaaaatcataaaattaatntcatttctcacaccatacaaggtttataatngtaatgatatgctctaaatttcctcaataatgttgacgaaacatttggatgaaggccaaagatattacattgagttggaagtacacattgttctcctttgttaaaggagaagaagtttcacctttcttatccttgaattatccaggtagcactcaagtttataccagccgtgtccaaatccttggacttgaaagcaaccacaacatcatctaaagccgaaagcgaatccgagtaaagattgaagcaatcttttatgcaagccttagtgtatttgatcaaaagtttgttcttcacacccaatctaacatatttagctagacattcataagtcg

SEQ ID NO: 143587 - DNA, 481 bp, Glycine max
  unsure (1)..(481): unsure at all n locations
atcctcagagtcacctgaggctgcagcttgatgcctttgttaacccttttttctttgggatctttccaatatcttctagcatcaagtcaagacaatgtacagcacatggagtccaaaatatttttggtctcgtgacttgtaaaattttacctaaaaagaccaaaatcaataaaattgtatgagtagtgtaacaattaaaagttataattataaaataaaaaacttcattaagcatgattgaattctcacccgccaaccaatgttgttaatggcagatggtggttcatggccgaaagccaaaaatccgccataaaaatatgacagatggcatagcggaaaataacagatgtcatggcggatggttcagccatttaaaagaggactgaacagaaaaaaaaatggtgtccaatagaaaaaaaaaantaaaatgggacggtcanaattaaaagaagggtgtcaatagaaaacgaaaaaaaaaagt

SEQ ID NO: 143588 - DNA, 237 bp, Glycine max
catccatatctacccacacctctctattaataaagtaaccaccatgaaatcatactgtttggtatcacaatcgaatattatacccatcaaaccaattcaaataattgttgattatataaggtgtacaactctaccaccctttaaaaactcgtcctgaagatacttactaaacacgacggtgagctatggatatgactgttaattccaatggcattttcttgtgaactcataatacct

SEQ ID NO: 143589 - DNA, 363 bp, Glycine max
agctttcttaagaaaacttccttgagaatcttctttgatgtaaactccttgagaagctagagctttagctacacacacccatctaaaaactaagctcacctccttgagaagcttccttgagatgctagagcttagctacacacacccatctaaaaactaagctcacctccttgacaaaatacatgaaaatacaaaaaaaagtccctactacaaagactactcaaaatgccctgaaatacaaggctaaaaccctatactaatagaatgaccaaaatacaaggcccaaaagaaggataaacctattctaatatttacaaagaaagagtggatccaaccttgacccattgggctcaaaatctaccc

SEQ ID NO: 143590 - DNA, 210 bp, Glycine max
aacagtcgtgaaacgcgtctctccgtgttgcactcacaaatctcaagtctgggcggacctccttgtgaatcgattcttcataggcatggggttatcggcgatctcacatgtaattacgctactcacctgcttgacgatattcatgtgtgaacaaacttggtgcctgcttcttggacttgtcatgttgcgctgaattacacagacccatcc

SEQ ID NO: 143591 - DNA, 382 bp, Glycine max
  unsure (1)..(382): unsure at all n locations
agctttgatntacacagattggtttcatnggtctatatcttcgatttacatatatgaatttcatccaatttttngacaagtcattgttacttccatgaatattgatattgtatcatgcttaattatatgcatttgattattctgatcattgtgtgttgtgtgattatttcttccatgcaggtacatgattcctattttgtgtgagagagaaatgatgggcagcatcaccaactgaggtgagtttatatttccttttttttgctctatcttcgtagttcgtatatagtccnattttatatgtctgagtttaaatgtgtaaaaataaaataaaatgtctgtgatgctttgaattcttgttgttatggattcctttaacctaaaa

SEQ ID NO: 143592 - DNA, 377 bp, Glycine max
  unsure (1)..(377): unsure at all n locations
cacttaatagacagtaaagaatatctacatcatgactgaacagaaattgccaacacaagcattatcctttcatgacaatgcaccacctttaagctacaataagggtgattggtagcagaatacagattacacagtgataggaatgtctcctccacctctatgaacctaacaagtactctaaaacctaatatcctcttgaaatgaggggtttttggcgttcccctaccctgatgggtgtttaacgtaatgcacaatagctctctgagactaaaagctttacataacctccttcttttttacccaactgcagctntaaagggatttatatccttgaaggctcacttaacgccattctctcactaaatgcgaagaaatga

SEQ ID NO: 143593 - DNA, 245 bp, Glycine max
cttgagctcacctaggctcagtaacccttggaagaaatactgagtcttctttagaaaatatggattgaatctagtgggatgcatccaacatcttttcttgatatgcccactagcatgatgattaccgtgcgtgaatctcatcacacaactaccatcggaaggattctctgcagctatgagaacactactcatattcatcagcactttgattataaacataccttgaaatcataccaagatgcctc

SEQ ID NO: 143594 - DNA, 429 bp, Glycine max
  unsure (1)..(429): unsure at all n locations
agcttnctagtgggcccaggggctgattaatgccccaaaagtgaccattttgcctttcttttgaatattntgcatatttccttttgaaacatcacaaaaccctacagcttgcacgataattagtgttaagcagcttaatttggctggcgagaatccaaatgttggcaaatgatcatcctcgaacaaaattagggtatgatagttgcccctctttacttatcttttattggagataaaagggaagtaaagataaagacactaatttcgttcaagcgatctcaccatccgaccgaccactagcaaaagcccaatcagtgaaacctgtcaaaaagaaagagcataagagacatcaggtntatcaacaaaagaccttgaagtcttgcacagtaagagagacatcgaagtctctacgaaagactctaatagtct

SEQ ID NO: 143595 - DNA, 377 bp, Glycine max
  unsure (1)..(377): unsure at all n locations
gatcttaagcaccgcagctgcaacttcttcatctcgatacaatgaattgtttataaatctntgatgccttgngtatacagtcttctttcaatgtctaagttggatgaaggcaatacctttctcacatacaggacatgcataatagcctttgacactgtatccacttaagtttccatatgctggatagtcatttatggtgcaaaaaaccattgcacgcaacgtaaaagtctcttgcaaataaccatcccagacattaacctcgtcttcccataatttcctcaagtcttcaatcaatggagcaagatacacgtcaatatcattccctggctatcttggacccgctatcatcatactgagcattatgtatttttgcttca

SEQ ID NO: 143596 - DNA, 380 bp, Glycine max
cttacggacactcttattactaaccgtggatgcaggcccacacagatctgaggcccattgagatctggatcttaactctttgtttgcctagtgtgacacatgatctacttttcgaatgttctacagtttggattgacatgcaacttcctattctatcatacattgaaaagctcttgcatctttgacaatgtatacacttcaatttacatacactcgtttaatatttatggtgcaaatagacgcatgacacacaagtaagaacttatgcattggccgcaacacactttgagcgaatttatcgcttgagtgatatgaacttgcgtctatgggacatgatcgcgaattgttgattccatgctatctacgcccggtatgtgatg

SEQ ID NO: 143597 - DNA, 326 bp, Glycine max
  unsure (1)..(326): unsure at all n locations
ggttgtcaaatagattgtgaaggaatgcattgaccgtatcctggtgagagtgtgatccttaaatttngagagaaacgactatcatttagtacttgattttgcattaatctctgcaagatggattgaatgcaagaattgaggatgatgaaggccatgtttgattgtgatagccacttatccaaaaagctgaccacgtgcttgaatgatttatctcttgcacccagtttgagctaaatgaattattgattgattgaacctcgagcctatacagtgtattctcttgatacctcttcttatgttgtaggagagcatcatccataaaaatc

SEQ ID NO: 143598 - DNA, 396 bp, Glycine max
  unsure (1)..(396): unsure at all n locations
agcataggagcacaatccacaaacccttgcgacaggtacagatttctgatacaaggccaactggtgttccaaattaaccaatgcattcagattgccttcgagctttctagtttcagatgaaacaaatgggtttgtacctacctcatgcactcctctaatgactatggcatcatttctggtgctaatactgctgggagttggaagccatcatctcaattaaatatctagctctagcaagagttatgtctccaatggctccaccactggcagcatctatcatacttctctccaatatactgaatccttcataaaaatatcggagaagatactgttctgaatatctatggtggnggcaactggcacataatatacttatatctcttctattactcatac

SEQ ID NO: 143599 - DNA, 379 bp, Glycine max
  unsure (1)..(379): unsure at all n locations
tctctgctctaatcaattatcaggtgatcacaatagaatacttcattcttgaaagtattcccagaagtgatcaataacacttttatcaattaaatcaagagtctatttgattacattgatcgtgatagctttctaagtttgggaagaacactctaatcgattaaaatgataatctaaccgattacttcttcgaaataattgattacattgacaatttaatcaattacagacgattaaaactattttctctataaatagtcaccgtgtgatctcactntcaacgaatcaaaataagtgttttacaataagtntgtgcgactcacacattcttatcttcatttctgaagtgtcatggtgaaagtgagttgtcacatcttgt

SEQ ID NO: 143600 - DNA, 193 bp, Glycine max
cacaatattagcaataccactttctttcagttacatcgatagatatattcatcctttgcacgagtatgatgactaagctgccctatgaaacgtagctatattcatcacattatatcaccgttcccttgtaacaaatatctggctccgtattcgatcttactaacttcatacgaattatccgatattcgatatc

SEQ ID NO: 143601 - DNA, 211 bp, Glycine max
gattgtatcacctgtgctacctgacgggatatgtgggttcaactggattgtccatatgtcgctcaccttttcttcctggttcggatcaacagtgaggcaatagttagtgtaacttgctgcgtcatacgcctgaatcaagaatgggacatctctgggaacaaactggatggagctgccgaaaatactcatatactttatgatcaagttttgc

SEQ ID NO: 143602 - DNA, 400 bp, Glycine max
  unsure (1)..(400): unsure at all n locations
agctntgtttcancaactgaagcattgactgtttcttcattatacaacctgaagtggactntcagatatttaggccaacccgattntttcctgtcctttgtcacatatttttatgtggttntcctcattgtaaattgctcatttacgcacaaatgtagaatattcattccactatatatagaatctagctgataatcccaaattagtagctntgaactcacatagcaatacagcttctatctcaatcaatgaagatgtagttcaggcattatttatgtgcaaacagttcattaactatatgcatcgaggatgctcgctccctntggccactgaatattcttatgatntttattgaagatacatcctcagtgccatttatattttaccaatttatgtattg

SEQ ID NO: 143603 - DNA, 259 bp, Glycine max
attgatttatcagcctcaccatctatattctggacttggcctcatgatgaatcgtgattctcgagatgatgaattgctgattcacgacaagaaaccagaatgctccttgctctgtacttacaatggaagtgtatataacgattttcaaaatccgaacatacctcagatttgtgttactatataagtctttgcagatgtttctcaggcaccatgtatgtactctctggtcattgactacctacttcctggaagcgatctc

SEQ ID NO: 143604 - DNA, 468 bp, Glycine max
  unsure (1)..(468): unsure at all n locations
agcttgtagactatacctttttccgaacactgtcttgtttctgnctaggcccgggttcaaggcgggctgcatcaccggctccgcttccctaactgtactggaggcggttgcggtggctttatcctctatggttttctgaagttttaacatgaccttcgagatggaagtcatttgatcttttaaggccgatagatcggccttcatctgttcctgcacgccctcttcattatccatttttctggatcgagtgttataggggtgccttgatgttttcttagttatgatgaaattcctaaagaaataaacaacggtgagtatgctaccaaaacatgagtatgcaaatggatgatcggagcactnggatccaccccaagattntagattacgtaatgagtctagaacttctcattttatataanataaacaaagctttcatctagccaagattatacatatgtgtacaaaaga

SEQ ID NO: 143605 - DNA, 453 bp, Glycine max
  unsure (1)..(453): unsure at all n locations
agcttttcatgcatgttcacaccatattttctatacttcgatcaactgatgcaatctatttgattgaaaagataatttatattactcttctaatgtagtcgacaacaaaaaaaaaatataacaaaaaatattgttgttcttttaaagggaagtcaaatggcagatgcacaaaaaantaataaattaaatgtcttttatttaataattatctattttatagaaaaattatttcaaatcaaatatataatgtatggaattttaatacttagttggccttcagccaacagtgcctaattctaagagtcatttcaagcacaggttacaggtctttgctttcaagtaacatggngatcaatgctctcaacatanacattattgcaaaataataacacatganatatgatatagtaagcatggaaattaactanactttgttattcattaaatcaaaca

SEQ ID NO: 143606 - DNA, 468 bp, Glycine max
  unsure (1)..(468): unsure at all n locations
gcttaggtgaattcatgagataattcaagattatatataagtatgattcatgatgttagtgcttagctntactgagttttaaaagattggctaaaattttgttaaaacataagcgcttagacaatgaaggaaagctggagttgctgcacatgatgtccaacgttatgtcaaggaatcagattgggctgcacaatgcacaaggcaagataaaatgtcaaatgaagaattgaagctgcaggatccacgatgtcggatacgatgtccaggacatcctgcccgaaaatactggacacataaatctgttatatctttaacagattaatgtgcagttagcaacagatttggcgatctatctttangaacgaattanaagatatatataagtcgaattacanacttgaatagttncgtcagggattaaagattaaagataaaaactaanagaatcaaacttatctttaaatcttt

SEQ ID NO: 143607 - DNA, 392 bp, Glycine max
ggctttgacatcaagacaaaatcggtcagctatctaagctctgcaaccatgaggtattgtgactattctccacaggactcaagacgattgattctctaatcagacacacatataacactataactatgattgattactggcaatgatgttctctgagctacacattataccatggagtccattggtggtgaacagtgcacagtgcgtgatggaatgaagtcagatctaatgccactgctcgaaactattacatcgtttcgatgctcatgatactccgctcgcgtagactgatatccatatttcgtattatcacaatcttattaatgtgcaaagcccgtcagatcaggcgatacattctacagcacgtattattcttttacttggaccctatt

SEQ ID NO: 143608 - DNA, 376 bp, Glycine max
  unsure (1)..(376): unsure at all n locations
ctgcggcatgcaagcttgtactccaatacaatgcacttcacttgattgtttanaatatgtgttaataatattggggcagatcccttttcgtttttgttatattcaggctttccctttgtggtcgataatgtgattgggaagccgacaattggaaaatctgagcgtatgttattgagggatgacagaaaaattccaaatcacactcttttaaagatacttacattttgtaattcatcatgcctaacgggagtctagaattagaccctggcagattatgggcataaacgatgtctacattcaagttaaattgtcgagggtgtggcaagggaacgaaaaaatgtaatttgttttggattgtagttgacgagttgttcaa

SEQ ID NO: 143609 - DNA, 351 bp, Glycine max
aataatgacaggctcatacctttatgctaatgacatatatatgctctcactttgtggacatttttgtgactctgtgtccgacaacagaaaaagtggtgcgtatattatagagggacgacagaatcaacatctacaaatctgcccctaagaatccccctttactattaaaactttgaataacggcacggtggaaacgcacacctttcctattgtggggctacaccatgctttcatttatgcagatcatctaatggagcggcttgaggcaagaaaccaagaatggtgattctgattcgcttgtccaagcaacactgtttacaaatcatccttcccaagccatattctggaaca

SEQ ID NO: 143610 - DNA, 445 bp, Glycine max
  unsure (1)..(445): unsure at all n locations
tgatcttgtgtcataatcatattcagacatgtaccccattgcatcacttggcatgaatcaatntttttagacaaaattgccttcatataaaaagggcaaagacactctgcgcctttatttgggcaacaaacaatatatttgtgcgattntctttcaacaactttaaaactttgatgcaccttcataacgtattgttcaatgcattttttaccgcatccttattatcaaaatccatgccaacatataattcttgcccaacattaaaactcgatagcatcttcaaaccgcaaatgtcctcctcatcaggatgactccaatcgatattgttataatgcaaagcatcattccacaatggattttgaattccttctacacctaatagttaaaaaaagaattcatgtcaatacaatctgatctaaaatgataaatgtattccactattttt

SEQ ID NO: 143611 - DNA, 221 bp, Glycine max
taaccgggctgcaccggcccgtatcgtgccaaaatttttctgtcccttgagaacccgctgggctgggtgagaggaacgagcataaccagccgggacgtatggctggttgtttcgacactacataattgcgcctatggacaactgatagtggggaaatgggaatcctgttgatgcgtgagcactccttgtgattactccgacttactccgccagataaactt

SEQ ID NO: 143612 - DNA, 328 bp, Glycine max
gttttaaaacacacgggttctgtgtcaattgctttctcaacacgtccccgtccttatatcgtgccctcttctttcacgaaatacgttctgtgactgtgaatgatctgaacaatgcgccaaaatgttgatcggagatggggggacatcatgtaatttacccttcacaaaaaaataaataattaacgaaatcacgtattagactgggtctaacatgttgtgctgtccgatgaaaaccaaatttttgtaacaacaatttatccgtgttgaactttctccaaaattataaatccaatttgtcaacctttctgggtatttaaaattgcttgcg

SEQ ID NO: 143613 - DNA, 323 bp, Glycine max
aaccaaaaatgagagcttgcatcaaaatggtgaggatacaagaagagaatgaagatgaagagcctcttaccaaagctttgagggaagaagcttcaagaatacttgtaagaagtttggaaaaagaagaaaaatggattcctcgtctattgaagaactcgcgccaaccatggagaatgaaggttcaagtttgattttggagaaataggagataagtgatgcaattctactccccagggcatggatagaagactccaagagattgagtcaaactgctgaagaagccctaagttctcatagacctatggagatattggcccatggct

SEQ ID NO: 143614 - DNA, 121 bp, Glycine max
atggattgctgttctattgataagctctggcacaaccatgggctatgtatgattaatacttgatttgttgtgctgcaacgtgatgttatgattccattctactatacacaggcctcgctgg

SEQ ID NO: 143615 - DNA, 248 bp, Glycine max
attacacatgggtggggatccattaccactggattggaacctcttataacaaccctaatatatttgatattaatattcaaagttatgaaatcgattacagcatagtggtaatttgattccacaatttaaaaattcatatttcaaatgtgaagagtcataactcttcagaagtaactatgtaatctatcacaccattatgataatcgattaccagtaagcgatttctaatataactcccaacagtcaca

SEQ ID NO: 143616 - DNA, 395 bp, Glycine max
  unsure (1)..(395): unsure at all n locations
atgcaagcttgagccttttatacgacaattacttttattcggaggttcgatagtgtctcgtatgatatcnagacagctcgaattgaaaacggaagctctgagataaatcaaacgacaataacttttaactcgaatgtgtgattgaggcccttaatatatcgtgacgctcgaaattgataacagaagctctttgaaagtcaaatgacaaaaactttcaattcggatatctgattgagtcccgtaatatatcgagacgctcgtaattgaaaactgaagctttgagcaaattcaaacgacaataacttttgaatcggatgtgcgattgtgtcccatatgatatcgagatgctcgttattgaatacggatgttctgagaatatcaaacgacaatacatt

SEQ ID NO: 143617 - DNA, 326 bp, Glycine max
aaaaaaactgtggcaagtgtagaagatgaaaaagatggaaatacaattgctgtgactgccattcttattctaccaaatctcccaccaacccaactatgtctttattcatacaataacatacacttgtctttacccaccatacattatttcacaaaggccattcctaatattatccacaaagactacctaccgtactgtcaatgacaaacaacacctttgtcttaatccagaacaccaaccgataaatgaattttgctgcgagattacccattgaatacaccacaattgcaatgaactatgctgacttgaccccatatttacttgat

SEQ ID NO: 143618 - DNA, 321 bp, Glycine max
tgcgcgcctgctcgcctactcgctatgatactaaaaggtccatatgttcgccttgatagctcggatcgactcataaccgactccgtggcttaccgacacgcactcaacttgactaggacccactcattcgctcgcaactcatgatgcttacgatacggatacccaatctccttttgcgaggctgacctttgaagccgtgtcgatatacggcagacatgtactccctacgactgtgatatttatccactgccgacaccgtgaaagtgcccgtctcgtaccgcggagaaatcgccggactgctgacctattggatctctatca

SEQ ID NO: 143619 - DNA, 335 bp, Glycine max
  unsure (1)..(335): unsure at all n locations
acctgcggcatgcaagcttgtctcatcgtttatacgagacagagaccaatatgttagtcatcgtcagcaagtaccaagaagaattaaatctatccgcggcccacgagcacaaagtggcagacgagtatgctcaagtgtacgcggaaaaggaggctagaggaagggtgatcgacgcgttacatcaagaggcaacaatgtggatggaccgattngctcttaccttgaacgggagtcaagaacttccctgattgctagcctatgccaaagcaatgacggacacctactccgcccccgatgagatccacagacttctcagctattgtcagcatatgata

SEQ ID NO: 143620 - DNA, 290 bp, Glycine max
ggatcgactaataatcgaatccgtggcttgcccacgcgcactcaactggactcggacccactcattcactcgcaactaatgatgcttaaggtacggatacccaatcgtctctttgcgatgcagcacctggttggaccgagtcgaactacggcgaacatggactaacaacgactgtgaatctatccactgccgacaccgtgaaagtgcccgtctagtaccgcggagaaatcgacggtctgctgacctaagggatctctatcagagattgcactgccgctgtatgtgtggac

SEQ ID NO: 143621 - DNA, 427 bp, Glycine max
  unsure (1)..(427): unsure at all n locations
gctttcctntaaagagtgttcgaganaattttattcattaattatactntacgctaaggcaaaaagttctcaacttttccttaatgtatggtgagtantttatgatgttttttgtctgtatatntatcatttctaataaaattatgcaaaagcacacataatgcgtttactaattactataaaataaccaaatttcaaaccgaaataagtgagaggtttatgaaatgttgaaaaatcaaattcatgtgaaagcacaaatagttagcgagtccaaataaggatggtttntcatgcgggttaattatgttttcaattattttttgagcacaaactataccatttgtagtaattatatatnttttntcattctaggtcctaccgttgtcattgagaatcacataacttagcacattatcaaccagtttga

SEQ ID NO: 143622 - DNA, 383 bp, Glycine max
cgtgccatctgtgctatcaatagtgcctcatgaaatcctttccacgtgccatgcctggcgataattaataaagttcttcatctccttatctatcatgtatctggcacaatctggcatgacgatatatcacataatcagctacgaaattatgccttttgcgcacatcctgcgcatactcattacatgctcacctcctgttttgtaaccattttttttgcagaagaccagaatcgcctttcccacccatagcacgatcaccacatgctagtcgtatctcaacagagaagtgagaccaatcgcggcatcattcagtttgaattagagagagaaacatatctaatgacatgagagaggaaaaatctataactatgtattaatctatc

SEQ ID NO: 143623 - DNA, 425 bp, Glycine max
  unsure (1)..(425): unsure at all n locations
catgcaagctttatccaacttgaaagagacactttatgtaaacattgtattgtacgtaattcaaaatggagattgtaccagatatataaatcaatatatatgcagataaattcttatatatgcatctaagacagtatatgtttttttatttatagtagagtataaataacaaatagttaatgactagtattatttttttaataataatgtattattatctgatagtataaataatattattttttaatagttgtcattatcataagaacctatatatgtgatataataaaaaaagaacgtatatgtgatcatctaagatagtataattttaatagttgaagatatgaagagtttctcataggaacgcattanaagtctccacanaattatttcataataaattattttgagtcatctattatgtg

SEQ ID NO: 143624 - DNA, 240 bp, Glycine max
tgctgctgcggaactcgcctagaatgataaccttgtgtttacgtgagagcgccgtatgggtagtggagtgcttaccgtcactggagtggagttaatgacagatgatgtctaatgattgcggcgcaaaaagttattgattttgcatttattggggatttttgataagaaaggcggaaggacaagtattatacttggaatatctatgaatggataacagacagttagaaagtatgggttttc

SEQ ID NO: 143625 - DNA, 209 bp, Glycine max
aagccttgccgttatacaaagtgctatggatttccataacacgtgggagatatatacctgttggaaaaggatccgaatcagaagtttcatcactgcatcgattaccatatgtgtgccaccgattaccagttatggaaattgggaaattcaatttcgaaagtcataaccccactattataattgtgtcatcgattacacaaacattgtaa

SEQ ID NO: 143626 - DNA, 395 bp, Glycine max
  unsure (1)..(395): unsure at all n locations
agctttataagtgcgggtttaatacgcgaattgcctttcatcgcgatatgcggggatgactccccgaagagatcggatttggtacggccatgtcctcccggtttctgactatgaaattggcgagtggaggaacgcccagacgtttacgcgaaaagcataatgtaacctcttgtagctttaaaactctacggttgggcctatgctttagagtttcctttntggtaaagcattatgtctcttggtttttgaagatataatataaagatctttcttcatttgttcctgtgcctctatccattctcattcattttcatgtttatttctctactcttaaagcgccagatccgacgacgatgtcctcgaagtactaatattcgggacccgaccgtcaattt

SEQ ID NO: 143627 - DNA, 290 bp, Glycine max
cactctgctgatgcagcgtcactgccaaaagatctgtgtcgtcgggctggactcacgatgattactcatgccctggtgattgcatgtcgcccaaacatattctccaaaaccacaacgttgccccacgtgtggggtatcaccatccgtagggccgcaggatgaattatctgttgatgcaagaacaaaatatcgtttgcctgccaaggtgtgctggtatcatccaattataccaaggcctgagcgattgtccgctcatgcacatgatgctagtaacctctcatggcatacag

SEQ ID NO: 143628 - DNA, 402 bp, Glycine max
  unsure (1)..(402): unsure at all n locations
cgctaagcctggcacaacggacaacattaataacaataaatgtcaattgaattatgcaggggggcttagcatgacagagcatgctaagactacacagtgacaattgaatagacgcttatctaagcgcgacgtgtacgcttagccaaggcatcaaacatgcataanacatatgataacccataaattatggacaaaagcaagaactcgttaagcgcaactgatgcaatcctccctaggaagggaccagtcactataaccatgagcaagatgctccaagaagattatgctagatctactgaagaaggccctatggttctcatgaacctcatggtagatttctaatcccatgggccaaggttgggtccacatatctttgtcatattagactaagatgtcattata

SEQ ID NO: 143629 - DNA, 253 bp, Glycine max
cacaacacatttgacacattcacaaatcgcgcataaacccaccattacctggtggggacctccatctgatctcatgtgctcacatagaggccatattctggtttgtctcatacaccgaatgcgcattaatcctccacagactgcgcaacatccaagtaattcatcattcaaacaacacatactatcacattcaagaaaacagggcagaggtagaaaacctctgcccaaacagaaaggaaaatcacagcttttc

SEQ ID NO: 143630 - DNA, 419 bp, Glycine max
  unsure (1)..(419): unsure at all n locations
cactcttatgacctaattcattctcaattngncaaccattggaagggggaaacaatcccacgtaattaaagcgtttaatgcatgatagtttacacacatgcaccatgtatcgtctttcttttttaggagaagcacgaaaaggctagtgatgggctgaatccacccattgcagaggagcttggtgtgaatcatgcaggttttgatgatgccaaaaagaattgacttgataatggttgtcatcataaaaaaagggaaagaatgtgaatgtatgaatacagggttttgatgatgccaaagtataatcaaacaagattgcttcaagaaacattcaaggttaaggaaatagagattgcttcaagaataaatccagaccaagaaaacaaagatcaagaagaaagttaagtcttagtctatctttg

SEQ ID NO: 143631 - DNA, 459 bp, Glycine max
  unsure (1)..(459): unsure at all n locations
agcttttggaaattgaagaagaagattattttctaagagactcagaaatcaattggcaaaagtttgttgtctaaagaatgaattgaaaagatactttgaaatgcaaatcaaagccttgcttttatagactcttcatgtctggtgaagagaaccattagaagagttataacctttagaaaaacttaaaaagccatttgaaaaagttgaaaactattggaagagttacatcttttgatttgttcagaaactattactggtaatcgattaccaaatcagtgtaatcgattacacaaagcttttttgtgaaaggatgtgactcttcacatttgaatttgaatttcaacgttcaaacacactggtaatcgattacaacattttgaaattaattgaaacgttgtanattcnagttgaaagctttttgaaaccattttgtactggtatcgatanataatctggtat

SEQ ID NO: 143632 - DNA, 331 bp, Glycine max
  unsure (1)..(331): unsure at all n locations
agncttgtcaaatttggtattaccttctttctcttcttaatagtaaaaggactgatatgtcgagctacaggtgaagcagtcttctaaaactttgctccccttgcaggagttatagtgccattaagtttgatgctctttctagacatggctctctggaagttcttggatgaactcttctcgcgttntcttggccaattatcaagctcctcactactactaactcttcttgaaagcatcttctctttggtgtaaacctccaactctttgctccaatttgattctttgagttctctttgagctatttttgtttccatcaatatntccttcttgt

SEQ ID NO: 143633 - DNA, 367 bp, Glycine max
  unsure (1)..(367): unsure at all n locations
agcttcatgtacttcttctaatgagagagttttcctgccatagatgagggttcttcagagaggctatcaaactcgttcagtaatgatctcaagagcaagagtgcttggtctttatcttctaaggtgatttcaatattttccagatcaagaatgatcttattgaagtcaaccaaatgatcttccaacgacttccctattgtcatcttgagggtgtacaatttctgctttcaagtataagatgttggccaacgatttggtcatgtacagattttccaacttgttccaaatcacaatagctgatntcttctttgaaacttccctcagtactttatttccaagagacaggatcaaagcactatgagccttg

SEQ ID NO: 143634 - DNA, 161 bp, Glycine max
  unsure (1)..(161): unsure at all n locations
agcttatgcacggataatgtaattatgaaanttagatgcccgaataaacaccatttcctagttaaccatgcattaggtaccatgttcaattattntgtctttaagtgaaacgggtttatgatcccaacatggttggctcgtggtgcctaacacatgatact

SEQ ID NO: 143635 - DNA, 286 bp, Glycine max
gcgcactacacggaacagagagtgaaagattgtactcttaatacaccgcgagttccgttgctccttctaagtgaaccccacaagctccacttggagcctgttgatccaataccaagaaggctttccgggcgtgaaacgtcgtctgcgagacttcaaatccagccggggccggtgatctttacaattagagcctgcgacgaccgctcgtttgaccttcaatctttacgccctatctgacgaaggaacagtatgcttaaattatcacgtcattgtcgcacaagaagcc

SEQ ID NO: 143636 - DNA, 298 bp, Glycine max
  unsure (1)..(298): unsure at all n locations
tcacctgcatgcatgcaagcttgcgtaagctnnntttnntttttaagattttatncaaagatttgctagacacctttgntactttcttgaaaagttttgttagcgtggtccaactaanagaagcatggaatatgtatataggcatgcaaaaagtgatattcatttttcattacattgtatagcgatcaggatattaatatatatatctaattattcttggccatcaaattaatatcttttaagattcttaaggagatgttcttaaaacatttccttctttttttaccttttacattta

SEQ ID NO: 143637 - DNA, 424 bp, Glycine max
  unsure (1)..(424): unsure at all n locations
agctntganatccaaggatctaatccaaggtttgtgtttcataaatgggattcctttacttgtactattcgattccggtgcaacccactcttttatatcccatntgtgtgtaaggaaatttaagctacccgtgtcttctttaaataaaaatctgattgtagaaaccccaactagtggttttgtgtaacttctaatgtgtgttggattgcctatcggaaattttggtaaaccttcttgattgatctgatttgttgcctttaagccaaatgatgttattcttggatggactgatatcttccaccatgtcttgttaactgttttgataaactgtggtgtcgatgattctcgagtgagaaggatatgatgttatctctgccaccaagttgtgacattttaaggaatatgttatgtgtcatgatcttgc

SEQ ID NO: 143638 - DNA, 432 bp, Glycine max
  unsure (1)..(432): unsure at all n locations
tgttcaatgaatggcatttacgttgcgtgttcttctctaataaagtgttacaacacaatcataattcacacatggagtcgatttgatatctgagctttggagtgtatgcgtaactaataatctgagaagaagtaccccgtcatcaggatgtcgagtaagagctgttgcgagaaaagaatagccaatgaaaactctaattttgaccgttttgttacatccaagattntaagcaaaatacgtattaattgtgactcctccgcaagaactctcatcaaacaacccccgctgacatacatataaatgattaatccttcgcagcaataatttctaatatactatatcaattaaacgacggttacgtccactattatgatgaaaattccaactgaaatgacacctatttgaaccgtggctggattacgtacaatttaa

SEQ ID NO: 143639 - DNA, 474 bp, Glycine max
  unsure (1)..(474): unsure at all n locations
tgcagcttggtcaagaaaaaaaagagttctagagatttttgctngaaaggattgatgggaaaagcaaaagtattttttattattgaaatgcaaaacaaagccttgcttttatagactctccatgtctggtcaagaagaccattcagaagagttataactnttagaanaacttaaaacccatttgaaaaagtcaaaacctttttgaagagttacaccttttgattttttcagaaatagtcactggtaatcgattaccaaattagtgtaatcgattacacaaagcttttatgtgaaaggatgtgactcttcacatttgaatntgaatttcaatgttcaaaggcactggtaatcgattaccaaaacattgtaatcgatttcaacttttttgaaatcaatggaaccgtgtaaattcaatttgaaaactntttcaaaacaattntgctactggtaatcgattacaacaatctggtaatc

SEQ ID NO: 143640 - DNA, 381 bp, Glycine max
  unsure (1)..(381): unsure at all n locations
atttcaaggcttgtaaaggattgatgggaaaagcaaaagtattntttattattgaaatgcaaaacaaagccttgcttttatagactctccatgtctggtcaagaagaccattcagaagagttataacttttagaaaaacttataacccatttgaaaaagtcaaaacctttttgaagagttacaccttttgatgttttcagaaatagtcactggtaatcgattaccaaattagtgttatcgattacacaaagcttttatgtgaaaggatgtgactcttcacatttgaatttgaatttcaatgttcaaaggcactggttatcgattaccataacatgggaatcgatttcaaccttttgtaatcaattggaacgttgtgaattc

SEQ ID NO: 143641 - DNA, 473 bp, Glycine max
  unsure (1)..(473): unsure at all n locations
agcttaagacatcttgttgtgatcaattactattatgtngnatcgatcaaaatagagagtgtctgcctctgaagaaatttttctaacttagaaacttttttcaaaacaaaccatgatgatgcatgatgcaatacatatatcaaatgtactaagatgcaccaaccaagataacaaccaatacaaatgccattcaagagagttgggcatgtaaaagccaaaacttcttcagaacttcttcaagcttttccttgagcttcaagctttagcctttgggtagttcaccatgttgctcatgttgctacccctatctttaacagtgttctcacttttaaaaaaagaagggaaaagagagaagaagaaaatgcttagaataagtgtgcaactcacaacttctatacttgttntttctaaagctctcatggtaaaaagtgagtngtgaatcacatgtgagatcaagagactttattcactca

SEQ ID NO: 143642 - DNA, 132 bp, Glycine max
caaatttttcatgctcgtgcaccgtcttatatttattctgacttacactttcctcctatccctctttcattaccacctataccattcccataccatatgatcgaagatgcgccaaccgagatctcggccacc

SEQ ID NO: 143643 - DNA, 301 bp, Glycine max
tttggcacgggcattctcttcctttggaacccctctgggttcttattcacaggctttcgcgggagctgcattttcttctcgtaacccggcacacttttttcggacatctgtagcgacgaacttgatttttcttttgtaagtcttcctcgtgtacgaaccttcaaccattcatgataaccaccaatgatgccattacgaatgcccctaagctctttatctttccttaacgggcttttccatgcctaatggcctctttgtataacacttgaaattttgcgcgccaaaatctctcacaaggaaa

SEQ ID NO: 143644 - DNA, 442 bp, Glycine max
  unsure (1)..(442): unsure at all n locations
tgcagctttcttaatgaatgttatcattcttccatgcttngnnctatcatgggggacangaatgtgtgcaattgctacagttgacgtatggtcacagtacaaactcatagtttcatttggtttaaagcccaaacctgatagtacattnttaacccacaaaagttcacatacaccaagtgttatgcctctgaattctacttagcactagatcttgcctctacgggttgttttttactcctccaagttacaagattctctcctacaaaagtaaagtatccagaggtagatcttctatcatcttttgaacttgttcaatctgcatcagtgtacccttctacctttatagtttcatgattgtgagaacaaaatacttttccaagagtggacttcanagatctccaaatcctctcgaaagcatccatatgaagctttcatgggcatg

SEQ ID NO: 143645 - DNA, 278 bp, Glycine max
  unsure (1)..(278): unsure at all n locations
tccacatactactgattatcaagaaggacaacacctgtgcattgtgactcactacacttatcgtctcattccaacacacagttgttgtgattcagtggtaatactcaccatacctgactagtacgttgctgaccacaagctttctcaatcctccanacgttgatcctatgaattctacaatgacgctatgatatgtgccgaacggcagcatctgaatcctgcaaagtccttagctgctgcatccaagacgatgagtacatgcgcatatactaatttat

SEQ ID NO: 143646 - DNA, 387 bp, Glycine max
  unsure (1)..(387): unsure at all n locations
agatattgcaatgtgtggatcatgcaactnntcatctatcagaagtgaatcatagcaccaggcggataattcgttcatagttgcgaaatctacatagtccttctccagggatgtcaaagacatcatcacgtgacatcagctngtctgcttctgctccccctatcttcatgcttactgcagcaccttctatcagctactagtcttttcacgatgtcaagacatctcttgtgacatcagctatctgctccccctgtcttcatgctcttactgcagcatcttttatcagcttctagtagcttacatcagtcatcctcagcagcagcagtctcccctcaagatcatatacatacaacctcccccttaaatcatgatatatgcatacattcg

SEQ ID NO: 143647 - DNA, 287 bp, Glycine max
  unsure (1)..(287): unsure at all n locations
agctttatgatcctggctatttgaacacatgtttcttttcgatcaacaattagntatattgatggagatgaggggattctcanatatagacgccaccctattgaggaattggcagataaaagcactttcacagaaatgtgctatcatataagtgaagtgttgttacactgaatatgtgggtttgaaagataaactaataaattttgactgcgattacttaacagagatttttgtcttggagaccttgaatgtgggcttagttcgctcttgttaatatgtgcttcata

SEQ ID NO: 143648 - DNA, 108 bp, Glycine max
agcttgcaaaatgtggtccaccaattgctatctatgagcgtcgaaaaaattatgcacaaagtggcctgcaaggagtccaaccttctccttcaagaagggtcgacgcct

SEQ ID NO: 143649 - DNA, 334 bp, Glycine max
agcttgcttgtggagcttctatggattctttatctttgagcttcaatggggtcctttaatggtgattttccaccatggagatgcagcagaagacaaaggaaaagaggtgagaggaggcgccatccattaatgaataagccatggaagaaggagcatcaccaccaagatgtgccttggataagaagcttccagatgatgcttcaatggaggaaaagaaagagagaaggggggagcacgaaattgaacgaattaaagatggagagaagcggaactttgaagagtgtctcataagaccttcattcatcaaaattacaacaagttgtacacatgtttc

SEQ ID NO: 143650 - DNA, 390 bp, Glycine max
tatgaaataacatcgtgtaggctcaatgatgaagatatcaataattcgttctactcaaactgagtgcagaggatatgtttcaagcacagggtcaccattttggctaagcggttatcataagaaaacatggccctcatgatgcctaagttaatgacattcatccaaacgtttgatgttcgtgcaaaattcagtactaaatgatcgtcatttctctcaaaattttaagatcacactctcactgggatacagtcgatgcattccttcccaatcaatctgacaaactgactaacactttcagtcatacctccaatcacatgttcattctcttcttatgtctgcaagctggaccaaaacaaacacctatcattccaatcaactcaataatacatt

SEQ ID NO: 143651 - DNA, 347 bp, Glycine max
  unsure (1)..(347): unsure at all n locations
cagnaccactaggactaatcttattattataatacatattaacttcgctgacaaaagaaaaactaactgggccaaccaggcaactcagactaaccagtaagcacctctttaataggggacctgccaacagnntttagnttataaaatctcctcaagagacatggaaaaagctataagnaagcatactactcacgaagntctgatgaaacggaggctatgacacaaaaagcacacaagccacgatgaacacacggtccaagagagggcaaagnngagaaaatatacaaaaagaataaatgacgctctcaccccagcaaacataaatgggactactacatctccatgca

SEQ ID NO: 143652 - DNA, 328 bp, Glycine max
cgacgaccactttttactcttatgtcggaatgaatactgtgttatatcgagacgctcgaaattgacaatatatcgagacgctcgtaattgaaaccaaatgctcgaagcaaatttcaacgacaataactctttactcggatgttcgaatgaatcccataatatatcaagacgctcgtatttgaaaacataagctctaagcatattctaatgataataactttgtactcggatgtcggattgagtcccgtaatatatcgagacgcccgtgattgaacaccgatgctcgtagccaattctaatgacgatatctagatgcttgaaactgagc

SEQ ID NO: 143653 - DNA, 440 bp, Glycine max
  unsure (1)..(440): unsure at all n locations
agctaggtgaccttncacactatatccactcaaattcctatatgctggaaagtcattaagggtgcaaaatatcatcgcatgcaacctaacagtctcaccctgatttgcatcatacacatcaaccccgtctacctaaaacttacgcatgtcttcaatcaaaggagtaaggtacatatcaatatcgtttcctggctgtcttggacgtgatatcatcatagacaacataatgtatttgcgcttcatgcataacgaaggaggaaggttgtaaatcattagcaacacaggccatgaaatgtgattagtggacaagttaccaaatggattcatgccatccgaagaaagaccaagtcgaaggtttcttggttcggctccaaattcaagatacaagtgatcaattgtcttccactgtggagaatcagccggatgtcggagaaacccat

SEQ ID NO: 143654 - DNA, 175 bp, Glycine max
  unsure (1)..(175): unsure at all n locations
atgtgggattgaattaaaacttcatacaaaggatgactcgcaataatcttctttaaaacctcttcactttgtttgatctctacatgacttcccttgtcccctttctccttgatccattntctncaattaggctaccttccatatctatctagctagctntattatcttttgcacc

SEQ ID NO: 143655 - DNA, 398 bp, Glycine max
  unsure (1)..(398): unsure at all n locations
aatatacgaagatgatgttccgagtacattgtatttggtacgaccttgccctcctgatttccagcaagggaattggcgagtggaggaacgccccgacatttacgcagcgagcataatgtaaacctttacggttttaaaagctctatagttgggcctaggctttagagtttttcttttggttaaggctttgtgtattttgttttttaaatttataatacaaggatctttcttcatctgttcctacatctctacccattctcatccatttgcatgtntacttcttttctgaaacggcagatccgatgacgagtcccccgaaggtactaatacctgtgacccgcctatcaacttcaagcaagaaacgaatcanacggaagatgaacggaacgatgatgtgg

SEQ ID NO: 143656 - DNA, 242 bp, Glycine max
  unsure (1)..(242): unsure at all n locations
atatgggctacgtgggaatacctgaactcaaattgaggtgggccacaggggatgatgggtttatgcgcgctttgtggattgggaaaactttgtgtgcaccattgcctgaccgccacctagtaccacatgtgatgggtaccccataatcctacaagcttgagttgaggaagtgtanaaaggcgaaacttcctgcttttaattcgtgaccacagaatggtacctggagatatgtcgcgggggtt

SEQ ID NO: 143657 - DNA, 402 bp, Glycine max
  unsure (1)..(402): unsure at all n locations
agctagccacccagctcgcccaggcgaacaatgtggcttcctccacaagcaaccgccttctggaggaatcttctggaaagcccaagtgggcatgggtgctatttgcacccccatttttactaaatacacccctgccttttttggtgattctttttccgtaaagttacagaaacttacaaatttcgtaacgattttctttccgtaatgttacggaaccttgcggattacataatcatcccctttttcacttacggaatgttacggaacctcacgaattgtgcaacgatgcttccttttgagttccggcatgtcatggaacttcacaaattgcctaacgaagggtgcaaagtacctcanaatggtcaaacgaaagttgcatgccaccaagcaaaggtccccgga

SEQ ID NO: 143658 - DNA, 177 bp, Glycine max
attttgatgatttccaagaagaatcctaccaagctgcttccaatgataaacatttgcttcaagaataattcaagattggttcaaccaacaaagccctgtttcaagattcacttaagacccagccctgcccttaaacaaagtgctttccagacatgccaagctctggtaatcgatttc

SEQ ID NO: 143659 - DNA, 442 bp, Glycine max
agcttgacaaagtctgtcagagatttccatgatcttcttcatcacatggtaaatagaacaaaatgaaatgaaatcaatgctttaagagcatgagtagcatctcgtcagtaagaataagtagaccctttagcgactagatcctcaagaacggaagaagcagcattatgcatgcgtaaaagactacatattgaactgaaatgaaaactccatctagtgtctccaggtctttgtaatgtgccaatttggttaacctctcttccaatctgaacttcatcatttacaaccaatgatgcaatttcagttgtataagcaacttgcaactcatcattatgtttacaagaagaacacacgacattaaaaatcatactcaaattttgaaaaaaaaatcatgaacatcaactacttcattagtcgaagcagcaaaagctaatagtaactgatg

SEQ ID NO: 143660 - DNA, 378 bp, Glycine max
  unsure (1)..(378): unsure at all n locations
tatatctctttttctacagncaaattcaatacacgggtttttttttcttcactttactaaagcaagatcccttttttttaaagagagaaaaagaccgaaccaccccagggtggctattaaaactcaatcctggataccgatatttccatctctgggcttatatttacaggtaatcaagtcttgctcctgctctcttgacagnaggaatctgtgccattaatagcaaatattcccaagacatcagaaccaacaagataaacttcatgacacactactagncacactgagtgcctccaaactaaagtttcagnttactttcgttggtaaatcgcactttacattattcagatttcagaacttataccaatatatgaccca

SEQ ID NO: 143661 - DNA, 345 bp, Glycine max
  unsure (1)..(345): unsure at all n locations
agcttggtgtgagaaagcatggaagagttattcttcctacttttatttcgtgaccatagagttgtacctggagatatgtcgcgggggtcaggggaccttggggacgtcaggtggggtgctattgcccaaaaccaagcttgaccaatcctgacccaacccgggcatagtcagttagtgagaacctatgacgtacctaagcaggcgagctcttggcagtccaccaataaaagaacaaagtccacgaagcaaggaggcttgtgtggcggctgaccagctatgtatcttgggtggcttctgaaaattaccctctggtaatcgantaccattcgggggtaatccactaca

SEQ ID NO: 143662 - DNA, 396 bp, Glycine max
  unsure (1)..(396): unsure at all n locations
tactaagctntgaattcattctatgcacccttatgggactattctagctttgtatgnnnncatcctcattcttctactttcggtgtttcttttcttcgntttaagcgagtttcgactgatcgttagatgccgaaactcacttaatcgatgtttaaatgaattttaaccgatcgttagttttagaatctcatttaatcgccattaaaataaaatccaatcgagtagcctcagttaaaaaccaaaaaataataaaataataaaatatctaaaaataataataaaataataaataataaaataaggggcaaccggacattntattttgaaaggtttctttaatgagttgagaaataaccaactgaaacttatagctaaatcaactcacaaatcaagcat

SEQ ID NO: 143663 - DNA, 442 bp, Glycine max
  unsure (1)..(442): unsure at all n locations
agcttgaagtgagaaagagtggaagagtctttcttcctactcttattcgctggcaacagagtggtacctggaaatatgtcgtaggggtcaagagaccttggggacgtcacgcggggtgctattgcccaaaaccaagcttgaccaatcccgacccaacccgggcatagtcagtcagagagaacctgtgatgtacctaaacaggcgagctcctggcagtcaaccgataaaagaacaaagaccacaaagcaaggaggcttgtgtggtggctggccacctatgaattttgagtgatatatggaatatggcctctggtaatcgattaccaagggtgtgtaatcgattacaaggcttaaaaatgaagacaagaagttacgatggtctctggtaatcgattaccaagggtgtgtaatcgattactangcctaaaaatgggatcaggaag

SEQ ID NO: 143664 - DNA, 460 bp, Glycine max
ctacctgcaagcgtagcagcttgcacctaagtatgacttacgtcaacatgtcttttttatgttctgatacaagtatagaccacagaacagaggtgttcgggtcttatcacattatattacttgatgtccatgaagatgctctaatgctttggaccaagttaaaagaatataggagaatttgcctggcacggagactctacgtgatattattttggtcttgcatcaatcatatacacattttattattataaaacgtgtactatacgttctctctttatcacattacttaatcattttatctctgcatttttacttcgtatctttctatccgtcataaaaaaattatagaaatataatgtctatcttttcctcatttttagacaagccattctaccattttcataacacacatgcaaatgttcattcgttgctgatagtattaggttaaacacacaccatc

SEQ ID NO: 143665 - DNA, 435 bp, Glycine max
agcttatgagtgaaacaatgtgactctgcacttttaaattataatttcaacgatcaaggacactggtaatcgattaccaaaacattgtaatcgattacagccttttgaaaatatttggaatgttgtaaattgagcttgaagacattttcaaactcattttggtactggtaatcgattataacaatatggtaatcgattaccagagagtaaaaactctttggtaaagattttgtcaaaaactcatgtgctattcaaagtttcaaaaaactttttaatacttatcttgattgagtcctttctttattcttgaatcttgagtcttgaatcttgatcttgattcttgagatcttgaatcttgaatcttgaatcttgaatcttgattctagtttgtaggctttcttcttgagtctcgaattcttcttgattcttgaactc

SEQ ID NO: 143666 - DNA, 447 bp, Glycine max
  unsure (1)..(447): unsure at all n locations
cttaagcacctgcagctgcagcttgaaagaggaagaggacattgttgaatcttcctgctnttattcgatgaccacagagtggtatctggagatatgtagcaggggtcatgagaccttanggatgtcacgtggggtgctattgcccaaaaccaatctagaccaatcccgacccaacccgggcatagtcattcagtgagaacctgtgatgtacctaaacaaacgagctcctggcactcaacagattaaatgaacaaagaccacaaagcaaggacgcttgtgtggaggctggctatctgtgaatcttgtgtgatatatgggttatggcctctggtaatcgattaccaagggtgggtaatcaattacaaggcttaaaaatgaagacaggaagctaacatggtctctggtaatcgattaccagcgggtgtaatcgattaccaagctagaaaa

SEQ ID NO: 143667 - DNA, 414 bp, Glycine max
atctctaagtcacctgcggcatgcaagcttgccacccagctcgcccaggcgagcaatgtttctttctccagaagcaacagccttctggaggaatcttctggagggcccaaccgggcccggtttctatttgcacccccatttttactaagtacacccccctgcccttttttatgagattcttttttcgttaagttacggaaacttacgaatttcgtaacaatacttgtactgtttgcgtactgttacagaaccttgcggattacataatcatcccctttttgacttacggaatagtacgaaacctcactaattgtgcaacgatgcctccatttgatttccggtgtgtcacggaaccttacagattgtgcatcaatattttcttttgatttcccgcatgttccggaatttcacaaa

SEQ ID NO: 143668 - DNA, 397 bp, Glycine max
  unsure (1)..(397): unsure at all n locations
atatattgatagagncatcattnttcactttttaattgtttatgaaaaaacaccatattgntctactgtagttnatcaaaaaatgaatgatccaatggtatcccaaaaatataaacaatataattatctaaatatttaaatacctcatttaacctatgttaatattaaagagggggatgaactttttttttatagntagaaatatttttctaatttattgagtgaacaaaaatgacaatagaaacaacttaaaatctcctttttttaataatccatataaagggntaaagagcaagtaaagagttntttacacaaaaataaaaaataaatattatccatataatacattaaaaaatacaaaaatagntnttaatgaaatagaanacaataaaaaaat

SEQ ID NO: 143669 - DNA, 397 bp, Glycine max
  unsure (1)..(397): unsure at all n locations
tgcaagcttctcgatatattatgcaccctaatcggatttccttgtgacaagntatgaccatttgaatttctcgagagcttccgttgtttaatatcaagctttccgatatattatgcacctgaatcagacttccgggtgacaagttatgaccatttgaatttctcgagagctttcattggtcaatatcgagcgtctccacatattatgcacccgaatcggacttccatttgataagttatgaccatttgaatttctcaagagctttcgttgttcaatttcgagcgtctccacatattatgcacttgaatcagacttccctttgaaaagttatgaccattagaatttctcgagagattccattcgttcatttcgagcgtctccatatattaagcgcctg

SEQ ID NO: 143670 - DNA, 443 bp, Glycine max
  unsure (1)..(443): unsure at all n locations
agcttctatataagatgaaccattntatcaattatcacaagttgagttttattcacaaaattaggagttatctcttttatcttagtgagagtgattctcctaagttcttgagtgattcaagaaaaccctggctatatcaaaggactttcataacctttgtgtgttgccctcgccggaaagagtgattctttccttcctttcatcttcaaccttgttctttcaaaccacaattccagaaaatccacttctgcccagaattatctcgtggtcataactctcattttacacgctcaaattaagagattcttgagcctaaactgaatttcaaaacgagatctttcacctcgttttggaatcacctcatttggagccctgtagcttgagttatcgccatttctatatttctgtccaaccaccacttaacctacgttttatcatatcat

SEQ ID NO: 143671 - DNA, 388 bp, Glycine max
  unsure (1)..(388): unsure at all n locations
aagccattataaatattttaaactttagggaatcgaatacataccttgagtaatcgattacaggcttttaaattcaaattcaaaatttgaaaattggtccataaattaatttagccactggtaatcgattaccagaaaggaaatatcatatttttgaaaagataatngntcttaaaaaaacttagaaaatatttcctttagccaaacctgagcagnatttattaaagaattctttctaagatcctaacttagtacatcgntcttcttgcatttctgaattcttgacttgaatcgcgctcatctttggcatcatcaatgtgagcgccctaaataatgantgggttaattgnnatgatttaaataacaaaaaccatgggaattttttttc

SEQ ID NO: 143672 - DNA, 246 bp, Glycine max
  unsure (1)..(246): unsure at all n locations
aggattaaacttacaatagaattgatagtaccgccttcgatcataattaagtaaataatggggaatccgctatctgaagctttaattttgattgtataacaattgaaaaaaaaaacttttcattacatctttgttccttatatgcctantttaaaaacttagaattaaaaactggtccccttggtaaaaaaaaattctataaaaatttagtttttaactctttaagggataaaaatgtgaaaaaca

SEQ ID NO: 143673 - DNA, 292 bp, Glycine max
  unsure (1)..(292): unsure at all n locations
tcagccacaacaccagcaacagcatcaaccttttctattctctcgtgaatgncaaacgnncgaagacgatgacagccgaagcagcggtggcccttacaccgccgtcgctctaaaatcagntttaagcggcggaagatgcagcgatagggccacaattgaagtggtgcggcggnccaaaggccgcccgcccgggtccaagtacaagcccaatccgcctctcataattacgcgcgaacccgagcccgccatgagcccgttcattctagaaatcccgggcggaatcgacgtcgtc

SEQ ID NO: 143674 - DNA, 446 bp, Glycine max
  unsure (1)..(446): unsure at all n locations
agctatagtgcaattaagataaacttaattttatcaacaatcagaaaggcttacatctataagaatagtttctccaggcaacaccaacacagaatcacctactcgaatatcatcagttgggacttcaacacaaattgcatcataggaaagcacagtgtcagtagaaggtgaaccttctgttgaagtaatcacaagtcttgactgagtagatatcagtgactggcaaaacattcaccacagtgtaatcatgtaagacaaaataattaaacctgcattaaaatatgactctaaagaaatgccattgttacagcaaaactatacattgatgcttaatgttcatgtaagccactttttcttataaataaagttccagttcttggattntttcatttttctaagacacaataattgatcagaaaatggaagaaagtggaagtagaaatatg

SEQ ID NO: 143675 - DNA, 432 bp, Glycine max
agctataatgagttctctcttgtagaactactaactgcagtaacagttgcaacccagctatccgatagtgatgacaatagaatcaatgccttcacctcatcctcaaatttgatctgcaccgacttcaactgggcgagaatagtattaaattcattaatatgattagttatagagataccttctcccatcttaaggttgaacaaccgacgcatcaagtatactttgttggctatcgacggcttctcgtacatatatgataacgccttcattaagcttgcaatagtcttctcgtttatgatgttgaatgcaacgttcttggctaatgtaaatctgatcacaccaagagcttgtcgatctagcaagttccattcttcttgcttcatgtcgtctggcttaacccctgataaaggttgatacaacttcttctgatat

SEQ ID NO: 143676 - DNA, 150 bp, Glycine max
  unsure (1)..(150): unsure at all n locations
ttgcaaacaaaaactttttctaacaattctttagacaacaaacttttgccaatctgatttctaaatctctttgaacttcttcttcttctttttttncaaagccttccaaagntttctggntntctaaaccttgaaaactgagtattcatc

SEQ ID NO: 143677 - DNA, 410 bp, Glycine max
aacaacagggggagaatgtgaatgtatgtatacatgattttgatgatgtcaaaaaaagaatcaaataaggctcattttgcttcacgattaatacaagattggttcaacacacaaagccttgattcaagatttcttcaagatcaagccttgcctcaaaatgtagagatttcaagtcatccaacgcacatgtaatcgattaccaatacatgcaatcgattaccaaggcacatgaaagtgtgtaatcgattacacatcatatgtaatcgattaccagagactctgaatgttgggaattcaaattctaaatgaagagtcacaactgttcaagagaaacaactgtgtaatcgattacactaattttgtaatcgattactagagaggatgttcaaggaatatcgccaacagtcaca

SEQ ID NO: 143678 - DNA, 368 bp, Glycine max
tgcaactcacgcaaagaccctaagaggttctttgcccagaggctacagatttcctagccaaaatatcgctctaactacaagaagttagtgggagcacgtgaatcaagagtatctcttgctccatacaagagtttgaagctcaagagaaatacccactccgcatcctggatcaaggaaaaccatgttctataaccattatggtcttcgattactttatccatacatactcttactctatccacattaaacgctagagcatgaaagtatctcatgaatatgataaagctccaccacattattggaaggctatccagtcaaccctcttcgaatgtaatacttccttactatctatgtaacgcaattccaat

SEQ ID NO: 143679 - DNA, 366 bp, Glycine max
  unsure (1)..(366): unsure at all n locations
cttgactctgtcatctagaaggtgtacagccgctgctataagcataaccgatctgctagggactttgtcatatacaatgactctagcttcaaccacattgaggctgctgacttttctcttgcaacttctcttaaagctttatctccaaggcatagaatgattgcacttcttgctctatcaatcatctttgatttctcctttgagcttagagattcagacatcatttcttctcctttaagagcttatgcacaaccatgttgaatcaagattgcttccatcttgattctacataacccaaagtcattntccccttgaaacttctctatatcatattgtcgttgtcccatctatcttgatcttgatcta

SEQ ID NO: 143680 - DNA, 350 bp, Glycine max
ctcaaggaagctagtgtgacactagttgtaactttgatgaatgagagttctgagagaaacacttcaaagatccacttctctttctcttttttccccttcaattacattcccctcccccacttctgtctcttttgtcctccattgaagcttgctctctaaacttgttatccaaggcactctcttggtggcgaagctcctacttccatggcttattccctagtggatggcgcctcctctcaccttttctgctttatcttccattgcgtatccatggttgaaaatcacccttgaaggacctcattgaagctcagagatccagcctccatagaagcatctcaagcaagcttcca

SEQ ID NO: 143681 - DNA, 318 bp, Glycine max
  unsure (1)..(318): unsure at all n locations
aataaataagnnnncttttctcctccaacaacttacccgctaaaacatatagagctcccattatcggntacaactagaacaaaatactcttctccaacttcctccacaaaggcatcaagcaactcagaaagcttttcacctgtcttcacaaaatcagagccatcaacagacttcaaaaacatggtaccagcctgagagctaatcaaaaaatgaatgatgcatccttgtttgcgatcagtccatgcatcggacataatagnacaaccatacttgacccattgctccctatgagccttcatcaaatattcaggatattca

SEQ ID NO: 143682 - DNA, 388 bp, Glycine max
agctttatccccacatcccaccttttatctttgcattgctgaaaaatgttctgcccctcatgatgatacaactttcttagatccctccaccaaccagattgtctttcatagacccgactagactgcaaggcctcccaacctccatacttagagttgataatcctaacccaaagctgttggtgatcagaagctatggcccaaatacatttgcccaacagagccgtattaaattctgctatgacttttatgcctaggcccccctcacacttgggaagacagacaatgtcccatttcacccaaaggaattttttattatcttggtctcctccccacaaaaaattcctctgcagcttcaccaatctgtttattaccttttgacggatcttga

SEQ ID NO: 143683 - DNA, 396 bp, Glycine max
  unsure (1)..(396): unsure at all n locations
tagaaactaagcttagnncagnncacaaattcagctgctgagagatataattttnagcattttgacaagaatttatacctacttagnaatatgaagactagagaaaagaaaaatgaaaaaggaattctaatgcaaactatgaacaatgtatagatgtcatgccatgactcgtaatttatcgaactgggatgaaacagnatgaattgaaaacatgcagccaagatcaaacattgnattagattagagagccaactaaaagaagaaaaaagaaatngntcgacaaccaaactcacaaaagtatgtcacaactgcaagaaacttcactagacagcncacaaatctatctatagaagaatgataaaagataaatncaaattgaattataaataattatga

SEQ ID NO: 143684 - DNA, 282 bp, Glycine max
tgaaacttcctgctattattgttgaccacagaatggttcctggagatatgtcgcagaggtcaagaaaccttaaggacctcacgtggggtgctattgcccaaaaccaagcttgaccaatcccaagccaaccccggcatagtcagtcagtgaaaacctgtgatgtacctaagcaggctagctcctggcagtcaacagataaaaggaaaacaatacctcctatcaacgacgcttgtggcagctggccatctgtgaattttgcgtcatatgtggatagaggcctct

SEQ ID NO: 143685 - DNA, 413 bp, Glycine max
  unsure (1)..(413): unsure at all n locations
actataaatactcagctttcccncaatttcttaaatagggggagaagtgttgtgtataatggctcatccccttatgcacttctctctctttcgaattagcttagaaaatagtttccgtgaagttaatccaatccgatgcgcttccgtaacgtttccgagagtgatttcgcgaaagttttcgaccattcttcgacgttcttcattcgttcttcatcgntcttcggtcttctacgggtaagtaccttgaaccaagcgtttcgattcattctatgtacccgtggtgagccacattgtgtttcgtgtattttccttctcgatttcatttacttntccgacccctttagacgtgctttagccattttatttaagtcatttctcgcttaacctaaaaataaaataaatttccatcgatc

SEQ ID NO: 143686 - DNA, 436 bp, Glycine max
agcttctttaggaccttgaacaagccatcaacttctctttcacaaccatgctatgtgctcgcgactggtccctttcttcccttcgcaacttgagttcactattgctaccccatagagctccgcgaaatttgttccggccatactcttccttgcgagccctcttggtctctcgttcaagggctcttgcggtaattgcattctcttcccgtaacccggcacactccttccgaacgtgtgtagcagccaacttgaacttctccttggcgagttttgcctttcctaactcgctcttgagagcttggactcctcgtcctcttccggtgcttcacaattctcttcgctgacgacttttaacttggcgagccaatctaaacctcgtatgcgaactttcagccattcgtggtacccaccaatgatgccattacgaatgcctcta

SEQ ID NO: 143687 - DNA, 282 bp, Glycine max
  unsure (1)..(282): unsure at all n locations
tgaagagagaaatcatggaagagtcagtcttcctacttttgtttgttgaccacagagaggnacctagatatatgtcgcggagatcaagagatccttgggacgtcaagtggggagctattacccaaaaccaagcttgaccaatcccgacccaacccgggcatagtcagncagagagaacctgtgatgtacctaaacaagcgagctcctagcagncaaccaataaaaaaacaaagaccacaaagccatgaagcttgtgtggtggctggccagctatggatcttg

SEQ ID NO: 143688 - DNA, 379 bp, Glycine max
  unsure (1)..(379): unsure at all n locations
cttgagtttgataatatggcggcctacccacacatgaacttcttctgagataacaaacacttatattagaggggaacgcctagtattgaaaaataaaatggcatgatccgagtctctaacacaaggaacttgtttattgagcaaagccttgttcaataatcatgcatttngttgacagaaaatgattattgggaattgaagtaaaaatatgatatatcctaatgtgaaaaacaataaatgcaagctattaacagtgacatcagaggtgtaaaagagttgggtctttctaataaacaagttgaacatataaagatattacataattatgaatgctcttatgtgctatggtgaagactaaacgtctaaacctcgatccctt

SEQ ID NO: 143689 - DNA, 325 bp, Glycine max
  unsure (1)..(325): unsure at all n locations
aactacttgaagactttggagtatatcttgatcacctaggttcgaaatgagcaacacaagagctattaatctagacagtaaccctgccatgcattcgaagactaagcacatagaaataaggcatcattctataagagatcatgtgtctaaaggagactgctgcgatgagttcatagatagtgagcatcaattagatgacattntcattaaacctcttgctagagataggctcttttacatcacatatgaaataagcatataggatgcatctagcatataagatcatcttagttgcataagtgagtgaaagcattgncattcatat

SEQ ID NO: 143690 - DNA, 453 bp, Glycine max
  unsure (1)..(453): unsure at all n locations
ttaagtcacccgcagcatgcaagcttctggggggacatcttgatttgctctctattctgacattcaccacagattctgccttcttctatnttcagattgggaatgcctctaacagcacctttgtcaatgattttcttcatgcctcttaagtgcagatgtccaaatctttgatgccataatttgacttcatcttctttggagaatagacatgtggaggagtaactggtttcttgaagtgtccataggtaacagttgtcctttgatctgctgcccttcattagaacttcactcttctcatttgtcaccaagcattctgactttgtgaagtttacattgaatccttcatcacacagctgactgatgctgatcaagtatgcagtcagtcccttcaccagcagtactttgtctagactatgaagtccatcatggactagcttttccattccagtgatc

SEQ ID NO: 143691 - DNA, 449 bp, Glycine max
agcttgcgattattaatacaccatttgcgatctcctctactccgacatatatatatatatatatatatatatatatatatatatatatatataaataaaagaaagtagagatcaaatttaattaaaagtttttaaaatacatttaaatacaagtctttcaaaagggtaaaaagctcacattcacttctctaacaccataataaaacttgttcaaataattaataaaatatttcggctcaaaacaaggctgtccaggacctcatacaattaatatagcaacttataccctaatgtcacatgctatcagagcattgtgtccccacgttcttcaacacaaggttccttaaagcaatatacctagtgatctgctcccttgaacataaagtttaagatcatcacacgacccaaacactgatagcagaccacgagtgagttatcacatttctaac

SEQ ID NO: 143692 - DNA, 406 bp, Glycine max
  unsure (1)..(406): unsure at all n locations
taatactcagctagctaagatagagtgccaagagaatccagcataagccctcttagtcttggaccatggaagnaatggattttcaattcttcaagaaaggcattgtttagcataattagctctaagcaagactcaatgagatgagttccctgaattgaagcccttttcaagctggatggcgaatcttttaagaaaatagtttcacatctacgcaactttagcttatgaatactagcagccttgggaactgaatcctccaagagtaggcattcataaattaccaatttctgcattgtttagcataatttgctctaagcaagactcaatgagatgagttccctgaattgaagcccttttcaagctggatggcgaatcttttaagaaaataggtcacatctacgcaact

SEQ ID NO: 143693 - DNA, 423 bp, Glycine max
  unsure (1)..(423): unsure at all n locations
gacctaagtgtatacgatttgtttgacaccatatttatttatttagagagtgacccgcctgttggtaatgacccaaacaaaaatcttctggttagatacacgatggcagntgtgaatcaaaagaagccaacccacacaatgtggaaagaatcttctatctgcaaaaagacatggaataatttagttttgcaattcatgacagtgtctgatatgttagaagcagatgcaggatttcttgtacgtgacactattgcttttgtatgtgaaatattggattgttgcccttggtttaagtttttagatttacaggtaagtccttatgggattgctgggctctagtttatcttgtatgtacaactattacttgatagatgtcaaatattcctctctcttgcccattatttatatttccttttccatcta

SEQ ID NO: 143694 - DNA, 411 bp, Glycine max
  unsure (1)..(411): unsure at all n locations
actaagctagagnaggattctttgtgacattcttgtgtatagncttgtttgtttctgaacactnaaagcactagaagcaagagttgacagttctaaaattgcattgctttgctgctaataaagcaaagngccaatttggatgtaaacagatagactacctgngtcatatcatttctggagaaggagtagcagnagatccaaggaagattaagagatcatggagaggcctgaacctaagaatgtcaaaagagtacgtgggtttttaagtctcacaggttattacaaaaaatttatcaaggattatgagaaaattgctaaaccagcgactgaaatgactaagaagaataactntatttggggaaaagatgctctggaagctttcaatcatctgaagcagatcatgactacagc

SEQ ID NO: 143695 - DNA, 448 bp, Glycine max
agctttagaccaaagtaacttataatctatgcatctaatattcctcaatttagaggatgtttcaaagattgaaaagtgaaaatgagaatggggttaatttagagcgaactctcacctcaaacaagtctatatcatcaatctaaacttgctcaaactggttttacgcctaaaattccaccgaatcaaaatttgactcctcaacatccaatttttaccctagaaatggttcttgccttcactatggtcatttgttttcctctcttgcacagcccaagctttctcataagtcataaatgacatttcaaactatgattaactcactttaacctccatttaccactgaatccagatttggccttccaaaccctgaaagcatcacactatttcactcacaggactacattctcactttctaaccctaggttaactctacccttcatccctagca

SEQ ID NO: 143696 - DNA, 391 bp, Glycine max
ggaaagatgttcaattaggtttctgagtgaagagcttagtccacctaaatagtcttagtcaatgatatagagacctctctttattgctaaccttatcacctccttttactgcttgacctggatggattaatacgcgatttatatatgatggtataattctctgtgtgtggcattccaatagggtgtaccaagaggactaaaagatccttcttttcgtgtgattcaaaaccactttgccatttcaagaaatctaggagaggcaacaacaaaggtatactaacttgggaaacttatattagagtagaaatgtgtgatttgtcttaacctaatgcattcatattcgaaagatgcctttcactttaataaaatggataacacagatacatcttaa

SEQ ID NO: 143697 - DNA, 375 bp, Glycine max
aaccaaaactttatccgcagattcctcttgtaagactaaatttcgatcctacttcaatcaaggtctaaggcaacagtatatgtcccaatgctaaagtcacctatctatgcacacaaatggatgatcagaccaaaagcatacaaacattaatcatcgaaggaagcattgaacacagaaaacataatcaattagatattaactattaacatcagttggtcattacaaatcctcaactaaggtgtttagccagctattacaaagaaaccctcaccataaatgagattaaaagcagagaatgattattccttacacaagaagggggatgtctcctgctcttctcagcatctcacactcactctccaactcactaatctc

SEQ ID NO: 143698 - DNA, 362 bp, Glycine max
  unsure (1)..(362): unsure at all n locations
ataaaacataagatatataacttagagtctgtcttagatcgaagcaacgcctgatgaagcttatatcatcttcgagtcaagagatccttgtatccatggcattaaagagctcacccataaaagcttggatgtcacggagctctatgagtacttcagtcagaagataagaggaatcatctttttgaggaggaagagatggggtacgttcatcaagaataagcggaggcaagtcttgtttgcgaacccactgaccatcaacatcctttcgagaaccaaaggatagaactgcatcggcaccaatggaaaacgaccttttaaccttaacatatggntcatcatccaaaggaacattgaaataatga

SEQ ID NO: 143699 - DNA, 412 bp, Glycine max
  unsure (1)..(412): unsure at all n locations
gcggcatgaagcttaagaaaacgaagatacacctctctgtctaagggaattccaacatgctcttgtcgcataatgtcacaaggcggtcaaacaagccgaattcatcaaaccaacccacataatccggcaaaaaatggcggagtatattatgtgactaaattcatcatccccccttcgataaactgtcaacctaacgagttggaggctaaagaactaacctgctcagtggtatcaagactataccgatcatgatncgatcacggcaccacgctgatgggtcagaggctgaactgaacgcgggtcgctagccgaactggtatatattaaatacntaaattccatactacatatatatcatatataaattatcctcttcgcatctatatcaaacaatttcgtcgtatcaacagcg

SEQ ID NO: 143700 - DNA, 355 bp, Glycine max
  unsure (1)..(355): unsure at all n locations
agcttncaaagaatggaactccctactatcatactaagctgcagggctagaagtagtggtctttctcttcctagatgtcatctacaataaaaaaaaacctatcagtttattagactagaagttatcaaaattgaaacagaaaataaaaactgaaattggaaacatgcgcttaacccgttatgacagaaaaattttctctacatgaatggcttaatgagatacgcacttgcttagcctagagcacttttatttcaaacaatggcttaatgagcagcgctggcttaaccttatgcatgccgcaagaaatagcgcttaacgcgaaccacacttcaaaaatttgactaagttatgtggg

SEQ ID NO: 143701 - DNA, 313 bp, Glycine max
  unsure (1)..(313): unsure at all n locations
tcagcctgatcgctnagcgacagcttatcccgggcttagcgggacctattatcgncaagcgcaatcccttacaggcttaattgaagtccaagacgctaagcgccagtcatggcagcttagcgagatttatcgagagaatgtgagcgctcagcgagtcaatctcatcttagcgcatcctcccctgtacttaagatgcatcattttagctaagctggctagagccaagcttaacgagagctgtagcttttcttatctgcagacctcactaagtggacacaccctcgcgctaagcccagnttttagagaaaaaaaa

SEQ ID NO: 143702 - DNA, 443 bp, Glycine max
  unsure (1)..(443): unsure at all n locations
cgcagcaagctntaaaaaggtcacactcccctcaaaaatctgatttcatgcttaaataggtggctntgttcgtgctcgtgcgcttagcacaattctgaaccgctttgtgcgcattagtgaattttagcttagcgcggcttttctcgctcaacggatggactgaagtggtgcgcttatcgggatgacccttcgctcagctaacacgcacaactcatccttcttccagattcttccttgcgcttagccgacgaatgttgcactcagcggatggctcgctaagccagcatattggcttagcgagagggtgaaaatcagcacttcaaaatttgcctaattaacctgaaattcagagaaaaatgattattaaacacacaaaatggaagcactaaatatttattacctatctttaacaaagagtaattagaacactacacaataaccat

SEQ ID NO: 143703 - DNA, 333 bp, Glycine max
  unsure (1)..(333): unsure at all n locations
atcaatagnagcaagctgcaacgataatacgttgaataccatcaactgataaccctcaagaaaaaaatgcctgattgaagaataaagcagaaccggtcgactgaaatctgctttgacatgagcccgatagaggtctcaagtatacatgagactcgngatggcaacaacggacacaagccttcaatgatctgatatatcctgaagaattttggagcttatataactaatgttaagtctagatgaccactcgtctcatccaccttggactttgatgtataacaataactataaattattgatggcctaatgagctttgactagtggacaagatca

SEQ ID NO: 143704 - DNA, 430 bp, Glycine max
agctagaggctatcacattacttggatggattcatatagcgcctacctaagagagacggaaatagacctgaaattgtgggaagacaatttgaagcgatatggtgggaaatattatcggaaaacatgcattgctcattgtggcatatggtatcatgatcaactgtgcacagacatagaagatgaccctagagggaagaatggcctctattcggagttgtttgaaccatatggccacgctgattacgcaggtcttactcgtaaaagataatttgcaagaaactattaagtttagttgcgtgctgcatctcttccataatgagaatttgcatgggtctaggattacaccggtacttgcatgttaatgttttattagaattccttatcactatattattggtacgaactaagttgggagaagatattctaattc

SEQ ID NO: 143705 - DNA, 202 bp, Glycine max
gcttctatgaaagctggatcttcgagcttcaatgggcgcctttaatggtgattctccaccatggagattcaccggcagacaaaggataagacgtgagacgatgatggcagcttgcttgtggggcttctatgaaggctggatctccgagcttcaatggggctctctcatggtgagttcctccacggagatgcacctgacgaca

SEQ ID NO: 143706 - DNA, 445 bp, Glycine max
agctatggaaaaggcatgcaacgatgagtgcttgttttttggatcattatgccaaaataaggctcccttttaatttgcatcagcctacatgtcttactcttagatatatatacagcgcttttaatttcaaggataatagttgcaatattgcagaacgcaacgaaaatgatcgccgcttcttccataataagcacataaaatggtctgaactttattataagaaattaaaagaagtgattagatagaataaactggacaggataacttgttaacttattttattttgaaaaaaacctggctaaaactatctgtaagtaagactaacacaacatttattgttcaataagaatttgcatgcgtttggctaatggatttaataaggatttatctaatgaaagtttatggttgattataaaatatatttacaataataagcgaatctaat

SEQ ID NO: 143707 - DNA, 334 bp, Glycine max
  unsure (1)..(334): unsure at all n locations
tctagncttccacactcatctctaatttgccattccccatgttcaccacacattttacagtaagcataaatggtcagcccaatatcaaagagatattataatcttcctctatttccacaatcacaaagnccatcaaaaaagtgaattgatgaaccttaaccaagacatcttcaattacaccatatagntagagaatggatcagnctgctagntgaagattcatttaggnaggagcaattctcagattcccaattctcaagcacatagaaacaaacattaaattgatgctcgcccctatatcaataagatttttacccactgacacatccctaat

SEQ ID NO: 143708 - DNA, 447 bp, Glycine max
  unsure (1)..(447): unsure at all n locations
agcttgaagtgagaaagtgtggaagagtcagttatcctactttntattcgtgaccacagagaggtacctggagatatgtcgcacgggtcatgagaccttggggacgttaagtggggtgctattttccaaaaccaagcttgaccaatcccgacccaacccgggcatagtcagtcaatgagaacctgtgacgtacctaaacaggcgagctcctggcagtcaaccgataaaagaacaaagaccacaaagcaaggaggcttgtgtggtggctggccagctatggatcttgagtgatatttggaatatggcctctggtaattgattaccaagggtgtgtaatcgattacaaggcttaaaaatgaagacaggaagttaagatggtctctggtaatcgattaccaagggtgtgtaatcgattaccaggcctaanaatgggatctggaagttgag

SEQ ID NO: 143709 - DNA, 341 bp, Glycine max
caagcaacaagcgctatgaaagggtccccctaagtccacgtaatcaataatctgtggcagcattttgttcccacacagatattcctcttatagttactgaagcagaatttccaaaatgcacaaagcgaaaagatgaatgtactttcgcataacaaataatccggaaaaaaacaaaagctgtgtggacagattcatatgagcccaataaaaacgacacgtgtaaataaaaacattattaatcccatgatcacaaatcataatcataatcaaagccacaatcatctgcgtgcacgccactgctcgttaacggtaatttataaaacgacgttaatgaagaaact

SEQ ID NO: 143710 - DNA, 443 bp, Glycine max
agcttgcccagagaaagaagcccttgttgatatgcttaccaccccgaaagactggaaagcagtttctaatgactcctctgcggccttcacatagagcataaaggatgggcagctcaccaagatgtcttcctcgcttgatacgaagaccagatgcccttccactacgaatctcaacttttggtggagcgtaaagggaacaactcccaccgagtggatccacggacgccccaacagacagctgtagggggtgctaatatccattatttggaaggtaactcgacaggtgtgagggcctatctgtactgagaggtcgatctctcctctaacctctcggcgagtgccgtcgaatgcacgaaccaccattgaactcggctttaggtgggaagcattgaatggtaatttctccaaagtgctcttaagcatcacggttaaactggaaccat

SEQ ID NO: 143711 - DNA, 261 bp, Glycine max
  unsure (1)..(261): unsure at all n locations
ccctataacgcaacgagagggacaaaagtgggcaggaaactttaatggtcgncattgtcaatgcagaaggtattctgcgcttcactatccatgttcacacattattgcagcttgaggttacgtgagcatgaactactaccaatatatagatgttgnttatacaaacgagcacatcttaaaagcttactccgcacaaaggaggcctcttgagaatgaagcagctattcctccttctaatgacgcatggacacttatccctga

SEQ ID NO: 143712 - DNA, 391 bp, Glycine max
ataaaccttggaaaaagtacaatggctgatttgcctaatgaatctagaacgaggaaagaaccttgcgatgaattggtcctacacctctccccaagctgtatacgcttatgtctggatgtgattgcgttcagcacaatatcaacatgaaaaatgatgaagaatgtaatgcatgatcacaaatctgcagtgctcgggctccacttgccactttcttattccttctatggtgttcctcgcgtttatctctggttctctgttgtccctctcttcttcatttgcatggctatttatagaaaagagccaagaggtgcaagcaaactctcccaagaaaaatttgttgcttagctctaaaggcactaactcacccaagtgagttgcgactcgctcaggc

SEQ ID NO: 143713 - DNA, 442 bp, Glycine max
agctttagtgactgcgtgaccacatatatttatattgagtgtccgcatggatatgttctacgattggttttgcatgaatttctaattgtcataacatataattcatggaagtgatctgggcattctttctttctaagccattggccaaacaactgtcccaatgtacattattttctaccatttgcaagccttttgagccagacatttgatttttaccagaaccctgacctagggtgaaagtttcctaccttaccctaggataggagagcaagggtgtttttcaagggagatttctatcatcttttggctagtcatggatttttaaaggtagttaaatattcatcacacaaaaaaaagagagaagacaacaagataggataagaagatcaatcaaagatggaaacgagtgacaggcaaaatagataggaagaacatgttcttt

SEQ ID NO: 143714 - DNA, 441 bp, Glycine max
agcttaacaacagtcccaaaacccaattttattcgaaaccaagtgtcatgatttctatattaccaattgtggtagttgttaatgttgaatcatagttttgctttctcatctgccctttgtctcatctctttaccttacaactcagtcaattctatcattaccctttttcaatatgcagaattagcaacatgaaaacatatctaatccagcaaatgccaccatcaatagccaggctatggtccagaaccaacgaaatgcctcatgtcccatttctttcatcttctaaatttattgtagcttctgcagatttaaaagaagcatttggttcttcatttcaacatgaatctactatttagtttataattcactcaattctgcctttaatcattttcaacatgcagaactatcaacatgcaaagatatctaattctgcaaaagcca

SEQ ID NO: 143715 - DNA, 286 bp, Glycine max
  unsure (1)..(286): unsure at all n locations
accccatttntaccaactatcaaaccttagaaaactatattatctacacaaaaggtacacttctctatattagcatagatggagggtttcctaaagactgaaagaactctgctgagatgtccctaaagaaaatctaagctcctactatacactaaaatatcatcaaaataaacaactacaaatctacctatgaaatcccttaagacatgatgcataatcctcataaaagagcttggtgcattagagatcccaaaaggcatcactagccattcatacaaaccaaact

SEQ ID NO: 143716 - DNA, 441 bp, Glycine max
  unsure (1)..(441): unsure at all n locations
agcttctacatgaaaatggccccataatttgtattgtagagctcgcgcaattcgaaacatattactcccacaatattccacgaagaatgaaaggaacatattaataaaatatccatttaatttgctgctgtgtcctgtacacaaggacagatccaaattntatttctaacggacaatttttttttataatatctccatagaaaaaaatattacaaatttttaaaaaatacacaatatgtaggaaataaatctaaaatatttttcttttagcaaattataattcttcttcacatactttcatatttgtaaaatattgtgataatttttcattgacaatactataaaaaaattgtaaggcatatcaatttattcttccttttattcttataatgtttacattcattntaaaaaaagtgtcttatgggatcgaacaaaactaac

SEQ ID NO: 143717 - DNA, 310 bp, Glycine max
  unsure (1)..(310): unsure at all n locations
gacttatgacgccctnattacatgaaaggattcacttattctaaatcactgccanataaataggaggaattagtgccaaagcaagtactatttaacctaatactttataggatatnatntgctatattagtgttcggttattctatggagtacctttcacatataatagaagtacatattaagtattagacgtgacctgacctcaatacctatgacatgggaaaaatgtaatgtctctgagccaattacttaaattatttagtgctaggttataatgtaaagtacgttttgcatacaatagcagaacata

SEQ ID NO: 143718 - DNA, 324 bp, Glycine max
  unsure (1)..(324): unsure at all n locations
agcttccacagtgccggtcctagcaaagttattattctcacagagaaattctaccaataagcgctctctctttaacggagatggtntacaatactgtccaatccatacgcacatctatgttgatgcacagcacgcttacgctcatacttctttacgaacgttcactttctgcaccacatccttatggctgagaaaactgcactcatatacactcaaggcgacttcgctgcctataatatatacatgtacttgcacagtgtatttgctacctacatcacacacatgtcctttgcatggatgacaatcttgcgtactctaagcgct

SEQ ID NO: 143719 - DNA, 433 bp, Glycine max
agcttcactgtgatctgccatgagctttattttatgatccataaggctttcaacaggtctacagttctgcatacctgtttcttctaaaatatcaagagcatacttcctctgagaaatcacaataccatctcctgattgagccacttcaataccaaggaaatacttcaaagatctcatatctttggtctggaaaagactgaataagtgctcttttagctgggcaatcttaggaggatcattccctgtaatcactatatcatcaacatagaccattagatagacacattttccaggagatgtatgatagtaaaatacagagtgatcagcttcacttcgttttagtccacacatttgaacaacatgactaaatctatcacaccatgctcgaagagagtgtttcaacccataaagagatcgacgaagcttacacata

SEQ ID NO: 143720 - DNA, 170 bp, Glycine max
  unsure (1)..(170): unsure at all n locations
ataggaaatcanacatcacatgcatgcatggtagctcaaagagctaagcctctctgaagagaccatacagagccactccaataaaggggcataaattcgctacgcatcttttttgctaaaaaatttctttcaagtagagcaaacttcaatccttctttgcacttacataa

SEQ ID NO: 143721 - DNA, 433 bp, Glycine max
ttagtgtcttggaatagcaagaagcaatcttatgttgcactttcaactaccgaagctaaatatgtagttgtaggaagttggtatgctcaaagtcttaagatgaagcaacaactaaaagaacttggagtaaaccttgatcacatttagggattacgcatatagaaataaggcatcattttcttagagatcatgtgttaaaaggttacaactacattgacttcattgatagtaagcatcaactagcagacattttcactaaaccgcttgctagagataggttctttttcattagaaaggaactaggcatattggatgcatctagcatagaataatattttgtttgcatagcgtgtgattcatattgctattcatatcatttgttctttgtttaggttgagttacacagtatcggttcatgtgcatacttattagt

SEQ ID NO: 143722 - DNA, 452 bp, Glycine max
agcaccgcggctgcagcttactcacaagggtccgggattctgtgtgcataatattcttgaagactggtcatagtcaaatggaaaaagaggctcacatattaactgatggaagagggttttgatatgaatatccaggaaatagctgaaagatgaatccattgctggaattggagagctcgcggttgacgggttgattcactggccactgcttctgtggctataaccaagagagctcacctgaatgcagggtttctttttgtggctgaattttgaatgtacacagccatgataatgaaggcagggagatctttgtacatggaggatgatagaaatgatctctgtctttttttctctagttttttttcccgagaatggggggcttgtggattcatttttgtggtcacaaataggatataaatatgatgtgaaaaatgatagatagaggagacatg

SEQ ID NO: 143723 - DNA, 447 bp, Glycine max
agcttagaatacgcaacccctcgcattgagaataagattcttgtcaataatgcccacgctggtgacgatttataaaattatttttgcggttggtgaaaccatcgattacaagaacaatcgtactaatatagatctatacacttactaccaaaatatataggaacatacataattagatatgggaatattacaaatagaccgaaacccggaaatcccatcaccttctttcaaattgaatcccattccccctacaagtggtgctggaccgcattaagttttctgtttttataatttcaaatggttgtgtacaaatcaattcatacgtatcaataaactaaataaccctcttatagatatttgataaatgaggtacataatactaaaacgctcaaatatctaattgtaagaaaaaacacactaataacacaatgaaatttattaaacatc

SEQ ID NO: 143724 - DNA, 357 bp, Glycine max
  unsure (1)..(357): unsure at all n locations
tcaactgcacaagactcttaatattagaagagtatcctatgtgaaccttcacccgacgaagacactgacaaaaacttatcttctgcttcttggacaaatcatggcaagctgggggcaagtagattttcttgccatcagatcttggatgcaactgagatcgnatacccatatcagctagatcttgacaggtattcaagccatccttcgtcttgccttgaatgttaaagagcatcccaatcacactgtcacaaacattnntctccacatgcataacatcaatacaatggctaacgncaagatcacaccagtacagaagatcaaagattatggacctcttcttccatatgcaactctgac

SEQ ID NO: 143725 - DNA, 424 bp, Glycine max
  unsure (1)..(424): unsure at all n locations
cctgcgagcatgcaagcttgaaaactatctaaagactaatgggctttttntctcatggaccctccgaattaaggaacattaatgaaaagagatatgatatctacacaatagcattatgatatatacatatatatatatatatatatatatattatgtattattacttatttgtatgcgcttctctctatatctatctcttataagaaaaagtctaatgtaacgtataaatatgttttctctaatcaaaggcaaaggaggaacgaggctttggatggtgtagacagaagcaatacatggctcgcgactcaagtctcctaattaactagacgtggtgtacatcgttgtagtgtgtttgaatggatgtgagtataattgattttggataaaattaatgttagttacaattgattgtaaagtaatata

SEQ ID NO: 143726 - DNA, 444 bp, Glycine max
  unsure (1)..(444): unsure at all n locations
agcttgtgactcttggcaatttctttaaaactagtcttcttttaaaaattgtgactctttttgaaaactaatcacttaaaaagttgtgacttttgaaaaaaatttcagaaaccagtcactttaagaattgtgacttttggaaatttatttttctgaaatccgtcacaggtaatcgattaccatcgaggtgtaatcggttacacatcaacagatgtgagtcttcatgtttaaatttgaaaatcaaaatgtttagaaactctggtaatcgattacaagtattgtgtaatcgattacacaagtttgaaatgatttgtaaaagttttatcacaagttatgactcttgaaatatgaaatataacgttttaaaacattggtaatcgattacatgattatggtaatcgattacagctntgtanatcagttttgaaaacaatgcttcctact

SEQ ID NO: 143727 - DNA, 237 bp, Glycine max
atcaaaactaggcagcaaacccctcaaaaggtatatatcccaatgaagattatcgaattcattggaaagattatcgagtcttcctgaaaaattcattttggcaagcacgatcaacttacggagactcattttgcatagagcatccgcccttattatgtttagaggaaagctgctttcatttttaaaaactaaagcttcaagataatctgctgcctacaacattgcaaaagggaaata

SEQ ID NO: 143728 - DNA, 431 bp, Glycine max
  unsure (1)..(431): unsure at all n locations
agcttatcgttgctaagcccttagcgaccgaatttgtgctctntgttcttatagattgctagttagtttcttaattagttactactactagctaaggtttggaatgcaggtagtgttgcttggaaagctgtgtaaaaatattgccttattttgttgagttgttgcttggaagcatctactttcttccttcactgttgttgtgtagtcgtttctttcatgctctagttattgtttccatgcttcatatcttatagctttttgggatagaggttgttcaagttgtttggccttattgttcatagccttctggctgatgtttaacttctgcctgatgtttttaatatccccattgattcgtagtatttggagggataggagcttgaagggaacagaattggtgtgattgattgagggtcaactatccaatgcat

SEQ ID NO: 143729 - DNA, 270 bp, Glycine max
tggatgatttctcggaatatgggccttcttttgaatcctgctagaagaacttggagatggtgctacaaagatgcatggaaacaaacctacttctaaactgtgagaaccacttcttggtttgagaaggcataatcttgggcaaaaaatttcaccccgagagaatgaggtacaccgggccaagattgatgtcattgagaagtttccaccaccatcgaatgttaaaggcattaggagcttcctaggacatgccggatttacatgagattatca

SEQ ID NO: 143730 - DNA, 299 bp, Glycine max
  unsure (1)..(299): unsure at all n locations
agattctggcttcttctattgtcagattgggaatgcctcttacagcacctttgtcatgattttcttcatgcctctttagtgcagatgtcccaatctttgatgccatattctgacttcatcttctctggaagatagacatgtggaggagtagctggtttcttgaagtgtccatatgtaactggtggcctttgatctgctgcccttcattagaacttcactcttctcatttgtcaccaagcattctgactntgagaagtttacatagaatccttcatcacacaactgactgatgctgatca

SEQ ID NO: 143731 - DNA, 407 bp, Glycine max
  unsure (1)..(407): unsure at all n locations
agctntgatggtgttgagaagaaatcacatgtttgtcatcatcaaaaagggggagaatgagaatgtatgtatacatgattttgatgatgtcaaaagaagaatcaaacacggctcattctgcttcaagattaatacaatattgtttcaacaaacaaagccttgattcaagatttcttcaagatcaagccttgcctcacaatgaaaggtttcaagtcattcaaggcacatgtaatcgattaccaatggtttaaaagtgagtaatcgattacacatcatatgtaatcgattaccagagactctgaacgttaggaattcaacatttaaatgaaggatcacaactgttcaagaaaaatagctgtgtaatcgattacactaattctggtatcgattaccaaagaagattttca

SEQ ID NO: 143732 - DNA, 340 bp, Glycine max
  unsure (1)..(340): unsure at all n locations
accatagaatctcagctntgtgcctgnncgatggncagcaatgctctagcgtgtatgtccggcanactgcttgncaggncattgacattagattatcacatcttgcactatatcatttgaagaattttgatgcctcgntcttcttatctagctcaagcctctgaggaagattagattctgatgtgggatttcttgaccagtcgncaaatcgactgggcccatttgattcgntaccgcatgcataaggcattgcaggctagagcacctttaccctatcctcagntaatcactttatttctgcgncatttcaatgtacctcttgcttcttagcctttcattc

SEQ ID NO: 143733 - DNA, 438 bp, Glycine max
agcttgcccagagaaagagtccacggaggaaatgcttaccacctcacaagactggaatgcggtttctaatgactcctctgcggcttccacatgaggcatagaggatgggcagctcaccaagatgtcttcctcgcctgatacgatgaccagatgcccttccactacgaatttcaacttttggtggagtgttgagggaacaactcctactgagtggatccacgggcgccccaacagacagctgtagggggggttaatatccattatttggaaggtaacttgacaggtgtgagggcctatctgtactgggagatcgatctctcccctaacctctcgacaggtgccgtcgaaggcacgaaccaccattgaacttggctttaagtgggaggcattgaatggtaatttctccaaagtgctcttaggcatcacgttcaaactgga

SEQ ID NO: 143734 - DNA, 190 bp, Glycine max
  unsure (1)..(190): unsure at all n locations
tcaaacctcatattaaatgaagggaaacagatcaatatcaaaggtttaggcataaccaatcaaactcacaaataagacataaccaaatcagaatccaaacaatttaaaatccaaaaccacatagtatcaaagcacaaaagnctgaaatcccaatactacaagataaattaagnactgaacataatgatct

SEQ ID NO: 143735 - DNA, 381 bp, Glycine max
cagcttaaacattcaatttcgaacgtctcgatgtttactggtacttatccaacatccgagaaaaaaggtattgtcgtttgaattggctcatacgttcaacattgaatttcgagcgtctcgatatattacggggctcaatccgaaatctgagtgaaaagttattgtcgcttgatttggcacaaacctttcacattcaaggtcgagcgtctcgatatatgacggaactcaatcgcacctccgaatagaaagttattgacgtttgaattggctcataggatgaacatttaattgagagcgtctggatatattacgggactcaatcagacatccgagtaaccagttattgtcctttgaattggatcataggttcaccattcaatt

SEQ ID NO: 143736 - DNA, 382 bp, Glycine max
acgtgaatggtgattggatcgcagcaaaaacagaaacctacggctataagacataaaattctatattagaattctacttaataatttgccccctgaactttacagcttaatattagtctctcacacatatccttataaagccaccctaatcatagcttaacaagaataagtcactctctcacaaatcacaatggacactcttatataaatccatactcaaatgtaccttttaatatttattcccttacttatatgctgttgggtttgtaactgacttaagcattacaatccttgcaatactcccaccaccttacttctaaccatgaatggttcccaacacaataggcgacatctacatatatattacaataacaatacttat

SEQ ID NO: 143737 - DNA, 315 bp, Glycine max
  unsure (1)..(315): unsure at all n locations
taacagaaacagaaactaactatttatttcacataaggaaccgaccccaaggagggacaagtagcttctgccttaaagaatctaagccttaaggagaataatttagntgatgaacctggntttattcaaagaacctgtgtattcaacatgactttttcagtcttttctgtcactgaatttcaaaaagttatgcctatgacacaagattcaaaacgaagcatatgtagcaaatatttatattttgagattaaaatttaaaagcacaattcttatatgtatattcggctctcagtattataccggaacacagaaatc

SEQ ID NO: 143738 - DNA, 348 bp, Glycine max
tttcctaaccattttatgtgggccattaagtctaccatatgctgacaatagccgagaagcgcatgaatctcttccggggcggagtaagcgtccgccattgcctcgcccttggctaacaatcggggaacgtcttgactcccgctctaggtaagagcaaaccgatccattcacatggttgcctcttggtgtaaagagccgatcacccttcctctacgctcttcttccgcgtatacttgggcatattcgctcgcactcatatgctcatgggccgcggctagacctatctcttcttggtacttggcgatgactactaggatgttggtcttcgtctcacataaacggtgagac

SEQ ID NO: 143739 - DNA, 422 bp, Glycine max
ggacctcaagcgactgggctgcagctgaactcagagggtgctgtttatcctttttgggaagacactgggatatctgctgtctgctcaatccagtatacaacgactctctctgatacgcgcgagcactttaaacataatatgcactgctgtttctattctgatctgaacggactaccattcgcctgtgcaaccgtaatcgcccgagaactaagatcttatccaacctcgatgccttagaccgggtaccttatgttatgggccaatatactcaccacctgtgaagactcccaatggcatgatcggagtgtcatgtgatgtagcttgactatcatgtcataacatcccggccgtattttgttgttacggacttaaccaatcagcgcgcattttgcaagagaccacttccacgacctttatgaacg

SEQ ID NO: 143740 - DNA, 398 bp, Glycine max
  unsure (1)..(398): unsure at all n locations
gaaccgcaggcctgcaagcttaccacaaccgccaatcagnggactatattagntgtttattttgcctgagctatcatgagtaaagaacatttacccactcattaatacgactgacgtatagctagcaaaatcggctcatattgctacatcatgaagccttcaatggtaaattccttattggggcaatgtttcttctgatgataagatggctttagatccaaggatgaatcttctctatataagcggcgcttgtgatgatgaaccaatgcgattttgatgatgccccaagccccagtgattgattcaagacttcaagatcaagcctcaagaaaccaatccaaagtttaagattctagagaagatatcaagaagcaaccagccacgactttatatatgat

SEQ ID NO: 143741 - DNA, 413 bp, Glycine max
tcttttcatgactagaacagtatactcgcgcttcatttaactgtctatgggcttggcggccacactcaacaaagaactgtcgacacctactgtacgttgattacaccaatgctgttatgggagatgtgcgacaatcctttaaaaccttattgatacattctgagaggttcgttgtcatgtggccttatcgacgtccttctctatcataagccatcgttcattgttcctttgagatgcgatcaatccatgttgctatggctggactcagctcacgaaatttctctaaatattgatcaaaaatgtgcttgcaaggagtgtatgttgcataaaattagttatgaataacaattttaagtataaatgaaagtaaaatacacgtgaccatcaaatatgaaatcttacccaacttcttc

SEQ ID NO: 143742 - DNA, 319 bp, Glycine max
  unsure (1)..(319): unsure at all n locations
aacgccgatatattatgtgaaaaagcaataacttattaataacaaaagatgaatttggtccacccattatagntgtagaaattatatggctttcgttaagaatgagataatgagaaaatagagagacagaacattcaattgatatggtatattttgaatggatacgaaagacaaatcacttacagacctatttatagtaagaattaagtntctaacccctgaccctattccctctaatattattcgatcatattacttttgctctaaatattntgnagatattctaatacactctacattatttgaatgaaattttgac

SEQ ID NO: 143743 - DNA, 421 bp, Glycine max
agctttaagaaaacgtcgaagccgagtgtatactatttttcttccatgtctcagatgtacgtagcttatgtcttcttcacagatagggcatgaacgatgtcctttaacattgtatccactcaaattcccgtatgttggaaagtcattaatggtacaaaataccattgcacacaacttgaatgtctcattgtgatacccatcaaacacaacaaccccctcatcccacaactttgtcaagttctcaatcaatggattgataacatcatgtatttgttcttcatgcacaaccaatgaggcaagtcgtaaatcgtgaatgtataaatacatgattttgatgatgtcaaagaataatcaaacaaggttgttttcaagattacttcaacaaacatttaaaggttaagcattgcttcaagattaatac

SEQ ID NO: 143744 - DNA, 228 bp, Glycine max
  unsure (1)..(228): unsure at all n locations
ttaacttcattttcttggtctatcttttctagtaattcaaaattttcatttttactcctgataggaaaacctttgaaatgagaacatccttcattcttccttctaatattttgggagattacaagatagaaagagggtctctccaactcttaaaccctgagcatgttcttaaacttccttgaacatgttgnttagaaattttcgagcttgcttccctattctggatct

SEQ ID NO: 143745 - DNA, 388 bp, Glycine max
  unsure (1)..(388): unsure at all n locations
tccttctccccctatcccccccacccccaccagcatgncatgacacgtagaaccgaccctaagcgaccgcagcagcaacccgaaccaaacgagaaaactatttttacatagcncccccaccggaacacacaaaacatccatgacttacgggcggcttctaacgtacgcccctcattccacggtgaatatgctgcttagcagagcccaaaagataatagagtcatggaccatgatcatacctcatccacaaagctacgcggatgccggcgccgataaccaaattcgaaccctcttaaacgcatgccgtggaataactntcggtctagcatggcacctccacccacatatgctctagttgaggagctaaacactatcctatcattcatat

SEQ ID NO: 143746 - DNA, 443 bp, Glycine max
  unsure (1)..(443): unsure at all n locations
agctgtngaaaagtgttntccatttagggatcaagaggagttagaatagacattctgcttcttgtacctagcatgtaagcataaaatgaaaacttgtcatagtcgtgagtagagtggtcagtttaattagtttaaacaaaaaaccgaagatataacaagattattaatttttcaaaaaattaactaaaaaaagaaaatattaaaattagataattaaagataaatatcctaagtactaaaaaaatattagaaaataaaagatatatttttaattaaaattttcaatttttttataaaagagatataatctgaaaagttaaactgctaattatttctagatttatttaagacatagttagcattttaattacgaaaacaataacaaaaaatataagatatttatgtttagtttttcttttcaaatttgatcaacaaaaatttgg

SEQ ID NO: 143747 - DNA, 437 bp, Glycine max
acctcagagtcacctgcggcatgcgagcttctcctccccaaagtcttgagcttcttcttcagtgtgctaccctatcctgtcgtcttcaattatcatgcgtagctctctctcctccataatccttggtgagtattgttgtgaatcaaataatatttatgtattctcgccttaatattataaaaagattagatcagttactattaataggtatttcaagactaagttgactagctttaatatgcattctattgctaatctttatgtattactaggtattcgaatgttatgttaattagcatgaaaatattatttagttagttcaggtgaacatattatccggtgattgtatatattcctgacatatgatatgcgttatatatatgtatgatattttaggcagacacacgtgatattagctgtggtgatattagacacac

SEQ ID NO: 143748 - DNA, 430 bp, Glycine max
agcttgcctaattaacctgaaattgagagaaaatgattattatacacacactactgaaaatctaagtgtttattacctatacttaacagaaaatacttataacattacaaaataaccataaattgagagagtttgatacaatttattcaagatttatacacaaaagtgaagtattttcactgactaacaactttcacaaatttacagttttgcttgttctcaagcaaaaagaaaacagctcacttgtcctcaagtgacaatgacatgcagtgactatgtacaaaggtgtatgctacaaagtgactgattgcatgataagagaatggagttaaattccctcatcacttgtctttcacaaagtatgtagtatccacagagaagtataaaatgtaaccttaacagatagatgatagtaggcataagactaata

SEQ ID NO: 143749 - DNA, 439 bp, Glycine max
  unsure (1)..(439): unsure at all n locations
ctggtatgattcatgtcaccgaaatcttagtgatcaacaccaaccacctaactcattactaatatatagtcgtctatcaacacaataacaataacattaataaaaagtatttattcacatgatacataagaatgtgatgcatgtcggcagactaatgaaattttgttagttatcgtatttgattaaattagatgaattaagggtcatttggcaatgcatgtaacagctaactaatcaaccttatttcatcaatgctgcgctcaggcattgcgttttaagccacatattttaactntattttagttaggccctggctgaccaaacaaggcagtttcttaaggctctaatcatctatgtttttcttaattatactcatcaactttttttattaataatttgaattctatataagaacatttatattacttgttgctcaaat

SEQ ID NO: 143750 - DNA, 400 bp, Glycine max
ggattaactatctgtaattaaggatcttcagatttgaacactactcatattctctcctcaaaagcgagtaaatcattataatttatcaaaaaagtctactttaattgacgatgggtgagctttgtaaattatttaatatcaataatttattcttaataataataattagataagtgaggtggcaatagtttggcgcaaaaatggaggtaaccggaggatatagactgccggggaagtgaaccaagacacaaacctaacacaagaagagagagaaagaaagaatgaatgaactaataatcatgcactctctttctattcttcttctttctatcataacataactatgatatcaacaccatataataattaatagcaataatttagtaatactctcttcatt

SEQ ID NO: 143751 - DNA, 296 bp, Glycine max
ccctccctatgacacttgaccccggaccttaagcaccgcggctgcagcttataccttgagatagaggttgttattgtcctggattcagctagggactacttttcttatcacccttatgttcattacgttcgaaaataatatctttgttttgctatatgcaagaaaatttcaatgctggttgtcacacaaaagcgtgacaccctatatccctcacatctattcttattcacgaataaaaatgttcatattacttcacagtatgttttaaatattcttaaatacgagcctttcaaatg

SEQ ID NO: 143752 - DNA, 454 bp, Glycine max
  unsure (1)..(454): unsure at all n locations
ttaagtgacgccgctgcagcttgatacatataagaaaaattgttgtatttatnttacacatctcatctgagattgttaagagtcctttcgtctttgatattgatacaattatctcaaactgataccttttgtcccacttaacaatcaataatgaagaatataagaaaaagatttaatactttaattaatttattgatcttgtaaaatgacaggaaaaataaaaccataatgacgaatacgatgatataaaaagagtattaagattgaatttaattaactgtgaaatgacattaaaatacttgcaacatatttataccttgtttatttgaatatgctacaatatatttttacgtattttaaccactctttgttgaaaaatgatatgccaatatgataggacaacgacaacatgtggctggtcccttataatgattagtaccacgacattagcaag

SEQ ID NO: 143753 - DNA, 376 bp, Glycine max
ttcattcctcctccctttgtcaaaaagaattccgccaagactaaccgcctgaattcttttagtgactttcttctaccttgtccaaaagaacaaaggactaaccgcatgaattctttagtgtgtcccttctcgccttgcgaacagaatctcacaaccgatacaactctgagaatacatctgattctatcccttccctaaaacaaaacaattcaaaggactaaccgcctgagaattcttttggtatcccattcacaaagtttcaaaggattaaccgcttgagaactttgtcttaccacattggaaggtacatcctttgtggtacaagtagaggagacatctacttgggttgtggtgactgagaacaagagacggtaca

SEQ ID NO: 143754 - DNA, 330 bp, Glycine max
agcttatgctgcaaacatctacaatagaccttcttcacttcagcagcaaaataaaccacaacaaaacaattatgacctctgcagcaacagatacaatcccagatggaggaatcaccctaatctcaaatggtctatccctcaacaacaacaacagcagcctgcttctttcttccaaaatgctgctggtccaagtaaagcatatgtttctccttcagtgcaacaacaacaacaacaacatcaactgagacaacaatccactgttgaggccgcttctcaaccttcattataagaattagtgatgccaatgacaatacagaacatgcagtttta

SEQ ID NO: 143755 - DNA, 304 bp, Glycine max
  unsure (1)..(304): unsure at all n locations
tccccctgattcccccattggaaaagctatagatctttcttattcctcatccagagaagctggagctctctctgattccccagnttttttatctgatagatgaagaagatgctcggactctgntgatctctctgattataactatattagtttcagnacattattttgatgaattntgggttctgattataattatgnacttatactttctgagattagccactatgctcgntttgaagcatatggaacaatntgacttgattctgatgatattgcagagaaacacctttactctttaataaaa

SEQ ID NO: 143756 - DNA, 435 bp, Glycine max
agcttagcagaataggtcttctgcagtgaattgatcactgtgggtccgacaaaaggcaaatttgatcatcctactacgacgactgagaaaactggggcgaataaagagggtgagaaagacggacaaacccctgttgtgactgccattcctatacgggcaagtttcccaccaacccaacaatgtgattactcagccaataacaaacctcctccttacccaccacccagttatacacaaaggccatccctaaatcaaccacaatgcctgtctaccgcacttccaatgacgaagaccacctttagcacaaaccaaaaaaacacaccaacaaaaaagaatattgcagcagacagcctgtaaggttcaccccaaattcgcgtgtcatatgctaaacttgatcccatatctatttgataattcaatggtagccataaccct

SEQ ID NO: 143757 - DNA, 319 bp, Glycine max
  unsure (1)..(319): unsure at all n locations
tgggctgcagcttgactgagtcatcagagatgttataatatgtgaccttggcatgaatnncacatcatctttttcaacatctggttcaacaatcaagaaatctatctttcaatcttctctctcaacatcgngcaactctttcaacagattgtttctgattcatcttctcttcatctttctaaaaggttttgtncaaaactttttctttcaagataagtnctttgatcaaaaacttgtgctactcatcttttttattctcttctccctttgccaaaagatcgagggactaaccgcctgaattcttctatgtccctcttct

SEQ ID NO: 143758 - DNA, 236 bp, Glycine max
  unsure (1)..(236): unsure at all n locations
gctcgaagatggaatgttatttataacaacttttactaagttattcacaacctctttaagatcttcaagatctgatttcatatttgagatttcttgacatacctgaggtatagatatgttttgagtctcatgcataacttttccctctccaacagntgaacactactgcaaaaataacatactacgacagnncttgagtacatttaaagaccattttgaatcatcttttaaaccaa

SEQ ID NO: 143759 - DNA, 297 bp, Glycine max
  unsure (1)..(297): unsure at all n locations
caatcacacaaacaaaacacagaagagaacccggaaaaaaagaaggaagacacaaacaacagctcaccggttagcagagaaacttcaaccccgagcaacaatagctaaacactataacagcgagctccgaggcggatatattacaagctaattccttagcgagccagcagtcaatgctcacattgcatacttatccccaaaaccacaagagaataagaatagnggcaaggagaacataccattcgcttccaccgcacagacgagagggaacacgagcagacgcgagggaagccgacc

SEQ ID NO: 143760 - DNA, 376 bp, Glycine max
  unsure (1)..(376): unsure at all n locations
gtgaaccaacattaacgagagcttaactactnatgaaagaagctaacaaatgaacaatgcttaatnaccanacatgggggaagctaaaatcatcaaaacaagcctaaaaggctgaaaacaataagcccaaatcttcaaaatcttcagaagcatttaatcaaacaccttagaagtaaaaatatctatccttcctgtaagtttaggattggggatcacattcaattgctgatggagagattgcattactaaatctagagagagttcttgttgcatgtaccatgggcgatcaataaattctccatcagaagaaaatttacaggtaggaaaacatcttttnccaacgcatccaatttncctacattatagtatacaaccc

SEQ ID NO: 143761 - DNA, 369 bp, Glycine max
  unsure (1)..(369): unsure at all n locations
ccatcacatgtggtactaggtgttcttccttcgaaggngcacaacaagtggtccacatcctctatgcgcgcacaaaccaccatcccctgttgcccacctccaactgagctcacgtactcccacgtatcccatatcctcgttcttctcaagaccgggcccccatcatattctcccaagctttcacaacatccaatcaaaacaacattcaaacaggacaagctatcacagccaggcaaaacagagcaaggcataaactctgctcaacacatctaccaaaatcacagcttttctcacttaaagaccccagtaacaattccttcgatccaattcggcaaccgttggatcgaccccaaaattttactggaagcc

SEQ ID NO: 143762 - DNA, 355 bp, Glycine max
  unsure (1)..(355): unsure at all n locations
tgtagcattatattatccgccactccttcttgggtgagcccgaaagcaatctttcatctgagagtgaatcctgatgcatgggcctggtcttgggatcattgatcagttaattaattctaggaccgagaaaacattntctaatttcttcaaagtcaatatgacgtagattccttgcacgatcctctataacattatttgctctgctcttctccaaatatttcttctttaagcggagntctcgctggtacttccttagaggttcacctccaattatatatgtactggccatcattttagcatgagcagatgcctcattaagggccatctgctcttccatgtactttctttgagttca

SEQ ID NO: 143763 - DNA, 365 bp, Glycine max
  unsure (1)..(365): unsure at all n locations
atctaacattggatttcctaacaaacacatgtaagggaaagaattctattcattntttatgaaccattttgagtttgaaatttaaatgacactcttattcctttcatcaaaatgtttgnctaacccaatatcattggccaatttcaccccattagcccgagtagcatgatttataagaaaataatgaagatcattgatacaatgctaaaattaatgatacatgtaagccaaagtggctaacacccattggaagaatatgaaagattaatatcttcttcatgggtagattctggaagnatattaaacattttcattttgagagacgtaccgggtaattattattttctcattgataagatnaaata

SEQ ID NO: 143764 - DNA, 298 bp, Glycine max
  unsure (1)..(298): unsure at all n locations
cgatatattatgcacctgaatcggattggcgagagacaagttatgaccctttgaattnctcgacagctttcggtggtcaatttctagcttctccatatattatgcgcctgaatctgacttccgagtgaaaagtcacgaccattggaatttctcgatggcttccgatgttcgatttcgagcatctcgatatattatgtgcttcaattggacatccgagagacaagttatgaccatttgaatttttcgagcccttacgttggtcaatttccagcagcccgatattttatgcccctgaatc

SEQ ID NO: 143765 - DNA, 310 bp, Glycine max
  unsure (1)..(310): unsure at all n locations
catgcaagcnncattaagatgcttctagcacactcctgactccttctctaagatcccaacgggcagatcatgttttcgtgtttagagaagccgcggatcaaatttcgagtagttcctacggtcactgaatgcggagcatctttttttccgagacagctccatgtagctttctctagatagcttattatgtgagctttctctagaagcttcctcgaggcttctttgatattctatctcaagtggctcctttgagatgctagatccttatctatccacccctctattaactaaattaacttccttaaactta

SEQ ID NO: 143766 - DNA, 397 bp, Glycine max
  unsure (1)..(397): unsure at all n locations
tcatgcactcctgtaatgactatagcatcattttaggcgctaaactgttgggagcaggaagccatcttctcaattaaatgcctggcttcagcaagggtcatgtctcctaaggctccaccactggcagcatctatcatacttctctccatgttattgagtccttcataaaaatattggagaagaagctgctcanaaatctggtggtgaaagcaacaggagcataattttttaaatctctcccaatattcatataagctttctccactgagtagcctaatgcctaaaatatcctttctgatggccgaggtcctagaagcaaggaaaagnttttctaagaatactctcttgaancatcccatctcgtgaggaccttggacaaagaatatagccagccttt

SEQ ID NO: 143767 - DNA, 358 bp, Glycine max
  unsure (1)..(358): unsure at all n locations
ccttaatggatggcgcctgctntcacctattttcctttgncttccgctgcatctccatggaggaaaatcaccattaaaagaccccattgaagctcaaagatccagcctccatagaagccccacaagcaagcttccatcataaactatatcgaattcaaataataatacctgccacctagcgattcgtcctgtgaaggccgagttctcaaagatagatttcacgggatccattntggaaattagccacgtgagatggctgatcatgtacttgctaagccgatgtgatgcccataccagagcacaacacgtcctttccaacattgagtaattcatctcacatgcgagaaacttcttgctt

SEQ ID NO: 143768 - DNA, 339 bp, Glycine max
  unsure (1)..(339): unsure at all n locations
agccacgacccacgagcacaaagntacagacgagtatgcctgagagtacgcagaataagaagctagaagaaagagaattgactcgntacatcaagatccaacaatgtggattgaccgatttgctcttactttgaacaggagtcaagatcttccccgattgctggcctaagccaaagcaatggcggacacctactctgcccccgaagagatccacagacttctcagctattagcagcatatgatagacctaatggcccatataattaggaaccactaagaagnttggattatcactcagatcttgactaggtataactttctgaataaaaaaagtttatc

SEQ ID NO: 143769 - DNA, 329 bp, Glycine max
ataaatcattcatcccccaatcaattcaagcatatgatatgtaaatctcaatttacactctaatctcatatgcatatgcatcatgtaatgttatgcgaacatgactccatagagattcttacaactttaaggcgatcctcgtaggccccaccctctaccatggtgcaagtctctgaccattcatggagtcccttgagctgaccttgagaaagtagagcacttttattaaaattagacaagtgagggtaatgaatggcttgcttagagaaaggttgcatgaccttacatttatatgattttgcccacttgtctaatctatatgctcattc

SEQ ID NO: 143770 - DNA, 347 bp, Glycine max
  unsure (1)..(347): unsure at all n locations
actcttctcttcttcctattcaagataccaaatagagactcttagtccccctttctctcaaaactggcacaccaccctatgtcattctaaggtaggagaggccttatatagggggtcttaatccacctgggttaaggcccaattagggcaagtgccctaattgaatcttaaaactctctattaagcttcgtgatacttaaccttagtctttagttactctaaattattaattccaactctaactaaatctctttatcaataaaatgattctcttagntgtttctaatatatccaccaatcagccattaacgagttgacaataggaaccctcttccctagaccctatt

SEQ ID NO: 143771 - DNA, 308 bp, Glycine max
  unsure (1)..(308): unsure at all n locations
agctnagcttctacattgaatatatctttatanctttatnnncctctnaagatgggacacatactcactagagntgnagatttgatataataaaaaagcaactaactcttttatgatagaaggcttggttgcttaacaactcataagatcatccacaattaaatggggtctaacatcaaaatcaaaagtatgataaggcttccaatgatcattagtagatcatctagacctaacatattaattnttaaaaagctatcaaaaatactcaaagaatttgcatgtaacatatattacattcccaaatcctt

SEQ ID NO: 143772 - DNA, 188 bp, Glycine max
  unsure (1)..(188): unsure at all n locations
ggccatgaagnaactcgagacagcgaagagggcctatcaggattttttcctgcacctgntgaatatcatgngatcgtgggtgtngagccttgntaggaacagctgtgacatccgagcttatatcagaagggttatggatccccgacacctgattgttcatgtcggagataaacgttggcgtttaaata

SEQ ID NO: 143773 - DNA, 327 bp, Glycine max
  unsure (1)..(327): unsure at all n locations
taagctcaaaggtcaatcaatcaatcaacttcgtcagctcaaacagggagcaaaggataaaccattcaaacatagtggaaacttttttggctaagaggctatcacaatctaacaaggccttcatcatccccaatttcatagcattcaatccatacttcaaagattcacgtaaaaatcagaactaaaagatagncatttctctcaaaatttaaagatcgcactctcaccgggataaagntaatgcattccttcacaatcaatctgacaactgactaacattttcaatcatacttccaatcacatgctcattgtcataccctaattttc

SEQ ID NO: 143774 - DNA, 288 bp, Glycine max
  unsure (1)..(288): unsure at all n locations
agctagacacctttccttagtcaattgttcttttcttggnnncaattntcaaaccattatatgttcttaagctttaagtttcaaactagactaattnttcctatgacaaaacctcttagaaaagaaaaaaaaaaaaaaaaaacccaccagtgaacactaaaagtcctaagagactaaattaagtaaaataaagggtaagccaatccatatatgacattgaagagcaatgcatttttgacatgcattattatgctctaaaaagagaaaatattggatattccctggaga

SEQ ID NO: 143775 - DNA, 386 bp, Glycine max
  unsure (1)..(386): unsure at all n locations
ttcgaatctagcatgctatgctagctttctccctcatgagcatagcatctccaaatgaatttgntgaaagatttctttagtcaaaaaataattnctttaaattctcttattggaataaatctatgtgacatgaagagttgctataaaataagatctttatctctcataaaatattattncttaataataaaataatattcggttaacacataacaacatcataatttagtgaaaataaaaaagatatataaatgaatttncgaagnttcttattattgaaacaaaaatatatataaattncttataatcatataacactctcaagatcagaacaatattatataaactataaaaaataactcaaaaaatgcatttaataaattctc

SEQ ID NO: 143776 - DNA, 299 bp, Glycine max
acaccatcaccaccaagaggccgagcgcgaagagaaactagagtatcactttctttaatataaccccgcaaaaaaaggaacaagaggaaaacaaagcatcaaatcaaacaaaagcaaaagcatgagctgagcacaaacaaccacaccctaatcagatagccatactaaccaggataagcaaaacaaaaagcaatagctgcaaaaaatgtcagaaaatagaccacaagcctgaaacgaaaccgactcaccgccaggcagaccaggctcagcggctagggggaaagcccaacgggggcccg

SEQ ID NO: 143777 - DNA, 155 bp, Glycine max
  unsure (1)..(155): unsure at all n locations
agaaactccagccaagattaattagttaaagaacaaattaaaaataactattagttttataaatgcaacattgtaaaagaacaattatgctactattcaattagaactctaagagaaagaatnattactattnaattccaaatttaataatacat

SEQ ID NO: 143778 - DNA, 204 bp, Glycine max
tgaacagcagagctcctcactggttcgacggcaacgacagctgaagctgatgcgcctatggtttcagaggttcactgatgctttccttcctttgcttcgttcaaatccaaaggatggaaagttgagtagagattcgaatctttaatttttaatttgctattcaaaattatgggaatattcaaattatcctttatggattaaccc

SEQ ID NO: 143779 - DNA, 404 bp, Glycine max
  unsure (1)..(404): unsure at all n locations
tcttaatcacctgaagctgcatcttacattcttgatctactcgncctcctctccttcttctttatcctataaggctttctcttgctttaagtggnctttggatagtctttagaaatatcttcataagntttataagcnttagagtgtatgggtgagtcagaccaaagntcatgataagctcctaacagacatggggtcatcatatttttcctggncgccctagnctgatttggatccttcagtagctaagtctgccattaagcatatgtttccttctttatcatcttcatcagatgaagagtcgncttgatctccccacattctcatatgccccttcttttctttagtattaaagatttntttctaccccgaccctcctccagatctggacattctgccttgaa

SEQ ID NO: 143780 - DNA, 439 bp, Glycine max
  unsure (1)..(439): unsure at all n locations
ctatgatactaagctnaataatagtnacatacaattcaatgttaatatttgttactaactcaaggggtnctatttacaggactatggctactccacctgcctcacctnctnctnctcctcctgcagtagcatcagcttctccgtctaccttgaagcagacacgcaaagccacacaactacgatccttggccactagaccacctgaggcaaacaaactagaggtccatgtcgatcctgcgaccagcaaggccgacgggccctacaagaaaaaaattaagaacatatttggggattgtcgctcatgataaggtcgacgtgacatacgagacctggaaggaagtccctgctgcttagaaagattagatatgagaggatattnaggnaattntggtttcatctttgattntctttattagccaaaatttataattaactaaca

SEQ ID NO: 143781 - DNA, 275 bp, Glycine max
  unsure (1)..(275): unsure at all n locations
ttaagaacctgcaagctgcagcttacacatgcaagagttgcatctatctcctattcacagatatgccataaatagattttgaagtcatttcccatcaaatcaagagataatagagcataatcatcatggatcaataagagttctgaaagtcggacttgcatgaaattttggctttggntgctctggtctttcttttttttggagctagtaggagatcaagcatacacacttgggttgccgctcacccgagcgatcacttcttatccccttatgcc

SEQ ID NO: 143782 - DNA, 427 bp, Glycine max
  unsure (1)..(427): unsure at all n locations
nnnnagnaaaaataaataaactaataaatatagagcaaattcttagctgagnaccctaaggataaatagnnatgctaagtcaactgcctccttttggcctcattttcgnntttcctcttctcctttcaaaaccctttctttttcccgcagcccaccaaacctgtctcagtaaaacgatgatctcgaactcgntcaccgttggatcgncgagaaatttgagtatcatgtttacaacccaattccgaacagtctcaccggttggaatttcaaaatcatatctgagcttagagaaaagcccttcgcattgtagcattttaatttcccgcagaaacccaaaactgtctcgagaaaactacgatcccggtttcgttagccggaggattttcatgatatttggatatataggtcgaaattcaattccgcacgc

SEQ ID NO: 143783 - DNA, 262 bp, Glycine max
  unsure (1)..(262): unsure at all n locations
aacttgaattacacagcctcaagacatgaaatatgcaaaaatgcactagagaatcgattacacatacctgagaatcgattaccagagacccatccctctgtgagatcaattacacaggctaggaatcgattaccagacgctcccttagtttcctgacttcgntttcaagcctggnaatcgattacaccccttaggaatcgattacagagaccatctcagcnctctgtcttcatttttaagccttagaatcgattacccaccc

SEQ ID NO: 143784 - DNA, 361 bp, Glycine max
  unsure (1)..(361): unsure at all n locations
cagaagaacatagaccacacaccctcgcaacaagagcagacatctagaccatggcaagccgagctactaagttgaccaaagaatcaagcactccctccagccgtgtatttccaggagaagaagaagaagctgnggccaccgcaaggactcctccaagagacaacagcatcactgctcgcaccagaacagcaggagctggaagccatcttctcaagcaaatgcctagctcagcaaggggcagaccaccaagagctccaccactggcagcagcaatcataccccaccccaagtagccaagccctcacagaaagatagaagaaagaggtgcccaaaatcaggtagagaagacagctcgcacaca

SEQ ID NO: 143785 - DNA, 292 bp, Glycine max
  unsure (1)..(292): unsure at all n locations
aaaaatttcatgatgcacatatnaatttcaaactaattaaatcataaataatgactagaatataccaatatgcacccttaaatccatcgactgatactccatgncgatgattctggaagattaaacattgaggagaagaaaggtagntgcttcanacccttcacatncgcttgatcggataccaacaatgagncataatcataacctctatagtttcgagaggtgcttgcccattggtagggaagcccgncaagcaagcctacacttttctaggatacatagacctacaaaa

SEQ ID NO: 143786 - DNA, 323 bp, Glycine max
  unsure (1)..(323): unsure at all n locations
ccatatatgtgtaatcgattacacagagcaaattntgaattcaaattttaatagctgttggaaatcagttntggccactggtaatcgattacatcctctgtgaatcgattaccagagagtaaatttctttgaaaagacgttntaactttaatttcttggccaaacctcttgctgcttcaattggaattcccctcttatttaatataccctttctaatactagagacttgnctagatcatccatctttaatatctntaatttctttatcttgaataaagctctgagacgcatgtgaacctttggcatcatcaaaacattcagct

SEQ ID NO: 143787 - DNA, 281 bp, Glycine max
  unsure (1)..(281): unsure at all n locations
aaaaattcttctaaaatattaacataatattaacttttaatagaaatggccatgggggctaatcgaatgggagtntggactggcagcagngtaaaagtagtttctaatgaaagtagcgggggattaaacatgtgctacgacagagcatgatagaaaaattaaatgtttgatgatggcatatgantgaaagagaagacaatgtctccttaattactttgggaaaagaattcttatttaaaggcaataagataattgctattagggatgataatggatatgat

SEQ ID NO: 143788 - DNA, 162 bp, Glycine max
  unsure (1)..(162): unsure at all n locations
cttcatcttgatcttaccattgacagaagnatcgaagagctggctggaatggagtcgttagccatcaatgataatgnttagctgtactagctcgntgtacccatagtgtaggagtctttcggagttacccatggaagcgatcaagtgcttcacttagcgatt

SEQ ID NO: 143789 - DNA, 422 bp, Glycine max
  unsure (1)..(422): unsure at all n locations
atcacggacacaagaaactcagcttgatcaaaacaatatctaatcattccaatccactcttattttctatagctcattcaaatcattctcaaacactcatttcattattaaatncaatggaaatattctagagacaactctaaccataaaacaagatttatttacacaatcactacaaaatgaccataaattgggggaactatacaagctttggaaaatgttttctatacaaaagntagncgcgtaagaagactaacagagggattatccatgtttccttcacatagtcaacaaacattggccaaagagaacaaaccctttcaaacttcttcaagcactcatcaaactgctgctccgaatgacaatcaaccagagttccctatgcatccatgacatactcccaagcatttctttgaccaatt

SEQ ID NO: 143790 - DNA, 334 bp, Glycine max
  unsure (1)..(334): unsure at all n locations
agcnnaaccaataataaaatatgcatttagtcattatctctaanannacagangaagaatgtagtatatacacactacctataataaaaggngaattgagagaatgctctaaccatgggggatcgacacatgcttaaaggagcactcaaaccgggagtatttactcccaaagcctagactctatatagtccgttagggcctctccctcctgattcaagtncaactcagaaaacattttagcacacaaactctatctatgaattgtacaaaacacatgactcctcaattgttttcaaaataacgncatctcatcgcgctcgtgagtaaactcgtc

SEQ ID NO: 143791 - DNA, 313 bp, Glycine max
  unsure (1)..(313): unsure at all n locations
atcactaaacactcgacactcgccataancgagatttcaaaaagctccctaggtaacccacccaatatctcacggactactaaagaggagccatccaactgaacagatatcgagacaaaccattataaataagtnataggcgaagaactaaccatcgaagctctactactgtacaggctcaagagngaactttagcatcacaagcctttataaggatcttcacattaggcccaagacccaattcaaaccttgagccaaatcagtccaaactgcaaagatatcaatgctgaccgaagccaacatcctacaacat

SEQ ID NO: 143792 - DNA, 445 bp, Glycine max
  unsure (1)..(445): unsure at all n locations
agcttcaatggagcttatcatcactatctatttttccaatgccctaaaaaaagngccataaccagttagcttgaattgtagtctcaaaacatgttacaaattcagctttcatggtagatgcagcaacaactaatagcttttcactcttccacgatactgctcctttggctaaaaaaaatacatatccaagagagtattttctcgcatccacacatatagtaaagtctatgtctgaatacctaatcacctcaagagagattagacctcctatatgtaagaaagaggtctttcgttccttagaagtatctcataaccttctttgnagctttccaatgttccattcccagagtatttagatatcttcctatcattctagctgcaaagcttatatctgataaatgacaaatctgagcatacataatactcccaacaactgagtcataca

SEQ ID NO: 143793 - DNA, 401 bp, Glycine max
gcttctcaagaagttttctattctataaataaaagcatgtgaacactagtataactttgatgaatgagagtcctagaagacacaactcaaagatcaacttctctccctttttcttccttcaatttcgagctccctcctctctttcttttagcaaatgctcacccccccctctaaaatttaattggatagggcttctcccaattcaattaaatttattttcaaccacacacatcaaatattcacttaatgcatgccaaattagaaaactacccctaatacaaaaaactagtctaagagccctaaaatacaagagatgaaaaatcttacatttctaaggtaccttaactatattagggagccctaaatacaaggcccaaaaataatgaaaccttaatctaaat

SEQ ID NO: 143794 - DNA, 236 bp, Glycine max
  unsure (1)..(236): unsure at all n locations
gatttgctcaaaatgatcaaattatatctggtcctgtttccacttttccaatcatttcaaatacaatttcaaaatattggatttttcgntatttaaatcgcgtatctccatcacttgnagagattcatcattccacgaatgattgactgacaaaatgattcacttatcaaattctaatttaaagntttttatctaaaaagataataactgagctttttcccttctttttaaccccc

SEQ ID NO: 143795 - DNA, 222 bp, Glycine max
  unsure (1)..(222): unsure at all n locations
agctagggagataggctcctccacctacaactcatttaacctaacaagncaaagcanggctgagtgcaattgctgtatatccgatcttatggcaaccgcagaagagataggcagtatttcttccccatcttttctgtgtcttgatccgctccccgagattttttcatcaaccatgatttccttgattaatcctatcatcacaaagagaattctcccttttaa

SEQ ID NO: 143796 - DNA, 311 bp, Glycine max
  unsure (1)..(311): unsure at all n locations
ctcctatgncngcaataatattcctatatttgcccttttagctacacatgactagatnagggcagntagcgnccctcttttcatgttttactaaataatataaataacattaattttcgtattatcattatacaaaagatcttaacaagcttaaaacttaataagctctaactcagagagagagtcaaaacatattcagntattgagcgaggaaaaacagagaacagaaaatgaatatacacaaactaatatagattgctgttatctagattcaaaatgtttttcccctccaatatcaatactactattat

SEQ ID NO: 143797 - DNA, 342 bp, Glycine max
  unsure (1)..(342): unsure at all n locations
atgctaaccttcatggatcttaacatgggttcatgnttgntgttgaacatagnagaagataaagtctgtatgngggaagaaaatgaaccatgcataaaaaaccacttctcatagaaactagaacagataacacagagagattatccgagaaaaaatggactaaaaattcctacattagatcccaattcccttcactccttccctcccttccctttacaacctgctcctgtactccaccctgcaacatcacctgtccgacctcaccacatgggtggaccgagacatgatcaccacatgtgatacccctcagacctacactttcaagctctctgattcattccc

SEQ ID NO: 143798 - DNA, 161 bp, Glycine max
aaactagtaaataaaacaaaaaatgatacatattagcgttttttcaatagaacattaaaagatcaatagatgtaaaattttattgcctctttaattgacaatttagatcatagacaaagaataagtaaatataatagacatctaatgatagaatgactatt

SEQ ID NO: 143799 - DNA, 111 bp, Glycine max
tccttagatagcccctttgagcctatgttcccctttctttgatcagaatctcattacaagccttaagagaaaaaccatgatatcaccttaccctttaagaatttaggagct

SEQ ID NO: 143800 - DNA, 283 bp, Glycine max
  unsure (1)..(283): unsure at all n locations
gctctattctcacttgtagnttcaaaatcttatctccgcactcttgaaaggaggaaactagaatctaaactccctcatccttccttctaaatttgggagagcatcatcaaagtaaagggggtctctccaactcttgacccctattttagtagtaaacttctctaaacatgttagcctgaaatttcgagcttgcttccatgttctgaatctctgagatgagctgttttccttgagtttttatgccaaaaatgattcctttagttgctaaaatctacggttagac

SEQ ID NO: 143801 - DNA, 289 bp, Glycine max
  unsure (1)..(289): unsure at all n locations
tagctagcttctccactggcagaagaatctctctgaaatctttctncanaggnagcatgactttctataagattcatcaatcggctctcttgctggggagtaagctgtaactagcaacccgtgtctccagatgatagatgtgagcgatacatatcaacagctactcgctgagctaccttgagtggaggttcagaagaagaagatagcgcctttgcttttgaagaaaaaccagtcctcttataatttggtggatcaccttgtgacttgaagcatcgatcctgagtttgac

SEQ ID NO: 143802 - DNA, 92 bp, Glycine max
  unsure (1)..(92): unsure at all n locations
atgctagcanaccaaattgctcaccactattagtagattttcctncagagnagnncatataaacctcctcctctaaatcaccattaagaaaa

SEQ ID NO: 143803 - DNA, 389 bp, Glycine max
  unsure (1)..(389): unsure at all n locations
caagcaagctacaagcaggcaagcagcaagaaccatctcttcctccagagagcaagcacnccataccaaaaaacaagncaaggaagagcaccaagcctgagcaaaagcagcaagcagagatcagaaagtacaaagcttcaagcaaggaagctgagacagactcttcatcagaactccgcaagaggaccatctagcataatcttgagcaacaactcaaacatctggacaaactctcgagcaaatngggctagagtattctcacatcctcccaccccacagaaaacggcatcaggatgacccaatatcatataaccacaaagaacaaccctcacaggagaccttgagaacccaactaagctatagtgagactcccagacagaatccacctt

SEQ ID NO: 143804 - DNA, 229 bp, Glycine max
gccaccaaacccacacacgaggaggcagaaagcgagcagcccgagaaccaccccaggggccgaacacaccgcggcgaaggcccaagcccaggccagaagccacgggaggaccagaccgcaacccaaggacaaagcgaacccacccacccacaaggtcgcacccagaagcaaagcaacaatcaccccccccccggcttcccctgcggcgacgccagggcgacaaccccca

SEQ ID NO: 143805 - DNA, 257 bp, Glycine max
  unsure (1)..(257): unsure at all n locations
cctggagacatttngaaacaaccttcccccaccacatattgcatgtaaaagagacctgcaagagagaggggtcgcgatatccgctntcattttaccgcaagataaaaatngactagatcaaaagcagccaatgaaatncaattcaatcaaaattaactaagcaaagaccaaaggtagctagcccaaccagcgatagaaaattaagactcgaggacgaagatattcaaagtaattatgtgtaggacacagctccgccc

SEQ ID NO: 143806 - DNA, 384 bp, Glycine max
  unsure (1)..(384): unsure at all n locations
gcaaaatcaaccatcgcagatcaaatatgacctttccagcaatagatacaaccctggatggtggaatcaccctaacctcagatggtccagccctcagcaacaacaacagcagcctgctccttccttgcgaaaagctgctggcccaagcagaccatacattcctccaccaatccaacaacagcaacaaccccagaaacaaccaacagtggaagcccctccacaaccttccctcaaagaacttgagaagcaaatgactatgcagaacatgcaatttcagcaagagaccagagcctccattcagagcttaaccaatcagatgggacaattagctacccaattgaatcaacaacagncccagaattctgacaagctgncttctcaagc

SEQ ID NO: 143807 - DNA, 287 bp, Glycine max
  unsure (1)..(287): unsure at all n locations
tattttattctagattaagattggctccaggtaatctgaaatctaagaggtatggaccattcatcatcaatgaagncatgccacatgaagctatgatatcggaggatccagataccaagatgacatgacctatgaatgattgccaaatcaaacactactttgggaggagatgttgagaagctcaccattgttgnccacttgcaagaagcttgagcccaacaaaggcatccagcttataagaagctaaagaagcgctcctgagagagaacctagaatttctcaacttt

SEQ ID NO: 143808 - DNA, 299 bp, Glycine max
  unsure (1)..(299): unsure at all n locations
ccancaagnatggacggtgtttaatcataatagaaactactccctctctatgagatcttctgagattcctctttgtctctcaatgtctagaatttgnttcagcttcatacgccaccatgctaaaagagaaaaccactctaacattgtccataaaagatattcatctttatatggatctttcagcatgttgtatgtcatcatatattctatggcgatggggatagactattgtactgtattacaccaaattggccatatggtatggtccactaatcccacccaatcttacggaactattc

SEQ ID NO: 143809 - DNA, 401 bp, Glycine max
  unsure (1)..(401): unsure at all n locations
agccacaacagaactattatgacctctccagcaacatgtacaatcccgggaggaggaatcatcccaaccttagatggtcaaatccttcacaacagcagcaacaacaacaacaaccttattttcaaaatgtagctggcccaagcagaccatacgttcctccaccaatccagcaacaacaacaacaacaacaaccccagaaacaacaaacagtagaagctcctccacaaccttcccttgaagaacttgtgaagcaaatgactatgcaaaacatgcagnttcaaaaagataccatagcctccattcagagcttaactaattagatgggacaattggctacacagttaaatcaacaacaaccccagaattctgatagattaccttctcaatctatctagaatccc

SEQ ID NO: 143810 - DNA, 205 bp, Glycine max
tctctttcctattattcaatatttcaaaagcacttgccactagtcccattgcgagaggaacaagaaaggcccaccttcttctctagatgagactcatagcacagccataagaaagaaagaaaaatctgactttagaaatagctaaatcctgcctcggtttgcgtagcatttctctggttccagtccctcgcatttctctgcaccc

SEQ ID NO: 143811 - DNA, 354 bp, Glycine max
  unsure (1)..(354): unsure at all n locations
gctcaacagatatgttatggaaagcnctactttaccaagaagatcgctggtgctagatctccgacaggatttgaaaacccccacaagatggaaatattaaatattctgctcaaagattagatagaatcatattttattaaatngattattcaaccccatcaaaattttatgaatagagttagataggagntataattttctttacaaattcaatgggatcataaatagattggattgggttatttgggcctaaatatttataaaatatttcttattttctaaaaataaatnaagaataataattgattttcttctaaaattttataaatatagaatgattaaatatactccaaa

SEQ ID NO: 143812 - DNA, 314 bp, Glycine max
  unsure (1)..(314): unsure at all n locations
ggacctncgagagaaaagggatgaccatttgtattgctcaagagcttccataggtcaatttcgagcgtctcgatatattatgcgccataatccgacctgcgagtgagaatttatgagcatttgaatttctcgagagcttccgttgttctatttcgagcgtctcgatatattatgagcctgaatcggacctccgagttggaaggatgatcatttgaatttctcgagagcttccatttctcaatttcgagcatctcgatatattatgagctcttatcggacatccgagtgaaacgttctgaccatttgaattgctc

SEQ ID NO: 143813 - DNA, 121 bp, Glycine max
  unsure (1)..(121): unsure at all n locations
aaaaccaaagagattcttatcaaagaaactatttctttgagacgaatcctcctntagttnatcaattctccgcggatcctgacgtcattctattcatcttctttatcttctccatcttttt

SEQ ID NO: 143814 - DNA, 170 bp, Glycine max
  unsure (1)..(170): unsure at all n locations
gcatgcaagctntacatatatcaaaagcattcgctgtcctccctctgctatagctcctcgcaatgcgattcacagtttcagagaacatattcaagcacaagaatcaagtaaacttcttctttgtcagccggtgaaaagaaacaatgcctcaaggcaacaatatttggacg

SEQ ID NO: 143815 - DNA, 329 bp, Glycine max
  unsure (1)..(329): unsure at all n locations
gaaactaagcctcccattagcagagctatataaatgagtctncggaatgtttgctctccgatctctaccaaaatcaatacattagtgccatagattagtcaaaatggagctttataggtagaggataggagaggagtacactgaatcccccataagactttgagaaactattcaacccattttcccttagctagatcgagtttcctttttagctctgctaaaatgactttgcttactgcttcgactagtctgtaggttagatggtgttctactgatgtgacttgatggttaatccccaacaacttcataaaatcattcaactttttatc

SEQ ID NO: 143816 - DNA, 373 bp, Glycine max
tagagaagatcccgatggaattatttcttgagtgagatccaatcctgataacctttgattagattagatctcgatgagatccaatcttgattaccttagattagattagatcctgatgagatccaatcctgattaccttagattagattaaatcctgatgaaataatatcctgatgagatccaatcctgattagattagatctagatgagatccaatccaaatattatccagatgagattaaattttgattagattagatttgggagaattaaataggatgctcccttcaaggccaagcccaattctggattccagctcaatttcagattttagccccattggttattattctcccgaaatttaatttaaaac

SEQ ID NO: 143817 - DNA, 283 bp, Glycine max
  unsure (1)..(283): unsure at all n locations
aaatgagagacatgaagaaagccatgattgtacatacacaagctctctgaccaaacagcttaccttaaaagataatngcatccttagctcccttttttagctgaatgatatagcaaaaaaatnagaatcctaaacttaaataaatatctcatgataccttgnttagattctaagagagcatatggctcaaagaaaattnactctagtcaaagaaaatttactctaaatcaggaggaaggaagccaatcccaatgaaaagaaaaaagtaagcattagcacacac

SEQ ID NO: 143818 - DNA, 70 bp, Glycine max
cccagctagaggatcatccatgtcaactacggatgaaatatagctgctgcagatcaacaaaaacctacgc

SEQ ID NO: 143819 - DNA, 374 bp, Glycine max
  unsure (1)..(374): unsure at all n locations
ctatagcatnnaatttatgcatcaaatattatatngcatctatcattatcgctnnaatacacagnaaaatattatcttatagctggagaatagcaaatcatcttgacgctagcaagcgaatgagcgatacgagttaaacatatatcagaagtagctttttcttttaaagaaaccagcctacaaggtccataaattatattctcccggcattattattattgatntaacaaaaaaattgcccaataggatatatncaatattaaaagtaaatttgtaccgaaaaaaattaaatgtaaatcaaaaactaaatctatgataataataagataaatgataaaacaaagtgccatggaacaacaggtgaccccatccgt

SEQ ID NO: 143820 - DNA, 440 bp, Glycine max
  unsure (1)..(440): unsure at all n locations
agcttggatatatatagattccaatattctgtttgacacaagncattcaattctgttgttagatatgtgacctaagcgcttgagccataaagctcctgagttagtattatcaattctacgcttagtaccatgcaattttgtattaaagagattcaccataagatactacaatatcaaggaaatatagattatcattaaccaagatagaaccagntccaacaatatccgaattaaaagacaacctgaacacattgnttttaaatgaacacaaataacccaatttggccaaataagaaactgaaaccttattccgtctaaatgatatgacaacaaaagagtctttcaaatccaaataaaaaccagtacataataataatctaaagagccctatagcttccacttccaccgatttaccatctcctacatagatccatctttca

SEQ ID NO: 143821 - DNA, 301 bp, Glycine max
  unsure (1)..(301): unsure at all n locations
cctttaaatgatactctngtcatttattttattgcgcctttctaatagcagctcaagctccttcgaaaactagcatatctgcaattactttctcgataaaggtgntcttcagntttcttatgaagctattttggtctactaatatagactactatattgaacttgggtaactatctcctcgagttactaaaaggagattttattcatttttcttattagaaaggacaattgagcatgattatgattgagaatnctgattatttgaattattaattaagtttgagcttgatccattcattaa

SEQ ID NO: 143822 - DNA, 387 bp, Glycine max
  unsure (1)..(387): unsure at all n locations
gagatcctagagagnncaccagcaagcatgcatgctctatggtagatattgaaccgaattattctttatttattgttngaacgagcatatcttgtctgccctaattagggctaaagatagaatctttggtgatgataatgctncgaaaaagtcaaagaagncggcaagtgggccttttagtattgtcataactttgcaagcgatatcttcaagtatgcgctcttctcaaaattcctagatgactatagtactttgttatactttgaaggtcagtcttaaggttgattctcaacacttagctattagacaagatgacaatcctcgtttagcttccatgcctttctttggagtcatagaagtattctgagagcttattnctgtaaaatt

SEQ ID NO: 143823 - DNA, 391 bp, Glycine max
  unsure (1)..(391): unsure at all n locations
aaatttgcgggtaagttttgaggataaaatgtattattatacatcatagagatgagagagaaccatcttgagtcctagaaaggcaaaattaacacattaaagtagaggttatagtggaacctgattataatcatcatcattaatatcttcttcatcctcctcttgtgcattttcatcctcatctccatcttctccatctttcttttcattttcatcattttcctctntgccctgcatgtgaaagaatcatcaacataaaatttcattggagaagtgaaggttgcccaacagtagaatctgaaaagatatacaatattcatttggaccaaatgcaatcttacttccaaaactaaatatctagtgctcaacattccttgaaagttgctaatgg

SEQ ID NO: 143824 - DNA, 439 bp, Glycine max
  unsure (1)..(439): unsure at all n locations
ttgtcattaacctgtcaaaccatggcaagtcagtcatgcacttaccaaatcaccattgctcaattttgatatgtntgntattgttgtttgatacaacctgttttgcacccaaatcatgtcgacaaacaccatgaaaacaataatagcttatttttcataatgaggttntgttgttgttatgctcctgttaagaaacctatatttggttatctcgccaacaacattgttgtcgtgtaagcttgtgacattgacaaggggacacaactgtcgtcaaagttgacgacacacattatttttctcattctatgtccctaaaggttatcattcttgacaaaagaatatggtggtggaaaacatgcttgccgtatatgatgtcatataaatgacgatggtagtggccaaaatcatgactatcaacgcgatgttgatgagaatgttt

SEQ ID NO: 143825 - DNA, 369 bp, Glycine max
  unsure (1)..(369): unsure at all n locations
tcgataattatgaatcacaacgttgatgagggatgaccattngccacacgtgaagccttttcgtgttttttgcttgtgtcccacgaatggtttttgattcactgaaacataataaagagaattgaagctcaatctcacaattctggaaaaaggtcacttgattgaatggatcccctctccattcctaagccacgtattagttggctgggcttgactttttgcacatgaacatcacaagatatctgatcccatggaatgtgtattgcttgtttgtaaaacccactatgttagtagcacaagtgccatttgcccacaagcctaagagcatccacatttttgtgtcgtgcccaagaggaataccattcacac

SEQ ID NO: 143826 - DNA, 390 bp, Glycine max
tgctttatttcttctaatttgacgctttttttaattatgtaagtcatgtcttgagatcttccacttaatccactaacccataatgaattaaaatgagtaatgtattttcttcctcaaaaacaagtgaacccaattaagttgactcactttttgaattatctatggtgaaccaacctagaataaattgagttgacttattttgacactctaaatcttatagtatcatatcattgactgcccaacaaattccttaagatgatattcatctctgttttcttcgaagtgcacgattaattttgattattttaggcttgaaaaagtatttgagattttgattattttacgctgaaaaagtattgagactaaaagctctcttgatccttttaatga

SEQ ID NO: 143827 - DNA, 408 bp, Glycine max
  unsure (1)..(408): unsure at all n locations
ctgaattgagaatttctgttctcggaataaatgcgcatataagaatacaattagagagtgacgagactttcaatggatttcactgaatttattgatagagagatcgagatatcttaatgatgaaagtttttcaaatgatctatgaagagcaccaccaattgagttgttgtaaaaccgcagctgctcaatatttttaaatgccccaatatgatctgtcagattgcctgaaagtcgtgaactctgaactgcaagtcttgtgagtccatgggaaatacaaggagcaagaatttctanaagctcattaaccttgtggttgagtttgagatatgatatatctatcacccttaaggtgcagagattacccaaagaagttggaatgtgtccttcaaggtgactatatgacaaatc

SEQ ID NO: 143828 - DNA, 355 bp, Glycine max
cggagggtattgagaaagtcgcagtgaggcacggtattggagaggaattcgccggtagggactcgagatagagcatcggcgacgacattgtgggccccaggtttgtaacggatagtgtaatctgaaccaagaagcttcaccaagtaagtctgttgctccggcgtctggattgtctgtgacatgagctccttaagactcctatggtcagtaaagatggtgaatgaagaacccagaagatagtggcgccacttgcggaccgccgaggtgattgcatgaagctccctgacatatgctgaagcacgctgtaaccgagggcagaggaccttgctatagtacgcaatgggatgatcctgtt

SEQ ID NO: 143829 - DNA, 423 bp, Glycine max
  unsure (1)..(423): unsure at all n locations
tctacttatgtggcanggcgggttttcttcactttcttgtttccaacgcgagctctgaccactgttcttccttcccgcgatgcttcttttcatgtccgtctgagtgggcttatagcctaaaccatacttcccacgattcccttgggtttttatcaagctagttatgccgccattgtctttgcctaaacccatcccgggttcatacccgttcctcaacataactcgggccatcattaccgccgcatcggacagacaaggttgcccaaagagggagtccaccgaggaaatgctgaccacctcaaaagactggaaagcggtttctaacgattcttctgcggcttccacataaggcatggaggatgggcagcttactaatatatcttcctcgcctgacacgatgaccaagtgccccttcactacgaa

SEQ ID NO: 143830 - DNA, 413 bp, Glycine max
gcttgagcggttaacatgcgtgtggttcttattagaatacttgctggatcggcaagatatctttttgggtgctgctccttctccaaactagctagctatttttcactcatcaaccccttacacagtgtatgtttgaatcactaatgtaaggagaaacacaagagtatcgaccgattcacttgagatacaaagaaatctatttataatagatatttcttggagcatatgatcaactaaaaagaaaattaatagcgtccatatatctttgaacacgattatggaataaacaattacttaatctctagaaagcggaagacattgtgaaaatgtcacataagtttttaaatgtcaagaaaatgttctcataactagttaatatcatgtcgctccctaaatatatattcatattatta

SEQ ID NO: 143831 - DNA, 413 bp, Glycine max
ttgaatgactatgttgtgtctctccttatctctgctttcatatgttcttacatattgttacaatatatgcatgagtttctaaagcatgctagaatatggttttctagtttgagctaatggtatgtggctcttaggctcttattcacaaaggaccccaaggttgggttccttagtctctttctctgggtaggaattgacattgattgtgattgcttgtaagaactcaaagtgcataatggaaatctaattcaagttgaattagataattggagtagtttctctagaaatagagagtgaaccaatatcaatcttgctgtccatcttttctttaatcctatctctatcttattggattcttgaacaatttgctgagtttaaaatatttctttttgaagtgtttaacaaaacgatat

SEQ ID NO: 143832 - DNA, 379 bp, Glycine max
  unsure (1)..(379): unsure at all n locations
tgcttctattcgnagaccacagagtggtacctaaagatatgttgcgggggtcaagagaccttggggacgtcatgtggggtgctattgcccaaaaccaaacttgaccaatcccgacccaacccggacatagtcagtcagtgagaacctgtgatgtacctaaacaggcgagctcttggcaatcaacagataaaaggaacaaagaccacaaagcaaggaggcttgtgtggtgctggccatctgtgaactttgatttatatgtgaaatatggcctctggtaatcgattaccaagggtgggtaatcgattacaanggcttaaaatgaagacaggagactaagatgatctctggtaatcgattaccaaagggtgtaattgattac

SEQ ID NO: 143833 - DNA, 322 bp, Glycine max
cttggttagctcaaggattgttacaaagatttttctcaggaacacggcccctaattccattctaacgtgtaaaatatagatccatcgccaaccataaggttgactctgtaacttatcattcaacttgtccatgccctattgattggacaaaagggcaacttcttttttgactgtgacccatactcatcacaaaggagaaaactgacttgaaacctaaaccccctggttgcggcgttcttgatcagtttccgtttctcgccgccggccagttcaagcgcatattatataacgctaaaaaacccacatgtcaagtggttgtaat

SEQ ID NO: 143834 - DNA, 437 bp, Glycine max
  unsure (1)..(437): unsure at all n locations
tatagaccctttatgcttgaaaggtagggaatattactgcaatttgtgttgaaatgatccaacttgaacttatttgtggcatgttttgctgtaacttccttgtgtgctactcctttccgccaaaaataatacaattatcatattattttatacatacaaaaaaataataaataaaagaaaacaaaaaataattttataaaattaatgttacatcatccttaactcatttttatattttgtaattcatacgaattataagtgaaaaaataaataatgttgcattgaaaaattaacatgaaaattatattaagacatttttttccttacacgataattatcaattattttatttattagattttaaaaataattaatttagttcataataataaatatnngtttaaattattattttttcaaaattcgatatcattatc

SEQ ID NO: 143835 - DNA, 391 bp, Glycine max
tgggtgggcatttggagagaaaaaaagtgaaaaatcgtgttttccatgctaagcgaaattcaacttttggtgctgagcatgacatgtcgcactaatcacaatttctcctcgggttagaaatgtgcttagtgcacttgcctcagtatgcgagatgcccaaatgtgttagtttgaaaatcccaacggccaaagcatgaagacgtgagttacaaacttatagtcaaaatttgaaggtgatccaacggttaacaagtgcaagatctcaattttacaaaagtaggtttgggttaaacttgaaatctcacatttcaacgtaggtaagtaaactccacatcacctaacatccacatcaagcaatcacacatagctaaggtacacaacaccccaactta

SEQ ID NO: 143836 - DNA, 426 bp, Glycine max
  unsure (1)..(426): unsure at all n locations
tcacacagtttattttttctatactagagtggtggaataccaattactaagtcttttctaactagatgattgagatgatgcatgtttatgtgtgcatccctacgatgccataaccaagaatcatcaattttacttaccgaacaactaagctcacatccactgtgccttcatgagtgacttcaagcatattccatatttcctttgcactcttgcaccttgcagtatgaaagaattcattagaagataaaccataagttaaaatgctcttagtttttttttatcatctttcacttttcttttctcatcattnttcatctcatcccattctttagctaccaattcaccattcacttctttagtatgtataaaagaacctttaacaatcgcattccatgcaccgaaataaattgattgaataaatatttt

SEQ ID NO: 143837 - DNA, 83 bp, Glycine max
aaaaaatgcccctttacaatcaggcaccttcgtacctaaaatatttacatgtacttcccaggggatttgttacctacattaca

SEQ ID NO: 143838 - DNA, 248 bp, Glycine max
tccctggtctcagtcacatgatgtactcgacgaaaatgaataaatcaaagaaatcacacaagctttattcttgttcgaagttctatgaatggtaacacacataaccttaataatcggagccgcattgtaacttcaagtaatcaaggacgtttcagagctagataaataatttgatcaagtgcaaattcggctgaggagagtagtcacgtggaatcataattaaattcgattaagctcaacgctagctg

SEQ ID NO: 143839 - DNA, 366 bp, Glycine max
  unsure (1)..(366): unsure at all n locations
aaaataaaacataacacggtgaagtatcgtgttagtaaataaataaataaaagctaaagttttaagactgaatcacttttaaaaaaaacattagtaagtcttaacttttagttccattaaacaacattaaattaaatataagaggattttaattagaccattgcatgcaacccaagatgccaataaataaaaacacgagtctagtacttgaatcaaatgacagttagcgtcaatgcgtcattgactcttaaactcaagaacatcattgtgtacaaaaaaattcagtatatatatattagaaaacgtcaatntaattagtatcataagaacataagcattatggtgaacccacgacaattatgatgt

SEQ ID NO: 143840 - DNA, 389 bp, Glycine max
  unsure (1)..(389): unsure at all n locations
atctaatacatttaatntgcgatttaatcaagtctttgcttgttattggtagcaacattgtgataagcaatattcttggagtaatattatgcttctattcttaccatagctgtttactttcaaaaccagattgagttatatgaatgagggtctttatcacatgtctaaggattttctagcaaagtcataattatattaagtagtgtatgaataaaacccttatgagcataattggaatatatatatatatatatatatatatatatatatttctaactctccgagaggaaggtttctttcatcatgttctgaaccttgatatcaagcgaatatattttgcgatagtccgatgaccttttcttcattgtctaattatataaacaatctat

SEQ ID NO: 143841 - DNA, 215 bp, Glycine max
  unsure (1)..(215): unsure at all n locations
accgtggacgactcaaaattactggaagtctctagtacataagcctacantttgaccgctgggatctactagcaaatatccataactcattctgcactactctttccacagccaatctcacacaagcatttttctgcacttgtgcaaaattctgctgcacaatttcacagcaaaaatctgcacaaagtgcagatttcgaaaaccacaccttccct

SEQ ID NO: 143842 - DNA, 369 bp, Glycine max
  unsure (1)..(369): unsure at all n locations
agcgcgagtntgacgctgagtgaaagttcacttactcgctcttagcaggagaatggttctaagcgcgctttcacggacagaaagccctattataagtctgatttgcggagaatgaaaggagagganacatagagagaaggaatagccgtcagagtttgaagagtgaaatatacagaggcaaagaacaaagcaagaagccaagttttgatcttttaggaagtgttgtgagtntttgagtgattgtgagattcctagtggtggaggagacatccncactcctttgtaagcaagcaatttctcctaattcctcttcttcattggtaaaagagcttccttgctatggaaagcttaaccctcagttggggattc

SEQ ID NO: 143843 - DNA, 320 bp, Glycine max
ttcattatgaatcctgatttacgcatgttcacattgggtttttgttacttggtgatatatgatttctatcaatacctttttttcatgtcattataactattatattagatagccttttcattacagaggcaatgtatgtttgggacatcaattttaatggttcctcttgttgttgtagtcctatgatgcgtcatgttttaattcatatttttactatgtttaacagatgtcttctcccttggaaattaatgaactaataactcccactcatacaaatgataatgaggtgaatgtacaagttcctgcaaattcaactcaag

SEQ ID NO: 143844 - DNA, 359 bp, Glycine max
  unsure (1)..(359): unsure at all n locations
ctttccttcatttaactgtctnngggcttggcggccacgctaacaattactttcacacctactgtacgtttgaatggaccaatgctgttttgggaatgttgcgacaatcctttaaagccttattgatacacttctgagagggttggttgtcatgtggccactatcaaacagtctttctctatcataagtcatcgtccatttttcctttgaaatgcgatcaatccatgttgctatggttggactcaattgacaaaacttttctaaatatgaaaaaaaatgtcttgcaggagtgtcgctcataaattagtttgaatacaatttaactaatatgaagttaaataatgtgaccatcaatataa

SEQ ID NO: 143845 - DNA, 336 bp, Glycine max
ggtctgtatatgtgctattaccgcaggtccagcgtgcagatataaacgtaaactgattcgactcgggacttgttcatttggtaagcatcattcggtaagcagccatgtgtgcaaagaattgattatcatgagttaaaaataattgtgatttctattctaatcaaaataataaatgtgagcaagtgggtgtgaaaacagatatgtaaaagcgttgggtcctcctactaaaatacttgatgcaattaaatgtatttctctatttttaagggtattcctgcgttttatgctgagagctaaaataccaaacaccgatgtctcgtgagtttgcactaattc

SEQ ID NO: 143846 - DNA, 402 bp, Glycine max
  unsure (1)..(402): unsure at all n locations
acttaatggtggaacgagataaggaatgaaaagattgtgagtttaaatcttctgttagtaaaaaagnttgatttatctgccgacaatattatttaaatatttttggtccttcaattttatgtcacttttgtttttggtcctccaactttaaatttatttgtcttagtctctcaatatttttggtcccttcaagttatgtcacttttgtttattcattatgcatgcagccttttatataatgtagctttctttacatgcataaccaacctaactaacaagattaaaaaactctaacaaccaacaactgaattaactaactccacgtaactaatctgcacgtgggttattatacttggctgcaacgttttcttcttctaacatttcctaacccatcaaaaacac

SEQ ID NO: 143847 - DNA, 387 bp, Glycine max
  unsure (1)..(387): unsure at all n locations
aatggataaattagacagggaaaaatggtataagttgttcttgcccaaactagtaaattctatcttatacatctagattaacatgctaactcactatattattgtgctaatatctctagggatacgtgtactaaaattatgcctcacatagagtctactcacatggagacaaatttcactgcgactcaatacatattgcaattcctgcacagatggaaatttagttcaaatagtttttatttctctgtcaagcttcactaaactaatcagatgtatatatatatatatatgccgacctatcangcttataaggctntntaatatgcctaagcctggcctattaatataatatgcttttaaaaaacctgagcccaaccctttaattaa

SEQ ID NO: 143848 - DNA, 431 bp, Glycine max
  unsure (1)..(431): unsure at all n locations
cagctggagctacgatgtatatgctctatcttgagggggagtgttataattatgagttataattatgtgtatctttagaatagatctttgtatctgttttagcttatagtagaagacagcagtgtgtcctgtcttatcaaagctttcaagcttctctctcctctttgtatatatatatatatgttatttgaatgaaagatgtgtgtgatattttttcctcactacctcacaagctaagtttccttatgtttatcctctgctgtcactccatcccatcttccagtccaaatttctcaatccaatttatcctggtttgtccatccattgcattcactccatgtctggcatttttaaaccacagttgtatcctatctaatntatttggagcaactttggttaaacaggctttgacaatatcccactactggtag

SEQ ID NO: 143849 - DNA, 237 bp, Glycine max
tcgtcgcggaagaaagaagagaagaacttaagagctttcgtggaagagagaaatgaagaagagagaatgcttccgaaagagggaaaaaaagctttttaagtttttaaatgaaggggcaaaatgacctttcaataaattgttgggtgcactagcaatattgctgggtgcacctaacatatcccaacaagttatttgcgataatgggcctgtaggccaattcatgaccatttttgagtg

SEQ ID NO: 143850 - DNA, 428 bp, Glycine max
  unsure (1)..(428): unsure at all n locations
gagcccgggtagncatttataagttcaagtccatttttttcaaagnctgaagaaagtatgatgaactaatggacgtcaatatggccaccgatgaagccttggaatgagaaaccaagaaggcccgataggaagaacacgaccaaaacaagttttgaggggctttatagggcagcaatagtgagctcaagctccgaagaggtgaaaggaatcatcacaggtcaaaggtatgatctagaaggacgagctaaaggcttgccttangtcgaaaagaaatttgtcccaacagttaatgcgagactgaagggaatatatgggccatcatcgatgagtgcaaagagaagctaaatctagcggcgactcatgagcaaaggctagaggatgagtatgccaagatatcagcagaaagggaagcaagggaaagggtaatt

SEQ ID NO: 143851 - DNA, 319 bp, Glycine max
tctcacacacgagtacactgctggttgagacaatgattgatttattcaggagtctccactttaatcgattaccaaggggattaatcgattacttctctctcgttcatgtgttcagaggtgaaaaagaacactttaatcgattacataggtcatctactcgattatattggccttgagttgttttctaaatgttggatgaacactttaaattattacttagataaactaatcgattactttgttaaaataatcgattaccttatagatttaatcgaatactgaccattaataattggtttctctataaataaccttatgt

SEQ ID NO: 143852 - DNA, 438 bp, Glycine max
  unsure (1)..(438): unsure at all n locations
agcttgatacatgtgtcaataattattttgttgttcgaatgaacgttctgtacgcatgcttgaattaatgaattgcaccaagctcgatcaattcaagttccaaagggtgctgttaatgttaattatacacgactgtgattcatatttctgatcgatacagctcaactagacagtatattttgtgactggtaaacatgcacaaaaaaatgtttataattaatctgcatgcatgtatacgtgccaattgtatgtgaggccacaacaagtcaaaatctcacctaaatgtccctaagaatttgtcttggacacttggcgaanaaatgcaaacttcatttggctaaaaatgcagaagtgcttcctagcatgtttgctagctcgtagatgcacccaactactctgtctttgacatgtacgtgtnaatgaacaattctttgcgta

SEQ ID NO: 143853 - DNA, 435 bp, Glycine max
  unsure (1)..(435): unsure at all n locations
gccttaaatctaacgcttttgagcgaaacaccgctctgtgcttcgcctttaataaaagaagacatctggagtcttccgcctgtacttctatcacgacgccaataagatcgaatcgtgcagaaatgagattgagttccatgccatatccggtggcagcgaaatctcacgcttggggtctgcaccatcgcacattctgaatgcttcgagactgtggcaatggacgtcgaacagagtgaaatctaatcttatatgtntaaacagggaagggaaagagagattacgctcaactgaaggacgttaaaatatttaatatgaattaaaaaatgatgtggttggtttaattgacgtggcaaaacctgattcatgggacagaagatgacatagagattatggtacgggactggtgatcttaatctgcgtgtgggtcgttgatgt

SEQ ID NO: 143854 - DNA, 390 bp, Glycine max
  unsure (1)..(390): unsure at all n locations
ctaatattatctttaatttctgtataaacaaaattggtatgtaatatgaccgacagattattatcgattaacttttccgatggatatctccatgtcaaattattggcagacatgtccatgaaaaattaccgaaaaatattnttatggaaaactaccgaccgatttttttgtgagagcaccgattgattttttagtgggaaattatcgacagatcttttcagtgagactttntttttttaccatggtagttntgggggactttagcatgtattatgctacgcttcgcactaatattattaataatattcattttgcttttgaaaaaaaatagtaactaatttattcttgagatccaaaccaagaataggaagacatccccatcttcttaca

SEQ ID NO: 143855 - DNA, 421 bp, Glycine max
tcacgcggcggcacttatataaataacagacccttcttgtcttttgttttaaaatagaccatatttggtaaattgtttttaaagcaaccccctacagtaaatttgtcggatggtgacaccacttagttcaagtgacaatacattaaatacaacaagtgtgtggggttcacggatggaaatgagacaatgagcatgtggtttgacctatttaaggtttggttctgattgacttatttattagaaatgtcaaattcaaattttttaaaagagtttttttagataaaaaaaatcaaatccaaacaataaaaaaagtttgttaaacttgacaaaccaatcggtaataataataataataataactattattattattaaataaaaaacttttaaaattcttcatattcttataaaataataaata

SEQ ID NO: 143856 - DNA, 405 bp, Glycine max
  unsure (1)..(405): unsure at all n locations
ccccatatttacaggagaactcaaagaatgcaccagcttattgcctaacacccatgactagcaaatttcttacacccataattacagtggaactcaaagaatgaaacagcttatatcaacgccttgcgacaaagtggcactcaccttcagtcttgaagctacctgcaaaaaaacacaatttattaaacatacatcaaacacaaactcattatcagtgtatgaaaagcagagctgtgatatgtttctcagttctcaccactgaaaacagtgcagaaagcccaacaccaacaccaatccagaagagaggtgaccctctggaaatatagtaaatagaccaataataatgtgaactaatgagcaaaggataccaacaaatntaaataaaaaagagtaaattattacata

SEQ ID NO: 143857 - DNA, 423 bp, Glycine max
  unsure (1)..(423): unsure at all n locations
ctacaatagnatntttatatgatgtcacactatgtttgttatgtgcgcgaatcgagggaaaaaatatcttttaattgtgacacggtagaacggtgtctgacacgtgtccaatgcatgtccatgaagtgtcattgctcaattagtgtctgccatttttaagggatgttcctgttttatagcattacacacatgcaaagatacgtgtatgttaaaactggttctactgaagtgcaagttagtgctaatctgctttctcctttgctctgatgatgcagtgtccgtgatattgctgatagtgccagcgatatatgaaaagcatggngacattattgacatccttggtgagaaggcatttgttgaattaaataatctatatgcagattngatgaaaaaagttttcgggaaatcgcaacactcgcaaga

SEQ ID NO: 143858 - DNA, 317 bp, Glycine max
ctgccatgatgtcaacgtatgctgagaccagatcgggctgctcaatgcacaaggcctgatttagtgtcacatgggaaagtgcatctgcaggattcactacgtctgatacgatgtccaagacagcctgcctgtagatactggaatcgctggacgcattgaagctgcatgatccacgacgtcagatgcgatgttcaggacatcctgccccaaaatactggagttgcttaaagcattgtagctgcaagatccacaatgttcgatgctatcgtcaggacatcttgcccgaatatactggacatatgaatctgctatatctt

SEQ ID NO: 143859 - DNA, 457 bp, Glycine max
  unsure (1)..(457): unsure at all n locations
agctttanggatttgaaatttcgtctgacaatataaaatttatgttttattataagncaactaccaattttgggagttccatattggctgttccaccatgaaaccccctgatgtccaggaagatcatatccttctaaaggcttttcctcattctctggagggagtggcgaaaagatggttgtactaccttgctctcaggtccattaccagctgggatgaccttaagagggtgttcttggagaaatttttccctgcatctaggaccaccgccatcagaaaagacattttatgcatcaggcaacttattggagagagcttgtatgagtactgggaaagattcaagaaattgtgtgcaagctgtcctcaccacccaattttttagcaactccttctgcaatatttctatgagggacttaacaacttggagaggagtatgattgatgctgccagtggtgga

SEQ ID NO: 143860 - DNA, 451 bp, Glycine max
  unsure (1)..(451): unsure at all n locations
actaagctgttcanatcccttaattcaatctcttttaccgcttntgaattcatttcacttcctaagcaatcctaaacaactttgaacatagatcaaatattttttttttaatttcacaatcaattgcattgaaagtacaagtatgacattacaaacacactagtaattcagtagctatcacattgaatcaaatgttagccataatcaacgggaaggcgtagaacaagagataagaccctttctgaacaaatatgaaaactgaaaataaaaacacctaagctatgaagcaccgacacagacacggacacgtggacacctgtaatgttgaaaatgtaggacacgaacacaactatatatatatatatatatataattaaataaaataaaattacataaaattaaatatgagcgatatgcataaaagatcntaaatgaaaattaagaattatat

SEQ ID NO: 143861 - DNA, 302 bp, Glycine max
tcaaaattttatctgagcataaaaatggaatctgatgtgtccacgcaaaatgtaaactaaactagtgtaattagttttggttgagtaggcggacattttgggataaaaatcgtgttacacttgattgtgtagactaatataaggaggaggataacaaaatatactttcactaattgaatgtatatttttttcttaacatggaaaataaatatccaatccctttctctctttgttaagcaagattaaattaaattaaattatagtgcatacttttcgttcttcacgtgtattttgaggctgat

SEQ ID NO: 143862 - DNA, 432 bp, Glycine max
  unsure (1)..(432): unsure at all n locations
cgttacactctataatactcacgctatagccaatcgccttaaaccactntcctaaaatgcatttcactagagcaatcaactnttattgaatattgggctattcttgataatgttcttttggtatctgaaattgttcaacacttgagatgcaagcagaaaggtaaaattaggaagtttctctgaaaattgatattagcaaggctttttacactactagaaaaatggctttttacgacacgtgatctacgacggttatttgcggaaccgctttataaagtggtgcggtggcacttttgtaatttttgtgtaataaattgcattttacgacgcactttctaaggcggttattgaaaaccaccttagaattttatgtttaataaaatttacgctcggttttagaanaaaaccgctgtaattctaaaaataaaaaag

SEQ ID NO: 143863 - DNA, 433 bp, Glycine max
  unsure (1)..(433): unsure at all n locations
tatgcgcatatttccttacgatctttcactngcacaagatattctatcaactaagaaaaatgcacccatatacaatcaaggtagcttcattacctagattatttacatgtacttccaaggtgtatttattatttacatcacacacgcctccttggctgaatttacatacatgcatactcaaagcattttggggtaccaaaaactgcacatgcgctcatcttggtatttctaatacccatacatatacaaacttcacgatgaatcttgactacctacacaataaggtgctacatttcatgctttttttcaagttnttgctacctaaagccacatgcaaattcaagcatattntcctttgctgactaacattgtattcaaattagaagggatatatttntttgtaatatgtnttcttcacataacatgcaacata

SEQ ID NO: 143864 - DNA, 405 bp, Glycine max
gcttaaaggagacaatctggcggagatatttgtatttgtattgaaccagaattcagcctacgccaagtggttaagccattgtctttggtttggttccagttaaacaccttaaatacgcttctaagcatcgatgagctactttcgtctgcccatctgtttgaagatgatagacagtactcatctttaattgagtgcctgcttttgtgaacaactccttccaaaagatgctcataaaaagtttgtctctgtcagagactatcaaggcaggaaacccatgcagtctcaccacttctttaatgaataactcaactacttccttagctatataaggatgacttaatgcaaaaatatgagcatacttagtcaggctatcccctaccaccaagatagtatcttttccttgag

SEQ ID NO: 143865 - DNA, 430 bp, Glycine max
tctggtgggacatcttgacttgctttccaatctgacattctccacagattctgccttcttctattttcagattggggatgcctctaacagcacctttgtcaatgattttcttcatgcctcttaagtgcagatgtccaaatctttgatgccatattctgacttcatcttctttggaggatagacatgtggaggagtagctggtttcttgaggtgtccataggtaacagttgtcctttgatctgctgcccttcattagaacttcactcttctcatttgtcaccaagcattctgactttgtgaagtttacattgaatccttcatcacacagctgactgatgctgatcaagtttgcagtcagtcccttcaccagcagtactttgttcagactatgaagtccatcatgaactagctttcccattccaatgatctt

SEQ ID NO: 143866 - DNA, 203 bp, Glycine max
gaatccagaatcttgatggctcttaatggtggaacctggggtatccactttttagataaacctcataagaatttatccatgggatcataattatcataatggctacctataaaacgaagcttatttagaatgggtggaaacatctaaacatgggttggatatcttttccctcttttatactgaagagttcatacttacgtatc

SEQ ID NO: 143867 - DNA, 431 bp, Glycine max
  unsure (1)..(431): unsure at all n locations
tccacaacatccaagcaaaacatcgttcatacagcacaagctatcacagccaagcaaaacagagcaaaggcagaaaactctgctcaacacatcaaccaaaatcacagcttttctcacgtaaagaccacagtaacaattccttcgatccaattcgttaaccgttggatcgactccaaaattttactggaagtctatagtgtataagcctgcattttgaccgttgggatatactagcaaacatccagaactcattctgcactagactttccacagccaaccacacacaagcatttttctgcacttgtgcaaaattctgctgcacaatttcacagcaaaaactctgcataagtgcagatttcgaaaatcacccttcctctcatccaatcttgcccaaatcaaatcctacaagtcccaaatcatgtatcanacat

SEQ ID NO: 143868 - DNA, 285 bp, Glycine max
  unsure (1)..(285): unsure at all n locations
tttttgtgtgaagacctgcatagaacttaacttgaagaggaagctgctctgagagcttgagatgagtttgtgagtgattgtgaagtcctagaggtggaggagacatccctatcacttgaatttcttcaatcattcatctttttcttctgtntggtggaaaggaagcttcccacctatggatgtggaaaagggatcaagctgaaatgtttgatgatgccaaagtttcacatgcgtctcaaaactttatttcagacaaagaaattaaagattttcaagatggatgat

SEQ ID NO: 143869 - DNA, 235 bp, Glycine max
aacgtttgaattgggcgatccgttatcttcggttaaaataaattccgaccgttcggtcgtgccgtaaccacgttggagatcaaaaaaagaggtcaaaaaataatataataataaaataaacatcttttagtaaaataaagcggaaaatcaatcggacggtctctctctcggatttgtcattcccaatccaatcgaatcacaactacagcgaaacttatgcctagatctactcgcc

SEQ ID NO: 143870 - DNA, 425 bp, Glycine max
  unsure (1)..(425): unsure at all n locations
tctttgagaaaacttccttgataatctagaacatagctacacacttccttgagaagctagaacatagctacacacatccatgttggtgagtatcagagcacccccagaaaaagctcttttcaccacgaaaggtccttcataatttggggcccacttgcctcgattatctttaacagcgtgggacatcttgttcaacacgaggtccccctcgttgaacttgcgcgggcgtaccttcttgtcgaatgcgttctttatccttctttgatacaaacgcccatggctcatggcagccaaacgcttaccttcaataaggttaagttggtcgtagcgcacttgagcccattctgactcttctaggcctgactccgccattatcctctgagaaggaacctctacctcanatgggagtactgcctccatcccat

SEQ ID NO: 143871 - DNA, 382 bp, Glycine max
  unsure (1)..(382): unsure at all n locations
tcattgggaaaagacattcttttaattccctgcaataaaggggtgaacaactangagaatacataaataagttaacctgatttagaattatccactctctctcttggtgtatcacctccatctctcaagtgtatcactccttccttttttctattcctctgggatgcctcactattgactctctcttgttctctctcttccctccttctgagtgggacatcacacacttctctgagggatagaggtttatgaataattctctggtcatggtgttggaaagaaatctngttggagaaaccatcatgcactgctttggtgtcctcttcaatgatggccctcactagcgtcatctccatcttaattgcctcaacaaataaacttt

SEQ ID NO: 143872 - DNA, 189 bp, Glycine max
acatattataatatccctttaagcctatattgtccaactttggtaactacgaaatcaaaaaggacacctggaacttaaataaaagcagtagaatctatgtgctctagacgttttacatttaccgacgcgggggggcaggtaggtccctttatctctaccccttctgacggagcaattgtccggccaccc

SEQ ID NO: 143873 - DNA, 469 bp, Glycine max
  unsure (1)..(469): unsure at all n locations
ctcgaccggatcttagcaccgagctgcagctgtaaaggttacatatcatgtctggtttggnttggttcaaggataaaagggatgccccacattatttccatgacacaaatgcaaaaatgatgatttggaaactttatgcaaaactggtcatgcatgcacctatgtggacactcaagtgtcaaatttttatggtcatgtgatgctaaggctcaagattcatttcctctattttaaatcaacccaatgtttccaaaatatgttcttttatccatttgtgcattcatccgagtccattttgggcgtccggtgaaatttcacagcgtttaccctttgggtgtatacacattttttttccaaaaactagttatgatcaacgaatttttctttaaagaaaagtggaagtcatctcttttcaaaagtggtagtgcttagctttacttgagtttaaaagaatggcttaaaatttggt

SEQ ID NO: 143874 - DNA, 255 bp, Glycine max
gcttgaatcttctactccgtgcaatttcaattccaagcatgatagcctcgagttctgcagttacaactaaacaatagcatacatcaataacaaaagagaagttcgctttgccattataatccttgagaactccaccaacaatggccttcttcgtgtctctattgattgaaccattaatattgagtctgaactagccatttgaaggcttgctccaactaatgctcttatgacccacaactttaccttcattgtggg

SEQ ID NO: 143875 - DNA, 246 bp, Glycine max
atgactttttcaggctacccaaaagcaaacgctgaaacactcaagtgtttctgctctcggaaaagaagcgtttctcacaagcccgacgctgaatcaaagatcgcaatggtcccgatcatggacatctaacatatgaacctccataccaaattttgagaagaactaaccgctaacgaacgccggaaggcgatttacccagacagctcagtcacctttcttgagaaactttctcgtgaggcttccttg

SEQ ID NO: 143876 - DNA, 403 bp, Glycine max
  unsure (1)..(403): unsure at all n locations
atctcctttatgtgctctatatcgcgggagtgtgctcaaatatatggcgcaatcttgattcgttttcttgcttgattacgttgaattangggtttgtatgacatggccctaagcctataatgcattttgaagtgatggggcatgccacattgtccccgttctcttgctattgacgcctaaacgcgcgcccaccaagtgttcggtgaaatgcctcaatggcattagcgcgggatatttgtagggaaacaacccatggagcaatttggtttgcacatattttctgggacatgcattcagtttcgaaaggggtagaataattgccccacatatgtcctatgcctatgagccacaagttttatgccaaagaacacaagaagatgtgcgtattgggtaaagttaccct

SEQ ID NO: 143877 - DNA, 337 bp, Glycine max
agaataattcctaaaaagggtttcaaaacattgggtagccaagaattttcacaaatctttaccaagagtttactctctggtatcgatacccgaaggaggaatcgattactagtagccagcattggtttcaaaactgatttgcaaagctgtaatcgattaccatgagcatgtaatcgattaccaatgttttaaaacgttagatttcaaatttcaagagtcacaactagtgataaaacattttcaaatcattttaaacttgtgcaatcgattacacaatacttgtaatcgattaccagtgtttctaaaccgtttgattttcaaattaaacatgaagagt

SEQ ID NO: 143878 - DNA, 243 bp, Glycine max
ttgccttaataccctttccaaaagataaggcctcaggttagtcttgcatctaatgaagccaaagtaaagtgtctgacctacaaagggcctcacatgcttgtgctcctcatatggacaccagatgacaatgttcatttgtagctcattcggtttctccttgattggaaggtcacaccagatacctcttaatggattccatctagtggctagaggatcctcatccatgtaattgttggatcaagt

SEQ ID NO: 143879 - DNA, 314 bp, Glycine max
ttatatatatttatttagaagtgaacaacattatggttcaccaatgcttcaacagccttgggatgtgtatagagaagtggtagcaatgccaacaactcatcaactaaagcatggtcaacgatctttttaagaataacttgcactgcaccttccctcactattctccctttgttttcatgcatataacatagtctggacagtgctgaagcatcatctttcatagttggtggattaccctcttctaataaatccaccagtatttgataactccagatcttccaattatgtgtttgttatcatcaagagttgacatt

SEQ ID NO: 143880 - DNA, 358 bp, Glycine max
aattttatctgagcataaaaatggaatctgatgtgtccacgcaaaatgtaaactaaactagtgtaattagttttggttgagtaggcggacattttgggataaaaatcgtgttacacttgattggtaagactaatataaggaggaggataacaaaatatactttcactaattgaatgtatatttttttcttaacatggaaaataaatatccaatccctttctctctttgttaagcaagattaaattaaattaaattatagtacatacttttcgttcttcacgtgtattttgaggctgatattgacaacactatgagtattgaatagtttgaattcattgctgccagtatggatcggcat

SEQ ID NO: 143881 - DNA, 346 bp, Glycine max
  unsure (1)..(346): unsure at all n locations
gcattttttatagcaatcaacttttattgaatattggtctattcttgataatgttcttttggtatctgaaattgttcaacacttgagatgcaagcagaaaggtaaaattatgaagtttctctgaaaattgatattagcaaggctttntacactactagaaaaatggctttttacgacacgtgatctacgacggttatttgcggaaccgctttagaaagtggtgcggtggcacttttgtaatttttgtgtaataaattgcattttacgacgcactttctaaggcggttattgaaaaccaccttagaattttatgtttaataaaatttacgccggtttttagaaaaaa

SEQ ID NO: 143882 - DNA, 352 bp, Glycine max
  unsure (1)..(352): unsure at all n locations
ttcttataattatttatttggatagctaaaaaatattggaaattatttagatttataaaataaataatcgataattctttataaaataaatattatataaaatactattataaaactcaaaattatatgaacagtatttacttaactgttaaaattataatcaatttcattggaaaattctttgtcaatttttatttattttattaatttgattttgatattgtggtggttatttaatgttcacaggattatttgattatttgagaagattattgaaggttgataacattttnttttagttttaactggcagaaaatttaaaaccaaacaaccacgtcatgccattgaagct

SEQ ID NO: 143883 - DNA, 448 bp, Glycine max
  unsure (1)..(448): unsure at all n locations
tagcttttgcagtcgtctataaggatgattgggtgttagaaaatgtcgatgcctactgtagactgtttttcttccatgttttagttgtatgtagcttctattttcttcacagatggggcatgcatgatgacccttaacactgtaactgttgagattcccatatgctggaaagtcattaatggtacaaaaaagcattgtacgcaattcaaacgtctccttgcgaaacacatcaaacactaaaaccccctcatcccacaacgttctcaggtcttcaaccaacagacttagataaacatcaatgtcatttcctggctgtcttgggcccgatatgatcatagacaacatcatgtattttcacttcatgcacaaccaaggaggaaaattgtaaattactagcagaactgaccataaactgtgtngagtgcttaaggtgccatatggattcatt

SEQ ID NO: 143884 - DNA, 229 bp, Glycine max
taatgttttattacttgctcactttaattgaccctgctcgtttcggattttaggaaagatatatatcactttgatcctttacattattcctcctctcttaatcttcttgcttcataaaaacaatgaagggaataatattgaccttcgaccctttggactttgatccatcagggaaatcagtggtggttcattgccaacgctaatgctccaagagtatccatgataagat

SEQ ID NO: 143885 - DNA, 322 bp, Glycine max
  unsure (1)..(322): unsure at all n locations
tttgcctgaccctaagagaacatttgaagtgtattgcgatgcgagcggacaatgcttatggtgcgtattgatgcangagggaaaggtagtggcttatgcttcacgccaattgcgtcctcatgaagttaactatccgacccatgatttggaactagtagcttgggtctttgccttaaagatttggaggcactatttatatagtactatnttgaagttttcagcgatcacaagagcctcaaatacttgttcgatcaaaaggaactcantatgatgcaacgaagatggatggagtcctcaggatatgatttggtctttctaccat

SEQ ID NO: 143886 - DNA, 208 bp, Glycine max
  unsure (1)..(208): unsure at all n locations
gtaggcgcgttatgcgccctcacaatgcgaagaccccatnggcgtcttattcaaacttacacaatgtggctcaatcaacgatgatctctctgagtttgagagtcttgccaaccatatcatcagtctttctccatccttcgacttaagttagcttatctttggggtggcgttggagatttgtcnnaaggttcaagcttcacaacctctg

SEQ ID NO: 143887 - DNA, 228 bp, Glycine max
agctgtattttcttcttgtaacccgacacactcttttcggacgtctgtagcgaccaacttgaatttttctttggcaagtcttgcttttcctagttctgtttttagagctcggacttcttcatcctcttctagagcttcgaagctttctttgtcaataatctttaacttggagagccaatctaaccctcgtgtacgaactatcagccattcatgataaccaccgatgat

SEQ ID NO: 143888 - DNA, 390 bp, Glycine max
gaacagggaccattgcgtttaattttccttcccgagaactcttgagatagcgaaaaaccccgtaggcgacttttgagtgatcgggagttgggttagccatgaactggctcaattgctgcccagtggaagaaatatctagtctattgttagtaagatagatgagactaccaacaaggcgactatttgaagaggagtcttctacagatgaaggatcttctatgcctgcttgaagatgagtagtacaatccataggttttgaagctggatggcatgccagccctccataatcagagagaatatctagaaccatattcctttgacatagatggatgcctttactagaacgagcaaccttaatgcctatgaaaatttttaagtgcccaaatctta

SEQ ID NO: 143889 - DNA, 291 bp, Glycine max
tttgcactcgggaatcgactcgtgcctccttatcactctcttggaagaatgctaccgtaccttgtcaaagaaatatgttcaaggtctataataaattattgaatttttgtccttaatccttaaataatatttggttgttttgactttccaatatatctaaacttttattttgaattctcaatatattaaaacttttattttaagtctatgtcaacagttatgtgatggtcatctttaaagtaacacatcatcactcaattaatgaaaagaactcacaacaaaagtgttaat

SEQ ID NO: 143890 - DNA, 401 bp, Glycine max
  unsure (1)..(401): unsure at all n locations
tgcagcttgaaagtgctattttcaccttctcgctnagccaatctgctggcttagcgagcgttcgctaagcgcaacactcatggactaagcgcgaggaagactctggaagaagatgagctatacaggttcgataagcatatcgcttcatctcactaagcgcaccacttcagttcatccgctaagcgagaaaggcgtgctaagccaaaaatcactaatgtgcgttaagcggtccataagtgcgctaagcgcacgagcacgaacatggccacctatttaagcatgaaatcagattttagagggagagtttggactaggattcagagctttgcatgtctaagatttctaaagagagaaaagtccaagttccagagaagtttgagagattttggtgtgaaagatct

SEQ ID NO: 143891 - DNA, 383 bp, Glycine max
  unsure (1)..(383): unsure at all n locations
accatagatattcttgacaatcttccacttgagcagactcaaagatcacccatcatatatcgacgtcgtcctcgaattcctgacgtagaacttgaaggtaattaaagaccagctaaatcatgtcctacttcagcagacaacccgaccatggacctagccaaagagaatcttgacttgcccattgctcttaggaaaggtactcggtctacacgtaatccttatcttatntataacttattaagttatcatcgtctttcttcttcgnaccattcttttggttcctctttatcttctggttctcttcctaaaaatctttgtgaggcacttgatcatccgggatggcgaccaaccatgattgatgaaatgcaagcttttaagcataa

SEQ ID NO: 143892 - DNA, 367 bp, Glycine max
  unsure (1)..(367): unsure at all n locations
ctgagcagattttcagaanatattctcaacagtcacatctttttatgtgggtcttgaatggctatcaaaggcctatatatatgtgacttgagacacgaatttgcgaagagtttttcaaaacaaaaaagtcttatcctcttataaagcaaaattgttttatcctcttacaaattccttggccaaattacttgtgattcaataaggaatttttgagtgctcaaattgttcaatctatctctttcaagagagatttcttcttttcttcttcttcattctgaaaagggattaagagaccgagggtctcttgttgtgaaagaattctaaacacaaagtgatgtgaaccttacggggcacggatcgcttgata

SEQ ID NO: 143893 - DNA, 250 bp, Glycine max
  unsure (1)..(250): unsure at all n locations
agactataccttcatggatcataaaatgacatntttcaaagttaagaacaagattagtctcaatgcatcggtcaagaactctagagaggctatccaaacatccatcaaaggaagaaccataagcaatgaaatcatccataaacacctacatgcaactctntaataaatcagaaaagatactcgacatgcactcttggaaggttccaggaccgttgcataggccataagtcatcctggtgtaggcaaatgt

SEQ ID NO: 143894 - DNA, 291 bp, Glycine max
  unsure (1)..(291): unsure at all n locations
attccctaatggatggcgcctctcctcacctcttcgcctttatcttcccgtgcatctccatggtggaaaatcaccattgaaagacctcattgaagctcaaagatccagcctccatagaagctccacaagcaagctttcatcaagtggtatcagagcacaagagcttcaagtaggtgcttcttaaacctccattaattttcagctttaccttctcctctattgttgggtcttcatttttctncatgtatctactcacatgtcttgtgctaaatgtttttaacatgattcttt

SEQ ID NO: 143895 - DNA, 410 bp, Glycine max
  unsure (1)..(410): unsure at all n locations
atgcactaaacgtggaattgagatagatacccatttctctaaattcnntatttttatnatgaagagacaattattccgtatgataaataaatatattaatctaacactttctatctttattgttattntcttgattcagtgtcaacctttggagctgtgctggacatggtaacagacaggatattctctgctctctctttatgcatgcagaccaaagaaaatgtgatgattgatgctgttatagctcctttatgttcaattcttgtgtgctatgaattgatgtggcttccttaataccagaattagcactgcttgtctacttgtagtcctttcccaactgtacaagtaagatattttccctttcaacgtgtatttcagtcgctgtaatttcaagcatgtacacctgactt

SEQ ID NO: 143896 - DNA, 288 bp, Glycine max
  unsure (1)..(288): unsure at all n locations
gctggtaccttctcttactacataataatattcggtgtttctctcgggctgcttactggttaactccatcttctaaatttattccatgcatacatgtggatgggctaataccaagaatgtccgcccagggccaacctatagccctcttatgcttcttgagaataaataaccagctttccttttgctcatcagcatgggaggcacatataattactggaaaacttttgctatcatccaagtgagcataatttaaatttgatggcatangcttcaattctggggtgggcg

SEQ ID NO: 143897 - DNA, 412 bp, Glycine max
ttgatgtattaagatttttgtttaaagcattccctcctcttggttattgagttcatcattttttcaatggatcaagctaatttgaagatactcagatccaattttctaacagatgggttcaaaacaaatcactttcaaagagggtgcatctttgaatcaacctctgttgtttgagggtgaacatttttctttttggaaaaagagaatggaaatctttgttcaatcaattgatcccggtgtatggaatgccatcattaaacttcattttgttcctactaaatatgtgaatggtgaattaatacctaaagaatgggatgaaatgagagatgatgagaaaagaaaagtgtgagatgatcaacaagcctaaaatattttaacttctgggttatcttctaatgaattcttttgtatc

SEQ ID NO: 143898 - DNA, 278 bp, Glycine max
  unsure (1)..(278): unsure at all n locations
tacccaccacagttgaaagaaccacaatagatgggagcacaacaagtggaagcacaacaatagaaaaacctatagatagatggtctgaagaggatagaagacgagtacaatataatttaaaagccaaaaacataattacatctgccctgggaatggatgaatatttcagggtttcaaattgtaagagtgctaaggaaatgtgggacactntacaagtaacacatgaaggcacaacatatgttaaaagatctaggataaacacattaactcatgaatat

SEQ ID NO: 143899 - DNA, 465 bp, Glycine max
gctttgaaatcaaactctgccactagtaatctatttcttgaaactggtaatcgattaccagagagtaaaaactctagtaacttagaaaaatttgagaaaaactcttttgaaaaacaaaattgtgctatgtttgttttttgaaaaatcttttcaatacttcccttgtgaagtcttcttgatttcttctcttgaaacttgaattcatattttctttgaatcttgttgactcaatcttgaaatcattttcttgattcttgaatcttgttcactcaatcttgaaatcaattggaacgtttgcaatttaattaaaagcttttgaaatcaaactttgccactagtaatcgattacaggaaactggtgatcgattaccagagaggtaaaactctattaacttataaaaatttgagaaaaactctcttgaaaacaaaattgtgcttggttgtttttgaaaatcttttcatact

SEQ ID NO: 143900 - DNA, 269 bp, Glycine max
caaaaaaaacattatacccagagagattagacattgttcttacagatacttttttttcttatatgaaacataccataaaaataagaaaggatgatgtaattgtgatgagacaacattcggaccacatggagtactttaatattcctctcactaattgggaggggtcttataaactgcatgagtgcttaatgccgctctcccaaactgatcttgctttggtttcgccgaaccaaacaaatgaagaatacttaacacaatactgtttgaac

SEQ ID NO: 143901 - DNA, 320 bp, Glycine max
  unsure (1)..(320): unsure at all n locations
tggttcttcaatactcctcatgtatgactcatcatgcgtgtcacttatgtgttgtcactaccatgcataatagctctaattttgactatataataaatttcaaatatccatggtcatgttaatagacttttgggggcatttatgtaattatgtttctgtcttctactagtactgctncacgggccctatttcatggctagtggatggacctcanaccttacatcatgacttctctgatcattctgtaaataagttgaaaagcctattacaattcttcggtccactgtattgacacattgacccttaatttgctgggatgg

SEQ ID NO: 143902 - DNA, 265 bp, Glycine max
  unsure (1)..(265): unsure at all n locations
gtgattgattaccagtagcaaaatgaatttgaaatttttttcatatgaatttacaatgttccaattgatttaaaaaaagctgtaatcgattacgatgttttggtaatcgattaccagtgcctttgaacattgaaatncaaattcaaatgtgaagagtcacatcctttcacataaaagctttgtgtaatcgattacactgatttggtaatcgattaccagtgattgtttctgaataaatcanaagatgtaactcttcaaatggttt

SEQ ID NO: 143903 - DNA, 261 bp, Glycine max
cagatgggtttaaaaataataccctgataatttttctaaaaccaacaaacctaccgcaatactgtggttgtaagaccatttcaccccattattaagatcttgagaaccacttaaaaggggatgaaaaaaaaaagaataggcttgttcaatcccaacccccatataatcattccattggcctccatggactactcttcaacaatattaattatgataagtgaatgggtgtcaaaaattttatatattgatcaaaagatcaac

SEQ ID NO: 143904 - DNA, 413 bp, Glycine max
  unsure (1)..(413): unsure at all n locations
tatctctatacactgaactaaatattttcatagttntnntnntcctcatacaaaagataatttacatgtcctatgttatagaaaaatcaatggcttattatatataatagtctaacgaataaccacctgaatgttagaaatgattaatgtattaaagtcgaaggttgaataattgaatattaaaaggatttgatcttgaaaaaaacaattttagatcacgctttatttattttttctgttaaattagttaaaatttcttttctcttattaacccgaagaaggattataaaaaaaaaagttattgaagatggatagatcgtgaataaaatgatatcgctaataatcattgacatcatgagcagggatctccatcagggtaatgaaggcaattaccccacacacagtaataaact

SEQ ID NO: 143905 - DNA, 438 bp, Glycine max
atactcaagctaaaggaacactcaaaccaggtgtatttatctcaagacctatacttctaagagttcgtcagggtctctccctcctgattcaggttcaacccctaaaataatattttacatgacatgaatattacgtaagaactattgttatttaaaaaacagcttttatctgttaaaaataattaagaggtaattattgagatctatataaagaaatataaaaaatgaaataatctgtggaaatcatttaagtttttaaagaattacaaatttaaaatggaaggttgctaaaattcttaaaactgatgtcacatagtaagacttatccaaaaagtaaaatataaaattaatgtaaaacataaaaatattaaattgcaaaagattattcatatttaagagtataaatgaatcacagcaaatataataaaatgctaaatt

SEQ ID NO: 143906 - DNA, 335 bp, Glycine max
ttatacccttccgaagtgctattaagcagataaatttctcggggataagagtttagatacaaaaaaaggccctgattttttaatacctaaaacaaagagggagaacttgaacccaacggtatgagataccgaatctttcagaaagcactcgaaggttgaaactagcaggaacttagggattttcgacggtggagaaagaacaatgaatgagaaaggtttaaaggttaaaagcagtgacagaagaaaaccaaagctgattttgcaggggaagtttatgcttaggtaatcgatggcattatcctgatgttaccatcggttaatattggtaaactcgt

SEQ ID NO: 143907 - DNA, 427 bp, Glycine max
  unsure (1)..(427): unsure at all n locations
ntatccagaagnggctgattggactntattaattgtcagttatatccatgcaaaaatatactgtgggccactctggcagcatattttgaaagttttcttttttttcgggtgatcttgattntttttttcttcaaaaaacggcatttgctgatgctaatataaaatttaaatatgtaattttttttttgtcttccatcaattttatatacacctgcacttttacttcatgaggtctcttgttgaaaataaaagtaacaataatattaatatcaataaaacaataaatttggcctttttcctttggacaatgttttatttatttatttataatattagcattggcaagcgtgccaaaggatcaaaatgtaatttgtgaaattaaaataacaaacagttacacactagtatggcagagattgaaccggct

SEQ ID NO: 143908 - DNA, 259 bp, Glycine max
gcttggatattaacaacactatataggtgttacatctcgtatgcggaacactatgttgaagttcgtgaaaactaatcaagattcaatttcacaggatacattatttaaaggagcgagcaacacttaatgtgaattaatccgaattgtggattaatcatattaaaaacttacagtatcacagttcgtaaggatatttagtggttccaccaagaagtcaaaatctattatgatgggtgaaaaaaatatacacagagaataa

SEQ ID NO: 143909 - DNA, 270 bp, Glycine max
ggaattgaccgatgatatcctgtgtaccaatattctcttgtagatgttccttgaaacacaagctacttcccttgagcatgacatcacatctcatgatgagttgaacgggagaagaataagagaggataatgtatttcagaatcatagaagagattgcacgcacgaatagagaataatacatgcataattgtattctgatgttccaccaccgactaaatattaacaggctgaatctgaggagaccaacaagccgacatctggccatttgct

SEQ ID NO: 143910 - DNA, 401 bp, Glycine max
  unsure (1)..(401): unsure at all n locations
gggctgtagttgggatgtgccatccttttatcttgctcctatcttgatttccgatngtcaccgagccaaagncactgctttggtcggatgagaacaaatttccatgtatagtaacctggaaagaggctccataatcaacaacccaagaactatcatcacaagcaatgtttaggatattaccttcaccaacgagatataacaaatcttcttttgaaactacgacagtagtattcttctcttcttgcttctttgttgggctgacttggtctgacttaacgttaccggccttttgatctctcttgaaggatcaacattctatatttctgtggcctatacttccacagtagtagcatgtaattttttagcgtgatttggatctacctcgagatgatgtggatctc

SEQ ID NO: 143911 - DNA, 450 bp, Glycine max
  unsure (1)..(450): unsure at all n locations
acacaaaatcgatgtattccatacccctcaatttaatggatattcaagggttgagaaatgaaaatgagaatggggtaaatttggaacaaactctcaccttacacaaagtctaatacatcaatttaaacttgcttcaactggatttacacctaaaattctaccgaaatcaaaattgactcctcaacacccaattttaccctagaaatggctctttgttcactttggtcatttgtttttctctcttgcacagcccaagctttctcataagtcctaaatgacatttcaagctaggattaactcactttaacctcgcaataccactaaatccagattgggccttccaactctcaaaacctcactctttttccactcataacaccatattctcactttctaaccctangntaactctacccttcattctctaacagttttcataaggcaattcag

SEQ ID NO: 143912 - DNA, 244 bp, Glycine max
  unsure (1)..(244): unsure at all n locations
ctggagcaaccaatttaattctgtatctttgttctcatgcagttaatcatttggaacttgctgtatgattgtacatacgagtatatcagcctatctttgaatgcttaacataagggtttcaatttattggaaaaaggactgaaaaataacttaaaaaaatattttctgaaaaaaagtcctttcgctaaacgcaagcctcgcgctaagcgcatctcngntgatgcgctaagctgtgagtctcaag

SEQ ID NO: 143913 - DNA, 184 bp, Glycine max
tgtctaaacagtagatgggcgaaacctaataacaagagagcatttacatacatgctttatgcatagaatatagataatagatagcttcataggatctgtagaagtgatagacacacaacttgccttgcacaaaattgaagcaactatcttgctcactatgtagaatgttgatcattattggaga

SEQ ID NO: 143914 - DNA, 325 bp, Glycine max
taacttctacaaatacagttttgcttggaggtaataaaagatacgctaccaacccagatgaatttacatatgagacatgtgcaactgcaggatctgcgatgtcctttctgtagagaagctgtagaggaggcatctcattgttcttccttgcatcttcatccaaccaatttggtgggcatcgatgtcttggctgaactatcatactgcctttcctcttgggcctatacaaaattatctacagcatatcttcactgaggtgaaaggattaaagaataagagatggagatattggtggatggccggcacatgggctatatggaaactc

SEQ ID NO: 143915 - DNA, 423 bp, Glycine max
tattgttgcacagaagggcttatgtctgtgtggtggtctgtagaggagcataaatcacagagtctaacaacaggtgcagaattttgattcatggctagttgggttaccaggttaaccaaggcatctagtttaccttcaagcttcttagtctcaactgatgaagataaattcgtggctacttcatgcactcctctaatgacaatagcatcatttctggcactaaattgctaggagtttgaagccatcttctcaattaaatttctggcttcaacaggggttatgtctccaagggctccaccactggcagcatctatcatacttctctctatgttactgagtccttcataaaaatattggagaagaagttgctcagaaatctggtggtgagggcaactggcacatagttttttaaatctctcccag

SEQ ID NO: 143916 - DNA, 322 bp, Glycine max
caaatttagatgttcagaatcaattcacttaatcaaaatcatacttgttgtgacaaagttgtttacggtcgggtttcatataaaagtaacatgaatccaacctaccttcttaatgaggaagcttcagggtacaaattcaataaaagggacaacatttttttgtgtgtgtgtgcttatgtgaaaggtaaaaaagttggccaaatctatgttatcctttctagttttaagtaaaggtttcatatatataaattgaatgtaagaaatttgaattcatctaactaattttattgtataataaaagacttttaactatgactattta

SEQ ID NO: 143917 - DNA, 399 bp, Glycine max
  unsure (1)..(399): unsure at all n locations
tattaaatcattgatttgtctgtaaaactaatggatttactagagtgtgtaatgatttttgttttttgtcttgtatgaacatcctttggtaaactgaatatttctctctatatgattgacttcggattttgagtcataccttatccaaaactagacatacatgactttttatactggtaaagtttataaaattatggtatatgataagtataagttatgcaatagttttataaatactctatagaagaaaaaaaaatgtaaacttgagttctaatataaattnttaatcagataaatatatttatgtataaatttggtttgcgttggattagattgaattttaaaatgaaatccacaatctgaatttatccaaaacaaatgggtttagtaaattctaat

SEQ ID NO: 143918 - DNA, 428 bp, Glycine max
  unsure (1)..(428): unsure at all n locations
tgtattgtcgctcagatcttgtctagttatggctctctgtatttangcaggngctcagatcactcagcgagggtacaacgctaatcctaatgatgtcacataatctctctccgtgcagacatcattctttacctactgctcacatttggttttttaggaaaaacaccataactaaacgcgccccaaggcatccctatcgcaccagatccaaatctagaacgatgggtgatcaagaggagacacaggaacagatgaaagctgacatgtcggctttgaaagagcaaatggcttccatgatgaaggccatgttaggaatgaggcaactcatggagaaaaacgtggccaccgctgccgctgttagttcggctgccgaagtagacccaactctcctagctaccgcgcaccattctcccncaaatgcgatagga

SEQ ID NO: 143919 - DNA, 422 bp, Glycine max
  unsure (1)..(422): unsure at all n locations
gcttgaaatcagaaatggagaatgagcttgggcaattctcgaagcttttgcatgtttagagatttctagagagagaaaagtccaagttccagagaagtttgagagcttttgttgtgagaagactggcagagactgagcgagaagaggaagccatcccgagagcatgagatgagtctgtgagtgattgtgaggttctagaggtggaggagacatccccactacttgtatttcttcaatccttcatttttctcttctctttggtggaaaggaagcttcccagatatggagagctaaatcctctgttggttcttccttgtaggtacttgatgtaaatacttgtatatctatttaatgatggtntatgtgttctctgtgctatcagtatgtcatttcagtgtgcttttgccttgatcatgtagatg

SEQ ID NO: 143920 - DNA, 280 bp, Glycine max
taatgcatagaaatgcacaaactaagatataggtttggtttgattaactaggtttcaatgaattcaatgaataggaataagagcaaattacagcaacacccccctaagcttttatcaaattatacattaaccccatcctttttttatttttctacactaacccctctaagtttgaaaacattatactaacaccccaacaaaacttacactaacacttcctacaagaggtgaaagtaatggttaaaaaagcagggatgcttgtgtaattacacgaaaactc

SEQ ID NO: 143921 - DNA, 302 bp, Glycine max
  unsure (1)..(302): unsure at all n locations
atggaacacagctccaaacctcaaaatggaggacacatgaatgacaacgcaattcattcatggggcttcgaaaaagggtaaaaatggaggatttgcttggaggtcctctcttatgcaatcatggaacacaactccatactcgaaagtggatgacccacgaacaggcctaagcaataacattcatgtggctccgaanaaggatgaaaatggaggattgcgttgagggtcctatcttaagcaatcatggaacacagcttcaaacttgaaaatggaggtcacatgaatgacaacgcaattcattc

SEQ ID NO: 143922 - DNA, 330 bp, Glycine max
aatacaatcataaatgtaaatctgaagcatactaatgcgccaatttccttacaaacgttctcttgcacaagacattcaaccgaaaaaatgcacccatatacaatcaaggcagcttcgttacctaaattatttacacgtacctccaaggtgtatttgttacttacatcacacacatctccttggctaaattcacatacatgcatactcaaagcattgtggggcaccaaaaattgcacatgtgcacatcttggtgtttctaatacctatacatacgcaaacttcatgatgaatcttgactatccacacaataaggtgctacatttcatgctc

SEQ ID NO: 143923 - DNA, 440 bp, Glycine max
  unsure (1)..(440): unsure at all n locations
ggatccttgagtcaccgcggctgcagcttctgaatctgatgaagagagaaatttgcttttatttaaaagaatttctctttccttttttaaaagcaatgccacatgtctcattttgagtggagcaaaggggcccacctcttccccttgatgtgacttcatactcagccacaaggagagaaaaanttgaccttttgaatgctaaaaatcctttctcagtttgcgtgccacttctctggttctagttcctcgcgtttctctgcacccgtcggggcccgttttcgaaagtatacaatatatatatcaaaacgctcagaatgaaaccctgagcgtgggtcagaggatggttttgttaaattattagttgcacgcaaaacgataattttagactaattaattgagatntaatctataactggctagatatggaatactctttcgta

SEQ ID NO: 143924 - DNA, 421 bp, Glycine max
  unsure (1)..(421): unsure at all n locations
cctcaattcctctaatttttgaagttggagcttcctgtgtttaccaactacattcaaatcaaaattcagatacttcaatgtctagtatgctttatgatcaaactcaataggtaagtggcaagattggcgatagaccaattggaagggagtgagtcttgtaggagctttgtatgttgtatgtatgcccacagagcttcatctaagttntgagatcaatccatccttgattgagcatctgttttctcatagatcttcttgacttccttgtaagaaacttcagcttgtccattggtctgggggtggtaaggtgaggctaccttgtgtctgacactatagtgttggagaactttcttgagttggacgttacaaaaatgatatcctccatcacttatcagttcccttggtgtgccaaaccttgaaa

SEQ ID NO: 143925 - DNA, 347 bp, Glycine max
agcttgccacccagctcgcccattcgagcattggtgcttcctccagaagcaacagccttctggaggaatctcctggtgcccaagtgggcctggttgctattagcacccccatttttactaagtacaccccctgccttttttttggtgattcttttttcgtaaagttacggaaacttatgaatttcgtaacaatacttgttttctttccgtaatggtacggaaccttgcggattgcataatcatccccttttttgacttacggaatgttacggaaccctacggattgtgcatcaatattttcttttgatttccggcatgtcccggaatttcacaaattgcctaatgat

SEQ ID NO: 143926 - DNA, 450 bp, Glycine max
acggacctatgaatactagctttctttcacaatcaatctgtctgctaactaacaattctaaatgcaagttcacattcttgttctttctttgtctaacatacatactagctcaaactcatgaaaagaaacacaaactccatcaaaatcatgcactcaatttaagtacttgtagtttttcgtgagggaaaatacttgtacttgggggcatgtcactcggtttggaactcccttgtgactcgggcttatcaccattgggggtggggtggagttgcctgtgcacaacaggatgaccttgacacttgctacccagctttcttgggtgtgagtgtcgtgtgggaatgctcacgctatttcatgacgaatggtactacattgcatttgagagttaaggtcaagtgcatgcatcatactaagcatgattgattggaatattggaaaagttgatgaaaa

SEQ ID NO: 143927 - DNA, 291 bp, Glycine max
tcttcgtgcgagctcaaccgaagctgtatttcggccgaccccggcattttgttggccaggaaaacattagcccacctcggcaaaaaaaaaacatgattcaccggtattgacaaaaaaaaatgctggccttattcggccacgaaagatgaccgatcgaggtctaaaaaaaaagcatgaccggattacgccgatcgaacgtttcctaatagatatcctccaagtattattcagggattgaatggaaaaaacaatagccgacatcggtagttaaatagccgcgactgatatttt

SEQ ID NO: 143928 - DNA, 279 bp, Glycine max
atatgatattcgccttttgaatttgctcagagcttcagtattcaatttcaagcgtgtcgatatattacgcgactcaatcaaacatccgagttaaaagttattgtcgtttgaatttgctcagagcatcaacattcaatttcgagcgtgtcgatatattatggggctcaatcagacatccgagttaaaagttattgtcgtttgaatatgctcagagcttcagcattcaattttcagcgtctcgatatattacgggagctcatcagacatccgactaataag

SEQ ID NO: 143929 - DNA, 384 bp, Glycine max
  unsure (1)..(384): unsure at all n locations
tattggtataaataataccaattaagtcatccttaactgtatgatctcatacctacacagtctttggatccctcagaattggatgagtattcgaatcattcatgtatctctcccgttggtgaagcctacaaagagtcgctcccattccatgtcagatctcttgtgcaccgacgatcaatccctgtcttcgtcaggggtggggatgttactatgaatgggttcaattttaaaaattaattaagatgaaattgaaattagatgtctatgtgcaaaagatgtatagnttaaggattgattgaatcaaaattaaaattcataatatctattttcaaaccaaataaagtttatgatcaattgaaacacaaataaagtttaagatgacta

SEQ ID NO: 143930 - DNA, 423 bp, Glycine max
  unsure (1)..(423): unsure at all n locations
cctcgacacctctgtttttctatctgtcatcacaatctctgttggtagagagacnaaaacttcttcttctaatgagccattattatatgcagattctacattcatttggtatacatcccagcaaatgtagctagccattgctattacaagtctcactgtttccaacctagcaacaggggcaaatacttcatcataatccagaccttgcttctgtagaaatccctttgcaacaagtctggctatgaactttgttacttctcctctaagattcaacttatgtttgtagacccattttactgttatggctttctttcctgttggtagctttgagagactccatgtcttgtttctctcaatagacctcagctcttctttcattgcttcaacccaatgtgagtgcttcaaagcttcttccacgccaat

SEQ ID NO: 143931 - DNA, 222 bp, Glycine max
actccatcatatgagcttttttttttatgaaccgacattcgactggtccgaccgacacttaggttactaacagactgatcttagattcccaaatggaattcctccagcgccgcctgcgaaggaatatccgttggaatactcccctttataaaaatgatggtctgccctacttgcgatctctttcccgaaaaaatgtttcggcacaaagcagttcaaatctgc

SEQ ID NO: 143932 - DNA, 176 bp, Glycine max
  unsure (1)..(176): unsure at all n locations
ctgtgatgtcccttagcaggcgagctcctggcagtcaacagattaaaggaaaacaagaccacaaantaaggaggcttgtggtggctggccagctgtgaattatgtgtaatatgtggatggtggcctctggtaatcgattactaaaggtgggtaatcgattacaacgcttaaaaatg

SEQ ID NO: 143933 - DNA, 440 bp, Glycine max
  unsure (1)..(440): unsure at all n locations
cattatcacgctcaccaaaattaagttgtgctctgtctagtgtgacccattcctgtaaggatcaagattaanataaatgcataattagaagactgtcaaatgaattagcattgttgtacttggcatgaccattggtgattcaaaataaaactttggcatatttttcagtttaaattatatgtcctacaaatacaatctgcanaggatttggtatatatataagcagtgatcgtataccaaatttaacacagaaatagcatacaagccaacctagcatcgaagagggtgaatcaacaaaacatttgcagttcaagttagagcattttctctttgtcacaagaaaaatataacaagggtctagatcttacaacattggatttgcaatgctaattcctttatagcattgaccacattcatcacttacaggaacaatgtgagtc

SEQ ID NO: 143934 - DNA, 402 bp, Glycine max
  unsure (1)..(402): unsure at all n locations
tagaagcannagttgagggttntatcttacttttgatatcctatgtccacacctttgctggggatgaaccaatttcttcatctccctgagtgttattccaattggcactttctttcttcaaatgaccaagctcgctcaacaaatattcagcattgatgtaatggcattccctccgagtcttccagaaaaggagttccacanacaaaaggggttgctntttcattttctntagcatctttctgaccaaacaagtagagaaaaggatcaaaatgtanggacatcaatgctgaatntatagactcctttgaattataagatataaagtagagaaaaggatcaaaatgtagtaaaatcttatgtggtatgctcatatttacatctgaataactatacctgcataat

SEQ ID NO: 143935 - DNA, 388 bp, Glycine max
  unsure (1)..(388): unsure at all n locations
gttttaccaagtgttcttgaaccctctttccatcaagcttaggtaagtgacctccattttcaactctaagcttgagttttacttcattttttttactctattctcacttgtagtttcaaaaccttattntgcactcttgaaagttataaacttgaatctaaaatccctcattcttccttctaattttcgtggagactaccagaggtaagggggtctctccaactcttgagccatgtgattgctgttgaacttccttgaacatgttgctttaaaattttcaagcttattgtcatgtcctgaatctgtgtgttaagatattttccttgaattttcatgccaacaatgagttctttgaatgttaaaagatagaattagcctccaattcact

SEQ ID NO: 143936 - DNA, 292 bp, Glycine max
  unsure (1)..(292): unsure at all n locations
aagtgcctgcttgtatnggcattgtctaggcatccaaatgtagaagcgtgacttctaatgtacttttttctgaaagcaaaaaattattgttgtggcccaagttccgtttgaatatgttgcaacactaagacaatcaggacctacacattccagtgaaaacggtctagttttcttttgttttcgaatatttagaatataaggttttttaatactgcagattgttgaagttgtgctgcgccaaggtcttgttcatccaatcacctgtgttccataccttatagcccttgaaaca

SEQ ID NO: 143937 - DNA, 444 bp, Glycine max
caagagtcttcacacaaaaccatcatgaagcagatttcttacataactacccatcatatctcccacaaccccatacccacgaaaatcaaaggagaaagaagtccacccaaacctgaattttcgaagtcccactcatagccacgcacttcacgaccccgaaaatgccctcctttcgcgatttggagcagaaatgatggccaaaggttggagctttgcttggagcttcaatggagaatgaaaaagaagaaaatggcaacgtgagggagagagagagctgtctgaaattttgtggggctgagtgaatagagagagagagatgcttttatggtattaaataaaagggttttccctttttctattattttatttaagcaatgccacatgtctccatgtgagtggagcaagaagggtccactttctctttttgactgtgacccatactca

SEQ ID NO: 143938 - DNA, 366 bp, Glycine max
cctgcaacaacccatatgtcccttcaggctgtgattgcatatggcgccttctcttcgcttgaagaatgaccaagatgggtagggctaatgccctggctgcaacccccaccactactaacccatagtgtaacatgggtgggctggacttatccgaagaataaaatgaatgatggggtgacactatgaaagggccttggaaatcacccattctggttgttttttttcggggcgggagaaattagacaaggacaacttgggtcgggaataatctaatatgttgtgacactagacatcgtcagagaaattcatcattattggggatggtgatacaatgagacatactttttataaataaattatggaagg

SEQ ID NO: 143939 - DNA, 430 bp, Glycine max
  unsure (1)..(430): unsure at all n locations
ctatatatatatatatatatatttatatatatgaaagcttttttgtcaagacagatatatntcatctaaaacagggtatacattgttaataacaagcagtcgacattgtttatattctcataaaaacagtatgatatttatacattctagtgttttacaactcacttttatcttctttttcttcttcttctcttcaaccctaanccaccataagatagagtggacgtttatcatttctctaaaaaaataaattataaaactattaaaattccttcgttttttattaacgattaaaatgtttactttttttgaattatttaattcgtcctataaatattagttataagatgcttacgtgttaaaagaaatggtcttcttaaccagtgttntggagctcgattaaagaaataaaataaaaaatatttatcat

SEQ ID NO: 143940 - DNA, 404 bp, Glycine max
  unsure (1)..(404): unsure at all n locations
ctttctcgaaaagcttttttcgtcatctacttgatcaggcgtgatgcacacactacaggtcacctataccgtctttgtaattgagaagacaacgtcaatgtccacacaatgatatatacaacaattcaacaacgcactttattgtttacccgtcattgtttgggtgcatttcaacgttgtgtgtgtactcaacacccatcgttgttttagtgcatttcaacgtcggggtttacttgacacccgtcngtgttagggtctatgttaacgtcgatggtttaaatacgtgtcgtagaaatgggaagaatatacgacgggggcttattgaccgcattgaaagatatttctgtgacaaaattgggttgaaccgtaaagcaaaatcttactacgaagaatcactataattc

SEQ ID NO: 143941 - DNA, 426 bp, Glycine max
  unsure (1)..(426): unsure at all n locations
ntgtcacataaccaanaacaggataatcagtaaggaaaagtttcatgagaacccatcccatgaaacttgaaacaaacacaagcaaatccaggtgcttacttgaatggccagtgagggcaagaaaaagcacaaaatatatcacaagagccatgactaatgatgatgatgatgatgatgattcagagggtattagagaaacttaattgatggaaattgaagagggtactccagtgtgaggcagagagagagatagagagaatgagaagagttgaagcagttttggagaatggagatttctggacaagaggtgaggtggtaggagcctgtctggtacacttttcaggcacccttttatgtgttgaacattatgtacataagtattattgtattaatataaatcataataattaatagagtactaagtat

SEQ ID NO: 143942 - DNA, 299 bp, Glycine max
  unsure (1)..(299): unsure at all n locations
tctcgctcagcagatggactgaagcggtgcgcttaacaggatgaccctttcctcagcgagcaagcacagctgatctttctttcagattcttcctcgcgcttatccgaggaatgttgcgctcaacggatggctcgctaagccatcagattggtttatcgagagggtgaaaatcancacttcacaaacttgcctaattaacctgaaattaagagaaaatgattattaaacacacaaaacagaattactaagtatttattacctattcttaactaaaagaacttataacactacaaaataac

SEQ ID NO: 143943 - DNA, 390 bp, Glycine max
  unsure (1)..(390): unsure at all n locations
tcagaacttcatgccaaactttataatgcagtacatgcatggaacagagaaaattctnntttnttttttgaatacaaggtcattaaattgccgcaaatatttatgcaaacaattttaataaacacgcatatttttaaaatataatcatataaaagatcatgattaaaattctgcagcaaaatttcggtagaacaacttaatgatcgatcacatggactggctgttactggatcttggctcattgaacaacactaccagtctacttactttttacctaaatttctagccttacctactttttttgtctgtgaaaagagaaatacttttcacttcatgttaattccctcttaatatttttaccctgatgtgatcaaaaatgaatatgccatg

SEQ ID NO: 143944 - DNA, 328 bp, Glycine max
aaaatatttcctcttcaagaatctgcatgtgctataagatcttggctagtacttatgatttcattttcccaaaggtagaatcactaacgccttctttcactttgttggggagggtttcagaagtttcatcagttttgtttcattttaattaaagggaggctccccattaattatttactataagctataacagctaaattgcatcataatgctcaagtgaaacagatagaacactctaaagggatatcattctataccaagaataagttcatttataagcttggatcatttccaattcgtaaaaaaagatataaataaaatgaagtga

SEQ ID NO: 143945 - DNA, 429 bp, Glycine max
  unsure (1)..(429): unsure at all n locations
acctataaaactcacctcaagctgctgccattcattgatgaactatttgtgaattggcaaagaggacctcgactagnacagaaaattcatcatcaattcataaacatctggtattactttaaactagtggaagcggactgagctctgtctagctaaatattatccattaataacttgcagggctttattgtggcttagtctcttgtaagcatgcatcatactgctaacaaatgacaattgattaccaatgattcgtagtaatgcttacaaaaccatttttgtggaaggaatcatagtatatataggttggattctatctaaaattccatcattgatatctttagtcctgcagtatgttctttctcttcattttgagttctccacatactgatggatgctaaattggtttggtttatctggactctttga

SEQ ID NO: 143946 - DNA, 381 bp, Glycine max
  unsure (1)..(381): unsure at all n locations
tgcaagcttatcatatatgtattctccccaactttctcctgataatgaggaaaataccttaccangttctcaaacctagttgcatactctgccaccgacacgctcccctgttttagctcgaagaacgtcatcttcttcctattcttcacgtcttctagaaaatacttctccataaaagtctgtttgaaagtctcccatgggacaacaacacctggctcctccaaacttgggtgagtgttcttccaccagtactatgcctcatctgccagcatgggagtagcaaacaacaccttctgttgtgctgacacttctactcaaagacttcttatctcctcaccaacctcacgcttcagacatacgccttgaggagggggtattctt

SEQ ID NO: 143947 - DNA, 285 bp, Glycine max
tacacgttatgaatcacatgctgatgataatgaattttaggatttgtaagagatggataagatacaatattttataaaaatgaataattgcgattttttgcatatgcacaaatttgagaattaaatataaataaatattatttgtatggtaaatgctatgacgaaattttatgatggattttagcatgtgtgaaatggaccttactagtttcattactttcggagctaacttgatatttttagaattctcatgttagaaaatccgattatcaacatgatagttct

SEQ ID NO: 143948 - DNA, 314 bp, Glycine max
gctgcacctaaaaagatgaaattttagtttttataacaaaggctattatatcagcttatagttactcttcttttactaaatgagttagttcaatattgtaaaacctactaagaaaacattctaaacttaatatggttttaaattattggtattattactattaaaagtttatcataatattctgagattgtatttatggatctatttaaatgcctagacatattagcttccataaaggccttgcacctattaacctatttagtagaagtgttattaacttggttaaaagacgtacgttaagatacattatacca

SEQ ID NO: 143949 - DNA, 407 bp, Glycine max
tggccttgatatcatctaccttcgtagtatcaatctggattgcctgagcaagaacattatcatgcacagttggtgttgaagtgataagagctgcagctatggacactgtgccatggagttggctgtcgaaggcagaaagcacagaagcaggcttatcaccattggtcttctgatagtgcaccaaaccttttgggaacacatagatttcaccgttcttaatagactttgagatgagtttgttggatgtggagataaatccaacatctaattcaccgtccaacacaaacacaatctcagtggcacgagggtgtgtgtgaggtgggttaagtcccccagctttgtagtctattcttgagaaagacacccccacaagtaattggtatatatgttgcttttagggaaaattc

SEQ ID NO: 143950 - DNA, 341 bp, Glycine max
tgatgcgcttttgagccacaacagctaacagaaggtaagtagcgataaacacagacgctgatgaatgttagcacagaaaggattgtcaaagaattaaactatcaagagaaaacgaaataaagaatttgccgaggaagggaaaggacccaaactttgaattaaaaggggtcatacgatatgatagggaagttcctttggacataataacttctttaagtgcacccatgtataggttcaacatcaagaatgcagctctcggctcagtttattctattatatatattgcatgtctaatacatcaatagcgttgcacgtgaaacaagtagcttgtctctcccagg

SEQ ID NO: 143951 - DNA, 407 bp, Glycine max
cttacaattctgctgagctgatctacatcacttgttcccaggaacaatggctttgatgttaatagctcagcaaagaaacatcacttgttgcaagacatgaggtgtttccatcatagatgtttgcatccttatcagtgtcataagagtagctcttggttttcatctcatccaaaactctgaaatattcttcatgactcacggttccctgatttggattttcatatacattttggtttaagctaactaattgagaaatagcttcaggatggtggagtgagctctcactatttgaagcatcatcttcatatggtctaataataatggaggaagctgtaaaggtgcaagaatggggttttgtgtatttatggactagggttaatatggttgagttaattctaataccctga

SEQ ID NO: 143952 - DNA, 391 bp, Glycine max
  unsure (1)..(391): unsure at all n locations
ggtttgaggtacttacccgttgaagactgaagaanacgtataatgaacgatgaatcttgaagatcggtcgagaatcttcgcgtaattactcatggaaacgttacggaagcgcctcggcttggattttcttcacggaactaatnttcctcagcaatttcgagagagagagaagtgcctaagaggctgaacccatttcttcttcacttctccccttatttatagcaaaataggggagaagcttgccgcccagctcgcccaggcgagcaaggttgcttcctccaaaagcaacagccttctggagggaggatcatgaaggcccaagtgggtcagattgctatttacaccctcctttatactaaatgcacctcccttctatatatttggtaattct

SEQ ID NO: 143953 - DNA, 317 bp, Glycine max
  unsure (1)..(317): unsure at all n locations
gatatgtttctaaataagctagagtnttgctcacagtacattgatttatttcaatctattgggcttcctgaaactcgtcatgatcggacacggggaggtaagggtacacgaggatatgatgttgtaacaatgactcgatgggaggtctcataagcacatttgtatatcttgaataacacacaagtggttcttccctacgtacgtactcacaaagaacatgttgcagctattcacccaaaaatgaatatgttgaaagtgttgcaagaacataatataactttcataaacttatttaaagaaacaatcttcagtgatga

SEQ ID NO: 143954 - DNA, 314 bp, Glycine max
cagctgagctaagaaagctgaaaattttgaatagttttttttacagtccactctctaagggcattgtatggctgtatctggctgtgcatcttacacattgatatttgtatgcatcatgcatcatcatggttgggtgaaaaagttctaagctaaaacatttcttagaggaaaaaatctctattctaatgttaccacctcattgaatcgatacacaagctatctgaagctgagagttagtctctataaattgatcaatccaaatctcgtatcgactacctgttgttgaacatgacgattatcaggagcttacttta

SEQ ID NO: 143955 - DNA, 404 bp, Glycine max
tcttagtttcagatgatgcagatgggtttgtagctacctcatgcactcctctaatgactatggtatcatttctggcgctaaactgctgggagttggaggccatcttctcaattaaatttctggcttcagcaagagtcatgtctccaagggcttcaccactggcagcatctatcatacttctctccatattactgagtccttcataaaaatattggagaagaagctgttctgaaatctgatggtgggggcaactggcacatagtttcttaaatctctcccagtactcatacaggctctctccactgagttgtctaatacctgagatatccttcctgatggcttgggtcctggaagcacggaaaatttttctaagaatactctcttaagtcatcccagctcgtgat

SEQ ID NO: 143956 - DNA, 372 bp, Glycine max
  unsure (1)..(372): unsure at all n locations
ctcttaaggtggtgagattggtgactgaattttgaatgacatnatgatgtgactcgaatgatcataacatatatgcattgatgaatcacattgcatatgagtagacacgtaagttgagggtgcttggtggaccctcaacctagtgttggaggttgtcaatggtagctaacatgaatatgcctgaagaatggatgggtggatgaatccctagataagttaaggtccttgcaagccttatcgagataagccattatcctagctcattcattttttataaaaacacactttttctacacgattaattccattctccccaaatggttagatcataaagtacgactatgttaaggaatgtgcttataataatcgctc

SEQ ID NO: 143957 - DNA, 379 bp, Glycine max
  unsure (1)..(379): unsure at all n locations
caatattctgatgagggtgtgccatatgttctcaagactgaactaatactttngctacccaagtctcatggtcttgcaggtgaagatcctcataagcatcttaaggagttccatattgtttgtttcaccatgaagccccctgatgtccaagaagatcatatctttctaaaggcttttcctcattctctggagggagtggcataagaatggctatactaccttgctcccaggtccatttttagctgggatgaccttaagagggttttcttggagaaattcttccctgcatttcggaccactgccatcagaaaagacatttcaggcatcangcaacttaatggagaaagcctgtatgagtactgggaaagattcaataaat

SEQ ID NO: 143958 - DNA, 305 bp, Glycine max
tgcagcttttaaaaacacatctcttcaactattttgaaaaggcatgaagggccaatatatatgtgtgtctgatttcaaaaagcaagagagagatattccaagagaacttcattcttaaatgctctctcaacaactcttgggcaaacacttgcaaatctattgagagttcatccaggaacttcaaattgtattatccactctaaaggagagtaatctttctattcttctcaaaaagtcaattgtaatcaagagactgggtgtctcttgaatcgtgagtttcctgaacacaaaggaaagtgattcct

SEQ ID NO: 143959 - DNA, 425 bp, Glycine max
  unsure (1)..(425): unsure at all n locations
tggagctcggagaaaagattgaagatgttntgtcttttacatgtccaactccattgagtgacatttgtattggttgttatattgaatgttgcatcttaattcatatcatatattttgtgcatcatgcatcatcataaataagtgagaaggaaaaactctctgttttaatctattacaaccttatcataatcgattgcacaagttgtctaatgcttgttgagttacgtcttgtatcggtttaatcaaatacacaattctttttgagacaatgactgtgttatgaacccatgtaactttcctagctttcgaggtctaggcacctccagaattaagaagagagaaatgggaaattcttgtattattgcttcctcattagatacattgttctgctntatatagactcattttctgctactaacaattct

SEQ ID NO: 143960 - DNA, 246 bp, Glycine max
aaagacaacaaaagaaaacggattagatcttgaaaatgaatgcggcgaagcatactattgatactagacatctcatgtgaactaccctaaactctgaaggattgggaaaggaatatagatggcacggcattttcccccaactctagagtaacaggagtttaattctttgcagctgcagacatcactacgctcgccacacatggacttactgaaaatttattcccatggagaagtaatttagaacca

SEQ ID NO: 143961 - DNA, 430 bp, Glycine max
  unsure (1)..(430): unsure at all n locations
tcaaccatcttgagtcttatatcatgactacaaaagaacttcttacatctgatattatttgccttttcatgtattacttcttaaaaagttactatttactacaaagttaaagtaataaaatgagatttcttccctataaaaataccctcttattgaaaaaagttaaaagtaattatgaatctattcaagtatttaggagacatactaatgaataaagatattggaaaaataattgatgtttnttaatcttttaaagtgataaatattttctaataaaatattcaaagagacatataatgatacgaaattatatgttcttgtaaggttgaggtaggtattagtggtttttattttagaagctattgatttttcttggtgctccttgtagaggttgaaaatgtacttggttgatgtatattctaagttttta

SEQ ID NO: 143962 - DNA, 366 bp, Glycine max
  unsure (1)..(366): unsure at all n locations
ctatctttatgcgnnnnctaaatttcccccccaaggatttccggtccgttgtatctcttgttacgatctttcaaagaaatgaacatggatttgaggcttttagtcctcacgttagtttcacaccttgcgttaatttgtgatcgcctgagcccttccgctcagttcatgggatcccccaagcgcttaattagaattgaacctgaaccaactttccctaaattttctgcgtttgaaaacattcatgcatacacatacgcatacgcatgtatattgttgtggtaaaacaggggcaggatcaccttgtgctaccttctggagtgaagacaaaacatgaaccgcagaaaccaatcaaggtatggtaatgat

SEQ ID NO: 143963 - DNA, 437 bp, Glycine max
  unsure (1)..(437): unsure at all n locations
agtgcctgtatattgatgcgcctgaatcagacatccgagtgaaaagttatgaccatttgaatttctcgagagcttnctatggttaatttcgagcgtctcgatatattatacgcctgaatcgaacctcagtggtaaaagttatgaccatttgaatttcttgagagcatccgttgctcattttcgagcgtctctatatgtgatgcaccttaatcggacctccgagtgaaaagttatgaccatttgaatttctcgagagcttccgttgttcaatttcgagcgtctcgacatattatgcgcccgaatcggacatccgtgggaaaagctatgaccatttgaatttctcgagagcttccgatgttcaatttcgagcgtctggacatattatgcgcccgaatcggacatccgtgggaaaagctatgaccatttgaatttctcga

SEQ ID NO: 143964 - DNA, 224 bp, Glycine max
cgcataaagaagggaaaaggcccaatgggcatgggtcctctctttcaagtcaggaaaatatagttggggaagtacactgcatggcatcatcaactggtgagtttacttttatggggggatttgttctgttataactgaattaatgtgacacttggaccagttattgacctaatggagaagtgacatagggaatgactctggaaaagggtcctcgtgtttttttt

SEQ ID NO: 143965 - DNA, 424 bp, Glycine max
ctgatggtgtcgagaagaaatacatgtttgcatcatctttatgtggagaatgtgaatgtatgtatacatgattttgatgatgtcaaagaagaatctaacaaggctgcttcaaatgataagcatttgcttcaagaataattcaagattgcttcaacaaacaaagtcttgtttcaagattcactaaaaccaagccttgccttataacaaagtgctttcaagacatgcaaggctctagtaatcgattacccttcctggtaatcgattaccagaagacagggttgagaaatagctgttgaaaaaggttttgaatttgaattttcaacatgtaatcgattaccatatgtctgttatcgattaccagcaacgaaactttggaaattcatattcaaaagtcataaccccttcagattataactgtgtaatc

SEQ ID NO: 143966 - DNA, 364 bp, Glycine max
tttaaaagggttaaaagctctcactttctttcttctacatcatattcaaacttgtccaaataaataataaagtcatctcgactcaaagaaggtcatctaagtcccatacaattaatatagaacctatatcctaatgtcacatcctatcagagcgtggtgttcccgtgtcctctaacattgagggttttcataatcatccacctatacatctgctccctcgaacaccaaagtgcaaagatcatcacaggatccaaacacaaacagctaaccgggagtgagatatcacatttctaactactcgagagaaacaacacaacatattatagcccaatacaatttacttatcatatctcacattatttca

SEQ ID NO: 143967 - DNA, 424 bp, Glycine max
actcaagcttgaggatatggggtcccaaacatgtggactatgttttggcggcgatggtgcaaacgattctcccatccacaaatcacgtataacccaccatcccctgttgctcacctccaactgagctcacgtactcccacgtagcccttatcctcgttcctctcaacgtcgggtccccatcaatcctcccaagcttccaaaacatccaggtaattccacctccaatcatcatggactaacaaaaccaagcaaaacaaggcaaaggcagaaaactctgcccaaaacgtaactcaaaatcacagcttttcacatacaaatactccagtaacatttccttcgttccaattcgttaaccgttggatcgactcgaaaattttactggaagtctctagtacataagtctacattatgaccgttgggatct

SEQ ID NO: 143968 - DNA, 374 bp, Glycine max
ctggttatcgatacaaccttttgagaatatttggaacgctgtaaaattcagtttgaaaactttttcaaacttattttgttactggtaatccattacaacaatatggtaatccattaccagaaagttaaaactctttggtaaagttttgtcaaaactcatgtgctattcaaagatttgaaaaactttttaatacttatcttgattgagtcctttctttattcttgaatcttgaatcttgaatcttgatcttgattcttgagaacttgaatcctgattcttggatggaagctttctttttgagtcttgaattcttcttgattcttgaactcttgaccttgtcttggatcacttgagatgtccttgatcctttgaac

SEQ ID NO: 143969 - DNA, 419 bp, Glycine max
tctagccagatggacttacctttaatgaatgcctttgatattccttttgagccatggctccctatgcttattttgaagctcactacaagccttaagtgaaaaaccatgatattaccatatacttaatgaatcttggagctttggaattgctttgggaataacatgtggggggcttttgtatcattggacaacttgtattggaggctatgcttcatgatgtatttcgggccatactcgatgtacattgcatattggataaatgtcggacatgctgaatgaaatgtcgattctcaaaggctaaagagtaaaaaaaaaaaaaaaattctaaaaaaagaataagaatagcaatatagttgagtgaataagatcttaaatggcacaagaatgatgaaactcttaggtctactcttcatgtataa

SEQ ID NO: 143970 - DNA, 313 bp, Glycine max
  unsure (1)..(313): unsure at all n locations
acccggaccttaaancgactgcagcatgaagctnaatcaaaatagtgaggatatacattttgctatagcaagaatactcagagggaattctatagaattatgttaacaacatttaacaccatacatgtgaggagatacatgtgaaaaaacgaataaacaacaattaaggagaaggtttagttgaaaattaatggaggtgtaaggagcacctacttgaagctcttgtgctctgattaccacttgatggaagcttgcttgtggagcttctatggatactggatctttgagcttcaatgaggtccttcaatggtga

SEQ ID NO: 143971 - DNA, 349 bp, Glycine max
tatcaacaactcagaataattttttttggcgatcctcgtcttttcgaactagccaatggaatgtcattataggtacatgacccactttttattcgatgtatgttctttcaatttgaaattgggttgagaaactaaactcacccatgtaatgcactccatttatttaatgtgtttaaattatcagttcttaatttgagatatagtattctatttaatgatgttctaaaagtatattgtatgtttcaattaaataaaaagctataaatctatttttgattcctaataaatatctaattgttgtgtttgctctttaataaacttttcttttcgttgagccttaataaacaaa

SEQ ID NO: 143972 - DNA, 438 bp, Glycine max
  unsure (1)..(438): unsure at all n locations
agcttcaccaccaagagaatgccttggtatttgctttttaatgaagctccaatggaggaaaattatgatagagagagaggggggagcacgaaattgaacgagaaaaagatggagagaagttgaactttgaagtgtgtcttacaagtntcacattcatcaaagttatgacaagtgttacacatgcttctatttatagcttgtgttactaattaaatgaaagcttccttgagaagctagagtttagctacacacacccctctaatagcctagttcacctccttgagaagcttccttgagaagttagagcttagctacacacccctctaatagctaagttcacctgcttgagatgagaagctagagcttatcctctcacactcctctaatagctaagctcaccctcctgatatgagaagctagaactttactacacatacc

SEQ ID NO: 143973 - DNA, 399 bp, Glycine max
  unsure (1)..(399): unsure at all n locations
cctttgatgggactcngcgggagagatgtggaaatcgacattcccattctgataagcccccacacttgcaatgtggcgtgtcaagtaatggatattatatccgcctatagctgcctcttgggaagaccgtggattcatgccctgtgagtggtcccttcaacgcttcgccacaaattgaagttcgcaatgggtggacttttactgatagtgtcgggggaagaggacatgttggtgagctgtccctcctccgcaccatacgtagaggcggcggaagaatcattggaaacggctttccaatcctctgaggtggtgagctgcgcctatgtggaaccaagtccgacgctaccttctctcttcanagcggcataatggtggcgcgtgttatgctcaggaatggat

SEQ ID NO: 143974 - DNA, 442 bp, Glycine max
gcttgctaacccatggaagctcctaatatctccttcttcttttggggtgggccattcttggatggccttgattttctcagggtccacttggaccccatttctaccaactacaaaacctaagaaaactatattatctacacaaaaggtacacttctctatatttgcatagagggtgtttttcctaaggactgaaagaacttgtctgagatgtcctaagtgatcatctagcctcctactatacactaaaatatcatcaaaataaacaactacaaatctacctatgaaatcccttaagacatgatgcataagcctcataaaggtgcttggtgcattagtgagcccaaaaggcatcactagccattcatacaaaccaaacttggtcttgaaagcagttttccactcatcaccctttttcatactgattgggtgataaccactttta

SEQ ID NO: 143975 - DNA, 438 bp, Glycine max
  unsure (1)..(438): unsure at all n locations
agctttcacgtatctgcaagagttctgcgggtctttatttttcatatctatattngaacaacttctgtcaaccgagtcagaaacactttctgtttataacaactcaaatatgatgctgaattttctgtgatatacaaatagctaaagagagtaccgtttatctgtctgttcagttacagctgcgtagaaccattgttccataattgtatcgcttactttcttatgacatctaattaattcaagtgccttgtgtgggtagcggggacatctctgatttttattattgacattttcagcgatagttctctaaaagaagtggcttcaacagcttatggacaggttngtgcaccagttcacacatgggcagaaaaaacagctgtatatgctgtgatgtatacacttccgacgagagaccgactttgatgaagctaatgaaac

SEQ ID NO: 143976 - DNA, 370 bp, Glycine max
agcttatcgtaatcgattacagagttggttttgagacaatgactaatttattcaagagtctctattttaatcgattaccatgtgatataatcgatcacttctctttctataagtaggtaagaagtgaacaagaacactttaattaattactttgagtatctaatcgattaccatggtcttgagttgtttctaaggggttggaagagccctttaatcgattaaaaagataactaaacgattactttattgaattaatcgattattggcagttataactgttttctctataaataatcagcttgtgttctcttctaaacaatctcaatatctcgaaaataacacaataagcctctgaatgagctaagatcat

SEQ ID NO: 143977 - DNA, 282 bp, Glycine max
  unsure (1)..(282): unsure at all n locations
agcacaagagcttcaagtaggtgttccttttacctctcttaattancagcggcacctcctcctcaattattgatactacattntggtactccatgtctctcctcacatgtcttgtgttgaatgttggtaacatgactctctagaacttccaccaattaaacttgctttacacactatatgtgattatctatgggttgaatttcttgttcttgtacttgaaccatgaattgtgttgagtctaggatcccttgagtcttgacttgccattattttggctgaaac

SEQ ID NO: 143978 - DNA, 444 bp, Glycine max
  unsure (1)..(444): unsure at all n locations
agcnttggatgacaggaaattcaatgtgggatttattttggttttcctatttatgtcgtgtgtacatcttgattggatagaataagaggaataagtaatttattattgatcaagtttttttaaacttaaatgaattaaatttataaaaaaatatttgttgtataagtgtttttttttttaaaaatgataggatttgcttattaaaaaacaaaacaattacttatttgaagtaaaaataatttaaacaaacacattagaaaattattaaaaaaaacttattttatttaaaaaacacttanttttaaaaataaacataaacaaactagttcattgcaaattttattaatattggaaaagagataaaaatgaaacggacgaattttataccctttatttgaatcgcttatttatttttgtgtacaatattgtgataaaatttaacat

SEQ ID NO: 143979 - DNA, 446 bp, Glycine max
taacagatgggatgaagtgctaaagctgaagctccacaagatccttctcatttacggagtccatttgagtcacttatgtagaagcaaggcttcaagaagattttgatgatgccaacaatcaagcatatccaagacaactcaagaagattttgatttcaagaatgtcttcatggataattcaagcaaacatcaagcaatccaagatattcaagttagattgactagataagttcttaagttagaattacaagttaaaattgaaagcaaaaaaatttggccaaggtattttcctttccaaacatttgattttaagattttctctctggtaatcaattacctgaggttgtaatcgattaccagtggccacaaagctttctgaaaatgtttttaaagttattttcaaagttctcaaagatgtaatcgattaccaaactatgtgatcgata

SEQ ID NO: 143980 - DNA, 441 bp, Glycine max
  unsure (1)..(441): unsure at all n locations
agcttcctcaacagttgtaggcagtgcaacctgcctattcttcaagcatgcacattgagggatgcaacatttatggtggggcccatgattcaagcatggcatggtccaagatgatatatccaaagaagtcaactatatgaccaatccacaccatcaagggtttccatcaaggaagaccttcaagatacaatcaggggggaaatntctcttaaagccaaggttggagatcccacctcgggaataacttcaacagaaatcaaagagtttcatctaatcggcctcccaatcaaaggcctaatttatatgagaaaaccactaagctagaagacactctgaatcagtttatatagggttctctatcaaatcataagagcactgagtttgccatcaagaatctagaggtacaagtgagccaattagcttagcaattggctgaaatgt

SEQ ID NO: 143981 - DNA, 430 bp, Glycine max
  unsure (1)..(430): unsure at all n locations
gcttacttgtaagggtcaagtntttgtgttggattctctattgtgagagaagtttctgtacccttaaggaaaggttaaccactacaccagttttagtgttacctgacccgagtgaaccttttgtggtgtattgtgatgtgtccaagatgggtttgggtggaatgcttatgcaacggggacaagtagtggcctatgcttctcgacagcttaagatacatgaaagaaattatcccacacacgatcttgagttagtagccgcagtttttgctcttaagctttggaggcattacctttatggatctaaatttgaggtgcttagtgaccataagagccttagatatttgtttgatcaaaaagagcttaacatgaggcagaggagatggttacagttccttaaggattacgattttgagcttagctatcacccaag

SEQ ID NO: 143982 - DNA, 435 bp, Glycine max
  unsure (1)..(435): unsure at all n locations
agcttaataccttacttaaccaaattcatgtcatccctcacggcttgtgcagccactgcctccaatttcttccatgttaactccctcttctcttccaactctctagccctggcttccttctctaagtactgtttttgacactcttcaaacaattcggcatccatctccagaaacatcttcctcacattggctgttagcccaagcactgctcggttccaatggcttttcaagttattttccagagcttcaaagattactggcaatataacatttcgattctgggatactatacttataatctgctcatttttccacaagtaaagtgctcgttcagcaacctgccatggataaaacaattgtcagatagagcaatcaagatagaataaagaaacattntcctttactaccaccaaaggacgggatttatcatttatc

SEQ ID NO: 143983 - DNA, 438 bp, Glycine max
  unsure (1)..(438): unsure at all n locations
gcaagctataaaggaaacacacgaacttttgttatgttctttnatcaacaagagaatattaattnctctacctttagaacgaaattaaaattccacatttgtaattgntcaaaactctgttttaaaattccaaaatcttaaattcttcattataaaatccaaacaattaattgttgattaaagaaatctaaattctcagataaataactttcatcagctaaaattctctatccagacgcactctagaggagtcttgaatttggctttgtgatcaccctaataatatataattatcaaatctatcgttatcatatggttattattattggttttaggcgattgcttcctacatcccataaattacttctcgatctctcctaattataacattcaaccgctcccttccattttcaagattttgtcagtttccttctccct

SEQ ID NO: 143984 - DNA, 386 bp, Glycine max
  unsure (1)..(386): unsure at all n locations
agcttggagagcatagagaggattttattngtcttatcccanaatgtccaaaacgaggcagatgatgcttggagagacgcacatgggttccctaaaatgatcaagacaaatgcttctcagatgtgagaagagtctgcagaaatgattggcaagatttgcttgcttgtggcacaagaaaagtggtaaaaagaaattcgatgagctcaatgtcttgcataatttccactatgattacttcaacaatgaaaaacagaatgccagatgaaatccacggattgttgtagacaatataagctactcttctgccaccgggtcaattctatctagtacttctctaaatattttcttcttagaacactaataaaaatgggtgtgctcttttgact

SEQ ID NO: 143985 - DNA, 424 bp, Glycine max
  unsure (1)..(424): unsure at all n locations
tctccaagggcatagntatctccagtatcctgaatatgtcttgaatctcgccagatggcggnccttatctttcttggactgtaccacaggatatggcacttccatacccttatctgaagctttttctttcctcttttctctntctttctcaacaacttgctcccacgtcttcagactgttacctttgaatgaatggagccacttcttggcttctcctgccaaagaaaatgaaaataaactgagcctaatggcttcatctaacactcctgcaatcttcacaatgttacatatttctatgtacattgccagatgtgcataggggtcctcatttggtaatccaagaaataagttcccctatatcagatgaatcaaagaatgaccatagtttatgttgtgagcttggactttatgacgtgccatactt

SEQ ID NO: 143986 - DNA, 413 bp, Glycine max
  unsure (1)..(413): unsure at all n locations
agcttgaatcggacatccgtgtgaattgtttgtctcatctgaatntctcaagagcttccgttgcttaatttcgatcctctcgacatattatgcacccgaatcggacatctgtgtgaaaagtcatgatcatttgaatttctcgagagtttccgatgtttaatttcgagcgtatcgatatattataaccctgaatcggacctcagtctgaaaagttatgaccatttgaactttacgagagcttccgttgttcaatttcgaatatcactgtatgtgatgcgccctaattggacattcgagttaaatgttatgaccatttgaatttctcaagagctttctgtgttcaattctgagcgtctcgatttgtgatgtgtctgaatctgacattcgtgtgagaaggtatgaccatttggatt

SEQ ID NO: 143987 - DNA, 257 bp, Glycine max
gcccgctcggacatacgcgtgggatgctcttgccattttcatatcgccagagctcccgacgctgaagttcgagcctggcgctatataattcgcgaggatcggacctgcacgtcaaaagctctggccatattaaactggcgagagctttcgcccgggatcttcgagcgacgctatatgggatgcgccttaatcggacatgcccgagaaaagttatgaccatatgaatttctcaggaacttccgtgggaattccgagcc

SEQ ID NO: 143988 - DNA, 288 bp, Glycine max
ccgctgcacataagaacaccgacttttttgtttaatcaaaaagaggttttacttggagaattaaatctctttatgttaaaacgttaaattcaatttagtcttataaaaatcacattgtttaatacaaaatggatctaattatacttaacagttgattttatcaacccttaagatgtgaatttgttggtacctaagtatatattcaatattatattggtgttatggttgggatgtgctactctgatactttgattcctatttaattcacctacttcattaagtgtgtgg

SEQ ID NO: 143989 - DNA, 449 bp, Glycine max
  unsure (1)..(449): unsure at all n locations
agcttgttaaagaacttagaaaaaatcaagatcatttttgttcacacatcattcgcgtgtatgacatccactccacaaggtttgaagtaaaggagaccttcaatcctattacgcaacgtggcggacaaaagtgggcagttaacttgaatggtcattattgtcaatgcggaaggtattcagcgtttcactatgcatgttcacatattattgcagcttatggttacgtgagcctgaactactaccaatatatagatgtttatacaaatgagcacatcttanaagcttactccccacaatggtggcctcttgggaatgaagcggctattcctccttctaacgacgcatggacacttatccctgacccaactacaattcgtccaaaggttggcgataatcaacaaggataaggaatgagatggattgtgtcgaaccatctgagcaccgacaaa

SEQ ID NO: 143990 - DNA, 441 bp, Glycine max
  unsure (1)..(441): unsure at all n locations
ccctcttattntatagttttaatatgagacatatgttaattttagtttggaaatcgcggcattctttctataaataaaaaattatattaccaggacggcaatattatttggcaaccactgtctaattattctcacctagcttttnttcttcttcttgacagattcatgttcaaacattaggattgaagattgcaacattacttccggtgatgattgcattgcggtaaaaagtggctgggatgagtatggaattagatttggaatgccaacccaacacttaatcattaggaggattacttgtgtatcccctgatagtgctatgattgctttagggagtgaaatgtctggtggaatctatgatgttagagctgaagatctcactgccatcaacactgaagcagcagttagaatcaaaacagcaattggtagaggtggatatgt

SEQ ID NO: 143991 - DNA, 450 bp, Glycine max
agcttcctatggataatgctctcctacaacctataatttgttgtaggagataacactgtataggctcaaggttcaatcaatcaataattcattcagcttaaactgggtgcaagggataaatcatttaagcacgtggtcagctttttggctaagtggctatcacaatcaaacatggccttcacaatcctcaattcatgcattcagtccatactttagagattcatgcaaaaatcagtactaaatgatagtcgtttctctcaaaatttaaggaccacactcttactgggatacgatcaatgcattcctccacaatcaatctgacaaactgactaacatttcagtcaaagttctaatcacatgttttgtctcttctaatggatgcaagcttgatcaaacaaaatctatacattccaatccactcaattcatacatttgctcattcaagtcatt

SEQ ID NO: 143992 - DNA, 387 bp, Glycine max
  unsure (1)..(387): unsure at all n locations
aaaaccaaatgatttaaaatgatataattcatatttgtaatggttgaaattatttttaataatttaaaatcttaaaaataagacaataattttgtttggtcccagtagcatcaatttgtcaatggaacttataagcttataataaatcttatcaaacattatttatttctaataataaattcttttagtaacttctagtattctttaattggtagtttttagcttttaaatttttatatttagttttttggccttgaatattntctagatttcctttaacattcattntagntagcttctaatcttttactagttaaaaaatacttgattgtttgatacatgaatcattntagtatnttttaagcattttttttgtagtgttatgta

SEQ ID NO: 143993 - DNA, 444 bp, Glycine max
agcttagggtgcatacttgggatcttcgtttctcttccagttcttccttagttgcttcattattgcacttccctgacagattaaacctacaaggaatttaattgtacaaaagaaataaaaaccaaggcatacaaatattgccaaatgacatagaaactataacagtgctttactggaatgttgtgtgtcaaagtagaccacacttcatgtctatttataatatggaaaaaggaatcagtatagattacaatatcaatcaattactgattaataggagatagaataactaataataaatacaatatcaggaataatatcgagatgtaatctcacagaaacaactattgatcatatagagaagagcaacataacaacaatgtcacaagtaacaactgggtttgaaagaaaaacagactatacaagcaagcagaagtggggggtagt

SEQ ID NO: 143994 - DNA, 402 bp, Glycine max
  unsure (1)..(402): unsure at all n locations
gagaggcaatagaactctntaagcaaatgttagtgaatgatgtcaacctgaccatgtgagctttaatagtcttctccctgtatattctattcttgctgatctccaacaggcaatgaacatacattgttacgttataagatcaagttttctttacagacttgaagtagcaagtattctagttgatatatactcaaagggtggaagtttaggatatgctcaccagatttttaatataattcctctgaaggacaaggatattattatttgaagtgcaacaattgctgcttatggaaagcatggacatggcaaaatggctgtgaaacttttcaatcagttggtacaatctggagtaaaaccaaatcatgccaccttcacctctgttctgcatgcttgcagccatgc

SEQ ID NO: 143995 - DNA, 433 bp, Glycine max
  unsure (1)..(433): unsure at all n locations
agctntgagcaaattcaaacgacaataaccttttatttgatgtctgattgagtcccgtcatatatcgagacgctcggaattgaatgtttaagcttcgagcctattcaaacgacaataactttttactcggatgtctgattgagtcccgtaaaataacgagacgctcgaaattgaatgttgaacctctaagcaaattcaaacgacaataactttttacacagatgtctgattgagtcccgtaatatatcgggacgctcgaaattgaatgtttaagctgagagcaaattcaaacgacaataactttttactcggatgtctgattgagtcccgtaatatatcgagacgctcgaaatttaatgttaaagctctgagccaattcaaacggcaataactttncactcggatgtctgattgagtcccgtaatatatcgag

SEQ ID NO: 143996 - DNA, 427 bp, Glycine max
  unsure (1)..(427): unsure at all n locations
ttcgagcgtctcgatatattacgggactttacatatttcctatntaaaatttattgtcggttgaattggctcacaggctcaacattcaattttgagcgtctcgatatattacgggactcaatcagacatccgagtaaaaagttattgtcgtttgaattggctcagagctttaacattaaatttcgagcgtctcgatatattacgggactcaatcagacatccgagtaaaaagatattgtcttttgaattggttcagagcttcaacattcaatttcgagcgtctcgatatattatgggactcaatcagacatccgagtaaaaagttattgtcgcttgaattggctcataggttgaacattcaatctcgagcgtctcgatatactatgggactcaatcagacatccgagtaaaagttattgtcgttgaa

SEQ ID NO: 143997 - DNA, 380 bp, Glycine max
  unsure (1)..(380): unsure at all n locations
agctntctcgctcagggatcttttctggcttcacctcanactctccgtacaaggtcgctgggttgaaaggctcatggnttaatctttgtattggatcttctagctgcctgaagtttggcagcttcttccttaatcatcgccatttcacgaacttcttcagtggtatcaagttccactctcatattttcttcattttggtggtgctgaaacagtagtctctttatcgatggttcctcgacttctatggggatcatggagtctgtgccatatgtgagtcggtaagcagtttcattggtggctatctaatgtgtacagtggtacgcccagagtatactgtagagttcttctttcctaagcccttagacttgttgagtctagta

SEQ ID NO: 143998 - DNA, 331 bp, Glycine max
  unsure (1)..(331): unsure at all n locations
tctaagctggcgggctgagggacccngctgaaggaacgaggattttgtattgcgttcacgtgagctaaatttaaaggtgggcaactggggatggtgtgcttatgcctggcttgtggaaatgggatagttgatttgtgccatcgcccgatcgccacctagtaccacatatgacgggtgcccccataatccaataagcttggtgtgagaaagcatggaagagtcagtcttcctacttttatttgttgaccacagagtggtacctggagatatgtcgcangggtcaggagaccttggggacgtcaggtggggtgctattgcccaaaaccaagct

SEQ ID NO: 143999 - DNA, 438 bp, Glycine max
  unsure (1)..(438): unsure at all n locations
agcttgtccgcataggttcgtcgatctatctctttctgtttatatgcactttttaggcataatcttataattaattatctaatttctctctttaggatttgttacgtataactcccaaattttgaattcagtttattccgctttttttttttataatgcggattttaaacatctagttttatctgacataaataagagatttttacactgtttatgtaataatataatttgtactaaacagagtctatatatcaatggaacaaatttaaaggctcatatttttgttagtatgttacttttttggtagaaaaacgaaaatcacctgaaatcaacactaattatactgatattttacgaagcaaaaataaaataaaattatgctgatattttccttatttaaaattcgtgcttgtctaaagaaacatngactntgtatac

SEQ ID NO: 144000 - DNA, 343 bp, Glycine max
ataaagatgaagaagaagcggaaaggttattattaatgtaagttccggtgagggaaatcaaagtaaaaggtccaaaaacaaccaaagtagaagtgtcaagaaaagtttggcaaagagtggctttcaagatagacccaaatgcacattgcactgtgatgctaacttgacaatggcgcgcaaattggaccacggcctcaataacatcagaatttttcgggacttgaatgaaaatgggtttcaaggcaagatcgctatcttggttaataacgaggggtatttttggcttgttcttggatccaaggggcctaccacaacctttgtttgaggatggtggcatttggtg

SEQ ID NO: 144001 - DNA, 434 bp, Glycine max
  unsure (1)..(434): unsure at all n locations
agctntagttgctntacccttgggtttatcttggttaggcacatccttccagtgcttccatagacagttgccacctgccctttgtcacttgctttgtgttaagtgctgctcatggtgaatcagccacccatgttatctccatcaaatattggaatacctatatgttcctccttgaattctttccttaagctcgcaagtcacacactctctctgcaattcttcagtgacttgcttctacattcttgactagaccatgaacagcttgtaggatcctggagctctgttattagttgctaagtactaatttagaggttttagaaagaatgaatataactgtactcctcaagatttctagagcatgaggtctggtcctcaaaatcaatttttcagactttcactaagcagaatacttagtcttgtctctatacctctat

SEQ ID NO: 144002 - DNA, 463 bp, Glycine max
catagaaactcaagctgaaaggcatggattgatactgcttccctcatcatgtggtttatgatgtttacaatttaatgagccttggctaccctgctatgagacacacacacatagagacaaacacgcgcagacacaaacacaaacacaaacacacacacacacacacataaagatacacacacacacacacacacacagagtcacgcacacataaagacataaacacactgaaccacagacacacacagagacccacacacaaagacacacacactgagtcacaaacacacacatacacaatcatactcacacacatggacagacacacacacacataaagagacaaacacacacacacacacacacacagataaagagacaaacacacacacacacactgtttccacatataaagagacagacaaacacacaaacacactgagccacagacacacacacaaag

SEQ ID NO: 144003 - DNA, 425 bp, Glycine max
agcttctgggacgcttactctggattcaactatatcaggatgctcgctccagatgaggagaaaacgacattcgtcactaaaagtaccaatttttgttacaaggtcatgcccttcggccttaaaaatgtaggcgctacataccaacgattgatggaccaagtctttaaacaatagattggacgaaacatcaaggtatatttggatgacatggttgtcaagtctcaaagcatagtccaacaagtggtagacctggaagaagtctttggggaactccgtaaatatgacatgtacctcaaccctaaaaaatgtacttttaaggtgggcggaggcaagtttctcggcttcatgatcactcaccaggggattgaagccaacctcgacaaatgcactaccatactagagatgtgtttcccgaaccaacgtca

SEQ ID NO: 144004 - DNA, 389 bp, Glycine max
agacctccaatctttaatggagagggttaccactactggaaaacccgaatgcaaatttttatcgaggcaatagatctaaatatctgggaagccattgaaataaggccttatatacccaccacagtagaaagagtttcaatagatggtagttcatcaagtgaaagcataaccatagaaaaacctagagatagatggtctgaagaggatagaaaacgagtacaatacaacctaaaagccaaaaacataataacatctgccctaggaatggatgaatatttcagagtttcaaattgtaagagtgctaaggaaatgtgggacactcttcgattaacacatgaaggaactacagatgttaaaagatctaggataaatgcactaactcatgagta

SEQ ID NO: 144005 - DNA, 432 bp, Glycine max
agcttctaaacttgtacaagaatgtatctcttattccacttgttagacaagtggcctcagatatcttaagaagggggggttgaattaagatatcacaaaatttttcctaattaaaaattctatttttgatttaaacccaaatcccaacattcctttcaaaatgaactcctaaataattatgcaaattaaacttactgaatagaagcaataagcaataataaataaaagagtttaagggaagagaaaatgcaaacacagatttatactggttcggccacacccttgtgcctacgtccagtctccaagcaacccgtttgagagttccactatcttgcaaaagccctttacaagttctgaaccacacaaggacaacccttcctttgtgttcaggttgctttacaacaagagaccatcggtctcttaatccctttt

SEQ ID NO: 144006 - DNA, 276 bp, Glycine max
  unsure (1)..(276): unsure at all n locations
aaccgctcccggataggtcaataaaaaaattttttttcaaaaaaaaagtttttaaccaaacttaggtttgctgagtatgcctgttatggtttcttttaaagggaaaacattatatatcaggcaaaacatcctcaattcctttgatccacggaccggtccctntgctaaagggataagatggttggaatcagcacgtccataacggcctggtgcgtccggaacgtaaaaaagaaatgcactttatttctcattcatcgacaacttttgggcattgta

SEQ ID NO: 144007 - DNA, 420 bp, Glycine max
  unsure (1)..(420): unsure at all n locations
agctggtgcctcttcacgtctggaattttattgtancatatagatccaaagacccttaggtgctttgctgatggcttcttcccgttccaagcttcaattggagtcttgtcttttacagacttagttggacatctgttgagtatgtaaacagcagtgtaaactgcttcatcccagaatgtgttaagtagtcccttctccttgagcatcaatctagccatttccataactgtgcgaatctttctctcggacactccattttgttgaggagaatatgcgactataagttgccactcaatgtcttcatcctcacanaatctttcaaactcgcgagaggtgtactctttgccgcgatcacttcttagtactcttatccgttntccactctgattntcagcaagggccttgaactttttgatactc

SEQ ID NO: 144008 - DNA, 227 bp, Glycine max
cttccaagatagacccagatgcacattgcactgtgatgctaacttgacaatggcgcgccaaatggaccacgggcttcataacatcagaaattttcgggacttgaatgaaaatgggtttcaaggcaagatcgctatcttggttaataacgacgggtatttttggcttgttcttggatccaaggcgcctaccacaacctttgtttgatgatggtggcctctggtgagag

SEQ ID NO: 144009 - DNA, 361 bp, Glycine max
gcttgccaccacagagaatgttccttctgatgcctttctgcatcagggcaaaatccagattcacccatgcacatgctacgttccccatatttgtcaagaatccaagcagcattactttgggcgacctcataacccatctcagccattcttgaatacaacataaatgccttgccaatatcaccttttaagtatgactctagagcccatctagacaaagaactccatggaccccgctctgcaactaatttgtacagtgcagttgcctaaaaccacgaaaaattagcacataaatttggtggcagaggcattaaatgatagaatgagtagtcattaagaaataaaacattgattgaaagtaatc

SEQ ID NO: 144010 - DNA, 280 bp, Glycine max
tcattttaacctctggctttatttccttcaccactgggtcatctatggttctatcactttatcttggtcgggttttggttcttttttttcgagtggcccatttggtttatattttttttctttgtcttctagctaccaatctaattggccacttccattgtaactaagcaattccaatatctttgcacaagaatgaaactcataattgccaagcaatgaaccccttccatccacattttattgcagcctgttcaattgcagtgaatgactcttgtgcttt

SEQ ID NO: 144011 - DNA, 393 bp, Glycine max
aataaaataaatattattaagaagttatctatatgaatataacaattaaaattaataaataatttcgtccggggtatttactaactgaattaaaggatggaccaaactctaaacctaatcttgacactgattgatgaaacgacataaaatgggatatatactttgattgagcacgatattgccaaagatcaccagatttaatttagaatgagttgaattttttaaatgagtttattttgacactcaaagataaagagaaaaaataaaagtatgatttttaaaactataaagctaatcgttttataaaacttaatttatcttcaaattttgcaaattgtaataaaaatatgcctttaatgatgagttaaaccaagccttctttctcattgattc

SEQ ID NO: 144012 - DNA, 144 bp, Glycine max
ccttttattctcaagtagaaacatatgtgtctgtggtgactttggttaggctggttgatgaaacttgcatggtgggattctatcattttttgatccattaatggtattatttataaagtaaggaagtgtagctctaaaacttaa

SEQ ID NO: 144013 - DNA, 416 bp, Glycine max
gagatgcccctgtgatacattaataacctatgtttctttcttatcctatatccaatatcacaaagactacctaccagcaaatcattgaaattcactcccaacaccacaggcttgcttgttattaacaaaataaccgaatattataaatcttatgttcaggaacctttattcattccacctgctaagattaccttagggagctgtgacattatggcattggactgcacgacactacatcaggatgctattaccacataacaaacactaaagaaatcctacagttaagcgcaatttttgaataaagatctaatgatgttattaaaactagcaagtctagtaagaatcaatactcaataaaccactactaaccttaccatccaagcatcatgaatcaccactcatcagattttatattt

SEQ ID NO: 144014 - DNA, 210 bp, Glycine max
aacaccatagtttatgcacctgaaccagaacctttaatgcaatgcaaaaaatgctggaggtcaaaaccgttatgaagggcccatttggtctatattcttgttcctgggcttctagctatccaatctaattggccactttcatttggacctaggcaattcccatatttttgcccatgaatgagactcctatttgccaagcaatgaaccctt

SEQ ID NO: 144015 - DNA, 410 bp, Glycine max
  unsure (1)..(410): unsure at all n locations
ctgcagctctactatgtggagggcgggctgtttcatttcttttcttcacgcgagctagaccaccgctctctcttccgcgatgcttctcttcatatccgcctgagggggcttatagcctaaaccatactttccacgattgtctttggcatttatcatgctagttatgcccgtcgtgtctttgcctaaacccattccgggttcgttaccggtccccaacataacttgggccattattactggcgcatcacacaagaaagtgctcccanagaaggagtccaccggggaaatgcttaccacctcaaaagactgggaagcggcttctaacaatcttctgtgggttaacataagcatagaggagggcagctcaccaagatgcttcctcgctgaacgatgaccaatgccccttccta

SEQ ID NO: 144016 - DNA, 376 bp, Glycine max
  unsure (1)..(376): unsure at all n locations
gatgttngtatatatgggaggatgttgtattccatttttgttttaagagtagagtctcactggtaagactaactttccaaatgtttgccttcgcaagaaatggccccgaggaagtttgcctcaaaaaagtccaggaaggacaaggcagctgaaggaactatttccgctccggagtatgacagtcaccgctttaggagtgctgtacaccagcagcgcttcnaggccatcaagggatggtcgtttctccgggagcgacgcgtccagctcanggacgatgagtatactgatttccaagaggaaatagggcgccggcggtgggcaccactggttactcctatggccaagtttgatccacaaatagtncttgaattttatg

SEQ ID NO: 144017 - DNA, 440 bp, Glycine max
  unsure (1)..(440): unsure at all n locations
agcttgtagaatggctagacatgatacatgttttgtttggtttggttcaaggataaaaagggatgccccacattatttccatgacacaaatgcaaaaatgacgatttggaaattttatgcaaaactggttatgcatgcacctatgcggacactcaagtgtcaaatttttatggtcatgtgatgctagggctcaagattcattttctctattttagtcaacccaacgtttccaaaatatgttcttttatcaatttgtgcattcatccgagtccattttgggcgtctgggaaaatcttcacagcattcacccttcaggtgtatacacattntttcaaaaactagttatgatcagtgaatttttccaaagaaaagttggaagtcatctcttttaaaagcatgttggtttttcagcttgacaacttattttttcttttttctcc

SEQ ID NO: 144018 - DNA, 326 bp, Glycine max
  unsure (1)..(326): unsure at all n locations
tactagagangctactagcactgactgactacacacatgagcccgcttacaggtaagagatgagtttatcacaattggggttagaatgaacatgtgtatggatccttatgggaccaaattgggatttatttcgagatgtttattgaagtataattcttcctttatgattataaatacaatattgttgttgttgacagaccaattgatgtcctgatgcaaataggttgataaaattgagtgttcttggtgttttcccgtttttaacctaggatggcgattcattgattttggctttattgcgtgaaattgtttgaggggctttactt

SEQ ID NO: 144019 - DNA, 405 bp, Glycine max
  unsure (1)..(405): unsure at all n locations
agctncaaaaaactatagaggagaatgcctcttttaccacctccaatacaactagggaagcggaaccggtgctacaacccccaataaacatacgccgagataaaaacaccacggtgttcggtcggaggtatattcctcaagcttacccttatggcttgcctccaaacttcactccccgtaccgctccggacgataagaaccaagcccctaacttcgaggggcaaactcctccttatgccgattatcctctgcaagaaaacgatgaagaagatgcccgtctaggtcctttactgcccctcaaggatccgcccccccatgaattgccccaaccaaacataatccgtcatgttccgttttcacacgcacccgttaaaaaatccgtccctttgccaaagataatggaaa

SEQ ID NO: 144020 - DNA, 370 bp, Glycine max
cacaacagcattgccacatgcgcatatcgcgcataaacctaccctcccctggtgcccacctccaactgagctcacgtactcccatgtagcccaaatcctcgtttctgtcagcaccgggtccgcatcaatactcccaagctggcccgacatccaagtaattgaacattcaaacgacacaaactgtcacagtggagaaaacatggtgaaggcagaaaactctgccccatacaccaaccaaaatcacagctcttctcacttaatgaccccagtaacaattccttcgttctagttcgttaaccgttggatcgactcaaaggtatcactggaagtctctagtacacaaacctacattttgaccgttgtgatctac

SEQ ID NO: 144021 - DNA, 436 bp, Glycine max
gcttatagcaagactatgtttttctttactaattgcgtgctggtcaagctttacattcatctattttgcaggatgcaagttgcacactttgtggtggagctcatggatcaagcttgtgtgtttccactgcagaaacatcgtatgaagttaattacatgggaaaccatcctagactaaaatataatgctcgtggatattctggatttcaacatggcctaccttaccagaatcataatcaatggagaactcaccctggaaatcagtttaataaagatcacggtgggctacctaacatgtcacaacaacaagggcctatcttatctgaaagaacaacaaagctcaaaaagactcttggtgtgcttatgcaggtgtgattgactaattataagagcacgaagtcagccatcaaaaatctagatgtccatgtagggcgtct

SEQ ID NO: 144022 - DNA, 146 bp, Glycine max
gagattaactcgcccttcggacacaaaatagcgctcatttttatttttgaactagtctggcatgtaccttccttgacaacaaaacttctaatgaaggtggcttcttgttgatgtgattgcttgaaacttgaaatcatctgctcttg

SEQ ID NO: 144023 - DNA, 354 bp, Glycine max
agcttgagatgaggaagtgtttattggtgatacttcccgcttttattggcgaccacagagtggtacctggagatatgtcacgggggtcaggagaccttgtggacgttacgtggggtgctattgtccaaaaccaagcttgaccaatcccgaccctacccgggcattgtcgggtagtgacaacctgtgatgtaccttaacaagcgagcttctggcagtcacctattaaaggaacaaatacctcaaagcaaggaggcttgtggtggctggccacctgtgaattttgtatgatatgtggattatgggctcttgtaatccactacacacggtgggtaatccattacaaggctttaaatt

SEQ ID NO: 144024 - DNA, 429 bp, Glycine max
  unsure (1)..(429): unsure at all n locations
ccttggtttaaacatgagtggtacattattttggactttgttgatncaacncgggcaaaattggatgagggaaagagtggttttcgaaatctgcactntatgcagaatttttctgttgaaatgtgcaacaaaattttgtataagtgcagaaaaatgcttgtctatagctgattgtgaaaagggtagtacatatggggttctggacatttgttagcagatcccaacggtcaaaatgttgacttatgtactagagactttcagtaaaattttcgagtcgatccaacggttaacgaattggaacgaaggaaatgttactggggtatttgtatgtgaaaagctgtgattctgagttgcgttttgggcagaagtttctgccttcgccctgctttgcttggttttgatagtccatgatgattggatgtggaatta

SEQ ID NO: 144025 - DNA, 446 bp, Glycine max
  unsure (1)..(446): unsure at all n locations
agctngtctcgctgagtgaaagacccctgtttatttattnttctcatcttcttcaaaataactattttcaaggcttaaaagttgaaatccttctttaataaagtgtattttgaaaattaaataaaactttttcatgaaagagaagggaaatcaataaattatttgtgttagttgttgtatgttaaattgtgcatggttataatacattggttntcctatgattacttccttgttgaaaatccttacattgttgttgagaagggtatactttggtgaggtgatggtaagaattataaatgttgcaattagtgaataattgtataattgttgcatgatgatttgttgattgagatgataatgtgaatacgatcttctatgagaaccttccctatgggttgaaaggagttagttatagcctttgggaagacttttagttgttgaaaatg

SEQ ID NO: 144026 - DNA, 386 bp, Glycine max
  unsure (1)..(386): unsure at all n locations
ctactatttcatttgatctttacaaagataggggccaaacgaacaaagagagagcaccctaaatttcaatttcccccaaaggcatgcttaattatttaacctgatatttctataattggagcctctctgtctatttatatgctatctatgtactatgtactgattttaaatcttctaaaaatagcccaaagggcccccaaacattccacatagttgatttttttgtaagtaacatgactcttagaatcattgcaattcgagccaaacttttctggtccccattatggtgcatgttacaaactcgaaggatccagcccatagataactatatttttgtttgtaatgaaaagagaatntgacagctaacattacgatatgtatttagt

SEQ ID NO: 144027 - DNA, 445 bp, Glycine max
  unsure (1)..(445): unsure at all n locations
agctnttcgattcattctatgtacccatggtgtgttatattgtgtttcgggtatttttattctcgtttcatttactttttataccccctcttgacgtgcttaagccattttacttaagtcatttctcgcttaacctaaaataaaacaaatttccaccgatcgctngaatggtattatccgttaacttcggttaaaatgaattccgaccgttcggtcgtaccgtaatcacgttgaaaatcaaaaaagaggtaaaataaacaatataataaaaaaaatgtgtttagtaaactaaagcggaaaatcaatcggacgttntctctttgggatttctcattcttaattgaattgactaataactaaagtgaaattaaggctaaaatcaactcgcctagtcaagctcgtccacaanaataggtttttgaagtttgcatttcaatttcttact

SEQ ID NO: 144028 - DNA, 396 bp, Glycine max
cttcagcctgattgctaatcgacaccttatccttggctaagcatgactcagtgtcgccaagcgctattccttacggccataactgaggttcatgaagctaagcgccattcatggctactaagcgagattccttgccgaaatgtgagcgctaagcgagtacttatcagctaagcgcatactcctctatacttgagatgcatcattgcaactaatctggccacagcctgacttaactagagttgcaactgttcggatctgcaaacctcgctcagcgatcttatcctcgcgctgagccaagcctgtgctaaaaaaaacttattttgaattgtgaacattggcttatcgcgggtccgctaagtgagcctcattgagaaaccaaacgtctctctggctcgc

SEQ ID NO: 144029 - DNA, 425 bp, Glycine max
  unsure (1)..(425): unsure at all n locations
caagcttgcttgttccagtgtgttttattatgatttgtgatttatacgaccttgcgtttgagtgccattttagtcgtcttatcccttactagttgaatttgtaactgtttgtgttatcagacaaaaaatggggtttcttcacttattgacactcgtcatccactaatgttttgtgacttgttctggccgatatatgctttcttttgtatgggcatacaaaggcatcttgttcatgctatattccttttttgttttatggtttggtggaatgagattttattcaactggttgattgttcttgaaatcagagtgtacttcattcgtagcaatagcatctaagcggtttatggtcatgctttatgtatagcacttgtgcggtttatagctctttcngccaatatgcacttgtggaaaaaatgcttttc

SEQ ID NO: 144030 - DNA, 441 bp, Glycine max
  unsure (1)..(441): unsure at all n locations
atatatcccactgattnttatttatgcgtttatagcaatatttcgtataccgaattaggttggatgtattgaaattttgaaattgaaaaaattatcaaaatactgataatataatcttataagaattatatatgtaggaaaattttcagtttttttttcttttaaattttataatcacagcgatatatcaataaatcttactgatctatgtattgtaattgagttacgtaatgaaaattttctcttcctttcttatgtaaccagtaaattgtgctctggtcacatgtcgtcattaattaatggcagttatacttattaatatttgaacaaaatactattagatttataaaattataatttttatcaaatatatttgactttttttttacctctcacttcaaacactagtaatataatgtggcatgattgacaagggattct

SEQ ID NO: 144031 - DNA, 431 bp, Glycine max
agcttctatataagctgaaccattttatcaataaagacaagttgagttttattcagaaaattagagtttatctcttttatcttagtgagagtgattctcctaaattcttgagtgattcaagaacaccctggctgtatcaaaggactttcacaacctttgtgtgttgccctcgctggaaagagtgattctttccttcctatcatctccacccttgttctttcaaaccataattccagaaaatccacctctgcccaaaattatcttgtgaccataactcccattttgcacactcaaattaagtgattcttgagcctaaattaaatttcaaaacgagacctttcacctcgttttggaatcacctcatttggagccctgtagcttccgttattgccattctatatttcttgccagccaccacttaacctacgttt

SEQ ID NO: 144032 - DNA, 379 bp, Glycine max
  unsure (1)..(379): unsure at all n locations
aaatggatcattttcaaggtccaacgccttaaaatgatcacctcttaaggtaaaaaagaatcacttgataagcaagaactacgtaggtctgatttcctcatcgcaattgtggatacgtaggagcaaaagccctgcttttgtctggcaccccaagagatctgtaatggtccaatgccttaatgtttctctcctctcaaaaaaacaagagatcgttcatggtccaagctcatgctattataaaaaggttcatcaagtcaagttgaaatatgaaagtaaccgtcttgcaaaattggggcataagatgaatcgagtcacatcactgcttcgtctactgccaaacatatttaggaatgaagatgtccttgttacttncagtttc

SEQ ID NO: 144033 - DNA, 439 bp, Glycine max
  unsure (1)..(439): unsure at all n locations
tgcaagcttcanacttctctcaagattccttcctatcaactcttttattgcaaccttctttctgccctggaaatgtagttgatcccctatctattaacaacaacggttagaataacaataacaacaagaagaaaaacaagttgttggttgcgacgccatcacacgaatagatgttggatcaatggagatgaatcatcactattcaatctttcatcaacgaatctaacaatcattattgctttgttcaccataaaccacacaagcgacttacccaccacggccattgttttataaacaggacgagaattttgtcaaacttattactaaattataaatattcattaggaattttttgtctctataaaataaaggagtttattttagttctttaaagaattttattttgaagtttgaatccgatttttttttgaaccaatta

SEQ ID NO: 144034 - DNA, 428 bp, Glycine max
tttaaaaaaaatattgaaattttagttgaaataaaaatattaaaattatggattaaaaaagattagaagttgaaaattcttagaaacattttggttgaagaaaaaaaatactaaaattctctctcgctgacaaatgacactaagaacgttttcgttacacagttatgtactatttattgtttgcttttcattttccactgtccttaatattttatcatgcttctataacttaagcttgaaagagttaaaaataacaggcaataaagattaggttgagaataattaaacgcatatagaataaattaaaaacaaaataatcggcaacaactaaaaatacattttaacgttagaaaaagtttatttggcacccgtcaaaagattttgataattgaataactttagaaaatatagaacaaaaaaaacgaagt

SEQ ID NO: 144035 - DNA, 446 bp, Glycine max
agcttcatgatgatgaatcaagttgtttctttttgttttgatgatgacaaaaagcccaagagaatgatttcaagattgagtcaacaagttcaagatcaagattaatttcaagtttcacgagaagaaatcaagaagattcaatattcaagagaaatttgatttcaagattcaagagaagtttgatttcaagattcaagagaagatgaattcaagattcaagagaagaaatcaagaagacttcacaaggaaagtattgaaaagatttttcaaaaaacaaacatagcacaattttgtttttcaaaagagtttttctcaaaattttctaagttaccagagtttttactctctagtaatcgattaccaattacctgtaatcgattaccagtggcaaagtttgatttcaaaagcttttaactgaatttacaatgttccaattgttttttaaa

SEQ ID NO: 144036 - DNA, 426 bp, Glycine max
  unsure (1)..(426): unsure at all n locations
agctntgagccaaaatcttgactcttcattttccttgacccagggtgagaatgtcaatccttaccctcggaagcaaaaaagaaaagaaggaaaatttccaatcaaagagaaagcaaaaagcaatcaaagagaaagcaaaaagaaaagaaggaaaatttccaatcaaagagaaagaaaaaagaaaagaaagacaattcccaatcaaagaatgggagaaagtaaaaaaaggaagaagaagaaggaaagaaagctcctgatcaaggatcgaaagaaaacagaagaaatgtgcagaaaggtctttggaccggacaatatctgaacaatacagaattgtcaccaaatgaacgaaaagaaggaaaggaaaccatgacctatagtggttttctccctttaattgccaaccaagatattgtgtgctagtgactt

SEQ ID NO: 144037 - DNA, 313 bp, Glycine max
ctggtgccacccattcctttatatcttggttgcgtgcagaaaaacttaagctttctgtgtcttctttaaataaagatctagtagtagagacccctactagtggttctgtgttaacttctgatgcgtgtttgaattgttctgtggagatttctcgtacgatattcttgattgacttaatttgtttgcctttgagccaaattgatgttattcttggtattgactggttatcttccaaccatgtcttgtcgaactgtattgataaaagagcggcgtctgatgattctacagcgaattaggatatgctgcttatctc

SEQ ID NO: 144038 - DNA, 396 bp, Glycine max
  unsure (1)..(396): unsure at all n locations
agcttctacagatggttcattcctaatttctatacaattgcatcacctctcaatgagctactgaagaagaatgtggcatttacctggggcgaaaaacaagagcaagcctttgctttgctcaaagaaaagcttactaaggcacctgttctagctctgtctgactgtactaaaacttctgagctanaatgtgatgcctatacagagggagttggatctgcatatgcagaagcaaatgcctttggtgtctcggaattgatgagcacttgaattctaagctttttctaagccttactacaccccatttttctccccctatggcaacatcaaagagccaaagaacttgggaatcaaaccagatatagaatgaagtggaaacggatcaatatctaagtataa

SEQ ID NO: 144039 - DNA, 386 bp, Glycine max
attactgaaagggtaccgatgttactctgctgctcacaatccttattatatctctgcaaatgtaatactttctgaagaaaaaccataatttgctccctgcatggttgagtccaatactcttcaagaattgaaacctattccctatcttggtccatgaccttctttgtatgaatcagagtcaactatctattctaccatagatattcctgacaatccttcacttgagcagactcaaagatcacccattatatagatgtcgacctcgaattcctgacgcataacttgaatgtattgaaagacctgatgagtcatgttctacttcaacggacaacccgatcatggagctacctaaagagaatgttgacttgcccattgctctcagtcta

SEQ ID NO: 144040 - DNA, 422 bp, Glycine max
agcttcatgtgaaaacatggtatgaaatatatttctaaagtagtcaataattataattttttttactaattttgtgttgtaattgataatattcttatatttaatttcaaaacaattcaatatatatatatatgtttcattaaatttgctctgtaaccacattttttgttaatttaaaaaacattataatttgaattacttcttaatggataatattgattcatatttcattagtttactcatagtagaactgagataaaattagtaaaagttaaatataattttaattctatatataatatattaaataataaattaatatacaaaataattataagagaaatgaattaaatagattttaaattgttataaaaggattatattacattcttttgagataaaattcataataaacaaaatgt

SEQ ID NO: 144041 - DNA, 430 bp, Glycine max
  unsure (1)..(430): unsure at all n locations
agagcttcttgaaatcgagactgctcatctttcgctcttctagcattggnnnctgatctataaagccattggaagtctggcattcgtatttgaagagacagaagggaagcctgagcacaatccttacgtgttttgttgccagcatcgatcgaagagtgaacttcagcagcttcaatgaagtagcgcatggaatccaacaggtcttcattctggtccttgttgtagcagcgaaaccactgctcacatgactgctctgcacgtgactctaaaagggctgccgtctcatgtttcatatcaaaatgattgtagacctgtacagaacaaaattataatcaataaattatcacatatagtcgaaaaggcactgattatattaatttgtacaagaattacattctctagtcatgctttaataagggtactaccccta

SEQ ID NO: 144042 - DNA, 431 bp, Glycine max
  unsure (1)..(431): unsure at all n locations
agctnntttttggaccttgaacaagcaatttacttctctttcataaccatgctatgtgctcgcgactggtccctttcttcccttcgcaacttgagttcattattgctaccccatagagctccgcgaaatttgttccggccatactcttccttgcgagccctcttggtctcttgttcaagggctcttgcggtaattgcattctcttcccgtaacccggcgcactccttccgaacgtgtgtagcagccaacttgaacttctccttggcgagttttgcctttcctaactcgcttttgagagcttggacttcctcgtcctcttccggtgcttcaaaattctcttcgctgacgacttttaacttggcgagcccatctaaacctcgtatgcgaactttcagccattcgtggtacccaccaatgatgccattacgaat

SEQ ID NO: 144043 - DNA, 336 bp, Glycine max
tggaattttattaaatgacaagaaaaatagcgattaagtagacaatgtagagtttatgaggcttccttgaccaccaatggatatttacctttgtctctatggcattatcttcattctcaaattctcaatcattaggcgtcgtgtatcctccctcccttggttaacacctaatggaatgcccaagtaggtgaaaggtagcttcattgtcatgcaatttagcaaatatgagggcctcattttcctacacaacgatcccaaccaaacgacttttgtaaaaatttactctaaggcctaatacaaacttatagcatttgaacactaccttaagggtcaaag

SEQ ID NO: 144044 - DNA, 433 bp, Glycine max
  unsure (1)..(433): unsure at all n locations
agcttgttagacaagatatttattattatttctaacatgaaaaggactgacaagtaaatattcgtttacaagtacaaattatgtgagatgagtttaccagttttagctatgttatagctatgttatatgactttaaatagtatatattctaattaagttntattagtttattgtattttttttgggtatttattggaaaaaaataaatttaatctaaattactttaaattagattagttcagactaatttaatgaattaaataataaactaatattagataatgaaatataaaatctaatcaataacaaaagacttgaataattcttattgtctaataacgatataagatttcaacttaagagttatttaaattcctcactagtaagtcattaagtcgactctactgaatgtaaagccttaaacatttgcacg

SEQ ID NO: 144045 - DNA, 368 bp, Glycine max
tactctggagaaagactctgctaaaataactgctattctgtcttgtctacttgtgcagggggatgttaagattgagaaatggaggtagcctaaaatcaacagatgggattgaatacatcagtgggcgtttaacatctatatgttcagaggaaatgcttatggctacaactcaagtcacactatgatgatattttagtttagactctagtctgcaacaggggaaaaattatctagttatataagactataggagcatatgaacaatgtgaagaggaggaggaaggactaaagcttcagttattcataataaatctcttgtgagaaataatattgtataactataatgtctaatatgagagatgtatgca

SEQ ID NO: 144046 - DNA, 374 bp, Glycine max
  unsure (1)..(374): unsure at all n locations
agcttggtggaaatatgaagacttattattttcactccaaagcttgctaaaagatgacagagaaaattgctcactcaaggaagaaactacacacatcacagcaagtaatttcgacacctgttgcagtatcatcagcacactaaggtcataaccagctcaattggtggtaggtaagttacaaaggaagagaccaaaaggctaagagtcaggattaagcaactctacaggcatttgcacaacataaaacactccaagtgtnttacagataataaaagttatcatgataggctattcaaaattctgatgttcttgaatattgcattctcgtaaatgcagtaactagatatcatgtattagaaaccttctcttaagtt

SEQ ID NO: 144047 - DNA, 373 bp, Glycine max
cattataagggcaaagacaataacacatagcgaagctagttttgatactaatgctagattgctagtaaatgactgaatacatgtaatagatattggttttatatttcccttttctgcaaagatttgcacatacatgacaattctatgatctaaactctagacaaagtgagagatttgggtagcattgttagtggaggtgtggggctataatggcaacttcttgaaaattctaccttgagtttttttttttattggcaaatattagtctgttaattttttgttagaaatttcagtgggggattcgaacccgcaacctcttgtccctcccttcttccttctccgaccactggaacaaccttatatttcccattct

SEQ ID NO: 144048 - DNA, 414 bp, Glycine max
ttattatcagcagatgaagatcaagcttgttttcatctcatggactcctctaaggacaatagcatcatttcttgcactgaattcgcgggagttggaatccatcttctcaatcaaatttttggcctcaacaggggtcatatcaccaagggttccaccactggcagcatcaatcatactcctctccatgttgctaagtccttcatagaaatattgaagatagagttgctcatatatctggtggtgaggacaacttacacataatttcttgaatctttcccagtactcatacaagctctctccactaagttgcctgatgcctgatatgccttttctgatgacaatggtcctatatgcatggaaaaatttctcgaaaaacaccctcttatggtcatcccaactgaaaatggacctggg

SEQ ID NO: 144049 - DNA, 235 bp, Glycine max
gagagaataatggaccggtcaagactcaagcgttaaagtctatctcaagcgttagcgggacttaaaaaaaatggaaattaagacccctttatatttaaaagctaactttttcattaaaattgatgaaataattaaccggaattcaaccccatacaaaaatttaatcggaaagcttaatgtcgtatgtcatacccctaagacttagctgtttacagtcaatttcatgaattcgaaa

SEQ ID NO: 144050 - DNA, 325 bp, Glycine max
accctgtattttttgatcacttgtaactattatacaattctctccggaaaaatccacgccgtgcgctcccgtaacattatcgacgtttcgggggcgataacgcgaaaattatcctccgtacttcgacattcctgtgctactctttctgccctcactccgacaagttccttgaagccggacttttcaacttattctaagcaccctgagcggtcacatttgttacggtctttattgcgatcattaataccgaccccttggacggcttaatctctaattaagtcaatatctcgcctaatcaataaaaaaaatacattgccacctatca

SEQ ID NO: 144051 - DNA, 347 bp, Glycine max
caattttgacctctccacaacaatcaaccctggatggaggaatcaccctaatctcagatagtgtagccctcagaaacaacaacaacagcctgctcctttcttccaaactgttgctggcccaagcagaacatacattcctccaacaatccaacaacaaccactgcccgcaaaacgaccaacagatgaggcccctcccaaccttcccttgaagaacttgtgaggcaaatgactatgcaaaacatgcagtttcaacaagagaccagagcctctattcagagcttaactaatcagatgggaccattggctacacaattaaatcaacaacaattccttgaatctggacagct

SEQ ID NO: 144052 - DNA, 369 bp, Glycine max
agcttactaaggcacctgttctagctctttctgatttttttaaaacttttgagctagaatgggatgcctctagagtgagaattggagcttgtttgttacatggttggcaccctattgcttattttagtgaaaaactttatggtgccaccctcaactacactacctatgattaagaggtttatgccttaataagaaccctccaaacttgggaaaattaacttgtttccaaagaatttgtcattcatagggatcatgaatcaacttaagtacattagagggcaaaacaagttaaacaaaaggcaagccaaaatggtagagtacctagagcaatttccatatggtatcaaatacaaaaagggaaaaacaaat

SEQ ID NO: 144053 - DNA, 347 bp, Glycine max
gctcaaagatcaatcaaagaacaactcaagtgaatcaagaacaattcaagagttcaagataagaatcaagaagaattcaagactcaagaagaaagtctagagacaagaatcaagattcaaggttcaagatctcaagaatcaagatcaagattcaagattcaagactcaagattcaagaataaagagaagactcaatcaagataagtattaaaaagtttttcaaaactttgaatagcacatgagtttttgacaaaaccctttaccaaagagtttttactctctggtaatcgattaccagattgttgtaatcgattaccagtagcgaaatgagtgtgggaagttttcaa

SEQ ID NO: 144054 - DNA, 290 bp, Glycine max
tgacatataactttcttgactgtgatttgactcttatgaggctgtcctgtactcaagatcaccttcccaacaaagtgagactcgaaccttcaaatttgagaaagaaactttctatgtcttttcaccacagcagcacccttttaccagacctatgctttttgaaccaagagatgactgaccctataaagattttgtggactggtcaaacagaggatgtaaggtgaagaaagggacagggattggatggactcatacaagctatgctggaattacagaggccacattgagct

SEQ ID NO: 144055 - DNA, 452 bp, Glycine max
aagcttgtcaacttcccaaaggcaatatgctattggagcaaagtgggtgtttataaacaagctcgatgaaatatgtaagggtgtgagtggaacaaagctaggcttgtggccaagggttattcacaacaagaaggtatagattacactgaaactattgctcatgttgctcgtctagaagcaatgcacattttaatatcctttgctgcccatcatggtatgatgttgtatcaaatggatgtaaaatgtgtgttcctcaatggacttattaaggaagaagtctatgtggaacaaccccctaggttttagagttttatctatcctcatcatgttttcaaacttaataaagccttttatgcttaaagcaagcttttcaagcttggtctgaaaagttaagttcttttttaactgaaaatgaaaagtagatactactttgtttcgcaaggattatggaa

SEQ ID NO: 144056 - DNA, 440 bp, Glycine max
  unsure (1)..(440): unsure at all n locations
agcttgtagaatggctagacatgatacatgtcatggcttggtttggttcaaggataaaagggatgccccacattatttccatgacacaaatgcaaaaaatgatgatttggaaattttatgcaaaactggtcatgcatgcgcctatgcggacgctcaagtgtcaaatttttatggtcatgtgatgctagggctcangattcatttcctctattttaaatcaacccaatgtttccaaaatatgttcttttatcaatttgtgcattcctccaagtccatttcaaggatggccttcactttttcggngtctacctctatccctttctggcttacaatgaaaccaagcaatttccctgatttgaccccaaaggtacacttagcggggttcaaccttaattgatatttcttaagcctttcgaacaactttcgcaggttgacaaggt

SEQ ID NO: 144057 - DNA, 311 bp, Glycine max
gatatttcatctttttaatgtctgccacaataataaaatgtgggttaaatttgttttcagtttcatttcaaaatttaagggggcatatatggatttttatggaagcattttcctgaaactgcaaatgcgtgtctacatgaatattttcaaatcatctttgttagttaatatcttctcataaatatttttctttttctagctatagatgttgaagcatggagagatgtgatttattttgtttcacaacatattaattctcaattatatcgtttatttgcttattctctcagagatgtgacaatatttaattt

SEQ ID NO: 144058 - DNA, 411 bp, Glycine max
  unsure (1)..(411): unsure at all n locations
agcttctcaccaactccctttcttctgcattttaaaaattgcacttttgtcaaccatgcaagtgttcaattcagtccttgtccaatttaaccaaaatagaaaaaaaaaattaaaaatcattaacatactttcactgacatgcaacgaaattcagaaataacaataataatcaggtaattaaagaattagtaacgagttctctctctttctctctctctcaattcaaagaaaatcacgtgaaattaaataaaaagtcactcgaatttccacaatccaaactccgattgcggaattaacatgcataaactaaagacaacgctggctttgcaaagaggaatatgacagttccacagtgtgacgcgggagaaagaaaaagaaggaacctgagagncgatatcggagatgaaaatg

SEQ ID NO: 144059 - DNA, 351 bp, Glycine max
  unsure (1)..(351): unsure at all n locations
tgagtgccacctttcattgcaaggtgaggtctggtaagttccctggtgggaggatatggtgccactttcaagctttcaatgtagcactatcatgcctgcttttgatatgccttgacaatcacgatctatcccgttaaagtggggaacttcatcttaagatatgatgtggagacgatggctccgatcttattcaacgttttcattccaatcaaagtaaactaaaaggtatctgcatcaacgattaagtacctaattgtaaagctcctcaagagttggccttgacccaaggtggtcattangtcgacatggctttcggtctctactctttctcctgtgaagccatgaaaggga

SEQ ID NO: 144060 - DNA, 427 bp, Glycine max
  unsure (1)..(427): unsure at all n locations
agcttgcttttatgtccttttcattgtttttattgttgaataatccttgaaaaattgtcttgttaaaactccattggtttagctttcatttaatttttttttgtctttggttattgcttgtctctttgtttccttgtttgtgagttgccatatagggaattggaaaggaggattggtgccatcccttgaagaatttgagtcaagaagcaaggggccaaccaccttaagagctattggactaagaagcactccaaattgagtgaatcaccaaagagagaaaaaccaccaaaattgaggacctttttgcaattttgtaattgacaatttacttactttccttgctntcaaattttgtaacaaaaaggcctttcattggaagtaatttgggagcctccaataggtcaccctacttccctttgtgtgtaat

SEQ ID NO: 144061 - DNA, 434 bp, Glycine max
  unsure (1)..(434): unsure at all n locations
tctatatatgggttaaaacaagtctcccgttagtgtgtccttaagtttcatgggataatttcttcatttggttttgatgaaaaccccatggatcaatgcatataccacaaggtcagtgggagtaaaatatgttttcttgttttatatgtatatgatattttacttgcaaccaatgatcggggtttgctacatgaggtgaaacaatttctctctaagaatttgtacatgaaggatatgggtgatgcatcctatgtcattggcattatgattcatagaaaggtattttaggtttatcataggaaacctatattaacaaaattttagagagattttggatgaaagattgttcaccaagtgtcgctcccattgtgaagggtgataggtttaatttcaaccaatgcccanagaatgactttgagagggaacaaatgaaa

SEQ ID NO: 144062 - DNA, 327 bp, Glycine max
aattttttatttctcatttggcctttaactttttgaaaaaagatcttataatgctgcttttgtatgttatgtgcgtgttagtttgattgaattaaattgggtagaaagtaaatgtgttttgggaagattggttcatgcttgtgcttcttctttcttttttaatgccatggggattttgtaactgtttattgtgtgaatagacctttgcgactttgtggtgttctttctgcatacgaggcttcccgcggatttcattttctgacatctctatcatgaatctctttgtcttatatattacaaatgacagacatacatgacatttcaatg

SEQ ID NO: 144063 - DNA, 442 bp, Glycine max
  unsure (1)..(442): unsure at all n locations
agcttagagattccaaacacaatgaaattgttgtgatcatagtgctacactntgggtcttaaatttgtcaaacttcaatgaaactcaaagacaaagccacagtcacatctatttgaaatgtatatttattcatacaaaaattcagaccaattaaatatgtaatgtcttacctccttaaagtcatttggaaattctttgatggtagaaattgccactgtagcagcttcatcataagggtatctgaaacaaagcggcgttatacaattgtaatgaaaagtcttgggtctactaaaaaatcaaagggagcactagatttgagaggcaacagattgaaattattaggtttgagaacagattatattagtcatcataacaaatagcatggctatcgtattacttggacaggtatccttgccatgaattttccagcatttttagcttt

SEQ ID NO: 144064 - DNA, 348 bp, Glycine max
atctcaagaaaattcatcaagctcatttagttgattttgtcttgaaaccacttcacctggtgatgtacaagacacctttatttgtcaggaggtcaaggaattactagacgaaaaggtatctagtggatgaaatattaaggattttcaagacttggaagaaagggtgaaatccttaaccacaactcttgaatattcagaagaagaatgtaaggaaatgcttaaacaaaagctcttactacaaaaagaatgtgcccttgctaataacgagcttgataagctgtaaaagaagaactcaaatctctggactaaatatcagcattataaaaagggttcttctaatttaaacta

SEQ ID NO: 144065 - DNA, 443 bp, Glycine max
  unsure (1)..(443): unsure at all n locations
agctntaaccaaattaggtacaaatatatcttatatttttttgagatatacaataattacaccaaatataccgctgaacgcaagtatagtgacaattaacatttataccattatggagaattttttggaagttacatggcagagtgaaagaaaggaacatgatcgattaacactagacgaatttaactaagaatgagaacaaatatttcgaattatccaccaactggtttaatattaaaggtataagtttttttttatatggaggaatcaaactcaagtactaaatgatttataccaatttatccaagtgagttagattcctaaatatgtataaataaggtataatttccaatgaactatntaagtncattttatttttgttagttggaccttagagagtttgcatgaaaatatctatcatattgttaattgttgaaaatact

SEQ ID NO: 144066 - DNA, 294 bp, Glycine max
taccaattatcattatttatttattatctttgcagaattcatcgagtatggcatgatggatcactgtccccatgagagtccgccactggaaaagaacgtcaacatccaatctctatatcgatctattaattgtgctgcactaacaaccaaatattgatctattaatcgatacgaaacaaactctaatatgtttgatttcttgcgagaatcttatctttattggtgaataatatatgagctgtgtagtctatctggaactgatgagcccctaaaagctatgttacctaatctttt

SEQ ID NO: 144067 - DNA, 212 bp, Glycine max
ttgtatctatatatacagtctttgagtcaagaataataaaaaaaatggtcataattttcaggtatgtcccttaatctcaacagtttcacttgaagacaaaggggaaggactttttaaaatgaaagtctttgatatggaattgaaggaaatcacttacattagaacttggaaaaacatattcttccttgacatgcttgaccaggtatttttcc

SEQ ID NO: 144068 - DNA, 340 bp, Glycine max
  unsure (1)..(340): unsure at all n locations
aatccggactacgctaagacacacttgtgtgtattatttttggctacgctcaataagaagcacttcaaacacatatacttggtcaggtttatgtaccgacgatgtaaaaatgtcattatgaacccgcctaataatacatgtgtcaacccgcttttatgactcctatatcatggtatacccacccaaattacacttttctctctcgatttttttagttttgggttggactgagttcacttgaacacccttaattatgaggtttggtttttttttgaaaaaaatgaatattagtgaaagattgatcaaaataagtttgacaatntatcaatgcatgtcatac

SEQ ID NO: 144069 - DNA, 440 bp, Glycine max
  unsure (1)..(440): unsure at all n locations
agctntagtattccttttatacttgttgtaaccttcttaaaataacacacgttctataatacgataaacaagtgcttaatatataatgtgccttacttctaaatgtaatggtaatttagttggtagtcgtacaaatatattaatagtaacgtcatttcagaaatacagatcatacaccatgaccctaacaatttcaatgcagcatgccaggtttctaatcagacaacaccctaaaaaaaaagaaaaaattatttgggacacaacaccatcagaaaacaattccatgtcttttggatgacttatttatcgggcttcaaaaaaaaagaaaaaattacatatatgttacttactggaattgcaaacacaaaatgaataaatgatgaagttgtaaaaaatgattacatattagttctaaatttttaataaacaatattaacctt

SEQ ID NO: 144070 - DNA, 376 bp, Glycine max
tcttcaaatataaccttcatcttcaagtattcattggctgactatttgttaattcttcactctaatgctcgtttgaagtcttgagtctattgaagcatttaatgcttgcattaaatgcatgtcccttcttcatacaaagtctatgccgataggataacgtatgttgtacttcattagggaagtcccttttttcatcattgcaggtctacaacaatagagcgtgccttttgatgagaattagtatcttccagacatatttcatttattcttcataggactttgacagatcctaggagaatattttctgcatgaaagaatctcagacacagagtattaatgagcgttttaaatgcactatttaaatgatacattagat

SEQ ID NO: 144071 - DNA, 440 bp, Glycine max
  unsure (1)..(440): unsure at all n locations
agctttgataattgattnttatttttatgttttatttattctaaattcttattaaattaaaataattttgtattaattaatttatgtgttcttatttataatattatttataataatcttatagcatggataagattatttttccaaaataatacatgtggtcttaagaaaataaagaaagaaaagtggaaaaatggaaaagaaaaagctaccaatgtatgtattgtggtggaaaattattataatagtcttatcaccatgaataaaattattttttcttaatcaaaaaaaaaatatatatttccaaactaatacatgtggtctcaaggaaaaaaataaataaagaaaagtgggaaaatgaaaaagaaaaagctaccaatgtatgtattcagctgggaaatctgagagtgtattgntctttattttattnttcagtttta

SEQ ID NO: 144072 - DNA, 426 bp, Glycine max
  unsure (1)..(426): unsure at all n locations
tatcagaccacgaagaagagggccagcggacccaagtttctctttctctggaaagaggattcaaggggtatgtatgcaaatttttcatttctcatttggtctttaactttttgaaaaaagatcttataatgctgcttttgtatgttatgtgcgtgttagtttgattgaattaaattgggtagaaagtaaatgtgttttgggaagattggttcatgcttgtgctttttctttcttttttaatgtcattgggattttgaaattgtttagtgtgtgaatgaactttttgattggtttaattcggatagtttgcttggttagagtgaatttctgacgtgtcatgcaatgtaatagatgttttggtatcaagtagtccaaggctaaatgcacacataagactgaagttnttttttttgtcttgagggaaaa

SEQ ID NO: 144073 - DNA, 419 bp, Glycine max
  unsure (1)..(419): unsure at all n locations
cacctgcacgcatgcaagctnttgagatgctgactatgtngtgatttttcgaaaagcacaacacaagtggaagttgccatttcattggtggaaacttggttacatagatatgcaaaaagcaagattctactgcattgcccattgctaaagtagaagacatgacaattgcaagctattgtgctcaactcctttggataaagaatcagcttggggactacaacatctatgagagtaaaatttatatcttttgtgataaaaaatttgtcattagtctttctaaaaatccaacattgaattctagagtaaaacatgtataaattaagcataattatataagagaccatgttcagaatgagacagtggatctacagtttgtacccactgatgatcaacttgctgacattttcacaaaactcctt

SEQ ID NO: 144074 - DNA, 446 bp, Glycine max
  unsure (1)..(446): unsure at all n locations
catgcaagctgttcagccatatactttgttctatattttactactaactctaacacaaataagaagatttgttagttgattgcacaatgactaacaccatcgtcttatagatgaataaataaatttagcacttagtcttttctcttaatatgaatgaagtgttttgagaaattttctaaattttataaggatttaaacaaataaatttttgtgcaaaaaatgaaataatgaggcttcaaaatcatacttcatgtcttcaaagcttttaatatttataggcctccttcaatcaagtattcattgtctttaaatagatacatttcctttcttaagcttatgtctaaagaaaaaggccattgggacattaaatgtgtgcatttaatgcacatacttcttcatgctgagaaaccactctccgtcgctggcgtgtngaatacttcaatagg

SEQ ID NO: 144075 - DNA, 375 bp, Glycine max
cccttcaacatgctggaacaactcgtttctttttcaacaaaataaaatgactagattgtattaatacaagggtaacaaccttatttcacacatgcttctcaagcatatttgactgtagttgtgcatcatgttattagaatgagcatgaaaaagcatgttgtagatgaccagtagaaagtctcagcttgactattaacacgttccatgacatcagtggcaaggattattctaaaaaaagaaagaatttgaaatttcattttttattctttactttaattgtaatggaatatctctattagttaatctatttaatagaatagaagttataaaatctaagtaattcacggttaaaggatgaaccatgttgacaatcat

SEQ ID NO: 144076 - DNA, 404 bp, Glycine max
  unsure (1)..(404): unsure at all n locations
agctnttcagagtatgattggtatgtatcctatgttgctaacattatgtaagcctgaattgtgtttatataatttactagtatgatatttattattagtatgcaacttcacattcactcgtgtataatagtagtattctaatagtcaagaaagttttaatttactttattcccttttgcagtgattcttgatacgccattggactatagtctggatgactgcattgaatacatccaagaagatgaactagtagaggtcacccccgcaagtatccgaatgtgcaagaatccaaaaattacaaacaagaaaacaaggtagactctcactgtgaagcagtaacttgcgaatgctttttgagttaaccagtgactgctggtgtgctgaagctgcataactcatcaatg

SEQ ID NO: 144077 - DNA, 408 bp, Glycine max
atgtagaaacatcttcttcgaccttggtgattctttactccatctcattgaatcgcatgtccacttgtaactccaaggtatcaaacctttcaccaacaaaggtttgaaaaccatcaaacctgtccaaaatcttttgaagaagagaggaatcttctccaccatgtaagtgtccttcttcattgatgggttgagcaccctttttcacccaagagccatcatgctctttatggtaaccaaaggatgcaatcactgcagcacctattagaaaggatctcttgattggaacataaggttcagaatcaagagggatgttgaagtgttgaagaaagagggtgactaagtgtggatatggcaatgaagcatttaatcgcaatgccttatgtatgcgatatcggactaattgtgcct

SEQ ID NO: 144078 - DNA, 339 bp, Glycine max
ataaaaatgcatgatattattttaatacgtaaacctaccctgaattaggtgaacttgctttggaaagatcgaatgctaatatatagtgccatgtcccaactctactatgtcaatagggctcttgattcttgaagccaataacttacataaattattccccattggggaggtttaatagctagctatcaattgggggaagcaatttttgtgaaatgatgtctttttaatctaaccacatgtggttggtaacctgaatttacttcttatgtattcgcagaggagtgtagcttttacttcatcatcctctaatttcaggactgaacattaatggggtggttt

SEQ ID NO: 144079 - DNA, 171 bp, Glycine max
gtgcatggcaacaacaagagagggcgactcatttgaaccaaatgtgggctttaaatgaccattactgataacacaaactctgttgtttttcattattgggggtgactctagtgtctttgtccaaagacaagtaactttgtgcctcggccttactcgctaatattgttgccc

SEQ ID NO: 144080 - DNA, 374 bp, Glycine max
acatagataaagcgatgttgatgttcaaaggacactttaaactcctctttcatcaactgacctacacttaacaagtattgatcaatgttaagtacatatatagcgactaatattcatttgatacctgagctcgcagaaattgcgacacatccttttccttttattggaatatagtcaccattcccaaaagttaacctttgagacataacgtggcttcacactctctgatagaatcttatcatatgtcatgtgggtcgtacaaccactatcaatctatcaacatttaaaactactcctcatcgaataacatgttgcaacaaaaaattaatctttttcctcttggtcaacaacttgtgcataaacttttcgctgct

SEQ ID NO: 144081 - DNA, 402 bp, Glycine max
catgcaagctagctctaaataacatttttggttgtttttatgggaggagggtgcatgccatttttgttttaataataaccgcccactggtaaaaccaactttccaaatctttgccctcgcaagaaatggcccccaggaagcttgcctcaaaaaaggccaggaaggacaacgcatcccgaacgaactaattccgctccggagtatgacagtcaccggtttaggaacgctgtacaccagcagcgcttcgagggccatcaaggatggtcgtttctccggagcgacgcgtccagctagggacgacaagttactgatttcagaaggaatagggcccgacggggcatcactggtactccatggcaagttgatccgaatagtcctgagttattgccaatgctgccaaca

SEQ ID NO: 144082 - DNA, 408 bp, Glycine max
cacatgttgttctatgttttgtcgggcgatggggcacaacaagatttccacattcacaatgcgcgcataaacccaccatcccctggtgcccacctccatctgagctcacgtactcccacgtagcccatatgcttttttctctcaacaccgggtccccatcaatcctcccaagtttcctgcaacatcaaagtaatacaacattcacacagcacaagctatcgcagccaagcaaaacagggcaaaggcagaaaactctgcccaataacaccaaccaaaatcacagcttttctcacttaaagaccccagtaacaatttcttcgatccaattcgttaaccgttggatcgactccaaaattttattggaagtctatagtgtatacgcctacattgtgaccgttgggatctact

SEQ ID NO: 144083 - DNA, 310 bp, Glycine max
  unsure (1)..(310): unsure at all n locations
agcttctcaaggaagatntcttaataaagcttctcaaggaagctacctagtctataaatagaagcatgtgtaacacttgttgtaactttgatgaatgagaatcttgtgagacacaactcaaagatcaacttctcttcctttttctaccttcaattccgtgctcccccctctctctttctctccctctttcttttcctccattaaagcatcctcttcaagcttcttatccaaggcaattcttggtgttgaagctccttcttccttggcttattccctagtggatggtgccttccctctcctcttttccttt

SEQ ID NO: 144084 - DNA, 407 bp, Glycine max
  unsure (1)..(407): unsure at all n locations
gaaagttntctcanagaagcttctcaaggaagatttcttaanaaaacttctcaaggaagctacctagtctataaatagaagcatgtgtaacacttgttgtaactttgatgaatgagagtcttatgagacataactcaaagttcaacttctctctctttttcttccttcactttcgtgctcccccctttctctttctctgcttctttcttttcctcaattgaagcatcctctctaagcttcttatccaaggctcatcttggtggtgaagctccttcttccatggcttacccctttctctttctctgcttctttcttttcctcaattgaagcatcctctctaagcttcttatccaaggctcatcttggtggtgaagctccttcttccatggcttattccctagtggatg

SEQ ID NO: 144085 - DNA, 359 bp, Glycine max
  unsure (1)..(359): unsure at all n locations
gacatggctccattattatccaatcataagcctcaacactagaaaggttntttcctccgtctagattcatcaatgcaaaatccaccattgctactttttcccaagggtctgatgaacctctctgtgaaacatgggagagattcaaagctntgttgcagaggtgcccaaaccataatttcgatgatgctgcacaattacatattttctatagtggtttgaaacctcaaacaaagatgattcttgatgcctcggctggaagtactacgatttctaagagtctggaggaagcaattgtaatcattaactccatagccaccattgattattagagtaaccatgatagactttaattcaaagaa

SEQ ID NO: 144086 - DNA, 330 bp, Glycine max
ataaaagggattgtttttattatattcatgacacaaatgcaaaaaagatgatttggaaattttatgcaaaactggtcatgcatgcacctttgttgacactcaagaggcaaaattttatggtcatgtgaagccatgggcttaagaatcatttcctttatttcaacccaatgttccaaaatatgttctttattaatgtaggctttcattcgaatacatttgggcgttcggggtaatttacaatattcacctttcagggtagccacatttttcaaaattggttttaacaatgaatatttttcaagaaaaggtggaattatttctatttaaagc

SEQ ID NO: 144087 - DNA, 326 bp, Glycine max
gttttccccaaacgccttaatcttttcggttaaaagacagcttaaagtctaaaagcaacacctcgcataattttccttgtttcgtcaagaactacgtatgtttaaattcctcattccaattgacgatacctaggagcaaaaaccctgcttttgttaactttctaagattaatatacttaacaattggtaaaccaaatatatttggagcatgatattgatatttgattaaaggctgtatacctcgtgacagacgtgtggggtgctaatacctttcccgtgcgtaaaaaagttcaaacctttatttcttaaatacgtgactggttctg

SEQ ID NO: 144088 - DNA, 399 bp, Glycine max
  unsure (1)..(399): unsure at all n locations
tgagcgtncatatgggagcgtgcatgatcagttttgtctttactactaaatcatcgttggtatatgcggtgtcatgggaaataatgtggggcatctcccttttattcctgaacacgctggtcaaaggcatgtaccctgacatacgtcatgttctgcatttattaagaatttttgacccaaaacttgatacttgtgccctaagtttccacccagctaggaattttaccctttccttcctaaaatgaagaaccgaggatctaaaaaatgtaaagagaaaatagttcatttatggtaaattataatgggccttaaacgaaaacaaaagaaaaattcttgtccagaattgaggaagcaaagaaaaaatattgaatattttgatcaatatcggagaaaacaaag

SEQ ID NO: 144089 - DNA, 375 bp, Glycine max
  unsure (1)..(375): unsure at all n locations
ctgcagcttgaggattatggggtacccattacatgtggtactangnggcggtcaggcgatggtgcacaacaaatatttcacatccacaaatcgcgcataaacctaccatcccctgttgcccacctccaactgagctcacgtactcccatgtagcccaaatcctcgtttttctcaacaccggggcctcatcaattcttccaaagcttcccaacatccaagtgattcaacattcaaacaacacaaactattacggcctagaaaacagggcaaaggcgagaaactctgcccaatacaccaaccaaaatcacagcttttctcccttaagaccccagtaacaatttctttgctctagttcgtttaaccgtggatcgactc

SEQ ID NO: 144090 - DNA, 216 bp, Glycine max
tttttaaaaaataaagagttgtttttttgttagggaaaagtttggttttttttaatataagattgttggttgaagaaaatattagagtgtatatatttaaggtgtgtaataggaaatgtggtttatttttgttatgtttgggttgatataggatttggaagttggttatgttgtattatgggattattttgaaaaattttattttgtggagaatgt

SEQ ID NO: 144091 - DNA, 339 bp, Glycine max
taacataaaatacttataacactacaaaataaccataaacttaggaagattgatacaatttacacaagttttatacacaaagttagttgtattcattaactaacactctggatgtctaagaaacactctgttttgaagcaaggctcgatcatgagttaatttcgaagcaatgctttgtttgttgaaacaaccttgtttaatcttgtaacacatgcttttctctgaagcaaacttgtttgattcttcttgcatcataaaattattatttatacttcacacctcatcaaagtttcctttttagaaaacatctatctatagtgctattgcccaattataact

SEQ ID NO: 144092 - DNA, 448 bp, Glycine max
  unsure (1)..(448): unsure at all n locations
cagctnngaatttataaaatagtattttatcgttgcttattttaccctaatcataaacggcttaagattgtatgcctatcccttttcttcttcatgcgttcttactttgtgtgcttgcatcttcaaacacccatgaccaacacctcactcaaagaggaatcgttttcaagtaagaatataaaaaacaaacgttttcttcaaaatgttcaaaaatgttttttttaaatataagaatataaaataaaagatgaaatatgtttgaacaacttgtaaaattcgaaaagtatcaagttgataatcataaaaatttacgtattaatctgatttatataaaaataaaatataattttattggtcttaaatgataatttcattaaatgattctctaacatgattaatagaattaattactttatctctttaccttccaaacacaataaaaaatacc

SEQ ID NO: 144093 - DNA, 433 bp, Glycine max
  unsure (1)..(433): unsure at all n locations
gagagtcttccacccttgttcggataaatgaagattattatttaactcatcgcttcatcgcatgcacttgttttcaactcgaatccagatccgtcgtttgagtcagcctcatgtgaagaatcaatgttgcggttggtgttgattacaattgatgctagaaactcaacagcgccagaagcctccatgcaccgcttatttgtttcgcttccggaagagatggatttgagtcttctgaggcatgtgagaggggaatgagaagcgtctttgagaagcttcgaaatttggttcttgttaacggngggtttaggggttgggatcctttcgatgccgtgagaagcgttcatggaacaccacgcttggatgagtctacgaagggtgtggtttggtgtgagatcggtgtaatctatcaagggcagtttggtaatggggcatg

SEQ ID NO: 144094 - DNA, 431 bp, Glycine max
  unsure (1)..(431): unsure at all n locations
agcttgatgtcattcaaaacacattatgtatatctctaaatgaagactaaacatgcattgtttatgtaattgtattcattatgcgatataatttgttgtaacccgttactaaccaattaatattatcaagtacttgtttggttaagcaaggaaattgttggtccaacaaaaatcatttacacgtgcagcatacatcattgtcataattgacaacacataatgacatgcatgcgtattacagtttgagcgcgacaacacattggctgacttcagtacacattctgaaactaacagtcgctcgacaacacattggctgacttgactagacattggcgacaacacattggctgacttgactacacatttacgcatgtctatctttntgtaaacaaagttaaacaatggctcggtcacaaccatctatatatatg

SEQ ID NO: 144095 - DNA, 378 bp, Glycine max
tatcactgatatgcttatgtctagcatatttgaatcgagatcgaaaatcatgagcatctactaattttagtcgtactaagattaaagactagaactacagcattctaaagcttcacaagagttgggcagttgttcaactttcaatctagtaatatgagagacagaaaacatcgtgaccttgaattctattattctttgagtgcttacgctcaatcgctatctaagatctatactagtctgtgccaatgtctactttggtatataaatgtctactcttactagttatggttacttgtggctgtgttgctgactataatattttcaaacgaagtccttatatgtgcagattatgagatagtcagcgacttctgattagtc

SEQ ID NO: 144096 - DNA, 431 bp, Glycine max
cccttagcgagcagtctatcgcttagcctatttcttatcatattgtaaagggcttagctcatccttggccagcttagtggaccaaatcagcctgagatgcaagggttaagcgctaagcgccagagactctttgcttagcgcatgaccaaagatgcgcttaacaaaaggactgtgtttcaaaagaagaaaaattctaagttatttttcagtccctttcttaaaaaattgaaactcttatatctatcatttaaaaacaagctgatataccccaatgtaatgattatgaagcaagttccacatgatatactgcataaaatgcaaagataacagaaattaaaactgggttgcctcccaggaagtgcttctttaacgtcattagtttgacacgtttacatcaatgggtgatcaaatgcacagtgctatgtgctctt

SEQ ID NO: 144097 - DNA, 391 bp, Glycine max
  unsure (1)..(391): unsure at all n locations
tttctcactntgnccactccactgtgttgatacctcaatctttttttctctatgggtttcctctgtgccctcttcacttgccgcaccctgtccttctcctttcctcggtgccctcagtcttagttcatctagaaatttaaaggaactaaaactgatttttcttttttaatcttaaagggattaaaaacatgttctatcctctnttctctatatattaatgcaaatgtggcttcacttttttataattacttgaaactcttgtgcttgataccttgagtagcctgttaaagtgatgctcttgttgntatcacatttactaaacacttgacttatggctcacatgatctttaattaattaaanaaatgtgtgtatatatatatatatatatat

SEQ ID NO: 144098 - DNA, 441 bp, Glycine max
agcttcataaagcttgttgtaatcgattactacattcatgtaatcgattaaacagagagtttttgcctcttcaagaaacgtttctgacttaaaaacttttcttcacacaaaccatgatgatacatgatgcaatatagatatcatatgtactaagatgcaacacacaagataacaaccaatacaaataccacacaagggagttaggcatgtaaaagtcaaaacttcttcacgcttttccttgagcttcaagctttagcctttaggctattcaccatgttgctccccttatctctaataccacctgcacatatggccaacacacgacccgaactcaagagagagacacccccataaaattccaaccctactctaacgaccaccatgacggataatgatccactttgacaactccaagcccgcatcacagaaatagaagaacgc

SEQ ID NO: 144099 - DNA, 440 bp, Glycine max
accttcaaagaaggatcctatacaaccaacagaactgtgttttcttctatgctacttattaacaccataaatatttagagaagagataaagtaaatgaaatgtgaggaatttaggcttgtagcagagtatggaaacaaagccagagagtcactaatctttttgtgtagaattttatacttccacatccattgatttgaagataagaattcctactggaacaatttgcccctaataggcctatatgtgcgaattgtacagttcttattattatgtgcaactaactttcattaggctgaaattaactctgcacgggacattttgctttgttagcacttagtagttaaaccaaatgctccaaaatacaaaggtagaaacgcgataatggtggttttctttacgaaacctcacttttcatacaatggacaggtatattattggt

SEQ ID NO: 144100 - DNA, 431 bp, Glycine max
  unsure (1)..(431): unsure at all n locations
agcttgctaattcctaatataggtgtaagattatattaaataaagnaagattaaggtattgaatttatgaattaaaatataaaatacgaaaacttcctattctagaatagtaaattaacaagtagtattcagatttgtcatttaggggagctgctgccttatcatcaccctgatccaaaattgcgtgagacaaaatattaatccctaaaatacaacatttagacaatgaaagttgtattctttgcttaaacgggttacctcacatgcattaattggcttccacaaaagagcaaaagaaaaagaaataaaaaaaatgtataattaattaaaatggtcacaaaatcctaaactatctgcacattggactttgaggttgatgagaataagcaaggttgtttgaggaacagtatcccatcatcttctcaatgctt

SEQ ID NO: 144101 - DNA, 434 bp, Glycine max
  unsure (1)..(434): unsure at all n locations
agcttgctgaataagctgcaatttattctctctccttagaaaccaaaatcaactgttgtcttacaaaaaatcagctccaaagtaggtcacttgatcatgaaaaacgctctaagtcccacattggacaaaataacctcattagcccctttctttccctatatatagaggagaccaacaagtattatatgcatcaaagaattaagtgggcttagcgcgtgttaggcgcggagcccctcaactaatatttttatatttccttgagttttcaaacaaggaaaaattagacgacttgagattgtgttttaaatcacaaccaagtttttaccatagtaagagttgtcatggatatcatggtgaatgaaaccattgggtcaatgtgttcttgggagtgttcatgagatcngcttctttttccttgttgaggaattgcttca

SEQ ID NO: 144102 - DNA, 435 bp, Glycine max
  unsure (1)..(435): unsure at all n locations
agcttgaagaggatgctttaatagttgtatttaattatagaacggaaagagagaggggggagcatgaaattgaaggaagaaaaagggagagaagttgaactttgagttgtgtctcacaagactctcattcatcaaagttacaacaagtgtttcacatgcttctatttatagactaggtagcttccttaagaagctttcttgagaaaacttccttgagaagcttctttgagaaaacttccttgagaagctagagcttagccacacacacccctctcataactaagctcacctccttgagaaacttccttaagaagattcctaaagaagctagagcttagctacacatacctctctaatagctaagcttacctctttgagatgagaagctagagcttagctacacancccctataatagctaagctcaccccatgac

SEQ ID NO: 144103 - DNA, 373 bp, Glycine max
ttagcgaaccaaatcaagctcagatgctagggttgggcgctaagcgtgtgagactctcagcttagcgcatgaacacagatgcacatagcgcgaggcttgcgcttaacgaaaggacttattgtcaaaaatattctctaagttataaacttagtcctttcctaagaaattgaaacccttatgttaaacattcaaagataggccgatatactcctatgtacagattatatagcaagttccaaatgattgaatgcatgaaaaacaaagattacagaaattaaaaactgggttgcctcccaggaagcgcttctttaacgtcattagcttgacgcatagcttactaccttcagggggcatgaaagtcacacagacacat

SEQ ID NO: 144104 - DNA, 376 bp, Glycine max
tatctctgggaagcttataggatccccttcgttggcccgaaactgaagactgtcgatgtggccgaagtcgcaccatgacccagtctcctatgtcaaaatagacatccctgcgtttcatattagctgtgtgcttcatcgccagttgggctttctcgagcttcttccttattttagcaaaagcagattccttgtctgataagaactcatctactgcctccactttagacgagcctgtaatatactggggcaggcttagtggcttcttcctaaatgtaatttcgaatggtgaaacacttgaacctgagtgttgcgacgtgtttgtagaccattctacctatttgagaaatttgccccaagacgaaagtttcttgtggac

SEQ ID NO: 144105 - DNA, 440 bp, Glycine max
  unsure (1)..(440): unsure at all n locations
atctttatagtcacctgccgcatgcaagctntgagccanaatcctgactcttcatattccttgacccacggtgagaatgtcaattcttaccctcggaagcaaaaaaaaaaaaagggggggagagggaaatattccaatctaagaggaagccaaaaaggagagaaggaaaatttccaatctaaggaaaagaaaagaagaaagggagttcccaatccaagagtgggagaaagcgaaaagaaaagaaagaaaattcccaatccaagaatgggagaaagaaaaaggagaaggagaagaaggaaagaaagctcctgatcaggatcgaaagaaaacagaagaaatgtgcagagaggtctctggaccagacaatatctgaacaaatacacaattgtcaccaaatgaacaaaagaaaaaaaggaaaccattacctaaaagtggtcttc

SEQ ID NO: 144106 - DNA, 380 bp, Glycine max
tgtggagcttctatggaggctttatcttttatcttcaatgaggtcctttaatggtgattttccactatggagatgcagcggaagacaaaggagaagaggtgagaggaggcgccatccactatggaataagccatggaaaaaggagcttcaccaccaaaatgagccttggataagaagcttggagaggatgcttcaatggaggaaaagaaatatggagagaaagagagagggggggcacaaaattgaaggaagaaaaagggagagaagttgaactttgagttgtgtctcacaagactctcattcatcaaagttacaacaagtgttacacatgcttctatttatagactaggtagcttccttgagaagctttcttaagaaaa

SEQ ID NO: 144107 - DNA, 393 bp, Glycine max
  unsure (1)..(393): unsure at all n locations
agcttctccaaagggcatagttattttcagttttctgaaaaagnctaggaatcttgccagatggcggtccttatctttcttggatggtaccatgggatatggcacttccatacccttatctgaagctttntctttcctcttttctctttctttttcattcctactcttttcttcatctttattttntttaactttntctttttcttctttttctttttcttttcctacctctatttcattttcttgggcttttatttttctttcttcgaccattatttgtttttcccccctctgactcattgcatcagttacctcattcttctttttaatagtagggtcctttaaaagagcatgctccttcaaagcaacaacattcttattcttagccaccat

SEQ ID NO: 144108 - DNA, 415 bp, Glycine max
  unsure (1)..(415): unsure at all n locations
acaaggcttctatttattttatttctaatngaancaattttatatgtttaaaaaagacctataataataataatgaaacaaaacccaacattatttcctatctcttattattattattattattattattattattattattattattattattattattattattattattattattatgtaggctttgttcttttatagtttcttagtttgttttctaattagaaaataaattgttgctttgttgagtggatgtgcaacttgaggtgcaatatcagcaaaagataactctgttttctttcattttctgtcattnttatcatgattttctttgtcttatatattacaaatgacagacatacatgacatttcaatgcatgtatagaatagacttagaaaccttatacccacaact

SEQ ID NO: 144109 - DNA, 384 bp, Glycine max
agcttatatgcaatgaggtactctgtctgtttttaacctcggcgggcgcctatgagtacatgacaagacaagccacacaatagtaagtcaagtcactctcactaggtaatatcatagggagaccagtcagggtcacagtgttttgcgagaattttccaaccatatgaaatcaacataagcttaaaggagcactcaaaccgtgtgacccccaaggcctacactccgaagagtccgtcagggcctctccctcctgattcaggtccaaccaagaaaatattttagcacacagactctatctatgaactgtacaaaacacatgacttctcaattgttctcaaaataaatttaactcgtcgtcctttaagggtcttatcattaactcgt

SEQ ID NO: 144110 - DNA, 377 bp, Glycine max
acagaaacttgagacttacaatccctctggttatacagaattggttggtattcatcatcagcatttctagtgaatttcagcatgaagaagtctccattgttagacatgcacaatggtaaaatcattgatttttcttcataaggacaaatattaagatgttaataactaaaatttattaattgaatccaagacttgtcatctccaaacttcctcatctgccacaagcaaagatgagtgttgctatcttgccaaacacacagcgagtctctaaaaactccaatatttgtatcaaaaaagcaaaaatcgtccggaagaaacagtgatctgcaagtctccttcttcaggtcaacagaaataattacgatttcagaatgaat

SEQ ID NO: 144111 - DNA, 426 bp, Glycine max
agcttaatcgcagaacttgtgatattctcttagaggaatatgagaactccaagatttacaaggagaaagtaaagaggatgattataggattcttaggaaagagttccatattggccaaaaagtgtttttgtttaactctcgccccaagcttattactggtaaacttcgatctagatgggatggatcgttcgttattactaacgttttccccatggtgcagttgagataaaaaatgaagttaccgacaaagtattcaaagtgaactgtcatcagctccagctttttcatgagagccctcaagtggaagagaagcttgtggtggacctctctttggtctagccaattttatgtgatgatgtaccttgaatgacgcttgaggagcttctatctcccttatttatatggtggctctttgacttcatatca

SEQ ID NO: 144112 - DNA, 416 bp, Glycine max
  unsure (1)..(416): unsure at all n locations
gctaccatcaagtgggaatcagatcacaatatcttaagtaagngctccttaaaccaccattaattttttttctttaccttctctttcattcttgattcttcatttttctccgngtatctcctcacatctcttgtgctaaatgttgttaaaatgattctttagagtttcaaccgattaaacttgctatagaagctagatttgattctctatggttcaaatttatttttcttgttcttgttcttgaaccatgaattgtgttgaatttaagttcctttgagttttttcttgttattttttgtggctgaaacctaaaccataaaattcttacaaaaatattaaagtagaagaaaacctcaaaaatcttgagtgacttgttcacctatttgagttttgtcataaaagtcatgtctagtcat

SEQ ID NO: 144113 - DNA, 261 bp, Glycine max
catgcagcatatgagccttggttcccaccttaaacatggctatacctcttaagatactaacactcgttggtcacaaagaatacgacctcgacaatccgccaagtgattctctgagtgaatcctgctcacttctacaatgaagaggatgattgaacccacgaatcactaatgcgttttccagattcatggtccgtgaattcagatctacactctcgacgcatgattctggattctacagatgactcattcaagagtggtctc

SEQ ID NO: 144114 - DNA, 394 bp, Glycine max
agatgatgacaaaagcttaaaggcgagaacacttgatgataacaaaagatggatgcaatctcaagaatcaaaagaatggagtttcaagaattgtaatcatagcacaacttcaaagaatgaagaggaaaagtgaattcaagaatcaagaatcaagtttcaagattcaagttccgtgaatcaagatcaagattcaagactcaagattcaagaatcaagagaagactcaatcaagataagtatcaaaatggtgttttccaaaactaagtagcacatgaatgtttcacataaccttttaccaaagagtttttactctctaggtatcgattaccagattattataattgattaccagtagcaaaatggttttcaaaaagctttcaactgaatttacaac

SEQ ID NO: 144115 - DNA, 388 bp, Glycine max
gagtgtgaagatgagcgcccaagtactactgatttgtccgacataccctcagaatgaccttgaaatgggagtggggaacccccggctttatcaacatgcataatgaaaccatacggctaaaaagctctatacttgtggcctaagctttagagtatacgctcagtataagcttcttgactggagtgattgaatttataattcaaagatcgtacttcttgcgtccgggggatccatgtattctaaggcataagcatggttagttccttttctgaaacggctcattcacacacaacttcaccggaagactaatacgcgggagccctctattatcatggtgcaggaaatgagccaaacggaagatgaatgtagacatgatgtggcactctct

SEQ ID NO: 144116 - DNA, 269 bp, Glycine max
  unsure (1)..(269): unsure at all n locations
caccgagcgcangncagtgtgctgagtctagtttttgtgcacaagagccaaccaatctttcacagttaatttgattaagcgtgggtccaataccatgcatctatttcttactttattcaatatcactgattgactactatcctcttaagacatcatatctgtctaactgatagatgaacctctctaattaattctgctcgaagcattctcagctcacatgggatatatatnnncaataaatcttaaaaaagaaacactcttaattatga

SEQ ID NO: 144117 - DNA, 309 bp, Glycine max
atctaatcctggttacaatgtaaagagcatgaatgttatgacattgattgagagggtgtcattataatgtaaatttggctgcctcctgaggaatactttgcacctatgtggcatggaatatacctttcaacagtgtgtgtatatgtgaatatatatatagcatggaaattccttgcttaaagttggataaagtgccctgcatattatgaatacatttatcctgaaaatgccttgcataatatgaatgtatataggactgtagtgcctcacaaatcgttggatgggtagcgtaaaacagttttccaatat

SEQ ID NO: 144118 - DNA, 350 bp, Glycine max
  unsure (1)..(350): unsure at all n locations
tgagccaaaatcctgactcaccatataccttgacccagtgtgagaatgcctatccttaccctcggaagcaaanaaaaggagaagagaatgaaatattccaatcgaagaggaagcatttaatggagagaaggaaaatttccaatcattgagaaagaaaagtataggaaatgaaattccccatctaagagtgggagaaagaaaatagaatagaaaagaaagaaaactcccaatcaaagaatgggagaaggaaaaaaagaagtataataaaagaaagctcctggtctaagaaacctatagaaatgtgcagaaaggtcttttgaccggacgatatctgaacaatacagaattgt

SEQ ID NO: 144119 - DNA, 369 bp, Glycine max
caatgaaaatccaacattcgacatggtccgctggtgtctaacacctcacagggacatccaccagtataatcttaagcaccactgacacatttcgagaggaaacatgagacatattcccggatcattggtgatccaaatgacaaagtccaaactaggaactctctgcagcatacaacattactctcatggactgagccaaaccacatagatgatgctatgtctgatgaacacttggtcacagcaatggaagaagagctacaacagtttcagaagaacgatgtttggaagctttagaactccccaaacgaaatacttatgttggagcaaagtgagtgttcataaactagctgtaccatacaggttaagtat

SEQ ID NO: 144120 - DNA, 381 bp, Glycine max
atgagcccatttttctctttgtttagcctacaaacttttgttatttcgatgatggcgacaatatgctcaaactttggatctaatgatctacgaacttttctccataatctttagatcatcaatattttcaccatttctcttaatatgattggtgatttttaaaattctagagaaatagtcggagatgacttcattttatttcatatgaaacgtttcaaacttggctcttaatgtttgaagacataccttcttgactggattcgctcccttgtatgcgggctgaagcttctcccatgcttcttttgtcgactttccttttcaaaccttctcaaaagcattgtcatctaatccttgatagaatagatagaaagccttcttgtc

SEQ ID NO: 144121 - DNA, 374 bp, Glycine max
  unsure (1)..(374): unsure at all n locations
ctcaagctgttatgtgagaggatgtgactctccacatgtgaatttgttttttaacgnnccaagacactggtaatcgattacttaaacattgcaatcgattacagctttttgaaattaattggaacgttgtaaattcagttgaaaggatgttgaaaaacatttttgctactggtaatcgattacaattttcatggtatcgattaccagagaagtaaatctctttggttaacaagtgttgagaaactttttaatacttatcttgggatacttaatgttgtgataaactttttcagtcatccactcactcagtgtgctactcaatgttgtgaataacactttatacttatcttgattgagacttctctcgattctga

SEQ ID NO: 144122 - DNA, 306 bp, Glycine max
atactaatatgacatggtaactttccaaagaaactgggccacgaagcacaatggttgaaagaatatcacaagatcctgctatgttaatacaaattcatttcaatcattaacacccggacagaattactataaacagtctatattgtcactgaaaaaaagaaaaccactgttgcggagtcaacaaaaatatggagtctcaatttccccttactattttctttccacaactataggcctctaatgcttacaatggcatgggtgacaggagatcctgtatggttcatcacgtaggtgcgagttaattca

SEQ ID NO: 144123 - DNA, 394 bp, Glycine max
aagcttcaaatccaaacatcattcccctatttcggattatatatattccaagagcccaatctgcatattttcctcctttgaaaacccaccgattgaaatacattaaaacttcatcaaatgacagattcatcaacgaagcgcataggatcttccttcaccaccgctactgctggccaccaccgtcactaactctctggagcacccacaacaccaataccttcttccctttaattaccttgatcatgtacctagttttcttcatatgattaacaccaattgtactcttcccaattttctcaatcagtcatttgagaccctaaagaccgagaccttgctttcttagatgatgatacattacaatgatatcaattgtattgaactctggttaactaaa

SEQ ID NO: 144124 - DNA, 349 bp, Glycine max
aactcaagctctcatctcgcatatatagagctcacgaatatttgatcgtttttaagagtggaagtgcgcgatattcactcgtttgaagatataacacatgcttgctttatcgtgcgtgcttatagcgaagatagagacacataaatgtacactccttttctagcagtgatcactgatgcttcactactagtcaataattccctcatcatagcactattcttaggaatacgctcaccgggctttataacttatacgtgacatctcgattatgagacaacttctaatatgtgcatggatgatcagacatatgaaacaattgagagaatcattactttcatagcattgtacg

SEQ ID NO: 144125 - DNA, 271 bp, Glycine max
atgttactcaaggatgacagagggactttccactactctcaccaccctctttttgcatcttatagagaatctcggctgtgctaatgctacatctctcagaactggcagtagttggatttaggactaccgttctattctactgacaacgtgaaaaagtggattggtgaacaggttcaacgatatgcttatcttacaataacgtccgatacgctttctgccgacagtatagatgtttgcgtgttaataacctctagataagaacatgcacact

SEQ ID NO: 144126 - DNA, 397 bp, Glycine max
tcactggccacctacctggcttgttcattgatgtggtctactatcctgcctacttctgcggaagaacttgccggttccccgatttgtgttgcctctgccagctgctgtaactcatggatgcttgagggtgtctgtgctagacagtcccaccatatcgcgcacccaagatatagcattggtgagattaagctgagaacttccgtgacgtgctgtccttgccctgaccccgcccgagtgctctgttgcccctggtgtacctgtagctctctggtcttgacccaccaccagcttattctctcgtaatgccccataagcctctctcgggtgacctaagcatttggtacttcgatcttttattaggttggcaccaagtaaataaggagctcaagaattcatt

SEQ ID NO: 144127 - DNA, 418 bp, Glycine max
  unsure (1)..(418): unsure at all n locations
ctggattaattcagcctaactattatcgaagtttagtattttaggctacaacatagaacacaagaacatgattaattggagaaatatcctcatgtgcatcaacttgtttgtttgaaagacccaatgccttttacctattgttgtcaaacttttacttagttgcatttattgttttactataggattagtttatntctgttttaaccatcaattatcaatgtgtgtttcaacaatgctttacttctgaacaaaactttgtctaataagttccctgtgttcgatactctgatcattccattttaattttaaatacttgacgacccatggcactttctggtgaatcggattttccttgaacatatatgttggagaaaaattggacaaaaagttaccatatgggtaatcttacaaaatgctt

SEQ ID NO: 144128 - DNA, 102 bp, Glycine max
aacagggatggggctatgcccttgggatgtgaaactgatggacctcggcgcccgcactatacccatggaagggttccccacaaaactacaagcttgatatga

SEQ ID NO: 144129 - DNA, 385 bp, Glycine max
  unsure (1)..(385): unsure at all n locations
gttagttaataactaacttgtgttaattgtgttagcttgtgtgtgtattcattccatatatatatggagttgatgtaatccaatttatagagtttcaataccattcattcttcatcattctctctaaacattgtgtgagtaaatcttctatcacaacttaggtcctaaatctttctagattgttcttaataatactcttatacttttccaatatatttaacttctacataaatcatgagcttctctatgaccttcttttctattctagaaatttgtatcatattntaacacacacatatatgtcatataattatatggattatactttcttaatataatctgttatatgacattataattaatccatgcttttacaccctcggca

SEQ ID NO: 144130 - DNA, 422 bp, Glycine max
  unsure (1)..(422): unsure at all n locations
atatccagccttgtcattaaccagacttaataccctcgacaacagtgtcaaggaattctttttccccggatacaaaggcttctttgaatcactttgcaatgtatcatacataggggcatgtgcttgctaaaaagactcttgtccaaggtcacgaatcatatcctccaagcgatctcccatttcttcatcaaacggttcagattgggactcactgtacatgtctgtcaattcaccatgccatatccacgtggtgtaattcttcttaatcccatcacacaatagatgctcccgtatgttcgccagtatttgtcatcttccgttcaaacaattgatgcaaggacaataatattttccatcctcatccggttgacttctttcanaggcaaattgcaagaactctttgattccttcctcgtatgtag

SEQ ID NO: 144131 - DNA, 359 bp, Glycine max
  unsure (1)..(359): unsure at all n locations
caacctgctggaggaatctgctcgatgtctttgtgggcctgaangctanctgcacccccatttttactaaaaacacccctgccctgtgttggagattctatattcgtgaagttacggaaacatacgaatatcgtaacgatacttattttcgttccgtaatgttacagaaccctgcggattacataatcctcacccttttgacttacggaatgttacggaacctcactatttgtgccacgatgctaccttttgatttcccgcgcgaaaagaaccgtacggattgcgcatcaatattttcttgtgagtggcggcacggcacgaaattgcacaaattgcctaatgatgggtgcccagcacct

SEQ ID NO: 144132 - DNA, 382 bp, Glycine max
  unsure (1)..(382): unsure at all n locations
gggnntttgagaagccttcatgcatataatcactctaatagtccataatcatgcataatcttacatgaatttattcactttgaacctttacatgattatgttttatcttgatcaaaatttatattgtttgtcatcatcaaaaaaggggagattattaagtttgaacggtccactatgtcaaaattggacaatccatccgcaccaaatgttttgatgataacaatgatataaattttttatggactaatagtatattcttaagtcaaacaacacttactttatatgagttcacattaaaaaaatttatcctatttctcatattagtaattgtccaaaggtcacaggaacttgtgtttattcatctttatccaacgtccaacat

SEQ ID NO: 144133 - DNA, 283 bp, Glycine max
gctgcagcttgtcttttattaagagaattcggactcatacgtttctaaaaccttggggagatccaaggctccgatcatccattgcatactcatgttgtggtgacatacctcaccgcgcttatttctttaggaaattcatcattactaagaaaacaccaagggccctctataacactcgatccagaaaaatggataatgaataaggcgtgcaggaataaatgaatgccgatctatcggtcttaaaagaacaaatggcttccatctcggaggtcatgtttaaact

SEQ ID NO: 144134 - DNA, 447 bp, Glycine max
  unsure (1)..(447): unsure at all n locations
gacaccaaaaactcagctgtgcacataaatcactcctacattttatctctagcatgcattgtattgtggnctcgtcctttgtcaccggaagccggaaggtccatatcaccttcttaattgtacacatggggcactgcgcccccaaatgcgcaagtaagaagagataatttttcgggctctcgtgtcccgaaaatgcattcatattcatgcatcgcataagcatcgcttcataacatcataatggacatatcctgcatttgtccgttatcatatttcagcctcacattttttgcatgaatcatggcatcatcatgcatatgcgttcaacacacttnttgatctgcaaaactgcgtaccatttgttttcatgtttgctcatcctngcgttttcctctaccaaacacaaacaaaaaaagggaagcgtgaaacttattcttagttcatgtg

SEQ ID NO: 144135 - DNA, 381 bp, Glycine max
gcttctacagctagatccaccaatttttccacatttggaaagaggactcctctacagaccaacaatgcgagaatgcctatgaacggtgcccactcgcctctacctaccaaggttcttgctttttcctccaaacatttcctcggtattccaaccaccccatttctgacttgctttccatagtctaattcatgcgccgagatttggactatctttgaaattctagctaatgagggatggaaccctgaaaaaaggtatggtctccttccccctagaggaaatcctaggatctcttcaaattcttccaccatgggtgacagctggaagtccccaaaggtaaagcatctcaacaactgatcataatactgcgcgagggaggcaatg

SEQ ID NO: 144136 - DNA, 437 bp, Glycine max
  unsure (1)..(437): unsure at all n locations
tgaaccttgaatcttgattcttgattcttgaaatcaaattttctcttgaaagttgaaatgttcttgattcaatcttgaacatcttgatctcattctttgattcttgagatcatcatctttgttatcataaagtgttcttgacctttgagctttttgtcattacctttgttatcatcaaaacttctttgaatcaatctggattcatcatgaagcttgctcttacataactgttagggacgaattctccataacctangacaagagaatggcttctaaatcagaggaaacaacccatttttaatactattaatttcgtattctagtttacttgttctttaaatcacaaaacaaacaacccccccaattgttactgttactgcaagtatattatgaacatttggtttatcattgctcgttgggaaacaacctangatcac

SEQ ID NO: 144137 - DNA, 305 bp, Glycine max
gcttagaaagctacgtcatcgtctaggttatataatatcttccatagatagtcatggaggcatgacattcctacaaaataaaccctcattgagagtcgatgatgatggaggggtgattatagaagtagttaagctaaagcagttaagggaactggcagggctggattttagggcaaagcacgataagaccctatgttccttaataaataacatgcaactcttggaggtactatgtattgctacaactggtggaagtgaagtaattgacttgcacattacgtcccctatgcctacatttagaaatc

SEQ ID NO: 144138 - DNA, 366 bp, Glycine max
  unsure (1)..(366): unsure at all n locations
ngcatgtgaacgttaaannattgaatgttggggtttaagttttctctataaaaaaaatgcttgaacctttattgtttacgcttgcatttctccttactgagttctctttcttcttgagtgtgagcttctgcttgtgcttgctttgtgctccttggttcaaatttggtgcttccttccttcaagtgtgtgcccttatccttcctttctagtgagtgtttttaaaataaataaaatttatatattctgttaataaatattataagtttaagttacttagtattaccaattatttaaagtaagttagtagtgaaatagtaggtaagttcctattaccaaaaattctaaattaaagttagttagtatcgg

SEQ ID NO: 144139 - DNA, 386 bp, Glycine max
atccttaagtcacccgcagcatgcaagctctagaaaggtgatgcagcgtctctaatcttattacaccaagattaggcgatgctcatgaatttcttatacctatactctatacataaacgtataagtgatatttttatgtgtaacggtctactgtacttctgcttccaaatataaaagttctgtgacaaaaagactgaatagacgggcctttagccagaaatacgatgctgtcggggctcaacaccaagaccattggagaaggttcttggcttgcagatgttgtgggctctgtgtcatgaagtgagtttgggagacttgctgagttagaataattagtcactgcggagggcctaataggggcaagatctattaccatattggtgttg

SEQ ID NO: 144140 - DNA, 352 bp, Glycine max
  unsure (1)..(352): unsure at all n locations
gcctattgtngttgaggatgaattctccagaattacctgggttaactttatcagagagaaatcacaaacctttgaagtattcaaagagttgagtctaagacttaaagagagaaagactgtgtcatcaagagaatcacgagtgaccatggcagagaatttgaaaacagcaggttcactgaattctgcacatctgaaggcatcactcatgagttctctgcagccattacaccacaacagaatgggatagttgagaggaanaacaggaccttgcaagaggctgctcgggtcatgcttcatgccacagaactttcctattatctctgggctgaagccctgaacacaacatgttaca

SEQ ID NO: 144141 - DNA, 375 bp, Glycine max
atccttaaagcacctgctgcatgcaagcttaaggaatatgccctggtattaatttgtaaataggggctttatacattcaagtaaagataatgttgcttgatttgacaagggatgatttgcatttgggaatcgcatggctagcacccttagggaacatgttgttcgattgggtcaatcaaatcatgaagttcaaatggcaggaccaatgggtgagaatacaacgtgaagggtggcacgatgaaggacatatggcattgtcatcattattgagatgatgcaagctatcaatagaagggttgctatggtccatagaagactctctaccgtaggtacatagtatgaaggagttgtgtcaaacgcgagaacaccaattac

SEQ ID NO: 144142 - DNA, 437 bp, Glycine max
  unsure (1)..(437): unsure at all n locations
ctttattgagaagtactgcacgcagagacaggtccacggttatgcaccacaggccgcggacgcgccgccacctcatcaggctggtccagccggatcatttgacacggagcagtatttgcggcatttggttcgccagcaggcagccaaccaccgggcacatgtacagacccatgattgtctttatcagatgagtctcagcctacagagccagggctttacttcttttccgtgccctactccgaaccagttcagggcagaggtcgcatggcctggagattggcctgaggccccaacaggagagacaccagcaggggcaccagcagaggctcccgacgaggcagatgaggcttgcgaggacgaagagatgaccgatttacttgatttcttaggagggagcggngccacatgattgggagatctctcgacccatacttctt

SEQ ID NO: 144143 - DNA, 258 bp, Glycine max
  unsure (1)..(258): unsure at all n locations
tctcgtcccggatccttaagtcacctgcngcatgcagcttgaatcgactcgttggcttgtttccataccagaggaatttctaaataacttccagattacctctgttctcaaaattttgaatggccatcatagcctataataaggacttgggacacgaaattcctaagaaacagttttatgaactagaatgtcttatcctctcacatagattcctcggtcacacactggcatattcgataaagaatgtaaatgatcttc

SEQ ID NO: 144144 - DNA, 436 bp, Glycine max
  unsure (1)..(436): unsure at all n locations
tctagtcgtccatagaccttctgattggtacggttcagttttcgttgcatctgngcattcatcgcatccagtaacagacgttgagcgccgtccaactgatgatactcgtcaccaccaccacctgctccagccataatgtaacacgaaaaaaaaatgtgcaataaaaattattaaggtttcaggacctcacaacactctactcacgtgtttaactcttagatggtagtacactcgtgtgtaatgctctcaataggcttttgtgtaatgtattccctcttgccttttaccactcgagtttcctcttaagctcctggatggaccaaattagacgcacaaggtcatatataataaaaggaaagaccatataatgatcacaaacagatttgagttggataacatgtgaaccttaatttgggtaacagatatgatgacaaat

SEQ ID NO: 144145 - DNA, 207 bp, Glycine max
  unsure (1)..(207): unsure at all n locations
accagcctaaccttcccctgtattggggtgactcacaccggccccaagcaagttctcacgcgactggcgctgaacgatgctacatgactcttttaactcccacctgtgagactctctctagaagcatgatataattacctatggagcagcattgatctcatcgtactcgaaccattanatgcgaaagaggttacgtccactgacctt

SEQ ID NO: 144146 - DNA, 256 bp, Glycine max
accctacaatccatccctgttatgaggtcattcaatctctgctctctatcacagtcctaaggcaacagtacatttcccaatgtctaagtcacctaattgttcacataaatgggtgatcagaccaagaacatgccgaaattaacatctgaagaagcatcgatcacataaaacacaattaataacagactcaaaggattacatcacgtattccttagaaattcccaacaacggtgttttgccatccatttcagaaaaa

SEQ ID NO: 144147 - DNA, 357 bp, Glycine max
tctcgcctgataacaaacttatatctcagaatatatagagtatcctacataatctctcacgatttattaatctctcatatcttatgatctgttatcatatttaattacgatctttgcaataataggcatatcgcatgatgtaaataggaatgctatctcctgtatacacttgcatacatagcatcgaatctatataaaacggactttgctatgtagttcaaacaaacggattgagaatctcttgcatctgttatcctctccttcaacagttgaatatcagcacaagagagatacgctcgtgcattatatgcgcttgaagcttagcgacagttagctcacgacatatgagccaataat

SEQ ID NO: 144148 - DNA, 270 bp, Glycine max
  unsure (1)..(270): unsure at all n locations
cgcaagctggttcancaggtgtttgaccttctttgtatgagagaggatcaacatcaatgcctatgagatgtaccttccagattagtatgttgtcggcaccacttttaacatttctgatttaaatgcttttgcacgtggagtatataattgaggaggatgaactaatcgatttgaggtcgaatcctcttcctggggaggggaagacgctatcctccctctgaaggttccaatcattacatcctttaccaacaggctccaataagattgggc

SEQ ID NO: 144149 - DNA, 247 bp, Glycine max
ggaaggccaaaaagcatgaccacacctgccaccctaccatgagtgggagacacatcacacaaagtagccaacacgcgacaaatatgacaatcgaaaaagaagggacatagagatgcaggaatgataacaaaaagaatgagcaatcacagctaacacaatggaaggcgaaacaaatatagacgggaaggaagagataacaccggaggagatgtaataaatggtgcgaataccaaaaaaaagcgacctt

SEQ ID NO: 144150 - DNA, 56 bp, Glycine max
  unsure (1)..(56): unsure at all n locations
ngaaattgaccaacggaagctctctagaatctcaaatggtcttttcttatcacacg

SEQ ID NO: 144151 - DNA, 317 bp, Glycine max
agcttctagccaaatggacttaccttgaattaattcctttgatagcccttttgagccttgtttccctttcattgatttgaagctcacttacagccttaaatgataaaccatgatatcaccatatccttatagaatatcggagctttggaattgttttgggaataagtgtggggggttttttgtctcattggataacttgttttgttggctatgcttcgtgatgtattttgggccatacttgatgtacattggatattggctaaatgtaggacatgctgaatgaaatgttgtttctcaaaggctatagagtaataaaa

SEQ ID NO: 144152 - DNA, 430 bp, Glycine max
  unsure (1)..(430): unsure at all n locations
cgtgttctcttctaaacaacaataaactaagcttctgtttgagctagtatcatgtgtggttattagttaaagaaagaaaagaagaaaagtgcttagaaacagtcactcacaacttcaaatcttttgattattaagatcttttgtgataagtgagttgtgttactctcttgagttcaaaaagtcacctcattcactcaagcaagggtttgtcaaaatgattgatcaggttgtatctatctntaactctagttattcatgtatggttttacacatcacttatatggcatgaatttctgaaggcatgttataataggtgtttctagtttgggcttaagggaggtttctcctatgttcgttttcacagatgacctcagcgttgggtgctttagtctttattatctatggtgggaattgagattgcttgtagaat

SEQ ID NO: 144153 - DNA, 407 bp, Glycine max
  unsure (1)..(407): unsure at all n locations
gcctgcatgcaagcttttcgcaaagcttactgtaaaatcttggacctagccatgatagaagtctctacaaaggccatcgcctccctcgcctaatttatgattagccgttgaggtgcttcacctttggggacttccaactatcacccatggtggaagaattagaagagatcctangatgccctctacggggaaggaagccataccttttcacagggttctatccctcattagctagaatttccaagatagtccaaatctcggcgcaggaattataccacacgaagcaagtcgaaaatggggtggtcggaataccgacacaatatttagaggttaaagcacgaatctttgcagagtaaagcaagtgggtccagttcatagatattctcgcattggtgatttgtcggggg

SEQ ID NO: 144154 - DNA, 280 bp, Glycine max
atcaagaaacgcgcacacgcactgtttccgaagcggtcactcacataaatatggattctccccctgtgaatgtgcgtttatgcttgactcgagatgcagtccataactgatgtgagggctcgatttaatccctatgtctctcctcgcttggcatgaacaaaaagccaaagtgcatggcaaatataggacatacataaagtacttaatcatacgagagaattgaaaacattccaatagaataactctaccattgatcaattttagacagataattcttcat

SEQ ID NO: 144155 - DNA, 245 bp, Glycine max
  unsure (1)..(245): unsure at all n locations
acacataaatctcagcttgaccgagggagaggangatggtgtgcgctagaggctttttttaatgcgagaggaaaaggataaatgtagcacttcaaagcgtgtcgtgattacactctcattcaaccaagttggtaccagagatgcacactgatctatttatgacactcgccccttactaaatgggttttggtacctcatgtacattatctggatagccaccaggaattttccaagatgagttaatc

SEQ ID NO: 144156 - DNA, 147 bp, Glycine max
gtctcccccccctccatctcagccacccccccccccccccccccccccccgaaccctcaaccttcctgcccccgcccttccacccccccgcccctcacccactaccgcaccccacacccccccccccccccccctctcccccccccc

SEQ ID NO: 144157 - DNA, 445 bp, Glycine max
agcttattaaactctatgaaacacacacttattttcattagaacacagaatcacagaaatgaaaatttcaactcacccttaagtaggggtggcaattggatggttagtaaaccaacctaaatatcaaatgaagattgttagtggatactaaatgcactgattatcaaatgaataacaaatgaagattgttagtggatactaaatgcactgatggattataaattatccatccataatgatccaatcctaaatccgtccagtacatccatatgaaaacactattgaatgatatatgataagctgattggtgttcttgaatgacaaatctcatcaaatatagaagtgttctataaggataaggattaacatctttatcaaaactatcaccaaaatatttatgatgaatgaaactgaaactatcattcatattgaaataaattaccac

SEQ ID NO: 144158 - DNA, 393 bp, Glycine max
attagcatagatcataaatcacctacggattctgattcagattccaatccccatccccatgatgtcatttacgggttattattggtattttataagaatcatctaaaattctaacacgagataaggatccctacaattctaacaagaaaaaggtttaaattactatttacaccttaacatcctccatctacaccccactttaccaaaaaacaccatctatatacatgacctccaattagcattgaaaccctttaaacattcaacaacacataaataaatcattccattttaacaattagcttaataaataacatatattaaatataattatctattgcgataattatttcacacattacacaaaaaacataatattctataaactaagctata

SEQ ID NO: 144159 - DNA, 343 bp, Glycine max
agctcgtacccgtccttctgattctatttgttcatttctgactttatggcttgagatgaagttcaacagattggacctcttgctagtttttattgatgaacatcttaagcacttgcgctcgaatgaaacaaaagttctgagactgaggtttaagctgctttccttgatatatgtcgtatgcctaacttcatctaatagaacaggttacctttcattcttctttttgaacaactgcttgctttgtgaaagacaagtgattacggcatttttgttcatccttttatcatgcaatcaatgcaaactgtaaatttgggggagttcttagtcgacgaatacgactaac

SEQ ID NO: 144160 - DNA, 430 bp, Glycine max
tcaagagacatcccctcgaccacattattggtgatatctttataagggtaacaactagacattctcttaaagatatatgcaataatatggccttagtatctatgattgaacctaacaatataaaagaagccatagaagatgataactggatcaattccatgcaagaagaactgaaccaatttgaaagaaacaatgtgtggacattagtacaaaaacctgaaaattatcctgtcataaggacaaaatgggtctttagaaataaactagatgaacatggtataattattagaagcaaagccaagttagtagcaaaagggtataatccagaagaacgaatagactatgaagaaacatatgctcctgttgcaagaataaaagccattagaatgcttttggcatatgcatccataatggatttacaccttatcaa

SEQ ID NO: 144161 - DNA, 363 bp, Glycine max
tgtgctcaccacacatcatcacgggtgctggtgctactagtttccactgttttttgtgttaccatacgtaatatcattgtggttggtcatgtgtagaatcaaggttatttgtttaagatatttaaagtctccttttatatagatgctgtaatatgggtccatatagtttaactcacggctcttattacttctaaattaactgtacctagcttagaactgtggttaatatcgccactctgggatgtaatatccgaatatgtactactactatctatgcttaaatagggcttcttttatcctaaaaaaatgaatgtagactgacttggcctttttcatatagaatattcttttcatgttagttct

SEQ ID NO: 144162 - DNA, 354 bp, Glycine max
  unsure (1)..(354): unsure at all n locations
agcttgcttctacaagaaacgaacgtgttttccgaaattcactaatgtgcgctaagcgcacgagcacaaacaaggccacctatttaagcctgaaatcacgattttagagagagtttcgactgggattcagagctttgcatgtctagagtttctagagagagaccccttctcgtgtcatcccatcattatcgcctttgcaagattcaaagtctcatcacttcaatccttatgacctgcggcttcctgtttctgatttgaatacctccagtctggctcctcgtttctatcaccgggatggtggccctccagactacactattgatttgaatccccctgtccttttcgnttatttgg

SEQ ID NO: 144163 - DNA, 411 bp, Glycine max
  unsure (1)..(411): unsure at all n locations
tgctgaagaaggagcagtttctgtagagacttataatgcttcaatgaatgctttaagagagggggctaaaagggtaggtattatgaaaaaaaatgttgcaaaagtcacacctccaaacactcagggtaatggaagctgcctgaaagaccatagcaagaatagcccttcatcaatttctgatgtcatcccatcattatggccttggcaagattcagtgtctcatcacttcaatcttaatgacctgnggcttcctgttactgatttgaatacccctagtatggctcctgtttctattcaccgggatggtggccctccagataacactattgatttgaatcacccttgtaattattagtttatttggttcagatatactggtcattgctttaattgactatcatttatcgatgc

SEQ ID NO: 144164 - DNA, 388 bp, Glycine max
  unsure (1)..(388): unsure at all n locations
agctngatcaaaacaaagtctatacatttcactccactcaattcatacaactctcattcatttcaaacacgaccattcatttcaaacaagacacaccactgaaacatgagacaaaactttcactgttcaaacaaactttttgttcaagcaatcaacactaaaacaacagaaatttaaatgactgaaaattaaataactgataaagcatagactaaataactagcatgaactaaataacggataaaacaaaatggtcataatctgcgaaaattctaaaactctgcagaatttaaaactcctaatcatcttgctgctaatcctctgcatgcgaattcagacccaacaccggagcagctggtaggtcctgaaaaatacgttactctaactg

SEQ ID NO: 144165 - DNA, 449 bp, Glycine max
  unsure (1)..(449): unsure at all n locations
ntgcttctacaactttctagcaaaattcgctagaaacgagacaaccaccccagactcatgtaacctgtatgttgatagtgtgtccaacgtaaaaggaagtagggcagggatcctcctcgaaggacctgacaatatcaccatagagcaagcccttaagctcaacttcaaagcctcaaacaatcaggtgtcgcaacctacccttcggcgggagggcgacgcgagactcacgggtgtgtcttccatgggaggaaaatgtgcggagtcgccaccaacgtttatttgaggaaaacgtcggaaaaaccagaaaaggtgtggtctacgaactttaagcgtgaaaggttcgggagttgtttttacgcacggngaaggtattagcacctcacacgtccgtcacaagggacggcagccttcaatcaagtgtgcacatatgactttcacaattatgtatt

SEQ ID NO: 144166 - DNA, 199 bp, Glycine max
agagggactggaaaagaggaaaaaattttatacaaaggaagtaggatgaagcaataagaagagaagggaaaaagtggagaaagagggagatggaagaagaaaggaaaaaaagtggaaaggaaaaagaagagagaaagacaagaagggaaagaagaaaagaagggatagatagagggacgggaaaaaaagaaggaaagaa

SEQ ID NO: 144167 - DNA, 231 bp, Glycine max
cactactgacgcgaacacaaataagaagaactgttcgttgtgattgcacaatgattaacgctcacgtatcttatgagcgaatggatacctttaatactcagactttcctctcaagataatcgaagcgtttcaagaagaagtctcaacactccaataatggtcacacagatattttcccgaaagaactcggatatgagcgcttcaattcatacaacacgtgttcaaggatat

SEQ ID NO: 144168 - DNA, 419 bp, Glycine max
ttaaatctcagcttcaatggatgagagagaccatttatggacacatattattgtcttgatggacgagttagctgtttgctgaaagtgcaaatgaaacttggatcaacgcttatgcgagacatcaaccaacatgttagccatcgtcaacaggtaccaacaagaattatatctagccaccgtccaccggctcggattggtggacgagtatgcccgactgtgcgcggacaaggaggctccaggaagggtgatcgactcgttacgtgaagcaatgacagatatggatggactgattggctcttaccttgaacgggagttaagaacttccctgaatgctagcctaggccaaagcaatggcggacgcctactcctgccccgaggagattcactgacttctcagctattgtcagatatgataactt

SEQ ID NO: 144169 - DNA, 360 bp, Glycine max
aaattacttgtgaatgagagccatgacggtgggctcatgggccactttgggataaacattacccttgtcttactcaaagaaaagtttattggccccatatgaagaaagatgtccataagcattgcactatgtgtgtggcttgtttacaagccaagtctatggtgatgcctcatgggctatacacacccttacccattccatctgcaccttgggtagacattagtatggactctgtccttgggctccctagaagccacagaggtgtagactctatctttgtagtggtggataggattagcgagatggcacactttataccatgccacaacgtggatgatgcttgccatatctcaaaactct

SEQ ID NO: 144170 - DNA, 445 bp, Glycine max
agcttgtacgcacatcgttcacgcatatgatatccactccacaaggttcgaagtagaggagaccttcaaccctataactcagcgtggtggacaaaagtgggcagataacttgaatggtcatcattgtcaatgcggaaggtattatgtgcttcactatccatgtccacacattattgcaacttcgtgagcatgaactactaccaatatatagatgttgtctacacaaatgagcacatcttaaaagcttacttcgcacaatggtggtctcttgggaatgaagcggctatttcttcttatgatgacgcatggacacttatccctaacccaactacaattcgtgcgaaaggtcggccaaaatcaacaaggataaggaacgacatggattggctcgaaccatctgagcaccgacaaaaatgtagtagatgtggagcagaatggcacaata

SEQ ID NO: 144171 - DNA, 422 bp, Glycine max
actacaaattacctgaagcccataattgctgaaatgacatttatccaaacagaaaacccatgacattaccaaaaatgtcaaatgatgttctctagttgcaacccaaacactttaatttcttaactcagcaaaaaggtcataatttaaacaaaacaggaattttctttccacataaccttacatactaagaatgagttttcaacgtttagttttaccactaaagagtagttcatgctgagctgaaacttactgtcatagtacccccaccctgatatgatgacaagtccacaaattgtaacatatcccgttgataaggttaatgacgtgttataaaatataaatccaaaatacatatctttgaattcaggattgctttagtaacatttgatttaccggccaattgtaacagtaaaatcaacacc

SEQ ID NO: 144172 - DNA, 355 bp, Glycine max
atgctgcgcttaaaacaaaaatggcgaacaatctcttccaatatacacaaacatcaatgtgaattgagagcaaactcatgctcatacttccttacgagcattcctcccacaagatattctttttactataaaacatgcacccatgcacaatcaaggcgccttcgttacctagattatttatatgtacttccaaggtgtattggctacctacatcacctgcacttccttggctaaatttacatacatgcatactcaaagcatcttggcttccaaaaattgcacacgtgcacattctggatgtttaatacctatgcctatacacaacttgtgatgaatattggcatttacacaataa

SEQ ID NO: 144173 - DNA, 459 bp, Glycine max
atcctcagagtcacctgatgcatgcagcttgtgatgcctcaatgcacagggtatcatttgctcggagcttagaaatcgtgctaagaatagatactaatttcctctatcacaaattggctttagacccctcggaaaagccaatcatctataaaaggagaaagctctgggaggaaaaaatgatattcaatgctgaccaaacaaaaaagctgatattacatttcagagaaattcagtatccgacctatctggtgaatgtggcgatggagaagaaatcaaaatggagtggagaatgtacgtcgacttaacaaattaaaacgaagcttgccctacagatttgtatactctaccaaacatcaaacgtctagccaatatggcctcgggttaccaattacttaatttcatggatgcctacttggcggataatcgaatcaagatgcatcccatggatgacgacaaaac

SEQ ID NO: 144174 - DNA, 449 bp, Glycine max
tatgtgtcctccattggccacataagtgataccactaacattgttagtggtttacgattagaataattttaaaaaaaatatagaaaactataaatagatttaccccaaatttgacgaactaaaactatgtttaattctttattgtttaatccccaatctattaagtaattattcattaatgacgttgcactctttcattcactattaaaacactataaaagagttaatgttgtattgtatctaaattgtacaaaattgtatataatttaaaagttaactaatatttctccatttaatttacaatgtaaatattaaaacgtaagtatattgtagttaaaataaaacacttgcatgaatgtataatttattcaaaattgtatatatgatcatcataataatattacataatgcaatgactaaatttattatattttgtgacgaagagagat

SEQ ID NO: 144175 - DNA, 342 bp, Glycine max
atacatggagcatattgtttatgtctagggcatgggctcaaaccctgagaaaatacagaaccatgcttactcggccaccctcttaatcacatcaaatttatgggattcttgcgttgacaggatactatcgtcattttattggaggatatgcttatatagcaagccctcttacagccttattgcacaaggaccagttccattggagctcccacgcagaaacaacctttttaaagctgaaacaaattatgacttacgccaccggcttggctctggtgaactacacttgcccttttatacttgaaacggatgcatctgggtccaccataggagcggttctttttt

SEQ ID NO: 144176 - DNA, 232 bp, Glycine max
acacagaggtagggatgatactccacctataaaacctaagatcactctatacctataatccttttgacagctaatgttttaggtgctaccttgccctgttatgtcgctctaatgcataggctctctaacatatccctatttatcaccaactctagctcttaagggctttctatcctcgaaggctcgcttatcgccactttcgagctaagagcgagtatgtgatcttctactg

SEQ ID NO: 144177 - DNA, 444 bp, Glycine max
  unsure (1)..(444): unsure at all n locations
aagcttctatagggagactcagcagcagattcctcagaactgtgtctgtctttaagctctcataagggaatttcccatgaacaanactgtcaacaaaatttcaagagtcaatgtcaccatttcaatttcaaaatagacacaacgattgaagaaattcactaattatccatgtgaaagagatgggggaaaaagaaagatgcaaaagtacctgtaatattcttcatagtcaatgtcatacccaatagcttgaatggaacaaagtgaaacatatataagacaataacataattcttagtattctcagaatgtaaccatgattaaaacttatntaagagacagtggtgtaaaacaaggaaatgatacccttagaccagccatagtnagttcatagttactgtaaaggaggttgaccaattcaccagtttaccttggtctgcgccagct

SEQ ID NO: 144178 - DNA, 388 bp, Glycine max
  unsure (1)..(388): unsure at all n locations
agcttatattcaagagagagctgagacattcatgggttacattgatgtttacaatgtgcaaagaaaaccatggcatgaaaaaggttgtatgattgtgattaaaaaaaaatgaacaggtgtgtctcacattcacgcaaaagggttgaagcttatgttcaagatggtgtaaagaaaattatggattacattgaggtttacaatgtgcacagaaaatcgcgggcatggaaaaggttgtatgatttacaataaaggaaaaggtgtggcttgcattcactcgaaagtaaaaatattcacgcacttgttgtgagcttgagacaggaaatgctaatgtggtcaacccttttaaccttaatgcggntcaattaattgcactaatcatatcttttgt

SEQ ID NO: 144179 - DNA, 443 bp, Glycine max
tcttatccaaggctcatcttggtggcgaagctctttctttcttgacttattcccttgtggatggtgcctcctctctcctcttctccttttccttctgctgcatctccatggtggaaaatcaccattgaaggacctcaactaagctcaaagatccagcctccatagaagctccacaagcaagcttccatcaagtggcatcagagcacaagagcttcaagtaggtgctccttaaaccttcattaatttttttgctttaccttctcttccattgttgtttcttcattttttctccatgtatctcctcacatgtcttgtgctaaatgttgttaacatgattctttagagtttccaccgattaaacttgctatagaagctagatttgattttctatggttcaaatttcttgttcttgttcttgaaccatgaattgtgttgagtttacg

SEQ ID NO: 144180 - DNA, 393 bp, Glycine max
agcttaccccttgacaaagttgaagaatctatctcccaatctaatttaagcatggtagctctgttaatggaggaaattgagcagattcctaactccctcttcttcaaacggtttctagacaaggctccatgcaactgttacatgcttccttgagctgacctccccgctccaaatgaagttccttatccatcaatcaatttccttgccaaaggtaaacatggaagttgtaggagagcatgctatgaaccacaaacttcactagcattacacgacccattagcaaaagaaactttcctttccaagttgccaacttcagccttattctattggcaataggtcatagataaattctctaaggttgactcgaaaagagcactccctatatatgaaaat

SEQ ID NO: 144181 - DNA, 357 bp, Glycine max
tgaacatctcttaattagttcgtgcaaatccgtggagcatatatttgtggcggatgaaaactcgggtcaccatcatcatttcagaatatctgctccaactgaactggtgagcatttcaaattgctttaatttgttctttcttatgttagacttattagcattctattgtgaacctcaagcatattatcaactgtgtgatataggttccgattttccccaacttggagacatttgtgatttctcacatggacaacttgaagtcaatatggcccgaccaactcactgaaaattccttctataaaatgaaaaagatggaaatcacatcctgtaacaatctcttgaatgtgtcccatgtca

SEQ ID NO: 144182 - DNA, 251 bp, Glycine max
taagccaccgcggctgcggcgaactaccaaaagaactgagtttttcaaccatgtggactaagctagcgacccaacaatgtaaaatatctttgaagacccctataaaccccctcatggcagagcaaaccatgccaactacgacacaacagatgtgacactcaattaatccaccctcatcacgaagaattgttactgggacatcacacagcacaaatgcatcctaactcctatgacggagccctaaattgaat

SEQ ID NO: 144183 - DNA, 408 bp, Glycine max
  unsure (1)..(408): unsure at all n locations
cgacctatgaatactcagcttggatatnttacagatatgtgcggtgttcgataatttcttcttgtttaaaaatgcgatcattcactccccatgtgatgcttatgttaggatcatgcgatgatcttaaaccttgtgtttgagagagcagactgttacgtgaattactttaagaaaccttgtgatggaggacgccgaaaccacaattttttattggatggtacattggaacaagagttattattttttttgcctgacccatcagacatgtgatcttacttatttgataacntggacactcttttttatggcataataattctaaaaatttatttggaacagtgaaacaatgtgacattacccccatcgctgatgtccatctttgaatcaatgggtttttagaaccgcatc

SEQ ID NO: 144184 - DNA, 371 bp, Glycine max
agcttcttatggaccgtattctagcggctatcttctctctcaagaccatgccatgtgctcaggaatggtctctatcttcccttcagagcttgagctcactgttgctgccccacaaagctccacgaaatatgtcacggccatgctcttccttgcgagccctcttggtttcttgttcgagggctcttgcggtagctgcattgtcttctcgggactcggcacactcttttctgacgtctgtagcgaccaacttgaatttttctgtggcaagccttgcttttcctaggtctgtatttagagaacagacttcttcatcctcttccggagcttcgaagttctcttcgccgataatctttaacttggagagccaatct

SEQ ID NO: 144185 - DNA, 333 bp, Glycine max
  unsure (1)..(333): unsure at all n locations
tananaacaaganatgaattaaaagtctcggattcgatttcttacccgttgaagaacgaagaacggatgaagaacgatgaagaacggacgaaaaccttcacggatttgcttacggaaacatctcggaagcgttacggaagcacctcggcttggattttcttcacggaaacaatttttttcacccaaaacagctgaaatacataaccagggggctgagggatccttagaacagccccctttagcctttttataggaaaaagggggaggaggttgccgcccagctcgccctggcgaccttagctcgcccaggcgagctgggcggcnacctcctcc

SEQ ID NO: 144186 - DNA, 289 bp, Glycine max
agctaggtgcatataatttatatgctctttcttgatggggagtgctataattatgggtattattagatgtatctctagagtagattttcctattttatcttgttgaagaagacagcagtgtgtactgtcttgtgcaagcttgtcaagctgtctctctcctatttgtatatatatatgttattagaatgaaatacaactaaccaactgagggaaaagtttctctcctcacatattcaaactttaagtgtatgcatagatctcctacaggtgatttagttcctctagactt

SEQ ID NO: 144187 - DNA, 464 bp, Glycine max
  unsure (1)..(464): unsure at all n locations
ctattacgtgacctataaaactcaactgctaaccctggaagctcctatatctcccacactntttggggtgggccattcttggatggccttgattttctcagggtccacttggaccccatttctaccaactacaaaacctaagaaaactatattatctacacaaaaggtacacttctctatatttgcatagagggtgtttttcctaaggactgaaagaacttgtctgagatgtcctaagtgaaaatctaggctcctactatacactaaaatatcatcaaaataaacaactacaaatctacctatgaaatcccttaagacatgatgcataagcctcataaaggtgcttggtgcattagtgagcccaaaaggcatcactagccattcatacaaaccaaacttggtcttgaaagcagttttccactcatcaccctttttcatcctgatttggtgataaccacttttaa

SEQ ID NO: 144188 - DNA, 258 bp, Glycine max
taacacgagtagtactacgctcacctaacaacatacgacataatctttattaatgcatgtagtcacccaaacgcttcaacatctaatgagcctcaggctctatctaatacacactagctatgtgctgtataagcatgtctctaacccttcaatgaaaacctgacgtaacatgatcattcctttgtgtgcacggataatttaaaatgtaaagagaatgttgagactcacatatactatgaaagaccctgattctatata

SEQ ID NO: 144189 - DNA, 399 bp, Glycine max
  unsure (1)..(399): unsure at all n locations
agcttcttcgaactttgctatacaagggggagaagtgaagggaaaacatgttcatccctctcggtgatttgagatcacttgaagttagtgaaaacaagtattcccgagaagaaaatccgagccgaggcgcttccataacgtctatgtaacatttcccgaggtgatgttgtgaagatttncaaccattcttcaacgatcctcgttcggtcttcggtcttcaacgcgggagctcccgaaatcgaacttttccataattctatgtacccttagtggacctcatttgttgtaacgtgcttctattttgaattcatttactttccgtaccacgcttttgacgtgcgttactcatttacttgattcattcttgagcctaagcaaaaataaataaagttcccctga

SEQ ID NO: 144190 - DNA, 447 bp, Glycine max
actcaagcttttacttatgtcgtaagagaatatggagaagaagagactcttaacatatatttatgcggaaattaaaagcacagtggaacagtaaagtagtaggaagaacgaaacaaacacacaagagttcttatactggttcggcaacaacccgtgcctacatccagtccccaagcgacctgcggttcttgagatttctttcaacctagtaaaaatccttttacaagcaaagatccgcaagggatgtaccctcccttgttctctttgaacctagtggatgtaccctccactagaactgatccacaagagatgtaccctctcttgttcttagtcaaacccaagaagatgtaccctctacttgtaccacaaaggatgtaccctcccatgagttatgacaaaatctcaggctgtaaacctttgtacttgtgatgtggatacaaaaatctc

SEQ ID NO: 144191 - DNA, 359 bp, Glycine max
agaaaatgggcacataaaaatatagataactacgtgtatgaaattgttacagatatcaactgatctttatatttggataagtactcatcagatatcccaagggatgttctatacattatgtcccaagaatgcgaaggtcgtcctcctgcacactatcaattgattgcattggctggtgtgaacattcacaatattaaattttccctatcttgggataaatatgaaacattaaatttattagtggaccacgatatttaaatgaaccatgaacgaccatagcaaaatagcagagcttgaccgatttcatactgtccctcacaagtcaataattctccaagatacaatgaggaattctatgc

SEQ ID NO: 144192 - DNA, 376 bp, Glycine max
ggtgggccacactaggaaggtctagattaacttatggtccacttggaccccatatctaccaactcaatatcctacgaaaacaatattatctacacaataagtacactcttgtatatatgactaaccaacgacactgggataacacatgggactatgctctcatagacccacccactttcaacaaatattaacctgggcattatctacttatctcctgagaggttaccccataggctaaactataagaacgcttattccagcgactaaatctaattcggtgttacattctccttaaacgaagaccccctggggaatctaatgcaaacaccattgtaacttgtagcctaagagtctattatcacaagactccttatgc

SEQ ID NO: 144193 - DNA, 410 bp, Glycine max
gcaattaaagatattcaagatggatgatcagtacattttttattgtcttagaaaaaggtatattcaatttgaatggaattccaattgaagtagcaaaaagtttggcctagaaaattaagttaaaaagtcttttacaagaaatatactctctggttatcgattaccacaggatgtaatcgattaccaatggccacaactgatttacaacatctattaaaatttgaattcaaaatttgccctgtgtaatcgattacacatatttggtaatcgattaccagcactttctgaacgtcttaaatcaaattttaaagcttgtaatcgattacacatatactgtaatcgattacacagcagatttcagaaaaattctcaacagcacatctttttatgtgttcttgaatgactataaa

SEQ ID NO: 144194 - DNA, 438 bp, Glycine max
  unsure (1)..(438): unsure at all n locations
agcgttatggacgcgtttcaagtcctcaatatttctcacccaagacttcataggttgccaagctaaagagacctgngtattgaaatcagggaggctaagctaacgacccaggaattgaaaataattgtgatgacttctataaaccccatcattgatgtgcaaccaaagccaacaatggtcaaaagaggggacactcaataaaccactctggaattgaggaatttctactgtcacaacattagccacaatcctatccaaacgcttatagagggtgccaacaatggtcataagaggggacagtaaataaaccactttggaattgcggaatttctactgccacaacattagccacaaccctatccaaatgcttatagagggtgcctcttttcttggtgaaaggagggctagaaaacccaagttcactaatattacaatcat

SEQ ID NO: 144195 - DNA, 437 bp, Glycine max
ctcaagcctgcaagttgattgtcttcacatgtgtgcaaactcagcaacagtagtcgactttgtcacattgccacacaattcctttaagttccttgcttttctatagcttaataaaatttttccaaagatgcaaggcataaaatctatgaggtgcaccacgcatgacttcttgcaaagctggaataagtccctgataaaataaagtacgccataacttatgtcattaactgcaattaaatccctaacttatgataataattgcaaatcatttcatgtcataccttttgcatgtctgacatgaaattccacccattctgtacataatccccaagatctttatgcaacaaagttaaaaaacacttccaattttctttgttctccacgtctaccacaacataagcaataacaacgatgtggttattagcatcaaccccaac

SEQ ID NO: 144196 - DNA, 261 bp, Glycine max
tttcttagataccctgttgaccttgcttcctttccttgttatgaagctcaatacaagcctttaatgataaccatgatatcaccatatccttaatgaattatggagctttggaattgttttgggaataagtgcggggggttatgcttcattggataatatgtttgttggctatgcttcatgacttattattgggccatactcgatgtacattacatattggctaaatattggacatgctgaatgaaatgctatttatcaaat

SEQ ID NO: 144197 - DNA, 434 bp, Glycine max
ttcttgagaaaacttccttgagaagcttctttgagaaatctttcttgagaagctagaggttagctacacacacccctctcataactaagctcacctccttgagaagcttccttaagaagattcctaaagaagctagagcttagctacacacacctctctaatagctaagctcacccccatgacgaaaaaacatgaaaatacaaaaaaaagtccttactacaaaaactactcaaaatgccccgaaatacaaggctaaaaccctatactactagaatggccaaaatacaaggcccagacgaaggaaaaacctattctaatatttacaaagataagcgagctcatacttagcccatgggctcgaaatctaccctaaggctcatgagaaccctagggccttcccttggatctctagcccaatctacttggaggcttct

SEQ ID NO: 144198 - DNA, 372 bp, Glycine max
  unsure (1)..(372): unsure at all n locations
naagcttttctaatgagaagttaacacaatttaaactatactttgactgaatgctcaaagaaaacacagatggcatacttcttattcaataatatgaaataagatatttagccaatgacttttcttcttagatggagaagctgctttacgggtcaagaagctgaaaagacataaaaacttaagaaattgcggtccatacaactatgcttaatataatatcaaattttgggccgatagaacattttgggcatgctattatccaacttatcaaacttatcatgtccaaaaatctgttgcatggtaatggtgtttgtacgattgtataagtgtcccggatagtagaaaacaccggtgggctaaaagcttcatatc

SEQ ID NO: 144199 - DNA, 446 bp, Glycine max
  unsure (1)..(446): unsure at all n locations
ctattacggacctataaatctcagctatttgggcgatctggatagatttctgaacattttggaggagttaacgcagttgaatagttgagacttgatccatgtgccatagaatgagaagcaccattatacaaacacggccctgtaccgcacgttgaccacgctagatcagcagctgtgagacttttggttctctgtggctcaatgtaagggtctagccctagaagcttttcattgtcagcaatgccgaaaccacgaactgttgaaatagacctctgaatggatgatgatttatcangaagggccagactgtttaatggaatgtctggcagggagactccttcatctgcaagaaaagatgtctccnaagccatatgggaagcttgcaaaactccatactgaaccacatgttttaccttcttcattcattcttgtcagcacctttaagt

SEQ ID NO: 144200 - DNA, 355 bp, Glycine max
  unsure (1)..(355): unsure at all n locations
agcttgaaagagaaaggctttgacatgattggtctttatcacatggtaggatggatatgttgtttggagaaactcaattcctaacattatggaccgctatgatgattctatggaatcacagaggtagataacgtcatctatcagggatttgttactgggactacaatattgatctcttcgaccaccattactgctgcttgtgaatgtgctctggatggcctgaccataagcaaacactgggagagagagataacccccgagattatggatgagccactctatggagagcctcgcccatacgaagttgacaagatggctcttaataccttctngaggatagcaaacttgacttaca

SEQ ID NO: 144201 - DNA, 443 bp, Glycine max
gacctataaaactcagcttgcacacttggatcatttgcacctcttatgcacattcttctatactgcgcctatcatcaataggatgaggccattagcatcatttttaaacattaggagcgcatgtgtatccccctgtctgaaacctatctgctagctgaattcaccctatggactgttattgaccaataccgtcttagtcacagattggagactcccctaattccaatttatccacttgtagcagaatccttaccttataaattgattatgtgaggtagagctatgtccttaatccacaattctataatagattcaccgcatatactatatccattgatgagtcacttgcattgtcaacttgccacactgccaacccattagcatatgtgtgatagggtgaaggcaacgtacattagttgcatggatccctacgccacaatgtc

SEQ ID NO: 144202 - DNA, 369 bp, Glycine max
gctttgagccaaaatcctaactcaccatatacctcgacccagggtgagaatggcaatccttaccctctgaagcgaaaacgaagagatagtaaatttccaatctcagcgaacgcttataatatgagagagaacgaaaatttccaatcaaaggaaaaaagagaggaaaggaaattcccaatctaagagtgggagaaagcgaaaagaaaataaagaatattcccaacctaagagtgtgagaaagtaaaaggaatgaaagaacgctcctgatcaaggattgaaagacatcacaagaaatgtgcataaaggtctttggaccggacaatatttgtacaatacagaattgtcaccaaatgaacacaaaaagggaaa

SEQ ID NO: 144203 - DNA, 441 bp, Glycine max
  unsure (1)..(441): unsure at all n locations
cttttggtttagagctgtttttgaagatggtgaggaagaattttctctgtctcaaatgggtcatggtcacttgatgatttccagtgagtccatataaatatgagttttgtccatccaacaagtatagttaggttaaccagatcttgattgcatgtaatagagtgcatgttgctattactgtctaacagatgtcaagtatgttttagttcatccttccatcttatagcaaaggacctactcactttaccatcaggctacatatagcaagcaaactaatataagcaaatgtgttgtatcatgtcatgtttatttgaaaatagtcttcaaatttctaacctgatccataatatgaattgtgntgaacatttcctctggttttttttattaatattcatcattggcttagccattttccgtcaattatattgatcttcattcatc

SEQ ID NO: 144204 - DNA, 76 bp, Glycine max
agctgtgagccaaaatcctgactcaccatataccttgaaccaaggtgagaatgccaatccttaccctctgaagcaa

SEQ ID NO: 144205 - DNA, 394 bp, Glycine max
ttaagtcacctgcagcatgcaagcttgtgcaaatcaaatcactcctacatttcatctctagcatgcattatctatctttacccactcctcacagttggttttttatggaaaaaacactcataactaaacgcgccgcaagggatccctatcgcaccagatccaaatctataacgatgggtgatcaagaggagacgcaggaacagatgaaagccgatatgtcggctctgaaagaacacatggcctccatgatggaggccatgttatgtatgaagcagctcatggataagaacgcggccactgccgacgctgtcagttcggctgccgaagcatacccgactctcttggcactacgcaccatactccctatacatataggacggggaatgacacactg

SEQ ID NO: 144206 - DNA, 424 bp, Glycine max
  unsure (1)..(424): unsure at all n locations
ttatgataagctnttgtggattgtgtctattgaagtatgatgtaactgctcattataaattctgttgtgtcagttggttcaattatgttctggtcattactttctttcaagctttggcctggtgaaggtgccttcctattttggtttgtgtatatgtgtagggtgtggatgcatgtttaagatgactgtaatcactctattttttgttttttgaccgtgcttaccgtgaaccgtatttggatgtttatatggaaaataaagctaatgctaaaagaatggaacgtgctgaaattgagaaattaatttagatatttttagtcttcaaacaaaacatatagtggaggacattattttttgtttgggggatggcgattaattctggttaggctttacgagttgaagcctaaaatatataaaagtgggt

SEQ ID NO: 144207 - DNA, 384 bp, Glycine max
agctagatctgtgcacaattaaggtagaagctgatgatcggcatagattggcacaacaaccatagtgcctatttcgagaaaagagccctgaacgacccggctcgacgctacgatatccacactctaacatgcaataatttcaatttttataaaaaaaactcccttaatttagcttatgaaaatagaagtaatatcgtctgacatacattcatccaacagcacaccatgacttaagtgaatatacataattatatagaacaagtactatgtacacgtcatacacataacgaaaactaaattcgttcatagactaaataagatccaaggtttacatttttaacccacacaatacaccttgaaaccactatggaggagttgattaca

SEQ ID NO: 144208 - DNA, 439 bp, Glycine max
agctgcttgaagctagaataattcgctctatctctataacgcgctatggtaccgcattacattaagcgcaggacactatagagtgtgggaactcagaataaatataaaaaaagatgtcacacctatggaagtgcgtattttaccagctaacagtgacgttacctaaaccaacaaatatttgtgttgcttaaccactaatgtagcttattaatattgtctcacaaggcaaggaaaaatgtctgtgtaaatggattaaaatttaaaacacataatgttgcagatatatttgattattgattacaaaaaatgtgtatgcaaatggtacatggtactttatttataatacacgtgcctacagactttgatgagtatattatatatactgaagttaaaaacaagaataataagatccttatgttgacacctgtccctgatattt

SEQ ID NO: 144209 - DNA, 363 bp, Glycine max
cttcctgcttttattgttgaactttgagtggtacctggagatatgtcgcgggggccaggagaccttggggacgtcatgtggggtgctattgcccaaaaccaagcttgaccaatcccgacccaacccgggcatagtcggtcagtgagaatctgtgatgtacctaagcaggcgagcttctggcagtcaacagataaaaggaacaaagaccacaaagcaaggaggcttgtggtggctggccagctatgaacttgattgatgtgtgagagatggcctctggtaatcgattaccaagggtgggtaatcgattacaaggcttaaaattgaagacaggaggctaagatggtctctggtaatcgattacca

SEQ ID NO: 144210 - DNA, 366 bp, Glycine max
ttaccagaggagatattcagaacatatactcagcagtcacatcttttcatttgatcctcgaatggccaccaaaggcctatatatatgtgacttaagacacaaattagccaagagtattgagtgatcacaaagtgttatcccctcgaaagagcactagagctgttctgaattagaaaaatgacttatgctctctaagattccttgtgcaaacacttgcctattcaataaggaattgtgattgatcctcattgcacaatctatctcattgaagagagagttcttcttgtcctcttcttacttctgaaaagggagtaagagaccgagggtctcttgatgtacatgaattctgaactcacaggaacgatt

SEQ ID NO: 144211 - DNA, 371 bp, Glycine max
catctaataggcgaaacagtcatccactatcctcgaatacaacatagcggaatgattaagaaaggagaaaacacactaccaaaagtaagtgcataccactagtcatatataattaaagcagttaagtttacaacacataaacatgaacatccaagagcaagtgcaaataattacaaggtgcagacatgctaagcaagtcttaaaagaaatactaggtattcaaatatgataaaaacacacccgaatacaaggcttaaaaacaaaagataattatcatctagatactatatcagagaatccaaactgaaatctaaggaacaaagttagatacgaacacatacagggtgacgcatgacttatctcaatatcac

SEQ ID NO: 144212 - DNA, 385 bp, Glycine max
agcttcctgataccatgggagatcctcggaggacttgacttaatcatggacgactctgcagttggtcttcacatggcatcctcccttttacaccttgccgcagagacgatcatatgtactggaagaagctgcaaaggagacttaaccaatctttattgacactctagcgaacgatccatcgcatgtagcccgaatggagatcccaatatataccgtgcgtctaaaagatgtgcgatctgctcaactgatgcatgaagctccacaaaagataccctgggctgatttgggaccacattgatatagacaattgttcccatcattaatgacaaagcgctggccccccgtaccatgtgtatcacatacattaggtggaccaccacattac

SEQ ID NO: 144213 - DNA, 306 bp, Glycine max
  unsure (1)..(306): unsure at all n locations
gccatacataatagtggccttattatacgccaccacaagtctatatgagttgcgccttgagggtaanacatcaagcgaaagcttaagcatagaaaaacctagagatggatggtttgtacagggatgaatactagtacgatactgctttctaaccataaacataataacatctgccctatgaatggatgaatatttcagggttccatatcgaaagagtgctaaggacatgtgggacactctccgattatcacctgagagcactacatatgttaaacgatatatgatagatgcgctgactcatgactt

SEQ ID NO: 144214 - DNA, 440 bp, Glycine max
  unsure (1)..(440): unsure at all n locations
aatcctgactcaccatataccttgacccagggtgagaatgtcaatccttaccctcggaagcaaaaaggaatagaagggaaatttccaatcaaagaaaaagagaaggataatttccaatgaaagcaaaaaagaaaagaaggaaaattccccaatcaaagagtgggagaaagcaaaaagaaaagaaaggaaattcccaatcaaataatgggagaaagtaaaaaagggaatgaaagaaagttcttgaatgaaaaacagaaggaatatgcagagaggtctttggaccggacaatatctgaacaatacagaattgtcaccaaatgaacgataaaagaaggaaagggaaccacgacctanaatagtcttcttcctttgattaccaaccaaaataccgtgcgctagcgacttttntttctctccccgcactaaacaaaaacagaaaa

SEQ ID NO: 144215 - DNA, 399 bp, Glycine max
  unsure (1)..(399): unsure at all n locations
gcttatagaatatataatacaagaacatttactattgaagagtctatacgtgtttcctttcatgagtctaatgccattcttccaaagaaggaatttttagatgatatttcacattccttagaagatacacatattcatggaaatgactctaaagaagaagatgaagaatgcaatgaagattctcaagaaaatggagttagagcaaataatgaacttccaagagaatggaaagcctcaagagatcatcctctcgacaacattattggtgatatatcaaaaggggtaacaactagacattctcttgaagatatatgcaataatatggcttttgtatctatgatngaacctaaaaatatcaaagaagccatagtggatgataactggatcattgccatgcaa

SEQ ID NO: 144216 - DNA, 398 bp, Glycine max
aacggaccatacagtcattagaggaccttttgagggcgtgtgtcttagagcaaaagggaagttgggagagttttctgccattgataaagttcacttacaacaatagttttcactctaccattggcatggctccctatgaaagcttatatggtagaaggtgtaggacacctctatgttggctagagcccggagaaaactgtagaagcaagcttcatgatgatgaatcaagtatgattcaagtagttttgatgatgacaaaaagcccaaaagaatgatgtcaagattgagtcaacaagttcaagatgaagattaaagaaaagacatcaagaagaatcaagactcacgagaagaagaaatcaagattcaagagaagataccaagaagcaacatgtcaagac

SEQ ID NO: 144217 - DNA, 391 bp, Glycine max
ggatcttaagtcaccgctgctgcagctcgaactgaattacaagtgtctattgtattcgaaacggtgccatcgactacaagatattggtaatcgattaccagtgtgcttgaatgtggaaaatccaattctcattgtgaagagacacatcctttcataacaagtcttatgtaatccattacacggatttggtaatcgactaccaatgacgagttgtgaataaacaccacaagatgtaactcttacaatggcgtcaagttattactaaagtataactcttcaatggttcgcttgaccagacctaagagtctataaagtaaaacttgatttcattttgatatccagtagcagctttactcctttcactaaccttgaacatattctgactcttttc

SEQ ID NO: 144218 - DNA, 435 bp, Glycine max
ctttgtggagagggacgtgactgttaatcaattggacagtatattttgaaacattaccgcctgcaataattaaagttttagtgatgaatagcttcctgaggaggggaggaaccacaatctggctttacatatatcggtgaactgcaagtctgatgctctgtctaatgtacttgtggacactggttgctcattgaatgtattggccatatacacattagatcaactttcttaccgggggccccccatgagaagaaacggggtggttgtcaaagcgtttgatggatctagaaagtctgtcatcggggaggatgatttggccattacaattgggccgcttgttttccatattacattccaggagatggatatccaagccgcatacagttgcctcttgggtaggccgcggatacatgaatctggtgccgtgacatccac

SEQ ID NO: 144219 - DNA, 376 bp, Glycine max
agcttgtgtcagaagaaagtggctggtgtgggcttaaatgcgtgcatacaatgcacagactttgtcatgctaaaaaaccactctttgtcactcgtgtcttgaacactacaataggaaaccacttcctttcgtgttacaacatgttcgggcaataaaactcttcttgtgatggaaattgaaaaatattacaactcgacttcattaattcttcatatgatccgacaaatcataggagaatgtctctgcaaaatatatcttatacacagagtatgatatgaagtctaatgaaaactctaatattgatcagatcatgattccatcttgctactatctggaacatcagatgcaacatcgcggacatgttttgatgtgcata

SEQ ID NO: 144220 - DNA, 449 bp, Glycine max
aactcaagctgcttctacagctcttgctacatgtcactcgctgtgtgttcctcttactggagacctaatggtgtgttcttgcatacgtgtcacttgccgtgggtggcacgtactatagacataatgacatgggcttggatacatatcattcgtcgtggatgacacgtactggagctatattggtgttgctcaatctccgtaatgcggttttggagttattggggagtatcagtttttggcatgggtgttagttcctgtgctgctcctcttaatgtcttccgggtcttgcttatacttggtgattgtctggtctcttaacaaactgggctacgtagctagcctgtataagttcttctatcttatcctttagggccctgtagtctttgatgttatgaccaataccacagtgatatctgcagtatttggttgcgtcatcaatgttatgtcta

SEQ ID NO: 144221 - DNA, 406 bp, Glycine max
tgaccatcatccatgttaccccagaaatacatatataatatatcgacccaagcacaccgtattgttagatatatttattactgtccaacaataattaccaaaaaatagcccacgaagggaagttcatttattggaagagattccatctcagcaacaaaaccggtgctaattgacattgatctctaaaagtaatatgcatgttgccaacccactttaatggtaactaaattaatcaacaacctcatactattaactacaagtaatatcatatatgagccattcaaagtacgtcaactctaagccagccaaaccattatatatagacgcaaatcttgagactagagaatctcaagccttaatctagatacttcccttttcaactttctttgccataccttggtgagtg

SEQ ID NO: 144222 - DNA, 290 bp, Glycine max
catgtactgcaaaacatgctgtttattgtcttatcatcattttttcgaaccacgggacttcaataattgaagatgagatgaattgagttattttgaaattgttgtgcgcccaacctctaatcttagagaaattatcaaaagatcaaaattacacccagatgcttaatattgtgacctattaaatttggtgcagcctttttcacaaaccctctatcatctatagaaatagctagttctgtatctaataaaacttaagatgaaacaccacgtgatagtgtttacactcttgt

SEQ ID NO: 144223 - DNA, 406 bp, Glycine max
agcttgtgtgcccttgtagtgcgagggactttaaaatctcctgacggatcaacacgtgcacagtggggcaagatgcatgggacatcctgaaaaccactcatgaaggaacctccaaagtgaagatgtccatattgcaactattggctacgcaacttccaaatctgcagatgaatgaggaagagtgtgtgcatgacttccacatgaacattcttgaaattgccaatgctatgcactgccttgggagagaggataacagatgaaaagctggtgagaaagatcctcatatccttgcctaagagatttgacatgagagtcactgctatagaggaggcccaagacatttgcaacatgagagtggatgaactcattggttcccttcaaacctttgagctaagactctcggatg

SEQ ID NO: 144224 - DNA, 454 bp, Glycine max
  unsure (1)..(454): unsure at all n locations
tctttaaatatntatatagacatatgtatctctatcttcttacaaaaaactgaagcactcaatgcatttaaagatttcacgcttgtcggtccaacgcaagtctctattatgccaaaatgaaaggaatttagtatggatttcaaaaacatggtcaaaggcaacagacaaatacccctgtcaaaacatataagactgaggggtgtttcagattctacaaatggaaacatcattttgaaattctaatcacgccaatgtgaccgaagttcagtgaatgccgcataaataacctcaatgttataaacagataacttttacaatgtctcattctctatggtttttcaaaggaagtgtaagaataccctattacagtacccaacacataagagacactaagaagaactcaaactatctatgagaaggttataagtcaagaatacctcagagaaactttgaa

SEQ ID NO: 144225 - DNA, 282 bp, Glycine max
cccaaagctcacaaaaccatgctcatatgtcgccgaagcatttcaccgaacacttggtgggcgcatgattatgcactaatataacgagaatggggacaatgtggcatgcgccattacttcagaatacaccctatgccaaggccatcccttacaacccctcaatttacaaaaacagcaacaatttgatgatactacctcactttcttaacaacacatcaatttacaacaccacaatacattatggaaactacaaacccaaaatgatgtcttactgttggatac

SEQ ID NO: 144226 - DNA, 419 bp, Glycine max
ttgcttctacagggcaccccaacaaaatggtgttgtaaatatgaaaaatagatctttagaagaaatagctagaaccctcttaaatgacgctccacttccaaaatatttttgggctgaagctgtcaacaccgcatgttatattatgaatagagcgttaataagacccattcttaagaaaacccatatgaactttttaacaatagaaaaccaaacattgctcatttacatgtctttggatgtaaatgttttgtcctaaacaatggtaaagaaagcctatgtaaatttgatgctcaggcggatgagggcatcttccttggttactccctacatagcaaagcctttaggatatacaacaaaagaaccatgacaattgatgaatcaatacatgtttcttttgatgaaactatattacctcttcg

SEQ ID NO: 144227 - DNA, 282 bp, Glycine max
agcttgtgcagcagtgtggcttgatactttgtttcccgatctgaagaccacataagaagggtccgctgagctatgtgtatataacaaatatcccacttggttagctcaacatccgatatctcatggaagatgaaagcacattgaaaccagatcttttttcatgagagacctcgctgccaccgggatattcctgtcttggctgtagagatcacaggatcagattgccgatatattgacccccggcttcgtgacttaaatcttgccatgataagaacgctgttg

SEQ ID NO: 144228 - DNA, 109 bp, Glycine max
taagaatgaacactcagatcttagttaggaacctctttgtctaatcactctgctcagggacgtcctaattgatttgccattcattgctgtataacatggtaactggggg

SEQ ID NO: 144229 - DNA, 340 bp, Glycine max
agcttgtcggagacccatgatgaccacatatcgatctccactccttatggctcacatagattcgggtatagggcctaatatctcaatgtgtgtgtgaggtataggcgtcatgcgtgtgtagaaaaagtatttctacctatgaatctaatcgatagacaaacacacaccacacacattaacattagcaaggttatatatgaatatggacaaatcaaaagataaaagggaaaagggaaaataaataaagatgaagtcatgataaaaaacattgcacaccgactgaatgacctaactctctaacacgttcccagtggagtcgccaattatcacaacctattct

SEQ ID NO: 144230 - DNA, 380 bp, Glycine max
  unsure (1)..(380): unsure at all n locations
tgccgcccagcttgcccaggcgagcaatgatgcttcctccataagcaacaaccttctggagggcccaagtgggcctggttgctatctacacccccatttttactaaatacaccccctgccttttttttggagattctttttccgtaacgttacggaattttacgaatttcgtgacgatacttatttttcttccgcaaggttacgaatccttatggattatgtatttactcttttttaactttcnaagaagttacggaaacccacggattgcgcaaaaacacctctttntgacttccaccacattacggaatttcacggatcgcgcatacctgctttcttttgatttctgagacgtctcatgacttcatttactgtgcaac

SEQ ID NO: 144231 - DNA, 231 bp, Glycine max
gaaagagagaaaaagaaagaggaaagaagtaaacgaaagaagaaagaaaaaaaaagaaagagaaagaagaacgagggaaagaagggggagaaaaaaagaaaaaaagaaagaaaggagagaaagagaaaggagaaaaaaagagaagaggaagaggaggaggcagaagaaaaacaaaagagaggggaagaaaggaaaaaaaagaagaaaaaagagagaagaaaagaagaggag

SEQ ID NO: 144232 - DNA, 299 bp, Glycine max
tttttttttatccacagaagttttcgaaacagcaccatgaaatatttcacagtgttcaacccataaattcacgaaatcagaattatattcatgaattgagaaattagcctgactgtaattggctatgtccaatatccactgaaagcatttggcggaaatggccctaattgaaaatgccgttgagatagtcccacatgtctttggcagtagaaaatgaatgcacggtattgaccattataagctcaatggaccccaaaagcccagaaataatcttggcatcctgcgtctcccaaagctgc

SEQ ID NO: 144233 - DNA, 142 bp, Glycine max
  unsure (1)..(142): unsure at all n locations
ggacgaaatagcaacatttcgtggcactatagcccactatgttgatggtgtccaaaatcttgagaatgccctccaatataaacattagaggggcattttatggacataattntgggattttggaanaaaaaagggggggggg

SEQ ID NO: 144234 - DNA, 413 bp, Glycine max
tttccttactcttattctggaagatctgggcctcgaattctatccttgttctgtaattcacaacattcacatttccaatttcattagaaaattatgagtagtattgtcttctctgcactcaaaggtagtgccgtaaaaagttactgacatgtgaaagaacgcaaaactatgtaaacataattctctcgcttcaataaagaaccgtgaattggttcatgcataccaattcacatgacatttttaaaccggtttggtaaaatttagtgaattcgtgaaagcaatgaatcaggaaacatcacgagtttgactttggaactcttaaagaacataaacagctaagcttgttaattgttacagagagaaagagaggattttttccacaggatgttgagaatgatgctcttagagagaga

SEQ ID NO: 144235 - DNA, 310 bp, Glycine max
agcttatcaaatggacctggggggtccccatgtatatcatatcttttcttaatactcacctcctatatcatatgtaataattctcacatatatgcctaagtgcctttttatttcattctagtaaatttctaaggcatacattgcctgagaaatctcaagcagttaggagacatatccataacgtgaataatcatcaataatggcgataaagtatctttcctttccgaaagaactaacatcaaaaggtccacaaatatcagtatgcataatttaaagaagctgagtgcttcttgagctcatctctttgtat

SEQ ID NO: 144236 - DNA, 268 bp, Glycine max
  unsure (1)..(268): unsure at all n locations
acctttttntctcaggtgcacccaaacccaatctccgggttcgaagacaaccttctttctcctttgatggctacgttaacatagcttttacttttccctctcattcgatctttgactctataaagaagcttcttcacactagccgactttgctagaccttctttatgcggaaaaacacaaacattaagcataggctaaagatcaagaggagttagtggattaaaaccatagacaacttcagggttaacaaagagaataatctgatgac

SEQ ID NO: 144237 - DNA, 404 bp, Glycine max
agcttaatgttgagtagacgtggcagtcacgcttaacgaagccataaaagtgtgacttccattgaatgttacaaatatgcataaaacttggcagtcacgcattgagttaaacgtgcgtaaaacttgtaatgacccaaagaggggaaaaagaagacatggacgtgagttaataacaacaaaagaacttatattgaaagaaaagtaacctgctgaggaaagataattattaataaaattaattaatatttagtaccaatgtcatgaattcatattaacgacctgaaaagaaatatcataaattttcattttgcctctaaatatatgagagttaatttaatctccagttttaagagacacatgataattctctgatttaaaagaaaacatttggtgacaaatgcttt

SEQ ID NO: 144238 - DNA, 363 bp, Glycine max
gcccagtgcagatcttatgaacgttgagacatctttgtgaccacatgaagtgatctcttgcccctatacgctctggtctatcatgaagaactccctcccttagccagccaatgacaatctgggtttcacctaagaaggtagctactgtcgattaattcttagatcgatcatcaaacactctccccgaagcctgtctttgctgctccactaagaaccatatattctgcctcaaatgttcagagagcaatagaaagccgaagtgtttccctccaactcaccaagaagccaccaagggtgtaagcataccctgttagagaccttctcttgactagatcaacaaccaaaatctgccccacaatatct

SEQ ID NO: 144239 - DNA, 342 bp, Glycine max
  unsure (1)..(342): unsure at all n locations
agnctgctagcctgagagatagattaagcgttaaataattaaacgagaaaccctgtcgggtgaaagtgaggcgcaaccatcatattggacttgaaggggtttatataagcacataagtcgagaaaactaagtgatataagaaactagctagaaaggaaaatagaaaagtgaccgatataactgtgattttgcgtatggacgtggccacatgacagacagagcaatgatgacattggaggcatcatgaanaccaagggcacctatagatgatacgaagggcgaacaaaaacgcaggggctggacatagatagaaagcacctcgacatggtaagttacagtgat

SEQ ID NO: 144240 - DNA, 345 bp, Glycine max
atttacaagggtgtgtggtttcatatcaaaccttacaaataagatatatgggtgggcctcctggcctaaaaatgaatgggtcttccaataagagaatacatcttaacaagatggtaaattcaaaaagtagaactattactattggacaatgatgtaccttatacacaattttataattcccattatccatttaggatggccaaataaattagaatcattataatacctcatgctaaaaagtcaaaaacataatatgaaagaaacatgggaacacaatcagaaaggtttgaccaatattacatgcttcttcttatggtacacaggaaaaaaaaactgggaaaaggg

SEQ ID NO: 144241 - DNA, 345 bp, Glycine max
  unsure (1)..(345): unsure at all n locations
ggggatatttcgaaaaaaccaaaccaaaaacctttgaatgaggtagatactcctccaaacatcttaatctctctcactatgccattccttcatgaatgaagtcatgctcaaaagacctctcaaccatttagaaccaattctaccttggtgcatactcntgatagaccaaaccccaaaggaagttcctgcagatccatatatatgccccacttttcattgatgacaacaaagctgggatttttcactgtctacacagtgaggaatgaacattttttaatgcggaaactatgcctgattcccgatgatcataaactgaggaagtatagcatgggccttgctccctgc

SEQ ID NO: 144242 - DNA, 183 bp, Glycine max
gcagctgaaggtgtttactttgctagcattgtgttaagactcgtaggcacctttggtacgcagagattggagaaatatgttagtcgtaaccccgttattcataaccccgttattatcgtaggaaagcccctaccaattatatggcgctacgcctaatgttagcgccagctgacagccctttag

SEQ ID NO: 144243 - DNA, 345 bp, Glycine max
tttcgtttggggaatatcacttgatgacatgccacctttggttagccgctttgagatacttggcgtcctttgttgcacaataaatgaagtctcgagacgtgtcaaaaatcaaaaggaaacaagcttgcgcgatccgggaaattccgtaatgtggcggaaattgaaaagaggtgttttgcgcaatccgagagtttccgctacttctttcgaagctcaaaaagagtaaataccttatccgtaagggccattttaaagaattgtggatttgtgaaacctcgtgtgtgcttttgttgaattgcgtaaatataaataactgttggctatttcgcattctttacactgcat

SEQ ID NO: 144244 - DNA, 362 bp, Glycine max
agcttatcctctatcgctttgtatataaatttgactgtagcttacattcttgggaaaataaactttcaatatgtggtttaaaagatacagacaatgttacaatgcaattaatctggtgattgagttggttatgacacttactttttaaccttaattgaagcttgatagtgttactaagaaagtttgctgaataaatggttttcacatatactgagctctgtagcatgacattgagtcattattatatttggagacaattaccatctctagtacgggttcaatcacctagggatggacgttatcaattttccgacattgatcactacttcaacacgtattgcacttctaggggtcaacatatt

SEQ ID NO: 144245 - DNA, 359 bp, Glycine max
aactctgctctacacgtcaaccaaaatcacagcttttctcacgtaaagaccacaggtacaattccttcgatccaattcgttaaccggtggatcgactccaaaatctcactggaagtctatagtgcataagcctacattttgaccgtggggatctacaagcaaacatccagaactcactctgcactgctctttccacaaccagtaaatacatagcatttttctgcacttgtgcaaaatcctgctgcacaatttcacagcaaaaatctgcacaaagtgcagatatcgaaattcacactttctcccatccaatcttgcccaaatcaattcctacaagttccaattcatgtatcaatcatgtc

SEQ ID NO: 144246 - DNA, 377 bp, Glycine max
cgctagcttcacctggcataacgggaagtcatcactcccacaagccttaatggccaacttgcaacagttttcagtgcttgccaacttcacctggcataacaagaagtcatcactcccacaagcctgaacgaccaacttgcaagagtccttagtgctcgccagcttcacctaacattgaagaggagcaacactcgctgttgaggtgagagaggacttgtattttagaacgttgtccctcactcactcatagccagagacggtaaaggtggacgatggtgacccaatgttatggctaagtcacatgcgaggagatgccctgacatctttgccaccactacctctccttacacccccagaagcagaaggagggaggatta

SEQ ID NO: 144247 - DNA, 306 bp, Glycine max
aaacctcacaatcactcatagactcctctcctgctcttatgataactttctcttcttgctcagatctttgctagtcttctcataaaaaaagctctcaaaaatctctggaacttagacccttctctctctatatatatctaaacatgcaaaagcttcgagaattgcccaaactccctctccatttctgattttaggcttaaataagtggccttgttggtgcttgtgcgcctagcgcaactatggctcgcttagcgcgcattaatgaatttcaacttagcgcgcgtcttttcactcagtggatggact

SEQ ID NO: 144248 - DNA, 302 bp, Glycine max
gcaagcttcttctttagaagcacttacaggaaaattaataaaacaatgaaataagcttctcccataagctaacaagttaaaaaaaaaatcagctctagggagaagttaaaatcatttttagcttctccaaaaagttaattttaacttatgcataagctaattttaacttacagggcaaatttacttcattttttccttcttattttcttctcctatgtgtgtgtggtgcattcttaacatttgggtagtgcactgaacaataaccttagaaaatagtcccttgtttttcatatttaggtttc

SEQ ID NO: 144249 - DNA, 338 bp, Glycine max
  unsure (1)..(338): unsure at all n locations
tcacttcttctcccttatcttctaccgcatatccctgggtgaaaaacaccattggaagacctcatttgagctcaaagatccagccttcataaaaacttctcaagcaagcttccatcatgttatagagaaaaaccaactcttacaaaatacaaaagataagcacctctttttcattttcttaaaaatgaaaagagactcattagtatttcttaaggtgtagagcattaaggtagtctaaaacctatatgaacatttgttaaatattggacttttaggttctttgattntatagacaactaatatggtacctgtgccacatgagcataaaatggagaaat

SEQ ID NO: 144250 - DNA, 376 bp, Glycine max
  unsure (1)..(376): unsure at all n locations
catgcaagcttgtagcggcgttattattatggttaatggttggactacattatgatatacactacaagntgtctataacaataatctctgtaagtataatataatattaatatgatatgaagaatagtaatgtattaatgaatcacaaattacaaattaccaatctcgattaagtattaccattagtagctgaacgctgtctttntcgttgttgtaaaatagttttcctacgcttcctttgttcaacatatttgtctatgagtagtttgatttctgcaacaactgccttattattggcanacaacaccaaaatcaaacgttgaaattgtggtaaataagttgctaaatacctatattgatgtgttcctgtgtcata

SEQ ID NO: 144251 - DNA, 441 bp, Glycine max
  unsure (1)..(441): unsure at all n locations
gcgcgggtctgggagacaaatgtcaagagttcgctatatgcgaagatgatgttccgagnactttggatttggtacgaccatgccctcatgatttccagttgggaaattggcgagtggaggaacgcccccgcctttacccaacgagcataatgtaaacctttacggttttaaaagctctatagttgggcctaggctttagagtttttccttttgttaaggcgttgtgtcttttgtttttgaatttataatacaaggatctttcttcatctgttcctggtctctacccattctcattcatttgcatgtttacttctttttttttaaacggcagatccgatgacgagtcccccgaatgtactaataccctgcacccgcctatcgatttcgagcaagaaatgaattatacggaagatgaaggagatgaggatgtgggacatcccc

SEQ ID NO: 144252 - DNA, 218 bp, Glycine max
accaacttatggctaacatagagggagcatctgttaattggttccctcactggaaggaaggaagaaccgggattttattctcatgacgatttccaaatgttcccttgatgggaacaaaggagttgattaactataatcttgtcctctccataagacaacttgggtactccatgatataagcaccgtcaaaagaaagcctcatgcctttcattacacgg

SEQ ID NO: 144253 - DNA, 403 bp, Glycine max
gttgaaacaagactaaatagacctggaagaaattatgagggtggtctagatcgattgcaaacatcaaagttagaagtttttcacaacttatcaaaccattgcatggaaaaaagtatgttgaattgagtttataagaattggagcaagcaagaaattgtgttcttaaaaattgtgatgaagtctctccatttattaagtgattttcctaactacatgttatatattttattggaattatatataagctattatatttattatatatgttcaactatcagactacacaaaaaagaattagagaaagcaaagtcacaatatgtggaacaaaaagcataataaggaatttttccagtggttcaaaaatcatgtaagtatgaaattatctttgctattattattatta

SEQ ID NO: 144254 - DNA, 250 bp, Glycine max
  unsure (1)..(250): unsure at all n locations
taccaattcataatactcaaacgctttaatgagataaaaggaatgagatttaagttttgaaatgcttgaatgcattccaaactctcattacaaaagaaatccatatctatgaagttatggtcaatgatanaatgagaggagaagaggtttgtgtacccgatacaattttcttttgataagaacaatgaggatgacgaaatggaggaaggaattggactatcctgagcctcngagtgtcggtggcttctac

SEQ ID NO: 144255 - DNA, 124 bp, Glycine max
actcagcttttctattgataagataactgatgacctggctacaatatattacttgtaaaagaagaagatgttggccttgtgctaacaattagaacacggcccaggcatgtgggaaacacacaac

SEQ ID NO: 144256 - DNA, 341 bp, Glycine max
catcagtgtccttatatagactatctttgaagatgacctgtgcaccttgtcttcgaggtcaagagatatgttgctcctaacataagagaactggaggctaagaagactcatagtgaagtgtctctatcacatatatggttcctcccccttccttagctggaacaacttggatacaactatgaatttcaacatttgtgtgtgggtgtttgttgtaggttcataactcatgacttctcctttattccatcttcaccataaggttactacttctttagaagagtgagtattctacataatggaggttattcattttttactgctataactatgaatgctacttt

SEQ ID NO: 144257 - DNA, 180 bp, Glycine max
ggatttattaccatatatgtgtgatcgaatacacagtgccaattttgaattccaattttaataaccggtggtaataaaatttggccactgggaatccaatacattctctgggtatcgaatacccaagaagtaaattcttggtaaagacttttttacttaaaattcttgggccaacccttt

SEQ ID NO: 144258 - DNA, 385 bp, Glycine max
  unsure (1)..(385): unsure at all n locations
tcgttattaatatagctaataaaaataataactgacatgagctacgcctctgttttactaaaggtatactttgatctaattaattnttccattgtttctagtctaggaattacgatataaacatggttttaaaaaaaagtttgtggtcatcaatgtgtgtagttacactctaagctttgtaggagaggatatatatttgattttaaaagaatatattacggtgaagataattggagatccaactgacaaaccaaaaaaatttaattactgtgtaaggatggtgcaaacatatatgtgattacaattaaaaccatttgattaaaagatattaacctgttaaaagttaaataaataagagaatttaattaattttgtgtgatatgta

SEQ ID NO: 144259 - DNA, 353 bp, Glycine max
  unsure (1)..(353): unsure at all n locations
tcgattacacaattctttttgagacaatgattgtttttttatgagtctttgctttaatcaattactaggtgatataattgattacttctctcttaaaaagtgtttcagaagtgctcaagaacactttaatcgattacttctttgaaataatcaattacattgtatatttgattgattacaggcggctataaatgttttctctataaatagccaccttgtgttttaactattaacaacttttgtgtgtgctagaactacgagttgaaattagtaaaacaaagaagagaaganaaagtgcttaaatacaatgtgactcacaacttctaatctttgattatgaagatcattttgtg

SEQ ID NO: 144260 - DNA, 421 bp, Glycine max
  unsure (1)..(421): unsure at all n locations
agcttgcatcactaagcctacaagctccaatggagcttacatcactaggtgtgtgtataggtgtcatatcatcctatctgaatacttatctagtatataactaaaccgcaaaagattggtttggttcaattcggattatatcttaaatganaactgaaccggatgtattcttaaagcttgatttgagtgactgtttgatcaaaaaccaaaccaaaacgaacaatagacattcctagtttgtagtgacatttaatatatcttcacccaaagtagtccatgcataagttcacaagtttttgcctccataggatttggagttccactgaaatgcaaagtcttggtttatatctatatgaaaatattctaatatataaaatagagatgtctttatgaaatcaaataatttttgtacaaaaaaaca

SEQ ID NO: 144261 - DNA, 302 bp, Glycine max
tcttggatgggcctggatttctcagggtccacttggaccccatttttaccaactaccaaccctaagaaaactatattatctacacaaaaagtacatttctctatatttacatagagggtgttttttctaaagactgaaagaacttgcctgagatgtcctaaatgatcatctatgcttctactgtgcactaaaatatcatcaaaataaacaactacaaatctacctatgaaatcccttaagacatgatgcataagccttataaaggtgcttggtgcattaatgagcccaaaaggcatcactag

SEQ ID NO: 144262 - DNA, 316 bp, Glycine max
catgcaagcttgtacatgattaatggggatctgtatttctacttgtctcactttgcttgagagcgttatcataagaaattcttctttgtttacattcaagttctgattcgattaccactatccattatgaattactttactggaccacgtgattatactataactgctctctatgattataactaatatttctgtatgccttgagatattattctactttgcggtctctgctgaaactaatctccggatgtgcggattcatcgcttaatccaagtacaaatgtttatgatatgaatctcctctaaagatagctctc

SEQ ID NO: 144263 - DNA, 362 bp, Glycine max
  unsure (1)..(362): unsure at all n locations
tctcagcgtctgacgatgaatcaagaatgattcaagtgttttttatgtttacccacacgatcaccggaagtccgacgaaggctttgcagattcagtcgacatgctcaagatccagatgatagttcaggttcgtgtcaagaactctggacgactgctgaatcaagagacgtttaatttccagattcctgagaagagttattctggagtacgagattccatcaagaggacgncgcgcggagccgtattgacaagatctttcacatagacaatcatagcactgctgtggttgtcgcatgagtttctctcataacattctctgttaccggagttcctgctatctgggaatcgactaccagtttcct

SEQ ID NO: 144264 - DNA, 327 bp, Glycine max
ctcgtcccggatcttaagtaccgctgctcagcttgtgagggacttatattttttttgtccctttagagggtgtcctgaactgagctcgaatttttttggattacgacttaaattcgagaatggtccgaatttgtctggtggactatgtaccaagcgaaagaaaatacaaagtaccttgattgacgcgatatgaactgtgaataacggcagtcagttacatccattcgacacccatcttacgggagacctcatcctcgtttgtctattcgtttttactttgctgggaaagttatgtttttacccagtgacgtccttaactgaaccttt

SEQ ID NO: 144265 - DNA, 298 bp, Glycine max
tgcataatgtcatcaatttttcatattggtgaactacatcaattcttctcattgacaatgtcaacctttaacttgattgcatcttctaatgcagatgcattcactttctaatgtgccctttatgtgtgtgacaacatgtggaaagaaaatgttgtctctaaggtgcaaaagagaaccatcttgaactttattctgaagatcatcatcatagtcaaatcttcatcattctgatgctgagtctgatacaacttcattctgatgtcagatgctctctttgagcctatgataagtctctatg

SEQ ID NO: 144266 - DNA, 286 bp, Glycine max
tagcttatgaaactggcatatggattgatttatatcacttcttgtcccatcaacaatataggagaactgggaacttatgttgtattcaaaagttttctgctgtgagaatagtacatagacgctgtaacacaaacatatttttcattcatgaaaatatgaacaggttcttgtatgactcatttacaaccattaatggggaaatgaaaaataatttctacacaatcaacgagtttctagacgaaaactgctagcgtactctcaactatatatgctgaactggttgtac

SEQ ID NO: 144267 - DNA, 386 bp, Glycine max
  unsure (1)..(386): unsure at all n locations
agcttatatactggaaaatttcttcttggattggcgctagtgctaagattaaaaatactagcggggccaagttgtgtgggagccnaattttgagtgggaagcctttgtgcttgagtgggcactctctgctggatgggcgccggattggaatggtttccgacgtgggtctaaaagcttggctggtgtggggaatattggtaagtgttgtgaaaagtttggtgggggttatgccaagtaggagttgaagttcagcatgggtgtccctttctttttttggatcactgcgtcagatatccattgttgtgttgagagacggataagtaactgtctctttgaagctacttaatcttcgacggaatccaattttcaagttgggacagttaccc

SEQ ID NO: 144268 - DNA, 274 bp, Glycine max
tctctgtacctgctttttcactcaatgaattggtgaagaagaatgtggcattcacattgggtgaaagacaagaaccagtcttttctttgctcaaataaatgttcaccaaggcacctgttctagctctccctgacttttctaaaacttttgaacttaagtgggatgcctctggtgtaagtgtgggaattgtgttgttataaggtggtcaccctattgcttacgtttgtgaaaaacctcatatgataaagagctctatgccttaattatatccctc

SEQ ID NO: 144269 - DNA, 363 bp, Glycine max
tagcttctcaaggaagctgcctgaacccatctttgtaatagcgtccttgtgcattgcttaaccgttggatcttcttgaaatttggtctggaggttcacaagacagattaacacaatctgaccgttgcgatcggtgaaaagaagtttggcatgtgagaaacgcttcctttcccgagagcagaagtacttgagtgttgcagcctttgtgattcgtgtagccttggaaaaatgctatttccatctccttcctttttccaaaaccttttccaacgtgccaagctttttctccatcacccacaaccactagttgccaccccaaactgccatagttctctgttgaaaccctacaccgagaggaaccctt

SEQ ID NO: 144270 - DNA, 300 bp, Glycine max
  unsure (1)..(300): unsure at all n locations
catcatcaaacaaggagagaatgtgaatgtctgtatacatgactttgatgatngtcaaagaagaatcaaaccaggctcattttgcttcaagattaatacaagaatgtgtcaataaaccaagccttgattcacgatttcttcaagatcaagccttgcctcataatgaaaagatttcaagtcatcccaggcacatgtaatcgattaccaaggcacatgaaagtgtgtaatcgattacacatcatatgtagggcccatacctatactggagtgatcgattattcaggagtgatcgattacaca

SEQ ID NO: 144271 - DNA, 317 bp, Glycine max
taaagcaatgttgatggtcaaatgacactttaaatcccttttttatcaattgacctacacttaacaaagtttggtcaatgtttggtacataaagaacatctgatatttatttggtacctgaacacgctgaaattgccacagttcctttttcttttacaaaaatatagccaccattcccaattctgacctttgagacgttagttggcttcaaattcttgaatagagtcttatcatatgtcatgtgggtcatacaaccactatcaatcaaccaacatttagaactactcctcatcgaatagcatgttgcagcaaaaata

SEQ ID NO: 144272 - DNA, 318 bp, Glycine max
agcttcccgcatacacacctggaatgatctgattactgccttccttatggcagattagtacaactctaacatggctcccgaccggactcaactgcaaaacatgattaaacgtgaaaatgagtcctttaaagaatatgctcatcgttggagggacctggcaacgtaagtaacccctcccatggtcgagagggaaatggctactatggtggaggacaccctgcctataatttagtatgagaaattagtgggctacatgcccttcaacttcgcggacttggtcttcccccaaaaaaagatcgaggtgggttgaaaagggga

SEQ ID NO: 144273 - DNA, 378 bp, Glycine max
tgccgcctagctcacccaggcgagcaaagttgcttccttcataatcaacagccttctggaggaatcttctggagggcccaagtgggcctggttgctatttgcacccccctttttactaaatgcgtcccctttctatttttttggtaattctttttccgtaacgttacgaaacttcacgaatttcgtaacgatgcttattattcttccgcaaggttacgaatccttacggattatgtatttagtcttttttagctttcaaagaagttacggaaacttacggattgcgcacaaatacctcttttcgatttccgtcacattacggaatttcacggattgcgcaagcctgcttctttttgatttctgacacgtctcgggact

SEQ ID NO: 144274 - DNA, 297 bp, Glycine max
ctgaccctccgttctcagcgtcatcataatcttatgcaacgatactttggaccagtctccattctgcgacgcattggcagcgttgcataccgtttgcgactacctgaagggtctcgtgtacaccccgtcttacattgttccttactacgccctcatcacagacgctgtgacctcccaacctcttcactttcggcggatacttgctccccacaccctatacttgagccactatccatccttgactctcgaatggacttctctgtggaccccccaactcttttcgctcttgttcaatgg

SEQ ID NO: 144275 - DNA, 307 bp, Glycine max
attaaatcccatttgactttgaaatggccacttgaagcccacaaggaccgtgtggacgacattgtctgtgaaaaataccgcattatccaagagaaatgagcccagttttgttagagctacacagatcccttgtgggaggtatgtaatttgtaatttgaattatattccactataaattcagctcttataatagattgtagtaatcattttcattaatgttcgatttttgcaggatgtgcggaaaaaagcatatgccatccacaagcaaaacactgccctccacgtgttgtctcgtgggggttatgat

SEQ ID NO: 144276 - DNA, 356 bp, Glycine max
gcttagttgaatttgaagatacaatgtatatttgaaattgattttccatattatgattcgataagatgtgctcctattattaacaacataacaggatgtagtcgatgtatgttaagagagcgaagttcaccactgtacgagagtattcaaacatgagagtgaattaacttttaaagttattatcactcttttaaaatttgtatacattttattttgtgaatcaattcttttgttattagactcaaaagaaagaatataaacttttattcttgtcacaaataactattggggacgctttattaatttttcggttaaactttgaaatagtacgagtttttcttttcctctactgaatc

SEQ ID NO: 144277 - DNA, 319 bp, Glycine max
tcgcgtgtatgaaatccactcgacaagggttgaagtaaaggagacctttcatcctataacgcaacgtggcggacaaaatgggcaattaactttaatggccattattggcaatgcggaaagtattctgcgcttcactatccatgttcacacattattgcaactagtggttacgtgagcatgaactactaccaatatatagatgttgtttacaccaatgagtacatcttaaaagcatactccgcacagtggtggcctcttgggaatgaagcggcaattcctccttctgatgaggcatggacactaatccctgacccaacta

SEQ ID NO: 144278 - DNA, 414 bp, Glycine max
cggcatgctagtctgcctattgatgtagagaccacaagatgtttgtgcactataatattagtctaacactctctaacgccaacttaagttgacgcgagtggttacggcactcttctcttaagcaaaaaattgagggtttgattctcaactcttgtgaatggagctcacttactgggaggagtctacctttttgtcttccatattccggaggaaagtatgatctatgctcattggaaaatactccttgtaaagcaaataaataataatgcatgttaatcttaagtctatattcttcaactctatttattattgttatatcatgtgcgaactcctccctatctgagcaactctaaatataaacaataattatgatgctttggattttgttaaaactgagttgtactcaactcatat

SEQ ID NO: 144279 - DNA, 392 bp, Glycine max
  unsure (1)..(392): unsure at all n locations
aagttaattacacaaatttcttttgacatttaaagaaaatacatatatcttttttcattttttaaaatttacacaaaaaaattccaaattttatccacaatttaaagaaattatatatgtttttcctccatttgtaaaatatatctaagacttaatagttggtttaaataattttgttagttggatcattgatgacttgatgtgagtaattttatttgatatttgaaacccataattattcatttcacatatgaatttactataatgaaatcggntcaataatttcgctgctcaccataatgttcatttagcatatatatttatttgtatgacacattaattaaatattgtgcaatttgatttatattaatcaaaattgtctcatatttaaa

SEQ ID NO: 144280 - DNA, 407 bp, Glycine max
  unsure (1)..(407): unsure at all n locations
gctagagataaggcgttctatgggaaacatcatgcaaacattatgttctgggatgctgatcgcacttgcctaatttggctattagttattgaccgtccgaaattgataattgacgtatgttattatagatttaccaatcacttctatcatctttcatttacttaattgcgttatgtactcttgactgactacaatctgggtggaaattttttataagttggcgaagatgacccatgattatatccagaacaccgagatatctttctgtgttgtacttcaacctttagggtaaaggatagcactaagctcaacaatattgttgtatcaaggatggctgatgatccaaaacttatatatntaattaaagaacaatntaattgtaatgaggtaatactacattgaactat

SEQ ID NO: 144281 - DNA, 385 bp, Glycine max
  unsure (1)..(385): unsure at all n locations
gcctatgatatntggtaaattcttcttactaaatgtgggtatttgttttttgtattaaattcttttataataaactcaccccttgcaatttttgtaccgtgtgggtgggacttgtgaagaatctgaacctttgtttgtaggagcagaatgacaaccatagagtatgaaaaatgagattattttgtggagccccccaacccacgtgatgacgtttggaatattttggaaaaagttgtgttttgttaatcaactcctccatagttgggtccataattctttgttttgttgaattggggatgtaaatcacaaatatacattccattatgtgaatgatgtgtactgaattactatacctatatatatatatatatatattcatttactt

SEQ ID NO: 144282 - DNA, 228 bp, Glycine max
gaattaattcctttgaagcccttttgagccttgtttccctttacttgtttagaagctcactacaagccttatgtgagaaaatatgatatcaccatatccttaaagaattttggagctttggaattgacttgggaaataactgtggggggtttttagttcattgcataatatgttttgctggctatgtgtcatgatgcatattgggccatactggatgaacatttgtta

SEQ ID NO: 144283 - DNA, 437 bp, Glycine max
  unsure (1)..(437): unsure at all n locations
tncttaagaagattcctaaggaagctagagcttagctactctcacctctctaatagctaagctcacctccttgagatgagaagctagagcttatctacacaccccatataatagctaagcttacccccatgataaaatacatgaaaatactaaaaaagtccctactacaaagactactcaaaattcctcgaaatacaaggctaaaaccctatactactagaatggccaaaatacaaggcccagaccaaggaaaaacctattctaatatttacaaagataagcgggctcatacttagcccatgggctcgaaatctatcctaaggctcatgagaaccctaggggccttccttggatctctggcccaatctacttggagtcttctatccaatgcccttgcggggtaggattgcatcatatactacatagaaattgatgag

SEQ ID NO: 144284 - DNA, 321 bp, Glycine max
  unsure (1)..(321): unsure at all n locations
ctcatacgtcctaaagctttattcaagacgaagacattataaatattcaagatggatgatcaaaacaatctttagagtcttagaaagggtgtattaaataggaatgaaattccaactgaagtagcacaaggtttggccgggaaattttagttaaaaaagtcttttcaacaaatttactctctggcaatcgattaccagaggatgtaatcgattaccaggggccaaaactgatttacaacaactattanaatgtgaattcaacaattgcactgtgtaatcgattacacatatatggttatcgattaccagcagtttctgaac

SEQ ID NO: 144285 - DNA, 340 bp, Glycine max
  unsure (1)..(340): unsure at all n locations
gacaatggtgatgtgaacctttttcttacccatgattacttaaactagaatcaatttcaagaaatacaagtccgaactcaaaatacatattgattaaactatcccaagcccaataagaaaggtaaggtatactccaacttcacacatttatagtttaccaataacaaaatttcaacttcatattacaaaagtttcacaaggaattaaaaaatcgcctttgctggatccagatatggtcgcatacatagtaaaagattaagcttgataacatgtgaacaaacccacaaaanaactatcgacgggtacatatctacaagactccttcaacatgcttaaaaaa

SEQ ID NO: 144286 - DNA, 395 bp, Glycine max
ggaccttaattaccgcggcatcagcttatctcgcctattttttgctttatttgaactacaaatgcttaccccactgagcaatatacccctcaatgctctgcacatcattaaactccgacaaagaaatctcaggctatccaaattcaacgcctgcaaactcgcccttacattcgaactcctcacctcaacataaatccccacacacctatccagcctgtcattggcaaataacctcccgagaatcgcctgcgcttgtgaaaaccgacaccggcaatggtgatggcgcaatgcacgcctgatccccgctcgcggacgccatatgcaacggcacactattctcactcaacagcgacctaaactcattcttcaaattacccaatgcagcatcagcaacc

SEQ ID NO: 144287 - DNA, 355 bp, Glycine max
tttgggaaagttaattacatatccatgatgtaagatccaatttctaattttaattggaaagtaaagtaagcaaatctttcccactgaaaataacataaacatgtatctcgccatttatattcttaatttgaaactcaaagcagcagaccaaaaatgcagaacataatggcagggaaattaaactcaaaacctcaaacattgacataatttacaaaaaaaaaaagaacttaaagagagctgttatagttacctcactccaacgctaatgatggttagttgccaactattcttccttgctagaggtgctactttgatctcatgtcagtggttaatgaatttactaagctccccgcgt

SEQ ID NO: 144288 - DNA, 314 bp, Glycine max
gagcttatgctgcggatatttactttataccttttcaacctcagcaacagaatccaccacagcagaacaatgatgacctttccaccatcagatacaaccctggatggatgaatcaccctaacctcagatggttcagccctcaacaacaacaacaaaaacctgctccttccttccaaaatgctgctagcccaaaccgaccatacatttctccaccaattcaacaacaacaacaactccagaaacaaccaacagtttaggcccctgcacaacctttccttgaaaaacttgtgacgcaaatgactatgctaaacatg

SEQ ID NO: 144289 - DNA, 349 bp, Glycine max
  unsure (1)..(349): unsure at all n locations
cgagatgaggaagtgtanaagggtgaacttcctgcttttattctttgaccacagagtggtacctggagatatgtcgcgggggtcaagagaccttggggacgtcaagcggggtgctattgcccaaaaccaaacttgaccaatcccgacccaaccccggcatagtcaaacaatgagaacctgtgatgtacctaaacacgcgagctcctgacagtcaacatattaaagaaacaaagaccacaatgcaatgacgctttgggtggctggccaacagtgaattttgcgggagatatgggtgtggcctctcgcaatctattaccaacggtgggtaatctatttcaaggcttaaaaa

SEQ ID NO: 144290 - DNA, 343 bp, Glycine max
gatcatgacagttgtgatgagttttaaggagatgaaaggaaagggaatcaatatctagaacttacaatggaaggcagttaatcaaaaaaaaaactattgacaaagcttcacaacaaaaataaaaggggaaaatgcttgaagaatgaatgtccttgtcacatcaagcagatcttgattcttttgctcatcaatgccattgttgttgtggcatataaggacaagagtattgagatataatacctttttgttgcaggtagttgtgaaaatcatgagaaagatactcatttctagagtcagtgcacaagatcctattgcttgtgagaaaataattctcacatatgcc

SEQ ID NO: 144291 - DNA, 451 bp, Glycine max
tgacatgaggaagtgttgaagggtgaaacttcctgcttttattgttgaccacagagtggtacttggagatatgtcgtgggggtcaggagaccttggggacgtcaggtggggtgctattgcccaaaaccaagcttgaccaatcccgacccaacccgggcatagtcggtcagtgagaacctgtgatgtacctaaacaggcgagctcctggcagtcaacagataaaaggaacaaagaccacaaagcaaggaggcttgtggtggctggccagctgtgaattttgtgtaatatgtggattatggcctctggtaatcgattaccaagggtgggtaatcgattacaaggcttaaaattgaaaacaggaggctaagatggtctctggtaatcgattaccaacgggtgtgatcgattaccacgcttaataacgaagtcaggaaacttatggagcctctgg

SEQ ID NO: 144292 - DNA, 254 bp, Glycine max
ttggatgtactaaacatgcccattctgttgtacggtctttgtgatgatgactgcgatgtatatatgctgatatcgctgatagaaaactgttagagatgaacggtataattcacctatggttataaaatgagaatggggtgtttgactggaaaaaacagacgtaggctttcatagttcgaacgctaactctggattctgtgagtaatgaacgttaacatgggataatcctagcttgaaatgcatttaagacatgt

SEQ ID NO: 144293 - DNA, 255 bp, Glycine max
  unsure (1)..(255): unsure at all n locations
tatccttatggcctgcctccggactatacctctcctgccatccccgaagatttaagccaagcccctacttttgaggggcaactcccaccttatgaagactatcccgggcaagaccatgccgaaggagatacccatcttggccccctgctccacctcaaagatccattcccgcatgaactaccccagccgaacatagtccgccatatcccggcctcacccacacnccgtaaagaatttgttcccttcgcggaagat

SEQ ID NO: 144294 - DNA, 364 bp, Glycine max
cacttaagtgcaactgaatatgactacatggttgacgcccgcacaccaaccaatctggaactacaaaaaatgaacaattacacaggccttcttaatattttttaatccataaatgtccattggaaaatttattataatattaacttttcatgtgaaaatacattctgatctgcttatctcacttcaaccaccaatttaatctataacttctcggctctctaatgaccaagccgctcctttttgtgtaaattcttctggcctattcaaagaaatctaattaacgtgttacaagaaatactatataccttaaatgccaagcgttgttacttaagtctaccacttcaggacatatttacatttacgg

SEQ ID NO: 144295 - DNA, 415 bp, Glycine max
  unsure (1)..(415): unsure at all n locations
tctctgaagtcaaaccacacacatatatatatctagacatgggacaaaatagntcttaaaaaaatgttatccccagaacaagtacacgttaattataacaaatgaacaaacaaaaaagcatgctttcattttctcctatcaaatttatcctgagaaaaaaaacaaaagtgagtcacttatagggaacaaattcttccagaactgaagatcagtcttatgaggctcatcaactatcttggtggcccaacagaacaacattatgagagagccacatgcaagggagagagttgaggtaagccaagggtatgtgaatgcattcaacaccttcttgttataaatgttgaacaccacattcagtgcccaccatgttgcaaagtatatttgacaaccatatttgtttatgttcaacctaata

SEQ ID NO: 144296 - DNA, 97 bp, Glycine max
tggaccaattccgggtttgctggtgctatgggagagctctaaatttttttcagaaaactctaagaaaaaatgggcgatataaaaattcttctctctt

SEQ ID NO: 144297 - DNA, 364 bp, Glycine max
  unsure (1)..(364): unsure at all n locations
gatctataactcaaataaacctaaaggaattgtcttgaattggttacatggcattcttcactattttggcgattttataaaacaaaattagtgaaagcactgatagaattacatgccattcccccataaaacaaaatacgtggaaaatcattagagaaacaaaaatcgaaataacaagtcatagatgctcttgttagccaatagaacagagaanaacaacaatcagtggcaagcattttaaatttaataaattaatacttgataccaagacactctcagcagtcaactgacaagagatatanggaanttgagtccataaatgaaaaatgcccagacatttgataatgactctnacttcaatttc

SEQ ID NO: 144298 - DNA, 262 bp, Glycine max
gggggctacttgagcttgcagaatccttcacctttgggcgtatttctttgaagattcgtgctcctttttacacatgttctgtaactacatgctatctggagccatatcagaattgtactgatactgcctaatgaaggcgaccattatgtccttccaacaatggactcaagaagttctggattagtgtaccacgtgacggctgccccaatgcatcaacaattttttatatgttgagtatgccaccatcttccgatagtacacc

SEQ ID NO: 144299 - DNA, 381 bp, Glycine max
ttatggtgtcttctcgataaccttcgttttacttgatgaaatttggttcctcatctctaattaatgcttgcaggctcacttaaatactgctcatatataaatgttaaaaacaaagtgtgaaggttatttttttataaaaaaaaatctatactccttgtgagttagatattatattgcttgataatcttattgctaaatgatatttctttggtttagggtgatgaatacatcaatggggagatcattccttgtaggtaccctacctatcaaccaaaacatagccagccaaagaagagtaaaagttatgagaggcagagagattcctttggtcttcccttatagaatgcgtctataaatggaaccttaatcaaagatccctga

SEQ ID NO: 144300 - DNA, 312 bp, Glycine max
gggtttcttcatgtaagcttgaacttttagcaactttcgacgaatgctatcaaacactttatcgcgagtcattagaaagtcgtccacgacgtcaagctttgaggagcccgcaaggtaatctggaaaagagaatggcttgtgtccaaatattatctcgtaaggtgtggagcctgtgctactattccacgaagtgttatgggataactcaacccacggcaataacttgccccatgtttctggccaacgatgcacaaaggcacgcaaatattgttcaattaccctgttcattacctctacctgaccatcactctg

SEQ ID NO: 144301 - DNA, 307 bp, Glycine max
acagtcacctgcagcatgcagcttaattagatggcttgtaacaagtataagcaagactggttgttaggatatgcccaatcttggggtggatttttctgaaacctttgctccactggctaggttggatacgataaagtttgtgttcgcgcttacaacacaaaatggttgggctacacatcatatggatgtcaagtctgcctttttgaatgggtactttgaagaaaaaatcttttttgaacaaccaaaaggttttgtagtccataactaaacgaattgttatttatcgtgtacatcctttttgataaca

SEQ ID NO: 144302 - DNA, 344 bp, Glycine max
cctggaacaaatgtgctacacttggagtgatcacatgccgcccctttgaaaccttaacacccactctgtcattatgccgagaattatgaaaggcaacaggggtaaccctttctaagtattctggacaaaaatcaatggcttcttttgcaatgtagctctcaacaatagaagcttctggacgatatagatactttgtatacccttttaagatcttcatgtatcgctcaaacgggtacatccaccgtagataaacaggaccacaacatttgatttctctgaccagatgcacaatctagtgaatcatgatgttaaaaaaagcacaggaaaatacatctcccactggc

SEQ ID NO: 144303 - DNA, 299 bp, Glycine max
  unsure (1)..(299): unsure at all n locations
gccctttggaggaatcttttggaggggccaagtgggcctggttgctatttgcacccccatttttactaaatacaccccctgcccttttttggtgattcttttttcgtaaaggtatggaaacttacgaatttcgtaatgatacttgtgttctttccgtaatgttacggaaacttgcggattacataatcatccctttttttgacctacggaatgttacngaacctcactatttgtgcaacgaagcttcttttgatattcggtgtgacacggaaacttaccgattgtgcctcagattttct

SEQ ID NO: 144304 - DNA, 327 bp, Glycine max
  unsure (1)..(327): unsure at all n locations
cattaataattaatttaaccccccttcttaattattctcgagtgcnnttgaaccaacaagtgaaaggtaatgcagacatcttggaataatgcttcacattttgtgcatgatgccaacttctttgtttaagcttaagggcangtaccgactggtgataggcccatgatcgaatgatcatcaacccgcgttcggctaagacattaaacagcgctcctaggaggcgcctaatatctctaattttctttttaaaatcctgtttttactcgtttgtttcctgaatatatcttgaatcaccttagttatatgcaactataggatttagaaaaa

SEQ ID NO: 144305 - DNA, 398 bp, Glycine max
  unsure (1)..(398): unsure at all n locations
ctttccanagattacggaaaatctgggacttagccatggtataagtctctacataggccattgcctcccttgcccagtattatgatcagccgatgaggtgcttcacctttgggaacttccaactatcacctatggtagaagaatttgaagagatcctatgatgccctctatgggggaagaaaccatacctcttcacagggttctatccctcattagctagaatttccaagatagtccaaatctcggcgcaggaattagaccacaggaagcaagtcgaaaatggggtggtcggaatatcgagaaaatatttggaggtaaaagcaagaatcttggcagataaaggcgagtagatcccgttcatagatattctcatactatctgatttcangggggggggg

SEQ ID NO: 144306 - DNA, 344 bp, Glycine max
cttttagtgacattagcttaccttttataatagaatgtacttcttgatgatacaatgcgctgggccacccattctataatctaagatagaagcacagatctccatgaacaaccgtatcatactaaattacatccaacagttcaactatcacaaccatattacatgatagggtcatgtcaaacttgttaaaagaattacctgaacagatgactcttgtacccattgaagtagtgcaactgcatacaattctcatgattgctatcactatcaccactaaagtaaccattaactaattccatggcattagagatcttgagtctataaatgtgaggaacataaataca

SEQ ID NO: 144307 - DNA, 140 bp, Glycine max
cacaccaagggaatcgggtccaaactaataatcaaacccaccaatccaatgggaacgtggtcccaaacttattattagaacgaccataccaatgggaacctgggtcccgacttattatcatacccaccataccaatggga

SEQ ID NO: 144308 - DNA, 383 bp, Glycine max
  unsure (1)..(383): unsure at all n locations
agctntaaagaatgagntattacttagtggttgtgctattcttctcatatgaatcgatcaactagctcgaataatggatagtctttggagcacccaatngtttgatgcatagttactacttactagtaccgcgtgaggctaatatatgtggtgtgaccaatcgagaaaacgaccgctgatactcacttgcatagataacanatgataaatttgttgtgacttctctattcactcttcctttgatgataatacttctgttaggatagagcacagatgctcaaagagaactcttatcggtccaattatattgaattcaattgtttgaagaaataaatttaatttaccgtgtcctagctggatcattcttgctgactacacatttt

SEQ ID NO: 144309 - DNA, 347 bp, Glycine max
ccttaaaactaagcttacgcaaacgattatgtaactacaaatgatagattgttttattaaaaatgagatttcctttaaactaaaacatgaaaaggaaatattggggatcctatactatgacaacctggtgtataaagtacatgtacaatcactatctatgccagtctgccggaaattaccaatggcaacaggaggccacctaaacactctatcctggctcgctttgcgaagcataattctcaatgggggcctatcaactcaaaaaagctggaagcttttcggttggccctttatgaaccaatttctgccatgtccgagagatgattgaccacacctagtgaactgac

SEQ ID NO: 144310 - DNA, 329 bp, Glycine max
agcttcttatccaacgctcatcttggagattattctcttttttccatggcttattccttaatggatggcgcctcctctcacctcttctcctttgtcttccgctgcatctccatggtggaaaatcaccattaaaggatcccattgaagctcaaagatccagcctccataaaagccccacaaacaagcttccatcaagtggtaatcagagcataagagctttaagtaggtgctccttaaacctccattaatattgttgctttaccttctcttccattggtggttcttcatttttctccatgtatctcctcacatttcttgttcaaaatggt

SEQ ID NO: 144311 - DNA, 417 bp, Glycine max
agctcttaaagttccaagaacacatgaatgttttggcggatccccacaaagagatgtaaattttgagccacgcgagtgggtcatggttaagctccgtccccaatccccattgtcaaatttcggcaactgaatcttcttatttgaaattggccaagcatttttatggcccatttaagattctatcttgcattggcaagatggcttacaagttacaaattgcggagggctcacgcatccatccagttttccattgctccatactcaaaccttttcaccaaccttcttcgagcacagacagtccaatagctctaccttcacaggacaatgataataaccccatcatttcaccacttgcattccttatcactcgcttggaccatactaagggtgaaccacgaatgatggagcttgtgcaat

SEQ ID NO: 144312 - DNA, 356 bp, Glycine max
  unsure (1)..(356): unsure at all n locations
ttgagcttcaatgagggcctttaatggtgattttccaccatggagatgcagcgaaagaaaaaggagaagagggtagaggcggagccctccactaaggaataagccatggaagaaggagcttctccaccaaaatgagtcctggataaaaacttggagaggatgcttcaatggggggaaagaacgagggagagaaagagagagggcggagcacgaaattgagtgaagaaaaaggagagaagttgaactntgagttgtatctcacaagactctcattcatcanagctacaacaaagtgttacacatgcttctatttatagactanngtagcttcttgagaagctttttaagaaaacttc

SEQ ID NO: 144313 - DNA, 348 bp, Glycine max
  unsure (1)..(348): unsure at all n locations
actcagcttctacanaactttatgccgtggaccttctttattatttgattactacagccgctgtcctcttcatttcccctagagcaattcaacaaaaaaaatggaaaagcgaaaagagatttggagaccttcaaaaagagaggtgaactacctctgctgatgccatcagcagattcaagatatccnagttctaaggagttgtgcacccacaaagaagttaagggcatgaaagattacatgggcgaaactgtcacattgatggtaatttgtcctacattctgaaaatgtaggacccagacttctgtataccttgcttatgggacagaaattgatatgcctgctaactag

SEQ ID NO: 144314 - DNA, 342 bp, Glycine max
ctacctaggctataaatagaagcatgtgtaacacttggtgttactttgatgaatgagagtcttgtgagacacaactcaaaagtcaacttctctcccttttttcttcctttaatttcgtgctccccctctctctttctctccctccatagaagcatcctctccaagcttcttatccaacgctcatcttggtgtgaagctcttcttcatggcttattcctcgtgatggccctccctcacctcttctctttggcttcgctcatctcatggtgaaaactacattaaagactcatgaagctaaagatcctgctcctaatgccccccactagcttcatagaacacctg

SEQ ID NO: 144315 - DNA, 426 bp, Glycine max
  unsure (1)..(426): unsure at all n locations
tactcagcttggcaacaatcctgtcattgaaccactntccatcatcattttgaaatgagactcatctatgtccccttcacgcaagttgtttttggtcccataattgggtattgcttccaacgataccactttggaaattgggatcaacttcttgctgcatatgaccttaaggacaaaggcatttttctggatgtgggtgatgttagcaccttccagcccaataaacccaagagacacacgtagaggcccacataccttagaaacttcgtgtaatccctcagctaaatagagataggggagcataatattcaccagcaccacatcagaattcttacttcgcattcttgcagcatatgtaattttgctataacccatagtgaatttgttagagcatttagctgacatttatattttcagcaaattatt

SEQ ID NO: 144316 - DNA, 244 bp, Glycine max
  unsure (1)..(244): unsure at all n locations
acacttttgaaattaagaaacgcaccccttttttctaggcgatcacttacataaattctccccctttggttttgaattagggcttatcttaaaattaaattgactactcatgtgagttcttgatttaatcccatttctctccccctttggcatgaacaaaaagccagagagcgtatctaatntgaagcatacaaatataactaagcattctacaacattcatggtaaaatatcgacccaatcat

SEQ ID NO: 144317 - DNA, 311 bp, Glycine max
  unsure (1)..(311): unsure at all n locations
taaaaatggtaggtgatgaatagctgtttaatcaacatataatagtattttttatttaaccttttagtgttggctgagaatattatccaacatataagacacaatgacttattcacaaatatttaaaaaattaggtaatttaattaataaaaaataatttatcctaaatgtatgtctttntaaaagttatccctgacattaatgacacgtactcttatgtgttcattttaaaggtatccttgacattaatcatgtggacgcttctattctctcaacccttctcttgggtaaatgtgatactattctacact

SEQ ID NO: 144318 - DNA, 376 bp, Glycine max
tgcaagcttgtagagaaatgtctcgtatcaattttatctattaccgtttatcttttttcattacatagttgtttctgagacgacgattgatttatccaggagtctttaatttaattgattaccatgtgatataatcgactacttctctttctataagtgtgtcagaagtgatcaagagttctatatgcacagtgagataatctaattccaatcttggattgctctgttaagaattctatatgcacagtgaaaatctaattcgagtttggatagataattggattagcttctctagagataaagagtgaactaccatacaacaagcggtgtaatacttctcttgatcttatccttccttgtcattgtggtcttaatt

SEQ ID NO: 144319 - DNA, 283 bp, Glycine max
gccctatacgaaatcactgaggtacttgggcctgtgtgtgttgcgttttgggctgttattgcctctgctatttgtagtcatgatttcctcttgggtggaattattgtccgatgttgatatctatgtgatatccggtactgctgttagtatgacgctatcatctgcatgggttttttttatcggcaaaaatatataaatatttcattatgtaaatagtgatgaagcaccacaggtacttttgtacatatatatgatcccatagatatgggtccttataaaaaac

SEQ ID NO: 144320 - DNA, 164 bp, Glycine max
agcttgccacccagctcacccatgctagctcatctcgcccagtttagctaagttgcttcaccgccttctggagaacttcctggaaggtccaaattggtctatgtgctatttgcacccccttttttactatatacaccccttggcattttttggctgatcttttt

SEQ ID NO: 144321 - DNA, 270 bp, Glycine max
ttaccggcctaacttaagggcatgaaacttagcgcccgtcattggagctaagctgaaattctttgggcaatgggagcgcttaaaaagggcttatcaactaaacgcatgctcctctgtacttaaaaagcctcattttagctaagccagccatatcctggcttatcgagagttacaacttttcggatctgcaaacctcgctaagtggtttgatcctgtcgctaagccaagcctctggtaaaaaaaaaaaaactgattttgaaattgaaacgt

SEQ ID NO: 144322 - DNA, 362 bp, Glycine max
catgcaagcttgaaattgacaacggaagctctcattatattcaaatggtcatcacttttcacaggatgtccgattcgcagacataactcatctagaagctcgaaattgaacaacggaagccctcgagatattcgaatggtcataaaacttcactccgatgtccgattgggggacataatatatctagacgctcgaaattgaacaactgaagctttcgtcaaattctaatagtcataagtttgcacacggatatccgattctgtgacataactcatgtatacgctcgaaattgaacaacggaagctctcgacaatatccaatgggcttaacatttgactccgatgtccgattcgggacatatt

SEQ ID NO: 144323 - DNA, 394 bp, Glycine max
  unsure (1)..(394): unsure at all n locations
cttacccgttgaagatcgaagaacgatgttgttcttatgaagaacgtcgaagaacgggtgaaacctttgcgagattcctcacggaaaacgttaccgaaacatttcggaagcgcctcggcttagaatttcttcacggaaacaatttttccaagcaaattcgaaagagagagaaatacctaaggggctgaaccccttccttcttggcttcctcccctatatatagcaaaatatgggaggtggttgccgcccagctcgcccangcgagcacggttgctctctccaaaaacaaccgccttctggaggaatattccacagggcccaagtgggcctgggtgctatttgctcccccatttttactatactcacccccctctgctgattttggtgagtcttt

SEQ ID NO: 144324 - DNA, 400 bp, Glycine max
  unsure (1)..(400): unsure at all n locations
agcttgttccanagcatattcttaacaaacttgttatttgacttcttgtgctgcccaaaagtaaggggaccctcaaataacgcctattagcaagttcttctttagaccaagcttggataagatgttttgttttagaattgggtcaaaatttctactaaaaaatgttttgacttctatagattgatgacttagaagctntagcgtaatcattcaatgcattcataatacagccacattctaccaaagctgctctaataaaatgaaacagtcatcagcggagagtaggtaagatataataggtacacccctacagatattgatgccatgagtatggcttcacccttctaacttctaataagagcttatatcccttcagcatagaggatgaacacgaaaagag

SEQ ID NO: 144325 - DNA, 338 bp, Glycine max
actcagctggctgagacagtttctaaaattaagaggttttttgtattggaggttatggaggttcccgggcttggcaaaaagattacttggtatagacctaacggcgcctctagaagcaaacttgacagggtccttctttcttatgaatggcttgatagatggcctaacaacattcaagctacacttgcaaggaatttttcggatcactgtccaattggtcttcgttctaacgagattgattggggccccaaacctcttcggataatggattgctagcttcttgataggtctttcaaggaaactgtctgtcacagctggacatcctatctgcaatcaag

SEQ ID NO: 144326 - DNA, 334 bp, Glycine max
tgaaaaaattggggccaatgaagaaggtgaggatgaaatataaacccatgctgtgactgcctttcctatattggcaagtttccccccacccaaccatgttattacttaggcaataacaaacccttttctttctcactgcccagttatccacaaaggcaatctctaaattcaccacaaagtctgtctaccgcattttcaatgacgaacaccacctttagcacaaaccaataacacccacccaagaattgaattttgcagcgagaaagcctgtagaattcacccccatttcagtggcctatgctgacttactcgcatatctacttgataatcaatg

SEQ ID NO: 144327 - DNA, 313 bp, Glycine max
tacacttgcacatttgagaagcaaactcattctaccaagaactcattgaaagtgctcaaagacaattgtgatagtaaggtacatctaatgttagtcactcatgtagactctttaaggttcccatgtcatcaagaatcaaccggatcgataaatccatggcatccctctaagatcttaaatcaagaaagtttcacttggtcatattaccaagtgtaacaacccattgccatcttttaatggtgcacgtggtcggtccaaaaaccttacattttcttgctgtggaaaataatcaagttttttttttaaaaacaaa

SEQ ID NO: 144328 - DNA, 364 bp, Glycine max
  unsure (1)..(364): unsure at all n locations
ctagtgactgtgtgccaccacaaattttacattgagtgttcttattgatatgtcctacaaatgaatttgcataaatttttaattggcataaacatatgattccgggatatgaatttggctttctttctttcttacattttaaaccactggcccaaaaactatcccaatgtttattattttaccctttgccagcccttctgaaccaaacacttgatattttgtggaacactaacctaagaataaaagttcctaccctaccttatgttangagagcaaaggttgttttgattgaaaattctatcatttggtggctaatgtgatgtaaatactttgtttttatgggtattaaaggaaattaaatatt

SEQ ID NO: 144329 - DNA, 277 bp, Glycine max
ttgaagcactttctatctttctctggggatgtaaattgcttcaaaaaaacattgaaggttaccttttgtgtcttgacgctcatttccagattatcattccccatattcactacatagttggtagtcaacatgaagggtctgcctaggataaaaggaatcttcgtatcttcttctatgtccatgatgacaaatcctcagagaaagttaagtgacggactttgaccaagacatcttctaattccccccacgatcttattattgataggtttgcgagctg

SEQ ID NO: 144330 - DNA, 401 bp, Glycine max
  unsure (1)..(401): unsure at all n locations
cttagaatctcaagcttgtgactctnggcaatttctttaaaactagtcacttaaaaatttgtgactcttgaaagaatcttcaaaaacaaatcacttgaagaattgtgacttttggaaatgtatttttcgaaatcagtcactggttatcaattaccattaaggtgtaatcgattacacctcaacagatctgactcttcatttgaatttgaaaattaaatgttaaaagctctggtatcgattaaagtgtgtgtatccatacacaagttaaatacttaaactgttaaccataatgaactctgaattgaaatctacgttaaaacactgaatcaataccacttctgtatcataccgagataaactcttgtatgatttggaaactctggctctcatgttgaaaactt

SEQ ID NO: 144331 - DNA, 359 bp, Glycine max
  unsure (1)..(359): unsure at all n locations
agtttttggagaggagaatcactttcaggtttcctcattctagatagtactggtcatgcgcgctgtacacgtagaataaagattcattctctgcaatttccgttctgcttcaattacaatatcgttttctgctgactaatggaatgctaaatctccaaccgttgttttctcttgaggatcaagcacaactctctttgaggttttggtattactattgaattctgatcagnttttcctcttcacaaatgctttgtattcgttgctattaatccatgctcgattaattgactctgcacttatttatggtcatgcttaatgatcaatttcgttcatgattaattggtggatgtgttgcttaa

SEQ ID NO: 144332 - DNA, 396 bp, Glycine max
  unsure (1)..(396): unsure at all n locations
ntctctctaagctttgtatccaagtcactctcttggtggtgaaacttctccctccaaggcttattctctagcggatgacacctcctctcacctcttctcctttatcttctactggcactccatggctgaaaatcaccattgaaagaccttattgaagctcaaagattcaacctccatagaagcttcttaagcaagcttccatcacacatactataacacaacatcattctatgctacatcgatctacaatacctagctcattcctaataagaagaactatctctagcaagaggtttaataagatgtcagctagttgatgttcactatcaacaaactcaatgtaacaatcaccttttgatacatgatctcttaataaatgatgcctaaatctatata

SEQ ID NO: 144333 - DNA, 135 bp, Glycine max
tgggttgacttacacggtggggagcccaaactaaatgacaatgcgttctatagagcacggagtattgtatttgacaggccgttaacttctaactcaagtagtctacagcgcgctcgcctccgggacacccgtaat

SEQ ID NO: 144334 - DNA, 385 bp, Glycine max
tgcaagctagacaaatatcacatcttccacactagccactgaatcattgcacctccttcactgagctcacttttcccgctcatcccataagccattatagtttgaatctgagctaaaaaaacccaaatgttctaacccgtgagtttcactgctaaataacgcactaagcacacaagagaatagaatcaattgcctagactaacacaaacaaacacgtcgtagcatggatcacactaatcaagttgtcatgccattcttctttacccataattcaattctcataaagacgaggagcaagaacgtacaaatattgaaaatggtttacctataccaaatattgaaagcacatggaagcgctccacatttcttctttcatccgtgacat

SEQ ID NO: 144335 - DNA, 430 bp, Glycine max
  unsure (1)..(430): unsure at all n locations
ctcagcttatggtagagcttactattggttctccttttggcagaactacacccaaatattgttcacacatttcttcccaatcatagtaagttgcactaatgattgggctaccgtccacccttatgccatgctgcagtgctacatcctctagtgtaattgtctattctccaacaagaagatgaaaagattgtgtctctggtctccatcactcaaaaagtgtagtcactatatgatgataaattttgaagtgtcataattttgtcacattagcaaacccagcatgagcaagcaacgactcaattaaaggatgaggagcgggcattgaatgacaataggaaatgattattggtgggtgtccttgtaaaacaaaagttacgtttttataattgtcatgacaatnaaaggttataatatcatctattagtactta

SEQ ID NO: 144336 - DNA, 406 bp, Glycine max
agcgttatatgaagaactctcttagcgcgcttaccactctatgtgagttcatcttctaatgatgaacactcatccccttgctgaactacctggggctaagcgaggatgaatcgctaagcccaaggaacttagccattttttatgtgatagccgggcgctaagccaatcattcctgaaccaagcgcaattggttgcagtattcgctgagctaatcgagcttcacgagctaagctcccataacttagtgaaatttttgctcaatttagtgccgctaagtgctgcttattcttgggtaagcgcaaatacatgcagctaacctttggcttagcggactccttgccagctaagccaactttgcagacactggaacctagcattttatgctaagcggcattcctgtgtcgct

SEQ ID NO: 144337 - DNA, 322 bp, Glycine max
tcatggtgatgagctgatctaatcttacaccaatagtacattgataatcacctatagaatgagtcaccacggtcccatttttgaaagatactataaatgtcttgaggcatgtaaagctgcttttgtaacaacatgtatacctctgattgggttagatggatgttatctgaaaagatattattgtggccatttgttgacaaccattgggaaagattgtaattaccaaatgactcctattgcatatgtagcagtccatgctgaaaccatagactcatgactatggggtattgacttgttactcaaagacatggatgggattact

SEQ ID NO: 144338 - DNA, 340 bp, Glycine max
gcgttccgaagtctctcactaagaactgttatatgctttcttccgccggagctcccttcatggagtaccctaactgtcttatagcaagagccggattgaagttaatacaacccctcatccctatcaacgggatgttagggtagttcccacatgagaagagaactccctcattaccttacttccatcgaggaaaccacctgattattctgccttctatgccagccaagtgtatggccctatctactcttctcttttcgacacacgagcgatggcttcggagcggacatgggtgtattatgtcttgttggaataggtgtgaaaccaaccatacacaaagagc

SEQ ID NO: 144339 - DNA, 427 bp, Glycine max
gtggtgatcagagcacaagagcttcaagagtgttcttcttaaacctccatgtaatttttttctttaccttctcttccattggtggttcttcatttttctccatgtatctcctcacatgtcttgttctaaatgtttgtaacatgattctttaaagtttccaccgattaaacttgctatagaaactagatatgagtgtctatgattcacaattcttgctcttgttcttgaaccatgaattgtgttgagtttatgggcctttgagttttgtcttgttattttttgtggctgaaacctaaaccataaaattcttacaagaatatttaagtagaagaaaacctcaacaatctagagtgacttgttcacctattgtagttgtgtcataaaagtcatgtctagtcatgaaactcgtcacataagaattcttatg

SEQ ID NO: 144340 - DNA, 166 bp, Glycine max
ggatcttaagcaccgcggctgcagctctatacagacctctatctggctttttccttgaccacacctactgtcattttttctatcaatatcggcgaataatacttttgttacgaggggggctattgttttcctggccgaataaatgggaacatgccagttttggccg

SEQ ID NO: 144341 - DNA, 329 bp, Glycine max
tgacatgaagaactgttcaacggtgaaacttgctgcttttattgttgaccacatactggtacctcgagatatgtcgcccgggtcacgataccttcttgacgtcacgcggggtgctattgtccaaaaccaagcttgaccaatcccgacccaaccctggcatattcggtcattgagaacctgtgatgtactaagctgcgactcctggcgtcacagataaaggaaaacaagaccacccatcattgaggctcgtggtggctggccaactgtgaatattgtgtaatatgtggattgtggcctctggtaatcgaataccaaaggtgggtgatcga

SEQ ID NO: 144342 - DNA, 207 bp, Glycine max
tggtgccggatctgttggcactgagaactaggtgaatgttttcactttttgagagagacacagcatcattgtcacgggaagctgctttgtcagagcttggagacatctggattgtggggcacgttcatgattctgaaacctaactcagcattattagcacacctgcacctgtgcacccactttttttctgaaatcttcgatttttca

SEQ ID NO: 144343 - DNA, 161 bp, Glycine max
tatggtattgtaattgagagccctcgaccattggatttttatgagatggcactccacacttgatctcagtccacaattaagacgctgggaacgaatatagttgcacatgcgttattctttgacatgacgctgtttgttatacacatacacaggaggagacc

SEQ ID NO: 144344 - DNA, 397 bp, Glycine max
agcttcacactttggtcattctcatagatgttgcatgataaaacatgctctaatttcatctcccactccaagtaagcctccagatcattctttcctttaaagggatgaatgatgggtttaataccatcaacttcggtttgtctaggaacaccatcattccctcttcttctcctgtcttcttcattatgagctctaagctccatttgatccaacctctcatggagcgcatcatctcattgtttcattaacctctcccaatgcgcataaaacttgcatttgaattgcgaaagcgcgctccatcattatgatatgacctaacatctaaacaacaaatcaacgtaacagacattatagtgctgttgaaacctcacccctcagtgatcacacatattgtttt

SEQ ID NO: 144345 - DNA, 384 bp, Glycine max
  unsure (1)..(384): unsure at all n locations
caccccaaattccggtgtcatatgctaaacttgatcccatatctacttgataattcaatggtagccataaccctagccaagggtcatcaacctccatttctccgagaatacgactcgaacgcaatgtgtgcttgtcacggagaagccccggggcgttccattgagcattgtanggctctgaagtgtanggtgcgaggtctaattgatgctggctgaaatttgaggagaatcgcgtgttaatcctgacattgacaagagatgccacacattgggcaattttgaaagcttgtgttaggtgtccctaatgactcatcacggtttccaagtttatgccattatttgtaaccacaactaccatgttaaatgaaatggataaaaatgata

SEQ ID NO: 144346 - DNA, 344 bp, Glycine max
gccaacaacaagctgtaacactcagcatctgtatacatactttcgtacatctatgtacatgaatatatatatatgtatatagacatacatatgtacatatatctatatagtattatgtatatgcatatatatataagcgcagactttatcctttctttatatatttggcgcagacgagctttgttcatctaataaacacgagtgtagagagtctttttctagaaccaaaccacttgcaggaatattttaaataggctatcatttgagtagccatatatatatcagggaaggactcctatgcttatgtgcaagcggattgtgttggtagaatgaaggggagaaaa

SEQ ID NO: 144347 - DNA, 405 bp, Glycine max
  unsure (1)..(405): unsure at all n locations
tagagcacttgtttgacactcatcacttgcaaaaatatgacactgaagagagtaacaaagtattgtgaagagaggaagaaagtagtgtgaagagaagaagaaagactttcgtttgaagtttgctgattctatagtaaggatattttgtatctatttaaagaaagccctctttccttttgtttatttatcatgcacaaattgtttattttgaagtaataaattttatggttagaatcaaactttgaagctcaaatttaagtgtattaattntggtaattagaattttaatttagaaattattagtagtaattatttgtaagcctttctttaatggtgtttgcgtctgaaataattttcgtatttgacatatacaatattttgtattattgacatatatttaattaa

SEQ ID NO: 144348 - DNA, 404 bp, Glycine max
cttatgctgcagatatttacaatagaccttctcaacctcaacagcaaaatcgaccacagcataacaattatgacctctccagcaacagatacaaccctggatggaggaatcaccctaatctcagatggtccagccctcagcaacaacagcagcagcctgttccttccttccaaaaatgtgctggcccaagcagaccatacattcctccaccaatccaacaacagcaacaaccccagaaacagccaacagttgaggcccctccacaaccttccctcgaagaacttgtgaggcacatgactatgcaaaacatgcagtttcagcaagagaccagagcgttcattcagagcttgacttatcagatgggacaattatctacacaattgaatcaacaacagttccagaat

SEQ ID NO: 144349 - DNA, 185 bp, Glycine max
gaatcatgtcttcaagggctcccccactggcaacatctatcataccttctttcatattactgaatccttcataaaaatatttggaaagaagctgttctgaaatctgatggtgggggcaactggcacataatttcttaaatctctcccagtactcatacaggctctcttcactgagttgtctaata

SEQ ID NO: 144350 - DNA, 353 bp, Glycine max
  unsure (1)..(353): unsure at all n locations
cggcatgcacgcttctggagggacatcatgactagctctccgatcagacattcaccacatattctgncgtcttctattttcagactgggaatgcctctaacagcacctttgtcaatgattttcctcatgcctcttaagtgcacatgtcccaatctttgatgccatattctgacttcatcttctttggaagatagacatgtggaggaatagctggatacttgaggtgtccatagggaacagctattctttgatctgctgcccttcattataacttcactcttctcatttgtcaccaagcattctgactttgtgaagttacattgaatccttcatacacaactgactgatgctga

SEQ ID NO: 144351 - DNA, 263 bp, Glycine max
ataacccttggaaaggtcaatataaacctctttaaaccaatctcttttcaaaaaagcttatttacatcttattggagaagacaccagtttctatcagcagcaacacagagcaaaactctcacagtgggtagcttggccactgggaaaaagggtcagagaaatgattccttgggaagttcctataaacttttcaaaaaatctctattcaaaaagcttattaactctaattgggaagacactatttctatcgcaacaaccagagc

SEQ ID NO: 144352 - DNA, 323 bp, Glycine max
atactacgatttcagcttttatatgcattttcttggccaacatcagctctactgtcgaaatttaccacttaaagtgtctctaaacgtttagaaaccctcatactagtgactcacatcgcatattcatcattaaacttagacactggcaacggattttctcgtgagtctttacatactgcatactacacacttgatgactttatagagcacactatacttgtgagtaggagcagttaccacttgatgctataagtagagccctctaaccctagactattgaaatactatttcagaccatatcataactatatatgagccttact

SEQ ID NO: 144353 - DNA, 255 bp, Glycine max
ttagtgatatacaactacacactccgattacaaaattaaacacaaaatggggccttcaatgttcttcattttttatactggaacatccctatcaacaaccctcctttgtttgagtcctggtaagtttaacttatacttcgctactaatggaacaatagatgccaggacctacatgcaaatgccccacatgaataacacttgtgatatatgaaaaaagagtgcgcgcaaaaacaaggggagataaaaaaacttggg

SEQ ID NO: 144354 - DNA, 203 bp, Glycine max
cctatagtaagctaagcgtccccctctgacaaaatgcatgaaggtacttaggggtctttctactaagactcctctgacacgctgaaatactgagctaaatctctctactgctcgaatggccagaataccacgccctaaataagaaaaaagcgattctaatattacagagaaagtggcccgaccttggccgtgggtcataatct

SEQ ID NO: 144355 - DNA, 282 bp, Glycine max
caaatcttttaatacctaaccatgcttatcaaatatgcatctccatgattagctagcactgaatatgtcgataatcaagataatgttgttgcgctgctgccaaataaaccatgtcaacgctagccaccaacacttccacctgttgacctttacagtctcacccaccccaaatatatgttgaacgaaatgatgtctttggttttgcgggagaggacccacacgattcacccaagacatcgagtccaccacagcggactgatttgctgcaatgataaacgcatg

SEQ ID NO: 144356 - DNA, 376 bp, Glycine max
aaccctatgtccacccttgggtctcacatctccttaacccaaagtttgtccatgggatgaaaacccaaagttcaaccttggtacataattctacaaaacccaagatactcccttggtccactcacatgaagcaactacgacaaccaccatttagggtccaagttccactaagcgaattgtcaccccactattaagcaaaacctttacccaggtcgaacctatactcactcctcataaatatcagaggagtactcttgcatgtcaggatgacccaccaacgaattgcatgacaagacctttaattatgtgcagcttacacttactcctcacaaccatcaaaggacgaactcagcaggtcaagcgacctatccactca

SEQ ID NO: 144357 - DNA, 394 bp, Glycine max
ggatcttaagtcactgggctgcagcttgctcaacattataaaacctgctatgtttaatagcgggaacagcctcaacagaattattatgacctcatcagcaataggtgcatatgccctatggaggaatcatccccaccttagatgatcgaatccgtaacaacagcaccataacaacaaccggtcttattttcacaatgcggctggcccaagcagactatacgttcctgcaccacttcagcagtcagcagcagcgacttcctcataagttacaaactaatgaggcccctccacagccttccatctaacaatctttgatgcaaatgactatgcaaaacatgctttttaacaagagacttagccttctttcatacttacttttagatggacagtggct

SEQ ID NO: 144358 - DNA, 145 bp, Glycine max
tgatgttcattgcctcaatctattgcacgtatcaaatcttttttatttttggtaacgagaaatgccctgtgaaatgctatacagcccatttaataactgggtccgaggcctccaacttttaaagtcttaaagacggaattggaaa

SEQ ID NO: 144359 - DNA, 340 bp, Glycine max
ttgaccgcgccctgaatgtacctgctataatactttgcgaagctatgactgcacttgcatggggatctcttgtctataaaggaccaccacacttgcataagtgaggtattaatgcactcgatattcactaacttgcatggcatttgaatagcttgggaacatatattacctactggtattctgcacgtaaaactgccacacatgagggaagatcagcttgggctgccttttgggttattaaaattggcttaatggaggctgctgcaggggcttaccttgtgtacatatataaataggggaaactctatcacattctcacataggtgatgctatttgatat

SEQ ID NO: 144360 - DNA, 201 bp, Glycine max
cggatcttaagcacgcggctgcacttatgggctaatttcctttgtttccccttggcccgttgttcatatgatttttactcgtatccccgtagtggtcacttcaaaatggagattttatagaaccatttcattacctacgagttcagacttcatatatgataattttttcactaatttttggaaaccaaatatcacactttg

SEQ ID NO: 144361 - DNA, 280 bp, Glycine max
  unsure (1)..(280): unsure at all n locations
agcttttcgactaacatattgcacaaaggtttattcggttgaccactcgggcatttccgcccgactgtgtgactcataagttaacacgacatatcgtgtgagcacggaagatgacgtatatcctctcgtgttatcgggcttgtcctctgcgattgtcgattggcgcaagagacgacntaaaactttgtgtgctatcatgcgttatcgtgttcacatagcaaaaaggattatacggttgaccactcgcggtatatgctcccgatggcgagaactaaatgtc

SEQ ID NO: 144362 - DNA, 403 bp, Glycine max
  unsure (1)..(403): unsure at all n locations
tgatcaaaacaatgatctaatcatgtccatccactcaaatcatcaattgctcattcagatcatactcaaacactcatttcatgcaaaacaatccactacatatcatnttcaatcaattcattgttcaaacacgctgttggtgcaaacaaacaactcaaaatgctgaaatttatataattgaaatttaaaaaaattgatatataaaatctgaaattgaaatgactgaacataaatcatataataattgaaaataaacttaaatgttcgagatgcacaaacctaaatgtcctgctcctgtggttgctcctatgcatgctcattaaggtccaacacctgagcatctggtgcagatggtgtggcataatcaaatatgggtgctatggatggctttgggatctggttt

SEQ ID NO: 144363 - DNA, 73 bp, Glycine max
atcgttagcaaaatactctgtcacacagattcagcgtactctatggtgatgaacgcgtaccgcacttgtgaca

SEQ ID NO: 144364 - DNA, 287 bp, Glycine max
agcctctacatatacgctttgttctaaattggaataagtcgatgtgacctatggtctctactcattcccctcgaagctgagtggaacaacacgaggctggattgtgtcaagctaaacttctagtctctagatagccttctcgtataagatgtcaggggagcttctcctggcgatgaggacctttggaaccatgaaagtagcgattatgatggaagccacccatgggtcattatatttgatgatgttgatcccttgaagtcttattagtgaaagtgattgacgatgac

SEQ ID NO: 144365 - DNA, 337 bp, Glycine max
tgtcaatgcgtccttcgctaccgtatgcgttaagattgatttaaaagcattgccttttgcctggctaactgccttttaatctctatgtgtgctacttgatacttctgatatacaaaggtgttatgctatgaatcactctcttaaattaatgaatctcttggattctattaccatgaatcttacttagatagaaacactttttgctttaccaataactactcctgataccttgtaaataacgtgagtttctttatatggtttataaagagaaatatatgacttgtatggtataacttacaagactatagcgttggtcttggtggtgatcttaaatatg

SEQ ID NO: 144366 - DNA, 129 bp, Glycine max
cggacccaagcccgagctgcactgatacccagaaagagcattcggcccgaccctaaaacccccgcggcgacaaaagtcagcgccgaaaccccaaccctcgacagaactagggggaacagcagcggagaa

SEQ ID NO: 144367 - DNA, 449 bp, Glycine max
  unsure (1)..(449): unsure at all n locations
tgtgnataattattagttgtatgcagtgttttattgattctgctggtaatgggcacagataattggagcgtgactacttgtaaggggtactctacgaacaggaaacatgacaatccctatgtatggctttagggatttagcccccgtaatggaatatggctttagggtgtattttttattttggccttacactttttacactctattttaattaaaaaacaactctattccatttctattttctctattttccttctctaaacccaagacacatttattattttctttctcccttcttggatgcaagtgagaccccttaagcaccactctattagtgagcttctcctatgcccctagcaaaggtttataccacacaacaatatttgatacatcacattgtttcgtttggttactggatcatcaatataataatgaaagtctaatgtgac

SEQ ID NO: 144368 - DNA, 349 bp, Glycine max
agctgcaagctggattggcgaagaacacagagtttttcttagtcaaccgcccccgcgaataacgtcagtaccactttgcggcaacaaataagcaagaagttcaacctacaacattactcatttaagcttgaggataaggggacccatcacatgggactaagggcggtcggccatgggcacaacaagtatcacatcccaatgcgcgcagaaccacatcccagtgcccactcaaatgactacgactccacgagccaatactattttctaaaccaggtccacaacctctcaagctcacaacaatatcaaaacatggcacgacagcatccacaccaaaaacaaggaaaaattg

SEQ ID NO: 144369 - DNA, 391 bp, Glycine max
  unsure (1)..(391): unsure at all n locations
catatagctacatcatgtggtatcagagcatcttgatctatgtgatgttctnnntgctcctctatctnntaggacgagcaagtcactttaatctcttgttcttcatcatcttctccatatataatctccattgacttgtggtttggggctgcttataatacattaaaaaaaaaccgattgaatcttatatctacacttgttcttgcacttctatggttcaaattttatagatctactcttgaatcatgtccttgtgttgattttaagtgctatcagttttcaggcataatcttctagtgctaaaactctatatttcaatttttttacaaaatattgattctaaaagagaacacaaaaatctaagtggtaataactgcattcatgtttgctt

SEQ ID NO: 144370 - DNA, 361 bp, Glycine max
aactatagcatggacaaatttactgtttccttggaacttgatagagcatggctagataactgtagtactagacatagtgtgcaagggtctagttttgattacgctgtgcttataatgctgttcaaattaagctaatattatcaagagacatctgcgaatgaagcggagattaaattagtccaaactctccagacatctgcgttggtttttttgtctcagcatcaacacgggaataattctaataataaaaaccctaattgatcatgttctccgtggaggaccgacgctttacttattgttcccactcatcgtcacgctatggtctgtgtactataaaaatatttgttcattatgaacttaa

SEQ ID NO: 144371 - DNA, 247 bp, Glycine max
  unsure (1)..(247): unsure at all n locations
ggagaatagttgatacagaacgataagaaagaggtttagtgtcagcactcacaacatataattcgtctgttaaaaaacagacacaaaaaaacttgtgctattcataaaggtagaatgccgcttaataaaagggaatactgagaacgcttatttgtcacaacaacataatatcatcnggataagtctaagacttgagtctctttatacacaagctcaacatttttttccaatgcgcttagtaagactc

SEQ ID NO: 144372 - DNA, 396 bp, Glycine max
  unsure (1)..(396): unsure at all n locations
agctntagcttctntaagaatcttcttatggtttcttctcaaggaggtgagcttagttatgagaggggtatgtgtagctaaactctagcttctcaaggaagttttctcaaagaagcttctcaatgaagttttctcaagaaagcttctcaaggaagctacctagtctataaatacaagcatgtgtaacacttattgtaactntgatgaatgagagtcttgtgagacacaactcaaagttcaacttctctccctttttcttccttcaatttcgtgctcccccctctctctttctctccctctttcttttcctccattgaagcatcctctccaagcttcttatccaaagctcatcttggtggtgaagctccttcttccatggcttattccctagtggat

SEQ ID NO: 144373 - DNA, 454 bp, Glycine max
  unsure (1)..(454): unsure at all n locations
aagcttgcaaccttantccctatgctacagagcttattctgaggtctatntattatcatgcatagcctgccagaagtggctcacaacaggccaatcaaacctatggagcattttcttaagcaagtagcctagcctgaagctcaacttccattggtgagacccaatgaggctgctcctcctgagcccatacttgcacaggttgaactagagccaactgatccacaatcttcagtggtgaatccaccttcttctcctgagcttgaagtagttctcccatctccacctctgattatcatctccgattccccatctagagaaactgttgctccccctgattcaccagctcgagaagtaactgatcctcctgattcctcagttggaggagttgctgatctctctgattcctcatccacagaagtaggtgctctctctgatttcccaatttttcatctgt

SEQ ID NO: 144374 - DNA, 306 bp, Glycine max
  unsure (1)..(306): unsure at all n locations
agaccggaccctaagnnacgcagctgcaacaggaacaagacgactttctaatatcggcctcgacaaatacacaatgatggaaatacataacacgagacaacgagaaaaggaggaaaggagaaaactcccgctcatacgaatcagaagaaagcacgaagggaaaattcccactcaaagtaaatgggggaaaacaaaaacagaaagagaatctctcatcaatgatctcgtgagaaaagaagatatatgcctaacaggcttaggaccagacaatatctgaacaatacagatgtgtcaccaagctaacaa

SEQ ID NO: 144375 - DNA, 397 bp, Glycine max
  unsure (1)..(397): unsure at all n locations
gattgacaaacatgaatgagagatttctttgatcgacncaaagaggaactgtcatantagctcacgatgagtgaagggagtttattatactttacggcttttgataccatatttagagatgtagctccatgtggagcttgtaagcctggaatcatcttcatcaatagagacctttgcttcttgtagggctattggcatcggtaatatagtatggaagaaagaccattggttatgccacttcaaggagaagatgagtcaacaacaagctcaccaccataagaagctatggattacaccctgaaagtaggaggagatgagtggagggagaaagacacaaagaactacaatttttgctccttaaatgaggtctgaactttgaagcgttaatctctaaaga

SEQ ID NO: 144376 - DNA, 355 bp, Glycine max
agcttttgaagagacacatctcttctaacttttttgaaaaggcacgaagggcctatatatatgtgtgtctgacttcaaaaagcaagagagagatattcttagagaacttcattgtcaaatgctctctcaaaaactcttgggcaaacacttgcacatctattgagagtgtatccaggaacatcaaactgtgttatccactctaaaagagagaaatatttatgttcatctcataaagtaagttgtaatcaaaagaatggttgtctcttgaattgtgagtttcctgaacacaagggatacagattccttgtgtgttcagaagttgaaaaaggtttttactaagtagtgaaatctcaag

SEQ ID NO: 144377 - DNA, 480 bp, Glycine max
  unsure (1)..(480): unsure at all n locations
ntagtattcatgtagtatatgttgctacccttatctctaactatttgcacagagnccactcatacaaagataaattgcattccgactcaatgcacaatacaattcttgcacaaatgaaaatctagcttagaaaatttctatataaaaacacataactactaaaattaaattcatacatgcatagatggcacaacacaaaagttcctctgtcaatttgagttgtaattttttagggtgttacaactctaacttattttaattattccacatcatataattagacactctaattagtcaccacatagttcaactaagattctaattttgaactagttatatagtaatctatgaaaatacccaccactttagactcttatgagctaattactcttnttctaattttatggaatctaaatcaccattaatcagcccttaactatctcatttaatttctaaccctangtacataaatacccaatt

SEQ ID NO: 144378 - DNA, 344 bp, Glycine max
  unsure (1)..(344): unsure at all n locations
agcttgatgtgagaaagcgtggaagagtcattcttcctacntttgtttgttgaccacagagtggtacctggagatatgtcgcggggttaggagaccttggggacgtcaggtggggtgctattgcccaaaaccaagcttgaccaatcccgacccaacccgggcatagtcagtcagtgagaacctatgacgtacctaaacaggcgagctcctggcagtcaaccaataaaagaacaaagaccacaaagctaggaggcttgtgtggcggctggccagctatggatcttgagtggtatctggaatatggcctctggtaatcgattacgaagggtgtgtaatcgattaaa

SEQ ID NO: 144379 - DNA, 450 bp, Glycine max
ggaaagaatagcatgggcagaaatgtctcctcattgattggtaaatctgttccccaaatccctgataaatgtaaagatccaagtacattaagcataccttgtattataggaaacagtaagtttgacaatgccatgctagatttaggagcttctgttagtgttatgcctcagtctatttttaattctctatctcttggtcctttgcagtcaactgatgtggtaattcatttagctaatagaagtgttgcctatcctgctggtttcatagaagatgtcttagttagagttggtgaactgattatccttgttgatttttatattttgaatatggaggagggattttctcaaggatcagttctcatcattctatgcagaccttttatgaaaactgctagaactaagatagatgtatatgcacgcacactatcaatggacgttggtgatataact

SEQ ID NO: 144380 - DNA, 402 bp, Glycine max
  unsure (1)..(402): unsure at all n locations
gcagcagacatgaatgggcggccaagagttanaggaatgtcaatgtcctcttctatgtctatgacaacgaaatcagctggaaatataaggtgtttaaccttcaccaaaacatcttcaatgactccatatggccatgtgatggagcggatagctaactggatggtcgtgcgtgtgggcattatctctatctctctatgtcgcctgcacatggaaagaggcattaaattgatactagctcccaagtctataagatttttgcctacaacaacctcactaatagaacacggtatcgtgacaattccagcatcttcgtgcttgggtggaagaatgccttgaataacagcactacagttaccttccacacaaattatgtcactatggatgtaccgattcttcttggtt

SEQ ID NO: 144381 - DNA, 444 bp, Glycine max
  unsure (1)..(444): unsure at all n locations
agctntagcttgtctggaaaggagacgccattcttactatctcttcatttgtacacttattaagaaaatggtgcattataaatgtaaaaatgttttgtaatttgaaaatattttctttaaatcccagtaagtatacatgtatgtggtttgggtatgtatggagaaaaactgcatgcaaaacaattaatgaatattcaaaggttaaccgtttgtctatattaaacaagatatactgcaaaacataacattgtttgatcaatgtatgtagccaaccccacctattggtaaaaaggctgaattgttgtttaaagatcctatggtaataataattatttttagagataaagttagtctataaaaaactctgctctagtgcctctctataaagttaaaagagtagcttactagcttttgaaaaataaatataatagcttttttttcctt

SEQ ID NO: 144382 - DNA, 406 bp, Glycine max
  unsure (1)..(406): unsure at all n locations
tttaaactttacattatcatgttggtctcttttcgagatatgtgcaatcatgactgtgtgactatagattaatatgggtgtgggtgtgactgttatatttagttgctaggtcctgttgtggtctttcttctcaagagtctatgaataattgttcaacttcagtggcggaaattactcctgcattgcttcttaaagatgctgcttatggagctactgcttatgtntattaagaactctcaaactacttgagttttaaagactggttaggtcatagctactatgctctattgaccgaagttatccatatatcgatcttgccatttctacaaattgaagatcgatcaattttgttgtgtctggactatggtaacccctaaaaaacacagccacccactggtcatggaac

SEQ ID NO: 144383 - DNA, 333 bp, Glycine max
aaaataggtgatttgaatgtcaggtttgcgagttatatgtgaaagacgtattattgatttaattattcatttagctcttatagtttctaaaattattccttttagtccccatatataattcatagaatttttaggccttacaatttacattctaattcctaaaaagtctatgtcattaaaattctttaactcattagttaaaaaatctatcataaaatttattttgagaattaaaatgtaaactctatgaactaaaatattcatttattaatcattgggactaataggaataagttaaatattgtaaaactcaatggatacttaacctatatt

SEQ ID NO: 144384 - DNA, 443 bp, Glycine max
  unsure (1)..(443): unsure at all n locations
aacaaagtagtggtatgttgtgtctgccactttatcactgctaaactggacactgactcanaaaggagaggcgttgatatcgtcttccaataaccaacgcaaagtagcattagctttaagtcgtgtatattagcgtcgacttatgatcgacacgaacgtaggatcaatcatgggtgatgctactcattgaaacattcaaagtaccacatccagcacaaattgtcctcacaacttgaatatcttatgtgttcaccattctagaattattgctntttgaaagtataaaggatgtggatgaacgacataacaaagatcgaacaaaaaaaacaaagtaattgacctttgtgacaatattgcttttgttggtcatgatatactcaatccacatccctattaatgtattagacaaaggagaacataagaaggttaatcatatttcaaac

SEQ ID NO: 144385 - DNA, 392 bp, Glycine max
tacaagacaatgcttatcttaacgcaaaaaatgtcatgctaatccctctgattttagaacgaactcatataatctatttatgcacacacgtatgtgtggaatatcctactatttatatcaacatagagggacatccaacacattctaattgtcatacacatatatgcatttgaaaagaacatacattctcacgcccaaggcattgcgtcaaagttcacacttaattatatcctatacatttactattacaaactacctacacacatttcaaatatatatcatacaaaatttattgtttctctcatatctatttatatgcatattggaaagctaattacattctgcacacacttgcattcaaaagagaattccatgctatcatacattcattt

SEQ ID NO: 144386 - DNA, 264 bp, Glycine max
attctatttgcatgctgatgatcattatcattctattaatatgcgtcattagtattcttatcttaagtcagcctaatcagaacttataattataattctattaatctgtgtaatagcacttttatgttacgttagctttagttagaaatgataactttcatctaatttgataatctaatatgtgctattagctttttttatcctaagttacctctagctcaactgaaattataattctatgaatatgcgtattacgtctttctc

SEQ ID NO: 144387 - DNA, 409 bp, Glycine max
  unsure (1)..(409): unsure at all n locations
tgcagcttgaatcgttacacatatactataattattatcatagcagatntcagaaatatctcacagtccatcttttatgggttcttgatggctatcaaagcctatatatatatgacttgagacatgaatttgctaagagagtttttcaaaacaaaaaggtcttatcctcttataaagcaaaatcgtttttatcctcttacaaantcccttggccaaattacttgtgattcaataaggaattatttgagtgctcaaattgttcaatctatctctttcaagagagatttcttcttcttcattctgaagaataagagactaagggtctcttgttgtgaaagaattctaaacacaaaggaagggttgccttgtgtgttagagcttgtaaaggaattacacatagtggactctc

SEQ ID NO: 144388 - DNA, 374 bp, Glycine max
  unsure (1)..(374): unsure at all n locations
gcttgaccaatcncgacccaacccgggcatagtctgtcagtgatatcctgtgatgtatctaagcagggcgagctcctggcagtcaacagataaaaggaaaacaagaccacaaagcaaggaggcttgtggtggctggccagctgtgaattttgtgtaatatgtgagatatggcctctggtaatcgattaccaagggtgggtaatcgattacaaggcttaaaaatgaagacaggaggctaagatggtctctggtaatcgattaccacggggtgtaatcgattaccacgcttgaaaacgaggtcaggaagctaaggaagcctctggtaatcgattaccaagtggtgtaatcgatnaccaggcttataaagggaactg

SEQ ID NO: 144389 - DNA, 356 bp, Glycine max
  unsure (1)..(356): unsure at all n locations
agcttgagatgaggaagngttgaatggtgattcttcctgcttttattcgttgaccacagagtggtacttggagatatgtcgcgggggtcaggagaccttggggacgtcaggtggggtgctattgcccaaaaccaagcttgaccaatcccgacccaacccgggcatagtcagtcagtgagaacctgtgatgtacctaaacaggcgagctcctggcagtcaacagataaaaggaacaaagaccacaaagcaaggaggcttgtggtggctggccagctgtgaactttgattgacatgtgggttatggcctctggtaatcgattaccaagggtgggtaatcgatacaaggcttaaaatga

SEQ ID NO: 144390 - DNA, 390 bp, Glycine max
  unsure (1)..(390): unsure at all n locations
tacctttataaagccgtcctttttctttttgctttcttaagagcgggaagaaaattggcggtcctgggtgaaaacagagcagcctttgctttctcaaagaaagcttactaaggcacctattctactcttctgaatttctaaaactttgagctaaatggatgccctggggggagttggactgtattgtacaggtgggcccctattgtnattttagtgaaaaacttatagtgccaccctcaactcccccctatgataagactttatgccttataagagccctcaactgggaactaccttgttcaagaattgcattcatagtgacataatacttagacattaaggaaaacaagtaacaaaggctgcaaagggtgagtcctaagcatttcatat

SEQ ID NO: 144391 - DNA, 470 bp, Glycine max
  unsure (1)..(470): unsure at all n locations
agcttgattatatggtcttcaccaacgatattatcaaggtaggtctaaaaagaggcaaatctgattattatgctttgatacatgccaaaaaaaactagggcaaatgaagagggtgagaatgagggagaagcccatgctgtgactgccattcctgtacagccaagtttcccaccaacccaacaatgtcattactcagccaataacaaaccttctccttacccaccgcctaattatccacaaaggaaatccctaaatcaaccacaaagtctgtctaccgcacttccaatgacgaacaccacctttagcacaaaccanaaacaccaaccaagaaagaattntgcagcgagaaagcctgtagaatttaccccaattccagtgtcctatgctgacttgctcccatatctacttgataattcaatggtagccataaccctagccaagggtcatcaaacctcatttctccgagaata

SEQ ID NO: 144392 - DNA, 427 bp, Glycine max
  unsure (1)..(427): unsure at all n locations
agctttcttgagaaaacttccttgagaagcttctttgagaaaacttccttgagaagctagagcttagctacacacacccctctcataactaagctcgtctccttgagaagcttccttaagaagattcctaaagaagctagagcttagctacacatacctctctaatagctaagctcacctccttgagatgagaagctagaacttagctacacaccccctataatagctaagctcacccccatgacaaanaacataaaaatacaaaaaaaattccttactacaaagactactcaaaatgccccgaaatacaaggctaaaaccctatactactagaatggccaanatacaaggcccaaacgaagganaaacctattctaatatttacannagatagcgggctcatacttagcccatggggctcgaatct

SEQ ID NO: 144393 - DNA, 454 bp, Glycine max
  unsure (1)..(454): unsure at all n locations
tatgcacggaanatgtaattatgaaattgagatgcccgatgtatcaccatttcctagttaaccatgcattaggtaccatgttcaattattttgttttttaagtgaaacgggtttatgatcccaacatggttggctcgtggtgcctaacacatgaaactaagaatgtagtgtgaagtttcacgcttccccctttttgtttttgttttgtagaggaaaacgcaaggatgagcaaacatganaacaaatggtatgcaattttgcagatcaaaaagtttgttgaacgcatatgcatgatgatgccatgactcatgcaaaatgtgaggctggaatatgataacggacaaatgcaggatatgtccattatgatgttatgaagagatgcttatgcgatgcatgatatgaatgcattntacggacacgagagcccgcgaaattatctcttcttacttgtgca

SEQ ID NO: 144394 - DNA, 359 bp, Glycine max
agcttctgaaggatatgaatctgctgtggtctttgtggcttcatctgatgattcatagaaaagttgggtcatggacttagggtgcacataccatatgtgtcctgtaaaggattactttgaggatcttgaacaaaaggagcatggaacaatacttcttgggaacaataaggcttgcaaggtgcatggcattgggactgtcagactgagaatgtttgacaacagggaaatgctgctgcaagatgtgaggtatgttccaaaactcaagaaaaaccttatctctataagcatgtttgaccttataggatacactacaaaggttgaggatgggatgatgaaggtgtccactggagcctcaatca

SEQ ID NO: 144395 - DNA, 461 bp, Glycine max
  unsure (1)..(461): unsure at all n locations
ttaaaactagcttatgatggtgaagtgttgagattttgtcttatttncaatatttgttgaaagttgtagtataatgttgcaatattattcaatattttgtacctccagagatggattaggattttgttgccaatcttgttccaagcagcaacaacgacaatgcgtgcagcaaatcctgctaggctctatggcccttggaacctctttttcatgaggatggccatatgccttcagtcctccctcaaatctttcgggtttattttccttggtcacgtgttggcatgcagggaacattaatggaaaattgtcatttattaggtggatgaatctattgcatggcatcattatttattggcctgttgcaaattgtggaacctcgttctcgggctcataaatgtggtggatggggtgttattggtgggatgaggaggtttcggtttgaagcaagtgttgcgggtgga

SEQ ID NO: 144396 - DNA, 429 bp, Glycine max
  unsure (1)..(429): unsure at all n locations
accggaccttaagcaccgcggctgcagctgctggggctttattttgctttatctntgancatcaacggggtccttcaatggtgattttccaccatggagatgcatcggatgacaaaggaaaagacgtgagatgatgcaccatgctctaaagaatatgccatggaagaaggatcttcaccaccatgatgagccttggataagatacttggagaggatgcttctatggaggaacataaagagggagaaaaagagggagaggggagcactaacttgatggaataaaaatggagagacattgaactttgatttgtgtctcacaagactttcattcattagagttacgacaagtggtacacatgctactattaaagactatgtagcttccttgagaaaatttcttgagaaaacttctttgataatcttcattta

SEQ ID NO: 144397 - DNA, 415 bp, Glycine max
  unsure (1)..(415): unsure at all n locations
aattaattcaaggcaagtccatttggctaggagcttataagaacacaattgccttaatcatttccaaatatgcatgtgaattatgaagcatcaacaagaatcaagccaaggctattgtgcaagcaatcaatggggcaaaacacaccaaatgattatgatgatggatggctcaaattcttacaaaggtaaactcatcactttcaaattgagctgtcaaactatcatgacatgtagaggagaagccaggacttcaaatcgcataatgtcaagaatttttntaaaaaaacaattacccatgtcttgaacatatcctctaattcaaagaaaaaaaaacatgcacatttgtacatgcacacagaatagaccctaaatattatactagaaacccaacataactaacaacattaacaaatta

SEQ ID NO: 144398 - DNA, 264 bp, Glycine max
ccaccatgaaaccaccagatgtccaggaggatcacatatctctcgaaagactttcctcactctttaaagggagtggcaaatgactggctatattacccttgcttccaagggccatcacgagctcgggatgacctccaagagaggattcttagaaaaaacaatttccctgctgtcaggaccacagccatcagaaaagatatttcaggcattagacaactcaggtgagagagcctatatgaatactgggagagatctataaattat

SEQ ID NO: 144399 - DNA, 449 bp, Glycine max
aagagggtgctattgtgtgtataaagaacaagctcaagatgttgctcatgtatgtggcattaacagatccacttaaactgttacaagaacacaataagggtaagagaaacttcactaaggagaagaagcccagagttgtcacgatgctctagttaaatatgagatacccttgccatgtttagttcactaattgtgcgatacatgaatgcaatcaaatatttatacaggattagactaaacatacctacgtgaggtggcgaaggagaagaagcactgacttctgacgatgttcgagtgcgacgaacacgatgctcgaccttagataaaacgatggtcaaatggagaacatacagcttcaaggtagatggagaacaaagagagcaagaaatcttatatgaagaagaagacagagagaaggagaagacaacgcgaaggagacgaaacatacc

SEQ ID NO: 144400 - DNA, 420 bp, Glycine max
  unsure (1)..(420): unsure at all n locations
gcaagctttatgtgnaggatgtgactcttaacttttgaaattatatttgaatnncaacgttcaaagggactggtaatcgnataccaaaacattgtaatcgattacagctttttgaaattaatcggaacgtcgtaaattcaatttgaaaactttttcaaaacaattttgctacaggtaatcgattacaataatgtggtaatcgattaccagagagtaaaaactctttggaaacatgttgtgagaaaaattcatgtgctactcagtgttngaaaaaccttttcatacttatcttgattaagctttttcttgattcttgaatagccttttcttgattcttgaactttgagtcttgaattgttcttgattctctctcgaacaattagaactgatccttggtcttgattccttcttgaacatctt

SEQ ID NO: 144401 - DNA, 460 bp, Glycine max
  unsure (1)..(460): unsure at all n locations
aacaattatctaatcattccaatccatncaaatattacaatntctttattcaatcatgcncaaatactcatttcataccaaacaatccactgcatatcattttcaatcaattaattgttcaaacacgcttttggtacaagcaaacaactcaaagtgctaaaatttaaataacttaactttataagagctgaaatataaaaactaaaattaaaatgactaaacataaatcataaaataactgaaaataaactaaaatgttcaagatgcacaaatttaaatgtcatgctcatcctatggctgatcttcattaaaattcagtgttggagctactgatgaatcctggataggctgctctggctctgtgaccggtgtagatggctgggtcttctcangaacaagagcaggagatggctcatgtatntgatctgtggaagtcccctcttcttgagccatgtgtgca

SEQ ID NO: 144402 - DNA, 197 bp, Glycine max
agcgaaaaaaagaataaaataggacagtattaccacataagaaataaggacaagcacagccgatacaaatgctctaaaacaaaaaaatcaatgaaaaattcaaacaactgaaaatagtaacatcgagaacaagcaacaacgactttctagactataaaatcaaagccgggacattcaaaaatcaaataaacagacac

SEQ ID NO: 144403 - DNA, 313 bp, Glycine max
tccatgattgctacatggaagggttatcaaaactcttactgtccaataaataacctaaataattgaaaatctatgttgaatgtgcaaattgagtgcaactattttgttaggagagtgctttagtactatatatcaatgagtcccacggattgacaatacatcatgcatttaagattgaattcggcacctttgcgaatacatgttctgagtttttctctcttagtacaagacgtatgacattctggggtatacaaacttgcgccttattttctactttatataaaccattatttctccttccctaccgtaatat

SEQ ID NO: 144404 - DNA, 457 bp, Glycine max
  unsure (1)..(457): unsure at all n locations
ctgcagctgagttatcattcttggtacgtcctactcaatagttggatatggatggttcttgcacaatccagcgattattgatgtctccatatgggtgtacattgtggaagaaaagcttcccagcttattttgatgatgccaaagactcaagtcaagaatcaagattcaagcaagtttcaagaatcaaagagtcattcaatcaagaatcaagattcaagtgaaggttcaagagaagactcaagatatgcaagaacctcaagaaaagcattaaaagaatttttcaaagaaaaatagcacaatttgttcaaaataatttttcaaagaanaatcttttacctgagttnttactctctggtaatcgattaccagaaggcttgtatcgattaccagaagcccaaaatagttttataactgatttacaaagtagtaatcgattaccatgggcatgtagttgata

SEQ ID NO: 144405 - DNA, 363 bp, Glycine max
  unsure (1)..(363): unsure at all n locations
gttcatttaaccttgtgatgcaatcctaccccccaagggtattggatagaagactccaagaagcttgggctagagctactaaagaaggccctangattctcatgaaccttanggttgattnttgagcccataggtcaaggttggatccactcttctttgtaaatattagaataggtttttccttcttttgggccttgtattttggtcattctagtagtatagggttttagccttgtatttcagggcattttgagtagtctttgtagtanggacgttttttttgtatttntatgtantttttggaatgggggtgagcttagatattatatggggtgtgtagnctaagcttagcttctcatctcc

SEQ ID NO: 144406 - DNA, 400 bp, Glycine max
  unsure (1)..(400): unsure at all n locations
agctntaacctcattgtctctcacagtctttatgattgtgagccaatccaatccttgtgtccggattctcaaccacttatgatagcctccgatgatcccattactgcttcccctaagctctctgtcctttcttcacgccgcatcccatgccttgcaaactccttggagtaccctcgcgttgtggtcactgaaaccccgtgcgatgaaaggcgtgatgctttcgtctgatggcactcctctcatggggtagtcaagctgtcttatggagaggacgggattataattaatacaaccccttgttcccatcaagggaacatttggacatccttcgcatgaagatagaatcctgattcttccttccttctagcgagggaaccaattaacagacgcccctccatgc

SEQ ID NO: 144407 - DNA, 460 bp, Glycine max
  unsure (1)..(460): unsure at all n locations
catactcagcttcacatcagaccacttccagggtgctggaactacttcacatggtattgatggngcctatgcaagttgaaagccttggaggaaagaggtatgcctatgttgttgtggatgatttctccagatttacctgngttaactttatcagagagaaatcagaaacctttgaagtattcaaggagttgagtctaagacttcaaagagaaaaggactgtgtcatcaagagaatcaggagtgaccatggcaganagcttgaaaacaacaggttcactgaattctgcacatctgaaggcatcactcatgagttctctgcagccattacaccagaacagaatggcatagttgaaaggaaaaacaggaccttgcaagaggctgctagggtcatgctccatgcctataatctctgggctgaagccatgaacacagcatgctacatccacaacagagtcacact

SEQ ID NO: 144408 - DNA, 480 bp, Glycine max
  unsure (1)..(480): unsure at all n locations
agcttcttttggaccttgaacaagcaactatctcctcttttagaaccatgctatgtgctcgcgactggtccctctcttcccttcacagcttgagttcactattgataccccatagagctccgcgaaatttattccggccatactcttccttgcgagccctcttggtctcttgttcaagggctcttgcggtaattgcattctcttcccgtaacccagcacactccttccgaatgtgtgttgcggccaacttgaacttctccttggcaaatttcgcctttcctaactcgcttttgagagcttggacttcttcgtcctcttccggtgcttcaaaactctcttcgctgacgaactttaacttggcgagccaatctanacctcgtatatgaactntcagccattcatggtagccaccaatgatgccattacaaatgcctctaagttcttgatctttccttaacgggggttcccatgccttatggg

SEQ ID NO: 144409 - DNA, 473 bp, Glycine max
  unsure (1)..(473): unsure at all n locations
tctcattngatccagcagaggaagagcctacttcctatttctctcaagtcacacccacggaattcaagcacaagagacttggtcattatcatcttgaaagaatgctaaacatgaaaaaaaggaaatatgcaaaagaaaatttgaagaagtttcaaatggaggaatgcaaatctactagcacactaatgaatcataaggagaagtttataaaagaagaaggtgttgataacattgatgaatgatattatgagagcttgattggatgtctaatgtatctcactacaacaaggccaaacattctatttgctcaaaagaacaaaactggaacttttgttgacaatcaagtagccattgctattgcaaacaatcccgtgtgtcatgggaagactaaacatttcaacatcaagttctattatttgataaagatgaaacaaagtggtgaagtgaacttaatttattgtacgtctaaagat

SEQ ID NO: 144410 - DNA, 409 bp, Glycine max
  unsure (1)..(409): unsure at all n locations
tctccttcttcactacatcaatatatcttcgngntgagncttctctggggctgtcttactggtttagctccatcttctaaatttattcgatgcatacatgtggatgggctaataccangaatgtccgncagggtccagcctatagccttcttatgcttcttgagaactgacaacaacttctnctcttgctcatcagcaagggaggcagatataatcactggaaaactcttgctatcatccaagtaagcgtattttaaatttgatggcagaggcttcaattctggtgtggtcggctggacagtggtagacggagatggtttctcagcctttacctcataaagaaagtcagaggtatgtgtacttcctgaaacatggntagtcctatctgactcntataaatcaaatctca

SEQ ID NO: 144411 - DNA, 467 bp, Glycine max
  unsure (1)..(467): unsure at all n locations
tntntgagaaaactntcttgagaagctagagcttagctacatacatccatccaanaactaagctcacctccttgagaagcttccttgagaagctagagcttagctacacacacccatctaanaactaagctcacctccttaagaagctagagctcagctacacacacccatctaaaaactaagctcacctccttgacaaaatacatgaaaatacaaaanaaaaaaagacgtccctactacaaagactactcaaaatgccctaaaatacaaggctaaaaccctatactactagaatggtcaaaatacaaggcccaaaagaaggaaaaacctatgggctcaaaaacctatggatccaaccttgacccatgggctcaaanatctaccctaaggttcatgagaaccctanggccttctttagtagctctagcccaagcctcttggagtcttctatccaatacccttggggg

SEQ ID NO: 144412 - DNA, 462 bp, Glycine max
  unsure (1)..(462): unsure at all n locations
agcttgcctaaaaatgcacttttcnttattgagacacttgattctaatcaataatgcttagtgataccannttttgctattatttatttctcatgtaaaatgccaatattttatttttntgtacaaaattccaatattgttttcacctcgacaatgggaatgggtcatcttacatatttcattctttaaattgagttaaataaaataaatttcttaaattgagtattgacttcaacccaattgagtattngaaatttagctatgattcggcccactaatccaagatcaagtccaagatgctctactaagtatgcttaggtatcacgaggcacgtaaagcatataggacaagtgtgactatatgatgtgacaatggggtgtattaagaagaatgtcacctccctctacgaagatccaaaattaattggatcggcttttctcattcaataaatttctctcccac

SEQ ID NO: 144413 - DNA, 424 bp, Glycine max
  unsure (1)..(424): unsure at all n locations
tagaggggggagcacgaaattgaaggaataagagagggagagaagttgaactttgaagtatgtctcacaacactctcattcatcaaaggtacaacaagtgttacacatgcttctatttatagactagatagcttccttgagaagctttcttaagaaaacttccttgagaagctttcttaagaaaacttccttgagaagcttctttgagaaaacttccttgagaagctagagtttagctacacacacccatctaaaaactaagctcacctccttgagaagcttccttgagaagctagagcttagctacacacncctataatagctaagctcaccctcatgacaaaataacatgaaaatacaaagaaaatcctactacagagactactctaaatgccctgaatacaaggctaaatcctatctacta

SEQ ID NO: 144414 - DNA, 340 bp, Glycine max
  unsure (1)..(340): unsure at all n locations
agcttctgtnttcaatttcgagcttctttctatattacagggctcacatggacatccgagttaaatcttattgtcgattgatttttctcagagcttccgtgttcaattacgagcctctcgatattctatgagacacaatccgagaaccgattcaaaatttattgtcgtttgaatttgctcaaagcttcagatttcaattacgagcgtctttatatatttcaggactcaatcagacatccgaattgaatgtaatgtcattagacttttcatagagcttcccgtttcaatttcgagcgtctcgatatattaaagggctctaatcgacattcgagtgaaaagt

SEQ ID NO: 144415 - DNA, 475 bp, Glycine max
  unsure (1)..(475): unsure at all n locations
actaagcttgagaaaatanacgacataatnntatcttgatgtttatngaacccgaatatatcgagacgctcctaattgagaactgaagctctgagcaaatttaaaggacaataaattttcactcggatgtccgattgtgtcccgtaagatatcgagacgctcgtaattgaaaactgaagctctgagaaaaatcatatgacaataacttttaacttggatgtccaattgagccgttgaatatatcgatacgcctgaaattgaaaacggaagctctatgaaaagtcaaacgacaataacttttaattcagatgtctgattgagtcccgtaatatatcgagacgctcgtaattaaaaattgaagctctgagcaaattcacacgacaataacttctgaatcggatgtccgattgcaccctgtatatatcaagacgctcgaaattaaaacggaagctctataaaaattataccacaatac

SEQ ID NO: 144416 - DNA, 437 bp, Glycine max
  unsure (1)..(437): unsure at all n locations
agcttagttcgcggcattaaccctaccaagatagtgttaatntgacctccatcataaaggccatgatatgacattgtctcaatagactattaaatcactcctaagcttcacaaagtggctcatcaacctcttgagtgaaagtagaaacagatgtcttcctttgattggtctgggattgagcctataatctattaaagaaattatcacaaatctcatcccatgtcaaaggaatgttgggaggtatagtttggcaaaaatgtttagcctttgtggaaagtgaaaatgggaaaagactaatacgaatganatcatcatccacttgatgaatcttaccgtattgaaatcgcacaaaggtagtcaatgggaaaaggatctcataacaaagcctggaatttgtttgttgataaatgaatgaaatgtctcatttcacatgtgag

SEQ ID NO: 144417 - DNA, 454 bp, Glycine max
  unsure (1)..(454): unsure at all n locations
tactaagcttcatgacgaatcaaaatgattccaggtgttttgatgatatctatgatgacacacaaagatgatgaccgaggtgaggaacaaaaagctcataagatcacagaacaactcatgtgaatcaaagaacaactcaagtgaatcaaagaacatctcaagtgaatcaagaacaagtcaagagttcaagaatcaagattcaagatctcaagaatcaatatcaagattcaagactcaagattcaagaatgaagaaaagactcaatcaagataagtattaaaaagttttttcaaaactctgaatagcacatgagtttttgacaaacctttccaaagagttttactctctggaatcgataccatattgtttaatcgataccagtaaanaatgagtttgaaaagtttcaactgaattacaccgtccaatatttcaaagctgaatcgatacaagtttg

SEQ ID NO: 144418 - DNA, 404 bp, Glycine max
tcattcataaaaaaaatctacatgaataacccattggacttattcaaagacgaccaaataaccaatcatcaaagaaaaaatcattaaaatcacaaataaccaaaaaaaccaaaatgaatgcatgatataattaactcactagtcattataattctcactataagacaatcattgattaacaaaaatctcccgatagttttgtattgcagcaaagaagaggggagaagagaaaacataccatttgcatcaatttgactatgactatggtattgagtgagatgaaatttcatgtttgaaacctctgatcttctgcagggggctgaagcaccattctcaaagtccaggtgaacaaagtcactgagagagaagtctcccacacggctttcggcattgctaaccctttc

SEQ ID NO: 144419 - DNA, 479 bp, Glycine max
  unsure (1)..(479): unsure at all n locations
tcgacccggatccttaagtcacctgcggcatgcaagccttttatttttagtagatgaagatgaatctctgaccacctcaaggactcctctaaggacaatagcatcatttcttgcactgaattgttgggaattagaagccatcttctcaatcaaatttctagcctcagtaggagtcatatcaccaagggctccaccactggaagcatcaatcatactcctctccatgttgctaagtccctcatagaaatattgaagaaggagttgctcataaatctggtggtaagggctgcttgcacacaatttcttgaatctttcccagtactcatacaagctctctccactaagttgcctggttactgaaatgtcttttctgatggcagtggtcctagatgcagggaagaatttcttctagaacacccttnntaggtcatcccagcttgagatggatctaggagcaagggtataccacatatcttttg

SEQ ID NO: 144420 - DNA, 434 bp, Glycine max
  unsure (1)..(434): unsure at all n locations
tgcctcaaagaggtccaggaatgacaaggctgtcgaaggaactanttccgccccggagtacgacaggcaccgctttagaagcgttgtacaccagcagcgcttcgaagccatcaagggatggtcgtttctccgggagcgacgcgtccagctcatggacgacgagtatactaatttccaggaggaaatatggcgccggcggtgggcaccactggttactcccatggccaagtttgatccagaaatagtccttgagttttatgccaatgcttggccaacagaggagggcgtgcgtgacatgagatcctgtgttaggggtcagtggatcccgttcgatgccgacgctatcagccagctcctgggatatccgatggtattggaagagggccaggaatgcgagtatggccagaggaggaaccggtctgatgggttcgatg

SEQ ID NO: 144421 - DNA, 201 bp, Glycine max
  unsure (1)..(201): unsure at all n locations
agcttgctatagaagctagagnnganantctttggttcatattccttgcnctgggtcttgaaccatgaattgtgttgagtttaggttcctttgagttttatattggtcaattttttggctgaaacctaaaccataaaattcttacaaaaacattgaagtagaagaaaacctcaaaaatctagaatgacatattcacctatt

SEQ ID NO: 144422 - DNA, 273 bp, Glycine max
aatttggtactataaaatggcccaacctttggtacctttggggaagaatattattagccatggattaagaaaaggttaaaagatttggattaatcctcgaattaatggaccaaattggctataataattggggagtgtttaaaaaaatgtatatatgaaaagcttgaataccttctatcaagtaataaattaaaaaaattataattaataattttttctttaataataaaaatattaggtatatattaccggaagattattcaaccataatat

SEQ ID NO: 144423 - DNA, 361 bp, Glycine max
  unsure (1)..(361): unsure at all n locations
attaacaagcccatgcacagattagataacactataacaatcatgaagctctcataataaaattaccgctgttatttatggcagatactttactatcaagcaaactagataaataaaattagaaagatacccaagaaagatgaagaaacacttgagaattttcgtctaagaactaatttgtaatagatatgactgctagatcctcccacaaccaatctttccagaaaaatcattaatgatttaccattcttatttaaaaatattaaggctaacttttatgaaccataatcatggatcatgttatntgaaagaaaattattccatcatcaagaaggagaatgatactttaataatgatactt

SEQ ID NO: 144424 - DNA, 414 bp, Glycine max
  unsure (1)..(414): unsure at all n locations
gagcgcaacagttccaagttaagaacatgaagtgttaaattgtagtgcaatgtgtttaacatgttttacaagtcattggtattgtataattcatgaacaatgtctatgtgcaaaagtttttttatgggttggacttgaattangaaggtgaggccctaacggattctttgaagtctacgcataggggtaaatacactcggtttgagtgctcctttaaatctatgatgatcccatatggttgaagcattctcacaaaatagtgtgaccctaactagtcaccttatgattttacttagtgagattgacttgatatacccattgtgtggcgtgtcttgttatgtcttctaagcgcccatgtagtgttcactatcatggtccacactgcatataaaattgagtctatataattgtaca

SEQ ID NO: 144425 - DNA, 495 bp, Glycine max
  unsure (1)..(495): unsure at all n locations
gtcacctgcggcatgcaagcttgatgtcattcaaaacacactatgtatttctatatgaagactaaacatgcatnntttatntaattgtattcattatgcgatataatttgttgtaacccgttactaaccaattaatattatcaactactcgtttggttaagcaaggaaattgttggtccaacaaaaatcatttacgcgtgcagcatacatcattgtcataattgacaacacataatgacatgcatgcgtattacagtttgagcgtgacaacacattggctgacttcagtacacattntgaaactagcagtcgctcgacaacacattggttgacttgactacacattagcgacaacacattggctgacttgactacacatttacgcgtgtctatttttttgtaacaaagttaaataaaggctcggtcacaaccatctatatatatggcagactangctactaaatcacacattatcttgctntcaaataatctctc

SEQ ID NO: 144426 - DNA, 490 bp, Glycine max
  unsure (1)..(490): unsure at all n locations
tactaagcttataagttggtgccaagtctttcaaaattgtctaagttgcattgtgagtcatgtcnagttgggaaacacactcgtaattcatttcctaatcgagtcaataaacggtctacgtctacttttgcccttgttcattcagatatttggggtccatcacatgttgttacccgttctggtttaaatattttgtacttttattgatgattactcacgttgcacgtgggtatgtttattgaaaaacaggtttgggttattttctatcttttaaacacagtttggtatccttatccgatctcttcacaatgataatgctcgcgaatatttatctcatcaacttcagaaattgatgacttcaaaagggattctccattagacatcttgtgcccgtactcggatactcaacanaatggngtggcttgcctcacagcttgctacctctntaaccgcatgttgtcttccattctaaatgatcagatacctaata

SEQ ID NO: 144427 - DNA, 409 bp, Glycine max
  unsure (1)..(409): unsure at all n locations
ctgcagctttatggagaggagtgactcttactatttaatntgaatttgaatttcaacgntcaaaggtactggtaatcgattaccaaaacattgtaatcgattacagctttttgaaattaattggaacgttgtaaattcaatttgaaaaccttttcaaaacaattttgctacaggtaatcgattacaataatgtggtaatcgattaccagagagtaaaaactctttggtaaacatgttttgagaaaaattcatgtgctactcagtttttgaaaaaccttntcatacttatcttgattaagctntttcttgattcttgaatagccttttcttgattctcgaatcttgagtctcgaaatggtcttgatacttccttgacatcttgaactgatcccttgtcttgattcctctt

SEQ ID NO: 144428 - DNA, 370 bp, Glycine max
  unsure (1)..(370): unsure at all n locations
tactcagctgatcaaacaatattatattccatccatcaattatcaatttctcattcaaatcattctcaaatactcatttcataccgaacaatccactgcatatcattttcaatcaattaattgttcaaacacgcttttggtacaagcaaacaactcaaagtgctaaaatttaaataacttaactntaaaagagctgaaatataaaaactaaaattaaaatgactaaacataaatcataaaataactgaaaataaactaaaatgttcaagatgcacaaatttaaatgtcatgctcatcctatggctgatcttcattaaaattcagtgttggagctactgatgaatcctggataggctgctctggctctgtg

SEQ ID NO: 144429 - DNA, 452 bp, Glycine max
  unsure (1)..(452): unsure at all n locations
agctntattaattttaaatagattacattattatctacatagaaattaaattcttacatgtagaaattacacatgacttttcaatatagaaccaaattaagcataattacttcgcccaatccataaagaagttgagattctttgatgactgaccaccttctagtatgttatttatggtcatgtctttcaatntcaatgacctagctntgatgtcttcatcaacaagcagttgatccaccttcttccttatctcttccctagaaattattccattttcatccttgtctagtccaagcccaatcttccacacatcacatatatatgacttgtcaagatattgatcagtggcgcatggccaacacaagaaaggtacaccggcacatataccttctagggtagaattccaaccacagtgactaatgaagctagccaatgcagggtggntcaatatc

SEQ ID NO: 144430 - DNA, 459 bp, Glycine max
  unsure (1)..(459): unsure at all n locations
ctcagcttanaactaaggcctgtgttctgggagttatttactgtatttattataatgntattcttatattgggataaatttgtttattgatgattgagaatttgtctccatgcttcttgtgcttttcagagaattttacaaataaatcccaatagcttagatcaaatcccattaggatgttttgtgttaaggacttctattcatcatatatgttgaatatttgcacttccaacagtacttatttttatttcagatcctattcctcacccttcccgaanaagtaaccacaactctttagacctagcttgatatttgtattttcagtctgtgtattttctaattttgccccatttactagtttcagaccatgtttacaaagcttcataagaaccatggtattataatttattttgaatcacatgagttacaactgtgtctgcgtgcaaaaagattgaatgt

SEQ ID NO: 144431 - DNA, 445 bp, Glycine max
  unsure (1)..(445): unsure at all n locations
atccttgagtcacctgcggctgcagcttgangattatggngtacccatcacatgtggtactangtggcggtcgggcgatggtgcacaacaagctttccacatccacaatgcgcgcataaacccaccatcccctgttgcccacctccaactgagctcacgtagcccatatcctcgtttctctcaacaccgggtccccatcaatcctctcaagcttccacaacatccaagcaatacaacattcaaacagcacaagctatcacagccaagcaaaacagagcaaaggcagaaaactctgctccacacatcaaccaaaatcacagcttttctcacttaaagaccacagtaacaattccttcgatccaattcgttaaccgttggatcgaactccaaaatttactggaagtctatagtgcataagcctacattttgaaccgtgggatctact

SEQ ID NO: 144432 - DNA, 467 bp, Glycine max
  unsure (1)..(467): unsure at all n locations
tcanaccacagcaacacanaatctaggtgtccaaaacccctcaattcaatgggttntctaggtttgaaaagtgaaatttagaatgaggtaaatttgaggcaaactctcacctcacaccagtccataacatccatttagacttgttcaaactggatttacacctaaaatctcaccgaatcaaaatttgactcttcaacacccaaatttgccctagcaatggctctttgttcactttggtcatttgtttttctctctagctcagcctaacctttctcacatgttctaaatgaaatttcaagctagtattaactcactctaacctccatttaccacagaattcagacttagccttccaactctcaaagtctcactctgtttccactcataacatcacattctcactttctaaccctaggttagttctacccttcatctctaacagntntccatcagncaattttagcata

SEQ ID NO: 144433 - DNA, 417 bp, Glycine max
  unsure (1)..(417): unsure at all n locations
agcttagggaatcgagtcctttgacttataaaaattangtatatgcgtaagtaaagaataaactttgcatattaaagaaaatcaaagaagaaaactaacatacctgaatatcctcccatatcaaatccttctgagcagcagggacttccttccatgtctcgtatgtgacgttgaccttatcacgcgcgacaatccccaaatatgttcttaatttcatcttgtggggaccattggccttgccggtatcaggatcaacattgaccactagtctctctgcaccaggtggtctagtggcccacaatcgtagacgtgtcgctttgcatgtccactntacgggagacggagacactgatgcgtgtgaaagaagatgatgaggaggcgacacatgtggagtagccatgtgtctcttaacataaa

SEQ ID NO: 144434 - DNA, 475 bp, Glycine max
  unsure (1)..(475): unsure at all n locations
tttcggaccttcaatactcacttcttcttttatatggtcaaatactttgtggttatccggccatgcattgcaattgcctcactagaagtgataaaaaatgagagactcgttgagaggtatcaaatgcattgccaaatcttatattgccaatacatacttattataatgcatacttgaatagataaatccaagtcttgacaagtatattttattcatttcattcagcattatcagcatctgaaattaaagcttcaaatctaagcctgggttctgggagttaataactgtattaaatataatgttattcttatattgggataaaattgtttattgatgatagagatttggtctcatgctccttgtgcttttcaagaattttacaaataaatccagttcttaaatcaaatcctgttgtgtatttattatttgggggggcatgaatcctattctgtnttaatatcgtttaagatgtttg

SEQ ID NO: 144435 - DNA, 357 bp, Glycine max
  unsure (1)..(357): unsure at all n locations
agctntntatnttcagtagatgattatgaattcttggccacctcatggactcctctaagaacaatagcatcatttcttgcactgaattgttgggagttggaagccatcttctcaatcaaattcatagcctcagcaggggtcatatcactaagagctccaccactggcagcatcaatcatactcctctctatgttgctaagtccctcatagaaatattgaagaagaagttgctcataaatctggtggtgagggcagcttgcacacaatttcttgaatctttcccagtactcatacaagctctctccaccaagttgcctgatgcctgaaatgtcttttcttatggcagtggtcctatat

SEQ ID NO: 144436 - DNA, 448 bp, Glycine max
  unsure (1)..(448): unsure at all n locations
tgcggcatgcaagctnggttatgtgtagattatatctttggtttcacttatngactnttaatctcattaaaagacaacttgcaaagtaaatgaccgcgtgaaattttattttacattaataaaccgagattacaacacaaaggatcggttgaaattttattntacaatgataaagtgggattatgacacaaacaatcggttgaaattttatttttacaatgattaagtgagattggggcacaaacggtcggtcgaaactcgctatacacaaagaaatgagatcactgatagtagaagaatgaaaatgaagatgtacaaatcaacaaaagggacccctaagggtgcatagagcgaatacaaaacttcaaaatataaactaaccgctcgatgaacgaagaacaatgtaggaattggtcacgaaagtacctcngcctcatatttcttcttc

SEQ ID NO: 144437 - DNA, 398 bp, Glycine max
  unsure (1)..(398): unsure at all n locations
tgaatgaattcttaagagggtgtgttttcaaagattatactttactctgtatcctcttgttaatttcagggttcaagtgccatctccagcgctgatctttttggtgactcaagagacaacaacatcgatcttactgctggtgacctcatcaatcgattatctttccaggtattctttaccttctactggatttgggaatgtcattattcatgtcatntgtcatctgaacaacaaaatgataattgaattagtgacattagtttctgtattcatgttggatgggttgctgtacgcctccctcccctctgtgttgcaagcacaacaggatctctcttcccttaagaacattgcaggagagactggaaagaagctcagctcactggcctccacattgatga

SEQ ID NO: 144438 - DNA, 444 bp, Glycine max
  unsure (1)..(444): unsure at all n locations
agcttgttngaatgtatctttntattaatctttggcatcatcaaaataatcttggaagctctgcttctacacttatcagtgatggtgggtcacatttttgtaatgcacagttgcagaatatgttggggcactacaatgtcaagtataaggttgcttctccttatcatccctaaacaaatggccaggccgaggtatccaataaggaattaaagaaaatcctggagaagactattacatcctcaagaaaggaatgggctgtgaaattggattatgctttatgggcttatagaactactttcaagactccaattggtttgtccccattttagatggtctatgggaaggcatgtcatccaccgatagagatgaagaacaanggctactgggctctcatattcctcaattntgatgaatccttatcaggggaaaagtgaaagttccact

SEQ ID NO: 144439 - DNA, 403 bp, Glycine max
agcttgtagtggaccgaaatgcaacactgtgtatacctcctagtcctaagcaacgcacacgcccatcatggtcctttcctagcactttacccacactatcattagctaaaatttttgtaaagttgtcacttttactcatttcttgtgtcatcttgtcctataaattagaaaaaactactacacactaacacacaaacataagaggataaaattaaacgccaaatcaatcacaaaaaattagaaacatatggaattaagaaatagaaaggaatctcataaattaccccaatagaccttgcctcctcattgacatatgatccatttttcttcttgtgagtcgcaatgtacagttctcctcgacccacagcacgttcaagatttactttctaatacacgacacatg

SEQ ID NO: 144440 - DNA, 360 bp, Glycine max
  unsure (1)..(360): unsure at all n locations
gacctatgaaactcagcttcagggtgattaatttatcttctatgcatactgttctttcttgctgngaatctttctctagcagctaggtacaggacgtcgccttggcttccatagctaacactatntgggcgatttagtttgctagaaacaacagtcgttttcaagatacaagcatcaccttcttggttgccactcaattgatatctgcagcaaccactctctctggaaatatctctaaaggctctatgaaaatcctcaattgatgaattcattgttctaaagaattactctattttgtgccaccctccgaagggcaatcagattcggcaaatctattggtaccctccgcttcatggatgg

SEQ ID NO: 144441 - DNA, 140 bp, Glycine max
ctttttttctcagagatccggtgctaaatccgagcgcgctcgaatattatgcaccttaatcggacatccgagtagagatgtgaccacttgaaattttcgtgagcctctaatgatccttatctagcgcctagatatattat

SEQ ID NO: 144442 - DNA, 302 bp, Glycine max
tctcaacaacgtcgtgaaatgtgaaccattcctaggcttttgtaccatgcatcatttatctaagtgcttgggacggtcctgtttaattatttgaagcatgatgcctgaatcataatagggccaattggagatcgagcttgactcctacgtcctttgaacaattgatttaattgactgttcttctggtcagataaaacagatgttgttgtactaattatctatagaggatgcactcggttaaaagatacattacatatatgctacgtcatccaacaaatccatattctacttcaacatcgatc

SEQ ID NO: 144443 - DNA, 310 bp, Glycine max
ttcttcttttaattcttgaccacagagtggtacctggagatatgtcacgggggtcaggagaccttggggacgtcaggtggggtgctattgcccaaaaccaagcttgaccaatcccgacccaacccgggcatagtcagtcagtgagaacctgtgatgtacctaagcaagcgagctcctggcagtcaacagataaaaggaacaaagaccacaaagctaggaggcttgtgtggtggctggccagctgtgaatcttgtgtgatatatgggttatggcctctagtaatcgattaccaagggtgggtaatcaatta

SEQ ID NO: 144444 - DNA, 330 bp, Glycine max
cttgtctgaaactggtccaaagacacaggttttatattctttaaaccctatccctgcgacaagttctatggaaggatacaccgagatggtcactaatatcccgcagtattgtgagttgcactttgaaagacgcccttggtcctgatgtctataaagatggtccatctattttccttcccaaatgttgtagtgccggtatgctgttaaatatattccaacatctatcgcctccacatgctgtttctctcctctcgccctctttagaggaattaccactgtatatgacctacccgcttaggtatttcatctcccatgctccagcaccttccc

SEQ ID NO: 144445 - DNA, 380 bp, Glycine max
cttgctaaaaggagttaataggcactcttttttttttgcttacgaaacaacaggggccagccttttataataaaatgagggctctgggccaaacattatgggcccattctggaagaaatcctacactctctatcttttagaatgaatcaatacaacggttaggggagactcatcacaatgagataatatctatcattatttttccacaaatgccacatatgaagcgcacacataacaaagcaacacaccttatctgtctacatatattacaaggcgacacatttaaagtgatgtgacttactccatgatgggcatccccggttgactattgtgtcttgagacagaacctctacaacttgtactaatagcatttaaaccat

SEQ ID NO: 144446 - DNA, 380 bp, Glycine max
  unsure (1)..(380): unsure at all n locations
actcaagcttgaaggtaaactatatgccctggtaacctggaacccagctggccatgataatanatccgcaccggtcgccagactctgaggtgtatgctcctctgccgaccaccacacagacctttgcccttctgtgcaacaatctgaagcaattgaacaacctgaagcttatgctgcgaacatctacaacagacctcctcaacctcaatagaaaaatcagccacaacataacacttatgacctctccagcaacaggtacaaccccgggtagaggaatcatcccaaccttagatggtggagtccttacaatagcaacaacaacaacagccttattgtcataatgctgctggcccaagaagaccatacgtttctccaccaat

SEQ ID NO: 144447 - DNA, 392 bp, Glycine max
  unsure (1)..(392): unsure at all n locations
agctatcagaaatcattctcccatgcgagtttatctttatcgngnngnaaaaggggttccaagccaccatattataagggctgctagaattgcatcagagaaattactgaggtaaatgattttgtttnttgcattcccccaacccctggttttatttatttgttaatcccgacacaattttgtatggattttaccttggaccttttgtatatatgtataattatagtagcgaatctcttaatatctcttggtttgtgcactattaagacaaagctaaagttgtgataaataaatagaatatatagtagtttatcgttgccttgntggtctgctcatgagtagaatggtataattggtctttgaactggtctatcgggagactggaaaatact

SEQ ID NO: 144448 - DNA, 415 bp, Glycine max
tactaagcttcctggatctcatcatctgcctgcgctccatttccaaaatttccgtggtcgccctcccaagcccaagccccaccccgtctggcctgctgcatccctcaccgacagccctgctcttctatccgccaaaagaggccccggtcgtcctaaaaagattggtgtcagcccgccaggcccaaggggtcgtccacccgggactgggagatctaagctgtccaagaggcctggccgtccccccaagcccaaatccgtctcggcgatctccagtggtctcaaacgacgtcctggacgcccacccaaagcccaatccaacgtaaacgtcatccccttcgcagccccagttgctcccggccttgctactgtgcagcccatccttcctactgcttccgtgcccaatggatctcccagg

SEQ ID NO: 144449 - DNA, 341 bp, Glycine max
  unsure (1)..(341): unsure at all n locations
agctncttttggactcgatcctcttttatctttcatgcccaaaatatttttagcagctcccatgtccttcatataaaactactaagtagtgacttcagcttctgaattggcgacaaaatttcatatgctatgagtatgtcatccacatagtggagtatatatatgtaggaaccatcctccaccttactattataaacacattactcatagggacttctaatgtacacatgagagacaatgaactcatcaaatctcttgtaccactgccttaatgattgcttcaacccatatagagaccttttcaatatatagagaagaatttcttgttactctcacctcaa

SEQ ID NO: 144450 - DNA, 270 bp, Glycine max
  unsure (1)..(270): unsure at all n locations
agcttgggggtatgtgtgcatctctactattattccacatnnggganccactccgatagaaagaaattggacgctttacactaaattagtctgctttcacttcttaccaatctgatgcattcttggattttttttttttttgctattcaaggttgctcctcctaatgcgtatgagtggtgtcagaaaatacggctaaggaatgtgtaatatgtttttatgaaaaacaatattcctttttttgggaataagtcagagatgctttgaagctt

SEQ ID NO: 144451 - DNA, 366 bp, Glycine max
  unsure (1)..(366): unsure at all n locations
agctngcagaacacgagtctctcattcatttcatatttttctcactacaaagccacactcactctccttcttttcgctctttctcccattctcctaaaatcctccaaaaaccctaagactctcccattctcagtttctcactcttatgattaatggaagaccgcgcgcatgctgcacttcctcccggttaacggttctacccttccgaagaggttctcgtcggttattacttaaccaagaagaacgagaaccgggaggagggtttctacggttctgatttgatcagagaacttgacctctacgatcacgaccccttcgaattaccggacgctgcgtgcttttcgtacggttacaaaggggaggaag

SEQ ID NO: 144452 - DNA, 440 bp, Glycine max
ctaagcttctaaggggaggcttctgaatggtttatattcctattatgttacaacaacaataatatgagtgtgcatgtgttaagttgcctttctgatttttgcattctacttgctctcctaacaattgatacgctctgcagctctaatgaaggatgcattcaggcagcatcagaggataatcatacacccttggaaaacgtgttaattgatatgtttggattggattctaaatctgatcctttcgagtcaaaacacggaaagaaagtaaaaagaacacagaggctgaggaaattatataatgaagctgagggtttgtgctaacactttattctttgtcactgcttgtaccatatgcttggcttttgcaatatgagtgctattctactaaatctgttagctatatggatccaatggtgtgacatactttctactaggagtca

SEQ ID NO: 144453 - DNA, 370 bp, Glycine max
agcttgaaggcatgtaacccaccatattctcttttataacactggtgacgtgtctactatcattgttatcatctccctctccatcattgggggcgttacttgagctgccacatccttccacctttgttctgtagttgcattatatccgaagccttatcataattgtattgatactgcctaatgaaggcaaccattatgtccttccaagaatggactcgggaaggttccagattattatatcaagtgacagctgccccaataagactttcctggaagaaatgcatcaccaattcttcattttttgagtatgcccccattttcctgctatatatcttcacgtgattcttggggcaagtagtcccacttgtat

SEQ ID NO: 144454 - DNA, 375 bp, Glycine max
gcttgtatagtcttagatataggtgtgagattaagctcttgagtggaatccctctcttgaggataaaatttgtatttttttttaattaaacataaatccacctttttgtgaagtccaacaatggctggcaaagttgaaacccaatgatgtagttggtccaactgaggctcggattgaatccagtgggatactacaagattgtgaaactcaacggttgttggtccagttttgaattggttgtgttagtgatatctcatctttaagagtgagtgtcacaccctaatttcgtctggggaccattgtttgaccgcattcgaccttcgttcgaccacttaataatgtttaatacccattgtcatggaatccataaaagtt

SEQ ID NO: 144455 - DNA, 419 bp, Glycine max
  unsure (1)..(419): unsure at all n locations
gaatggctatacatgattcatgtcatggcttggtgtgtgttcaagatttaagggatgccccacattatttccatgacacaaatgcataaatgacgatatggaaattttatgcgaaactggttatgcatgcacctatgcggacactcatgtgtcaaatttttatggtcatgtgatgctagggctcatgattcatttcctctattttagacaacccaacgtttccaaaatatgttcttttatcaatttgtgcattcatccgagtccactttgggcgtctgggaagatcttcacaacattcaccctttaggtgtatacacatnttttcacaaactagttatgatcagtgatattttcaaagaaaagttggaagtcatctcttttcaaaacatgttggtttttagcttgaaacttaattttct

SEQ ID NO: 144456 - DNA, 465 bp, Glycine max
  unsure (1)..(465): unsure at all n locations
agcaagcttgaatatctctgtcaatgtagtatgtttatantttttaattaaatgttaatgtattttaaaaacatccataattaaaaataatcttatagtatagtataaattatgtattggaaatttaacaaataatttatatattcaaaatatttatttgttacaaatttcaattataattaatattataatttatatatttaagagtatttattataaaatttatatgtaaaaagtaaatatttatcttgtaaattgcaaaaccaaaatatttgttaatctatatgaaaacccattcttctagtcttctaacttaaaagtacgttcaatttaaggttataatataagaattacttccttcttgtaaagacaaagaaatggaatacttactaaacatatggtaacatcataaatgaagaacacttattactttctgaatgtcattgagactagtgacagatttta

SEQ ID NO: 144457 - DNA, 465 bp, Glycine max
cgtgctcgtgctaagcgtggtgtcaactgtcatggtctatacatgccaaggatggccggaatatgttaattgatgtcacattaaaatctgaaggagagtgaatgtttaaattgaagttataatattttagctacacaactccactgcataaaactctctgccaattaatctttttgtaaaatcttcatttggaaatgacaaccacctacagagttcttacctcttaactggatgaatttgttggtcacttagttattttttgtagactattaagtttaatgacttggtgaattactaattgttcaaacttcctgcaggttatccctcctggtatggactttagcaatgttgtgcgtcaagaagatggccctgaaattgatggagagcttgctcagcttactgctagtgtagaaagatcttcaccaaaagctatgccttcaatttggtcacacgtgagtaactgat

SEQ ID NO: 144458 - DNA, 436 bp, Glycine max
  unsure (1)..(436): unsure at all n locations
ttaagcaccgcggctgcagcttccagttgtgacaccctgactattctctttttaatacagngcaagaatgttaactactattggattgtattatttatttttactttttagtattcaagaggaaaaagaatacagatttcagtcatgctgtcatatatacaaggttaaacataaacatagcaatccctgatttgataaaggtatacataattcgtggagtaccattataattgtctactaaactaactagaggtttttaagacagcacatagtctatcaactntgaatgtactttcaagtctcaacacaacaaaatcacttcagctattcataagcaacatacacatggtaccacttgacagtgtgtatactagtcgatgatgacatttctacataattagatgtggctgttccagtcatctagaatatgaaattc

SEQ ID NO: 144459 - DNA, 389 bp, Glycine max
acaggttttaaacgaaaacggtaactttatataatcgacgtcatagctacatcacatagtctgaaaatataaccagtcaacaaggtccttacagctctaaatataagatagaaatttcaataatctgacacacgtcattaatattataaacttaactttgacggtccgatactgataacttgaagacttatgaaacaaatatcatcatagaaaatcatattgatgatctaaatcatagccaattttatatattaataaaactgatttacctataataatgatctttctcaaagattgttatcaatcgaaatatatttaaagacctttttatattgaataaaggataggaagaaattagtgaaaagcatattcttaaagaattttgaata

SEQ ID NO: 144460 - DNA, 358 bp, Glycine max
  unsure (1)..(358): unsure at all n locations
gaagaattaagaattatgatgcagtttgcatttcttataaatgtcgatttngcatagtgcgtatttgaaatttgattgatttgtttgcacatcctatgtataacactataacatgggataaatacattggactttatatctcacgtcaataaacaaagctgatgcttcacgtggatactaaatattgaaccacctctacagctacttcttgcaagaaacaacacagattaataaacattacaaaaaacaatcgtatgacttatgtaaatgaatatatcaaaatcaaatatattaatacaaagatacattagacgatgttaattaattctccgtcatcatgatcattacgattagcatg

SEQ ID NO: 144461 - DNA, 355 bp, Glycine max
  unsure (1)..(355): unsure at all n locations
tactcatgccttggtaagaatttaagaattcatttagtactctgtgaagccatangttctttcttgttgagcctcgangaatctccaaggctcctgcaacccaaggtccgcccttggtgagcctcgatgactctctaatgctcgtcaaacccaaggtccgcccttgatgagcctcaatgaatctccaaggctcctcaaacccaaggtctgcccttggtgagctttgacatattctctaaggctcatcanacccaaggtctacccatggtgcgcctcgatgactatccaaagcttgtcaaacccaatgtgctcctttggtgagcctcaacgaattatctccaagggtcttcaaacc

SEQ ID NO: 144462 - DNA, 411 bp, Glycine max
  unsure (1)..(411): unsure at all n locations
agcttagaaagtagtatataaccttattcattcatgactntactcagttctctgattaaccacattctatgttaaaacaaggtaataattcaatatataatttcacacgtcttcagagaaactatattggtatattttacttttggtgagtccaattctaacacaaaatgagctaaacatgacatcttatgagcacatatataatttattttccaagtggaactcttatttatttatcataatttgttacatgatcctgcatgtgtaaaatatcatatttataccatagtagtcatgcaataagagcaaccatgatgtaaacccatttgcacaaaggttaaagatggatcttcaacgattttctttctctttttatgaatttatcgaatatacagaaagtaatagtttatg

SEQ ID NO: 144463 - DNA, 394 bp, Glycine max
cgctaattatgagtatatgttggagttaatatatataggaatttataatttgcctttcctattttctccctttttgagcaaataactgttaaattagcatcatttaagtttttgtgaggagaatattaagagtgatgaatttatgatgattactgagtaaaataaagcctataatagcatgataattaaggaaaacacactatattaagaaagcagagcttattaacaaaagcagactaattaaggaaagtaagactaattaagaacataggctaattcacgatagtaaagacggacttagcgtgagaaacccgcttagctaagctaatctgcgcctataacagaagaagagagaagaagaacaactcacccatactttctagagaatacaagt

SEQ ID NO: 144464 - DNA, 467 bp, Glycine max
  unsure (1)..(467): unsure at all n locations
agcttattattccattaggtgttcttccaattgtgcataataactcaatcggaccaacacaagaaaatngatcattacacattaacattgtgttgacatcgtcatcatttatcaatttcatacactgaaagcgaatntggttacctgtattggtgtatggcttccggtagtgaatttcatccaaaaattgtttgtcagatagctgaagggtattgtgtattctggtttttaggtttgcaaaatcacaactgtttggtactcgaatgggcaccggagttgaagtttggaagtaaacgccagtatcattgtgaataattgatccatctggaaaaatgaaagccaaccttgagttgacaatcgtttgactgctagtttctcctaanaattccatactntgtgtatcaattgggagactatgtgaaagcaagataatgcctgatatataagccgtgtccgctatataatat

SEQ ID NO: 144465 - DNA, 458 bp, Glycine max
  unsure (1)..(458): unsure at all n locations
taccttacaactgaccaccaagttactttcggccattctacctggagatacacacaaaagtgcactattgttttgcccggagaccaatgatgtcaagctatgttgagccaattataagaagcattcttatatgttctacatattattgacaaaaacaacttagaatantaatattattttcacatacataagataacaaattaaataacatattatcacatgctaagttgttaatggtggggcatagatgttcactgattgcaggtataaatagcagtgaactataacaatgctcaaacataaccaagaagataattcataaaagaagagaccaagagagagagagagagatggggcgcaagaacacaattttcttggcattggttgttactttgatcactaaggagacaatggcagaacaacatgtagttggtggaagccaacggttggatgaatca

SEQ ID NO: 144466 - DNA, 364 bp, Glycine max
agctttatatatataaagaaaatcttattcttttttgttgttgaaaaagttataaatttcattcttcttagaattgataactttggccaccaccaagccataaacaatatgtagtagcatgttagcttaaccagaggatgcgcacttttgctgattaatattgtctattttgcaacattaacaatgcgagggtgaatttactcgatttgttgctgataaaaagagcctcaaaagcctcaagatggaaggttgttctaaccttggaggttttgtactttgttcgactagtctttctaccctttggttgtctaatttatactctttggctataatggtgattaactcttctgtcatattttattat

SEQ ID NO: 144467 - DNA, 286 bp, Glycine max
  unsure (1)..(286): unsure at all n locations
ctaacctnnttacgtgataatacattattggttttatgagtgttatgntgggngcggatctgtttggtgtacgcccatcacttaatcatgcaatgctgtatctggtttttttataacagacctacaatacaaacgggcagactaccactactgacttgttgagtgacccacagcgatacattctctgtgggtttgatatttggggatgagcgtgtaataatattgatgggctctgaacgattttagacctatttttagacatgatcgccttcctcttgtattgtac

SEQ ID NO: 144468 - DNA, 392 bp, Glycine max
  unsure (1)..(392): unsure at all n locations
agcttaaacaacatattaggagatttatatatatgagaggcatcaacagattttagagaaatagttcctttacgataataaaccaaaaattgataagagttctccttttcctatcagtccacccatcaaccataagaatgcaacctgttttcttccaaatagaaagatattcctccacaagtttcttcacttcatcaacccaactatgtaacaaattaccacgatagttgtgtatacctggagccttgtatcctggatcatgctacatagagcatcaaccatatngtgaaaatatgttgaattagctgcattaaatggaacaaatgcatcaaggaaccatttatcaatagcaaggtcacactttctgatcacttgttaattttcatcacact

SEQ ID NO: 144469 - DNA, 279 bp, Glycine max
cttattctctagcggatgacagcctttctcacatctactaccttagtctctactgcaacttcatggcttagaatcaccattgaaagaccttactgaagcttcaaagaatcaaccttgatagaatcttcttaagcaagtcttcatcacacatactattacacaacttcattctatgctacatcgatctacaattcctagctcatttctattaaagaacaacctatctttaccaagaggctgtatattcaaggacgctagttgatgttcaatattaacaat

SEQ ID NO: 144470 - DNA, 458 bp, Glycine max
  unsure (1)..(458): unsure at all n locations
anncttgcagatttggtcttcgtcagtgatatgatctatgtgggtctgataaaaggcataatttgatcattcctacttangacgacatgaccaatactgcgggctaaatataagagtgtgtgattgtatgagtggcagaaaacaccatcgcctgttgacgtgtccattntcttggtacgggctcaatgctattctccacacacacgcacaactaattatttctttgacttcatgctcaataaacaataccgtctttcttacccaccacccaggtatccacagaggccatctctaaatttaccacaaagtctgtctaccgcactttcaatgactaacaccacctttatcacaaaccaaaaacaccaaccaagaagtgaattcttgcacgagaaagcctgtagaattcaccccatatccagttgtctatgctgacttgtctccatatctacttgataaat

SEQ ID NO: 144471 - DNA, 433 bp, Glycine max
acttaatggatgatttatcttcgagagaggattgtgttgttgttgtcacgactcgcttcttacaaaataatcatatgcagtatgcgaaatatgctatctcggcctcaactcgtcattttatgcatattctttgtgataattctagtccgataattggctcttgcctgaagatccacttttggaatgataaatgtcttatggagtaaatctttgcttgttgaaatttaccatcacaggtggatccttctttgtaagctcaagtgtctaattctatagtcaagtaggcatggaatttcccccaacaatatgtggactctttccctggcattgagaatgaaattttgtgcaatcctatcctcgtcttgcctcaagaagattttttatttggatacatactgattctcgtgacgcttttttgaaagaagcttttatc

SEQ ID NO: 144472 - DNA, 409 bp, Glycine max
  unsure (1)..(409): unsure at all n locations
agcttcatgatgatgaatcgtgataatgaatcttgttgattcaagcagttntgatgatgacaaaaaggccaaagaatgatttcaagattgagtcaacaagtttaagatcaaaattaatttcaagtttcatgtgaagaaatcaagaagattcaagaatcaagtgaagtttgatttcaagattcaagagaagatgaattcaagattcaagagaagaaatcaagaagacttcacaagggaagtattgaaaagatttttcaaaaaaaaacatagcacagttttgtttttcaaaagagtntttttctcaaaattntctaatttaccagaagttttactctctggtaatcgattaccagtntcctgtaatcgattactagtggaagaagttgatttcataagcttttaactgaat

SEQ ID NO: 144473 - DNA, 336 bp, Glycine max
agcttggttcgaggtacttacccgttgaatatcgaagaacgatgaagaacgaatgaagaacgtcgaagtacggttgaaacctttgcgagattcctcacggaaaacgttacggaaaccgttcggaagcgcctcggcttagattttcttcacggaaacaatgtttccaagcaaattcaaaagagagagaagtgcctaaggggctggacccctttcttcttcatttcctcccctatttatagcaaaataggggaggtggttgccgcccagctcgcccaggcgagctcatctctgccaggcgagcagggttgctttctgcagaaacaaccgccttctgga

SEQ ID NO: 144474 - DNA, 448 bp, Glycine max
  unsure (1)..(448): unsure at all n locations
tctctcccataatatgacgacacaatgttttctcanactatctttatgtcttggcatgtattaatctaaggccttctcattctctcaacatcactcctcacttggttccaccatgctaaagcatatccctcaaactctaatgaggcaaatttgatctttttctcttcattgtagttgtaacaagcaaagacttgctcaaccttcatctctcactcaagatacatttttggatctcaagtccctataataagaggcatcttcacctacactccgtcaatccattcctctcttttcctaccttcatatcttctatgatttcttctctccctatacctcttatttctccttcctcccacatcctcttcatatgcctcatcttcttcatgagaagagtatatatttatcctctcttctttctttatgtgtcaatcctcacacttaagcttac

SEQ ID NO: 144475 - DNA, 408 bp, Glycine max
  unsure (1)..(408): unsure at all n locations
caatcagctctatcacaattnttggagctaaagggagttgtaatcaaaccaggcttctctatctccatatacaattcttcaattaaatattaaaaggaaactgaaatgttggctttctgaaagaaattgtttaactccttgtaaataattaactcctcaatcctctgcgcccttgaagaatattgttaaaagtaaaaccattagttctgaactgtctagattttatacacaagtgaacttgttactgccctgtgccatgtgttaagatatatatatatatatcttcttcaacttcacaaatttgaaatagaatgtctcgtgtgtgaccacaaaggttgatgatgtctccataacattaaaaggtaatanagcttatatctttatatagatgctccctcttgcttgctg

SEQ ID NO: 144476 - DNA, 346 bp, Glycine max
atgtatgcatcggaaactgaatctttgagaaatattgggcgtttctgtgtctgaaacatggtgttcttctctttgaattgatgcagtgtctaatgaacaagttccaaccttgaagttccgttctgatgatcgctattgcgctggcatcatttgtatattgtttggactcgcttgaaggatggattgggtttttgaaatataaaaaatgttgatacttggagaaagggatggactaattcgcacattggttcttcataattcactgggtggatttgtaataaaaagttaagattctctctaacacccatttgacggactaaaatttaatatgtcggtgaatctgcat

SEQ ID NO: 144477 - DNA, 395 bp, Glycine max
  unsure (1)..(395): unsure at all n locations
agcttcttatccaagggctcatctggtggtgattctccttcttccatggcttattccctagtggatgacgcctcctctcacctattctcctttgtcttccgctgcatctccatggtggaaaatcaccattaaaggacctcattgaagctcaaagatccagcctccatagaagccccacaagcaagcttccatcaagtggtaatcagagcacaagagcttcaagtaggtgctccttanacctccattattttttttctttaccttctcttccattgttgattcttcattcttctccatgtatcttctcacatgtcttgttctaaatggtgataacacgattctttagagtttccaccgattaaacttgctatagaagttagatttgattttctatg

SEQ ID NO: 144478 - DNA, 465 bp, Glycine max
  unsure (1)..(465): unsure at all n locations
ttggagcaganacataggaccaactcattntatttcagattgtcatatctattcaagatctgagagatcatacaagtttcctagcgggttctaattatatgggccattaagtctatcatatgctgacaatagccgagaagcccgtggatttcttcgggggcggagtaggtgtccgccattgccttggccttggctagcaatcgaggaagttcttgactcctgttcaaggtaagagcaaaccggtccatccacatggttgcctcttggtgtaaagagtcgatcacccttcctctagcctctttttccgcgtatacttgggcatactcgtctgcgaccctatgctcgtgggtcgtggctagacttagctctttttggtacttggcgatgatagctagcatgttggtctccgtctcgcacanacactgagacaagtatcttttggaccctgaacacgcaactaacttc

SEQ ID NO: 144479 - DNA, 461 bp, Glycine max
  unsure (1)..(461): unsure at all n locations
agcttgcattngtaatatctaagaatagtgtcaagctgataccgtgccaagcaggtcctttaattaaacccgtccacaatagatttggaatccatctcgataagcacccagtgatccctaaattcactcagccaagcaattaaatggaagagggctaaagtttctgcctcttccggaagaatatttccaaaataatgtggacattaacaccaacacatttcgtcaattggctcttcaattattattcttgatccttgcttctacttttttttgttgcactcattgcttctattgttacttcttttcattgccatccttactttgttgctactttattttgtggtattcttatatttctcacattatttctttgtgtgggcaggttactttattctcagtgcctaatttcaatagtttattcttttggtgaactctaaaaggttgttctataatgttctctt

SEQ ID NO: 144480 - DNA, 480 bp, Glycine max
tctctccatcaccccacaatgcatatgcaacctcgccatgaactgcttcatcctcaacttgcaagtcatcttcactcatcctaagtggaactatcatcctaaccaacaaacacacaatgctagttgtggtgacattcagaagtattacaaaaacaatgccaagaagctgaacccccatttgcctgaaccctgtcttgagattcccattgaatatgccataaacaagacccgtatagtgcaaggaatcttgtactccatataagagataacaaaggttagggtcagcaaagaaaccagccaaaatgccacctaagctaccagccacggcatgggtgtggaaaactgctgaagtatcatctacttgtttgagtagcttactttctttgtgcaggaccatcattgtgtaccatgggatgcttccagacatcattcccattatgattgctgcccaccttgcacacacctaaactcaacaaacaa

SEQ ID NO: 144481 - DNA, 396 bp, Glycine max
  unsure (1)..(396): unsure at all n locations
agctnttgaaagcttgactcttcttactcatgatgtatatccgatgtaaatccatgtcattcttgagtagtcatcaattatggacagaaaataccttccaccacctagtgaaggtactcttgcaggcccccaacagtcagcatgaatgtaatcaagagttcctttggtggtgggaatcgctttaggaaatttaatcctatgttgcttgccgaaaacacagtgctcacagaatttccgttcatccagtttctgatttcccaatagctgatgtttttgaagtatcatcatacctctttcactcatatgacctagcctcatgtgccagaatagagttaagtcaagtatgctcttattggatcttgatgcaacagcttctagaccatcatcaatacatgt

SEQ ID NO: 144482 - DNA, 379 bp, Glycine max
  unsure (1)..(379): unsure at all n locations
ctcagctntgacaaacagacacactgctgtcttcttcaacaagatataatatggaaatctactctaaagatacatctaataatacccatagttataacaatcttctttgcattcaggaaactaaaaaggaatccatagataaagctttctgtcaatacttatggggagatgctaatgtttcttgggaggctgctccttctaatagtgcagctggtggtcttttgtgcttatggaataatgattcctctgtggtggatagaaaggtagttggtatgggctatatatggctggaaggagtgtggactaaagacaacaagaggaattgcattaccaatctgtatgcttcctgcgacttacagggaaagagacagcaatggga

SEQ ID NO: 144483 - DNA, 444 bp, Glycine max
ctgcaagctatagaatatatagtaaaagaacaatgtctattgaagagtctatacatgtttcctttgatgagtctaatgccattcttccaaggaaggatattttaaatgatatttcagattccttagaagatatacatattcatggaaatgactccaaagaaaaagatgaaggaagcaatgaggattctcaagataatggagttagaggaaataatgaacttccaagagaatggaaagcctcaagagatcatcccctcgacaacattattggtgatatatcaaaaggggtaacaactagacattctcttaaagatttatgcaacaatatgactttcgtatctgtgattgaacctaacaatatcaaagaagtcatagtagatgatcactggatcattgccatgcaacaagaactgaatcaatttaaaaaacaatgtgggaaactac

SEQ ID NO: 144484 - DNA, 313 bp, Glycine max
aaaagcatcacacaactttctgcgactgggttatagatacaatctctgcatatgagaatgcttcagacacattatgaaaactagcagatgggcctacaagagatgttataacctggcatggatacgacatatacaggtattcattatactccaaagcaccagatgacatatgtactatgcataacagcggggtcaccctaagggttgaatctcaacactttgcaagcgctaatgacgccagtccctgtgtagcttacatcctttactttgggttcattgatgaaatgtgtgagcttaattatgcgaaacttac

SEQ ID NO: 144485 - DNA, 340 bp, Glycine max
  unsure (1)..(340): unsure at all n locations
tatcttgatggtgatgagaagatttctcatgttngtcatcatccaaaagggggagaatgagaatgtatgtatacatgaatttgatgatgtcataagaagaatcagacaagactcattttgcttcaagattaatacaagattgttctaacaaacaaagccatgattcaagatgtcttctagatcaagccttgcctcacattgaaaggtttcatgtcattcaaggcacatgttatcgatcaccaatggattgaaagtgtgttatctattgcacatcatttgtaattgattaccatagactctgtacgttgggagatcaatttttaatgaagggtgcaactat

SEQ ID NO: 144486 - DNA, 376 bp, Glycine max
  unsure (1)..(376): unsure at all n locations
ttatcaaatgtggcagatgatgtaataatcttatttntcttcttntatcattngagcggagattttggtggacaaattacacacagactatatgattnttcgttaattatggaaaatctttaatttgaatggactgctaaccgaaagttttctttggatcccctctttgggtggtcctactaccattgctgctagacaaaaattatttggaatctcttggctttttccatttgtggtaataaagatatcttttgctacatatgtgaaataataagttgtagttggactattctcccctaatcctgtgagtctggccatatgatctatagaataaactcgttactctgtattgtgggaatgaagctatggatggaat

SEQ ID NO: 144487 - DNA, 425 bp, Glycine max
  unsure (1)..(425): unsure at all n locations
agctntggaaagtgttgtntttcaccttctcgctaagccaatatgctggcttagcgagcatccgctaagcgcaacactccttggctaagcgcgagaaagaatccagaagaagatgagctgtgcaggtttgctaagcacactgcttcatctctctaagcacaccgcttcagttcatccgctaagcgagaaaggcgagctaagccaaaaatactaacgtgcgctaagcgcacgagcacaaacaaggccacctatttaagcctgaaattatattttgtgaagggagtttggactgggattcaaagctttgcatgtctagggtttctagagagagaaaggtccaagttctagagagctctgagagattttgctgtgtgaagatctgtagagaccacagtgtgaatgtatgtatacatgattttgatgat

SEQ ID NO: 144488 - DNA, 459 bp, Glycine max
  unsure (1)..(459): unsure at all n locations
agctggtcactggtaatcgattatcaaattcttgtaatttattacacaaagcttntatgaaaggatgtgactcttcacacttgattttgaatttcaacgttcagatacactggtaatcgattaccaatatcttgtaatcgattacacccttttgaaatcaattggaacgttgcaaattcagttaaaagcttttgaaatcaaactttgtcactgttaaccgattaccagagagtaaaaactctggtaactaagaaaatattgagaaaaactctcttgaaaaacaaaattgtgctatgtttgttttttgaaaaagcttttcaatacttcccttgtgaagtcttcttgatttcttttcttgaaccttgaattatcttttcttgatcttgaatcaacttctttgaatctgaatcttgtctgaatattctttggcttttgcatatcttgtatatcaaactcctg

SEQ ID NO: 144489 - DNA, 457 bp, Glycine max
  unsure (1)..(457): unsure at all n locations
nntttgaaagatagagtntcacanaacaagtttatcacatatataatatgctcttaacatgagcttccaaatgttaacaatagatgttcataaagacaattttcacaaaaacatgtgtgcccaaggatatgacaaaagcaactaaaaatacaaaacttatgacaaaagatagagtaaaatcacaattttatattagttccctctacttgagctatgtctagttatccttcacaacctataaagggtttcactaatcacaattgattacaaatgaatttttactctaccactcttagctacaacaagtattttatatgccttgtctggcttacccttaatctccccctgagattaagaacatacaaatattctttgttcactaagtctctctgggctttccaaacaagaatttgaatgattacaatattcaaatatctcaaagattggatatacactt

SEQ ID NO: 144490 - DNA, 189 bp, Glycine max
caaactcagcttaacaccttgtgagtcagaaactaattattatatgtacaacgttttatatgatgtaaaaaaatgaatgtgagcctttttcctctctgaaagacttgtttataaaaaatgttttaaaaatacttttaattaatatttgaattttctttattccttattagtatatatgtgacgggtaaa

SEQ ID NO: 144491 - DNA, 260 bp, Glycine max
cgagctgcgcagccaatcagagggaacttttttattgttttgcgcgatttcgtaagccaaccccaccccaaccataaataaaagggtggaacagtactagcctaaagcccaaatattccacaaacacataatgctcacaacttaacgaaattaacaatgcgccatctggatgcagcaaccaaagaaggaaaaatgggttcccgcctcggcaagtaaagaaacttctatttcgaagatgacttaatacagggaaacaaact

SEQ ID NO: 144492 - DNA, 424 bp, Glycine max
  unsure (1)..(424): unsure at all n locations
agctngacaactccaagaccctgttggacttcttcgggtccactgggtgtcttgcaggcgcgatccctgcaaacaatatatgaaatcagaaatcagttgagcgatgtgcatacttacctatgatgacgtgaccttgccgggggggtacgggcaccctgtangactgataaaggcccgtaaccagagctggaaaccccagggccctgttggacttttccgggtccactgggtgtcttgtgggtgcgatccctgcaaacaatagatggtatcagaaatcagttgaactatatgcatacttacccatgtcgggacgacacagaccaactgatactttcgcagggggagaatggcattgcggtcgctgggcataatatngctaatgagcaatgtcatctatgtaagagttggtcatgtggtgcgcatg

SEQ ID NO: 144493 - DNA, 418 bp, Glycine max
  unsure (1)..(418): unsure at all n locations
tgtaaaggtgtgtancccaccatctnttcataatataatactggttatgtgtctactatcattatcatcatttttttctgtgtcattgaggtgccacttgagctgccaggtctctccaccttttgggcgtattcttttgaaagattcgtgccccctttttgcacatgttcagtagttgcatcctattcgaagacattatactgacactgcctaacgaaggcaaccactatgtccttccaagaatggactcgggaaggttccaagttagtgtaccccagtaagactttcttggaaggaatgtatcagcaattcctcatcttttgcgtatgcccccatcttccgataatacatctttagatggttcttggtgcaagtagtccccctgtacttgtcaaagtccaacaccttgaacttggga

SEQ ID NO: 144494 - DNA, 453 bp, Glycine max
tagattcattggcgaaacctcttgctgtttcaacttggaatttccttccaaagtctctagagattatgttgatgatgtatcttgaatttcttggattcatgtcttgaattaaacttgagaagcgcaagatcctcttgaattatacttgagaagcacatgatcacatggcatcatcaaaacatcaaagtctttgcttctacagtctggagaagctaaaaggtggcttcactcattcataggcaacaatcttaagacttgggatgaagtgcttaagacattcttgaaaaagtatttccctgagtctaagactgcagaagaaaaagcgaccatctctttgtttaccaatttctagaagagtccttgagtgaggcaatagagagatttcatggattattaataaagacacccactcatggagtctcagaaccaattcagctcaacatttttattgat

SEQ ID NO: 144495 - DNA, 459 bp, Glycine max
  unsure (1)..(459): unsure at all n locations
agcttattctatttataaccttcatcttcatgtatccattgnctctcaacagatggattcttcatttgttcttcgtctaaggtcttgaggttgttggtgcatttaattcttcttaatgtagagtccatgttacgtgtcttacacttcaacaagaaattcatttttacatcatagaaggtatgcactagcatagcatgcctttagatgaaagtcaatacttccaaattttggacttcatttattcttcttaggactttgacagatcctataagaatgttttctctaagagataatctcagacatagagtattacatgaaggtcttaaatgcattacttaatgctataccagatcatcttatatagatgtatcatttgaaaactcaagcatagaaatacagaccatgatttgttagaatgtcaaacannattnttatcactcatatntatttgtatttaat

SEQ ID NO: 144496 - DNA, 463 bp, Glycine max
  unsure (1)..(463): unsure at all n locations
tatcttgatgagagtgttccatatgttctctagactagactaatacatttgctccccaagtttcatggtcttgcaggtgaagatcctcataaacatcttaaggagttccatattgtttgttccaccatgaagccccctgatgtccaagaagatcatatatttctaaaggctttttctcattctctggagggagtggcaaaagattggatgtactaccttgctcccaggtctattttcagctgggatgaccttaagagggtgttcttggagaaattcttccctgtatctaggaccactgccatcagaaaagacatttcacgcatcaagcaacttagtggagaaagcttgtatgagtattgggaaagattcaagaaattgtgtgaaagctgccctcaccaccagaatttntagcaacttcttcttcaatatttctatgagggacttggaaacatggagaggagta

SEQ ID NO: 144497 - DNA, 454 bp, Glycine max
  unsure (1)..(454): unsure at all n locations
agcttcatgatgaatcaagattgattcanagtatgtnttgatgataacaaagatgatgacaaaggtgatgacaaaaagctcaaagatcaaaaacacttcatgataacaaagatgatgatctcaagaatcaaagaatcaagattcaagaggaaagttgaagaacacttcaagattcaagaagaaggatgaattcaaggatcaagcttcaagaatcaagatcaagatctcaagaatcaagagaagacttaatcaagataagtatgaaaaggattnttcaaaaactgagtagcacatggaattctcacaaaacatgtttaccaaagagttgttactctctggtaatcaattaccacattgctgtaatcgattaccagcagcanaattgggtttgaaaaagtttcaaattgaatttacaacgttccaattaatttcaaaaagttgtaatcgattacaa

SEQ ID NO: 144498 - DNA, 452 bp, Glycine max
  unsure (1)..(452): unsure at all n locations
tgtgcttagagacaacttagtctcttctatggttttagacttanacccaataattctttcacggatattatggctttgtagaaaatcatccttcagattatcaacttttctcagatcatggcatcttcagttcatcttccccactatttctgtatttctgatcttctggtcttgtctaagaaggtcaaaaatggtggttcttgaatttgcatccagaatgatccaaaccaagtgttcatggcttggattgcatcatgtggcaatcagagcttgaattcaaatagcagttcataattatatccatcaattaggtgcagggttatcattttcatctttcaattttttcacaaaaactagaaactgattctcatttgactcttgtgtgtttgcgttaattgagagtcccttgagtgattttgggtaatcttgctgtgccttcaatcttcatcttc

SEQ ID NO: 144499 - DNA, 350 bp, Glycine max
agctttgatgtgatgaatgacttcttttacttaaatcgcaatcttatcagagggatggcgagagtatatgaaaataacaataagttcgcagaaacttgcattctgggattatggaatcaattcaaagaaagtttatagtgagaggccatctcattatttgttaaaaaaagaatgtttctctaagagtccagacaacgagttggagctgccacagtcaacaatgacgtttgacgctgaatttgcgaagatccatttttcttaacctctcacaaactaataccatttaaaaccacctcttcttgggttgtttcactattctctataactgcatgagaccgaatcacaattca

SEQ ID NO: 144500 - DNA, 345 bp, Glycine max
  unsure (1)..(345): unsure at all n locations
ctcagcttttctgccgggcaagtgatgtcatgcttttnggncgtatatntctnncaacagaatgctttggattagtggtaattctggcagagatgatcatgacctcttctctactatggtacgtgatgctgttttgatgtttcacatattgatgttggagtctatacgtcggagaactcgcttgcactatgccacttattatggaaatatatactgcctttaggtccttctctctgctgctcattccacacctcgtagcagattctcggttagacacaatttcctctctttctcttcatacacacacatgcacacccaatatcgttccagccatttcaataatga

SEQ ID NO: 144501 - DNA, 303 bp, Glycine max
agctttgaggataacttaatcatttgagcaatgatcacaagtgtgtgtcagtatatgcaaattaaagttaatctgcttcgacgatagagagagcagtggcacttagaacacggtgtggatgaggaacaaactccctttgtgactggaattcctataccgtcgagtgtcgcacccgctggacacaatgattacttactcaacaacaacctttctctttgtcttccaccccgctattcgcaaaggccctccctgagtcagacataaatcccggctttcacacaacctatgctgaacaccactctt

SEQ ID NO: 144502 - DNA, 357 bp, Glycine max
ctttcggacctatgaaactcagcttctgacgatgaatctatatagatggagagatttgtgatgatgaccggtacgatcacttaggcaccgctctctgattctaagattcttacaacaagtgctagagcgagaaagaacctagccttcgcgctaacagatcgagaacactgagtgaatccagagaacgttttcttaccgaactccggagagcgatattctctcgacctcgagattaaatcctcaacacttcacaacgacagtactgactagattattcatacaacgaacatagcacagttccgtcttgcataagagtatttctcaaaactttctacgtaccagagttttcactctctg

SEQ ID NO: 144503 - DNA, 464 bp, Glycine max
tcttagtttcagatgatgtatatgattttatggctacatcatgcactcctctaatgactatagcatgattcttggcgctaaactgttgggagttggaagccatcatcttaattaaatttttggcttcagcaagggtcatgtctccaagggctccaccactggcagcatctatcatacttctctccatgttactgagtacttcttaaaaatattggagaagaagctgctcataaatctggtggtgagggcaactggcacataatttcttaaatctctcccagtattcatatatgctctctccactgaattgcctaatgcctgaaatatctcttctgatggttgccgtcttagaagcacggaaatctatttctaagaatactctcttgatgtcatccaatctcgtgatggaccgtctgatctaagtctttcccgaatcaaatttacattataatgtttttactatg

SEQ ID NO: 144504 - DNA, 435 bp, Glycine max
agctatctggatatatatctggtccttgctatactgtgtatacgaaggagattcatatttctaatataaaaagtcaatcatatatctcatcttacccttacttgtagatgctttctgggttccctccactaacttttggagcatatttgcaggccttgcagtatgtctgtatccgtgtgactatactactttaaatagtgtattatgggtagagtggacaatggacatgtctatgtatgaaaagaatcaaataccttatgcatgtgtactgttggccttaacatggttagatgtcaactcacatattgtttgcagggcccagacacaatcttgtgagtcactggctatatgctcgagcatcgaactctggatactgataagaatccgaacaagaagaaacaagtgtaacatgtcagctatctttgattgagtgcc

SEQ ID NO: 144505 - DNA, 458 bp, Glycine max
  unsure (1)..(458): unsure at all n locations
ngaggcttctatattggttatataacagtttttcnaaattttacanttattaatatattttaacttgtatgatgtatggctaaattcatgtacttaattaanatctaatttatgtgaatatggcctatgtctcacggaaaaaaagataattaaatgagtgcttaattgttttctgcttttatttattttattgaatgtttggtgagacatgntttcttttcaaggcttacagaacatcggtcctaaccctacagaaaagtggtgggttgcaatgggccatatgcatgaaatacatgaaacctagtggttcgtgctttattatattactcaaaagctgcctttgatattgaatatagcaaccagattactcattcaaggagatgtttaagtgattatcttcctggattcganatatatatatatatatatatttgcactatttgctggtatgcagttca

SEQ ID NO: 144506 - DNA, 169 bp, Glycine max
aggacaaaaaaaggaagaaaagagaaggggcggaaagaagaaaaagaaaaggcggaagaaagaaaagagagaaaagagaaaaaggggaaaagaagggagagaaagaggaagaaggaaaaggaaagaaagaaagaagaaaaagaagaagggaaaagaaaaggagaaaaga

SEQ ID NO: 144507 - DNA, 433 bp, Glycine max
cttatgcatggtccactcaacttattgttgatagccgcttcagcttcttactagctaaagcagtaactcatgggaaacctaaactcatatccaaccaaacgcatatcttaatcttaattgcccattaaaaggaaattccagttatgtttgctcttgaattcatgcgcttgcttaattgccatgacaaacctatcaaccgtcaaagcaaaagttcacttacacacaaccagtaacaatttttttttttggctcctgctaagaatagtccttcaataaaataatttctactttaagtttcttaactaatgtcttaaaaacacttataaaaaaaagatcatgggtaacacaaccttaagcatataaaaacattaccaactgtaccaatctctatcaaaagaactcaaactctgtcactaagtaagcgcctccaatt

SEQ ID NO: 144508 - DNA, 399 bp, Glycine max
atcgcgtgaatggcctactgtgaggggggatttaatcaactcaggcaacgcaaatcgctgctggtgctggcgcttttggccaaccaaaacgccattgaagctggccacttcctgcagcgttgcaaactgcaacccccttggaaacaacctttgctgcctgcagcctaggaactctgctacctcaactcatcagatcgactggcgagaaccagcttctgcaaaatgccattgaagatggcgacaccactgccaggtggcgcgtcgagaaggaacgcgccattccctcctgcgatttgcatgtgctctacgtaaaacagagcaccatgcatgaattactttataaacagactcatttggggaaaatgttataaaagtaacccatgcggaaatttgcccata

SEQ ID NO: 144509 - DNA, 424 bp, Glycine max
gcttgatgtacgttgagcataacgatctatgttattcttatattgcagaaagatttttggtgttgcagaaagtgctaagcgccgctaccgcgctgagccccaaatgcttactggagtttacaacttctagttgggcttagcgcgaggctacgctaagcgctagtgttttaaactcaaacatcacgttggcacgctaagcgcagctgcgcactaagcgtgccatacgaatttgagcttttataaaaagtagaggcagaggcacttgggttactacctttgaacctcaacctctgcaacctctcattcctgagcattctcttatttctggtctgtgcctactgctactatgcatccttcctgcttgtttgcaaagacaatccatgtaagtgagcatttctacttttactctgatgcttcacacctt

SEQ ID NO: 144510 - DNA, 420 bp, Glycine max
  unsure (1)..(420): unsure at all n locations
actcagcttctgcccactgtttataatacgtggagaagtgaagtgttaacgtgttattctcttaagcactcctctctctttcgaagactcttacaacaattgcttccgcganaaagatcccacccgaagcgcttacgaaacgtttacagtagtgagttcccgaaggttctctaccgatcttcggagatcattattcgctctacatcgatcttcagtcctcaacagttaagaacgctagaccaagcttgacaattcattctatgtacccggagcggtccacacttggatacatgaatttctattctcgttctcatttacttgagatacccacttttgacgtgcttaagccattctatttaagtcatttctagcttaacctaccgataaactaaatttccaccggaagttggaactttatta

SEQ ID NO: 144511 - DNA, 474 bp, Glycine max
  unsure (1)..(474): unsure at all n locations
actcagctttatactaattcactggaggtncatgctttatgtacaccatttgttacagggagaggacaatggatgctttgaaggctgttgtatatgctcataaacaattatcaagctttgtagcccaatctttccttgaagtagctacggtcttttctagtatccttttgatctccctatttgaaactttaactcatccatttgtttgtggatgatagggtggtgctactttgtgtcgaatatcgtagtgttggaagacctttgaaagtcttggcactctaaacctagcaaagatgtttctctntaaggacttaatcattatttttgcatcattagttgcactagcaattgcttccagccacttgttcgcttncggcaagtgcaccagatcgcacaagtagtataaaacggtaagaattgagtatcgaactctcggttaacttgtgttattnggtaagctatttcagaaaatag

SEQ ID NO: 144512 - DNA, 480 bp, Glycine max
  unsure (1)..(480): unsure at all n locations
actaagctntaacaaccccatattatcatacagaacatgacgatgacttactgtagctatcacaaacaagttgaaacctagctatatgcaatgattaatgaaaataaagaaaaagaactgggttgcctcccaggaagcgcttctttaacgtcactagcttaatgtgtgttcctcatggatctagagcaagcttggctctggccatcagaaccatctcattcttaatttcctctatcttagaacagatgttatggtcaagtaagtgtttttatgcgtcaaaccaatcgaatttgatcttctaatcatctatacacatttccattttacctttccccatatccaccacacaattggcggttaacatgaagggatgacccaaaatcagagggatcacaacatcctcttcaatgtccatgacaacaaaatccgcacggaaggtaaagtgatgcaccttgaccaaaacatcttcaatcacgccat

SEQ ID NO: 144513 - DNA, 375 bp, Glycine max
taaaaacccgagacattgtggaggaggatttttttacccgaacttcgacaaccaggcgggactgggcaactaagtatacaggcaagcgatggagttgttgcccaaactgatacagttattgccccaagctgacctgataagtgccagtggacctaattgccgcaatcaaaaggtcacttgcgcacaaccagtaccaacctttttttggccctgctaagaaaagtcttccaacaataaatttacttagctcgaactatgtctacaaacactttttaagacaaacggtgggataacaaccctatgcattaaaaacagtaccaactggaccatctttatacaaacactcaacttagttctagtaaggcccttcaatcc

SEQ ID NO: 144514 - DNA, 393 bp, Glycine max
  unsure (1)..(393): unsure at all n locations
ggtaatgagaaagactgatattggctgagtattgatattattaagctaatgggaaatttggccatgtangaatggcattcacaacatgggtttctccctccttcttattccctccatttggcccagggttcctatcaccagaattcatcgaagcagcgtaatcaaatctgccttttcttaggcctacttcgatcttttcgccgacaaaaactaaatcggcaaagcttgaaggcgtgtaacccaccatcttctcatagttgaacactggtaacgtgtctactatcattgttatcatctccctctccatcattgggggcactacttaagctgccagatccctccacctttgggcgtattctttgaaagattcatgctccttcttacacatgttct

SEQ ID NO: 144515 - DNA, 456 bp, Glycine max
  unsure (1)..(456): unsure at all n locations
taanagtatcattagataaataattagttacatgaacctgtctggatatatgcattcactcgtgtaatgttacgatcgatatgtaaagttgaaaaagaaattaaatttaatgcatgtgcatagcatgtatgctatgatgcttgccactgatgacatagagtctccaacatccacattgtgcttccccgagagtactgtgcaaatgaataataataataataacactatggtctcaaccaaccacattgggttaatcaatggaaactatttactccctctccaaccaccgtagatgagtttattattaccaaaagtttaggaacaacaagtagtgagggtgcaattgaaactgtgaatggtgggggtgacagtgagtcgtggaggtacttcaccaaacacaacaatgaagaagaactcgttgaaactgatgagaagagaataatgtacgacacgatg

SEQ ID NO: 144516 - DNA, 365 bp, Glycine max
ttagctgttgctcaaggtccaaaagaaacttgtctcagcgtttatgcgagacagagaccaacatgctagccatcatcagcaagtaccaagaagaactaaatctagccacggcccacgagcatagagtggcggatgagtatgtccaagtatacacggaaaaggaggctagaggaagggtgatcgactcgttacatcaagaggcaacaatgtggatggaccgatttgctcttaccttgagcgggagtcaagagcttccccgattacaagccaaggccaatgcaatggcggacacctactccgcccccgaggagatccacggacttctcggctattgtcagcatatgatagatttaatggcccatata

SEQ ID NO: 144517 - DNA, 472 bp, Glycine max
  unsure (1)..(472): unsure at all n locations
acactataaaactaagcctgaacanataactgaattctgggccttcttaatgactttgttatgatatctacaagntgatcatttgagctaacaaatccagtaatgatctccttggacaacatctttttcttgactgaaatgacaatcaatctttagatgtttagtcctcttatgaaaaattagattagaagcaatgtgaagagcttggttgtcacaactaggggtgtgcaaaaaaaccaggttagaccgaaccggactgcaaccgacccgggccgaaccaattgcacactcgaactatgttgaaaaaaaaagcggccccgttttgtagccggtttggttcaactcgacccgtttcgacaaaaaaaagtagtgaactacattgcacactctcatcatcctactatccttttgttttgcaacttcaactgtcaagttcaaggatgacaactagggttcctacttctcaattatt

SEQ ID NO: 144518 - DNA, 445 bp, Glycine max
cttaagcgacgcggctgcagctgctgagatgagggatttctattattattattcctactccaagggtttccatagatatgactttggcaagtattatatggtactccaaggtgttgtttaccaagcaatatacacacacaacttaccttgcacgaataacctatgagcaactgaagttataaaaatagcatgagctttatgccaatttgcacactgaagaaattggtcaagggcttttgagtgatccccattataattataataaattgcctgcaccgccataacaaaatgattcaaacaacaataagagtcatttaaagaaaaatacagaactttgcaacatttcaagcattagcaagcccattaatcagtatagaacaccaggacaacaatttaattcagttgtagtcataaattgatcataatgtgtgcccatatgaatcta

SEQ ID NO: 144519 - DNA, 457 bp, Glycine max
  unsure (1)..(457): unsure at all n locations
tgaagtggagttttaaagaaantttggcttttacatgctcgactcctttgagtggcatttgtattggttgttatcttgattgacggatcttagtacatttgatatatgttttgcatcatacatcatcattgtttaggtgaaggaaattttctaagttagaaaaatttcttcaaaggcaaaaactctctattttaatcaattacaaccaactgtttgaagcttgtagagttgagtctcgtatcggtttaatcaattacatatatctcacaatccattagaatgttatttgagaaaatgactaatttagtcaggagtctttgctttaatcgattaccaagtggattaatcgattattatttctctctcattcagttgttcagatgttaacaagaatacactactacaaaagtcatttactacgacgtaccaacaaggacggtccacagaanaacaatgt

SEQ ID NO: 144520 - DNA, 439 bp, Glycine max
  unsure (1)..(439): unsure at all n locations
tgtcagcttcttctggcaatggttggaccagggtcattgttgaanagccttttggtcgtgattcagattcttcagctgcattaactagatcactcaagcagtatctgacagaggatcaaattttcaggttttctaactaaaactgataatcttcaattcaactttaagattgtaaagtacattttataaaatgggaaatattatacaggattgaccactatcttgggaaagagcttgtggaaaatctttctgttctccgattctcaaatctcatctttgaaccattatggtcaaggcaatatataagaaatgtacagttgatattctcagaagattttggcactgaagggcgtggcgggtaacctttattccttaacagctttcacactttctgttcttataatggggagtcttatacattntcatatctgtaccatgt

SEQ ID NO: 144521 - DNA, 383 bp, Glycine max
  unsure (1)..(383): unsure at all n locations
tcttctcaaagatcccaacggtcagatcatggaaaatagtcttgtgaagttgcagactaaatttcgagaagatccaacggttaacgaagtctaggaagtgtttttaccgaggcagcttcatgtatctttctctaaaagcttcattaagaggcttcctccagaagcttcctcgtggcttctttgagaagctttctcaagaggcttctttgagaagctagatccttatctatccacacccctctattaactaaattaacttcattaaaataattacggatgaaaataacgcaaccaataatcagacatcaaacataattactaataatatatagatatatatatcagggtgttacatggtgggcgcatgtntaggcatgaaaatt

SEQ ID NO: 144522 - DNA, 447 bp, Glycine max
  unsure (1)..(447): unsure at all n locations
tgtcatcgtgagacatcagaggctagtattttaataaatgtgggtaggaaaaattcaccaaattgatagagaaaaatctaaaatcatacatcttaggcaaataaggcatgctagcccccaacattattgcattttgattccatctttggacattgtgattttgaaaattagaaaacccaaagtttattagggcatttcatcaaacatacaactcccaactgatctggcaaaagaaatagtgagtagaaaatggaacttgcagacaaaaaacaaataaaagaaagatgattttctctttatcattcgcagaaaagaaaaattgaggaaacacactgcaaacaaatgtttagatttccttatgtgacattatactaactagtgaaaatttagcagttaatttaaagttaatagagatgcagaatgtaaataattaanaaaggaattatg

SEQ ID NO: 144523 - DNA, 409 bp, Glycine max
  unsure (1)..(409): unsure at all n locations
agcttcttatccaaggctcatcttggtggttaaactccttcttccatggcttattccttaatggatggcgcctcctctcacctattgtcctttgtgttccgctgcatctacatggtggaaaatcaccattaaaggacctcattgaagctcaaagatccagcctccatagaagctccacaagcacgcttccatcangtggtaatcagagcacaagagcttcaagtaggtgctcattaaacctccattaatttttttgctttaccttctcttccattgatgtttcttcatttttttctccatgtatctcctcacatgtcttgtgctaaatgtttttaacatgattctttacatgattctttagagtttccaccgattaaacttgctatagaagctagatttgattttctat

SEQ ID NO: 144524 - DNA, 375 bp, Glycine max
atcgattacactgctggttgagacaatgactaattttttcagaagtctctactctaatcgattaccaaatgtattaatcaattacttctctcttgtttaacgttgttaagaagatgaaccaagaacactttaatttattacttgggtcatctatttgaatacattattcttgagtgggtttccgatgttggatgaacactttaatcaattacttagataatctaattgattactttattgaaataattgattatcctatagaattaattgattacaggtgggtataaatgttttctctaccaattaccagcttatgttacatctatacatcatgagatcattaaagaatactcatacatcttgaaattactttta

SEQ ID NO: 144525 - DNA, 447 bp, Glycine max
  unsure (1)..(447): unsure at all n locations
cttctaaactntatacaagaatgaagctctgataccacttgttggacaagtggcctcagatatcttaagaagggggggttgaattaagatattacaacttatttccccaattaaaaaaattctatttcactttctattcaagttataaattcccttaataatgaatttcttaaatattgattcaaatagaacaatttgaatacgaatataaaacaataataaataaaggagtttaagggaagagaaaatgcaaactcagatttatactggttcggccacacccttgtgcctacgtccagtccccaagcaacccgcttgagagttccactatcttgtaaattccttttacaagttctaaacacacaaggacaacccttcctttgtgtttagaattctttcacaacaagagaccctcggtctcttaatcccttttcagaatgaagaaga

SEQ ID NO: 144526 - DNA, 94 bp, Glycine max
gggataccagcctacacatgctgacaagatgaggatttctttagaaaggaaataaagaaggttggctcgtctacagggcgacgaccacaggtgg

SEQ ID NO: 144527 - DNA, 475 bp, Glycine max
  unsure (1)..(475): unsure at all n locations
actcagcttanacgccagcacacaanatctaggtgtccaaacccctcaatgtaatatattntctaggctttagaagtgaaattgagaatgaggtaaatttgaagcaaaatctcacctcacaccagtccataacatcaatctaaacttgctcaaactggattcacgcttaaaatctcaccgaatcaaaatttgactcttcaacacccaaatttgccctagaaatggctctttgttcaccttggtcatttgtttttctctctagcacagtccaagctttctcataagtcctaaatggcatttcaagctaagatttactcactctaacctctaaatactaccaattccagatttggccttccagccctcaaaaattcactcttttcccactcataacaccacatcttcactttctaaccctaggttaattctaccattcatctctaacagttttccatcagcaatttcagcatataaa

SEQ ID NO: 144528 - DNA, 452 bp, Glycine max
cttaagtcacctgaagatgcaagctgggtcttgggaggtataagattttctgttatgataatgtagaaatgaaaattattgggaacatggaaaattcatttcattttgcaaaacttatggtataatataataatgatgattaattattatttttattgaaattatttttaaaaaaaattacttaaatcttatttaaatttagttacaaacgtaacaatataatccacaacaaataaaatattacagaagttgcaagaaaacaactagagaaatcaatctaaaaccaagcttgtggttattcctctataaagttccatttattcttgtatttaaaaaagaaatttcaataaataaattaatgcaaacaataaaatttatttaagcagacaaattcataaatttttatataaatatggacaataaagctttaacatgtctctaattactttctg

SEQ ID NO: 144529 - DNA, 459 bp, Glycine max
  unsure (1)..(459): unsure at all n locations
nggaggagagagaanaaagatctggtgtaaacaatntcattatatcttaatcgatcttaacccgttaattntttaatttttaaaatggacggacgtcatacatttttttttaccaaaacttgcgcacggtgcgtaaggagtttcccttacgcaccctggtcaccatcacacaatgggtcataaacatttaccttaaagagatcaaatagaaaaaccaaggaaatacgtagtgttttcctttntttttttcgagaagcaagtatacatcagaatatatatatctttggtgagctttgaaatttatattgagattttaataatatatataaggatgaatgttgaactatttgtttaatttaatttatggtgagttcatgaattatattgccgtttgctacaacgaagagataatgtagcctatgagttgaattctcatagtaaaattatattaccgtttac

SEQ ID NO: 144530 - DNA, 437 bp, Glycine max
tcctctgagtcacctgcggctgcagctttatggaggctggatctttgaaacttctttgagaagcttccttgagaagattcctagagaagctagagcttagctacacacacccctctaatagctaagctcacctccttgagatgagaagctagagcttatctacacacaccccttataatagctaagctcacccccatgccaaaatacatgaaaatacaaaaaagtccctgctacaaagactactcaaaatgccctgaaatacaaggctaaaaccctatactactagaatggccaaaataaaagacccaaaagagggaaaaacctattctaatatttaaaaagaagagtggacccaaccttggcccatgggctcagaaatctatcctgaggtacttgagaaccctagggccttctttagcagctctagcccaatcctc

SEQ ID NO: 144531 - DNA, 449 bp, Glycine max
  unsure (1)..(449): unsure at all n locations
aaattattntccgtattactactattatgtaaatatttttttaaattgctatgttatttgtgtttaatttgtagacgcacttaatgtaaaatgtttttccgtattattatccaaatattaatttttaattgctttgttatttgagtttattgtaaaatatttttatgttttgtacaaaatcattttatcgctagattataataattattaagatgatgatgtgataaatttcctctacaaaattgatgtgataaaataattaaaccctattgaatatttctgtcaaaatattttacaataatgagcattgattaaacttatgatgtatattattacacgtataaaaaaattggcgtattattatgtatgtgataatcatacaattagaaatttattatcgaanataaaaaaactaanaaaatatatttatcgattaacataacatatgt

SEQ ID NO: 144532 - DNA, 409 bp, Glycine max
gcttgatgttgttgcatacagtgttcttatattctttctttgtgctaatggcgataatgaagctgcttttaaactttatgaagaaatgaaacacagagatctttggcctagtacctctatatacatagatcttattgattctttctgtgctggaaattatcaaattgaaagtgaaaaactttggagggacatacaagacagggaattggtttcattaaattcatatggacgcaccaaaagattgaatgagttgttgataatttctaagaaagaattaattcacttgaggtacaaaatgagaagaaggtatggctgatcacattatgctttttgtttgcccaaaatgtgagttggcacatgaggctgaaccaacagttctgttactcatcaagacgtgatattgctgaat

SEQ ID NO: 144533 - DNA, 476 bp, Glycine max
  unsure (1)..(476): unsure at all n locations
agcttaaggagaaggactaccctnggttcactaacatggcaaactttaaggccacaggacaaccaccggaaggtatgaaattccacgagaaaaaggttcttctaagaagccaccaagtatgtttgggatgaccctactctttttcgtattggtgttgacaatttgttaaggcattgccacaactcaccatatggaggtcacttcaacggagaaagaacaactgcaaagatccttcaagccaaattctattggcctacactcttcaaagatgctcataatcatgcatgatcatgcgacaactgtcaatgaaccagcaacatatctagacgacatgaaatgccattacagaacatgcaagaggtagaagtctttgattattgnggaattgatttttctggtctcttaccatccttgcatggcaacgaatatatcttggtgattaagttcaaccaatttctagtccaaccaattatgca

SEQ ID NO: 144534 - DNA, 396 bp, Glycine max
ttggttatgcgagctctattaaatacttggcaagtgtaccacatcgtccaagtaatattttaaaacgataagactgagtgtcaagtccacaaggactttgactgtatttatagtttgtatatgcctaattttaagcaattaatgaattgaattgaatatttgtcaagtgatgacgcataaatataaattcgatgtaaattaaactacaaagaaaagcatgtgcaagggtgaaacaacaaacactcagagtagtgaagtgacgaatgatgcaaaattactgacatgttaggggctcaccccaccaatactacttttgatgcagcatcaaggatttttctctatctaatggaattcaagtattacctacatccactaacctactctagccatgataac

SEQ ID NO: 144535 - DNA, 364 bp, Glycine max
tcattctccaattggagctcttacctcgtatcttgatggaaaacgccatggcgtttccttcctcattattgctagtattctgttttgctttatttacctttcgtttgccaaaataactatttaaattgaaactgaattcagaaatgtaactttatattattttttctgacatcatagaccatgtgtcttccaattcgttggatagatactgatttcatgttaaaaatattgttaaaatttagtatgcatttcgatcaatttatcttaggagtaaaaaaagtaagttttaactcttatgttttataaactaattctcttaaaaaatctaaacaggtacacttcactctaattttttatcttacac

SEQ ID NO: 144536 - DNA, 373 bp, Glycine max
cttcttgttctcttctaatactctcatacaaaagctttaacctatatttggaaaacccttggcaggtctctcaacgatccaaaagataccaaagggttctttcttcaaacgtccgttcaaggtgcacggaacagagagccaaacatcaacaaattcgaacaaggcctaaatctaaaacaaagtgtggggtttgatggcagcatgaattccaataacattcaacagagaagtatgagagggaacttaaaaatcaacgttcgctgacggttatagatggctatgcccccgaacattatgtaattaaaaaggatataatgctacttagcacagcgatatattcatgtgaacaatactcactatcgtcaccctcaac

SEQ ID NO: 144537 - DNA, 457 bp, Glycine max
  unsure (1)..(457): unsure at all n locations
tcttagtttcagatgatgcagatgagttngtagctaccttatgcactcctctaatgactatggcatcatttttggcactaaactgctgggagttggaagccatcttctcaatcaagtttctggcttcagcaggagtcatgtctccaagggctccaccactagcagcatctatcatacttctctccatattactgagtccttcataaaaatattggagaagaagctgctccgaaatctgatggtgagggcaactggcacatagttttttaaatctctcccagtattcatataggctctctccactgagttgtctaatacctgagatatccttcctgatggccgtggtcctggaagcagggaaaagtttttctaagaatactctcttaaggtcatcccagctcatgatggaccttggagcaaggtaatacagccagtcctttgccacttcctataatga

SEQ ID NO: 144538 - DNA, 51 bp, Glycine max
ccaaaaaccacccgtaaaaaagaaaaaacagcaacaccaccaaacaagaca

SEQ ID NO: 144539 - DNA, 471 bp, Glycine max
  unsure (1)..(471): unsure at all n locations
ggacctataaaactcagctttgaagttatccatatctacaatattttaaattntgtctgtcatttcaaaggtgtaacaaatttaattaaatcaacttgttattcaaataactaaaaaatgaccttgcaatttttttttataaaaaatgcatttaaattgtatatttttaataaaattacaaatgatttatattcttattatttgataaatagtttaaaaaattataatatccgaataatgaatgattttttatagagttattaatcattaaaattatatatattcctcgaaagaaaaatattttcaaaataataaaagaatttttattgaataattctattaacaaataaacgtttaaaagtgagacatagaatntattttagattatgagttctttntagttaaacaaacaangttctaattttcaacttaatagagaattgctaatattaatgcaatcacattataatt

SEQ ID NO: 144540 - DNA, 407 bp, Glycine max
  unsure (1)..(407): unsure at all n locations
tcacctgcngctgcagcttgccacatgcagaggccccacttcttttttatctcaactccattattcaaactacatagcatttgctcatattacgcgtacttgattatcatcctcatataaaggtaaaccttcattaatatataccaaaatcgttctgcttgtccttgacgtgcatgacatcaaaatttcaaccagttgacacacatcctcaaggtgtccaaactttcagaatctcatggaaaatgagaaaaaaaactattcatgtccaatacgtgtacggcaaacatggcggggctcggcgtgcatttggtgcaaggtcaaaagtgtcttaaacgatatatacatatatacttactatgacgccacccccacgcaatatattttataacatgccaattttatatatt

SEQ ID NO: 144541 - DNA, 420 bp, Glycine max
  unsure (1)..(420): unsure at all n locations
ntgtgaagctcctggtttagctntacctcgatttactcttccatttgtagttgaatgtgatgctagtggagttggcattgnggctgttttgatacaaaacaaaaggcctatagcttatttctcggagaaattgggaggagccagattgaactattgcacctatgacaaagagttctatgccattgtgagagctcttgatcattggaatcattatttgcgttctaatcactttatattgcattcagatcatgagtcattgaagtatatcaatgggcagcagaagttgagtccaaggcatgctaaatgggttgaatctcttcaatcttttaatttctcttcaaaatacaaggatggtaagagtaatgtggtggctgatgcactttcaaggaggtatgctttaatttcaattcttgaaactcg

SEQ ID NO: 144542 - DNA, 100 bp, Glycine max
atccttaagcaccgcagctgcagcttgctttatagctgaacaaatctttattcttgcatgtattacagtgggttgcactcctatgatcagattgtattga

SEQ ID NO: 144543 - DNA, 436 bp, Glycine max
  unsure (1)..(436): unsure at all n locations
tatccttatggctggcctccggacttcatcccccgtgccaccccggaagatntaagccaagcccctacttttgaggggcaactcccgccttatgatgactatcccgggcaagacgatgaggaaggagatacccatcttggccccctgctccacctcaaagatccgtccccacatgaactaccccaaccgaacatagtccgccatatcccggcctcacccacacccgtaaaagaatctgttcccttcgcggaagataagggaaaaattgaggcgcttgaagagaggttaagagcagtcgagggccttggcaattacccattctcggatttggcggatntgtgtcttgtgcccaacatcgttatcccttccaagttcaagtaccagactttgataagtataaagggacgatatgtccaanagggcatctccggatgta

SEQ ID NO: 144544 - DNA, 420 bp, Glycine max
atattaaacagcgcagctgcagctgaaacactggcagcctttttctttatttctacaaccacaaccgtatgcaccatgtgctatatccactgctttgcaaataattcaactttcagaacaaggtggattttactctacaagtcattggtggcgacacatcagcaattaccggattatatcatgcaatagatgtgtggactactcccatatactgttaatgataaccatatgcagctttcaccattctttgctgaaagaaaacatctctgactctgatgatgaatatgtcatgttaatcgtcacaaagcacatttgctatatgaaagcattcccagaattgatgtggaaactcggaactttaaaatggttgtgtcttcaaagtagaaatttatgtgctggccactcttttatcattataaa

SEQ ID NO: 144545 - DNA, 405 bp, Glycine max
  unsure (1)..(405): unsure at all n locations
actagctatttggcaagtacttatagattttcttttaaaataacatgcttcaatgcatgaattataggaagattgtgcttctaagtaagtattttgactctcttaacttaatcaactgcttagtcattttgtgtatttttttcagaaaaaaggagttactgtaggttcaactgagattgtgccactttgtagacaaccagattntgagattgcttataaaggaacaccattgaggatggatgaagacaaaggagcgatgttagacaatgatcataagtctgatcaagtaaaacaattatttactccattgtcattggtttcgaagaaaacaatgcatattattactgtattattgcttctaatgactctaatgttgtttggacaatcctccttcattctattatt

SEQ ID NO: 144546 - DNA, 325 bp, Glycine max
gcaaagtcccacaacgatactcttcaaatattaagagccttgtgcagttgaaggagctttaactggtagggttaaagtttcaagattgtcacgtgttaatgcaacaattgttagttgtggccatacgagacatttttcctaacaaagtcaagttagccataactcgcctgcgtcttttcttcaatgccatatgtagcaaagtccttgatcctgtcaagtttgatgacctgtaaaacgaggctgcaaatatattgtgccagttagagatatattttccttctgctcttcttgacatcatggttcacttaattgttcatctggtccg

SEQ ID NO: 144547 - DNA, 285 bp, Glycine max
gctatcacagccaagcaaaacagagctaatgcagaaaactctgctcaacacatcaaccaaaatcacaggcttttctcacttaaagaccacagtaacaattccttcgatccaattcgttaaccgttggatcgactccaaaattttactggaagtctatagtgcataagcctacattgtgaccgttgggatctactagcaaacatccagaactcattatacattactctttccacaggcaacctcacacaagccttttttgcaccaagcttaaatcctgctgcacct

SEQ ID NO: 144548 - DNA, 443 bp, Glycine max
  unsure (1)..(443): unsure at all n locations
tttttgcatttgattctctccctacatgtaagtgcacttcccctttattctttggctctccattgatgtattttagtgccttagttgctcaattttcgccaatttcatgagacaatgtatgcttggattcacgcttgtttgtttgaattggagggttgtgggggatggccttaggcctaatgtgggttctgaaattgttgggcacatcacattgcccccattcttttttccctcatacctaaggtgcacccaccaagtgctcggtgaaatgcctcaatggaatttgggcatggttntgtgaactttagagtgtagaactgacttgtgggtatatggacagcttgtagaggttagaataagtgccaaaattaaggacttagacctagggtccaagcctttggatttgagtgcaagtaagcatgaagatganagcattgtgatac

SEQ ID NO: 144549 - DNA, 444 bp, Glycine max
  unsure (1)..(444): unsure at all n locations
agcttangttaagttagtctaaacctaagtattctgtctaaattgagcctactccaacaagatggatttgaggacgaagcttggattgattcagtctaactagggatcgaggtttaataatttacgctacaacatagaacacaaaagtatgattgattagagaaacatctttatgtacatcatctggtgtcgcaacctacccttcgacgggagggcgacgcggggctcacgggtgcgtcttccaagaaaggaaaatgcgcagagtcgccaccaacgtttatttgaggaaaacgtcagataaaccggaaaggtgtggtctacgaactttaattgtgaaaggttcgggagttgtttatacgcacggngaagatattatcaccccacgcgttcatcccaaatgaccgcagcctttaatcaagtgtgcaaatatgacttcaaaatgtt

SEQ ID NO: 144550 - DNA, 154 bp, Glycine max
gaacgcgagcctaacgcaaaaaccacccggaaaaacgccacacgaaaaccgcacaaccgaacaaccccaaagtagagacccagcaaacaaaaaccagcagacaacccaggccagagcaaaaaacacagcaaacgaaaaaataagagaaaggtac

SEQ ID NO: 144551 - DNA, 442 bp, Glycine max
gatcttaagtcacctgctgcatgcaagcttttgattattaacaggctgtatgaagctgtatataagatggtctttgctagtactgatacggatttcaaagtggttcaagcacaataagataggatggttagtttatttctggctttataacaagttttatatctgtcttgttactgggtcattagatgaaattatgtgaaggtttcatactttcatgtgcggtggaatcagtttttcctgatcttgtaaaggtcatcatactggttgcaaaacaaaaccggatccttataaaaaaaaaagctgggatgctatctgtttcttatcaaagaactttattaaatatttattaaataagctcttatcaaacaaaagccgaagagtgctggaaacacattattttcagaaaggtcaccggatgcttccataagttcacatattaata

SEQ ID NO: 144552 - DNA, 470 bp, Glycine max
  unsure (1)..(470): unsure at all n locations
catcattaccgaatnntgctggtggctctctctgactctccaattagctagcattcctctntgttcaattatgtactataactcttttctattaaaatcatctgcgtcttacaaagtataatgtaagaactgttgagagtaacaattttatcaggcaaaataccaaagaacatgtaaaaacagcaatttgataaaggaaaactaaggtgccatttgatttggctatttttattattttccttttcaatgaaaaaacaattgaaaatatatttggtcaggttttagaaaacttactttgtcaacgcttttgaaaaaaggcctgtggtcttttatactatttaaatggtcatgaaacaaaactgttaacaagcagcatcttaataagttgctntttccttattaaaatgcttattgaatatatacattcgatgcttgaagaanagaanaaaaaaatatcaattaataatcag

SEQ ID NO: 144553 - DNA, 380 bp, Glycine max
aattcgctgaaatcagatttctcatatttttatcttcaactgcatccttctaactctccagtgatgtgacctttggctatgtaatggaagattccaaacggttaatggctggagagagattttcctttcacctttattgttaatcgtgcctaggattaattaaaaaaataattctagaaagatttatattgaatttgatttgaataggtaacagaatggcagtaatttctaacgtaagtacctatctacctttgagcttcatcaagagtcataattcataaatgaacttagaaagacaattatagtatcataaaagtaccatttttggcaatgatggtaagttaaggacaaagctcacaataaactttcctccacaccaa

SEQ ID NO: 144554 - DNA, 490 bp, Glycine max
  unsure (1)..(490): unsure at all n locations
ctataatactcagcttaagaaaaagatggcctcagcaaattccttatttccagtatggaattctatcaatagacctccaatctttaatggagagggttaccactactggaaaacccgaatgcaaatttttatcgaggcaatagatctaaatatctgggaagccatagaaatagggccttatatacccaccacagtagaaagagtttcaatagatggtagttcatcaagtgaaagcataaccatagaaaaacctagagatagatggtctaaagaggatagaaaacgagtacaatacaacctaaaagccaaaaacataataacatctgccctaggaatggatgaatatttcagagtttcaaattgtaagagtgctaaggaaatgtgggacactcttcgattaacacatgaaggaaatacagatgttaaaagatctaggataaatgcactaactcatgagtatgaattatntagaatgaatgccaatgaaaat

SEQ ID NO: 144555 - DNA, 442 bp, Glycine max
  unsure (1)..(442): unsure at all n locations
agcttgattcatatgtaatttacagaaatttttctttcttataagcttactccacacaatggtggtctcttaggaatgaagcgacaattcctccttctgatgactcatggacacttattcttgatccaagtataattcgtgcgaaagggcagtcaaaatcaacaaggataaggaatgagatggattgactcaaaccatctgagcaccgacaaaaatatagtaaatgtaaaagagaaggacacaacagacatcgatgtccaatgcaatctgaaagtgaaagttgttaaattaattgatttatgtattttgtttgtctacttcaatgaaatggtaactatccatgatcagnttgnttttttaattatttattattatatttttgggggcgacataatctgcatccactactaattattcataacataaacgataatagaagtct

SEQ ID NO: 144556 - DNA, 435 bp, Glycine max
  unsure (1)..(435): unsure at all n locations
ataatagaacactagtaatatgtctactatcattgntattatttctttcttcgtcattgaggaaaacacttaggttgccagatccctccacctttgggcgtattctttgaaagatccgtgccctcattttgctcatgttctgtagttgcattctatccgaagccattatactgacactacttaacgaaggcaaccattaggtccttccaagaatggactcgggaaggttccaagttagtgtacaaggtaacagctaccccagtaagactttcttggaaggaatgtatcagcaattccttatcttttgcgtatgcccccatcttccgacaatacatctttagatggttcttcgggcaagtagtctccttgtacttgtcaaagtccagcaccttgaacatgggaggggtgatgttattgngtactatgaacgactct

SEQ ID NO: 144557 - DNA, 380 bp, Glycine max
catgtctggttgagtcccatattatattgagacgctcgaaattgaatgttgaagctttgagcgaattcagacgacaataaccttttactcggatgtctgattgagtcccgttatatatcgagacgctcgaaattgaatgttgaagctctgagcaaattcatacgacagtaacttttttctcggatgtctgattgagtcccgcaatatatcgagacgctggaaattgaatgtttaacctttgagcgaattcaaacgacaataaacttttactcggatgtctgattgagtcccgtaatatatcgagacgctcgaaattgaatgttgaaactctgagcccattcaaacgacaataacttttactcggatgtccgattgagtgc

SEQ ID NO: 144558 - DNA, 455 bp, Glycine max
  unsure (1)..(455): unsure at all n locations
tcgaatcttccattctccattnggagctattacctcgttcttgatggaaaacgccattggcgtttccttcctcattattgttagtattttggtttgttttatttacctttcgtttgccaaaataactatttaaattgaaactgaattcagaaatgtaactttatattattttttctgacatcatagaccatgtgtcttccaattcgttggatagatactgatttcatgttaaaaatattgttaaaatttagtatgcatttcgatcaatttatcttacgagtaaaaaaagtaagttttaactcttatgttttataaactaattctcttaaaaaatctaaacaggtacacttcactttaatttttttattttacactttttaagaacaaagtaatctgcaaaagaattaaataatccaattacggttggtgagtcaaatcggtatgcttttattctt

SEQ ID NO: 144559 - DNA, 475 bp, Glycine max
  unsure (1)..(475): unsure at all n locations
ggacctatgaaactacgcttatagaaaaaagataanctcttgctattataagattattgaattacacacaaataaagaatcctctcatagtttaatttgatctttatgaataaaaaaattatcaagaaaaaatctaatccaattaattgagcgatacacataaattattataaatttcttattaattgaatataattacacacaaataaaatgtcatgcattatgtcaaagacttttttattattatttttattctttaaataacatttattttttaaaaaatataaatacagacagtaaggttcggccggtgcaaattcatgcatgaacggatacaaaccatatagcaaggtttctttntttcttatttatttaatgacaaataatggaccagtttaagtttggttgtggttaagaacttaagatcaaatctttaattctaaaataatataatcctatctcgtgaacatccaca

SEQ ID NO: 144560 - DNA, 424 bp, Glycine max
gctttaagccttgaaatatgttgtgttaccaccttctcagccttctacaagctgaaattagattagacaaaacagtgaacatgtggtacgtcatccttcatatagtttccaaacatgatcactatataaatgtttaatttagtttaccttacaaatataatcatggttaaattatgttttaggtctcactaaaatttaaatttggtctctctaaaaaaatattattttggtccctctaattttgaaatataattttttatttcaagtattatctaaaccatttttacgtttgtataaagtattatctaaaacacataattaatacattttaaatttagagagacaaatataatacaatttttctaaaaggaaataaaatataagttaccctataatcattttatcatcaacttctttggataaa

SEQ ID NO: 144561 - DNA, 444 bp, Glycine max
  unsure (1)..(444): unsure at all n locations
tccnctccatgtggtggtctggcggcatctaacgacggtctttggtggccaccgatggtcatgggtggtggagaagaaggtgttatggtttgggtgggcgtttggagagaagtatagtgaaaaatcatgtttttcacattaaagaatgtatttataatttgcagatctcacttagtaaattcaccttgctaagtgaaattcaaattttggcgctgagcgagacatttcacgctgagtgcaatttctctactggttggaattgcacttagcacgctaatctcgctaagcgaattttctccttgggttggaattgcgcctagcgtgcttgcctcactaagagaaacatgcaaaagtgttattttacaaatcccaacgatcaaagcgtgaatatataatttaggaacctacggtccatatttgaagggaatccaatggttaacaagt

SEQ ID NO: 144562 - DNA, 415 bp, Glycine max
  unsure (1)..(415): unsure at all n locations
acatatgcgtgtgttctgactcgataactatggaccgttcaataagaataaagttatactcataactacctagttgattcacaggcggaattcatgtctttcattcaaagaacgcgataacaaaggatgttaattcggttacgttaccccatacattgtagcttacagtgtttgtacaaaggctaatcttcttctattataacaaagcgttttgggaagcttgtataaattggtccaaagacatttttattacatacgttcttttttatgtcacacatacgcactgctatttaacattnattgtaatatattctataaaaaaatatagatgttcttttatggggtctttncatatcgggagctaacattaacatgatatgttgttaaagaatatattcaagtggataatcttgga

SEQ ID NO: 144563 - DNA, 394 bp, Glycine max
  unsure (1)..(394): unsure at all n locations
ngagatgaggaagtgttgaagggtgaatacttnctgcttttattgttgaccacagagtggtacctggagatatgtcgcggcggtcaggagaccttggggacgtcaggtggggtgctattgcccaaaaccaagcttgaccaatcccgacccaacccgggcatagtcggtcagtgagaacctgtgatgtacctaaacaggcgagctcctggcagtcaacagataaaaggaacaaagaccacaaagcaaggaggcttgtggtggctggccagttgtgaattttgtgtgatatgtaaagtaatggcctctggtaatcgattaccaagggtgggtaatcgattacaaggcttagaaatgaagacaggaggctaagatggtctctggtaattgattacca

SEQ ID NO: 144564 - DNA, 395 bp, Glycine max
gcctactctcatcacaaagagggttatatgtgtaatgaaacgacgtgttccttgaattatgtggaatacaataagaaataccccaaaatttcctcaacctaaagggcatcaagacattccgtttgggaagtgatgaagtgcttggcctgcatcacaaaaacccacctcaagtgttataaagcagatgcttgctgcacctgttttaagcttcccgataggccaattacatactggatagggtacacctttacattccagattggccaatccagaaggtaaagaacacgttctataaaggtgcatgaagtaatgtttggagtgctacaataaattatcttgtgactaaccctattctaatattctaagtaatcaacctgtgatgtacaaaataatat

SEQ ID NO: 144565 - DNA, 381 bp, Glycine max
tagttaatgctgagagccaaagaagttgtttatataaagtatctgtggctacatcacctattaaacaaattaggcatggatcctcctcttcctcttcctctaagatgacagttttttccaacttagaaaattcaatttcagaatcctttgccgagccaagttttacagcagtgtccgattccttcagcttttctgagttagatgaggtcccaatctcataattgccaccagcaactgtttcttgagttgaattagaatctctagtttgcagcgaagtactgacttggtcaccacagatttcagtgacacctaaaggaacattttctgagagtcccccgggaacagctggagcagcaccatggtgagatgattgcttgacat

SEQ ID NO: 144566 - DNA, 437 bp, Glycine max
gcagcttgacaattaaagcacatgcattatctttctctgctgacactgcatcgatgccaagattaccaaataatcaaatatttttttatatgataaatccataacagttggtgccccaggtgacacgtcaaactcatcctagtgtaaataatgtctataaattaatactttcttccacgtccaatttgcatcacccctccttcgttgccagaggccaactttctttaatttctctctattactcatcctaattaaacatgatgcacaccatgtttgcgtgcctcaataaaatagtacaagaacaacttcaagtcaaaaaggcagtgtgcagagatgagttaataaccaaaaagaaacctccaactcttgccagcaaggcagtgaagaaaagtgtccgttttgcggactcacaccctttcatatttggagaagatcac

SEQ ID NO: 144567 - DNA, 402 bp, Glycine max
tttatccccttatctctaacaatgatgccacatggagaagtgatattggaggacccaaccaccaaaaggacatggactggcaatggcaccacaatcaaacactacttatgtggtgatattgataggctcaccactattgtccaatttctagaaacctaaccacaacaaggacttccaacttaaaagacattaaacaagtgcttctgggaggcaacctaatattctcgaactttgctttaatgtgtgtgatctaaactttatgtcttatatttcttgattatatgttcgtgttgactaaattctatcttaatttatgtttgaactatatctaatctaaacatataatcaagttttctactaaaaaaaaaggctactttaaactcgcctgggcgagtgaatgtc

SEQ ID NO: 144568 - DNA, 408 bp, Glycine max
  unsure (1)..(408): unsure at all n locations
tgtgccccatcttgctatatatatggggagaagtgaagatataaaaggttcagcctctaaagcacttctctctttctcgaaattgctgaggaaaattattttcgtgaagaaaatccaagccgaggcgcttccgtaacgtttctgtaacgtttccatgagtaattacgcgaagattctcgaccgctcttcaagattcatcgttcgttctgcgttttcttcagtcttcaacgggtaagtacctcaaaccaagcttttcaattcattctatgtacccgtggtggtccacattntgtttcatgtatttttattctcattttcatttactttntatacccccttttgacgtgcttaagccatttatttaagtcatttctcgcttaatctaaaaataaaataaatctccgccga

SEQ ID NO: 144569 - DNA, 393 bp, Glycine max
catgcaagcttctatccaagcaattcttggcggtatattttcttcttccttggcttattccctagtggatggtgcctcccctctacttttctcctttgccttccgctgcatctccatggtgtaaaatcaccattgaaggacctcattgaagctcaaagatccagcctccataaaagctccacaagcaagctttcatcagcagagatctggcagctcaaataatgcccccgatgatagagagagagatgatgataatgataatggacacattgttagtgttctactatgagaaaatggtaagttacatgccttcaagttttgcagatctactgtttgctggtgagagaattgaagcatgtttaaagaaagggaaattcaattatgtgtcttttg

SEQ ID NO: 144570 - DNA, 469 bp, Glycine max
  unsure (1)..(469): unsure at all n locations
tctagtcgtccatagacctnctctgtggtacggtctagcttacgttgcatctgtgcattcatcgcatccactaacagacgttgagcgccgtccaactgatggtactcgtcaccaccaccacctgctccagccataattcaacaggaaaaaaaaatgtgcaataaaaattattaaggtttcaggacctcacaacactctactcacgtctcttagatggtagtacactcgtgtttaatgctctcaataggcttttgtgtaatgtattccctcttgccttttaccactcgtgtttcctcttaagttcctggatggaccaaattagacacacaaggtaatataaaataaaaggaaagacaatataatgatcacaaacagaattgatttgggataacaacttggacatgatttggataataatatattagaattggaattggataacaggtgagctnntaattgggtaacagat

SEQ ID NO: 144571 - DNA, 382 bp, Glycine max
  unsure (1)..(382): unsure at all n locations
atgtctgattgtggcccataatatattgagactntcaaaattctgaacagatgctctgagcaaaatcaaacgacaataactttttactcggatgtccgcatgaatcccgaaatatattgagacactcgcaatggaaaattgaagctctcagaaaattctaacgataataaattgttactcgcatatccgattgtgttcggtaatatatcgtgacgctcgtaattgaaaacggaagctcggagcaaattcagacgacaataacttttaacttggatgtccgaataatttcaggattcatgcggacttccatatgcgaataatttcacccgtgccgctgcaaaaagacaagtgcggatcatgcgcgccaccatgaccactctta

SEQ ID NO: 144572 - DNA, 380 bp, Glycine max
agctgagcaagcaacggcaaacgttactcaatgtttttatttttaatgcacaaagctcaaatgaaacagaactcgggcaatcaaacgacattagtttactcggagccgatgagtccgtattatcgagacgctcgaattgaaaacgaacttgtctaattcaaacgacatattttttactcgatgtccgatggagtccgtatatatggacgctcgaatgaaacagaagctctgacaattcaacgacaatactcttttcaatgtcgaggagcccgaatatatcgagacctctatggaaacagagctctgaaaaatttacaacaaaactttatttgagtcattggtcagaataataaacgctgagtgaagcggagctcgacaat

SEQ ID NO: 144573 - DNA, 442 bp, Glycine max
atccttaagtgacctgcggcatgcaagcttgcacttctttactttccttaggaatttcagcctttttcccacttagactttttagctttgggagccaagttatcccttatgttctagacttcaaccacttgtgatagccaccaataacgccattgctacttcccctaagctgcttatcttttcttcccactctattccatgctttatagatattctgaagtatctttgcattaacttcattaaaacctcacgagatgaaaggcatgatgatttcctctgacggcgcacctctgatagggtagactaactgtcttatggccagcataggattataagtaatgtgaccactcatccccatcaaagggacatttgggaatccctcacatgacataacaatacttgcgctgcttcattccaccatgggaaccaactaatggatgct

SEQ ID NO: 144574 - DNA, 382 bp, Glycine max
gagggaaaccattctccttgaaacatttatcaactgtatgattgtctttgccacagtaagtacatgaaagtcctgaattcgatgaagatgtacttgctgcattgatcaagctactatctcctatcatatcattgctattaatttggctttcttgttgaactgcataagaaaagactttagctataccaggtaaaggatccatcatcaatacactagatctaacattgctaaactgatcattcaatcctctaaggaattgcataactcgatcttactcttttctttccataacactaacaagagcatcacatgtgcactttggactgcatgtacaaaaatgatcacgccgatactctttaattatcccataaatatgcaatct

SEQ ID NO: 144575 - DNA, 434 bp, Glycine max
cttggctctggccatcagaaccatctgattctctatcttatccatcttggaataaacattcctgtcaagtgagtgtttttttgcatcaaacaaatcaaatgtgatcttctgatcatctattcctatttccagattacctttccctatatccaccacacaattggcggttagcatgaagggacaacctaaaatcagacggatttcagcatcctcttcaatgtccatgatcacaaagtccacagagaaagtgaattgtcgcaccttgaccaaaacatcttcaaccatgccataaggccttgaaatgtaacgatttgccagctgcaatgtcattcttgttgccataatttccagctctccaattcttctgcacatggagagcggcatcaaattaatactagctcccacatcaatgagagcttttccaactgacactg

SEQ ID NO: 144576 - DNA, 465 bp, Glycine max
cttgctaataataagttgccacacagacctgcatttagagtctacccctacaggaattccaaggtaagaaaagggaaattccaattgactgcagttgagaaaagaagttgcttccctacaccagccttcagatttacccagacacccgaattggctcttattgtagtttatctttagaccagaaaccaattcaaaacatttcaggatacactttaaaactctaacattatcattagtggcagccccaaagaacaaggtgtcatctgcatattgaagtatattaacttcctcttttttctttcccacttgatagctgctgaagagattttttgttactgctgatctcatcaacccggtaaggccttccactactatattgaatagcaaaggtgcaaggggatcaccttgccttaagtctcttagggacaaattcctgagaagtacttccattaattaaaatggata

SEQ ID NO: 144577 - DNA, 447 bp, Glycine max
ggacctcagagtcacctgcggcatgcaagcttccttaagaagattcctaaagaagctagagcttattacacatacctctctaatagctaagctcaccttcttgagatgagaagctagaacttagctacacacccgctataatagctaagctcacccccatgacaaaaaatatgaaaatacaaaaaaaaaagtccttcctacaaagactactcaaaatgccccaaaatacagggctgaaaccctatactactagaatggccaaaatacaaggcccaaacgaaggaaaaccctattctaatatttacaaagataagcgggcttatacttagcccgtgggctcgaaatctacccaatgcccttgcgggataggattgcataagataatacagccaaattcgcccgtttctcatttatggatggtttctcggggtataatcaaataaagat

SEQ ID NO: 144578 - DNA, 465 bp, Glycine max
catgacacatttagcatgctttcatcttatttcttcacaaataactatcataaggcataaacctagtaaaactacccatcatatcttccaaaacccaatacccacgaaaatttatgtgagaagaagtctacccaaacctgaaatttgaagtcccgcaatgtagaggtgcgcttcacaactccgaaaatggcttcctttcgcgatttggagcagaaatgatgagcaaaggttggagctttgatggagcttcaatggtgaggaagaagaaaggaatagcaacgtgagaaagagagggagaaaagcttctgcacttttggctgagtgagtgaggagagagagaacgtggtttttagtttaaaaaggcttcctcatttctttttctttttttaaaaaggtatgccacatgtctccttttgagtggagctaaaaggggcccactttttctcttgatgtgactcatactca

SEQ ID NO: 144579 - DNA, 383 bp, Glycine max
caactttcatttctatcgtgttttcctatgattttgctcccatggatgaaaaaagatgttcccatgaaaatgagaaaagttattttctcaatactataaactttattctttatttgaattatttgaaactgtaaaagatattttcaagaatatttaaatgaaagctaatctttttttctaaaaaaatatacccaagaataacatttctagggataatattcttagaaatataatgtcattcatgaaagataagatgataccttaaagaaaactcccttaaattcagtctccattgcgacaatgtgcacaaaagaaggcgtgttatattttgggtttatattcacttctttattatttatacagaataatctttgatcaatata

SEQ ID NO: 144580 - DNA, 457 bp, Glycine max
  unsure (1)..(457): unsure at all n locations
nttctctnntcattttaattattacattacaatatcatattccactagacaagntattcttttaatccactagacaagttgttaaagtaacgcaaagtacgaaaagatcaaatccaaaacggaatcccatatatactattaaatttactaatgtgtgatattctttntcttatatgtagcaaggacacacacacaaatcaaatgctgcatgtaattagaagagatatcttgaaaggggtaacgttattttggcttaaatatatcggttttgccttaattaatttttaataatagattttattaaaagtttcaacataaaaaaaagcaggtaataaaaccatacatatattacacatataaaattcctataaataacctgcataatatatggagtaattattcttctttttcttctttccatgtctctctggtttaatttaataataaattaataata

SEQ ID NO: 144581 - DNA, 404 bp, Glycine max
ttgtcatcataaataagggggagaatgtgaatgtatgtatacatgattttgatgatgtcaaagaagaatctaacaaggctgtttcaaatgataagcatttgcttcaagaataattcaagattgcttcaacaaacaaagccttgtttcaagattcactaaagaccaagccttgccttaaaacaaagtgctttcaagacatgcaaggctctggtaatcgattaccaggaagtgtaatcgattaccagaagacagggttgagaaatagctgttgaaaaaggttttgaatttgaattttcaacatgtaatcgattaccatatgtctataatcgattaccagcaacgaaactttggaaattcaaattcaaaagtcataacccttcaaattataactgtgtaatcgatta

SEQ ID NO: 144582 - DNA, 388 bp, Glycine max
gcaaccaatgccaagatctcctacaggtgcaacctcaaaaagacctattgatctgtgatgattatgcgcattaccccttgatttgacgggaaataacttgcaaaatcaatttatgacgtatctgtgattcggaatcgagaggagacacttgcctgtgtgagattttatacacctttgagtgggtttcctccattttattgaatccagcgtttcttctaatgtttctgtagaaacaaaatgcaaaatgtcttaatcttattcttggttatgagaaattctatctttgtgctttcattcctcattcgtcgcattatattggaaaaaaatgtgtgttggtctatcataccctaatttcatccggggactaccatccattgatgtttttgat

SEQ ID NO: 144583 - DNA, 463 bp, Glycine max
  unsure (1)..(463): unsure at all n locations
tagtttctaccatcatttttaattaagaaacgttgtagttagactagtttctacatcgnnttttaattaagaaacgatgtagtaagactagtttctacatcattttttaaataggaaacgttgttgatcccctatnttctacatcaatgctaacgtaggcaccgatgtaataagactagtttctacatcattttttaattaagaaacgttgttgattcctattttcctaaaaagttttttattttttattttatctttcatgttacatatgaataattctgataaaataagaattagaaatcaaaagaaaaatttaaatatatttaagggacaacatagaaagatagtgtaatgataaatataaaatattatcttttttaacgatcaaaagtaaaaaagaaattaaggacaaaatgaaaattntgattatttttcagaaactaanaacatgaaaatatgtagt

SEQ ID NO: 144584 - DNA, 345 bp, Glycine max
atgggggaatctgtcaaagcaacttactcaagaaggtaagatgctacaaaggcgtaacacctctatcgagaggcactatctgactaatagaatgaaggccttaatgcctcttatttggcaaaattacccagactgcggcaggaaattgatgacattaagaattgtaccatggaatgctctaaagatgtcaagacgtataccgacgtattgaatgcccaactagtatacatcttcttagctggacttgattcacatttggatggagtacatgggcgaatccttgccaccataccactgcctagtatacaaatagtagatgcaaatgtttgcatggaggaaaatatc

SEQ ID NO: 144585 - DNA, 351 bp, Glycine max
  unsure (1)..(351): unsure at all n locations
tccacggaggatatgcttaccactctctaaagactggaaagcggnttctaatgactcctgtgcggcctccacataaggcatagaggatgggcagctcaccaagatgtcttcctcgcctgatacgatgaccagatgcccttccactacgaatttcaacttttggtggagtgtagagggaacaactcccactgagtggatccacggacgccccaacagacaggtgtagggggggttaatgtccattatttggaacgtaacttggcatgtgtgagggcctatctgtactgtgaggtcgatctcttcctaacctctcggcgggtgccgtggaaggcacgaaccatcattcgacct

SEQ ID NO: 144586 - DNA, 385 bp, Glycine max
aatttaggctacaacatagaacacaagagcacgattaattaaagaaatatatttctatgcatcagcttatttgttagaaagacccaacatatctacctactggtgtcattttatttaccttgcattttataattttttgcatacaaggctaatttaaattctatttgaaattatcacttatacatgttctctcaacaatgcttcgattctgaacttaattcaagctaataataggtccatgtgtttgatacttggattcatccattataattgtaaatacttgatgatccagtgcgctttccaataaacccccattgaaattttcttgagacataaatgtacgaaaggtaacttgaatggggaacaagcacccctgataatcatg

SEQ ID NO: 144587 - DNA, 456 bp, Glycine max
  unsure (1)..(456): unsure at all n locations
ntaatgattggcttggttgaaaggtgggcacatgagtctcacacgtttcctcttcctgttggtgaatgcacaattacctttgaagatgttgttattcaactgggtttacatgttgataaaagaccagttattggatatataggtgatattcctccaaagaatgcactagtgggatcaacacttaaactaaaatggttaaaagaaaatatgttgactttcctagcagaacccacaccacgacaattagcaacccattgtagagaacacattttagggctaattggtggaatgttggtgccaaataagtcaggggacagagttcacttgatgtatctacttatgtcagcaaatcttgattgggccggttggtacagttaggggtcgacatgtttagcacatttgtacatagaaatgtgtaaagcaatttattccatatccaaaaaaatgggaggatgt

SEQ ID NO: 144588 - DNA, 276 bp, Glycine max
ctcatgcaagggcagtgctaaaataataataactgcgcagaacagataagaaaagaaacacgtcacgctcgatgcatggtcttggcctgcaccacacactacactcttttcttttgccgagccgccatgagatgagaatctcgttggggagaggacactagcgacgcatctgttctgagaaatgaaacgagccggccatacctgaccataaaatgtgtgcgcttcacaagagagcgcagctaaagttgtgtgggtggccacggcatatctctacta

SEQ ID NO: 144589 - DNA, 429 bp, Glycine max
  unsure (1)..(429): unsure at all n locations
ntacaacagattntagtaatgacccactaactctagaattaaaataacttaatgccattaacctagggaattaaaaaaaacttaatggctgagtgtaactgaaattgtggcaaccaaaagtcacccccaatagccaacaagtcagccaccatttggtctcccaaaaggctgatgcctaggttgccaattgggcccttattacaacttgaactaaacctaactaaagcccttttagttgattaacccaaaacatatttttggtcagccaactttacaaggattgggccattatttagacagactaaacactctaaaattgaaacaaagtggtgtcatttagtcctcctccatttgggccatgatacaactcacaaccttggacttttctccttgaaacttgggcttgtattcaaatagtatggacagcac

SEQ ID NO: 144590 - DNA, 352 bp, Glycine max
gaagatgacctagagcccaaatagtgatttcaagattgtgtcatccagttcaagatcaagtttaatttccagtgttatgagaagaaatcaagaagattcaagaatcaagagaagtttgatttcaagattcaagagcagatgagttcgagatttctgagaagagattaacaagacttcacacgggaagtattgaaaagatttttcagaacacaaacatagcacagttttgtttttccaaagagtttttctcaaaattttctaagctaccagagtttttactctctggatattgattaccagcttcctgtaatcgattaccagcggcgaagtttgatttcataagtttttaact

SEQ ID NO: 144591 - DNA, 251 bp, Glycine max
agcttgtacattcaatatcctgatgagggttgtgtttatgttctcaagactggactaatacatttgctgcccaagtttcatggtcttacacgtgaagatcctcataagcatctcatggagttccatattttttgctccacacgaagccccctgcttttcaatatgatcatatccttctaaaggacatatctcattccgtggagggacttgctccttatttctttctttaacagaaacgcgctgccctttcc

SEQ ID NO: 144592 - DNA, 469 bp, Glycine max
  unsure (1)..(469): unsure at all n locations
tactcaagcttgattcatctggttcaactcatttatattcttactaatatctttnnttttttgtttatgcaaattttcactttaatttaattcttgtaaattaattcttaattttttttagtctttggaatatttttagagttcttttaatactttatttcaatttaagaaaataattaataaatataataatgacatgacacttttgatgtctgaatttttttaagacttagatacttgatgatattaagtgtgttttggaacatattaaaatcacgttgaacggaaaaaaatatgcattccaatgtaaaaataacaaaatatcagttacttttgcgttgcgttctctataagacaaatacaagtacactcattttcgtttgatgacattgtacatgatagcaattttcaacacttgatagcaatttatttcatcgtttggtgacactcattagtcatttcaacactt

SEQ ID NO: 144593 - DNA, 443 bp, Glycine max
ttaagcacgcagctgcgcttaccttctggaagtatacctttttttacataggaggctctggaagaaaaattcaaattacacagggggagggatgtcttctccacctctaagaacctaaaaatcactctaaaatctagaatcctcttgaaaacacagcaagtaagtgattccttttgaacctaaaaatcactttaaaacctataatcctcttgaaaactaaggtttttggagctcccttgccctcttacgtcgctttattgcataggcactccagcttatccctatttttcaccaacacatcttttaagggctttttgtccttgaaggctcgcttagcgccattttcgcgctaagcacaagtaagtgattttccgctgagcgagctatgcgtgcttagcgcgaaagaagacaaacgactcgctgagcgagctgatgacacactg

SEQ ID NO: 144594 - DNA, 427 bp, Glycine max
cacatcaatcaaattattatcataccttgaatgggttgaggagacccatacaaatctgcacccttcttctttgaccatcagatactttatgcaatctccaggaaagatcgatatctaatacctacccaattgaacagcaaaacagaaattaagaaacagtatttccagagacaactatttatgcattcccacaaaaaactttccagaaatagccatgcataaacagagaaaatgaacatcaagagaccataatggctttattttggtcaaatctggcactgcaaagctcagtctttatgccatctggcatctaatatcaaattcatggatagatgctggtaacatcttaaatgcattcacctcaatgagttagtttccttatattttattaacataaactacataagttaagagaaacctcatggac

SEQ ID NO: 144595 - DNA, 449 bp, Glycine max
gtcacctgcagcatgcaagcttgaactcctttgtgaaaaagactaatctttgttttcattgtgcgtggacaattcatggcaagattggcatctttgatgtgtttgtgaaacataaattacatgataactgagattctgtagtacttgttcttgatgctactgcatgtgtttaaaatgctacatctcttaaatgtgcacatcatgtcttggacttgaagtctttctctatgacttgcgtgcatatattttgaaccacttcattttttaatattggaccatatcatacatgactgcattaagatgtttcatagttgttttccatgtctatcatttgagtttggaacaatcaggattatagtgtgcatatatgctagaacatatctatatccttgactttgttcaagattatttacatatacttatagcatgtgaaattgttctcatacatg

SEQ ID NO: 144596 - DNA, 445 bp, Glycine max
  unsure (1)..(445): unsure at all n locations
agcactntgatttctgagggttttgggataaaaatggtcattgaccaatcccttttccataacttaacccaattgtccagtgacggtgtaccatttgaaggtacactaaatgacgattggaaatttgatttctctgcatatgatgcccgccagttggtttgcaccaaccatgcggatatgactggacgccttcttgccggttcattggcttttgaaagccgcatccttcattatctcattgtgcgtattttgttccacgatcttccaaccttgcccaggtttctgaagaagatcttgttatcatgtgggcctttcataccgggcgtcaacttgactgggcacacttagtcagatatcgcatgcataaggcattgcgattaaatgctccattgccatatccacaccttgtcactctctttcttcgccgttntcaaattcctcttga

SEQ ID NO: 144597 - DNA, 194 bp, Glycine max
gaccacagagtggtacctggagatatgtcgcggagctaggagaccttgcggacatcatgtggggtgctattgcctccatccaagcatgaccaatcccgaaccaacccggccatactcaaacagcgagaacactaaatctacactaagaggctaactgctggcatataaaaattgaatgtgcgcgcaccacattg

SEQ ID NO: 144598 - DNA, 326 bp, Glycine max
cacttgtccgcgtatttcatatccagcgccgagtccactcattaagccctaaagagactactacagaatactctttgagacctatgtacgcgtttggaagccatgaaccacatgatcacaatacaacacactgaaattaaggcatcttttgagacaagtacacatgtgcgcggacatgcttataaacgtaccttatatgagaaaatatacggcatggcatcaacgtatgctttaaaccaaatcgatgctgagcatgagcgtcgaagttatgctgcgattgacagttctcaccgtggatgtgcaatgagaactactcatgggcctcc

SEQ ID NO: 144599 - DNA, 442 bp, Glycine max
aagtcacctgccgcatgcaagcttctgcatgtctagagaggtctagagatattttgtcccaactccacagagtttgggagattctgttgtgtgaagatctgcatagaccaaagcttgtaaaggaagccgccctgagagctcgagatgagtatgtgagtgattgtgaggtcttaaaggtggaggagacctccctactgcttgtatttatgcaatcattaatctttctcttctctttgttgcaaaggaagcttcccagatatggaaagctaaatcctctattggatcttccttgtaggtacttgatggaaatatctttttatctatctaatgatgttttgtgcggcctctatgctatcaatatttcattctaatatggtttaaccttgatcacgtagatgcctgccttgatagggtcatccaccagggaaactggcctgatctt

SEQ ID NO: 144600 - DNA, 453 bp, Glycine max
  unsure (1)..(453): unsure at all n locations
aacaattccatatattgttggggatacatatactttatacaatatcctactcgacagacctaatttgaatgtgcttagagccattgtttctacaccacatttggcaatgaagttcccccccccccccctcttatggggaatacatcattgtcaaagctgctcacgaggatgctcgtgaatgctatgtgaaaagttataggattcaactgtacaatatggtgaaagaagataacaacagatagtcgatcgcgaatattaatttggttatcaccacataggaagatnttgatccccagtcagactctgaagattggcagccaacccccatagaagatattgagcatttccaaattggtaaggagtcacatcagtgtaccaaaattgacaaacaaatggaggatgcagtgagaaaggaagtataacaagtgctccttaacaatgctgatctctttg

SEQ ID NO: 144601 - DNA, 480 bp, Glycine max
tacggaccttaaaactcagcttttatccaggctcatcttggtggtgaagctccttcttccatggcttattccctagtggatggcgcctcctctcacctcttctcctttttcttccgctgcatctccatggtgaaaaatcaccattaaagaatctcattgaagctcaaagatccagcctccatagaagccccacaagcaagcttccatcaccggctctctacgtatggttggtttcacacttctttcgccaagagatgagacacgtttgaccgctagaaggccaccgctcatgcactgagaaaaaaaggcaaactgggaccgactcttagcaaacaaagaaagagtgtctgtcaattggttcccccgatggaaggaagaaagaactggaattcttatttcgtgtgggaaatttccaaatgttcccttgatggggacgaggggttgcatcaattacaatctcgtcctcgctataagacaact

SEQ ID NO: 144602 - DNA, 375 bp, Glycine max
accccacatgcgaactctgcagaaactgaattgtggtggtgagtaaaatttctgacaatttcaattggtgcgtagtaatagaaattgaaagaagagaaagaagaagggaatgacctgccatggtggccggaacttgttttcttgcgaaaattccgtttgaatggcggaagcacttactggggaatcgagataggtgtccgtccgtttacatattgagcagacaatctctttacattttacaacaagcaaccattctttgttgctttttctgtaactattctgtatatactcaaagatatgctaagttaaatttattgattctacacctgctggatttgaccataatcacatttgaggataattgtcgaatttcta

SEQ ID NO: 144603 - DNA, 457 bp, Glycine max
  unsure (1)..(457): unsure at all n locations
tgtnntgcacatcgtcgcgtctatggtatccagtctatttggtttgtaaganaagataccttcaatctcataacgcaacgtgacagacaaaagtgggcagttaacttgaatggtcattattgtcaatgcagaaagtattctacgcttcactatccatgttcacacattattgcaacttgtggttacgtgagtatgaactactaccaatatatagatgttgtttacacaaatgagcacatcttaaaagcttactccgcacaacggtggcctcttgggattgaagcggcaattcctccttctgatgaagcatggacacttatccccgatccaattacaattcgtgcgaaagctcgaccaanatcaacaaggataaggaatgagatggattggttcgaaccatctcagcaacgacaaaaatgtagtagatgtggagcagaaaggcacaatatgcgtcgat

SEQ ID NO: 144604 - DNA, 449 bp, Glycine max
ttaagtcacctgcggcatgcaagcttgcttgaggagcttctatggaggtctttatcttttagcttcaatgaggtccttcaatggtgatttttcaccatggagatgcatcggaaggcaaaggagaagaggagaggggaggcaccatccactagggaataagccaaggaagaaggagcttcaccaccaagaattgccttggataagaagcttgaagatgatgctttaatggaggaaaagaaagagagaaggggggagcacgaaattgaaggaataaaagagggagagaagtggaactttgaagtatgtctcacaagactctcattcatcagagttacaacaagtgttacacatgcttctatttatagactacgtagcttccttgagaagctttcttgagaaaacttccttgagaagcttcttttagaacactttcttcagaagctagagct

SEQ ID NO: 144605 - DNA, 441 bp, Glycine max
  unsure (1)..(441): unsure at all n locations
tggcagaaaagctacaatntatntatacaccttanaaactaaaatcagctcctatattagagaaaattagctccaaagtaggttacttgatcatgaaaaatgctataagtcccacattggacaaaataacctcatgaacccctttcttccgctatatatagaggataccaacaagccttatatgcaccaaagaattaagtgggcttagcgttaggcatggagccccttagtcaatatttttataacgagataagaactaacttaataggattagtacaactctagacatgattattatactatataaaggtcatagtaatgtaggaggaaaaatgagcgtgtaatattgatatcataataagtgggagtacgatacatgatgtttatacttatgattngatgtgatgatattggtgtgtaaatgagtgaatgtgcccatga

SEQ ID NO: 144606 - DNA, 381 bp, Glycine max
tgaacaatatacttgtccttcatttaactgtctttgggctcggcagccacgctcaacaaagtactttcgacacctactgtacgttgatttgaacaatgctggtatgggaatgttgcgacaatccttcaaaaccttattgatacattctgagaggttggttgtcatgtggccatatcgacgtccttctctatcataagtcatcgtccatttttccttggaaattagatcaatccatgttgctatggctggactcatttgacgaaatttttctaaattttgatcaaaaatgtgcttgcgaggagtgtaagctgcataatattagctatgaataacaattttaagtatatatgagacttaggtacacgtgaccatcagatatga

SEQ ID NO: 144607 - DNA, 472 bp, Glycine max
  unsure (1)..(472): unsure at all n locations
ggacactataaaactaagcttaggctgctcaattgctctaggttgctgcatggaaggttaaaggtctgtatgggggtcagcagaggagcacaaaccacaaacccttgcgacaggtacagatttctgattcaaggccagctgggttaccaagttaaccaatgcatccagtttgccttcaagcttcttagtctcagatgatgcagctgagtttgtagctacctcatgcactcctctaatgactatagcatcatttctggcgctaaactgctgggagttagaagccatcttctcaattaaattcctggcttcagcaggagtcatgtctccaagggctccaccactggcagcatctatcatacttctctccatattactgagtccttcataaaaatattggagaagaagttgctccgaaatctgatggtgagggcaactggcacatnagtttttaaatcgctcccagtactcttac

SEQ ID NO: 144608 - DNA, 378 bp, Glycine max
tggtgttgctgccccacagagcccctctgaacttgttcctgccgtgctcttctctacgagccctcttggtctcttgttccaaagccttggcagtagctatatttgaatctcttagttcggcattctcctttcggattttaagagctgctgatttgaacctttctttgactgtttgggcttgctcgagttctgccctaagggcctgcacctcttcgtcttcctccagtgcctcaacttcctcccttttagcggttcaaaaaacacaggagccaatccaaaccttgcatgtgggctttcaaccaccttcggtagccaccgataggcccattgttactgcccctgagttctttatccttcttttgcaccacctctcatgcc

SEQ ID NO: 144609 - DNA, 458 bp, Glycine max
  unsure (1)..(458): unsure at all n locations
gacaccggatcttaagcacctgcggctgcagctaggcaaataaatcactcctactttttatctctagcatgcattggatgttggtctcgtcctttgtcacaggaagccggaaggtccatatcaccttcttaattgtacacatggggcactgcgcccccaaatgcgcgagtaagaagagataattntccgggctctcgtgtgcgtaaaatgcattcatatcatgcatcgcataagcatctcttcataacatcataatggacatatcctgcatttgtccgttatcatattccagcctcacattttgcatgagtcatggcatcatcatgcatatgcgttcaacaaactttttgatctgcaaaattgcataacgcattgtttcatgtttgctcatccttgcgttntcctctacacaacaaaaacaaagaagggggaagcgtgaaacttcacactacattctt

SEQ ID NO: 144610 - DNA, 446 bp, Glycine max
  unsure (1)..(446): unsure at all n locations
tctaatatactgcaggacacaatcggacattcgagtattaatntattgtcatttgaattttcacagagcttccattttcaatttcgagtgtctcgatatattacgggacacaatcgaacatccgagtaaaaggttattgtcatttgaatttgctacgagcatctattttcaatttcgagcgtctcgatatattacgggactcaatcagacatcttagtaacaagttattatcgttagaattttctcagagcttccattttcaattgcgagtgtcttgatatatttcgggattccttcgtacatccaagtaaaaagtaattgttgtttgattttgctcagagcttctgttctgaatttcaagcgtcttgatatactacaggagacaatcggacatacgagtaaaaatttatctgtcgttgaatttgctcagaacttctgttttcaat

SEQ ID NO: 144611 - DNA, 399 bp, Glycine max
  unsure (1)..(399): unsure at all n locations
agctntggagaaccaagccaatcataatgctatacgaaatatagatgggaatagaggtaacaatggcggtaatgaccgaccgacgcagaaccgggttgagggagtaaagctcaatgttcctcccttcaaaggtagaagtgatccaaatgcctacctggactgggaaatgaagactgagcacgtatttgcctgcaatgactacactgatgcgcaaaaagtcaagctagcagcagctgaattctccgactatgcccttgtttggtggcataaataccaaagagaaatgttgagagaggaacggcgagaggtagatacatggactgagatgaatagggtgatgagaaaaaggtatgtgcccactanctataacaaaaccatgcgacagaaactccaagggct

SEQ ID NO: 144612 - DNA, 297 bp, Glycine max
tggtacctggagatatgtctcgggggtcatgagacctttgggacgttaagtggggtgctattgcccaaaaccaagcttgaccaatcccgacccaacccgggcataatctgtcaatgagaacctgtgatgtacctaaacaagcgagctcctggcagtcaacagattaaaggaacaaagaccaccaagctagggggcttgtggtggcttgccagctgtgaactttgattgatatgtgggttatggcctctagtaatcgattaccaacggtgggtaatcgattaccaggcttaaaaatga

SEQ ID NO: 144613 - DNA, 337 bp, Glycine max
gggccaaactctcacctcacacatggctatgacatcaacctaaactcgctcaaacaggagtagcacccaagattccaccgaatcaaaaagcgactcctcaacacccaatcttaccctagaaacggctcttcgtacactacgagcattgggattgctctcttgcacaacccaagcttacatataagaccaaaaagacaattcacacgcagatgaactcaccttaaccttcgaataccactaaagccagacttggcgctctgactctcaaaaactcacctcttttccactcataacaaccaaatctcacggtctaaccctaagttaaccccacccttca

SEQ ID NO: 144614 - DNA, 463 bp, Glycine max
  unsure (1)..(463): unsure at all n locations
gcttcttagtctcggctgatgaagatgaatntgnggctacttcatgcactccttttttgacaatagcatcacttctggcactaaattgctgggaagttgaagctatcttcccaattaaatttctggcttcagcaagggtcatgtctccaagggctccaccactggcagcatctatcatacttctctccatgttactgagtccttcataaaaatattggagaagaaactactctaaaatctggtggtgagggcaactggcacataattttttaaatgtctcctagtattcatataggctctctccactgagttgcctaattcctgaaatatcttttctgatggtcgtggtcctggaagcacggaaaattntttctaagaatactctcttgaggtcatcccagctcgtgatggactgtggagcaaggtaataaagtcagtcctttgccactccctctaaagaatg

SEQ ID NO: 144615 - DNA, 423 bp, Glycine max
  unsure (1)..(423): unsure at all n locations
ctattaccttctctcacgtatgcacaattgtacactccaatccctcttgacaaagtcacggatgttttccacaatagtagcataacgatggtactcttgcgatggatgcttcataagattaatatcatgtaaagaatctgagacacataaaatatcagtatgctctaaactcctaagcaatcttcaaaccatgcaacactgccaaaagttcattatcaacaagattcgcattgcaaagcaacccccaaaacccgcatgcaatgctatcgtattaccaatagctntaatacatgtgagtttttaatgaataaatgcaatgttaagaaacaaagagaataatatgtaaatatcttggagagaaacaaattgtaagagatattttattcagttaccaacccaatacatttatacatttataatgct

SEQ ID NO: 144616 - DNA, 439 bp, Glycine max
ttaagtcacctgaggcatgcaagcttcttttaaaattaatcttatgggtttattcttattccgaaccataaaataaattctctcattaatactttttttgttgttgccgtagctagcttctgacttggctcaaaattggataacgaacaagcctaaggcatccatttgcactcctgaaggagggcgtgatttcaaggccatagctaattttcaggactaccatggtctgccgaaattcaaaaaagtgagtgacgtacaatgagaaattgaaaaccttaattaaatcaaacatgctaattaactgtggctaatggtgaattagttaacataactttgaattgcacacgctgaggctaaattcatggcaagaacgagaggaaatagagtcacattcgaccctgaccgtattgatatgagcggtggagcaactggagcacat

SEQ ID NO: 144617 - DNA, 463 bp, Glycine max
  unsure (1)..(463): unsure at all n locations
tgacttaacataatattntntgttctaccaagccattgttttctctaaactatataacaaaacacaactnttactanttgtatttatttgcatctaataaaaataattaggagtcattatttgtctttaagacataaatatctttgacttgacaaaatacaaattggtatgtgctcaaaattctggatgctagcatgagatcttgctaccctagccaaggtatgggctataagattatgttgcctctagctgaaactcaccaaagagtttggtaaaagagaagggatggttctacaattattcaaaatacaatgaaaatcaagggcacctttagggacatgtttgactccctcgacaactgcttagaagtctagctcaaactctgtgtgactntgtagagtcctcaagcttttgcttcttatggttgtggagtcccattaaagagcatggttctaaccttaac

SEQ ID NO: 144618 - DNA, 440 bp, Glycine max
ttaagcaccgcggatgcagcttgccgattagttataccggcgatttttttgagtgggtttgagaagaggcagatatgattatcctgctttgatgaataggaagcctgtggaaaatggagagaatgagatggagggaggaacccatgctgtgactatcgttcctacatggccaaatttcccaccagctcaacaatatcaatacttagccaatattagcccttctcattacccaccacactatcaaccaagaacattcaattatccacaaaggccacccctaaatcatccaataccaaacaacaaccttaacacaaaccaaaacaccaaccagggaaggaattttccagcaaagaagcctgtagaattcactccaattctagtgtcgtatgctaacttactcctatatctactcaataatgcaatggtagccataaccccag

SEQ ID NO: 144619 - DNA, 479 bp, Glycine max
  unsure (1)..(479): unsure at all n locations
actcaagctgaaactctcactcttganagggattcatcacaggaaaatttaactacgttaatgcttgaccatcaaaangatatttttaatcttacagagcaacctgaggatctaaaaggtggttctttgtttccccatcagcttgaggcactgaactggttgcgtaaatgctggtataagtccaaaaatgtgatacttgctgatgagatggggcttgtgaaaacagtatctgcttgtgcttttatttcatcattgtattttgaattcaaagtttcacttccttgcttggtcttggaaccgctttccacaatgcctaattggcttgctgaatttgaactatgggctccgaatgtgaatgttgtagaatatcatggctgtgctaaagcaagagcaataattcgccagtatgaatggcatgcaaataatccaagtggattgaataagaaaacaaaagcctataaattaatgtgctcttacta

SEQ ID NO: 144620 - DNA, 335 bp, Glycine max
  unsure (1)..(335): unsure at all n locations
atatatatgtcattccgcctacagcttaaaaactatgtctctactttgggaacggggacatcctcaggtgactatcataacactcatatcgcaaagaanattaataagagaaacagatttttggcattatcaactatcctgtttccgagtaaaaaataatcatacccataaatatttaaattaatcgctggcaaaacattaacttatgatactttagtccttaatactcccctttgtgcttatatactttatcccgtctcttttataacacacaataagaaattgtattaagtataaacacatttcaacctagactatatccaaaatattcttta

SEQ ID NO: 144621 - DNA, 461 bp, Glycine max
  unsure (1)..(461): unsure at all n locations
atcggtntgagagcaaacattggttgaggcttaggctcaaagtagtagntgatgacgtggtcttgaatgagagcttgagaatgaagaatatcctctcccaccttaaaaagaatctaattttgcaaaaagaattaaagcacaaaattgcacccatccttagatattatgtcctaatacttgtgatagaagtggccaccatacccatcaagcctcgtggccctagagccactcatagtgaaaactatagatttaatctcataaagggaaggaagatcagtaagcataacattatcatggttagataccaatctaggaataagcttggaaaccaaatcattntgagagcagacattggttgaggcaaaggctcaaagtagtagttgataacgtggtcttgaatgagagcttgagaatgaagaatatcctctcccaccttaagcatgttgatttgataacaactc

SEQ ID NO: 144622 - DNA, 380 bp, Glycine max
aactaagaatatacttgacagccggaatatgtctgtccttatctataagttattgaacaatatctgcaaaccacaaacgccttgtgttagcaagaaaactactttaagtgggtaacactataaattaaccatcatttgtctataatatattatcagagaaacatagaagtgataaaactcttgtatcatcgcaaattaatgaaaattcactcttgttcctataacctacaccacccagtgcctccactcgcatacatgccacatgcatgtgtgtgattgtgcatatgctaccctccttgtatatacagattaccatcctttaaatggacaaaaacctactcaatttggaaacatacacattttacagagagataaatact

SEQ ID NO: 144623 - DNA, 97 bp, Glycine max
acccggagcccgacacaagacagcagaacatcacgccatcgggaccaaacaaatggcccccggcgaaaaatattcaaacgggcacaggaatacccgc

SEQ ID NO: 144624 - DNA, 444 bp, Glycine max
  unsure (1)..(444): unsure at all n locations
taaacattcaactntgagcgtctcgatatattacgggatctctatcttacatccgagnaaaaagttattgccgtttgaattggctcagaggttcaaaattcaatttcgagcgtctcgttattttacgggactcaatcagacatccgagtaaaaagttattgtcgtttgaattggctcagaggttcaacattcaattttgagcgtctcgatatattatgggactcaattagacatccgagttaaaagttattgtcgtttgaattggctcataggttcaacattcaatttcgagcatctcgatatattacgggactcaatcagacatccgagtaaaaagttattgtcgtttgaattggctcataggttcaacattcaatttcgagcgtctcgttatattacgggactcaatcaatcatccgagtaaaaagttattggcgtttgaat

SEQ ID NO: 144625 - DNA, 359 bp, Glycine max
aatgttgtttctactataagttcgggtggaaattattgacgttaggtggaaattagtatgacttatatatagtagatgattactcaaggttcacatggactttgttttcgaaaaccaaaaatgaagcttttgatgcttttcacaaacttgccaaagttattgaaaatgaaatggtcttaacattgtttcacttagaagtgattaaggaggtgaatttcaaaatgagtcttttgaaagattttgtgaaaaaaatggaattcaccacaatttctctgccccaagaacaccccaatataatggtgttgtggagaagaaaaatttatcccatgaagaactgcaagaacccttcttaatgaaac

SEQ ID NO: 144626 - DNA, 464 bp, Glycine max
  unsure (1)..(464): unsure at all n locations
cttgttagtccagtttctctatgtgttctttgattcaacttaagaatgttaaataaatgcctctgaactaattgtttcagttctatggtttcctcaacagatatgctgctaaagccacaaaaagtgaagctgattgcataaatagaatatgattgagagctaataactaattcagatgatcttgtaaaggttacaatcagtcattttacatgaagaggagggatcttttagtcaagctattagaaacttgctgcagtaagatatcaatcccacagttgcactcacagtgtttgaaagtgggccttgcccatgatagtttcgttgttaccaagcttaatgttctttatgctagatatgcatcactttgccatgcacataagctttttgaagaaacaccttgcaaaactgtctatctatggaatgctntacttangagctattttttggaaggaaaatgggtagag

SEQ ID NO: 144627 - DNA, 443 bp, Glycine max
gtcacctgccgcatgcaagcttctactaatgtggcacggtggatcctctttgtcttgttgtcccgaccgcgggccttggcctttgatcttcctttccgaggtgatattccttacgttagcccacttagggttatagcctaacccaaatttcccgtggtttcctttgacacttactaagccagccctgtcgacgatgtgcttgcccaaacccattctgggcttgtagcggtgcccgaacatcacctgggccaccatcattgccatgccatacaagccgagctgccttgggagggaatctatggaagcgatgcttactacctcaaatgatgggaaagccgtttccaatgactcctccacgggttccatatacgacatagaggaacaacaacttaccacgacatgttccttacctgatactatgaccaaatgtccttccactacaa

SEQ ID NO: 144628 - DNA, 459 bp, Glycine max
  unsure (1)..(459): unsure at all n locations
tgttcgcacatcattcgcgtgtatgatatccactcgactatgnttgttttagaggagaccttcaatcctataacgcaacatggtggacaaaagtgggcagttaacttgaatgaccattattgccaatgcagaaggtattttgcgcttcactatccatgttcacacattattgaagcttgtggttacgtgagcatgaactactaccaatatatagatgttgtttacacaaatgagcacatcttaaaagcatactccgcacaatggtggcctcttgggaatgaagtggcaattcctccttctgatgatgcatggacacttatccctgacccaactacaattcgtgcgaaaggtcggccaaaatcaacaaggataaggaatgagatgtgatggctcanaccatctaaccaccgacaaaaatgtagtagatgcggagcagaagggcacaataggcgccaatgt

SEQ ID NO: 144629 - DNA, 396 bp, Glycine max
gcttcattgttaatgtcacatcatataatgtctataaccgtatcaaactatggagatcgtggtatggtattgtaagtgacatccttgggcaaagaggatttgattgggatggcactaagcacatgatcacagttgagaatgaaaatgcttggaatgaatattgcactgtaagtattctttaatatgttgctatttgttattcaaagcagatcggatttgactttttcttttttttcagtcgcataaatcggctaaaccatttcgattcaaggtgcttcaaatttgggatgatatagtggatttttgtgctaaagatagagccaccggtcatggagctgaaactgctatgatatggatcctaataaagcgatgagtaaagaaacaaatgaagtggaa

SEQ ID NO: 144630 - DNA, 429 bp, Glycine max
  unsure (1)..(429): unsure at all n locations
ntgcagaattggtcttcgccgcggaaagggtcgaagcatatctgattagaggcaaatttaatcatcctgcttggacgaatgagaaaaactggggcaaatgaagaggatgagaaggagggagaaacccatgctgtgactgtcattcctatacgaccaagttccccaccagctcaataccatcattactcagccaatatcagccattctcattacccaccacccatttatccacaaaggccatccataaatcaacaacaaaacccacctaccacataaccaatgctaaacaccacctttagcacaaaccaaaacaccaaccaagaaatgaattttgcagcgaaaagcctgtaggattcaccccaaattccagtgtcatatgctaacttgctcctatatctacttgataatgcaatggtagccatatcccct

SEQ ID NO: 144631 - DNA, 417 bp, Glycine max
  unsure (1)..(417): unsure at all n locations
agctncaaaccatagaagggcacttttgttttaantttctgacaacaacgaaccgagaaaaagaagtcctaatcactccattcccgttaaagcagataataggaactcacggcagacacattgctgttctactatcatatcgccatatcgtcaccatagtttcgcataagtaatatcgatcctgcatacaatccgcagcacgcagcaatttctgcatatgagataaacagaagagaaccaacactcattctaactaagtacgctcaagatataacatgaataacaggaagacatcctttatattaagtaaaacctaaacaacactgaatagccatagcccattgcacaagtcttattcatgtccctaccaccaccacttagtagcgcaatttctctaaactaagctcatacaaaatc

SEQ ID NO: 144632 - DNA, 449 bp, Glycine max
  unsure (1)..(449): unsure at all n locations
nntctagctttcattgggggtatttgatctccttttggtgctctaaattgngggaatgtgctcaaatatgtggggcaattntggtttgttttctcgcttgattaagttgaattgggggtttgtatgagatggccctaggcctataatgcattttgaagtaatggggcatgccacattgtccccgtcctcttgctattgatgcctaaacgcgcgcccaccaagtgttcggtgaaatgcctcaatggcattagcgcgtgattttttgtagggaaacaagccatggggcaatttggtttgcacatatttttgggacatgcattcatttttgaaaagagctagagtaatggccccacatatatcctagtcctagaaactgaaattttatgcaaaaaagagcacaaagggaggtgcatgttgggtaaagttacccttttttttggccagcaatc

SEQ ID NO: 144633 - DNA, 404 bp, Glycine max
atctaaacattcctttccatctcattcatacaatctctcattcaaatcaatcacaacacttcatttcataaaaaatcaaaccactgaatatcatattcaatcagttcactattcaatcatgcctttgtacaaacaactaaaacaactgcaatttaaaggactgaaatttaaataactgaaacataaagcataaactaaataaactgatcaaaataaactgttcaaaatgcaagacaagaagataaagatgttgtcaatcctcctgcgggtgatcctctgcatgctcattaagatccaacactggagcagcaggtggatcctgaacaataggttgcgctggctccgatgctggtgcagatggttgggaatccttatgaatgggtgctggagagatttgaactgga

SEQ ID NO: 144634 - DNA, 454 bp, Glycine max
  unsure (1)..(454): unsure at all n locations
ctttaattctattcataatcctgcctcaactttgaaaatatatgagttgattgggntattaactagtcagtgagcaaattattccaacataaacgctgtcagctaagccctgngttgacatcctacttgtccagttgaagcagggttactaatgtgtagtcatgggctcacatcaaggttagactagatcatgcaactgttatattaattttctacctaagaatctatagattagaaaccctgtatttgccagctcagtcattcatgattaacatctatgaactggaagggaatgactcatttcttctatttcaacctacttaggttatgattctttntgagctaatgctacaaaaaggacactattatttaaacacttgaagcataattgattctggttcatatgtccgcanaatagcaacatattctgcaagccttataccatatacctata

SEQ ID NO: 144635 - DNA, 435 bp, Glycine max
  unsure (1)..(435): unsure at all n locations
atcagatgttttaaacgtttttaatatccttcagaaatntgaatttaaattttaaagcctgtaatcgattacaacttgtgtataatcgattaccagaaatgaaaattcaaatttcaattctgaagagtcacaactcttcagaatctaactgtgtaatcgattacaacagttatgtaattgattaccagtaaggaattttcgaaaataactcccaagagtcacaactgttcaacaagtttttgaatgaccatcaaaggcctatagataggtgacttgtgttacaaaattccttagagtttttctgaacaaattgtcttatcctctcaatacaaaattgtcttataactctcaaaatattccttggccaaaacactcgcaaattcaataaggaatcttgagtgatctttcattgtagcatccttctcgtaagaaaaa

SEQ ID NO: 144636 - DNA, 245 bp, Glycine max
aaggactttgattaaattgtaatatacaaattatgtgatgatatgggatgtgtcagagaggaacaattgaatattgatgctgtacatttggtgttttttttaagattatcggatttttgatattctcattaaactaagatttataagaggtgtaattaatgtgatgcaatatatgatttagatataaatagttggatgataaatttaaaaagaaatacgttaagaaagaaactaattaatgagtt

SEQ ID NO: 144637 - DNA, 364 bp, Glycine max
ttgctcttactatatatacacacacatacacatgagaatgccaatatccatttgagtcgaaatgtattcgcattcaacatacaaaaacttggattatagaattattagccgctttgctttctaaacattaactaaaggatatcatcgcactttattatttaaccttttaaaaatagttgtttttctctcatattgttccatgattctctcttatatttatggattcttctaagataaatgataaaatataataatattcttaaattaaatcttacaaaacaaaagatttaatgattctttgttaaaaacacttggtgttgaatgacttatattcattctagatattaaaccactctttttgata

SEQ ID NO: 144638 - DNA, 456 bp, Glycine max
ggaccttaagcgactgagctgcagctgtcttagaaaacttccttgagaaacttctttgataatacttccttgagaagctagagcttagctaaacacacccatctaaaaactaagcccacctccttgagaagctagagcttagctacacacccctataatagctaagtgcacccccatgacaaaatacatgaaaatacaaagaaaaaagtccttactacaaagactactcaaaatgccctgaaatacaaggttaaaaccaaatactactagaatggccaaaatacaaggcccaaaagaaagaaaaaacctattgtaatatttacaaagaagagtggatccaaccttgacccataggctcgaaaatctaccctaaggttcatgagaaccctagggccttctttagtagctctaacctaaacctcttggagtcttctatacaatacccttggggggtag

SEQ ID NO: 144639 - DNA, 234 bp, Glycine max
  unsure (1)..(234): unsure at all n locations
acacccctctcataactaagctcacctccttgagaaggtttcttaagaaggattcctaagaagctagagcttagctacacctgcctctctaatagcttagcctcagctcctgagatgagaagctagagcttagctacacaccccctaaaatagcttagctcacccccctggacaaatacatgaaagatacaaaaatttcctacttcgnagactactccaaatgcctctgaatac

SEQ ID NO: 144640 - DNA, 328 bp, Glycine max
gacttgcagggatgatgaggacatgaccaaaagcaagggcaaggatccacttgaaggacttggatgacctatgacaagggctagagcaaggaaagccaaggaagctcttcaacaagtgctgaccatactgtctgaatacaagcccaagtttcaaggagaaaaaagtccaaggctgagagttgtatcatggcccaaatggaggaggactaaatgacaccactttgtttcaattttagagagtctactgtgtctaaataatggcccaatccttgtaaagttgactgaccaaaaatatgttgtgggttaatcaactaaaacggctttagtt

SEQ ID NO: 144641 - DNA, 361 bp, Glycine max
cgagcctgtcgagccatttgaacttaagcgacatgcgaagattatgttccctttaccttacacttcattagccgcctaaattgcttatttacattctacgctgaaaataccgcaaattaagatagctcatgagctaactggtacatatatagcaagagctcctttgtagcatcatctggctccttcttcattcgcctttgttacttttccccccttcgcttctttctggctttatgataagaaccttgtcagctaataattatacattatttaaatgccatgacaacatatataatcattaaccactgactaaacagagatgtgaacggaaacggataggggaaaaaatcctagagaaaaa

SEQ ID NO: 144642 - DNA, 442 bp, Glycine max
gctgcagcttaatggaggctggagcgccgagctttaactcgttccttgaattgcgattttccaccatggagatgcttcggaagataaactacaagtgctgagaggatgtgccatccactacggaatacgccatggcacaaggagtatcgccaccaagaatgtgccttggataacaagcttggagaggatgcttcaatggaggaaaacacagagagagagaaagagagaggggggatctcattattgaaggaagaaaacgagggagagaagttgaactttgagttgtgtctcacaagactctcattcatcaaagttaccacaagtgttacacatacttctatatatagcctaggtagcttccttgagaaacttccttgagaagcttccttgataaacctccttgagaaacttctttgagaagcttccttgacaaacttgcttg

SEQ ID NO: 144643 - DNA, 390 bp, Glycine max
tataaagcagcttgcggcatcaaagcctcaaatgcattaacacttggcaaagtatgcacgacatacctcaatcaaaatcagaccctgtgagcacgactgagcaccccaaatggactgcaaagtgaaatgtaccttgataaggtcctttcatccgaaacaaacaaagagtccttacagtgagcacgagttcgtacctaggtatttaaaagaaagactcctgaaacgtacctatgtaaggtggcgagctatcacggtctcgagtgcgatgaagaagaaaaagcttagatagagaataagagagcttagatggagatcgaaaaagagagcgcgagcaaaatatggctcacgcctgatatatcttaaaatgtaagtccaacatcggttttcaat

SEQ ID NO: 144644 - DNA, 392 bp, Glycine max
ctcaaacaaaacatcatttttgcctgaattgtgggattggaagccatcttctcaataaattcctagcttcagtaggggtcatatcaccaagagcttcaccattggcagcatcaatcatactcctctcgatgttgctaaatccctcatagaaatattgaagaaggagttgctcagaaatctggtggtgagggcagcttgcacacaatttcttgaatctttcccagtactcatacaagctttctccactaagttgcctgatgcctgaaatgtcttttctgatggcagtggtcctagatgaagggaagaatttctccaagaacaccctcttaaggtcatcccagctgaaaatagacctgcgagtaaggtagtatagctaatctttttgcactccc

SEQ ID NO: 144645 - DNA, 461 bp, Glycine max
tcaagaaaaagatggcctcagcaaattccttatttccagtagggaattctatcaatagacctccaatctttaatggagagggttaccactactggaaaacccgaatgcaaatttttatcgaggcaatagatctaaatatctgggaagccattgaaataaggccttatatacccaccacagtagaaagagtttcaatagatggtagttcatcaagtgaaagcataaccatagaaaaacctaaagatagatggtctgaagaggatagaaaacgagtacaatacaacctaaaagccaaaaacataataacatctgccctaggaatggatgaatatttcagagtttcaaattgcaagagtgctaaggaaatgtgggacactcttcgattaacacatgaaggaactaaagatgttaaaagatctaggataaatgcactaactcacgagtatgaattatttagaatg

SEQ ID NO: 144646 - DNA, 362 bp, Glycine max
acagccttctggaggaaggatctagaaggcccaagtgagccagattgctatttgcaccccccctttttactaaatgcaccccccttctattttgtggtaattctttttccgtagcattacgaaactttacgaacttcgtaacgatacttattttccttccgcaaggttaccaatgcttacggattatgtatttactcttttttagctctcgaagaagttaaggaaacccacggattgcgcaaaaacacctcttttcgacttccgccacattacggaatttcacggatcgcgcaagcctgcttccttatgatttccgagacgtctcgggacttcatttattgcgcaacaaaggatgccaagta

SEQ ID NO: 144647 - DNA, 463 bp, Glycine max
  unsure (1)..(463): unsure at all n locations
taaatagttcattctttgtttagcaaagtaggtattttgtaacgtccttaactntgatatcctcagattatgagttgattactttgtaatccatgaaacttttgtttgaaaaaatcaggagtgacttaatgttaaagaatacttggtataacaatcctgggtgaagattattggtagaagatagtcaaaagtgacacagagtatacttatttgtaatcaagttggctagtggaacccgttgtgttgaaggagattgaacatacctcgattgagtgaatcaatataaaacttgtgttcctttggacgatcaatttaaataatttgctgaaaactcttctttgcgaaatttttttataaatatattattcaatcccccatttgattaaactatatctattcaatgttcataattaatagagtggtaaacttaaatatttactttaccgtataanaatacttacat

SEQ ID NO: 144648 - DNA, 355 bp, Glycine max
  unsure (1)..(355): unsure at all n locations
tcactcaactcatattaactcgctttagacacaaacaaaacctaagacttgagttgcaatcctatcccacgatantgttttatcactttttatgtcgcaccacgtaacacacaacatagacacagaaaaaaaaagaatgaaaaagaggtttttattatttccataattgtaattagatgtaattgtagatcgaagtatgtttaccacatccacattcgctcccccacatcattaaatcattgaggaaaagagtgaaaataactgcttttctttgtttccattaatattgaagcgattagatagagaaaattaatcgcattcacattcacattcacttccccctctatataaaccc

SEQ ID NO: 144649 - DNA, 466 bp, Glycine max
  unsure (1)..(466): unsure at all n locations
tagacaaagcttagaaatcaagtgatcatcaattccaattcatanggggagtgaacgcaatatatcttgcatatatattacttgtatcttgatttcaggaattaaattgtcatcatcaaaaagggggagattgtagaagcaaagactttgtctttgatgttttgatgatgatcgtgatgatttgatgaaaatgggcttctcaagtttaattcaagacaaatgatccaagaatacaaaatacaacatcaagaagatctctagtattttagaaagggaattcctaattgaaatagcaaaaggtttggccaagaaatttaagttaaaaagtatttttcaagagatttactctctggtaatcgattaccagaggatgtaatcgattaccagtggccaaaatggtttacaacagccattaaaaatctgaattcaaactttacactgtgtaatcgattagacaatattggta

SEQ ID NO: 144650 - DNA, 432 bp, Glycine max
  unsure (1)..(432): unsure at all n locations
agcttatagaaatcagacaagataattttattatcctcacattataatagaagcatatgtgcataaataacaaataaggcataagtcatcaaaacataaatcatttgtctaaggcactcgcatctagaagtcctaattctcttctaatggtgtagaaagaatctttggttagtggttttgtgaagatgtctgcaagttggtttttagtatctacaaattttaaaacacagtcacctttttcctaagactaagtgctaattgactatcaacatttaccaagatgagtttttattaacatagaaggttttattatatcaaaataattntatttgaaatataataattttgaaaagcataaaaaaattttgaacaattaatcaagtaattcaaacatatcaaacaagaattatacaaggattgaaagatatagat

SEQ ID NO: 144651 - DNA, 448 bp, Glycine max
  unsure (1)..(448): unsure at all n locations
ntagtctgtacttcaaggattcaaaattcattatacaatttatcttttaaagagaatttgagaggagaactgcatcagaaacaattggtgtttaaaattgtgaggatttttttatctcttttatttctaatgtaatattatatgagttattctatgaccatgattagctaaatccttagaactcagattgtgaagtaattatagtaatgtactctagtttctctttttaataaagttcttcgatgttattcaattacttgtatctttctatcgnttntacttctatattaaaattaatcactctaattattagttaattatgtgtttgtgaccatcttctcgtaattaactgacctatagaatgatagggttcataaaacttgtatgaccaaactgatgggatgaataaacctctcttgtattcatccttaacnncctaataaatcac

SEQ ID NO: 144652 - DNA, 409 bp, Glycine max
ggctgcaagctgaggattatggggcatccatcacatgtggtactaggtggcggtcgggcaatggtgcaaatcaattctccacatccacaaatcacacataaacccaccatccccagttggccaccttcactgagctcacgtactcccacgtagcccttatactcgttcctgtcaacgccgggtccccatcaatccttccacaacatccaagtaattcaacatccaagcatcatgaattaacacagccaagaaaacagggcagaggcagaaaactctacccaaaacacaaaccaatatcacagcttttcacactcaaataccccggtaatattctctttgttccaatttgctaaccgttggatcgaactcgaaaatttactggaagtctctattacataagtctacattt

SEQ ID NO: 144653 - DNA, 457 bp, Glycine max
  unsure (1)..(457): unsure at all n locations
tcagatgaggagatggngaactctnttggaaatattcctctaaccaggaatatgctccacccaaagcctttcaaagagtcaagataggcagagaggtaaaacttggaaaggtgctgtggggctgcatagagactgtcaaaattataccactccctgttcactttacggatacaaaaccaatggtcttgcaaatgacaaatgaaggcattttccagctcagggtcaatctgggcaggctcagcaactggagagtcaagagggataacttgtaggtcccacacttccagaagcctttgtaaaacctacagaaaaggctttgcataattaagtaaatcataaaattgcaaaggatccaaatcctaaattgcatgcccaaaattaatattngatgcatgcaacaaacttcccgtgatttcactaaacaaaaaaaaaactacttgtaaccatagttataaaa

SEQ ID NO: 144654 - DNA, 406 bp, Glycine max
atcttaagtcactgctgctgcagcttgaggtttggctttgcactatttgaccgatggggtctgaaaaaaagaaaaaaaagaaaaaaaaaaggggccaatttgatcatcctactaagacgactgagaaaactggggcaaataaagagggtgaggatgagggagaaacccatgctgtgactgccattcctatacggccaagtttcccaccaacccaacaatgtcattactcagtcaataacaaacctcctccttacccaccacccagttatccacaaaggccatccctaaatcaaccacaaagcctgtctaccgcacttccaatgacgaagaccacctttagcaaaaccaagaaaacaccaaccaagaaatgaattttgtagtgagaaagcctgtggaattcacccca

SEQ ID NO: 144655 - DNA, 445 bp, Glycine max
ttaagtcacctgcggcatgcagcttcctcacatggatttcttttgcaatgatagtttttaatgcattcaggcatttgagaactccaatctcattcctttcatgtctttaaaattgcatgtttattttgaattaaataaagccttctattctaatcttgaaattcaagaaggcactttgatttctgaagtttatgggataaaaatggtcattgaccaatccctattctatgacttgacccaattatctagtgaaggtgtaccatttgaaggtacactgaatgatgattggaaatttgatttctctgtgcatgatgcccgccggttggtttgcactaaccaagcggatatgtctggaaggcttcttgccggatcattggctcttaacagccgcatacttcattatctcattgcgcgtatcttgcttcaaagatattaaaccttgcac

SEQ ID NO: 144656 - DNA, 469 bp, Glycine max
  unsure (1)..(469): unsure at all n locations
tacacaacattcattattcaacacctacattcaacaattattcatcatccatattcaacaattattcatcatccatccatggatccaatcaagactgctcagaatgatgcatacacctgacctcaactctcaaatgcaatgcggtacgtaccgtatccaataccaaggaaatagcctaagcgtgtctatacgacacctcacttaggaaaccatgcagtatttttcgaggccacccagtcgtgcaccataaccccccccccccggtgatcagcctgngccacaagggagttccctaccaggtgacacaccccttagtacaaagtacacactgccacagtttatactatttcccgtgtcatataagaaatgaaccatgggcgtcgtcaagtacctgaccatggatgaattaaagtgcctaagcatcccctcagaaatgcttaaatcctttaaccactctantttcccccac

SEQ ID NO: 144657 - DNA, 405 bp, Glycine max
actgccccatgtagttcatctattatttcatcaacagtgggaataggaaagctatctttgattgtgatggcattcaaggccctataatctgtgcaaaatctccaagtgccatccttcttcttgatcagaatgattggaggagaaaaagggcttctgctatgggcaataatcccttccttgagcatgtcagctatcattaattacttcaatctgatcctttcgtaccttcaaccaatgggattgaatgattgtgagttcttctagggggtaaacctgatggcacatcaaagactgttcaataaatgtcaagtatcatggccagttatggttccatatcatccggtatatctaataactgatcctgtggaccatccaaccttgagtatagtaaagaaaataattctg

SEQ ID NO: 144658 - DNA, 402 bp, Glycine max
agcttgaaggggagtggtcaccgccgcatttctctttgatacgtcgtcgttaacggtggaggatgctttgggagcgtgggttcttcttcgacccaatgaagaagccatggatgctgcagatgcagaaatgtgtgtcatgcgagaatctttgaaatataaagaggaagaagaagaagctctttcgcgccataatttcgattcgcgccacgctcgcgccaacgccatgttatttttattttttataatcttgggtcactagatggaaaaagacaagacctatataggctagagcccaacccacgaacattattaaaaataactaaatttcgatccgtaagccatttcgttttaaaattttaggtttataaaatttaagctttttatatctatttccttcattta

SEQ ID NO: 144659 - DNA, 271 bp, Glycine max
  unsure (1)..(271): unsure at all n locations
tatgcttattttgncatgatgtatggatgcacacttgaatgatatccgtcctattctctctcaacctcttgatggtacgaacgcttgagaattttgtttcactccaaaaattttacttgacttgctgaataagttttaatcaagctgaattttatccacagtctttcaagcttatgaatgaagcttagaatgatgaccttgtatttacattggagactattgtggtccagtctggtgaaaatattgcctctcatgcgcttgggctatgcca

SEQ ID NO: 144660 - DNA, 457 bp, Glycine max
ttaagtcacctgcggcatgcaagctttaagggcagaggaccttacattatcttaatgtgtggatatggggcccactgagagtgagaacgcgtagccctctaatggtgagggcgtgcaaccctttgaatgcgatggcgtgtagcccactgaaggtaaggacatgtattcctctaaaggcaaggacgtgtagtcctctaaaggtgaggacatatagccctcggaaggtgagggcgaggacatgttgtcctctgaaggtgagggcgtgtagccctatgaaggcgagggtgtgtagccctatgaaggcgagggcgcgtagccctctgaagataaggacgtatactcctcggaaccgagggcgtgtagccctctaaaggtgaggacatgtagtcctttgaagatgaggacatgtattcctcggaaggtgagggcgtgtatccctctgatggcgaggacatgt

SEQ ID NO: 144661 - DNA, 479 bp, Glycine max
  unsure (1)..(479): unsure at all n locations
gcttgatacgctcggcatcgtggttggataccagattgcttattaangagtttttaaatctgcaaataataataagtaataattacttgtttcagagttcagacacagaaaatgttaatcctaaaatcaattaattactggcctcgagagcggagtgcgaacgacagcgtttgatggcgtcgtcgagggattcgagaagggccttgggccagagctgtttgtgggaggaagacttggccttgttatgaacgcctctgatggcggcttcggttcggagaatgcgggacaagtccttattgtggtccttcaccaactccgcagacgctggtttcgaactccgcttcaacgactccacccgaaaaccacggcgtgtctttggaggactacgattcgttgaaaaggtgaacggcgtggcggaggagatggaagaagaccatcttaacatcatttcagatacactcaggaccatcttacaatat

SEQ ID NO: 144662 - DNA, 175 bp, Glycine max
gataaagcgtgtggcgccatctctctacaacgcataattaagtgactttttcggagacgaattcctgtgtatttatcgaactctagtgcgttctacttcggaggagtgattacatccagaacccaactgaggtctgctgcttctgccatgccataattaccaccctcaaccgctg

SEQ ID NO: 144663 - DNA, 451 bp, Glycine max
  unsure (1)..(451): unsure at all n locations
tcctctaccgtannaaaaatattatcggccagtgttntttataagaattgcgcaatgtcggcagaaaaatatcagtcgtggctatataacgaccgatgtcaggtatttntgtttcaattcaatccctgaataatttttggatattgtccaataggaaatgttcgatcggcgtcatcaggtgatgcttgctttttattttagacctgctggatcggtcatctttcctggccgacatcgactatcattttttttatcagtgtcggtgaataatgttttttggccgaggtgggctgatgtttttctagccgagtaaatgagaacacgccagtgtcggccgaaacacagcttctgttgagctcgcacgaaaaaacaaagccgacctacattgtatagtttgtaggcgacaccgaacaacanaaccaaaccttctctaccgganaatactattatc

SEQ ID NO: 144664 - DNA, 350 bp, Glycine max
ggctggatatccggatcgttgataccgatcaatatttgcggtatttggttcgccaggatgcggtcgaccaccgagcacatgtacagacccgtgattgactttatcagatgagtctcagcctacagagccagggctttacttcttttccgtgccctactccggaccagtacacggtagaggtcgcatggcctgaagattggcctgaggcaccaccccgagaggcaccaacaaacgctcccgacgaggccgatgaggtcctcgacgacgaagagatgaccgatttacttgatgttttaagacgaagcggggccacatgattgggagattccttgagccatatttacttttgt

SEQ ID NO: 144665 - DNA, 333 bp, Glycine max
  unsure (1)..(333): unsure at all n locations
tgctcgtcttgctgagagnnaacatgcttatctttctgatgatgaccgacgaacaagtanggatcaactngaaacttatgtgctctaagtgagaagaaatgcttcttcttccacttgtgaagatgttcaaagtctggctatgaagatggctcacactgagaaacatttggtatttttccattgcgttataaacttattgagctagctttgatattgccggtgtcgacagcatccgttgaaagagctctttcagccatgaagatatcaagtctaaattgcgcactatgatcaacgatgcgtgcgtcaacgacttgatggtgtgttacaccgagc

SEQ ID NO: 144666 - DNA, 437 bp, Glycine max
  unsure (1)..(437): unsure at all n locations
ttaagtaccgccgctgcagcttctttagtgcgcacatttaagcctatcttatggtggngcgagcctttgagggtactcggtgggaagttatgggggaaatcgacattcctattcagataggcccccacacttgcaatgtggtgtttcaagtgatggatataaatcctgcctatagctgcctcttgggaagaccttggattcatgccctgggagtagtcccatcaacgcttcaccagaaattgaagtttgcagtgggtggacttttagtgatagtgtcgggtgaagaggacatgttagtaagctgcccttcctccgcaccgtacgtagaagcggcggaagaatcgttggaaacggctntccaatcctttgaggttgtgagctacgcttcagtagagccaagtccgtcgctaccttctctctacaacgcggccataatg

SEQ ID NO: 144667 - DNA, 358 bp, Glycine max
tctaatactcatgcaccttttacattcctaactggaaacttatattcctatgcatgagtcatacttttggcactttagtctagcttctacaaactacccacacactcacaatgcacacaatgtatttcgcacgctaagttccacaaaatcatgcgcacacgccattgaagcatttcaacgaacactaggtgggcgcatgtttaagcatgaaaatcatgggaacgggggcaatgtggcatgcccccattatctcaaaatgcaccctatgcctaaggccatccactacaacccctcaattgacaaaaacatgcaataatttgaggataaatccctcacattttgagctaacacatgcgac

SEQ ID NO: 144668 - DNA, 171 bp, Glycine max
catcttccggcccaaatgctgtagtactctctgtccccagcaaagagagatcaacggaggaagatgatcaagccgcagaggagactcctacaccacgggcaccaaaacctgctccacgtgacctcattgacctggaagaagtggaatctgatgaagaacccattgccaaca

SEQ ID NO: 144669 - DNA, 209 bp, Glycine max
  unsure (1)..(209): unsure at all n locations
gatgaggaagtgtagaagggngatatctcctgcttttattcgttgaccacagagtggtacctggagatatgtcgcggtggtcangacacctctgggacgtcangtggggtgctattgctcaaaaccaagctagaccaatcctgcatccaactatgcttagtcactcagcgaaacctgcgagtacnctttcaggcaaactcctggctgtc

SEQ ID NO: 144670 - DNA, 347 bp, Glycine max
ctttattcagaagaatatagtttatctcttttatcatagagagagcgatgctcctaaattcttgagagattcaagaacaccctggctgtgtgaaaggactttcacaacctttgtgtgttgccctcgctggaaagagtgattatttccttccaatcatctttacccttgttctttcaaaccacaattccagaaaatccacctttgaccagagatatctcgcggccataactcccattttacgcactccaattaagtgactcttgagcctcacctgaatctgaagacgagaactttcacctcgtcttggaatcacctcatttggagccctgcaacgttagctattgtca

SEQ ID NO: 144671 - DNA, 425 bp, Glycine max
  unsure (1)..(425): unsure at all n locations
nggaggggttgatggngacccggtgctgagaggaacgattataagggctacgtacgagtatgtgagctcagttgaaggtgggcaactggggatggtgggttcatgtttgatttgtggaagtgggagagttaatttgcgccatcgcccaatcgccacctagtaccacatatgacgggtaccccataatccaaaaagcttgatgtgagaaagcgtggaagagtcagtcttcctacttttgtttgttgaccacagagtggcacctggagatatgtcgcgggggtcaggagaccttggggacgtcagatggggtgctattgcccaaaaccaagcttgaccaataccgacccaacccgggcatagtcagtcagtgagaacctgtgatgtacctaaacagccgagcttctggcagtctacccataaaagaa

SEQ ID NO: 144672 - DNA, 345 bp, Glycine max
cgaaagaactacctccgccccggagtacgacagtcaccgctttaagagcgttgtacaccattagcgcttcgaagccatcaagggatggtcgtttctacgggagcgacgcgttcagctcatggacgacgagtatactgatttccaggaggaaatacggcgccggcggtgggcaccactggttactcccatggccaagtgtgatccagaaatagtccttgagttttatgccaatgcttggccaacagaggagggcgcgcgtgacatgagatcctgtgttaagggtcagaggatcccgttcgatgcctacgctatcatccagctcctgggatatccgatggtattgga

SEQ ID NO: 144673 - DNA, 454 bp, Glycine max
  unsure (1)..(454): unsure at all n locations
ntgatgcaccttcataacatattggttgattgcattttttactgcatctttactatcaaattccatgccaacatataattcttggccaacattaaagttcgacggcatctccaaaccgcaaatgtcctcctcatcaagataagtccagttgatattgttataatgtgaggcatcattccaaaatggattttcaattcgttgtgcacctaacagttcaaaataaaataaaaaatcaaataatacttatttagcattaaatacaattgtcatcaaataataaatgtattgtctaatttttttatacaacacattataccttctgctgggtgaacaattcttactggttgaggaatgttggtgacttcatcgcctgtgtcagatatatcgtcaacactgtcatcttcgtctaaagactcttcaacatatgagttagacacaagataatcatcatcat

SEQ ID NO: 144674 - DNA, 440 bp, Glycine max
tgcaagctgcttgtacacaaagtgtgatcttcaatcttcatccaaagcaagtgagacaatataatcgatatcttgtgatgaaaaaaaatttataaaatattaagagacatctaattacttagcaaatcataatttattatgtaacattatattatataagcaatttatttcattttaccttccttaaatttctcaaattccttatttgtaagcattagtaatggtgcctcttttaaccaatcttgagtgcaaataagagtttccactatttttggtgttagggagttgcagtatggatcaagcactcttccaccaatgctaaatgttgagttagaagtcacaatggtgacaggtataaccaagacatctctcgcaatattctcaaggaccaaagattgtccaaactttaatctccaccaatgtagaatatacacagcctt

SEQ ID NO: 144675 - DNA, 430 bp, Glycine max
  unsure (1)..(430): unsure at all n locations
atgtcgatgtcnagtgtatactgcttttcttccatgttgtagttgtatgtagcttggatcttnttcacatatagggcatgcacgatggaccttaacactacattcactaaaattttcgtatactggaaagtcattaatggtacaaaatagcgttgcacacaacatgaatgtctcatttcgatactcatcaaacacgacaaccccctcatcccacaatgttgtcaagtcttcaatcaagggactgagataaacatcaatgtcatttcctagctgtcttgggctcgatatcatcattgacaacatcatgtattttcgcttcatgcacaaccaaagaggcaagttgtaaattactagcaaaacatggcacaaattgtgccgagtacttaaactgacatatggattcattccatcagtggcaagtccaagccta

SEQ ID NO: 144676 - DNA, 334 bp, Glycine max
  unsure (1)..(334): unsure at all n locations
tactatgnncaagtccacatgtgacatgtatgattatgacttctttgctttatcacctacagatatgtaaacatagacggggcattgtagtaagcctcactcgagtcgatttcccaatgtgactccccttaatattaggactatatgctagataaccgcctctcgagcttgctcacgtatgcccttggccccacaaatattcacatgaaaatattagctatcctgtgaagttatgtcctggattactgaattattgaccagacctaatccaacactattcggactatgatgcagattaggactatatgcaactgaactgaacttgacgtttgta

SEQ ID NO: 144677 - DNA, 454 bp, Glycine max
  unsure (1)..(454): unsure at all n locations
taanagtcaagaacacttcatgataacaaagatgatgatctctagaatcaaagaatgagttcaagattgaatcaagaacacttcaaagttcaaaaggaaatttgaattcaagaatcaagaatcaagtttcaagattcaagttccaagaatcaagatcaagattcaagaatcaagaaaagactcaatcaagataagtattaaaaagttttttcaaaaacttagaagcacatgaatttttcttaaaaccttttaccaaagagtttttactctctcgtaatcgattaccagattattgtaatcgattactagtagcaaaatggttttcaaaaagctctcaactgaatttacaacgttccaattgattacaaaatgctgtaatcgattacaatgatntgctaaccaattaccactgtgtttgaacgttgaaattcacattcaaatgtgaagagtcaca

SEQ ID NO: 144678 - DNA, 278 bp, Glycine max
cagctctatacgagcgggtctgggagacgaatgtcaattgttcgcgatatgcgaagatgacgtcccaagcgctttcgatttggtccgaccatgcccttctggttttcagctgggaaatcggcgagtggaggaacccccccggctctacgccacaagcattatgtaaacccttactgttgacaagctctatagttgcgcctatgctttcaagatttcgatttgttaacgctatgtgtcttttgtttttgaacttataatacacggatgtttcttcatct

SEQ ID NO: 144679 - DNA, 452 bp, Glycine max
aagctcgaataatactatcaattacaaaattcaaactgtgggtaaatgcattgactaatacagactaagcaatccaacattcccttatcagtgatttcgagaaaaaaaatataatgatttaagcaaaccattcacataatatcagaagcaacaccacactcgatcaagctagatctgaatcaacgaattcaaggacaaaccctgaaataacacacatcggaacacgatcacgaattcaaaactcctaatcgcacgccatcaatcgacgattcacacacgacatgttcattcacaaacaacgcgcgcgagacttcaagattatcgacgcacatgcaatcatttacagaaccagaaaaagattaacggatgacaaatgcagatcagacgaagccacaaatgccacagatctgtgaatctgaagattctcggaaccgaatcgtggaaaaagagag

SEQ ID NO: 144680 - DNA, 349 bp, Glycine max
tctcacacacacacacagatatatggaagtgaccccagttacagtatccaatgtgttttcaaattcaattgtcgaattaccactatctatcattttgaatcttcatgtgaaccttagaaaaactagaacatcaataagaatgtaatcgaacaaatcatattttcatatatttcgaatgtgcaaaactacaaatcatgtattatgtaaaaggagtataaaacagtttctgatttatgtgaaatttactgggtgtgatctacatgattaagactttccatccaacaatggaatttctgattaagtcctcccaacaaaaagatatctgattatttctattccagaagagtca

SEQ ID NO: 144681 - DNA, 405 bp, Glycine max
  unsure (1)..(405): unsure at all n locations
atgtcgatgtctagtgtatactgcttgtcaaacatgtggtagacgtatcgatgtcgccgtcttctcacttacaagagagcgaagaatgtgcggaaanaangngttttttaggcattgagtcaaacaaagactgtgcaaaccccatgtttcccatcccagcatacccaaatatcaaagtattccatgagattacatccctttgtggcattctgtcaaacaccttgaatgcatagttcattttggaacttttgcaataaaattgaagtaagcagttggcaacatagatggtgggcacaaaaccagtcacaatcatctgggtatggacttgcttgccacgattcagagctttaaggttggaacatttttggagaatgtgggaaaatgttaatttcttggtggggttca

SEQ ID NO: 144682 - DNA, 360 bp, Glycine max
agagctgagtctcatattaatttaatcgattatacgagccttttaatcgcacacactgttgtttgagatagtgactgatttattcaggagtctctgctgtaatcgattgccttgagcacagtacttattagacctattttgaagaacactccttatgaattgtacaaaggaagaaaaccgaacatttctcacctaagagtttctggttgcaagtgtatcgttctaaacaatgataaagactcttttggcgaattttataccaaggccgataaggatatctgtcttggttattcattgcatagacaggcatatagagtattcaataaaagaaatttaattggtgaagaatttgtacatgtg

SEQ ID NO: 144683 - DNA, 434 bp, Glycine max
tcaccttctcgctaagtcaatccactgggttagcaagcgtccgctaagcgcaacactcattggctaagcgtaaggaagaatttggaagaaaatgagttgtgcaggttcactaagcgcaccacttcatctcactaagtgcaccgcttcagtccatccgctaagcgagaaaggcacgtgctaagccgaaattcactaatgtgcgctaagcggtccagaattgcgctaagcgcacgatcacaaacaaggccacctatttaagcctgaaattaaattttgtgaggagaatttgggccgagagctgaagctttgcatgtctagtgattctagagagagttttgagagattttgctgtgtgaagatctgcagagaccagagcttgaagaggaagccgttctgagagcttgagatgagtttgtgagtggctgtgagatcct

SEQ ID NO: 144684 - DNA, 391 bp, Glycine max
tctacggattactcacacgcaccattgggagttctttaatgtcttatatgccttacacaagacaaatatagtatagccgcacaaaaatccaaaaatcagccacaattatcaattgagctcaatcattctcctaagaccaaaattgagttaacgtgataaaatataagtcatagagaggtcaatatatctatgaataatctaaaaaagaatactaaactacaaatgctcgatcattgaagacgatgatgatgatgatggatgatggataaatcatggtgatgacgattgattgattgatagtgtatgacgattgaatctttaagagatggttgatgaactaatgatgcttatgagatcgcctgctatgacaactattatatctatgctctat

SEQ ID NO: 144685 - DNA, 424 bp, Glycine max
aaataccaacctgtctataacccttttaacactaatgaaatttatattccttatgtagaacttatattccactgtgactctgcataatctagatatcataatctctggctgctgtgttccacgttgtatatgcctcatatgccataaaatgcttataaagtaaaaaaatggtgtataattgccatgtcctccctaaaatatgggggcccttagagtaatggcgctaaagctgacattggctgcaatcatagccacgatctcgctaaaaaacaccctgtgacggcgaacatgatgctgccacaggttgttacactgcacaatgcctctatagtgaccccatttgctgctgttaattattctgctctatactctgccacaagccttaatattaatgtctggcgataagtacccctacacaatcact

SEQ ID NO: 144686 - DNA, 370 bp, Glycine max
tgaaagaagggagatttacatatagaagagtcttattgaacaaaacgcttcctgcccagaggcactgtgcactctaccatcaagagtcacggaccaagatccaagttggactactcaagatcaagattcacgattccacataagacattgtctatatctctgctgacacgcgcgctcgcaaacttagacgcacacgagtcttgcataacacatctgacacaagagatgatagctccacgtaaccgacacacagatgatcggaacgaagactgggatcccatggacgccaaagagttacaaccgaaattacgcgcccaagtgagacaatatgctgcatcgaatgcaagaaggctaccaagaccaggtgatg

SEQ ID NO: 144687 - DNA, 298 bp, Glycine max
atgtttatgatgatatctatacagacggagcctatatatctatatactctatagatagatatatagatatagatatatagatatagatcatacaatgaagttccgcacgagtgggtatataggaatcctaatctgccgaaccactcatgttatgatctattacatcctaggtctttccgttccttcatctggcttatgttcttcatgtaacattcagacggaatgactctatgaaattacgtcgctacttccacatggtacgggtaacgtaagagacatctttattcttcccgggggg

SEQ ID NO: 144688 - DNA, 474 bp, Glycine max
  unsure (1)..(474): unsure at all n locations
acatagaacactcaagctntttcattagcgcaatctatgtttacggggaattcaaaatgcttnttttgtaacaaatacaaacgttagactaatttcaattaactaggttcaacgaatatttttaaatacaaagagaaatacgaatataaatttcatatataatctaatatagtataatattcattttggatatttacattatatctatatatctatctatatatagatagatatatagatagatatatagatatatttctaatagattctaagggacttttttaaaattcttttatttaatgtttagtaaacaaatattgtattttaattaattctttgaatctcgacaatcgactaaaaatttgttattatgatttcgagtaagccgctatggtgagaatggtagacacgctgctcttaagaagcagtgctagagcatctcggttcgagtccgagtagcggcatgacatctta

SEQ ID NO: 144689 - DNA, 131 bp, Glycine max
gaatcacgaattacttcacgaattcttcccctctttcagcctacacgtgcctttaagaatgtgttcaaggtatcttcatcaaacttcactaagggacctctcaccctcacctgcttaggtgaattattctt

SEQ ID NO: 144690 - DNA, 412 bp, Glycine max
tgaaatctcattcttcctttttctttgctcacaaataatctttttcagattagccaatgaatacctgtattatgactgttgctgcttccccaccaaaagaaattcatcattttttctaattcttcccgaaggttagaaggaagaagacaagcatccatacataatgtataaatagattgggccactgactataataaaatctccatacccactttggagatgaactttgttgactgatggtgaatcccattccaaaccctatctttgaggaaactgtaaatagattttgtttccttatcccaatactagatgtgcgcccttgatatttgcctatgccaatgtttgttgtaactcctagaagagaagatatgtaatacctcggtgttgacgtgtatcggaactaaaaagaact

SEQ ID NO: 144691 - DNA, 388 bp, Glycine max
atgtcttttctaatgctgattctaccctccgaaagtttcttccatgtaatcaatgcttaaatccatagaccccgagattcatctgttggtttcattactctgcatgaattatacatcttctatttcaattattttcatgtgttggattaaacttcttagttgctatattatatgcatgttgtgttatgttattctcattatcctgattcagaactctgattgctccatcctaatagtgtgatgtcaaacaacttaaattcaattattattccattgcagcaacaccccaatttaggtctgcagacattaatttagcttccttccatttcacttatttttcccaattaagtatcatgttgtcccaatcaacatgggcaatatgcatata

SEQ ID NO: 144692 - DNA, 395 bp, Glycine max
  unsure (1)..(395): unsure at all n locations
tatattgaacaaacatggactaaggactaaattgatgtctaaaacttaactatatgtaacaaaatctatcttttttcatgcttaaatgttcatttggtcctgtaagtattacaattatgtgattttaatcctcttaattacaatggagtcaatcggatctattaggtatnntaaatatactattttagaccctcatcttctaagnncatcaattaagatcccaagtattacaatttttccattttagaccttaggtatatatattacttcatattganntatataattaagtactatcttagtctattaaacacagggaataaaatcgcataatgttatacctaagagattcaacgggaacttaagagactaaattgcataattgtgatacttga

SEQ ID NO: 144693 - DNA, 303 bp, Glycine max
  unsure (1)..(303): unsure at all n locations
aagaaaatcacgtntctctcatcttctctctctctcgttctctcggaggttctgggtcctcgaattcccaatcataacaatgactcatatgttacatactacataaacaaaaaaaatataaataatnnncctatgctaaattaccttggtacaaatactctttagaaactattatgacgagttaaataaatgtaatacagaaaacaacaaaaaacatagaattaatagttgttcacagaacattttgcctaataaaatacttatttttaacccaccaatcctgataaatatttaccaaaaaaa

SEQ ID NO: 144694 - DNA, 433 bp, Glycine max
ctgagaatggctagacatgatacatgtcactgttttgtttggatcaaggataaaagggaggccccacattatttccatgacacaaatgcaaaaatgatgatttggaaactttatgcaaaactggtcatgcatgcacctatgtggacactcaagtgtcaaattattatggtcatgtgatgctaaggctcaagattcatttcctctattttaatcaacccaacgtttccaaaatatgtgtttttatcaatttgtgcattcatccgagtccattttgggcgtctgggaaaatctttacagcattcacccttcatgtgtatacacattttgttaaaaactagttatgatcagtgaattttttcaaagaagaagtgggaagtcatctcttgtcaaaagcatgttggtttttcaaccttgacaacctattttccttttt

SEQ ID NO: 144695 - DNA, 403 bp, Glycine max
  unsure (1)..(403): unsure at all n locations
ctaagcttcatgatgatgaatcangttgatncaagtaggtgtgatgatgacatttttcctagagaatgatttcaagattgagtcaacaagttcaagatcacgattaaatcaagattaatttcaagattcaagaaatgacatcaagaggaatcaagactcaagagaagatgatttcacaagggaggtattgaaaagaatttttcataaccaaacatggcacaatttttntttacaagagaagtttttctcataattttgtaagttaccagagtttttactctctggtaatcgattactagtttcctgtaatcgattaccagtggcaaagtttgatttcaaaagtttttgactgaatttgcaacgttccaattgattntaaaatggtgtaatcgattacaatata

SEQ ID NO: 144696 - DNA, 389 bp, Glycine max
  unsure (1)..(389): unsure at all n locations
tctgagacgaaatgaacaaagtgttgtcacactgtcagtttactggacaaaggaaacttgagcggaatgagtaaatcttaattttgctaagctaacaaatttcattgtattcaatcttttgtgtaaacactctntgagtgatcaaaatacattttctatcaagcatatattgtttgtgaaagtcaggagtgacttantgataaaggatacttggtgctacgaatggcctatagagtactcattatagccagaagtggcatacagaatacttggttgtaatcagagaattgatcacaaaaactcttcaagggttgaaagagaattggacgtaacccaagagttggggtgaaccagtataaaacctttatgtttctttattgcttctacat

SEQ ID NO: 144697 - DNA, 458 bp, Glycine max
  unsure (1)..(458): unsure at all n locations
taggaacccanacttgtagcttcaatgcaaggaaacatgcttatggctatgaatccaaaatttggttttagaattagaaaaacatgaaaattaggatttgcttgtgagagtttttgctcgaatttgggctgccccatgtttgatactttacatagaggtagcgtggaaaacaccttgcaatagtgtgtatacataggtaaatataaggagcatgaaattcctagcaaagtatgaataattgttttcttaaatgaatgtatgatagtgtggaatgccctttttgaatgcaaatatctacaggatgtaattagctttccaatatgcgtataaatgaataggagtgaaacagcaaaacattgtatggtgtacttcaaatgtatgtaagtagtttgtgatagcaaatgttcaagatataaattacgtgtaaagcttgacgcaacactctgagcataaaagtg

SEQ ID NO: 144698 - DNA, 370 bp, Glycine max
atcgtctgcgtgtatgatatccactcgacaaggtttgaagtaaatgagaccttcaatcctataatgcgacatggcggacaaaagtgggcagttgacttgaatggccattattgtcaatgctgaaagtattctgcgcttcactatccatgtgcacacattattgcaacttgtggttatgtgagcatgaactactaccaatatatagatgttgtgtacacgaatgagcacatcttataagcatactccgcacagtggtggcctcttgggaatgaagcgacaattcctccttctgatgaggcatggacactaatccttgacccaactacaatttgtgcgataagtcggccgacataaaccaggataatgaatg

SEQ ID NO: 144699 - DNA, 477 bp, Glycine max
  unsure (1)..(477): unsure at all n locations
taagctctgagccanaatcctgactcaccatataccttgacccagtgtgagaatgtcaatccttaccctcggaagcaaaaaacaaaaggagaaggaaaatttccaatcaaagaggaagcaaaaaaaaaaggagagaaggaaaatttccaatcaaaggaaaaaagagaggaaaggaaattcccaatcaaagagtgggagaaagaaaaaagagaaggagaagaaggaaagaaagctcctgatcaaggatcgatagaaaacagaagaaatatgccgagaggtctctggaccagacaatatctgaacaaattctgaattgtcaccaaatgaacaaaagaaagaaaaggaaaccataacctaaaagtggtcttctccctttgattaccaaccaaaatcctgtgcgtcggtgacttgttcgcctcgcgtcaaacaaaaacagaaaaagaaaaagccaacccaaaatcaaaagccaaaaacaca

SEQ ID NO: 144700 - DNA, 221 bp, Glycine max
ccatttttactaaatacacccccaacctttttttgcgcctcttttttcgtaaaggtaccgaaacttatgaatttcgtaacgatacttgttttctttccgtaatgttacaaaaccttgcggatttcataatcatccattttttgacttacggaacattatggaatctcacgaattgcgcaacgatgcttcctttttgatttctggtatgtcacggaacctta

SEQ ID NO: 144701 - DNA, 463 bp, Glycine max
  unsure (1)..(463): unsure at all n locations
tgatgttngtgttgaatgcattaaaggtaaacaaaccataagcaagaaattatgtgcatatagagctacagacgtcttggaattgatacatataaacatttgtgggccatttcatacaccttcatggaatggtcaacaatattttatatcattcatagactattactctagatatgcttacttgtttcttatacatgaaaagtcacaatctttggatgtgttcaaaacatttaaagttgaagttgaaaatcaactcaacaaaagaataaagtgtgtcagatctgaccatggtggtgaatactatggcagatatgatggtttaggtgaacaacgttcagagccttttgccaggtacctagaggaatgtggaatcgtcccacagtacaccatgccggggtcacctagcatgaatggtgtggctgaaagaccaaacaaaactcttaanggatatggtagaagcatg

SEQ ID NO: 144702 - DNA, 371 bp, Glycine max
attcagcctcgcttaaccacgtgcctctcagtgagaggatgaatgttcctccttaaaagatgaactcgcttatcgaggtaagcgcgcttaacgagttctgttaaaaatgcatgtatacaatgaggctaggatgaactcgcttggcacagcatgctctcttagcgagttcatcgcattttctggaaaaaaacgcagtgcgttttcttccattcttcaagcctctaaaaggcatatcatacatgcgaaccatcccaaatgatctatacaatacaaacatatgtaaagccctaatctttaactacttctaaaaaaacattaaagccctaaaaatctaaagcttaatgtgacgttttctaccctaaaggtcaacg

SEQ ID NO: 144703 - DNA, 314 bp, Glycine max
  unsure (1)..(314): unsure at all n locations
aagcttntcacacagtatattctctgtggccataaattctttattaatatgcactggcactaagcttcagggatttgcatgggtgaaatcgtgatgcaatatttgcatattataataaactacaaatttgtccaaatctaactgtgataataattgttgcaaaaagaaactgctattataattaatagttattactgcaattcatcttctaaagtacattttcctcactttagtggagcaaaatccaatctcaagacttaaaattgtgcctatagaattccccttccattttataaataggggtatattttgat

SEQ ID NO: 144704 - DNA, 338 bp, Glycine max
agcttctttgaaccaacatcacaataaccttatcaccgaattggactccctcaatgccaaaatcaatttgattttggatcggctcgccaccatcactgtcacaccaccgtcaccctcagtttccccgcatccacctcgatctccagctcatcgatcacatatgaagctggatgtgccacgcttcaacggccatgaccctttcggctggatatttaaaatatcccagttctttgattatcaaggaattcccaatcacgaacacctcaccgtggccactatctacatggatgggccatccttgccgtggtatcagtggatgtcacgaaatgactactttt

SEQ ID NO: 144705 - DNA, 345 bp, Glycine max
  unsure (1)..(345): unsure at all n locations
tgtgactctcggcatggctttaaactagtttcctaatatttatgacatttgataaaatcttcagaaacaagtcacttgaagaaatgtgacttttggaaattcatttntttgaaatcagtcactggtaaccgattatcgttaaggtgtaatcgattacacatcaacagatgtgactcttcattttaaattttgaaaattaaaatgtttagaagctctggtaatcgattacaagtattgtgtaatcgattacacaagttaaaaatgatgtgaaaaacgttttatcactagttgtgattgttgaagtttgaattctaacattctgaaacattggtaattgaatacatg

SEQ ID NO: 144706 - DNA, 446 bp, Glycine max
cggaccttaagtcacctgcggcatcaagctttgctgatacattgacatatacctcctcaacctcagcagcaaaatctaccacagtagaacaattatgacctctccagcaacagatacaaccctggatggaggaatcaccctaacctcagatggtccaaccctcaacaacaataacagcagcctgctccttccttccaaaatgctgctggcccaagcagaccatacattcctccaccaatccaacaacagcgacaaccccagaaacaaccaacagttgaggcccctccacaaccttccctcgaataacttgtgaggcaaatgactatgcataacatgcatgttcagcgagagaccagagcttccattcagagcttgacacatcagatgggacaattagctacacaattgaatcaacaacagtcccagaatgctgacaagctaccttc

SEQ ID NO: 144707 - DNA, 272 bp, Glycine max
catgacctttcacacggatgttcgatatcgggacataactgatcgagacgctcgaaagtgaacaacggaagctctcgacaaattcgaatggtgataacttttcacacggatgtccggttctgggacataacacatctagacgctcgaaatgaacaacgaaagctctagccaaattcttatggtgctagcttataaacgactatccggtttgggaaaataatatatcgagatgctacaaaattaacaacgggagctctagagaaattaaaatg

SEQ ID NO: 144708 - DNA, 378 bp, Glycine max
  unsure (1)..(378): unsure at all n locations
tggagaatccagatcataatgaagaagaaaggatgagaacaaggaatgatggttgtcctatacaaaaccgaattgatggtattaaactcaacaatcctccatttaaaggaaagaatgatccggaggcctacttggagtgggagatgaaaatagagcatgttttctcatgcaacaactatgatgaggaccaaaaggtgaagcttgccgccacggagttttccgactatgctcttgtgtggtggaagtgattatgcaagttgaagtggacgtttccattgtgaaatacaatgataaggtactntgtgatgttgttcctatggaggccagtcacttacttttggngagaccatggcaatntgataaaagagccaatcatga

SEQ ID NO: 144709 - DNA, 407 bp, Glycine max
caagcttgtgctcattcgctgagtatgtgatgggatcttgtaaagggatcgatggaacctgtatttatagtatttgagcgtgattgatggtccttgtttgtaggggctgttgtagcctttgcaaataattcctggcttgtagataatagctacggagctttaagataacgttagagataagcatttggttatagataaaaggtagaatataatcgtatcttgtacataatgtgtggccttatagataattaattacctgctgacatataaagttattcaaatacatttgaatattaataggttaacgataacctatttgttacggagcccgactgctaaaggtcgagcattcacgctcctattataagactgccatggagggttgacacgtgtcatatagtgccatg

SEQ ID NO: 144710 - DNA, 442 bp, Glycine max
  unsure (1)..(442): unsure at all n locations
ggcttctacatctttttctctaaacctttgggttgataatcaatcttggtaatggaattgttgtaaaagggtcataatactttgtttttcataaaattgtgtattcattggtttcttttgttgaaaaatatttattatcttgttttgagaaaccttgattacactgaggggttagctttaattgaacattaaagaatgagttggtaattaattcacaagaatctattcaattccccttctaggttcccggttattccaacaaacaataaggcctcaacatgatatggatgtacttatcacaaaacaacaaaaaacatattgcgagaaatccaattttgcgaatttgggaaaccctatgattctcaaaccactaaatngcctaatgggattcaaggatctctcacctatgtcctaaataacaaatcattcttggtaacctatc

SEQ ID NO: 144711 - DNA, 332 bp, Glycine max
  unsure (1)..(332): unsure at all n locations
tattaactctattccatcgtccacttttattataaaattgtagcctcaactgtaatgtttaaaactttgcgtccttaatatattatagaacatgaatnttcagggttcactatgaaccatttaatttgttgctaggaagaaaatcaaccaatttgcttatgtgaaaagaagtgcatgccatgtagtgggtatatattatttaattgttttgaaaaatacccttttcattccaaaatgattgatgttntaaagaaattcatattgaccaatgtttctttcaatgagatattaaaaactttatttcaatttgccctaaataaattatatcaatc

SEQ ID NO: 144712 - DNA, 434 bp, Glycine max
tcttatccaagacacattcttggtggagaagctccttcttccaaggcttattccttagtggttggcgcctcctctcacctcttctcctttgtcttccgctgcacctccatggtggaaaatcaccattgcaggacctcattgaagctcaaagatccagcctccatagaagccccccaagcaagcttacattagcaagccatcaatgaagatattgagttgaactggctcgctgaacccgtggttgggattcttccagagtaaaccatggaagcggtcaagagcttcactctgtgattcattatggaattggtagaatgaagagatctccacttttacctcagcagccctggactctggaaaatatttcttcaaaaatttctctaccacctcctcctatgtctgcaagctatttcctttgaatgagtgcaaccatc

SEQ ID NO: 144713 - DNA, 349 bp, Glycine max
  unsure (1)..(349): unsure at all n locations
aactgggatatgaattgccttcttcataaaatgaatggcatataggtgccatctcgatcctgggaattgtggacagggacttcttcatctctctcgttgatctgcacccccaagttattagttttgaaatacgtaaacggccgttagagtggcgctactcctncgcgtatgggaatccctatcttgcgagccactttcgtcccaccttaagcaggagaggctatcatcttcttcccgcggtaatgcgtggggattatagtgaacttcgccctacttccgaggatagcggtggctatttctcgacatctaccgcagagaaacctcttgatgtcatcaatacctgtggaat

SEQ ID NO: 144714 - DNA, 467 bp, Glycine max
  unsure (1)..(467): unsure at all n locations
cttagcgtcgntgccggggaacttctttctatgtggaaagttagttttgtcctaggcgtatattcattattctctgataaaatgtgaatatttactttcaattcatatgttttcctcttgaactggataaccgctatttctgttagttgtttatatgcatagatctcccacaggcaatttagttcctctggacttggagactgaagctacgttgagaaggaacagagctgagaggagaagaaaattactgcaagacaggacagtagcgttcattcttgtggaagaaactcattttttttattcttcagcatcagattcaccatcatcaagggaatctgcaacctatctgccagaagtagtttccatggcggatgaacaccagtagagagttacccttgaggactattctagtagttcagtgccacaattatttaccagcattaccaaatgcggatcccaatgcacat

SEQ ID NO: 144715 - DNA, 277 bp, Glycine max
tggctgactctgtgcgtctttgatagaacatggatacttgtatgaactgagcaagagtctcttctagcttcatcattctgaatagagactatagcccttgttgctgcctattaagtggcccaccctggtctctattgaactgagtactagggtgagttttccactaggcccgttgatgattataattgctagccgtgttataatcaagaatatccacctacattaaagtttggtctgggctggctccccatatagtccacttcatgtgttgcttctt

SEQ ID NO: 144716 - DNA, 427 bp, Glycine max
gttgattttagccttattctctctttagttattactcaatcccactcagaaagaaacatcccgcagagaaacgtccgactgatttttttgatacatttttctcaaagatatgctcttattattatattattatttgacctctttttttgatttccgacgtagctacggcaccactgaatggtcgaatttcattttaacacaaattaacagatgttacaagtcacatgatcggcggaaacttattttattttttgattaggcgagaaaatgactttaataaatgacttaagcacgtctgaatggggtacgaaaagtacatgaaatgaaaataaaagtgtgcgaaacaagtggggaccaccaagggtacatacaatgaattaaaaagttcgatttccggaactgaccggttgaagacctatgaacgatg

SEQ ID NO: 144717 - DNA, 470 bp, Glycine max
  unsure (1)..(470): unsure at all n locations
taaactctctagctacctataaatcctaggcgaattcatgaaataatccacatagttttcgaacaatgataactcgcactctaaagcatacggcgtaaaattaaagagcaaagtttagagatactacgttaccttctaggagcacttctttaacgtctttagttggacacgtggatgtagtcaaggctttgccatctcacacttcctaattcttttcttcgatcgngagcaaatccgattgtggacttagcacctgttggcacctgctctaatgccttgacaaagagaatgtttacatgcaaatgtttaaaatgctatgaaattcttgtatcacctttcccatttgaccctatgtttacccaagttggtgtggcaccaaccataaccaaaaatgactcttcatttcattttccctttgcaaaacacttagatgataaaatgcagtcgcatgcatggttattatcgaacat

SEQ ID NO: 144718 - DNA, 325 bp, Glycine max
tcgcgagttcacccagcataatgtgacggtatgtgattggtctaaagatactatcttggcagatgaaaatgcttcataaactttaagaaagctagctgatgggcctagaagaaatgttatgacttggcccgcatatgacataaacaagtattcattttacacagaagcaccagacaacataagtacgatgcagaccagtggggtcaccctaagagctgaatctgaacaccctgtaagtgtgcatgacgccaatccctgtgtatgcttcgtcccttactttgggtgcattgatgaaacttaggagcttaactatgtgaaatttact

SEQ ID NO: 144719 - DNA, 386 bp, Glycine max
actacacacataagcccgcttataagtaacggatgagtttatcacaattagggttagaatgaacatgtgtacggattcttagaggatcaaattgagatttattctggaatgatcattgtattcgaaattatcctttataactataattaccagatttttgtgtttgacggaccaattgatatcccgatgcacaattattgtgaaattgatatgttcttgtattgagtgtgaacactacaaattagggccttttctaattagcttgaagagatgaaattaagtaacgatggagttaccgcacgagggagtgagatatcgaatatgtatcttcccctttctttgcatttaagacttctttatagtttaagttaactatataattgaaa

SEQ ID NO: 144720 - DNA, 391 bp, Glycine max
cctttcttttctcatgtgcacccaaacccaatctccgggttcgaaggcaaccttctttctccctttgttggcttgtttagcataactcttatttatcctctcaatttgatctttgactctctcatgaagcttcttcacatagtccgcctttgcttgaccttctttatgcttaaaaacagaaacattaggcatacgcaaaagatcaagaggagttagtgggttaaaaccataaacaacttcctaaggagaacaattcaacatggggtaaacaagcttcccaagttcttaaggtcttcctcaaaactgtcctaagcaaagttcccaaagtcctattaacaacttccgtttccccatcggtttgtgggtgacaagtggttgaaaataacaattt

SEQ ID NO: 144721 - DNA, 434 bp, Glycine max
  unsure (1)..(434): unsure at all n locations
cccatggaagctcctaatatctcccacactntntggagtgngccattcttggatgaccttaattttctcagggtccacttggaccccatttctaccaactacaaaccctaagaaaactatatcatctgcacaaaaggtacacttctctatatttgcatagagggtgtttttcctaaggactgaaagaacttgcctgagatgtcctaagtgatcatctaggctcctactgtacactaaaatatcatcaaaataaaaaaactaaaaatctacctatgaaatcccttaagacgtgatgcataagcctcataaaggtgcttggtgcattagtgagcccaaaaggcatcactagccattcatacaaaccaaacttggtcttgaaagcagttttccactcatcaacctttttcatcctgattttgtgataaccacattta

SEQ ID NO: 144722 - DNA, 228 bp, Glycine max
cactacgagactgtgcgtatgaatctttgagattaacctaagactagctgaccaagcttcttatgccatacccagaaatgctattgattgagaagaagcataacaccttttgactggatatatcaccaggattaatatagttaagatttgcttatctcttagcatagaagagtgaagagttgtcctagttccggatgatgcccatattcctggttaagtgtgacactt

SEQ ID NO: 144723 - DNA, 437 bp, Glycine max
  unsure (1)..(437): unsure at all n locations
agcttgtgactcttggcaatctctttatactattcacttaaaaagatgcgacttttgaaaaatcttcacaaacaagtcacttgaagaattgtgacttctggaaatatatttttcgaaatcagtcactggtaatcgattaccattaaggtgtaatcgattacacatcaatagatgtgactcttaattttaaattttgaaaattaaaacctttagaagctttggtaatcgattacaagtattgtgtaatcgattacacaagtntaaaatgatttgaaaatgtttaaacacaagttgtaactcttgaaatttaaaatcttaacgttttaaaacactggtaatcgattactaccttctggtaatcgattattagagagtaaaactctttggtaatgatgttgtgaaaacttcttgtgctactcaatgttttgaaaaacttt

SEQ ID NO: 144724 - DNA, 394 bp, Glycine max
tgttcgcacatcgtttgcgtgtatgatatccactcgacattggttgaagtagaggagagcttcaatcctataacacaacgtggcggacaaaagtgggcagttaacttgaatgaccattattgtcaatgcggaaggtattctgtgcttcactatccatgttcacacattattgcagcttgtggttacgtgagcatgtactactaccaatatatagatgttgtttacacgaatgagcacatcttaaaagcatactccgcacagtggtggcctcttgggaatgaagcgacaattcctccttttgatgatgcatggacacttatccctgacccaactacaattcatgcgaaaggtcagccaaatcaacaaggataagtgtcataccctaatttcatct

SEQ ID NO: 144725 - DNA, 427 bp, Glycine max
gcttgagaagccctctgtaaaatgcataatctattaccatatttctagaagtgcgcaacatgagggatttgaacaaattaattgattaccacatttgataattgattaaatcagatttttatgttaaaattataaattccctcacttgtcctttctcattagtgactcttgattcaattttatctttaaaaaaacactttctgagagtcatataagagaaacactctaagtgatcttttaataaaatattaaattaaaaatcaaaatataatataaaagtttgtataagatcctcatgtttgaattaaaaaaaaatcaaatttgattgactgatgtgattatgtaatccagatgacgttcgatgaactagaccatacataatatagattgttggtacttattttacagtacattgaagtaactactt

SEQ ID NO: 144726 - DNA, 434 bp, Glycine max
  unsure (1)..(434): unsure at all n locations
tcctagtccacaagtgactttcaagaacacaccagtcacccaaaatgtgaaggcgcgcaccatggcaaccaactctagatcatgcgtaggataaatccttcaatgagtcttaagctgtggaagaacataggccactacttggcctcctacaagcactcctctaaacttaaaacttactnttcaatatttactactccaacaaggacctactcgactaaggtagcacttaactggttacgtgactgacttctctataaaactcanagtttactccctacaaggacctcacaaaagcttcaactcactcaagtcatctctaacaagggttaaagttaactcaaggaactttcaggataacctcctggtttgactactacttangggcatctaatcttaatcttagggttcctctcatcctagagcaacttctactt

SEQ ID NO: 144727 - DNA, 351 bp, Glycine max
gcctacaaacacgaagtgaattaaaagtctcagttttggaaacttacccgttggagaacgaagaacagacgaagaacgggtgataaccgaggaaaaccttcacgaatttgcttacggaaacatctcggaagcgttacagaagcacctcggcttggattttcttcacggaaacaattttttcacccaaaacagcggttgatgaccgcagaaaacgaagaacgaacgatgaatgtcgaagaacggttgaaaatcttcgcgtgattacccacagaaacgttagggaagcgcctcggcttggattttcttcacggaaacaattttcctcagcaacttcaagagaatacgacgtgc

SEQ ID NO: 144728 - DNA, 407 bp, Glycine max
  unsure (1)..(407): unsure at all n locations
agtcgcattcaccctgtctttcatgtattcttactcaaagcctttgtgggagaccttacgacaacaaacgtggaccccttacctgccatggctagtgatgaaccagcagcagcccccatgataatcctagactccaagttggttccgtccgaagatggcccacgacgtatggtgctggtgcatggggaagggttatcacccgacaacgcttcgtgggaagactggcaacagctgaaagaacaccgcaaccttgaggacaaggttttgtctgaagagaggggggatgatatgaacgtggaagacaaagccatgcaacgatgacgttcgaggagagtgaggcagttacctaagcactgggacgtttaccaactanggtgaatgggcttatgtagaagctgatcatgtga

SEQ ID NO: 144729 - DNA, 415 bp, Glycine max
  unsure (1)..(415): unsure at all n locations
tcgactctcacagtctttagatgtggaagccnnnncttttttgtgttcggactctcagccacttatgatagccgccgatgatcccattactgcttnnnntaagctctctgtcctttcttcacgccgcatcccatgccttgcgaactccttggagtaccctcgcgttgtggtcactgaaaccccgtgcgatgaaaggcgtgatgctttcgtctgatggcactcctctcatggggtagccaagctgtcttatggcgaggccgggattataattaatacaaccccttgttcccattaagggaacatttggaaatccttcgcatgaaganananncctgattcttccttccttctagcgagggaaccaattaacagacgcccctctatgctagccaagagctggtcccaacttcttgga

SEQ ID NO: 144730 - DNA, 337 bp, Glycine max
caaccgtcttctggaaggcccaagtgggcctggttgctatttgcatccccatttttactaaatacacccccaacttttttttgtgcttcttttttcgtaaagttacggaaacttatgaatttcgtaacgatacttgttttctttccgtaatgatacaaaaccttgcggatttcataatcatccattttttgacttacggaacattatggaatctcacgaattgtgcaacgatgcttcctttttgatttctggtatgtcacggaaccttacggattgtacatcaatactttcttttgatttccggcatgtcccagaacttcacaaatagcctaatgat

SEQ ID NO: 144731 - DNA, 444 bp, Glycine max
cttgatgtttgtgttgaatgcattaaaggtaaacaaaccataagcaagaaattaggtgcatatagagctacagacgtcttggaattgatacatataaacatttgtgggccatttcatacaccttcatggaatggtcaacaatattttatatcattcatagactattactctagatatgcttacttgtttcttatacatgaaaagtcacaatctttggatgtgttcaaaacatttaaagttgaagttgaaaatcaactcaacaaaagaataaagtgtgtcagatctgaccatggtggtgaatactatggcagatatgatggtttaggtgaacaacgttcagagccttttgccaggtacctagaggaatgtggaatcgtcccacagtacaccatgccggggtcacctagcatgaatggtgtggctgaaagaccaaacaaaactctt

SEQ ID NO: 144732 - DNA, 408 bp, Glycine max
  unsure (1)..(408): unsure at all n locations
gactaattcagaatagacaggttattttatagacatgaatggaataagattggagatttcaaatgctcggaagcattcanaattctcatttgagaagaactccatatcaatgaattttgggtctacaatggaatgaaaggaaaagagtgttgtgtaccatacacactgttcctctgatgagaataatgattcatatggaatggagggaggaattggggcttcctgtgaccctgaatgccgctgacttcgactcgaggctcctttccgctctttcgatggttccgccatatgaggagttttttcgggatttcaatcggctcaaatgaaagagattgaaaaaagatgaagtttgggctttgcggggagtgatttggacaaaaattgagtgagatatggttggaagaaaaa

SEQ ID NO: 144733 - DNA, 411 bp, Glycine max
  unsure (1)..(411): unsure at all n locations
gcgcgcagacactattcttatatagaaaacaccccaatgcattggtgngagaanttgattgggctcctctcccaagatacaacaacccgctggttccaattgtgtgcagcgaaaggatccccgaaccttntgaacatcaatgctctttctctcaaaaggtaatttttgataagaacatgaagaaaataaatttaaaggaaaatgttgttgtatgtagtgcctatcaaaaatgtttttctacttgtgtttattggcttaagaaggatatatatatatatatagggatagacccacttatgtagccatacaaagaactcaaagtaaactacccaactccacaccttttaacatttaaacccaccgcccgaaaaaaaccaacgngtnaaatctataaaatatttttttttcaaa

SEQ ID NO: 144734 - DNA, 294 bp, Glycine max
tcatcccaatattgaagatgtcttccttagtcagtggaatggctcgatggtcatatactaaaggaacgaattgagacatgggagcgaaaagtagtatgttctttggatgcaagaatgggggtacaaagccatcaaaagatgggtcaatctgtagagcattaatctttctacacgagccaatgatatctttatcatattgcactatctctctataggccctggatgatatcttgtacacacttttgtgcagggctgctgcaaatgtaagcttggatatcataaggtgaatatgct

SEQ ID NO: 144735 - DNA, 439 bp, Glycine max
  unsure (1)..(439): unsure at all n locations
actcagctatccctagcttnacaacctaaggaggggattctaccatttgtatctctaatattaatcaacggatttgtttaagggtgggtgcacatanacaagattatcatattacaaaagatgaatatgcaagttaagcactatctattattctctcaagattttcaaaagtgttttgagagctttacaacttatgcaatattcgaatacaaagaacttgaatgtangagataatattcagttcaaaatttgaagcttcaacaattcaactcttctggtatacatagactttagtagcaagtaactgttggctcacaacgaccttcaaattgtgtctggtgctttgcatggagaaggggttcattcaagcattaaatgcatgtcaaatccaacttgagcaacacctcttttgatggtagcgattgtcaaatcaaccttt

SEQ ID NO: 144736 - DNA, 443 bp, Glycine max
  unsure (1)..(443): unsure at all n locations
cacctgctgcatgcaagctngggcgagagatagaaatagcctaagctatatttccataagtgcaagaattacattgtgcattgagtcgcaaggtaatttgtctctatgtgagtggactctatgcaagggtcactctgagtacatatatctgatgggaggttagcacactaacttatgaagttaacatgctaatctagaattaatattatgataagatttaccaactttatcaaaaatagtttttatcatttttgcttaagtctactttaatcatttctggttaaatattcaaaaggaaaaaatacccgtatatggcagaatatggcacgtccatcatgtaacatcccatttttcgtaaaataatttaaaaatgatcgttattcgtaaacaaacagagtttagaaaaatgatgaagtttttataattaaataaaaaggagaaat

SEQ ID NO: 144737 - DNA, 357 bp, Glycine max
  unsure (1)..(357): unsure at all n locations
ntaagtgaaagggtcgggaggtgtatttacacaccgngattgtgttatcaccccacgcggccgtcattagagacggcaacctttaatcaaatgtgcaaatatgacttcaatttatattcttttccctttttacggtcttatgttnttttatgcctttttatgtttttatctttatgggggcgacaagggcgtgtgcctttgctcctacgtattcctcgattttgatgagaaaatcagacctacgtagttcttttgtgaaccaagcgctttgggtaaattattttgtatccttatatgcaagatatgtgtttattgaatgaaaggtcatttaaggcgttggacccgtagacaatcttt

SEQ ID NO: 144738 - DNA, 384 bp, Glycine max
ctcttagactggtttatggttttgttcagagaatgacatcagaatcatgaatgttttgtacaatattctacccggcagagcaagcactctaagtgatgtttaataaatatgttatggataattcgttgaaaactcggacaaataatattctatccatgaaagatgaaccttatagaaactacatattaatggatagcctatgttcatagatataattaactttttacagaaattcacccttacatattagatttgaagtttaattttaaaataactcatcattctaagtttttaattctcaaaaaaagaaattgagcctttttctttttactataggggggcgatggtgccaaaaaaaacctcgctccataattttttaaaata

SEQ ID NO: 144739 - DNA, 465 bp, Glycine max
  unsure (1)..(465): unsure at all n locations
ggacctataaatctcaactttcaatggagaaaggctcacattcactntcttctactttatattcaaacttgtccacataaataataaagtcactctcgactcatagaaaatcatataagtctcatacaattaatatagaacctatatcctaatgtcacatcctatcagagccgtggtgatcccgtgtcctctagcatgaggttcttcatagtcatccacctattcatctgctcccccgaacacaagttcaagatcatcacaggatccaaacataacaacacacagggagtgagttatcacattcctagctaatagagaaacaagacaatcgaatatacatattatataaatgagataccacttgcttaaacatagctcacgtaacttcaccacttcatcattcaaaattcactttttaattatcaatcacattacacaagaatcccacacttcgatcaagatata

SEQ ID NO: 144740 - DNA, 446 bp, Glycine max
actcagcttgaggattatggggtactcatcacatgtggtactaggtgtgtgtcgggcgatggtgcacaacaaggttttccacatccacaatgcgcgcataaacccaccatcccctgttgcccacctccaactgagctcgcgtactcccacgtagcccatatcctcgtttctctcaacaccgggtccccatcaatcctctcaagcttccacaacatccaagcaaaacaacattcaaacagcacaagctatcacagccaagcaaaacagagcaaaggcagaaaactctgctcaacacatcaaccaaaatcacagtttttctcacgtaaagaccacagtaacaattctttcgatccaattcgttaaccgttggatcgactcccaaaatttactggaagtctatagtgtataaccctgattttgaccgttggaatatactaacaaacatc

SEQ ID NO: 144741 - DNA, 276 bp, Glycine max
tgtctgtcacgtcgaaggcaaacggagatattgtctatatgaatagaggcactattttctgcggcactattatctttatgagatcatcgaatgaagtactagatgactgatctgtccgaatactaacgataaattcattctgtccgataaaacagcttctatttgataaactcattctttatgcagaatctaaggctttaatgcctgagaaatactttgtcctgagggacaatttacctccttgtatgactgaaagatcatatcctacacaattat

SEQ ID NO: 144742 - DNA, 334 bp, Glycine max
  unsure (1)..(334): unsure at all n locations
aagcttcttcctttgctctctggacaacattttggccctcttatcattntctttcctcatacttaaactaggtatattatttgcttttaccagcgcaaaaatcaaatcatncnnaaagttttggctagagttgggcatgatgacttcaagttgagagaaaatgtgttgttatttttatcaatctntattattttgatatttctctaatctctagttaggaaaacccatattcttttttatctgtgaagtagcattgtcctgattttgataaagaatttgtagaagttcttgtgatggcctactctgacatgtcaagttttccttatatgtatat

SEQ ID NO: 144743 - DNA, 388 bp, Glycine max
  unsure (1)..(388): unsure at all n locations
ttctcaatttattgctgaccacaatcctcattggtaaaatagccgaccttatcctctgaaagatcaatttcttaagaagattaaccataagtgagtggctcattaacctaatctagggtacccanagagcctttctaaaaggattaatcacaagaggataagtcctaagtgatttaattcgggttcttaattgtgattcaaaaaaggatcagatgtaatagtagtgaaaatgactaacgagacctggattcagaagatgatgattgggtgtttctatctacgagacttgtatttgactttcgttggcatttaacacatccatgactctctatagtcaatatgatcatgagttccaataattcttttatcatttcgagagttgatgcat

SEQ ID NO: 144744 - DNA, 461 bp, Glycine max
ggaagggtaactagatgccttggtaacctgaaataaaaaatctgcttctgtcgccagactctgtggtttatgctcctctgccgaccaccacacagacctttgcccttctgtgcaacaatctgaaccaattgaacaacatgaagcttatgctgcaaacatctacagcagacctcctccacctcaatagcaaaatcagccacaaaataataattatgacatctctagcaacaggtacaatctcggatggaggaatcatcccaaccttagatggtcgaatccttcacaacagcaacaacaacagccttattttcaaaatgttgctggcccaagaagaccatacattcctccaccaatccagcagcaacaacagcaatagccccagaaacaacaaacagttgaggttgctctgcaaccttcccttgaagaacttgtgaggcaaatgactatgcaaaacatgcagt

SEQ ID NO: 144745 - DNA, 393 bp, Glycine max
  unsure (1)..(393): unsure at all n locations
ttatctagccaagagcatacgaaagtgttacttccgaacctaacagtntctaattatatgggccattaaatgtatcatgtgttgacagtaattgattagcctgtgaatttcctctggggctgaacacacttcagcgatggcctttactttggccagtattcgcaggaggtcttgacttccatttaaggtcaaggcgaacctatccatccacatggtcgcttcttgatgcaatgcatcaatcattctccctcttgcttccttataggcgtacgcttgtgtgaagacctctactagtttgtgttcatgggtcaaagactgggttaactcttctttgtactgccctattatagctagcatgctgtgctccgtggcttctaactgttgggccaaact

SEQ ID NO: 144746 - DNA, 435 bp, Glycine max
  unsure (1)..(435): unsure at all n locations
tgcctcanagaggtccaggaaggacaaggcggccgaaggaactagttccgctccggagtacgacagtcaccgctttaggagcgctgtacaccancagcgcttccaggccatcaagggatggtcgtttctccgggagcgacgcgtccagctcatggacgacgagtatactgatttccaggaggaaataaggcgccggaggtggacatcactggttactcccatggccaagttcgatccagaaatagcccttgagttttatgccaatgcttggccaacagaggagggcgtgcgtgacatgagatcctgngtaaggggtcagtggatcccatttgatgccgacgctatcggccagctcctgtgatatctgttggtgttggaagagggccacgaatgtgagtatggccataggaggaaccggtctgatgggttcgatga

SEQ ID NO: 144747 - DNA, 382 bp, Glycine max
agaaacagaaatagtcctttaatgtatatgaataaattcataagtgtataagaataatattaataataggtgacaacatataattgatacttaagtgaaatatgtaaatatattttattgttcttaaaaatattttagattaaatttaagaagttataatagattaagtttgaaagtttggcgataatatttcaacttttgataataattttgtgttgctgctgtaaattaagaatatgggagtaactttcttcaaattgttgatttattaatgccttataatcaactttgagaattacataattcatatacacagtggtgggtacttaggacatcttttttattaaaggatattatcttctgctgaatttaacaatgactc

SEQ ID NO: 144748 - DNA, 414 bp, Glycine max
  unsure (1)..(414): unsure at all n locations
ntaagaagttaattctcaaacgatgctgatgttataaagtttgctgtcatccaagcaaaacttatttttacgtgaattctaagataattattacagaagtgaataaatttattatttctataaaaaaataaaaaaatatatcatacatatatcaatttgtaattgaataatattgtaaaaaatattatatatatatatatatatagattatttactaatttttaattattaatataatgtcacaatctttgtaccaaaccatgtatctaatttaaaaataaaagtagagatattggaaacgattaaactctaagtttaaaattaatagtagagatattattaattgcggctaaatatagctgaagtgttcgtgtagtgctcgacataaatacatatggcttcacgacatgatat

SEQ ID NO: 144749 - DNA, 428 bp, Glycine max
  unsure (1)..(428): unsure at all n locations
gctgccgcttatatcattacttgtggagaaccatttattcttagntgaatgctccttcgatatagaaaataatttgctttgaggcctccagatgagtagtggatggagtctacatgtattgactgatgagtcgagtaccatatacaatgtctggtcttgtggacgtcagatatcacaaactacccaccaaactcttgaaatttgtagcacccatcttttttgcttcgtcaaactttgataacttcatttcgcactccaccggtataccaattggcttgcatagttttgctatgaaatgaaggattcgtcttccttttgctatacactcataccacgatagtatgacattagtccaatatcggtcatcttgaactccttgaccatcgctttcttgaactgttcaaacatactaggattacttcccatga

SEQ ID NO: 144750 - DNA, 434 bp, Glycine max
gacattgtacgctgagagtgaatgtactgtctttcttatcatctcactctacgatgatgacctgtttgtaacaagaagcaacacaagtcttgcggacaagcttaataaataaatgatggaggagtttgatatgacagaccttgtcttaatgaccttctttcttggcttggaaatcaaactacgacaacatgaattctttatttgtcataacaactatgccaatgagattttgaagaagcttaaactcgatgaatgcgcagaaacgagcactccaatgaatcaacaggaataagtttgcaatgaagatggaacgagaaaaatatatcaagcatcttctataagcatgattgggtgtgtgatgtatcttacagcaactcgacctgatgttgtaaatgatcgtagcattgtatcccctgttatgaattatgcatgcg

SEQ ID NO: 144751 - DNA, 383 bp, Glycine max
agctcgtgattgcatttgggcatctattttttacttttctacgctggctctacatacataaaacaaccctaccatcccaattttgcgcaaacatattcatatatcattggggcatttcaccgagcacttgatgggcgcatgtttggacataaattgcaagagaatgggggcaatgtgacatgccccattgcttcataatacaacataagcctaatgccttcttattcaaattctcaactcaaaaaaatcaagcataaaaacaacccaaaactgccccacaaatataatcacattcttacaatttggagcaccagaagatgaagaaaatattccaatgggaagctaaaaacatccaggattgaatacttattgttggagtgaat

SEQ ID NO: 144752 - DNA, 423 bp, Glycine max
  unsure (1)..(423): unsure at all n locations
tgagcacctctntcctacctctctcgtcattgatgggttgagccttctctgatggtgtctgactggtctgtaatcttcatccatcattatctngcgcatacaatangcagggcttctcggatggactccctcttttcaattcttcaaaactggtcccccatacaggaatattntcttcacaatctaagtcttccaagcaagcccttagatccttctcctcttcactggttagacaatctacaacattgattaaagctttctccagtgaaatttgtgtagttgaaagagcaccaatgtcttctttatcgaactccttgatgtgccatcattttcttctattttctaaaccctttctgcaccattttaattattgattggtcttaattgtcaattaattaggcagtttataatttgggctcattt

SEQ ID NO: 144753 - DNA, 401 bp, Glycine max
agcttaggagaaccaagccaatcataatgctatacgaaatatagatgggaatagaggtaacaatggcggttatgaccgaccgacgcataaccgggttgagggagtaaagctcaatgttcctcccttcaaaggtagaagtgatccatatgcctacctggactgggaaatgaagactgagcacgtatttgcctgcaatgactacactgatgcgcaaaaagtcaagctagcagcagctgaattctccgactatgcccttgtttggtggcataaataccaaagagaaatgttgagagaggaacggcgagaggtaaatacatggactgagatgaaaagggtgatgagaaaaaggtatgtgcccactagctataacaaaaccatgcgacagatactccaagggctgt

SEQ ID NO: 144754 - DNA, 402 bp, Glycine max
  unsure (1)..(402): unsure at all n locations
tctagtcgttcatagacctcctctgtggtacggnctagcttacgttgcatctgtgcattcatcgcatccactaacagacgttgagcgccgtccaactgatggtactcgtcaccaccaccacctgcttcagccataattcaacaagaaaaaaaaatgtgcaatacaaattattaaggtttcaggacctcacaacactctactcacgtctcttagatggtagtacactcgtgtttaatgctctcaataggcttttgtgtaatgtattccctcttgccttctaccactcgtgtttcctcttaagttcctggatggaccaaattanacacacaanggtatataaaattaaaggaaagacaatataatgatcacaaacagaattgatttgggataacaacttggaca

SEQ ID NO: 144755 - DNA, 445 bp, Glycine max
  unsure (1)..(445): unsure at all n locations
actctgctttccaatttgagtctatgttttatggcttgagagtgaaattaacatgatttcagaggtagattcagtattgacaactggagaagttttggaattgattcacgttatataaatttgctgcattccatctttttttgtgatttttttttcttttaacgtaacttatgatactaatgcacatttgtgtcaatcttacagtcaaaagaagttgattttaaaagcctagaagagactcctctggacaaaatgtatgaaactaacttttgcttccattatttaatttcatgtgtttatcgaacaatggtgttcagatgtagtatggtgcttgcagactaacaaatattaatgaagaaggatacctttatggggtccatggaagctctggaggttatgcggaaacaatcattcgatatgctgctaaaacacttnttggaagaca

SEQ ID NO: 144756 - DNA, 317 bp, Glycine max
  unsure (1)..(317): unsure at all n locations
ggaaaaccacacttccattcagaatagcccccacacttggcatggggtgtttcaaggaatggatataaatcctgcctatagcttgctgttgggatgaccatggattcatgccctangaatggaccccttaacgcttcacccaaaattaaagttcccattgggaggacttttaatgatagtgtcgggtgaaaaggatatgttagtaagctgcccttcctccgcaccgtatgtagaagcggcagaagaatccttggaaacggctttccaatccttgatgttgtgagctgcacctctgtggaaccaagtccgtcgctacc

SEQ ID NO: 144757 - DNA, 462 bp, Glycine max
  unsure (1)..(462): unsure at all n locations
tgtgcatccaataccctgatgaggatgtcccatatgttcttaaaactggactgattcatttgcttccaaagtttcatggccttgcaggtgaagacccgcacaaacatttgaaagaatttcacattgtctgctccaccatgaaacccccagatgtccaagaggatcacatatttctgaaggcttttcctcactcattanagggagtggcaaaggactggctgtattaccttgctccaaggtccatcacgagctgggatgaccttaagagagtattcttagaaaaaaatttccctgcttccaggaccacagccatcaggaaggatatctcaggtattagacaactcagtggagagagcctgtatgagtactgngagagatttaagaaactatgtgccagttgcccccaccatcanatntcagaacagcttcttctccaatacttctatgaaggactcagtaata

SEQ ID NO: 144758 - DNA, 365 bp, Glycine max
catcaacgaagatcggtgttgtcttcattccatgttattacaaaatttccacaatgtggcattcaaagatgatttcttatgaccatcttagattctgcgacgtaaataataattataattctgttaattacaaaaatgtcaccgcgtggcattctaaggtggttcaacggaactgtcttataatgtgtgtcatagaaaccaagttttctagtagtgttgatccagcattagttgatgatataatggaaatgattaaggcaaataatgtatcgcctcaaacattgagcaatatttgtatttttgttgaagatggaacagttcaatatctgagtcttagattgtttaggagaagatcaaatgatcct

SEQ ID NO: 144759 - DNA, 445 bp, Glycine max
atttagctctagtttcactttggttattagtttattcattcaaggtaactttcaaagaaaaatgtccaattgatttttttgatttattctattcaaagatattttgattattttattattatttctcccttttttggtttaaaacgtggttacagcgtgaatgatcggttggatttcattttaacagagattaaacggtattacaactcaaatgatcagtggaaattcattttattatttattaggtgagaaaacgacttagataaatggttaaagcacgtcaaaagggggtacggaaaataaacgaaataaaaataatagcacgcggaataagtggggaccactaagggtgcatagaatgaattgaaagatttgatttcgagaacttaccggttgaaaaccgaagaacgaacgaagaacgatgatgaacggtgaagatcttcac

SEQ ID NO: 144760 - DNA, 387 bp, Glycine max
acccatcgttctatcattccaaactcgccactccatgagaacgcatcacaattgcatgcaccaccccctccaacagccaccccagactgcatcactgccgaccccgttcggcgtcccaaagcacccacaaagaagcacccgcagcggctctcggagaagaagaagacacaaacgaagatgatgatgatgacccatctgcggaactgagctacgtggacccagtaactgaccctgagagcatcacggagagggagctggacttctgctacaggcccattctcgacgccagagggaagaatgctcgggagttagctgtgtgcgacaagacactatcgttgcagcacaccaagtatatcccgaacaacgacaataacagcattacgctga

SEQ ID NO: 144761 - DNA, 389 bp, Glycine max
  unsure (1)..(389): unsure at all n locations
ctaagctggtccaatcgagtaggagaaaggccctcataagcatatctgcatattgatcaatngcaaggtacatgaaggacacgattatgagcaagagaaatagtgctcaaattatcaccaagaattcgaggaatagtgtgagaaactttcaccttaaacaacaaggtctgaatttgttggacctctaaagtagctggagcaaggttccagtacttatcttcagtgcttgaacgatcaacaacagtttgcttttgggaccaccaagataccatgctgggtcctataaagaaaaaaacaccgaatgtagaccccctgtcatttggatccgaggcctaatctacatgacaataggcttgaagaataaaaagagaatgagatggagcacgaag

SEQ ID NO: 144762 - DNA, 125 bp, Glycine max
taatgtatttctcgtttcaagtattatgtgaatgatttggatgaggtgatgcatcgtgtgaattaaccatgtgtgattttgtgaggtggacgttgagtatgcggcctcccatccaactaacgtga

SEQ ID NO: 144763 - DNA, 276 bp, Glycine max
  unsure (1)..(276): unsure at all n locations
actatatgatgtggctattgtggtgtgtcaagaaaatgctcacctccacctctaaaatctaattgtattgggcttcttccaattcaattaaatttagtttccaacacccacatcaaatattcacttaatctatgtgaaattacaaaactacccctaatacaaaaactattctaggtgccctaaaatacaatggctgataaatctggctcatacttancccatgggcccaaaatctaccctaaggctcatgagaaacctagggccttctcttgcata

SEQ ID NO: 144764 - DNA, 375 bp, Glycine max
tgaataacggggcatggacctgcatgcctggcctcaaagcctttgctttcatgcatttttgtaggcacaaagcaaattcatatggggaccatctcaattgtgaagaaaatggcataggtttcattttcctatgatgtcagtctagtgctcatgctccctccggaatcttttataacattcaattaactaattcactggtattagctaaattagttaatttaataaatctgtttttaaatttatttttttaaattatccggaatattattgatatatactctttttttaatattttataagatgtatttcttttaatctctttcaacactaatatatttattattttaagtcttattggttatgcatttaaataat

SEQ ID NO: 144765 - DNA, 453 bp, Glycine max
  unsure (1)..(453): unsure at all n locations
ctcgtctggctgatatttatcatgcagacttttctgatgatgaccgaggaacaattagggatcaacttgaaacttatgtgcttcaagtgagaagaaatgcttctttttccacttgtgaagatgttcaaagtttggctatgaagatggttcaaactgagaaacatttggtatttccattggtttataaacttattgagctagctgtgatattgccggtgtcgacagcatccgttgaaagagctttttcagcaatgaagattatcaagtctaaattgcgcaataagatcaacatgtgtggttcaatgacttgatggtatgttacaccgagcgggagatattcaagtcacttgatgatattgatattattcgaacatttatcgcaaagaagtctcggaaaggacacttgcctcgtaattntatttaacccgctattgtagattatgtttatctctt

SEQ ID NO: 144766 - DNA, 421 bp, Glycine max
  unsure (1)..(421): unsure at all n locations
ggacacttaaaactaagctaacaagttttntntttatagatggggtttgactcttttatctaaaanagcgtnttaaaaagcttgaacttgacctttatagtaaacaagtcgagccgagccttacataggccgagccaaaggtccttgacaagttgttcggctcatttccacccctagtcgcttgcaacgtgggtcatgacgggatgacaataaaaaaatatagagaaatgtcttccaaaaagggaaaattggacgagtcgctatcaacgtttatttaagaaaaatgttgagaaaacaaaaaataataaggaatgatctacggttngagaaaaaagattcgagagtcgtttacgtgcgaggaaggtgatagtactccacatgctcgtcatgaagaccacaacctttaatcgagtgtgctata

SEQ ID NO: 144767 - DNA, 346 bp, Glycine max
tgagctgcagcctgtaaacggctggtcatgatatatgtcatggtttaaccaccggctcagggataaagggggtgtcctacattagtttcatgatacacatgcgacaatgatgattatggaaatctatgcagaagtggtcatgcatgcacccatgtggacactcaagcatcaagtttttatagtcatgtgacactaagactcaagactcattgtccctattaaacgtaaccctgtgtttacaaaatatgttgtttaaccaattcatgcattcatctgagtccattatgggcgatcgggaaaattttcacagcatacagccttcaggtgattacacacattttctttc

SEQ ID NO: 144768 - DNA, 341 bp, Glycine max
aaatgagatgattgacgtgatattatgagatgctcaattgtggacatgacattcgattgtgaataagtgtgcgtgtttgacacttgatgtgacaacaattatatagtgagctatgaattatacaataacccgaccagtgatatcttgagaaaaatgatgatgcccagtgtttaagagaaaacgtatgtttcttattcacgaaccactgctaaattgtaccataatgcgataaacgtgtttgaaacactagtgcgatgtcgggggtattgtataattcatgagcagtgcttataaatgaaatatgtcatggtggactgtgcattatgagatgtgaacttttg

SEQ ID NO: 144769 - DNA, 372 bp, Glycine max
ggatcttaagtcacctgcagcatgcaagcttctggtgggacatcttgacttgctattttatctgacattcaccacagattctgccttcttctattttcagattgggaatgcctctaacagcacctttgtcaatgattttcttcatgcctcttaagggcagatgtccaaatctttgatgccatattttgacttcatcttctttggaggatggacatgtggaggaagaactggtttcttgaggtgtccataggtaacagatgtcctttgatctgctggccttcattaaaacttcactcttttcatttgtcacccagcattctgactttgtgaagcttacattgaatccttcatcacacaactgactgatgctga

SEQ ID NO: 144770 - DNA, 281 bp, Glycine max
  unsure (1)..(281): unsure at all n locations
ttattagctttgagattaaccttgagctagtatgaccaaattttgtgccacacctggtgatcttctttgatagaaagacagcaagatacattttgatatgacagctcatctagtctaatcttgtaaagattacctttcactctggtagaaaagagcagtaacccatcattgctcttgacaatagtctcatccatggttaatgaaacatcgtatccattgccacataaatgacctatgcctaacagattatcgtttaaccctttnacaaataaaacattatc

SEQ ID NO: 144771 - DNA, 394 bp, Glycine max
  unsure (1)..(394): unsure at all n locations
attattattatgtcgccatcaccaccatcatcatcagcgtcgacattattattattagaatagtaagagatcttttgccccaaagagtccttttcatggaactataaatttcggtagatgtcccattgcatcatcattccatagaatgtcatgtcttgtacactacattatagtagcactagttatttataactttgatctcaacatgtttataatcttaccttatagaataacatacacgctgtgaatagtatgaaagaccctcccttctactttgtaaaacagattcaatagaaactaggaaaataaacaaatatattcgccgagaaataagagagagggatttgaaccctccatagttcttnttttcgaactatattgattctcaagactg

SEQ ID NO: 144772 - DNA, 431 bp, Glycine max
  unsure (1)..(431): unsure at all n locations
actcagcttatctagatcctttgtggactggcccaattatacagccctcttaggtttagactaacttaaattgtgtttcatccgcagatccctcatttaagactagactcagctcaagtagcttacgaaagtttagcctaatttagcctaagctntgtctgcagattcctcatttaagactaggcctaaactaaacagcattaatgtaacaacataattacaaccaaaacttaatccgtagatccctcatttaagactaagtttcgatcctgcttcaatcaagttctaaggcaacaatacatttcccaatgctaaaatcacctaactgtgcacacaattgggtgatcaaaccaaaagcatacaaacattaagcattgaatgaagcattgaacacagaaaacaccaatcattagatattatgtatttacatc

SEQ ID NO: 144773 - DNA, 218 bp, Glycine max
atacattcctgcttccattgacgatgactaccacctgtaggactcgaacacccacaaagaatgatgccattcgcatatagtcaactccgccttggtggacaatgatagcttatatgagacaattgaagatttcagactattcatagagtatgagtgggctcataaaacaagagatgactccacttactacttgatctcagatctttctctccccctgt

SEQ ID NO: 144774 - DNA, 296 bp, Glycine max
cagaaaatattctcaactgtcacattttttcgttcggttcttgaatggctatcaaaggcctatatatatgtgactcgagacacgaatttgctgagagttttcagaacaaaaagatcttatcctcttcgaaagcaaaatcggtgtatcctcttacaaattccttggcaaaacacttgtgattcgatcaggaattatttgagggctcaaattgttcaatctatctctctcaagagagaattcttcttctctgcttctttattctgaaaagggattaagagaccgagggcctcttgttt

SEQ ID NO: 144775 - DNA, 450 bp, Glycine max
  unsure (1)..(450): unsure at all n locations
ctctagtcatcgcccttcgagatgctaagactctnttctactttntttctcccaccagagatatctaacacacaagagacactaagaggaactcaaactaattaggataagggcttagaaatcaagattacctcagagaagctttgaaatgaaggattggaggaattttctccatcgaatccttgaggagaattctgaggattccgctccgattaagatgttcctcttggtgtgggggttcgacgacaagcaacgacagctcgtggcggccatcggtggtcgtgggtggtggagaaagaggtgttaggttttgggtggcgttttggagaagaggagagtgaaaacttgtatttttaatgctgaggaacgtatttataatctgcatatctcgcttagcgagttcgtctcgctaagtgggagtccacttttctcgctcaacgtgcaaattct

SEQ ID NO: 144776 - DNA, 446 bp, Glycine max
  unsure (1)..(446): unsure at all n locations
tctagatgggtataccatgctacagctgctccggtcaagctgtcttgttagaanaggaccaataacttttcgttcgcagaatacgcccccatctttcggcaatacatccgaagatgccctttcggacatgtcgtccctttgtacttatcaaagtccggtactttgaacttaagaggaatgatgatattgggtacgagacatatgtccgctagatccgagaatgggtaattgccgaggccctcgactgctctcaacctctcctcaagcgcctcaatctttcccttatcttccacgaagggaacagattcttttacgggtgtgggtgaagtcgggatatggcggactatgtttggttggggtaattcatggggggacggatctttgaggtgaagtatgggaccgagatgggtatctccttcctcatcgtcttgcccgggatagtcgtc

SEQ ID NO: 144777 - DNA, 283 bp, Glycine max
actggtaaaactaactatccaaatttttgccttcgcaggaaatggcccccaggaagctcgcctcaaagaggtccaggaaggataaggcaaccgaaagaactagctcccctccggagtattacagtcaccgctttatgagcgctgtacaccagcagcgcttcaaggccatcaagggatggtcgtttcttctggagcgacgtgtccatctcagggacgacgagtatactgattaccaggatgaaatagggcgccggcggtgggcatcactggttactcccatggc

SEQ ID NO: 144778 - DNA, 320 bp, Glycine max
agaatgtattgccatatatcgctttatgttcaaattatttaatatatattctgaagcatgtttctcatagcaacgatgttccagtcttcaattatatattgcatctttctgtctctttcaaatcacaaattaatgttgtttgtctatataagaaacacataacatgttaccagatattaaaatgtctcgcatactcgagtcgtatatggactaatctttaaattatctaatatatatcatgtattacttttttatatacaaaacctccaaattaattattctgacatgtgactcctataagatgatttgaatgagattca

SEQ ID NO: 144779 - DNA, 196 bp, Glycine max
  unsure (1)..(196): unsure at all n locations
aaaaaanagccgcccaccggcggaagaataatttcccccaccaccgaaggggcacaccacccaaccaaaaccccccaaaaaccgcaaaccgaccagggccccagccaaacaagagacaacaaaacgcgacagaacacacccagcagaaacagaccgcgcgcaacaccaccaccccaccggcaaccaagaaacccac

SEQ ID NO: 144780 - DNA, 385 bp, Glycine max
tatgcctgtgaaataagaagcatcaacaataatcaagcccaggctatttgcgcaagcaatccatggggcaatacacaccaaatgattatgatgatagatggctcacattctcacaaaggttaactcatcactttcaaattgagctatcaaaactatcatgacatgtagaggagaatcaaagatttcaagtcacagaaatgtcaaaaacttttattttcaaaacaattacccatttcttgaacatatcctatgattcaaagaaaaacatgcaaagtcatacatgcgcacagaattgacccaaaatataaaactaagaatccgacgaatctaacaacattaacaaattaacacaactaacaaattaacgaaaccagcaaaactaaca

SEQ ID NO: 144781 - DNA, 323 bp, Glycine max
acaaatgagatcttgagctccacccaagatttccttccatcaacatcaccaacacaccatacccataggattaaaacccaaaacaacacttataaggaggaagaaaaagggcttatctttcactaatggaatcataagctccataaagggagataaatcaactatcatgaaaaactcaagccccaacttgagagggttctatgagaagaagataatgaataaggagaagagaagggatgaaaaaaatgaagactaggaagagagggactcttcaacgcgcaagaaaataagcttgcataactgatttgaagtttgctacttac

SEQ ID NO: 144782 - DNA, 355 bp, Glycine max
  unsure (1)..(355): unsure at all n locations
cccctaactcaacaccattagtttatcttccggctgaaaaatttgtttggatctctgtgtaaaaccttactaaaatctctgctatttcagtccaacacctctcaaccccttgaagtaagagtttctaagagattatacgattctgatgaggactttcccgtcgattcttcttttaaaccaacctcttntgctacaactaagcaaaaggtatttcaagaaaccttgaagaaaatttatttcatgagatcccgatctaaaaagtttcttgagaccatatctttcaattggatattgaaagatagaacctggctttctacattgcatgatgagcacataatggaatcttcatcatctc

SEQ ID NO: 144783 - DNA, 390 bp, Glycine max
  unsure (1)..(390): unsure at all n locations
ctgcagctgaccaaaaaagaaatcttttttgattttangatcaatacctcagtttgttttacctagtaaaatggatcattcttaaggtccaacgcccttaaaatgaccaccttgcgcgccaaaagaatcgcttgattcacccttcagaaagaactaccgtgggctgatttcctcttccatggacggtttgtatgagcaagagccccgcttttgtcgacctccgaataaaaaagaaataaaagtttaggtacacaatttcacaccattctaaaatttacgctgttgttctttgggacaaacgtgagaggcgcttatacctttcttaaatgtatatacaactcctgaatctggaatattctgcatgaccgatttctcttccgtttttcgaca

SEQ ID NO: 144784 - DNA, 268 bp, Glycine max
cggaaccgtaacgttgaacaagatatgcgtgggtgaccacactgagactgtatctggaaagggccccaatagggataacaggctgaacttccatatggaacatgacgtcaatatcgcatgaactttcatactggctcaactgggatatcgaacactgtattaaagtaatgcatgtaagaaagaaagccgagagatagccggatgcagggccacgttcatgcaaggcaagacaaattactgttacgaatactcggcgagagtaaagttg

SEQ ID NO: 144785 - DNA, 319 bp, Glycine max
gcttcagatactgtagaaccaaccggttgtgtcttgcattgatatgtgagaaggggtggaggagcaacttcatgtggatgtggtggagaacatggaacttcattgacatctgggtttgaggtacctagaggacatgaagagggaatcgaaagaacattctatatggaagaagaatggtccgttaatgatggaaagaaaggtgtgtcttcaaagaagattacatctgcagacatatactatcgcctggttgatggagagtagcatttgtaacccttatgaagacgagagtaacctaaaaaaacacacttgactgcttcgg

SEQ ID NO: 144786 - DNA, 451 bp, Glycine max
tgagacttcaagatctgtacctttgttccttgaccatctcctggaagcttcatttaaggcaaggagagtcattttcacttcttaaaccctagcattgttgtctttggaaactaggcttcattacatgttgttgtgatgtttaaaattttgtatctactgccatgactagaactggatcatatgttgcttgtctagaagtttgaatgttaaaaatgagttctttaaatgttaaagcatatggttacccttaaatttcacttaaatcaaagttttatagcaaaatttatgaataaaacaagttttagaacattatgtcggacaaaatctgtcacggaaataatctggcggtgagagttgcatggactagttctattaaagctttgaccttataaatgagtctattacgtgttaaaatgtaacgtaacatataataattatgaataaccgattt

SEQ ID NO: 144787 - DNA, 323 bp, Glycine max
acatccacaaaatacacataaacccaccatccccagttggccacctttactgagctcacgtactcccacgtagcccttatcctcgttcctgtcaacgccgggtccccatcaatccttccacaacatccaaataagttaacatccaagcatcatgaattaacacagccaagaaaacagggcagaggcagaaaactctacccaaaacacaaaccaatatcacagttttgtacactcaaataccccggtaatattctctttgtttcaacttgttaaccgtggatcgactcgaaaattttactggaaagctctattacataagtcta

SEQ ID NO: 144788 - DNA, 345 bp, Glycine max
  unsure (1)..(345): unsure at all n locations
acacataaaactcagcttcaaccacagcacacaaatctatttgttcaaaaccctcatttaatatatttctacgctntagaagngaaattgagaacgaggtaaatttgtagcaaaatctcacctcacaccagtccataacatcaatctaaactggctcaaactggattcacgcttaatatctcaccgaatcaaaatttgacatcttcaacacccaaatttgccctaaaaatggctctttgttcacctttggcatttgttttttctctacacagtccaagctttntcatagtcctaaatggcattcaagctaaaattactcactcctacctctaatactccaatttc

SEQ ID NO: 144789 - DNA, 376 bp, Glycine max
gcttacattatgagtttggagtatggaatatcattatgaagctatttgttgaacatataattgagataaaggtgtgagtattgactgcctcacgaagcctggtcaaaccaaaattatatatctatgggttaaggcagtagaggtctttatatcactgtgaacaaccagtactatcattatgtagtagaggtgtttaaatcactgtgaacaacttttatagaattcgttcttcatgcatgaaagctaaacctttagcaataccaatagaaatcttcttccttgttggccaactgaatttgaaatgtctatctactgagtgttttgtgatagtgacagattttagacaaccgtactatcaaattgaaatgctacataa

SEQ ID NO: 144790 - DNA, 399 bp, Glycine max
  unsure (1)..(399): unsure at all n locations
ttacatcaaacaccttgtgcacacaatgcacatttcacatacatatcgatcatcggtattgatgtacaaatcatatccaaacccaccaaccaagagtgtttgggcatggagttgcaccccaaaagatagcagagaagggtaataacattggacccaaacatcattttctcatggaacagtacaaataaactacttggaaaaggaatcctcgaagagagtaatccaaagtaataatgagatccgagaattacctggatctagtgtcacgttcatctaattcttttttattttctttttctcattcttgcatgataaagntaaaaacacgattatttaagtcaatttaaccaaaatctttgattcccgaatgaacattttgtccgagacttactctaatat

SEQ ID NO: 144791 - DNA, 365 bp, Glycine max
attacaccaccatgaatccaagtcttgtcaagaaagttaatatgatgcctcaagcatacacatgaatgtggttacaacctcaaaaagtgcctagttgatttgaccaaatgttttgaacagaacatgtcaacagcattacaaatctggcctttataaccccccaaaaatatctcatctcttaaatttttgatttatgtatgtaatagatcttcctttctgcacaaagccttactttctaaggacttcccaaagcctatgagttcaatcaaaattgaaagttcacaagcatgcaaattggtcgagtcctttacctcctccgatcctcattggaagcacctcatgacaaaatgcaatgcggaacatca

SEQ ID NO: 144792 - DNA, 444 bp, Glycine max
  unsure (1)..(444): unsure at all n locations
tctaaactctgnatacaatttatcattgaaattactgatgtaatattccttttataagaaccatcgctgatgtgcttatattaaaaccgtttctcacaaactaattaaaattgttggcatcctacaagtctttaatgtggactatttaagcaacaaaacaaaactggcccaaaggattattatggatctcccccctttccctcgatgagtctgaaacatgacctccgaaagtccaggtcttttgggacgctactgtgagagatcataatatatacgtgttatatatatcttggaattaaaaccttgactaattaataagcaattgggtctgcaaaatttggaagataggagttcactcacggaactggtcaaattcaatctctattatccattaaaattggatatagaatgcagtctatctaaatatactcggcccattgcatg

SEQ ID NO: 144793 - DNA, 375 bp, Glycine max
  unsure (1)..(375): unsure at all n locations
aaaacacatacacaagcaagnctcatgacagacactacttagcgtcactaaacgtaccacgcactgntatatgccaagccagacctctatgtagtcggaactattatttcattcataaaaatgcaaactcgactcccataattattggaaacacatgnccggtcacactaacttataattcaaaggaagtgaacttctattttgcattcataattgatacaaacggaaacacatttattgtttgtctgtggaacacacaccataagacaacacacgcctcctattatgagggggaatatgtccaagaaattaaactacagaaagggtatgcgtagcaattatgaacgtactataacactactcttgactaaacta

SEQ ID NO: 144794 - DNA, 218 bp, Glycine max
acaggtccacatccccaagtcaaaacacatcctgttcccctcactgataggacacagaacctatatagttattaacgggccaaaaatctccagcttccacatgggatcacattaacaacacatacaggcaaaacaggaaggaaaaatgccaaaaccacaataagtttcattaaaccataacatcttgtcaatgtaactgagcacccaattacggagtc

SEQ ID NO: 144795 - DNA, 181 bp, Glycine max
  unsure (1)..(181): unsure at all n locations
gtgttaaggggggaacttactgcttttttgtttaccgcatattggtttctggagatatatcggtggggtgaggagaccttggtgatatcacgtggggtgctattttccaataccaatcttgnccaattcagacccaacctcggcatatcctggcagcgagaacctgtgatgtatctaaaca

SEQ ID NO: 144796 - DNA, 109 bp, Glycine max
cctcttcctttctaccccaaattgcaaggaaaagccattttcggagtcttggagcctccctctactaagaggggcatcaaatctcaagtcagggtggacttcttctcac

SEQ ID NO: 144797 - DNA, 392 bp, Glycine max
  unsure (1)..(392): unsure at all n locations
tgcagcttgatgagcatcataaagatacagtttctcgtgaaagcagntaaagttgtgtaatactatcaaggtctctcaaaatatattaaacactggaaacatgtgtatgataacaacttaacaggaaataaaaactctaatattatcaaagaaatccattcgacactaaagattaataattaatgtaagatggctgccctattgcagttaaattacaagcatagattatggatctaatgaatgaaaagaatactctaatttttagttttactattcagctgcagagcacatatttaactgaccttgtctacaaaaggatgctatcttcatttatttgaaccaaccttataagatttcataagagtaccttgaacacagcaggatgcactgaa

SEQ ID NO: 144798 - DNA, 447 bp, Glycine max
  unsure (1)..(447): unsure at all n locations
ctgggtatctncttctttactacatcaagaatcaccgggtttagtcttctctgtggttgtcttactggtttagctccatcctctaaatttattctatgcatacatgtggatgggctaataccaggaatgtccgccacggtccagcctatagccttcttatgcttcttgataactgacaacaacttctcctcttgctcatcagcaagggaggcagatataatcactggaaaactctcgctatcatccaagtaagcgtattttaaatttgatggcagaggcttcaattctggtgtggtcggctggacagcggcataaagagatggtttctcatcctttacctcataaagaaagtcagaggtatgtgtacttcctgaaacatggttagtcctatctgactctataaaatcaatctcgagaggtagaacaccaccaccgacatgcaatcaa

SEQ ID NO: 144799 - DNA, 312 bp, Glycine max
tggattcagctgacgactactttccttagcacacttatgttcaatatctgggatgtgccctggagatatgtcctgaattttctactttgaaaactatgttatttggaaatccttcccatgacaccattgaaccactgatggacgcttcggaggataattactaagatggaaataagataaaccaatcaaggcggtgtattgaaggagtatcggatcttgaaaagaaaatcaatagactagatacattgacttagaaataaatataacaaattttgacattgttgaacaaatattagcttataaaccaaatct

SEQ ID NO: 144800 - DNA, 358 bp, Glycine max
  unsure (1)..(358): unsure at all n locations
tgagccttagntgccttattcttgggaggctttattgtttcaacagaatctagagtttgaatctaataagttcactaactctggttcttatgaactggtaagtgggggagatatattttatgctggcttgaatatcatttttctgtacatatgtcaacttcctattgatcagatgtgtggcacatatgtcaactcctgtcttatgttctgtaacagacattttcagcttattaaaatttgttggcnggccctacgatcatgagatggtggactctgtanttgagtgaacctgttctctgaaaattgagtatctactctggataaacttgcttgatactcttttattnggtataactat

SEQ ID NO: 144801 - DNA, 370 bp, Glycine max
agcttgagaagatggggatgaatgagtatctatcaacatccttggaaaagcagacgcaagcgtcatcaaagtgatacttgctaataggacgtaacacttgaagaacatcgcgatgcacaacaatgtcacctccatcatagccagaagtggaggctttttaagagtccatccacacgatctgacgctagaagatcctagcatcatgagcgtttgaattgcatattagctacttttcattaaacaacaagctccagctacgagggaagttcacaatctccaccttcattttccttgtaggcatgtcttctttgcaataaagctcaaatcctttttcctttggagtaccccacactggtagaggcagacacac

SEQ ID NO: 144802 - DNA, 320 bp, Glycine max
  unsure (1)..(320): unsure at all n locations
ttttctgggttattccctattggagggcacctgctctcagatcttctcctttgggtttcgctgcatctacanggnggaaaatcaccattaaaagacatcgttgannctttgagatacagccttcatggangcgccacgagcgatcttncatnntatgtgactgagactnatttgtctaatgcttatcnaattgtatgaactaaaactaatcctttaaatattgagtttatagcgttttcttgacaaangcngggggagcaagctcagcctagccaacccanncccccgctnnccatcaaaagaaaatattagcgttatgt

SEQ ID NO: 144803 - DNA, 446 bp, Glycine max
  unsure (1)..(446): unsure at all n locations
gatccttaagtcacctgcggcagcaagcttcttataagctgagaccatttatctattaacacaagctgagtcttatgcagaaaactagagtttatctcttttatcttagtgagagtgattctcctaaattcttgagtgattcaagaacaccctggctgtatcaaaggactttcacaacctttgtgtgttgccctcgctggaaagagtgattctttccttccaatcatcttcacccttgttctttcaaaccacaattccagaaaatccacctctgcccacaattatctcgtggccataactcccattttacgcactcaaattaagtgattcttgagcctaaattgaatttcaaaacgagaactttcacctcgttttggaatcacctcatttggagccctgtagcancagttattgtcatttctattattttgtccagccaccactta

SEQ ID NO: 144804 - DNA, 397 bp, Glycine max
cttgagcacttgtctctctttttaatgctcttagaaaaattgtgtccgtgaagaagatccccgccgaggcgctttcgtaacgtttacgtgagtgagatcgcgaaggatttcgaccgttcttcggtgttcttcattcgctctacatcgatcttcagtgctcaacgggtaagcacctcaaaccaagctgtgcaattcattgtatgtacccgaaggggtccacacttggtttctgtatttgtattctcgtttgcatttactttatatacccccttttgacgagcttaagccattctatttaagtcatttctcgctttacctagcaataaactaaatttccaccgaatggttgaatcttattatcttgtaactgtggttgaaatgaattccgaccattcgg

SEQ ID NO: 144805 - DNA, 201 bp, Glycine max
  unsure (1)..(201): unsure at all n locations
caaaaccatagacagataacttgtctttgatgataatgatcaccagaggatgatctcaaatgcagcaggacgggtgcaaccaattaagcctaacaccctacaacagaattctgccttggtggcatcaaccacgtctgctgctggggtgtatttctctncaacagatccacttcatgtgccctctcctgaatctaaaacacc

SEQ ID NO: 144806 - DNA, 413 bp, Glycine max
  unsure (1)..(413): unsure at all n locations
nngtgtggctgctngtgtggctgttatactaagtgacttttggtcagcaatgagattgttgttgtggctgctgttgttgctgctgctgatgcaactgaggctgccccatcaatttctgctgctgccattgttgctgtgttaaagagataatcattgcatgttgtccattctgagacaacccagacaactgagaactcataaaagcaagcgacgatgaccttggtaaatcttgaacctgtagtcaaaagcattgtcaatgttctaatatgcctcaattcatnntgaaaagttcaatacatatttttacagacacatttaactacatcatgagtgaacatattttgttntcttgtcttcatcaaccatcaatatatttgggggaaatattcttctttacatgatcaatgtttata

SEQ ID NO: 144807 - DNA, 332 bp, Glycine max
agcgtgtcatgtgtgatgtgagctaaatatacccattctgacttagaggttataatgatgctctgtgatgcttgtgtgctgaaatcgttggttgaatactgattgagatgaagggtatagttaacctagggttgaaaagtgacaatgtactgatatgagtggaaaagtgtgatgctttaagggtttgaaaagctaaatctggatttaatggtaattggaggttaaagtgagctaatcctagtttgaaatgtcatttatgactgtgggaaagcttgtgctgtgcataggaggaaaatgagtgaccaaagtgaaagtcagagccatttataggg

SEQ ID NO: 144808 - DNA, 436 bp, Glycine max
ctgcagcttgcttgcccttaaggaaacatgatttttaacttcattacaactataacataatataaaaacttggacatggatttattaaattcatccaatgcatgcttgttttttctggcacttttagtcattgctttgctgatgacattacttttacttatttatgcaaaaatatacttaaataaggataatctttttctcttgtatttgttgagtatgttttgtattttcacgaattatataattattatgaaacagtgcgtgtataccactaggtttcatgtttagttcctcttcttctttcccaaatctttgaactcgttatcccctctagtggccatctctggcttctctagttcgcgattctcccttaagaaatttcaagaaaaatctcaccttcattgatatccaactcttggaatcatgccattacatt

SEQ ID NO: 144809 - DNA, 331 bp, Glycine max
  unsure (1)..(331): unsure at all n locations
ctggtgctttgactgcttgttcagagatcaaaggccatttggaggggatccatttacatggataggcaatcaaatgtgggttanggtttaatatttgtgttgcgaatacaatcttatacatgtatggcacatgtggagctctggtggaagcttgtacaatatttgatgacatggaaagaaaggatgctgtgtcttggaatgcaatcattgccgctcatgagcaaaatgaaaaaatagtgaaaactctttcactctttgtttcaatgttgcgatcaacaatggaacctgatgatttacttatggcagtgttgtaaagcatgttctggtaaca

SEQ ID NO: 144810 - DNA, 440 bp, Glycine max
  unsure (1)..(440): unsure at all n locations
agctnggaggggttgatggagacccggtgcttataggaacgatgataanggctacgtgggggtacatgagctcagttgaaggtgggcaactggggatggtgggttcatgtttgatttgtggatgtgggagagttgatttgcaccatcgcccgatcgccacctagtaccacatatgacgggtaccccataatcctacatgcttgaagtgagaaagtgtggaagagtcagccttcctacttttatttgatgaccatagagtggtacctggagatatgtcgcgggggtcaagagaccttggggacatcatgtggggtgctattgcccaataaccaatctcgaccaatcccgacccaacccgggcatagtcagtctgtgagaacctgtgatgtacctaaacatgcgagctcctggcagtcaaccaataaaagaacaaatactac

SEQ ID NO: 144811 - DNA, 312 bp, Glycine max
tcgccgctgcatcttatggttaaatggtggcggtatttgttatttttttcttgaaaaaggggagttttctcgtaacagtacaccataatctttttataagtattaagtgatgataaacccccttagctttaattacattcaccaatggtatttgcattgaccctaattatatgatagccgacaagtgcataaagatcacctttttacaacaaaatatggacctcttgccacatattaatctaccttttaaaaaagatagatctttcttgaagtaataaaggggttttatgagtcattatctttaaggtttaa

SEQ ID NO: 144812 - DNA, 420 bp, Glycine max
agcttggttcgaggtacttaccggttgaagatcattgatctatgaagaacgaatgaagaacgtcgaagaacggttgaaacctttgcgaaattcctcacggaaaacgttacggaaacgtttcggaagcgcctcggcttagattttcttcacggaaacaatttttccaagcaaattcgaaagagagaaaagtgcctcaggggctgaaccccttccttcttgctttcctcccctatttatagcaaaataggggaggtggttgccgcccagctcgcccaggcgagctcagctcgcccaggcgagcagggttgcttcctccagaagcaaccgccttctggaggaatattccagagggcccaagtgggcctgggtgctatttgcacccccatttttactaagtacacccccctctgctgtattttg

SEQ ID NO: 144813 - DNA, 323 bp, Glycine max
gagtatgactgaaaatgctagtctagtttgtcttaatcgattgctgaaagaatgcattatcaaggtcccggggagagtgtgatccttaaattttgagagaaacgactatcattaattactgatttttgcgtgaatctttaaagtatggatggaatgcatgaaattgatgatgatgaaggccatgtttgattatgatagccacttaaccaaaaagctgaccatgtgcttgaatgaattatcccttgtacccaggttgagctgaatgaactattgattgattgaactctgagcctatacagtggtgtcccctactaccttgactt

SEQ ID NO: 144814 - DNA, 387 bp, Glycine max
  unsure (1)..(387): unsure at all n locations
gcttcttgatgatgcgttgggtgactatgatggtgttgtcantgattacattgaactttgccagcaacaccgttgttctagccaccaatagggccctcaatctgaatctcttgccttggacgtgtgtggtggttgttgtacacccacaaattgtgatttgatcttttaatttttattttgtnaattatgattgttttaatcaccaaaaattacatttaaaatttaacttaaaaatgccacttaggttcagatgttcaagcttaaattttgacaaaaaaataacattttgaatttttttaaaatatattccagtttactaaggtatatatacttgtntgtttttaatatgaatacgttaacaaattatacctatatattattttaaaa

SEQ ID NO: 144815 - DNA, 346 bp, Glycine max
ccacaactaattaggtggactatctttcacaagcctttctataagacaaattatttggcagtggaacgatgaatatggtgctccttttgggagatggagctaatatgtgctgacaactactactacattcaaatatggctgactgtttggcgggggtgatgcgcacataaaatctttggtgaggagctccataaaataggcttatttcttttgacaaacgaactgtaacattgatgaaaatgtatgatctctgatcataataacttactttctagatgggaacttcacaaacaagtagattcaaaactaactcaggacataactagctacttttagaattgattct

SEQ ID NO: 144816 - DNA, 440 bp, Glycine max
  unsure (1)..(440): unsure at all n locations
agcttcctcngggccattcctgcgaaagcaatcgtnttgaatagttaatttaccaaggggacactactcttaaagcaaaaatggcatataacctccccccataaatacaaacatcaatgtaaatttagagcaagcttacgcgcatattttcttacaaacgttctcttgcacaagacattctattaaccgaaaaatgcacccatatacaatcaaggcagcttcgttacctagattatttacacgcacttccaaggtgtatttcgttacttacatcacacacatctccttggctaaattcacatacatgcatactcaaagcattgtggggtaccaaaaatcgcacatgtgcacatcttggtatntctaatacctatacatacgcaaacttcatgatgaatcttgactatctacacaataaggggctacatttcatgctcttt

SEQ ID NO: 144817 - DNA, 430 bp, Glycine max
ttcttcacatagttcgactgtgcttgattttctttatgcttaaaaatagaaacattatgcatgggcaaaagatcaagaggagttagtgggttaaaaccataaacaactttataaggagaacaattagtggtgctatgaacagctctattgtaagaaaactcaacatgggtaaacaagcttcccaaatttttaagttctttctcaaaattgtcctaagaaaagtttcctatgtcctattaacaactttcgtttgcccatcggtttgtgggtgacaagtggttaaaaatagcaatatagtgcccaacttgccccacaaagtcctccaaaaatggcttatgaacttagaggccctatcactaacaatgctccttggcaaccatggagtctcacattctccttgaaaacaaatcacccatgggaacatcatcac

SEQ ID NO: 144818 - DNA, 313 bp, Glycine max
  unsure (1)..(313): unsure at all n locations
agctngtagtggaaggagagaccttctatatgatgagtacttatacacctcangtatgattagaagagcactgtgaaataaaattttgggaggatttagaagctttattccatagggaataccattacgagaataatattntcttaggaggggatctaaatggtcatgtanggagaacatctacaggatatgagggttcatatatggtttacgatctatgataaagaaatgttnaaaggaaatctatcctagatttcttattagctcatgacttcacaatagcccacacttatagcttttttttggtggtgct

SEQ ID NO: 144819 - DNA, 428 bp, Glycine max
agcttataatgaggcgcggagaaatgaggtgattgatataaacaaaacaaggcactaaacatacaccaacgccaagttattgattttatatgaagactgaagaggtttatatatgtaagccgctcatggtgatatatattctgaaagaatatatgatttcgagcatggcgtcatttccatcatataaactttggtatccatatactgattcctatcatgtacacccatcatatccattacataattacataattcgaagggatattctttgtgtttactatatgaagaatgcttttcttccatactcgttgagtgttttttctactattaatatgaagatgaaattgcatataggatatttattctcccttataatcagggttcaaaacttcatccattcatagccatgtcggtaaaatatacttaat

SEQ ID NO: 144820 - DNA, 467 bp, Glycine max
atcctcttagtctctctgcggcatgcaagcttctcccccaatatgttataaatagggggttatgtgatgtataaaagggttcagcccctttggcacttctctctctttcgaatttgcttaggaaaattgtttccatgaagaagatccaagccgagacgcttccgtaacgtttccgtgagtgatttcgcgaacattttcgaccgttcttcgacgttcttcatacggtcttcattcgttcttcatcgttcttcaatcttcaacgggtaagtacctcaaaccatgcttttcaattcattttatgtacccgtggtggtccacatttgggttcatgtatttttattcccgttcattcactttttatacccccttttgacgtgcttaagccatattatataagtcatatctcgcctaacctaaaaataaaataaatttccaccgatcgcttgatttgtattatccgttgactt

SEQ ID NO: 144821 - DNA, 437 bp, Glycine max
  unsure (1)..(437): unsure at all n locations
agcttggttntgccgtatcgtatatgatactctgtaatctgtggcgttttggtttggttcaatgtctaacattttgcttttagaaaaaaattgcagggcaatcatacattatcttttcttacacaatcaagaaaaaagaacacaaaaaacaaaatcagctgtgacatttgttttgagaaaagatgaaaataactttacctgtgtccctctccctttgccaattttgtttctttatatttaagttcttgttttccgttcggggtttgaattcactttgttatccaacaatgctagttaagaaaattgtaaatctcttgaagggctaattgaaaatcaaaattgagactcagntaataaccaaagaaatatttgcttatagagccagaggtttatctgtatgaactttgaagccgcacactaatgaagagtgcaacatg

SEQ ID NO: 144822 - DNA, 440 bp, Glycine max
  unsure (1)..(440): unsure at all n locations
agctntttanaaagcttttgtagataaaaatgtttaacccaaactataaaaaatgcttgttaaacttgacaagccgacctgtttaagtaataataataataataataataataataataactattattattattaaataaaaaaaattaaaattcttcaaattcttataaaataataaatagaaaataaaagtacttttaaattggattgtgacctgtacgcatttcacctctacacacgtccctttgcattctcactttttaattcattttctttctctaagttcttgtatctatgccaaaaagatagagattaaagttaaaaggataatgcaactatattaatacttccaaggaaaagaatatcttgtaaagatattttcaaataatttaaatatttttgtttgactatattagtataaatcatctctaattcataca

SEQ ID NO: 144823 - DNA, 425 bp, Glycine max
gccccggatccttaagtcacctgcggcatgcaagccttctttggccaaacctattttcaatcttattgacaactggtaatgtgctctttaattaaaattttcttaattattaatttggtccctaaattattttaaataatttaaatttgatctctaaattattaaaatattcactctgattcttgactttttaaaagtaaatcaatttgttcctcaaatttttaaaatatttaaattcttaaaaataaatcaagttagttcccaaatttttaagaacttgaggatcaaatttaataatttaaaataatttagggatcaaattaatttatcttttaaaatttgaggataaaattgaaattcttaaaaatattggaaagtaaattaaatcatctaaaataatttaaagatcaaattgattattttta

SEQ ID NO: 144824 - DNA, 404 bp, Glycine max
agcttcagaccaaagcaactcaaaatctatgtatctaaaacccctcaatttagtggattttcaaggtttgagaagtgaaaatgagaacggggtaaatttggagcaaactctcacctcacacaagtctataaccttaatctaaacttgctcaaactggttttatgcctaaaattccaccgaatcaaaatttgactcctcaacacccaatttaccctagaaatggctcttgccttcactttggtcattcattttcctcctttgtacagcccaagctttcccacagtcctaaatgacatttcaaactgggattaactcactctaacctcccattaccactaaatccagatttggctgttcaaatcctcaaagcattacactgtttcactcatatcactacattctca

SEQ ID NO: 144825 - DNA, 437 bp, Glycine max
  unsure (1)..(437): unsure at all n locations
agcttatctaaatgtattcactagtaatcttttacnggtttctggtaatcgatttcacagttatatatttaagggtcatgacttttgaatttgaatttcaagagttttgttgctagtaattgattataaacatctggtaatcgattacaggttcaaaaatcaaattcaaaacccttttcaatagctatttttcaaacttcccttttggtaattgattacacttcctggtaatcgattaccagagccttgcatgttggatcaagtggcctcacaataattaagaaggggggttgaattaattattcctaaacctttactaattaaaaatttactcttctaaggcttttactatgctgttaagtaaatgaagaatagataagaaacttatccaaaagtaaaagcgcgaattaaaatgcacagcggagattataagagta

SEQ ID NO: 144826 - DNA, 440 bp, Glycine max
agcttgttaaaccactgaccaagtcgatcatttatatttaactacaggtacccaacaatgtatatagcgtataaaagagaagagaaaaagaattatgaaagaacttcatcacgcagagacacggcatggggagataatacttatgaagcctcagcctgtgagagtgaaacgttgatatgagaaggtacaacacaaatggaagacaatgttcttgcttttaccatgcaacctaaattatacatatgccaatgaatgagcaacttgcacagatgatgaactcatttaattgagtcatttcgtggtcaagaactatagatgcattgctgaattttggtagccgaattatatatctgtagtatatatttaaacgagctagcatcggagaactaaccaatagtatttttgtgtataattataagtattttttattggagataatt

SEQ ID NO: 144827 - DNA, 429 bp, Glycine max
  unsure (1)..(429): unsure at all n locations
agcttcttatccaaggcaattcttgagggttattctccttcttccttggcttattccctaggggatggtgcctcccctctcctattctcctttgccttccgctgcatctccatggtgaaaaatcaccattgaaagaccacattgaagctcacagatccatcctccataaaagctccacaagcaagcttccatcaagtggtaattagagcacaagagcttcaagtaggtgctccttaaacctccatgtaatttttgctttaccttctcttccattgttttttcttcatttntctccatgtatctcctcacatgtcttgttctaaatgttgttaacatgattctttagagtttgcaccgattaaacttgctatagaagttagatttgantttctatgggtcacatttcttgttctgttctcgaaccatgaa

SEQ ID NO: 144828 - DNA, 257 bp, Glycine max
agcttatactcggatgtccgattgtgtcccttaaaatattgagacgcctaatattaaaatcggaagactcgagcaaattcaaacggcaataactttttactcggatgttcgattgaatcccgtaatgatgcaatcctacccaccaagggcgttggataccaaacatcacaccgattcggacttagattcctcgagaggccctatagttctaatgagcctattggtttaattctagcccttcgactaactactttccc

SEQ ID NO: 144829 - DNA, 437 bp, Glycine max
tgcaagcttttatcactccagccaaatcgtgcctttaagtttaccagagctaataccgctgacaaccttgtgaaagctgtgcaccctggatacaaaggcatcttcgaatcattttctattttgtcatacaaaggagcatgtgcttgttgaaatccgtcttgtcccaaatcgcgaatcatgtcttctatacggtttcccatgtccacatcaactgggttattctgagaacttgatgggttctctagcaattccctatgccatattcaccttgtgtaagttggagtgatcctgtgacatataagatgtgttcttatctcagctattacgtggtgtctcccattcccacatttcaaacatggacaaaaatatttaccccgcaaacatggtgcattcaattcagtaaattggaggaattgtcaactcccttctatactcat

SEQ ID NO: 144830 - DNA, 432 bp, Glycine max
  unsure (1)..(432): unsure at all n locations
agctngcctcanagaggtccaggaaggacattgcttccgaaggaactagttccgctccggagtatgacagtcaccgctttaggagcgctgtacaccagcagcgcttcgaggccatcaagggatggtcgtttctccgggagtgacgcgtccagctcagggacgacgaatatactgatttccaggaggaaatagggcgccggcggtgggcatcactggttactcccatggccaagtttgatccagaaatagtccttgagttttatgccaatgcttggccaacagaggagggtgtgcgtgacatgagatcctgngtaaggggtcagtggatcccgtttgatgccgacgctatcggccaactcctatgatatccgttggtgttggaagagggccaggaatgtgagtatggccagaggaggaaccggtctgatgggt

SEQ ID NO: 144831 - DNA, 406 bp, Glycine max
  unsure (1)..(406): unsure at all n locations
agctttccaaaatgacatgttgttgtataatgctttattctaacccagncacgttcaaagtcctgttgaatcagtataaagcaacgtgcaacaatttggtaagtgattcatgactttttgaaatttagaaacaatcttggattgaatactgtaaatttaatatatctcacatcaacttaatcttaatttcaagtcgcgtcaagttctatgtattcattcatgaaaaaatgcaacatttacacaagtcaatttggaagggaatacagaatacaacattgtctacaatcattagaggaagactgcaaaaatagactctggatggaggtattctgcagctgaaaaaaatttggaaactggccaagaaatntattttgagtttccaaatctagaagacaactttgctcta

SEQ ID NO: 144832 - DNA, 443 bp, Glycine max
agcttctttttagacatcgatcggtcatctttgttggccgacgccgactgtcattttttcgatcactatcggtgaataatatttttttgccgaggtgggataatgttttcctggccgaataaatgggaacatgccattttcggccgaaacgaaacattggttcggctcgcacgaaaaaacctagccgacctacattgttagtttttgatgcaactccgaaacaagaaaacttcccctgccgtaagaaaaaacattataggccagcaagcgtttttttttataaaaaaattgcgcaatgtcggctgaagaatatcagtcatggccatttcacgaccgatgtcggctattgagttttctattcaatccctgaatgaaatttgaaagatgtcgattaggaaatgtttgatcggtgtcatccggtgattcttcttttttatacctcc

SEQ ID NO: 144833 - DNA, 420 bp, Glycine max
aagaaagacgttgtaagagaatttttttaatgcaatatatgtcttttaaaggatgactttattatgcaagcgtttatcatgcacaatgtatgcctttcatcttacattttattttaatattttatttatgtctatctatttattctataaattatatatctcgtaattaatattctatataattaacatgtctatatagctaatattttatatgtttctttaagttcatttattttaattttggaagaaattgtcatgtaaactaacaacatccatgtgatacctttttttaataataaaaaaatactacatgatatgccacatgagatacaatcttctaaaaaaaaagtcatgtgacattgaaaatcaccaaataacataacaatgttggtataacatgataaaaaacattatctcatt

SEQ ID NO: 144834 - DNA, 444 bp, Glycine max
  unsure (1)..(444): unsure at all n locations
gcttatagttattggagggagaataaaacatttcttaatttattgtgcctttcaagaaacgaagaattctttntgcggcctttagatgaggagagggcggagcctccgtaaagcgacacacaactcccaccgcatatagaatatcgggccttgtattggttagatagcttaaactccccacaagactcttgaagaccgtggagtctaccttctctccttcatcaaactttgataacttcaagccaccttccataggtgtgtgcacgggattgcaatcaagcatataaaatctcttcaacacttcttttgtgtagcttccttgtgagacaaagataccattctctgtgtgcctcacttccattctcaagtaatatgacatgagtcccatatctgtcatatcaaattcacgagacatggacttcttgaagtcttcaaacaaattgg

SEQ ID NO: 144835 - DNA, 223 bp, Glycine max
gcaagcttggaacatgagctgaagcatcagattttaatcttttctaagttagatgttgcgatggagcttgattgcttaattgacacccatgactgaaactcaaatgctgagccatgataaacttcctctgaccacaacaaggaaggatcctcaaattcacgtaacaacacaatggagctgggccttaaaatgattaagtcctgataagagacaacccacacac

SEQ ID NO: 144836 - DNA, 398 bp, Glycine max
  unsure (1)..(398): unsure at all n locations
taatcaccgccgctgcaactgctctaataacattgtgtgttatttattggacgaggtngtatgccattcttgttttataggtatcatttcttggtcaaactaactgtccaaatgtttgccttctcatgaatggccccgcagaagcttgcctcatagaggtctatgaaggacaaggcggccgaatgaactatttccgctccggaatatgacagccaccgctttatgagcgatgtacaccagcttcgcttccaggccatcaagggatggtcgtttcttcgggagcgacccgtccagctcagggacgacaagtatacttgattccaggatgaaatanggcgccgactgaggacattactggttactgccatggncaaattctatcacaaaataatccttga

SEQ ID NO: 144837 - DNA, 363 bp, Glycine max
tttttatttaaaatcaccactgaattttaacttaacacattatatagcgcggtgcaagtgccgtgcataattcaaatttgacaacattcatggttccccaccacgtgaaacttcagccatccatctacttctttatgtcccggtacaaccttaaacatgcattcatcgtccaagacagattttagaaatttacaatataacttacgttgacggatcaatcaactgaattaaacttctaatggttggtgtatgtgctctcataacactatctaattagcggtggatgacgatgccagttttgtatagatccaaggacgttgatggtgagatcgatctgcatcccatcctcaaagggagttcatc

SEQ ID NO: 144838 - DNA, 357 bp, Glycine max
cctggccgggcataagctaatcccggttgtatcctgaaaatacctattacattggctgaaactattgtatgggcatctatcacctactatgtaattggatttgacccaagtgttgctaggtgagcaatataacttctattaatttggacttgggaagacaacctatcattgtgtggcattacatgggagatgctgctcttgatgtaagtttttcaaacaatatgcttctgctgttactacttggccagacggcttctgcattgttttgtaaatagcggcgattggtaggaatatgattattgtttacacatttggatcattcgcaaaaatcacacttctgacgttgggcggtttcat

SEQ ID NO: 144839 - DNA, 430 bp, Glycine max
  unsure (1)..(430): unsure at all n locations
agctttaaggctaagactttgtgttgctccctctatctctaacagattccccttttttggctttgatgatgccaaacttgaattttccattgagtgcatttgtagagtcttgaaagtagagactttgctttttgtagttaacctgaaagtttcttaacactaagataagtatcaattccatatcatcatcatcattagggagagttatatataaaatgtatgatgcaatgctaatgcaatatattctcccattttgcataatgctaaggcaatatacaaaacaaatgctaatgcaatgaattatgctatgctaatacatcttctccctgtnttggtattaacaaggtcataaagttatagttttcatagaatcaaagcaaacataaaactgaagagaaagagccatagcatttcattcatatttaaactt

SEQ ID NO: 144840 - DNA, 420 bp, Glycine max
  unsure (1)..(420): unsure at all n locations
gctttgagccaaaatcctgactcaccataaatcttgacccagggtgagaatgccaatccttaccctcggaagcaaaaaaaaaggagaagagaaggaaaatttccaatctaaggaaaaaggagaaggaaaatttccaatcaaagaggaagcataaaaaggagagaaggaaaatttcctatccaagagaaagaaaagaagaggaaaggaaattcccaatcaaagagtgggagaaagaaaaaagaaaagaaagaaaactcccaatcaaagaatgggagaaagaaaaaaagaagaaagctcctggtcaaagaaaccagaagaaatgtgccgagaggtccttggaccaaacgatatctgaacaatacagaattgtcaccaaatgaacaaaagaaagaaaaggaaaccatgnacctaaagtggtct

SEQ ID NO: 144841 - DNA, 422 bp, Glycine max
  unsure (1)..(422): unsure at all n locations
agcttgaattggacctcggtgtgaaaagttatgattcatttgaatntctcgagagcttccgttattcaatttcgtacgtctctatatgtgatgctactgaatcggacatctgtgtgaaaagttatgaccatttgaatttctcgagagcttctgttgttcaatttcgagcgtctcgacatattatgctcccgaatcgggcatcctgatgataaattatcacccattgaatttctcgagcgcttccgatgtttaatttcgagcatctcgatatattataagcctgaatcggacctcagtgtgagaagttatgaccatttgaatttttcgagagcttccggtgttcaatttcgagcgggtcgacatattatgcgcccgaatcggagattcctggataagttatgaccaatgattttctcgagagc

SEQ ID NO: 144842 - DNA, 427 bp, Glycine max
  unsure (1)..(427): unsure at all n locations
agcttctaatagtgatgatattggattatattttattgatcgtagaataaatgatttaaagacacaacgagctggtggtataaatagttcaaagttattcgttttaactgaattttcaccacagattataaaaaaagaaagaaagtgagaatgaaatctataaaaataactattctgttctgttcacaaccttttcttttcgaccttctttatttccctcccctcccctcccaaatcacccaatcctctttttaatttgtttccgctattgttttaggcttttgtcttttggatatggttttgaggatntcctttgcttttccctctcgcgcgtgtttaactatcactaaatgagttaaatttatatatgtgttttgttttgtcttcacccgtttgtattaagtttcaacaacattcaaaataatat

SEQ ID NO: 144843 - DNA, 440 bp, Glycine max
  unsure (1)..(440): unsure at all n locations
agcttcatgatgatgaatcaagattgattcattatgccttgatgatgactaagatgatgacaaaaagcccaaagaatgatttcaagattaagttcaagatcaagattaatttcaagattcatcaagaagattcaagattcaagaataatcaagatcaacattcaagactcaaagattcaagaataaagagaagacttaatcaagataagtattaaattttttttcaaaacattgagtagcacaagaagttttcacaaaatcattaccaaagagttttactctctggtaatcgattaccagtgttttaaaacgttaagattttcaaaattcaaaatgaagagtcacatctgttgatgtgtaatcgattacaccttaatggtgatcgattaccagtgactgttntcgaaaaattcatttccaaaagtcacaattcttcaagt

SEQ ID NO: 144844 - DNA, 439 bp, Glycine max
  unsure (1)..(439): unsure at all n locations
agctttccatanagaaagagtttggaggtatgatgtttcataatctccatggattcaacctagtagggttgggaagaagggttggaatttcattaataacccaaatactacaatttctaaaattctcaaagctaaatatttttcaaatatttgatacttggatgccaaactaaggcataaaccaagctatgcatggcatagtatttttgcttcacatatattggtcaaggatggtattctgtggggaattgatgacaactccatcaatatttggagccaaccatgggtgccagcatcagcaagaccatatatcacttcatctaccccgctcggccttcaggatcttaaagtcagtccactcatcaaccaccaacaacaatgttggcattaagatgtggtacaacaaatttccaatgacaatgactaaagaaatgttgct

SEQ ID NO: 144845 - DNA, 404 bp, Glycine max
caacatcaatacgagcgctcgatttttacgggactaaatcagacatccgagtgaaaagttattgtcggttgaatttcctcgaagcttcaacattcaattacgagcgtctcgatatattacgggactaaatcacacatccgagtaaaaagttatcgtcgtttgaatttcctcaaagcttcaacattcaattacgagcgtctcgatatataacgagactcaatcagacatccgagtaaaaggtattgtcgtttgactatgctcataaccttatcattcaatttcgagcgtctttattattacgggactcaatcagatatccgagtaaaagttatatcgttgaattgctctgagctcaacattcattcaagcgctcggtaatacatgactcaacacacatcgagtaa

SEQ ID NO: 144846 - DNA, 330 bp, Glycine max
  unsure (1)..(330): unsure at all n locations
agcttgagttgtacaagccaaaagtgacttttattattacttgnaacttgttgaagttaatgaaacttggtggttacccaaaaactggacatatggggggatgatgcaatcctacccccaagggcattggatagaagactcctagaagagtgggtcttaactactgaagaacgccctaaggttaggtttttggcccatggactaagtatgagctcacttatctttgtacatattagattagggtttcattattttttggccttgtatttatggctccatagtgtagggagggtaccctagtaaagaacgatctttcatcctatgtatttt

SEQ ID NO: 144847 - DNA, 465 bp, Glycine max
  unsure (1)..(465): unsure at all n locations
tcgccccggatcttaatcaccgcngctgcagctgtctctacagaagagagaaacatattttatgtgattcattgcagataattctttgcagtgatcaagaataattatgaaccaatcaatcaacaagcataaattgaaaattggtcccacattctaaaaatggtcatctcagtgcttcaaaaaaatttcccaaaagaaatagaaagtacaaaatcatacataaaagcttagaagcaaagtttgagggttttatcttacttttgatatcttgtgtccacacctttgttgaggatgaaccaatttcttcatctccctgagtgttattccaattggcactttttttcttcaaatgaccaagctcgctcaacaaatattcagcattgatgtaatggcattccctccgagtcttccagaaaaggagttccacaaacaagaggggttgctctttcattntctttagcatct

SEQ ID NO: 144848 - DNA, 443 bp, Glycine max
  unsure (1)..(443): unsure at all n locations
aagcttgaagacaagactagtacgatgtatcttttcttgggtatagcaatatnctctaagggctgaccgggtctacaacattgcaaacataagaaattcgtcatcaatcgagatgttgaagttgatgagtacgcttcttggaattgggatgaagaaaaagtggagaagaacgttcttatacccgctcaactaccttaagaagaagctgaggaagaagatccaggtgaaccaccttcacctccaccacaacaacaagatcaagaactatcatcgctagagtctactccaagacgagtaagatctttggtggacatatatgaaacctgtaacttggccatacttgaacctagaagctttgaagaagcgtcaaagcacgaagtatgggtcaaggcaatggaagaagagatacaaatgatcaagaaaagcaacacatgggagttagt

SEQ ID NO: 144849 - DNA, 433 bp, Glycine max
  unsure (1)..(433): unsure at all n locations
gcttgatcctcgggtggttggatgtttgaggaaaaaaaanaataaaaaattttaaattaaagtagaaaataatgtgagatgaatatcatatttttttaaaaaaaattctctctttctttcctatttttccctaaccaagcatataatcatggtccaagatcttcatataacgcaaagagcaacctaacctagtagtcaaagaaatccccaatcaactgagagacagctatgaagtcccaaatgaagaaaaaaagagtgaatcccattcccaacactccttgcaacgtggcggaaggttcctgcaggggtcacctttgcatcaagccttgttgtttcttctgcagcatgagagaaccacacgcatctctcagaagggctggaatagcgacctgcttcagagaaatgcctcacgctcatggagagaatcatcatg

SEQ ID NO: 144850 - DNA, 358 bp, Glycine max
agcttgtaatcgattacacacatactgtaatctattaccagaggagattttcagaatatattctcaacagtcacatcttttcatttggttcttgaatggccatcaaaggcctatatatatgtgacttgagacacgaatttgctaagagttttcataacaaaaaggtcttatcctcttaaaaagtaaaatccgtttattctcttacaaattccttggccaaaacacttgtgattaaataaggaattatttgagtgctcaaatggttcaatctatctctttcaagacttcttcttctcttctttattctgaaaagggattaagagacccaggatctcttggtgtaaagaaatctaaacac

SEQ ID NO: 144851 - DNA, 403 bp, Glycine max
tttagttcaaactcaactttgcatctattcatttaatttaataaaagaaattaattaagcattttacaagttaaactaaaataagttttatactgaataaaaaaacaaatatctaagctatgttcaataaaagtagtcaaaactagttagtaagttaaaactgaagttgatcactgaaagcttttaaattaggctattaatttataaatgtttgataaaactatttattgaagtaattaaaaaatataaaatgacataaatagatatatttatatgatatttttatatgaaactgtacttcagtttatggataaaaatatcttttcaggtcttaataatcttaatctttaatttaatttaaacctctctaatattttttaataataagatattgttattatat

SEQ ID NO: 144852 - DNA, 259 bp, Glycine max
  unsure (1)..(259): unsure at all n locations
agcttcattctacacctgagaaagaggatgagttagntngcacaaaaagagaaagcttcctaatcatgagggagctaacaaaaaatttcatgcaggtggaccttcttctagtaattttgacttgcagtagcctcttatccctcttccatttccacctagagcaatttcaaacaaaaagatggaagaactggataaggagatcatggagaccttcacgaaagtagaggtgaacatacctctgctagatgccatcaaacaa

SEQ ID NO: 144853 - DNA, 444 bp, Glycine max
  unsure (1)..(444): unsure at all n locations
gcttctgttgtaacaggcgacgcattacncaactgttcnctntnncttaatccttgngttntctcatgtggtcccaaacanaaattaagtttgtgtggagacacttttatcgacacaccccgaattcccacctgcacgattcctccccatcaaattttcagagtttcacttttcttctctctcctgaaaatctcgaaatagggttctgatattaactaattttccgctttgatggtacttttcaatttgggtaatccgatgaatgatgatgattcatgatttgggtagtctttaaaatttttccattagtctaatttctggttttatgattgaaaggaagttttttttttttttctttcttgtgattgaatggcttatacaatatagcattagtagccgtcgtttatatatttatcagatgagtgagcttatttattgttgctg

SEQ ID NO: 144854 - DNA, 444 bp, Glycine max
  unsure (1)..(444): unsure at all n locations
ggatccttaagtcacctgcggcatgcaagcttctcaaggaagtnttctcaagaaagcttctcatggaagctacctagtctataaatagaagcatgtgtaacacttgttgtaactttgatgaatgaaactcttatgagatacacttcaaagttccacttctctccctcttttattccttcaatttcgtgctccccccttctctctttcttttcctccattaaagcatcctcttcaagctttttatccaaggaaattcttggtggtgaagctccttcttccttggcttattccctagtggatggtgcctcccctctcctcttctcctttgccttccgctgcatctccatggtgtaaaatcaccattggagctcaaagatccagcctccatagaagctccacaagcaagcttccatcactttgtggatgagttatggtggactctgg

SEQ ID NO: 144855 - DNA, 414 bp, Glycine max
  unsure (1)..(414): unsure at all n locations
tcgaaacaagtaactaagaagatttcctttttttttcctatgnanacacattataatggagactgtcctggttacttcaaagctttctattgccgacaatctccataattttaccaattgaggcgcgtttcttctgaacgggaacggatgtttcaaagcatcaccatactgttcaagtgtgacatcagcatcaggctctatgaacatgacccgcttgagagtctatctcagatacgatcttaatttcgcctttattggtgatattagctacaaataggttgtgtgactcatggagttcgtccaacgttattgataagcatggaattgatcatatccacatgtgtggataaatttcttgacagccctatagaaatatacgagaaaatatttaaatttctctttgtatatttcgag

SEQ ID NO: 144856 - DNA, 385 bp, Glycine max
gatagcccctttgagcctatgttcccctttctttgttttgaagctcatcacaagccttaagtggaaaaccataatatcaccttacccttaatgaattttggagctttggaattgttttgggaataagtgtggggggtatgttttattggaagatattaatttttcgccttgcttaatattttattttggccatgcttgatgtatatatatattgcctagttcttgctttaatcttcaaatttgtattgtttaaaacaaatgaaaaaacatatttcaattgctgcaaattccgcaaattcctattgtttaaaaaatagataaataaagagagaagtgaagttgaataaatgacgtcttggtatgatgactctatctgtgagccttg

SEQ ID NO: 144857 - DNA, 307 bp, Glycine max
  unsure (1)..(307): unsure at all n locations
gcagcaganaaagagaggaaacaatttttatcaggacccacccaaggggacaaaggaccagacaaaaaccaaagtgcacaaacaaaaccaaggagaggaaacgaagacacccttgaagacaaacacaaacgaccgatggaaacaccctcaaacaaccgtagcaacaaaaccagacgacgaggcgccacccaaacaggaaataaacaacgatcaacttaaagcgcaacacaaggaaaaaacgtcaaaataagcaaaccacacggacaactaacccacaccaacgagtccccccacgaggcaagacaac

SEQ ID NO: 144858 - DNA, 420 bp, Glycine max
ctgctggagctgatccattaacttttctactcctttagactggtggtccctaggctcttgaccttgacttgataaaacctccttttaagtgaaggcatttgacttgatcccatgttttactaaagtgaacaaaaataggtgcgaattaaaacttcgacatctatcattggtggaatggatgaatgcatgaagaaatgcatataacacagatgcaatttatgaatatgggagcccgagaaattgtctccttcttagatacaatgtcttggggtagcaaagtgctcgacgtatgtatttaagaaggtggcacggaccctccgttggtttgccaaagaagggatcacaacagaattcgtgagtgatgcatatgcaaaaggcgaaacacgggaatgtacagtatgacagtattcacaaaatata

SEQ ID NO: 144859 - DNA, 435 bp, Glycine max
  unsure (1)..(435): unsure at all n locations
agcttncatcactaggcctacaagctcctttgttttcttacatcactaggggtctgtataggtgtcatatcatcctatctgaatacttatctagtatagaactaaaccgcaaaagattggtttggttcaattctgattttattttaaatgaaaactgaaccggatgtatttttaaagcttgatttgagtgactttttgatcaaaaaccaaaccaaaacgaacaatagacattcctagtttgtagtgacatttaatatatcttcacccaaagtagtccatgcataagttcacaagtttttgcctccataagaattggagttccactgaaatgcaaagtcttggttaatatctatatgaaaatattttaatatataaataaagattcttttattgaaatcaaataattttttacaaaaatacattcttttaaacctt

SEQ ID NO: 144860 - DNA, 438 bp, Glycine max
  unsure (1)..(438): unsure at all n locations
agctngaattaataagcaacattgaagatgttttcattgttaccagtggtcctggtgcaccaaacattgattgtgtgatttcaactgtccaaatatgttgtcttgacataacttctggccttccacaagtctggccttccagtgaaggaatgaaataaagatcaaacatggtattgttgttgcatgccaagaatttaataatcacagattcaaaaattgataaatcttttctgaattctttcagcccttccgcaaagtagacttttgcctgatgctgcctaagcctgatttggtatattgttccatcatatctaaagttgacaaacttatggtattctggtgcccattgtcggtggtaaaaagagggcacttctataatgtcctgcaaataatcatagcaagaaagcaaatatgaaactatatgaagaatataaacaa

SEQ ID NO: 144861 - DNA, 434 bp, Glycine max
  unsure (1)..(434): unsure at all n locations
agcttaataatgtaagtataatatataaatgtatataggcagccaatgcaatgaattacttttaaatcttggaaagtatattaaaaccagctattcacaaaatatagagtgggaataaatggaagcccattaacagtcatccatgcatacaagtaccatagcctacagncttagagctaattcaagctcagttaaaacaacttagaatggtttaggattttcagactgcaaaaaattaatttcaactagttgataaagttaaatggataacatgtcccaataaatggaccacacttgatgtcagagcccatctacttcagaatatcaatcatgtaaatcttttttacctgcaaaaaaggtcgacgaagaagaagttcagcaaatatacaacctgcagcccaaacatcaactccaggaccatattgcttggacca

SEQ ID NO: 144862 - DNA, 437 bp, Glycine max
  unsure (1)..(437): unsure at all n locations
agctnggagttttcatgggtaaagatgttgctgtcctggttttggatgggagtgtttctttggagatttgggaagtggtcaaggctttgattgttaatggtattactgagcattcttgttattcaaacctgattacaaagttagtggaaaaaaagaggtctgatttgctctgtttatgcattacgcatggtttcgatcttggttcatcagaaatacttaccattttgaggtactttctttctccgtccaaagatgcttataacagtatggtaactgtgaagaaggattgggagtgccaagtgctgttggccattgagaaagcaaatgatagcaatctgaagaagtacttgcttacggcgaaggaggcttctattttgcttatgatggcatatgatggtttctctgcgtctgagaattgtttgcattatctgtttgca

SEQ ID NO: 144863 - DNA, 438 bp, Glycine max
accgcggctgcagcttgacaactctaggaaacaggatttcttctcttccacaatattatctgagggctggttctgcccttttggtaaggaacattgtgtggtcttgcttatcaattattcgttctggatatttttctgccgatacattcctctggaaacacaatccatctaaatcttttgcagaaatattgtcaatccaggccttctagttttcctaaatcttcccaagagttattcagtatcttagatgattctagtgaaaaaacatttttggttggatcaccactttcaatgcaaagatatgtgtttgatggagaggctggaaagatatggcttgaaccacaaaacctatatgcttgcacaagtgttttgctagagcagaatcttggtatttttttttacctcacttaataatgaaaaacctgcaatgttattttt

SEQ ID NO: 144864 - DNA, 431 bp, Glycine max
  unsure (1)..(431): unsure at all n locations
agcttatgttntaggtctactaacaaanaatatttactattaatatttataaaggaaaaaagcctcataataaaaaaaattatatatttataaaaaaaagtaaaaaaactcttctaaaattttctttaggactcgcttatcatttgaccagtcctaagaatactatgtttttcttccaattcacactatgcaggtgatttttctttttgacttaattgacagtgatataggggtccttatcaccattagacacatcatggtaagcaatatattttaaccttgatggatgatcactcttgatccacttatacttatttgatgactgaaaaattggaaggtcctgattgtatcatacaattgtttacaatgatcaaactcagtttagagaggtgatcaaacaacaactaaagtctgataataccaaggatttg

SEQ ID NO: 144865 - DNA, 441 bp, Glycine max
  unsure (1)..(441): unsure at all n locations
agctttggccttgacatttcttgtcttcctctctttgtgattctntagctaagccaccgtaggattttcaggcagtggccaaactgcatagtcttcttctatcagttcccaaagatctagtgctttaagatgagtagtcatccttgcagcccataggtcgtactcctcaccatcaaaaactggtggtggtattatgtgtgttgtgtttgcttccattatggtttctctcaactcacagatccctcaagataatgactaatttattgttgaagattagataaaagatagaggagagcagatatattttttaaggatgcatagttcttattcatttgctctttaaatagagctagagtcaaatatacaaaacaaaaaattccttatttttagacatgactaaaacagtttctaatatgataaaaaaatagaatcataactcct

SEQ ID NO: 144866 - DNA, 440 bp, Glycine max
  unsure (1)..(440): unsure at all n locations
agctntaggtcggttcatgcattcaagaatatgtatcttttgtaaaaaaatccagaagttagttcgacctcaactacttgtttaagggattaaaagttagtaaaaccctctccatgccctgtttttttatgggtgaataatggtatcattcgacccatattaatctttcaaaatattgaaatctatttaagatactcacctctcctaacaaatattttttcatacgtatgcgtcggacatcgaactaatgatcacatgtttaagagacaatattatctttcaaacataccacgttgttcgtcatgccctattttttaatacaagatttaaatnttatgttatttgaagagaatcaaatntcttgatttttgaataaagggaaaagagtgctcaatctcttcaaactttaatcanagggtcttctaacttgttaattgaat

SEQ ID NO: 144867 - DNA, 438 bp, Glycine max
  unsure (1)..(438): unsure at all n locations
agctntagtcagggaaagtaacccanatattttctatagtagggtcttgaaaggtcataacaagacttttctaaattggtttaaagatataatcttcgatgaccataatgcatctgaaacgttaaggaagttagcatatgggcctaaaagaaatgttataacttggcaaggatacgacatcaacaagtatttgttctacacaaaatcactagatgacaagagtacaatgcaaaaaaatggtgtaagtctaagggctaaatctcaacactttgctaatgtacatgatgacaaatcccgtgtagcttttatgccttactttggagtcattgaattaatctgggaagttaattatgtaaaattcaatgtctatgttttcaagtgtaagtggataaatagcaatatcagtgtatgaaccgatgattttactttggtagattt

SEQ ID NO: 144868 - DNA, 380 bp, Glycine max
  unsure (1)..(380): unsure at all n locations
agctngagatgaggaagtgttgaagggtgattctttctgcttttattgntgaccacagagtggtacctggagatatgtcgcgggggtcaggagaccttggggacgtcaggtggggtgctattgcccaaaaccaagcttgaccaatcccgacccaacccgggcatagtcggtcagtgagaacatgtgacgtacctaagcaggcgagctcctggcagtcaacagataaaaggaaaacaagaccacagagcaaggaggcttgtggtggctggccagctgtgaattttgtgtaatatgtggattgtggcctctggtaatcgattaccaagggtgggtaatcgattacaaggcttnaaaatgaagacagggggctaagatggtct

SEQ ID NO: 144869 - DNA, 455 bp, Glycine max
  unsure (1)..(455): unsure at all n locations
atccttaagcactgagctgcaacttgaagtaacagatgcctggttttcctgtaacccaactggccatgaaccaaaaatctgcacctgtcgccagactttgtnggttatgctcttctgcagatcaccatacagatctttatccttctttgcaacaatctagaggcaatgagcaacctgaagcatatgctgcaaacatttataatagactccctcagcagcaaaaccaacaacagcagaataattatgacctttcaagcaatagaccaatccagtagcaataacaacaacaacagcaacagcaacagccccaaaaacaacaaatagttgaggctcctccgcaaccttcccttgaagaacttgtgaggcaaatgactatgcaaagcatgcattttcaacaagagaccagagcctccattcagagcttaactaataagatgggacagttggctatacag

SEQ ID NO: 144870 - DNA, 463 bp, Glycine max
atccttaagtcacctgcgggctgcaagcttgcattgcaggttatcaaaagatgtgttattttcttgttcaaaaacttaagcttatattaagtgtcaacgattaaatgccttaactacattaaagctgcacaggataatacatagtttcaattccattcttattgaagttattcaacattacaagattacctttgaaagtccatcttgaaaaccccacgtaccagtaccactttacattgacattgataaagaagcctctttcttgcagtatcaaaaagatcactttttggtacttggggtgattgaagccaccatattttgctatgctttgcatttgtgaaccttctgtctggctttctgcctctgcataccaaaactccatattcatcatcaaatctattgcctcctgtcagccaaaactgatgtagtagccttgtaagtcagttgaaacttgaaacatagt

SEQ ID NO: 144871 - DNA, 434 bp, Glycine max
agcttataaagaaagatgatagcatgatttttacccaatcacattttgttgaaaacatattgaagaagtttaattattttgatgtgaaacctgtttctacgccttatgacttatccattaggttaaagaaaaaatttgagtaaagaaatttcttctcataaatattctcaaattattggttctttgttgcatttgacaaacttctctaagcctgacattgcatatgtagttggtagattaggaaggtaaactaataatcatgatcattctcattgaattgcatcataaagggtttttagatacttaaaaggaaccattaattataacattcattatacatcttttcttgctattattgagggatttagagatgcaaattggatttttgattctgatgaaacaaaattgacaagtggttatgtctttactttagt

SEQ ID NO: 144872 - DNA, 397 bp, Glycine max
tgccttcaccaacacaatgaataactgcgatcgagtaagaaaatgtctctttttctccttttccttttccttttcaaaaaacgttctggtgatacaaaataaataaaaaaatgggagtcgcacggctaatgattactatactccttatttatccattccaatggggccaccacatattgccacccatgcatgcatgaggaaacataattatatacgcacccaccttatatagcactgtgttatctcatctcatcctcggcattaaatagctcgcatcgacgttcaaggaaaaaggaaacatcccatctacaattgtatccatcatggtgctgcatttgtatctctgtacagtgggaattcaaataacattgcatagagacaaactacaatgtctcgc

SEQ ID NO: 144873 - DNA, 435 bp, Glycine max
  unsure (1)..(435): unsure at all n locations
agctntacatcttattcatcacatactttactaaaatcatacaactattttctctaaaagattctgtaaaaataaaattataatgaaaatgaaaattccaatacgaagttgcaatagctatcattgttgttccttcaaatacaataaatacttcagagttcatacagtggccctgcaccagaaaataaagattatggaaatatgtcaggagtattcgatgttcaatatattcaagttaatagacatgaagcctagacaaaaaatagtcattgcaatcccatagttgactcaaatttcaggcaagcaagatatacttatttatgtaaagcaacttttccagattatttggctaaattccaactacctaaaagtgccatgacttcttcattttcaatctctgcatcagtgaaagtcagggctttcttgcagttcctt

SEQ ID NO: 144874 - DNA, 309 bp, Glycine max
  unsure (1)..(309): unsure at all n locations
agcttctggtgggacatcttgacttgctntcttatctgacattcaccacagattctgccttcttctattttcagattgggaatgcctctaacagcacctttgtcaatgattttcttcatgcctcttaagtgcagatgtccaaatctttgatgccatattttgacttcatcttctttggaggatagacatgtggaggagtaactggtttcttgaggtgtccatacgtaacagttgtcctttgatctgctctcccttattaaaacttaactcttttcatgtgttcaccatcattattttcttctataatat

SEQ ID NO: 144875 - DNA, 438 bp, Glycine max
  unsure (1)..(438): unsure at all n locations
agcttctatataagctgaaccatgttatcaatttcacaagttgagntttattcagaaaattagagttcttagtgagagtgattctcctaaattcttgagtgattcaagaacaccctggctgtatcaaaggactttcacaacctttgtgtgttgccctcgctggaaagagtgattctttccttcctatcatctccaccctngttctttcaaaccacaattccagaaaatccacctctgcccaaaattatctcgtgaccataactcccatttcacacactcaaattaagtgattcttgagcctaaattgaatttcaaaacgagacctttcacctcgttttggaatcacctcatttggagccctgtagcttccgttattgccatttctatatttctgtccagccaccacttaacctacgttttaccatcccattcatccat

SEQ ID NO: 144876 - DNA, 436 bp, Glycine max
agcttgtgctataatatcctatgagggtgtttcttattgttctcaagactggactaatacatctgctgcccaagtgtcatgatcttgtccgtgaagatccttatcagcatcttaaggagtttcatattgtttgtttcaccatgaaaccccctgatgtccaaaaagatcatatcttctctagggcttttgctctttctctggagggagtggcagaagattggctatactaccttgctcctagggctatatttcgctgggatgaccttatgagggagttcttggagaaatacttccctacatctatgaccactgtcatcagataagacatttcacgcatcagacaacttggtggagaaagcttgtatgagtactgggagagagtcaagagattgtgtgcctgctgttcttaccaccagatatatgagcaacttctttt

SEQ ID NO: 144877 - DNA, 439 bp, Glycine max
  unsure (1)..(439): unsure at all n locations
agctnntgagcaaatcaaacgacaataacttttttctcggatgtccgattgtgtcccgtagtatatcgagacgctcaaaatttaaaacacaagctctgcgcaaaatcaaacgacaataactttttactcagatgtccgattgtgtcccacagtatatcgaggcgctcgaaatttagaacaaaagctctgagcaaaatcaaacgacaataactttttactcgaatgtctgattgtgtcccatagtatatcgagatgctcgaaatttagaacagaagctctgagcaaaatcaaacgacaataactntttactctgatgtccgattgtgtcctgtagtatatcgagacgttggaaattcaaaacagaagctctgagcaaaatcaaacgacaataactttttactcgaatgtccgattgtgtcccgtattatatcgagacgct

SEQ ID NO: 144878 - DNA, 440 bp, Glycine max
  unsure (1)..(440): unsure at all n locations
agctnnttgagggtgccttattgtgtgtttttttaccttcctaagaccatccataccctaaacctcccccaaattaggggtataacatgactaaaaccattatgctctcttaaaccctaaaacaaggtaagagatatatgaaaaataggcttaggggtttttaaaaaaacataattatcatttttttttttggctcacacaaggtgtaaaggataaattattgtcaaaggttggctttttggctaagtggctgaaaataaaaaaagtgccttgattgtttccacctcatgtaattaatctaatagtttaagaatgatgcaaaatcaggaaattaaaaacagatgttctctcacaagtaagtttcacacaactcactgggacaagacaaagatgttagcttaccgtgtcatgatttctttcagacaggataacctttcctt

SEQ ID NO: 144879 - DNA, 439 bp, Glycine max
  unsure (1)..(439): unsure at all n locations
agcttctaaggtcaacatcaaatctcaactctggccaaagataacatgggaaatccccaaaactgacccatccccagtgtatgttgcactaaatgtggcagaagcagaatatcacaacagaactataatgatgctatttatatgcctgaaatattgtatctcacctgcccacatgacaacaccaccagcattctcgattctcttccgctcatcacttctatttggtttatgatcctcagagagagcatttgctgccaaaataaaaaaaattaattcaagataccaatcttatttccaaaatgtattcaaatggaactgtaggagaaaatttatcatatgaccagacaaggactcttgtctgaaatgctgtatcttccacatgatctctgtatttacattatcaagcagctnttccccaacatcacatcattaagatata

SEQ ID NO: 144880 - DNA, 272 bp, Glycine max
ttaaaccctcattaatatttagctttaccttctctttcattgttgctgaaacctaaaccataaaattcttacaaaaatattaaaggtgaagaaaacctctataatctagaggggactcgtcacctctttgggagtttggcataaaaagtcatggcctaatatgaaaacctgtcacaataaaattcttatggtgtgcggaaatttattttcctgggtctttggcaacccaattggtatgaagggttgaaagcttttgggctatttttgatttg

SEQ ID NO: 144881 - DNA, 433 bp, Glycine max
  unsure (1)..(433): unsure at all n locations
agcttcaagatgagcagtcatccttgcagcccataattcgtactcctcaccatcaaaaattagtggtgaacctgctgtgtatgatgtttctccctccattgtgatttctctcaactcatagatcctttaaagataagagctctagataccaatttgttgttttttttaataagagtaggcagaaatattaaacaataaaagggagcataaagaaagaaattgagactgcaaaggcttactttattctgatatgaagtaacgtatttaaaagcatggaaaagataataactgctaacaaaaagataacatcactaacagaaagataacaccactaacaaatcatgcctagagaataggatcaaaactgctttatcctatcagtcaacatgactnttattttttccttataaatagcataaaaatctcatctact

SEQ ID NO: 144882 - DNA, 423 bp, Glycine max
agcttgatccttattatcaatcatgacattggtattttcaagatatagaatcaatttattaaacaaatccaattgttctcctaccaatctatctccatgcattttaaaaagaatataaaaactattttaggtaatgacgattaactaaagatttggtcatgtacaaaccttcaagctttgaccaaaccctaatagtaattgtttccttagagacctgtctcgacaccttgtctctgagatagaggataattgcattgttccttctacaatagtgttttcttatccccattaggatgctacttaaaagctacaagtacctttgagaaacatcatgggagaagcttttaaaagtcattgtggttgtcaacaatttcattgtcatgattgtgggattcgcacgtgacatttcaaataattatgata

SEQ ID NO: 144883 - DNA, 432 bp, Glycine max
  unsure (1)..(432): unsure at all n locations
agcttgtaggatgatggnggatctcttcacatgtggtactaaggggcgggcgggcaatggtgcaaatcaattctccacatccacaaaacacacataaacccaccatccccagttgcccaccttcactgagctcacgtactcccacgtagcccttatcctcgttcctgtcaacgccggggccccatcaatccttccacaacatccaagtaattcaacatccaagcatcatgaattaacacagccaagaaaacagggcggaggcagaaaactctacccaaaacacaaaccaatatcacagcttttcacactcaaataccccggtaatattctctgtgttccaatttgttaaccggtggatcgactcgaaaattttactggaagtctctagtacataagtctacattatgaccggtgggatctgttagcaaatgt

SEQ ID NO: 144884 - DNA, 357 bp, Glycine max
  unsure (1)..(357): unsure at all n locations
agctggagggtgatggacctacttcctactttaattngaaaaagaaagatcttttttttatgtctgcaaatttcaaatatcacgcccggctgcggagaaaaatatggaagttgaataacttangggaatcgaaacgtctctactcatattgaaatgatgaatataaaaaatagctgcagttttgaaagcgagagaggagctatgggaaattgggatattgaatatctttcggtgtgctcttaatatgttacctaacactggacttggatgaaacagatttgtctctaagtgcttggcaattgaattcccgtgtatgcttctgctacacagatgacattgagaaccaactcggacggg

SEQ ID NO: 144885 - DNA, 465 bp, Glycine max
  unsure (1)..(465): unsure at all n locations
atcctcttagtcacctgcggcatgcaagctttgtaagatgacaagccaatcttgttgtttactctntaacaagaacctcatgatttcatgctcacagtcggatctttgataccactctcacttgtatccatgttctacttatgaatgaaataccattatcttatgtttcttaaaaaaaattatattttatatcttttttcactattaaagcatttattaaattttcatcttacctttgttttttttaaaaaaaaaaccctaacttctattattaaaaaaacctaacttctattttttatatatattttatgcttttttacccttaaagtgtttattaaatgtccatcatcttattaccggttaccattgaagtcattttgccgctacactcacagctattgaacaaagagaggaacacactctacacaatttttcttttctataaaaatgttgagcctaaacatg

SEQ ID NO: 144886 - DNA, 370 bp, Glycine max
  unsure (1)..(370): unsure at all n locations
ttgaacaaggtatatatcatctttatgagctaactagagatttatatttatgaaacgaagcaaggcatgtgggtgcctttaaaactggatagtagtagccagcaatgtttaaggttttggacccttctttgatttctttcctttggctataaattatttttccattcctagcaagggcaatcatctctttgttttttctttaatatcagggtcacaagtatctatacaaatgagtctggtagctacttgaatcaaactgttccatgtagtgattgtccacattcacaatctggtagtagttgcaatgtggtaaaattgatatcaatatcaatatcatcaccaccccacatctcangggcaccaaacagct

SEQ ID NO: 144887 - DNA, 384 bp, Glycine max
  unsure (1)..(384): unsure at all n locations
tatataccatgcacgtgttaggtttggtgaaataattgaacaaggtatatatcatctttatgagctagctagaaatntatatttatgacacgaagcaaggcatgtgggtgcctttaaaactggatagtagtagccagcaatgtttaggcttttggacccttctttgatttctttccttaggctataaattatttgtccattcctagcaagggcaatcatctctttgttttttctttaatctcacggtcacaagtatctagacaaatgagtctggtagctacttgaatcaaactgttccatgtagtgattgtccaaattcacaatctggtagtagttgcaatgtggtagaattgatatcaatatcaatatcatcaccaccccaca

SEQ ID NO: 144888 - DNA, 470 bp, Glycine max
atcctcttagtcacctgccgcatgcaagcttcacatacatcacaacattgtcataacgtatttaccagccacttacctgtgtgtgtggtaagacagcggaatcagagtgttgtatgtaaatccactaatttgtgtgtcatacaggttaacaggaacaggatatatgccagctccgcggttcccattctgctcatgtagcggcagagtcaaccctggaactagcgcagggtacataccaggaatcatttgataatacccacccggaaagggcataaaattcgaaaatgcagggacctgagacaacaacaacaacatccatacaaaaccatgacgacgattcagatacatgcattttaaaaacaacaagttaaggcgcattttcattcacacttgtgttcacacagcaagctcaaaacacaagtacaaattaaagcatagaattgagctaaattaggttgttaacacataaa

SEQ ID NO: 144889 - DNA, 412 bp, Glycine max
  unsure (1)..(412): unsure at all n locations
agctnttggttttaaacacaaaatctttctaaaatcttttgtagggttttcttttttcaaatcatttctccttaaatcactgtaaagtaagacgtaatgagtataaagaggaaaaaacaatagaattatgtcagttcacccaaaatcacaaggccacattcaatcctcactcaaactagtgagatttcactaacacaacttcagttacaacaccacaacaccttaactcaaggtatcaacaacccataacttcacacaaattttgaaaacagcagctcaagctttaatcagtgacaatcccactgacttaagatacacaaagttgctccctctacacaacaccaatacttggtcttggattggagacttttctcatatttattaaagtgggttgtttgtgaagttactacac

SEQ ID NO: 144890 - DNA, 441 bp, Glycine max
agcttgatgaaagaaataccaaacgattttattattctatttcagcttgtagttgcttaatcgaaatgtctgacatttgttcccttctcaaatcacctgcaagacttgtctccaaagaatgtaactgagacacaaatgattttgaatatataaattttattaggacaaaaactatatgtttacattatcttcacatcacgccaccatcatttggaaataaatgttgagcctaagattgttcccatatcccttacgggaccatatttaggtattagtattttagcccacaatgcctatccctttttaagcagaggccacttccatttcacaattaactaccttatttaactaattgaattaaatctttgaaagataaatgaggatagtagttggttgatatagaaaagataaatgagctatgaaaggacaaatccttggggg

SEQ ID NO: 144891 - DNA, 441 bp, Glycine max
agcttgatgagcatcatctgaagatacaatcttcttgtgaaagcagttaaagttgtataatactatcaaggtctctcaaaatatattaaacattgaaaacatgtgtatgataacaacttaacaggaaataaaaactttaatattatcaaagaaatccattcgacactaaagattaataattaatttaagatggttgccctattgcagttaaattacaagcatagattatggatctaatgaatgaaaagaatactttaatttttagttttactattcagctgcagatcacatatttaactgaccttgtctacaaaaggatgctatcttcattattttgaaccaaccttataagaattcaaaagagtaccttgaacacagcaggatgcactgaatccagttggaaaaactttgattcaagtttaggaagctgagtccaacgtt

SEQ ID NO: 144892 - DNA, 441 bp, Glycine max
agcttaactctcaaattccccttcatccttatctcttttgatataggcattccttcattagggacaacaacctcagcaccaggtttgacaatatctgtcaatgggatcatgagactccttccgtccaaggtggtgagatccaacgttttaccagtaagggcctcaagaagggttatctcttggttgatcaccaaatcattaccatcccttctataaagagcatgcggcttctcatctatcacaaaaatgagatctgctgggatgacaccaggctcacggttacctttctctgggaagggtaattttgttcctttcttccagccaggttttatctcgatagtcaaaatctcctccacatccccacatttgctgaaatggaattgcatgtgtcaaatattgtcaaaaaacacaaatatccacttctcagatgtaaaagaacca

SEQ ID NO: 144893 - DNA, 439 bp, Glycine max
  unsure (1)..(439): unsure at all n locations
agctttcactacgcgctttctgtcgtgaaccttattgattcaatggtgngccacacgacctcacttcactgttgttntgccgttgctatgccgcctcactttgtctcttagctctctgtcgaggtaagaacccctctctcgcgctatggttttctagggttcataaatttctatgttcagcattggaacttccattgctttcattgccactgcttggttcggtctatgctaggctcttaatttgtgatctcaaaatatcaatgacaaattaattaaccaatctgacccacaaacaatgattaattgattaattaatttatagttacttttgtggaggttgaatccacggtccaagcaatgcccctttgattgcatcatgtgtggcttaagcaacaatgattaattaatttatttccttaattacttaagtgttctttat

SEQ ID NO: 144894 - DNA, 436 bp, Glycine max
agcttgcttctacaatataaatataacaacatttgtcctttattaaaatagtgaaacccatcatgtccaaacaaaaaatataaataatgtttctgctaattgctggaacataatagcaattatttaattccaaaataagccttgatgtaaattcaaaataaaagatcctatagctaatgcaacaaccttttctctatttcccactcactagtctagttcgcttttagtcaactttctactgtcctttagcccctgcacattagtaaaaatgtgagaaccatatccagtatcttatacccaggatgctaaagtagacaaattgatctctataacatgaatgtttgaacccaaagtctcacttcccttcttctccttgcactcttccaagtatctctcatgcctttcttgctcttgatagagcgtcttgtggtgcatg

SEQ ID NO: 144895 - DNA, 434 bp, Glycine max
agcttcaattccaatgaccaaagcatagttggtgtttatacataaaaatcatatccatgcaaccaaccagataagcataatcatatattcaaccaaggaaaattgaaatcccagcaagagaaaagagaacttgccttattaactagaaaacagtgagtaccatcaatgctgggaagaagaaactatccactttgttaagctcagttcaactcgtagccacttctattgtgtttaggtaagataaattgataaatttacagtaaaatattttcttcaaattaaattgttacaatattaattatttttaaaaccaaaaaattgattaattgcggggaatggttttaaagaagaatatttacgccattacctggaaaagattattctctttaagactgtccaacgcaccaagtgatgcttaattccaaataatatga

SEQ ID NO: 144896 - DNA, 369 bp, Glycine max
  unsure (1)..(369): unsure at all n locations
agcttcacacggttgacgttggatgtgtctattccatttgtcgttcaggtngtgttggcgcatagatatgctttggttgtgccaactataatgacatacttttggttctctcagcgctagagacacctttgacttccattaatagtgtacttctcttaaacattactagtggtgaacatatagagctggcatggcaacttgcacatatgggtgtcagctacgaagaactatatgttattaatgtgtttcgacgttggcgtctgattgaattctgcatcggccctatacaagagaaggcgggatgatcaataatcacatatccaattcttgggacaagttaatcaaatgagttcttaaatgtgcaggatt

SEQ ID NO: 144897 - DNA, 118 bp, Glycine max
  unsure (1)..(118): unsure at all n locations
acctgggtaatgatgcatggatttagtgtttacttggctctcaaactnggacaaagattgcaagcttccttttaatcaatggtcaactaacatcaaaaaaggcttttggtgtaaggtt

SEQ ID NO: 144898 - DNA, 413 bp, Glycine max
  unsure (1)..(413): unsure at all n locations
ntgttgtcatgacaacgatacaaggattacattatatcttgatgcaatgacatatctcatctccgntatatccatccacttgtccacactaacctaaatcacaaaaacatacatgtgtcagtcatgtaaacattatttataaaagaaaaagcataaaggaaataccttggataacccatccattggtagggacaacctcaactgttcaaatctctctgtaccaccaaagagctttatgtagtcttgcgaccatttgccaagttctttaatcaatttgttgcgcattagtgcccaagattcttctcccatacctaacaaagtggcaattgaccgatatccacagttaccatccgttttcacatcaacaacatcctcaatgaaaccctgtataaatggcgcaaatngatccaaca

SEQ ID NO: 144899 - DNA, 388 bp, Glycine max
agctgcatgaataatggcctgagcaaactgtttattcccagtatgaaactcaataaataggcctcctattttaaatggagagggttaccactactggaaaaccctaatgccaatcttcatggaggcaatacactttaacaatttgcgaagccatagaagtacgaccttcatgtaccccccatggtggtgggaatgcaacacttccaaaccctacaaaaagtagactgaaatgaaaaaacattattgccgtccatttaaagctaaaacatcattcttatgcctttgaatgatgatatttacggttcaattgtagatgctacgattgtggacacttaaagttcacataggacaatgattcaacatctagaaatcttactcagacttaatt

SEQ ID NO: 144900 - DNA, 380 bp, Glycine max
  unsure (1)..(380): unsure at all n locations
ngaacgtgatgctaagaccacatggaaaatagcctttaactcttctcatctaaggacgagttccatggtggtccgtgccttccacngcagccgccgagaggtaaggggagagatctacctcccagtacaaatagggcctcataccttccaagttacattccatgtgatggatatcaatccggcctacaactgtcttttgggatgtccatggatccactcactgggagtcgtcccctccacactccaccaaaagctgaagtttgtagtggaaggacactcggtcatagtatcacgtgatgatgatgtcctcgtaagttgcacttcctctatgccgcacatggaagccgccgagaagtcatttgaaacgactttgcaatctt

SEQ ID NO: 144901 - DNA, 371 bp, Glycine max
  unsure (1)..(371): unsure at all n locations
acctgcggcatgcaagctntaaatgtcataatggagatgaggtcttattatgtttttccaaccttaatcagttacaacatactgctttcttgtctagggaagaccaaaagagttaatgaatctcgtcatatacttgaaacaatgaaaaattctggttgtgatcctgattggctcagctactatctcgtggcaaaggtgttgtttcttaattggaaggtttggtaaacggaaagagatggtggatcaaatgattggaaaaggtttggtgccaaacccttaagtctactacacgttgattggtattctttgtgggattgacagggaaattatgctcttgaactgtttgagaaaatgaagaaaagctcaatggg

SEQ ID NO: 144902 - DNA, 406 bp, Glycine max
  unsure (1)..(406): unsure at all n locations
atgcagtttttgctcatactaacagagtgtattattgtttatctttncgattntgaaatgttgtcccttttaacattaaataatcactcctcaaacttactgattatgagaagtgtagtacagatagtggtggtggttggaaattcttttagtggacaagaaatatcaatggaacttgtgaaagtagtgaaggaactccacctcatttcaaaatcactngacatttatgagggtttatctaaagtcatatccaaacacgagaactttcatcttcgtccacaagtatcacttcctaatctttcaagtcctaatcctaagaaagatattcatgcttatatatgctagctaacctcacaacatatggtacattgtgaagatagagacccttctagaggatgggacggtc

SEQ ID NO: 144903 - DNA, 447 bp, Glycine max
  unsure (1)..(447): unsure at all n locations
agcttatactctntggtggagacccaagaatggtttntttttcttcatcttttgggtcttgacagttatcattgcttggtacatttggaaatgattatatttctctcttttcttcttacctaaaacacagtgaaaagaaagtgatacttttgtgattattagtgaaagtaaaatatggaaatagaaaattttcctcaaagcaaatagacctttaattttttattttaagaaaagatgttggcaccttcaagtgggaaatttctaatatataagactatttgccaagtaacatcagctacaaagaagacagacttttactttctggtagctctgaatttggttacttcttattcttctctggttttggggtttggaggtgttcacttgtgaaacatgtgaggtctggtgatatccaatctcttacatattaacaaaccaatggaagaa

SEQ ID NO: 144904 - DNA, 512 bp, Glycine max
  unsure (1)..(512): unsure at all n locations
acacttgaaactaagcttaatgaggtccttcaatggtgatnttcagccatggagttttctatgttatataagaagaagaggagagaggaggcaccatccactagagaataagccatggaaggaggagtttcacgccaatagagtgtctcggataagaaacttagagaggaagcttcaatggaggaagagaatgagagagagaaagggggggcacgaaattgaaggagaaaaaaatggagagaagttgaactttgaagtgtgtctcacaagttccctgagaaacttccttgagaaacttccttgagaagctttcttgagaaacttccttaagaagcttccttgagaagctagagcttagatatacacacccctctaatagctaagctcagccccatgtcaaaatacatgaaaatgcttagcttcacacacacctctaatagctaagcttaccctcatgccaaaatacatgaaaataccaaaaagttcatctacatagactactcaaaatgcct

SEQ ID NO: 144905 - DNA, 290 bp, Glycine max
ttgcacaatgtatgattgaaaaacatcgtttacatgacgttcattctcacttgtggcacttgcttaaaggcatctacaagaaagcatatggggatgatcctaaacgacgagtggtacctattgtacacgtccctctgctctaacaataaacactgttttatatagctaaaaagcctaaaaccttgtcaccaaaattacgacttttcgcccctactcgaagctcaagtgtaacaccaccttctgtttcaaaactcctaccctgattcacaaagataaaaaaaaatattttt

SEQ ID NO: 144906 - DNA, 246 bp, Glycine max
atggcttgacaatgtctccctattatttctccggtgatcgctggataatgttcatctaagtctgcttggatggagaaattcaaaactctgaaaaatcttaaactctcagaattctaaataccttaattgaaattctcttattttcaaaattttgtgtcccgatcaaaaaatttaaaattatgagaatgaaagaaatgaatgcaaaaagagaagatatgaatggtgtacgtgttcctctatgttcca

SEQ ID NO: 144907 - DNA, 423 bp, Glycine max
  unsure (1)..(423): unsure at all n locations
agcttccatcacatcgnctaattgtggtttttcaaagaattgttatctatttttacaaaagtttcttcttcagacgaaaacttatgttgattgcgaaaaggtttttaaaatagtctaaaatcacaattcaaccccctttcttgtgatatttgcccttacattttccttatcatgtttttttaacttagcaaagttttgtatagactagaacaagctctttgggcttggtatgaaaacttagttcatttatgttgggaaatgctcttgaaagaggaaaagtaggcacaactctgttatgcaaaaactatgaccctcatttcattttagtgcaactatatgttgatgatattatatttggtgctactaatgaaactctatgagaagaattttctaagttggtgtagactgagttcgaaatgagta

SEQ ID NO: 144908 - DNA, 400 bp, Glycine max
agtaaagattgattaggcaacatgtgtggtttgcttatctttaagacttaaagactctctgactaccaaattccttatacagtgtttctcacaaaggtcatggagcactatggtgtggacttcacaaatgaaaaattcaaaattttaacaagcaccaacaaagtggacaaagccttactgtcttgtatgggacttgttgagagaaactaaaggtgtttctacaatgaggaggcaccagagccagagattgttgcacaagctctataagtggaaatgaagcctctttctccttttgaggccatattgctcatgaaaatagatcagatttatagctggaaactcaagcaaaatgaagctcacaatgagtacatggaaaacatagtgagaggttggaaaacat

SEQ ID NO: 144909 - DNA, 381 bp, Glycine max
  unsure (1)..(381): unsure at all n locations
agcttctcgactggttgatgttcaacaacttatgaataaaccaatgtgtgtccaaaagctactcatttctctgtttccatcttccgtattcaccttctcctctagcaaagctcccttgtgcatctttagcaagctcacaagctcatccttagagagatttgtgtgggtgagtcaagctactttttcgagtatcggttcatgtatgactcacgctttcataattntcacctgtttttcatactctatttaaaagttcaagcatctttcttctttctcatactctttcatatcaagttagtttaaatggcgttgggtaagtatttaaaactcttagacatttttttacatgtgtgttccttgcagttctgagccaagttaatg

SEQ ID NO: 144910 - DNA, 357 bp, Glycine max
  unsure (1)..(357): unsure at all n locations
gtgatggtgttgagaagagatacatgtctgtcttcttcntttaatgggcgaatgtgaatgtatgtatatatgattttgatgatgtcaaaagaagaatcaaacaaggctcaatttgcttcaagagtaatacaagattgtttggacaaacaaagccttgattgaagatttcttcaagatcaatcctttccttacaatgaaagggttcaagtcattcaaggcacatgtaatctgataccaatggtttgaaagtgtgttatcgattacacatcatatgtaatcgattaccacagactctgaacgttgggaattcaaattgttaatgaagggtcacaacctgtcaagaaaaacaattgtgta

SEQ ID NO: 144911 - DNA, 334 bp, Glycine max
  unsure (1)..(334): unsure at all n locations
agcttataggtatntgggaagtatgtngtattactnttcccaattaacatatacctgctcaagggcccattgttttgccagccatgctttactgtcataccctaatttcgtctggggacaattgtttgtcgacataccggttttttctggtcacgttgagctgcttagagccaatttatgcacgatccgtaagatttcacgatgtttcagaaggaaataagccaaaaactcaaaatagggatgaactgatcaatttagggggtgttcttcagccctgcacccatcaagaagcttctacatgaagcaaccagctcgcctgggtgagcatgttact

SEQ ID NO: 144912 - DNA, 351 bp, Glycine max
  unsure (1)..(351): unsure at all n locations
ngatgttacgctaagcctcgcatctcaggctaagcgcatatttcatgaaagatattggggttgcaaaaagcgctaagcgcagcctgccgcactaagccccaaatgcttacgggattttacaacttcaagttgggcttatcatgaggctaggctaagcgctagtgttttaaactcaaacgtcacattggcacgctaagcgcatctgcgtgtgcgcgccatacanaattcattttttaaaaatcaaaggtagaggaacttgggttgctacccttgcacccaaacctctgcaccctctcatctttgagcattcttttactttctgctgtgtgtgtactgcttctcagcatcatc

SEQ ID NO: 144913 - DNA, 209 bp, Glycine max
caaagccatgcgcttagcccaacctcgcgctaaggccaattacaaattcttaaattccaaacagttttggggcttagctcagtaggccggcgcttaatggtgacttcaacccaaaatagttctgcaagctgcactcagcgtgagattgcaagcttagctttaaatcaagctctgacttatagggatagtccaagcttagggcatcaacc

SEQ ID NO: 144914 - DNA, 439 bp, Glycine max
  unsure (1)..(439): unsure at all n locations
ntttggagtagaaacctgggaccaacttattntatttcattaaggaagtcatatctagtcaaggtctgagagaccatacaagtttcctaacgatttctaattatgtgggccattaagtctatcatatgctgacaatagccgagaagcccatgaatctcttctggggcggagtaggtgtctgccatcgccttggccttggctaacaatcggggaagttcttgactcccgttcaaggtaagagcaaaccgatccatccacatggttgcctcttggtgtaaagagtcgatcacccttcctctagcctctttttccgcatatacttgggcatactcatccgcgattctatgctcgtgggccgtggctagacccagctcttcttggtacttggcgatgatagctaacatgttggtctctgtctcacatagacgctgagacaagc

SEQ ID NO: 144915 - DNA, 273 bp, Glycine max
agcttatatattttgtgcctactttaaccctttcttgattgttaactatatattggaactgctattactcattgaaggcgagtcctctagcttatataaatcagctgatgcccgcgtgtctcgactcatttttcatgctattgctggaatcatccaaagaacggccaaaggttctgtctgccattgtgcaatctgcagagctacaaacatcggtttatgcattccaaagcagcgaaacagtgccacacagaagaggatctatactattggatc

SEQ ID NO: 144916 - DNA, 108 bp, Glycine max
cttgctcccgtatccacttgataattcaatggtagccataaccccagccaaggttcatcaacctccatttctccgacaatacgattcgaacgccacgtgtgcttgtca

SEQ ID NO: 144917 - DNA, 441 bp, Glycine max
  unsure (1)..(441): unsure at all n locations
tcttcttcttcttattgggtttctccaccaccaaaatccacacttttaatctcttgtggctcttccactcaagaaaagcctcgcacacctcacacacccacttgtnctcctcatgccgtagtacatcgggtggaatgttcaatgacatcatgttggatgagctcaaatctagggttgccaaaatggtgcatcatgttctcttttctttccatgaagaaattgtccaccacaatcatgttgtcccctatcgcaatcaactcatccaccaggtgtgaccccatgaaccccatgtcccccgtcaccttgacctagaggcccttcctcttaatccccaacgacaccttccccacggaatgcactaccgcaaccacgtgatggtggtaggatggaatctttcacttgcgctcaaagtacgagatcgggaaagactcgtacaaaatg

SEQ ID NO: 144918 - DNA, 399 bp, Glycine max
  unsure (1)..(399): unsure at all n locations
tttcttcaaaggactttattcaattcaattatccaataaccactgcacatatgaatttcatgatgagtagtcacgtacgcggaacaaaatataaatgttgtgaaataaaagtgtcaatatgtgtacgtgtatacaatgcggcatcaaaaattttaagaaaagaaaaaaaagaaatcaacaagattggaaggtcaatatatccagtataaataaaatcacttccacaccaattttatgctaaatataaagaatcctaattcctaaggtacacaccncacacaagaacacatcaatttacaacaaattcgcatcgaaacaccaattggtccatcaaacacactcaatccgcaattaaaacatgaaaaacataattgaactcataaaacaccccaaaataac

SEQ ID NO: 144919 - DNA, 407 bp, Glycine max
  unsure (1)..(407): unsure at all n locations
agaggatgcttcaatggagganaagaaagagggagagttatagagtggtgggagcacgaaattgaatgaagaaaaagggagagaagttgaactctgagttgtgtctcacaagactcttattcatcaaagttacaacaagtgttacacatgcttctatttatagactacgtagcttccttgagaagctttcttgagaaaacttccttgagaagcttgtttgagaagaattccttgagaagctagagcttatctacacacacctctctcataactaagctaacctccttgagaagcttcctaaagaagattcctaaagaagctagagcttagctacacatacctctctaatagctaagctcacctctttgagatgagaagctagaacttagctacacacccgctataat

SEQ ID NO: 144920 - DNA, 207 bp, Glycine max
gagcacgtatcttctacccgatatgaagagaagatgactcccgtacctctcgagctatgagtcaatgacctaatgacctctaaagaaactaataacaggactctatgaatccatgcaaaatcattgcgactactacccgaatatatgggcaaggacaaatattgccaaagtcctacgcgccaattctgttaggcgcctctcatcacg

SEQ ID NO: 144921 - DNA, 343 bp, Glycine max
gcttcatgagagagtcaagataaattgtttgaaaaatattatctatgctaaacaagccaacaaagggagaaagaaggttgtcttcgaacccggagattgggtttgggtgcacatgagaaaagaaaggtttccggaacaaaggaaatcaaagcttcaaccaaggggagatggaccatttcaagtgcttgaaagaatcaatgacaatgcttacaaagttgagctgcccggtgagtataatgttagttccaccttcaatgtctctgatttatctctttttgatgcagatggagaatccgatttgaggacaaatccttctcaagagggagagaatgatgaggacatg

SEQ ID NO: 144922 - DNA, 386 bp, Glycine max
  unsure (1)..(386): unsure at all n locations
tcaatgagtaagacaaatatattgcacattacatgccaaccatcaaagaataaaatagataactagtagaagcagatatttcttttctcttttcctatggccttttgagacagagcaatggaatataaatgttaaaagtgaaaattctgtctaaaacaacaaaattatatacatctccatcaattgcaaccaaataaggcaaaaatatgtataaaagagtcttgaaagatgaagagaacaaacagaaaagntaatcaacctaactatataagaactggacnagtgagaaaataccaaaagcaatatattacactactagtanacccatggtagtaaatattggatgagttgcgatacgaatcgtactatacattacgagtctcatg

SEQ ID NO: 144923 - DNA, 406 bp, Glycine max
  unsure (1)..(406): unsure at all n locations
tttgtgatgagncccgaacctagcatccgtcgcaacataagatcttcagaatgcggctcacatcctgtccaacgacaataatgcaccgccttgtgttcacgagaataatcaatcacacatcaattcttagggatgcatcccacctatgattgaggatcccctatctactaatgttccaaaaaaataacagtataactcctttatattctttaacagacccaccttgtatacttgatcatcaacgataatggactttaaattgcccaatttgctgataatgcgtctgagtaatatatttcagccttgggggtataagaaacaatcccataacataaatatttatgtcggacacacgaacacttctgctggtgacaaaggttctaatgagtcatgagtcattatgcat

SEQ ID NO: 144924 - DNA, 391 bp, Glycine max
  unsure (1)..(391): unsure at all n locations
agcttgagagatcatgcaagtatatttttttttacaatacaaacaacaaccatttgtctctatctcgctttctctttctcccagtccaatcacccattatccttacattatcttcactattattagtcacatcatggttttcaattttcaatcatcaaatcatgatatctttcaactcatattaaattattaacacagactaaaaagggtcttattatatttatacacacatacaccaatataatcgcctctacactctactatattggtgcgcttgcattatcatttatcaagaaccaaggccaaagaacacatanaagatgtgtctagagtgtgagtgagggaggcaatatacacagaagagagtctaatataataaaggacactgatc

SEQ ID NO: 144925 - DNA, 305 bp, Glycine max
  unsure (1)..(305): unsure at all n locations
ccttgatattcccccttttccctggttctcacacacttctccaatatccagctgcacctgtccattatgttaactccttcctttccctccaaacagatttctccaaacacaattcccttcttgtcccctcatttcctgcctctcctccggtaaaaacaaaaagtggaggcccgtgatttaagggcctatcaaaaagtctagctctcagtcaaactaattntagctagattcacttttagaaagaaataggtttaatagcctcaaagaacttatgatatgaaaaaaaaaaatccacgcgtcaaaat

SEQ ID NO: 144926 - DNA, 340 bp, Glycine max
  unsure (1)..(340): unsure at all n locations
agctttgaccaaattcaaacgatgataactttttactcggatgtctgattgagtcccgtaatatatcgagacgctcgaaattgaatgttgaagctctgaccaaattcaaacgatgataactttttactcggatgtctgattgagtcccgtaatatatcgagacgctcgaaattgaatgttgaagctctcagcaaattcaaacgataataaatttttactcggatgtctgattaagtcccgtaatacatcgagacgctcgaaattgaatgttgaagctctcagcanattcaaacgacaataattttttagtcagatgtctgattgagaaccgtatatatcg

SEQ ID NO: 144927 - DNA, 438 bp, Glycine max
  unsure (1)..(438): unsure at all n locations
tttgatgcacattnggagagggtaatgaaacaacgagattatgctctccatgagagggtggatcaaatggagaatagagatcataatgaagaagaaaggagaagagggaatgatggtgttcctagacaaaaccgaattgatggtattaaacttaacattcctccctttaaaggaaagaatgatcctgaggcctacttggagtgggagatgaaaatagagcatgttttctcatgcaacaactatgaggaggaccaaaaggtgaagcttgccgccacggagttttttgactatgctcttgtgtggtggaacaagctacaaaaggagagagcaagaaatgaagagccaatggttggtggccggagatgaaaaggatcatgaagaagcggtatgtgtcggctagttactcaagggatttgaaattcaagctccaaaactaac

SEQ ID NO: 144928 - DNA, 327 bp, Glycine max
ttttatccctcttgggcatatgcagacccttcatggattctcaacatccctgttactctactggaagctgctgtttgggtattccttacctactatgttagtggatttgatccaaacgttgggaggtaaagaaactgccttcacaaataaagagcatggcgaatgttgctgcttttactaaattggatgttacttatgatttgacatcgtgaattatgtgcaagtatgtcaatcaatatctcattctactgtttattggccacatggccttcgcactatttcgtgcttttgcagcactgggtagaaacaatattgttttcacacatt

SEQ ID NO: 144929 - DNA, 434 bp, Glycine max
  unsure (1)..(434): unsure at all n locations
cccataatattccgaaccaaatgtagcaagacctttgcacggcgccttgaaaaaggagattaacctttatcctaatcaggaaaccacagatagataactttatatattaaaatcttgcttcttcctattcctataagctgttttaaccaaagtaatctatatcttgcaagtgagaacacaatagtgcgttntataacaatagattatttagcacatcatttacatgaagatctagtaccaataacaacaatatgtaataccaattcccaaagtagtccactagagggttgaattcagcataatatacaaaacatggcattaggaactaaatccatgttcacaaaatagttactaagttaggtaacagtgcattcagaacagaagagtattcccagaacaagaaaactactaatatctaatttcgagttaacaca

SEQ ID NO: 144930 - DNA, 301 bp, Glycine max
  unsure (1)..(301): unsure at all n locations
agctggtagcanantcaaaccacaataactttttactcggatgtccgagcgcgccctgtaatatattgacacgctctaaatagaacacagaagcactgagaaaattcaaatgacaataacgttttacgtggatgtgcaattgtgtcccgtaacatatcgagatgctccatattgagaacagaagcgcctaacagatttcgatgacaataactttttactcggatggccgattgagtcctgaagcatatcgtgacactctgatttgataacagaagctccgtgcaaatcctattgaggacaa

SEQ ID NO: 144931 - DNA, 432 bp, Glycine max
  unsure (1)..(432): unsure at all n locations
cttctgttttcaatttgagaatctcgatatattacgggatnctttatgacatccgggtaaaaagttattgtcgtttgaatttgctcagagcttctaatttcaattttgagcgtctcgatatattacgggacttaattggacatccgagtgaaaagatattgtggtttgcatctgctacgaactttcgttttcaatttcgagcatctcgatatattgcgggactcaatcggacatccgataaaaagatattgtcgttngaatttgtcaccagctttttgtttcaattctgagtgtctcgatatattacaggacttaatcggaaatccgagttaaaagatattgttggttggattttgtacgagattttgctttcattttcgagcatctcgatatattaccggacttaactcgacatctaaggtaaacagtatt

SEQ ID NO: 144932 - DNA, 324 bp, Glycine max
  unsure (1)..(324): unsure at all n locations
agcttgcattatatatagattaattaaaagatccctcgtcctatgctatttgngttttttaatcccctttaatctgaagcagttcagggaaaggaatgaaagtaccaaatccattgtgtgatgtggccactggccaacatgttttgcaaatttgggctggatgtagatagcaaacatttgttttgggctcatggatgcccaataatatttgtagaatccccatgccacgttggtggcataaatcttttcttatttttttgatcacgcaaattagatgtctatattatatataaaagtacccctggtcctgaaatacacgataca

SEQ ID NO: 144933 - DNA, 247 bp, Glycine max
tcttcacttaagctctggtggaacaattaatatttgccttaaatgcacgttctttcttttgcatgggaaccactatatttgggtttcgtgtggaagatttcacccgaaaaatcacttttctttgatcaaaggcgtggcaacaaaatgtgttttttgggggagagggataactttttcatcttgaatttcatttattcttgatgagtttcgaccgatcttaagagaatgtgtttataaaataaatatc

SEQ ID NO: 144934 - DNA, 383 bp, Glycine max
  unsure (1)..(383): unsure at all n locations
cttctgttatggatttcagaactttttattgtttttttttacgnnctaaacttttttaatggattcttttcctgganaatggattctttttgcggaaaacattttttatgcagtaaaggagactgctaagaggctgtttttcttaatatagcctatcccttttattccaatttgtttatttgttcctacagagatcgagtatattctgttgcattcagtcccaatggtgagtacatagccagtgggtctcctgacagatcgatgctcatatggtccttgaaggaaggcaagatcgttaaaacctacactggtgatggaggcattcttgaggtctgttggaataaggacggtgacaagatcgctgcctgttntgccaataatac

SEQ ID NO: 144935 - DNA, 365 bp, Glycine max
agcttatgcgcatacttctttacgaacgttcacttgaacaagacattcttataactaagaaaaatgcacccatatacaatcaaggcaccttcgttacctagattatttacatgtacttccaaggtgtatttgttacctacatcacacgcattttctttgctaaatttacatacatgcatactcaaagcactttggctatcaaaaattgcatacgtgcacattctggtatttctaatacctatacatacacaaactttgtgatgaatcttggctatctacacaataaggtgatacatttcatgctttactcaagtttttgctacctaaagccgcatgccaaatcaagtatattttcttttgctgac

SEQ ID NO: 144936 - DNA, 365 bp, Glycine max
agcttggccacctaaaggagttcgtccacaatccatagtcacacatgcccaagaatctgtacaaaccaaaatatagtcaagggaaggaccaagaacatgcaggtcagtcaaaaaggtggaggagccgaagccgctcgagggagagagaggagagacccctcgactaaccaaggcgagtcataaacaccatcactggaggttttgctagtgtaggggccactacctctacgggaaaaaggcacctacggctagttcgattagtcaaatatggtctctcgactccaagtatccaacatgccacccataaccttcatgtcaaatgacttcaaggcaatcaatccagtgcaggatgaccccatggttat

SEQ ID NO: 144937 - DNA, 378 bp, Glycine max
aacgttgtctctagaacatttccattggatttaatgatgaaatctgtgcattttcacgtgaaaaaaacgctaagttttgaattgcaaaaagtatcagttgggctaagcttagtagttgggctaagcgcttatccacttctaagcgcagctgtagcacgcttagcgcaaaggagaatctggcagaacattagcatcaaagtcgtgcgctaagtgcgagatcactatgcttagcggagcaagtgcctttagccaggttaagcgtgtgactagcgctaagcccgaatccacttaccccctcaaagcgcgaaggaggcactaagtgcaacgtcctaatttcatagcctatataaagtctgcttgtgcagaatacggtcacac

SEQ ID NO: 144938 - DNA, 211 bp, Glycine max
tgcagctggatgattggtcttaccgacaattgtataagtttgtctaaaagagcagatctgttattatgctttgatcatgccaaaaaaaacaagggcgactgattagggtcacaatgagggagaagcccatgctgtgactgccattcctattcaaccaaattttccacccacccaactatgtcatttgtaatgccatcaacaacatttctct

SEQ ID NO: 144939 - DNA, 411 bp, Glycine max
  unsure (1)..(411): unsure at all n locations
ntcttaagaaaacttccttgagaagctntcttaagaaaactttcttgataagtttctttgagaaaacttgcttgagaagctagagtttagctacacacacccatctaaaaactaagctcacctccttgagaagcttccttgagaagctagagcttagctacacacacccatctaaaaactaagctcacctccttgagaagctttcttgagaagctagagcttagctacacacccctataatagctaagctcacccccatgacaaaaaaacatgaaaatacaaaaaaaatcctactacaaagactactcaaaatgccctgaaatacaaggctaaaaccctatactactagaatggccaaaatacaaggcccaaaataagaaaacaacctattctactatntacaaagaagag

SEQ ID NO: 144940 - DNA, 382 bp, Glycine max
  unsure (1)..(382): unsure at all n locations
agcttgcacagttnttattaggtattaattgttctgcatatctaacaatcgtggttttaaattgctgttgtcgttgcgatccttgacattgcgtgaaaatgtgtttgtcatgatttggttgcagagaatcgtaaaatctttatgttgcggtcgcaattgtggttatatatggatcatgatttaaaaccatactaacaattttgcgctttgtgtttatcaatcgattaattgatgattgaatgtgaaaattaatagaagtttttggcaatgtanggcaatgagaggctccaacaactcaagaaggggcttatcaaaccaatacgatggtccatgcaagggcgacaaccccattgacaaatgttggagatgtgaccccaattgg

SEQ ID NO: 144941 - DNA, 396 bp, Glycine max
  unsure (1)..(396): unsure at all n locations
ngtcagcaaggttacaaagcacaactgttggaatcaatgatagagcgtctaccatggcaacccccaacaagttggaaactctttgattgtagaaaagaaattaactttacaaatcaaattcattttcggatcttttcttgctccaaaagaaacattttggtgttttctttttgtaggtttccccccactctcttattttcaaatctcctttccttcttctcatcactctcggagaatcattcgaaacctgccacaataaccaaaatgaaacacataagcgaagaaaaaaaaactaaaaccctttaagagagagaaaaggaagttacagggtcttggaggatttcacagcatggtgcaaggtaagcacgagcacgtcatcatggtggatctggtctt

SEQ ID NO: 144942 - DNA, 338 bp, Glycine max
agcttcgaaataaaaaattaaccggtcgaagtacgatgaacatcgaagaaatgatgaagaacgacgaagaacgttcatggaattgatcacggaaacgtcatggaagcgttatggaagcacctcggcgttgatttttcttcctttttctccttctcactaatttcagttaaatatgctcactaagtgatgtaagctccattggagcttgtaggcctaggatcttcttcatcaatggattcctttgcttcttggaagataaatggcagcggaatggagaaggaatagagagaggagacgccacttcaaggagaagatgagtctagaagaagctcaccacc

SEQ ID NO: 144943 - DNA, 419 bp, Glycine max
  unsure (1)..(419): unsure at all n locations
gaccttgaaactaagctttntgcaaggaagaacaggaagagagatgagaagaaatgttttcttataagttcccaacaattgttaaagagttgtagaagttctattgaatgcaagtcaaggtcttacttttatagactcttcatgtttggtggagaaaaccattggaagagttataaccttgagaaaattatgtcaagagttacaacttttgaccttttattcaaaagttatcactggtaatcgattaccataatcatgtaatcgattacacaatgcattttatgaaaaggtgtgactcttcacaattggattngaattccaacattcagatacactggtaatcgattaccaatatagtgtcatcgattacaccatttgaaaaatattttggaatgctgcatatcagttaaaaacatttt

SEQ ID NO: 144944 - DNA, 419 bp, Glycine max
  unsure (1)..(419): unsure at all n locations
agcttgcttgtttatcaactcttaaacctagatgactattatttttacgatttcttggcgttggcaaaatttggaaaaatacttgatagttgactttttagtctaaactaaaattagaaaacaaaagaaaaagtaaaaagttcctctaaatcataaactttcttgtgttctctntctcgtttgaaatgttagaagaaaaaaaaaaatacaagatttcacaaaccccacctaattttaaactagttgaaatcaaatataaggcagacaactacaatcgtctctactcccatttgcaacagtttttttttatagaggaattaccactctaatgtacaagttcagaaaacaatttctgaatgcgacgaaattgtgccttcacgcttcccattgagtgattctccactctcatcccagctaaa

SEQ ID NO: 144945 - DNA, 427 bp, Glycine max
  unsure (1)..(427): unsure at all n locations
ctgttgttctgttctgaaaaactgaaattattgcatgttagcaaaggaaaccctaattagtatactatagcagcaagtttgaaatgctaacgaagaatgccagagaacaaagtttttgtaatcatgcagacacagattagttgtcttgggaggagtgtagtttatatatttttaaagtctgtggaatattgaattggatttatggcacatctaaccttttggctctggtattcacacttcatagtaaaacagtatttgctggaggctaagaaatgcatctttcacaaaacttgctacaccataccatatagatgcttagttccttattccactgagatggaaatggaatgaagtctgttctagtttttaaaataaaatggtaaacgaaggattaattcanataatattacttttttagtaaacattc

SEQ ID NO: 144946 - DNA, 290 bp, Glycine max
  unsure (1)..(290): unsure at all n locations
agcttgttgagatggttgttgaggtggtacttaactactggacaatttctcagtagtatttctctgcaaagtcacatctcttctccctaaattgattaattnttttgtccctgccattatcaaaataggtggtggtctctgtttcttttgttttgtcactattgcttctttctccaccacctggatcatggntcttgatctgtatatttgntaagnggaagtggcctaatctggaatgccaagtggcaaaagaaagatcactattagaaagagtattcgcatgagacaca

SEQ ID NO: 144947 - DNA, 411 bp, Glycine max
  unsure (1)..(411): unsure at all n locations
tattcggaccatnaatctcacctgaatacccctggaaaagttggtgcttggttctattgagctattacaaataattttgagaatatgtgttgttacttgtgagtttggattgctctagattgactgggtgcatctatgacgctaatttgttgatcactcatacactaaaaaaaaaaaaatcttgactgtgttctcttccatgtttaagtgaaagaaaatataaattatattatccccttcttgtgaatctcactagtgttcttgctacacggaattatgaagcgttgttctttttgtattttcttccatagactgtagccatgaggcttgagagacatgttcttgaaaagaagctgagaaggaacatccaccactggtatgaatcttattcattattgcatcctgaggaac

SEQ ID NO: 144948 - DNA, 379 bp, Glycine max
  unsure (1)..(379): unsure at all n locations
agcttgttaaagcccctttttatgcatctggtcgtgtattnttggaggtattccccacatttgttgctcagnggtttacgattccgtgcacgtctgtcaaaacttgttttgtagcactttcatgataaatattgaagagtaatattatgtctttttactattcctcttaatattttatgaaaaggatgttaaatgacatagtaaattaataatgtaatattttgacatctttaaaagctttcaatattttggttgtcgtctaataagtaagaaagatttagaattgtttaagacaactctatccaattataaagagataaaatagaagtgaaagtataaaataagtatataattgttaataaaaaaaggtaataatata

SEQ ID NO: 144949 - DNA, 314 bp, Glycine max
tctctctctcgctcgctcaattgttccttattttagcacataaatgctttattctcctagctcatattcttacctgagggtcagaggcctctattttgcaagtccctcctcttatcaaaggtacctctctaagctgacatgtgaaggccgagaccccattttagccacattcaccttgacgtgtcacgggtctatattttgataaaaacatcattcgtgccaatatttaatgggcttaacttctttaactagaatgaaccagtcccatatcacctcggtgtatggatcttgatcttgctatattgtgagaaaaa

SEQ ID NO: 144950 - DNA, 374 bp, Glycine max
agctcggagccacattgacctttactttgtgctttttttttttttttccttcaggctttgtttagcttctcttttcaaacatgggttgtgtccatggcaagtgctgtacccgttacccttcaccctcagtgagtggctctagagacttcagagaacttggaccttactgtgcccaaaggaagcacattctcactcagagtttattgcaatttgttcctgtcccttcccataacttcactttggaatactctgtgctcactcagagagggtactatcctgattcacctgataaagaaaaccaagatagttttagcattaggacacagtttcaaggcaaccccagtgtccatttctttggtgtctacgatggacat

SEQ ID NO: 144951 - DNA, 322 bp, Glycine max
  unsure (1)..(322): unsure at all n locations
taannataattaagccgattgcttacagcttattcacagtatgatcaaaatgctgccttgttggtaaactagactaatagatcaaaaaagagtaaattaaggtgaataatgaatagcagacaagttgaaagtacctccaaattgcgatgtggaggtgaaacttgcttgactatgtatcttagcggcaatgtccggggttccttcctgtgccaaactcaaatgcaaaccaaatgttacgtcccccagtaacattcgaaataaatatcttatttgttagctactactatcatagacaatgcaaacatgctaattatttttttaa

SEQ ID NO: 144952 - DNA, 410 bp, Glycine max
agctagcttgtggagcttctattgaggcttgttctttgagcttcaatggggtcctttaatggtgatttataccacttgatggaagcttgcttgtggagcttctatggaggctggatctttgagcttcaatgggatcctttaatggtgattttccaccatggagatgcaccggaagacaaaagaaaggaggtgagaggaggcgccatccattaatgaataagccatggaagaaggagcctcaccaccaagatgagccttggataagaagcttggagaggatgcttcaatggacgaataaaaagagggagagaaagagagaggggggagcaccacattaatgaataaatagggagagaagtggaactttcagaatgttcatagactcttttcatcaagttcaacaggtgtac

SEQ ID NO: 144953 - DNA, 345 bp, Glycine max
  unsure (1)..(345): unsure at all n locations
gggagaatgtgaatgtatgtatacatgatnttgatgatgtcaaagaagaatctaacaaggctgcttcaaatgataagcatttgcttcaagaataattcaagattgcttcaacaaacaaagccttgtttcaagattcactaaagaccaagccttgccttaaaacaaagtgctttcaagacatgcaaagctcttgtaatctattaccacgaagtgtaatcgattacccgaagacagggttgagaaatagctgttgaaaaatgttctgaatttgaattttcaacatgtgatcgattaccatatgtctggaatcgattaccagccaccaaactttgtgaattcaaattc

SEQ ID NO: 144954 - DNA, 431 bp, Glycine max
  unsure (1)..(431): unsure at all n locations
ctaagctatcaacagattctagaatgacccactatcctagaatttatatcacttaaagccattaacctacggaattaaaaaaaacttaatggctgagtgtaactgagattgtggcaaccaaaagtcaccccaacagccaacaagtcagccaccatttggtctcccaaaaggctgatgcctaggttgccaattaagcccttattacaacttgaactaaacctaactaaagcccttctagttgattaacccaagacatatttttggtcagccaaatttacaaggattgggccattatttagacaaactaaacactctaaaattgagacaaagtggagccatttaatcctcctccatttgggccatgatacaactcacaaccttggactcttctccttgagacttgngctagtattcaaatagtatggacaaca

SEQ ID NO: 144955 - DNA, 277 bp, Glycine max
agctctgagccaaaatcctgacttatcatatatcttgacccacggtgagaatgccaatccttaccctcggaagctaaaataaatgagaagagaaggaaaatctcctatctcatgaaaaaggagaatgataattttctatcttaaaggaagctttaaaatgagagaacgaatatctccaatctaagagaaataaaataatacgaaaggaaatctccttctaagagtgggtgaaagtataaagaaaatgaagaaaacttcctattcaagaatgggagaa

SEQ ID NO: 144956 - DNA, 260 bp, Glycine max
acattgatgtttgtatttatgggaggatgttacatgccacttttgctttaagagtaatgtcccactaaaactaactttccaaatgtttgccttctcaagaatggcaccgaagaagcttgcctcaaagaggtccaagaaagacaaggcggccgaaggaactatttccgccccggagtacgacagtcaccgctttatgagcgttgtacaccagcagcgtttccaagccatcaagggatggtcgtttcttcgagagcgacgcg

SEQ ID NO: 144957 - DNA, 368 bp, Glycine max
  unsure (1)..(368): unsure at all n locations
tgagctcattggtgctgccccacaaagcttctcggaacttatctctgtcatgctcttccttgcaagccctcttggtttcttattcaagggctcttgcagtaactgcattttcttctcgtaactcggcacactcatttcggacgtctgtagcgactaacttgaatttttctttggcgagtcttgcctttcctagctctatctttagagctcggacttcttcatcctctttcggagcttcgaagttctccttcgtgataattttcaacttggagagccaatctaaccctcgtgtatgaactttcagccattcatgataaccaccgatgatgccattacagatgcccctaagttctttatctttncttaat

SEQ ID NO: 144958 - DNA, 412 bp, Glycine max
  unsure (1)..(412): unsure at all n locations
agcttgttgagggtctccgtcagggcctctatctgtcangccatatagcttgttttaggtcagcattgcatcttgggttgtgagttccaaaaggattttctttgttggcgtggatgttcaatcacaaaggatggcgtgatcattggccgtcatgttttctatcacctccattgcctcctctggtttcttcaacttaatttttccccctacggatatgtcaaggagttgctttgactgtggtcgcacgctatctatgaagatgtttaattgctcacgctcgttgtacccatgtgtaggcgtctctctgagcctcgctgagtgattcatcacgaaattgatggaatgaggattatttcatcttcccctctgcagtctttgactctgggaaatattttttcaagaacattttgac

SEQ ID NO: 144959 - DNA, 279 bp, Glycine max
  unsure (1)..(279): unsure at all n locations
tcccttctagcgntaatggattgcattgtgtgcctccaagttaggacttattggatcgccaagcnatgggataatgagtttgaaaaggttgatgtccaatcccatatggcccttgctaaatgtgccaaggccgaatgagccctaattgaggccaccaaggagaataagacatttttgcaatcgaccaaggattcttgaaagtctcttgaggatacaaagactaagttgaaagaggttgaatctcgagaagaggctntaaaggcctagcttactactact

SEQ ID NO: 144960 - DNA, 347 bp, Glycine max
  unsure (1)..(347): unsure at all n locations
ttttattttttatttattttcagaaatcctactttgttttntgtgttgcaggctgacaatntaataagaaaagaacatntattcaaagaaagtattatactgatcaaagcttggtcatattatgagagtcgcatcttgtgatctcagcacggactcctttcaacctatgggttggaaatcttaatcatatatttattcaatatctatagtcacacgcttgcaggaccccttgaggtgacaannactttttgcttttatgtatatattattggtcgcttaggtgcggtatatggatatatacacacactgaaatttcccgtattcttatcctattggtggcatatctt

SEQ ID NO: 144961 - DNA, 400 bp, Glycine max
agcttctaaactttatacattaataaagctcttggtccgcttgttaaacaagtggcctcaattatcttaagaaagggggttgaattaaaatacaaaaactatccccttaattaaaaatttaacttttttatattaaaaatgcaacccttattatgagttactctaagaacaattcaaaacaaacttctttaaagcgaaatataaacaataataaataaaagaagtttaagggaagagagaatacaaactcaatttttatactggttcagtcacgccctatgcctacgtccagtccccaagcaacatgcttgagatttccactatcttgtataaagccttttacaaagtttgaaccacacagtagcaacccttcccttgtgtcaaataaccttacaactta

SEQ ID NO: 144962 - DNA, 422 bp, Glycine max
  unsure (1)..(422): unsure at all n locations
atgatacatgtcaaggtttggtttgttcaaagataaaaaggatgccccacattattttcatgacacaaatgcaaaaatgatgatttggaaattttatgctaaactggtcatgcatgcacctatgtggacgctcaagtgtcaaatttttatggtcatgtgatgctatggctcacgattcatttcctctattttaaatcaacccaatgtttccaaaatatgttcttttatcaatttgtgcatccatccgagtccattttgggcgtctgggaaaatcttcacaacattcacccttcaggtgatacaccatttttcataaactatgtatgatcagttgaattttccaaagaagagtttgaagtcatctcttttaaaagcatgttggtttttagctcgacaacatattntnctttttctccttcttt

SEQ ID NO: 144963 - DNA, 397 bp, Glycine max
agctttctaagcaaaagccttcgcagacattacttgctttgcagggctcttcaacccttcagccttcttcatgttatattgggtgtaagttctgttaactcaatcagtctccatcgctcacacacctctccagtaaagtcactaattgtttcagtaagatttctttaaacaataatcccagccgtagtgagattctaggatagtaaaataatgagacgagcgtataaccaacgagcggagaataacaagtcaaatccttggcttggtagtatatggatgtgtctgatacgcgttctggcgtttctttggcgtttgacacatcttaacatctctaccttcactcaaaggtgtcaccgtatcttctgcttcaaacctaataggccctgggagtagatca

SEQ ID NO: 144964 - DNA, 372 bp, Glycine max
aactacgcttctattagctgaccatttatcaaaaactttattttatgtttattcagaaaacagagcttatctcttttatctcagtgagagtgattctcctaaattcttgagtgatcaagaacaccctgactgtatcaaaggactttcacaacctttgtgtgttgccctcgctggaaagagtgattctttccttcctttcatcttcacccttggtctttcaaaccacaattccagaaaatccacctctgcccagaattatctcgtggccataactcccgttttacgcactcaaattaagtgattcttgagcctaaattgaatttcaaaacgagacctttcaccttgttttggaatcacctcatttggagccct

SEQ ID NO: 144965 - DNA, 320 bp, Glycine max
gaaaagatttttcttggtcttatattattctatgaagacaacctaaaactaagaatggtttctgacatggttctgtaaagatgaaatttttgaaaatggacaagcaatgactattgaacaccaaagtaaatctctgctttactttttttatttggtttttgcttatctttttctcaatttagaaataactcaatggacaaaataatttataaaaataaaaattagccaatgacctagattcaatttaaataaatggtcatgattctttactggtagtgacttataacccaaagtaacaaaagggtctattgacataatac

SEQ ID NO: 144966 - DNA, 446 bp, Glycine max
  unsure (1)..(446): unsure at all n locations
tcctagtgaggagcggcggaaaaaggttgacatgaagtattattataaaaaacaagnttcccactgatgagcaatgagaaaagattgacgattctcattattgtctaaatccaacaaaagtgtcatttagtcaacaaaagctacttttcacatggaaattagtatcaatgtacaatttttccaacatgttttgactaaagaaacactcttatctgcaatcattaaccacgatgacaaggtaaaaaaattgaaattagtgagaatgtgagattgatcaggtgagaatgtgacatgtaacatgctgtcatgattaagatggttntctaccacagataaaccaaatttcgtgccccttagaatctccaatctcaactaatgtgtggatgcgtataaaataaaagcgagtcactagttccaaatcanatagtattcttcttattgatgat

SEQ ID NO: 144967 - DNA, 410 bp, Glycine max
acctgaggcatcgcaagctgcatgatatacattctccccctttcttaagcaaattcttaattcttcttgacatcatcaaaatcttcatgatttacattctccccctttttgatgatgacaaccacctgtaggttaggagcaacaacaaagaaaaaatatctatttgcatatagtttactcccccttggttttgcaatgattgcttatatgagacagttgaagatttcatatttttcatatgtaaacaaattgtctcataaagaatagataatttttcttactattttatcttttacactttctctcccccttgatcttgaagaaatcttgaatcaaggctttgtttggtgaaataatcttgtatcaatcttgaagcaaaatgagccttggttgattcttcttttgacatc

SEQ ID NO: 144968 - DNA, 482 bp, Glycine max
  unsure (1)..(482): unsure at all n locations
tttccttgaacttaaagctttagccgttaggttgttcactatgttgttcatgttgcttccctatctctaacaagtaggtgttgtcggtatttgaggaattaagtgatagtgtttcaacccctcgaaaattggcaaacaacaattttatatatagatttctaatactaacatttgaattaaatgatttggacatgtgtatggtgatattcctaaatacattaatatgacactagtaactgtctttgtataacttctttgcaattgtgtgaactggtacttcaattataaaaaaagaccttgcttccccgcacttaccaatctcacatgcctaaatgaaattatcaaaattattaatcccaatcgaaataacttcctttgattacataatcaacttctcgaatntttgaccatatttcgattattnntttntaatggattcttctactcatctcgagacaagtgtccatgtcagtacatccaca

SEQ ID NO: 144969 - DNA, 318 bp, Glycine max
  unsure (1)..(318): unsure at all n locations
gcatgcaagcttattcttatggtctgccttcggactttatccnccatgccaccncaattaccaagtggggaactggcgcgtgataagccactcataagtctataccgctgattcaatgttattagagcctatagattttcgctctcttttgttttgtgaaacctaccttattaaataaacaaagagatcttgtttcatttgttcttgcagtaccaccctttctcatatcaataagcatgtgtttcgcttcttttgacttgtttggaatagatatgagggtcgattctttgaggatcctaacaacgagggtttgacaat

SEQ ID NO: 144970 - DNA, 276 bp, Glycine max
  unsure (1)..(276): unsure at all n locations
ttgcggnggcttgaagcttggctctggtttatacatgtttgatacatgatttgggacttgtacgatttgatttgggcatgattggatgagaggaagggtgattttcgaaatctgcacttatgcagaatttttgctgtgaaattgtgcagcaaaattttgcacaagtgcagaaaaatgcttgtgtgtggttggctgtggaaagtctattgcaaaatgagttctggatgtttgctagtatatcccaacggtcataatgtaggcttatacactatagac

SEQ ID NO: 144971 - DNA, 385 bp, Glycine max
  unsure (1)..(385): unsure at all n locations
ctgcagcttcattcccaacatttgcagagggacatcccatatactgaataagcttctactgttgacaggatatgttatacaatctgggatatttcgcccttaaaggttcctgttccatgagccagcaggcccatttaacccatgcaattttcttttgatcaaggccaccaccccataggaacctcctctggatttgggtcagttattccgctaccctgttatgaattctggaagaaaaaaaaaagatngaaaataagaattgaggttagagtttcttttatgagggtcactcttcccccataagatagatgtctctgcttccacctacacaatttagattcactctttcttatgattggatcccataacccacagcgccttggat

SEQ ID NO: 144972 - DNA, 321 bp, Glycine max
  unsure (1)..(321): unsure at all n locations
gttttctttattctttcnccatcctcgtctttaatattgacattttctcagccaaaaacaagacacacacactcatgtgaaacttgaactattagcgttttatataatattttggtgcctgaccaaatcaccccatcaaatttaccattattttcaagaatagtatttttaagagaatgtgagcttttgctaggcttaactaatgagaatgatgaatttgtgtcttccgaatgtgcctttgttaaataatcacgatgccctctctttgagtacatgtnacatttaaaatatattatagtccttggtgacggaacaaaacat

SEQ ID NO: 144973 - DNA, 411 bp, Glycine max
  unsure (1)..(411): unsure at all n locations
agcttgtccaatggctgaaaatgagactctgcatttgaggattctacggcgagaactttcatatgtccagctgaactggtagccttcactctttgctgtcattagaaaagaaaaaaaaaacaattcaaaaggatataaagtgcttgctcaaaaccaatagataatatcaggatattataatatgatgtgaaatgtaccaacctttttgacaaaactgtcttcttcttctggagaaaaaggacgctcacagcaagggcaaacatgattagctcttgcaaccctttcaaaaggatcaaacatttgccgcataccatcagcaatattatatttgctgaagcaatcaccagacaaagtattagtacatgagaccagtacctagtgacaacacanacaacactttgatatggtcac

SEQ ID NO: 144974 - DNA, 448 bp, Glycine max
  unsure (1)..(448): unsure at all n locations
ntatactggataatttaattttaccgaataaagntgggtcaataacataatctactattaattggtagtacgtaatttaatatatatatatatatatatatatatatatatatatatatatattatgagtatttttttataaaatatttttgtgcgagggtatatatcgtccttgataaaagcgaaggaattaagagaattaaagaaacgcagggagggtgacgtgaatcaactgatatgaagaagaccaataatttgcaaattagcatggttcgcactaagacttgctttaaattttataatcaatctaaactgttacttgtctgtcgtcaaaataaagtttcaactaacataacaatattgtatttagatctctttaaaggaagaatatngctttactctntctttcaagattactttgttantaacgtcatcactaactactaac

SEQ ID NO: 144975 - DNA, 279 bp, Glycine max
  unsure (1)..(279): unsure at all n locations
cttcttcttcttctttgtaccaaaagctttctgaagttntctgggtttctaaaccttgaaaacttgtgctattcatcttttcattctcttctccctttgccaaaaagaattcgccaaggactaaccgcctgaattctttttgtgtctctcttctcccttttccaaaagaacaaaggactaaccgcctgaattcttttgtgtcttccatctcccttgtcaaagaattcaaaacgacacaggctgagaattcttttgattcttccctttccctaatacaaa

SEQ ID NO: 144976 - DNA, 470 bp, Glycine max
  unsure (1)..(470): unsure at all n locations
cttgagacgcatgtgnatctttggcatcatcaaaacatcggtttgattctttgtctacaatctccccctttttgatgatgacaatccctgaaatcaagacaaactatatacaagatgatagcacgttcacacaccccttactccccctatcttttggcatgtatgcctaactttacttaatgataaatttctaattgatttctaacccaagctctgtcaagttctctccccctttggcaacatcaaaaagaactaagcaatacaaacaaaatccaaacaaagccaaacattaaaccaaaaataaatccacacattgtcataaccaaccaaagcaaagtcctgaaatgtaataatagtgcaagagtacgataactagagcaacnaaaagcccaatacaccgcgagtaaacaaagtactaagagtactttaatactaataagactcaggcatataataataaccattaatct

SEQ ID NO: 144977 - DNA, 393 bp, Glycine max
  unsure (1)..(393): unsure at all n locations
tgcagctttagatcgagctcaacgcaaatttttatataattcttgatcctggaaaataaatgcctaattcgaacagaacaatgccgaattgaaaaacaccaaaaatcagggtcgcgatctantgagagaagagaagaaggaagggtttgataccatcgaaacgctcctcgaagaagaccttggcggaagtgatggacatnagagagagaataatgagaaagcggaggtcagggtttcgcaccctaaacgccatcgtcatcgacggaacagagccagggatgtataaatgaaagtgagaggagagctgtggctacttggaattttagtgagtgagatccttgttctctatatagcggatcaattcgctttgggttttcagtacagtgggcaaat

SEQ ID NO: 144978 - DNA, 440 bp, Glycine max
  unsure (1)..(440): unsure at all n locations
actcagcttcacgatgttttgtggtggcacgtgacatcagaggttattattctatgtgagttggggcttgttgccgcgactggaagaagaagatgtggttgtggttggggattatccgcggcggcgatggtggtggttttgaagatgatagttgccattggggatttttttataaaatagtttattaaattaagataaatattaaaataaaaaaatgagaggtatgccctgtcattgatacctctgatgtgactccacacgtgtattgctaatgtgtccaactaatggacacatcatcacatttttgtgaaaactaatggcaaggatctcccacaaaaagttttaagtttccgggacccgatgaaaaacaaaaaaatttcacggatcggttatgaangtcagatatattttggacatctataacatatttaagtctaact

SEQ ID NO: 144979 - DNA, 410 bp, Glycine max
  unsure (1)..(410): unsure at all n locations
ttcagtcacctgcggcatgcaagctntcacacgaatgtccgattcgggcgcataacaaattgatcaacgaaagctctcgagaaattcaaatggtcataacttttaacacagaagtctgattctggcgcatcacatatagagaagctcaaaattgaataacgaaagctatcgagaaattcaaatggtcataacttttaactcggaagtctgattcaggtgcctcacagaaagagacgctcaaaattgaacaacagaagctctcgagaaataaaaatagccataacttttaactcggaggtccggttcaggcgcataatacatcgagacgctcgaaattgaacaacgaaagctctcgagaaattcaaattgtcataacttttcacacggaagtccgattcattcggatcgag

SEQ ID NO: 144980 - DNA, 376 bp, Glycine max
  unsure (1)..(376): unsure at all n locations
agaatcggacatccgtgtgaaaagatatgaccgtatgaatttcgtgcgtctctatacgcgacgctcctgaatcggacatccgtgtgaaaaggtatgaccattcgaatttctcaagagcttccgttgttcaatatcaagcctctcaacatattatgtgccccaatcggacatctgtgtgaaaagttatgaccatttgaatttgacgagagcttccgttgatcaatttcgagtgtcactatatgtgaggcgcctaaattggacattccagctgaatgttatgaccatntgactgtctcaagagcttccgttgatcaattctgagcgtctagatatgtgagacgcctgaatcggacatccgagcgaaaagatatgacca

SEQ ID NO: 144981 - DNA, 409 bp, Glycine max
agcttgcacaattttgttgtctaagcagctttctaatggaggatggggtgagagttacttgtcaagccaaaacaaggtatatatattatcgcttgaatagcacactagactctgaaaaaagaggtcagtgttaataaatttctatctacacaaatatatcggatgctttctttgccaaacaggtttacacaaatctaaaaggcaacagggcaaacttagttcaaacttcatgggctttgatgtccctcattgatgcagggcacgttagtaaacaaaaatcttcaagtattttagtacttatattgtatgagtttaattgtcattcactttatcaatcacaaataatatgtgatgattgctagagtagttattataaaaatcaacacatttatctttcattacaaaatga

SEQ ID NO: 144982 - DNA, 416 bp, Glycine max
  unsure (1)..(416): unsure at all n locations
agcttcatgcttaagtatgtatggcaagacttcattattgttgntcaagacatacaagtgagcttgtaacaaatcttctacacttggagtcatcacatgcagtcctcttgaacccttaccacccaccctgccatcatgtcgagactcaagaaggccaacaggtttagccttctcaatataatctgaacaaaattcaatggcttcttctgcaatgtacctttcaacaatagatgcttctagacgatatagattctttgtatacccttttaagatcttcatgtatcgctcaatcaggtacatccaccgtagataaacaggaccacaacatttgatttctctgaccagatgcacaatcaagtgaatcatgatgtcaaagaaagcanggggaaaatatantctcaactggcacagtataa

SEQ ID NO: 144983 - DNA, 368 bp, Glycine max
  unsure (1)..(368): unsure at all n locations
catctccaactaaatttcgtgctcttctcttcctctcccttcattcatcttttcctacctccatgctcttattcatggcttcctatggtggngagcttcttctagactcatcttctccttgaagtggcgtctcctctcaactcttcttcttctccattccgctgcaatcagaccttaagaatcaaaggactccattgatgaagaagaatccaggccttcaaactccacatggagctaaatcgttggctctttccaaaaccgatgttgtatagtaagaaatatacaaaaaatgcaaaaataacacccgatttggtcaaaatcgatgctgaaggtgaataacaacatcgtataaataaaccgttgtcatc

SEQ ID NO: 144984 - DNA, 329 bp, Glycine max
  unsure (1)..(329): unsure at all n locations
attggangcctaagtccattgtgttcccagcccacttctgtacttggatcatggaatgtgtttctttcactttctttagggtgacagtcaatggatccatttatggccacttcaaaggacagcggggtcttagacaaagggatcctttctccccttatctgtttgagctttgtttggagtacttttccacagatatgagcagcctcaaggatgatgccaattttaaatttcatccccactgtgcagatattctgctatctcatttggcttttgcagactatattatgcttctatttaaaggagatatcccttctgtgtcaactatgttt

SEQ ID NO: 144985 - DNA, 378 bp, Glycine max
  unsure (1)..(378): unsure at all n locations
agcttgtggccacgaacaactctcgtaatntttttgttttactgcttgaaanttttatcatcaagcttgatggagataagatgtgagagcttgacatgagaagaaggaaacgcgccgtcgttgcgaaacggagacgccatagatcaagatcactggatcggaaaaagagtagctcttgataccatgatagaatatcataaaagagaatgagagagagtagaagctatttctcatatattgatcttatctgaaataatgaatacaatgctcttatatagagcagcaacaaactattgcataacagcatagcaaactaatagaatccagctggcataactcacttactaactatttaccttattcactctattatgaaca

SEQ ID NO: 144986 - DNA, 394 bp, Glycine max
aactcagctctattgctatgcgtagctaagatgatctttttgattatgcttttgagaaagcctctacaaattagcttatgcataagctaattttagcttatgaagaaactcatttcattttgtttcttattttcttctcctaaaagtatttctggagaagtttattcgatgtccaaacaggccctttaagtgttagaaaaaacagcctatcctagatagctagtgaagagcactagtgtgagggtcagcattagaacaatcttgcgtccaacaatcaaataataaagatccttcggtctaactgttgttagagtacttgtataattataaaggtatgatacattgggaagagaagagaagagagagttcacatatatactcaagcttatttgag

SEQ ID NO: 144987 - DNA, 226 bp, Glycine max
agcttagtcctagaggatggaccttttcatgtcttgcagaggatcaataaaatgcctataggttggacctcccacaagagtatggagtcaacaccacttttaacatttctgatttaattccttttgcaggtggagccgataatgagtaggaggaaccaacagatttgaggtcaaatccccttcaagggggaggggatgatacaatcctccctaggaagggatcagt

SEQ ID NO: 144988 - DNA, 366 bp, Glycine max
tagttccttgcttagcccataagggtttccagattatgcttatgaacttagcatctctatctaacacaataatcctacgcaaaccatggagtctcataatttccccaaagaagagttttgagatgtgagaaacatcatctaccttatgccatggtataaagtgtgccatcttgctaaacctatccaccaccacaaagatagagtctacacgtctttgggttcaaggaagcccaagaacaaagtccatactaatgtctaccgagggtgcaaatgggatgagtaagggtgtgtatagcctatgaggtatcaccctagactaggctttgtaacaagccacacacctagtgcaatcacctacaataaaat

SEQ ID NO: 144989 - DNA, 421 bp, Glycine max
agcttcatgtgcttatgatacagtataacatgaaagcttgtattagagtcaagttgcgaactcaactcatttctagacttttttttttctgaattctcatttagtgtcaactatccctactctaattttatttattatgttttaatatttaatgttctatacttttgtagatttaatttattgttttaaatatactatagcaatgtgtgtgcgcacacgaatttatgcatttttaggtttggtgtatattttttatcaacaattattaatatacctcctctaattgtttactttttttttaatcccaaattcaaaagctagcctccataattctatattgggttatccgattttaacctttgcaatcatattttattgtattctcaatggtcccttggtccatatgtctctcaattgaaca

SEQ ID NO: 144990 - DNA, 183 bp, Glycine max
  unsure (1)..(183): unsure at all n locations
cgtatgcattcctcaaacattgctacnaacggccttttgcactcaccacgaccactgaggttaaggttatgcccttcgggctatgcaaggctcattccacctttcaggcaacaataaacatgcttttccagccattctctggacagattttaatgtgcatctttgaagacattataatttata

SEQ ID NO: 144991 - DNA, 406 bp, Glycine max
agcttcttacatttgtgaaagttcttttgggtgtgtcagaaaagaacttgtgggatatgctcttgcttgttccagtgccaatgaactgtgcatctgaagtgtaatgaatctgagttttgtcatcagtatagtcaaggccttctgctatcccacagtcaatgccaatagaacctataatcaacacaatcagaagaatttaataataataaaaaatttggtacttttctttaacctgttaaagttttttttttatatttagtatttaagtacgtataaattgtcagagaattttgatgcaagctcagagcagtaggagaaaatcctcaccagttacatcatctagtttccttcttccttgtttgtgatgcatagagttcttccctgtggccataactatggactttcc

SEQ ID NO: 144992 - DNA, 387 bp, Glycine max
  unsure (1)..(387): unsure at all n locations
agctntntatataaaacaaaaacaggcatttatgtggaagaattgtaccttagtaccaacgccaattgtcgtattgtcggaaggaattggtgcatcatagtcaattgctccaaattctttttcctcctctgccttcttctgctcaagtgctgacctgagtagtgtcataaagaccaaattaagatttattggttntatttaattagaaagaggtgtaccttctaactgcttttagccgttcctcaaagtcaacatccaaaaaatcgttcctagatttgccgtcaagttgtgaacttaaacggggtgcctctgcccatttcatataaaattaaatcaaatcaaatcaaatcaattggacatatgaatatgggtttgcaattccactta

SEQ ID NO: 144993 - DNA, 453 bp, Glycine max
  unsure (1)..(453): unsure at all n locations
tccttttaagcgttgctggcactgttacaagatgagacattgtaaggattcataggccaatgtgagatgtgcgttggaatggtgaaggggttggaggagccatttctagtggaagtgttcctcaaggggttaaaggaggagattagcactgagttaaggcttcatgaaccaaagacttgatagaagctatggttaaggctcgaagaatggacgataagaacagagttttagggatattacccttgagtaatagccaggggtataatttgcataaacccagttatttgggtcagaaattnttaatggattgacagccagcaaatagtaaggtagctgatcctactaatgttgctaaaacaggatccagtggatggcaaagtagaataatcttccataagttgtcatccgcggaagtcaatgataaaatgaagaaaggagaatgttcacctgtga

SEQ ID NO: 144994 - DNA, 391 bp, Glycine max
  unsure (1)..(391): unsure at all n locations
agctggcctaattaacctgaaattgagggaatatgattattatacacacaaaatggaagtactaagtatttattacctatacttaacagaaaatacttataacactacataataacgataaattggaagagtttgatacaatttacacaaattttatacataagagttagtcgttttcaccgactaatagtcatccgccacccttgccatccagagacgggaagtccgatgacacgtggagacaacatatggttatttgccacccttgtcatccagagacgggcagtccgatgacacgcggagacacctcatggtcgttcgccacctttgctatccaaagacnatcgagtccgatagcacgcgaagacagattatgatcatccgcaccttt

SEQ ID NO: 144995 - DNA, 403 bp, Glycine max
  unsure (1)..(403): unsure at all n locations
tagacctactcacctcagttgcaaatttatcacagcagaacaattatgacctctccagcaacagatacaaccctggatggaggaatcacgctaatctcagatggtccagccctcagcaacaacaacagcagcctgctccttccttccaaaatgctgctggcccaagcagaccatacattcctccaccaatccaacaacaacaacaaccccagaaacaaccaaccattgaggcccttccacaaccttccatcgaagaacttgtgaggcaaatgactatgcagaacatgcagtttcagcaagagaccagagcctccattcagagcttaaccaatcagatgggacaatnggcttcccaatngaatcaacaacagtcccagaattctgacaaagtgcttctcaagct

SEQ ID NO: 144996 - DNA, 316 bp, Glycine max
gctttagcctgatcgctaagcgacaacttctctttggctatgcgtgacctatttgccaatcatggcagctaagcgatattcattgcggcaatatgagtgctaaacgagtccttctcagctaagcgcatgctccactgtacttaagatgcatcattttaactaaactggccagaacttagcttagcaagagttgcagcctttctaatctgcagacctcgctaagcagacttacccttgcagtaagccaagtctctgttaaaaaaaatgattttgaatttgaaatgtcggctaaacgcacgggtccgctaagcgagcc

SEQ ID NO: 144997 - DNA, 421 bp, Glycine max
  unsure (1)..(421): unsure at all n locations
tagctgaattcagatcgaatcgaagttagcttagcccaaccttggctatcttatcggaccaaatcagcctcagatgcaggggttgggcgctaagcgcttaagactcgcagcttagcgcatgaatagagctgtgcttaacgcgaggcttgcgcttagagaaaggactgtttttcagaagaagaanaaatttctaagctatttttcagtcctttgtccatgaaattgaaacccttatgttaagcattcaaagattggctgatatgctcctatgtacagcttacatagcaagttccaaatgatttaaatgcataaaacaaanaacaaaaatagaagaattaaaactgagttgcctcccaggaagcgctttttaacgtattagcttgcgctttacctacttgggatcaataacagtgcctgtgtc

SEQ ID NO: 144998 - DNA, 280 bp, Glycine max
  unsure (1)..(280): unsure at all n locations
taccttaacgacccaccatttagccaaaggctctatgtacggcggctaaagcccanaacaactaagtacttttatttctccttcacgcatctaagccagtaaaaagtgtactagtttgagttatatagttaacactactattatatatacatgattgtattatatgagagttttgattaacacatttagctagtgctcaaaatgatttacacatcagtaatgggtgagcatgcttttaacctttaaaatatttagaatatttatatgtaattcttaaact

SEQ ID NO: 144999 - DNA, 493 bp, Glycine max
  unsure (1)..(493): unsure at all n locations
ggtagagaagtcttgcgaccggaatgtagaagatctaaacatactatttgttattggngctgntatttatttggggctatgtatttattgttattttacacatctttgatagagaaatgctattacacatttgatatggccttctttcacgcctctaacgggcaaactaactagttaatcctgagctggcaaagtccacacctctgcttatttttacagtacaattagcctttttttctctttggtccatatggtacaattntttaggtcagtgttgtccttccggaaccctactaatgtgatatttatatcaattcttttgaagaatagtggcttaagagttacaatcaacgtcagaactgatcaaaatcggaactaacaatatacattttaatacattnttaatgcatattgtttatcattgttntaaatttattaagaaatattanactatgagtgacacatagaaaatttataatttttgaaataaaaa

SEQ ID NO: 145000 - DNA, 319 bp, Glycine max
  unsure (1)..(319): unsure at all n locations
agcttgtggagttaaagctagcactactctgtgtgnatggcttgcattcttttgatggaatggatcatgaagatcctacacactttgtctacctcatggaactttgtagaacatggaagcttctgacgaagatgctgaagctgtctaccttagagctttcccattctccttggtaagtaaataaaagactcaacacttgggaagaggtggagaaaaacattcattgcagggttttttcctctgtttagattcatccgtgcaaaatctgcccttgcttctttttcccaagggtttgataaacctctttgtgaaacatggg

SEQ ID NO: 145001 - DNA, 334 bp, Glycine max
  unsure (1)..(334): unsure at all n locations
ntnataggctctgaaatcgcacactgggcttagcgccatttctctttttatcgcgggtaagtgtattcgggcttagcgtcagttgtgcgctgagcctggatgaaggcacctgctgcgcttatcgcactgagcgcttagcacgcggctttgatattgatgctctaccagattcttctttgcgctaagcatgctgaatgtaacgacccgcctcgtcgctacgatatcaccactctaataattggaaaataaaatgttttttctttcttttatgaaaactccattatttttgcttatgaaaatncatagtaaattgaatttcacaaatatatatatg

SEQ ID NO: 145002 - DNA, 403 bp, Glycine max
  unsure (1)..(403): unsure at all n locations
gcttataagaacaaaattgccttaatcattttcaaatatgcatgtgaattaagacgcatcaacaagaatcaagccaaggctattgtgcaagcaatcaatggggcaaaacacaccaaatgattataatgatggatggctcaaattctcacaaagggaaaatcatcactttcaaattgagctttcaaaactatcatgacatgtagagaagaatcaaggatttcaagtcacaaaatgtcaagaacttttattttcaaaacaattacccatttcttgaacatatcctataattcaaagaaaaacatgcaaagtcgtacgtgcacacaaaattgacccaaaatattaaactgaaaatccgacgaaactaacaacattaacaanataacacaacttacanattacaaaa

SEQ ID NO: 145003 - DNA, 349 bp, Glycine max
  unsure (1)..(349): unsure at all n locations
cactcatgccatactccttgagaaaaaataaaanaaaaaaagagttgaaactaaagctgtacagaccatattaactaaaaaaaattcaagattgaatgatacataaacaaaaagcaatctagcatcaactgtcataaacacagattttatccaaatagaatacacttatacacccataatgagaaatgagacagccacaacctaaagtcccaaactaattgagttccaattctatcagcattntatacaacacacaacaatcccttcaattattatcactcaaaaaatcttataaacagggaaaggaaacagggttgtacctgtggaccatgacaaaatgacacttatg

SEQ ID NO: 145004 - DNA, 419 bp, Glycine max
agcttcttccaaagctgaaaactgggattcttatttctttttcagctcaacaagatactcattaactcaactgaactcaccccagaaaatgaaaacacacaaacaaaatgaatgaaagaaaaaacacatagaagaagaagaagaagaagaagaagaagaagaaaacactgtttatgttctggaaaattcaattcaaagcaacttacaaatttcaggaggtgaaaaaaacccgttggctggttggtttttccaaagctgcttgaattgaaagttgaaaaagagagaaaaatggatagctcaaaataaatactactactgttacagcaattaaaaataacggagagacaaaacagggtgataaagtgtatttaaattaaacaatatataatattaaaggttttattattatttgatttgga

SEQ ID NO: 145005 - DNA, 360 bp, Glycine max
  unsure (1)..(360): unsure at all n locations
tctacaacatcatttatggcaaggcaaaggtactttccattttttattctacaaaagatagaacctaaataagaagccaggtaggccttctggtagaaaaaaggtatgcaggggttctgggtctattataaccagaaagggggagaacagantttgggacgtgtctgtcccacaatttagtgaaatgtaagaccacctacataacctagcccaaaagagtgtaagcgagggattaaaaacctagttgatcacttataaagtcaagtagaaaatattattctattttgattcccaacatgcagaagtacaaaaccaattaacatagcaactagagtgagttggatggaacctgatgatctt

SEQ ID NO: 145006 - DNA, 390 bp, Glycine max
agcttggaaatttataaaagtaaccttgggttctataatctgtatccgaggttctagacaatgaagatgatggacccaagttgttggaacgaagtgtttaacctggagataaaattctaattaaacatctaacgagattaagccaaaatttggttaataaaaaatgtgagttttgaatcagacaattggcttgcacgcaaaatttccagaccttaattaattagtgagagtgacttaacttttataattaaaaacattaattagaagttaataagctaacgaaaaacttatgttgaaaagaagcttatttagatgagtcttggtatttaatttgaaagttatatggtaactaatgagtaaatggaaattcttttcaaaattaattaaata

SEQ ID NO: 145007 - DNA, 404 bp, Glycine max
  unsure (1)..(404): unsure at all n locations
ccatccaaacttgtcatgggatttggtttatatttatctctctcattntcaatttgatgttttactcaaatatactcatatcgaaactataaacttaactttctaggcctttcatcctcacgagaaccaaatacaaaggcaggagaggtaaattatgctagatgtgttagagatggtgattgtaatccctaccctccctatttggattgaatgggagcttcagctcgttgttatcagggtacctgttactgttattggggaaaaaaaatcaagtgtgcaaattaaaactaaagaaaataaattctttgaagagaaagagngcttattttttcttagcgaacatctaggttttttatttatttcatccctatcattataatatcaatattatttcaaaagacact

SEQ ID NO: 145008 - DNA, 370 bp, Glycine max
agctttaacctcatcatctctcatagtctttagaattgggagccaatccaatccttgcgtccagactctcagccacttatgatagccgccgatgctcccattactgcttcccctaagctctatgtcctttcttcacgccgcatcccatgccttgcgaactccttggagtaccctcgcgttgtggtcactgaaaccccgtgcgatgaaaggcgtgatgctttcgtctgatggcactcctttcatggggtagccaagctgtcttatggcgaggacgggattataattaatacaacccccttgtttcatcaagggaacatttggacattcttcgcatgaagatagaatcctgattctttcttccttctagcga

SEQ ID NO: 145009 - DNA, 401 bp, Glycine max
  unsure (1)..(401): unsure at all n locations
ctatatctgacaaaatgaagatcttttttttttaaaattttctgtgactacttgcacattccatttgtgagtttgtagtgtcctctatgacctgcacaaggcagatacgtcaagtaagcataaaatttgaaaattagctacaattctcaattaagctcaatcatttgcctaagaccaaaatcgagttaaggtgagaaaataagggtaaaagagatgtcaattgagctaagaagaatagaaaaatattaaactacaaattcttagtcacacctcatacaatgtgctcattggatgatcttctcttagtgaactcgaagccatcatctcaacattgcatctaacgatngaagtntcgggagacaatgacaaaatcatcttagtctaagcagaatagataacac

SEQ ID NO: 145010 - DNA, 138 bp, Glycine max
tgcagctttatgacttccaacttattgacaccttagctttttaatcgaatagtttagagggatcaaatatgggtgaaaagaaagccatataatgcccccaaagatgaatccacatgttttgactggaataaaaaacat

SEQ ID NO: 145011 - DNA, 283 bp, Glycine max
tctggaggaagcctcttaatgaagattctagaggaagcctctttatgaagcttcttgaggaagctacatgaagctgctttggtaaaaatgctgcccatccttcgttaaccgttggatcttctcgaaatttggcctgctactttacaagacacttgttcatgatctgacccgtgtgatcttcgagaaggtatctagagtgtgctcgaagctttcgttcccgagagcatttcttatttaagcacttcagcctttgctttcatgtagcttaagaaaaatgtcattt

SEQ ID NO: 145012 - DNA, 356 bp, Glycine max
  unsure (1)..(356): unsure at all n locations
agcttcgtcctcagatccctcttgttggactatgcttaatttaaacagccctcgtaggtttagactaacttaaactaagcttcatcctcagatccctcttgttggactaggctcaacttaaatagcttacgaaagtttagcctaatttagcctaagctttgtcctcatttggatttcttttgtctcttccagattgcttctatatgttggcttatttggtaaggaagctcttagaatgagatcaatttggtgctctatccctctcaaagcaggcaacccatgaggggtgtctttgaggaagacatccctaaacttcttcaataattnttccacacctagaggcaaagaactatgca

SEQ ID NO: 145013 - DNA, 386 bp, Glycine max
  unsure (1)..(386): unsure at all n locations
aaactcagcttagggtactcattgactccagattgctgcanagaatgattcttatctatatggggatttgtagaagaacatataccacagactcttgcaacaggtgcaaatttctaattcatggcaagctgagttactatgttgaccaaggcatcaagttttccctcaagctttttattttcagcaaatgaagatgaatctgtggccacctcatggactcctctaaggacaataacatcatttcttgcactgaattgttggaagttggaagccatcctctcaatcaaattcctagcctcagtaggggtcatatcaccaagagctccaccactggtagcatcaatcatactcctctccatattgctaagtccctcatagaaatattg

SEQ ID NO: 145014 - DNA, 199 bp, Glycine max
tttaacataatttggatctttggattaaaaggaaataaacggctcattttaagagtaattctttatacttactcttacatcccctccttatcgaatattaattataataataatctatatctattaataaaaataattatctttgtagacatattctattctcaaaatattcctaatatatgtcttttctagaatcata

SEQ ID NO: 145015 - DNA, 439 bp, Glycine max
tgatcttacagcacctgagctgcagcttcgtgatgttgaagcttatgttttcaaaaactatttagtatcgactttctctatcttttaacgacaacgggaaagtattaatatgcccttaatgtttctgaaccgaccaatatataagtcacaatattaaattatgaatatctatgataagtaaattaatagcggatcacaaagttctgacgttatatcatttgcactgtactgataatttggtctcatgcattttgagtctctttgtattaatgaccaccaacactgtcttgatttaaaatccccgcaccattgatctgaaagaaaacgtttcatgcacgaccttgataaatttaatttacatggctccagtcactgtcatcataaaaataacttctccacctatatactatcctaactagttatcctatacaccgtatgg

SEQ ID NO: 145016 - DNA, 452 bp, Glycine max
  unsure (1)..(452): unsure at all n locations
tatccattccaggagtaggggtaggtgggacccattntggttattgtatattaaagntcaacgcccgcattccaataaacaggtatttgtcatcctaactgaattggtggtccctattttcaatccttcttcttcttttgctatgttcacaaatctcaactacactctttttctgcctccaaaaggccaaacactcaccttcatgacgtggatatcatctactttcaactctattcttaaaccatatgttntggtcgtcacaagaagagggataaatcaaatagaataagaatatttaaatttaaattatttaataggtcagacatgatggaaggagcaagggagaagaaaaaaaaaatatggattcatntttgtttatatcctcactcaatacggcaaaatatcaatactgncttattntaattactactacaatcaatcttcaatggttc

SEQ ID NO: 145017 - DNA, 300 bp, Glycine max
agctggctagtgaagactctgatgggctaacccctagtgctgtgttctcccaaatcatgaatccaaaaggtcgttaaggttatgcaataataacaacactttcactacatacgcggtcaacccactcaagttctgtagtgcaatctgctttcaccaaatttgaatgttactcgctattcattttcttaatattgctattcctttgtatgttgtttctaatttattatgattatgtaagttgtaatttgtgaccatgttatataaagaatgaagagccaacatgttggaaccaggttggta

SEQ ID NO: 145018 - DNA, 438 bp, Glycine max
  unsure (1)..(438): unsure at all n locations
tctattctatgatcaacttaattcaagaatcacctattatctaattctatattgaatgtagnttgaaaagacaccccaaatgcaagtcagcatttggaatagggtttaccgctcatcaccaacctacctgtagataccaataaaacacaacccaaaaacccaaaattcaaatgacataaaaacatcatttttgaaggaaaaaatngaaattggaattgaatagttaaaggggaaggcgacatacatgctagggtgattgttcttgaagggattcacggaaccacangacgaatggaaaaagggaagactttntgaaaaccctaattcgattactgaaaaggaattgagagaggatcacgttaatagcaaatgggaattgggggcaccaaaagcaagcgactttgcgcacgcagaaaccgatgctgacgtcaccgggat

SEQ ID NO: 145019 - DNA, 424 bp, Glycine max
  unsure (1)..(424): unsure at all n locations
atgcaagctntgcgctatcaaagaccaaatctgagtctcattgtgcattccataacacaatttcattatggagcagccacaaagcccatatcacaaaaacccacatagtccaccaagccaaacaatcccgtaatattacctgcatgtcagaaatgtgcttgataactcgcaggtaacacccttacctcaccacaccacagataacaactacgccaaatctcagttgcaaattataatgaaacatcaaatgtgaagcagtctcaagcgtctctctgcagaaaacacacttcaaatatgcaccaattggccaactatttctcttaagttgtttaagggttgaagcctattatttgctaatttccacaccaggcctctaacttttgacggatcagaaatcttccaaaacttttgtaaaaaaaactct

SEQ ID NO: 145020 - DNA, 364 bp, Glycine max
  unsure (1)..(364): unsure at all n locations
gacacttgaaactcagcttcaatccccttcatttccaccaaatgcaagataatgtgtttttgagtctangagcctacctctacctcgtgggaccttcaatttcaggtaagggtggacttctcctcacttgaaatctgtgggcgttgggttcttgggagctataatgggtagttctactaagttattgctttagggtagttgtttagtggaaatttgagtttaaatcgagctgattctagtttagaatgtcaattangacttgtaggaaagcttggtcagagcaaatgaggaaaattagtggcaaatgtgaaagaaaagagccatttatagtgtaaattgagttctaagaggtcaaattctgaat

SEQ ID NO: 145021 - DNA, 350 bp, Glycine max
  unsure (1)..(350): unsure at all n locations
acgctgtgcaaatcaaatcactcctacatctcatctctagcatgcattttctttctttacccactcctcacgtttggttttttagggaaaaacaccataactaaacgcgccgcaagggatccctatcgcaccagatccaaatctagaacgatgggtgatcaaaaggagacgcatgaacatatgaaagccgacatgtctgctcttaaagaacaaatggcctccatgatggaggccatgttaggtatgaagcacctcatggagaagaacgcggccactgccgccgctgtcagttcagctgccgaagcagacccaactctcttggcaactacgcaccatcctccctcanacat

SEQ ID NO: 145022 - DNA, 359 bp, Glycine max
  unsure (1)..(359): unsure at all n locations
agtcngccgcgattgacgaagggcgcagaagacgacgtttgtctctgtatgctatcaggcttttcgtcttacagacagcaataaagaatgtttatacggataaccactcgggttttttcgcccgtcagcgtgactcaaatttcagtatgacaaatcttgtgagcgcggaagatgacgtaaatctccgcgtgccaaagggcttgtcggccgcgattgacgaaggacgtagaagacgatcgtagtctctgtgtgctatcaggctttacgtcttactgacaccaaaaaagaatgtttatacggataaccactcgggtatttccgcccgtcagcgtgactcaaatgtcagtatgacagatctt

SEQ ID NO: 145023 - DNA, 374 bp, Glycine max
cgataactcgcctgtgctctttcttccatgctatatgtagcaaagtcattgatccagtcatgtttgatgagttggaaaatgaggccgcaattatactgtgccagttggagatgtattttccccctgctttctttgacatcatgattcacttgattgtgcatctggtcagagaaatcaaatgttgtggtcctgtttatctatgggggatgtacccggctgagcgatacatgaagatcttaaaagggtatacaaataatctatatcatccagaagcatctattgttgagaggtacatttgagaacaaagccattgaattttttcagaatacttagagaagggctaacctggtggcctcctgagtctcgacatgatg

SEQ ID NO: 145024 - DNA, 419 bp, Glycine max
  unsure (1)..(419): unsure at all n locations
actcagcttctaaggaagctacctagtctataaatagaattatgtgttatcacttggtgtaactttgatgaatgaaagtcttatgagacacacttcaaaggtccacttctctccttcttttattccttcaatttcgtgctccccccttctctcttttttttcctccattaaagcatcatcttcaagcttcttatccaaggcacattcttggtgggtaagctccttcttccatggcttattccctgggggatggtgcctcccctctcctcttctcctttgcctttcgctgcatctccatggtggaaaatcaccattgaaggacctcattgaagcttaaagatccaacctccatagaagctccacaagcaagcttncatcaaaatcttcttctcatcaacctcttcatttcttcccaacta

SEQ ID NO: 145025 - DNA, 319 bp, Glycine max
gtggcccgtcataggttaacttaacctaatatactttcggtgaaataagaaataatcaactcgattcaaattccatgacgatttaaaaagttacatgcacttatagtaatacaattcaagtcacaattaaaagttcatactagggaaaggaatacactgaaaaataaatattagttttagtgtcgccataaaaaactaagttataaaaaaaggtataaggcgaatggaagaaatccatctatgttaccatgcacggtttaatactagagaatatgttaacctgttaggaagttgcgatataactataatctatgtatat

SEQ ID NO: 145026 - DNA, 401 bp, Glycine max
agctctgtccttagatccctcttggtggattgggctcaatttaaacaatcctcctaggtttagactaacttaaactaagctttatcctcagatccctcttgttggactagacttagcttaaatagcttacgaaagtttagcctaatttagcctaagctttgtcctcagatccctcttgttggactagacttagaccaaacattattattgtaacaacatacttaaaaccaaaacttaatccacagatccctcttgtaagactaagtttcaattctggttcattcaagttctatggcaacaatacattttctaatgttaaaatcacctaactaggcacacaaatgggtgatcagaccaagagcatacaaaattaagccttgaacaccagaaacaaaatcaat

SEQ ID NO: 145027 - DNA, 425 bp, Glycine max
tgagtatgtttcaaggggttgcaaataagctgtttacatttttctacccaccatagaggttgatatacatattctatgggggactatcataacaccacagatcatgcctagatgttgtagtacggggaacctcatgcacaaactgacagatgcaacattggagatcattgaggctatggcttctaatgcttataatggcattagagaaatggatcaaaaaaggatcttagagaaaactgtgagtgcgtctcaaaaaaattggtcattgaagttggacgctacactctgggattacaaaacaacctttaagactcccattgggatgtctccatttaagctattttataggatgaactatcattttcctgttgaattgaaacacaaagccatgtgggctctgaaatttctaaactttgattatgaac

SEQ ID NO: 145028 - DNA, 389 bp, Glycine max
agctttataagtgcgggtctgggagacgaatgtcaagtgttctcgatatgtgaaaatgatgttccgagtacttctgatttggtccgaccctgccctcctgatttccagctgggaaattggcgagtggaggaacgccccggcgtttacgccacaagcataatggtaacctttacggtttaaaagctctatagttgggcctaggctttagagttttctttttgttaaggctttgtgtcttttgtttttgaatttataatacaaggatctttcttcatctgttcctggtctctacccattctcattcatttgcatgtttacttctttttctgaaacggcagattcgatgacgaagtccccgaaggtactaatacctgggacccgtctatcaa

SEQ ID NO: 145029 - DNA, 318 bp, Glycine max
aataactcctgggaaaagttgaatcccttatcactgaccactggaagctcagctgtgcatttacctgatgtccctgaggacagaccattggaagaaatgattaacgtgaacaagagtgatgaatctatttctattgggaaggactgtgaattggagcatgatagttctggttaattgcaaaatgatgatatggagaagatagatgatctatatgaatccgagaaaaatcagaatggggatattactaatttgtctgttctccaaaaggatgagaaacatacagtggtaagcgtttcagtacagaaaaatgaaagaata

SEQ ID NO: 145030 - DNA, 304 bp, Glycine max
cgctggagtatatgatgaaaggatgtcatctactctggccctggttttcctttttctcgatgccatctgtaatgaaaagaactcaaaattcaccttagactacatttattcaagttgctgaaattgatgatgggtgcttagcatgatatatctcgcttagcgcacactcagaaatataacacttcgacttattgcaacagggtgcgctttagccgaatcaagaccgcaaaagatatgcgctaagctcagcggggttgcgcttaacggcaccatgaatttcagaaatttcactaagtatgtggac

SEQ ID NO: 145031 - DNA, 366 bp, Glycine max
agcttcaaagcttaatcttcatgttgcttcccctatttctaacactcctcattatagtatagctcgaagcctttgtttttagcagcataacaaacagggagatgtggacacaccttgtcaacaactatcttaacatcagtggccctggatatgtacagactaggagtgtaggaaatagcttgatctcttacatacatctaagcatgaaggtttccaagagataaacgttcttcctgggttaaattaaaattagctggatgcactggcaagagctttgtaataggcgtctgtaaatgcacattcttctgaaattcactttttggaggtttcacattgatgcaatcctaccccccaagggcattggat

SEQ ID NO: 145032 - DNA, 304 bp, Glycine max
  unsure (1)..(304): unsure at all n locations
ntaacctcattgtctctcatagtctatagatttgggagccaatccaatccttgtgttcggactctcagccacttatgatagccgccaatgatcccattactgcttcccctaagctctctgtcctttcttcatgccgcatcccatgccttgcgaactccttggagtaccctcgcgttgtggtcactaaaatctcgtgcgatgaaaggcgtgattgatgcaagctccattggagcttgtaggcctaggatcttcttcaccaatggattcctttgcttcttggaagataaatggcagcggaatggag

SEQ ID NO: 145033 - DNA, 384 bp, Glycine max
ttctctgacctagcatcaaatattcctaaattatcctttccattattcaatacaagacattttccaccaaagatatgaagatgtgagatgtttgggtttttgcccttgaacaattcatatggagttttctttaagatgggtcttattaaagccccttttaaaatgtagccaaaatattttggaagaggtgtatcatctaataaagatctagcaatctgtttcaaagatctaatttttcttttaacaccaccattttgttgagggattcctggtggccaaaagttatgccccaacccatgcttatcacaaaataatttaaatcttttttttctaactcacccccagagcactcctaaagatttatctcgagaatttcttttttga

SEQ ID NO: 145034 - DNA, 303 bp, Glycine max
  unsure (1)..(303): unsure at all n locations
aagagtaatgtcccactaaaactaactctccaaatgtttgccttcgcaggaatggcccccaggaagcttgcctcatagaggttcatgaaggacaatgcggccgaaggaactagttctcccccggagtacgacagtcaccgctttaagagcgttgtacaccagcagcgcttcaaagccatcaaaggatggtcgtttctcccggagcgacccctncatctcanggacgacgagtttacttatttccatgatgaaataaggcgcacgctgtgggcaccactggtttctctccttgtcaagattgat

SEQ ID NO: 145035 - DNA, 442 bp, Glycine max
  unsure (1)..(442): unsure at all n locations
agctntagggacatcctctgttatcactgaatggacacatgttggagcacttaattcattgaggtataaaatagtagtaacttcctgtattcttatgcaatttaaaaatataattcagtgcctggttatcttgccaaattgtgcagacctggaatatttggaaaactacagcagatgatgctgaaagaaaaagaaacagacatggacttctggaaaaagttacaagccgaagctaggccagatagtaaaacttttgcttttactttctctgcagnttccattcttatctaagtaaaaaaccatttaagacttctttcatttctgaaacaatcatttggtagtttatcattttttctttttttggggcagaagggtgtgtgcattaaacagaacatgaacctactttattatttacacccacctgcccagggtatgtgacttt

SEQ ID NO: 145036 - DNA, 362 bp, Glycine max
ggccacccagcttgccccggagagctagggtgctttctccataaggcaccgccttctggagacacttcttgaaggcccaagtgggcctggttgctatttgcaccccctgtttactaaatacaccccttgcctttgtttgctgattctttttccgcaatgttacggaaacttacgaattacctgacgatacttgctttctctccgtaatgttacggaaccttacagattacgtaatcatcccttttttgccttccggaatgtcacgacaatttacggattgcgcactaacactctcttttgactttcggcatcgtacggaacttcaccgattgtgcgacaatagcttctttgaatatcggcat

SEQ ID NO: 145037 - DNA, 295 bp, Glycine max
catgcaacctttacatcggccatactatcacattctggttgattagatgttttggatttatcttgactcatgcattaatctaccaattctagagctgtatcaggaattagcagctgacggcacgcaaatcgttgctacggccaattctgaagcaacttactatgacaggctaactttattctcttggacatatgcaccttaagatgcctcctctcccaaccctcttatttatataatcgtgagaatgaacactcttaattttttttatgggctacttccttggactactcgaaaa

SEQ ID NO: 145038 - DNA, 387 bp, Glycine max
  unsure (1)..(387): unsure at all n locations
tgaaggtgtgtagcccaccatctnttcatagtagaatacttattatgtgtctactattattggcatcattcttttctccgtcattgaggtgccacttgagctgccaggtctctccacctttgggagtattcttttgaaggattcgtgccccctttttgcacatgttntgtagttgcatcctatccgaagccattatactgacactgcctaacgaaggcaaccattaagtccttccaagaatggactcgggaaggttccaagtgagtgtaccaagtaacagctaccccagtaagactttcttggaaggaatgtatcagcaattcctcatcttttgcatatgcgctcatcttctgataatacatctttagatggttctcggggaaagta

SEQ ID NO: 145039 - DNA, 410 bp, Glycine max
  unsure (1)..(410): unsure at all n locations
catgcaagctngaaataaaataaatattgagtgtgaattgagtttctgcactattgaactatttgaacaaaaacaaaatattcaaagctataaaatgtgacaactatcaagttaaaagtgtaggggagttcctactgaaatatctcttgctgaataaaaggtttttctctatttaacgctatcctagtgttcttacattgagaaaatactcagaccatgattcttcacatgaatgaacctaactctcttaactttcgttcttgattcctcaacaaactcgctctaacagaagtgcactaagcacacagtgtaaaataaactagatcactacactccattcctagacatacagaattctaacttgctctatcaagtctagggtttaaagcattttccatactctaaaacct

SEQ ID NO: 145040 - DNA, 483 bp, Glycine max
  unsure (1)..(483): unsure at all n locations
ntcaaaatttactaactaaataaactgaacataaaaactgtactaattacatagactganaataaaatgtatctaaagcagaaaaataaatgaaagtcttgccaacaatcatcctgagcagcagtgggctcatcctgagctggtgcaggctcgccatgaggtgaagaaagagtatcctgggctggctgcggtgtctcttgtgttgatataggccacggatcctaggtactctacaccgcctgtagatctgctgcatagtcggtgtccttggctcttgggctgtggaagcctcacctccccccaaaggagaaggctggactcttagctaggctacttgtgccatgaactcatccattgctgataaaggccgatgctgagctgagtcatgcatactttgcatcaccaggcataagccacgggggatgctctgcaacataggaatggtgaccttggagcatcgacattagaatgatgatgatggag

SEQ ID NO: 145041 - DNA, 370 bp, Glycine max
gctttgaggcgtgatccctgcaaattgataaatggcatctgagatcaactgggccacatgaacactcacctgtgtcaagatggcatatacccactgacacttcattaggggaaagtcagaattatgatcgcctgggaggatgttgctgaaaagtaatgtcatccacatctgcgtcagggtggtcattctagtgcgcattgatcgcacccgtctacccatcacactccgggcgaagtattattctgtaacacacaacaactgacctatgacctcctcatcaaatcctgaggcctggctcctcctctgactgaacttgcaacgttgcccctcttccaagaccaacggatgcgccaaaaactaattaatggca

SEQ ID NO: 145042 - DNA, 314 bp, Glycine max
  unsure (1)..(314): unsure at all n locations
aactcagcttatacccttccggcgattgaaaaatttttttggaattaagggcatgaagngcaccgatatcttaactggtcaacaggttcttgagcgagttgagggcatcaatgttgtatttggaaagacccaaaaaggaaaaaagtaaaacttctatatataagaaaaggtcgatattgtttgatcttccatattgtgccgatctagatgtcacacattgtatttatgttatgcatgtcgagaaaaatgtttgtgatagtgtcatcgacacacttgttaacattcaaggaaagacaaaggatggtttgaatact

SEQ ID NO: 145043 - DNA, 420 bp, Glycine max
  unsure (1)..(420): unsure at all n locations
agcttctattcatgcttgacataaaattggaagagtantatcttatccttgttgttgaattcagggtattcagctaaaatagcatagaatctgtaatcctctcttgtttgaatacctaaatagatattaacattaagccaaaaccaaacatatcataataccaattttagccagaagtaaacatgagcaagaaataatacaagactgttcaatatagaaatntagtttacctttgtcattagcgtctccattccattgaccagaggtgtggttccactccccagccatgttctcatcttttttccaatctaattaaacccaacgattttcccatccgtctgcattcacacaaagcacatgcacatgagatagaanaatggaaaatacttgattaagattagaaaaaatggaaaacatcta

SEQ ID NO: 145044 - DNA, 492 bp, Glycine max
  unsure (1)..(492): unsure at all n locations
tcatgtgaaccctaaggccttcttcagtagctctatccctatcctcttgtagcctcttgctcatggctttggtggctggtcctttcctatggaagattgcatcatagtctatgtgaagagccatttgggacctccaaaggatcatccaagcattacgtaggaaactgtctagcttgctttaaacttcctttaccttccattgtcaaaccgcccaaagagctttctttttaccaattagtttttaccttattgtcacacctcttttagtgtttattttggctagtttcaatcatagtttcttttaccttttgctttcaaaccctcgacaagaaagaaccataacttaggaaccaatatgagtcttcattcttcatctagtattaatggtgaaggttctactcctaagcaccccttgtatatgatattagatgaagtgagatcccttanatngtggnangagnnaaagagagaanaaaaaagaaaaaaagtggt

SEQ ID NO: 145045 - DNA, 428 bp, Glycine max
ctgcaagctgcttcttgcgattccaagacactagatagcttcctcataggtggcatgtcccacttgtactttttctatctaatttgcatcctacaaaatcagaatctgaaaagtctattaagtttaaggaggtacctttgggataccacaaacctacattgcttatgcccttaagataatgatccttttaacaacagttaagtgagattccttaggattggactagtatcttgcacataagcaaactcttaacatgatattcgatctacttacagttttgtagagaagtgatcctatcatacctctatatcttgattcatccactaatttatctttctcatctaaatcaaggtaggttgaagtagccattagagtggatgcttcttcagaattttccataccaaatatcttaatcagttatatacagt

SEQ ID NO: 145046 - DNA, 387 bp, Glycine max
  unsure (1)..(387): unsure at all n locations
tccttaagaagattcctaaagaagctagagcttagctacacatacctctctaatagcttagctcacctccttgagatgagaagctagagcatagctacacaccccctataatagctaagctcacccccatgacaaaatacatgaaaatacaaaaaaaagtccctactacaaagactacccaaaatgccctcaaatataaggctaaaaccctatactacaagaatggccaaaatacaaggccccaacgaaggaaaaacctattctaatatttacaaagataagcgggctcatacttagccatgggcttgaaatctaccctatggctcatgagaatcctagggtcttcccttggatctctgacccaatctactnggagtcttctatcca

SEQ ID NO: 145047 - DNA, 313 bp, Glycine max
  unsure (1)..(313): unsure at all n locations
aaattttggcttttacatgcccaactcctttgagggacattngtattggctgctatcttaaattgggcatcttagtagatttgatatctatttttcatcatgcatcatcatgggtagtatgaagaaaaatttatttagaggcgaaaactctctgctttaattgattacaacctcgttgcgatcaattacaacaagctgtctaaaacttgtagagttaagtctcatattggtttaattgattcccgatatctcgtaatccattacactgttgtttgagacaatgagtggtttagttaagagtctctgctttaat

SEQ ID NO: 145048 - DNA, 362 bp, Glycine max
  unsure (1)..(362): unsure at all n locations
aagcgttgaaagtgcannatttcactntctcgctaatctagcatattggcttagcgagcattcgctaagcgcaacactcatgggctaagcgggaggaagactctggaagaagatgagctgtacaggttcgctaagcacactacttcagttcatccgctaagtgagaaaggcacgcgctaagccgaaattcactaatgtgcgctaagcggtccataagtgcgctaagcgcacgagcacgaacaaggccacctatttaagcctgaaatgaaatnttgggagggagtttggactgggattcacagatttgcatgtctaggttttctagagagagaaaggtccaagttccagagagttctgagaga

SEQ ID NO: 145049 - DNA, 248 bp, Glycine max
ttttttggaatttaataaaaaactaaagatagtctcatatgggaaaaaatgtccccatcgtgtctcaatagaattaattgatcgacctaatattgattaacaatactcgatccaaaagatcctcagtgaatggtgatctcttactattatttcctcaaaagagactttcgattattttacggtttcacgaaatttgggttattccttccataccttttttgggattaaagcaggaacccctttccttt

SEQ ID NO: 145050 - DNA, 474 bp, Glycine max
  unsure (1)..(474): unsure at all n locations
cagagaatgaaggagaacgcagagaagttacagaaatgttatgttttgaaagaaccctaggatcgactcagcaaatgatgccataatagaacagagaattgagagaaaactcatttgattctggtataaatgtttttccaattgttcaattctgttacattcttggtatttatacatagtgtgagagtaactaactttgccacttgggttacaactgtgattataaaagccatgactaacactatcaataacaaggctaacacatactctattacctacgcagaatcatcaagggtcctatttcttcctttaatttcataagttcgtagatgtacttccaactctagaatcattgcgtgtagtggatctcgacgacnacaaagatgagtcaggagaagcaggggaataacacgggacaccaaatatctgtgatgaatgtaacatgtattaaaagtgattcataatagacgactt

SEQ ID NO: 145051 - DNA, 397 bp, Glycine max
tccattaggtaaggtgaaaacatggctcctatcactttttttaaaagcctcaacacttgggaagaggtggaggataaattcatagcgagattctttcctccatcaagatttatcagtgcaaaatccgccatcgcgatgttttcccaaggatctgacaaacctctctatgacacgtgggagagattcaaagctttgttgcggaggtgcccaaaccataactttgatgatgctgcacaactatgtagaagcaagcttcatgatgaatcaagattgattcaaggagttttgatgataacaaagatgatgccaaaaagctcacaagtcaagaacacttcatgttaacaaagatgatgacttcaagaatcaaagaatgagttcaagattgaatcaagaacac

SEQ ID NO: 145052 - DNA, 211 bp, Glycine max
  unsure (1)..(211): unsure at all n locations
agctngaagctcaaagagaagcttgaagaatttntggcttttacatgcccaactaccttgagtggcatttgtattggctgttaacttggctgntgcatcctactagatatgatatttgtattgcatcatgcatcaccatggctagcgtgaagaaaagcctttaagttataacagttctttcaaaagcacacactctattttaatccattac

SEQ ID NO: 145053 - DNA, 191 bp, Glycine max
tctttgctctttatcggatgacatggaccagccgaaagcctcacaccaacacattacttcactgcctttgaagagaactacgtaggtctgattttctctttgatgtgagggtacgtacgagccaaaaggctgtctttttgagctcaaaccctaaactagacaaaggactagatgcatgactcacctacgct

SEQ ID NO: 145054 - DNA, 280 bp, Glycine max
aaccacaaaagatgatgacaaaggtgatgaacaaaaagctcacaagatcaaagaacaactcaagtgaatcagaaaacatccatctcaagaatcaagattcaagattcaagttcaagaatcaagaagaattcaagactcaagaagaaagcctaccaaccaagattcaagatctcaagaatctagatcaagaatctagatctccagaatcaagatcaagagttatgaatcacgaattaagaatccagactcaagatctccagaatccagatcaagagtcaga

SEQ ID NO: 145055 - DNA, 196 bp, Glycine max
cgagaggggtttatctcaattgtgttcgggggaaaccaatcggtagcctaatctacacttcaagccatcaataatgaagttgtcaacctgaacttacaaaataacactcgtgtttaagcacaattgcaccactgcaatttggggaaaaggggtagggactttaatgaaaacactgtgacaagactggaggatatgt

SEQ ID NO: 145056 - DNA, 240 bp, Glycine max
gctctctgaagagaactaatgagttgaaaccccatcatacaaatcaatcggggtaaatggtgtttacagccgaaacatcatgtctgccatgctgacatcttatttagattgctccaatacaggtactctcagctttctaaattgctaacattttgggtcacttttgacgctaagttatttcttacatctttgagcggacacagttaagggtcccatctgacccctctttaaactaacccg

SEQ ID NO: 145057 - DNA, 302 bp, Glycine max
cctaaacccctttggccgatcccatatctgttagcgaggtacctgatgctattaaagggacccaagatgcaccagaaatgccctgatagagaatgctgtagctgcctgacctgatctcacaatatcctcttattatgtatttcacagggggaataaattgtaagtatactgattagttgtgccttcctcaaccattctcctctcatgaaaataaagccacagccaacaactctcatattagtttaaatgttcgtcactccacaagcataacataccacctgttgtattgactgccggatgcg

SEQ ID NO: 145058 - DNA, 303 bp, Glycine max
  unsure (1)..(303): unsure at all n locations
cccaccatcttttcatagttgaatactggtnatgtgtctactatcattgttatcatttttttctccttcaattaggtgccacttgagctgccagatctcttcacctttgggcgtattctttgaaagatctgtgcccctttttgcacatgttctgtagttgcatcctatcccgaaccagatcaaaattgtactgatattgcctaacgaaggcaaccattatgtccttccaagaatggactcttgaagattccaagttagtctaccatgtgacagctaccccagttagactttgttggaagaaat

SEQ ID NO: 145059 - DNA, 242 bp, Glycine max
ataaaatgtcgtattggcattgatttaaaaaaaaagaaataaaatatccacttgaactgttcaaaaattattttttataaaaggagatgaaattagataatatagtgtacatcatcctctgggcattctcacactattcaagagtgaattaataactctttgaatttgaaatactaaatcaattatgatactatagatattcgttacctttaaaaaacataagacaatgtttacagtcttgg

SEQ ID NO: 145060 - DNA, 275 bp, Glycine max
gaagccaattcttattttaatcgaccatataaagttaataataatatatgtggactctgaaactctgattattttcgctattattatattagttaaattaaacaatcttagtaaggacgtcttgctagctcaatagattgatatagtatttaattcctgtggataaaaagaatctttttttgatactttaatttattttattttaagagaaattatttgtattaatagcgtaattatataatgtcgcatttaatataattaaaaatatcaatgag

SEQ ID NO: 145061 - DNA, 362 bp, Glycine max
  unsure (1)..(362): unsure at all n locations
ctcacgccttgactngagtcatcaagagattatatatatatgaccatggcatgagttcaaaaatcatcaatcaatcttgaatcatctatcntttacatcatcttctgtcaacatccttgaatcaatctttcaacatctctcaatatcttctttcatctctttcaacactttcaacaaaactttctaattcatttctcttcatctttctaaaagtttttgctcaacactttctcttccaagaaaagttatttgttcaaaaacttgtgctattcatctttttcattctcttctgcctttgcccaaagaacgaaagactaaccgcctgaattggttggggtctctcttcttccttacaaaatatt

SEQ ID NO: 145062 - DNA, 414 bp, Glycine max
acacacgtggagaacttggtccttacacgagaggacatgtgtgttaaacagcgaatccatagttgaagacagatatttgaaacgtggagctgatgacttcttttattttaatctagttcatctcactaagccgggccttattaaaaactaaaactgaaactcttacgagctaatcataaactttctctagtgtacctttgaatggtgatgctctatcatacaacccctatacattcatttgtgtccttttgtgtgatcattctgctgaacaaaatctcgcttaatgatattagtcactggagtaagattgcatgccctcaaagacataattattactcccgtggctagaagaagcaaatatgtgagacatggaatggttgggctatgaaatgacttacctctttttatgagccc

SEQ ID NO: 145063 - DNA, 333 bp, Glycine max
aattcttgctctcttacctcttcgaggctctatatctagttctggttgtgcaagattctcactactaatatcaggaagataactggatgaagtaccaatgaacacacattcataagctctacttgcaagttaaccatcttagggtctgggatccttacataagccagacatccgcaagttctcaaataagacaaatttggttgttttttctttaatatctcatagggagatgtcttgctctttgatttggggattctatttagcacataagacacagtttacaaaattgcgtccaccacaaagatgtgcactagaacccaacatagtagctac

SEQ ID NO: 145064 - DNA, 315 bp, Glycine max
ttgcatgaattgagtggagtgtgatgcgtacatcatatgcctatgaatgaggccgccacgattataatagaaacaacatggattgtgatatgactagaaatgatagttagtttgacagatcgattgtgaaggtgctcattaaccataacccggtgagtgtgtgaactgtattttgagggaacgactagtattgagtaatgatttttgcatgaatatttgactatggaatgaatgcatcgatgtgaagaggatgaaggccatgactgattgaaactgccacataaccaaaaagcttaccttgcgaatgaaatgata

SEQ ID NO: 145065 - DNA, 347 bp, Glycine max
ttgaataacacaaaatctgatttatataaacttattacaaataaatgcacataatattagaggatcgaggtttgttctctcaattagatatgacttgcctataaatcatatatgaattgcctataaatctctgttaaataaaaacaaaatatttgaatttgattttcaatagagagaaaaatattacagaaattaaaccattctattaagaaaggcgtaatagcttcacaagttggttgaacaaaaacttattggaaactagagagtctaattagaaattcaccaaacatcccacattgggagtaaatgctaatttctgttttgcataaaaatggacatataattac

SEQ ID NO: 145066 - DNA, 316 bp, Glycine max
  unsure (1)..(316): unsure at all n locations
ttattgctagaggatggcgccttctctcacctcttctactttatcttctgccacaactccatggctgataaacaccatttgagaaccttattgaaactctaagatccaacctccatagaagcttctcatgctagcttccaatcagtggtatcaaagtacatgagctttaagtagtactccttanacctccattatccttcattggtatttcttaattattctacatgtaattcctcacatgtcttgtgttgcatcgtgttaacatgatcctatcgaaattccaccgattaaacctgctctaaagccagattttatt

SEQ ID NO: 145067 - DNA, 137 bp, Glycine max
ggttttgctcggtctagaagccactgctgatcacatatcctccactagtccattaagatacaccttattattacagccatccgctgttacacaattaaaaagagctatcattttttcaagcatttgtaaatacatat

SEQ ID NO: 145068 - DNA, 364 bp, Glycine max
  unsure (1)..(364): unsure at all n locations
agtgaaaaaaaaggcagccccttatgcacttctctgtctctcaatttgctgagggaaattattttcgtgaagaatattcaagccgaggcgctgtcattacggttccataacatttgtgtgagtaattacgcgaagagtttcgaccgttcttcaagattcatcgctcggtctttgatttcttcagtcctcaacgggtaagtacctcataccaagcttttcaattcattatatgtatccgcggtgggccacanttttgttcatgtatatttattctcgtttgcatttactttttatacccccttttgacgtgcttaagccatatatttaagtcgtttctcgcctaatctaacaataaaataaattt

SEQ ID NO: 145069 - DNA, 325 bp, Glycine max
  unsure (1)..(325): unsure at all n locations
cttgtgtatcgattacacttatttggtaagtcgataccttttactgtctctgataaacaaaagatgaactcttcaaaaggtttgctttttaaaatggtttaagtttttaaaagtataactcttctaaatggtctcttggccagacatgaagagtctatataagcaaggctttgattttgctttcaatacagacttttacacttttacacttattcaatcaatcctttacaagcctngaatctctttgaacttcttcttcttctttgtaccaaaagctttctgaagtattctggttttctaaaccttgaaaacttgtgctattcat

SEQ ID NO: 145070 - DNA, 396 bp, Glycine max
  unsure (1)..(396): unsure at all n locations
tcattctgtgtaaagttanaagcttcaagaaaaagatggtctctgcatattccttatttccagaagggaattctatcaatagacctccaatctttaatggagagggttaccactactggaaaacccgaatgcaaatatttatcgaggcaatagatctagatatctgggaaaccatataaatagggccttatatacccaccacagtagaaagagttttaatagatggtagttcatcaagtgaaatcataaccatataaaaacctacagatagatggtctgaagaggatagaaaacgagtacaatacaacttaaaagccaacaacataataacatctgccctaagaatggatgaaatatttacggtgtcaaatgtaagagtgctaaggaatgtgggac

SEQ ID NO: 145071 - DNA, 330 bp, Glycine max
ctctgggaatctttcataaaagggctatcttaatggagactgtttgcctacctggtggtctagagagcatatcttgcttcacatggggaagaatacgatgaacctgtcttacaaccaaacctcccataccaggttgatacatatgttgaccacgctagcacgatcatcattcgtgttataatgctttaaaaggctcattgagtcttgtgacaatgaagtttcaacgatcaacgaatggattgggagtgttgattctactagatagtgggagtacagataacttcctccagcctagactatctcactgcctgaagttacctgttgaaccat

SEQ ID NO: 145072 - DNA, 236 bp, Glycine max
  unsure (1)..(236): unsure at all n locations
agcaaataccaattaccacctatgaaactgcaacaccttgagaggaagcattatgtctctcattattagctgctaacgatggttaaacagtgctacatacctagtttggcatgtgctgctacttgctanatttctaaataaaataaataaacgtactattggaacttaatgcttcctgcacacgaaatggtctccaaaacattttaacanacaaaccttccacattaccgcatatg

SEQ ID NO: 145073 - DNA, 289 bp, Glycine max
  unsure (1)..(289): unsure at all n locations
aattacaaacgttatctaatctcccatttttgttcatagctagcgatgactatgatcactacatcagaantaagatagaaaacttcacactaagacccactggctgtataaggggtggcgatctcatctgtccatcagttgggacaaagcatgacgcagtcctctcaaacctgcattgaataaaataagtcccagataatggaatattcattgctaagctaaatagttctgttgaaagaaatgatagaataattcaaaaagctacggaagaagtgcttatagtcatgtg

SEQ ID NO: 145074 - DNA, 405 bp, Glycine max
gcttatatatatatatgtttatgtaagttttcatgtttgatatatatttggagaagagaaatgatacatgatattggatccttataagaagattaatatagtaaaaaaaatattatttatatttacttaaactaacgtatcaaatttaaaagattttttgatgaatagcgtgaaacttaaccttacatatgtcatgcctattattattgcacctgctatatcttttagtgtaaggctcaaagacggttcttgcctatgcacgtatttagactaatttaactctctaattggtcaaaggatattatttgacaaaaataaattattttttaagttgttctttacaacttaaaaaacagttgttgtattgcaatataacttcaaataattgatatatcaaagatatat

SEQ ID NO: 145075 - DNA, 387 bp, Glycine max
  unsure (1)..(387): unsure at all n locations
gtaaagtcattctaatctttttcaagagatcgagaaagtgagaaaccatgttcattattatactctttcattttggtgtaattttttttacaatatcttgcttacttcttgtgttaagaggcattagacattacagagtgggaagtatcatgcatggccttccaatataactagnttctgtcaataattctaccttgataatggcatgtaaccataatggaacagagcattttttggagttcaataatgagattgtaaataagggtgcacaatttaactgtgcatcttttggtgtcacagctttaataactctctttgtttcgggtgtttattttaattcctatnggaagaaaacattttgcaatcacctcatagatggttagaaat

SEQ ID NO: 145076 - DNA, 52 bp, Glycine max
tttatagaaaaaaagattgtataatatagggcaaattgaaactgtggaaggg

SEQ ID NO: 145077 - DNA, 386 bp, Glycine max
  unsure (1)..(386): unsure at all n locations
tgagccaccacttggtgctctgtcgaagtagagtttctctctgtgagataagatcaattgcntgagaagtctctatccttcagcttgagtgagccactgtagaatgagtcaattcaagtcgagagcctctctgtgaaaaagtataatatcttgtgagatctctatcctcgttctagagtgagccaccatatagttgaggaatttatgttacacattccagtgaccctactatcttttgtgtagtgggagaatctccatatatgagaattatattcatgggctctcattactacctgtaatactaagaggttattttaacttcgcgaactggaaagactgagtttacctacaaattttattcgagttgaccttctatattggttata

SEQ ID NO: 145078 - DNA, 368 bp, Glycine max
gtctgtatggtggtcaactgatgatcacatacgaccaacccttgctacagttcagaatattgatttaatgccagctgggttaccaagttgaacaacgcatacagtttgccctcaagcttcttactttcatatgatgcagaggggtttgtagctacctcatgcactcctctaatgactatggcatcatttctggctctaaactgctgggagttggaggccatcttctcaattaatctctggcttcaacaagagttatgtctccaatggctccaacactggcttcatctatcatacttctctacatattactgagtccttcatataagtattggagaagaagctgttcttgaactgatggtggggcaact

SEQ ID NO: 145079 - DNA, 206 bp, Glycine max
  unsure (1)..(206): unsure at all n locations
tgtctggtcctatcactgctgcctaattggctgtgtatctcgatcaccgcctcttcttcctctgggaaataaatcgtcgtccacttctacatgaccatgcgacgatcaagattaaaggccctctgggctaaaactatataatgattaacggatctccttattngagacccctcctcatgaccatcgctaccgaaaaccctaatata

SEQ ID NO: 145080 - DNA, 233 bp, Glycine max
aatcccaatgtagatgcgctgtactgctgtcgtttgcgcacctcattattttgctaagcacactgcttaaggttatctgctaatctagaaaggcgcactaagcgcaaaatacttacgtgcgctgagcgctcgagcacgggcaaagcctcctatttacgcctgaatcacattttgttaagagagttaggacttgcattcaaagctctggatgtttcatgtttctagagagagaa

SEQ ID NO: 145081 - DNA, 351 bp, Glycine max
cgaaaaagaagtacgaagtcttcattaccgatactctacaacaaatacttattgcactgcataatcaccataaattggtagagtctgatacaatttacacaaggtttagtcatcaaagctagtcgtgtgcaccgtctgacacctatgctcactagctgacactcggtagctcttctttggacttatcagggatggtcaacaattttagccctctgattgtcttaacggctgggacgaacttcatttagacctaagactagccgttcacgtctctcctcataatcatgcgtttgacccgcaagtgagtccttgggtctctgtggcgcgtaatctcactgttgctgcctcaca

SEQ ID NO: 145082 - DNA, 295 bp, Glycine max
ttcttccatggcttattccctaatggatggcaccttctctcacctattttcctttgtcttccgctgcatctccatggtggaaaatcaccattaaaggaccccattgtagcttcaagaaccagcctccataaaagcccaaccagcaagctttcatctagtggaatcaaacacaaaaactttcaacacgtgccccataaacccacattaatttttatatttaccttctctaccattgctgaatatcatttatctcctgtatctcctctcatgtcttgtattaatgacgctaacatga

SEQ ID NO: 145083 - DNA, 377 bp, Glycine max
aaaatttattgatgactcccattttttcttcttaccgatgacgacttacacgatacattcctttcgcgaacataatgtggaatattcttaaacgaaatcaatatccatctctctgccgtagtgtcagattgcgtacactagataatcgcatttgctggtatgactttatagtaatcctcatcaccgcctctagataccatattgtgattggatcacatatacaacattttatgaccattacatggactatgccattgataacttagtctgtatcaagtaacttaccttattgccctgaccctcacatgatgattcaagattgccactcttgattctaacttctttctgcgggtgaaaatttatatgagtcggcgcta

SEQ ID NO: 145084 - DNA, 330 bp, Glycine max
cacaaaagagagaagaaatcaatattccgttgccagattgacaaggaagttgtcagcattatccaccatactgcctttaactcacactgttaaggtatatacatctctgtaattatttctacatcttggagaaaattgttaggtactctctaaacacattttggttataagagtctaattaatctctatatgacatgcatgtattcataaactgatcaaacatgttataggtaattaagggaatctattgtaatatagcggtggagttcgatctctctattaataaaattaacattctaacacattaattttatccaaaaaaaaaattat

SEQ ID NO: 145085 - DNA, 304 bp, Glycine max
  unsure (1)..(304): unsure at all n locations
aactcgagtatcgaccagattgtagaacagntgttcatgagctcgacctaggtacataaccactcaatctctaatgcaaagcttggagagactaaaatgtgttaatgactcantatttatataatccaaagatacacaatccctcattctcacaagcaaagcctattgagactaaaaagtgcaaaagacttggtatttaaacaacccgagggtatatagcccctcattcatgaatgcactagtctaagagattaatacgtaaagaattggtatttatacaactggaatgtacacagcccatcat

SEQ ID NO: 145086 - DNA, 406 bp, Glycine max
  unsure (1)..(406): unsure at all n locations
aagcaaactgatgcatggttatttgtaccctgctgtgctaaatatttattgacctgatgcagggaatgtggttagtgctcctctggtgaccaccatacagacctttgcccttccatgcagcatcctggagcaagtgagcaacctgaagcctatgctgcaaatatntacaattgacctcctcaaccttatctgcaaaatcaaccacagcagaacaattatgaccttcccagctacagatacaaccctggatggaggaatcaccctaacctcagatggtccatccctcagcaacaacatcagcctgctgcttccttcctaaatgctgttggcccaaacagaccatacattactccaccaatgctacaacagcaacaaacctagatacagccaacagttgaggcccctc

SEQ ID NO: 145087 - DNA, 324 bp, Glycine max
cccccattattactaaatacacccccttgctctttgtggtgaattcttattccgaagcgtacgaaattttttaaattttataacgatgctagtttcgtttccataatgttatgaaaccttacagattattgcaatcattcctttgttgccttcagaaacgttatggaacgttactgattgcgcactaacacttccttttaattttcggcgtgtcacggaactacacggattgtgctacaatgccctctctcgacttccggcatgtcacagaacatcatgaatagtctaacgatgggtgccaagtacctcaaagtggtcaatgag

SEQ ID NO: 145088 - DNA, 456 bp, Glycine max
  unsure (1)..(456): unsure at all n locations
gatcttaagtcactgggctgctgctcacgaancatgtacgattttttttatcctatctcgacagggagcttcttcatagaactctaacctataggtcccttattgatttgggagaaaaacatcgtccgataacattattctatttttcttgtagtagcatttattatgacttcgagcaaatcgtttatggctttacattcagtagagtccacttatagacttactggcgaggaattcaaataaatcttacagttgaaatcttattatcgttattagaccactagaagtatatccgtctcttgttattgattagagtttatatttcattatctagtattagtttattatttaacttcttgaatgacgtctgaactaatctaatttaatgtgatctagaatcaatttgtgttcttacactctataacccaagaaatactatatactactcagtcttat

SEQ ID NO: 145089 - DNA, 361 bp, Glycine max
tcgcttatggtaattgggaactgattttactttactacgtggatcatgacattaaccatacacttgactactaatcactctgctataagttcggcgaataaaaactctatagctcttatgaaaaagaactataaaagtataggattttctcatagctaaataattcgatgagtaaggtttcagggaaacttactcatatttctttattatttacgtgtcataaacctcatggaaacctattcaagaggcctagtggatatttctaagttgctcacttgcacataaattgaagatggtgataaatgagtttcaaagaaccttaggaacaaacctagcagagattatttatcaattgctatat

SEQ ID NO: 145090 - DNA, 318 bp, Glycine max
gaccacagagtggtacctggagatatgtagagggggtcaagagaccttggggacgtcatgtggggtgctattgcccaaatccaagcttgaccaatcccgacccaacccgggcgtaatcctgcaatgagaacctgtgacctacctaaacaggcgagctcctggcagtcaaccaataaaagaacaaaatccacaaagcaaggaggcttgtgtggcggctggccatctatgaatcttgagtggtatctggaattcggccctcggaatcgattaccaagggtgtgtactcgactacacggcttataaatggagacaggatgt

SEQ ID NO: 145091 - DNA, 227 bp, Glycine max
ctttattgttgaccacagagaggtacctgcagatatatcctgggggtcacgacaccttggtgaccactagtggagtgcaatcgcccaaaatcaagcttgaccaatcccgaccctaccctggcatagtctgtctatgagaacctgtgatgtgcctaatcacgcgatctcctacagcctacagataaaatgatcatataccacaaatctaagacgcctgagcggctggc

SEQ ID NO: 145092 - DNA, 349 bp, Glycine max
  unsure (1)..(349): unsure at all n locations
actggacatagcaacaggctctgtattgttatgatgacttaatctagctgcattcactttcagatacttattgccggcccaaaataatcatagctattaaggctaactccttctggaatatggttggggtaagggaggttgtgacatacaaagggaaacaaacctctacatgactccaagaattattgaattaacaccatctacatatctaaatatgagctaaaaaaaattgactaataaaaaataccatcgagagatgtttaaatatataaacacatatacatagttactaatctccggataccagcacacattgcagccaactcaaagaacactacangaagatatc

SEQ ID NO: 145093 - DNA, 339 bp, Glycine max
cacattaaatggttgtcacttcatagccatttcaaaaatcaaataaacatataattggttcctgaactttgcttcaattatgtacagcgataacccatgagtcaaatgcctaatgtaaatcaattttcttgtacaatggactgactcattctaacatcaactaacaacttttaaaaataaatgtcacctcaaatcgaagaaaatcaacttgattagaacaatgtccattgacttcaaccagattaacagactggttgtcatctgcttctgttgttgaaatatttttcaaatcctgcaactgagaaataagacccttaagcactcacagacacagacatg

SEQ ID NO: 145094 - DNA, 400 bp, Glycine max
gcctgcaatttaaacttgcaacataggagttgattttgttaaaagaatcctcttcacactcttagaggtgactttgagcgcttgtttatagacgagtccgagtcaatttctgattattatttctcagtattggcccgattcaatcaacttaaaagaaatgtgtgaacatgttgattaggtgaaggacatggaaaaaatacttctaactttaaatccaagttttgacttcattgttaccaacattgaagaaaacaaggatttaaagaccatgactattgagcaactcatgggttccttacaagcatacgaagaaaaacataagagaatatttagacaaaatgaggctacaaagcaactactactactcaacgtaaatgaagcaaactatgcaaattacaag

SEQ ID NO: 145095 - DNA, 467 bp, Glycine max
taatacatacttggaaataatgcttatagaacccaactttatgctatagacacagttgcgaaattggtgcataatgatacaagcaaaagatcaaaccatgttgttatggatcttagcatcgatgaaacataagaagtttgactgtgttatatagatttcaccataatagctaaaaagttcaatacaaaatgtggaaacaactgagatagaacgtaactaaattaacattttaagaatattatagtgttggtggtgttaaagaacggttatttcttataatctatttaagaatacactatcacaacgactgatacacggttttgaattagtatcacgaatatatcaaaatagaacatgcattgctatcaatacagaacatgcattgcaaaagaccatgcctgggaagctatataatacacatatgtgtgtgccaaattacaaccggctacattactaacgtagatgac

SEQ ID NO: 145096 - DNA, 245 bp, Glycine max
atacttacttcgtggttatgaataaaagcgcaacacggaatccaagaatgtcgaaaatagagatcctatggctgcaaacttcgaaattccgcgggtatggcttttgaaaggggggaaaatacatttttgtatgtcaaaacgttccccctttcgtcacttttatattctggtgcaagggttgccccccctctttacacaccatgctcctatatttacgcgttgcccaacattatatcctggtcttt

SEQ ID NO: 145097 - DNA, 397 bp, Glycine max
  unsure (1)..(397): unsure at all n locations
ttattcatcaaactagagtgtatctctcttatcttagtgagagtgattctcctatattcttgagtgattcaagaacaccctggctgtttaaaggactttcacacctctgtgtgttgccctcgctggaaagaaagatatcttcctttctttcatcttcacccttgttctttccaaccacattttcagaaaatccacctctgcccagaattatctcgtggccataacttccactttacgcacctcaattaagtgatgcttgagcctaaatcgactctcaaaacgagacctttcacctcgtttggatcacctcattggagccctgtgcttcagtattgtcttntctatatttttgtcagccacacttaacctacattttaccatcccattcatccatttt

SEQ ID NO: 145098 - DNA, 381 bp, Glycine max
atgtgtggagatatgctctagctttgaagaaagtttcttttgaagcttctgaggaagttttctatgatagcttcttaaggaagctatcctttctatcaatagaagcatgtggtacacttgttgtatctctgatgaatgaaagtcttgagagacacaactcaagttcaacttctctccctttgtgttccttaatttggggctcccccctctatccttctctcttttatctttggcttcattgaatcatactcttcagcttcttatccaggctcatctggagggaagctgcttttccttgcttatctcctatggaggcgcctccttcacctctgtctttggttacgctggttcttctggggataatcccttgaggacttttga

SEQ ID NO: 145099 - DNA, 373 bp, Glycine max
  unsure (1)..(373): unsure at all n locations
atgatgttgatcatgctacgcaatattcagagattatgcaccaatggatagtatcatctctatggtggaaatctcatactcttggatntagcgaagaagcaacgtaacaaattgctctttccactacaatagcatagtatgtccaatagaaagttgttggtctcaactgatatggatcataaaccaattggaagactacaatgtctctaagagtaactttcctatctattgtgacaacatagttgcaatccatctttcttataattcaacattgcattctatggcaaaaacaatagaaatcaaacaccaccttataagagacgatgtttagacaggaccatggatttacgtttgtacccttggagagagtttt

SEQ ID NO: 145100 - DNA, 262 bp, Glycine max
cacttcattatttcaggctgaataccacattacctaattttacgaccatcacatgattaattcctgctggatcgtagtaacaatttattgtttatgacccgaaactaagaaactcgcgtccaaaatctggacatgaaagttagaaaaaaaatatttactcactttgaaacactacattatgcgtattcgttatattctcatttctttagggataacagaatctttgtgctacctctttcatcctaagccaccattatttttt

SEQ ID NO: 145101 - DNA, 282 bp, Glycine max
cttctttctatctcgtaatccactttctttcaacctccttacatcatgctagaatgaagtcattaaaacattcatacagttcgtagaatgccaaaaatggttgattaatcaaatgaccgacctcaacaaagattttgtcaagttccgaaaaatgatcctatttatatccaatcataaccgatgttctcaataatcactatgaagattattaaattttattgaaaaaataaactatcgaacaacattcgtcacccttaactacaaatgctaacctatctttaa

SEQ ID NO: 145102 - DNA, 388 bp, Glycine max
  unsure (1)..(388): unsure at all n locations
agttatgatggaaatttttttatgtcaagcaatatcatcttggctcccctcttgccaggacactacgcagatatttatcctttttgctgtgggtgggttgaaagagtattctgaggcttaaatttcccattanttgttattctttgggtaggcatatatggagaggttcgaatttaaactagcataatctggtacgcttttgactgatatgttgctgcgacatttatatactatatggcaggttcttgaccgtggagagaaaattgagcttttgggggataaaacagagaaccttcgctctcaggtccattgtttgctactattgcatgttaagatcttttaatgattctgtgaatgcgaagtatagagtattagaaatggaagtggg

SEQ ID NO: 145103 - DNA, 357 bp, Glycine max
gctgcctaaaatacctgatattggagataatgattattgatcacacaaaatgatattactaagtattcattacctatactgtatagaaaatacttataacactacaaaatgaccataaattgggagagtttgatacacattgtacaagtattatacacaaaagttagttggtttcaccgactaacacttatgtgctggctgctgacgtcaaaagttcgcaccaccatagagctcaatctcaggtgtgacgcgtggatatgcaattagttcaaggtatccttgggcatgacattgagtgaaaagccattgtcaatgagcaccttatccatgatatggtccaagcacttgactgacaca

SEQ ID NO: 145104 - DNA, 297 bp, Glycine max
ttttctcaatcccttgcggatttgctcaatgacacaaccctcctatattagactacctatgagggctgagccttacaccctctcgtggactatactcatctatatgcttataacagttagacctatttatcctagcgtggcctataccctgcttgtggacttacttctaccatacaacatttttgggatgcatatttgaaccacaacttttccaagacccctcttgtagactagttgtcctctgcttattctagtttgagcaacaatacatttctatgctaagatccctaactatgc

SEQ ID NO: 145105 - DNA, 426 bp, Glycine max
  unsure (1)..(426): unsure at all n locations
tcagcctatcgctaagcaacagcttatccttggctattcttgacctatngacgccaagcacaattccttactgccataactgaggtcaatgaagctaaacgccagtcctggcagctaagcgagattcattgcagcaatatgcgcgctaagcgagtccttatcagctaagcgcatgctcctctgtacttaagatgcatcactttagctaagccatccagagtctggcttagcgagagttgcagcttttccgatctgcaaaccttgctaagcaatctgatcctcgcgctaagtctagtatgtgtgttaaaaaaaactgattttgaatatgaaacgtccgctaaatgcgccggctccgctaagcgagagtatcaaaaaaatttctaagtgagtgtaacaacaggtacactcacatttgccagattccga

SEQ ID NO: 145106 - DNA, 352 bp, Glycine max
ggaatcctaatgatggatctaaacattttttcaacattgcgcagaaaaaatgttaaaaaaaatcgtcaaacataattaatgtgaacaatatgactaaagaggttgctactttaaaggcgtctgaagttcaagagggaaaatagcgaaacttacttattaccaccattatctgcactacgcatcactgtgaactcattaaaccaaagttagacaaaatatttgatgttctccaagcatgggtaaccttccactatcttgggcgggcaataagccttatttatgttcacatacacttcagcctatatcctaatatcaagttatttggacacaacatagtgttatgttaaaaaat

SEQ ID NO: 145107 - DNA, 273 bp, Glycine max
  unsure (1)..(273): unsure at all n locations
caatggattttttggtaacccaactggccttgaatcagaaaaccggacctggcgcaagagtctgcgggttatgctcctctgctgaacaccataacaacccttgcccttctaagcancaacctggagcaattgattaacctgaagcttatgctgaatacatttacaaataaacctccttaacctcatcaggagaataaaccacaacagaccattatgacttctccagcaatagatacaatcttggatggaggaaacaccctaatctcatatggt

SEQ ID NO: 145108 - DNA, 330 bp, Glycine max
tcaagctgatagatattataggtaacatattattttattgaatttgtgtataacaacatatctataacatttactacaaaaaacagataataagtcgaacctgaagggctatttatattgctcatcttgcataacattttaagataatttctctctgcaaccctttgaaattctcttataaataagtgaaaccgtgaaagatacaaagcctaccactctttatggtactaagatgtatcttctctttattcttcaagcatggaacgaactccatctttctcttgtattaagactctttgtcatcttctgtcccaaaaaaagtcactttgt

SEQ ID NO: 145109 - DNA, 374 bp, Glycine max
tcatttcttcttgataagtccatggaagatgaatgagaataccacaccagacatagtttaaacaattttttcttttgccaaatgccaactaatttcaaaattattatcaaatttcaatggatatatatcaagctatcagcatatattagagattaattaatgtacttaaaagtcagacaattcaagggaacgataattaccttacttaaaggtctggctttcaaaataatgctttgtacattataatatataaacataaacatcatgcaacattaaaattggtgtgaacaaatataaatcaagtgccattgaaaaagctgaaacttactgagcattttctccttcaatggttggagcacattgaataatgtaaa

SEQ ID NO: 145110 - DNA, 475 bp, Glycine max
tcaagctgtcaattggttcagaatgctgcacaaaagggctaatgtctgtgtggtggtcgacagaggagcataaaccacagagtcttgcgacaggtacaaattgtttattcatggccagttgggttaccaagttaaccaaggcatctagtttaccttcaagcttcttagtttcagatgatgcatatgagtttgtggctacctcatgcacccctctaatgactatagcatcatttctggcgctaaactgttgggagttggaagccatcttctcaattaaattcctggcttcagcaggggttatgtctccaagggctccatcactggtatggccgtttgaagtttgaagtttggcgaaacacaagttctcaaattgttttgaatctctcaaatctggccacaccaagtgttcctggtatttttcaaacaaaatatgagtcaaaagaacctaccacaccaaaaatcagccaaaaataaa

SEQ ID NO: 145111 - DNA, 277 bp, Glycine max
actcgcattttcgaatgagtcccgtaatatatcgacacgctcgatattaaatgttgaaagctctagcgcattcatacaacaataacttcttactcggatgtccgaatcagtgacgtaatatatccggacgcttgaaattgaatgttgaacctctgaaccaactcaaacgacaataactttttactcggatgtctgaatgagtcccataatatatcgagacgctcgaaatgaatgttgaacgtctaagccattgaaacgacaataaattttactcgat

SEQ ID NO: 145112 - DNA, 308 bp, Glycine max
acatgtgtactaggtggcggtcgggtgatggtgcacaacaaaattattcacattcacaaagggcgcattaacccaccattctctgttgcccacctgcaactgagctcacgtacttccacgtagcccatatattcagttctcttaacaccgggtacccatcaattcttccaagcttttctcaacatccatgtaaaacaacatgtcaaccgcacaaactatcacagacaagaaaacagggttaaggcagaaaactctgcccataacaccaaccaaaatcacagcttgtttcacttaaagaccacagtaac

SEQ ID NO: 145113 - DNA, 290 bp, Glycine max
cactcctcttatgactatggcatcaattctggcgcttaactgctgggagatggatgccatcctactcaattaaaattttcggcttcaacacgagtcatgtctccaatggcttcaccactggcaacatcaataaacttctctccaattactgagtcctcataaaatatggagaaaagctttcttaatttagggggggaactgcacaaaattttaattttccaaactatcagcttttcactatgttaaaccaaaacccctcaggtggggccgcaaaaggaaaatttttaaaa

SEQ ID NO: 145114 - DNA, 345 bp, Glycine max
  unsure (1)..(345): unsure at all n locations
ttcaatacagtgctcacatcaacattcgtattataacggatggcgttttcctaaagatggtgcttcatggacctgtcattcacaagcgtttaactttcaacgatgttggcttcatagatgggcatgcaccatcgctgtatgttgatacgaccgttataaaataccaactttgtagtactgcacctaattgtcacccatatactctctctctcctattcatccatttattaataanaaagatgcgcatgataaacatgatgcaatattaaactgccattggtataatatgtttattcactgtcatttttattagcaatcaaatataaaacaatatcacttatgaaa

SEQ ID NO: 145115 - DNA, 252 bp, Glycine max
tcctaaccatacctatatcttggaatttctagatatttcccatccccgtacccatatatgtcctcttccgcattctggaacgtcctacgtggaaagtctatcatgttacattcgccaaacaaacaaatcaacacttttgatgcagcaatgcttttccaaaagctcttgaataaatctgcttcaagctagtcaaattgaagaaacactgttgatttgaacactatagtgtcagtgtagcagaggcaactgaaa

SEQ ID NO: 145116 - DNA, 155 bp, Glycine max
tttttttgaggaggggttttatttaggaaaattctcagacacctctatagtctacaactgataaggaccggagcatgtgtacatcaactcttgtcactccctgcgaaaagaggaaagccttaaaagatataacttcctggcaaaggggcgtatgg

SEQ ID NO: 145117 - DNA, 374 bp, Glycine max
  unsure (1)..(374): unsure at all n locations
ggatggacctttcaagtattggagatgtatcaataataatgttcttangtnggacctcccagaagagtatggagtcatcaccacttttaacattcctgatttaattccttctgcaggtggagctgattttgaggaggaggaaccaacagaattgaggtcaaatcctctttaatgggaaggggatgatgctattctccctatgaagggaccagtcactagagccataaacaagaggctccatgaagattgggctagatctgctgaagaaagccctagggtcctcatgaacctcaaggtagatgnctgagcccatgggtccaggtagggtccaattatctttgtacatattagactacgatgtgattatatctgat

SEQ ID NO: 145118 - DNA, 288 bp, Glycine max
gaaccttcgcagaatcttccggaaaacatgcggaaatgttcggagcgcctcgcttagatctgttccggaaacaatctttcgagctattcaacagagagaaagcctaagcgctgaacccttactttttacttcctccctattatagcaaatagggaggggttgccgccagctcgcccaggcagccagttgttcctccaaagcacacctttggagaatatttggaggcccagtggcctggtgctttgcaccccttttataaaacacccttgcctttttgggattttttct

SEQ ID NO: 145119 - DNA, 297 bp, Glycine max
ttacattcggtgttcttattgatatgttctatattcgagtttgcataaatttctaataatcataaacatatgattcgtggatatgatatacgctttctttctttgtttctgtacattttaagccactggccaaaaagttatcccaatgtatattattataccacttgcgagactattgagccaaacactatatattttgttggaacactaacctatgattaaagatgcctaccttaccttatgttatgtgagcaagggtgtttttatggagatttctatcatttgatggctaatgtg

SEQ ID NO: 145120 - DNA, 213 bp, Glycine max
aaaatattatttgtattcacttgatacctttggctacttgctagcattgctacgagtgggctactctcaacattcttgtaaggtacattaggtaaataggcttcttaaggatatgattaccttattagtatggctataactatttctgccttttgttaggggtgggagggaaaaaggaaacgatgggagggaaacaaaggtgaaaaaacattt

SEQ ID NO: 145121 - DNA, 348 bp, Glycine max
  unsure (1)..(348): unsure at all n locations
tccactagccatgtgatatctgtttcagatgagatcatataaatcaaagtcgatcaagttccagcaaataatcatccacaaaatggtgtctttacgagtctgaatgacaaatntggtgacagggagtctgaaaaggttttgaaccaaacaaagaatggggataatagtagtcaatcaggttcatctaatcatttatagaaagatgccaatggctctcaatcatgtgaagacagcggtgttaagagtgtttctgcttacagatcttcttcgcatcctataaccgcaccatcccctttgtctggtctgcctgaattctctcaccttggttggggccactggtttacatta

SEQ ID NO: 145122 - DNA, 237 bp, Glycine max
ccatggcgcatctaccaactccaaggcatctacccgatcggtgaaatctctgatgctcggggtgcctaaaccccattggcagagcccaaatctctcagtaaggtgcctgatgctattaaagtgacccaagatgcaccagaaatgctctgatagagaatgcgttagctgcctaacctgatctcacaatattctcgtatattgtatttcacagggggaataaattgtcagtatactgat

SEQ ID NO: 145123 - DNA, 205 bp, Glycine max
tatcattattttctccttcaattatgtgccacttgagctgccaaatctctccacctttgggcgtattctttgaaagatctgtgcctctttttgcacatgttctgtagatgcattctatccggaaccagatcaaatatgtactgatattgcctaacgaatgcaaccattatgtccttccaagaatggactcaggaaaataccaagt

SEQ ID NO: 145124 - DNA, 391 bp, Glycine max
cagcttaaataggctctgaacttaacctatatctggttcccaatgctctatttaaactctcccaaaatctatacgtaacctatgatatctattaaaataaatgctggatggcacaccatgtaatttgagaatctcactaataagcagggaggtctacttctccgaggaaaatatgatattaatgggaataaagagaacagacttggttagcctatcaacaataacccaaataaaatctaaacctctggggtcctaagtagtcctacaacaaaatccatggaatactatcccacttccattggggtatctctaagggttataacttacctgaaggtctttgatgctctatcttatccttctgacagactaaacatgcatacacaactcacta

SEQ ID NO: 145125 - DNA, 386 bp, Glycine max
tacggacctatgatactcagctttctacatgctttctgcttgtatctcatagaaatatattaacatgtagcttaagcatgaaaggttaacacacaatttatactttgttaacatcaaaatctttgagatttaattgtttgatacaatccaatatgacttggacgcagtcatacctaacaatatctagtgttagaatctccttccctaatccacttacttatagacttttgtagcatcaatgattcctctttagtagacaaattccaaaaaagagaaatgagagaagccctttccaccaattcctcattcgataattcctcctcctcatcctttacgtccaacatatatattttgtaaaccgcttctatatatgcatttgttcttta

SEQ ID NO: 145126 - DNA, 310 bp, Glycine max
tatgaagttcatgcagataagaagtgaactgagtgccaatttgaggtgggtgagatgatgtttctcaaactaaggctgcacaggcagcaatccttgggtgcttgaatctgccccaaactctctccaaggtattacatcccatttcagactttggagaaaattggtgcggtggcttacaagctgcaagtgcctgaagggagtcgcattcatcccatttttcatgtatcgttgctaaaaaaaagctgttgggaagtacactgtcaagggaactcttcccgagttggagagtgacaccacgaatcccatcaca

SEQ ID NO: 145127 - DNA, 231 bp, Glycine max
tgcgcgacttatgcagttcattcaatttatgtgtcaactgaggatatatgtgctagaaatggaccgggacccttttcctaaaaaaaaaaacaattagttacactctcaagcctttatacctctcagattctttacggtttttcatctcgagctcttctttctgacaatgcattaatttatcaaaccagttgtatcttccagtgattttcaggaagcttgggaatccattgc

SEQ ID NO: 145128 - DNA, 399 bp, Glycine max
  unsure (1)..(399): unsure at all n locations
aagctttacttatgggagggcgggctttcttactttcttgtcttcacgcgagctntgaccactgctcttccttcccgcgatgcttcttttcatgtccgcctgagtgggcttatagcctataccatacttcccacgatttccttgggcatttatcaggctagttatgccgccgttgtctttgcctaaacccattccgggttcataaccgttccccaacataactcgggccatcattactgctgcatcggacagacaaggctgcccagagaaggagtccacggaggaaatgctgaccacctcaaaagactggaaagcggtttctaacgattcttctgcggctttcacataaggcatagaggatgggcagcttaccaagatgtcttcctcgcccgacacgat

SEQ ID NO: 145129 - DNA, 400 bp, Glycine max
  unsure (1)..(400): unsure at all n locations
taatagnataaatttctgcatactgttggttgctccaataaatgtgtcctcagtgttggtattttttccttgaactgcctaagatgatactctgcaagtacccatattcaaattcaaatgcattaaattatcaaagacatagaagataaaccccaaaccaaaattagaccataaggcagagtgagagaaaacaaacatgggaaaaaatcactttttgagagcagagaaattacgttcggaaaatattattgaccaaagaaaaacatacaacttctgtcatcacaatataaaaaaggacatttatgtagagccaacctaataataataataatattaataacatcaacatgcactacagcaccaacaatatgaatagaatcataatctagctccatgcaac

SEQ ID NO: 145130 - DNA, 311 bp, Glycine max
acatactaagagtagataaactatataatgattttgccatatgttacactttcttatacggacaaactaagataagaggggtttactgtgactattcggaagatgtatatgataaggggtgcagtgtctcttacagttactatacctatcccctgtggaactataaacatgttctactgttagagcttgattaccctgattgttgaggggatggtatactaagaggaagatctatgtctcttgtcccttgtgagattggaaaagatgttaactaacatacaagtcgactttgaccaataaacatagcatgt

SEQ ID NO: 145131 - DNA, 342 bp, Glycine max
  unsure (1)..(342): unsure at all n locations
caatacctatcatcatgaactaccctaaaccatgaacatatggtagaggcaganaactctggccaaaacacattccaataccacagctttccctactcaaataccccaataacattctctttgttccgattcgttaaccgctggatagactccaagattttactggaggttcctaatacataagtctacatatggaccgctgggatcttctagaaaatgtccagcaacccaatatgtactacctttcccataaccagcaatgcacaagcattttctgcacaagaacaaaatatttgttgcacaattcaacaacaattttctgcataatagggcagatttcga

SEQ ID NO: 145132 - DNA, 347 bp, Glycine max
tcttcttcttactgaaggctcacggccgacttatatacctcaccaacactcgttctgatatcgcgtacgccgtgcaacaacttagtcaatatatgtctagccccacaaatgctcatcttcaagctgcttatcgggtacttcgatacctcaaaggaacaccaggctccggtctcttcctctccgtcaccggcactcctcagctccgagctttcagtgactcggactgggcaggctgtcaagattccaggaaatccaccaccgatttcgtggtctacttcggttcttctctcatctcatggcaatctaaaaagcagtccacagtttcacgcaactcttctgaggctgaa

SEQ ID NO: 145133 - DNA, 417 bp, Glycine max
agctgatacaacgtggtataagtgttttctatctggaccatgtatttttccttggttttgctgttatctcacacggagtacacgttgatcaagagaaggtgaaagccattctagaatggccaaccctcaaaactattagtgaggccagaagctttctatggtaacaagatgctacaggagatttgttacggattttattactatggaagcacctcttactaagatttccataatatatgtaagatttaaatggggggaaaaacaagaacatgcattctctgcactcatagacaaattgatgcttgcaccaattactacattacctaattttggcatatcctttgaaatcaagtgtgatgcatctggtgttgggatatgggttcgtttactgcaatagggacatcccttacctacttt

SEQ ID NO: 145134 - DNA, 247 bp, Glycine max
actgtctgttatcggtgaaagcatgtataaatccaatgtgacctagaaatgggcacttgcacctcataatgatggtgtggatgacaccatctgttataaatacagcattaccaaggagatattggcccatttttgccatacccacagagatccctcttgggaggtatgtactttgtaatttaaatgtgttcactaacaattcaattttataatagatcatagtaatcattctcttaatgttcgattt

SEQ ID NO: 145135 - DNA, 408 bp, Glycine max
  unsure (1)..(408): unsure at all n locations
agctactcctggatgtgccggttggacttaaccatgtgaaatttctccccagccatggcgcatctaccaactacaagtcatctacccaatcgttgaactccttgatgctctttgtccctaaacccctttggcaaatcccaaatctctcagcaaggtacctgatgctattaaagtcacccaagatgcaccagaaatcccctgatagaaaatgctntagctgcctaacctgatctcacaatatcctcttattttgtatttcacagggggaataaattgtaagtatactgatttgttgtgcctccctcaaccattctcctctcaggaaaataaagccacagccaacaactntcatttgtagtttaaatgttcgttcactccacaagcataacataccacctgttgtattga

SEQ ID NO: 145136 - DNA, 356 bp, Glycine max
  unsure (1)..(356): unsure at all n locations
tagcccaccatctcttcatagtagaaaactggtnatgtgtctactatcattgttatcattnttttctccttcaattaggtgccacttgagctgccagatctctccacctttgggcgtattctttgaaagatctgtgcccctttttgcacatgttctgtagttgcatcctatccggaaccagatcaaaattgtactgatattgcctaacgaaggcaaccattatgtccttccaagaatggactcacgaagattcctagttatcatgccacgttacatttactgcattgagactgtcttggaagaaatgtgtcaacaatacctcatcttatgcgtgtgcgcccatcgttcgacaatgc

SEQ ID NO: 145137 - DNA, 239 bp, Glycine max
caaaggcacggggtgttggtgatctggcctgggctgtgtaaggtgaaaattatccctagtttgcacaagaaggttttaataggcttttaaatagaacgctgcacttagcgccaccctcgcgcttagcgcgggttagtggatttgagcttagcaccaatcgagcgctgaccctgcctgaagacacctgctgcgcttaacgcactgatctcgggcttagcacgcggccttgatattgatgc

SEQ ID NO: 145138 - DNA, 360 bp, Glycine max
  unsure (1)..(360): unsure at all n locations
attgctttcaatacagctgttcatatcaccactaattgtcctccttttgaagttgtatatggttttaacccactaactcctcttgatcatttgcctatgcctaatgtttctatatttaagcatatagaaggtcaagcaaaggcggactatgtgaaaacgcttcatgagagagtcaaagattaaattgagaggaaaaataaaagctttgctatacaagccaacaaaggagaaagaaggtgtcttctaacccggagattgagtttgggtgcacatgaaanaagaaaggtttcctgaacaaaagatattatagcttcaaccaagcgagatggaccatttcagtgctcgaagaattaatgacat

SEQ ID NO: 145139 - DNA, 375 bp, Glycine max
catattaattatatattcaatatttattcatgaacttggttaaatggaatatgactcgtactactttgtaattgaagtactcagttctacaactcttgagaatgggaatatgcaaatttactttgtacccatatatatgacaaactttatatattatcattcgatcaccttttgtattgttgaagaaattcatcatcacaaatatttttcatggctaaagtcacattttattcatttttctgcattcgagatttcattttagtttttaactttaatcgtttttattttgatcctttaaagtttctttgatagaccatattaagaagttttccgcacattctttcattctaagttaattagtgaaacttacaaata

SEQ ID NO: 145140 - DNA, 436 bp, Glycine max
  unsure (1)..(436): unsure at all n locations
cgtgcactataatactcaagctggtatagttctctaatttatggtcatgttgaattaaatttggtnaataaatcttgttntattgttaacactgtctctataacatttccattgaatttaatgatgaaatctgtgcattctcaagtgaaaaagaggctaagttctgaattgcaaaaaacaacaattgggctaagcttagtagttgggctaagcgcatatccaccatgaaaagcgctgctacagcgtgcttagcactaatgagaatctggcagagcatcaacatcaaagccgcgcactaagcgtgagataagtgcgctaagcgcaacaggtgccttcagccangctaagctcgagactggcgctaagcccaatntcacttgctcgcgctaagcacganggtggcgctaagtgcagcgtcgcgattttagaacctatt

SEQ ID NO: 145141 - DNA, 280 bp, Glycine max
tcacacatattttatcaacaacctcataaaaaatctttgctcggctatgcttaagatgtttgatagaccgacctatgtgctttaaacgagcccgaaccggtcatgtcgcatccatatttggtacccgaatacttttaactacacaaaatccttggacatccgcaaacacaatattccagccactctttctcattgcgcccaagcgagctctgacaacatccactaattgcatggcatgcacaatattaagatcttctctttgcgctacatatgaaagctc

SEQ ID NO: 145142 - DNA, 114 bp, Glycine max
cctatccactgcttgggaactattatctcttggttgaaaacatcactggatagtgtttgaacgagtgacaaacccacatatgtgattaataacagccaaataactcattttttc

SEQ ID NO: 145143 - DNA, 314 bp, Glycine max
  unsure (1)..(314): unsure at all n locations
acacttnatactcaagctcttgctctaatttaacaaatctttctttcatttcacgcttcactgtctgtgatcttatttctgtgcccatgaatgaaaagaatctggtctagtggccgtatacagccagctctgaataccaactgttataggaattatgtgggaaagagaaagaaacacaatgaccgagaaagaatgaggcaaagagagaagatcaggaatatagaggatagaatggaagagaaacaaagagctcaacgaaatatgctctgcactatgtgattatcatntggtctctctaaaatacgacagacctg

SEQ ID NO: 145144 - DNA, 322 bp, Glycine max
ctctgaaatgtatcttataagactttaattcatcaaaggtacagcacgtgttacacatgcttctattcatagactaggtagctagcttgagacgcttatctaagagaacttacattgaaagcttctttggtaaaactctcttgagaagctcgagtttagcctactcacaccccactagagaactaagtgacctccttgagaagcgtccctgcaaagctagagctcagctacacacccctataatagcggaccccacctcctgtaacgaaagagtgattaaccaaagaaaaaccctactacaaagacacctcataaggcctga

SEQ ID NO: 145145 - DNA, 430 bp, Glycine max
  unsure (1)..(430): unsure at all n locations
agcttctatggaggatggtttttgagcttcaatgaggaccttttatggtaatcttccaccatagagatgcagcggaagacaaaggagaataagggagagaaggcgccattcactaaggaataagccatggaataatgaacttcaccaccaacatgagccttggataagaagcttggaacgatgcttcaatggaggaaatgaacgagggagagaaagagagaggggggagcacgaaattgaacgaataaaagagggagagaagtggaactttgaagtatgtctcacaagactctcattcatcagagctacaacaagtgttacacatgcttctatntatagactaggtagcttccttgagaagcttctctgagaaaacttccttgagaagcttgagcttatctacacacacccctctcataactaagctcac

SEQ ID NO: 145146 - DNA, 383 bp, Glycine max
ctcatgtgatggggagagttgcgatattctgtgtattgcagagatattattaggagacatgattcgagttcgatgtagttatatcagaatcgatttgtatttatgtatatgagatcttgtctatagtgaattaggatcatatctctagtggcattggatctttagatttacctctattcatgtatcctttgtacggataatcaatccgaaatatacatacttcttcaattatatcctgcagtctcacatataccatgttgagtgttatcagctacaaatatgcgcataataagagtttactagctatttccagtccgttcatcaaatgtaaagaaggaggtgatttttacaactcaacagcccgtcttgattagtctcccttt

SEQ ID NO: 145147 - DNA, 334 bp, Glycine max
gctatggcgaatagcctgaaccgtcattgtcattggtgaggtgagctgctcacgtggacatgtcgtcattgcagttggcgagaccggctgagtctggtgacgtggagagagtcgccaatgcttctggtgatataagttgcaagagtggttctcgtcactggaaaaggcgagactggtgtctgcggattctctgttcctttaaataagcaggctctgccttgaaaattcgtaggtgtctgatgaaagaaagcacagaggagcgtgttttatccagaattacaagccttactttattatctctatatagcccagcttttgccttgaacttctcatt

SEQ ID NO: 145148 - DNA, 381 bp, Glycine max
  unsure (1)..(381): unsure at all n locations
cccccccaccacctccaatacantgtatagatncactcaccaccccagagagttgaactggaacggannatgaacttgaaccggaccaacaccgagagatcttattcataatgaaacttttcgggcacacctggatcctcaagaacaatacacaacttctcgcactgaatagcagggagttggaaccctctcacaacaaataatagcctcacgagagtcatatcaccaatgctccaacactggcagcgaccaaacataatcctctccatgaagccagcccctcataaaacacggcagaaggagctgctcaaaaatctggtggtgaggacagaagaaacacagactcttgaaacgtaccaatactcatacaagcttactcca

SEQ ID NO: 145149 - DNA, 377 bp, Glycine max
  unsure (1)..(377): unsure at all n locations
ctacacatacctctctaatagcttaactcacctccttgagatgagaagctagagcttatctacacaccccttataatagctaagctcacccctatgacaaaaaacatgtnaatacataagaaagtccttactacaaagactactcaaaatgccccaaaatacaaggttaaaaccctattatactagaatggccaaaatacaaggcccagacgaaggaaaaacctattctaatatttacaaagataagcgggctcatacttagcccatgggctcgaaatctaccctaaggctcatgagaaccctatggtcttcgcttgcggggtaagattgcatcagtagtgcccatctatgtccatcacgaagctntaacatgaagc

SEQ ID NO: 145150 - DNA, 337 bp, Glycine max
ttattttggtcactggttatctattacaacctctagtaatcgattacgagacaggtaatatcatatttatgaaaactcaaaaacatgtgggaaatatcctttgggcaaacctgcgcatcatcaaataagaaactcttccttagatccacgaactaagttcatcaattatcttgaatttctagattcctgacttggatcagacgtgagaagcgctcatatttggcatcatcaaaacttcatatcatatttgtttctacaattactatgggctatattgatggcgggctatttgagaccttgatagaccccatcctaagttgatagcccaacaccctaa

SEQ ID NO: 145151 - DNA, 357 bp, Glycine max
  unsure (1)..(357): unsure at all n locations
ttggacacacgacaggacacctatttcatgagaagctctctaaccccgctcattcacctaataactcatgacactctcaatcttccctttcatgagaaacatacatgagggatgcagtctaaacgctgcacataccttatcatcactccaaccccacttgccctacacaccctcctttctcgcccacgtgggcctgctcacacacagcttcgcatgaacggctttaaccaattgcaacttaaaaggacaaaacccgatttccttcacttgctgcacccactccttaaactgcttggggattgctttcaccatacaaggaagatactacaccagtctaacaatggngtctcagggact

SEQ ID NO: 145152 - DNA, 399 bp, Glycine max
tgatatcaaagaaatagagaagtttattgaagcgaatccatataattcacccaactgtgtgtgttaatcatcagagaacaaaataaaactcttcataatacaaatttaaatattccataaaatcgctattgttattcctttatttcccaaccacacttgtaagcatttgttaaaaaaaaaatgtaaaaatcaacactgatgtaaaaaaggactatctatttcttctaaagaatcacgacaagtcatgttgtctactatatattgcgaatcgcgaacatgataaatcttaatctataataatctcagtatttacaccactgagcccctaagtttaaagatagacttcattctataatcttaataatttaaccaccaaaaccctaagtcttgatcctcatc

SEQ ID NO: 145153 - DNA, 394 bp, Glycine max
gtcattctgtgcagtacctattataagaacagtagagttcatatttactttatgcataagttcaactaacaatgagagttcaacaacagacgaatatagtaaactcacgtgtataagaatggaaagttacatccaatcttgttagtgcattcaagtacacttgctggcatgtcttaccatcgacactactcctgatagggattgtgtggcctggtataaacaaaaacccatctcttgatgcttcaaactctaacactgacacacataacttcacaatatcagatgccttctctctagattcccataaaatctgcctccgagtcttaatatgttcatggaactcaggaggaattcctgaatttttagtgaagtatttccaaatactggaatggga

SEQ ID NO: 145154 - DNA, 289 bp, Glycine max
ccaccatgcggcagcataaacgagcaccgcaaccgttccacgctcatttcttctctacaccacattatcaacttaacctgtgtcgaaaacacgatgaaaggatgagaaactaatgcaacgccaggactgtcagaagaatgaacaatgagggggttataatcatcaatgacagccatggccgtgacagaaaaatcaccagaccctaccagacttccgaaaagccccattaaaaatgattcataaggggatgacttatccagttatataagaacctaatctcaatgatatc

SEQ ID NO: 145155 - DNA, 411 bp, Glycine max
tataatactaagcttcacatataattctactcttattgaagaagctcttggtctctctatatcaagagaatactatagggctatattgtccacagtagaggtgcaaggtacactagttcttacatctgagcctctctggaagatactttacattgccgaaatgttaactatgtcaattaataataaacaccacctccacatcttgagaaccatctttagtcacccctttgagaactctctcaagtagtgtccatgtgttctggcacagctctattcccaacacagactagcgtgcatctacacagacgttactcgactgcgttcaatatgacgaatcacccaaagaaataaatttctaccgctctgatgagaattattcattgctatgaaattagagcacaatggcttctc

SEQ ID NO: 145156 - DNA, 314 bp, Glycine max
gaatggtcttttctacatcaaagttctggagttatgcactctgtatgccatggaccattcaaagtatatcacgttagattctacaatcacactaagagtccaactttcccagtttatccttggtgtttacgatgaaacgctgacatccaaatgagtggaagtaagagatattgggcttacgcttcattcataattcatagggacttctttaagataagccttatgtaaattatgttctattaataccaggaaacatttacagcttcgacccataaatctttgggagtggagtgatccttaagcattggtcatgc

SEQ ID NO: 145157 - DNA, 280 bp, Glycine max
ctcagctttccttttaatattgcaacccttcatcacatctctttcttcttcattatcactatagtcttcaagaaaatgttgacgcatcccttgaaattattcattctcttgcttcttcttattcttcaaatatccccatagttctactctaacttgtctgggacattatgccacaagctgcaacaatccattgcttttgccttcaagtggtacttttgctgtagtaatttccaccttttgtaaccttgctacaaattgcacacaacactattttcttgtt

SEQ ID NO: 145158 - DNA, 377 bp, Glycine max
gaagcttgaatgggtcgattgaaagtatactcactattcttactaatgactctcttattctgaaactagctatcgtcaacttgtcattaatactatttcctctatctaagccactcctatcctgaggcttctgatgaaaattatgataataactccttgtgggataacaagtcaaggacaactacagtaattacttgctttctcggtgcatgacaattttgtattctagattagacctttttacgagtaaaccttcagcagaacttattgagaattcaacccagccttccgcattatggtctttatatgctttacctactcttgctctaatgcatcttagctttccaaatacaaaatatgttctgaatgaaacatgt

SEQ ID NO: 145159 - DNA, 261 bp, Glycine max
acacatataagggtgccttataatttcacaatcgtcctctgcttgtttattctggtatattcatatttctcttataatgtgcttgcttattatggctttacattggatatcaataaagcattacatctattcgcataattctttcatattttatttatgaaaaacaaaattgattgagcgacaggttccttccatgcatatcaaactacaccaaccaaatctcagatcttatctttgtaagggtagaagactaatcatgtg

SEQ ID NO: 145160 - DNA, 475 bp, Glycine max
  unsure (1)..(475): unsure at all n locations
agcttagtcaaacagaatattccgaanatgtcatagaattgggcgttgaanaagcataacaaaactttcagtgattggtttaaagatacaatctctgcagatgagaatgcttcagaaacattaagaaaactagtagatgggcctaaaagaaatgttataacctggcaaggatacgacataaacaggtattcattttacacaaaagcaaaggtgaaaggaaagatattgagctggtataggaggaacaggcacggattggtgctgatccttctagtgggacctccaataaatctgagaattataaggaggaagcatggaagaaaacacagaagcataaaccaaagagggtggagagtgtcaacgctgatacagaagcctttggtgatgactcgaaaattatgattgctctatgcattgtgaagctggagcagtagaacatacgaacaaaagagatacatgccatcaaaatttggca

SEQ ID NO: 145161 - DNA, 437 bp, Glycine max
catccagaatattatataaaaagcattttgtatgaacattcaaacaatccaaagcagcttgccatttatgtcagtcagactcagactggaggaatgtctttccgtctttggggagggatccccctgaccctgtcacagagctgcagagcactcttcctacactgctatacatgtgaggcaaggctaccctatgtatcatccacgattctctacataacatgtcaccaaaccccaagatcttttttctccctctctcgcttacaacggtcaaaactcgttatgcgcaatccagaaaaaaatatttaatcgttatcctaccataaattttatacttttttttcttaaatagcactaattttccttcttctttttacacgactgtaatattatgcaactatatattaaacacttactctgtcggatacacctgacactcc

SEQ ID NO: 145162 - DNA, 332 bp, Glycine max
gaaatgaacgcttccaaccctatgttttaatccactgcttattccactgagagaaaagctcgtgtatcagatcaagcccgaacagaatctaccatggtgacgttttataattatactatgtatagtacatgttgtcattaatcaattaagtaatcctcaaactaaattatctgatatattattggtgcatatcagtgatggatgccaatggataaaatatggacaaaatatggccgaagggaattcatgccctcgagcatactacagatgcactatggctgttggttgcccagttcgcaaacatgtgatttattctgattgatcagcgcata

SEQ ID NO: 145163 - DNA, 408 bp, Glycine max
  unsure (1)..(408): unsure at all n locations
ngtggctgcagccaaagtgagaagagcttaagaagctgttttttctgaagacccttctcagagaccctcgttgaagtcctctacaacatcaacgagcagctcctaactgaggacgtagacatccctctcacaaaggttaggcctgtcaagaaagatgcacttgttgtggtcaccggcgaccgtggtctctgcggcggtttcacaacgcaatcataatgaaagctgaggctagaatcatggaatagaaggagcttggcttggaattcactgtcataagtgttggcaagaagggtaactcttatttcatcagaaggccttatattccggttgacaggtttctagaaagtggcacactttcaactgctaaggaagctcatgccattgctgatgatgttttctcactctttg

SEQ ID NO: 145164 - DNA, 386 bp, Glycine max
  unsure (1)..(386): unsure at all n locations
ggatcttaagcacctgggctgcagcttaccaaggactacctaatttattctttgataccccttngaacccatggtccccattctttggtttgaagctcattaccagccttaagtataaaaccatgatatcaccttaccctaaggaatttggagcttggaattgttgggaataaaaaggcgggggtattttcattgaaaatgattttgggcagctaatttcattttgcctcctgagttatgatatgccatcattgctttaatcttaatttgactggcatctaaaaaaaaaagtctgaaatcttaattctctgttatcaaaaaaaaaaaaaagaagatgttataataagtctttttagactgtttggaccccgtgaattttaataaaa

SEQ ID NO: 145165 - DNA, 473 bp, Glycine max
  unsure (1)..(473): unsure at all n locations
ttaatatntgaatcataacatttagtgactgctgggaatttattacagatattgtgtaatcgattacacaatgtaaaanttgaattaaaatgtttattaactgctggtaatcgattaccaatattgtgaaatcgattacacagtgtaaaatttgaattcaaatttctaatagttgttgtaaaccattttggccactggattacatcctctgtaatcgattaccagagagtaaatctcttgaaaaatactttttaacttaaatttcttggccaaaccttttgctatttcaattaggaattcccttcctaaaatactagagatcttcttgatgtcttgtattcttggatcgttgtcttgaattaaacttgagaagcgcattntcatcanatcatcacgatcatatggcatcatcaaaacatcaaagacaaagtctttgctttttacaatctcccctttttgatgatgacaattta

SEQ ID NO: 145166 - DNA, 434 bp, Glycine max
  unsure (1)..(434): unsure at all n locations
gattcctaggcctaagtcatatntttggcactntattctagcttccacaaactatccacccactcacaatggcagccatatgtgcacaactcgtcccacaagctaagtttcacanaatcatgcacaattgccattgaggcatttcaccaagcacatggtaggcacgtgtttagacataaaaacatgaggcacgagggcaatgcaacatgcccattcatctcagaatacacaataggcctacgaccatcccctacaaccccccaattcacacaaaaaaccatggatttacatacacattgtctcatagattttgccaagcatagaccattagagcactaaaacgcatcaatggagagccaaagaatcaagggagagtgcacttacttgtatggatngaactcaaatgcgaaaaggagagcagaanactcaaaaat

SEQ ID NO: 145167 - DNA, 437 bp, Glycine max
  unsure (1)..(437): unsure at all n locations
atgaagactctcccaaaatctagttgtttatctgggatctctatcagagactatgctataaggaacaccgtgtagtctaactatctcactaacgtacaagctagtcaacctctctaaagaatatctgatgtttattgggatgaagtgagcatatttggtcaacctgtctacaataacccagatggaatctaaacctttgggggtgctaggtaaccccactacgaaatccatggagatactatcccacttccactcaggtatctctaaagggtgcaacttccctgaaggcttttggtgttctatcttagctttttgacacactangcatgcaaggacaaactcattaacttctttcttcagacccggccaccagaacatctgcctaaggtcctnggacatcttagtcgctcccgggtggatactcagactacttctat

SEQ ID NO: 145168 - DNA, 367 bp, Glycine max
  unsure (1)..(367): unsure at all n locations
tggatggagcttttttcttatagctctttataatatttattttataaactgtgtcgtggtgaagttacggtaatgttgtggctttaatttgtaggtctagctatgatctctccatgttcacggatatacttttccttttggtttaggtactcgcattctgcangcacatgtcatcggggcttatacatgtgatattcgttnttctttaaaatttatcatgaattacttattctattgtgattaatttcatagcttacatgatcgacatctctggtacagaaaaattcgtgtattccccactttggtgcttttaccatattaataagaaagagagaattttgtacataatctgaacattattgtctta

SEQ ID NO: 145169 - DNA, 402 bp, Glycine max
tcgagacatgttacgtaaactctttgtgtggggatattggtccaccatgacagtcgttataggtcctttgcatccactcttcttaacctatatattagagaaagacatatctaaatacatcaagggttgaaagggaaacactgctaacaactaataaaatatagagggaataccacggtaataaagcacctctttttcaagacgctccttcacaaacgaaacaacttgtgcaaaatccaaattaaaggcaaccaaaccacttttgccactctttccaaataacatgtcagggttcacaaccaatttataagatgaaagccagcgttccttctacagtatctcagtgaaatcacttgatcaataatcttgaacacaaacagaaacaaattcattatcattact

SEQ ID NO: 145170 - DNA, 445 bp, Glycine max
  unsure (1)..(445): unsure at all n locations
ntagganataaatntaatgaggattactgtgctttctagctctatgcctcagaatttattcatctaagttcaccttgaattccaaaaggttgaagttgctgtaacaagtcatcacatgcttgaaacttataaattgatgcaacagactatctaattgttcacgtgtgtaatgttttggctacatgaatcttgtatatttgaattaatggaatgatgttaggttggattttttggattgttttaaaaaaagacaaaatgaaataaaatacggtcaatattgcattcaatttcattgaatactacatttcaatatttcattagttttatctgatactcctgtntctcttcctcactgatctcttggagatgtggaatagaaccagtattnttcttcccctttcaagggatccaaatgaagcttaacttatcgcttaaatctttcaac

SEQ ID NO: 145171 - DNA, 402 bp, Glycine max
gagcttttcgattcattctatgtacccgtagtggtccacattgggttttgtgtatatctattcttgtgtcatttacttattataccccctattgacgtgcttaagccattttacttaagccgttgtttgcttaaccttaaaataaaataagtttccaccgatcgtttgaatggtattatccgttaacttcggataagatgaatttcgaccgttcggtcgtgccgtaaccacgttggaaatcaaaaagaggtgaaaaattatataataatataaaaataccttttagtaaaataaagcgaaaaatcaattggacgttttctctttgggatttcttattcttaatcgaattgactaataactaaagtgaaactaaggctaatatcaattcgcctagtcatgctc

SEQ ID NO: 145172 - DNA, 477 bp, Glycine max
  unsure (1)..(477): unsure at all n locations
gaccttaaaactaagcttaacatcagaccacttccagggtgctggaactacttcacatgtacttgatggggcctatgcaagttgaaagccttggaggaaagaggtatgcctatgttgttgtggatgatttctccagatttacctgngtcaactttatcagagagaaatcagacacctttgaagtattcaaagagttgagtcttagacttcaaagagaaaaagactgtgtcatcaagagaattatgagtgaccatggcagagagtttgaaaacagcaagtttactgaattctgcacatctgaaggcatcactcatgagttctctgcagccatcacaccacaacaaaatggcatagttgaaaggaaaaacaggactctgcaagaagctgctagggtcatgcttcatgccaaagaacttccctataatctctgggctgaagccatgaacacagcatgctatatccacaacagagtcacac

SEQ ID NO: 145173 - DNA, 455 bp, Glycine max
ggctctatgagtctagaggatctcatactcaactttactattatcactcttcaaattctctgcattcaccttgaaaagagaaaattccttgttgaggcgttcaatctcttttttgagaactttagtagaagcctcagttatagtgagcttggtcttcaaggcctcttcttgggcctctacctcttttaacttactctttgaactctcaagagacttctaggattcctcgattgattggagtagtgtttcattccctctagtggccttaactaaagcttgctctaccttgtcaagttcagtttgagccttgttggacttggtgacagtcttctcaaactcattagcccaagaatctacaattctccaagtccttacttggaagttagcaatggaatccattgatgcttgttgatcggctttcctcaacatctcacaatctgactagctaagcattg

SEQ ID NO: 145174 - DNA, 475 bp, Glycine max
  unsure (1)..(475): unsure at all n locations
tgctttgtgtaatgtatnccatcttgccttttaccactcgtgtttactcttaagtacctggatgcaccaaattagacacacaaggtgatatgaaataaaatgaaagacaatatatatataattatcatagactgagtaacaaatttgatatgggataacaacttggatttgatttggataaaagatcatatttgatttggataacatattagatttaatttggataacagataagataacaaatatgattaaagatatgacaagtaaacttcaaatgctcatgacatttgatacggttgtccgcttgaggcccactatatatcaaaatgctcagaattcacaggagaatctggggattctgtacacgattttctgtcaaaaaaaggctcttactgtctaatttcgtgttaaagatcaaacaccactttttttcttctttattctctcttttttttaatattgctgcaactttttt

SEQ ID NO: 145175 - DNA, 457 bp, Glycine max
  unsure (1)..(457): unsure at all n locations
gcttcctcggggccatctcctacgaaggcaatacattggaaagttagttttacccaaaaatgttactcttaaaacgaaaatggcatacaacctcctccaatacaaacattcactcatgtacatacttccttacgaacattcactcgcacgagatattcttctaactaaggaaaaaaatacacccatgcacaatcaaggcatcctcgttacctagaccacatacatgcacctcctttgtaagatttacatacatgcatactcaaggtattttggctaccaaagattgtacacgtgcacattcgggtatttctaatacccatacatacaccaatttcatgaggaatttcggccatctacaccataaggtattacatttcatgctcttttcaagtgttcttgctacctaaagccgcatgcaaattcaagtatattttctttngctaaanaaacattcaaa

SEQ ID NO: 145176 - DNA, 464 bp, Glycine max
  unsure (1)..(464): unsure at all n locations
tgtttntgtagttgtgtaacacagtgtgctcgaataccgtatttggntggaggactgtctttgaagggcgacctttctacatcggttgtgtaactcaaccgatgtagaatgtgagccttctacatcgattctaaggttgaaaccgatattgaatggtagggtttctacatcggttatcaatcaaccgatgtagaatggtgtataatggcaatatttctacatcggttacaagtcaaccgacgtagaatttgaaggatatctacatcgttcattattggaccgatgtagaatgggtaggaattgttagatttctacatcggttataagtcaaccgatgtagaatttgaagggtttctacatcgtttatcactcaaccgatgtagaataatgatatttctattattatttttgcgacacttataattctcccttcaaatattgatgtgatgttaatgcgcatgatt

SEQ ID NO: 145177 - DNA, 439 bp, Glycine max
  unsure (1)..(439): unsure at all n locations
gcttgtattggctgcgaatgcancatgagattctaatgaanatattcttttcattcaaatgcagtaacaatgcatgacatgtggaaagaaattcccatgtaagtataaagtagtacctgatgcaaattaagtacatggtatgagcattctacataatttaaacatgacaaatttcctaataggttatgttacncttggccactgctttctttatcatcgcctgggtgctcatccagtactttaaatctgtataatcatgttacaggagaacaaataaattaatgaacaggacaattacgaaagatcaatgtcataatgggtactattctttctgtcaatgattacgaaccatactcaagcaacagtgtaagttgtaaagcagaanatctgagctatacatacagtttaaagttggtcanatgacaaactcatttagtaa

SEQ ID NO: 145178 - DNA, 473 bp, Glycine max
tatggcctatgtatcagatgttgagtatgagaggcaacgtgttattatgtcagcatgttgtgattcaaaggcttcttgacaagagccggaggcacaggcacaaccggagccatagcctaaggcacaaccaaagccacaacaaccacaaatatcgcctactaaccatatcatcaaatcctcaattggaggaaggcttaatgtattgagtctgcttcgatcctataaggaccacatagttggccatgtatggatcagtcaacccaaagatgagctgaagctggtcagccatggtggcaaggttatgcactaccccaccaattcaatgatgaagaggtacgtggataggtcaaggctaaagggcctgtatgatgcgcggcacatgtccacaaataaaggcgtagtccatgtctttattgagagatggcacagtgtgaacctctccccttccctttctataagagagatgaccatta

SEQ ID NO: 145179 - DNA, 474 bp, Glycine max
  unsure (1)..(474): unsure at all n locations
agcttcaggctgctcaatagctccaggttgctgcatggaagggcatatgtctatatggtggtcagcagaggagcacaaaccacaaacccttgcgacaggtacagatttctgattcaaggccagctgggttaccaagttgaccaacgcatccagtttgccttcaagcttcttagtttcagatgatgcagatgggtttgtagctacctcatgcactcctctaatgactatggcatcatttctggcactaaactgctgggagttggaggccatcttctcaattaaatttctggcttcagcaggagtcatgtctccaagggctccaccactggcagcatctatcatacttctctccatattactgagtccttcataaaaatatnggagaagaagctgctttgaaatctgatggtggcggcaactggcacatagtttcttaaatctctctcagtactcatacaggctctctccactgag

SEQ ID NO: 145180 - DNA, 94 bp, Glycine max
  unsure (1)..(94): unsure at all n locations
tctacactntatacaagaatgaagctctgataccacttgtttgacaagtggcctcagatatcttaagaagggggggggggggtggaatttctat

SEQ ID NO: 145181 - DNA, 483 bp, Glycine max
  unsure (1)..(483): unsure at all n locations
agctntntacattgtatgactttaagtnttaaaaaataggctgcccattnttgacgtaatgctgtcatcgtgtcggtgtctagtgccgtgccatcaccgaaccactacacattgtgaaaaacaaacaattaatcatttccattattgtgaagaaataacatatcaccatttgctttcaatgttttcggaatagaaaatttaccatactccaatcattcttcaaccctgcgccaattatgtttcacatccaatgcatcacataatacccatactcatatcctccgcgttgaacgtgactctacattcaatggaaaaaaaaatcaatgtttgtattaacatgtttaataaccattttaattgcaaactttgtttgaagttggactaaccttgacttcaatccactggggtgtagtttgatgaacttttccgtcagtagtggtgtttaatgtcttaaatgcactgcattggaagataatatgatat

SEQ ID NO: 145182 - DNA, 464 bp, Glycine max
  unsure (1)..(464): unsure at all n locations
tattggaaccaaagagccaaagtcttctggcttgaggatgtttatattaattcaaaaactttccattcttcagccaatgctcataagaagatcaattctatatcttctttgatgtgatgacgataccatttcatacaagcatcaagatttatgttgtattgcaaaaagttattttgatggctcgtttaaaggatgagcaaatgaggttgttggaaatttcgattatataaggcattttatccttgaagaggatagcaatatcttgcttgttccttttactgtgaatgattntaagactgctttcttccaaatgaactcagacaaatcacctagtccaggtggacttaatccagcttttttaaagaanaattggcatctctatggtcctaaaatatactatatatgctgcaacaaatnggcttgaacatggtgttctttctttagaggtcaattctaccaccact

SEQ ID NO: 145183 - DNA, 471 bp, Glycine max
  unsure (1)..(471): unsure at all n locations
gtcacctgcggcatgcaagcttctacanaactctattggtgacatatgcagtggttgggaagcaatgaacaacatgatgacactttaacacacccaaattaaagcatcttttgagacaagtacgcacatggttcgacatgtgtttaaagttaccttgtacaaaaaactatttgacatggtatcaaggtacgctttaaatgaaattgctggtgagtatgagcgtgtaccttatgcaagcaagaacccttcacgttgtggatgtgtcatgaggactacccatgatttttcatgtgcatgttgagttgttaaatatgttgttggctccataccactagagacaatccactatttttggcgtagacttagtttttcatatcaagggttatgtgaggttgaggtgaccataactgaggagatgaaaatcatatcgaaacgatttgagctactcgatatttgcggcaaggtacattt

SEQ ID NO: 145184 - DNA, 477 bp, Glycine max
  unsure (1)..(477): unsure at all n locations
tggacatcagcaganacaacttttctggtcccttcccaggtggaattcctagactccaaaacttggttgtgcttgatgcctttagcaacagtttttctgggccattgcctgcagaattttcacagcttgaaaaccttaaggttctcaatctagctgggagctacttcagaggttcaattccacctgaatatggttctttcaagagccttgagtttcttcatcttgcaggaaattctctaacaggaagcatacctccagaacttggtcacctcaaaacagtgacccacatggagattggctacaacgaataccagggttttattcctcctgaattaggtaacatgagtcagcttcagtatcttgacattgcaggagcaaatctttctggtcctataccgaagcaactcttcaacctcaccagtttgcaatccattntcctcttcagaaaccagctcacaggatcaataccaagtgagc

SEQ ID NO: 145185 - DNA, 472 bp, Glycine max
  unsure (1)..(472): unsure at all n locations
agcttatagttacaaatgaacaaatgtactctattgtgcacaatataccaaatatggccctatcgagcacgaataagttttaattacaaacgaacaaatgaaatgagtatgccatgacaggttaatataccagtctacaaatgaacaaagactcaaacacaagatgaaaatgtaattttgcactaattaatccaacaccataatggcactttattcatttacaagttatagccataggctagcacaaggtagcagttaacttgaaacttgtgagtcatccacaatagatagagtaataataggccatagcatacagacaactgccactaaatgaaaaactaacctggtaaagtccatgaaataatccagcttccaacctccatactcatcagcctagggtggaagcaagtgatganaaacagtgagcatcactctcattccatatgattgaaccctattgataatccacgta

SEQ ID NO: 145186 - DNA, 486 bp, Glycine max
  unsure (1)..(486): unsure at all n locations
tnggagcgaganacanagagagcccgaaaagaagagtggtttctaaacaagttctgaggggctctatgggggcaggaaaaacgaactcaagcttcaaagggctgaaagggatgagtcaagagtggaaagtttaatgttagaggataagttgaaggcttgtcaaaggtcaaagagaagtttgaccgagcagctgagtaagaccgaacagaatatgttgacaatcatcgaccaatataaagagaagctaaacctagctgctagccatgagcaaagactataggacgagcatgcaaaggtatcggctctacaagtggaaagggaagcaagagagagagtgatagaatcattgcacgaggctatgaagtggatggatagatttgctctcactctgaataagagtctagagcttccaacgctgttagccagagccaaagcaatggcggacgcatactcatctcctgaggaagttcatgggctnntttatta

SEQ ID NO: 145187 - DNA, 418 bp, Glycine max
  unsure (1)..(418): unsure at all n locations
agctttgctntaaatctcttagaggaggagcttattatttntccaataaaagtgaataccactaaattatggcataaggggcaaaaagatgaagaagatcaatctagttctaaaataatagcccaagtcctggagtggtgctattgaaacaaggttggtagcaacaaaatttgctcaaaaagaggcagaggagtggtgttattgtacgggagcacacaaacaagtaggtacagttgaaggaagatgctttaagagaacattattttgaaaattttgctagaaacaaagatgaaataaaggagaaaaatgaaaaaattgaacctcataccccatgtggttctattgaaaaatatatgcccgagtggttctattgaacctcataccacagatagtgagcctattcttaccccacataggc

SEQ ID NO: 145188 - DNA, 478 bp, Glycine max
  unsure (1)..(478): unsure at all n locations
atgatgaagaatcaagttgattcaagtagttntgatgattacaaagatgatgacaaanagtccaagagaatgattccaagattgagtcaacaagtttcaagaatcaagagaagtttgatttcaagattcaagagaagataaattcaagattcaagagaagaaatcaagaagacttcacaagggaagtattgaaaagattttctaanaacaaacatagcacaattttgtttttcaaaagagtttttctcaaaattttcgaagttaccagagtttttactctctggtaatcaattaccagtttcctgtaatcgaataccagtggcaaagtttgatttcaaaagttttcaactgaatttgcaacgttccaattgatttcaaaatggtgtaatcgattacaagatattggtaatcgattaccagtgtatntgaacgttgaaattcaaaattaattgtgaagagtcatatcctttcataaaaa

SEQ ID NO: 145189 - DNA, 388 bp, Glycine max
  unsure (1)..(388): unsure at all n locations
agcttgcatatcccaaggatcaattangaaattacttgtgaaagagagccatgagggtgggctcatgggccactttgggatagacaagacccttgtcttactcaaagaagagttntattggccccatatgaagaaagatgtccataagcattgcactagatgtgtggcttgtttataagccaagtctagggtgatgcctcataggctatacacacccttacccatcccatttgcaccttgggtagacattagtatggactttgtccttgggcttcctagaacctaaagaggtgtagactctatctttgtgggtggggataggtttagcaagatggcacactntataccatgccacaaggtgtatgatgcttcttatatctcaaaactc

SEQ ID NO: 145190 - DNA, 454 bp, Glycine max
  unsure (1)..(454): unsure at all n locations
atagcttctntaggaatcttcttaaggaagcttctcaggatgtgaacttagttatgagaggggtatgtgtagctaagctctagcttctcaaggaagttttctcacagaagcttctcaaggaagttttctcaagaaaggttctcaaggaagctacctagtctataaatagaagcatgtgtaacacttattgtaacttttgatgaatgagagtcttgtgagacacaactcanagttcaacttttctccctttttcttccttcaatttcgtgctcccccctctctccttctctccctctttcttttcctccattgaagcatcctctccaagcttcttatccaaggctcatcttggtggtgaagctccttctttcatggcttattccttagtggatggcaccgcctcttacctcttctcctttgtcttctgctgcatctcgagggtggaaaatcacca

SEQ ID NO: 145191 - DNA, 469 bp, Glycine max
  unsure (1)..(469): unsure at all n locations
nggagaggatgcttcaatggaggacaagagagagggagagttagagagagggcggaacatgaaattgaagaaagaataacgggagagaagttgaactttgagttgtgtctcacaagactctcattcatcaaagttaccacaagtgttacacatgcttctatttatagactaggtagcttccttgagaagcattcttgagataacttccttgagaagcttctntgagaaaacttccttgagaagctagagctcagctacatacacccctctaataactaagctcacctccttaagaagcttccttgagaagattcttaaagaagctagagcttagccgcatacacctccctaatagctaagctcacctccttgagatgagaagctagagcttagctacacaccccctataatagctaagctcacccncattccaaaaatacatganaaaagtccctactacaaagactac

SEQ ID NO: 145192 - DNA, 240 bp, Glycine max
ctcaacatgcggagccagtcgcgggatgatgatctgctgaccaccagcctagtgcctgttcgtacccatcccagagcatctgagagcaggaaatgacatttatgcagtgaaaatatggcacgctaccacttaccttggttcatcagtgtccaggatttgatgctgtattgaccacctctcgaaatgatcaagtccctgtctgtcgattcataaagaacaaaatgcatgtgcatgcgtatg

SEQ ID NO: 145193 - DNA, 485 bp, Glycine max
  unsure (1)..(485): unsure at all n locations
ntntggagataaanatcgcagctatagtgttctttcagcttctctgcatacaatagtaaaggtattgtgagaaatcagaaaacaaaatataaaaatttaaacttttttattgtcaaaagtcacaaagaaaacgaacccaccctcagagttttgagataaaaatgacagctttggtgtgttcttccaccaagaacacgatataaaaatgcaaacctggagaggaacgcaaatatgctatcgttgtcatggaatttgagataaaaatcacagtttttgtgtaaaaaatcacagctttagatgtaaaaaaacgcagaaaaatacaaaacacaaatctgtttgagataaaaatcgaagctttttggagataaaaatcgcagctttagtgttctttcacctcctctgcatacaatagcgaaggtattgtgagaagtcaaaaaacaaaataaaaaaatttaaactttcgtattgtgagaagtcacaaagaa

SEQ ID NO: 145194 - DNA, 434 bp, Glycine max
  unsure (1)..(434): unsure at all n locations
gctttgcggatntggtcttcgccagtgaaaggatcgaagtggatctgaaaagaggcaaatttaatcatcctgcttagacgaatgagaaaactggggcaaataagagggtgaggatgagggagaaacccatgctgtgactaccattcctatatggccaagtttcccaccaaacccaacaatgtcattactcagtcaataacaaacctcctccttacccaccacccagttatccacaaaggccatccctaaatcaaccacaaagcctgtctaccgcacttccaatgacgaagaccccctttagcacaaaccataaaaaacaccaacaaaaaggatatttgcagcaaaaagcctgtagggttcaccccaaattccgttgtcatatgctaaacttgatcccatatctacttgataattcaatggtagccataacccta

SEQ ID NO: 145195 - DNA, 461 bp, Glycine max
tactcagcgtctatcgaccccgtttctctgacccttgggcaacatcaaatagccaaagtgcgcggtaatcaacacgagatgatataactaaaggtcacataatcaatcataagtcaaaaccaaatataatccaatcattcatagagtcaaaaccaaatataatccaagcataagagactaagtaccaaataccgaaagataacgaaaggtcagataatgataacctaaaaagcatagccaaatacacggcttacaataaaatagaatgataatctaaaactaagaaggtggtggaaggtcaaagcaccgacgaagataagtcacatcctcttcaagctgggtgatgcaggtatccatgccttcaaagcgaccatccaaggaatcgaatcgttcaccaacataggtgcggaggcctcgtaattctgagagaacttcattcataagggctgaggaatcatctc

SEQ ID NO: 145196 - DNA, 408 bp, Glycine max
  unsure (1)..(408): unsure at all n locations
gcttgtcatcccccataatggggttatcttcttgtggaaactggtttttgatagattacccactacgaaaaatctgcaatataggaacatcttgttggaagagcaacaccacctttgtccgttctgcttagaaaataggaggataacagccatttaatatattcactgtccgttctaatatcaaatttggcaaaattgttacaaatggattgtggttcagattgctcaacacagagatcccaaagaacatttctttatgtataattgtntttgcatggctgggaaggaataaaactattgtgtggagagctgtttggtgtgcagtggcttggtccatttggtgtcacagaaataaaattgtctttgaaggggaacaaatggattntgatgcaacaatggaattaatac

SEQ ID NO: 145197 - DNA, 482 bp, Glycine max
  unsure (1)..(482): unsure at all n locations
tctttnggaccttgaacaagcaatcaactcctctntcagatttatgctatgtgctcgcgactggtccctttcttcccttcgcaacttgagttcattattgctaccccatagagctccgcgaaatttgttccggccatactcttccttgcgagccctcttggtctcttgttcaagggctcttgcggtaattgcattctcttcccgtaacccggcacactccttccgaacgtgtgtagcagccaacttgaacttctccttggcgagttttgcctttcctaactcgcttttgagagcttggacttcttcgtcctcttccggtgcttcaaaattctcttcgctgacgacttttaacttggcgagccaatctaaacctcgtatgcgaactttcagccattcgtggtacccaccaatgatgccattacgaatgcctctaagctcttgatctttccttaacggggtntcccatgccttatgagattctt

SEQ ID NO: 145198 - DNA, 484 bp, Glycine max
  unsure (1)..(484): unsure at all n locations
agcttgngtgcttgagtgtgtttgtgaagtttatgaataaaggtgtaagggaataataagagaaatagggttttaaagggagaagtaggtactaaagcgtgaaaaggtgaaaatgattaagggagtaatggagaaagtaatgtgggaagaaggaaagataggaagttttaaaacttcccatcagttacatgggtgctcacttaagtgtgggcatctgtccgcttaagagaggatgatgggctaagaagttcagacccatcatttttttaagtgcctcgtttaagcgtacagggagccacgcttaagcgaaggggtacaaagagtaccccttcttgcactaaatttccttgcttaagtgatgacatagccacgcttaagcagggggttacaaagagtccccctttagtttctgacttaccctacttaagtgattggatagccatgcttaagtgaagggtatcgtgtgtccattaatgtgcacaat

SEQ ID NO: 145199 - DNA, 464 bp, Glycine max
  unsure (1)..(464): unsure at all n locations
tttgtgttggatacccagtgtgaacatactttctaaacccttaatgaaaagttgacgaccgctcccgtgctagttntgcctaacccgagaaaaccctttgaggtgtattgtgatgcatcaaagatgggtttaggaggagtgttgatgcaaaatggccaagtagtggcctatccttctagacaactcaagactcatgtgangaattatcccacccatgatttggagttggctattgtagtttttgcccttaagatgtggaggcattacctgtttggctccaataaagtgttcaatgatcacaagagcctaaagtatttgtttagtcaacaagagctgaacatgcatcataagatatggctagaatttcttaaggattatgactntgagcttagctatcatcctggcaaagccaatgtagtagctgttgcctcgagtaagaaatccctacatatatctgccctaat

SEQ ID NO: 145200 - DNA, 365 bp, Glycine max
ccgtgatcaatcaaagaagacaaaaggcgctcaagtctctattttatctgtcggcggagagaatagctgctaataaaactcacatggaagagtgtctcgtgaatctagatatgaccccttgactctgaataggactactaaagacattttttccaaatggggacacgacgattagactcagataattaccgtctcttttctgagacatgctcagctaaatggcgatcacggatgcatgagaatgttaaatccctaaaatggccgcgtgatacgcggggatggaggaacctccactaatactatgctcgtgagcaatctcttattaaagaacagatactcacaagtactaccacgcaatacacgct

SEQ ID NO: 145201 - DNA, 454 bp, Glycine max
  unsure (1)..(454): unsure at all n locations
gcccatgattcttattgatgcctatgatatgtgcanaaatattagcgcggaatatgccaagaccttttatctaagtacgtagctacaaagcaaatccactattatcttaatttgcgttactgctatttggctgacacaacccatttattctaaattaacaagatacttgcttatgacataagatagacagaaagctatatgtgcaatttatggtaaattaatatataacactagaattgcaaaccattagatcatgaggtagctttgtatagtacgtgaaacctttactgaaatactagcttctcttcagtttggtgcacgaggatggatggacttgttgatgatcctaacgccgtgtatatgagctctgctattcttgatatgtgggaagatagattgcacgacattcttaatggacaaccttatgatatggttgatgctgttcttactgata

SEQ ID NO: 145202 - DNA, 393 bp, Glycine max
accaaatcagcctcagatgcaagggttgggcgctaagcgcttgagactcactgcgtagcgcatgaacagagatgcgcttagtgcaaggctcgtacttagcgaaaggactgtttttctttcttttcaaaaaaaatggtttctaagttatattttaatcctttttccaggaaattgaaacccttatgttaaatattcaaagataggctgatattctcttatgtgcagttcatacaacaagttctaaatgattaaatgcctgaaaaacacacatagataatagaaatcaaaactgggttgcctcccaggaagcgcttctttaacgtcattagcttgacgcttttacctcactgcgtgatcttatgttatggttcttactatcacaacctcttgacc

SEQ ID NO: 145203 - DNA, 418 bp, Glycine max
  unsure (1)..(418): unsure at all n locations
ctctaaatatacatttgatgttgttttattggaggaggttgtatgccatttttcgtttaagagtagcattccttggtaaaactaactttccaaatgtttgccttcgcaggaaatggccccgaggaagcttgcctcanagaggtccaggaaggataaggcggccgaagggactatttccgctcctgagtatgacagtcaccgctttaggagcgctgtacaccagcagcgcttcgaggccatcaagggatggtcgtttctccgggagcgacgcgtccagctcagggacgacgagtatactgatttccaggaggaaatatggcgccggcggtggacatcactggttacccccatgtccaagtcgatccgaaatagtcctgagtttatgccatgcttggcaacagacgagcgtgcgtgacat

SEQ ID NO: 145204 - DNA, 441 bp, Glycine max
tacgtgacacttagatactaagcttgcacaacaagtacaaaatctatcttttgcaacatgaaatatcttacttgctgagtaacttccactaaaatatacaattactacttaggaggaagggatggaccttgatcaggctcatctaatctacctaattatactaattacacaacgcaaagaccaaattcacagtccgattattgaagtgcagagattctgacttccaagtccaatttaacccttaaaatggcagaattgacccaagtgtatttttgacgaaactgaagatcattttcttagcttcccaagaactactcacatgctccatttggagttttgtagtgtcctataagttttgcacaagacaaataggttaagtaagcacaaaaatactaaaataagccaccattatcaatttacctcaatcattttcctaagacc

SEQ ID NO: 145205 - DNA, 426 bp, Glycine max
  unsure (1)..(426): unsure at all n locations
gcttatggtgtcgctcatgttcnntggtttcttcacctacatggcttacactctaaagctggtttccacgtccacatcatcaagcacgtgcagccacgctcctttcatcatcaaccacctcttcccttcctcaaacgtaacggagtggccgtcttcatcccaaacttcccgcaccggaaaggggaaacggccggggcgccagaaaacggagctccgccacctggtgttcggaatcgcggcgtcatcgaagctatgggagcacagaaagaactacataaagacttggtacaagaaggacaagatgaggggagtggtgtggctggacgatcgcgtgaagacgaacccaaaggaagggttgccaccaacgaaggtgtccaccgacacctcgaatttcgtatacaccaacaagctggggcaccgctccgc

SEQ ID NO: 145206 - DNA, 456 bp, Glycine max
  unsure (1)..(456): unsure at all n locations
tggttggtggttacaaattaatcaggtttatctctttctctttctaagacaaaaccacaaatttgtacagtatatctagctaggtgatttacctagtttgcatatggtctttgcagaataggtacagagcacgagaaatttggttttgagcttaagactttacgtccaattaattacaaacaaatatcagtttactccatcgcatagctgcaagatttgattgggaaaaaataatggaaggagacaacatcataggactaaaaaatgtaagtcctataatgatcgattaatcatttgatattcaatttattcttctttatgaaattntatgccttgtattctgaatttgggatttggtggtgactatatgcagaaattgtacttgaaattttatttacaacagttctatttgaaatctgagaccaatttcaattaaacggaatgtgacatttatat

SEQ ID NO: 145207 - DNA, 322 bp, Glycine max
  unsure (1)..(322): unsure at all n locations
aaccgctgctgctgtanactcgtcactatcctgtgcagcacgatgccacacacatggcaactcctaaaaagatagaaacatttgaatagtctctttcagaagttatagcatataccttaaatagagaagataaggaatttaaggaaaatcaaagtttacttgtgtgggagaaattgaaaaacatgcaatagatcaagaatgacaccacgtttaaacatcttgatcagtgatagttactacttactatctttaacacatttaattactcttataattaccttttaaatgatttcttttatcttcattgattagtcctaatact

SEQ ID NO: 145208 - DNA, 484 bp, Glycine max
  unsure (1)..(484): unsure at all n locations
tagcanatggacatgggtgttgcccagtttcatcgtatctttcataatactcaccatcgctatcagatctaataatttccacctttctgtctaattgtttttctacttcattcaagtaaatttctaaggcatccactgcctgagatttctcatgtagtaagtagacataaccataacatgaatagtcatcaataaactgtatctttcctttttgaaagaattaacattaaaaggtccacaaatatcagtatgcacaatttcaagaagctgagtgcttcttgtagctcatttctttgtatgttntgtttgttttcctttaatacaatccacacaaatatttagatccgtaaaatctaaatcatgaagaatttcattctttattaatctttccatcctttctctagaaatgtgacctaaacgtttataccataagaaagcagatcattcattcactaaactattgttagtgccaacattatgatgc

SEQ ID NO: 145209 - DNA, 349 bp, Glycine max
atctggacagatatatttattggagaatacattctggataaacaaaatctatatgaaataaaatctacgatatgataagatctgataaaataatattgcttgtcttcttcaagtccaagcccaattccggattcaagcccaatggcttataattctcctgatattaatttatgaccacaaaattatcaaatgccccaatgataaaactgttaattaattggccaattaaggctaatcagtaattaaaatggtgacaaaaagggttaagaaataggagaaaataatgacacatctaaaggacatgtccattacgatgccatgaaagatgcatgacccgtttataactgtg

SEQ ID NO: 145210 - DNA, 476 bp, Glycine max
  unsure (1)..(476): unsure at all n locations
ctggaggggttgatggngacccagtgctgagaggaacgagtgtttttggctacatangagtacgtgagctcagttgatggtgggcaactggggatggtgggttcatgtttgatttgtaaaagtgggagagttgatttgcgccattgcccgatcgccacctagtaccacatatgacgggtaccccataatccaacaagcttgatgtgagaaagtgtggaagagtcagtcttcctacttttgtttgttgaccacagagtggtacctggagatatgttgcgggggtcaggagaccttggggacgtcatgtggggtgttattgcccataaccaagcttgaccaatcccgacccaacccgggcatagtcagtcagtgagaacctgtgacgtacctaaacaggcgagcttcttgctgtcaaccaattaaagaacaaagaccacgaagcaaggaggcttgtgtgcgactggccactatgatct

SEQ ID NO: 145211 - DNA, 463 bp, Glycine max
  unsure (1)..(463): unsure at all n locations
agcttagggatatggggtacccgtcatatgtggtactagttggcgatcgggcgatggcgcaaatcaactcttccactttcacaagtcaaacataaacataccatccgcagttgtccacctttcaactgagctcacgcactcctacgtagcccttatcctcgttcctctcagcaccgggtccccatcaacccctccaagcttccacaatatccaagcaattcaattccaaataccatgaaactaccctaaaccaagaaaacagggcagaggcagaaaactctacccaaaacacattcacatatcacagctttccttactcatatatcccaataacattctctttgttccgatttgttaaccattggatcgacttgaaaatattactggaggttcctagtatataaatctacantttgaccgttgggatctgctagaaaatgtctagaaccaaatatgtactacc

SEQ ID NO: 145212 - DNA, 295 bp, Glycine max
  unsure (1)..(295): unsure at all n locations
nttctagaacatatgaagaggtgcactatatctttacctttatatggcacaaaaagaattcttcagacatggcccgaggtgtgaaacagtattatcatgctcttcaaaatcatggtgattacctcaaaaccacatcgtcatcatgatctttgcaaaccaattacctgatgtttcacgcatgcttatccatgtctaacacagttgctgttttgcacacgagctacttgggataaggatactactgaaaacagacatggggaggaatgattagtggaaaaagatagtttgatgttgg

SEQ ID NO: 145213 - DNA, 128 bp, Glycine max
  unsure (1)..(128): unsure at all n locations
gctcaaccttcttttgtgggggataatganagttttactaccgaggcacctcaaccacatgagcttgagccagaaaacgaccagtcatctgaagccatcatctctagagctgtntgattttaaaaaga

SEQ ID NO: 145214 - DNA, 479 bp, Glycine max
  unsure (1)..(479): unsure at all n locations
tatngatttgtcaagaattgaaccctgaactttaaatgattatctcctaataccttgtttagattctaggagagcatgtggtttaaggcaaatttactctaaatttgggggaggaaagtcaattagaatgaaaagaaaaaggttaagcatcagcacacacaacaaataagttgtatgttaaaaaaaaagaaaaagaaaataagttgtgttgttacaaaaaggtcgaaagcaacttaagaaaagggaatagtgagaaggctatttgtacaaaacaagaaaagatcattgggattagtctaggacttgtgctctcttagaatctaaacttttgaatcctagaaaagccagtgaattttttgtagccacaacctcactacaagcctgagaaagtccttctgattctgtttatatatttctgacttgatgacatgagatgaaatgcanagaatggacctcctgttagttgttatcaataaata

SEQ ID NO: 145215 - DNA, 127 bp, Glycine max
ttgggactaagcttggttcaactgagtaaccatctaccccatctgatttgtcagactctgaatggaggctcttcgctcttgctgaaattgcatattctggatggtcatttgcctcactaactcctct

SEQ ID NO: 145216 - DNA, 433 bp, Glycine max
  unsure (1)..(433): unsure at all n locations
tctcttggaccttaggagaatcttcaactcatccttcaagatcaaactgtgtactcgngatcggtccctttcctctctctgaagcttaagctcgctgttactgccccacagagcccctcggaatttgttccggccatgttcttccctatgggcccttttggtctcttgttccaaggcctttgtggtggctatatttatgtctctcagctcggcattctcctttcagatcttaagagctgctgatttgaacttttctttgactgtttgggcttactcaagttctgccctgagggcctacatctcttcgtcctccttctgagcttcaacttccacccccttagtggttctcaaacttgggagccagtccagaccatgcatgtgggctgttaaccacctactgtggccgccgatggccccgatggtactgcctctg

SEQ ID NO: 145217 - DNA, 406 bp, Glycine max
  unsure (1)..(406): unsure at all n locations
aaacctctctntatgtctatgtttacgattgcacttataagctctttgttgcatgtcagcttgggtttttctttatgtgatctacatggtattttctccctagttgattattctctttatttttatctgcaagcttttcttggggggttgtatggtgatgagaaatatctgtgcagtgagactggctaccgaaatccattcaaatgtgttgagattaaagactcaacgaaggatgcaaagaaaacaaagtctcacaaaggtcggttgtctttggaaatttctgatggtattgcacaatctcatatagtgtcacatgttgctggagaaatcaatccttcacaatcacatataagattagtggatgattcatttgcttcagataatagttcacacgcttatatcactt

SEQ ID NO: 145218 - DNA, 478 bp, Glycine max
tccagactgtggcccttcagaagattcagacaaacacactctatataattacttatggtaacaagtaacataatttcctttcaagctaaccaagtgtgtatgtttgtttgtttcttcttttctttttgacagatgtctgcacggggtggggtggggtggggctcttactttcatcagtaggaaaatgtttgcattgaaatttaatgcattagtagcaaaatgttgtgggaagatattgcattactcactagtaccccttaacttgaaagttaccacggtttatgcggtaacataaatatcagataataaaagcaccaatcacacacaataacctcgtaagcattcacaaagttttccctagactgaagtaaattattcagcgttcccttcaactctttctgcttgttctcaagcagcacattatcgttctcaagataaatcacctgcattacaatttacagacacaattcaattaatt

SEQ ID NO: 145219 - DNA, 470 bp, Glycine max
  unsure (1)..(470): unsure at all n locations
agcttttagaaataaataaataaataaatatatatagagcaaataataggctgagtaccctaggtataaatagttatgttaagtcatctgtctccttttggcctcattttcgtttttccccttctcctctcaaaaccctttctttttcccgcagcccatcaaaccagtctcagaaaaacgacgatcttgaacccgttcaccgtctgatcgttgtgaaatttgagtatcatgttcgcaacacaattccgagcattctcaccgttggtaattttgatatcatgtctgaactgagagaaacacccttcgcattgtagcctttttctttcccgcagaaacccagagctgtcttggtaaaactacgatcccggtttcgttaaccgttggattattgtgaaaattggatatgtngttcgaaattcaatttcgcacgcttccaccgttgggagttgcgagatattattcgtggaggg

SEQ ID NO: 145220 - DNA, 487 bp, Glycine max
  unsure (1)..(487): unsure at all n locations
tctanactntgtacaagaatgaagctctgataccacttgttatacaagtggcctcagatatcttaagaaggggggggttgaattaagatattccaaacttttctcctaattaaaaatctatcttactttttacttaagttatgaattcccttaatgacaatcttcttaaatgttaattcaaatgaagcaacttgaatataaatataaagcaataataaataaaggagattaagggaagagaaaatgcaaactcagttttatactggttcggccacacccttgtgcctacgtccagtccccaagcaacccgcttgagagttccactaacttgtaaattccttttacaagttctaaacacacaaggacaacccttcctttgtgtttagagattctttacaacaagagactcacagtctcttaatcccttagagaatgagaagaagaagaggaacaaatctctctagaaagagatggattctacaaattg

SEQ ID NO: 145221 - DNA, 483 bp, Glycine max
  unsure (1)..(483): unsure at all n locations
taagtcacctgcggcatgcaagcttgtgtcatttcaaccagaagaataaaaatctttacatagattatctcattatcatttatcaaaaatttatcctcaatacataaattntctccaaattttccccaaataatattctaaccctgaatatataacctataaagatacgcataggaggaatggagaaaaacaaaaagagtaaaggtccatgcttctattcagcattcataatttgagatagaccatagttgtctcaccttaactatttttggatagcatttattggaactgtacgtggagacggttttaaatgtttctcaatatgatagtagacattaacatactcatcatatttgtccttctctctctttctatntgagtgggtaataaaatcttaaaaatacaataaaatatacaaataaaatagaggacagaccgggccaaatactgagccttagctagctagccagcacaccacatgca

SEQ ID NO: 145222 - DNA, 459 bp, Glycine max
  unsure (1)..(459): unsure at all n locations
gtctccactaagctgccagatgcctgatatgtactttntgtttacaatggtcctagatgcatggaagaattacttcaagaacaccttcttaaggtcatcccagctgaaaatggacctgtgagcaatgtagtatgaccaatcttttgccactccctctagagaatgaggaaaagcctttaaaaagatatagatcttcttggacatcacggggcttcatggtggaacaaacaatatgaaactccttaagatgcttataaggatcttcacttggaacaccctcatcatgatattgaatgcacaagctttcataagtgaaatcaagtgcagccatctccctaagagttctctcacaaggtggaggatgagccatgttctcagtatgaaaattaatagtggaatgcttatatcaaaatatcagaataccctcacagaatgctcaaatgttaaatgcacaaatga

SEQ ID NO: 145223 - DNA, 480 bp, Glycine max
  unsure (1)..(480): unsure at all n locations
agctctggtagatactagttgttcttttacttccatatgcaaaagtgttgtgccccaacacaattgttttcgaagtaacataataactaaaactagaactatgtctggagacataataactaatgacacataaacaagaaattttactatccaattatctacaaattgtgatatctttggtaacaaaatctttataaataaagcagatgttgtagatttacaaccaaccaaagaaaaaatgattttaggactcgattttatcgtacatgataatagaatagtcactattactaaggattatttattaatctctacaaattcacaaaggtcaccgataattgacgaactcacatcagagttgcgaacaaagcatggtgatatccncattngtgttaataataaaaataataaatgcctntgtgacacacctggtagctgtaaaataaaagaatcacanaactataggaggatagacaccct

SEQ ID NO: 145224 - DNA, 511 bp, Glycine max
  unsure (1)..(511): unsure at all n locations
cggacctatgaaactcaagctgaggattatggggtatccatcacatgtggtactaggttgtcgtctggcgatggtgcaagtcaactctccacatccacagatcacacataaacccaccatccccagttgcccaccttcactgagctcacgtactcccacgtagcccttatcctcgttcctctcaacaccgggtccccatcaatctctccaagcttccacaacatccaagcaattcaacatcctaaacatcatgaactatcaaaaccaaggaaaacagggcagaggcagaaaaatctgcccaacacaaaccaatatcacagcttttctcacttaaaaaccccagtaacattctcctcgttccaattcgttaaccgttggatcgacgcgaaacttttactggaagtctctagcacataagtctgcattgtgaccgttgggatctgctacaaaacgtccagaacccaatctgtactactctntccagaaccagcatatacacaacattttctgg

SEQ ID NO: 145225 - DNA, 453 bp, Glycine max
  unsure (1)..(453): unsure at all n locations
ctttcacatgaagctaccagctcacctgtgcgagcatgatacttctgaactaagccaccaactctgctatgcgaggtgggcatcaagctcctcccctattttggctataaatgggcatgggacgctgatgggaacgggttcatcaaccttgttaagcatatttcacttaaaattagtgacgagaagaagaaagatggagaaaatcatgccaatgcgcctccgtaacgctttcgtgaccaattccgcgaatgttcttcgtcgttcttcgtcttttcttcatcgctacgccatcttcaaccggttngttntttactttgaagctctgaattcattatatgcacccttaggggtccattctntcatatgatgttgacatctacatctccgctacgttcagtattcttcttcttcattttaagcgaggttcgaccgatcgtattagctgtaatctca

SEQ ID NO: 145226 - DNA, 480 bp, Glycine max
  unsure (1)..(480): unsure at all n locations
cttgacatagagggtcaagcacctacacaactaagctttctttgttattagtcacaacattcattgttaaatgtttgatatgataatgagaacctaaagtcaatgcacattttctcatgttcataagttcattacttaaattaaaacatttctcataacactgttatcatgaaatacttacaatgattctgttcagaatgttgtgctcaaaaagcttttactcagcatgtttattgtagctttccatgcacaaaactattttcatgttttatgaaagctttcatactttaatgcatatgattgaaaaggtcttatgtaaatatttttatcacaaacatgatttagttcanatatgccattttacaaatcagttaagctcgttatgaaaaccttcttatgtatgcattttgttatatgtcattctgatgctcagaatgttctaatgcaaatgtaatatatatgataacaaataacataata

SEQ ID NO: 145227 - DNA, 471 bp, Glycine max
  unsure (1)..(471): unsure at all n locations
nagcttcanaccatatcatctcanaatctatgtatccaaaacccctcaatgtaatggattttcaatgtttgagaagtgaaattgagaatgaggtaaatttggagcaaactctcacctcacacaagtctataacatcaatgtaaactttctcaaactggatatacacctaaaattccaccgaatcaaaatttgactcctcaacacccaattttaccctagagatggctctttgttcactttggtcatttgtctttctctctagcacatcccaaactttctcataagtcctaaatgacatttcaaactaggattaactccctttaacctccaaataccactaaattcagatttggccttccaactctcaaagcctcacttcttttccactcataacaccatactctcactttctaaccctaggttaactctacccttcatctctaacangtttccataagcaatttcagcata

SEQ ID NO: 145228 - DNA, 501 bp, Glycine max
  unsure (1)..(501): unsure at all n locations
tacggacctataatactcaagctgtgaaagcctgccgacatagcctaaggtggttttgtttgatgagaaattntcgctagttnttagttntttttactagctgaaaagtttgtttgattgtttggtaaatgttaagttcgacaaaggtagctgaaagctagctggaattagctagtagctaaaagcttaaagctttaaaactaacttattaattataaatgttcgataaaattagttattgaagtagctaaaaaatgtaaaatgacagaaaaataataaaatcatgatttattttaaaatgtaattaggaaattggataaatatattgagtataaaatggaagaaaatataaaaagttaaaagttcatattttaaaacgttaaaaaagccttatttaggctatgttcaacaagacatttgagttagtttctaagtatttttttctagtnntttaaattttatattttcaacaaacaataatttagaaatatgttaatatat

SEQ ID NO: 145229 - DNA, 471 bp, Glycine max
  unsure (1)..(471): unsure at all n locations
agctttataatagactttctcttcataataatattcacataagtgttntgagacataaaacacaagtcatacatataattcattcagataacggtcaatgtatattgatgctctcctttgggtgatacaccaacacaacatacaaacatgatgatgctaataaaattcttaacattatttggaaattaaatatgcaccaattagtagtatctatttcctttgggtataaaaataaaactaataatacacacaaatcgcctacaattatattcgctaattataagaacaactaactaatcaacctttgagtgatccataaatgtcttataacaatgaatttcaatgtaccccaaaaccaataatcatataatttagcatacattattctatgagtatttgaaataatcatttaattgaaataaataaccttatagacttggcccatttggtgctaacaaatctatcatacac

SEQ ID NO: 145230 - DNA, 463 bp, Glycine max
  unsure (1)..(463): unsure at all n locations
ntacttgtgtcanaattacatgtntggtgaagtgccagatgtgcttgngaatntagtatcacttgaggagttagtcatttatagcaataacttaaccggaagaattccatcatcaataggaaagttgaagcagcttagagttataagggcaggtttaaatgcactcttagggccaatacctgctgaaatcagtgagtgtgagaagctggagatattgggaagattcctctaggaagattctagaaacaatacagctcatctcagacgctaaacaggagtaaaaataaattattgaaacacaaaatccttaaaatattctggaactttcttttctctaacgagtctttggtttgtactggacccattcttttctttgtgattgtccatattcgattngaactcttgtttcacaattgatgaaattgaactaacctaaacccgattaattagtttttatgagaag

SEQ ID NO: 145231 - DNA, 345 bp, Glycine max
  unsure (1)..(345): unsure at all n locations
catgcagcttagcattaatttttagcgctcatttattcnggactcaatcagaaatccgaggtaaaagttattgtcgttcgaataggctcataggttcaacattcaatttcgagcgtctcgatatattacgggactcaatcagacattcgagtaaaaagatattgtcgtttgaattggctcataggttaaacatacaatttcgagcgtctccatatattacgggactcaatcagacgtccgagtaaaaagttattgtcgtttgaattggctcatatggttaacattctaattcgagcgtctcgatatattacgggactcaatcagacatccgagtaaaaaggtatt

SEQ ID NO: 145232 - DNA, 346 bp, Glycine max
gacacttgaaactaagcttaggaattctggcatatacttgtactctgatgttctatcgtagtccataatatatcgacacgctcgatattgaatggtgaaactctgagccaaagccaactacaataactactttactcggatgatcgattgagtcctgtattataacgggacgctcgaaatggaatgttgaaagctctgaccaatttataagacaatatacttttacttcgattgtcgattgagtctcgttatatatcgacacgctcaaaattgaatgttgaacctctgagcctatgtgaacaacaataacgctttactcggatgtacgactcagtgacgtattatt

SEQ ID NO: 145233 - DNA, 365 bp, Glycine max
  unsure (1)..(365): unsure at all n locations
agctntaacattcaattttagcatctcgatatattccatgactcaatcatacatccgagtaaacagttggtgtcgtttgaatctgctcaaagtttcgacattcaatttcgagcgtttcgatatattacgggactcaatcaaacatacgagtaaaaacttattgtcgtttgaatttgctcaaagcttcgatcatctatttcgagcgtctcgatatattacgggactcattcaggcaaccgagtcaaaagttattgtctgttgaatttgctcagagcttcaacattcaatttctagcatctcgatatattccatgactcaatcatacatccgagtaaacagctgttgtcgattgaatttgctcagag

SEQ ID NO: 145234 - DNA, 426 bp, Glycine max
  unsure (1)..(426): unsure at all n locations
tngagcaaattcacacgtcaataactgtttactcggatgtcttattgagtcccgcaatatatcgagacgctcgaaatggaataccgaagctctgagcaaattcaaacgactataactttttactctgatgtctgattgagtcccgtaatatatcgagacgctcgaaatggaataccgaagctctgaacaaaatctaaacgacattcactttttacttggatgtctgattgagtcccgtaatatatcgagacgctcgaaattgaataccgaagctctgaacaaattcaaacgacaatcaactttttactcggatgtctgattgaagctcgtaatatatcaaaacgctcgaaattgaatgtcgaagctctgagcaaattaaacgacaatatacttttnactcggatgtctgatggagtcctgtattat

SEQ ID NO: 145235 - DNA, 278 bp, Glycine max
  unsure (1)..(278): unsure at all n locations
ttcccttatggtatcaaacataaaaagggaaaaggttatattgtagccgatgctctttctcggcgtcatgcattactttctatgcttgaaacaaaattgattggtcttgaatgtttgaaaagcatgtatgaaaatgatgaaacttttggagacaattttataaattgtgaanaatttttcagaaaatggtttctttatacatgaaggctctcttttaaagaaaacaaattgtgtgtgcctaaatgttctactagaaatttgtttgttgtgaaacacat

SEQ ID NO: 145236 - DNA, 471 bp, Glycine max
  unsure (1)..(471): unsure at all n locations
ntntggagtagaaacctgggaccaactcagtttatttcatttaatgaaatcatatctagtcaaggtctgagagaccatacaagtttcctaacgatatctaattatgtgggccattaagtctatcatatgctgacaatagccgagaagcccatgaatctcttcgggggcggagtaggtgtctgccatcgccttggccttggctaacaatcggggaagttcttgactcccgttcaaggtaagagcaaaccgatccatccacatggttgcctcttggtgtaaagagtcgatcacccttcctctagcctctttttccgcatatacttgggcatactcatccgcgattctatgctcgtgggccgtggctagacccaactcttcttggtacttggcgatgatagctaacatgttggtctctgtctcgcatagacgctgagacaagcttcttttggaccttgaacaagcaatcaactc

SEQ ID NO: 145237 - DNA, 246 bp, Glycine max
  unsure (1)..(246): unsure at all n locations
tagaagcatgtgttacacttgttgtaactttgatgaatgaaagtcttatgagacacacttcaagagtccacttctctccctcntttattccttcaatgtcgtgctccccccttctctctttcttttcctccatagaagcaccctttccaagcttcttatccaaggcactctcttggtggcaaagctctttcttccatggcttattccctagtagatggcgcctcccctgtcctcctcttctttgac

SEQ ID NO: 145238 - DNA, 496 bp, Glycine max
  unsure (1)..(496): unsure at all n locations
tacggaccttaaaactcagcttcttgagaaacttccttgaaagcagagctagctattacacccctctcataactaagctcacctccttgacaaaaaaaacatgaaaatacgaaaaanaagtccttactacaaagactactcaaaatgccccgaaatacaaggctaaaaccctatactactagaatggccaaaatacaaggcccaaacgaaggaaaaacctattctaatatttacaaagataagcgggctcatacttagcccatgggctcgaaatctaccctaaggctcatgagaaccctagggcctacccttggatctctagcccaatctacttggagtcttctacccaatgcccttgcgggataagattgcatcaggtgttttatcgtgggaaccccaatcttgatatctggggcgaaacannattgggtgtcaaggtgtcgatttcgggccgaacttccatattattccataaagcacgcgtgacaatgatgat

SEQ ID NO: 145239 - DNA, 417 bp, Glycine max
  unsure (1)..(417): unsure at all n locations
actggagctacttcacttggatttgatggggcctatgcaagttggaggccttggacgaaagaggtatgcctatgttgttgtggatgatttctgcagatttacctgggtcaactatatcacagagaaatcaaaaacgcttgaagtattcagagagctgagtcttacacttcaaagagaagaggactgtgtgatcaatagaatcatgagcgatcatggcagagaatntgataacagcaggttcactgaattctgcacatctgaaggcatcactcatgagttctctgcagccattacaccacaacagaatggcatagttgataggaaaaacaagaccttgcaagaggctggtcgggtcatgcttcatgccaaagaacttacctatgatctctgggctgaagccatgaacacagcatgcta

SEQ ID NO: 145240 - DNA, 466 bp, Glycine max
  unsure (1)..(466): unsure at all n locations
gatcgaggatagctcggattactttcagtggaagatatgcggcagcaggttaatcataaatgtttcagtggaatttatgacgttggcaatctttatgaacaagaaactggtcttcctagtttcagaagtcagaaccattatcttcccatagctgctatttttagaacctttatcttttaacaattgctgctttaaggacaacaataacaactgagccttttccccctacccactatgtgaggtcagctacgtggatcaacgacaccataacgttctattatgaagcatgtctataaacaaatcattgaccgttaaatccttcttaatggtttgccaacagtttttctcaatttctctctagcaataaggttctcctccatctgatctagtctccatacatgtcaaatatactcaaacanatctcaagactcttgaatggtattgtgtgggatcataaaaaataatg

SEQ ID NO: 145241 - DNA, 483 bp, Glycine max
  unsure (1)..(483): unsure at all n locations
tctanaaatagaaaatacaaaagaggagagtagtcaattctttgtttatttttaaaagtagttagcttagttaggttgcagatttactatctgttcacttgatataaatcaagaagcaaaaacaaagtgaagaaaatggaataagcaacatacatatatggtgtatccccaccaaacttcttttgattaacaaattccagagagaagctngatgtaccctccaccacattcaatctcttgctcaaattttacagaatactgaaggaccaatgttctgttcttgtttgtgaattctggtatttttgcagagatggcaaagtgtttggcatcactggatgtttgaatacctacaatatccacaaaatagcaacatgttacaaaaccaaccatatatgatatgagtatgataatgtgaagtgtaatgtntggcatcactggaggttntgtacatattaagaaaggagacaaatacatgttattcac

SEQ ID NO: 145242 - DNA, 380 bp, Glycine max
  unsure (1)..(380): unsure at all n locations
agtcacctgcggcatgcagcttgacgacttaagacatctncttcgatcttggtgatcctagtctccatctcattgaagtgcatgtccacttgtaactccaaagtatctaacctttcaccaacaaaagtttgaagaccatcgaacctatccaaaatctttgaaagaagagattaatcttctccatcatgtgcttcttcaccaacatgtcgagcaccctttttcacccaagagccatcatgctctctttgataaccaaaggatgcaatgactgaagcacctattagaaaggatctcttgattggaacatagggttcacaatcaagagggatgttaaagtgttgaggaagaggggactatgtgggatatggcaatggagcttc

SEQ ID NO: 145243 - DNA, 461 bp, Glycine max
  unsure (1)..(461): unsure at all n locations
gagtcacctgangcatgctagcttctatcagttattaaccatatagacattatctaaaattagttatgtcaacagcaatatagacaataacaaaaaaaacgtcaatagctaactaacaaaaacagtaatgtcaataaaaaatgtgcggtgacctcggtcacgtggcttctctttctcccaaaaaactgagcaagttcttcatctcctcatccatacgggcctcctctgtatcgccgggagatcctgcaagcgcctcccctgcctatgcctcgggccaatctccgggccatgcgacctcagccctaaactgctctggagtagggcatgcaaaaggagcaaaaccctgcccctgctgactgatgctaagctggtagagacactcatgtatctgcacctgcccccagtggttagccgcctgctggcgaaccaagtgttgtagataacgctccatgcctaatgac

SEQ ID NO: 145244 - DNA, 394 bp, Glycine max
  unsure (1)..(394): unsure at all n locations
tgagttggagttntatttagcactagttgtactctggttattattctattcaatcaagacacatcccggagaaaagcgtccaattgatttgtgtgattactttattcagagatattttgataattctattattatcttgcctcttttggttttaaacgtggttacgacgtgaaagaccggtcagattcttattctcaccagatatctaaccgatattacaactcaaatgatcggggcaaattcatattattattgcttaggcgagaaaatgacttatactaaatggtttatacacgttaaaagggggtacggaaagcgaatgatataaaaatattatcacgcgaaacatgtggggaccactaagggtacatagaaagtaatgaaaggttcgatt

SEQ ID NO: 145245 - DNA, 475 bp, Glycine max
  unsure (1)..(475): unsure at all n locations
agctngaaagagcccgggtagtcaaagagatgttcatgtccatagccatcaaagtctgaagagagtatgatgaactaatggacgttaatatggccaccgatgaagccttggaatgagaaaccaagaaggcccgaaaggaagaacacgtgccatcaaagttttgaggggctttatagggcagcaatagtaagctcaagctccgaagaggtgaaaggaatcatcacgggtcaaaggcatgatcttgaaggacgagctaaaggttttccttatgtcgaaaagaaatttgtcccaacagttaagcgagactgaatggaatatgtgggccatcatcgataagtgcaaagagaagctaaatctagcggcgactcacgagcaaaggctagaggatgagtacgccaagatatcagcagaaagggaagttaggganagggtaattgattcattgcaccaagaggcaacaatgtggacggaccga

SEQ ID NO: 145246 - DNA, 479 bp, Glycine max
ctttggctggatccctgtacgaatgcatataggggatgaagtttatttaacgcggaagaagcacatccacgtgatgatattctatctttgaaggaagttgtaaaagagtgatgaactaagataggattttgaataggctttatcattgttcaacgatatattcaatagggtaaacatcttttcgcatccaatccacttaatatggctggtaggatgcaacctccttcctggtctattgcatggaagagagatcacactttcactggcagaatttcatcatttgaaacattgctaagtggttcagatcaaatcttgaagtgtcatttctggcagagaagttcatggatgtaatagccaacaagtgtacagtccttcaaacatattctccaaccattagcacatgaggtctatcggttatgttcctcactagagcaagtaattttggcattcacctgaattggtgtaatagagtattatat

SEQ ID NO: 145247 - DNA, 435 bp, Glycine max
agcttcctcggggccatttcctgcgaaggcaaactattggaaagttatgtttaccagtgggacactactcttaaaacaaaaatgacatacaacctcctcccataaatacaaacatcaatgtaaatttagagcaagcttatgcgcatatttccctacgaacgttcacttgcacaagacatcctattaactaagaaaaatgcacccatatacaatcaaggtagcttcattacctagattatttacatgtacttccaaggtgtatttgttatttacatcacacacgcctccttggctaaatttacatacatgcatactcaaagcatttcggggtaccaaaaattgcacatgcgctcatcttggtatttctaatacctatacatatacaaacttcatgatgaatcttgactacctacgcaataaggtgctacatttcat

SEQ ID NO: 145248 - DNA, 473 bp, Glycine max
  unsure (1)..(473): unsure at all n locations
tcaggttgctcattgactccagattgctgcanagaaggacttatatctgtatggtgatctgcagaagaacatagaccacaaactcttgcaacaggggcagatgtagatttctgattcatggcaagttgagttactaggttgaccaaggcatcaagttttccctcaagttttttattttcaacagatgaagatgaatccgtggccacctcatggacttttctaaggataatagcatcatttcttgcactgaattgttgggagttggaagccatcttctcaatcaaattcctagcctcagcaggggtcatatcaccaagggctccaccactagcagtatcaatcatactcctctccatgctcagaaatctggtggtgaggacaacttgcacacaatttcttgaatctttcccagtactcatacaagctctctccactaagttgcctgatgcctgaaatgtnctttctgatggcat

SEQ ID NO: 145249 - DNA, 234 bp, Glycine max
atgcaagcttgttgaattgtttgttggatagttaacatcccattctgtctaggttttgtgatgatgttgcgatgttatatgctgatattgtgatggaatctgttaatacaagggttaactacctatgttaaaaggagatgtgatgttatgagtggaaaaagtgaacttgagagttgaaggctactctgattttgggtaattgagttaagtggtaatactactgaatgttttatg

SEQ ID NO: 145250 - DNA, 429 bp, Glycine max
gtgccaaatacacaagttccttgagatagatactcggatcattctattctaattctaaatacttggcgttcccctttgatataagtgtttgtaaatttcatataaaagaactgtgtggggaggccaacatattctcaaactcaagtttgagaaaaataaattgtgtgaagcttgtcactaagggaagcacgctaaaaactctttttaaagtaaaaacgttgtttctacttcagaaccctttgaactacttcacatagacttatttggagcctctagaactatgagtttgggtggtaattactatggcttacttatagtagatgatgactcaagattcacatggactttgtttttgaaaaccatagatgaagcttttgatggttttgcaacttgccacgtcattcaaaagaaaagagtttacattgttca

SEQ ID NO: 145251 - DNA, 472 bp, Glycine max
gcttaacagctctacaacagctatctttgaatgactgcttctcaatatcaagcttgcctcctcagatagggaagttgacttccctaaggaatctaagcatgtgcattgttggcaaggaaagaggattccttttataagagctgggaccactaaaacttataggagatcttcacatcaagcatctagaaagagtaaaaagtgtaagcgatgccaaagaagccaatatgtcaagtaagaaactaaacgagttgtggttgtcatgggatagaaatgaagtgtgtgaattacaagaaaatgttgaggagattcttgaagtccttcaacctgatatccaacaacttcaaagtttgggtgtgggacgatataaaggttcacattttccacaatggatgtctagtccttctctcaagcaattggcgattggcagatgcagagaagtgatatgttgcaggatgtttacaacatatgactt

SEQ ID NO: 145252 - DNA, 472 bp, Glycine max
actcaagcttataagtcctgattgacatgctacactagaatcaactcattttatactccaatttccactaacctctaatttgactttctaaccctcaacatctcacatttatccacctacaacactaccattctcacatttaactctaagatgactcttcccatcctctctacgagtttgatatctacctttgaagcctacgtatatctcaaagcgtcattattaaaccctaaatcaacatgggtagttttgcttacatcatacatgtcaagttcagcataattacaacaagttccttcacaaacgactaccctaaagcaataacctagtagaactacccattatagctcccacaaacccaacacccatgaggtagaggtatgctcctagactccaaaaacaggtgttacttgcaatatggtgtggatatgaagaggaattcggagcttcaagagagacaacaatggtggag

SEQ ID NO: 145253 - DNA, 434 bp, Glycine max
  unsure (1)..(434): unsure at all n locations
agctgtcacaatatccaaacaattcgattcctattatcatgaaactaccctaaaccaagaaaaacatattggaggcagaaaattctgcacaaagctcatccaaattccacagtttttcctactcacatgccccagtaacattctcttcgttccgattcgttaaccattggattgccttgaaaattttactggaggttcctaatacagaaatctaaattttgaccgttgggatctgctatagaatgcctagaacacgagatgtactacctttcccgtgactagcactgcacaaccatttttctgcacatttggtcaaatttgctgcacaattngacagcttttgctgcacaatttggcagatttcgaattctagcttgcttgtatccaatttcactcaaattgganncnnacagcctaaaccatgtctaaatcat

SEQ ID NO: 145254 - DNA, 488 bp, Glycine max
  unsure (1)..(488): unsure at all n locations
ngtagaattatggggtacccatcacatgtggtactaggtggcggtcgggcgatggtgcacaacaagctntccacatccacaatgcgcgcataaacccaccatcccctgttgcccacctccaactgagctcacgtactcccacgtagcccatctcctcgtttctctcaacaccgggtccccatcaatcctcttaagcttccacaacatccaagcaaaacaacgttcaaacagcacaagctatcacagccaagcaaaacagagcaaaggcagaaaactctgctcaacacatcaaccaaaatcacagcttttctcacgtaaagaccacagtaacaattccttcgatccaattcgttaaccgttggatcgactccaaaattttactggaagtctatagtgtataagcctgcattttgaccgttgggatatactagcaaacatccagaactcattctgcactagactntccacagccaaccacacacaagcat

SEQ ID NO: 145255 - DNA, 460 bp, Glycine max
  unsure (1)..(460): unsure at all n locations
tcttagtttcagatgatgcagatgggtatgtagctacctcatgcactcctctaatgactatggcatcatttctggcgctaaactgctgggagttggaagccatcttctcaattaaatttctggcttcagcaggagtcatgtctccaagggctccaccactggcagcatctatcataattctctccatattactgagtccttcataaaaatattggagaagaagttgttctgaaatctgatggtgagggcaactggcacatagtttcttaaatctctcctagtactcatacaggctctctccactgagttgtctaatacctgagatatccttcctgatggctgtggtcctggaagcagggaaatntttttctaagaatactctcttaaggtcatcccaactcgtgatggaccctggagcaagggaatacagcccagcctttgccactccctctaatgaatg

SEQ ID NO: 145256 - DNA, 464 bp, Glycine max
  unsure (1)..(464): unsure at all n locations
cctatgaatctcaagcttgtatcgtcggcgacggtggcacaggtgagattcctctttatctctctttttcangatctactttagggttagggttagggttatttcccaattcttcttgtccggttctcgtaacgatctaggttattctataatccaaaacatttcggcaccgtcatacacatcatggagtatgaatttaactacaatattcatttattcctcgtaaaactatatgcatgaaagacaaccttcgtgaagaggcatctcactggtgaattcgagaagaaatatgaacgtgagattctttctctatcattntattatcattaaacttttatatgggtttatctcattctttcgtcgaatatgcttaatctgaataacgcgaccattggtgcggaggttcattcatcggattttatctcgaactgcggacagattctcttctattcgtggataccgct

SEQ ID NO: 145257 - DNA, 401 bp, Glycine max
agctttatatctttcgatgtgtacaatacatttgtgatctcatcttgtataactcgatgatgttattcccaagagagtatcattttagaatggataggccaacccatagggaataatacagctcaattggtttctacagtgtcggcctacattgcaaattacaatacgcttaaatttaggaaaacatttctataacatttacaaatgaatcaacatggcatgcagttattatagaaaccttttaaggttagggtcttctcctctacaatgctgccctacctctgtagatgactgaatgcacctagctacacttgaaactttatttgtaaatctcaaactcaaactagctgaagtggaatgctatgattaggttagtccatctattatatagtttaccactt

SEQ ID NO: 145258 - DNA, 277 bp, Glycine max
ccgtggaagatcgaagaactgatgttgaagctaatgagaaatcgtcgaagatcgtgtgagacctccgcaaaataactcacagagcaacttaactgaaaagtctgggagagctcagctggataaccttcactgaaactattatggcgggcctactcatataatatacaagcgccttggggctgaaccctttatttctatacttcctccctcattcatatcaaaagagacgaggtgctggccgtcccactctcccaaacaaactcatgttgaccagacg

SEQ ID NO: 145259 - DNA, 438 bp, Glycine max
  unsure (1)..(438): unsure at all n locations
gattcacgattgtcatgtgctcatgcaacaattgttaaccgtggctatacgagacatcttgccaaacaaagtcatgttcacgataactcgcccgtgctttttcttccatgctatatgtagcaaagtgattgatccagtaatgtttgatgagttggaaaatgaggccgcaattatactgtgccagctggagatgtattttccccctgcttcctttgacatcatgattcacttgattgtgcatctggtcaaagaaatcaaatgttgtggtcctatttatctatggtggatgtacccggttgagcgatacatgaagatcttanaagggtatacanagaatctatatccgccggaagcatctattgttgagaggtacattgcagaacaagccaatgaattctgttcagaatacttatagaangtaaagctgttggcttcctg

SEQ ID NO: 145260 - DNA, 479 bp, Glycine max
  unsure (1)..(479): unsure at all n locations
ttacacagatgccactctatgctaaatgcctgaaagacattgcttctaagaagaacaagtatatccacagtgacaccatagttgtggagggaaactccagcgctatgattcaacgtatccttccatcgaagcattcagatccaggaagtgtcacaataccatgttctataggtgaagtttaagtaggcaaggctctaattgatttacgagccagtattaatttgatgccgctctccatgtgccggagacttggagagctggagataatgcctactcggatgaccttacagttagttgaccgcttcgtcactagaccctatggagtgattgaagacgtgctggtccgggtcaaacatctcatctttcctgctgattntgttgtaatggacattgaggaagatgcggatattcccataattgtgggacgtcctttcatggtcaccgccagctgtatagtagatatggggaaagggaaaata

SEQ ID NO: 145261 - DNA, 282 bp, Glycine max
tcccacaccccgatcaaaatagtcctcgccattttattggagaagcgcctatgtcgaccaccacacaaaccttagcccttctcgtgcagcaaccttgaatacaaatgaacaggctgaagctaatgctgcaaacaataacaacttgactaccctagcacttagcagcaaacaacaccacagcataacaaattatgacctacccatacaaaagaacgatctctagtggaggaagcaccctaatctcagagggtccagccctcaacaacaacaacaacaacagtc

SEQ ID NO: 145262 - DNA, 476 bp, Glycine max
  unsure (1)..(476): unsure at all n locations
agtcacctgaggcatgcaagctgtattctttatggtgttaaaaatgtattaaagtccattaacacgtatataaaagacacattattntttatatttggactatgtggcaagattatatattagtataaatatgaaattaattaaattgaataataagaaatatgttaataaaatatacaaacgcacacgtctgtgaggatgtttaatttgggcgggggctttaaccgtaagttatactttatatgcatagaccaaagagttttcgctagtgtgcatatgatgatatgaaatgaactatgtacatcctcagtcctctatttgtttattattcgtttttccttttggagaattacgatcatctaaataaaattcagagagctttttgcttttgctgtatgttacttgataagaattatagaagcaaagataatgtctatgaaatagacggaataacgactgtcaacaattattaatta

SEQ ID NO: 145263 - DNA, 385 bp, Glycine max
  unsure (1)..(385): unsure at all n locations
atataaaactagaatgcagatgcagttcaaactttcctaacgatcaggcaggctgagggcaagtgtacatacacatggtgattggtgagtaaagggaaggtcaggacagacggcgaaaaggaaagatacttgaattatttgttggcagttttcctctgaaatcataaaaggaagaagtttatcattccccattgatcaccccaataatgaggcattagggggttggggtgaagaagtgaatcatataaaagtaaaattgctcagtgaaaataacatttagatttcgcttcaagatccaaatcaaattggagaaactaggacctatgtcttgcttttgctaattataacaaaaatggcttgcctaatngtctttgattcatcaaag

SEQ ID NO: 145264 - DNA, 492 bp, Glycine max
  unsure (1)..(492): unsure at all n locations
gtcacctgcggcatgcaagcttcaatccaaggccagactctcgtgcatgtagaggcttctcattataaaatgccaaactcctccaaaaaatctgatntaaagcttaaataggtgggttcgtccgtgctcgtgcgcttagtgcaaatctgaatcgcttagcacgcataagtggattttggcttagcgcacttctctcgcttatcggatgagctgaagcgatgcgcttgatgacctggagcggtgcgctcagcgatcctgacagctcatcttcttctggcttcttcctcacgcttagccactgagtgtcacgcttagcgaatgctcgctaagccagcagattggcttagcaagaaggtgaaatcagcacttttgccaatttgcctaattaacctgaaattgagagaaattgattatttaacatacaaaacaaaagtatcaattatctattacctatatttaatagaaagtgcttattatattacaaaacaacta

SEQ ID NO: 145265 - DNA, 460 bp, Glycine max
ccttaaacagagaataacagtcttattcgttcctaagcaaaccctatcccttgtgttaggggttgtctctttttgtcccatttggggagtttgatgaattatttcaactatatatactttgtttggtattgatactgaccctttttctaatttctgtaatagggctacccattgtgtgtattgtgaatgtcatatgttgaaattgaatattctgccataggcatataactattacaattagtaaagtttaattgtgaatatctaatatcaattttaattcctcaatattgaagtcaaattcaacgagaaatatgtaatttatgcttcctaatagatacaatagtggtcaaaatccaatattaatctttcttttctctaaatgaaaatcaacccaaactttagtactaattagatatgcatcgtatccacatctcacatgagaagacatattttttctttt

SEQ ID NO: 145266 - DNA, 448 bp, Glycine max
  unsure (1)..(448): unsure at all n locations
ctgagcctaaatcctgactcaccataaaccttgacccggtgtgagaatgtcaatccttaccctcggaagcaaaaaagaaaagaaggaaaatttccaatcaaagggaaagcaaaaagaaaagaaggaaaatttccaatcaaagagaaagcataaagaaaagaaagaaaattcccaatcaaagaatgggagaaaagtaaataaggaagaagaagaaggaaagataactcttgatcaaggatcgaaagaaaacagaagaaatgtgcagaaaggtctttggaccggacaatatctgaacaatacagaattgtcaccaaatgaacgaaaagaaggaaaggaaaccatgacctaaagtggttttctccctttaatttccaaccaagatattgtgtgctagcgactntntcgccccgcactaaaccaaaacagaataggaaaaaagccagaaaaa

SEQ ID NO: 145267 - DNA, 403 bp, Glycine max
agccaactaaccgatgcactcatggcagatgggtttgaacaactctacgccgattgatagtgttcattagtcacagccatggaattcaatcacctgatcatcaattgtttcatcctttaagccaattacatccttttgctctcgatacactggattgccgcctctgtgcatagagctcctagatctgatccaacataaccatgagtatctttgccaactgtatcaagatctacctgaaatacaccataaaattggaatggggaagtgcaagatatattgccttcattatatgataacagttttatggctagacaaatgatataaatcttacattgtctgaaagcttcatgttctttgtatgaatgctcagtacccgcaaccttcctacttcatctggcacacc

SEQ ID NO: 145268 - DNA, 438 bp, Glycine max
agcttgttcttgatttattctaagtcttaacaagctttgaacaatatacttgtccttcatttaactgtctttgggcttggcggccacactcaacaaagtactttctacacctactgtacgttgatttgaccaatgctgttatgggaatgttgcaacaatccttcaaaaccttattgatacattttgagagggttggtgtcatgtggccatatcgacgtccttctttatcataagccatcgtccatttttcctttgaaatgcgatcaatccatgttgctgtggctggacttatttgacgaaatttttctaaattttggtaaaaaatgtgcttgaacgagtgtagctgataaatgattatgaatacaatttaatatatataataaacggacctcaatataatctaccaattctcacatttttttgttgcatatgaattca

SEQ ID NO: 145269 - DNA, 487 bp, Glycine max
  unsure (1)..(487): unsure at all n locations
taggtgttgttgttggtcgtgccgttgactagaccacgttttttgactattacgatctcacgtatgaacttgagaaattgcttgagatcagaggagagctgcgctcacaagacaaatgggtttgttactttcacagatgatgaaaatgacatgatgctcacgggtgatgatacatggccacgagtaacatgaatttttgttggcaaacccactttcaatttcttatttcattgaacgaaaaattaagtttaatttccatgcattatcaatatatatattttttactttatcaactagtaaaaaataattctacgcaagaattttaatggaatttagtgtcactatatatgagctctacatattggaaactttacatttttttttctaatatgcacatctgaataaaatggcaagggagtggtgaanagtgataacagctaattatgagtatatcttgtggttaaactatataagagtttgatatttt

SEQ ID NO: 145270 - DNA, 459 bp, Glycine max
agctgacaaatcccatatgtggtattgctatgcaatatgaaatccaagctgttgaagacaacctcacatggatcatgattcctctccttggtggtcattctcctattggttgaaaatgggtatacaaaattaaatactactctgatggatccattgaacgttatagagtccgacctgtttccaaaagcgttacacaatgaacaggtatagattacaaggagacttttgctcttgttgcagaactcattattgtttgttgcctcttggttgttgttgctgttcgaaattggcatctccaccaaatggatgtccaaaatgccttcttctatggttaccttcttgaggagggttatatgcaaatcccacctagttctcgtcgaacagggagaagcatgtgtgtctacttaataagtccctttacggaacaagcatctcgaactagtttctaaattttctatc

SEQ ID NO: 145271 - DNA, 384 bp, Glycine max
tttaatggaagtcgagagcatgatattgcgccgatacagtttattgttgagcaggtatatcagcgggttcaacacctgaacattgtatttgggaagacccaaaagaaggataaaagtcagagttgcatatggaagaagaggtccattttctttgatcttccgtactggtgtgatcttgacgttagacattgtattagatgttatgcatgtggagaaaaatgtttgtgacagtgtgattgggacgctccttaacatttaaggcaagacgaaggatggcttgaatacccgtcaagatctagctgatatgggtataagatcacagctgcatccaaggtctgatgggaagataatttacttgcccccagcctgccatactttgtccaa

SEQ ID NO: 145272 - DNA, 466 bp, Glycine max
  unsure (1)..(466): unsure at all n locations
agcttaagacaacttgtgtaataaattacaataaggttgtaatcaattaaaatagagagtttttccttctgaagaatatttccaactttagaaattttcttaattcttaataattttactaatgctaatgcaagcaataaagcaataaactagttctttccaaatgcttatgcaatgcangcaaatatgcaattcatacgcagttcatctccccctttgggcattaacaaggccaaagagtttaaacttatgcacaaaaaagaacacacaaattgaaggaaataaaccatagcatttcattaatcatgaaacattgcaaacaattaatcattaatcattgacctttctaatcaaacacttaattttcttcaaacaaacacanacatggaagaacataacanaacagactaacanatagtagaaccaagcactggaacataattacgcttcatccttaactgagtaa

SEQ ID NO: 145273 - DNA, 438 bp, Glycine max
  unsure (1)..(438): unsure at all n locations
tttttaacttaattatatcacacttgtttatgtatgtgtttatctcttgacttacatataattttggtcattttattttactcaatacgtaattttggtctctctattttaaaattaaaatatttgatactcctattttaaaaatctactattttggtctctctatgttaaaatacaaacattgtgtccctatattttagaaaattcataattttgattctcatattatagaaaattcacaattttggcttaatatataattgttcctatgttttatttcttttattttttactttgtagttaattaaatcatttcttgatgatatcttagatgaatatgtagatttaggatctaattagaccaaaacacaagaaatataatatagataaaattgagagtntgatctacattaccaatcttctacaatagaatgaatg

SEQ ID NO: 145274 - DNA, 476 bp, Glycine max
  unsure (1)..(476): unsure at all n locations
tctccaaaaatatagtgtcatcaacatattggagaatattttcatgcaccttatgcttccccaccaagaaactntgaaagcaatttttgattgttgcttccctcatcaaacctgtcagaccttcaacaaccaaatcaaataataaaggggccaaaggatccccttgtctcaagcctctttgaggtttaaattcagtagttgggcttccattcactaggatagatatagaagctgaggtgaggcatcccttgatccagctaatccatctctcatggaaccccattcttctcatcatgtagaaaaggaattgccaagacacagaatcataggccttttcaaaatccactttaaaaatcaggcatgacctcttagatctcctagcctcctcaactacctcattagcaaccaaaactccatggagcagctgtctaccttttacaaaggttgtctgcctttcatcaatgaggtgagtcatg

SEQ ID NO: 145275 - DNA, 386 bp, Glycine max
  unsure (1)..(386): unsure at all n locations
agcttgaatcanaataataaataaagcaattttataaatacccgaaacgggttggatgccacaatatgaggaaccatcggaaaggatgaccttctttagtatatatggctttgtcgtgctggcgaaggtgtgttgatttggcaacactgtcgcatcgtgcttcaccccagggaagagaaaagggaggtacaaacaaacgaaaaaagggataggggaagaggaagaggaggggaagagaagaaagaggaagaggagagggggagaggggaaaaggaacaattgtgtataaaggggaagaggaaaaagaggaatgggagagagggagaagggaagaggaacatttactcatagaggggaagaggaaaaagaggaatgggagaaaggga

SEQ ID NO: 145276 - DNA, 488 bp, Glycine max
  unsure (1)..(488): unsure at all n locations
cttggagaatgtgggtgatatatatctagaggaaatttcaaattctcctctaccacttgttgaacactntgccatggtattaggaagaaagtcaaaccattctttaggtgttggtagtgcaccaataacaaagaagtttttacataaacaaattattcaaaatcaacttgagaatgcacaaaatcgagcaaataattntggagttggaagtgcaaaagttgacaagtattacaaaaaagcaagaggatgtcattatccaactttatattaaagtacaataccaacgggagttgattaaaactaactgagaacaaatgatgcaaaatcttgaaaataaagtgaaacgccaaattgtagacatgttggaagaattattgacctctgaatcacctactaactcaagtgctcaggttggtaacataaagctcttttattgaatattntcttttatgaactattatgtgattatttccctaaagccaaaatac

SEQ ID NO: 145277 - DNA, 280 bp, Glycine max
  unsure (1)..(280): unsure at all n locations
agcttctntgagaaaacttccttgagaagctagagcttagctactcttctctcctctcataactaagctcacctccttgagaagcttccttaagaagattcctaaagaagctagagcttagctacacatacctctctaatagctaagctcacctncttgagatgagaagctagagcttagctacacaccccctataatagctaagctcacccccatgacaataaacatgaaaataaaaaaaaagtccttatacaaagacaactcatattgcccgaataca

SEQ ID NO: 145278 - DNA, 476 bp, Glycine max
tacggacctatgatactcagcttctgaggaagcctcttaatgaagcttcttgagcaagctctattagctgtctcggtaaaaatgctgtccagccttcgttaaccgttggagcttctcaaaatttggtctgcagattcacaagacaattgtctaccatctgaccgttgggatctttgaggagatgtctggagtgtgctcgaagcttccgttcccgagagcatttcttatttaagcacttcagcctttgctttcgtgtagcttagaaaaaacgtcaattcttcttctttgtttcttccaaagccatttctaaagttccaagcactttctccatcacccacagccaccattagccaccacaaatcatcgttgttctccattgaaaccccacaccgagagaacccttcaaccgaagcggaatcttccaacttggcttgcggttttggtagagaacgaaaccttaatctgacctttcattt

SEQ ID NO: 145279 - DNA, 445 bp, Glycine max
  unsure (1)..(445): unsure at all n locations
gcttgttcgcgtcgggtctgggagacaaaggtcaagcgttcgcgatatgcgaggatgatattccgagtactctggatttggtacgaccatgccctcctgaattccagctgggaaattggcgagtggaggaacgccccgccatttacgcaacgagcataatgtaaacctttacggttttaaaagctctatagttgggcctaggctttagagtttttccttntggtaaggctttgtgtctcttggttttgaatatataatacaaggatctntcttcatctgttcctggtctctacccattctcattcatttgcatgtttacttctttttctgaaacggcagatccgatgacgagtcctccgaaggtactaatacctgtgacccgcctatctacttcgagcgagatatgaatcaaactgaagatgaacgagatgaggatgtgggactt

SEQ ID NO: 145280 - DNA, 474 bp, Glycine max
ctcagctgcttggggctctatggggctggatttgagctttatggtgtcctttaatggtggatttccaccatggagatgcagcagaagacaaaggagaagaggtgagaggaggcaccatccattaaagaataagccatggaagaaggagcttcaccaccaagatgagtcttggataaaaagcttggagaggatgcttcaatggaggaaaagaaagaggagagaaagagagaggggggagcatgatattgaaggaagaaaaagggagagaagttgaactttgagttgtgtcacacaagactctcattcatcaaagttacaacaagtgttacacatgcttctatttataaactaggtagcttccttgagaagctttcttgagaaaacttccttgagaagcttcttcgagaaaacttccttgagaagctagagcttagatacacacacccctctcataactaagctcacctccttgag

SEQ ID NO: 145281 - DNA, 431 bp, Glycine max
  unsure (1)..(431): unsure at all n locations
agctcgtactttctactcgaccttgacttgatgaacctttcctttatagcatgtgctgggttcgaccccataatccaaggaataggaattttgatttgncaatacttcaacaacctatcaaagacatgaatgactagggcatacatatgttatgcatgtaattatgagaccgtcatgagatgcccgaaggatcatcatnttctagttaaccacacattaggtacaatgtgcacatgatttttttttagagaaatgagtgtatgatcccaacatggttgactcatagccatcatcatggtacccaacacatgtaactaagaatgtggcgtaaactttcattcttcattgggactttcttttgttcttatattttttgtcttgggtttggaaggaaaatgaaggcatgagatactatgctgagtgaacaaata

SEQ ID NO: 145282 - DNA, 466 bp, Glycine max
  unsure (1)..(466): unsure at all n locations
nttatccatgacttcctatggtggtgagtttcttcttgacttatcttcttcttgaagtggcgtctccaatcatctttcttccttctctattccactgccattgatcttcaagaagcaaaggactccattgatgaagaagatccaaggcctacaagctccacatggagctacatcatgtggtattaagagcaatttcatgtaggtgatgttnttatgctttctctatctttttgttcggtcaattcactttaattccttgctcttcatcataatctccatgtatatcctccattggcttgtgcgttggtgctatttatagtagattcaaaaaaataaaccgatgaaatcttacatctacactctgtcttgcatttctatggctcaaattatatagatctactcttgaatcatgtttttgtgttgattttaggttctatcatatttcagtcataatcttcttgtgctg

SEQ ID NO: 145283 - DNA, 484 bp, Glycine max
  unsure (1)..(484): unsure at all n locations
agcttatccatgagacatgtttccccctcccctaaccttctaccattcaagacatcaaaccatntagagacactcttccctccacaaaccttcctaagatcttttcaccaaacagactcaccactcttatctttcccttccaaaatatttctccatccactacatactttgacatcaaagatttactccaaagactatcattttagtgaaaaaaggttccacctccatttaacagatagaacttcattaaatagtgtaatgtctttaacccccaaaccaccacaatccctaggactacaaaccttctcccaactcatccaacatattttcttttacctcctcactcccaccccaaagaaagtttatntgaatgcactctatcttcttaatcacacatgcatccttactcttgtaacagagacannatttaactatgggtttcacttaattgaagaataatatttacagcgctattattatatat

SEQ ID NO: 145284 - DNA, 513 bp, Glycine max
  unsure (1)..(513): unsure at all n locations
tacggacacttaaatactcagcttgacaacatgtaactaatnttgttattacaaaaagaagtttctaactaactaacttacaatctaacttccactaatatagagtgactacttacaaggaagggatgggccttgattaaacccatctaatctacataattaaactaattatacaaaacacaacccaaactcgcaacccaattattcaagtgcaaaagttctaactcccgagcttaatttgaccctctaaatggcagaattggccaaagcttatatttgacaaaatcgaagatatttttcttatctttccagggactactcacatgctccatttggagttatgtagtatcctctacgccctgcccaangcagataggtcaagtaagcacaaaatccaaaaattagctacaattctcaatttagctcaatcatttacctaagaccacaactgagttaaggtgagaaaataacggtcaaagagatgttaattgagcgaagaagaatatataaata

SEQ ID NO: 145285 - DNA, 317 bp, Glycine max
cccgtctcttatcataatgtgatgttaacatatgagagccacatgatcgctaacctatcacaacgatcatttatattaaaaaattgacgatctattaacattcggcctccaaactaaattttaaattgtggagatcaaatgtcaatgtgtagtataatatttgaataatcaatattacacaatcataaaagtacaaaggattggtttaaacctactttttattcatagataaagaatcatattaaaaaacgtaactagttactatactctatgattcactccttctataaaacacttaacaaaaacggaaaataaac

SEQ ID NO: 145286 - DNA, 114 bp, Glycine max
tttaatcaaaaaaaagcttttccgacccggtaccttttgaatggcgtacactgcctctttctttttggtcatcgatattttaaatcatatctcggggagggtatctgattgcat

SEQ ID NO: 145287 - DNA, 458 bp, Glycine max
tgtacgtcacacattaatggcacctccatgcgctgcacatatgtgtatacacctgtcgaaaaaacatggagtatctggagttagaagagggtttgatcttggtgcaacgcgtggcaactccctatgcgataaggtgaatctccacatgacgacaatgaggtcgaggcaattggtattgggattggaattcttggtgaattcatttagggtttcgacaacgtcgttttgctaaagcttttcgcagaggtggaagggtttgtgagtttcaagggtgagggtttcgaatgagccggcggcaacttgctagttgtttcatcgttgccattgcaatgggttcactgtgcgcttcctttgatggcatcgttgtggtggttacagagatgtcgtctcagcgattatgtgcgagctattggtgagtgggagagatgattgacgacaaagtgggataaggagataac

SEQ ID NO: 145288 - DNA, 439 bp, Glycine max
  unsure (1)..(439): unsure at all n locations
aaaatgatggcntggcttttacccaatcttattatgttggaaagctattgaagaagattaattattctgatgtgaaacatgtttctactccttatgactcatccattaagttaaagaaaaatttgagtaaactattgttttttcatataaatattctcaaactaatggtttttgtagcatttgacaaacttctctaggcctgcctgatattgcatatccacttggtaaattgggaagtaattgaggggtttagtgatacaaattgaagttctgattttgatgatacaaaattgacgagtggttatatcattacattagccggttgtcaatatcatgaaatctacttacaaactattattcacatgaagcaaaattattgtttaatattgctactaggaggctagttcttacaattggtatgtgtttatcttattgaata

SEQ ID NO: 145289 - DNA, 468 bp, Glycine max
tcttcctgaacttcctaacccttcatttaaaaaatttttggaatctaatctataattatcatctttgcaagtgctataagagtccgctcttgattgaattcaacaagtttcatactaacaacattagggtcaccctcacatccctttccaagagcaatagtcaatagtcgtttatttcttattaaacttgcctggtagggtttttctgacagtcgcttacatgcttcatcaaattagtagtttcatatttagaactattagccttatatgattttcggcaaatcttgcaaaaaaacatcatcatttaccttataaaaatgaacccaaacactataaggagttttaacaggttttctttttagcacctttgtttgtgaagacaaagcttctgacccttgttgtgtaggaacctccggcacttgttctaatagtggtggagctttagcatgtgcaggttcgataggacat

SEQ ID NO: 145290 - DNA, 466 bp, Glycine max
  unsure (1)..(466): unsure at all n locations
agctngctctaaattacattgatgtttgtatttatgggaggaggttacatgccatttttgctttaagagtaatgtcccactaaaactaactttccaaatgtttgccttcgcaggaatggcaccgaggaagcttgcctcanagaggtccaggaaagacaaggcggccgaaggaactagttccgccccggagtacgacagtcaccgctttaggagcgttgtacaccagcagcgtttcgaagccatcaagggatggtcgtttctccgagagcgacgcgtccagctcagggaggacgagtatactgatttccaggaggaaatagggcgccggcggtgggcaccactggttcctcccatggccaagtttgatccagaaatagtccttgagttttacgccaatgctnggccaacagaggaaggcgtgcgtgacatgagatcctgngttangggtcagtggatcccgttcgat

SEQ ID NO: 145291 - DNA, 472 bp, Glycine max
  unsure (1)..(472): unsure at all n locations
gttgacaagtgttgctnttcaccttctcgctgagccaatctgttggcttagtgtgattctgctaagcacaacactcatgggctaagcgcgaggttgactctataagaagatgagttgtacaggttcgctaagcgcaccattgcagttcatccgctaagtgagaaaggcacgcactaagccgaaattcactaatgtgtgctaagcgggccataattgtgctaagtgcacgagcacgaacaaggccacctatttaagtctgaaatcagattttagagagggagtttggactgggattcataactttgaatgtctagagtttctaaagagagaaaggtccaagttccatagagttttgagagaatttgttgtgtgaagatctgtagagaccagagcttatagcacgagccggtttgagagcttgagatgagtgtatgagtgatcgtgagatcctacaggtgaagaagacatcctc

SEQ ID NO: 145292 - DNA, 445 bp, Glycine max
  unsure (1)..(445): unsure at all n locations
ctcagcttaacactgtagctactactacggtatgtgctgatgaagttttgttgaatgatcgaccgcgaaagtgaggggcttgtagacttttcaacnaagcataaaactaaagaccttgatacaatgatgataagtgtgactacgaacataaaaccattaatgattatgtgataagctaacgtcaaatggggattaaattaatagccttcgtgggaccttctaattaggaggtgatgatgctctaatccttatgagggtctcagatatcttctaatacatgcattggcgccataaaaaaagatgcccgcataattagagtgtgtcttttttaatgtttttaatttgttaaaaaaattggttatactttggataaattctaagcactaaatcgaagctgtctcttttcataatgaattataattacgattgaataatattttctaat

SEQ ID NO: 145293 - DNA, 191 bp, Glycine max
tacgttaacgtaatacaattttacattatgaatgcataaccattaaattttatattaaactaatctaatttaattgtttttctctaaggctcttaattgttaaactaaatcctataaatatttagcttcaaaacaaatatatgaataatgcaacttttgtgcctcaataaaagtattatgtcaatgccgtt

SEQ ID NO: 145294 - DNA, 509 bp, Glycine max
  unsure (1)..(509): unsure at all n locations
ctattaggacctatgaaactaagctataagaacngaaatgcctaaatcatgtccaaatatgcatgtgaattangaagcataaacaagaatcaagccaaggctattgcgcaagcaatcaatggggcaaaacacaccaaaagattatgatgatggatgactcanattctcacaaaggtaaacttatcactttcaaattgagctttcaaaactatcatgacatgtaaatgaaaaacaaggatttcaagtcacaaaatgtcaagagacttttattttcagagcaattacccattacttgaacatatcctataattcaaagacaaacatgcaaatttaacacaacaaaactaacaaaattaaactagaacccaacaaaactaacaaaattaaactaatttaacacaactaacaaaaccaaaaccaaagaacacacttccccnccccccccatacttaaacaacacattgtcctcaatgtggcacaattaaaagattaaaagcaattaaaccatc

SEQ ID NO: 145295 - DNA, 447 bp, Glycine max
  unsure (1)..(447): unsure at all n locations
agcttcttttggaccttgaacaagcaatcaacttctctttcagaactatgctatgtgctcgcgattggtccctttcttcccttcgcaacttgagttcattattgctaccccatagagctccgcgaaatttgttccggccatactcttccttgcgagccctcttggtctcttgttcaagggctcttgcggtaattgcattctcttcccgtaacccggcacactccttccgaacgtgtgtagcagccaacttgaacttctccttggcgagttttgcctttcctaactcgcttttgagagcttggacttcttcgtcctcttccggtgcttcaaaattctcttcgctgacgaactttaacttggcgagccaatctaaacctcgtatgcgaactttcagccattcgtggtacccaccaatgatngccatacgaatgcctctaagctcttgat

SEQ ID NO: 145296 - DNA, 471 bp, Glycine max
  unsure (1)..(471): unsure at all n locations
ntgagccaaaatcctgactcaccataaaccttgacccagtgttagaatgtcaatccttaccctcggaagcaaaaaaagaatagaggggaaatttccaatcaaagaaaaagagaaggaaaatttccaatgaaagcaaaaaaagaaaagaaggaaaattccccaatcaaagagtgggagaaagcaaaaagaaaagaaaggaaaattcccaatcaaagaatgggagaaagtaaaaaaaggaagaagaagaaggaaagaaagctcctgatcaaggatcgaaagaaaacagaagaaatgtgcagagaggtctttggaccggacaatatctgaacaatacagaattgccaccaaatgaacgaaaaaagaaggaaagggaaccacgacctanaatagtcttctccctttgattaccaaccaaaatcccgtgcgctagcgaccctttttttctcgccccgcactaaacaaataaaacag

SEQ ID NO: 145297 - DNA, 483 bp, Glycine max
gcaagcttagggatgaagtaaccagctcgcctgtgtgtgctgctatgctatctccacccttcatttcctataaataagcgtgaggggggctgaatgaaggggccagcacatgatataaagatattttgagtgaaattcgtgaacagatagataaagaataaaaatcagggccgaggtgcttccataacgtttccatgatcgctcttcattgttcttcattcatcgaccggttggtctttctttttgaagctttgaattcattctatgcacccttaggggtccatccttgctttgtatgtcttcatgttcattcttctaccatcatcgatctcatttggatgtttaaagctagtttccaccgctcgtttatactcgaatcacacttaatcactggtataatcaatctcaaccgtttgtctgcgtgtaatctcactttatcactgctaaaataaaattagcgcaacatttgtgttgtacctctgt

SEQ ID NO: 145298 - DNA, 466 bp, Glycine max
  unsure (1)..(466): unsure at all n locations
ngatccntaaaataataggaactaggagactntcttcggttgtgtgataaacaaaaaacaaaggatattatcttattgcacttcgtttcatgttttcaaatattaatgtgtgagggtttgtaattgagagatactcgttgagaggaaatgttagttatggaatttagaaaaataataaaggaagttggtgtgatatatcaaagttactcatttattaaagaataaagcaaaaagatattaaaaggaaaatgttagagtacataaatttgttggtgacaaagaaggcttaattataccattggttccttagttgtattttaagattcaatttggtccctcaattatttaaaatgaaataattatgcctttttcatcaaatatgcttattatttgacagaaattagaacttttagcatcgattgtcaatacaattgacgtaaaatattgtattntttaaatcaaatgc

SEQ ID NO: 145299 - DNA, 483 bp, Glycine max
tgcaagctctccttgctgaagtagctgcgcacataactcgagcagagattccagagcatcagctctttgatggcaagtattatcaccacctcttgatatgcgtgtccttaatgaaacgccatttggtggcttatcagccatgacagcattgtcaacttctttatgcgttgaacaactgattgtgtgtgtatctgcttggccttcatccttacctggacgcatttcattactctcagaagccaagctgtccatgcatgagtcttctgtcaacactttagggttttcattttccttcaagctgtttccagtgtcagtgtcatgctcaaccttaaccgcatgtgcaattggtgatgacactttctcatcaatggacccctctttatcgttgctgttgctgtcttcactagacaatgagttactggagtcctcatgtttatcatctttctcttgtgtgtaactctatcaaaccttcttgtgaagtta

SEQ ID NO: 145300 - DNA, 495 bp, Glycine max
cggacctataaatactcagctgactcctcttataagcatgtctctattacatgattaacaactatgtgagcatgagggacaatgtctttctcttatgttagtgtggaagtcaataaaatggttcattttcttgctaatgttggtgtgtggcaatctcaatcctttgttatttgggattttccttctccttaactaagctcatgccttcttaaggataacctaaggtgagtcttgtaatttttccatatcaaaaaagaagaaaaatatatattttagattaatttttgacattgatatatgtagggtggtgagtcaaaggaaaaatataaagagggaagagtttgataattgtaatgactcactgtcgttacatgaaactacgaaataactttagcacaacacttgattgtaattcatttaataatattcaatataatttgattatgaaaataccagtaaacattttgtgttcatagactaaaagctaaaacgcac

SEQ ID NO: 145301 - DNA, 386 bp, Glycine max
gtattgcaatgggctttgcttggacagaagtattttgttttactgtaatcatattgcggtttctggtaccaactaacaagtggtgaacaatagtgatttatgtgggctttctaataggaagatggtaatctttaaaatgcttgtgttttgagtttgatgtgttttaacgcaaatctgaactgtaggatgtggtctttctgactgattattgtaactagttattgattaaagaacactaattaatattgttattttattcttggcaactcatctcttttatcttatgctaatctaatgtaggtggcaaaggaagcttcagatatggtgttggcagatgataatattagttcaattgttgctgctgttggtgagggtagatctatcta

SEQ ID NO: 145302 - DNA, 488 bp, Glycine max
  unsure (1)..(488): unsure at all n locations
tcttcttaacttccacactggcttattaagttaaaacaattttatatataaaaaaagtaactttttttatgcttcaatgttagctaggacatgattaatatttaaaatttacggtgtgtttaacagtctacagagatataatttttaaggtaattaaaagtgaaaagattatgttacggataaatgttagcaatactttatgtaacatactctnttgatcagttttttattggttaatttttttaaaattataaaactttatagttcccactttttatttaataaatttactttacaataaatttgaccaataataaaatatacgtgttagagaatgttatagacacttctcttgtatatttccaatatatatttattatattntaataaatattntaatgtaataattctctttgaaaggataatgatatttctttaatagtaaaacttttctattttaattgnttaaattcggtggtaagagctac

SEQ ID NO: 145303 - DNA, 463 bp, Glycine max
tcttagtttcttttgcttagcctttatcagagtatgtacttctggatcatacaatggcataagccacccattctataatctaagatagatgcagtgatctccatgaaaaaccttctaatactagtttacatccaacattccaactatcacaaccatatagtataattggttcatgtcaaacttataaaaagaattacctgaacaaatgaagcagtatacccattaaagtagtgcaactgcatacaattctcatgattgctttcactatcaccactaaagtaaccattaactaattccatggcattagagatcttgattctataaatgtaaggaacataaatacattcgatctttataagtgcacattcaaactagaaacattggatttttctttttcggtccatggaaataaataccatttcttgttggcatctcctagcatgaaagtgcatcaatatatctt

SEQ ID NO: 145304 - DNA, 426 bp, Glycine max
  unsure (1)..(426): unsure at all n locations
agcatacttaacctatatttgtcacgtatattatcttatggtcattcttgtaagcaactcggggaatgattctctnttaagtccgcatcaacaaaataatgtcatttatagaagacacacccaggtacccaccacatcattacaacatgcggttaaaagataccaagtgcattgataaattaatacaatgctgttctttaacaagtgcttttaagttcaattctgaatatagttacgttgaatacatgaataaatagttttgttgtgcatagtaatatttttttattcgtacgattaaaaaacaagtatcaaagatactcacaacaactcaagtattttgttcagcccattgaatatgattctctggtgtcaaagtaatctttcttaactcgagagaatgattgtctcataaatatcataacatac

SEQ ID NO: 145305 - DNA, 452 bp, Glycine max
  unsure (1)..(452): unsure at all n locations
tcagtaattcatcatgcatntgatccattacaaagctcatattttcctgagcatcttcctgtctgnaagtgacatgttgaaaccaagtatattacaaagttgcaagtttatgttaccaattagatcatgacacttgggcattccacactttcaaattaccaaataactntcttgacgagtctataaaatcttagacacatttggtacgacagacaaaattgtttaaatgataggaatattgtgaaatcacagttgaagtgtatgaatggaggattgagaaagaaagcaaatgaagattttgactattcatgtaaaataatattataaacaagtccctattaccaaccttggtcttcctgaaatgctatttggcacatccggagtaaaattctttaggacaacttcaaacataacagggcgaaatggcctttcagactcaaacgtatctgtat

SEQ ID NO: 145306 - DNA, 393 bp, Glycine max
cccggatccttaagcactgcggctgcagctcggggttttattgtcataaaatattataaagttcgtatatgctttaatcaaagtgatgtttctcctccatcattcatgtaataacaatttgtattaaaatttctttatatgattccaactgttgtagttaattgaccacaacacacattatattttgggagaggacgatttgagttcgattccacattatacttgtgattaagtcccaaatcaaggttaatccccatattgaaccaaacaccttggtccattggtaaaaatagttgtatttttaggaagcaaatttatttggttgaaaatacaccaaagacctattttggaaaaacaaattgatgaatatataaaggagacttctttttaact

SEQ ID NO: 145307 - DNA, 484 bp, Glycine max
  unsure (1)..(484): unsure at all n locations
ngatgcctctctgtataaccctctttacttgtgggatcttttttatatcttctagcatcaagtcaagacaatgtgcaacacatggagtccaaaatatttttggtctcgtgacttgtaaaattttacctaaaaagaccaaaatcaataaacttgtatgagtagtgtaacaattaaaagttataactacaaaaaaaaaacctcattaagtatgattgaattctcacccgccaacacataattacttccattgtccgtcaccacttgaataacattcttgtctccaatctcctcaacaaagctatccaaaagctcaaagatcttctgaccagtcttcatgtattcagaagcatccacactcctcacaaattgtgttcccaacgaacgaattaccaaaaagttaatcaaagttctattcttcctatccgtccaaccatctgacataatngaacacccatatttgattcgctcctcctcatgacccctc

SEQ ID NO: 145308 - DNA, 439 bp, Glycine max
  unsure (1)..(439): unsure at all n locations
tgcaagcttccatcacctatgatgccacaaccaagaataatctatcttacttaacaaacaactcagctcatgaaatgattcatgttcaaggtttaacatatagatattacctattctttttccaatatggacaacctcaccaaacatatcttcacttataagacaacaattcttgttgaattcaattttgaagcctttgtcacatagttggcattacttaagaggttgtgcttcagtccatccacatatagaacattctttatttgagttttgtactgatttccaatttttccttctcctattatttttcctttattattgnctccaaaaagtgacgtatcctccatcttttgacacaaagtcagagagtntggacttgtcatccgtcatgtgcctagagcagccactatccaagtaccatagtgagtcccttgctttt

SEQ ID NO: 145309 - DNA, 467 bp, Glycine max
tgtccttggttaggcatgattggtacatgatttgggactttgttgattcaatttgggcaaaattggatgaaggcaagagtggttttcgaaatctgcactttatgcagaattttgctgttgaaatgtgcagcagaattttgtataagtgcagaaaaatgctagtgtatggctggttgtgaaaaaggtagtacatatggtgttatgaacatttgctagcagatcccaacggtaaaaatgtagacttatgtactagagacttccagtaaaattttcgagtcgatccaacggttaacgaattggaacgaaggaaatgttactggggtatttgtatgtgaaaagctgtgatattggtttgtgttttgggcagagttttctgcctttgccctgttttgcttggttttgtgagtccatgatgattggatgtggaattacctggatgttgtggaagcttgggaagattgatgggg

SEQ ID NO: 145310 - DNA, 395 bp, Glycine max
  unsure (1)..(395): unsure at all n locations
gctttgtgtaatcgattacacatattngataatcaattaccagtgcttgtttctggaaaatctaaagatgtaactcttcaaaaagggtttgactctgtcaaatgggttttaagatttnctaaaatttataactcttctgaatggccttcttgaccgacatgaagagctataaagcaggctttgtttgcatttttcatgaaatctcttctaaccatgtcttacaatcctttacaagcccttgatctctttaaacttcttcttcttttcttttgtaccaaagccttctgaagtatctggtttcaaaacctgaaacattgctatcatttttcattctttctcctttgccaaagattcccaagactaccgccgattcttttgtgcttctctttttccaa

SEQ ID NO: 145311 - DNA, 364 bp, Glycine max
aacccactctacgtcccgcatggtgccagaaacccaaattaattctctaatacactaaatgaatcatagtcctgatgtacaactcaaatgtgctcgcctcgattagtttttcaaaaacaaattatctgaacattcacgctgaatgtatcgcattatactccaccaaacgataacactaacaagtacttaaaagcacctctaattatcggagtttttaatacaaatacttcaaaaataattgctaacactaagcgctttaaaataaatgaactaagggattactgcaaataagtactcgtcacacaaaaaatcctatatctaaattaactatttcataatataaaaacatataaacaatttaaca

SEQ ID NO: 145312 - DNA, 442 bp, Glycine max
  unsure (1)..(442): unsure at all n locations
ngngaggatngatggngacccggtgttgagagaaacgatgttatgggctacgtgggagtacgtgagctcagttggaggtgggcaacaggggatggtgggtttatgcgcgctctgtggatgtggaaaacttgttgtgcaccatcgcccgaccgccacctagtaccacatgtgatggataccccataatcctacaagcttgagatgaggaagtgtagaagggtgaacttcctgcttttattcgttgaccacagagtggtacctggagatatgtcgcgggggtcaggagaccttggggacgtcaggcggggtgctattgcccaaaaccaagcttgaccaatcccgacccaacccgggcatagtcggtcaatgagaacctgtgatgtacctaaacaggtgagctcctggcagtcaacagataataggaacaaagaccacaaagcaa

SEQ ID NO: 145313 - DNA, 383 bp, Glycine max
cgtgcaagctctgacttatgtcagtaagagatgatatatatttgaccatgacatgagttccactctaataaataatctatctgttacataatcttctttcaacatccttcaaacaatctttcaatatcttctttcatctctttcaacactttcaatatatctttctgatttatttcccttcatctttgtaaaagtttttgttcaacactttctcttccaagaaaagttctttgtgcaaaaactggtgtgattcatctatttcattctcttctccctttaccaaaagaacgaaggactaaccacctgaattcttttgtgtgtctcttctcccttataaaagattcataggactatccgcctgacaattctcttgattcttccct

SEQ ID NO: 145314 - DNA, 189 bp, Glycine max
  unsure (1)..(189): unsure at all n locations
acaaatacattcaccaagagaatatcgntttggaacgcaagtgtagtgtttttataacaaaatatacttttatattaacacaacgacnctggaagtgtgactatttcttgttaatatgtgaagtcacagtgggaaaggctcttattgacttgggagccagtatcaacttaatgtcacttccatgtgtag

SEQ ID NO: 145315 - DNA, 430 bp, Glycine max
cgtgcgagtcgttacgctaccgatagcatgagtgatataaacttttctgcctccgcttacttgtagcttaagaaaaataccatgtattcttcttgctatctaccacatccattactaaagatccaggtactctcttcatgaaccacatccaccataagccaccacaaaccatcattgttattcattgaaaacccacaccgagaggagcccttctaccgaagcagaatttccaactgggcttgcgggataagagagaacgaaaaccctaaaccgatcggtcgttttcttgcgatgtaaccatgggtacaagctagattcttgtagattcatataggctttgcatcttttctaacttagcaaccgacattgcatgactaatgcttcctttgaaagaccttagagagagagactttcgaaacattatcctttc

SEQ ID NO: 145316 - DNA, 383 bp, Glycine max
  unsure (1)..(383): unsure at all n locations
gagtcttcacaaataactatcatgaagcagattactatctatactacccatcatatcttccaaaaccccatacccacgaaaatcaaaggagaaagaagttcacccaaacctgaaattttaagcccactcgagacacgcacttcacgaacacgaaatgctctcctttcacgatttggggcacaaatgatggccaaaggttgaagcttngtttggagcttcaatggagaatgaagaagaagaaatggcaacttgagggagagagagagctgtctgaaaagtgtggggctgtatgaatagagagagaagttgcttttgattntaaaagggcttttcctcatttcttatttatttatttaagctatgccacatgtcttcatttgagt

SEQ ID NO: 145317 - DNA, 287 bp, Glycine max
ggtcttaccgtccttcgccattccgcaaccatgatgctgaacaaacaaccgacttcattgatgaaaaatatccaacgtctacaagcgccacatggggctacatcagatcctcctccctgcgacagcccgtgcaagcgaaagaccacttttctcaatagcgacacacatcataccggccttcttgggcaccaatgggaggggacggacccaaacactatcagacatcaaatagataaaccctcctgcgaccaatattacgactccatttgacacttcctgcttcatgg

SEQ ID NO: 145318 - DNA, 374 bp, Glycine max
  unsure (1)..(374): unsure at all n locations
gtacagcatattntatgtatgacccactaacctagaaatttatatcttaatgccattaacccacggaattaagaaaacttaatggctcgattgtactgaaattgcggcaaccgaaagttttacgccgacagcccagcaggtaagcaccatttggtgtaccaaaaagctgatgcctatgttgcccatagggcccttattacaacttgaactaaacctaactaaagcccttataattgattaacccaaaacatatttttggtcagccaacttacaaggattgggccattatttaaacaaactaaacactctataattgtaacaaagtggcgtcatataatcctccttcattgggccatgatacaactcacaacctt

SEQ ID NO: 145319 - DNA, 422 bp, Glycine max
agcttaatcatgttttaagagcttatgtattgttgtctgtcggctattcttctattagtaatgataggctctgttagattaagaagttatgatatcgcttgaatagtttaatgattaagctgtaaaagattttatatgaatgaaatgctatggctttttcccttcatattcttcgctagtggtaggtctatgattaactataactttttcgccttgttaatgccgaacgggggagaagaatatatgtattaacatagtgcattgcattagcatttgtttttctgtattgcataagcattatataagggggagacaacatttcattagcattgcatcatacattcatatacaactctacttaatgatgatgattatatgaatggatacttctcttagtgttcagaaactttcaagttttccta

SEQ ID NO: 145320 - DNA, 421 bp, Glycine max
agcttgagcaacaatattgtcacataatgttatataacccccattggtagttagctacaataggttacttagttaactacttgttagtgatgatagctagttatgtgatataaattggttaaggcatgcttcctacacataataacgggtgctgagaaggagtggaatatgctcatgtgagagaattgggacctttgagcattgacaggtgcagaccctatgttatatactgttagaatacatgtaaatatattacagcatattatggtggttaagatattacggatccttgcgattattggatctcctatgtatagataaatcagctatatatgattgtgtctgtcgtgtaaatgccacatgttttcaccatgtctcacattgttctctcctcccaacacatacatatgagaaaaaatac

SEQ ID NO: 145321 - DNA, 200 bp, Glycine max
ctttctaacccgcaataagatcaacgcctctgctgattcctttgtcactgtttggaacgccccaccgtggagagtcacgcctaaccttctaaaaggaaccttcgcttttggcgccatcatatcgcctatgattcgatacttccccaacaccattctcctcatcattttcaaccccattgacattctgacctacgcgcatg

SEQ ID NO: 145322 - DNA, 405 bp, Glycine max
cggatccttaagtcacctgcggcagcaagcttgccagttgtatgagtgctaattatatcccttcttcagcaggattgccggtcatcaagcatgttttaaccccttgtggctgttcgaaaggaaaacacctaatagttgctccagcctcctcctttacttttaactcatcttcatcactgataaattgtgtaaagcttgatattagagttgtgaataaatcatgttccttgtctaaacatgtgttggaaggtacattttcaacatcaaaacatattggtgaaaattgggggggggggggctattcaatgccaccacttttcctactcaaataccccagttacattttcttctatccgattctctaccttagtatcacttatagattatctggttgtccctagtcaa

SEQ ID NO: 145323 - DNA, 392 bp, Glycine max
ggtactcatcatatgtggtactatgtggcgatcgggcgatggtgcaagtcgactctccacatccacaaatcacacataaatccaccatccccagttgcccaaccttaaatcggctcacgtattccacgtagcccttatcctcgttcttctcaacaccgggtccccatcaatccctccaagcttccacaacatccaagcaattcaacatccaaacatcatgagctatccaaaccaagaaaatatggcagaggcagaaaactctgcccaaaacacattccaatgccacaactttccttactcaaataccccagtaacattttcttcgttccgattcgttaaccgttggatcgactcaaaacttttactggaggtgcctagtacataaatctaca

SEQ ID NO: 145324 - DNA, 444 bp, Glycine max
gacctctaagtcacctgcggcatcaagctttcgaatattgtgtctagatacattattgttccacctatcccattcatgcatgctgcaatcaaaattaatatttctatccattcttagacattaacatgaatggacgaagaattttcacctataggtcctcttaagcatatagtccaatcgaaatcgggcctctcattcaatttgaacttctgtgaggcttggtgtttaagataaggggaaaaaaaaaacaatgccactactattactttcttatccattttgtgctttgagctaccgcaaacaaaatttgtctccttgatgtttcaaagttttcctttgtgattaacttacctgaggggatttctaagtactgtgttgggaaaaactttgactttcccgtttctgaagttaaaataattcttcccaattagaggtaattatgag

SEQ ID NO: 145325 - DNA, 409 bp, Glycine max
agctttgagccaaaatcctgactcatcttttttcttgtcccacggtgagaatgtcaatccttaccctcggaagcaaaaaaagaatataggggaaatcttcgatcacagaaaaagagaaggaaaattctcaatgaaagcaaaaaaagaaaagaaggagaattcccccatcaaagagtgggagaaagcttaaaaagaaaagaaggaaaattccccaatcaaagagtgggagaaagcaaatagaaaagaaaggaaaattcccactcatagaatgggagaaagtaaaaaaggaagaagaagaaggaaagatagctcctgatcagggatcgaaggaaaaacagaagaaatgtgcagagaggtctttggaccggacaatatctgaacaatacagaattgtcaccaaatgaacaaa

SEQ ID NO: 145326 - DNA, 379 bp, Glycine max
ctttgtgaagaggggaacagaagaagacgtatttaatttttctttcttcactcgctaagcgcgcctctcggctaacaccaagcttacgcctaaggaccctgctccgctaaatcgccacccccggacacttgttggatgggagcactaagcgtgcctcgatgtgctaaacccaatatctctctggaatctgaatatttcgaattgggcttaacgaaggtgatagcgctaaacgtatattccctccttgttttggaaacctttggaatagcgctaagcgcttagcgccagccatcactgcatggaggagcatggttatgcgctaagcccagattgcatgaacaatttgagctgcaggaagcgtatagcgcacggccttctg

SEQ ID NO: 145327 - DNA, 385 bp, Glycine max
cagcttggaatgaggaagtgtgtttggtgttacttcctactctaatccgtgaccacagagaggtacctggagatatgtcccgggggtcacgataccttggggacgtcatgtggggtgctattgcccataacaaaacatgaccaaatccgacctcacccgggcatatctctgcaacgaaaacctgtgatatacctaaacaggcgagcttctggcagtccaccgataaaagagacaataccactaatcttggaggcttgtgtggtggctggccatctatgaatcttgagtgatatctgagatatggcctctggcaatcgattaccaagggtgggttatcgattacaaggcttaacattgaaggcacgacgctaagatggcctctggt

SEQ ID NO: 145328 - DNA, 162 bp, Glycine max
ataatcatcaagatggtgataaagtataatgcctttccgagagaactaacatcaataggggcgacaataacagcatgcacaatttcaagaagctgagagcttcttgaagctcacttctttgtatgatatgcatgtattcccttaagacaacccacacaaata

SEQ ID NO: 145329 - DNA, 431 bp, Glycine max
  unsure (1)..(431): unsure at all n locations
agctngcatgactagggtgcaacaatgtatcttataagataatttggatcttgatatacatctcctacacaaaaaataaaagacttaaatatgttcttgcttcttgtaaattcgtatttttttaagcttggctccagtaaggcttatttttaatcctcataagttgacgctcttctatttttcctccttgcaagatatttgattcatttatagcccaaggcgagcgatatcattttttaaatggtaatccctataagcatcaactcatgagaattataagataaagcaatttaagaatttcaaaagaactacaaattgaaagaagtccacttacaaggactatgataaaaataaagtaaaggacttatggaagacaaaatgttagaaaccgaccaccttcagctactagaattaaaaataaatgaatttat

SEQ ID NO: 145330 - DNA, 86 bp, Glycine max
tatctttttaatgaactatgaacaatatataattgcttcttctgcaatgtacctttcaatcataaattgcttcggacgatgtaata

SEQ ID NO: 145331 - DNA, 335 bp, Glycine max
ggacatctagagtcgcttttcactcttacattcaccacagattctgccttcatctattttcagattgagaatgcctataacaacacctttgacactgatttacttcatgcctctgaagagcagatgaccaaatatttgatgccatatgtggacttcatctgctatggacaatatacatgtggaggagcaactggtttcttgaggagtccataggtaacagctgtcctttgatctgctgcccttcattaagacttcactcttctcatgtgtcaccaagcatcctgactgtgagaaaattacattgaatacttcatcacacaactgactgatgctga

SEQ ID NO: 145332 - DNA, 317 bp, Glycine max
  unsure (1)..(317): unsure at all n locations
ctaagcttaaggatttctgaaattatatagagtctttttattttcaaaaagagattggacagacatgtttgataagacctgataagggactgaacataaagttcccaaggaaacctgctgaaggcagaatttgatgccaatgtgtaattagcctgtgaaacaagtgctataatatatattgcagtgtcttgctgaaagagacacaaagctccaaccaactatggtggaagacgcaatagctagagaagaaagtnaggctctggatgttacaatgcttcaatatgttattaaagtctcattgcaagggtttgatgttg

SEQ ID NO: 145333 - DNA, 315 bp, Glycine max
tgagaaaaggtaactgctttttattaatagtttgccagactgaaaaaagttaatgatgttttgccgagcgatgttaaatttgatatttatttaaaatgtattaagtttacaatatgtgctaatgattaaattctgaagatacacaattctacatatatttatattgcgatagtaaaataatatcgtttaaagggaaaaataactaattgtttgtttaaaatttattttaattcttaatctatttttttaatatatatattttaagggttgtttggtttatatttaataaaatgaaatatttttaatgcatattgg

SEQ ID NO: 145334 - DNA, 428 bp, Glycine max
agcttggatattcttttgtatggaatctattcttcttaagatagagccgaacccagtcaccctcgttaagaattagctcttttcttcctctattacctttaggtggatacacctttggttgggtctctatttggttcttaaccctcttattcaacttctttacaaactctgacctagattccctttctttatgtataaagaagtgtccagtggaaggggaatgacgtctaacggtgttaggggattgaacccatatacaacctaaaaaggggattgcttggtggttctatgaacccccatgttgtaggaaaattctacatgaggataatactcatcctcagacttatggttgccttttataagagcccttaagagggtggataaagacctattcactacctctgattgcccatcagcttgtggatgac

SEQ ID NO: 145335 - DNA, 247 bp, Glycine max
aactttaaataaaatccatttactttggcgcttgttatttatatgatgcgggtccaaatagataaaggagatgattggacatcactgtcaaactttattggatggaggttgaattatatagtcctcggtgacatttggtggctagaagttaatgcacaagcacatatattaatatgtatagcaacctctgatgcatgaattattttgtgcatgaaccttatgaagaagttgcacaacaatggtttgt

SEQ ID NO: 145336 - DNA, 342 bp, Glycine max
agcgtgtaattcaattggcaccttcttattctgtttagactctttcatcgagtaccaatctgtcttacagattcacattgaaataagaaagaaattactactttgcctatttaatggatcattgccctttacgtgatctaataatctatattacttgagaagcattaatctattaatgtaattatgttatttaatctttaggttgatgcgttctctattggcattgccatatgggagattcttactggcgatgatccatatgctaatatgcactatggcgccatcatcagtgcagttattttctctactctttggaacctcttttacagacgcatggactct

SEQ ID NO: 145337 - DNA, 85 bp, Glycine max
aacaaaatagcacagaaaaacggccagaaaagaacgaaaaaggggaagagaaacccaggaaacggggaacgaacacaggaaaaga

SEQ ID NO: 145338 - DNA, 304 bp, Glycine max
  unsure (1)..(304): unsure at all n locations
accttaaatctaagcttcatacccctccaaggatgaagtggtcttttgtttgtccctggcataaactcttatgctcttatggagggcaatccatcccttaggctctgctgatgatggactcgccncttgaagctctggagcatggattgaatcatctgaggagtgaaaataaaatctgttggacctgtatagactatagctggaagtggaatctgtgaaggtgctggaggaatcactgggatctctgtggaggaagagggaggaagtgtataagaagaatgtgtccgtgcctctgatggtgctg

SEQ ID NO: 145339 - DNA, 425 bp, Glycine max
gcttgggtgatgatgcgcgtactgatggtttccatgaggtgtatgctggggtttgacccatgcgggtgttgaatagatggcatgggcatcttcttccttcctttttgcccctgttgcccccattcttttggcgtttacatatgcggaggaaacgtcatcaaactttcctctcttcaatccaacctcgattctttccctggcaaacaccacatccgcttagctggacggcgtgtaacccactaacttctcatagtataacactggcagagtgtctaccatcatggtgatcatctctctctcaaccatgggaggagctacttgtgccgccacatccctccatcgctgcgcatattctatataggttacaccctctttcttgagcatattctgcagtggagtacggtcatgagccatttcacaattgt

SEQ ID NO: 145340 - DNA, 389 bp, Glycine max
  unsure (1)..(389): unsure at all n locations
aaggatcattagacagattggttgcacctctatcaaactaactcactaactaactaattttcataataccgccccactcttacaaggaagtgatgagccttgattangcccatctaatctacctaattaaactaattacacaaagcaaagttcaaatttgcagcccaattattcaagtgcagaggttttgactttcaagtccaaattgactcttgaaatattaaaattggcctaagcttatatgtgacaaaattgaatttctttctcttatctatgtacggactactcacaaaatccatgtagaattctttagtgatctataggccatgcacaatggtaaaaagtcaacgagacacacgaatccaaacatacgccacaattgtcaatta

SEQ ID NO: 145341 - DNA, 424 bp, Glycine max
agcttcacgatggaacaccttcaactgatgcaaccaagtatcacaaaatcaagccttctaatatctcactctcactcagccagacttctgcttctctgtcaataagctctcttagttcatgcacaatcccataatactacatcttcaacacctgaaatgtgtaacagccgtaattgttaataaataaataatacagtaataagttaataaataaataaataatataattaggtcataaatctctactatataaaccaaatgttaacttagagcagcttttacaaaacacttatgtccctttttcttttctgacgcacaagaaccttaacagagcaatcagaggaggagctctagagagcaccagagacgccaccattgctaacagagacattttagcgactacctcgaggtagggatagttact

SEQ ID NO: 145342 - DNA, 457 bp, Glycine max
  unsure (1)..(457): unsure at all n locations
tactcagcttcacaataanactaattgctaactacacctgtgatatatttatgttatatcctctatctgtgagatcataataatacatgcatgccaaaacgaaaaccaacagtatgtngtctaacccctcgacaccgatattctgaattgaagcaatgataaagcaagtggggctagctgaggcttagagtcacaaaataagtgattccctttgtcatttcacaaaacctaatgttgcagtagctacagctcatttaacttatttcagttacttgtgaaaacaacggttcataataattgaggagctacggaaggtacacaatagggtgatgagtgaggagctcatatatatagctaccctagagagtcgatcatttaccactgaccctcccacctaaccatggtgccaagggatagctatactatctctcatattttataacagaaataatggaat

SEQ ID NO: 145343 - DNA, 254 bp, Glycine max
tgtgtctccataacctctacacgagaaaacatccccgcacgccatctccgcttacatgcgatagatatagctccagatgcacaggtatatgcagacatgtgactggccatcacgcggtcaatcaatgtggtcagatgcaactaaatgtgaccttcactgatacactatgcaccataatgtattacctatcaccaaaatgtataatctatcaccataatgtattacttctcataccctcaattcatcccgggaag

SEQ ID NO: 145344 - DNA, 66 bp, Glycine max
aattaaaggtagacagaaagagacggcagggggctttttattataatacccacgacacacagcgag

SEQ ID NO: 145345 - DNA, 279 bp, Glycine max
ctacaagggagtggccctgtccatataaaatatatggaagctcaaacaaatattctaataccacgataaatctcaaatgccaaagctacaatctcaatgcattatgatcagatgccctatcctactaactataaagtctattatttccgacaagggtgtaatacctaattaccccaatcctgcctaatcaacaatatgtattgtcacacaccaacacggggaaaatacagttgtccaaacatatccaatgactaagatgtgagcacccctaaatatgaa

SEQ ID NO: 145346 - DNA, 422 bp, Glycine max
  unsure (1)..(422): unsure at all n locations
cgcttgaaaatataatatcttgatttctaagatacccattttcttcttcccctntggcaacatcaaaaaggcagaagtgtgttgtaacataaaatcatacacaaatggataaatatatacaaatgtatcatacaagaaaaaggagaaacttataaaaaatcaaacaagataataaattatccacaaatcataataaaagcatatgtatcaaataagtcataaggcatcataacataaaacaaatcatttgtctaagtcactagcatctataagtcctaattctcttctaatggtgtagaaagaatctttgggtagtggtcttgtgatgatgtatgccagatggtttttggtatctacaaattctagaacacaatcaccttttaggacatgatctctaagaagatgatgtctaatttctatgt

SEQ ID NO: 145347 - DNA, 349 bp, Glycine max
  unsure (1)..(349): unsure at all n locations
agcttgtagcanattcgaacaacaataacttttctctctgaagtgtgagagaagcgngtgatatatcatgacgctcgaatttttaaaccgaagctcgcagcaaattcgaaccgacataacacttcactcgggaggtccattgagtcccgtgatatatctagacgctcgaaatataaaaccgaggctcgagccgattcgaagacaataacatttactcggaagtcgatgagtccggatatatcggacgctcgaatttaaaccgaactctgacaaatccaacacaatacattcactggagccgatgaggccgagttttcggacgctcgattaaaccaagttcgcgaatcca

SEQ ID NO: 145348 - DNA, 425 bp, Glycine max
taagcttggtttaaatattgagcgtctcgatatatgacgggactctatttgtacttcgagtgaaaagttattgtcgttagaattagctgcaagcttccgttttaaattttgagcgtctctatatattaccgtcgccccccgcttccgagtgaaatgttatttgtgttcgaatttgctacaaagcttcggtgttaaattttgagcgtctcgatatattacgggactcaatctgactttcgagtgaaatgttatttgcgctagcatttgctgcgagcttcgggtttaaattatgagtgtctcgatatattacgggacttaatctgactttcgagtgaaatggtattgtcgttagcatttgctgccagcttcggttttaaatttcgagcgtcactgaatattactggaactaatcggactctcgagtg

SEQ ID NO: 145349 - DNA, 433 bp, Glycine max
  unsure (1)..(433): unsure at all n locations
agcttcacttggaagattctcctgttccctcttcttatggtaaggttggaaatttccatcctatgtcaaggttatggccaaaaagtctgcgtttggctcaaaaggcttgcaaatggagggacatgatgtatgtcaggatatatgtttagcaaatggctcataaataagggaatgtccaaatcacttccatgaaatgcatattatgataataagaaattcatgcaaaattaatcatagcacacatccatatggacactcaaacataatgctttgtggcaatgcaaacactaaggcttaggatttgtttccccattcagatcaaaccagtgtttcaacgattgctctttctatcaagtcatacaaacattcgaatttattttggcattcaggaaaatctttcattgcgttcaccctctangtgcacatttctttt

SEQ ID NO: 145350 - DNA, 415 bp, Glycine max
tgtagccattagaagagaatgagcatgtgattagaagtatgactgtttatgtaagtcagtttgtcagattgattgtgaaggaatgcattaaccgtatcctggtgagaatgttatccttaaatttttacgaaaatgacttcatttagtactgatttttgcgtgaatctctaaagtatggactgaatgcatgaaattgaggatgatgaaggccatgtttgattgtgatagccacttagccaaaaagctgaccatgtgcttgaatgaattatcccttgcacccaatttgagttgaatgaattattgattgaatgaattattgattgattgaaccttgagcctatacaatgttatcttctgctaccttgacttatggtgttgagagcatcatccacaagaagcgcgattaaaacatatt

SEQ ID NO: 145351 - DNA, 409 bp, Glycine max
  unsure (1)..(409): unsure at all n locations
tcttaagcacctgccgcatgcgagcttgtgtatcctcttgtctaaaccttgtttggggcctccaatgtcaaacaaagtatccttagattggcttgttggatttccatcataaagttagtctttgatgcttatgattggtgtagatgatgatgattatggatcgactcatgatgatgatgttcgacatgcgacgtatgatttctggctcttgatttgcatcagtatgattgtgacggtgaggatctcgaacttcttgttctttggaacatatgattaaggaaaggatcttttctctataaacattgtggatgagcatgcgaggacttgtagaggcaantttcccctatcctttcgttggtatagtctcttttgagtagactgaccaacttaagtgtttaagatatttatc

SEQ ID NO: 145352 - DNA, 456 bp, Glycine max
gcataagtgaaatcaggtgcagctatctcccaaagagttctcttatgatgtggaggttgagccatgttctcaatatgaaaattagtagtggaatgctcaaaatcagaatacttctaattacgctcaacaaacgctcaaaatggtcaaaatgctcaaaatgcacagaatgaccaggatgcacactatatctaactaatctatgaaaggttctatctatttcaggatcaaagggttattaatcacctggatcgcccctagtcatgaactatatgtagcaaataatgtgtttctcaacaagcacctaacaagggggttaaactacagctatactcaaacgatatctaaatgagctgaatatttgtgaggaacaccctaaaatcatgaaaagatagcacaataaatttcaaattctaactatgagaactacctaagcaaagtttagaaaaataggaaaat

SEQ ID NO: 145353 - DNA, 358 bp, Glycine max
agctacgaaatattcataccaaataccatatgttgtttaatacattcatgtggattgctatgcagaccatatccatccttttaccatgaagcatactaaggactctaaaaggtttaaagtgcctgcctacaccaatatctaaagaaatagaaataaattctaccaacttctggcgcccttcctgttttctcacaagaaaaatattatcatgtattttctttctacatgaagagattgatgccattgagctctcccataaacacttgtgaccaagacaaagtaaagaatatattaatgtgataatcccatgttcatgacagaatctaacttcaacagtactaaaattggggttggagat

SEQ ID NO: 145354 - DNA, 282 bp, Glycine max
aagatcaaacgcattcgattaataataatttttttttataaaaacgaattcttagtattggagtaatattccaaacaattctaaagttgcaaaatatatccaacttgattagaattataaattagaaattgctcctatactattctaaatcttaggtctattcaaacaaaatcaatggctacctaaaagaccacaattcaattaatgaagtgatataattatccaaattatttcatgagcattatgtgctacaaaaactaattaacatccgatagaagttaa

SEQ ID NO: 145355 - DNA, 429 bp, Glycine max
  unsure (1)..(429): unsure at all n locations
agctttcttccatccaactatccttgtatgtttgtactgctgnggaaagtataagtcgaataaatgatatcttctcacgttactatggacttcatgcacacttggacttcccttatcttcaataccttatgagagaagttgataaagtttcaatgaaggctctccaattaaatgctttttcgacaaactgagctattaaatgtgaggcgtaatgtcaaccacagcttaaatgacacgccctctgatgtgaaagatatactatagctaatgacctcgagaaacactactgcaagctcaccctagtcgcttgataatcaaaacatattttccttgaatattctctgatgtgattagggcaactcaaatgacttttgccgtaaatagcatatatcacgagcctctaaaaattgccaggtgagactgtcttga

SEQ ID NO: 145356 - DNA, 375 bp, Glycine max
  unsure (1)..(375): unsure at all n locations
ctgagcttctttagttggacacacatgagaatctttagtttttatttccattgtaattatcatctatatntatatatattttcgatgacttgtgatactttgtgaaacatttacaaatcatacccgcaacagtacatctgattctcgatactaatgtgagaattttagaaagaatcttgttattagataagatagcctttaagtatttttgttaagcgtttattgaatctgtcccataatataactcacctaaattttgattagaaaaaacaaaatagacaaaggaaaaccgctggaatatttatattattcctgtatacctggcatacttgtcaaacgttcacatttggttggttcatttgtgcatgagacaaa

SEQ ID NO: 145357 - DNA, 170 bp, Glycine max
  unsure (1)..(170): unsure at all n locations
tagcttgaatcggacattcgcgtgatataattttatcattctaatnnactcccagcttccgttgctggagttagatcctcgccacatattatgcgcccgagactgacatacgtgtgaaaagtcatgattccttggaatttctcgagagcttccgcagttaaatgtggagc

SEQ ID NO: 145358 - DNA, 368 bp, Glycine max
  unsure (1)..(368): unsure at all n locations
tataatatatcgatacgctcgagagtaaacatcgtagactgtctaganaatcaaatggccataacttttcacacggatgtccgattcnggcgcataatatgttgagaggcttaaattgaaccccggagctttgagaaattcaaatggtcataacttttcacattgaggtgtgattcaggattatactatatcgatacgctcgaaattaaacatcggaaactctcgagaaattgaaatggtcataacattttacaccgatgttcgattagatcgcataatatgtcgagaggctctgaaatgaacaatggaaactcttgagagattcaaatgggtatatactttaaaccgatgttccattcacgcttata

SEQ ID NO: 145359 - DNA, 430 bp, Glycine max
  unsure (1)..(430): unsure at all n locations
gcaagctctttatctacagtggatgaatatgatattgtggccacctcatggactcctttaaggacaattacattatttcttgcactgaaatgtagggagctggaatccatcttctcaatcagattcctagcctcagtgagggtcatatcaacaaaggctgcgccactagcagcatcaatcatactcctctccatgttgctaagttcctcataaaaatattgcagaaggagttgctcaaaaatctggtggtgaggatagcttgcacacaatttcttgaatctatcccaatactcatacaagctctctccactaggtcgcctgatgcctgagatgtcatttctgatggcagtggtcctagatgcagggaagaatcactccaagaacaccctcttaagggcatcccanctgaaaatggactttggagcaatgt

SEQ ID NO: 145360 - DNA, 268 bp, Glycine max
tcctttgattttccttatgagccttgtttcctttcttgtttgaactacttagccttatgaaaaactgatatttcatatttctcacgaatatggagacttggaaatgtatttggaataaatgtggggggttcttgtttcattggacaacttggtttgatgactatgcttcatgatgtattatgggccatacttgatgtacattgtatattggttaaatgtttgacatgctgaatgaaatgttgtttctcaaaggtgattaaaaaaatca

SEQ ID NO: 145361 - DNA, 367 bp, Glycine max
agctcgaatcataatgataaataaagtcattgaataaaatacccgcaacgggttggatgccacaatatgaggaaccatcggaaaggatgaccttctttagtatatatggctttgtcgtgctggcgaacgtgtggtgatttggcaacactgacgcatcgtgcttcaccccaaggaataaaaaagggaggtacaaactaactataaaagggataggggaagacgaacatgaggggaatataataaagacgaatatgagagggggagaggggaaaaagaacaattgtgtacaaacgggaagacgaaaaagatgaatgggagacagggagaatggaacatgaacattttcgccgataggggaagacgaaaa

SEQ ID NO: 145362 - DNA, 383 bp, Glycine max
  unsure (1)..(383): unsure at all n locations
tttttgttacacttatttgtttaaaaagctaaccatataacacttcattctattaacagcccctggactcagtccaatattaatttaacaattcacaagaggtcattgtagattgaggaatatttcagtcacaactaaacacgtgaaaaccttgacacaagcttaaattctcaaaacagagtgcctaaacaaacttagtcatatttcagtcaaaacatattttaaagctgaatataaaattaatagcaaaattgaacacccataaaatcttctttcattaacatagccattgaacaattcaacaattacaatatgcagattacaaaaaaccanattatcaccattactttcttcctaataaacacataatggtgccaaatact

SEQ ID NO: 145363 - DNA, 269 bp, Glycine max
gactcctgataaatcttttgaaaatgatctgatgtttacattgaagatattaaaacataatactcttgcatgtggagtgtgtatgcttcctcaaaagaatagtatactaacccttatctttactgagcaaaatctaaaatagctggactcaaacaataacctagtgctttcaatttaacttaaagcgtgatattgaataaagaaaaatgatgactgatacatctgattatggataaaaattacctcttatcttttttttatgagagggg

SEQ ID NO: 145364 - DNA, 381 bp, Glycine max
ctatgaaactaagcttgtggatagatggaattgctagaggatttgctttataattttgactatcagacttacatatttgaagaacatagaccaactatagttttacgcatagatggtttttactgcctcactcacagttttatatcattaccaatcaaggatgttctttaaaaagcaaagtacctttatttgaggcaccttgagggaggttacgaaaatgtactcccatccatggatccaaaaggcatgaatcacttgatttttctattcctcaaatattgtccagagataaaatgcctctttgatagtaccaatattgatctgctgcaaactgaagatgctttctccagcctagacattataatgttgtctgaattggat

SEQ ID NO: 145365 - DNA, 321 bp, Glycine max
ggatccttaagtgaccgcggctgcagctttcgatagtgaagcctcaaaaattgcttccgtggacaagtgtacctttgaaatattgagaccttcgttgctcaatttcgagcatcttaatatgttatgcacctgaatcggactcccgtgtgacaagacttgagctttttgagtcctcacaagcttattactgttgaaaattgcagcgcacttaacaatattatggcgcctgaagtcagcctattgtgtctatagtcatgaacagtggaatttgttcacagattacactcgtttactttgcgcaatttgatatttgctgaacct

SEQ ID NO: 145366 - DNA, 441 bp, Glycine max
  unsure (1)..(441): unsure at all n locations
tccttggggccatttcctgcgaaggcaaacatttggaatgttagttntaccaagaaatgctacccttaaaacaaaaatggcatacaacctcctccaataaatacaaacatcaatgcaatttagagcgcagcttatgcgcatacntttttacgaacgttcacttgcacaagacattcttataactaagaaaaatgcacccatatacaatcaaggcaccttcgttacctagattatttatatgtacttccaaggtgtatttgttacctacatcacacgcatttcctttgctaaatttacatacatgcttactcaaagcactttggctatcaaaattgcatacgtgcacattctggtatttctaatacctgtacatacacaaacttcatgatgaatcttgactatctacacaataaggtgctacatttcatgctttttttgaag

SEQ ID NO: 145367 - DNA, 430 bp, Glycine max
agacttccaagtttgaagaggcggttgacaacagctcctgtgttaattctgccggaccctaatagaccatttgaagtgtattgcgatgcgagcgggcaaagcttgcggtgtgtgttaatgcaagagggaagagtagtggcttatgcttcacgccaattgcgtcctcatgaagttaactatccgacccatgattttgaactatcagctgtggtctttgccttaaagattgggaggcactatttatatggtactcgttttgaagctttcagcgatcacatgagcctcaaatacttgttcgatcagaaagaactcagtatgaggcaaccaagatggatggagttcctcaaggattatgattttggtcatttctaccatccatgaaatgctaatgtagtagccgacgtgctaatccggatgtccttacatgttg

SEQ ID NO: 145368 - DNA, 395 bp, Glycine max
tccttaagaagattcctaaagaagctagagcttagctacacatacctctctaatagctaagctcacctccttgagatgagaagctagaacttagctacacaccccctataatagctaagctcaccccgtgacaaaaatatgaaaatacaaaaaaaagtccttactacaaagactactcaaaatgccccgaaatacaaggctaaaaccctatactactagaatgaccaaaatacaaggcccagacgaaggaaaaacctattctaatatttacaaagataagcgggctcatacttagcccatgggctcgaaatctaccctaaggctcatgagaaccttagggctttcccttggatctctagcccaatctacttggagtcttctacccaatgccctta

SEQ ID NO: 145369 - DNA, 429 bp, Glycine max
  unsure (1)..(429): unsure at all n locations
gagctncaccattagagggatgacgtgacgtgctttattatcttttattctcataacgccatatcatttggcttgcaatttgcattgatgcaaacattttttttgcaaccttggtattatacgtcaatagaacattgccttaacaaggatatctgatacccccatcattgagacgataatcttgctgactagctttgcttatgaactcttcaacccccttgacaaaaagactctttcaaaacgcttctaccactgcaacatctatcgcacgtccaacagcgatttgaaggaatatagtttatgttttgtatatttaagaaaagaatatgaacattcatgaatcacatacataatcttagaatgatcatgttttaggttaaaacacaatcacatacatatactatttgagtttctaaatgaacaaagaat

SEQ ID NO: 145370 - DNA, 427 bp, Glycine max
  unsure (1)..(427): unsure at all n locations
tggaaaatgatntctatacaaaagttagtcgtatgaagctactaacatgtagcatgtgatgaaccttgagagggtgaaaatgtgtgggacaagggcactattccttaaaccaatggaatcattaaaaagtccacccccatgttactaattttgaccatttcctattacccttttatataactttttttatttttcatcccttacccttaggatgtagagacttaacttgattatcaccattttaattatatattttttacacagaacttgccagtaaattatttggtttaaagggtgtagccagcagtataattaagacttcaatatcatatgttaatcatacctatcttattaaaaaagtgaactcgaaacaactttcaaggtatatcttnttttntcatttctcttttaaaatttgaaagaatgc

SEQ ID NO: 145371 - DNA, 422 bp, Glycine max
  unsure (1)..(422): unsure at all n locations
gagctcgaaacatatatgcaagtagttaaccgtgtcataacatgttactatacactggttttgttgatatatatcaaatctctacagaaatatttccattcgttgttttttactataacatataccttcaaagaacaaagcacagtcaacctagttgaccaaatgcctgctngataaattgttggtggcacaatctatggtagaaacattccctgttcattcaccattacatattacttataaataacaattaagtagtgtcaatttatgactaataagcatcacacggtttctatattacatntaaactttgcaaagctaatacataattacatattaactggaccattgacaatgatcaattgtaataaatataatgaggcacatcatgtatattatatgatgtatatgacgatgataaa

SEQ ID NO: 145372 - DNA, 304 bp, Glycine max
tcttagtttcaaatgatgcagatgggtgtgaactaactattcacttcttatgacatggcatcattctggcgctaaaatgctgggagtaggaagccatcttcttaattaaatttttcgcttcagcaacggtaatgtttccaagggcatacaccactggcaaaatttatcatactatttctcataataatgagtaccttataaaaatattgaaaagaaactgctctgaaaatttatgtgggggcaactggcacatatattttaaatatcttccatactcatacagctttttcactgagttgttaat

SEQ ID NO: 145373 - DNA, 433 bp, Glycine max
tagctttggttattttgtcacgagacattgtcccccttaaaagggaggtgcctactgagcgcaattgtctcaatgccaatttttttagattattacattattaatacgttgattgttttattatgcgcacaggccatatgcctcctcacttgctgaagtttttttccccgacgaccaatccacatgtgtcgctttctaatggatggatttcaccacaccatttcattccccttaatttaagaattttcttctctctcctccatttgttttgcatccgtcaagattctattttcgcttctgtatcttgctcaacttctcttcttttcttctatgtcaatatatagttaccccttctttctcttcctaaacttctcctcttttgatctccgattttgtttctactcctttaatactttgcgtctgtccatattct

SEQ ID NO: 145374 - DNA, 406 bp, Glycine max
  unsure (1)..(406): unsure at all n locations
gctctttcatctttcgaaatatggacaaaagccttgcacctcataactctcaagngactgtaggaggctttctttctaaaacaaatttcttctagtatttctccatttaaacgtcttgaacggacaaattgtcaaatcaactacaatctttactgtcccacctcacaatgtctaatggagttttaaatgtaaaaacatacatttcaatttttctgcaatttattattcattctttcagcttatccattcaattgaggagtnttgggaggtatcttctcatgtcgtatcccatgagccttgcagtatgcctcgaataagcctctgttttctccaccattggttgatctcaagcattttaactttcttctagtctccccgtctactgaggtatgaaacaaccttgaag

SEQ ID NO: 145375 - DNA, 437 bp, Glycine max
  unsure (1)..(437): unsure at all n locations
agctngtgagaganattaggataaattaatatggttttggttgttatatgcatgagtatttcgatgcttgactgcaacaatgcgttatacaatagtacctaccacatagagagttctggctatgcaatttggaatgcatcaagaagtttcagattgtgtgactacattctctggcaccaaagctattgcattgataaattactacataccctaaattacttaaaaaaattgcaaagaatattacttggcgaaagagcagtctatagctactatatcatcatgaacctcatgtatgaaaagcaaatacaaatggtaatgttgttgatgttgcacctgagttttctcctatgaaaactgttcaattttggaaatgcttctcaagacactattgacccaatatatggaggctttggaggaagattatgaagatggaaatg

SEQ ID NO: 145376 - DNA, 463 bp, Glycine max
  unsure (1)..(463): unsure at all n locations
ctaagcttaataaatctntagttaggtgagaggagactgactataatgaaaaaagtttcattttaaaattattataataataaaaaagagagtggatgcgtaattattgtatataaattaaattatttatattaaaaaaataaaacttcaaagataaatcttttgtaataaaatcctgcttattctggtagctatctttattaccaaaatcaaataaacaaaacctaataacaattactgctggtaatgtcgcatattgcctcttcaaaacttacaattctttcgaatctttcgtttgaaattngaggtctaagtcactttgcttcttagttgttttacaatttgacaacnattcacaaatgaacgttagaacaataatgatttgatttgctatgctaatggagttttaccttgtttttacaggatattatagcaatatcttgagtcaaaaaaaatgattgat

SEQ ID NO: 145377 - DNA, 374 bp, Glycine max
ccgacccgtagcatgcaaactatttaataaatggaagaacacttttttctatctccaccatccacctcctcagacacaagcaaacaccagtttccttgaccgctaacgactcaagcaatatcacaacgaaacgcacccacgctctatgcacttgtggatataaaatccaccaagctgatgctgaacgcgctaccactgatggagacacccctccctgacccaactcgccagcatgggaggtgccgttcagctacacctgaccagctgcagcctacgcctgcagctctgcaaagctgacatcgctggtcataccaacgcttgcatgcagcctcctagacacgcccataccagtggtgacatccacctgtgcacca

SEQ ID NO: 145378 - DNA, 219 bp, Glycine max
taaacttgctttgattaataaagtttggagaattttttttgataaatgagttacctttgaagagtagattttagaatttgtaccttatccttctaaaaaggtacgttccccccccccgattaaaatttggaaaatggaaataaaatggtgtgtttatatgccattatgatagtacgttatgcacaagattgtgtcaaatagaatgtatatttagggggg

SEQ ID NO: 145379 - DNA, 441 bp, Glycine max
  unsure (1)..(441): unsure at all n locations
tctaagncacccgcggcatgcaagnctatagaagcaatgagggaaccacattttaagtttttggctnccataagcaacatacattctcaacttagagagctcactaaggcaactctgcctgcacctaatgttgaaccagctgcagctaccacatcttctactagtatgagactgcaaaaaagataacttaatcaccaataattacttcagttactcatacacaaacgtgaggagaaagtgtggccacttactcataactttggagaatgcgattatatgttgagatggtgcaaatggtgatgaatgaccatacctaaataaatgaattcaacactcaagatacacaattagacttgtataacaaactatattaatgaaatggagtaatagtaaactatcttagttgttcgggatatcatacctaaatttcctttcaccctc

SEQ ID NO: 145380 - DNA, 391 bp, Glycine max
aaagggtactgaagtaccagtgaagtttatgcttaatacatcatatggttgcgagcaaaaaaaataatgggaaagtggtgcaacaagaagttggatacaagaagatgtgttttgtttaaatatatttttgttttggttgggttaaagtaaaaatgtcttgggttccattggataattgtgaataatgggactatggattatattatggttgatgaggtactggttcagggtttggggcgggaattgtattgcccttgatatatgcatacaattcacatcattgcacaatcttattttggcgaatcactgaaatcaaacatttcatgcctttattgtcaaccagtcggactgctgtatatttcatcattccctgctccattacttgttggta

SEQ ID NO: 145381 - DNA, 290 bp, Glycine max
  unsure (1)..(290): unsure at all n locations
tgtatacatgatttttaagatgtctaaataataatctaactacgatcattttgcttnatcacaacacccagactcgttcaacaaataaagccttgatttaagaattttttaagatcaggttttgtctcacaatgaaaggtttcaagttattcaaggcacatggaatcgattaccaatacatgtaattgattaccaattgtatgaaagtgtgtaatcgattacacattatttgtaattaattaccagagactctgaacgttggtaatttacattttaaattgaagggtcac

SEQ ID NO: 145382 - DNA, 453 bp, Glycine max
ggatccttaagtcacctgcggcatgcaagctcgaccaatcccgacccaacccgggcatagtcagtcagtgagaacctgcgatgtacctaaacaggcgagctcctgccagtcaaccaataaaagaacaaagaccactaagcatggaggcttgtgtggcggctggctagctatggatcttgagtgaaatctggaatttggcctctggtaatcgattaccaagggtgtgtaatcgattacagggcttaaaatggagacaggatgttaagattgcctctggtaatcgattaccaatggtgtgtaattgattacatagagtaacggggcacgggtaatcgattaccaattaggtgtaatcgattacacagcgtaatttgtaggttgtcatgtgcaaaagctgcgtaactcgagtttggtcactggtagtcgattacatactttggtaatcgattacca

SEQ ID NO: 145383 - DNA, 352 bp, Glycine max
  unsure (1)..(352): unsure at all n locations
aatggacttaccttgaattaattcctttgatatccctttngagccttgttccctttcttgtttgaagctcactacaagccttaagtgaaaaaccatgatattacccttccttaagcgattttggagctntggaattgttttgggaataagtgtggggggtttttgtttcattggacaacttgttttgttggctatgcttcatgatgtattntgggccatacttgatgtacattgtatattggttaaatgttggacatgctgaatgaaatgttgtttctcaaaggctaaagagtaaaaaaaaaaaaaaaaaaattcaaaaaaaaaaaaaagaaaagcaataaagttgagtgaa

SEQ ID NO: 145384 - DNA, 415 bp, Glycine max
agcttacatagccctaatcttaaacttattctatcatattataaaaaccctaagaatctaaagctatagttaaagtcttctaccctatagttaagacatgaaaaagagaaaaagaatcaagggaatttcttggatggtgtatgattgatgcttcacagtcaaaaatgcacaaagagagtacaaatgcaaaatgtgcaaatttttggagagagagaatgtagaggcgaggttttcggaatctggcaaatgtgagtgtaactgctgctacactcccttaagtagtttttcgatactctcgcttaacaaacctctacgcttagcgagcaagagagacgtttggtttctcaacaaggctcacttagcggacccatgcacttagccgacatttgaaattcaaatcaatttttgtttaaca

SEQ ID NO: 145385 - DNA, 192 bp, Glycine max
cgccattaactagccgttacccttgcgaaaaaccaatttttttttgcaaccaaaagaggttacccgccacacaaaaaccgtagatcccatatttcccacagcaagaagggacaatttaaccaaggactgtgaggtggttgtttactgacgagaaaaatcccatgtaccaagcaggatggacctctccccaaa

SEQ ID NO: 145386 - DNA, 417 bp, Glycine max
agcttgggattgggcaatagctttccccctgtattccccaaggtctcctggcccccgcgacatatatccaggtaccactctgtggtcaacgaataaaagcaggaagtctcacccttctacacattctattttcaagcttgtaagattatgggggacccatcacatgtggtactaggtggcggtcgggcgatggcgtaagacaattctccacattcacaaatcacttataaacccaccatcccctgttgcccacctctaactgagctcacgtactcccacgtagcccttatcctcgttcctctcaacgccgggtccccatcaatcctctcaagctcccacagaattcaagagattctacatcccatcatctccaactaacgaaaccaagctaaatagggcaaaggctaaaaactctgt

SEQ ID NO: 145387 - DNA, 390 bp, Glycine max
tacgtgaactataaaactaagctggtagtttgtcatcatgatttagatttgattgatttcatttattaaaattatccaacattcaactatagtagaataataataaaaaataactttttaatgattattatgaaaaacgtttactaaaacaaaaataataataattcaattttattttgcaaaggatgagtatcttttcactcttcctcccattttacctccttcctcggtcaatgtctccactcttcaactcttctcattgcatacattaaacctctaattaaaaccttcaaatgattcttttaaaactcacttacacactcatttacaattggtagaaattcccaaactcacgctcaaactaattgagaactcataccctcatacact

SEQ ID NO: 145388 - DNA, 418 bp, Glycine max
agcttatgcgcatattttcttttaaccttctcttgcacaagacattctattatccgaaaaaaatgcacccatatacaatcaatgcagcttcgttacctagattatttacacgtacttgcaaggcgtatttgttacttacatcacacacctccttggctaaattcacatacatgcatactcaaagcattttggggtaccaaaaattgcacatgtgcacatcttgggatttctaatacctatacatacacaaacttcatgatgaatcttgactatctacacaataaggggctgcattttatgctcttttcaagtgtttgctacctaaagccgcatccaaattcaagtatattttgctttgctgactaaaattgtattcaaattaaaggtgtacattttttgggaatgtatcttctttaca

SEQ ID NO: 145389 - DNA, 315 bp, Glycine max
  unsure (1)..(315): unsure at all n locations
tgtcaatccttaccctcggaagcaaaaaaaaaatataggggaaatcttctctctaataataatataatcaaatttccactaaagctaaanaagaatagaatgaaaatttcccaatcaaagagtgggagaaagcaaaaagaatataaaggaatattcccaatcaaagaatgggagaaagtaaaaaaaggaatatgaataatgaaagaaagctcctgatcaacgatcgaaagaaaacataagaaatgtgcatagaggtctttttacctgacaatatcttaacaatacataatcgtcaccaaatgaacgaaaaaagaa

SEQ ID NO: 145390 - DNA, 430 bp, Glycine max
cacccgcggcatgctaagctggtctgaggtactaacccgttgatatacttttaactattcataaacctctaaaatggactaaaccttactaaatcctcaggaaacgttcagaagcgcactcagcttggatttacttcacggaaacaatgattctcagcaaatacgccgacagagaatgcccaagggtgaaccctatccactgcacttctcccgacatttattgaaacatgggggagaagcttgccacccagctagaccaagcgtgcttacattacctaagcgagcatggttgctattcactcaataactcatcttttgtgggtgtacatttggagagtcatcccagatatcccaactaaaacaactacaatttgaatgtaacctacttataagttgtttaaacatagtctaatgcccaactggaaatccc

SEQ ID NO: 145391 - DNA, 422 bp, Glycine max
  unsure (1)..(422): unsure at all n locations
tgtggtaggtgctntaccatgctcagagttgggtgaacaattattttctttataagacactcgagcatggcgggcatgatatgttttctcactaattataatgctagaagattttaaagtttttcccgtatcctcgtttaaacttgattctgaagaaaatatattttaaattaactgatgttaacaagttatcttatgcatggagaattcagattaacactacaacacacgaatgtgaacaacaataaatcaaattaacattttcttgcggcatgtaatgataaaaatcaaataacaattctgccataccttacaggttaaaataacatatcatttctgaaattaaataagtatagcaatttccttatatgaattgaaataattttctcccacaaaattttcagagttgaaaaagaaattta

SEQ ID NO: 145392 - DNA, 352 bp, Glycine max
tctaattcatccaccttgtgctccataccttgatgacctacaatacggcacacttgtcactttcggggtgcttattcgaccattcattctctatttaattttcctgccaatggataactttgactacaaaggcaaagttgttacttttacatttatcataaacttttgcggcctctaaagttccctaatcgtttgtcaaggtatcactaactagtactgccatgatgaaacattagactgcaataccactcttgaactttcaactctcttagttccacgtgaacaattacatgctattcttaatgttcatcatggctgtgctgacatttatggaatgcgttaatattggagt

SEQ ID NO: 145393 - DNA, 381 bp, Glycine max
taaatatgagcagatgttatataccttaaaagaatcattgctatgtcaattcatcgcatgtaagttgatgctaattcctaattgtagtggtacaaatagataagccatttattgtaaatcgggtttcttcatacaattctattaattataattggttacaacttcagacattgtcaagtggaattcaaaaacgaaggtttcctccatgtccatttatggttatttttacacgccaacaacaaatatccatctccaaacgatattgatcatattatatcagcataaataccttcacagaaagatgatccagaactctatatattaatgcaaataacatgattcatggttcatgcgaaattttgaagcctgcatttcatgcat

SEQ ID NO: 145394 - DNA, 398 bp, Glycine max
atggacgatatcgacgtaagttgttttttctgatgttgaccgaggcttcttcggttagaatatgtttgtatgatgtcaaccaaagctatttttgccgatatcgactaacatttattttaaatgatgtcgggtagggttattatctcatagacatccgtcatgggaaatttttgctgacgtcagacaaggatttttttggtcgttgtcatccaagtttcttcagctgatgttgatcaatgattatttttgccaacgttggctagattgtttatactgacatcggccatgactaaatgttgatgaaacacatgttagggtttttcagctggcgtcaaactaggttttacagtcaacatcactgaaagctatttttagccctattggctaagcttttttta

SEQ ID NO: 145395 - DNA, 434 bp, Glycine max
  unsure (1)..(434): unsure at all n locations
tatgcgcatatntccttacgaatgttcgcttgcacaagacattcttttaactaagaaaaaatgctcccatatacaatcaaggcagcttcattacctagattatttacatgtacttccaaggtgttttggtacctcatcacacacatnttcttggctaaatttacatacatgcatactcaaagcattttggggtaccaaaaattgcacatgtgcacatcttggtatttctaatacctatacatacacaaacttcatgatgaatattgactatctacacaataaagtgctacatttcatactcttttcaagttttgcttcctaaagccgcatgcaaattcaagtatattatcctttgctgactaaaaattgattaaaagggatatatttcttttgtaatgtattntctttacatatcatgcaacactattatatat

SEQ ID NO: 145396 - DNA, 291 bp, Glycine max
agctatggctagagtgtgactccctttagactgtttatgttttcaacaacttacatattgtgcccttcctaattagaaatacgtggccaaatttcttgaataggatcgactttattcaatttataatttctcatatttttagggaagacaacttttgtgtagataaataagctaactatgcagtccatacctgtagatctttttggtgggatttactcctttcttttttcctaggggactattatagaaatagatttagttctccttcctataggcctaaacattttggga

SEQ ID NO: 145397 - DNA, 424 bp, Glycine max
tggaccgtccatgagctcgcaatgatggatgttctggactgtattattataagtatttgaagcaaaaaaaagacagcataattttttaatattctaatatattttagcatgtagaattcggagaatattgggcacacgttgcactacttgaaaaattgataaataaaccaatttgatagataaaaattggttcatcgtatcatcaacagagaagtcatctatcaccaacatgctgaaagcaaaatacatatgcacatctaattggaagattgatatttgttactcaaaattgtaataacaaattttacgaatatagaccataaccattatttttctgagaatttcaaaacatgagattgattggttccagaaaatgagagcaaaaacagatgctgtcaatatttttcaaagtcagggctgtata

SEQ ID NO: 145398 - DNA, 250 bp, Glycine max
caccctcctccgctatgggccaaaaaaagacccaaccacaactgtgcaaggctccaaccaccaggtaccacctagggccgcgcacccccaaaaaccccgcctacctggggacatataccatgcctcgaggacccgctaaagcacccccgcgcaggagctgcaaaagcaaggcgacaaggagaaagagattcaaaggtggtcagatgataacaaagatgacaacaaaagatgaggaaccaaaatctcaaag

SEQ ID NO: 145399 - DNA, 279 bp, Glycine max
aacctcgctgaaggaaattttagaggtgggcttttttttttttttagagtacagggcttgtgtatttttgataattactaaaaaagtggatttatttattatataacgcgaatgttaaatttttagaatttaatgttggtgaagcaagtgatatgaattaaagcttaaaaaatgaggtgggagataattaataatttaagtttttgtgataagagggatatatgaatgaatttcctataacctacatatgggttgtgaagagaacaaacaattgaatgg

SEQ ID NO: 145400 - DNA, 314 bp, Glycine max
gaaaaaaagtaaaaagggaaaagggaaaaaagaagaagggaggaaaaaagaaaaaggagaaaagaggaaagaaagaaaagaaaaaagaagaggaaaaaagggaagaaagagaaaaaggaaaagaaagagaagaaaaaaagagagaaaagaggggaaaggagagaaaaaaaaaaagaaaagatagagatagaaagaagagaaagaaaaaaggagagaaagaaggaaagaagaagaaagaaaaaaaagaaaaaaaaagaagagaggaaaagaaaaaaagaagggggagaaaagggaaaaaaaaaagaaaaaagaga

SEQ ID NO: 145401 - DNA, 387 bp, Glycine max
acagtcttgacacaacaatctttgctggagtctgaagacaaattcacattctcatcctttcttgggcaaggattatctgtgaagttcacttcaagagatgaactattgaatttaagttggcgatcaagttccctaggttctttgctttgcacaacagaggctttactactacttgcaggccacgtggattttgtgtcaacattttcctcccctgacccacactgtgaattggtattggctgcaattacatcaacagtctgacatttggatacagtggccttgacaggaccattgtgggtgttgaacttccatgagtataaatcctccgaaggtgttatccatttggttcccactcactttccttgacatgagttcttgaccttgacc

SEQ ID NO: 145402 - DNA, 346 bp, Glycine max
ccccccattataggagaggggtttgatttgatgtggactgctttggaatatcacgggacaaaatttcaatctaaagcgtcttctcctttttctctcactcctttcttcccatctctattcttttagttattcatacattgcctttttgtgacacctttccttttcagtcttcgtttctgtttggtgctttgcatgacatacctttgaacccttgccaaccagaatagaagcaaagcataagatctgcccccattcgttaatgtttgccagtaacttctactaattcagtggctattagtaaagatgcgagctatggtgagtgaccgaaattaatttcctttaaaat

SEQ ID NO: 145403 - DNA, 297 bp, Glycine max
  unsure (1)..(297): unsure at all n locations
cgcagcacgcaagcnaaaagaggcagccaccacatacttttattccatggaacaacgagctctccacccccataagacagccaaattggagggcccatgccgtatagatggatgaattcgaggagtgcatgatgcacctgaaaaggaagggccaaaagaaagcaaggaatgaaagaatcatttgtgaaacacatataggggaagaaacctctaattgggctcaaagaattggagcctaccatataaacaagacacactcaagntccctcgaaagatgatggtggcgaagataccaat

SEQ ID NO: 145404 - DNA, 363 bp, Glycine max
agctcgtacacacatcagatggcgtgtatgtatatccactccacaagcggtgaagatgacgagagcttctaccctataacgcaacgtggcggacaaatgtgggcagtaaacttgaatggacgtcattgtctatgcggaaggtgttctgcgcttcactatccatgaacacacattattgcagcttgtggttacttgagcatgaactactgccaatatataaaagttgttatacggacaactcatgttaaaagcttactttcacaatggtggcctcttgggaatgaagcggctattccttcttttgatgacgcatgaacacttatccctgtcgcaactaccatatgtgcgaaaggtcggtcaaaa

SEQ ID NO: 145405 - DNA, 366 bp, Glycine max
ctagaaagtcacttttatgtaaaaagaggagattttttgttttcaagtaactgtgaatgaggctgtagctcataaaaaagagaagacataatcagcagcgatagtatcgcggtttattttacgcacattctcttaagtttagatggactatatagtagatattgatgaaatattggaatgtctacatttcctttatgctaaaggaaatgattttatttgcttatatatgttcttcgttacagactaagcttaacgagacacaatatcaattgacaccttggtgtttagatacgaaccatacttatgttgcacacaatcgcaaactcactctattggtgcacctttggcaagcttaatatgttcata

SEQ ID NO: 145406 - DNA, 410 bp, Glycine max
agcttctgatttcaattttgagtctgtcttgttattttacggcgctctatccgacatgcgagttaaacgttattgacggctaatttttctaagagcttcccttttcaattacaagcgtcttgatatattacgggacacaattggacacccgagttaaaagttattgtagtttgaatttgctcagagcttctattttcaattacgagcgtctcgatatattacgggactcaatctgacatccgagtaaaaatttattgtcgattaatttttctcatagcttcagttctcaattttgagcgtctcgatatactacgatacacaatctgacacccgaattaaaagttattgtagttcgaattttcccataactccaagattcaatttctagtatctcgatatactcgggacac

SEQ ID NO: 145407 - DNA, 407 bp, Glycine max
ctaagaaaaatcaaacgacaataactgtggactcggatgttctattgtgtcccgtagtatatcgagacgctcgtaatttaaaactggagctctgagcaaatttcaacgacaattactgttactcgcggttcgaatgtgttccgtaatatattgagacgcttcgaattgaaaacagaagctctgagcaaattcaaacgacaataactttttactcagatgtccgattgtgtcccgtaatatatggagacgcttcgtattgaaaacagatgctctgagcatattaaacgacaataactttttactcggatgtccgattgagtcccgtaatatatctggacgctcgtaattgtaaacagaagctctgagcacattcaaacgacaataacttttactcggatgttcgattg

SEQ ID NO: 145408 - DNA, 402 bp, Glycine max
  unsure (1)..(402): unsure at all n locations
cttgtgaatgggtgacatgatacatgttttttttggtttggttcaacgataaaagggatgccccacattatttccatgacacatatgcgaaaatgatgatttggaaattttatgcaaaactggttatgcatgcgcctatgtggacgctcaagtgtcaaatttttatggtcatgtgatgctaaggctcaagattcatttcctctattttaaatcaacccaatgttgccaaaatatgttcttttatcaatttgggcattcattcgagtccattttgggcgtccgggaaaattttcacagcattcacccttcaggtgtatacacatnttttttttcaaaaatcgattatgatcaatgaatattttccaagaaaagctggaagtcatctctattcaaaagcatgtt

SEQ ID NO: 145409 - DNA, 426 bp, Glycine max
  unsure (1)..(426): unsure at all n locations
agcgcggactncctgtgtttagagaaccactcctttctatgtgtacccaaacccaaacacctgggtcaagcacgactatctttctgctattgatggcttgccttgcataacctgcatttttcttttcaattagaacctttacttgctcatgcaacttcttcacatactcagctttagcctgtgcatccttatgcttaaacatagcaatggttgacataggcaacaaatcaagaggagtcacaggattaaatccatacactatctcaaatggtgaacaattagatgtgctatggacagcccgattataagcaaactcaacatgaggcacacaggcttcccaagattaagaattttctttcaaacagcactaagcatggtgcctaaagtccgaatgactacctcagtttgaccatcaattagtgggag

SEQ ID NO: 145410 - DNA, 400 bp, Glycine max
caagttatggcaaggctcattatatgatacctgccttcaccaactattgcaacagcttaagctattaaacaaaaatacatgaatggtatctctcataagactcaaaaacaaaacacatgaagaaaccacatcaagaacaagaatcaggccaggttcctacctactactctctactaagtgccaaaaacagactactagtacaaaaaactaacctggactcttactcagctaagtcatcatttctgcccacaattacactagtgcaaacactgggcattaaaacatgtacaggggtcacttacttcttatttgtaaccactaataatatttaaagattagtacctcaaaatttgatccagtttgtccagtactcgaagcagtcttaacgtcagaattattg

SEQ ID NO: 145411 - DNA, 430 bp, Glycine max
  unsure (1)..(430): unsure at all n locations
agcttntatgtgaaaagatgtgactcttctcttttgtattagaatttcaacgctcaaaggcactggtaatctattaccataacagagtaattgattacagcattttgaaattaattggaacgttgtaaattcagcctgaaaactttttcaaaacaattctgctactggttatcgattatcagagagtaaaaacactttggtaaacatgttttgagaaaaaatcatgtgctactcaatttttgatgaaaacttttcatacttatcttgattaagccttcttgtgattcttgaatcttgaacttgattcttgagatcttgaaccttgaatcttgattcttgactcttaactttcttcttgagtcttgaattcttcttgagtctatcttgaactcttgaattggtcttgaatcacttgagttcgtctttgaat

SEQ ID NO: 145412 - DNA, 352 bp, Glycine max
atgccacgcttcaactggtgcagctactgcttttaatctaaaaattccttctaatacttcttgatcaaaaattctcatcccgatctatctcaagggaattaacttaaaattacaagcatgaaatcactgtgccaagtggttatcattcttaacattttacataaacaaaccttatgttggaaactttaaattaacatgcttatccaggtacaaattttatgtggtggggtctcttactctggcaaagcagagtaatgtgccaattacttaaaaacaaacataggtaatttcataatattttgcatgcaaattttacaattaaacagcaaaaattaatgaatggcttacgaat

SEQ ID NO: 145413 - DNA, 432 bp, Glycine max
agctcttcacctattgctatctaggatttgttattgagataaataacaaattgcaagaatcaaaattgctcgtatcatctcacatccctcaaatttacccttaccctatatcaaaaaataaatttataatatttttaataaattgcatgtttttggtatttataaaaatctcatcttacaatttattttatgcataaataaacagggggtcatattgctaaaacaaaatacaaatgtcttattaaagtctcatgtttctctatttgatgatggaacatgcatgttaagctcttgtaaagggagaaagtattacttaaaagaaaatagaattaattagtaaaagtgatataagtgaaaatccttgaagacaaggaaaagagaatgaagataatctccatgaagtagatgattagtccaacttttgaatgccat

SEQ ID NO: 145414 - DNA, 431 bp, Glycine max
  unsure (1)..(431): unsure at all n locations
agaagttccatcagaattataagctcttccaaggaagagaangtgggaagacgagacactcactgtaaaattcttcaagcatgatccaacagatgagaagagaaaatccactttggtatacgctacatctagagacaccattggcttcacataaattgcaacaatacctcactattcaggtataatatataataatattttgtcttttttttttttgatagacatataataataataatatgttgtcaaactttatacaaggtatctggttatctttttgttgaactcgggtccatgtcttagtcaagagttaaaacactagttcttaagatattgaattcattaagataattctttaacagatgcttctacatatgggcctgagggtgaacctctgttacatgttaggaanatgatatgtgcaatatata

SEQ ID NO: 145415 - DNA, 437 bp, Glycine max
ggaccttaagcgacgcagctgcatgcttattacctgaactcacttgctttcttgaacattgagatctattatttttgaaccaaaggaccacccgacaagcgaatcctggcacttcattctagaatatagcccacagatatatataactacaaaagtccatgaaaagcaccgaagacaaaaaagctttatatcgggctgaagagctaaagaatctccacagtgcatggaccacgaagagttatctatattggatttctataaaaaaaaaaatactgcgccatcgtataaatgtttgtttctgaaatattgaagagcacaccctttatgttcaatcgggtcaaatttaaagctcctgagaccgtgtgacaccctatttttcaccttccccaactcaactaatgtactaatgcactgtgtgatatgttggtaataaaatc

SEQ ID NO: 145416 - DNA, 429 bp, Glycine max
tatacgacctagtttgagtcgagagtacgttattatttatttggacacgattgaatatcgtgtagaagaaaataaatgtgagcctttttccctttggagactttttcgaaaaaaccgccccaacgtacttttaattaatatttaaatttttattcttttattagtatatatgtaatgggtagagggtgtcacatgagaagaccactggatcattcaagatgtgccccatgtacgtatttggagcagggatgctgaagaaccttctcatatattcggcagaagtcatcactcagatgcattcaaatatgaaataaaagggcatctttttacatctataacattgtgaatgacattcgggtcttttcttttcttaaaaacaagcaccatttggatcccaaataatactttggcaattttctttagtattgc

SEQ ID NO: 145417 - DNA, 408 bp, Glycine max
agcttcagcacaagaatattatgaatgatttatgatagaacctaacatcaacacaagaacgtgattcacgagttgatctataaaattagaaccatagaaatgcaagaacaagggtggatctaagatttaatcaggttattttttttgaatctactctaaacagcaccaaaccacaagacaatgtagcgtatacatggagaataagatgaagaacaaggaattaaagagaattcaccgaacaaaaagatagaggagacaaaagaacatcacctagatgaagatgctcttgataccacatgatgtaagctccattggagcttgtaggcctaggatcttcttcatcaatggattcctttgcttcttggaagatgaatggtagtgcaatagagaaggaagagagacaggaga

SEQ ID NO: 145418 - DNA, 269 bp, Glycine max
atggtcttttttggcacatgggtaccttttcattagaggggaatatgcagcttgctaatctctttcattcaataaagaatataatttactgcgcatctcgaatgatttaatgattgattgtgttttggggagttaattaagatggttgatgaattgttaatggtagtgaaactgatcgattcaatgataaatgatacgcaatgatgaggtgaagtcttaagatgagaaatggagtgattgtggttcaacaacacatggtgaaaatgatc

SEQ ID NO: 145419 - DNA, 419 bp, Glycine max
agcttataatggaaagtgaagtcttattctttttatgttggagatttagtttggaaggttatcctgcccatggataataaggatcgagccttgggcaaatggtccccaaattgggaaggaccgtttaaaataattcagatctattcgaatggtgcttatgaattagaggaattaacccctcagaaacgtactttgagtataaatggtaaatatttgaaaaaatataaaccaacattgctcgaagttaaaatatgcatagaataggaagaaataatggaaacataaaaatggcgataacagttaaattgccacgaaagggcatgtgtcaatattacatctaaagtagaatcgaaatacagaattcaaaataaagaaatcataagttctactaagtcataaccaaatcctcatatagcttc

SEQ ID NO: 145420 - DNA, 400 bp, Glycine max
ttacggacctatgaatctcagctgtagattgcagatatcttcgtgacacttttgttatattgcatcatagaagaatgaaattattgatccagacttgaaatggatttcatgaattgttatctgacaaatacatatcttaatgatgaaagttttccaaatgatctatgaagagcaccaccaattgagttgtcgtaaaaatgtagcatgtcaatatttttaaatgtcccaatatgatctgtcagattgcctgaaagtcatgaactctcaactgcaagatttgtgagtccatgggaaatacaaggagctagaatttctaaaagttcattaacctgttggttaagttcgagaattgagaaattaatgtcccttaagttgcatagatacccaaagaagttggaat

SEQ ID NO: 145421 - DNA, 157 bp, Glycine max
gactagatcggacaatctccggtccgcatagggccccacttgagctaccatgtcacccccctttggcgaacaccagaaagaaagagcatctttataacatgttccgaagtgcataacatccggagccgtaaaaaacagcaccgaaactgcctaacgg

SEQ ID NO: 145422 - DNA, 418 bp, Glycine max
  unsure (1)..(418): unsure at all n locations
taagtgacgcgaggcatgcaagctttttgtgtggcagatcatacctccctttatagatagacgggggggcaacattgatttctgaactcctgcgcccgtttgcggactcccttatcgagacatgcgacaattatcgagttttaaaagtcaccaattacaattcactaaagtatcacaaatacaattaaatttgacaaacctgccaatttgggggttggcggctatttgcacaatccggcctagtttctagatcaataccatgcttcactgtcggctcactacttgcttggccctcatttgtcagcaaacacaaattttgaagtcaaatgatacttatatngcctccatatacttgcgactgttgacatgaccttttattggcatttcaacctcaggatgtaagttgcgctaacatgat

SEQ ID NO: 145423 - DNA, 371 bp, Glycine max
  unsure (1)..(371): unsure at all n locations
aggagctagttgatcaatctgagacacttgtataaactacttagaaaaataaaacagagctgaaatcatttcaatggtatctttggttttatctaaattaattgaaaacaccaatagtncgcgcacgttggtcatgtgacacacattcataagtcttcataaactaagtggcggacacataggatttgctagtcccatagatatattttgaacacactattcattaacgagtcccatatagataacatggggacatttagctcaatatttttgtaaaaaccaaacaacctcactgtaataatatgtttgaaaacaactccattttatagagtttctaagaatacctgaatatgggaaatcagttggagaga

SEQ ID NO: 145424 - DNA, 403 bp, Glycine max
  unsure (1)..(403): unsure at all n locations
cgcagcagcttccaaactatataacagctgaatgagacatgtgaatccgacattatagttgattctagctagctatgatncagcacaaaagtacaacacgcataaattatgataatacactaagaaacggaaccatggtcaaaaacaaatgtaatatggaaatctcacaagtaacaaacagatagcatttgaagttcattcctatatgacatgaaaagattgccagcatgaaagaaaacattgagatcctccaagttcgaacagatcttatgatagttatagaaaattttctaatatttattgtaaaaaatattatcttatttatttttagagattcacgatatttaatggaagaaaataaattttacatttgattgatgttcttaaataataaaaattttta

SEQ ID NO: 145425 - DNA, 422 bp, Glycine max
  unsure (1)..(422): unsure at all n locations
agctttanagagatgaagacacaccaatgaacacgctaagaattcaaatttattgtgctcacttctcttacctttatctctataacttctaaaatggtaaaactctctaaacattttgtatatctagagataatagactaagttcatttttataatcatttttgagatgttaagaactagtcaatgagttaatcaacatccacaaatcttctaatttgtttagagtcagatatgacttcgttaaataaaaaatactaggaatactttaagctctgaggataagcttagtttgtaaaagctaaaaataattgtgaataatactcgtgatctttatgaaagttagtcaaatttgatgagttgtcaaagattagacgtaatctcactggttgagacgaacaaatataaaagtttatgtcttatat

SEQ ID NO: 145426 - DNA, 349 bp, Glycine max
cgctgttgtgcagtcacctccaccagatcctatagccaacatttatctctacacctatgttgtgcgttgatccagtcctgagcagaatgtcactgatcgatgaatctttcaacgaaaatgtcgtccttgatgtgattacatcatgatcttgtaccattgtattttggtggatgactctaaatgagttgctttccgggattttagtttgaagataaacaagctctccgatatctcgtagcttatagatcttcaatcaaaatctacaatcaagatctccgacatctatactgttaaagagaatgttttgaggattaatttcttcaaaatattttgcagtgagctatcatca

SEQ ID NO: 145427 - DNA, 432 bp, Glycine max
  unsure (1)..(432): unsure at all n locations
agctttctcataaccacataaagcttaactatatttcttaacctcatattaaggcaatatttagctctttcttgcaccataagagaggactaaaaattgattgagatcaattttactgctagcaaaactaacaagtgacttgctcttacccttatgaaccttcttcatgggatccccaatcacaaaggttaagtgactcttcctcgctttctcacaatgggtagttcagcatatgtggaatacagaactacccattgggtgactcttccacgctatctcacacatatgacgggtgactcttccacgctttctcacacaaggcttattgngttatggggcacccgtcatatgtggtactaggtggcgatcgggcgatggcccaaaacaaatatcccatttccacaagcccaggcataagcacaccatccccag

SEQ ID NO: 145428 - DNA, 367 bp, Glycine max
tgtaatcaattacacacatactataatcgattaccagagaagttttttataaaatattctcaatagtcacatctttttacttgattcttgaatggttgtcaaaggcctatatatgtgtgacttcggacacgacattgctaagagtttttcaaaacaaaaaggtcttatcctcttaaaaagcaaaaccgttttatcctcttagaaattccttggccaaaacacttgtgattcaataaggaattatttgagtgctcaaattgttcaatctatctctttcaagagagatttcttcttcttttcttcttcttcattctgaaaagggattaagagaccgagggtctcttgttgtgaaagaattctaaacaca

SEQ ID NO: 145429 - DNA, 422 bp, Glycine max
  unsure (1)..(422): unsure at all n locations
cgaactgcaagcgtgcgagcttttatgtgaaaggatgtgactcttatatttgtatttgaattncaacgctcaaaggcactggtaatcgattaccaaaacagtgtaattgattacagcattttgaaattaattggaacgttgtaaatctagtttgaaaactttttctaaacagttttgctactggtaatcgattatcagagagtaaaaacactttggtaaacatgttttgagaaaaaatcatgtgctactcaatttttgataaaaacttttcatacttatcttgattaagccttcttttgattcttgaatcttgatcttgattcttgagatcttgaaccttgaatctagattcttgactcttaactttcttcttgagtcttgaattcttcttgattctatctagaactcttgaattgttcttg

SEQ ID NO: 145430 - DNA, 397 bp, Glycine max
  unsure (1)..(397): unsure at all n locations
tactaagctcagagtaatatatcttcttgtgaagatgtggccatattgtgattctcaaccatgccacgcttcaactgttgcagctcctgcttttacttagaaatttccttctaatacttctttgataaaagttctcatccgaatctaacacaagggaattagctaaaagttacaagcatgaaatcactgtgccaagtggttatcattctcagcatttcacataaactaaccttattttgagaagctttaatttcaacatgcttactccagtgtacaaattntaatggtgtgtgtgtctcttcactactgccagaagcatgagtaactgtgcacattagctttaacaaccaaaccatagtgtcattttcaacattagtttgcatgcaaatttttcaaa

SEQ ID NO: 145431 - DNA, 405 bp, Glycine max
  unsure (1)..(405): unsure at all n locations
agcttcagatgcatcaaggagccagtatttgctgtataatctcttanccgacaatggggaagggagccaacaatgttgagtatgttccctatgataggtagcttccatggccctggaggtaaatttggagttgaggcagatttctttttcattattttgtgtgccataaacataaaaatgaaaatggaaaaatggatgtgaagtaaatggttcgaagattcatggtggaaacagaacgccttcagttttactgatgaaactgggtttgctactcttatagattgtagaaccttcgtcatcaattattgggcattagtaatctcctgattaccatatattatgcattttgatgatgtattggatgacagcaactccaatgcaaaatggacaatgatgtttgcatac

SEQ ID NO: 145432 - DNA, 433 bp, Glycine max
agcttcacaggacacggttatgaaacgagtttttttgtttgtttaaaaacaaaatacagcttcgaaaacaataaacaaacaggtgcttagagaagaacaaaacaattgtaatgaaatcaaaactatcttttaaattatgaccgctcaagacagatcaatttacagaaaactccataaagcttttgatggcgtcatattacacttatacccttcttttgacacagaattcttttcatgtgagataaaaaaactccattaggcttttgttgtagtacataaaatatccttccttattacatttctttttgtaacgttccttattacattttaagtgtgagaaaattggaatagtcaataaatcgattataaggagaattaatttttgtgtgggtaaatttttctataagtgagttatgatacaatagacagataa

SEQ ID NO: 145433 - DNA, 449 bp, Glycine max
  unsure (1)..(449): unsure at all n locations
tgaaaagagtctaatctaacttattcttacgtatgccaagccatttccaccccacttgcaaattaacttttatatgctaaattattaataattatatattattgctcatattcgttataattcgttgaaaatttanggtggatagaagctattattatatcgacgaaccttcaatttcaacaatattaattgacagtttactgaaatattaaaaatgtttactaatgacggaccacttaaggttagcaatgaactgaattttaaaagtatacgtataacttctctatttcaaaatatagacaaataaactaatttcatatagaaattgttgtgagattataaattatttaattacagggaattcttatatttatgagtggaaataactctatttgagtagtatataactagtaatttagctcgtgtaatatataggataaagtgttatg

SEQ ID NO: 145434 - DNA, 416 bp, Glycine max
agcttatgagaatgatgtagctaaagatgttggactacaacagaaaggaatcattgtcacttatgagcatacaagcgggacatgtatctcatgttgaatatactaagttagatgcaaagaattaccttaaataaaaaggacaaagtatggtgcatacggaagttggtagtttgatgtaatacttccagcaacagttattaaagaattcatcatttttctatgcatggtaaatggacatcaatgagcgaatgacatatgtattctgggtagatgcaaagatggtgtttgattatgggtattttagtgatgttgactgtctagatactacatattgcactgttaacttattggcaagtgcatcaaattgtctcaagtagtaaagtactcggaagttcgagtgttgaatccacatgaaa

SEQ ID NO: 145435 - DNA, 387 bp, Glycine max
  unsure (1)..(387): unsure at all n locations
ttanaagattggctaagaatttgttaaaacatatgcacttatacaatgaaggaaagctggagttgctgcacatgatgtccaacgttatgtcaaagaataagatcgggctgcacaatgccaaggcaagactaagtgtaaatgaagaattgaagctgcaggattcacgatgtcggatacaatgtccaggacatcctgcctgaaaatactggaattgctaaaagcattgaagctgcaggatccacgatgtcggatacaatgtccaggacattctgcccgaaaatactggagttgctaaaagcattgaagttgcaggatccacgatgtcggatacgatgtccaggacatctttgcccgaaatactggacatataaatctgttatatcttta

SEQ ID NO: 145436 - DNA, 423 bp, Glycine max
agcttgaaggtgtgcagcccaccatctgttcatagtagaatactgcggatgtgtctactatcattggtatcattttttcctctgtcattgaggtgccacttgagctgacatctctctccacctttgggcatattctttgatagatccgagcccctttttgcacatgttctgtaattgcatcctattcggagccatatcaacaatctgtctgatattgcctattgaaagcaaccattaggtccttccgataatggactctggaaagcatcctgttatcgtaccaagtaacatctaccccagttagactctcttggaacaaatgtatcaacagttctttctgtattgcgtatgccaccatctttccacacacgtgtttagatggatcttgaggcaagaactcgccttgtacttgttaaagtccag

SEQ ID NO: 145437 - DNA, 303 bp, Glycine max
aacttacaagggaatatggtgaatgaatgttccaacttctcacaaaaaccaaatttatgccaaaatttaaaaacgtgggggaacggaattaaataattatacttttgtttagatattgtgtgaaagagtggaaagtaatgatcaaaaccaataggcggaaaaaacttcccatcttatactccaaaatggagaaagagaaaacggcgttttggatgaaatggaatataaagcattctatgatggaacttaataatattccattccattcatttctatcacttccaacataacataatatatttc

SEQ ID NO: 145438 - DNA, 421 bp, Glycine max
  unsure (1)..(421): unsure at all n locations
atcattacatatgttcattactatgttgctattgtgtgacattgaggtcgctaatcaaagctacgtctgaaaagcattaaaccgatagggtctcggtcaaaagatttaatatattgtgaaagcctgaaagctaatcattccacactgattcagattggtatttattaaattatattttaaatttaatttaattgtgtacatatatagatgttcaatccacttataatatttttattatagcaaccctgtcgaggccttaaatcgctgatgctttgtttgaaacattttttcaagaacaataaaaaataagtcacctatcatatttattcaattgaaccaactcgattgctgtgtttgaaacatgaaaaaaacaggttagaaataataactnaattaaagaagaaaacacatcattacatgt

SEQ ID NO: 145439 - DNA, 351 bp, Glycine max
  unsure (1)..(351): unsure at all n locations
ttatnnntgtttgaagtctgacattatgtgtgaaatgttatatagtttgtctctagctctatcacctccaaaactcactactaattacatatttgttagtgcttaaatgtctaaactatcatttacgattttaatgttaataaacattagtgttaattgttctcaattataactcaaattttctatttgaacatatttatgtcacatccagcatcagattaataaaaactttttggccaccttgaaaggcccgtcattccatgaactggtgaccaaaaaatcaacacaatcatcagacttgaaaatgtttctaacataccaatcaattacagaagttcaattataaatttt

SEQ ID NO: 145440 - DNA, 429 bp, Glycine max
  unsure (1)..(429): unsure at all n locations
agctagctngagggcttctatggaggctggatcttttagctacaaagaagtcctttaatggtgattctccaccatggagatgcactggaagacaaatgagaagaggctataggaggcgccatccactatggaatatgccatggaataaggagctttaccaccaagatgagccttggataagaagcttggagaggatgcttcagtggaggaaaatatagagggagagaaagagaaaggggggagcactaaattgaatgaataaaaagggagacgagttgaactttgaattgtgtctcacaagactctcattcatcatagttacaacaagtgttacacatgcttctatttatagactaagtagcttccttgagaagctctcttgagaaaactttcttgagaagcttctttgagaaaacatccttgagaagc

SEQ ID NO: 145441 - DNA, 400 bp, Glycine max
  unsure (1)..(400): unsure at all n locations
tattttcatcatttgtctttacttctataaatgaatatgattaataatcaattcaatgtacaacctgtgacactatttattcattgatggatnttcttattatctatgctcagaaacggagataatatacatcagtgttcatgacctcttggacttgagggatggatgcgctgacttctttttgttttgcagcttctggtttgtcactttctgtgaacaagatggtatgtatgtatatatacttttttgagaccattcacaacattaagtattgaagctggcttccttttttcaaggtattattctccatttggtttcatatatgttaagaagtgaaaatgatgagcatgagtttatcttttgggcatgtacttaaaagtatgacatttcctggtaaatg

SEQ ID NO: 145442 - DNA, 413 bp, Glycine max
cttttttacaacctttattcctcctttggcaacatcagacagccaaggaactcgagaaccaacacatatatgaccaaggagttgaaaaatatataaatatcatagtattaaacacaagaagcctaactcacatagaagaaataatcaaaccagaatccaaataactgaaaatgtcaacaaccacaaaacattctagactgaaatttaagaaccacaagataaataagcaaagtacttagcatgataatgtaaattctaagaaactaaaagccaaaatacacgggttataaaagataaataatcagagactaaagtctaagaagacggaggtggtggtggaagatcgaaactctgacgaatgtatctgacatcctcttcaagctgtgtaagacgaatgtccataccggcgaagc

SEQ ID NO: 145443 - DNA, 445 bp, Glycine max
ttccatcaatggtattacaaatttcatcaaattatcattttttattttatgacttatgaggcaaaattggttgatgattgcatataccaaaatattagtgggtgtaaatttgtctttctttctggcttatacgtgatgacatattgatagccatgatataatttcattataacaaaatattttaccaatataattttggatatattcaacatgaaagacagttaactataggatacactagttgctaaaggagacaagttagtctcaaatagtgctctgctagtaatactgaaaaagaataaattcaaaaggtgcctaatgctttcgctatggggattattatatatgctttagattgtttcatcctaaatagaatttagtgggagtctgaaaagattatgagtatcttgtatgcacacaagaaatagtaaacatgtatgcacta

SEQ ID NO: 145444 - DNA, 405 bp, Glycine max
agcttgaaactagaccccacctcaagtgatggtgccattatatcatatgtcacagctggccatggagaatcaatataatgtttagatgattccatgggtcttcttaacccatcatttgtcttcatatatttattacctgttatgcctccaccaatcttatgaagaacttggtcatggtagttaaactgcctctgacggaaacctctaaacgatctagcattccagtcatttctattttgaaacctcctaatctgtgaataagcatttgaacatgaagcagttcataaattgatatggctacagcattcatgtgagatgaagggagggattggaaaagagatacaaaaacattcttaggcctccattggtttataaaccaaacggaacacactattctcactacca

SEQ ID NO: 145445 - DNA, 380 bp, Glycine max
  unsure (1)..(380): unsure at all n locations
tntcaatgggtaagtacctcanaccaagctnttcaattctctatcgttcttcaagattcatcgttcgttcttcgttttcttcagtcttcaacgggtaagtacctcaaaccaataaatttcaccgatcgttgaattgtatcatccgttaatttcggttaaaatgaatatcaatcgttcggtcgtgccgtaaccacgttggaaatcaaaaaagaggtaaaataataatataataatccaaaaaatgtcttttagttaaataaaagcgaaaaatcaatcggacgttntctctttgggatttctcattcttaattgaattgactaataactaaagtgaaacttaggctaaaatcaactcgcctagtcaagctcgtccacaaaaa

SEQ ID NO: 145446 - DNA, 425 bp, Glycine max
agcttagacatccatttgttcaagagtatgttctactttcaacttattgcttcatagaaaagtttcttctaatatattacgcaatgcattatttagtttattttttaatgctgctcgtttggcatgaagattcttaatttttctattttcatcttttaattattttaaatcgctcaaatgtcactttattgcttaattacaaataaacacgcccttatatttttatttaacacaagaaatttaatacatattatgtgcatgattgcaaaaagaaaagtgactgaagattttggaacaatctaagatcagaaaatcaacattttcttaatatcaaattgtaaattatttctaagcctttaactgttatatatggaagatgcatgctttcttattctaaatatatttatcattgagaagaacggggt

SEQ ID NO: 145447 - DNA, 412 bp, Glycine max
gcattacggacacttaatactaagcttagcagtaacaagtaaatgaattatgctgtccttgttcttctctttagacctataagcagggtacctacttcaatttaatgcgtgactgaaatattagttatagatgagtaaaagcattaaacattgtatgctctgtgtttaatctatgacttaagaaattgtggatgctaaagattacaattttgtacactcgtgcatgatgcatcgatccttctccctgatgaataccttactttctgaccattttttgcagactattcatagagttgtgtgatatattacaaattgaacgaaagtttatcaaagactttgatatatatatatatatatattggataaaaaaaatttaaaattgacgatttatgttaacataatttctaaccca

SEQ ID NO: 145448 - DNA, 424 bp, Glycine max
  unsure (1)..(424): unsure at all n locations
attgcttgtgggcacctatatctaatcctctatgctgagcttatgtatataaaacagacccacaatcccaatcttacaaaactatattcatatgtcattggggcatttcaccaaacacttggtgggcgcgtgtntaagcataaattgcaagagaatgggggaaatgtggcatgccccattgtttcagaatacaacataggcctatagccatcccctacaacccctcaactctaacaaatcaaacataaaaagcaacccaaaactgccccacaaatatgagtacattctcacaatctagagcaccaaaagatgaacaaaaggcaccaatggaaagctaaaaactcaacgattgaatacttacttattggagtgagtaggaataccaaaaatgatagcaaaatgcgaccaaaagtggcttggggga

SEQ ID NO: 145449 - DNA, 382 bp, Glycine max
tgaaatcaggtgcaaccatttcccttagagttcttcacggggtggaggttgtgccatgttctcacaatgtgcaaaatcagaatgctcagaatcagaatgctcaaaattataatctgcagatcacgatgttcaaaaccaccaataacagaatgcacagcttcaccagtaatggaatgctcacaatgatcaaaaggtataaaatgatgcctaactaatctatgaaatgtcctatctatctcatgatcaaagggttgtgagacagatggattgcctctagtcatacactacattcagcatgcacacaactagttgccttatcatgtaaataaaggtgatgtttgaactacagcttccctcaaatgaattccaatgacttgaattt

SEQ ID NO: 145450 - DNA, 445 bp, Glycine max
  unsure (1)..(445): unsure at all n locations
aagtcaactgcggcatgcaagctctagcttgataaataatgacctcctatattctctccaatatgtgctctttatgagaaatttattcctgaaaataatacagagaaggagctttgtatccatggtgacgttatgaaactcaattctatttgctctaatgctgtactcaatcttttgcttgacgtatatatataattatgcataggaggcaaactagtgtaagaagaagctgacaagaactaattttgacattataagtatacaagaatagtccacattgattttccttatatccaatatcaaccatctatatatggttatatggtgaggattaactactttatgagagtacgctcaatgttgtgcaccatttntgcgcattttctttaagctcaattctttgacagagcaagcaaaagatgactgtttgaattaataatatatc

SEQ ID NO: 145451 - DNA, 457 bp, Glycine max
tcacagtcacctgcggcatgcatgcttataagtaagagtgtatataactaaatatattatattaagatatttatccgaacatgccattactccatttgtcttatttccttttaccaaattcgttgtacatcagtatatgtgggactattatttatctctttattgtcctctatgaaaattccctctatatatcgtctgattcttccatctccacaaacagataacttgccttttctatctttcacattgccccattatttgccgtctttaagctggactttatgctccagtttctcatgcatgtgccaccatatttattatttaattaagagtatggaatcgcgattagaatgtcacctcataactggaaaagtcagatgatcgaccttggtttttaatcatgatctcacatacaataatgtaatagttaagattaacacctcttaatagatagtcc

SEQ ID NO: 145452 - DNA, 444 bp, Glycine max
ctaagctgttattctaatacttaggtgtgctcactactaaacatgtattattctgatacatcttggtatagtaacatcaagcatatgttatgatacttttttgtttttttgagagaattcaagtttaattacattaaacagacagtattgatattgtaactcatgaatttagtcacaaaaatgcgtgcgtccagtttctttcaagaaggtaccatgtgtttttgggtggtttgaaggacacaacagctttcaagaaggccatgtgctgcgatcatgccaacctgaaagtttaatcttatagttaagttttttgtttatttcaacaggttgatgacaatttgtagaaaataactgattattatattgccctttaggaaacattcaaaaaatttttcagtgaaactatatttctttatttataacttacttaactccttaatcatt

SEQ ID NO: 145453 - DNA, 354 bp, Glycine max
gagcaagtcgactctccacatccataaagcacacataaatacaccatccccaagggcccaccttcgactgagctcacgtactcgcacgtaacccttatactcgttcctctcaacaccaggtgcccatcaatgcctccgagcttccacggcatccaagaaactcagcatccaaacatcatgaactatcctaaactaagaaaacagggcaaaggcagagaactctgccccaaacacattccaataccacagttttcctcactcaaataccccagtaacattctcttcggtccgacttgtaaccgttggatcgactccaaactgttactggaggtccctaatacatcaaatcacatt

SEQ ID NO: 145454 - DNA, 471 bp, Glycine max
  unsure (1)..(471): unsure at all n locations
ttacgtgacactataaaactaagctaagcctatagcaaggagtgtggtccaattttatcattttcttttggtggtattacatctagtttcctaaaatgaggcgaggcattttttgtggaaaaaatgattttgtcgagaatgaaaatggcacgtcgacgactatcatatatgcgatttagataattttatcatttttaagttcagtcacattactcacattgctttctcttttctggtgataaagatgtgcatagaataccatgcacgagagcatactttcggttttatcctaaacttctaagttcaaacttattaaccattcctcagcctatattnttatgcacccgacaacataatattatcttgcacggtgtcaaatatatggctcttgatcatttatttttatagtgacttgagttatgtgttgggtgcgtacggaagggagtaagatattacggaaatggacacata

SEQ ID NO: 145455 - DNA, 410 bp, Glycine max
gagctttacaattcattctatgtacctctggtgggccacaattggtttcatgtataattattctcgcttcatctcactgtttatgtccccttatgacgtgcttaagccattttatttaagtcatttctcgcttaacctaaaaataaacataagactccaccgatcttttgaattctattatccgataactttggatgaaatgaatgtcaaccgatcggtcgtgcctgaaccacgttggtaaccaataaaagaggtgagtaatgatagacttatacacaataatgaaatacctctttagtcaaataaagcgaaaaatcaattggacgttttctctttgggagtactcattcttaattcgatcgactaataactaacgtgaaactaatgctaatatctactcgcctagtcta

SEQ ID NO: 145456 - DNA, 438 bp, Glycine max
ttgacaatgtacataaactatatcatatcatttttctgttatagtcttattagcatgaactaaaaagataataacattagctcggtacttgtcatataaattcctcttaatttaacctctatttcgacttgtcatcttggatactctttcaaggtctaccattgatccaagtaagctccttcttcatcttattagtagtggtagcagttacatgcatgcatgagagaagcacttttctactacattatgttaaaaagctccaaagaaggacatttacacattattgattaagcttgggttacaactttaaaaccaaaaaagaaaactaattttgcagaaaagtagcattgttgtattacatccttctggttgtactatgatgccatgatactacatactaatggactttatgatgatgcatgtggaaactcgaaattc

SEQ ID NO: 145457 - DNA, 411 bp, Glycine max
tagcttggatcttgcttggtcgaacacattatcatatgccatgctcccgaagactttaagatgatcaactcttggctttattccaccctacgcttattcaggtgataaacctttgatattctctctaggagagcagctatacaaataaactgcacatgaaatagcgttggcccacaactcattgggcatagaataagcttataacatacatctacccatattaagaatagttatattatttatctctccaccacccatattgttatgacgctctaggaaccattagaaggcaacaaatcacattattttcacaaaactcattgaattcttttgatgtgaaatctccttctctatcggatcttagagccatgattgcatagccagtctccttctctacaagagccttaaaat

SEQ ID NO: 145458 - DNA, 370 bp, Glycine max
gctgagtagactgcaccttctattctcaagcatagtcaagagcaacctgtagaacagtgactgaagtgttggatcaagaggcctctgaattattaataatcggggctgaacaattattcctaaacctttactaattaaaaatttactcttctaaggctttgactatgttgttaagtaaatgaagaatataaaaagaaacttaaccaagagtaaaagtatgaattaaagtgcacagtggacattaaatgagtatggaatattgagacatacacacaagagtttatactggttcggaacaacccgtgttacatacagtcccaacgaactgggttcttagatttatttaaacttgaaaaatcttttaaagcaa

SEQ ID NO: 145459 - DNA, 430 bp, Glycine max
catgcaagcttataacaatagagcggacgagagcctttttcgacactcgcttcggacaaggagagactctgcacatgtagatcataccccaagctactactgtgctgaagagaaggcagccagcacctcaacaaatgggaacacatcttccaagagcaatgtctaatggcactttacaaggacaacggagaccaagcccagggaaagaaagacatttatcatgagtagtatgaacaaacctacatttgatagaatgagtgcaataaaagcttcttacacaagttggggtccagggtttccatctttgacctgcacaaggtcatactcttccatcgaagaaagcgcattccttttgatatgacacacaccatctatcataacatcttattcatcacgaagacattgagaggtaatgatgacatctattatg

SEQ ID NO: 145460 - DNA, 286 bp, Glycine max
acaattattgtttttcagctgccatttgattgttgttctgtgttgccctcaatagaagaacgtttcattcatgcatgcctggtgtttatgatattatcaatatgttgacattgtgagtttgtgtttggttaaaccctaaatttacttagttttaagtagaaacccctttcatcgtgtccaagcttagtgcacaaaattctttatcctgtatggctgctgcagattctataatttccctatggcacttggtatgtggattgtggaacaccatttctagtttaacatg

SEQ ID NO: 145461 - DNA, 433 bp, Glycine max
  unsure (1)..(433): unsure at all n locations
agatgcaagcgaatctntctaatgtatctgtctactgactaacaattctaattgcaagtgcagatgttctttctttgtctaacatacacacttgctcaaaatcatgaaaagaaacacgaactccatcaaaatcatgcactcaactcaaaataaaagcatacaaccattttcataagtcaataaaagtgcttcactgtcatatcattgaaaaccaagttaaactgttcaaaatgcttcaggatgagcaaactaactacccataaataaaactagcagtgtatataaatataaaagaaatgttatattaaaaccataattaaaataataataaaccaaaaagcaaaaagtgtcatcaggaatcaaaattcctgtgactggtcttgggtatcctgtgtttgaacatactcctcatctgtcagatgcaatactggag

SEQ ID NO: 145462 - DNA, 438 bp, Glycine max
  unsure (1)..(438): unsure at all n locations
ntatcttctttangaatcttcttaggaagcttcttatgaggtgaacttaattatgagaggggtatgtgtagctaagctctagcttctcaaggaagttntctcaaagaaacttctaatgacgtttctcaacaaagttctcaaggaagctacctagtctataaatagaagcatgtgtaacacttattgtaactttgatgaatgagagtcttgtgagacacaactcanagttcaacttctctccttttatcttccttcaatttcgtgctcccccctctctctttttctccctctttcttttcctccattgaagcatcctctccaagcttcttatacaaggctcatcttggtggtgaagactactttttcatggcttattccctaatggatggcgccgcctcatacctcttctcctttgtcttccgctgcatctcgagggtg

SEQ ID NO: 145463 - DNA, 309 bp, Glycine max
ttacggacctattaaactaagcttttatccaggctcatcttggtggtgaagctccttcttttatggcttattccttaatggatggcgcctcctttcacctctattcctttgtcttccgctacatctccatggtggaaaatcccattaaaggcgccccattgaagctcaaagatccagcctccatagaagccccacaagcaagtttccatcataatgtccacgtctttagagggctacacgcccatgccttcagaggactacacgccctcgccttatgaggactacacatcctcacctttagaggactat

SEQ ID NO: 145464 - DNA, 428 bp, Glycine max
tagcttgctaacccatggaagctcctaatatctcccacacttcttgaggtgggccattcttggatggccctgattttcccagagtccacttggaccccatttctaccaactacaaaccctaagagaactatattatctacgcaaaaggtacacttctctatatttgcatagagggtgttattcctaaggactgaaagaacttgtctgagatgacctaactgatcatctaggctcctactgtacacgaaaatatcatcataataaaaaactacaaatctacctatgaaatcccttaagacatgatgcataagcctcataaacgtgtttggtgcattagtaagcccaaaaggcatcactatccattcatacaaaccaagcttggtcttgaaagcggttttccactcatcaccctttgtcatactgatttg

SEQ ID NO: 145465 - DNA, 353 bp, Glycine max
  unsure (1)..(353): unsure at all n locations
tcttattttcngatgatgcaaatgggtatgtagctaccttattcactcctctaatgactatggcatcatttctggcgctaaactgctgggagttggaagccatcttctcaattaaaattctgcttcagccgactcatgtctccaagggctccaccactggcagcatctatcatacttctctccatattactgagtccttcataaaaatattggagaagaaactgttctgaaatctgatggtgggggcaactggcacatattttcttaaatctctcccagtactcatgcaggctctctccactgagttgtctaatacctgagatatccttcctgatggctgtggtcctggaagc

SEQ ID NO: 145466 - DNA, 311 bp, Glycine max
  unsure (1)..(311): unsure at all n locations
tcagaagattagatttcttagagagagtgattctcctaaattcttgagagattcaagaacaccctggctgtatcaaaagactttcacaacctttgagtgtagccctcgctggaaagagtgattctttccttcctatcatctgcagcccttgttctttcaaaccacaattccagagaatccacctctgcccaaaattatctcgtgaccataactcccatttcacacactcaaattaagagattcttgagcctaaattgaatctcaaaacgagaccttccacctcggtnaggaatcacctcatttggagccct

SEQ ID NO: 145467 - DNA, 410 bp, Glycine max
accatgctatgagctcgcgactgagccctctcttcccttcgcagcttgagttcactatcgctaccccacagagctccgcgaaatttattgcgggcatactcttccttgcgagccctcttggtctctagttcaaaggcccttgaggtagttgcattctcttcccgtatcccggcacactccttccgaatgtgtgtagcggccaacttgaacttctctttggcaagtttcgcctttcctaactcgctattgagagcttggacttcttcagcctctttcggagcttcaaaactctcttcgctgacgacttttaacttggcgagccaatctcaacctcgtatatgaactttcagccattcgtgggacccaccaatgatgccattacgaatgcccctaagctcttgatctttcct

SEQ ID NO: 145468 - DNA, 376 bp, Glycine max
  unsure (1)..(376): unsure at all n locations
ctttaacaagctttgaactatattcttggccttcatttaactggctttgggcttggcggccacgctcaacaaagtactttcgacacctactgtacgttgatttcaccaatgccgntatgggaatgtagcgacaatcctttaaaaccttattgatacattctgagaagttcgntgtcatgtgccatatcgacgtccttctctatctgaagccatcgnccatttttcttttgagatgcgatcaatccatgttgctatggctggactcacttcacgaaatttttctaaatttttatcaaaaatgtgcttgcaaagagtataggctgcataaaatcagntatgaataacaatctaaaggataaatgagagtaaaataaac

SEQ ID NO: 145469 - DNA, 421 bp, Glycine max
  unsure (1)..(421): unsure at all n locations
tagaaatactaagcttatcaaagccttttatagggagaaacaagctctaatagctaggtattaaaagctaagnncatttctagtttcaaatggattcaccagatgaataacggaccccgcactattcagaaaggctcaaaaaggaaaccttcttattattcatatctatgnagatgacataatctttggtgcaacctcaaaaaggatgtgaaaagagtttctgagttaatgataagggggttcgaaacgagtatgaaaggtgagctaaagnttctcctaagacttcaaatcattcagaaagttcatgggatttttatccatcaagagaaatatatgaagccccttctaaaaaggttcagaatggatgatagccaacctatggcaacccctatgcatcgntccacaatcgntgacaaagatg

SEQ ID NO: 145470 - DNA, 405 bp, Glycine max
  unsure (1)..(405): unsure at all n locations
tgaagcatgccagctaggnccaagacatgattaagctcgtttcgttcactagtctaagggaataaagactagaggattcttcaaagcaatctatagattagtccttctttaggagaatacagattagctcttacacattgcaatattgctcatatgactctacatgatcaataaagattctgcctcagatctatgcataaaaaagagattttacataagagcttagggcaaattcaggaaaaagaatgtcttaacactatcgagaactaacatgagaatacaaattttcatattctaggagaagaaaatataaatatttctcacacataaaacattccttaaaatattaatagatgaatagaggaaaaaaacaatcttgccattgttgtacgtgagaataaactt

SEQ ID NO: 145471 - DNA, 336 bp, Glycine max
  unsure (1)..(336): unsure at all n locations
aacactgatagacttccacttcacagcactgcactaaggccacaccactccactcctcagcacatactccacactttccacagnngaattacaacacctcatagcacgccacatcgacatttcatttatcttccctggccacatgcattaaactctcatcacactaagaggccatgatccaatgtgaaataaataaaagccttcccaagcataaaatagatttccactactccaactttgngcctcaccaaaagaatcaaattatcaaaagagggggactaacctatacttttaggatatagatcaaagaactaaagagatattaatatgaaaatc

SEQ ID NO: 145472 - DNA, 187 bp, Glycine max
  unsure (1)..(187): unsure at all n locations
aacataatccaaccgctctgccataagcatgattcccaacaaacttagaccaaagatccaaccctgcagnccaccttcacatagtaatataacatagttaatcaaaagtgccagaaagttaagaatgttatgatatgaacaataccacccacatgaggaccaatncatatctgcacaagaattgcca

SEQ ID NO: 145473 - DNA, 317 bp, Glycine max
  unsure (1)..(317): unsure at all n locations
gcttgccagcatataagatagcagttggttggcaaaagatcatnanctcttctggtagagagaatgcntncaagatggagatgcacattttttctttctattttttgacagatacaaagctgatggaaatggtgcatccctgcatccttcttccaaagagacattgntaattaagagggtggaggtggaatgatctagtgtatacaacaaaatttatatacacaaactacttttgcctttagataataagcattcatattctttaattaggagacacaaaacaagatctcggacatcctgagctagaaaaaaaccaa

SEQ ID NO: 145474 - DNA, 438 bp, Glycine max
  unsure (1)..(438): unsure at all n locations
tagaatanntaagctagaggcaattcttctagacttggagagataacatactattctcttgaacccttagctcccactctcttgtcatgccgagacttcgaaacctcaacaagtttagccttttccatgtaatcgaaacaaaactcaatactcatccacaatgacctttcaataatagaagctcaagatgagagattctttgtataccatttaagatcttcatgtatctctcaatagggtacatccaccacaaataaacgggatcacaacatctaatttccctcaccagatgaacaattaagtgaaccatgatgtcnaaaaatgaaagaggaaaatacatctccaactgacacaagataatagtagnctcgttttccagctcatccaacttgagaggatcaatgactntgctacatatgacattgaagaagaaacata

SEQ ID NO: 145475 - DNA, 388 bp, Glycine max
  unsure (1)..(388): unsure at all n locations
ctttacatgccctctcccttgagacatttgatcgggagtaacttgataggtgcatctcaggacatttgatattagntttgcattgngcatcatcatagagtgtgagaaagaaattgtctaagctagataaatttctccaaaggcagaaactctatgttttaatcgattacagagctgtcataattgattacaacaagtagttcgaagcttaaagagctaagccttgtataggnttaatttattacactattagtagagacaatgactgattttttcaagagtctctgctttaatcgattgccagatgtattaatcgattacttctctcttgcttaattgntcagaagtgaacaataacactttaatcgattactcaaggcatctaatc

SEQ ID NO: 145476 - DNA, 418 bp, Glycine max
  unsure (1)..(418): unsure at all n locations
agatactcagctntacctgtatttnatcgagaattaatcaaatgagattgtttatattggattagatttggattattattgtactttccatttgnatgatgtttttacttgncaaacattttagtaaactgaagatgaaattttggtagaagatgatacatgaaacttcatgaaatgcaaaaaataagaaggcaaaaacttcattcaaatacaatcataagttgtttttatttttggcttcattcacaccaaattgatctcaaatttgaggacaattacttttgttggtccctttatgcttgtattggctacacgtttgtttacattgagattttatccagatcatttcgntccttatgggcataaaattntatttacctttgagacataatttggatgcatatgaaacaataataaa

SEQ ID NO: 145477 - DNA, 250 bp, Glycine max
agctaggcactatcaacactataaagcaaattcccataataaagctaggaggcagaagaatcagagtcttgtgctgccaccgcttctccttcattctcctccactttctcttcttcaactaaaccagcaccatcatcatccacaacaacaacagcctcttcttgagcaacagcagcagaaattctaagccccacaacttgtgcgaattaatggacaaaggttccaccaagtgtgacccaaacatgccaca

SEQ ID NO: 145478 - DNA, 392 bp, Glycine max
  unsure (1)..(392): unsure at all n locations
ntaatcgcgaaacggaaccggtagccctaaacacatcttctccatttgattnncccatnnnacaaatgggcggcaacgatcgttgttttttccaacaacttgcgttcggtgcgaaagtagtttcactttcgcaccctagacaccgtcgnaattctaatataaacaattcttaagtaattaactttgacattagatagacattttaattattataacaaagatttaatgcaaattatttctttgggaaataaattttaaataaaattatttttttcaaaattatttcacatgaacataaacagcagaagagtcataccatatgtaatttttttgggaattaagattataatgtntgaactatctattaactcaactcattacttgactagatg

SEQ ID NO: 145479 - DNA, 414 bp, Glycine max
  unsure (1)..(414): unsure at all n locations
acctgcggcatgcagctagaatcaattgaacggatacgtgattcttctttgcaagctacagacacttgagtaatcaattcatgatcagcttgcaatcaatgaatatagagattgttaactccataagaaattttctaactttagaaactgttcttcttactcctacatgatgatataagatgcacatgtgaaatgatagagactaagatgcaacacataatacaacaatcaatacaaatatcactcaagagagttgggcatgtagaagacaagacttcttcaagcttcaagatcaagtcttcgagttgctcccattatctctaacagntaggagaacgtatatcgagaaaaattnactctcattttcataagcaaattaacgagagtttcatttaaaaaacattgaaatttatg

SEQ ID NO: 145480 - DNA, 198 bp, Glycine max
  unsure (1)..(198): unsure at all n locations
cgtggctaccagtgggacttcgaaaattcaaggttgggtggacttctttctctcttgattctcgagggtatggggttttgggagatatgataggtagttctgttagatgtctgcttcatgatggctaccgtgaagactcttgttgaaagcctgntgaaattgccatgccaggatgaattaaacatacccattcctgtt

SEQ ID NO: 145481 - DNA, 420 bp, Glycine max
  unsure (1)..(420): unsure at all n locations
nctaaaacgntnnttgcgagagaaatctactaataagnnatataatacnnnnnnnnattagattgcatgtatgaaattaattncattaggtatcattaacagacaaattcaaggtgtgaataattaaaatcaacgccatgtgataaaatttggaagatgaactagagtatattnaaagaattcatttataataacttatctacatcttaattgaacttattttatgagattaatacttgngtaactatttaagaaaacctaaaaaagtaattataatatgtntataagtcattttcagcttatatattccaaaaaactatntaaaataacccatatgaaaataattgaatcatgcatattttctcttcattataaaacatccatatataaatgnnatcatataaatactattcaacaaat

SEQ ID NO: 145482 - DNA, 303 bp, Glycine max
  unsure (1)..(303): unsure at all n locations
cacagngtttatatttgggagccaatccaatccttgagtgcggactctcagccacttatgatagccgccgaagatcccattactgcttgccctaagctctctatcctttcttcatgccgcatcccatgccttgcgaactccttgagtacccttgcgttggagacactgaaaccccgtgcgatgaaaggcgagatagctttcgctgatggcactcctctcatgggagaaccatgctgtcttatggcaaagacgggattataattaatacaaccccttgttcccatcaaaggaacatttggacat

SEQ ID NO: 145483 - DNA, 331 bp, Glycine max
  unsure (1)..(331): unsure at all n locations
caattggaatagcatgagcagatgaaactttgatataaagagagctaagaatactttgaagagagaaagcaagggaaataacaatattcagttaatcacctattatgggagttagntaatggagctactcataaccaatgtgtgttacttgctatataagcaagggtcataatattgcatatgtagaatgctgaagnttgctatcaaatacagnctttcattcattcaataggtaggtctactttagaatgcattagagtgggtttaacaagataagacagagatagaattcatgagtgggggagagggagcatgctcactctatcagcta

SEQ ID NO: 145484 - DNA, 293 bp, Glycine max
  unsure (1)..(293): unsure at all n locations
taagccacttcaaagggcagcggggncttagacaaagggatcctctctccccctatctaattgtgctcagnaagagtacttttccagagatatgagcatcctcaaagatgatgccagatgtaaatttcatcccaactgagcaagtattcagctatctcatttggattttgcagatgatattatgcttctatctaaaggagatatcccttctgtgtcaactatgttagccaagcttcagcacttctgtaagggttcaaggctttccatcagctctgataaatctgacatatact

SEQ ID NO: 145485 - DNA, 245 bp, Glycine max
  unsure (1)..(245): unsure at all n locations
aatttccttcaagaaacttagctgncttgcattnttctattcattattagggagcttttttgtattctaagataatggccatatattgaatccaacagntatcggcaaaatgtgaaatggaattataaaggtgacttgatgagtagaaagaagaaagggggatagcncnggagaagntggaggncaaatccctcccactaacaataactaacaaaacaaacaattaacatttgccaatcaatttt

SEQ ID NO: 145486 - DNA, 328 bp, Glycine max
  unsure (1)..(328): unsure at all n locations
ctaactttagagataaaactcgnataaattagatcaaactctcccaatttatttttattttgcagagntataagnattttctgctaagnatagggaataaatacttagtattttcatttagagagttaataatcattttctctcaattncagctaattaagcaagctttggaaagagtagtttcaccttctcgctaagccaatctgttggcttagcaagcgttcgctcagagcaatactcctatgctaaccgcgatgaagaatccagataaagatgatgttgacaagttcgctaagcgcaccgcttcatctcactaagcgcaccgctt

SEQ ID NO: 145487 - DNA, 348 bp, Glycine max
  unsure (1)..(348): unsure at all n locations
gctagagctccttcaaccctaagagacttctcgctatattcnnanaagaggagatatcacctaaagagaagtgtatgtgcacgtcaatcctcccaggcctcagaaccgctagatcaacctcctctttagtttcgntcatcgagaacaccatcacgcgctcttctgcgcaggacgatacgagtccggccatgaagttcaacacgctcgataagctcgntgagtttgactttgacttctccggcagcaagcgatctaagtcttcgatcacgatcagagacttcgccgtcgnctgcatcagcatcaccttccaatcggcgccatcggagaacttcgaatcgtccacgtcgt

SEQ ID NO: 145488 - DNA, 418 bp, Glycine max
  unsure (1)..(418): unsure at all n locations
actaagctatgaattgctactntatttncctttctctttgagagatgttttctctcccagcgaaggagaccctatgagcttttgaacctatttttagagagagatcttgtttaagtccttatcccctttttttttttgtacttagtgncatcttcaaaccttttcttgaaattttttccttgacacttgattttcatggagaggctaactttgaagatggagtgtggaagttgaaatcccagctgagaactcaaatgaaaaatccataaacatgtgttcgagtctagagggccaatttcatacaagtagaattatcaaaacccaacttggaggccattacaagggattactatctcaaaactcaaacctagcttgttcttctttagattctgccatcatcgcaacatccaaaaagttg

SEQ ID NO: 145489 - DNA, 406 bp, Glycine max
  unsure (1)..(406): unsure at all n locations
gcagctgttcgattcattctatgtacccgtgtgtggccacatagagtgncgagtatttntattctcgcttcatttactttctataccccctcttgacatgcttaagccattctatttaagacatttctcgcttaatctaaaaataaaataaacttccaccgatcgttagaatagtattatccgntaactgcggctaaaatgaattccgaccgctcggacgtgccgnaaccacattggaaatcaaaaagaggtagaataataatataataatcaacaataatatcttttatgaaaataaagcggataatcaatcggatgagcttctcttagggatttctcattcttaatcgaattgactaataactaaagagaaactaaagctaatatcaactcgcctagtcaagct

SEQ ID NO: 145490 - DNA, 381 bp, Glycine max
  unsure (1)..(381): unsure at all n locations
atgctttactcagatgtacgatagagcactgantatatcgagatgctccaaattgaaagtagnagctcctagcaaatatcaaccataataactttttactcggatgtccganagagtcccgtagtatatcgtgaagctcgaaattgaaaacataaagtctgagctaattcaaacgacaataactttctactcagatgtccgattgagtcccgtattatatcgagatgctccaaattgaaaatagaagctcctagcaaattcataacataataactctttactcggatgaccgattgagtcccgtagtatatctatacgctcgatatttaatatagaagctctgagcaaattcaaacgacattaacttttttctcggatgta

SEQ ID NO: 145491 - DNA, 318 bp, Glycine max
  unsure (1)..(318): unsure at all n locations
agaatctcgatatattacagtattctttaagacatccgggcaaaaagttattgtcgcttgaatttgctcagatcttctaatctcaattttgagcgtctcgatatattacaggacttaattggacatccgagagaaaagttattgagggttgcatctgctacgaactttcgttttcaatttcagcatctcgatatatcgcgggactcaatcggacatccgattaaaaagttattgtcgttagaatttgtcaccagcttttgatctcaattntgagagtctcgatatattacaagatctaatcggaaatccgagttaaaa

SEQ ID NO: 145492 - DNA, 102 bp, Glycine max
actgataatatgtagccaattactaggtatctaagtttacccctagatctgtaaaattacatatgatcatgtgattccgatagaaacttacttgatcgtatc

SEQ ID NO: 145493 - DNA, 408 bp, Glycine max
  unsure (1)..(408): unsure at all n locations
acccagcttgagaaatcntagcaaatcgctagagatgccactatcgcttctggactacacatgagaaccctcttagatgtaagagatgagtttatcacaatagaggtttttattaacatgtgtaaggatctttagaggatcaaattgggatctattttgggatggttactgtattagaattctgcctttatgattataattatgagatattatgttagacaggccaatagatgctttgatgcgaattggntgataaaattgagagctcttggagttttcgnatttttgacctatgattttgattcatttgattttgatatgattatgagaaattgtttaaagggttnaatcatatgaacataacatattaatattattactgggtgacatgtatatgatgcatgagac

SEQ ID NO: 145494 - DNA, 220 bp, Glycine max
tatcgagacgctcgaaatagaactacggatgctctcgagaaatacaaatgtgcataacttgtcactcggaagtctgattcaagcgcataatatatcgagaccctcaaaacttgacaacagaagctctcgataaataccaatggtcataacttttcactgggatagccgattcaagcgcataatacatcgagacgctccaaattgtactacggaagctctc

SEQ ID NO: 145495 - DNA, 365 bp, Glycine max
  unsure (1)..(365): unsure at all n locations
agcctcatagaagtccatgaaagatttagcagccttatgttctagttcctctccggagtatgacagncaccgcttcaagatcgctgtacaccagcagctcttctatgccatcaaaggatggncgnttctccgggagcgacgcgtccagctcaaggacgacgagtatactgatttccaggaagaaataaggcgccggcgggggcatcactggttactcccatggccaagtttgatccagaaatagtccttgagttttatgccaatgctaggccaacagaagaaggcgtgcgtgacatgagatcctgagtaaagggtcagaggatcccgtttgatgccgacgctatcggccaactcctaagatatcc

SEQ ID NO: 145496 - DNA, 480 bp, Glycine max
  unsure (1)..(480): unsure at all n locations
ctcatccgacaggatccttaagcacctgaagcatgcnagctagagcgaatcatatcactcctgcattntatttctagcatgcattctttctttctttacccactcctcacgttaggttttttaaggaaaaacaccataactaaacgcgccacaaagcatccctatcgcaccagatccaaatctagatcgatgggtgatcaagaagagacacaggaacagatgatagccgacatgtcagctctgaaagaacagatggcttccatgatggaggccatgttaagaatgaggcagctcatggagaaaaacgtggccaccgctgccgctgccgaagcagacccaactctctatggaaccgcgcgccatcctccctcatacatatgaagacagagaaagaacacgctggggcacgacagcaaccctcatctgggatacaaccgagcggcttacccttatggattgccagccaactactcaccactt

SEQ ID NO: 145497 - DNA, 410 bp, Glycine max
  unsure (1)..(410): unsure at all n locations
ttgcagatttggagggcaccggcgaaaagatcaaagtgtttctataaagatgcaaatatgttcatccagctntgatgaatgcaaaaactggggcacatgaagaggatgagaatgaaggagaaaccattgctatgtctgccattcctacacagncaaatttcccataagcccaacaaagtcattactcagccaataacagcccctctcacctaatcatctacaaaagccatccccaaatcagccacaaaggctgcctgctcaccacacgcccaatgcctaaacaccacctatagcacaaacccaaaaagaattttgtagaagaaagcctgtaagattcaccccaaattccggagtcatatgctaacttgctcccatatctacttgataatgcaatgctagccataacccct

SEQ ID NO: 145498 - DNA, 207 bp, Glycine max
taaaagccataactcttctaatgggtgtcttgaccagacatgaagagtctataaaagcaaagctttggtttgcattcaaaaatcttgaatactcttccaatcaatctcttacaatactttataagccctgaatctctttgaacttcttattcttctttgcaccacaagccttctaaagctttctggtgtttctaaaccttgaatacg

SEQ ID NO: 145499 - DNA, 337 bp, Glycine max
  unsure (1)..(337): unsure at all n locations
aaggatgccccacattatttccatgacacaaatgcaaaaatgatgatctggaaattgtatgcaggactgagcatgcatgcacctatgtggacgctcaagcgtcaaatggtcatggtcatctctatcttaaatcaacccaatgcttccaaaatatgttcttttatcaatatgagcattcatccgagtccatttcgggcgtgagggaaaatctncacaacattcacccttcaggagtatacacattttttcaaaaactagctatgatcagtgaatttttccaaagaaaagatggaaggcatctctcttcaaaagcatgttggcatttcagctcgacaac

SEQ ID NO: 145500 - DNA, 186 bp, Glycine max
taaacctcttcaaatttgcatggctgagaagttcctctacttgctcttcaccaccttcgaaatcgaaacttttcttggtttcagaactaagtgagagtcagtgacttcattgctggggaatgaagaccaacagcgacagcaacatacccatttcagcaaagcctcaaactttccctcacaaagagt

SEQ ID NO: 145501 - DNA, 270 bp, Glycine max
  unsure (1)..(270): unsure at all n locations
ttcgagagacacctattgaagataagatgacaaaaaatggttaagatgctttgggcacatgcaaaggccgttagatgcattggagaagaaagaaattgnatggtttttaaccctgtgaaaaagggtagatggaggccaagaaagacgttagaggaaattaatagaagatatttcatgctggctaatattcttgataattggtttttaaccaagtccaatgacatgtgatccttgaaccaacctcacctagagagataagagctataatat

SEQ ID NO: 145502 - DNA, 341 bp, Glycine max
  unsure (1)..(341): unsure at all n locations
tttattaaggctcccatccaataatatctatatgtnnatctaaaatgtagcaacacatcaatagaggctatttatcattaaaaacttagtccaatgttaggggtgatnatcagntcttaatcataattaagcaaacagatttcagttgaatcttttttttccagntntaaaaacttagtagatctataatatttctttaaaaaatccactaaaataatagacccttcacgaagttgtgatgagaagatttgatgtgaaggcacaacaaataagacgcaaaatattttaattgagctcaaatattatgacatgaatatacttccttctctcagcacacaccg

SEQ ID NO: 145503 - DNA, 223 bp, Glycine max
  unsure (1)..(223): unsure at all n locations
ttcgagcgtctcgatatgttatgcccctgaatcttgcctncgtgcgaaaagatctgaccatttgaatagctgaagatcttccatcgttcaatgtcgagcgtccctatatattatacgccgaaactggaccctcgagtttaaacttatgaccattcgaatctgtcgagatcttgcattgttgaatttcgacatgtcgatatattctgcgcctgaatcggaactc

SEQ ID NO: 145504 - DNA, 282 bp, Glycine max
  unsure (1)..(282): unsure at all n locations
agaaagagagagaggggatcacgacatcgaaagaagaacaatggagagaagctgaactccgatgtagagcccacaagactctcattcatcatagngacaactagcgttacacatgcttctatttatagactaagcagctgcccagagaagcttccttgagaaaacacccttgagaagcccctccgagacaacttccctgagaagctagagctcagctacacacacccttctaataactatgctcacctacttgacaagcttccttgagaagattcctaaaga

SEQ ID NO: 145505 - DNA, 420 bp, Glycine max
  unsure (1)..(420): unsure at all n locations
aaagcccataccactatcttttgtagatttattcattctctttccaagaaatagagagccatcctttcccagcttcaccatcattccgaataaatttacttaggaccctctccaactcatcacaagttgagttaagaatagagatagattgcatagtatatgcatgaatgacttgaataactgattgagcaagagaatcctccttacaaaatctaagtatttagccttccatgacgccaatctttggtttgccttctgcagaatatgatggtattgctcatttttctccttcctatggagcaaaagaaagcccaggtattgccctagatcataagactctcaagaatactagaggtcttatcatagctcaccctaggacccgaggcattagagaattcctncaaacaatctagaatgacc

SEQ ID NO: 145506 - DNA, 254 bp, Glycine max
cagcaatttctaggcctcacctgcttgcttcaaagcactcgtgagacacaccaaagagctaagattgtcgctttctggacctttatcaattgactaccattgaccatagccttagcgaatgacccacacccacattgagttacagagcatcccacacataggtgatctaagatctctagctggtgaacccaatccctatcgtccacccctcttccctgggttatctctcttaacccttcacagcaaagctgatt

SEQ ID NO: 145507 - DNA, 373 bp, Glycine max
  unsure (1)..(373): unsure at all n locations
ggatgaaacataaccatactgaagcnccattagtgcttntatttcatatatngactagcaacattctaaactctagtttccacaacttacttgcttagcttctaaaaattaggtttctaacatatttacataattctaagaaaacaaattatgaaaatataacctgttacttatagagtataatgtcaaaaattttaaatttaggcatgtatacaagagcatctttagaagagagctctttttttcttttataaaaaaagagcaaagctgtatttaaaaaaaaattcaaagaaaaaaactcacatatatacgtgatcattgatcgaagccttactatcaaaccataaattaagtgaatcattcttacacccta

SEQ ID NO: 145508 - DNA, 427 bp, Glycine max
  unsure (1)..(427): unsure at all n locations
ncacacgttccattctgcatagcttctgtcagaaccttctggatacgctggggaggacctttcccttcgagggctcgcactccttgcttcctgcacctcctttgctatagacaccccttcccttacatttcccgtaacagaatccaaaatattaacatgcttggatactcatggaaaacccgntnaacgggaaaaaaatataattttctagacatgaacgtagaagagtaaagagagntacttttgaaaaaaacgttgttacactgaacaaaacattttttcaaacacgcgttaagacattaagtctagaaatcctttttagtcataggttatttaacttagccttcatatttaataatgagagactntttactcacacatgcgctccaaacaatagccggaatgagcctaagcatgatgggtatgt

SEQ ID NO: 145509 - DNA, 345 bp, Glycine max
  unsure (1)..(345): unsure at all n locations
agcttncttaagatagattcgtagagaagctagagcttatctacacatacctcgctaatagctaagctcaccgncttgagatgagaagctagagctcatctacacaccccgtataatagctaagctcacccccatgacaaaaaacatgaaaataaaaaaaaaagagccttattacaaagacaactcanaatgccccgaaatacagggctaataccctatactactagaatggccaaaatacaaggccttgacgaaagaaaaacctattctaatattgacaaagattagcgggctcatacttagcccatgggctcgaaatccaccctaaagctcatgagaacccta

SEQ ID NO: 145510 - DNA, 420 bp, Glycine max
  unsure (1)..(420): unsure at all n locations
cctgcaaagcgacatnaggaaaggcaganntaccagagggacattactcttaaagcaaaaatggcatataacctcctgccctaaatacaaacatcaatgtaaatgtagagcaagcttatgcgcatatttccttacaaacgttctcttgcacaagacattctattaaccgaaaaaaatgcacccatatacaatcaaagcagcttcgttacctagattatttacacgtacttccaaagagtatttgttacttacatcacacacatctccttggctaaattctcatacatgcatactcaaagcattgtggggtaccaaaaattgcacatgtgcacatctatggatttctaatacctatacatacacaaacttcatgatgaatcttgactatctacacaataaagagctacatttcatagctct

SEQ ID NO: 145511 - DNA, 238 bp, Glycine max
  unsure (1)..(238): unsure at all n locations
gttatatgcaaaagaaatgaaatnactggaccaaaacatgtaggcccacctgagatgctattaatctgccagcaagataatctgtgtcgaaaatctgaagaacaagaaacccacatccctgagcccgtgacaaaatccagtccctatagctcaataggctgtcctttttgaagaaatttgaaaactcgcattgaggnttagcagagtactctaatataagcagagccccactcagctc

SEQ ID NO: 145512 - DNA, 295 bp, Glycine max
  unsure (1)..(295): unsure at all n locations
taaaagaagagatcaatcatctatatttcaatcttctctcaacatcattcaatatctttcaactctttctatagaattntctgattcttttactcttcatctttctaaaagagtcattcaaaactttctcttcctagaaaactcctttgttaaaaacttgagctattcatctttttcattctcttctccctttgccaaaagaatgaaagactaaccgcctgagatatcttttgtttcccccttacaaagattcaaaggactaaccacctgaaaattctttgtcccaacacattgg

SEQ ID NO: 145513 - DNA, 249 bp, Glycine max
tcacaagcgattatcctcaaatttcagccagcccgcatcaattagaccttgcaccttatagcttaagagcctacaatgctcaatggaatgccccagagcccctctatgataagcacatgtagcgttcgagtcggattctcagaaaaatggaaggtgaagaaccctggctggagttatggcaaccattgaattatcgagtagatatgggagcaattcatcataagacactggaattggagagaatcctac

SEQ ID NO: 145514 - DNA, 427 bp, Glycine max
  unsure (1)..(427): unsure at all n locations
actaagcttctacctaaccactacccgagcgatctctacctaagaccctatcttagatatgagaacctncgntcactccctctcactcacactctcgggtttacaattaagtcaaagacacaccagagatcaactctgaacaaaagagatcaactctacacactagagatcaactctacacactagagatcaactctacacacataggtccacacttgatgttaaggtagcatcaaggaggctcacaaaagactcaagtcccaaaaactcactaactaactcttcaatcccggacttggnacagaactcgtgcagcctncatgattatatagcaatctgcgtttctgggctagaacttcttgatgctggaggagatctatcttcttctgaanaaatctgcagnnaaagaactaaaagataacttttg

SEQ ID NO: 145515 - DNA, 377 bp, Glycine max
  unsure (1)..(377): unsure at all n locations
aacgaatccctcttattactagctatctagaattccgtagttcctgaacgtacaaccttcaaatagtagctcagtcccctctttcttttctagaaaaatgaaaatcaaaagctgccaaaacatggataaagtcctaagaaaatcaatatcaaagaacacatggatgaaatctcaattaagaagcacaactacctatctttcagagaccttagaataatatagataggctccttatgcggaggggntttgcttaataatattatacttgtgccttccaaaaaaaacttatagactgatcatctttccattaatccaatnctagatgttattggataaaagatcatgggaactccacctgcctccactcctgctcctcc

SEQ ID NO: 145516 - DNA, 398 bp, Glycine max
  unsure (1)..(398): unsure at all n locations
cccatcacatgtagtactaagaggcagtctggcgatggagcacaacaagttttccacattcacaatgcgcgcataaacccaccatcccctgtggcccacctccaactgagctcacgtactcccacgtagcccataccctcggttctctcaacactgggtccccatcaatcctcccaagcttncacacatccaagcaacacaacattcaaacagcacaagctatcacagccaagcaaaacagagcaaaggcagaaaactctgctcaacacaccaaccaaaatcacagcttttctcacttaaagaccccatgaataattccttcgatccaattcactaaccgntggatcgactccaaaattttactagaagtctacagagcataagcctacattgtgacc

SEQ ID NO: 145517 - DNA, 452 bp, Glycine max
  unsure (1)..(452): unsure at all n locations
gctagaatataatgaagacaatattaactattaactcagatgtctgatagagtagccgaatatatcgagaagctggtaatggaatacggaagctcgtataanatggaaatcgcaataactattaactcagatgaccgattgagtcccgtaatatatcgagacgctcgaaatagacaacagaagctctgagcaaattcaaacgacaattagatctaactcggatgtcggattgagtcatttaatgatcctattgaggaccagcctatatcgagacgcatgactttgacaatagaagctctcagcaaattcagacaacgataacttgttactcagctgcccgaatgagttgtggcatatatgaagacgctcgaaattgagtatggaagctctgagcacattcaaatgacaataactntntcctcagatgtacgantgatgcccataatatatcg

SEQ ID NO: 145518 - DNA, 400 bp, Glycine max
  unsure (1)..(400): unsure at all n locations
tgatttatgaattgatgttagctntagtttcactttggttatttgtcaattcgattaagaaagaaaatctcacagaaaagtgtccgatagatcattcttattattctatttaaagatatcccnttattattatatcattattccgcctctttttggttttaaacgcggctacaacgtgaaagatcggntggattttattctcccagaaattaaaagatgttacaactcaaatgatcggaggaaattcatttcattttatcattaggccagaaaatgacttaaataaatgactaaagcacgtccaaagtgggtccggaaagtaaatgaaataaaaataaaagcacgcgaaacaaatcgggaccactcagaggacataaaaagaattgaaaggttcgatttc

SEQ ID NO: 145519 - DNA, 348 bp, Glycine max
  unsure (1)..(348): unsure at all n locations
catacgagcacgaactcattagagcattcaaacaagacaaactatataacattttgttagtcggcatatcatcaagttaattgaaaagtaagttccaaccaacttaatctaaaagataatggnttagatgttacattgttcatgattgaagagcttagatctttaaagatggaagncagaatttttctttttgactaatcttcttgagagatgttctcatcgctctcatatgccttggatagatagttgatctccttctccgaaccatcagatgaggcattgtcatcctaaacaatatacgctcccttggatcttctttcttcatagcttttcttctcattcttttct

SEQ ID NO: 145520 - DNA, 418 bp, Glycine max
  unsure (1)..(418): unsure at all n locations
atgaatntgnctgacaaaagagtccacatttccatcatctttgattatgagctncattgcaacattcagattatttgtcattgtacccttatagaccttacctaaaatagaaatccattaataagaattcgntatacatacagattcaatcaagcttggacaatttaaataaataagtggatgtcttcaattggttagcaaggcaaagaaccaagattttcagnttttaactctaggaacacttatccaattccatgttatgctagagagatcctgtatctgcattgatagtaagtacctaaagtcacatgcgctaataggctgattacatctttcacaatgccatgtcccatctgcgttattagtcacctttttgtacattgtctatcccctatcttgagatggcaccctggataac

SEQ ID NO: 145521 - DNA, 293 bp, Glycine max
aataattatcattatctctatcaatcaatctttcaatatctatcatctctttcaacagaactctctggttgcatttctcttcatctttctaagagatttttatcaacactgtctcttccaagaaaagatctgtattcaaaaacttgagctattcatctttttcattctcttgtctcttttccaaaaagaattcaagaaagactaatcgcctaaattctttctgagtctctcttctcccttttccaaaagaacaaaagactaaccgccagaattcttttagtgctcccttttcc

SEQ ID NO: 145522 - DNA, 236 bp, Glycine max
  unsure (1)..(236): unsure at all n locations
acttgaatttggttgccagacctcaaggttatgacactcacatttttatgattctgctcagctagagaaggcaatttgtcagaattttgggactgagcttgattaatatagtagtcatctgccccatctgatttgtcagactctgaatggaagctcctgtctcttactaaaattgcatattctagatggncatttgcctcactaactcttctaaagaaagttgaagaagagcctca

SEQ ID NO: 145523 - DNA, 235 bp, Glycine max
ggggtgcctggaaacaaccaacagagcattggaactttttaatggatttttgaccatgtaagagcagtgagaataataacttgggagtgagaatagcaactcccattcttatgtagaggcctttaagcctccctttataaaatagacactttagtgtaaggctgttgataaactattcacaattttctaaacagaacatatgaaattcatttcttaaatatagattagttcaaat

SEQ ID NO: 145524 - DNA, 374 bp, Glycine max
  unsure (1)..(374): unsure at all n locations
taaaactcagctttatgtatgcnncagctattaggatccatcctcttaacaagggacaaggattcaatcttcctcaacaaattctggcaagaattaatggcattctaaggagagccatagcaactatctaatgcctatcaccctcagacagatggacaaactgaaggagtcaatatagttttagaaacctattagaagagaagtttgnagattctcctcaacaatggnctaagaggntacctttggcagaatggaggtacaataccactttccactcagctattcagactacaccgtatgaagtagtatattgncagccccctcctattcatctacactatttgcctggagaatcaaaagagcaattggaggat

SEQ ID NO: 145525 - DNA, 151 bp, Glycine max
  unsure (1)..(151): unsure at all n locations
aaatagatttagatatattnngagaccatataagagaataattggtcactttagattcgcataaaatcngatttaatttgtaattgtgacaaaaaatattgatcgaatgtctcgcctttaaaaataaaggataaaaaatagttaaatgcca

SEQ ID NO: 145526 - DNA, 412 bp, Glycine max
  unsure (1)..(412): unsure at all n locations
gatagatcccagccacttctgtgtctttgctatatnatgnnntgcaaggccaatagcctaaaagaaattcacagagatgaatagagagcactcgnagacaacatagatatgcacaacctctgaaaaataatgcagctgtgcagagaatgatngtacgaaagacataccagagatctcactgcattattatggcagntggatcttctgaaagaacggcagctaaaaaggatctttccagcatagcatttttaacaaatggatgctctagaagttgagaagctgatggacgatttagaggattcctttgcaaacaaagcctgacaaaatcttttccatctggaatttaagaagctccttgctattcccaatcttaaacaaagcagcaaccttgagacactgtagtgaaaacagc

SEQ ID NO: 145527 - DNA, 299 bp, Glycine max
  unsure (1)..(299): unsure at all n locations
aagtcattatcaaaagagaagatggagagaggactatccctcatgaaccaccctgataaactctatgaaagatagtgacttggcaagcaattcagaatgagtnttccaaaagagtttaactcaagagcttagataccactcgagctaatacatgttgacgtctgtgggccaatcaagccatgctcactagataaaaataactatttcctccttttcattggttatttctcaagataaacatgagtctattccttaaagaatatatcaaaagtcttttccgccttcaagaagttcagagc

SEQ ID NO: 145528 - DNA, 335 bp, Glycine max
acactagaggctagagaaatcatcactgcgtaacgcaaattggcaaagctctacactatggctagaacccccactgcttgtcttgcattagctaagtggccaacaaagaaaagtagaatctcattacaccaccactcaaagcacgtgttgatgcagcatgatccactaagcttgattagcctaatccaatccatcatgttctgatcccaccaccctcctttctttcacaacaagccctcacttcttctctcaagaaccacaacataaatcgccagcataaccataaccatgagatcggttatccataccgccattgcaacttctccgagtcccat

SEQ ID NO: 145529 - DNA, 243 bp, Glycine max
  unsure (1)..(243): unsure at all n locations
aacacaaacacaacgtatggacaccagttttgtctaactaatcccacattcaacatcaacttatcacaccatgatgataatagagagtatttctatagtctcactttccaatacaactgaacgctggattggcgtncatccaattttaagacatacatacaaacactcttaagttagcaagacagctcatttgcctctcaatgagagatctgatagnacggnccactcggcttccacatattc

SEQ ID NO: 145530 - DNA, 416 bp, Glycine max
  unsure (1)..(416): unsure at all n locations
cctgcaagcgtgcaagccagctctaaactacatatgaaggagtatttactgggtcgaagccatatgccatttttgctcaaagagtagatgcccactaggaaaatcaactttccaaatgtttgccttcgcaagaatggccccgaagatactagcctcaaagaagtccaggaaagacaacgcggccgaaagaactagttccgctccagagtacgacagncaccgctttaagagcgctgnacaccagcagcgcttcgaagccatcaaaggatggtcgtttctccgggagcgacgcgtccagctcaaggacgacgagtatactgattttcaagaagaaataaggcaccggcggngggcaccactagttacctctatggccaagtttgatccagaaatagtccttgagttgatgcccatgc

SEQ ID NO: 145531 - DNA, 388 bp, Glycine max
  unsure (1)..(388): unsure at all n locations
ccttttattaaatcttctctagattcaaatattacctcttcaccatcaaagnagacaatgtcatcaagctaaagatcctcatcatctaaacttgcgtccaatgctggntcaactttactagaggatgcatcaaccatcaaatactggnaggcttcttcctcatagncctcatcagacgatgaatcatccaagtcctcgcaagtgctcatgaagcttttctttaggacttgaagaatttcttattcttatcctttgacttttcaaaggtaagacattatgacttaaagagtcctagcttcttgcactcataaaaaataactttactttttacttttttacagaaagatcttttggacgaactgnagaacctggaagaattcttattttt

SEQ ID NO: 145532 - DNA, 415 bp, Glycine max
  unsure (1)..(415): unsure at all n locations
aaactaagcttctatggatatgactggagnagccatattnnaatttccatgtctaacaaacagatnagagccattttgaaattttcttcaatcagaacttcttttgtatttcttgaagatttgaacagaatttagctgagtatttaggccttattgncagatataggtgaaagntttacatgttgcttcgaggctaggaaagaattggaatcttgatagaatgtttttcgntggagataagcccacaagacacattggagtaagntagcaatatccatacgttttcttgcatgtgatgaatgatttacagatgatanacaaactcgtgatatttntgagtgcgactattttttttaacccatcacgtaccttgcttatttattcccaatgtatnttttcccacattattaaaaca

SEQ ID NO: 145533 - DNA, 371 bp, Glycine max
  unsure (1)..(371): unsure at all n locations
cagccccttaagcacttctctctctttcgaatnagctgaggaaaattattcccgagaagaagatccaagccgaagtgcttccgtgagcgctccgtgatgaattacacgaagattctcgaccgttcttcaaagagtcatcgtgcgttcttccgtttcttcaatcttcaacgggcaagtacctcaaaccaagctgttcaattcactctatgtatcccgaggagagccacacttcaggttcatgtatttttattctcgntttcatttactttntatacccccttttgacgtgcttaagccatttacttaagtcatttctcgcttaatctataaataaaataatattccaccgatcgtttgaatagatcatccgt

SEQ ID NO: 145534 - DNA, 314 bp, Glycine max
  unsure (1)..(314): unsure at all n locations
ttccacatctaaagtaattagaaattttatgggaaaatagaaaaaaaggaaatgaaatcattaaccctaaagnaattacaaatcagagaagctatcaacgaccattatggaacgaatcaagatggagaaaattgtttctagagacagggaaagatgcctagtgaaagatgatatcggaagaaagagaatgaaggttaccagagagagaagaaggccatgaactgccatgctacaagtgttgagagtagttcggacatcatcgntaatgaatgtacatgcaatgatgttgcttattagctagaacttcccttgct

SEQ ID NO: 145535 - DNA, 404 bp, Glycine max
ttaatgcacctgaagctgcagctagaaacaataactgagtttctcttcattttgtgaacgagaaggaataaaacaagtactcaatcctggaaactaatttttctcagaagctatggtagatcaccattaagagaaccatgttccaccatcaaatttaaagttttccatacatttttcaaaaaaaatattaagagcatacacttttcaatctaggcctttggcaccataaacccagtaaaatattacttccataatctccattaaagctaaaataataggtgataaacaccacattaagcaatcataaaaaccagcattcccatctccaatgctccaaccgttgaaaaatctcttcaaagctttccaaaataatgcacaacttcacagatcacaaaatccaaaac

SEQ ID NO: 145536 - DNA, 402 bp, Glycine max
  unsure (1)..(402): unsure at all n locations
aaagtatattatcaaaaatatcttttcataaaaatagnnnagagtattctaataataattcttattttagatagntggaaattttttttacgataatttatttaaattactcttatataatccaactaatttttacttctctagtcattgatttataaatcataatcacaattattactgtaatggacaacaataattaataattagaaatattatactttaatagtaaatagntattaataaaaattttaaaaaatatttatatatttaaaatattttataaaaatattcataattttgnttttattccagagcatggcccacagatcacgcaatctagntactaacttactgntagagatataaaaccctttcaagacttctgctactattataaacaat

SEQ ID NO: 145537 - DNA, 298 bp, Glycine max
  unsure (1)..(298): unsure at all n locations
actctcataccttcgctcttgtccccaccacaccattggtcaatacaccaccacctcatcctttcacatcttccaaccttgcagactgcttttaaattgacatatgtcttaattttctatttaaacccattttttgctatacatataagagaatatagatatatattggattatagtntttgatataaacaatcattctactggattttttatatattcatgtatttctaccatattgactaaaggagtatctgattcatnttatatactctatcattatcaattatatattgctcta

SEQ ID NO: 145538 - DNA, 349 bp, Glycine max
  unsure (1)..(349): unsure at all n locations
ccttttgtaacaaactataaatgttagaaagcgctttgccaaaagaagaagaagaaataatactcatttcctctatctccctctcttatctctcttggctctctttgaagaagttgctgggcctcgaaaaccagctactacaacaattcacatttatatattttattcaactaactgagattagatagactttttatttgaagaaaacatttagagagagcttggatgagagaatttaaaagtatgaaaaattttaaaattttgaaaaattctaaattctaagaattttaaatacttcaatagaaattcttttattttcaaaatntatgagttggataaaaaaaattaa

SEQ ID NO: 145539 - DNA, 450 bp, Glycine max
  unsure (1)..(450): unsure at all n locations
cctgaagctgcagcagagagnagagagataatgaatattctcatgtntgancatgaccntnctgatnatccatgaccgntatcaagtaaaagtaacatcagatatacacgaagttgagtatttttcaatttttccacttgattgagagatagcacttatgcaaggtaaaatttaatgtacaaacgaattttgncataaaatacataaaataatatgaaaaatcacataaaatattatccaaattatagntgattagatatataatncgtacttgcataaaaaaattagcataataatattagatgaaagctaattttattttaccattgtggcaaatatttattaattttatatgtgtcaaatatcaagataaaagactttttaagcctatcaaattcagagagcgccttaaattaaaaagaaaacataatggagtctctttccatatta

SEQ ID NO: 145540 - DNA, 207 bp, Glycine max
  unsure (1)..(207): unsure at all n locations
tctctctatcttctctcaacatcatacaatatcctcatctctctctataagaattcactaattcattgctcttcatctttcttccagttctagctctacactccctcctccaagaagagntcgcagatcactaacttgagctattcatcctattcattcgcttctccctttgccaacagaacagacagaatctccgactaaattctt

SEQ ID NO: 145541 - DNA, 437 bp, Glycine max
  unsure (1)..(437): unsure at all n locations
agctagctgctcaacaatgtatctaatagataatctagcagataaatcaaaaggtccagatcaaataaccccaaagataactntatcaagaggcacanattcctatgataagncgnctactatctaaaattacactactgcctagntttacnaaggtccgctcttaaacttattttcagttntctaggcagnccataagccattttttcatgaatcttatatgtgaccctacattttcacacctaagaaactcatttttaaaggcaaatttttaagaaaaacaatccacaaatccataacagttagttcaatttcctgacagatttattccttaaacttatttcattcataacttttgctagaaaaaactatagagnctaacacccaaaaaaatcattnttaactagaaaatgtcaagagaaacaacatatcaaaca

SEQ ID NO: 145542 - DNA, 433 bp, Glycine max
  unsure (1)..(433): unsure at all n locations
actatagaanacctcagcttagaaggatgacatactggattnttgctgaggacttgtattcantctttgaccagattacctggtggggttcgatgctccattcttaagaatgaacaacaaacggnagnagcgtgtatgaggagtttctaagggaacaaatattcttctactaatccttcagagagggaagcaactaacatttggctatatagctcaatcaagtaaacatgaaagataaagcaatacatttggttagcattcatatgcttaattaataataatacccaatctatacttagatacataatatataaagggtattaatagataaaataaaataagtgtgtaagtggagcaaaccttatatatcaaaataataataagatattaacataggaggagcatcttcttatcattcatgcatttcacaccg

SEQ ID NO: 145543 - DNA, 417 bp, Glycine max
agcttctttaggaccttgaacaatgaatcttctcctctttcagaaccatgctatgtgctcgcgactggtccctttcttcccttcgcaacttgagttcattattgctaccccatagagctccgcgaaatttgttccggccatactcttccttgcgagccctctaggtctcttgttcaaagagctcttgcagaattgcattctcttcccgtaacccggcacactccttccgaacgtgcgtagcagccaacttgaacttctccttggcgagttttgcctttcctaactcgcttttgagagcttggacttcttcgtcctcttccggagcttcaaaactctcttcgctgacgacttttaacttggcgagccaatctaaacctcgtatgcgaactttcagccattcgaggacccaccaatgat

SEQ ID NO: 145544 - DNA, 405 bp, Glycine max
  unsure (1)..(405): unsure at all n locations
ntcaacaagagtcttcacaaataaccatcatgaaacagattactaacaaaactacccgncatatctcccaaaaccccgtacccacgaaaatcaaatgataaagatatccacccaaacctgaattttcgaagtcccactcgtagccacgcacttcacgactccaaaaatgtcctcctttcgcgatttggagcagaatgatggccaaaggttgaagctttgtttggagcttcaatggagaatgagggagaagaaaatggcnacgtgatggagagagagagctgtctgaaaaagtgtgggggctgagtgaagagagagaaaagctttttggttttaaataaaaagagtttctctttttctattattttatttaagcaatgccacatgtctccatttgagtggagcaaa

SEQ ID NO: 145545 - DNA, 436 bp, Glycine max
  unsure (1)..(436): unsure at all n locations
acctgaagctgcnagctactaactgtagatctttcaactgataatacccttaatannagaagaggatgcctgtgggactctgacatggcgcagacattgacaaaaactcatgttctcctttctggatcaagtatgacaagctggagagcaagatattctcttagcatcatacccttggatagaatagggctcgtatacccatctgggctagatcttgatgagtattcaaaccatctttcatcttgccttcaatgttaaagagcgtcagaatgacactataacanttttctctacatgcatatcatcaatacattagctaacatctagagtgaactaatacggaagctcaaacaaaatcaaccttttcttttatatgcaagncttactctcttccttctttagatctttccaatatagattcaaggcttaacccctc

SEQ ID NO: 145546 - DNA, 204 bp, Glycine max
aaatcaccattaaaggaccttattgaagctcaaagatccagcctccatagaagccccacaagcaagcctccatcatttctctcctggaatcgatcaccagaacagcagaatcgattaccaatagcgcaacattcttttcaaactgatttacaaagcagcaatcgaataccatgagcatagaatcgatgacctatgttgtaaaac

SEQ ID NO: 145547 - DNA, 389 bp, Glycine max
tctttatttcattatactgaaagctctttcattatatgaaccctaattgtattagggatactattatgatcgatatgatacctcaacccctccaaaataaaacataaagaaaccaatgtaaatctggattttttacaaaagaaattctaactttcttttgctggccaaagtcaaataagcataaaaggttgaaaaagagggcagcggagccggcagagaagctttttagagatttttacaaaatttagtttcttcccttcgtagtcttcgggtcaagagctacatattagagatctatcctctcttttttcttttcgatgcatgttcaacatcaaccaattataattttagaaatcaaatccttttacaggattaaagaaataaagaaa

SEQ ID NO: 145548 - DNA, 349 bp, Glycine max
  unsure (1)..(349): unsure at all n locations
gctttcttcccttatgaaagtggtgtggtgggatcatataaaagcgttgtaaccaaaaagctgttcctagttttatcatagaccttttcttgttgggtggaccagcaatttattgagaaaaccaagaacaaaattcagcctatgcatacacgattttatttcatagaaatagatatagattttaaacaaaatagcaaacaatgattcctaatggttagnncatttattattaaatnntaatacttattcttaaataattnaagaatttaaatacaatggaatgtcaacttactcatgtgttaaatcggcgatttttatgttgactagctgtcgatcgatggccgaatac

SEQ ID NO: 145549 - DNA, 400 bp, Glycine max
  unsure (1)..(400): unsure at all n locations
gcttcgaaaggaagagagagacctatcacttgctcattgcatggncttgaaagatgagttagctgcttgctcaaagtccaaaagaaacttgtctcagcgtttatgcgagacagagaccaacatgttagctatcattagcaagtaccaagataaacttaatctagccacggcccacgagcacaaagtggaggacgagtatgcccaagtgttcgcggaaaatgaagctagatgataggtgatcgactcggttcatcaagaggcaataatgtggatggaccaatttgctcttaccttgaacgggagtcaagaacttccccattactatccaaagccaaagcaatggcggtcacctactcctcccccgaggagatccacggacttctcggctattggcagcata

SEQ ID NO: 145550 - DNA, 386 bp, Glycine max
  unsure (1)..(386): unsure at all n locations
tttcttattcaagattcaagaatcaagataagactttatcaagataagnatgaaaaggttttttcaaaaactgagtagcacattgatttttctcaaaacatgttttaccaaagagnttttactctctgagaatcgattaccagatcgnttgaatcgattactgtagcaaaatgaatttgaaaaagttttcaaatgaatttacaatgttccaattgatttaaaaaaagctagaatcgattacaatgttttgagaatcgattactggagcctttgaacgttgaaattcaaattcaaatgtgaagagtcacatcctttcacataaaagccttgtgtaatcgattacactgatttaggaatcgattaccagagatatgttctgaatatat

SEQ ID NO: 145551 - DNA, 173 bp, Glycine max
  unsure (1)..(173): unsure at all n locations
acctgaagctgcagctgcatgggaacctgactgctatatttattgtgcctgnatcaatcagaaatccaggcctgttgactttctggccactggtgctcaatgcgaacccctgcanactggnaaatagcatcagagattagcttagcaacatgtacactcacctgtgtcaagat

SEQ ID NO: 145552 - DNA, 395 bp, Glycine max
  unsure (1)..(395): unsure at all n locations
actaggttctctatactctctttgttttacttnnggatgcctaagnccttaaagttagcttttgagaaaactatttttcaagcttttggatgatctttatgagaaacttgncttagagagcactatcttataatgagttggacaatcttttttaacaagtctattttccaagtgtttcatcataacttctttcaaaaaggcttcctctttgataaaaaaaaaggactaatntttttaatacactattcaattctcttttaatgagntctatttacttcatttacatgcatattttcaatgaaatctacctaccatttgatccttagtgctgaacatcctccaaattggaatttagacatgcactctttggtgaatatatagcctttaaaataatg

SEQ ID NO: 145553 - DNA, 413 bp, Glycine max
  unsure (1)..(413): unsure at all n locations
gattcaatatcgtttatctcttaagaaactcataaactcaactgaactcaccagaaagagaaaacacaagaacacaaagaaaaataaaaacacacaaaaaataaagaagataaagaaaaaaaaaaacagagtatatgttctggaaaattcaattcaaagcaacttacaaatttcaagagtgaaaaaaaaaaaacccgtaggctggtaggtttttccaaagctgcttgaattgaaagttgaaaaagagagaaaaatggaaagctcaaaataaatactactgttacagcaattaaaaatgagggagaaaaaacctaagataaaacaagggtgataaagagtatttaaattaaataataaataatattaaagattttttntgattagaatagaataaattcctaaacccgataaat

SEQ ID NO: 145554 - DNA, 374 bp, Glycine max
  unsure (1)..(374): unsure at all n locations
ccaaaccncaatgaagntgactagttctctctagagatatcatcctatgaatcctgctgtattatagacagagctgcctaggtatttgccccaatggctccagctttccatccaccgtaatttccactaagggcactcatagataggtgaaagccaaagtctttgtcccatcccgcaaacagatacgagactccgaatggccgaagaccaccgaatagggtagaacctagcttgggatcacagagagactgaactaactgctcaactggcatgggctcttgactaagcgatgagtagccttgtgcttagaccctatcggtattgattaggatagtcccattaaacattatcccagccacagcacatgcaacatg

SEQ ID NO: 145555 - DNA, 282 bp, Glycine max
  unsure (1)..(282): unsure at all n locations
ttgatgaatctaattcatggagagagtcacaacctatcactgaaataattccactattgccgttagaatgggtagaatacaactcagtaagagaaaccactcaagagacaacaaatgttgaatctcagtagggaataacaaacctacaagaaacagaaactttccatcaaaactttnatattatcaagtttatcctgataatgctatcctagattatggagatttagttctacacctggcacttatggnagatgtggaacctattagacttgatgaagccct

SEQ ID NO: 145556 - DNA, 281 bp, Glycine max
  unsure (1)..(281): unsure at all n locations
agcttctctgaacataaacaacccacaacattttctaaataacacatgccccataagagaaaagcagnctttattactctcttctgttataggagncatgcctcccttctttcacaggtccaatattcattcttctttcccaagcttttgattcttccaccactttcccaaacaacaaaaccctagattatctttttccaatcacttaattctctgagttcttcacccaataggcaaaaaatactcaaaatcccccctttntatttgtcctttcaatcact

SEQ ID NO: 145557 - DNA, 418 bp, Glycine max
  unsure (1)..(418): unsure at all n locations
tagaataactaagctagcatttgcttgaaacaaaacaacctacaatccatcctgatttgatctttgcatcntattattnttaggagcattaagaaaaaacaaaataaaggtaatatactttgnataaataataatgagtttagnctattaatttaattgtcatttttttacagntaattcaatttgcttataacatgaagaattatacgagagataatataaaaaaaagttaaatggatgaaaatatattatattcttatattcaaaatttttagagcttacaaatttctcaaaaaccaaaccaaacggtataagcaacaagtacatatgtatggcccatggcagcgcgtctcaaaacagnagncggatgatgaaatggntgtgcacttaccaactactacctacttacttgattata

SEQ ID NO: 145558 - DNA, 362 bp, Glycine max
  unsure (1)..(362): unsure at all n locations
acttcgncccatacctgatatagtattagtaaaagaagntttcaatcacatcctttaaaatcctttttcattttttatcttttctaaaagagataattngaatacaaaaaagcttgacagtactaacattgtatatattacttttctgtatcaacaaaattacttagaaacattatgnattattgagataatatagatatataatgggattattaataatccatgctttgctaaataaaaattatattaataaagacaaatctaaagncaaatcattaatatatgataaaaaaataattcatgctagctataagcgtagctaaatgacacttctataaatgacaattnttattcgaatatta

SEQ ID NO: 145559 - DNA, 339 bp, Glycine max
  unsure (1)..(339): unsure at all n locations
tcgctcagttctccacacacgcttagcgcgacacaggcacctggagaaacccgatatcatgtgaaagggcacttatcgcgagtaccgcgcctagcctggaactttacgcacatcttttgatcctcnaaatggggaaaaagaaaagaaaaagcactcattcataaggttgtctcacacaaaggagagatcctcccacaaaaaactaaagatagggnttgtgcccgaataacgggaatcaaccatttagagccattcctttcccctatctccattcttcttcttttccatcaccctctcgcaaatagaaagcctctcatgacaatgaaaagcttaaccccc

SEQ ID NO: 145560 - DNA, 260 bp, Glycine max
  unsure (1)..(260): unsure at all n locations
cttttccccccaggttctctgttgcgtagattaatgatntcctttctttctaaaatctctggaggccaggatattcttcagaaagcatcaagggttctgagaagcactgtacacggtactcaaaaagtgggatatgctgaggacaaatgctattggagacagcatccaccccatttcatcgtagactcaaaagtctggactatctgatantcatcatcatatataggtacacagaaggagagctttaattaatatcacat

SEQ ID NO: 145561 - DNA, 310 bp, Glycine max
  unsure (1)..(310): unsure at all n locations
ccaaccctcnacacacaaacgaaacaaaaggttttggggaagacaaaacaaacgacgccgnagattcggagaggataacaaacattttaagcttcgaaaaacccagcagacatttctttgggcctttagcaaaacaatagggttagctaaggcacctacttcttatgcaccatcattttaagagaagaggcgaaattgccctttactttaaatttaaaaaaagtctccctctcctctccctcttcgtatgcattgnagntgcacttaattcttctttcttctttcttcttcgcttcttctcgccgcacca

SEQ ID NO: 145562 - DNA, 294 bp, Glycine max
  unsure (1)..(294): unsure at all n locations
ccactagagaaaaaggatcattctcaagaggccaacgcctttatatgatcacctcttaatagctaaaaacatccccttgataagaaagatctacgctctgcccgcttcctcaccgcacttgatagaatacgctggagcaacgggttattccctctgcgagccccaatgacctcagatcacgatggtctctggtttgctgtcctaaagggccttcgctcaccgagnncctctgctcttctatttaatgctgcgccctcggacttgccggggcgtgctgcccctcccgtggttttt

SEQ ID NO: 145563 - DNA, 98 bp, Glycine max
tgcaccccactttttactaaatgcaccccctttctattattttagaattctttttccgtaacggtacgaaactttatgaatttcgtaacgatacttat

SEQ ID NO: 145564 - DNA, 362 bp, Glycine max
  unsure (1)..(362): unsure at all n locations
gataaacccaagtttccctttcactagatagatggagattaagtttggaagaggactcttcaactcccgcaagagcctctcctttgtcctttcccttcaccgncaccaagatctatataaaatcttgttctcccactctcgctagcaccatcaccacctgagacagnagtatcccactctctgttctcactgtcctagttnccactccatcctttcgccaccagcacggacaatgcaacaccaccactttaacaacaacaagtcgatctaagaaccacataaatccaaatcttcgctctcggcacacgattatgaatccagcttggccatcgagtctcacattgcagcaaatcgaacatcaa

SEQ ID NO: 145565 - DNA, 438 bp, Glycine max
  unsure (1)..(438): unsure at all n locations
gacctataaatctcagcttcttggggagggaataatctaatcattcttttcttactttttgggaaattaatcttagatagagccccaagttaccataaggataagatcacagagcttgatgaaatttcacatgaaattgggctgcaagagattgaaagaggttatctgagtcaaagattgtcatactacaagacaacttttcagntatctccatatgagaggataagtctttggtcaacgtgaaaatttcttatgaccatgaatccgagatagaagaaaaggtcaaacctacgaagacatcagagtcaactttattatatctttagcgtctagaaacatatctagccaatggcgcttgaagaaaaatgtagnatttataaaaatagnatattatatatgtcntattttatattttaaatagaataatagatggatgct

SEQ ID NO: 145566 - DNA, 286 bp, Glycine max
  unsure (1)..(286): unsure at all n locations
acagcacaagcaccagaaacttttggaagcttctcgcgtgtttctcgtccgactcatctcagnttcaagtgtacaagagaatgtgaaacctctggaggaggagtttcttagaagtagatatggaatgttggctgccattgctaatggactccacaaaaagaccatcagctttggtgcanagaatgctctcatttttttatcccggtgggactttagctgcgaatttctctatttgcatgtttttcattacccaacaccttgaagacaaggagtttttgatggaata

SEQ ID NO: 145567 - DNA, 333 bp, Glycine max
  unsure (1)..(333): unsure at all n locations
ctcttcacaaatggaagaagaaaataaaggtgatttaatgtcttaaactgcagncataagntaaaattaactagttcaattttttataaaaaaatcttttttacaagnttttccgnctaaaaatttaaagagtctataagtaggattgatcttatagatgtctgatttatttcacctctacttatttacctacaagacttgaaaaatttattcatactaggnttatacctaatgccttccttaaaacttggatgatcggaggcttgttttgagctactgattagcccctcaaagaagttgnttattggaattcatgtcaagtattaagcattc

SEQ ID NO: 145568 - DNA, 412 bp, Glycine max
  unsure (1)..(412): unsure at all n locations
cccgtttgcatcccatgtcaaaacacagcagctgcttgatgagcaactcatcgatgacatgcacgcgtcttccctgcaaccacgagtagcaaacatcaccattaaaagagattatatggaacccgcgacctttcttcaacagtacatgaaccacttaacctaaaacaagctcaaaataagcttgacctaacaaagttagtaactcactaaccaatctctttcttcacgaaacttcgagccaggaagttggagcgatgaagtcgacctcgtccatctcaaaggaagaaagggtaaggcttcaatgtcaaagagctgaagtcaatgtcaaagaaaggagcnagcagaaaggagaaaaaacatgcgctaagaggcaaagaaaggagcaagtagaaaggtcaacaaacacgcgcta

SEQ ID NO: 145569 - DNA, 422 bp, Glycine max
  unsure (1)..(422): unsure at all n locations
actaagctagccacccagctcgcccaggcgagcaagggagcttcctcctattctacagccttctggaagaatcttctggaaggcccaagtgggcctggntgctatttgcacccccatttttactaagtacacccccctgccttttttggagattcttttttcggaaagntatggaaacttacgaatttncgaacgatactcggtttcttccgnaatgttacggaaccttgcggattacataatcatcccctttttttgacttacggaaagttacggaacctcactaattgagcaacgatgcttccatttgatttctggagtgtcacggaaccttacagattgagcatcaatattttctttagttttccggcatgtcccggaatttcacaaattgcataatgatgggagccaagcacctcaca

SEQ ID NO: 145570 - DNA, 259 bp, Glycine max
gccctcttcttaggaataagccattgaagatagatcttcaccaccaagatgatccttggataagatacttggagatgatgcttcactgtgtgcaaagatcgatggagagactgagagatgggggtgcaccaaattgatggtagaaaaaaggagagaagctgaactttgagtagagtctcacaagactctcattcatcaaagttacaacaagtgttacacatgcttctatttataaactatagagcttccttgagaagct

SEQ ID NO: 145571 - DNA, 328 bp, Glycine max
cgtgagttttatgatgcctcagagtattgcatactttgattgaagaggcctaccaatctattctatgtctacgagttagattatattattcaattaagcctaagcattggctataattacgagggtagacattatctgttgcgcaaaagtcagataaaagccttttttgatgtccttaaccaagtatttatttagaaacgaccgatacagatgcttttagttttgatgcgcaaaatctaagccaagaatgaattgctagaagcataaaaatctaagaacttgagacatttaacacaacatgcattgcaatggtggtgacatgcccctc

SEQ ID NO: 145572 - DNA, 417 bp, Glycine max
  unsure (1)..(417): unsure at all n locations
tcttagtctcgactgatgaagattaatttgtagctacttcatgctctcctctaatgacaatagcatcacttctagcactaaatagctgggagttagaagccatcttctcaattaaatttcttgcttcaacaagggtcatgtctccaaaggctccaccactggcaacatctatcatacttctctccatgttactgagtccttctaaaaatattggaagagaaactgctctgaaatctggtggagaaggcaactggcacataattttttaaatctctcccagnattcatgtaagctctctccactaaatagnctaaagctagaaatatcctttctgatagtcgagagcctggaagcaaggagaatgttttctaagaacactctcttgaatcatcccagctcgtgatggaccatggagca

SEQ ID NO: 145573 - DNA, 433 bp, Glycine max
  unsure (1)..(433): unsure at all n locations
ctcagctntgctgatntagnnttcgccaacgaaaatgatcaatatgtgtctgaaaagatgaaaatnnaatcatcctgcttggacgaatgagaaaactggggccaatgaagatggtgagaatgaaagagaaacccatgctgcaactgccgttcctacatggaaaatcccccaccagctcaataacaccattactcagncaatatcatctcttctcattacccaccacgcgatcatacacaaaggccatccctaaatcaaccacaaagcctatctaccgcacttccaatgacgaacaccacctttagcacaaaccaaaacaccaaccaagaaaagaattttgcagcaaaaagactgtaagattcaccccaaattccagagtcatatgctaactagctcccatatctacttgataatgcaatggtagccataaccc

SEQ ID NO: 145574 - DNA, 444 bp, Glycine max
  unsure (1)..(444): unsure at all n locations
agctncttatctaaagctcatcttggaggtgaagctccttcttccatggctgattccttaatgagatggagcctcctctcacctcttttacttagacttctgctgcatctccatggaggaaaatcaccattaaaagaccccattgaagctcaaagatccagcctccatagaagctccacaagcaagcttccatcaaaccccactccagaaaactgttacaataaagntctttctatccctttatttttttttattttaaacacaaaataaaattaaaacatatatgttcatgcatgaatacatatggctgagggtgagggttcgagatatagagatgagtggnagattgattacttgaatatcatggcctctgttcttgacagaggcattctaaggcttatagnacttcttaagctcccctaactttggcaccactctcactct

SEQ ID NO: 145575 - DNA, 315 bp, Glycine max
  unsure (1)..(315): unsure at all n locations
taatgacatgggtagatcctgaaagaatttatacaactaaatgcccccttggattcaaaaagaattctaaagagtctgcatgagcgactaacattagatgttccatactatcacaataggctttgggtattttccacgagctcctagncgaatgaattttcttctcaaatgtgcaagtgcaacacctcgatgattctcttttttttcttttatatatattttttcaacaatcaaaagcatgtgcggcttccattccagaatctaaacttaaaagaaaaattagtcattccttgatccacatgggctttattgggc

SEQ ID NO: 145576 - DNA, 288 bp, Glycine max
  unsure (1)..(288): unsure at all n locations
attgatagacataaataagtacatgggctctatatgtaatcattttgccctaaagagagtaagtggntcaaccagaacaaaatatcatcaccagaaacagntcagctttgaaatggtacccatagccatagcatagctgttgagattggagccactatgagacaggtntagattgggagagacaacttaactttttaaattaaaaataagcacacaaagaagagccaagntcaaaagaaatcaaaaaaatggnctaggggggaccatgcccatcttctcaagctacaa

SEQ ID NO: 145577 - DNA, 394 bp, Glycine max
  unsure (1)..(394): unsure at all n locations
ctctccaaggcggatcgcccagaggcaagagttgctatccgagttcgacatagnctacgtcacccaaaaagcgataaaaagaagcgccttggcagattatttggctcaacagcctctcaacgactatcaacccatgcatcccgaattcccggatgaagacatcatggccctgttagaagaaaaactagacgaagacgggacaagaggatcgtgtggtttgatggagcgtcaaacattctaagccatggcattggagcagnattgttctctccaggcaatcaatgtatacctttcacagccaggctggggtttgactgcaccaacaatatggttgagtatgaagcgagtgccctggccatccaggcggcgattaactccaatgtcaagctactca

SEQ ID NO: 145578 - DNA, 77 bp, Glycine max
  unsure (1)..(77): unsure at all n locations
gatcctcaagcacctgcagctgcagctagacagtagatggctncctctgatctgccnagaacaccctacggagaagc

SEQ ID NO: 145579 - DNA, 212 bp, Glycine max
ggtccctattaagtgatcgttccttactatctatttaacgcgggagaaccctggattgacccttctatgtgccctataggattgagcgtctaatcatccatgcattagctaaaagatccagcctgagaggcgtttaatctcttaagcactcggaatggacatctgaacctctcactgctttggatacatacacatctgtgccgatgcataca

SEQ ID NO: 145580 - DNA, 375 bp, Glycine max
  unsure (1)..(375): unsure at all n locations
atataaacctcctcctctaaatcaccattaagaatagaatgccccacctcccttagaagcaactcaaaggctaaatgagaaactactaccaagattagacgaagagaatctttcttagatactggagataaagtctctttgcaatctattcctcccttttgatgaaatcccttagcaacaagtcttgccttagatctctcaaagttacctaatgaatccctttcggtcttaaagactcatttacatccaatggcctttgccccattaagcaaatctacaaagatccaaactttgntactctgcatggaattcatctcatgcttcatggcatcataccataaatttgactctttacaactcatggcttgatcaaaa

SEQ ID NO: 145581 - DNA, 412 bp, Glycine max
  unsure (1)..(412): unsure at all n locations
tatatacattnggaacgagaattctattacctctgancagcttactaactaatncagccaactaactaactatttctattaaagctgtttatactgctaagatcccccctcaagctgggaatggatattcatcattcccagcttgttacaaaagtgctgaaaggtggctggagagaaagctttggagataatgccgcgagttgcatggaagatgagaccgaaaggagctttacgagacccgcagagactttgtggcggataatatggcaatcgatctcgatatgcttagagcgttcatggaaaacgggattggntgctatctgaattgcagaaaggntgtcacaatataaagaggctggctgaataaatgctacaccaatgtcttggagaatatacgttaaccattgcagct

SEQ ID NO: 145582 - DNA, 273 bp, Glycine max
tgatgtgtgtctcacaagtatctcattcataaagcacaacaagagtacacatgcttctatgtatagcctagggagcttccttaagttgccttgagatagcttcctaggaagctaatgttacagccctccaatagctaagctcatccccatgccaaaatacatgatagataaaagcttccttgggaagcaagtagtacacccctccaatagctaagctcaccaccccccccccccctccaagaaatacatgaaaatacagaacaaaaagtccct

SEQ ID NO: 145583 - DNA, 292 bp, Glycine max
  unsure (1)..(292): unsure at all n locations
tcttaccaccttctaatgagaaagatgcttatgacaagctataaaacctcacacaaagtagcaagagtcttgaagattaccataaagagatgataatgactatgaagagatccaagtacaagacctaaaacttccatgccttatgttcctatgagggcctaatacagacattcaatgtattagaaagntgtagcactatgagagattggaagatttggagcatctagccaagacaatggagagacaacttgagaggaaacattcctacaagaagacctatcactatgactct

SEQ ID NO: 145584 - DNA, 361 bp, Glycine max
  unsure (1)..(361): unsure at all n locations
catagaccaccgactcttgcaacatgtgtagattttagattcatggcaagctgagttactaagttgaccaaagcatcaagttttccttcaagatttttattttcagtagatgaagatgaatctgaggccacctatggactcctctaagaacaataacatcattttttgcactgaattgttgggatttggaatccatcttctcaatcaaattcctagcttcaacaagggtcatatcaccaagagctccaccattggcagcatcaatcatactcttctccatgttactaagtccctcatagaaatattgaagaaagagtagctcataaatctggaggtgaaggcagctngcacacaatttctt

SEQ ID NO: 145585 - DNA, 334 bp, Glycine max
  unsure (1)..(334): unsure at all n locations
gaccatagaaactcagctntgtcacattnccattccagacaaacttctattcttctattcaatnnagnnaagggcagtgccaatttataaaatccctcaaagaatattctataatagccagccaaccccaagaaacttcgaacttcagttggagttgncagntgtggccactccataaccgactccactttaatcggatccaccgcaccccatctttagaaatcacatgtcccaagaactgcactntctccaaccaaaattcacatttcgacaatttggcgaagaatatcctatccttcaagatatgcaacacaattctcaagagcttctcatg

SEQ ID NO: 145586 - DNA, 364 bp, Glycine max
tctagctgagagatatacctcaagctagcataaccgagtatttcatgtcacccagagatattctttgacagacaacaagcaagatgcattatgatatgatatctcacctaatctaatcctataaagattacattttctttagcagagaaaaggaaagacctatcattgttgaggataatacattcatccttgttaaaggaaacaccatattcattggcacataattcacttatgctcagcagatagtgttttaatccttcaacacataaaagtgtatcgatatgaggatatagaggtatacctatcttacccactccattattagcccttttctattgcctctgatagctacaggtccaccatg

SEQ ID NO: 145587 - DNA, 405 bp, Glycine max
  unsure (1)..(405): unsure at all n locations
aggtagaattaccatcacatgatgctttattggcatataacaagttgcattctaagaaccttgagattttaacagaaacactatggaagctgccaactaaattgtctataggncaacctacacactcttttgtttagcaagttacaagttgtaccatctagggagaggctcatgaaacgggccaatgtattcccatggagaaaacactcgagaaattcattatatgggaaatcaacagcgacaagggtatactcaaagaagattttcaagcttccagcaaggtctctataatcaacaaggacagtggaggacacaccctggcaaccagntcaataaagaccagagtgggccttcaaacaagccaatccaacaaaggcctaacatattctagatgactactaagct

SEQ ID NO: 145588 - DNA, 277 bp, Glycine max
  unsure (1)..(277): unsure at all n locations
acccccatttttactaaatacacccccttgctctattttagagattctttttccataacggtaccaaactttacgaattttggaacgatacttggttctttccggaatgttacgaaaccttatggattactgaatcatccccttttttgccttccagaacagtacagaactttacggattgcgcactaacacttccttttaatttctggcaaggcacggaacttcacagattgagcctcaatgctttcttttgacttncggcatatcacaaaacttc

SEQ ID NO: 145589 - DNA, 383 bp, Glycine max
  unsure (1)..(383): unsure at all n locations
atcctcagatgcacctgcaggctgcagctgtgagacgagtagcaaatatccttttccttgaccganagagagaatgcccttccttgccctccgaagagagcatctaatatatatatagaaagttcccgatcaaagatcggaagtaagcaaaatatgaagatgtccaattcatgattgggagaaagcactctagatagattaatcctcgatcagagagcttcagagagctacagaagctttcaggaagccgtttggaccagactatatgtgaacgttacagatttggcacaagtaaacaagataaagaagagaacctcgacttggagtagggctgtccctttgatcgccaaccaaaatcctgtgcgcttgcgactttcttgccc

SEQ ID NO: 145590 - DNA, 365 bp, Glycine max
ctatcatcgccaagaccaagaagagtaggatctagccacagaccacgagcatataatcgcggatgattatgcccaagtctatgcggaaaaagaagctagaggaaaggagatcgactctttacaccaagaggcaaccatgtggatggatcaggttgctcttaccttgaacgggagtcaagatcattcccgatagttagcctaagccaaagcgattggaaacacctactccgcccccgaagagattcatgggctcctcgggtattgtcagcatatgatagacttagtggcccacataattaagaatcgccaagacactctgatgagctctcagaccttgactagatatgatttctttttataaaaag

SEQ ID NO: 145591 - DNA, 289 bp, Glycine max
  unsure (1)..(289): unsure at all n locations
attagcttagcagtctgactcttagggctgaagatattatgattattctctgtcatcccaaaaaataacaattcgagtagcaggagaacaacagcgcgctgtcttccacatgcatgggctggctgaaaagatctaactgaacctgcatagcagcgcaacggatattctaagataggcaatgaaataaaacgagttacnataatcatctaggccttataaatgacccctcattaagattcagtcnttatatgggaatatactactagtttaatccccctctacaccctta

SEQ ID NO: 145592 - DNA, 406 bp, Glycine max
  unsure (1)..(406): unsure at all n locations
ggacacactcaatctcagcttcgcgagattcctcgcggtagatctgatctgtgctcttttctcttgctcgantgagaagcttgagttttgaagattttgaattctttcggagtttggaagcatgatttgttgtagaagattgatagagagagagtttgtttctgagcttttgaggnttgagatgaagaggtccaaagatgaagntctcacagttgttctcaattgaaacggcctgtgttgtcttcacgaggagaagcgtaagcnnttttttattattattttttttattnaggagttttgttatcttcaatttaattgtactgagctcgagttttgactttgctgnattttctgcttgatcaaaagttagcatcttcaatcgagtgatgaggctatttgatttctc

SEQ ID NO: 145593 - DNA, 456 bp, Glycine max
  unsure (1)..(456): unsure at all n locations
agcttgtctatagatnttngaacattctccttcttctttctaaagatgcaatggcgttcccttgatttttcaactgtgtgatcttttccattaggtcggccttatctgctgccacaatttcttctggagtagagctggcagctactaagtcttttatttcagatagtactttcgacatggtttcagcagtttcttgattcccaagtttgtgagttgcaaaatcctggtgcagaacttcaagagctcgatttgcatcctcacagagctggagctgccgatcctcaagctttcggatttcaccaaccagtatggatggatcaggagaagccaataaattcttcagcattgcctgcctgcccactgcctctcgtcgctctggcgtacgtttaccattagctgatttgttctcttcaggaaaagaaagacatctgactatttgactagagggcccacaat

SEQ ID NO: 145594 - DNA, 347 bp, Glycine max
  unsure (1)..(347): unsure at all n locations
gttgaacaacaaatacctacaaactttgatggagttgacgaagaggacagacagcaaccagttgaatatgatcaacaaattccaccagaaaatgtatcagatacttcaggctcaccaacaatggcatcagatgatgaacgacctcaacgtgttnaaaaaggcttgtctggatgaccgattattcacttcttcattcacttctttctcttgtccaaagattcaaaggactaaccccctcagaattcttttgtttcttaccttctccctcttgacgaaagattcaaaggactaaccgtctgagttattcttttgttcttacaagaaaattcaaaggactaaccgcttga

SEQ ID NO: 145595 - DNA, 458 bp, Glycine max
  unsure (1)..(458): unsure at all n locations
agctnttgttnttcttggtagnatgcgatatgttcttttcttttattnnnanatattnntgggtagagttgttttcagaagtttatcagtaagtttttaattgaagttccagtctaggtagattcagggttcagaagcttattgattttgataatatcactagagaaaatacaacattaaaagtaatttaaacacaaaataatcaatctttatattgtgtttttcttgtcagatctcattccaagtgattttatccatgttattagggatgcacatgtttaccacaatcatgtgaggcctttgcaggagaagctccataaccagccaaaaccttttccagtatgtgtaatgtttagcacttcttttactttatattntgactcttttacttgttgaccccctaatctacttcttgtagactttggagataaatccaaaaatgaaagatatagattctt

SEQ ID NO: 145596 - DNA, 407 bp, Glycine max
  unsure (1)..(407): unsure at all n locations
agacacatcttcttcaacctgtgggattcttgactctatttcattgaagcacatatccacttgtaattccaatgtgtcaaacctttcaccaacaaaggtttgaagaccatcaaacctgtccaaaatctttgaaagaagagatgaatcttcttcatcatgtgcttcttcaccaacatgtcgagcacccttcttcacccaagagccatcatgctctttttgataaccaaaggatgctatgattgaagtgcctataaggaaggatctcttgattggaacatatggttcacaatcaaaagggatgttgaagtgttgaagganaagggttacaagatgagaataagacaatgaagcattcaatcgcaatgccttatgcatgtgttatctaacaagatgtgcccaataaattt

SEQ ID NO: 145597 - DNA, 456 bp, Glycine max
  unsure (1)..(456): unsure at all n locations
agcttggaaacctattgaaatcctctgaaatttttatttatattaaaaaaaagcaagaattatataaggagatagaaagaataacaccttaatcttgaaagattgataaattaaggatgattcgtcacaaagaataaaattatttgataaaaatctacggtttcacataagaatctcttaactgtgtttaatatgaaatttcataaaaaactatcaattaaggaatttatttataattcctactgtttaatcccaacttaggcccaataactaatctaataattaaaaaaaaataacaataaaaagataatagcccattacaaattcaaaaataggttcaaaaatacaatttaaaacaaaaatataatttattctaanagttgacaaatataaatgagcttcccttctttttctagatatggatacaaaaggacgtaatgcttagtaggagaagtc

SEQ ID NO: 145598 - DNA, 425 bp, Glycine max
  unsure (1)..(425): unsure at all n locations
tatcatgttgcaattgaatccaacaaacatgctgtttctttctctattaaacatttatcacccgaaagtattagaatggttatccaaacatgacaatttcccattaatcttttcatgatgcaagagttttggatccacatcattaaccaatttatatataaaaaaaaacatgaatattagagcattccttaaattagctattaaaataatgatgcagctcaatcctcagaaagatacgaaatcattggaggcatgtatttggagggatacaggtgcatttgttagtgccacctctttaattttgactaaagcattgtcattggtattgctatgagactaatcattgtcgtaaatggttctagctacagattaataatttgataattnttctgatgtctcaacttgctcaatgccttgttcaatct

SEQ ID NO: 145599 - DNA, 429 bp, Glycine max
agcttataagaacaaaattgcctcaatcattattaaatatgcttgtgatttatgacgcatcaacaagaatcaagccaaggctattgtgcaagcaatcaatggggaaaaacacaccaaatgattatgatgatggatggctcaaattctcacaaaggtaaactcatcactttcaaattgagctttcaaaactatcatgacatgtagagaaggatcaaggatttcaagtcacaaaatgtcttttattttcaaaacaattacccatttcttgaacatatcctataattcaaagaaaaacatgcaaagtcgtacatgcacacaaaaatgacccaaaatattaaactaaaaatccgacgaaactaacaacattaacaaattaacacaactaacaaattaacaaaaccaacaaaactagcataacctaagaacatg

SEQ ID NO: 145600 - DNA, 380 bp, Glycine max
  unsure (1)..(380): unsure at all n locations
tctctcacactccagacataanttcgaagatcccaacggttttatttggacaatcggcnnatgaagatgcacgctcaatattgaaaagaaccaaccgtgaacgagagctgagcaccggttttaccgaggcaagttcatgtagctttctctagaagcttcattaaaagctttctcccgaaacttcttaatagcttctacacactccaataccttcggaaatccaccgcaacatggtaatgtttggaagtgaacccattctaaaatccacgtacgaagcgaaacgttttaccaacgttctgtgcttcttaaactattaaagttctcaaacttctgtgctcttgaaacttctcaagctcttaaactaaacttactatccccct

SEQ ID NO: 145601 - DNA, 435 bp, Glycine max
  unsure (1)..(435): unsure at all n locations
agcttctttacgaatggtataatatattaagattctaatcttanaaaagatagaagcttttactttgatgctagcaatatactcttttaaacacacaatttataattaattggttagaaatttattgaagactataaaattaggatatattgtcattaaataataagtagtacccacaaaaatttgtagttttaataaattttggctaataattgagtatgttaaagagtgtattgttaaatttttcttgagatttatttcattcctaacttataaaaattcttataagtttatttgtaattatatatagagtaaaatatgttttagtccttatactttcagctaaatttaactttagtccctctagttntaaagggtcaatttggtccttatactntaaaaaaaaaatagatggatgtagtttctattttatca

SEQ ID NO: 145602 - DNA, 414 bp, Glycine max
  unsure (1)..(414): unsure at all n locations
tcactggacacaaaggagtaacgtcctttggggttcattacaaaaagtaaaatttgcttcttggtgtaatcaatggacacaaaggcgtaacgtcctttggggttcattgcaagaggtggaattgcctcttggtgtaatcactgaacacaaaggaggaaggtcctttggggttcattgcaagaagtggaaattgcttcttggtgtaaacactgaacacaaaggagggaagtcctttgtggttcattgcttgtaaagggaatttacaaagttagtgcaaacgttcaagtgaaatttgcttgaggactggatgtangcatgggttgtggccgaaccagtataaatcccggtttgcattcntcttttccttaatctcttttactctttgttgggtttatatttctttaatgatacttc

SEQ ID NO: 145603 - DNA, 449 bp, Glycine max
  unsure (1)..(449): unsure at all n locations
agctntagtatatgcatatgccttttatcgtgtatatgagaacaggaagaagatgaattagctagccttgtagactcttttcacactatatgataatccactttaatgtgttttgtctatttaaggaagattgaattcgtaactatatgcaggggagattaactatcacagaaaaggaaagaatgagttttaaaagcaaccctgaaatcctaaagaagataggttagcttagctattgaatnttacatgttacaattgtcattgcttggtactttacttcacagaagtcaatcacctatctagtgtcatggcatgatgtccaattgtttttaccatatgccttcagttgtaggtttgaattgaatggaaaaatagtccctagcttggggatcctttgacataacacataatttttttttcaatgccattccttagaacttagtcatgat

SEQ ID NO: 145604 - DNA, 371 bp, Glycine max
tcaaatagatcaccattcaagaaggcattatccacatcaagctataagattggccaatttttagcagctgcaacagccaaaaggactctaactgaagtaagcttatcaattggagaaaagctatccgagaaatcaataccagcttgttgtgtgtaacccttagctaccaatctagctttgtggcgatccatagtgccattaggcttgaatttcactttgtacacccacctgcagccaatgcattgtttaccaattggaagaagaaccaaagtccatgtgttattggattcccaaactttgatctcagctatcatggcttggcgccattctggaaaaagaacaactcgatgataaaattgtggctcataaat

SEQ ID NO: 145605 - DNA, 351 bp, Glycine max
aataataacatagtaaggaatatagtagtaataatgtaaaattcataagtgaatactattgttttattcatacagctgatatttaaagacttttatctatcttaaaggcattttaaacagaaatttaaaaagaaaagggggaaattaaagacaggggattcaaaccgattgtctctaggtattttggtcaatttcgaccaattttatcttaggttacctattttctaattaaagcgagtggtaagtataatctctaaataattaaaggttttatattctttttaagataaggtttggtgattctatcacccttaaataattataaaaaaattgtggactactatactatcc

SEQ ID NO: 145606 - DNA, 432 bp, Glycine max
  unsure (1)..(432): unsure at all n locations
agcttatgttatgggaatgatttctttctccttgctaatggagatatgncaaatagaaagagacatacacacacatcaatttagctagaattccttggaaatattaatttgtcacttgtgttaaaaaaagtatgactctacttggattnttcgtactatggttggttttggtttacgtgattcttttatgcccttgcatacattaatctcactctcttgatcatcttttctttttctttttctnttttctctccctagctttcactatctaagtgtctctataacacatacctctacacccaactcagggacagagcagtgtttgattcctttattcttcccaacgaggagaaataaataagatcttgaatgagagtgttgaggaggagcattatctagtaggacaggggagcgtgggctggtttacctttt

SEQ ID NO: 145607 - DNA, 457 bp, Glycine max
  unsure (1)..(457): unsure at all n locations
cttgcccagaagagcaacgttgtcggagttgtctatgtttctaggttaccggtgtcgnagaaatgtaactggacttgtttatatgaggtggcggtgtttgtggaccataccatgaactgagcagcatcggttagtacgaggttaccggtagtgagaagggaaaaggtagagcgttttccgttgaccggctggtcccggttggccatccaaacaagggtgtgaggtggttgtgtgtaccatatggcaaagcagtatgcgttatcccctacagggtaaaaccctgcagtgaatttgccctttggtgatgacactattacatcttctntgaatttctccacggagagggagaatgaagatgagtgcttgaaattatggaaaattagagaaacgaatagaggtatgtaaaatgtggaagaagccattcgcatactatggtcatgtaagtattcaaaatgat

SEQ ID NO: 145608 - DNA, 85 bp, Glycine max
ttctccgcgaaccaggcgggggtgggatctatagcgagcttgtgaccaactaatgtggagttgacacctgacttgtcacattgtt

SEQ ID NO: 145609 - DNA, 288 bp, Glycine max
agcttgaaggtgtgtaccccaccatttattcatagtaaaacgctggtaatgtgtctactattattgtgatcatctctttctacgtcattggaggtgccacttgagctgccaggactctccaccttaggccgtattctttgaaagattcgtgcccctttttacccattgtcgcaacctacccttcggcgggagggcgacgcgtgacttgcgggatgcgtgttccacgaaaggaatacgcgcggagtcgccaccaacgtttatttgaggaaaacgttggaaaaaccgaaa

SEQ ID NO: 145610 - DNA, 331 bp, Glycine max
cttaatcaccgagctgcactggaactttgaatcttgattttaaaaaaataaaaagcagatttaaagaatgaagaatacccttatcttgaaatgataattaagagattcgcacaaaataaattattgtaaaattaggttacataaaattttactggtttatatgaaattcataaaactatcataagaatattatattctactgttatccaacttagccatactattatattaaaaaatacataaagatatgcccttcaatcaaaatagtcaaaatcattaaacaaataattttttaaagtgacaaataagacttcctttttttaaatgatca

SEQ ID NO: 145611 - DNA, 315 bp, Glycine max
  unsure (1)..(315): unsure at all n locations
ttatcaccaaagtattgaatggttatccaacatgagaatttcccattatctntntcatgatgcaagagatctggatccacatcattacccatttattataaaaaaacatgaatattagagcattccttaaatagcttttaaaataatgatgcagctcaatcctcagaaagatacgaaatcattggaggcatgtatntggagggatacaggtgcattttgtagtgccacctttttaactttgactaaagcattggcattgttattgctatgagactaatcattgtcgaaagggttctagctacagattaatattct

SEQ ID NO: 145612 - DNA, 373 bp, Glycine max
  unsure (1)..(373): unsure at all n locations
aaacgagaaanatgaataataatataaattatatctagtattgaaaagtatatcccctttttatatttcaattaataaaaattatatctagtattattttataaggtaattattataaaaatattctaattgaataataatataaaataatttgagaaaataatatatagattaatagtgtaaaaaaattatatcatcaatcgataaaaatgttaaatatgataatttttctatttttacaataattaatttaaaagttattcgtgacaaaaatttacgattgattaattatgtaaaaactctttatactatttttgtgtacaataattgtattgagattcaaacttataacttttaagtatattctcatcac

SEQ ID NO: 145613 - DNA, 392 bp, Glycine max
agcttatagaaatcaaacacgataataaattattctcacattattatagaagcatatgtgcataaataacaaataagtcataagtcatcaaaacacagatcatttctgtaagttacttgcatctagaaatcctaattctcttctaatggtgtagaaagagtctttggttagtggttttatgaagatgtctgcaagttggtttttagtatctacaatttttttaaaaatatacagtctcttttttttaagactaagtgctaattgactaccaacacttaccaagatgagttttttcattaacatagaaggttctatcatatcaaaataattttatttgaaatacaatataataatttttgaaaagcatacaaaatattttgaacaatcaatca

SEQ ID NO: 145614 - DNA, 299 bp, Glycine max
  unsure (1)..(299): unsure at all n locations
taaccacattatcctttaagaaaatgactgaggcctcttggatggggataaaataaacatgtttctatgcacaactatgaggatgaccaaaaggtgaagcttgccgtcacagaatttttcgactatgctcttgtgtggtggaacaagctactaaaggagaaagctagaaatgaaaagccaatggttgctacatggggcggagattgaaaagatcatgangaaacggtatgtgccggctagttactcaaaggatttgaaaatcaagctccaaaaactaacccaatgcaaccaaggggttg

SEQ ID NO: 145615 - DNA, 168 bp, Glycine max
  unsure (1)..(168): unsure at all n locations
agctngccacccagctcgcccaggcgagctatgttgcttcctccagaatgctccgccttctgaagaacttcactgaaggcccaagtgtggcctggtgctatttgcatccccctgtttactaaatacacccnctgccttttttttgctgatatcttttctgtaacgtta

SEQ ID NO: 145616 - DNA, 228 bp, Glycine max
  unsure (1)..(228): unsure at all n locations
aaagaagtgtgataaatatgaactggccaatcangctaatgccagtggaaagacaaagcccaagtggagaaggacaaagcccccgagtggagaaggataaatgcccaagtggagaatgacaaagcccccaagtggagaaagatgaaggcccaaatggatgatgactaatttggcccactatgtctcaatttttgagtgtatagtctgcctaaataatggcccaatcct

SEQ ID NO: 145617 - DNA, 393 bp, Glycine max
  unsure (1)..(393): unsure at all n locations
agcttgctctaaatntacattgatgtttgatttatgggatgaggttgnatgtcatttttggtttaagagtagtgtcccactggtaaaactaactttccaaatgtttgccttcgcaggaaatggccccgaggaagcttgcctcaaagaggtccaggaaggacaaggcagccgaaggaactagttccgctccggagtatgatagtcaccgctttaggagtgctgtacaccagcagcgcttcgaggccatcaagggatggtcgtttctccgggagcgacgcgtccagctcanggacgacgagtatgctgatttcaggaggaaataggcgccggcggtggcatcactgttactccctggccaagtttatccagaatagtccttgatttatgccatgc

SEQ ID NO: 145618 - DNA, 325 bp, Glycine max
  unsure (1)..(325): unsure at all n locations
aagcttccatgctnntgtggcacgccggatgcataaacaggaattcttttgtgttaccngggggaatcacacctcccttttgtagggcctcgtagataaaccttctcgggggttggtacgtccttcaaaagtttggacctgcgcgaactacttgcctggatggcattaacagttccccctcaatgattggcaaacgggtttgtctttacgttgggccagtcctcttgaaatgtcagtcatccggcttctatcaaactttggacattgcatttgagggccacgcactattcggttgagtggcccggggttttcccatggtatgtgc

SEQ ID NO: 145619 - DNA, 453 bp, Glycine max
  unsure (1)..(453): unsure at all n locations
ancttttaaccatactagtgagttactgtgtattcaaaatttgccacgaatgtgattntggaatgtctaaagtattgactaaacatcaaatagaactcatttatttggttgttttcctttttctgggaaagttgtacaaggattccctctactttgtaatcttttatggtttctcacgtgtagaataagttcgttcttatgtacccaaaaagaagaaaaaaaaatgttttagcatttcattgatctaattaagacatgcattaacaaaatcttaagcatgggcacttcattcccatatcgggtataggaagacattggatgcgtcgtatcgaaattaattaaaaaaaacgtttactaaacttagatatgattctaattaaactaaatgcagtttgagatttagctatgttcacgtacttgtatttcattntttttctaaaatgataactnttt

SEQ ID NO: 145620 - DNA, 332 bp, Glycine max
  unsure (1)..(332): unsure at all n locations
agtacaatgataaagttctttgtgatgttgttcctatggaggtcatccacttactcatggggaaaccatgacaatntgataagagggataatcatgatggtttcaccaacaagatctctttcacgcatcaaggcaaaaagatagtgctcaaaccattgagtccacaaaaagtgtgtgaggattaaagaaaaatgaaagagaaaattcttcttgaaaagagagaaaaagaataagagagtctaacacttgagagttcaaaaagtcaggacaaaaagagggaaacatgagaggaaaaagatgagtgaaacacttgaagtgagggagaatttact

SEQ ID NO: 145621 - DNA, 439 bp, Glycine max
  unsure (1)..(439): unsure at all n locations
agcttggacagnggagacactttatttcatgtttttttctactcggatgcaacaaaatgggccacattgtcaatatatgatgcctcaaggatatatgttaaggaaatgatcatcagagcaccctcaaattctattgatgtttgcatgtgctgtgctacaactggttctccttttatatctacccttgagttgcggcccttgaatctttccatgtatgccacggattttgaggacaacttcttcttggaagttgctgcaagaataaactttggtgctccaactgaagatgctgtcaggtgtgaaagctccctttcttatattcttaaatttgatgttgcttttggcacataaatgaatgaagagaagactttccaaaatttttctgtagagaataagcatcagtagaagtataaaaccttattgccttttcaaggaaaaa

SEQ ID NO: 145622 - DNA, 314 bp, Glycine max
  unsure (1)..(314): unsure at all n locations
tatttgatttaatagttagtatgtttgtattgtgcaattatttattttgttcagtattagttaaataatatgatgaagataacttttgtttaaatttcagattggttgtaagctatatataaacaatcttaccttataaatattatcaactatttttctccattgttaatctctctattttttctgcaagtacttactatttctatattntattttaaaaatatttccaacaacaactcgaaagggatgcaaaatctttttggagtatcggaaactcataagaaanatattgcacgaattatgggtcaagcatg

SEQ ID NO: 145623 - DNA, 413 bp, Glycine max
  unsure (1)..(413): unsure at all n locations
agcttgttataaatataaccaattctttggcctcttagagactangngaagagatctgccaactgatcactatagttaacaaatcttgtaatatctcccgattcaatcttttatctgataaaatgacaatccacctcaatatgtttggtcctctaatgaaagattggattggaggcaatatgtaaagctgcttgattgtcacatattagtgtcatttgtgtatcctcttcaaacttgagctctcaaataagttgtttcagccatatgagctcacaagttaccaaagccatggccctgtattctgcttcagcacttgatttggctacaacactttgcttcttacttttccaagatatcaagtntcctccaatcaatacacaatatcctgatgtctatcactaggtgaccccact

SEQ ID NO: 145624 - DNA, 454 bp, Glycine max
  unsure (1)..(454): unsure at all n locations
actaagcttattaatttctatatggaagtgtactgggaaagacatgttatatattctctttacaatcttgagaaaaccccactaactattggccaaactaactccgagcactgaagacatgtgagaagcacatgttccatagtcttatgccagtagggaacaatgctcattcacttattacgagcacaatgcacaaagtaaaaacagcttattttatacaaggaaaaaatttataacactcattttcattcttcttatatatgtaattntactctgttggcacactgcactacaatcactttgcttgatcccattctggaattgcacgaggaagactacttacctaacttatatccatctttgaacacactttaattagtcatttattaccaacattngtttttattcttcttatcggtacctgggcagggtgagttccgtgtccagatcatgg

SEQ ID NO: 145625 - DNA, 446 bp, Glycine max
  unsure (1)..(446): unsure at all n locations
agcttgcaacatatacatgtgcttatgtgctgtttcatggcagagatattaatgagcatggccattgctcattgttaaaacagaacacatgatacacccaaatttgtcagaaaccaacaaaagacatctgaaccgtaaaatccaaacagataatcaaattcaaatctcttcacacagagacaaaccccataagatgaagaaaaaataaataaaattgatacaagtttagttttccacacactcacaaactaacaagttataaaaatgagttattctccagcaacaaaacccacaaggaatagacacaactttttggaagcaacacacaatagggtaatgtaaaaagagaactaaccaggccacattgcactgatttcagagaaccacccangaatcacagatgataaaccgtactaagagggtctttgcacccttcgcgtccatgg

SEQ ID NO: 145626 - DNA, 451 bp, Glycine max
  unsure (1)..(451): unsure at all n locations
agacactanattaacacttgcagaatcttttttttcacttgaaatagaattgaaatttacattaattacaagcggaagattataatgagtaatgatctaattgttaactaaaattatttaaaatcctacaaaaagaattgtaacttggaggaattctatataattatcaaaagtttctatacaaaagttagtcatataaaacgactaacaccaccatacaggcttagaagctcaaggctaagcctataccatataacatcaaaatgcgacacacaacagtcctaactaattaacaaaagagcaccaactaagcatttaaacacataaagactataacaagcntatcaattgcaataatgtcttctactctaagggttngccnnagataagaanaatgaaattagagtaaaataaaacttacttggatgcagacagtgagtggacaacgtga

SEQ ID NO: 145627 - DNA, 281 bp, Glycine max
atggctatctttcttaatcaaacttgattagtcctgagcatctcttacataaatcttctcttgtcaccagaaaagaatgccaaggtttgagaaacaaaaaaaaaggagggaaaacattcgcctgaacacagaccagttagtagcgtatttccctacatcaaatacaggaaaatggaaattaaatgtgagacttgataaaacaaataatacattgccataaaaaagactttaaataatattttcctggatgtacatgtgagcatctaaaaaaatcgtttttg

SEQ ID NO: 145628 - DNA, 247 bp, Glycine max
atcaagtggccatggctgtaccccagatggtggagttggtcaagctcaacggcttagcaaggaacatctgtattggtggaggttgtgaatccgtggatgctgcggtggaagtggccttaaaaggtgttcttgcggcgttggagacggtcatgaacgcttcagattgcgtgaagcttaatacacttcaaagggtgttggatgtgcttagttcactgcagtgggtcgattttcttggctgcaaatattg

SEQ ID NO: 145629 - DNA, 397 bp, Glycine max
  unsure (1)..(397): unsure at all n locations
ttctgtactcaatatcgagtgtctctaaatattaagcgactcaattcgacatccaagtacaaaattatctcgttccaacttaatnanaacatctgtattgggcgtcgggaggcgtcgtgtattacnttacttaattnaacattcnattaaaaaattattgaccttaaaatttgctcaccgcttctgtattctatttcgagcgactctatatattacctgactcactctgacatcctagtaaaatattattttccttaaaatattcccagaacttctttatttaatttccggtttctcgatatattacgtgactcaatcacacatcctagtaaaaagttattgacgttttaattttgtcacagattctgtattcaatttcgagcgtctctaaatatat

SEQ ID NO: 145630 - DNA, 392 bp, Glycine max
tcgagacgctcataaattatatccgaagctctgagaaaattgaattgacaataactttatacaccgatgtccggttgagtcctgtaatatatctagacgctgtcaattgaaaacgacagctcgcaggagattcaaacgacaataactttttactcggatgttcgattgaatcgggtgatatattcagacgatcaaaattgagactagaagctcttagcaaattgaaatgacaataactctatacaccgatgttcggttgagtaccgtaatatatcgagacgctcaaaatatatatccgaagctctgagaaattgaattgacgaatactttatacacggatgtccagttgaatcccgtaatatatctagacgctgcacattgaaaccggagct

SEQ ID NO: 145631 - DNA, 408 bp, Glycine max
  unsure (1)..(408): unsure at all n locations
agcttgagatgaggatatgttgaatggtgaaacttcctgctnttattggtgaccacagagtggtacctggagatatgtcgcgggggtcaggagaccttggggacgtcaggtggggtgctattgcccaaaaccaagcttgaccaatcccgacccaacccgggcatagtcggtcagtgagaacctgtgatgtacctaaacaggcgagctcctggctgtcaacagataaaaggaaaacaagaccacaaagcaaggaggcttgtggtggctggccagctgtgaattttgtgtaatatgtggatggtggcctctggtaatcgattaccaagggtgggtaatcgattacaaggcttaaaattgaggacaggaggctaagatggtctctggtaatcgattaccaaggggtgtaat

SEQ ID NO: 145632 - DNA, 329 bp, Glycine max
ttgacacaatattcatcagttatagcataatctattttctttggcttgatctcagaaaacaacctatgttcttgagaaaattccttgttaggaccctgtccttatgatcaccaatgatatgggactttggataatgtttccttatcaagtgtccaattgtgtctctgacctcttcccgctgattgtttgcaaatggattggatgtacgttggttttgactggatgtagtactatactaaatgatatcttctatctttatctctgccaaagactcatctaactctgagattttattctcaagcctggtatcattaaatctcacatcaatg

SEQ ID NO: 145633 - DNA, 445 bp, Glycine max
  unsure (1)..(445): unsure at all n locations
agcttgcttggggagcttctatggatgctggttctttgagccnaggngaggtccttcaatggtgattttccaccatggagatgcagcanaaggaaaaggagaagaggagagaggaggcaccatccacaagggaataagtcaaggaagaaagagcttcgccaccaagatgagccttggataagaagcttggagatgatgcttcaatgaaagaaaagaaagagggagagaaatagaaaggggggagcacgaaattgaaggaagaaaagagggagagaagtggaactttgagttgtgtctcactagactttcattcatcaaagttacaacaagtgttacacatgcttctatttatagactaggtagcttccttgagaagctntcttgagaaaacttccttgagaagctntcttaagaagttntctaaagaagctagagcttgactaca

SEQ ID NO: 145634 - DNA, 338 bp, Glycine max
tcaccaagaaatgctaccttcaaagcaaaaacggcatgccaccttctccaattaacacaaacatcaatggtaaattaaagccaagtcatgcacatattttctcacgaacatacattcgcacaaaatattctgcttactaaaaaatgcactcatgcacaatcaagggatcttcgttacctaaatcacgtatatgcatttccaaggcgtatttgctacctaaatcacatgcatttcctttgctaaatttacatacatgcctactcaaggtattttggctaaccgaaaatgcacacatgcacatttcgggtatttctaatacctatacatacacaaatttc

SEQ ID NO: 145635 - DNA, 459 bp, Glycine max
  unsure (1)..(459): unsure at all n locations
agctnggagaggatgcttcaatggagganatttatatggttagaaagatagaggggggagcacgaaattgaaggaataaaagaggtatagaagtggaactttgaagtatgtctcacaagactctcattcatcaaagttacaacaagtgttacacatgcttctatttatagactagggtagctccttgagaagctttcttgagaaaacttccttgagaagcttctttgagaaaacttccttgagaagctagagcttagctacacacacccctctcataactaagcttacctccttgagaagcttccttaagaagattcctaaagaagctagagcttagctacacatacatctctaatagctaagctcacctccttgagatgagaagctagagcttatctacacaccccctataatagctaagctcaccctcatgacaaaaaacatgagaataataaataa

SEQ ID NO: 145636 - DNA, 384 bp, Glycine max
ccttggtcatttcccaatgagcaatgatcaaccaaatgttcataacagatagtaataaaacagttacgaattgcggggttcgtatgtctttgtaaattatacagcgagtaaaattgaattagaaaatatcataattaaaacatgttgctttcccttgattcacaagcaagtctcttatcctaggttgtgagaatttatcctttatcagttcaaccacttattccaaccctaaattaaattactaagcgaaatttaacaataagcattcattatgtgaataagcaacacatacaccaattaatcatgaacgatcattaagcatgaacgtaaattaagcgcagagacaattaatcaagcactaagcatgcatgaattaatagcaac

SEQ ID NO: 145637 - DNA, 461 bp, Glycine max
  unsure (1)..(461): unsure at all n locations
agcttgaggagacactaaatcaatgcatgtagttatctatgtttaatnaccgaagcacaaaagcctccatcaagaacttggaaatgcatgtgggacaattttccaaacagatggatgaaagaccctccagtagctttggagccaacacgaagaagaaccccaaggaagagtgcaaggccgtgctgaccagaagccaaaagaaaacgcaagaggaggaagaagcaaaggaagaccagtctggggaatgaaggacagacggagaaggagagagagaattagagaagagagaagaagaagagaagaagggagaagaaaaaacagtcttaactcctaagaccaaaagccagttagcccaagaagctaagagagaagagccactagcccctctaaaggagcccccatatcctttagtaccgtcaaagaagaataaggagcactacttcaagcatttcttggaaata

SEQ ID NO: 145638 - DNA, 407 bp, Glycine max
  unsure (1)..(407): unsure at all n locations
gttacttttgaagctnttagcctgaagtatgatattgtataatggttgtttaagatattgttttgaaatttggttttgaggttttttggtttgtattgtatagtatatgaaagtataatgtttgtttaagatattttgtttggtgtgaatctatattttgaaggttttagtggtttattactttatttatatcctgtatggtatacgcaattgaaaataggaacacaaactattattaggttgtagctttactttgaacacaaactactaagttttgctcaaagtttctcctacttatgtgtttgaagcccttaaatttagtcactcattagaatcccaaacggatactaaaaaaattagtcattgattgtaatcctttttaanggcttttcatgtggtgcttcaca

SEQ ID NO: 145639 - DNA, 462 bp, Glycine max
acctctgagtcacctgcggcatgcaagcttctcatctttagagtgcgtgcccatctttctacagtaaatcttgatatgggttttgggacaggtcgtccctttatacttgtcgaagtccggcactttgaacttcggggggataacaacatcgggtactaagcaaagatccgtcatgtctgcgaacggatagtccccaaatccttccacggctctcaatctttcctcgaggagatcgagcttcctcctttcttcagttgctgggggcggtcctttcgtggacaaaactattggttgtgtcgtgatgttgggctgaggcaacgtgctgggtgctggcccttcgaggatcgggggatagaactcgacatcccttcgagcatagtcttgagggtctttgtggacctcgtcgggctgttgaggaggctctctttcaaggacgggagaagcaatatggcccgcatcgtc

SEQ ID NO: 145640 - DNA, 400 bp, Glycine max
  unsure (1)..(400): unsure at all n locations
atttgagtaaatgacaatggtaggcatctttttggggcaataatgtggatatattaactaaataactatagtatccttttgacaaagatctagtgtgcgatctgtagtcattaaaataactaaaaagcacatgaacatgcatcccagtggaaagaagatatttgaaaataacaataatctcaactagaatagaattcagaaaaccaatttaaaaatgatggataccaaataatattaattaaattcatcaccgtctatctgaattctgtttgcctaaggctaaattaagttattcaaaccaaattcagcctgaaactagcctcttgacaggtctgacttctttgaaatataggaatggaatacntcttctgtctgtnttctcctgaccaaagaaatcata

SEQ ID NO: 145641 - DNA, 457 bp, Glycine max
  unsure (1)..(457): unsure at all n locations
agcttgttacaacccattattctttgtcctactcttccactattggctctatacaaatcaaatagatttgttgattgtttgcactaactcttaatcatcttgcaaatgaatatacaatctcaacacttagtcttttctctcaaagtgttcaaggtggtttgagagctttatagaactatacataaatcttttcatagaaagaatttgaatgagagtgcataagttcgtatccatgtcttcaaagcttctatatttataggtcttcttcaacaagtgtttgttgtctctaaattgatagatttcttcacttgagctcgtgtatgaagattctggttgttggaacatttaatgcttccaataaatgcatgtactcccatgctgaanaaccacttttgtgagctntcgtgttgatcacttcagcagaaaaccacttgctttaagttagagtaggtctatc

SEQ ID NO: 145642 - DNA, 363 bp, Glycine max
  unsure (1)..(363): unsure at all n locations
gccttacncaacaatagagaagagattgtgcttagcgagtatgactcgcttagcgcatgaacaaattttcagaacaactaaattgccttgggcttatcaagactgactcgcttagcccaagcttatttgactttcaaaggcacagtggcctagcgagcgtggctcgcttagccgcaaacagaataccaaaagcctcagagacttagaccttactaaactaactcacctattgcggcatgccggcttatcgagttcatacgaactcaataattaaaacttggaatttaaacactcgctaagccttagtgcagtgggcttagcgagtcatacatataagcgtaatttaaacagatatgatgaaca

SEQ ID NO: 145643 - DNA, 450 bp, Glycine max
agcttcattaagaggcttcctctatttctttatttgaggcttctagcacactccagacatcttctcaaagatcccaacggtcagatcatggaagcgtgttttgtgaagttgcagaccaaatttcgagacgatccaacggttaatgaaggctaggaagcgtttttaccgaagcagcttcatgtagctttctctagaagcttcattaagaggcttcctctagaagcttcctcgtggcttctttgagaagttttctcaagaggcttctttgagaagctacatccttatctatccacccctctattaactaaattaacttccttaaaaataattacggatgaaaataacgcaacaaataatcaaacatcaaacataattactaataatatatagatatatatatcagggtgttacacatcatatattgagacgctcgaaattgaacaatggaag

SEQ ID NO: 145644 - DNA, 375 bp, Glycine max
ttcgagcgtctcgatatctgatgtgcctgaatcggacatccgagtgaaaatttatgaccatttaaatttctcgaaagctttcgttgttcaatttcgaccatctcaatatattatgcgcttgaatcggacatccgagtgaaaagtgatgaccatttgaatttctccagatcttccgtggttcaatttccggactctccatatttgatgtgcttgaatcggacctcattgtgaaaagttctaaccatttgaatttctccagaggttccggtgttaaatttccagcgtctcgatatctgatgtgcctgaatcgggccttccagtcacaggtttgacaatttaattgctcagagttccactgtcaattcaacctttgat

SEQ ID NO: 145645 - DNA, 396 bp, Glycine max
  unsure (1)..(396): unsure at all n locations
agcttgtaggattatggggtacccatcacatgttttactatgtggcggtcgggcgatggtgcacaacaagtttttccacatccacaatgcgcgcataaacccaccatcccctgttgcccacctccaactgagctcgcgtactcccacgtagcccatatcctcgtttctctcaacaccgggtccccatcaatcctctcaagcttccacaacatccaagcaaaacaacattcaaacagcacaagctatcacagccaagcaaaacagagcanaggcagaaaactctgctcaacacatcaaccaaaatcacagtttttctcacgtaaagaccacagtaacaattctttcgatccaattcgttaaccggtggatcgaactccaaattttactggaagtcta

SEQ ID NO: 145646 - DNA, 454 bp, Glycine max
  unsure (1)..(454): unsure at all n locations
tggtaagaaaagagcaacacacacagncatctaattattatcaagtatatatatatatatatatatatatatatatatatatatatatatatataaaaactgtgagtataaaataaaagtgtgtgtttctatgtaagaaaaagaaaagctaagtgcggaaaggcaagtaatagagctagaataaaaagaaaaagattgatctatggatgaatgctctcctagaacctaagcttttgcatcctagaaaaaccatgaattgattgcagcccagcctcgttacaaacctagaaaagtcctttggattcagtttgtgtgttcttgactgtatggcaagagatgaagttcaaagattgagatttattttgtttcttgattcatggataagcctaaacacttgtgcttgagtgaaacagtagctatgagggcttggttaataatcccttctagatatatg

SEQ ID NO: 145647 - DNA, 480 bp, Glycine max
  unsure (1)..(480): unsure at all n locations
ttcggacacttgaaactcagctttagtctcaatttgagcgtctcgatatattacccgattttttctgacattcgagtaanaagttattgtcgtttgaatatcctacgagcttctgttttcaatttggagtgtctcgatatattacaggactcagccggacatccttgtataaagttattgtcaattcaattttcttagagcttcggatcaaaaatttgagcgtctcgatatattacgggactcattcagacatccgagtaaaaagttattgttgtttgaatttgatacgagcttccgttttcaatttggagcatctctcgataaattacgacactctgtcaggcatccgagtaaaaagttattgtcgtgtgaattctctaagagtttcccgtttcaatttggagcgtctcgatatattgtaggactcaaaccgacatccgtgtataaaagtattgtcatgtcaattatctcagagcttct

SEQ ID NO: 145648 - DNA, 458 bp, Glycine max
  unsure (1)..(458): unsure at all n locations
caagctgaggaggacacgtgtccggggggnatatctttctgtttctggagggngacgtggacgaatggtgcgtacagggaaattatgggagagggaggagtatggttggcaatgaaggtgaccgtaccgtgtttgtacagagggttcacgtgcagggtgagggtgcagtacgcctgtggtaaagagagaacggtgccatgtgatgnttggagaatgaacagtggaggctttgcctggagattagacgttaaagctgctcttagcttaagcttagctctctaataaccataactaatcaactgtgaatatatcaccttaggccaggtagctttttttagtgtaaattctaaagtagaaattaatgctgatcggaacaacacgactttccgatcttaatntggacgtgaaaagttaagttgattactctgcgtatatcaatnatgagtatcaatactcta

SEQ ID NO: 145649 - DNA, 328 bp, Glycine max
  unsure (1)..(328): unsure at all n locations
gacacnagtctatgcccttcacaaagtgttgcccaaatagctctttaattntaaaataaaagaataacacttataagacattgtaaaaaacactaaaagatttttgtttcacattcaaatgaaacatgtccacaatcaatagatgttatatggggataaagagagtatntgaatataatccacatcactaagtcgatttcatgcacacttataaaagggtctatcactgtgcaacaaagtgagatcaccaaacgccttttgtttggcgtgcaacggttttccttgtgtgagcaatggtattgcaattgtatatttggtaggagaaact

SEQ ID NO: 145650 - DNA, 462 bp, Glycine max
  unsure (1)..(462): unsure at all n locations
agctntgagccaaaatcctaactcaccatagatcttgacccttgttgagaaagncaatccttaccctcggaagcaaaaaaaaagagaaggaaaatttcctatctaagagaaagcaaaaaaaaaaaagagagaaggaaaatttccaatcaaaggaaaaaagagaggaaaggaaattcccaatcaaagagtgggagaaagcgaanagaaaagaaagaaaattcctaaccaaagagtgagagaaagtaaaaggaaggaaagaaagctcctgatcaaggatcgaaagaaaacagaagatatgtgcagaaaggtctttggaccatacaatatctgaacaatacagaattgtcaccaaatgaacaanaagaaggaaaggaaaccacgacctatagtggtcttctccctttaattaccaaccaaaatcctttgcgtcggtgactttttcgccccgcactaaacaaaaac

SEQ ID NO: 145651 - DNA, 386 bp, Glycine max
ctaaccttattcttgttccaattcttgaatccaagttgttaccgcattctgttattattgacttacaatccttaaccttttctgttgttttctcatgatcgtcactcgcaaatgaatcacatttcaaacttagggcgcagattaatcacatttctatcattaggacaggaggctgctatgtttggtttggaaaagataagagggagcatatacatatatatgtgtgtgtgtgagaaagagatattacgtcatttagtcattgatgtagttggagataaactgctatttgtgtatgacttggacctgtgagttcattaattaatgtgcatcgtgcaaagcctttagtgaagagctcttcagcctttttattaattattttaattctt

SEQ ID NO: 145652 - DNA, 435 bp, Glycine max
agcttatcaaaattcaatgaaaaatcatgagattcattttggcaagagctattctttagaagattataaatgggaaccagagttacaaacctactatcaaaatgaggcagaaagaggtttcaatctggacaatttgttgatgcaattcaaggatacaattgaatcaattcaatgagcatttaaaagtacaaaaattcaagttggtaagctgtgagaagcaaagcttcatggtgaatcaaaggtgaattaaaggtgttttgatgataacaatgatgatgacaaaggtgatgacaaaaagctcaaagatcaatcaaagaacaactcaagtgaatcatagatcaatcaaagaacaactcaagtgaatcaagaacaattcatgagttcatgagatgaatcaagaagaattcaagactcaagaagaaagtctatagtcta

SEQ ID NO: 145653 - DNA, 261 bp, Glycine max
ctctgctattgggggtgctacttgagctgtcatatccctccaccgttgggcgtattctttgaaagattcatgcccttttttgcacatgttctatagatgcatactatcccgagccatatcaaaattatatcgacattgcctaacgaaggcaaccattatgtccttccaagaatggactcgggaaggttccaagttagtgaaccaggtaacagctatcccagtaagactttcttggaaaaatgtatagcagtactcatcttt

SEQ ID NO: 145654 - DNA, 448 bp, Glycine max
  unsure (1)..(448): unsure at all n locations
agcttcacacagnnnattnntctcatacttgtgttttggaagaccaattactaagtatttcctaattagatgatttagatgatgcatgttaatgtgtggagtcctatgatgtcacaacctagaatcatctattttacttaccaagcaacttagctcatgaaatgatgcatgttcaacatttagcatatagatattacctattctctttccaatgaggacacctttaccggatatgacttcacttatatggcaataatttctgttgaattcaactttcaagtatttatcacaatgttgactaatgctttagtccatccacatataacacattctttatctaanttttccctatanttcgttctcccactattttttctttgctattgtctccaaacatgacatantcctccacctttgacacaaagtcagagggtttgcacttgtcacc

SEQ ID NO: 145655 - DNA, 341 bp, Glycine max
attgattgaataagtgttcaagatacttgaaatgcaaaacaaagccttgcttttatagactcttcatgtctggtcaagacaaccattagaagagttatgacttttagaaaaaattaaaaaccaatttgaaaaagtcaaaaactatttgaagagttacatcttttgatttattcataaacaatcactagtaatcgattaccaaattagtgtaatcgattacacaaggcttttatgtgaaaggatgtgactcttcacatttgaatttgaatttcaacgttcaaaggtactggtaattgattaccaaaacattgtaatcgattacagctttttgagattaattg

SEQ ID NO: 145656 - DNA, 448 bp, Glycine max
agcttcaagttgcttggatagcttcttgttttttgccaacaaagcgtcctgtgatgaaagctccagcaggcttcttttggttaggatgtgtgctctatcacgcaagattgcatggtcactagcagccatattctcaatcaattccatggcttcttcaggggtcttcaattttatttttccccctacagaagcatctaaaagctgcttggattatggccttaacccgtcaatgaaaatagctggattggttctgaaaatccatgagtaggcgtctttcttagtaacccacgaaagctttccaaagcctcactcaaggactcgtctggaaattgatgaaaggatgagatggcagcttttccttcggcagtcttggactctgggaagtatttcttcaagaatttttcaaccacttcatcctaagtcttaagactgttacctttaaatgaat

SEQ ID NO: 145657 - DNA, 426 bp, Glycine max
  unsure (1)..(426): unsure at all n locations
ccttgaactcagctaaaaatcttatgttatgagggatttttattgtttttaaaaggnntggccaagaaatttaagctaaaatgtctttttcaagagatttactctctggtaaatcgattaccagaggatggaatcgattaccagtggccaaaatgatttataacagccattacaagtttgaatttaaattttacactgtgtaattgattacacatgaatgggaatcgattaccacccagtactaaaacgtttgattcaaatttaaagcctgtaatctatacacaagtcttgtattcatttccagaggagattnttataagattattttcaacggtcacatctgttcaagtggtttttacatggccatcaaagatatatttatatgtgactnggaacacgaacttgctgagagttttcaaaacaaaa

SEQ ID NO: 145658 - DNA, 450 bp, Glycine max
  unsure (1)..(450): unsure at all n locations
agctttcataagtgaaattaggtgcagccatctctctaagagtcctctcacgaggtagaggttgagccatgttctcagtataaaaattagtagtggaatgttcaaaatcagaatcaccctcaacagaatgctcagaatgctcacaatgcacagaacgaccaagatgcacactatgtctaactaatctttgaaaggttctatctatttcaggatcaaagggttgtaaatcacctagatatagtcatgcactatatgcagcaaataatgtgtttctcaacaagcacctaacaagggggtaaaactacaactatactcaagcgatatcaaaatgagcttaaattttgtgaggaacaccctaaaatcatgaaaagatagcacanaaaatttcaaacaaaaattcaaagtctaactatgaaaacgacctaagcaaagtttagaanaataggacaa

SEQ ID NO: 145659 - DNA, 415 bp, Glycine max
gcttcttgagaaacttccttgagaagcttctgtgagaaaactttcttgagaagctagagcttagctacacacacccctctcataactaagctcacctccttgagaagcttccttaagaagattcctaaagaagctagagcttagctacacatacctctctaatagctaagctcacctccttgagatgagaagctagaacttagctacacaccccctataatagctaagctcacccccatgacaaaaaacatgaaaatacaaaaaaaaaaagtccttactacaaagactactcaaaatgccccgaaatacaaggtaaaaccctatactactagaatggccaaaatacaaggcccaaatgaaggaaaaacctattataatatttacaaagataagcaggctcatacttagcccatgg

SEQ ID NO: 145660 - DNA, 444 bp, Glycine max
agcttgatgtcattcaaaggacactatgtcgttctaaattaagactaaacatgcattgtttatgtaattgtattcattatgcgatataatttgttgtaagccattaataaccaattaatattattaagtactcgtttcgttaagcaaaaaaatagttggtccaacaaaaatcaattatgcgtgtatgatacatcattgtcataattgacaacacataatgacatgcatgcgtattaaagtttgagcgcgacaccacattgactgacttgcacattctgaaggaaacataaacacgaaacatgttcatgcgtgtctattgttttgtaaaaaaagtgaagcaatctgtcggtgacaaccatgtatatatatgagacacggctaataaatcacacattatcttgctttcacatagtctcccaattgatacacaaagtatgacatttt

SEQ ID NO: 145661 - DNA, 346 bp, Glycine max
acctccattctgggcagtccatgggctattttgatattccagctgatcatgtgtatggccaggtaacggattattatgtcactagcatatagtaatagcatggaagaataaaaagcatttaatctattaaactcaaacaaacatggcttggatgtgttgtatatttgtaatttgtaattgatagtccatccaataatttgttaatttatggtaattatgcatctcaagtctgaattgaaatgaagggacaaccttctggaaacatgcttattttactgggtatagttatatgatcatctaaatttacgatttctgtagtaaagaaacttcaaatctaagtttcttt

SEQ ID NO: 145662 - DNA, 304 bp, Glycine max
agcttctagaagctgggcttatctaccccatttcctatattgtttaggtaagcccagttcaggtggtactaaagaaaggggcatgacagtcatttgaaatgaaaagaatgacctaatcccaacgaggaatgccactagctggagaatgtgcatcgattaccgcaagctcaatgaagccacaaggaaatatcattttcctttgcctttcatggaccaaatgttggagaggcttgtgggacatgcttattactgcttcttggatggatactttgggtacaatcagattgttgtggaccccaaggat

SEQ ID NO: 145663 - DNA, 430 bp, Glycine max
  unsure (1)..(430): unsure at all n locations
gctgctacnatggagctcctatatctccacacatttttggtgtgtccattcttggatggccttgattntctcatggtccacttggaccccatttctaccaactacaaaacctaagaaaactatattatctacacaaaaggtacacttctctatatttgcatagagggtgtttttcctaaggattgaaagaacttgcctgagatgtcctaagtgatcatctaggctcctactgtacactaaaatatcatcaaaataaacaactacaaatctacctatgaaatcccttaagacatgatgcataagcctcataaaggtgcttggtgcattagtgagcccaaaaggcatcactaaccattcatacaaaccaaacttggtcttgaaagcgttttccactcatcaccctttncatcctgattggtgataccacttt

SEQ ID NO: 145664 - DNA, 427 bp, Glycine max
  unsure (1)..(427): unsure at all n locations
agctntactatgcagagaataaccaaggaaaattctttcatctgacttatcatcaaattttcctaagttttcttttccattgtttaatacaaaacacttgcaaccaaaaacatgaagatgtgagatgtttggtttcctaccattgaacagttcatatggagttttcattaagatgggtcttatcaaagccctattcatgagataacatgcagtattaacggcttcaacccaaaaatattttggaagaggagtatcattcaataaggttctagcaatttcttccaaagatctatttttcctttcaacaactccattttgttgaggggttctagttgcaaaaaagttatgttcaatgccatgctcttcacaaaataaatcaaattctttattttcaaactcacctccatgatcactcctaatagatata

SEQ ID NO: 145665 - DNA, 342 bp, Glycine max
  unsure (1)..(342): unsure at all n locations
tactcagcttatcttgtaaactgacttctaaatatttgttctcgcagttatgttctcgttgaagcttgcctcagagagatctangaaggataaagcggctgaaggaaccagatacgctcccgaatatgacagccaccgttgtaggagtgctgaacaccatcatcgcttcgaggccatcaagggatggtcatttctccgggagcgacacgtccagctcagggaccacgagtataccgacttccaggaggagatagttcgccggcggcggacatcactggttacccccatggccaagatcgacccagacgtattcctcaagttttatgcgaatgcttggcctat

SEQ ID NO: 145666 - DNA, 355 bp, Glycine max
gcacagaccttgcgccaagcgctcagtcttcacatgctaagctaagcttgctcgcgctaagcgcaaagacccctgattggttggctgaatagtttagctaagtgcacatcattgcgctaagcccccacatcttcactgtaattgaaccttaagcagtgggcttagcgtggatgatgcactaagcgccacttcttctctggagaatttttatttgaacaacgctaagcgcgctatcctgcgctaagccccagatccattctataaattgagtttttaaattgggcttaaccgggccaggaacgctatgcgccaatctattatggttttgaactcttggaagtgcgcttatcgcgcc

SEQ ID NO: 145667 - DNA, 438 bp, Glycine max
  unsure (1)..(438): unsure at all n locations
agctntgattaatactattgaaaatatttttctagaatggatattataattccctccattgttagtgatgaggacatgaccaagagcatgggcaaggatccacttgaaggacttggaggacctatgacaagggctagagcaaggaaagccaaggaagctcttcaacaagtgttgtccatactatttgaatacaagcccaagtttcaaggagaaaagtccaaggttgtgagttgcatcatggcccaaatggaggaggactaaatggcaccactttgtctcaattttagagtgtttagtttgtctaaataatggctcaatccttgtaaagttggctgaccaaaaatatgttttgggttaatcaactaaaagggctttagttagggttagttcaagttgtaataagggcccaantggcaacctaggcattagccttttggg

SEQ ID NO: 145668 - DNA, 372 bp, Glycine max
gctgccactcttcttgactgcttgatcgttcttctcttatctttctcttcttctgtgataccggtttggcttggggatagatagcgagcttgtgacagataatgtggggttgattcctgacatgtcagatagttgccaagcgaataggtccacgttcctgtttaggacatcagatatgcgtttgtgctcatggctgtgttggatcaagaggcctcaaaataattaagaaggggggttgaattaattattcataaacctttactaattaaaaatttactctcctaaggcttttactatgttgttaagtgaataaagagtagaagagaaccttaaccaaaagtacaaacggaaattaaaatgcacagtggaaat

SEQ ID NO: 145669 - DNA, 456 bp, Glycine max
  unsure (1)..(456): unsure at all n locations
attaccacttaatctccatattaatggaattggaaatgttcttaattcttgatatagaagaattgaatagcttttcatttgccgaacccatcaatatttatattgaatattataaagatttatacccttcataatcacagctttattttaaccagatacctacagncttctaaaatatatatattattgtaccctcatgaattgctgttatttaatctaagaatctaaatattgtctcaataattgtnacatcattaatatanngtattatatcgaattcaacaattagatattctcagaatttgtaaattataaaaaactgttacattatgaaaggagtctttaaggtaagtacccttcacaaagcatatgcacgtgtggaggaacaatagataaaaaatctcgagcatgaatataacaaggaaacagaaggaaaactttgccaagtaaaaaagt

SEQ ID NO: 145670 - DNA, 450 bp, Glycine max
  unsure (1)..(450): unsure at all n locations
agctggtaagattatggggtatccatcacatgttttactatgtggcggtcgggcgatggtgcacaacaagttttccacatccacaaagcgcgcataaacccaccatcccctgttgcccaccttcaactgagctcacgtactcccacgtagcccatatcctcgtttctctcaacaccgggtccccatcaatcctcccaagcttccacaacatccaagcataacaacactcatacagcacaagctatcacaaccaatcaaaacagagcagaggcagaaaactctgccaaaacaccaaccaaatcacaacttttctcacttaaagaccccagtaacaattccttcgttccggttcattaaccgttggatcgactcgaaacttttactggaagactntagtacatatgcctacattgtgaccgttgggatctactagaaaacatccagaactca

SEQ ID NO: 145671 - DNA, 368 bp, Glycine max
ctaagctgttggcctcaagttggtcaaaggcagagtcattttttattttcacaagctcacaattgagcaagagggattctaaactatgtgtagctcgaagaggaaaaagaagaaagctgcctacgcccaagatggtggcaagggtatcacaggtagatgatttcattattattattttttatcacaacattgtaatgtgaaaacgttacgtaacgaaatcttgatttcattgtgttaagggagtttccaaaaaatattaaaactggggaggaaaaaaatatacattgtatatgtttataacggaatcacgattctatccttataagggggggggggtgccaaaacacgtatataatgaaattatgatt

SEQ ID NO: 145672 - DNA, 401 bp, Glycine max
ataacggggatctcaaaatacaaaataaccctgtatgattcaaacctacaaataaatatttcatcttgattcttggtaactaaaaaataattaatattctatggcaagtacttattatttatgaagaaggaaataaaaacggtagcaatgttgataataacaaactattttttttcttaaacataatgattaagtgtgactcaactactaatgttaaaaagtcatcaaatttagtatgcaaaccttaaggggttggtctattaggtaagcaaacaatatacatgaatggaaacgtaaataaataatctatgaccgaaaatcatgaaacagtactacacatggttgaacaatatcaccctctcctccatttgccaatactttggtgcaatcctattccaata

SEQ ID NO: 145673 - DNA, 369 bp, Glycine max
ctggaagaataagcccagcccctactttcgaggggcagctcccaccttatgatgactatcccgggcaagacgatgaggaaggagatacccatctcggtcccctgctccacctcaaagatcggtccccccatgaattaccccaaccaaacatagtccgccatatcccgacttcacccacacccgtaaaagaatctgttcccttcgtggaagataagggaaagattgaggcgcttgaagagaggttgagagcagtcgagggcctcggcaattacccattctcggatctagcggacttatgtctcgtacccaatatcgtcattcctcccaagttcaaagtaccggactttgataagtacaagggatgacatg

SEQ ID NO: 145674 - DNA, 442 bp, Glycine max
actctgcttgtcctataaagtaattacacgaaaattttgtttttttgttacaacttctacggggaaaaagtttatcaaatgatctatgagtgaagcaccattattaatccttagatttattattaaaatatttcgatgggtccaattaaaattaaataattttaaacaaacaaataaataaataactgtatttctatctttttcattctcaccccacccccaacatctcaaagatgttccacaggaatctgggaaatcttaaaaaataaaaattggtcatacatgaaaagatgataaaacatttaatacattttgtccataaagaaatgctctcatgtgtgtgcctgtaaatcattttcattacgagaataacaaaataatctaagtaaactggacatataccaatattattaatttttttatctgaaaattccctatcata

SEQ ID NO: 145675 - DNA, 174 bp, Glycine max
  unsure (1)..(174): unsure at all n locations
tatccaangacatttaacaacgaccttcgaaccacaggtacgttgtactcactttctctcgctatttgtcaaacagaaaacaactaacaagaggaaaagaactgaaatattgcgtggattgatagngatatgccctttgggatctttgaagaggcggtttgaccatgtggcaaa

SEQ ID NO: 145676 - DNA, 391 bp, Glycine max
  unsure (1)..(391): unsure at all n locations
actccgcttatgctcaacgatattaaatatttctgtttgaaaatgtgtgtanaccnaaancgagtatgtggctcaattaaaatgaagagtattttttatatcttaattctgataaaattaaataaataaatttgaataaattcgcaaattatttattatatatgtaaatgtgatgttaatcgctaccttttattaataattaaacatttattttttaagtaatttaagataattaaatttcttcattacaatatgtatataatcggtctgttccgcccggtattggtttaaactgaattatcaaatgctcaatatatgttttatgtcaagacaaatgcatgaaattcgttaaagtaatctagtttagacttcggaataacgctttatatct

SEQ ID NO: 145677 - DNA, 444 bp, Glycine max
  unsure (1)..(444): unsure at all n locations
agcttatggcggcaaatggtaagctatcaagtcttaagcatgtngatgttggggtttgtgaacactgcatctttggaaagcagaaaaaggttagcttctcaagggtagggaagactcctaaagttgaaaagctagaattggtgcacacaggtgtttgggggcctgccccagtgaaatctgttggaaactcacgctattatgtcacctttatcgatgactctaccaganaggtatgggtttattttcttaaaaataaatctgatgtgttttctgtgtttaaaaggtggaaaacagaagttgaaaatcagacaggtctaaaggttaaaagtctgaaatctgacaatggcggggagtataatagttaggagtttaaggacttctgttcagaacatgggaccaaaatgattaagacaataccaggaacacctgagcaaaacggtgttg

SEQ ID NO: 145678 - DNA, 227 bp, Glycine max
  unsure (1)..(227): unsure at all n locations
atctatctantaaataaataagaaaaatctcataattttttccaagaattatgatcaattaatttggttaaaactaattaaaagtaggtgataaattagacttaaccttttgaaattttttatctaaaaaagaaccctcggaatcttacgaattgaaaaatcaatagaaatattatttggtgcatgcttattagatacgtctaccggactcgtctcaagttctctta

SEQ ID NO: 145679 - DNA, 418 bp, Glycine max
  unsure (1)..(418): unsure at all n locations
ctctctaagtaggttggccgtcgtgatttcacaccttttctgtcgtggttgtcgncaatgattatacaggccaaatcgtcgacgattatgggtaagcttgtctccctaagggagaaaggaagctcgtctcccttttcttctctttgttgcgtggatggctttctttatgtggcttcattgtggattcctagggtttgagggtggaaagagtttctatcttgatcaatggaggccgaggcaaagaacaaatacgtgaagaatgaagaaaacaacaatgatcacaacaacaataaaagtaacagcaaaattgcgaattcaagtgagggtctgagcaagcccaagtgtcaaatgaagacactgtttcagcttgaaacgctcgagaaagcttatgctggtttgttatcgttaaccttnttta

SEQ ID NO: 145680 - DNA, 321 bp, Glycine max
  unsure (1)..(321): unsure at all n locations
tgttaaaactttgggttagccttcaatttcaattaaatcaaagttttctaacaaagttatgaataaaacaagtttaaggacatttcatagaataaaaatctgtcatgaaattgaactgattgttatagttgtatggactatttttcttaaagtttttacctcaaaaatgagttttttaggtgtgaaaatgtaggatggcatataagactcatgaaaaaccaattattggaacacctagaatactgaaaataagttaggagcaaaantntataatactgagtgacaaagtgattttaaggcatagatagcttaacattggaa

SEQ ID NO: 145681 - DNA, 441 bp, Glycine max
  unsure (1)..(441): unsure at all n locations
acctgcaagcatgcaagcttatcattcaagaatatcacagatcttgttttgttcctttcttctcacctaaaattaaggncactttgtntgaggccttcataatctttgtgtgcttatgcacattctctccatagataatttctttctttgttctgataatcatatgactccttcagatctttttgaagatcttctattttgttttccaacttttgaatagtcatgagagtaacttttcccctggtagtcatgtcaatctcaagacatacattgaactctttttttttaagagttatacaagctccacatgtctaagtggactcgtccaatgaaatatctactcgatcctgaatgtatttctcacgtttaataggtctcttgataaatatatgaattcttttttcactcttgaaattttcgaatgattaatgagtagatgga

SEQ ID NO: 145682 - DNA, 394 bp, Glycine max
ctaagcttatttacccctgcaaagcattaaagctgctagtttgtggtctccttccgtcaatgaaaatattcagctgtatgggcttagactgtggcctcaatacatgagtaggagttatccgtagcaagctacggaatctttctagggcttcactcaaagattgatctgggaactagtgaaaggaagagatggagccttttcctatgcagtcttggactctgggaatatttcttcagagacttttccacaacttcatcccaagtccttaagctattacctttgaatgaatgcagccacctcttggcttctccaaatagtgaaaatgaaaataaattgagcctaacagcatcttctggcactccaacaatactgactgtgttacaaatttcaatgt

SEQ ID NO: 145683 - DNA, 432 bp, Glycine max
  unsure (1)..(432): unsure at all n locations
agcttccacttattagtgcacagctccttcattattttagtatatcttgtaatnngcnnnanngcatccaacagaggtatgtttacctctacttttctaaacgtttccaagatctctttctctgcctcttccatttttttattaaaaactgctcttggagggaatggaagagggggaatgtgctgcttctgcaaatcagaattacctgtggaagaagattcacctgcacagaaattgttaggtaaatntttgtcatcacctttttctggagtagagtgaagtttggcaggttcatttgcagatgaggaaggtgttacgggttgaggtccttgacactgctttcccgacctcaatgaaatggcattgacatttttgggatttcggacagcttgagaaggtagcttgtcagaattctgggactattgttgattc

SEQ ID NO: 145684 - DNA, 460 bp, Glycine max
  unsure (1)..(460): unsure at all n locations
aaccagctaaaaccataatactataaccanactacaatatcttctatctaactaacctaacagaatataaaaatnntatttaagaaaatcacttaccaggaattatggaagagaaagcacacagcatactttaaggaagcgcaccacacacacactcaaacactcaaggagactcaagataggagaagctcagcttggggaggagaagtgtagtctttacgttgatggaggtttttttatagcagaaaacgtaaagaagcaacgatcaaaaggctactctacattttcaggtccaagctgtaacctatcctgcataaggctgcagccctaaacactgccgtgactgcaaacagtgtgaccctgcacaagctgaggtgtctcgccaatgggagaggcgagatcctatgtgtggtgtgtctcgccaatggagaaagcggcaccctccattgtagcgcgtatc

SEQ ID NO: 145685 - DNA, 465 bp, Glycine max
  unsure (1)..(465): unsure at all n locations
agcacctgagctgcagcttggaacccaaatttagctcaatgtttatgattactcatggctaggaatccaaattttggttntagaattagaaaagcatgaaaattaggacttgcttgtgagagtttttgctcgaatttgggctgccccatgtttgatactttgcacctaagtaatatgaaaaacaccttgcaatagtatgtatatataggtaaataaaaggggcatgaaattctttgcatagggtgaatgaatattgaggtcgcttcctaaatgaatgtatgatagcacggaattcccttttgaatgcaagtgtgtgcataatgtaaatagctcgccaatatgaataaatgtgagtgaaacaataaaaatttgtatgatatatatttcaaatatatgtaggtagtttgtaatagcaaatgtttaggatataacnataggtgtgaattttgacgcaatgccttgagc

SEQ ID NO: 145686 - DNA, 428 bp, Glycine max
  unsure (1)..(428): unsure at all n locations
aagctntagcgactatgagcaaccacagaatttacattgagngttcttcttttatgttctacagncgataatgcataaatatctaattgtcatagcatatgattcgcggatatgatttaagctttctttctttctgtacattttaagccattggccaaaaagctatcccaatgtatattatttttgccatttgcaagccctttgagccaaacaattgatattttgttggaacactaacctaggataaaagtttcttaccttaccttaggttaagagagcacaggtgttttgttgggaatntctatcatttggcggctaatatgatgtaaatactctgttggtaatatgggtggtaagggaaattaaatatttatacaaaaatgaaaaatgaagaaaaagaataatagtattataaggtaaacaagttc

SEQ ID NO: 145687 - DNA, 438 bp, Glycine max
  unsure (1)..(438): unsure at all n locations
agcttatcgtaatcgattatacagttgctttttatacaatgatngatttattaaggagtctttggtttaatcgattaccatgtgatataattgattatttctctttctataagtgtttcagaagtgaacgataacactttaatcgattaaaaagataatataatcaattacttcattgaattaatcaattatcttgtagatttaatcgattacaagcggttataattgttttctctataaatagtcaccttatgttctctcttataacacttagaagaacaagtttttatgagctagaatcacatgctgatattagttaaagaaaagtgcttagaaatagttactcacaacctctaatctatgattataaagatcnttttgtgacaagtgagttgtgatactttcttgagttcaagaagacacctcattcagtcaagc

SEQ ID NO: 145688 - DNA, 454 bp, Glycine max
agctgcattctctaatatctattattcatatcattaatttttctgttatcattggacaacttagttacttcatgcactgcaatgggtagcagaactcggcattcagaatgttgtttacgagttagactgcaaagttgtcgttgatgaaatcttgtcaaactctacatgtttatcaaattttcgtgttttattatcaaagtatagagtttttcttttatcattccgaaactcagcgatgagttatgttaagagaaacaaaattgtgcctagcatttcttaattaagacatcaagattatatgttagcacttatgtttttgagcatatatcaagatatttagtctcttattttaaaggaaatgagaaaaatatctttatataaaaagatggacagcgtagttcccactcaagtgcccgcacgctaccatataatatatatagtcacattttacaca

SEQ ID NO: 145689 - DNA, 435 bp, Glycine max
  unsure (1)..(435): unsure at all n locations
agcttgcatttcaaacaaatattatttagtgatttcgtctcaccccacatagnatgtgggtttatgggtcaatccaagtttaataaagaaaaattacaaaaaatagaaaattaaatttaaaaaatgtgaaatttgatccatttcaaatcatttaaaaaactaattgcgaattatctaatacaaaaaattatttgtccaaaatgataatataatntacattttatgtcacctaaaaaaataatttcctacattatgtttactttatttataattttatattaaatcaaaatatggaatcatcatttactaatcattaaatcatatagaaattacttaagtgttaagtgtgtataaatccaaacaagtaaagtgtaaattntacatgcacacatatnntttaagtagaatataaagagctaacanagcttatggact

SEQ ID NO: 145690 - DNA, 346 bp, Glycine max
  unsure (1)..(346): unsure at all n locations
attctttctatatcaaatgatgaccacaatcaagaccacatcaactatatttgtttggaacttttcacaatatggaagatgatgaaaaaattgttgatagtgaccacaacaacaatgcaaaattttataatagtatgtttcaacaacatatgggaagaggaaaagaaggaatatacaagggcccgggccaatgatgcaacatactgtctcaatcacaaaataaacattattttgtcaattagtatggaattttgcaattcacaaacaacaacatatggggagaagaaaacaggaatgttattgatgatatatacttacaatagntacacgcctttgactgaaatat

SEQ ID NO: 145691 - DNA, 451 bp, Glycine max
agcttggttgacttatcaaccttttgtgctctctctttgaggcctcaccaaattgtgtttgtatggtatatgactaagacgtaattgaaagtcctcatgttcaattttataaaagataaaccaataagatacttattttgtttgacaaacatcaaaggagtcctcatatatatgattgttaacttacatatgcatgtcctttgagagcaactatcaacccaatcgttagacctaggtggccaggaagagttcatcaagattaatttgtagaccacctaagtctctcaatcttgcaaaaaaaggcaatcaatgtttaaaaatatcacaccaatattgatcataacaccatcattccacaccattgacaataccttcaacaacacgtacgtatcacaaatctcaatattgctaagataagtaatttcatttctaattgttctctctcaaattt

SEQ ID NO: 145692 - DNA, 395 bp, Glycine max
atgagagaagaaataagggtcaagggaataaagccacctgagttagttagagagtaacaaagttagttacaggcagttaaatatgggaatttgttgtacaaatagtataaaagggagagtcaatggccaaatagggatatcgggaaattgaaaataagtgggtgggaggattttggtccctcaaagttcctaaaacaattctttctctgtaatccatacattcttgaaaaaataacagtcttgttctttgcaatgtgtcctctttttctgcattgctgaaccaattcctaataagagccaacagaccttctaacaattttggaatgctttattaaggaagaaattaattgttaagggcatgggagaattatgacttgataattcttgatagcacc

SEQ ID NO: 145693 - DNA, 173 bp, Glycine max
atatcaagacttttggagcctctatgacagcaatagtactgatcggcgactttccacaacaataacaagatcactacgacatagtgcgatcagaccacaattaaaaccttggacacaatgcctatatatatatatatatatatatatatatatatatctacatgcacaccaca

SEQ ID NO: 145694 - DNA, 328 bp, Glycine max
tatgtgggagtaatatatcttgatatggtgacgctgcaagcacactaccattgttggaatttgattctgagcaaaacgttactgatttatcacatgtgtcgacatgttgcaggggatttgtaagtatgctcaatcaaacaggacggtgccagggtcgaatattcctgaaaccatcaagaggaggctgattgttctttgtgcttactatgaaaatctacctctcatacaaatattaagcagagtgatttgtagccatttcttatttaatcgaaactgaaattattttattcaacgaagccagtcttatactcgaatattttttaagagt

SEQ ID NO: 145695 - DNA, 449 bp, Glycine max
  unsure (1)..(449): unsure at all n locations
agctnttagaaacaggtcagcattcactctctctatttctttataaaatattatgtgcaatattattgttcttgtatatctcaaaatttataaagattggctcttgcttctttcctgtttaatacaacaatgttaagaggttaaactctttctgtattatatattagaggaaattgcactagcatcccctgagattttcctaaatgatacaatccagtcctctagattcttttgacttgctgaatacagtgagttgtattttacatttttttagagtactgaatacagtgagttttatgactaatagatttatatcttaaatttgtagtatatgaaatttgaaagtataattaaatttggatggtgttgaaaaaatattctactttgttctgtattggaaaaacatgtattgaaacattatttacaaacattgtatcatctagaaatca

SEQ ID NO: 145696 - DNA, 456 bp, Glycine max
  unsure (1)..(456): unsure at all n locations
tctctntcttactttccttccncaacacaacactctttctttntctttntcctttntcttaatatttatattttatatttttcgatttattccttggtttacggcgtagattacaatagcgtttccttagaattacataatctagctgtttccgatgaagccagagccttccttcagtaatgtagtcacatcacagctcgccgtatttggggtttttgggaatatgccttggaataattgaattatattattattattattattaatttattataagctaatgtaattaattagtagattaatgtccattgacccagtgaaggttgaattaaaatcccattccctgcactgtccggtctagttgaaatccaattaattcctttcttaaatactagtatgaatatttcccaaattattaacttaaatgagggttatttaatggagaaaacactctgt

SEQ ID NO: 145697 - DNA, 438 bp, Glycine max
  unsure (1)..(438): unsure at all n locations
agcttcaattagtttgcacaaaacatactgtatttgattggttgattggtgtaatatttgagcccctagaaaagtgtaggtttcataaacagtacatgggaaaaagtataaatgccgtcactaagggttaattgggtaaaaaattacattntatttctgacttgctgaccatcttcttggatagaagttatgcaaatttgcttgagtttaccattctacccaagtaaatttagaaaagagtttgacagcaagttggctgcctgtacttagaattgtaaactgttggaatttatgagtttttgagttgacttgaaagtttgataacaatntaacatgcagttntaaaaacccactacaacactgatttatntatgacatccttctatctggntnntgtcccatttatggctatntttgggaatataagctgtttctatc

SEQ ID NO: 145698 - DNA, 405 bp, Glycine max
  unsure (1)..(405): unsure at all n locations
ttcacataaacaagaacgtgaaggccttatgtttatcgtttatttgtcaaagaaatgcttgtgaatatgtcatgaatgcctgnggaactcttgttgattgtccttcagagcatcagtttgatgagtgcctaaagaggtttgaaatggtttgttcaccttggccaatgtttgttgattatgtcaaggatacatggataatctcacacaaggaaaaatttgttaccgcgtgaacgaataaggtgatgcacttatggaacacaacaacaaacaagtatgaaattattgacttatttctattaacattgattaattgatggatttttattgttgtatatgtttattgttatttgtgtatttgaaatgtagggttgaatatgctcactgggctttaaaaagagtgttaca

SEQ ID NO: 145699 - DNA, 446 bp, Glycine max
  unsure (1)..(446): unsure at all n locations
agcttaattagtatattaagaatgatattattattgnngcaacaatagtttatggcaaaccgaaaaaattattggctgagtcgtggacaatgtcgctttctctaagacgtttcgtggcactgccaaaaaattgtgcaagcagacaatcaaccacgaagtccccaggataaaacagtccagatcattgtataagattccccctgcactgagggaaccttttctagaattacaccctcttgtatgacttgaaaagtcactctaaagccacccgaaaatatgacttgaaaagtcactctaatagtcaaccgaaaaatatgacttgaaaagtcactattatagccaaccgaaaatatgacttanaaagtcactcttataaccaacagaanaatatgacttanaaagtcactcttatagtcaaccaanaatatgactnntaaaagtcactc

SEQ ID NO: 145700 - DNA, 452 bp, Glycine max
  unsure (1)..(452): unsure at all n locations
agcttntcgattcattctatgcacccatagatgtccacattgtgtttcgtgcanttatattctcattttgtttactttttataccccctgttgacgtgcttaagccattttacttaagtcatttctcgcttaaactaaaaataaaataaatttccaccgaacgtttgaattgtattatccattaacttcggttaaaatcaattccgaccgttcggtcgtgccgtaaccacgttggaaatcaaaaagaggtaaaaaataatataataatcaaaaaatatctttttagtaaaatagagcggagaatcaatcggacgttttctctttgggatttctcattcttaatcgaattgattaataactaaagtgaaactaaggctaatatcaactcgcctagtcaagctcgtccacaanaataggctnttgaagtctgtctattcaatctcccactaagt

SEQ ID NO: 145701 - DNA, 396 bp, Glycine max
  unsure (1)..(396): unsure at all n locations
tgatggacagcgggtgaaccanaagcggaagtttcgtttggtgaggaagccatggaaaaacagagcgtttggaatgatttcgtaaatctcagaaaactattgggaaatgctggtgaaaacacgaatgccaagcagatataaatttgaatgaagaatgtagaggggcgtgtgaagcaacggtcgaatttgctttgtggtgaacgtgctattaatgttaagtgattcgtttgggcacgttcagattgcagtagctgctataattcctctaacagacaaatgcccagcttgcccctcagttttcaaactgatttgcattcaagcctttgtgaaaatatctgctatttgttcctcagtgtcaacatgcttcagtgtgatcactttatcatcaacaagatc

SEQ ID NO: 145702 - DNA, 389 bp, Glycine max
caagcttgacgaacacattctaagatgattattgttaccttcttaaatgtgtgttgctcaaaaaattacgatgggttttataaaacaccttcgtatctaattgaatccagaatctggtcttaaccttgttttaacccttactcactcactcctcatgtctatactttcctcccatggctgagtcctacccctctctttccctctcacattcatagcgactcctatccagtccacgctgactctgacctcctcgcgcttaagactggcccgactccttacgaatccgctcttatgccttccatgcatcaccgccaccttttcgtcaaatgggtgagggaagctaccagactgcactcaataagattcctacagcacggataggggggaac

SEQ ID NO: 145703 - DNA, 324 bp, Glycine max
  unsure (1)..(324): unsure at all n locations
ccaagtgagttgtgaaaagatgatgaccaagtgaaggtgcanattgcaaagaagaatgaaagctatgccaagcaagccaacaagaaaaggaaggatgtggtacttgaacccggttatgatcctggacatttgagggcaaatgttntccaagaaggagggaatgatgagaattctaaaactgtccaaatatagggacctatgaccaagagtaggaccaaacagtcagtggataccctccaacaaatcgtagcaggcatacttagcaaggcccaagtggagaaggacanaagcccaaatggagaaggacgaataaccgagtggaaa

SEQ ID NO: 145704 - DNA, 455 bp, Glycine max
  unsure (1)..(455): unsure at all n locations
agcttaatgtgacattgaatgtctatgcacgtgttttctcattgtaagctctatttgaacatggacaaaagagtatcaaaagcatcagccatttggttttcctttctaggaatgtgatgaaatgatatatcatcaaggagttccatcaattccttgatgtaagcctggtaaggtatcaacttatggtctctggtctcccattcacctttgaacagatgaattaccaacactaaatctccatacactttgagcaacttaaccctaaagtcgattgttgcttggattcctagggcacatgcttcgtattctgccatatntattgtacaattganaaacaatcaagccgtgaaaggaaaacattatntgtctggcgaaaccaacactgccccaattccatgttccaatgcattagaagcaccattcaaccatacaatccacttctatttgtcttcatc

SEQ ID NO: 145705 - DNA, 309 bp, Glycine max
taatatttggaagccatagaaatatggccttatatacccaccacagtagatagaaccacaatagatggaagcacaacaagtggaagcacaacaatagaaaaacctagagatagatggtctgaagaggatagaagacgagtacaatataatttaaaagccaaaaacataattacatctgccctgggaatggatgaatatttcagggtttcaaattgtaagagtgctaatgaaatgtgggacactttacaagttacacatgagagcacaacatatgttaaaagatctaggataaacacaaatactcatgaa

SEQ ID NO: 145706 - DNA, 450 bp, Glycine max
  unsure (1)..(450): unsure at all n locations
agcttctnttttagacctcgatcggtcatcttttctggccgacgccgactgttatttttttcgatcactatcggtgaataatatttttttgccgaggggggataatgttttcctggccgagtaaatgggaacatgccagtttcggccgaaacgaaacatcggttcggcacgtacgaaaaaacctaaccgacctatattgtaagttttttatgcaacaccgaaacaagaaaacttcccctgccgtaagaaaaaacattatcggccagcgagcgtttttttttaaacaaaattgcgcaatgtcggctgaagaatatcagtcatggccatttcacgaccgatgtcggctattgagttttctattcaatccctgaatgaaatttgcaagatgtcgattangaaatgtttgattggcgtcaaccggtgatgcttcttttagacctcgatcggtca

SEQ ID NO: 145707 - DNA, 385 bp, Glycine max
  unsure (1)..(385): unsure at all n locations
ctagcgtctcgaatattatgcgctttgattgacctctgngtgaaaagttatgaccatttgaatatctcgagagccttcactgttcaatttcgagtgtctcgatatgtgatgcctctgaatcgggacatccaagtgcaaagttatgacccttttaatttctcgagagctttcgttgtcaatttccagcatctcgatatattaatcgcctgaattggacatccgactgaaaagttatgaccatttgaaattctggagagcttccgttgttcaatttcgagcgtctcgatatgtgatgcgcctgaattggacctccgtgtgaaaacgtttgaccatttgaatttctcgagggcttccgttgtcaattacgaacgtctcgatatattat

SEQ ID NO: 145708 - DNA, 443 bp, Glycine max
  unsure (1)..(443): unsure at all n locations
agcttgacaagcagctgaacatgctgcaatattctcatctttatatgttgaaagagctacaacactctgcttctttgagctccaggatataggtgcaccagcaatcatgaatatatatcccatggtactttntctgtccaaaacatctgcacaccaatcagagtctgaataagccacaagatgtggtctaaccttctcatcttgatgtgggaataaaatgcccatattcagtgtacctctaagatatctcaaaattcttttgactgcaaccatgtgagagtgtctaggatcactcatgaatttgctaatcatcccaacactgaatgctaactcaggtcttgtatgacaaatatacctcaaacttcccacaattggtctgaataccgttccatacaccgtagcctcattctcacacttatccaacttcaaattcacctcagctg

SEQ ID NO: 145709 - DNA, 314 bp, Glycine max
cccgttgggtcttcgtattgtgacggattctatttgttttgtagaggtggagtcgacatgagcaggggaggtgtcagtggtgactgtacggaggaagaaagatagtggaaggtggaagcttcatacggcggttgctgaaatgaaagaagagttccctcggtatcgaacaagcttagcaatcgtttgcgagtactctcaaaatcaatcccaagggattgagatgaatgtacaaaaggataaggggtgtgcagcaacgaaagtgtgtggaaatgggtatggcggccatggaatgcggcaatgactctcaatgaaag

SEQ ID NO: 145710 - DNA, 453 bp, Glycine max
  unsure (1)..(453): unsure at all n locations
agctttgagccaaaatcctgacttttcatatttcttgacccagggtgagaatgtcaatccttaccctcggaagcaaaaaagaatagaagggaaatttccaatcaaaaaagaatagaaggaaaatttccaatgaaagcaaaataagaaaataaggaaaattccccaatctaagagtgggagaaagcataaagataagacaggaaattcccaatcaaagaatgggagaaagtataataggaagaagaagaacgaaagaaagctcctgatcagggatngaaggaaaaacagacgaaatgtgcagagaggtctttagactggacaatatctgaacaatacagaattgtcaccaaatgaacaaaaagaaggaaaggaaaccacaacctataatggtcttctccctttgattaccaaccataatcccgtgcgctagcgacttttacgccccgcactaaa

SEQ ID NO: 145711 - DNA, 380 bp, Glycine max
  unsure (1)..(380): unsure at all n locations
tcttctttctgtcttgtcagagctagatcaaacatcacttggatgtgatattcaattagagtactaaggatagcaaagttgatgggggcaacatttgagttgctagaaaagacaacaaaaacatcaagaacctcctttttcactgaagaatcttcatttgaggtgttagcctacttggacgcacgttcagttgacatattanaataacctcaacaaccttggctgcattggactcaacttgttcgtaacttnttgcattacaccagagattgagagatcaataagaacacatcaaatatatgatgtggcaatgaagtgaacaagcaaatgctcacctccccctctaaaatttaattagattagacttctccaaattcaat

SEQ ID NO: 145712 - DNA, 320 bp, Glycine max
ggatcttaagcactgagctgcactgggaccttgcattttactttttggacgacctttatctaagagcatattatctatgcgaggggggccgctatcttacttattcagtctgcctgcatgccatgggaggaataacaatcctgaataatggggaggaaaatgtgaacactgcagctctacttatccctttcctggataataactaatatacactagttaattttgaaaataataatggaacctacatacttgtcttatgcaaacaaatactttatgatatggtgtatgttgggatcaattttatggcacgaatcataaat

SEQ ID NO: 145713 - DNA, 372 bp, Glycine max
tctcacacggtgggtctccaaatgcgaaaccttaggtacacccttggagagtcctataggggcacatattacatctccagtatgtgccgctccacgagtgagacatatgcaagaacaccacattacgtctctaggacgtaccattccatgagtgacatgtatgtaagagctcaacattaagtctccaagatgtgccactccttgagtgacacatattccagaacacaacattacgtcttcagtatgtgccactccacgagtgacacgtatgcaagaacacgacattacgttctctaatacgtgccacttcacaggtgacatatgcaagagcatgacaatacgtctctaatacatatcactccacgagtgaca

SEQ ID NO: 145714 - DNA, 410 bp, Glycine max
  unsure (1)..(410): unsure at all n locations
agctgtntttgatcgatgttgccataaaaattttttatgctttttggttaagcccaacgcgcgaactgaaccgaagctgtgtttcggccgactggcatgttttcattatgtcggccaggaaaacattatcccactctcggcttaaaaaacatgattcaccgatatttgacaggaaaagaaaaatgctagccgacgtttgccaagatagatgaccgaccgacgtctgaataagaagcatgaccggatgactccggtcgaacatttcctaactgatatcatccaagtattatgcagggattgaatagaataaacaatagccgacatcgtgagataaatagccgtgacttgatatttttcggccgacattgcgcaatntcttttacaaacgctggcccgtaatatttctttac

SEQ ID NO: 145715 - DNA, 401 bp, Glycine max
ttgggtgctgaacaccagtgggatggcgagcattttgccacagctggtgctcaagtagatatatggaatcacaacaggtgttaatatcaatatctatttgctctacttatttcactaaaatcacagatgactcttctaaaatttatgtttatttcatgtaattgttacttcccttctgcaggtctcagccaataaacagttttgaatgggggtcagatactgtaatttctgtccggtttaatcctggagaaccaaatctgttggccacctcaactatgtatgtgagattgcctgtaagtcaagcactacaatattgattatgatacaatttcagttcccccccatagatatcctgatctatttgtatagttgcttgttaatgtttgctaatctcactgaat

SEQ ID NO: 145716 - DNA, 341 bp, Glycine max
  unsure (1)..(341): unsure at all n locations
agctgtctccaccaagttgtctgatgcctgatatgtctnntttgatggcagnnggcctagatgtaaggaagaatttctccaaaaacaccctcttaaggtcatcccaacggaaaatatacctatgagcaaggtagtatagccaatcttttgccactccctccagagaatgaggaanagcctttagaaagatatgatcttcttggacatcagggggcttcatggtgaaacaaacaatatggaactccttaagatgcttataaggatcttcacctacaagatcatgaaacttgggcagcaaatgtattagtccagtcttgagaacatatggaacaccctcattt

SEQ ID NO: 145717 - DNA, 392 bp, Glycine max
tcgaccatgatctaacttgtggctgatatatccttgaataatttccatcagtgttttctattaagcacggatactccattcccttgccgtgtccggtgtccgacacgcgttcgtgtcagtgtctgacaccgacatgacactcgtactacgttctatattttgggacattacaagtgtccacgtgtccatgtccgtgtcgtgtccggtgtccgtatcgatgtcggtgcttcataaaagattgcttccatttcttaatagctttcgtgatggcatacatttcccttgcataaactgatgcctattgcattttttggcagtttttttttactgaaaaaggttattggctgactatgtttgttgagaactactcctaacgcaagggtggaagcatg

SEQ ID NO: 145718 - DNA, 456 bp, Glycine max
  unsure (1)..(456): unsure at all n locations
agcttccaccataccgcgagcaagattagggtttttctcttttgattgaaagaaacccatgatctctggtccaagacaaaagaaaatagcattgacaaatttggaaatgaggatcataatcctcttcccacaacatttttaaatatttggaaaatagtagtatttaagattgtgtggatagaataaatgtttgctttatataattaaaattcataataaataaatatatttcaatatataaattatatttgatactcaatgaataatttaaattgtgatataaagttatttttaactattgacatattctttcaaaaaaaatattttatttcaatntagagatagagatgaaatatggtagattaaaaagaataagtgataccttcaaacacatagatcaactgacataaaattatttcaatttatctgatagtctcaagttttgaatatgtaatt

SEQ ID NO: 145719 - DNA, 405 bp, Glycine max
  unsure (1)..(405): unsure at all n locations
tggtcaacccatacccaggaatgacaatttgatctttctttcttcatcaacatttcatggggatgaaagactcgggaatacgcatgctatgcatgccaaatgtaattatgagattgagatgccctgtcgcaacctacccttcggcgggagggcgacgcgagactcgcgggatgcgtggtccacgaaaggaatacgcgcggagtcgccaccaacgtttatttgaggaaaacgtcgggaaaactggaaaagacgcgatctacgaacttttaagtgaaaggttcgggagttgtatttacgcatggggaaggtattatcaccccacacgtccgtcccaagggacggcagcctttaatcgaatgtgcaaacatgactntgatnttttatgttccctttntatgtcttata

SEQ ID NO: 145720 - DNA, 459 bp, Glycine max
  unsure (1)..(459): unsure at all n locations
agcttgaccaatcccaacccaacccgggcatagtcggtcatgttataacctgngatgtacctaagcaggcgagctcctggcagtcaacagataaaaggaaaacaagaccacaaagcaaggaggcttgtggtggctggccagctgtgaattttgtgtaatatgtggattgtggcctctggtaatcgattaccaagggtgggtaatcgattacaaggcttaaaattgaagacaggaggctaagatggtctctggtaatcgattaccaaggggtgtaatcgattaccaggcttgaaaacgaggtcaggaagctagggaagcctctggtaatcgattaccaaggggtgtaatcgattaccaggcttaaaaagggaactgggagatggtggaagcctctggtaatcgattaccagcctgtgtaatcgattacacagaggaatgggtcactggtgatctgatacc

SEQ ID NO: 145721 - DNA, 278 bp, Glycine max
  unsure (1)..(278): unsure at all n locations
tctcgttggttactatntatacccnctgttaacgtgcttaagccattntacttaagtcgtttctcgcttaacttanaaataaaantaaatttccaccgaacgttgaattatattatccgttaacttcgggtaaaatcaattccgaccgttcggtcgtgccgtaaccacgttggaaatcaaaaagagggtaaaaataataatataataatcaaaaatatctntttagtaatatatagcggaaaatcatgtggacattttctctttgggaattctcattc

SEQ ID NO: 145722 - DNA, 444 bp, Glycine max
  unsure (1)..(444): unsure at all n locations
agcttcatgaanaaaccatttttcccttcgttttatgcttgnnnctggatctaacaaataaccatcaaaacctacaaaatcatgaatgaatctttcatatgtaaacaacaatattagtaaatgtacaatatatagttgcaactagttttaagggtagtttataagaaaactattacaattaaaggataatgctaacaatttaatcgcaaaaataactaaaatttggcacttgtcaactcccccaacctagaatcttgctagtcctcaagcaaagtaaagaaaaattaaaaataaaaaatagtacaagtaagcttcaaaaaaatatgaacatgctttgtaaagaatcaattcctaaactcatcataataacatttttcanaatgcaacgatgagaaaacaaagcacanagatggaactttgagaaaccaaaaatgagattaagat

SEQ ID NO: 145723 - DNA, 350 bp, Glycine max
  unsure (1)..(350): unsure at all n locations
tacatataagaaacagccccactctcccaattntacaaaatcatattcatacatcattggggcgtttcaccgagcacttggtgagcgcatgtttggacataaattgcaagaggatggggacaatgtggcatgccccattgcttcagaatacagcattggcctaaggccttctcattcaaatcctcaactcaagaaatcaagcataaaaacaaaccaaaactgccccacaaatataagcacattctcacaatttggagcaccaaaagatgaagaaaatataccaatgggaagctaaaaaaactcaaggatngaatacttacttgttggagtgagtaataacacccaaaatg

SEQ ID NO: 145724 - DNA, 448 bp, Glycine max
  unsure (1)..(448): unsure at all n locations
agctnnttgaaaagtcacatctcttgtaaccattttgaaaaggcacgaagggcctatatatatgtgtgcctgacttcaaaaagtaagagagatattctaagagaacttcattgtcaaattatctctcaaaaactcttgggcaaacacttgcaaatctattgagagttcatccaggaacatcaaattgtattatccactctaaatgagagaaatctttctgttcatcttagaaagtaagttgtaatcaagagactagttctctcttgaattgtgagtttcttgaacacaagagaaagagattccttgggtgttcataatttgtaaaaagggtttttacaaagttagtgaaaacacgactaaccgacaagaccaggttgatgaccaacaacaacataatgaccaacagagacacttctgatgacntatttgattactgactttagcacac

SEQ ID NO: 145725 - DNA, 409 bp, Glycine max
  unsure (1)..(409): unsure at all n locations
cttctcgaggacccattgttntgctagccatggttttcgatatgtgatggtgtatccgaactcttgtctaacgaatgcgatgaatgtaggaacggttagttgcttgttttcttcaaccatcacaaggatatttttgccaacgagttttgaatccatattattatgatcttgtaatggtaggaatgacgaatgtgtgaggcctttcaatcattctaatttcccaaacttttagatttttttgtttagacgctcaaaattttcattggcaccccctcagcttggcaacataagacccatgtatccttcgcacacctcttatgtttgaaagtgacaaggttcttaatatgccacatnttgactggatgtttgaggtcctncaagtgacccaatcatttaccaacatatagct

SEQ ID NO: 145726 - DNA, 447 bp, Glycine max
  unsure (1)..(447): unsure at all n locations
agcttcagaccaaggcaattcaaaatctatgtttctaaaacccatcaatnnaggggattttcaaggtttgagaagtgaaaatgagaatggggtaattttggagtaaactctcatctcaaacaagtctataacattaattaaacttgctcaaactggtttacggcaaaactccaccgattcaaaatttgacccctcaacacccaatttaccctagaaatggctcttgctntcacctttgtcactcacttttctcatttgctctgcccaagccttcctacaagtcctaattgacattttaaaactaggattaactcactttagcctccaattaccaataaccccaaatttagcttttcaaaccctcaaaatctcacactnttccactcacatcactaccattctcacatttaaccctatgttaactctccccatcatctctaccagttt

SEQ ID NO: 145727 - DNA, 362 bp, Glycine max
cgaagcctattgaagaactcatcaagctgtagcttggacccaaacccaagcaatgtacacaacttagcaagaaccttactagccatgagcacaaacacatagatgatggaaccctgatttatggatccaatttttagcatcaccaaattggggaaccaatttggggctctatgatattgggaaaaataaaagacaaaagtgaatatatagaaagagatggaaagaacaacgccacaatcttaggagatcgataagttgaggatgattcaccataaagaatagaattctttgataagaacctaaggttgcacacaggaaccaagagagacactctcttaactgtgctaatatgacatttcata

SEQ ID NO: 145728 - DNA, 367 bp, Glycine max
catcaaattggagatttccgcttataaaaaagagaacagatggttcacgacaagatgtataagaataacgtcgcagtgtaaacgaattgatgagttaaagtagatctgtcacaaagaatgaaaatctttgatgggaacagggctccagaagaaccaagaaatcctctctttacacaactaaatctaattttagaaatgtcttcaaaatgttaagaagatatttattccttcactaaaatgagcacttgggcccaagcccaaaattaacaaactatagaaaaatacctaattaattaaaataaagctaattctcacacatgagttcaattaccaaattattaaacgtcaacaaaaggtgctaaaaaca

SEQ ID NO: 145729 - DNA, 378 bp, Glycine max
tttaaatatagaatcaactttcctctttattattgcaaaatgaattttctaagatgccattttttggtgcacgagaagtatttgctaatagcaaagaaatcaaaagcacataatccttatcgctgggttagatatgttacccaagcatactcatacgtagcacggttataattggaatctctgcaagaccaaattccgaggttacttgctttccaactcattgattgtcatgtatactgaattattccagaaatctacatgtaacattggttagttaaaatcgatcgtttaaattgcaattgcaatttgcagttaaatttggggggatggcagcatatcatgtgaataaatggcgggctctctgcctctacaagtgaa

SEQ ID NO: 145730 - DNA, 280 bp, Glycine max
ccatctttctaaaggaaatggtggtgggaaaggcaaatcagatcaattatataccaacagttcactaactgtgtatagcagcattcgatctatacattgtgcgacctatacatagcgccctacacacttaagttgctatgctaagaatatggcatacttcttactggaaataactaatctgtttaacaaatgttgttgtacaattgaaccttctgctgctatggcattccacagtttcacttacctataaaaagggccagcgttgatactatgtgggcac

SEQ ID NO: 145731 - DNA, 443 bp, Glycine max
  unsure (1)..(443): unsure at all n locations
agctntaaatatcatctattattatttaaattataaaaaatattattagaaaacgtcgtttagttatggttggaattgaagaaaaaaatatattaacgttagttatttgaattgatacttgatgatttggttttcttattaatttttttcaaaatttaatttcaaatatatttgcattatgatatatatcttttcttttaatttgaattatttcagaaaatatatatttattcatttacttacataaattttatttttaattttattatgattaattctatttttaattaaattaatccgataaataacttgtttattaaatatttttcatgaataaatatcataagagatgaaactttcttaaaataaaaaataaacaaatatttttgattaattntcaatcaaatattaacaaaggggtgatatttcaataatgataaaat

SEQ ID NO: 145732 - DNA, 158 bp, Glycine max
atcttagtcacctctattatcaagagatattgtaagacttcccagtctttaacataaaaacatgcactccaaccatcggtgagagtatagaatatatcactattgttcccaacatatattatgtcaccaacatagaccaatatactgagttgaaagca

SEQ ID NO: 145733 - DNA, 459 bp, Glycine max
  unsure (1)..(459): unsure at all n locations
cggatcttaagcaccgcagctgcagcttaaagctgagctatctatatgtattttttgccngagcacctatnacttatcaaagaacttttatttgactcggcctgatctttttaaaagcctagcctggtgtgataacccttttaaaaacctttttatatttgtttgctttggggtagaaaaatctgaaaaaggaaacgttaacaagaatatgaaaaccaataaaaataatgagtaatataaagacacttaaattgaattaaaatcttacttaattataagaatggaaattatggaacagtaatgtgtaatcaagtctgctagtttcataaaaaaaaattaattgtatccaaaaaataatataaatataaattggtaccacaaaataatatatataggccggcctatcagacttataagactttntaatgcttgatttatgttaattaatacctaaccttt

SEQ ID NO: 145734 - DNA, 384 bp, Glycine max
attcattacatgatatccggagcaactcctaggagacttacacagtctagtcaatcctctatctaaataatcttaggatttctttattacaatattctaagaattgtagattcatatctaatgggttttgctcttgttgggatatccttctcattaaattcttcttcataaggtaatgaaactccatattttttccaactccaaaaggctatgggatttgtttcacaaaattcctttttctattatttcttccaacatctttactatgttttgaatattagaagtgtttcagtgatcttctatactcttatattggatatatatatctacaatatttatgtgtttgttgcgtcctaggattaaaactactctatttatacaagc

SEQ ID NO: 145735 - DNA, 446 bp, Glycine max
  unsure (1)..(446): unsure at all n locations
agcatcttatacaaggcacattctttgtggtgtatctccttcctccatggcttattccctagtggatggtgccttccctctcctcttctcctttgccttccgctgcatctccatggtggaaaatcaccattgaaggacctcattgaagctcaaagatccagcctccatagaagctccacaagcaagcttccatcaactgcagctgcccaaacttttctagtaatcaattacaacatattataatcgattacagaggcttgttctatggtaatcgattacagggagtagtaatcgattaccaaaccctaaaacatggatttttcattaaaactaactatttttcacccacaaaaacatacacatgtagtataaataatgaaaatatacaataataaaaaaacaagtatcanaagcaatcaataatcatcataactctcagacacatt

SEQ ID NO: 145736 - DNA, 366 bp, Glycine max
gatcatcctgcttatacgaatgagaaaactggggcaaatgaagagggtgagaatgagggagaaacccatgctgtgactgccattcctgtacggccaaatttcccaccaacccaacaatatctttactcagccaataacaaactttctccttacccaccacccagttatccacaaaggccattcctaaatcaaccacaaagtctgtctaccgcacttccaatgacgaagaccacctttagcacaaaccaaaaacaaaaaaaaaaaataaaacaccaacaaaaaggaattttgcagcaaaaagcctgtagggttcaccccaaattccgttgccatatgctaaacttgatcccatatctacttgataat

SEQ ID NO: 145737 - DNA, 163 bp, Glycine max
ttttatacaaaccatcgcaaagtatatagaaaatatgctaggcgcgataaaattactcacaacgagcaacagataactgaaagcaataatggcatgtttagttcaattacaatggacataataactgtgagcagattatgtcaaatcacacgaatgtaccaaa

SEQ ID NO: 145738 - DNA, 451 bp, Glycine max
tcatccgcagatccctcttgtaagactaggcttaacttattcaactttatcatcacaacatattcagaaaaccaaaaccccacaatccatccctagtaatttagttatttagtcctacttctatcaagttctaaggcaacagtacatttcccaatgctaaagtcacctaacaatacacacaactgggtgattatgccaagagcattcagtaattaagcattgaaagaagcattgaacacacaaaacacaattaattagatattaaagataattacatcaattgttccttagaaatccccaactagggtgtttagccagccatacacagaaaccctaacacaaatgagatagaaagtacaaaataattgttccttacataagaaaggggatccctcctcctcttcttatcactttacaatcactctaacactcactaatctctctaaaaatg

SEQ ID NO: 145739 - DNA, 429 bp, Glycine max
  unsure (1)..(429): unsure at all n locations
cttaagtcacgaggctgcagcttgtcaacccttttgcataaccatanctctaacatgttgcatgccaaaacatgtatctcattctcttcaattntatccttctaaaacaaagccccgtctattcatataattgtgtaataaaattgaaaaggaccaaggtgaatcctatacatgctagcattgcttgccacaattggaacgacataaggcatagaagaaacaagtgattaaaatcttcttgagattgcccacaaaaaaacatagatttgttgtacttaaactcctcttcactgaagttgaacaccagtaggaagactcatttgcaatagcttttatgaaaaaattaaaaaaattgatggggcaatgtcatgccagaaatttttaagtcttatttgacaacttcacactttgccaacttggaaaaagatg

SEQ ID NO: 145740 - DNA, 416 bp, Glycine max
catcaaataggccaaagtgcgtataacatgaataatttaatcatacacaaagcataatttgtaaaacaaacataaaagattcttaaacatacatatagcaaaacatgaataaaaccaaattgaaatgcaaaccacttattcatatatcacaaaccataaatatcatgttcagccatactaagcaaatactaaaaaaatactaagtgttcaaatgtcataataatatagcctaatacacggctagaaatcaaaatactattaataatggtaatgtctaaattgatggcggtggtggaggtaaatcaaggcagttgcgaatgatggtgacatcttcttcaacctttgtgatccttgagtccatttcatcgaatcacgtgtccacttgtcgtacaaagcatcaaacacttcaccaacat

SEQ ID NO: 145741 - DNA, 385 bp, Glycine max
tccagcacctcggctgcagcttatagcgcggttggagacaaattctttggtctctatatacaaaatgatggggcgagtacattggatttggacaaccttgcctcctgattctactgggaattggcagtggaggacgccccgactttaccacgagctatgtaaccttacgtttaaactttattagcctagcttaagtttttttggtaaagcttgggtatttgttcttttaaaattataatacagggatctttcttcatctgttcctacatctctacccattctcatccattggcatgtttacctcttttatgaaacgggatatccgatgaccagttccccgtaaggactaatacctgggacccgcctatcacttcgagcgtgaaac

SEQ ID NO: 145742 - DNA, 487 bp, Glycine max
  unsure (1)..(487): unsure at all n locations
ttgtgcgttgacccaccagcccataaaactgggattaattacttgttgcctactctgttatattaacagaaacccagtatgtcataatttaaatatttacataattatgatcatatttaataaataaataaattataattgaatataataattataattagacgtgtttttttcttcttttttataaactgtggtcataggattttcggttcatgaactataaattccaaaagttgaaggaattaattaatctgtgacctgtattatgagagggggaataatacactataactctggccatgaaagcctcatcaaaaacaacaccttctccattgcaatccacctcatgcttgtgagtgtcatcatccacaactcctaaccttgcagcttaggggtgatgaatattngcatcattgacgatgaaagactataatattaagtgtatgatattaatataagaaatatatgtgacttatatatcacatgt

SEQ ID NO: 145743 - DNA, 317 bp, Glycine max
attgcgaacaaaaattcgtctaatgcgttggaccttgagacgatgttttaaattttgaaaagcgataagaatcatttaggcattggaccttgatacaatctccagtgatatttgataacaaaaagttagttatgagttggttttatcttggtttgtcttattaactctcaatctcatttaagacaactttacaacataagtgatcggttcagataaactttcaaaggaaaatagaacctcatgaatatggagagatggtgtgccataataacaggggaaccctatgtgccttatacttcaattctaaacaaactaat

SEQ ID NO: 145744 - DNA, 190 bp, Glycine max
caaatgaagagggtgagaaagagggagaaacccatgctgtgactgccattcctatacggccaagtttcccaccaaacccaacaatgtcattactcagtcaataacaaacctcctccttacccaccacccagttatccacaaaggccatccctatatcaaccacaaagcctgtctaccgcactttcaatga

SEQ ID NO: 145745 - DNA, 458 bp, Glycine max
tttgcctcactcaccgcacttttggtttcatttctagctatcttatacttatcccaagtttcagaatttctacacctagaccactccttgaaacactccttatttactctaactttgctctgaacactttcattccaccaccacgattctttacccctatgtccaaaacctctatattcacccaacgtctctttagccactttaataatctcttgggacgtcttgttccacatatcatttgcacttccttgtgattgtccacaccatacctcccatatcttttgttggaagattccttgtttctcacccttcaagtgccaccatttgatccttggtgctaccatatgacttcttctctttgccctatctctaattcttacatccataaccaaaactctatgttgggtagtcaagctctctcccgggataactttacagttcaagcaatacttcctatc

SEQ ID NO: 145746 - DNA, 320 bp, Glycine max
  unsure (1)..(320): unsure at all n locations
atgatgatngacaatgtgcctctggttatctgttatgttaacataaaaatttgtcgcttatttgataaacaaataattgttgctactataataaagtacgcatgtatgataaattgttgtctgagttgacaatacattgggaaatgcaagcgtgttaacatatagtgtgacaggacactgtaagacttgactacacattgggaaatgcaagtgtgttaacacaaagcgtgttaccatgtcacatcattggtgtgattgacaacacagacaataaccatgtgcacgcgtttgtttttattctaaaatattgaatcaattgt

SEQ ID NO: 145747 - DNA, 423 bp, Glycine max
  unsure (1)..(423): unsure at all n locations
tcaatggctcaatgagcaaggagaaatgatcttcttctttctattaagataccctntttctataagagactactgtgatgaagttttatgtgatataatccctatggaagtatggcacatttngttgggtataccatggcaatttgacaataaagcaatcaacaatggtctcaccaatgaaataaccctcacccatggaagcaaaaagttcaaactggttcccttgacaccttcacaagtggttggggatcaagtacaaataaaactcaaatgggatgaggaaaagaatagaaaaagaaaagaagaacaacctttaatggttaatgatgagtgtaacgagatacgtgtctcctccaagaagttagcctataaagaatgtcattttgcaattaagacaaacatttaagataactttcttcttat

SEQ ID NO: 145748 - DNA, 412 bp, Glycine max
gatccttaaagtcaccgcggcatgcagccttaatgcacttgaagcatctttcttgagcttatagacagccccaaaccagctcatttggcctcaatatctgtcaacattgggaggttggatcaaaggccttttgcctctcaaacagaccaacattgcttttacccctcaacaatttgaaggcatctctcagatttgacacttgtgctgccttcttaattctcactcgcacactgtttgtctgctctgaagctattactcaaacccctctccttatgcttcttatttgttacctcaaaaaatataccaacttttggcaggaaattttgaagtcccaagactattttatagttatttcaaaatgtcttgaaaacgtacttgtttgtttatccccggaattttattatacaatttt

SEQ ID NO: 145749 - DNA, 462 bp, Glycine max
tgtttaagaacttagaaaatatcaagaacaagcttgttttctcatctttcgtgtgtatgacatccactccacattgtttgaagtataggagaccttcaatcctattacgcaacgtggcggacaaaagtgggcaattaacttgaatggtcattattgtcaatgcggaatgtattatgcgcttcactatccatgttcacatattattgcatcttgtggttacgtgagcctgaactactaccaatatatagatgttgttacacaaatgagcacatcttataagcttatccctgacccaactacaattcatgcgaaaggttggccataatcaacaaggataatgaatgagatggattgggtcgaaccatctgagcactgacataatgcattttattgggatccgaatggcataaaaggcgtcgctgtccaatgcaatcctagcgtgggagtagttcatatcattga

SEQ ID NO: 145750 - DNA, 249 bp, Glycine max
acctctctgccacaacacacacacacactcactcaccttattatattaaccgttccactaactatactccatccaaaattgtcactctctctacctctattactcacttgactgcactgcgacgtagtgattatggaatagctgagagaaagagagagagagttgtaaatcacaaatagggtgtgactgttgtgtatcttatacaaatgggctaattagtaggcatattgttagctattgttcgcatgg

SEQ ID NO: 145751 - DNA, 228 bp, Glycine max
atgtttcttcaactcaaaaccctatctcctcctctaacatagctgtcttgggacttgaaactgacacataacttctcccttggctcggtattacgacttcttttctatttggagccaacttcaatgtgtcaaagactactcggatcgttacatcgttcagaaggcttacttaatcgagacatggctctcttaagcgagtaggtaatgtgaatcttgtgtcttatacga

SEQ ID NO: 145752 - DNA, 220 bp, Glycine max
agaaactttttattttgacataaagaccggtgtcttacctctgtcgaatgtactcgggattgacaggagttgttatttcacgaccgaaacgataatgttctttcatccacgcctccactggagaaatggggtaatccaggggtgataaatttaccagcggagtcttgtgtaccaaaatcacgatggctacaaatgctttcccaaatttttttaggtaaaa

SEQ ID NO: 145753 - DNA, 478 bp, Glycine max
ctcataatctacacgagtaacaaaataattaatatatatttacaaatgcaaccaatgtgagacttacaacattgtcctataaatctaaacctgactagtacattgaaaaaatttagctgaaaaaaacccgattctctaaaatccaccaatttgaagcacatcattaacattaaaaaaattaacaaatattggtgtggggactatggactgcaaaaagtccattggtatatcctgatgaatagtagaaagtgttattaagttgttaattatatatgcatttactataatattacactttaagtttaagtttccttttgtttttctttaatatatctaagatgtctgtctataaattgtatatcagcacatgttaaactatatatggcttaatccgcgtaattaacacctttcaacatattttcataataacaaacatttatgcagaaatgtcagatcgaatatatgtttaaaaaagcaa

SEQ ID NO: 145754 - DNA, 275 bp, Glycine max
cccatgctctggtggaaattgttgctggcatggaacccactgataaggatggactttcacttgcatatgggcttgctttgattgggaacattgaatatcataattggccggccttttgctctctttgccaaatgattggacaccgactagcaaactgtatacctgtgtctggtgctaatattgattccagctaaataaccactgattgtccgtccatagttcagccttaaatttgtgaattatcgtccatgccagagcccaatgcttcatctccc

SEQ ID NO: 145755 - DNA, 378 bp, Glycine max
gcttcaagttttgaagccctagtgggattgttccattgtattgttatgtgaaagatcaagggaagtatgcacaggtagctcagcaagggaagagggtatgtctcctgttagactgttgtcagccaaagacaatgaaactagtttcctgcattttttgagctctgggatttcaccagaaagagaattgtgggagagatttactatgctcataacaggagagtcacaaaatgttggaggaagttcaccataaaaacgggtgagagaagcataaaatctgtgtaagctcttgacaggccaagaccttgaggaattttaccagcaaagctgttgttggcaagctgaacttgctccaactgtacagctcctgaaactgactca

SEQ ID NO: 145756 - DNA, 487 bp, Glycine max
  unsure (1)..(487): unsure at all n locations
tcctcataccaatttggtcatatgctatattctagattttatttttataccaatatacccatctctgaatatagatgattcaaaacaccaaaacattataaacgaaatgatggtatatcaattttcattaagaagagaatggcatgccttcattccacatgtccctcctaatcaagcagttctgagaagatagaattttcaacaaggatataatccaacatacccagctgtgtctatgagaaggagggttggttcagttgaagttgtccgcttcacaccctcaagatcatataacatatgtgcagtaacactatgatgagccttgatctgttatcacataatgccaagcataatgatcaaataatatgtttacaccccccacccncccaacataatagatatttgcagttcaggattgataaattatgccttgtagtggcatataaagattgctttacaatgaatgcaatctcgatacacactttat

SEQ ID NO: 145757 - DNA, 413 bp, Glycine max
  unsure (1)..(413): unsure at all n locations
ttaagcacctgcggcatgcaagctntgtgtaatcgattatactgatttggtaatctattaccaatgatagnttctgaacaaatcagaagatgtaactcttcaaatagtttttgactttttcaaattggtcttaagttcttctaaaggtcataactcttctaatggttctcttgaccagacatgaagagtctataaaagcaacgctttgttttgcatttcatatctatctttccaattcattctttagacaacaaaattttgccaattgatttctgagtctctttgaacttcttcttcctccttttgccaaaagctttccaaacttttttggttttccaaaccttgaaaacctgtgctattcattcctgtagtgtttggctctactgagctntaaaagattggctaagattttg

SEQ ID NO: 145758 - DNA, 484 bp, Glycine max
  unsure (1)..(484): unsure at all n locations
actttgtcactccacccatatctggctntgatattaaccattcttatttctgccgacaacagcgtcaacgaattcttgcaccccggatacaaaggtttctttgaatcagtttgtaatgtatcatacataggggcatgtgcttgctgaaaagactcttgtccaaggtcacgaatcatatcctccaagcgatctcccatttctacatcaaacggttcggattgttgcccactctgcatgtctgtcatttcaccatgccatatccacgtcgtataattcctcttaattccatcacacaacagatgctctcgtatgtcatccagtatgtgtcgtcttccattcaaacaattgatgcaaggacaataatattttccatcttcatcctgttgacctctttctgaacaaaatgtaagaattgctcgacgccttcctcatattctgggctgatgcgactttcattcatccaacttcgatccatctaagtaat

SEQ ID NO: 145759 - DNA, 321 bp, Glycine max
  unsure (1)..(321): unsure at all n locations
tgttcccaagtgnctgccgtcccataccaaccattcttttggtgatatgctgcctaactagaaaaacatgatacctacttataaaaaattccacattatgcccttttctgcttgagtaatgatatccatacatccacatcctgtttctacccatttgcacccattgtctctgaatctctcgttattttttacaacatcatttgtcacatgattgtctttcatcagaacctcttccagagaataagaacacaatactaatgagaaaaaggggttaactcaccatttgattaagtattgcacttgaccctgtgatgggcaaca

SEQ ID NO: 145760 - DNA, 477 bp, Glycine max
ctaagcttatgcttaagtatgtatgggcaaacttcattactattgttctatacatacaagtgagcttgttacatatcttctacactgtgagtgatcacatgcagtcctcttgaacccttaccacccactctgtcatcatgccgatactcaagaaggccaactggtttagccttctgaatgtattctgaacaaaattcaatggcttcttctgcaatgtacctctcaacaataaatgcttctggacgatatagattctttgtatatccttataagatcttcatgtatcgttcaaccgggtacatccaccgcatattaacatgaccacaacatttgatttctctgactagatgcacaatcaagtgaatcatgatgtcaaagaaagcagggggacaatacatctgcaactagcactgtataattgcggcctcattgtctagctcatcatacttgacaggatcaacgactgtgctacatatc

SEQ ID NO: 145761 - DNA, 262 bp, Glycine max
  unsure (1)..(262): unsure at all n locations
aaatatgatngaatatcgcgtcgcttgttatattggtaagtcacataaacttccttattctctatctcaaactatatattttgctactcttgaacttatatacaatgatttatggtgaccatctcatataccatcctccaatggatcaatatattacataagctttgtcgatgcctattctaagatcacttggatctattttcttaaaaaccaatcagagacattttctatttttaaccctttaatgtggaagcaatgcttt

SEQ ID NO: 145762 - DNA, 468 bp, Glycine max
  unsure (1)..(468): unsure at all n locations
tngctatgatgcatgtgttactgctaaggtgtgtggtgtctgttaaagataacaatatagttgatacacttccatttatcatactgtcatctcattgaaagttgcatccccgacaacaaatatttccttactatcatcgttcgaggtgtgtatgtgattctcacacttatgtgcttaagtattataagcaatggttgacatgttactattctttaatagtacattgtaattcattgagtgagccatagttccccgtttgagattgaatacaacgattaatacggacagtttggattaattattgtattcaatcttgaattgtccgtttggacagcttgggaagacaaattgtttttacttcattctgacttataagttaagtatgttgtgttattttggactaaatttcgagcaatgcatcttgcttngttctctgggtgaatacatgataagcgtgatatgatgtca

SEQ ID NO: 145763 - DNA, 210 bp, Glycine max
  unsure (1)..(210): unsure at all n locations
tcaatggggcanaacacaccaaaagattatgatgatggatggctcaaattctcacaaaggtaaacttatcactttcaaattgagctttcaaaactatcatgacatgtagaggaaaaacaaggatttcanatcacanaatgtcaagagacttttattttcagaacaattacccatttcttgaacatatcctataattcaaataaaaatatg

SEQ ID NO: 145764 - DNA, 446 bp, Glycine max
  unsure (1)..(446): unsure at all n locations
tcttgattcttgattcttgatatcatgtttcctcttgaaccttgaaatgctcttgattcaatcttgaacatcttgatctcattctttgatttcttgagatcatcatctttgttatcatgaagtgttcttgacctttgagctttttgtcatcacctttgttatcatcaaaacttctttgaatcaatcttgattcatcatgaagcttgcttctacatatatatgttttaatttgatcatttttttgttatcaaatagttggtggtcaagaggaacaagtggcagggattggtgctgtgggtcttttttgtctatatatcatgaatcaatgacaaaggaagcatctcaaatgagaaaataaattattgaaatctatactttctaggaattcggatttctctaataattctaaaaatctgcactttcatatttggttttaatnttcttca

SEQ ID NO: 145765 - DNA, 424 bp, Glycine max
  unsure (1)..(424): unsure at all n locations
agcttcgtcagtgcagggtggatgtgcgatgttcatgttaccgtgataaacgaagaaacccctcgagaccaaccaatttgggtgtggtcgtgtcctccagagtttgaattanggaattggcaagtcatcaaacaacccgggatttccatggcaaattcaatgtaattcagtagtttgaaccctattgttgggcctaggctttagggtttgcttcctgtttgggcatatctttttgttcccataaattgtaaacacacaacccttttttatttgatgtgttccatcttgcactttcgtctattttcattcttctgcatatttattttttgtgcgattaaatgatttgacgtagatccaataatgagtcctgtgaaagtagtgatactgaggacccgaatcttgattntgagaaactaataaatca

SEQ ID NO: 145766 - DNA, 479 bp, Glycine max
ctggaaggatgcttcaatggaggaaaagaaagatggagcttattatagaggggggagcacgaaattgaaggaaaaaaagggagagaagttgaactttgagttgtgtctcacaagactctcattcatcaaagttacaactagtgttacgcatgattctatttatagactatgtagcttccttgagaagcttccttgagaaaacttccttgagaagcttctttgagaaaaattccttgagaagctagagcttagctacacacacccctctcataactaagctcacctccttgagaagcttccttaagaagattcctaaagaagctagagattagctacacatacctctctaatagctaagctcacctccttgagataaaaagctagagcttagctacacaccccctataatagcttatctcacccccatgacaaataaacatgataatacataaaataagtctgtactacatagactactc

SEQ ID NO: 145767 - DNA, 419 bp, Glycine max
  unsure (1)..(419): unsure at all n locations
gcttctntggaatcttcttaaggaagcttctcttggatgtgagcttanttatgagaggggtgtgtgtagctaagctctagcttctcaaggaagttttctcaaagaagcttctcaaggaagttttttcaagaaagcttctcaaggaagctacctagtctataaatagaagcatgtgtaacacttgttgtaactttgatgaatgagagtcttgtgagacacaactcaaagttcaacttctctccctttttcttccttcaatttcgtgctccccccctctctctttctctccctctttcttttcctccattgaagcatcctctccaagcttcttatccaaggctcatcttggtggtgaagctccttcttccatggcttattccttaatggatggcgcctcctctcacctcttttctttgtct

SEQ ID NO: 145768 - DNA, 452 bp, Glycine max
  unsure (1)..(452): unsure at all n locations
gtgacactataaaactaagcttgttatattaaacgacaatactnttactcggatgtctgattgagtcccgtaatatatcgagacgctgaaaattttaatccgaagctctaagaaaattgaattgacaataactttatacacggatgtccggttgagtcctttaatatatcgagatgctccaaattgaaaacggaagctcgtaggaaattcaaacgacaataactttntactcggatgtccgattgaatcgggtaatatatcgagacgctcaaaattgagactagaagctctaagcaaatggaaatgacaataactntatacacggatgcggttgagtgccgtcttatatctagacgctccaaattgtaaatggagactcttttataattcatacgacaataatcttttactcggatgcgcgacagattgtccttgattatctagagatgctc

SEQ ID NO: 145769 - DNA, 446 bp, Glycine max
  unsure (1)..(446): unsure at all n locations
agcttcaagtccctcatcgctcaagatatactcttgaatagtgtttcactccctatatatagagatcttctttcttcatttttcttgcctcagttgagaagcatttcctcaacttttctttctccctctcatatttcagccgatacatttccagcaaacttctccctctttcttcctgtcgctctaaaaaatttcggttggctataagagtgactttttaagtcataatttcggttggctataagagtgactttttaagtcatatttttggttggctataagaacgaatntttaagtcataatttcggttggctataagagtggctttttaagtcatattttcggttggctattagagtgaatcttcaagtcatatttttggttggctggtagagtgactttcaagtcatattttgggtggcttagagtgactttcaggcatacag

SEQ ID NO: 145770 - DNA, 472 bp, Glycine max
  unsure (1)..(472): unsure at all n locations
catacggacctttaatactcagcttaatatgctcttaatccacgacgttgcacttatcgcctccctcgtgcttagcgcgagtaagtggatntgagcttatcgccagtcatgcgctgagcctgtctgaagataactgccgcacttatcgcgcgaccttgatattgatgctctgccagattcttctattgcgctaagcacgttgaatctgcgcttatcgatggatgcacacttatcccaactgatgagctaagctcaactatcccttttagcacttcatgacttagcctctttttaacctgaaattgcacagatttcatcattaaatccaatagaaatattctagagactgctttaacaataaaacaagatttatttacaaaattactacaaaataaccataaattgtggaacttcacaagttgtggaaaatgttttctatacaaaatttatgcgtataagacgactaacagct

SEQ ID NO: 145771 - DNA, 328 bp, Glycine max
  unsure (1)..(328): unsure at all n locations
ccaaagcgagcaatatattgatgcaccttcaagactntattcttatncattgactctcttatgttcctttgcctcaacatttccatttgtctccaattgattgcatgtttggatttttacaaaacttgtccattggcctttttttagtctcacactttgtctttgcggccaaagcagtagcattgctagagtcctcatactcatcttcactttcatcacatccaagtggttcactagattccaaatctcttatttttggcatattaccaccaccagtactattgtaagtgggcccactctttttgttagccatatatcccctgagctc

SEQ ID NO: 145772 - DNA, 351 bp, Glycine max
tggtattggaaaaatgataaacgcttaaatggatttaatttgggggtcactaaactaatgtctttatggctcgtgtaacaaatatatggcaacttcatcaacttgaactaatttccttgatgccccatattgaaaaaatgatgagaaatttttaacaaaattgagaacaaatgcagaaaaaagataacttaccaagtaagttaacatagtaacattatgaatggtcttgcttttaaaacacagttaggaggtcatgcaattttccactacatatacttgggaatatgaactaaattatatcttactaagaatgagtctttttttaagaataatgctttattaaatgcatac

SEQ ID NO: 145773 - DNA, 429 bp, Glycine max
  unsure (1)..(429): unsure at all n locations
agtcacctgcggcatgcaagctngctagtcttctataaagatctatctcttggttggaattntgggctggttgacttcgttactccttgttgaactggttccccagatgattcctcgagcttgagccctgtgtgaaattcatcccttggttgaatctcgacggtcctccttggttgtagccttggaatccgtggtgattctgagctcccatgtagtttatacccctggaagaatcttcttgggctatgcattgccctggctcatgtgctcctccacagatgtggcatccccttatttgcacaactgaagagtgaaagggacttaccctagttagttgttgtggaagcttgttgagggtctctgttagggtctctatctatcgggataatagcttgttttgggccaatgttgcatcttgggctgtgagtt

SEQ ID NO: 145774 - DNA, 472 bp, Glycine max
  unsure (1)..(472): unsure at all n locations
ttcatactcagctcatgaaagtggttggctggtgtttattattgagtctgagaacgatctgaaccaagtcctctctgcaggcccttacttcatatttcaaatacccctactgctgaagattatgtcagcattctttgactttggctatgaggagctcagcaagatccctgtttgggttaaactcaaaaatctttctctggagacttggaatcctcaagccttatggaaaatcctgtccaagattggttcgcccattcgatctgaccatcttactgcttctaaggggtctgtttcttttgctagagctttagttgagggtgatgcttctttggagctcatcgatgaagtgcgatntagacttcttacagggaagacttttgtgcaaaagaatgagtatgaaaatagaccttcttgntgactcactgtaagatgattgggcaccgcctcactaattgtaaaactgtcactgcat

SEQ ID NO: 145775 - DNA, 334 bp, Glycine max
  unsure (1)..(334): unsure at all n locations
ataaataaactaccattntatcgattttataaagcaaggtatttatttattgaattggtccaagtggccaaccgtgtgaccttgattgcatcaaaagtacatccacgcatggctcagccacagtttccacggaccttgttccatagtcactccctcctcgccattagtactatcatacaaaattaattaaacaacacacatttaaaatcttatacagnactgtatattntagtgtatttttaattaaaaataaatatttttcttaaattattttttattggaatttaattaaataaaacataaataattaagaattttttatatttataaaaaa

SEQ ID NO: 145776 - DNA, 462 bp, Glycine max
aaatagtgcagcctgctcatgtcttctttttatcttctagttgtttcatgtatcgtgttaaatgcaacatcctaaaactaatgtaaataaatgaatcaatgagaggcttttgtcaatgtcaatcttttactttttaattaattagtacatatacaatactttcttcgtaccaaaactattttatgttttaatgatttacacacgatccatcacagacataccacacatcatttaaatgaatggattttttgttctttactatataaaaataaaaaagctttttttgtgtccaaacacgaaacttaaattattggaagatcaaaatcatatattttatattataaagacaagaaatataattaaaccgtaaaaaataactgtctcatcattttcatactttcacatgattatatgtaacaattcataatgtattgtttctatatacacagtgtagcattattt

SEQ ID NO: 145777 - DNA, 328 bp, Glycine max
  unsure (1)..(328): unsure at all n locations
ctgcagctngaatgatgaagtgtggaaaggtgagatcttttatctnttattcgttgaccacagagtggtacctggagatatgtcgcgggggtcaggagaccttggggacgtcaggtggggtgctattgcccaaaaccaagcttgaccaatcccgacccaacccgggcatagtcagttagtgagaacctgtgatgtacctaaacaggcgagctcctggcagtctacagataaaagaacaaagaccacattgcaaggaggcttgtgtggtggctggccagctgtgaactttgattgatatatgggatatggcctctggtaatcgattacc

SEQ ID NO: 145778 - DNA, 432 bp, Glycine max
  unsure (1)..(432): unsure at all n locations
ctatggctggcanggttaatctgataaatattgtttttatctctntaccaatctatctattatccttctttaagttaccccaaagaatagttgatagattggtttctctgcaaaggaattttatgtggggtgggggcatgatcaaaataagattccttgggtcaaatgggatgaaatttgtcttcacaagaaagaaggcggtttgggaataaaaaatatgattaaatttaatgctgctctcatgggaagatggatttgggaattacattctaagcagaatcagttctgggtcagggttataaattcaaagtatgggggatggccagccttgcagaatggcagagtccattgctgggactcccattggtggagagatctcatgaagatatatcagcacaatgacctcaagattattcatcaatatctggtgtg

SEQ ID NO: 145779 - DNA, 313 bp, Glycine max
  unsure (1)..(313): unsure at all n locations
agcttgttgagttgaaaaagtnagactttgtttcatcnacgaaaatagagaagtcaaagaataaatgtgtcattttacctctagcctctaatgaatgtcaagagacaaacattggtgctaatccaactaaaaaacatccttggaagtttcttcaatgtgaaggtagagttgaaggagaccaagcttaagcaagggtcatatgctaaactagtggtgttgaaagagagcactacgagatcgaaagcctgcctgacaagcaaaagtccaaagcaagtgcgcaggctgtttaaggagcgaccgggataccattcga

SEQ ID NO: 145780 - DNA, 476 bp, Glycine max
tgatgaacacccaatattctttatcttactatgccattgtttgctctaaacaaattagaagagatttattggttgagtttgctcactaattaaatctatagtcatcttatatacaaatatacaataagcacttagtattttctctcaatatattcaaagtattttgagagcttttgaattttacagtaaatatacagaaaattttatacgaaaagaatgaatgaatatttgcacgtaaggttcatgactctcttcttcaaaatttctggcatttataaccttcatctgtaagtgttagttgtctcacaacaattggattcttctcttgttctttgtgtgatgataatgatcgttgaaacatttaatgtttgcgtaaaatgcacacctcttcttcatggtccactcctattgacattcatgttgtgcacttaaaaagaaagtcacttgtcattcgtcagactaagtctgcatagcag

SEQ ID NO: 145781 - DNA, 418 bp, Glycine max
  unsure (1)..(418): unsure at all n locations
agtacctgggctgcagctgctgatcggtaaatgaatgctcttatttctattccaagtncaatttcatctcatcggcacttgattctttgctccacaacaagacgattctggcatctcctcatggcgctgcgagctcacagaaatcgccatttcatgtacgcaatattaagctgaaatttcctagatttgatggtaagaacgtcctcgagtggaattttcgtgctgcagtaatttttaattattatgggactgttgatagcgagagattgaccattacctcagttatctggatcaagatgtagtacctggtttcaatgatgcataaacaacccttcattctggaaagattanagagcttgtctccttttgtcctccttttgatgccttaaaaaattttaaaaacaaatggttgtgtgaa

SEQ ID NO: 145782 - DNA, 474 bp, Glycine max
  unsure (1)..(474): unsure at all n locations
ctatcgatctctctatgggttgaagcaatctcctctagtctggtttgtgtaattcagtagtattgttcaactttttgggctaaaacgtagtgaagctgatcattctatnttttactgccatacatcccctgcgaaatgtgtgtatctaattgtctatgttgatgatatagtgattacagggaatgatactactaatattgttcagcttaaatagcacttgttcaaccatgtccaaaccaaaaatttgggatatttgaagtacttccttggtattgaagtggctcaatcaagagatggtgttgtgatctcacataggtatgcactcgatattttggaggagacaatcatgcagaattgtatacctgttgatatgtcctatggatccaaatctaatgctcatggctgatcaaagtgaagtatatcctcgacctgagagatatatgagacttgtgtgaacacgtatttatctcacca

SEQ ID NO: 145783 - DNA, 276 bp, Glycine max
  unsure (1)..(276): unsure at all n locations
agcntttgcatgtgtatgaagttcttttattttatatgtccaagtccaaagagttttgagagattttgctgtgtgaagatctacagagacgagagctctaagctgaatccgttctgatagcttgagatgattttgtgagtgattgtgtgatcctaaaggtgaatgagacatcctcaccacttgtatttttgatatctttcatcttgttgttctctatgttgaaataaagctctctggactatggagagcttaatcctctgctggatcttccctgta

SEQ ID NO: 145784 - DNA, 439 bp, Glycine max
  unsure (1)..(439): unsure at all n locations
ccggtcgaagagcgatgtacgtttttgaacgatcacggtatcgatcacagatatgttatggaagcattacaaaatcacctctgccttgatgtttcttcttctttctccttcttctcactaatttctctcaaatcctcttgatntctaatgctggatccttccttcagctctcctcacgcctatttataggaaataaggggtggaggttgcacagtatctcgcccatgcaagctggttacttcatccctaatctttctagtgggcctatgggctgaaaaatgtcccaaaagtgaccattttgcccttctttttttgaatattttgcacatttacttccggaacgtcacaaaaccctacggattgcgccgacatttgtgttaagcagctcaattctgtcgactagaatccaaatgttggctacaatcatccttggatgaaa

SEQ ID NO: 145785 - DNA, 297 bp, Glycine max
gaaaaaaaaagaggggaagtaaaagagagaaaaaaagagaaaaaaagaaaaagatggaggagaaaaaagaaaaaaaaaaggaagaagagggaggaggaaagaaaaaaagaaaaatgggaagaaagaaaaaatgaaagaggatggaagagaaaagaagaaagagaaaagaaaaggagggaggagaaggaggggaaagaaaagagggaggagagaatgagaagaaaagtaaaaaagaaagaagagaggagggaaggaagaaaagaagagagatgtgaggaaaaaagaaggaaagaaaaa

SEQ ID NO: 145786 - DNA, 393 bp, Glycine max
  unsure (1)..(393): unsure at all n locations
agctntatgaaagtttttggttttctaaaccttgaaaacttgtgctattcattctcttctcccttngccgaaaagaattcgccaaggactaaccgcctgaattctttttgtgtctctcttctcccttttccaaaaggacaaaggactaactacctgaattcttttgtgtctcccttctcccttgtcaaaaaattcaaaacgacacagtctgagaattcttttgattcttccctttccctaatacaaaagtgttcaaagggctaaccgcctgagaattcttttgtatcctcattcacaaagtatcaaaggtttaacagcctgagatcttgtcttaacacattggaggtacatgctttgtggtacaagtaaggatacatctacttgggttgactg

SEQ ID NO: 145787 - DNA, 417 bp, Glycine max
  unsure (1)..(417): unsure at all n locations
ngagatgaggaagtgtagaagggtgaacttcctgcttttattgntgaacacatagtggtacctggagatatgtcgcggtggccatgagaccttggggacgtcaagtggggtgctattgcccaaaaccaatcttgaccaatcccgacccaacccgggcatagtcggtcagtgagaatctgtgatgtacctaagcaggcgaactcctggcagtcaacagtataaaggaacaaagaccacaaagcaaggaggcttgtggtggctggccatctatgaacttgattgatgtgtgagagatggcctctggttatcgattaccaatggtgggttatcgattacaacgcttaaaattgaagacaagaggctaagatggtctctggtaatcgatatccactgagtgcaatctagtaccacgcttga

SEQ ID NO: 145788 - DNA, 286 bp, Glycine max
  unsure (1)..(286): unsure at all n locations
agcttctcaaggaagctacctagtctataaatatgaattatgtgtaacactcattggaactctgatgaatgagagtcttgtgagacatacttcaaagttccacttctctgcctcttttnttcggtcaatttcgttctccccccatctctctttctctccctttttcttttcctgcattgaagcatncttccaagcttcttatccaaggctcatcttggcggagaaactccttttaactggcttaattcctagaggatggagcctcctgccacctctttcacttgaa

SEQ ID NO: 145789 - DNA, 424 bp, Glycine max
  unsure (1)..(424): unsure at all n locations
gacacttaaaactaagcttacgattggtcttaccgacaaaggacaaagtgtgttttttatagaaatctatcatcctgattgatgaatcgaaaattgggcaaatgaaacgatgagaatgatggagaaacctttgctatgactgccattcctacacggtcaatattttctgtcatcccaacaatgtcattactcagccaataacagttcctctcacccaataatccacaaaggccatccgcaatcatccacaaagtctgcccgctgcacatccagtgccataacaccaaccaataatgaattttgtagcacaaagcctgtatgattcaccccaaattctagtgttatatgccaacttgctcttatatctacttgataatgcaatggaagccataaaccctgtcanggttcctctacctcccatttt

SEQ ID NO: 145790 - DNA, 324 bp, Glycine max
  unsure (1)..(324): unsure at all n locations
ttagcacctgggctgcagcttctcgattatacgtccanattcagcatccttgtgtatagttatgaccattcgaatttctctagagcttccattgttcaatntcgagagtctagatgagttatgtacgcgaatcggacatccgtgtgaaaagttatgaccattcaaatatcttgagtgcttccgttgtgcaatttcgagcgtgtcgatatattatgtccnccaattcagacatccgtgtgaaacgttatgaccattcgaatttctcgtgagcttccgttgttgaatttcgagtgtctcgatatattatggcccaaaatcggacat

SEQ ID NO: 145791 - DNA, 477 bp, Glycine max
tagtgtgtaaacgcgtataaacagattctacaccctttatcattcatgaacaacatgctgagtgggtaaacgcgtagatatagatcttgcgccctttatcattcacgaacaaacaagctgagtgggtaaacgcgtagaaacagattctgcgccctttatcattcaagcacaacaagctgagtgggtaaacgcgtagaaacagattctacgccctttatcattcaagcacaacaagctgagtgggtaaacgcatatatacagattctgcgccctttatcattcaagcacaacaagctgagtgggtaaacgcgtagatacagattttgcgccctttatcattcaagcaccacaagctgagtgggtaaacgcgtagaaagagtttctgcgccctttatcatttaagaacaacaagctgagtgggtaaacgcgtagatacagattctgcgccctttatcattcaggaacaacaagctgagt

SEQ ID NO: 145792 - DNA, 507 bp, Glycine max
  unsure (1)..(507): unsure at all n locations
gtcacctgcggcatgcaagctntgcggatttggtctttgctggcgaaatgatctaagtgagtctaaaaagaggcaaattgatcatcatgctttgataaattcaaaatctggcgcaaatgaagagggtgagaatgtgggagaaacccatgctgtgactgccattcctatacggccaagtttcccaccaacccaacaatgtcattactcagccaataacaacccttctccttacccaccaaccagttatccacaaaggccatccctaaatcaaccacaaaacccacctaccacacaaccaatgctaaacaccacctttagcacgaaccaaaacaccaaccaaagaaggatatttgcagcaaaaagcctgtagaattcaccccaattctgatgtcatatgctaacttgctcccttatctacttgataatgcaatggtaaccataaccnctgctaggtttcctcaacttccattttttcgaggatacgactcgaacgccacatgtgcatat

SEQ ID NO: 145793 - DNA, 502 bp, Glycine max
aaaaaaattgattctgcatcgaaacataaatactaaactttgagacgcctttcataatctcactagacattttgttttagtcttctaactcattagagacatcaatattaaagtaatcaatgaatcttgaggcaagtacaacataaaggaaattcataatccaccaggcaacgactcttcagcataatgtcttcaatcaacaatatctaactcatcttgatacctgattttagaccataagcaatctatagatcatcatctattacatgagcatgattgcttggccttggagtgagaatgtaggtaatgaggtaaaccaccattctgtcttctacagtcagtccaccaactcccaagaaattcctcaagcatttcattgaacttgcggactccacccatgtccataccaactactttcttccacacaacaacatcaatgaccatatctactccatttacagtagagaagaggttaccttaatgtcaacacgtgcatatgtgt

SEQ ID NO: 145794 - DNA, 135 bp, Glycine max
ttaaatatctttcggtgcccacaggaccttttttttaattttcccaaacagagtaatatgagtggagccaatcggggcgcaacttatcattataatggagaagacatagccctatccgatagtttgctctcaaaa

SEQ ID NO: 145795 - DNA, 294 bp, Glycine max
agcttatcttatggattagaacaagtgctctttttattttccacactccagattatatgcttttgacataatgcactgcttatgtattatgatgtgttagcattgatgtaaaacttgttagcatgtgatgatagataaggctactttcgtaggctttgctttcaagatgctctgctggagggtaggcaactcttatacactgtgatatgttccgacaagtacttccataggaagcaactgtcatgtgtcttgctgatgcaggcttcttcctagatgagtaggtttctctctaca

SEQ ID NO: 145796 - DNA, 445 bp, Glycine max
  unsure (1)..(445): unsure at all n locations
tgttcagatacgtgcatttgtgtgcnatacacttttcctggttcaccacaacaaaatggtgtatcagagatgcggaatataactttaatggatatggttaggagtatgttaatctattatactttatccgtatccttgtggatgtataccttgaaaactgtcatctatttgttgaacagggttcctattaatgtagttccatagacacctttagatctgtggacaaatatgatacctagtataatgcacctgcatgtttggggttgacaggaacaaataaagatttataatctgcaagaaagacaattggatgcaagaacaatcagtgaatatttcattggttatccagacaagttaaaagggtatatgttttatagttctaatcatagtatgataattgtcattactggaaatgcaaggttcattggatatgatgatatctgtg

SEQ ID NO: 145797 - DNA, 484 bp, Glycine max
  unsure (1)..(484): unsure at all n locations
agcttctagtcgtccatagacctcctctgtgttactgtctatcaaacgttgcatctgtgcattcatcgcatccactaacagacgttgagcgccgtccaactgatggtactcgtcaccaccaccacctgctccagccataattcaacaggaaaaaaaaatgtgcaataaaaattattaaggtttcaggacctcacaacactctactcacgtctcttagatggtagtacactcgtgtntaatgctctcaataggcttttgtgtaatgtattccctcttgccttttaccactcgtgtttcctcttaagttcctggatggaccaaattagacacacaaggtaatataaaataaaaggaaagacaatataatgatcacaaacagatttgatttgggataacaacttggacatgaattggataataatatattagatctggatttggataacacgtgagctntaatttgggtaacagatatgataacaaa

SEQ ID NO: 145798 - DNA, 474 bp, Glycine max
  unsure (1)..(474): unsure at all n locations
ctaagcttacaacagatttgtaatgacccactaacctatatttttataacttaatgccattaacctanggaattaaaaaaacttaatggctgagtgttactgaaattgtggcaaccaaaagtcacccccaacatccaacaagtcatccaccatttggtctcccaaaatgctgacgcctatgttgccaattgggcccttattacaacttgaactaaacctaactaaaacccttttagttgattaacccaaaacatatttttggtcagacaactttacaaggattgggccattatttatacaaactaaacactctaaaattgaaacaaagtggtgtcatttagtcctcctccatttgggccatgatacaactcacaaccttggacttttctccttgaaacttgggcttgtattcaaacagtatggacagcacttgttgaagagcttacttggctntccttgctctatcccttgtca

SEQ ID NO: 145799 - DNA, 324 bp, Glycine max
  unsure (1)..(324): unsure at all n locations
agtcacctgggctgcaagctgttgaaagcttcatagaggttggatctttaagcttcaatgaggtccttcaacggtgattttcagccatggagttgtagtggaagataaaggaaaagaggtgagatgagactgatcgaggccgtacccgaatcaaataaacatgagaatgcagtaactaggaagtgatcctaggtcgtttcccaacgagcagtgacaaaccaaatgttcataatatacttgcagtaacagtaacgattggggggggggtgtttggttgnntnctatttataaatataatccttttactctaatactaaaatactt

SEQ ID NO: 145800 - DNA, 473 bp, Glycine max
  unsure (1)..(473): unsure at all n locations
tcacttacagagagtagttcatgcttagcgcaacaagctcgctaatcgcacttccaagaattcaaaccccgtaagatattggtggttagcacttcctggcccgctaagcccagcttaaaaactcaagttacagaatggatctggggcttatcgcatgatagcgcgcttatcgcatgatagcgcgcttagcgctgctacaataaaatttttccagagaagaagtggcgcttagcgcatcatccacgctaagcccacttgttaaagttcaattaccatgaagatgtanggcttagcgtagtgatgttcgcttatctgaactattcagccaaccaatcatgggtctctatgcttagcgcgagcaagctcatcttatcacgtgaagactgagcacttatcgcaaggtctgtgcttagcggatagacaattgcaaaaaaattctgagtcttttcctgtctatctcatcatataagctt

SEQ ID NO: 145801 - DNA, 295 bp, Glycine max
  unsure (1)..(295): unsure at all n locations
acctgcggcatgcaagcttcttatccaaggctcatctnggtggtgttgctctcttctccatggcttattccctagtggatggcgccgcctcttacctcttctcctttgtcttccgctgcatctccatggtggaaaatcaccattaaaggacctcattgaagctcaaagatccagcctccatagaagctccacaagcaagctttcatcagagccttaatcaaacccattcttaaaaaaaccccatatgatatttttaaccatagaaaagccaaacttgcccatttacatgtttggg

SEQ ID NO: 145802 - DNA, 436 bp, Glycine max
  unsure (1)..(436): unsure at all n locations
gganacttagattcttcaaaatattgcatgtgtggtggtgtgtaanatgangataccgatgttattggtgaaatatactcaacttctttctcatcatcttcctcctagggttgattgtatagaacttcgtcttcatcctcactaaaaggatcgagttctttaagttttagaacttctttcacacgtcttgttacatcttgttttaacatgtgttatcgaatgtatattttaagttatagaacttctttgtatgctattcttaaataataatattttttgatgaacaaatgtgtttaaaaattcctaataacgatgtaagctctcttttttttaaacaaaacagacatttgaatacttctttaaataatcaagatatattataaattctctatcttaaaacttaaataaatgagtacttaacattaactattcatat

SEQ ID NO: 145803 - DNA, 503 bp, Glycine max
  unsure (1)..(503): unsure at all n locations
ctcgtacccggatcttaagtcacctgcggcatgcagcttgctttgaaactntccctcaccctctgccttacaaactacaatggttgagtgagaatagggagctagttgtagatataaaagttttgatatgcttttccattggaaaatatgttgaagagatactgtttgatgtagtccctatggaggctagcaatctcttacgtggaaggccttggcagtatgataaggatgttctccataatggtgtcacaaacaaattttcattgggacataaagggaaaaaggttacccttacacctatgtctccaagtgaggtttgtgaggatcaaataagaaatgagtgaaaagagaacaagagactaaagtgaaacttttaaacataagaaaccaaactaaaacatagataaagtatcttattacacaattttactattattactatttggctcctacgcattatatgttggctaccttataccattatattagatcaagaccaaatc

SEQ ID NO: 145804 - DNA, 471 bp, Glycine max
tgagatgaggaagtgttgaagggtgaaacttcctgcttttattgctgaccacagagtggtacctggagatatgtcgcggtggtcaagagaccttggggacgtcatgtggggtgctattgcccaaaaccaagcttgaccaatcccgacccgacccgggtatagtcggtcagtgagaacctgtgatgtacctaaacaggcgagctcctggcagtcaacagataatatgaacaaagaccacatagcatggaggcttgtggtggctggccagctgtgaattttgtgtgatatgtggagtatggcctctggtaatcgattactaagggtgggtaatcgattacaaggcttaaaattgaagacaagaggctaagatggtctctggtaatcgattaccaaggggtgtaatcgattaccaggcttgataaagaagtcatgaaacttatggagcctctggtaatcgtataccatcctgtg

SEQ ID NO: 145805 - DNA, 374 bp, Glycine max
ttcctaattggttaaagatataatcttcggtgaccataatgcatatgaaatgttaaggaagttagcagatagacctaaaagaaatgttataacttggcaaggatatgatatcaacaagtattcattctacatgaaatcacaagatgacaagagtacaatgcaaaacagtggtgttagtctaagggttgagtctcaacactttgctactatacatgatgacaatccccatgtagcttacatgccttactttagagtcattgaagaaatctgggaggttagttatgtaaaattcagtgtttgtgttttcaagtgttaatgggtggatagcaatattggtgtgcgaatcgatgatttcggatttacttggtagatct

SEQ ID NO: 145806 - DNA, 238 bp, Glycine max
  unsure (1)..(238): unsure at all n locations
agcttctggagacttgctctttatacaacattgccttctttacctactgactgttgagagctagagaatnttctttcttaggtgcttcatcctgctaaagttcttgttcatgaacttaagagtaccaattaattctttaaaggacattgagtcaagattttttaaaacccttagcattgttacttgttaatgtggctccttgtaaagcttgttcatcaatgaagtcctttgcttcttt

SEQ ID NO: 145807 - DNA, 476 bp, Glycine max
agctcgcccatgcgagcaatggtgcttccttcatattctacatccttctcgaggaatcttctggagggcccaagtgggcctggttgctatttgcaccccctttttactaaatgcaccccactttctatttttttgtaattctttttctgtaacgttacgaaacttcacgaatttcgtaatgatacttattttctttccgcaaggttacgaatccttacggattatgtatttactctcttttagctttcgaagaagttacggaaactcatggattgcgcaaaaacacctcttttcgatttccgccacattacgaaacttcacggatcgcgcaagcctgctgccttttgatttctgagacgtctcgggacttcatttattgcatgtcatcaagtaataatccccggacgatattatggtatgacagttgaccctctttacttacctctcatcggagataagaagaaagcaaagatacg

SEQ ID NO: 145808 - DNA, 392 bp, Glycine max
  unsure (1)..(392): unsure at all n locations
agccttgactngagtcatcaagagattataaatatgtgaccatgacatgagtttcaaacaatcaaaaaacaattatcataataatcatctatcatctatcatctatcatctatctttcaatctatctttcaatatcttctttcatctctttctacataattttctgattcatttctcttcttctttctaaaagttttttatcaacactttttctttcaagaaaagttctttgttcaaaaacttgtgttattcatctttttcattctcttctccctttgccaaaagagcaaaggactagccgcctgaattctttngtgtctctcttctcccttggaaaaagaatgaaggactaaccgcctgaattcttttgtgtctctcttctcccttacaaa

SEQ ID NO: 145809 - DNA, 487 bp, Glycine max
  unsure (1)..(487): unsure at all n locations
ngaatgtgtgtaacctaccattttccataatagaacactattaatttgtctactatcattgttattatttcattcttcgtcattgagggaaacacttgggctgccagatccctccacctttgggcatattctttgaaagatctgtgccccctttttgcacatgttatgtagttgcatcctatctgaagccattatactgacactacctaacgaatgcaaccattatgtccttccaagaatgcactcgggaaggttccaagttagtgtaccaggtaacagctaccccagtaagactttcttggaaggaatgtatcagtaatttctcatcttttgcgtatgcccccatcttcggacaatacatctttagattggtttgattgctctngatcttatgatggtgctacattgaggacaatgtgttgtttaagtgtgggggggggagactgttctcttttttttttttgttactttattggggggtttctgg

SEQ ID NO: 145810 - DNA, 231 bp, Glycine max
cggataccttttaaataacacagaactcatccctgggcagcaatgtgacaacaaatcaaccacaaagccaaaaataacttcaaaatcgaaatcattttttaaaaaaaaaggaaagtcccaacaaggaaagtactgggcagcttcagcacgcaccgtacggatcaaaaaaaaatgggaaagaagaaaaaaggtacacacaaacgaagaaggcgagaagtggcaacaacagaa

SEQ ID NO: 145811 - DNA, 307 bp, Glycine max
gatcagcatctgctcccttcaccatgttccttcaatttataataacaacttatttgtcatctacatagatattttctctctttcttgtattatcttgtactagatggtccatttcattatacataaaaggaacttaaattgtatgtactctaacacatctgtaaaccatcaaatataaaatgtgaaatgtatatattagatatgaaatcaatatggtttttcttctgattttgctgtgcatatataggtcaacctacaattatatcaatgatgtgggatatttagatattggttaagctaacatttg

SEQ ID NO: 145812 - DNA, 353 bp, Glycine max
catgttcaattttttagttattaagtgtaacgggtttatgatcccaacatggttggctcgtggtgcctaacacatgaaactaagaatgtagtgtgaagtttcacgcttcctcctttcttgtttttgttgtgtataggaaaacgcatggatgagcaaacatgataacatatggtatgcaattgtgcagatcaaaaagtttgtgaacgcatatgcatgatgatgccatgactcatgcaaaatgtgaggtcggaatttgataacggacaaatgcatgatttgttcactatgatgttatgaagagatgcttatgcgatgcatgatatgaatgcatcttacggacacgatatcccgga

SEQ ID NO: 145813 - DNA, 143 bp, Glycine max
gaggagaggaaggaagggaaaagggcgaagaacaagaagagaggaagaaaaggagaaaaggaggggagggaggaagacggaggcaaaaagaaaagaagaaaaggaaagggaaaaagaagggagagagaagaagaaagaggaaa

SEQ ID NO: 145814 - DNA, 385 bp, Glycine max
gtcacctgaggctgcagcttgattcaatggaaatgttcaatgtttttatcaattttcataacatgatcgttggatgtcctaacctgaaacaacagaatttgagcctatgctagagctattattgacagtagcaattgaataagagaagtcagcatttgtaacaggggcagaagtagacatcagcagggaaggattgccttgaagctggagattgtgaaatgaataaaggccatcaacacccacaactccttgaaggaggaccttatgtgtctcctgagatttcacaagacagatatgaggatgaaactcacaaaacacaaagttatctttggcaaactgactcacaattaacaaatttttcgaaatagaaggaacatgtaacaat

SEQ ID NO: 145815 - DNA, 486 bp, Glycine max
  unsure (1)..(486): unsure at all n locations
tttagtacacagaagaagaagaagttcaaagatattcttttcttgtaaaggattgtaagagattgattggaaaagtattcaagattattgctagaaagattgattgaaaatgcaaaacaaagccttgcttttatagactcttcatgtctggtcaagatagccattcagaagagttataacttttagaaaaacttaaaacccatttgaaaaagtcaaaacctttttgaagagttacatcttttgattgttcagaaacagtcactggtaatcgattaccaaataagtgtaatcgattacacaaagcttttgagtgaaacaatgtgactcttcatttctaaatttgaatttcaatgttcaaggacactggtaatcgattaccaaaacattgtaatcgattacaaccttttgaaaatatttggaacgttgtaaattcagtttgaaaactttntcaaactcatttgtgtactgtgtatcgatacaataata

SEQ ID NO: 145816 - DNA, 285 bp, Glycine max
  unsure (1)..(285): unsure at all n locations
ctcgaccccggatccttgagtcacctgcggcatgcaagcttggaggggttgatgggacccggtgctgatatgaacgaagataagggctacgtaggtgtgcgtgaactcagttgaaaggtgggcaactggggatggtatgcttatgtttgacttgtgaaagtgggagagttgatttgcgccatcgcccgatcaccaccgagtaccacatatgacgggtgcccataatccattaagcttgatgtgagaaagcgtggaagagtcagtcttnctacttttgtttgttga

SEQ ID NO: 145817 - DNA, 466 bp, Glycine max
  unsure (1)..(466): unsure at all n locations
tattgtattattggttaccttatatttgtggtacccatctcatgctacatctccattttcaccatggtcatacactgtttatatgaaatgacaacatgagagtaaggaataatccttatattggaacaacagaatactgcaacagattctgaaatctgttatccataacagtgcaacaattttctgaattgtaatcagttgctaagttattatctttctagtgctttatccttctagtgctttatctctaattttctttatctgtaatttgaattcttgatttgctttatctgtaatttgaattctcagctctatatatgtaacttatatcaacatcaatgaaactgagctctntattctattcattctctctattctctatacctcacacgatagccactggattaaagagcaaaaactgggtagttaaagtgtacatgctattctaatattccccgtttctgat

SEQ ID NO: 145818 - DNA, 479 bp, Glycine max
  unsure (1)..(479): unsure at all n locations
gtcacctgaggctgcagcttggcctcttatgtctggaatatgaatgtagcatatagatccaaagacccttatgtgctttgctgatggcttcttcccgttccaagcttcaattggagtcttgtcttttacagacttagttggacatctgttgagtatgtaaacaacagtgtagactgcttcagcccagaatatgttaggtagtcccttttccttgagcatcgatctagccatctccataactgtgcgattctttctctcggacactccattttgttgaggagaatatgcgactgtaagttgtctctcaatgccttcatcctcacaaaatctttcaaactcgcgagaggtgtactctntgctgcgatcacttcttagtacttttatccgttntccactttgatttcagcaagggccttgaactttatgaatactccaaagacttctgattnttcttttagaaaatatacccatgtcattct

SEQ ID NO: 145819 - DNA, 353 bp, Glycine max
aatgaatcactacatgagattttttctgactcaatactaatgccgtttaaagcttgtggagatcggaatgcttcacatccttgcaatgcttgtagtgtggatacttaactattcaatttcaccacattagaataaaatcgacttttggaaaacttttcttagtatgatcaactctgtttatattgagttttgcctttttttttaatgtttatatatacacaattactcttcatcactaccacatttggatcaaaaacataaatctgagctttggtgatttcgaaccaatataacaaagttcgatctttactgaaaaaaataagggtaatgtcaagaaaccacactctttgttt

SEQ ID NO: 145820 - DNA, 401 bp, Glycine max
  unsure (1)..(401): unsure at all n locations
cggatcttaagtcacctgcggctgcaagcttctanacgtgatcatacattcattgcatatatngaaggatgaagttgtggtgcgtgatctgttttggtgtcacccaaatgcagtaaagttatgcaatgcatgtcatctggtgtttttttatagacagtacctacaaaacaaacaggtacagactctcactacttgactttgttggggtgacaccaccggcgatgacattctctgatgggtttgcatatctggaggctgagcgtgttaataatattgtatgggctttaaaactatttcgaggcctatntttaagaaacgatcgcctccctgttgttattgaaattctgatactggggacagatgtcgtacatgatgtcacgacatcacgcttcaaaacatgc

SEQ ID NO: 145821 - DNA, 410 bp, Glycine max
ctcccgcatattctataatggggggagaagcgacagttatgttggttctttccctttggcacttcgctatctttcgaatttgcttatgaaaatcgctgccatgaagaagatacgggccgagacgcttccgtaacgttgacgtgagtgatttaacgaacattttcgaccagtgcgttcgacgtgcttcattcgttcgttagttaggattcatcgttcttcagtattcaacgggtaagtacctcataccaagcttttcaattcattctatgtacccgtggtggtccacatttggtttcatgtatgtttattctcgtttcattcacttcttatacgcccttttgacgtgcttaagccatcgtatgtaagtcatttctcgcgttacctgaaaataaaagatatttccaccgatc

SEQ ID NO: 145822 - DNA, 279 bp, Glycine max
  unsure (1)..(279): unsure at all n locations
agcttgaaactcccatagtncccactccacatttacattggtgaaagatctgttgcacagaaaaaagataacatttgcaaccaagatatcatcatccaaattaaaagaaatcattactaattgaaaatacactccttcaaacgaaaaaagagttattttgtactattgttgccacaatatattggtatactgatgtagctccatgtggagcttgtaggccttggatcttcttcatcaatggagtcctttgcttcttgaagatgagtgaatgtggaatgg

SEQ ID NO: 145823 - DNA, 437 bp, Glycine max
cgtgatgacatcaccaatttatattacaaaatctgtcatacaactaactttagtatttggcattcatgaaatttgaagatcatgacaatgcaaaagataattatattaacaaaaattacggggaaaatatccactaacaaaaattaatttgtcattcagttgtttccaggataacaaactgcagtacttgtaattatctttaaaaaaaattgaaatatatattttcattctcgtaaatatggaaccggatttaattcctttgtaataatttttcttcctcgtaaaatctaaatcttttactttttgtcccgcaagtttcaggtatatctgaagttatgaattttaatttatatttcaaaatatgatttttgtgggttaaaaactatcaatctgccgacaattttgtcttccttttccctaaccttcatcttctttga

SEQ ID NO: 145824 - DNA, 433 bp, Glycine max
  unsure (1)..(433): unsure at all n locations
aactaatntgaaaacgggtgctatccatctgagctacgaaatctctttgcattaagaaagtggagataataatatgaaaagttgaagctttttgtaatggaaaaataatattgttttggttaaaagttaaactcaatgctaatggaatgtgtactcctcagaatcatatacataatgtcacaaatttcattaaatgtaatctcaactaaatatacacgtatcagttgaatcaaatattagctatcatttactatatatggtcggatcaattaaatttatgcacgcacttccaccctgtactacttttagttttcatcaatgaatccataattcacataaatcaaggaaaagaaaatgtatgaaaagaaactaagcacccaggtttcatcaatcaataaattcagaatctttcatcaatcaaagaaagaaaatg

SEQ ID NO: 145825 - DNA, 323 bp, Glycine max
  unsure (1)..(323): unsure at all n locations
ttttccttcctgcttgtgcgggcattgtctttgaggtattttttactttctttgtgagcnatgaaagtgatataaagctaattttctcattttctctcaacttgggcggagatgacaagttattggtttttggaaatggggatgacaaaattttattacttaatatgtttcaatgataaatgcaactttgagaaaactttttgctgctgtagaagggggaatttattacatgtggtacatttaaccttgtaaaggggaaatacgcctgtgtaacaataaaagctagttgtaggaaaggaaagatttaactggtgaaatgggtt

SEQ ID NO: 145826 - DNA, 471 bp, Glycine max
  unsure (1)..(471): unsure at all n locations
agtcacctgcggcatgcaagcttcttgcgtaacctctcttggtgctaataaaatcttataaacaaatccctcttattactagctatnttgaattctttagttcctgaatgtacaaccttcaaattgttgctcattcccctctttgttttttgcaaaaaataaaataaaaaaaagtacctcagcaaaagataatctatattataattaagggtcagtactagatgtattgaagtgtacaacatatagcatatgcagtgagaaacattgcccaaataagactgaatacaatgacaggatatgtcagccccccctaataaaattcctacctcaaattagacaaccagtgattaaagtgggtattaaaattcttctccatacaccttagccaagaccaagtatggaataatgcctcgtacatgacttttccgggaatgaagagttggttattgaagaccatgctgtttctgtgct

SEQ ID NO: 145827 - DNA, 325 bp, Glycine max
ctaagctcttcaacttacatagagcttaagcttagccttacgttttttgtttctcatgtagctgctccatgtatctattataataagcctatcttgcaataatatacattgccacccgtcttgatccattaacacattccttcattttgcatctgattataatccagaaagtgaaaaaccacgctgtcctatactttatggagaaaaagggcctcggactagttattggaatgggtttcaaacaagtgtgggggattgtggccatactttatgaaagcacctttgatattcgcatcatagtttcttatgacttgttgaatagaaa

SEQ ID NO: 145828 - DNA, 391 bp, Glycine max
  unsure (1)..(391): unsure at all n locations
aataccacagcttatttttattaacttactatactaaagctgccttctaacatacatcaaatgacaataaaatttgtcctgatttgctgataaatcatcaattaaaggccttataccgaagttgatcattactggctctctgtgcaaaccagtggagataccatgtgagaaggcaaacaaatcaaattaaagtactgatatagaattgtgttaaacaatgcacctacaaattcaactactcacaatgatgccacatggaaagaagagaatccacatttcgaaaccatttgaaaaaaataaattntcttttaattntaaaagtacatataaaagttagcacagctttaattgtgtaaaatatgaatcnggacacaaccaccaactttgattt

SEQ ID NO: 145829 - DNA, 437 bp, Glycine max
  unsure (1)..(437): unsure at all n locations
tttgtcactccacccaaatcttgctttcaaattcaccatttctatctcccctgacaaccgtgtatacttagtgcatccgacatacaacggtgtctttgaatcattatctaacttttcataatatggtgcatgtgtttgcctaaaaccctcttgtccaagatcgcgtatcatgtcttctatactatcaccaacttcttcatgaaatccaacatttccaggggtggatgacatttctgataactcaccatgccatatccatcttgtataagtatgacagataccatcacatatcagatgtgttctaatgtcatccaaagattttcgtcgaccattcaaacatttcacacatggacagaagtataccccacgatagtctggagccatttgtttggcaattgcaagaaatcttaaccaattctctactcttanttatgcgt

SEQ ID NO: 145830 - DNA, 291 bp, Glycine max
  unsure (1)..(291): unsure at all n locations
ttaagcgacgcagctgcanctncacatgaaaaaaacatttttttcgattccattcctaatgagcatattgaatagacatacttggatatcttttgacctctcgttggacaatcataagggaaaggacaaaacttttccaccctacatactgcaacatcctttgcatcttcctttgtgcgtaggcatcaagtcataaaaacctgcaggaaataaacattatagtataaaaagcatatttaaaaaaatgaaaacgagatgaaacataaccaatcaagcccgctaaattataaa

SEQ ID NO: 145831 - DNA, 448 bp, Glycine max
acatcctttgttatacattatgttattccattaaacttcgatgtatttcaacaagtttcaattaattgaggtatttatgacactaatctttgatctaagtttagtcatattaattgaaagattttcactcctctctctctaatgatgtatgtgttctaatcaaattcatatttttttcactaactcaatatgtcttgataactaaattataccacatgaataaattgtagatttgatttagatttttttttacaaatagttatgaaaacttattttaaagcaacattttgttttgtgaatgaaagcaacactggattatttttaccatattttgaacaggtgtctaatataaaacaatttcagtaagaatatataatcatgtgggttacggctatatttgagagtgcgggaggtcaaagttacctgcagtattatacatatctgatat

SEQ ID NO: 145832 - DNA, 292 bp, Glycine max
  unsure (1)..(292): unsure at all n locations
ctgcaagcttctaaactttggttcanaacttttattttctgtttgtggaaatnctgcagaaaacaaaagtgtgctatcttttcatcccttctcccttntgccaaaagattcaaaggactaactgcctgagaatntctttgattcttccctttcccttaaacaaaagatttcagaggacaaaccttctgagatatctcttgtttccccttacaaagattcaagggactaactgcctaagaattctttgtcttaacacattggagcgtacatctacttgggttgtgatactgag

SEQ ID NO: 145833 - DNA, 443 bp, Glycine max
  unsure (1)..(443): unsure at all n locations
tgtataaaccaaagagacagagatgtatagagaaaatctttcttngttaaaccatagaaagaaataatgtttttgaattgattattttactgacttgagttgcttactaattataacaaaatttcacttctttcacatttgtgcattagctgtcacatgaatgcttgtatgtgtggccttattgtgaaatattatggagtacactcgttgacagcaattttgtgtgtctgctactctgcagtcatataaaaacactaaaaagaatttggcaaaacaccatgaagagttaaaagatatgtctagctttctacatcggttcatgccaaaaccgatgtagaattctagacattctacatcggttattagaatgaccgatgttgaaatctgacattctacatcagatattataacgaccgatgttgtaatctgacattttacatggg

SEQ ID NO: 145834 - DNA, 483 bp, Glycine max
  unsure (1)..(483): unsure at all n locations
tcttaagtcacctgcngcatgcaagcttcctatgtgctaagctataaacagaatcatgtgtaacacttgtcataactttgatgaatgagaaacttgtgaggcacacttcaaagttcaacttttctccctattctccttcaatttccatgcccctctctctctctctcattcttttcctccattaaagcttcctctctaaggttcttatccaaggcactctcttgtaggtaaagcttcctctctaaggttcttatccaaggcactctcttgtaagtaaagcttctccttccatggtttattctctagtggatggcacctcctctcatgtcttcttctttatcttttggtgcaactccatggctgaaaatcaccattgaaggaccttagtgaagctcanagatccagcctccatagaagctcctgaagcaagattccgttgagtggttagagcacaagaatctcatgtatgtgtcccttaaacct

SEQ ID NO: 145835 - DNA, 476 bp, Glycine max
  unsure (1)..(476): unsure at all n locations
tatataagataatngaggccaaaaaggttaattgaatgtatatcatgaactaattaggcagcaaaacctagactacttatattgggagcagcatgacaaacaattattgtctttggcttctaccatcaatggcactaagtcttcacacaaaacaatggttggaagatacttgaaacctaaccttttataccatagccaaaataaaacaactaaaatagaaaaactaactagttgtgaaacaaaattaactataagagcttctcaccatgtctctaatagataggagcaatgaatgcctatattttttaaacataatcatagtaacacgaatgggtaagaaaaactaactagttttgaaacaaaattaactataatgacttagtatcgtcttagtctaatttaaatctccaaattcatagtaacgcgaacaggtaacaaaacctattgtttggaaaataatcatattgactagtctc

SEQ ID NO: 145836 - DNA, 396 bp, Glycine max
caagcttgaacataactgaagcatcatatactgaattcatctccaaggtgactccagtgggcagagtatattattgaatttaggtgggaaagagaaagaaacagaatgacagaagaaacagaatggagaggatagaaggaaagagaatagaaacagaggtcagaaatgtgcactgcactctgattatcattcagtttgtctaaaatacaaaaaaacctgccttatttatagacagctacctaatagccataaaataacaatagctggctaaaactaactaattgacataaagttgtgccttggtgacttgttggtcatgggttcgaatccggaaacagcctctttgcatatgaaagggtaaggctgcgtacaacatctctccccataccttcgcat

SEQ ID NO: 145837 - DNA, 470 bp, Glycine max
acttacagcaaatgtcactctactccaagttcttaaaggatatgttatctatgaaacacaagtatattcaccaagaaaaaaattttgtggaaagaaattatagtgctgtgattcaaaagatccttccacccatgcattaatgaccctgtgagtgtaaccattccttgttcaataggtgaagtcactgtgggaaaggcttttattgatttgggagtcagtattaacttaatgccattctccatgtgcagaatgttgggagagttggagatcatgcccactaggatgactttacaacttgctgaccgctccattactagaccatatggagtaattgaagatgtgctggttagaataaaacattttatcttcctgacaaactttgtggtaatggatatctgtgaagataatgacattcctataatattgggaaggtcattcatgttaactgcaagctacatatattgatatgc

SEQ ID NO: 145838 - DNA, 489 bp, Glycine max
ttatgactataaaacaaagggtgttgacattaattactctttttccgtatattatcatcgaattgattcaatttattttgttattacgcttataatactaaaatttggaattcaaattcaacacttttcgaataatataccaaattttgatccaatttatacaggcaatcgcattgtcctgaaataatgaaatcaaaccaaatacaaaataaatcttgtggtacgtcaactcaaacactaagcagctaattccttattattatattattatatatatggcagcacatgacatgataaacaaaaagcaaattgtctaaataaaatatgccctctaacccacatggtttacaacataaacaacataaccacgtgggcatgtatctcgtttacaagctcataagaatatcccatctacgcccaagctttatgcatattcatgattccttcaccaccccaaccttctatgatatgatgtacaatgttacaaat

SEQ ID NO: 145839 - DNA, 304 bp, Glycine max
tatagactcttcatgtctggtcaagagaaccatttaaaagagttatgacttttagacaaacttaaaaccaatttgaaaaagtcaaaaaccatttgaagagttacatcttttgctttattcagataaaatcactagtaatcgattaccaaatcagtgtaatcgattacacaaagcttttatgtgaaaggatgtgactcttcacatttgaatttgaatttcaacgttcaaaggcactagtaatcgattaccaaaacattgtaatcgattacagctttttgaaatcaattggaacgttataaattca

SEQ ID NO: 145840 - DNA, 441 bp, Glycine max
  unsure (1)..(441): unsure at all n locations
tccctttcctcnttgaaatgttgccaaacgtgttatcgttgaatttcattaagtcctaatttacattgtgaagtttgacaaacacattcgagctcaacttgttccacgcaaatgcaacaatgggcaggtaatctangagggtgagccatgttgccaagaaatgaaagagactatttttcttgctcttatccttacaacaactcaaaagaattggatgatcttgccaaagtggtggcgaaccttgaggcctgactgaaggattcgaagtctatgctggaggagttcgagctatgagtggctagggagaagaaggctaataangagcttaaggaggagttactaatttactataaggaggtcatggagtatcatgggaagggctntaacaatgccgtgaatcatgtcgggttcttctccaatgccctngaattgggtcttttg

SEQ ID NO: 145841 - DNA, 467 bp, Glycine max
  unsure (1)..(467): unsure at all n locations
agcttactacggacaatatctcaacacccactgtgcaatttatcgntcagatagttagttcttcaggctcttctctgatgccctcgcttgctgctaccttgtttgttagtttattcatgattctgttttcttaggatttctttgtacatacattagagatgctattttttatgtatggtttcattatttcttggagatatagtctggatgatattaattagtttacagattcattcaataatgaatttcacacattgatctcagataagtagtcagtttatatatttctctatttttagaaaaatgctagcagcatactttctaattgtttntatttctcgtggtttgaactttgaattcggttcaagtgggggagaattaattgttcttattatacaaaatggtcacaccgcttataaccatcctctcttaatggacatcaaacatgtttatgctcgtgttggaaa

SEQ ID NO: 145842 - DNA, 486 bp, Glycine max
  unsure (1)..(486): unsure at all n locations
gtgacacttataatctcagactggagactttgtaatgaatntctcccaccacaacctcttttccaagatgagtggtggactctacatctggatggctcgtccaatagcatggaaatggagtgagggtcatcatggaagggttgcataatgtagctttttcacaacccctacatttcaaattaaaatccacttgcaaccaagtcgaatactaagcattgttagtatcctaatgctatccaatgaagtgggagcccaaagagttagatgttgaagtgattccaatattgcatcagaacaaattaacaatgtttttcatataaaggacccccatttattgaaatattactatgcattccaaaaactttgagaggaatttgacgaagtccaagtggtacacatccactgacaaagccaatgatatagctatgttggcaacctcacctatacccatgtaattgaaaagtttcatactacatattgcattta

SEQ ID NO: 145843 - DNA, 310 bp, Glycine max
gatccttaagtcacctgcggcatgcaagcttccaagaatcaagatcaagattcaagactcatgattcattatatcaagagaagacttaatcaagataagtatgaaatcaaaaactaagtaacacatgaatttttctcaaaacatgtttaccaaagagtttttactctctggtaatcgattaccagattattgtaatcgattatcagaagcaaaatggatttgaaaaagttttcaactaaatttacaatgttccaattgatttcaaaaagctgtaatcgattacaatgttttggtaatcgattaccagtgc

SEQ ID NO: 145844 - DNA, 479 bp, Glycine max
  unsure (1)..(479): unsure at all n locations
ctaacccatggaagctcctaatatctcccacaacttttggggttgaccattcttggatggcactgatcttctcatggtccacttggaccccatttctaccaactacaaaccctataaaaactatattatctacacaaaaagtacacttctctatattcgcataaagggtttttctcctatagattgataaaacttgcttgagatgtcctatatgatcatctatgctcctactgtacactaaaatatcatcaaaataaacaactacaaatttacctatgaaatcccttaagacatgatgcataatcctcataaaggtgcttggtgaattagtgagcccaaaaggcatcactatccattcatacaaaccatacttggtcttgaatgcggttgtccactcatcaccacttttcatcctaattnggtgatacccaactttaagatcaatgttggaaaagatattggcaccatgcaactcatca

SEQ ID NO: 145845 - DNA, 309 bp, Glycine max
ttaagtgacgcggctgcagctatatataggttccttcaaactctagttctattattgaaattaaaatgagaatgaactaaacaaatattatattaatgtttaaaggtttagtatacattaatttgatacaatcttctttaatttgttggtgaagcaaacaaagtactaaaaaaagaaatcaatgttctattagaaatattaaaattaatttttttacatgcatgcaatgcaatgtttacataatattattaataatacctagaattgttttccttcttaaaagaaaattaaaattatttcttaattaaa

SEQ ID NO: 145846 - DNA, 436 bp, Glycine max
tgaatctgagtaccctcctgatacacttcggaaaagggttcttcttcttgataaatcaaaaggagatcgaaagagaagtggaggagaatttattaaacgccctcaatcaaatatgccaatgccgaatgagagacacttttcactccattcatctggtagtgctgcttcagctgttattttgggtatgcaggttccccctgttatggcgccatatgcatcaaatcctgatcggtatccccatgctggcgcaatcccatacaattatcaagttcctggccaatctgtatacactgcaccatctaatgctcctccttctaactatggtcgttatatgggtactagtactagtttgcaatcctcacaccagccatacatgtgagtttttttacatcaaatcatcagttgtaagacttgagaactatcattagtagtatat

SEQ ID NO: 145847 - DNA, 416 bp, Glycine max
  unsure (1)..(416): unsure at all n locations
atctctaagtcacctgaggctgcaagctgagctanacgtntgtttggatgtatatataattggggtnggtaaagtttcaaagatgaaaggttaaatgaagttcatgtggggggcgtaataaaataggggacaagttggtcgagttgaattgaccaaaatggggttcttgcatttcatgtgaaactacgagttgtagtacgttctctcgtgaagccctcttgctagtggaacaatggaacctaattcatatttgattaccgattttgcccctctttgtcaatatcaaattttggcacatgagattgatagagaagggcaacttgaactctttcttttggtcgtagagcttaggggatgaacatcgttttttaaagtcaaggtcatgacgtgggttcataagcgttaacctgaattta

SEQ ID NO: 145848 - DNA, 441 bp, Glycine max
  unsure (1)..(441): unsure at all n locations
tactcagcttgtatcattacacaagtcttgtatcgattaccagattatattttcagattatatnttccaagagtcacatcagttaagttggtatttgaatggccatcaaaggtctatatatatgtgacttggaacacgaatttgattatagtttttctgaacaaaaattcttatcctctcaaaagcaaaattgtcttatcctctaaaacattccttggccataacacttgcaattcaataaggaattatttgagtgcttcattgttcaatctatctctttcaagagaggtttctttttctcttcttcttacttctgaatagggattaagagactgagggtctcttgttgtaagaaatttaacataaaggaagggttgccttgtgtggtcacaacttataagggttttacaaatagtgaactctcagcgggtgcttgggact

SEQ ID NO: 145849 - DNA, 461 bp, Glycine max
  unsure (1)..(461): unsure at all n locations
agtcacctgcggcatgcaagctntgagccaaaatcctgactaccataaaccttgacccaaggtgagaatgccaatccttatcctcggaagcaaaaaaagaagagaaggaaaatttccaatcaaaggaaaaaggagaaggaaaatttccaatcaaagaacaagagaaagaaaatttccaatcaaaggaaaaaaaggaagcaaagaaattcccaatcaaagagtgggagaaagaaaaaaagaaaagaaaggaaattcccaaccaaagaatgggagaaagtaaaaaagaagaaagctcctgatcgaaaaaaaacagaagaaatgtgcagagaggtctttggaccagacaatatctgaacaatacagaattgtcaccacatgaacaaaagatagaaaaggaaaccacgacctaaaatggtcttccccctttaattgccaaccaatatcttgtgcgctatcgactt

SEQ ID NO: 145850 - DNA, 454 bp, Glycine max
tactcagctgcttctacatgtaggaggtagtgtctcctccaaatttagtttttattgaaatcttttgaaaacaacaaatattaagaaacttccctatttactacctccacatcttctactttgaaaaaaacactcggtatcacaaacacacctcttgggcttgaagttattcctcaagtaaaggactcgttggatgatggtttggttcatatgaacataaaaccttgtgctattgttagacccataatatgttttattagacaccaaataccctaaaatatacgattgatgaatggttgagtgttgcaacctcttttttaatgagttatgcaccaacattttatgattatgtacataggaactatatgtaaatgtgtattatatttgggtcatacaaacttagtgctcattgggaacctttaggtagcgtatcttttgtataatattaacatga

SEQ ID NO: 145851 - DNA, 385 bp, Glycine max
  unsure (1)..(385): unsure at all n locations
ctgcaacttgaaagggtgtttcaccttctctctatctcttctgctggcttagtgagcatccgctaagcgcaacactcctgngctaagcgcgaggaagaatccagaagaagatgagctgtacaggttcgctaagcgcacctcttcatctctctaagcgcaccgcttcagttcatccactaagtgagaaaggcgtgctaagccaaaaatcactaacatgcgctaagcggtccatacatgcactaagtgcatgagcacgaacaatgccacctatttaagcctgaaattaaattttgtgaagggagtttggactgggattcacagctttgcatgtctagggtttctagagaaagaaagtccaagttccagagagtttgagagatttgct

SEQ ID NO: 145852 - DNA, 473 bp, Glycine max
  unsure (1)..(473): unsure at all n locations
atttactattaatccgtgaatgcgcttcataaagaaaaaaatttttctgatnaagatcggaagaaagcanaagaaaatagaaaaattcccaatcatagattggaagaaagcaaaagaaaagataattcccgttcaagatcagaagaaagcatatgaaaatatacggaagggtcgttggacccgatgatgttaaaataatgtacaaaattgtcacgagcaagatagaaaagaaaagaaaccatgacttgagacgcacgtaacagtccccttcttggttaccaactgaatctttgtgcccgcgtctctttctcgctatgccaaaaagaaaacagataaaggaaaatgccatatcactcggagccaaattttctaccaaaacaccattttccaaaaagtcctattgatccatgattgcacatgttatctttgatttgataggaaatgatttgcagagtcaaagcatgacatgtcta

SEQ ID NO: 145853 - DNA, 344 bp, Glycine max
  unsure (1)..(344): unsure at all n locations
agcttgcaaaccaaatgctcaccatttctattgataagccttcaggttgnttcatataaacctcttcctctaaatcaccattaagaaaggttgttttcacatccatttgttgcaactcaaggtcaaaatgagcaactaatgctaagataatacaaagagaatctttcttatatataggagaaaaagtctctgtgtagtcgattccttttttttttagtaaatcccttagcaacgagtcttttcttgtatctctcaatgttgcctaatgaatcccttttagtcttaaatgtaacatccctctttccggaatataatataaaaagttgtagagtttcagaaaaaaa

SEQ ID NO: 145854 - DNA, 480 bp, Glycine max
  unsure (1)..(480): unsure at all n locations
ggacactattaaactcaagctgatgatatgggtaccattacatgggtctatgttgggcgggcgatggtgcaaacgattctcccatccacaaatcacgtataacccaccatcccctgttgctcacctacaactgagctcacgtactcccacgtagcccttatcctcgttcctctcaacgtctggtccccatcaatcctcccaagcttccaaaacatccaagtaattccacctccaatcatcatggactaacaaaaccaagcataacaaggcatatgcagaaaactctgcccaaaacgtaactcaaaatcacagcttttcacatacaaatactccagtaacatttacttcgttccaattcgttaaccgttggatcgactcgaaaattttactggaagtctctagtacataagtctacattntgaccgttgggatctgctagtatatgtccataaccgcatatgtactaccctttccacaacc

SEQ ID NO: 145855 - DNA, 156 bp, Glycine max
aagtataaagcaaacaacggaaagatcttttattttaagaaagtaagcgatggaaagggaggtaaaggtaggatagagagaaggtaaaaaggaggcgatgagagatgaaggaagaaggcgaggaaggaaaaaggaagagaggaggagagagggaga

SEQ ID NO: 145856 - DNA, 318 bp, Glycine max
  unsure (1)..(318): unsure at all n locations
agagaaagagaaaagaaagggatgtgtttgtgtanaaaagaaaagaaggaagggaaaaaaggaaaagaaaggagagaaagaagagaaggagaggaaggaagaagaaagaagaatgaggaatggagaggggaaagaaagagaggaaaaaaagaaaggaggagaagaaggagaagaggaggatgggagaggagaaggaaaggagagaaaagaagaaggaaagagagaaggaaagagggaaaaggaagggagaggagatagagagaaaaggaagaaagaaaggaaagagatacgaagagaagggaaaggagaaggaaagga

SEQ ID NO: 145857 - DNA, 239 bp, Glycine max
  unsure (1)..(239): unsure at all n locations
cctcaatgtgatgacactcacattntttggattctgcacagtctgtgaaggcaatttgtcagaaatttgggactgagcttggttaaactgagtagccatctgccccatctgatttgttagactctgaatggaggctcttgtctcttgctgaaattgcatattctggatggtcatttgcctcactaactcttctaaggaaggttgaggaggagtctcacctgcttgttgtctttgttgtg

SEQ ID NO: 145858 - DNA, 378 bp, Glycine max
atcaacctcagcagaacaattatgacctctccagcaacagatacaaccctggatggaggaatcaccctaatctcatatggtccagccctcaacaacaacaacagcaacctgctccttccttccaaaatgctgctggcccaagcataccatacattcctccaccaatccaacaacagcaacaaccccagatatagccaacagttgaggcccctccacaaccttccctcgaagaacttgtgatgcaaatgactatgcaaaacatgcagtttcaacaagagaccagagcttccattcagagcttgactaatcagataggacaattagctacacaattgaatcaacaacagtcccagaattctgacaagctaccttctcaag

SEQ ID NO: 145859 - DNA, 394 bp, Glycine max
  unsure (1)..(394): unsure at all n locations
agcttgactagttaaaaatgctgctcatactttcacctaaaaaaacagctgctaatatgaagataagagtactgactactcacttagttcaattaaagtgaaataacttagtagactttataatactaaagactagactagaaagctgctatagtcacgttggctcacagtggtgttgagacatcacatattacagaaatatcattggagatacgatgcatatgtgatataattgacttaggtcctatatatatgacagattagatcgcctattgttaggatatctactgaacatgtactgattaggatctgaaatgtcatatgtatgtgtctttagaaaacaaagaatgagaaattgatncggtatttgacattttacatctgtgataaatgc

SEQ ID NO: 145860 - DNA, 479 bp, Glycine max
  unsure (1)..(479): unsure at all n locations
tgacacatataatactaagcttgtnntgttgcaatatttatagtttatntttattgatctttataaagaataaagnttagaccaattggaaataagcatgactaagattacattacatgttatttccgtattgcttatccatattgatctatgcattgagtgtattgatgtggtggtcattggggtctatttacattcactactagaaattagactttctacatcgattatttggccctttctacatcggttatgacccgatgttgtatcggcattcgttgaaaacccacacccttcaacgatggttattggaccgatgtagataggtgacaattctacaatgggttacaagattgaccatggtagtattctaagaaatttgcatcggttttctgtcaaccgatgtagaatgatgccaataatggctgtattctacattgtgtttttggacgctcgttctaatatattgagatatatac

SEQ ID NO: 145861 - DNA, 376 bp, Glycine max
  unsure (1)..(376): unsure at all n locations
tgttcattactaaacaagctgatantatcataatcacaagcaaggtatgctaattacatgcaagagatgagaatgaaaaataggaaagggaaagaaaagctgggttgcctcctaataagcgctcttttaacgtcactatcttgacgcatcgtcttgttatccaggatccaatagagttcctacttcaaggaccttcttctcaggtctcttttcctccatcacatgcactctaagatagatattttgactaggaggatctttgtcctcatggaacaaatcaaagctgatcttctgatcttntatgcccatttgcaggatcttctttcctgtgtctaccatgcaacttgcagtaaatatgaatgggcagcccagaatg

SEQ ID NO: 145862 - DNA, 476 bp, Glycine max
tctagccaaatggacttaccttgaattaattcctttgatatccctttttgagccttgtttacctttccttgttttgaagctcactacaagccttaagtgaaaaaccatgatatcaccatatccttaaggaattttggagctttggaattgttttgggaataagtgtggggggtttttgtttcattggacaacttgttttgttggctatgcttcatgatgtattctgggccatacttgatgtacattgtatattggttaaatgttggacatgctgaatgaaatgttgtttctcaaaggctatagggttctaaaaaaaaaattgaaaaaaaaaatgtcgaaaaatgataaaaaaagcaataaagctgagtgaataagatcttaaatggcacaagaatgatgaaactccttggtttactcttcatgtttaaatattatacttacctcttttattttgttaatttctttctaatatgcac

SEQ ID NO: 145863 - DNA, 308 bp, Glycine max
agcttaaccaggggaaatgttcgctctcctttggctctatgcactttggtctggtatacaagtcaggtgtgtttcccttttcataaatagctctcactgaagtgatatttatttgcgtaatctttagatagcataatatctgcaggtaattcgggagtcaggaaataatacacaatcaggggaccgccccttctatgattatcttgagagttgccttcgtcacaagtcaaagatggtgatttttgaagctgccagggcaattacagagctcaatggagtaactagccgagaattaacaccggccatta

SEQ ID NO: 145864 - DNA, 482 bp, Glycine max
  unsure (1)..(482): unsure at all n locations
gagacattgcatgtctctgaagtagagttgctccagataatcaaacgtattataatagtatataaaacttccttgtcaagaatataggaggcatggacaatcatctcatacaataattagtattatatgtttattgtatcatcacatgtctattgtcctgaacaatctttacatgacatataattggggttttcaatttacggaagagttaataacatttgattacatgccacatagagactaatccaaaccatagtaatcactgaatataataatttctgtggatatgaatgtctcttcttaaatatatgtattcaccatctcattgtaaatagaaaaagtgaggaaaaatgctaacatacgcctacatttcttttatagtgtgtttggatggagaaattanaattctgagaaattaaaattctaagaatttcacatactttaattgaaattctcttattttcaaaatcttgtgtttggat

SEQ ID NO: 145865 - DNA, 337 bp, Glycine max
  unsure (1)..(337): unsure at all n locations
gtcacctgaggcatgcacgcttcttttgatntattttctggtcttggattcatatgtgtctttacttgttacatttacttttattgttgatttttgtattattttcttagatttaaatgatatacacgatataaacattntccatcctcaaattgtttagatatataatctgctttctcatatttatgtggggttggtggtgattgacggtgtcactatcactgtcattatggataccatttgtgcgtttgggataaggaagatagagaggggggagaaaatgaaaggatataagggagggccaccaaatcgctttctaaagcggcttgcggctgtc

SEQ ID NO: 145866 - DNA, 468 bp, Glycine max
  unsure (1)..(468): unsure at all n locations
gtccgcaagacttacggaaagatcttagagttgaccttatcagaggtatccatataagccattgcatcactcacccaatactacgaccggcctttgagatgcttcacattcggagacttccaattagtaccaaccattgaataatttgaggaaattctaggatgtcctctcgggggaagaaaaccatatctttcatccgggtgtctcccctctctgagcagaattgcaactgtggtcaaggattcancaagaggtttggacagcataaaacagacttggaacggcatatcgggcctaccacggatgtacctataagacaaggcgaggggtatggccaatcaaagagattgggtcccgtttatggatgtgttagctttgcttaattttggggtcgtcctctttccatacgtggatggttnggtggaccatacagcaatcgacgctttccttgcttaccaccatatcaag

SEQ ID NO: 145867 - DNA, 432 bp, Glycine max
agtcacctgcggcatgcaagcttgaccggatgtaagatacatcttcttcttccttttcattcttgactccatttcatggaagcgcatatccacttgcagttccaaagtatcaaacctctcaccaacaaaggttggaagaccatcaaacctttccaaaatcttcgaaagaagagatgaatcttctccctcatgtccttcttcaccaatatttctagcacccttctttacccatgatccatcatgctccttattataaccaaaggatgactgaagcgcctataaggaatgatctctagattggaacataagggtctgaatcaagagggatgttgaaatgttgaaggaagaagataacacggtgaggataaggcaatggggcattcaatcgcaatgccttatgcatgcgatatctaacaagatgtgaccaatcaa

SEQ ID NO: 145868 - DNA, 166 bp, Glycine max
tatgctttgacatcttgtgtattgataccacaggacaaatctttgtcttcaaaaactatgaaggaagcctgctcgatgggcttcatatgagctggatctatgagcatcaattattgttcttcatggtgattatccaccaaggaagtgtatcggaagacaaaagaat

SEQ ID NO: 145869 - DNA, 432 bp, Glycine max
  unsure (1)..(432): unsure at all n locations
ctgactgctattttcaatgtcaaggataaagctttctgggcnattgggtgtgaagagcaaattttgattcgggagatttatgtgtatatccagtttgaacaagtctaaatatatgttatggactggtgtgaggtgagagtttgcttcaaatttacctcattctaaatttcacttttcaaacctataatacccattgaatggaggggtgttggacacctatattctgtgttgctgtgctttatagcttgactttggtttagacatgattgatacatgatttgggacttgtaggaaattatttgggcaagattggatgagaggaagtgtgaatttcgaaatctgcttttgtgcaaatatttgctgtgaaattggcacaagatttgcacaatgcaaaaaagctttgttctgctgttgtgaaaaataatgaaaaga

SEQ ID NO: 145870 - DNA, 451 bp, Glycine max
  unsure (1)..(451): unsure at all n locations
agtgtccacatgggtgcatgcatgatctgttttgcattagtttctaaatcatcggtgatatatgtgtgtcatggaaataatgtggggcattcccttttatccctgaaccactggccatagcaagtaccctgacatacgtcatggctggccttctgtaaagcctctgtgggtcaacacctcaatccgtctgccctaatccttgacccatggtaggaatntgtacctttatcctcgataaaaataagaacaggaggatctcaaaaaaacgagaggaagataaatcttcatttactgttaagttattgatgtaagctccattggagcttgtacgcctaggatcttcttcatcaatgtattcctttgcttcatagaagatgaatggcagcggaatggagaacgaagagagagacgagacgccacttcatggagaagatgagtctataagaaactc

SEQ ID NO: 145871 - DNA, 289 bp, Glycine max
  unsure (1)..(289): unsure at all n locations
ttattgctcacggatgtagcctgtgtattttatatatcggtgtcttattattcaacattatatctagtgaaaataaaaaagctatttccactcctattcctataggaggtcgttatgtttgctcttgataagagtgcttgaaagttaattgcgtatcgcgtgggagatgtatttatcagatgatggcattcttagcatgagccagccatattattaatntataatcttataattcaataacctgagccatattggtgtttatcattatccaattattataaactagatt

SEQ ID NO: 145872 - DNA, 423 bp, Glycine max
  unsure (1)..(423): unsure at all n locations
cattcggacatttaatctaagctgttaagagatgtactgataggaatttgtttcctacctgataacgttgaataccagttaattctattgcagctgggaacatggctgggcaggcttttttcgttaggatctgatagtgacctggtcctgattgtttacgtacacttcttggtttgggttattgtaaaacgatgatgtgagagacttgggagtttttgtgtatgccgcggatgaatgcggtttctatctaatcttatacacgggcttgtatgctgggaacttacgatgctcttggtttgggcgcgtgaggangaggtgtttccacggtatgacttataccgtcttgttgccgttggtagtcgggaggagctagagcttgagtctcttgggagagaggaaaagtggacctatgttatatttccg

SEQ ID NO: 145873 - DNA, 267 bp, Glycine max
  unsure (1)..(267): unsure at all n locations
tctatatttgatattcngcatttcatcatgaatctgatatcaaaagatgtcatggagagtgacagatgaatacactgataatagagaatcacgccccatgagcaacatagaaaaactcaaggtgtaaaataagatacttgaggagctacatcagacaatgaacaaaataacaagaggtgcagatttgaaagatagtgtttggcctggctaaaatattttagatgataaaagtatatttagatcaagattattcaaataactgacaat

SEQ ID NO: 145874 - DNA, 444 bp, Glycine max
  unsure (1)..(444): unsure at all n locations
actttggattcccaggatcttctatatgatcatgatctgctcatggtggaagatactcatttgttgtgtctcaagcatttatgagataacttggcacttatcactccaaaagagggagcgagatttgaagatgttgtgaaatcagaatggtttgtagaatatttcaaatcggtggtaaagtggtcaccggaagagatttcatggcataaacttatgtggcttatgatcaatgaggtccctttgagtgtctaaagatcgaaatgttgtgaaaaccgattccttttttgtgggaaatatggtggcaatagatgcgagagcgacaaatttctcaaggcttgactttgctcaagttcatgtccacactccttgtgtgagcatgatctcataacatcaaaatataaaattcaacgacagagtatgctctattangatggtggaggagat

SEQ ID NO: 145875 - DNA, 431 bp, Glycine max
  unsure (1)..(431): unsure at all n locations
gcttctntgggaccttgaacaagctctcttctcctctttcagaaccatgctatgtgctcgcgactggtccctttcttcccttcgcaacttgagttcactattgctacaccatatagctccgcgaaatttgttccggccatactcttccttgcgagccctcttggtctctcgttcaagggctcttgcggtaattgcattctcttctcgtaacccggcacactccttccgaacgtgtgtagcagccaacttgaacttctccttggcgagttttgcctttcctaactcgctcttgagagcttggacttcctcgtcctcttccggtgcttcacaattctcttcgctgacgacttttaactgggcgagccaatctaaaccctctatgcgaactttcagccattcgtggtacccaccaatgatgccattacgaatgc

SEQ ID NO: 145876 - DNA, 470 bp, Glycine max
  unsure (1)..(470): unsure at all n locations
ntntagctaagtggctatcttcaatcaaaacatggccttcatccacttcaaactcatgtattcatttcatactcagagattcatgcaaaaaccattatgtactgctagtctctctctcacaattaaagatcacactctcaccgggttgcgactaatacattccttaagaatcaacctgacaaaccaactaacatttttagtcataatcctaattccatgttctttctcttctaataaccgcatgctcattcaaggcatatgatctgcacatttcagttcactcacatcatacaattgatcactgaatttcaaaacatagcatcaaccactggataataaaagtacattattcacttaagctgtgtacaagctatcaaccaaataataactataaactgaaatttaaaagctgatacataaacataaatctaaattatcaaatgtactaaagacgagataataataaaact

SEQ ID NO: 145877 - DNA, 424 bp, Glycine max
agcttccccgacatccaagcaattcatcattctaacaacacaaactatcacagccaagataacagggcaagggcagaaaactctgcccaaaacaccaaccaaaatcacagcttttctcacttaaagaccccagtaacatttccttcgttccaattcgttaaccgttggatcgactcgaaaattttactggaagtctctagtacataagcctacattttgaccgttgggatctgctagcaaacatccagaactcattctgcctcactctttccacaaccagcaaaacatagtatttttctgcacttatgcaaaattctgctgcacaatttcacagcaaaattctgcataaagtgcagatttcgaaaatcacactttccctcatccaatcttgcccaaatcaaatcctacaagtcccaaatcatgt

SEQ ID NO: 145878 - DNA, 444 bp, Glycine max
  unsure (1)..(444): unsure at all n locations
tctccacttgtaacttgngcctaaattcaaatagcatgcttaacacttgttgaagagcttccttggccttctttgttctatcccttgccatatgtcctccaagtccttctaaatgttccttgcccttaatcattgccatgtcctcatcatggaagcatccaaaaaattccctgatggaaaatatttacctttgtaaactttaaaaacaatagtatcatagtcggtcatgagattccaaccttgtttccttagcatgacaagattaaaaacatgaaggtgtctaaaacctgcaccttcttcttttttcaatgttaattattcccaatgtaactagtgtattcctcttctggattggttcttattttcccattagtaagaattcatcattgtttctaattcatcttgtatagtagaaggtagtataaaaacactcatgcaataagt

SEQ ID NO: 145879 - DNA, 307 bp, Glycine max
  unsure (1)..(307): unsure at all n locations
tctgctnttattgttgaccacatagtggtacctggagatatgtcacggnggtcacgagaccttggggacgtcaggtggggtgctattgcccaaaaccaagcttgaccaatcccgacccaccccgagcatattcggtcagtgagaacctgtgatgtacctaaacaggcgagctcctggcagtcaacagataaaaggaacaaagaccacatagcaaggaggtttgtggtggctggccagctctgaaacttgattgatatgtgagatatggtctctggtaatcgattaccaagggtgggtaatcgattac

SEQ ID NO: 145880 - DNA, 51 bp, Glycine max
  unsure (1)..(51): unsure at all n locations
agcttgcatgatatacatantctccctttttatgatgacaaccacctgtag

SEQ ID NO: 145881 - DNA, 427 bp, Glycine max
gcttcctagtctataaatagaagcatgtgttacacttgttgtaactttgatgaatgaaagtcttatgagatacacttcaaaggtccacttctttccctcttttattccttcaatttcgtgctccccccttctctctttcttttcctccattgaagcatccttccaagcttcttatccaaggctcatcttggtggtgaagctccttcttccatggcttattccctagtggatggcgcctcctctcacctcttctactttgtcttccgctgcatctccatggtggaaaatcaccattaataagacttcattgaagctcaaagatccagcctccatagaagccccacaaggatagttccatcaattaacgatctcttgcggtggtcgacaaaagtggtgcttttgctcctacgtatcctcaatcgtgatg

SEQ ID NO: 145882 - DNA, 377 bp, Glycine max
  unsure (1)..(377): unsure at all n locations
tcgacccgngtccttaagtcacctgcggcatgcaagcttgcttgtgaagcttctatggaggctggatctttgagcttaatgaggtgcttaatggtgatttacaccatgaagatgcaatggaagatacaggagaagaggtgagaggaggcgccatccactatggaataagccatggaagaaggagcttcgtcaccaagaatgtgccttggataagaagcttggagaggatgcttcaatggaggaaaagaaagagagaggggggagcacgaaattgaaggaggaaaagggggagagaagttgaactttgagtggtgtctcataagactctcattcatcaaagttacagcaagtgttacacatgcttctatttatagact

SEQ ID NO: 145883 - DNA, 423 bp, Glycine max
tccaagaatcaagatcaagattcaagactcatgattcattaatcaagagaagacttaatcaagataagtatgaaaaggttgtttcaaaaactgagtagcacatggatttttctcaaaacatgtttaccaaagagtttttactctctggtaatcaattaccagattattgtaatcgattaccagtagcaaaatggatttgaaaaagttttcaaatgaatttacaacgttccaattgatttcaaaaagctgtaatcaattacaatgttttggtaatcgattaccaatgcctttgaacgttgaaattcaaattcaaatgtgaagagtcacatcctttcacataaaagctttgtgtaatcgattacactgatttggtaatcgattaccagtgattgtttctaaataaatcaaaagatgtaactcttc

SEQ ID NO: 145884 - DNA, 426 bp, Glycine max
ctaagctgaagtcaaagaacccactggatgcctttatgagtattatccatcttgaaagggaaatcatagggacccaacaaatcatgttcaaactagattgtcattaaaaacacaacgacacactacattgatctctgagatggagcctaaacacattgacgaggcaatgcataacaacaactatgtgaaagtgatgcaagaatagctcgaccaatttcaaaagaatgatgtctggaagctcattgaactaccaaatagtaagaacgcaactggagcaaaatgggtattccgcaacaaactggacaaatatggtaaggttgtgagatacaacgcaagattagttgctaaacgttactcacaacataaaacgtatataccatatataaaacctttgcataacaagctcctatagctcggtatgacaaa

SEQ ID NO: 145885 - DNA, 345 bp, Glycine max
aaactaagctatgctggggattcgcattgggttacaggtacactattcttatcatatacattactgcaaagatctgctagtcccttttgaaaagtagagaaaactaattgattttaactagctaattcaactcgcggaactcgaaagttcaaatttaagcagtgatggttagttatatgctcagtatcgtaaaagaagtactattctttgtttctgttttataattatgaatttaattcttcatatactaatttactctattcctttctttgtaaaggggagataccgatggaagaattcccgggacttcaacaagatacactcttaaaaagttgggcttgggat

SEQ ID NO: 145886 - DNA, 398 bp, Glycine max
agctacctattagagaggtatgcgtagcttatctctagcttctttaggaatcgtctcaaggaagccttcaacgaagtgagcttcactattagaggggtgtgtgtagctaagctctagcttctcaaggaagttttctcaaagaagcttctcaaggaagttctctcaacaaagcttctcaaggaagcaacctagtctataaatagaagcatgtgtaacacttgttgtaactttgatgaatgacagtcttgtgagacacaactcaaaggtcaacttctctccctcttgcttccttcgactttgtgctccccctctctctttctctacctctttcttgtactccatcgaagcatcctcttcaagcttcttatcctaagctcatcttggtggcgaagctactt

SEQ ID NO: 145887 - DNA, 427 bp, Glycine max
  unsure (1)..(427): unsure at all n locations
ctaacatgccaacttacaacagcaagcccgatgtatacttattnttttgatgcataggccaaagtgagtatgtgaaaagattgtatgaccaagtgaaggtgcaaattgcaaagaagaatgaaagctatgccaagcaagccaacaagaaaaggaaggaagtggttcttgaacctggtgacgatcttggacatttgagggcaaatgttttccaagaaggagggaatgatgagaatcctgatagtggccaaatacaggctaaaggcccaagtggagaaggacgaaggaccatatggagaatgacaaagcctccgagtggagaacgatgaaggcccatacgtagagacactatcaagactattaattgttgctgtatgccgcaactaatttaaaggcccacagtaaatatgtatcttaggtataatcttta

SEQ ID NO: 145888 - DNA, 323 bp, Glycine max
ctgcatagctgaggactgtacctatgaccgtacatttttggtttctatctcggcccaagtttatcgcgggctgcggcactggttccgcttctctaactgcataggaggcggtttccagggcattatcctctagagttatctggagctttatcatggcctccgagatagaagccattagatcttttaaggccgattgaacggacttcatctgttctctgccgccctcttcaatatacattcttctggaccgagcgctataggggtgcctatgtgacttcttagtttagatgaatcccctaaaaaccaaacaatgtagagcatgc

SEQ ID NO: 145889 - DNA, 256 bp, Glycine max
aaaagaaagagggagaaaaaaaaaaaaaaagaggaaggagagaaaaaaaaagagagaaaaaaagaaagaaaggagaataaaaaaaaaaaaaaaaaaaaagaagagaaaaagaaaaaaaaaaagggagaaggaagaaaaaaaagaaaggaaaaagaaaaaaagaagaaagagaaagagaaaagaaaaagaaaaaaaaaaagaaagaaaaaaaaggagaaaaagaaaaaaaaagggcgagagaaaaaaaaaaagaagg

SEQ ID NO: 145890 - DNA, 110 bp, Glycine max
  unsure (1)..(110): unsure at all n locations
acccaangacgagccagcgccggaaacacaacatttttttgagcaacangagcagagccaccacgagacgacgggcgaagggggacaaaccagagcggagaggacacccc

SEQ ID NO: 145891 - DNA, 250 bp, Glycine max
ctgggtatacattacaaactatgctaacgagcagatgtttatatctttcattccagtactgagtgcacacattgttcacgaacctttctacttattaatcaaagcactgtggaaacaccctacaccttctaatccctcttaacttttttatgcatagattatcctgggcctatatgcctaactttcaagatctattaagttattgcctatgagaatattacaggaaccaagttcggcagcctgggaagga

SEQ ID NO: 145892 - DNA, 287 bp, Glycine max
acgcctcacacaccgagaacaacaaacagagcacaaacaataccatagtatacacatcgacgcaacgactgcatggaaacaacacgctcgcgcactaagcacataacgatgccacgagctccacaggaggacacaaccacgtccaccaagcctccgaagacaagaacgacttacacttctatgtggaagatagtcgggagggaatgccaaacacagattcaatgtacatccaaccccaacacgcaactcaagaagcggacccgccaaccatgcaggaaagaaaagca

SEQ ID NO: 145893 - DNA, 381 bp, Glycine max
  unsure (1)..(381): unsure at all n locations
aaattgagaatgatgtaaacttgaagcaaactctcacctcacaccagtccatgacatcaatctaagcttgctcaaactggatttacacctaaaattctaccgaatcaaaatttgactcttcaacacccaaatttgccctagaaatggctctttgttcactttggtcatttgtttttctctctagcatagcctaacctttctcataagtcctaaatggcattttaagctaagattaactcacttaaacctctaaataccaccaattccagatttggccttccagccctcataaattcactctttttccactcataacaacacattctcactttgcaaccctaggttaactataccattcatctttaacagttntccataagc

SEQ ID NO: 145894 - DNA, 265 bp, Glycine max
cctatgcctgttgaaagccttggaggaaagaggtattgcctatgtggagtggatgatttctctcgatttacctgggtcaactttatcacagagaaatcacacacctcttgagcattcaaagaattaagtctgagacttccaagagaaaaagactgtgtcttcaagagaatcatgagtgaccatggcagagagtttgaagacagcacgcttactgaatcttgcacatctgaaggcatcactcatgagttctctgcagccattacac

SEQ ID NO: 145895 - DNA, 305 bp, Glycine max
  unsure (1)..(305): unsure at all n locations
cggacacttaaaactaagcttgtatccagggaggggattcgagctaaatgtttatctgtctatcgtngaaatactgaggaagaatatgaccaccttagctcagacatggagcgttctttccttctcgaacctgattcctacctcccacacatctgatgtcaccttggacagagccaaattgatttacgacatcattaccaagatggatatgaatatggggtacctcatctcctaccagatctctctgactgcacaacataatacatccagacttggattccctgccttgatcacaactctatgca

SEQ ID NO: 145896 - DNA, 374 bp, Glycine max
  unsure (1)..(374): unsure at all n locations
atacaagaangaagcccaganaccacgcgttatacatttgtcctcatanatcnnaagaagcgggccgaattaagatattaccaactatatcccccattaatattctatcccactctctattcaagtcacaaattcccttaacactgaaatatctaaataatgattcagatataacaatctgaatataaatataaaacaataataaataacagaagttaagggaagagaaagtgcaaactctgatttatactggttcggccacacccttaggcctacgctcagtccgcaagcaacccgcttgagagttccactatcttgtaaatcccttacagctctaacaccaaagacaatcttctttggttcaaattctttac

SEQ ID NO: 145897 - DNA, 429 bp, Glycine max
  unsure (1)..(429): unsure at all n locations
nagcttgcatgtctagtgatgctagagagacaaaggtcctatttctctagacgatttgagagatatctgggcgaagatctgcatagaccatagcttgagtgtaagttgtctgagagctgagatgagttgtgagtggttgtgataatctagaggtgaaggagacatcctcaccacttcgtttgttgcgaatatttatctagatcttctctttgctgcaaaggaggcttcctagttatggaaagctaaaatcctatattggatctttcttcgatgtacattatgtaaatatctttctatccatataatgatgatatgtgtgttttctgtgctatcagctntttattctagcatgcctataccttgatcacgtatagtgcttgctttgttctggctatgcgatatctaaaacttgtctgatgtctgatgacc

SEQ ID NO: 145898 - DNA, 364 bp, Glycine max
  unsure (1)..(364): unsure at all n locations
aactaagcttaaagatatccncttgacacattatggggganatcttataatgttttttttctngacattccttaaagaattatgcaataatatggcttttgtgtctatggttgaacctaaaaatataaatgaagccataatagatgatcattggatagttgctatgcaagaagaacgaaatcagtttgaaagacacaatgtgtgggaactagtagagaaacctgaaaactaccccatcataggaacaatatgggtatttgggaataagttagatgaacatggcataatcattaggaataaggctagattagttgcaaaaggatacaatcaagaagaagggttagattatgaaaaaacatatgct

SEQ ID NO: 145899 - DNA, 311 bp, Glycine max
  unsure (1)..(311): unsure at all n locations
gtaagggaannatgcgcaattacaaccgctgttaanattgtttgtctatacnagcngggcaccagagcattattttaaccgatcaccgcactcctaaagaactcttaacccaggtcattcaaacccctgagcagcaaatgtatatagctagactcatggggtatgactattgcatacagtatcggtctgggaacactaatatagtagcagatgctttatctcgaagaatggaagcaacagagagtactctgttattattaataagcccttgcctaccattctcgaaaaacaaagaagcactgaatcatgaa

SEQ ID NO: 145900 - DNA, 349 bp, Glycine max
tgcccgagtcatacatctctatgatatgttgtttaagaactggcaatcataatggctcaccttggattatatggacgaaccaatctcatgcttttacaaaaaggttcatccagtcatgttgagatatgtgtattaagcatcctgctaactcggggcaaaagattaaacgagttccatcactgcttcgtctactgtcaatcatatataggattaaagatgaacttggacatacagttgcccttgacaaagatgtcatggaccatgttgaaaattaaattggtataatcccatatcctgcctaaaaataacaaatactattacatcatttgcatgcttacatgctattata

SEQ ID NO: 145901 - DNA, 458 bp, Glycine max
  unsure (1)..(458): unsure at all n locations
tgtggnagggcgggctaacatcaccaacatgtctcctactttaactttgaccatngaagggcggcccgcgatgcttctattcatgtccgcctgagtgggcttatagcctaaaccatacttctcacgatttacttgggtatttatcacgctagttatgccgccgtggntttttgctaaacccatcccggggtcataaccattccccaacataactcgggccatcattaccgctgcatcggacaaacaaggctgctcaaagagggagtccacggaggaaatgctgaccacctccaaagactggaaagcatgttctaacgactcttctgcggcttccacataaggcatggaggatgggcagcttaccaagatatcttcctcgcctgacacgatgaccaagagcccctacactaagaatatcagcttttggtggagtgtagaacgcacaacttccactgagt

SEQ ID NO: 145902 - DNA, 399 bp, Glycine max
cgctgctagctttaaacttaagcataaattttttttgttttggagagaaatagatgagtgaacgattctccaccactagtctgcattctcttgatttcatgattgtcattatcaaaaagggggagattgtgtgaacaatgccttccaagattatgttgatgatgccaaagaatctatagtcaatcacgcttccagaatcacgataatgattccagattcaagaattgtctatatactgattcaatattcaagttaataatctagactctagattctaaaatcaggataagactccattcttataagtatttaaagatgtttttcataaactactgaataacacacttttgctcaaaagaataaccttaccaaagatatttactctctggtaattgatta

SEQ ID NO: 145903 - DNA, 349 bp, Glycine max
  unsure (1)..(349): unsure at all n locations
accgcgagctntgaccacggcccgcctctccacgaagcttccctttacatctgcctgagagggcttatagcctaaaacatactctccacgaattcctttggcatttatcaggctagttatgccgccgctgtctttgcctaaacccatcacggggtcggaacccgtccccaacataacatcgggccatcaatactgctgcatcggacaggcaagcttgcccagagaaggagtccaccgaggaaaagcttaccaccccaaaagactggaaagcggtttctaatgactcctttgcgggctccacataacgcatacaggatgggcagctcaccaagatgtcttcctcgcctga

SEQ ID NO: 145904 - DNA, 318 bp, Glycine max
  unsure (1)..(318): unsure at all n locations
ttggaactcaacaaccctagatactatacatatacaatagctaccatcctatctagttntggactgcaactactccatggcttacaagtcaataactgcatgagatatctagcttccgcaaactgcactagcacatatttaacaaaacggctattaaataattctcactatgtaaaccaccggactgggcaatagatcaaaatgatagatatcacatgccttaggatcatcattttcacttgaaataaagtaagactatgtagaacccaaattgaaaacgcaagaaatgtgaacgtcatgtgtgatccatgggaaaaa

SEQ ID NO: 145905 - DNA, 428 bp, Glycine max
cgcaagctcgctaacccatggaagctcctaatatctctcacattctatggggagggccattcttcttgcccttgattttctaagggtccactatgaccccatttctaccaactacaaaccctaaaaaaactatattatctacacaaaaggtacacttctctatatttgcatagagggtgtgtttcctaaagactgaaagaacttgcctgagatgtcctaagtgatcatctaggctcctactagacactaaaatatcatcaaaataaacaactacaaatctacctatgaaatccctataagacatgatgcataagtctcataaaggtgcttggtgcattattgagcccgaaaggcatcactagccattcatacaaaccaaacttggtcttctaagcgattctccacatcatcacccattttcatcctga

SEQ ID NO: 145906 - DNA, 350 bp, Glycine max
cctctgacttgagttatcaagagattataaatatgtggccatgtgcttgtatttcaataatcatgatctatcatatctttcaatcaatctttcaatattttctttcatctctttcaacagatattttctgattcatcttctcttcatctttctaaaagtttttgttcaatactttttctttcaagaaaagatctttgataaaaaacttgtgttattcatctctttcattctcttctccctttgccaaaagaacgaaggactaacccgccgaattcctttgtggttctccttctccctaccaaagattcaaaggacaacccgctgagaaatctttgattcttccttcccct

SEQ ID NO: 145907 - DNA, 318 bp, Glycine max
gatacccctgtatcactaacatccacaccaagtagttacacagggataattcacacaatacttcaactaatccatatgagtgtagtaagttaataagtcatgaagtacaccaaacctttattgttagtcgttgaaattctagaagatcatataactcatgttcggacactatatttattctgtcaaaatataagccactcatttgagcgagagagccggaacattgctatgtgataaccaccgtggctagtaattccactatgatgtataggatgactgccctatacataatcatctacttattaagaacgacgatga

SEQ ID NO: 145908 - DNA, 477 bp, Glycine max
  unsure (1)..(477): unsure at all n locations
gacactatanacaactcacgctngagatgaggaagtatagaagggtgaaactttctgttcttattctttgaccacaaagtgggactggagatatgtcgcgggggtcaagagaccttggggacgtcaagtggggtgctattgcccaaaaccaagcttgaccaatcccgacccaacccgggcatagtcagtcagtgagaacctgtgatgtacctaaacaagcgagctcctggcagtcaacagataaaaggaacaaagaccacanagcaaggaggcttgtggtggctggccagctgtgaatcttgtgtgatatatgggtttttgcctctggtaatcgattaccaaaggtgggtnatcgattacaaggcttaaaaatgaagacatgaggctaagatggtctctggtaatcgattaccacaggggtgtnatcgattacaaggcttgaatacgaggtcacgaggctatgatggcttctggtaa

SEQ ID NO: 145909 - DNA, 428 bp, Glycine max
  unsure (1)..(428): unsure at all n locations
agcttgaaggtaaactatatgcctcggtttttctggnaacccaactgttcatgaacaaaaatctgcacctgtcaccagactctgtgggttatgctcatctgccgaccaccacatagacctttgcccttctgtgcaacaatttgatgcaattgaacagcttgaagcttatgctgcaaacatctacaacagaccttctcgacctcagcaccataatcagccacaacataataactatgatctctccagcaacaggtacaatcccggatggaggaatcatcccaaccttagatggtcgaatccttcacaactgcagtatcaacaacaacaacaaccttatttcaaaatggttctggcccatcacaccatacgttcctccaccaatcacagcagcacaacaacaacaacaacagcccctataacatcaaaca

SEQ ID NO: 145910 - DNA, 441 bp, Glycine max
  unsure (1)..(441): unsure at all n locations
gacctatgaaactcagctttaaactnttacaagaatgaagctctgataccacttgttatacaagtggctcagatatcttaagaagggggggttgaattaagatattccaaactgtttcccctaattaaaaatctatttcactttntactcaagttatgaattcccttaatgacaatcttcttaaatattaattcaaatgaaacaatttgaatatgaatataaagcaataataaataaaggagattaagggaagagaaaatgcaaactcagttttatactggttcggccacacccttgtgcctatgtccagtccccaagcaacccgcttgagagttccactatctttgtaaatccttttacaagttctaaacacaccaggacaatcctttctttgtgtttagagatcctttacaacaagagactcacagtctcttaatccct

SEQ ID NO: 145911 - DNA, 304 bp, Glycine max
aactgcatgcatgcaagagctcccatacaagacgtaagaacaactgttactctaattctatggcgctccaaacggacatggctcacgcgacccaggaaccacaatttcactagaacagaccaacaatgatagctattctcaatccttcttgcaaacggatagctgagagacaggaaatcgaaattacaagttcacaggatgccaaataagagccaaacatcgaatcctaacactcaatagaggaagacgctgactagcataccaaatggtatagctgaatcggtaggtgtaaccaggaacaaac

SEQ ID NO: 145912 - DNA, 378 bp, Glycine max
  unsure (1)..(378): unsure at all n locations
tatattatataactaacaaaaaatgaaagttagaacattatttacctttatctattaccatnncatcattacagtagcacattcaacaacaactttatagttcatagaacctataaaaatacattacaagtattagttcttgaataaacacaaatatcaatttaacaacatatacgaataaaactttaccagtattttcagcactccacaaccaacttctagcacacattaaagcccctatagtagtccattgaagtcgactatgatgtgggcttaatatttgaccaccagtgcttaatgtggattctgaagctacggtagataccggaatagctaatatatcattaacaattgcttgagtgttggatacttacacca

SEQ ID NO: 145913 - DNA, 360 bp, Glycine max
  unsure (1)..(360): unsure at all n locations
agctattacaagccctaagtgaaaaccatgatcttatcttatttcttaangaactagttctcaaattcaaaaaaaaaaatcaagttgaatcaactagaaaaagaaaaagaatacgaaaaacaatgctgttgagtgaataagatcttaaatgaaaaaaaaaaaaagaaaaaatgaatgatgggactcttggttctactctttgtatttaaaaattatctttaagttttcttattttttttcttagtgtgtacttattccccattgctcctctattcctttgggatttagccactaattctacatttttccctaccttgtgctttgccccattacaacctttaaagacctcttgatcttcat

SEQ ID NO: 145914 - DNA, 488 bp, Glycine max
  unsure (1)..(488): unsure at all n locations
tctagaaactcaagcttgtctcagcgtttatgcgagacagagaccaacatgttagctatcatctttaagttccaagaagagntaggctagccacggcccacgagcatagaatcgcggatgagtatgctcaagtgtatgcggaaaaagaggctagaggaagggtgatcgactctttacaccaagaggcaaccatatggatggaccggtttgctcttaccttgaacgggagtcaagaatttccccgattgttagccaaggccaaggcgatggcagacacctaccccgcccccgaagagattcacgggcttctcggctattgtcagcatatgatagacttaatggcccacataattagaaatcgttaggaaacttgtatggtctctcaggccttgactagatacgacttccttntttgaaataaaatgagttggtcccatgtntctactctcaaaaacttgtgcaaatcaaatcaccccttgcatttatct

SEQ ID NO: 145915 - DNA, 451 bp, Glycine max
  unsure (1)..(451): unsure at all n locations
tgcaagcttgtaccatattcaaacgattataactttntactcgaatgtccgattgtgtcccatacatatatagacgctccaaattgaaaacggatgctcgtaacaaattcaaacgacaacaactttttactcgaatgtacgattcaatcctgtaatatattgagagtctccaaattgaaaactgaagttcgtatcaaattcaaatgacaataacttttttctcggatgtccgattgagtctcatattatatcgagatgctccaaattgaaaatggaagctcgtagcaaaattaaaggacaataactttatacactgatgtccgattgagtcccgcaatatattgagagactccaaattgacaacggaagttcgtatcaaattcaaacgacaataacttatttctctgatgtccgattgagacccatattatatcaagaatgctccaattga

SEQ ID NO: 145916 - DNA, 440 bp, Glycine max
  unsure (1)..(440): unsure at all n locations
ntgagcanatntaaatgacaataacattatactctgatgttctgttgagtcccgtaatatacgagacgctccaaattgaaaacggaaactcttagaaaattcaaacgacaataactttttactcggatgcccgacagattgtcgtaatttatcgagagatgctccaaattgaaaacagaagctcgtatcanattcaaacgacaataactttttactcggatgcccgacagagtgtcgtaatttatcgagggatgtctccaaatgaaaacggaagctcgtatcaaattcaaacgacaataactntntactaggatgtctgattgagtcccgtaatatatcgaaacgctcaataatttgatccgaagctctgagaaaatagaatagacaataactttatacatggatgtccggntgagtcctgtaatatatcgagacgctgc

SEQ ID NO: 145917 - DNA, 369 bp, Glycine max
tgctgcaagacttgtatggtagaaggagtataacacttctatgttggttagagctcggagaagcctcccttacgaccagaagtggtacaacaaaccactgagaaagttaagttaattcacgaaaggatgagaactgctcagagtatgcagaaaagttatcatgataaaaggaggaaagatctggaattctaggttggtgatcatgtattcttgagagatactccatggtctgtggttggtcgactattgatatccctacaatttgcatcgtgatttattggtccttgatgtctctcttagattatctaagttaattaaacttgtaattgttctcttaacatttattattttctaaatggaatatcttat

SEQ ID NO: 145918 - DNA, 433 bp, Glycine max
  unsure (1)..(433): unsure at all n locations
tctttaaaggatgtagactntgngcttgacttttctagtttagatgtacttaaggagttgagaaaaggcttaccacctctcccatcatgtcaccaccagattgggagcttccctttgagctcatgtgtgatgcctctaactatgcacttggggttgttttgtcatggagagttgatagtctattttatgtcattgcttgtgcttcacgcactttagatgcagcccaagttaactacaccaccacttagaaggagattttagctattattttgctttacataaattcagatcttattttctttgctcccatatcactgtctttactgactatgcaactttgaggtacttgttgaagaagcttaatgctaaacctagattgatcgggtggatgcttcttcttcagtagtttgatattgagataaagacaggagtg

SEQ ID NO: 145919 - DNA, 355 bp, Glycine max
  unsure (1)..(355): unsure at all n locations
taagaacaaaggaagtccttctaaacctgatgttataaaatgtgtataatgaaannccactaaagaaagatacattaggaattgatcagaacataactaataatccatcaaatccgaaagcctatgaaagcctggttgaaacaacaatcccagctaaaatacttataaaagtaacagctttatgatgtaacgatccattgattaatgcattgatatgcatcagaaaattaaccaatcactgggctgttgatgcctgacaataattacaacaatatgattaactaattgaattacaccacctatatatattatttattgagagagagagtgtctttatatttcatacctgaacacg

SEQ ID NO: 145920 - DNA, 338 bp, Glycine max
tgcaagcttctcttaatatattaaaaagattattatttcttatgatataagatacaacctttattataacttcccaaaagatgtcagttagaaaagatgcactatgaccatgatgaaatccaccatgattgtggtctcaaagttgtgacgctgaaactctagggtgttatggattgactataaccctcgtgagttgatcatggccatggtgtcatttaccatgaccgttattgaatggttggcgtaattctgacgggtacatattctttttccatggtcgtgttgcttaccatggtcgtaataaatgtaccatgaccttttactagtgtgtatcttct

SEQ ID NO: 145921 - DNA, 369 bp, Glycine max
  unsure (1)..(369): unsure at all n locations
tttggtatcttactcaatgactctcatttttaacttagttatatgttcattngaaggacaactttcaaatgctcaaaaagaaaattagaagctcagaatggaatatgaaagcttttttttaagagaaaccattgtctgcaggaatctcattttaagcttgctgaatagttaaaactgagaaaaaagactactatctctttttatcaaactcagcatgaaaatgaaaataaagttgagaaattattagaagacttagctaactntgaggtaggcacaaagaaatagataaattgattgaatccagaaaagaatttatgatagaattggactaggtttcaatcagagtccaaaaaaggtctttcaaaagtc

SEQ ID NO: 145922 - DNA, 370 bp, Glycine max
  unsure (1)..(370): unsure at all n locations
tgtttgcatgcgagatgatctaagtgggtctgagaagaggcaaacgattatgctgctttgatgaataggaagccaggggcaaatggagagaataaaaaggagggagaaactcatgttgtgactgtcgttcctacatggccaaatttcccactagctcaacaatatcaatacttatccaatatcagtcattctcattacccaccaccttaccagtcaagaacacccaaacatccacaaaggctgcccctaaatcaaccacanaacctgtttgttgcacatccgaggccaaacaccacccttaatacgaaccaaaacaccaaccaggataggaaattntcagaatagaagcctgtgaaattcaccccaattt

SEQ ID NO: 145923 - DNA, 467 bp, Glycine max
  unsure (1)..(467): unsure at all n locations
ataaaactcagctgagttacattaataaactctctagatatttagttttgtgtgttcacacgttagaatgtattagttcaagataaaaatttaaactaattatatttggaaaaaaatgatcctgaattaataatataaaatagttttatacaattatctaatcataaaaatattaaatatgataggttagcttttacttttataataattatcgtaaaaaatcttacaaattataaattattaattgtgatcgagtaatagtataaaattttacattgttaacacaaagttattaaactcttttattagattggtttagttaaaggttgaaatttcttttgactaatccaaaccaaactaaactactgaaaatngaattaattcgagtcaccgcataatgataaaaataaataaattattatattctattcaagtctttatttacactaatggtcaattttatataa

SEQ ID NO: 145924 - DNA, 427 bp, Glycine max
  unsure (1)..(427): unsure at all n locations
tcctcggggccattcctgcgaaggcaacatttggaaagttagttttaccagnggacgttactcttaaagcaaaaatggcatgtaacctcctcccatcaatacaaacatcaatgtaaatttagagcaagcttatgcgcatatttctctacgaacgttcacttgcacaagacatcctattaaccgaaaaaatgcacccatatacaatcaaggcagccttgttacctagattatttacacgtacttccaaggtgtatttgttacttacatcacacacatctccttggctaaattcacatacatgcatactccaagcattttggggtaccaaaaattgcacatgtgcacatncttgtatttctaatacctatacatacacaaacttcatgatgaatcttgactatctacacaataaggtgctacatttcat

SEQ ID NO: 145925 - DNA, 431 bp, Glycine max
  unsure (1)..(431): unsure at all n locations
agcttaaagtatgcccgagtcattcatctctatgagatgtggntgaagtattggcatcagaattgccattccttggattataaggttgaaccaagctcatgcttttacaaaaaggttcatcaagtcaagttgaaatatggaagtaaccgtcttgcaaaattggggcaaaagatgaatcgagtcacatcactgcttcgtctactgccaaacatatttaggattattgatgtccttgttacttccagtttcaccttgacaaagatgtcatggaccatgttgaaaatctaaattgattcaaccccatatcttgcgtaanaattcgcaatacttcaactgtacatcattcgcatgcatccatgcttttcattggttgcattgctcgctgcattctttccttgaaaaataaaataaaatgaacttaatcattgtta

SEQ ID NO: 145926 - DNA, 313 bp, Glycine max
  unsure (1)..(313): unsure at all n locations
tcatggtgaatcaagaatgattcaaagagtnttgatgatatctaagataatgcaaaaagctcaaaagtcaagatcacttcatgataacaaagatgatgacattcaagaatgacttcaagattgagtcaagaacacttcaaggattaagaggaaatttgatttcaagaatcaagattcaagaatcaagaataatcaagatcaagattcaagaatcaagagaagacttaatcaagataagtattaaaaagtttttcaaaacattgagtagcacaagaagttttcacaaaatcattactaaagagtnttactctct

SEQ ID NO: 145927 - DNA, 456 bp, Glycine max
agttcttagtctcacctgatgaagatgaattcttggctactttatgcactgctctaatgacaatacatcactcctggcactaaattgctggtagtttgaagccatcttctcaattaaatttctggcttcagcaggggtcatgtctccaagagctccaccactggcagcatctatcatactcctctccatgttattgagtccttcataaaaatattggaggagaagctgctcagaaatctagtggtgagggcaactggcacatagtttcttaaatctctcccagtattcatacaagctctctccactgagttgtctaatgcctgaaatatcctttctgatgaccgcggtcctggaagtagggaaaatttttttctaagaatactctcttgaggtcatcccaactcgtgatggaccgtggagcaaggtaataaagccagtccttcgccactccctcta

SEQ ID NO: 145928 - DNA, 465 bp, Glycine max
  unsure (1)..(465): unsure at all n locations
tgaatggtatggggctctccaaaagtaacctcaagatgtatttacacttaatcaagagattggntttcaagagagactttgtccaaatttgttggaagcactaaaaaacttgacaagtggttaagatatagtaaatgcccaactgataaatttggacatgtatattaaggaaaaaattatgttcataataatggaaccataatatgttacttctgtggaaagattggatatatgacatccaagtgtagacatctaccaaaaaccgaatcatccagtgctttcagaactaacaagaaaagacctaanaaggtttgagtacctaagagaaaatgttttttgttccaaatatcttcaaccacaacatagacacaccaatcatagtacttggacaatggatgctcatgacacatgataggagaaaggtgtatgtttcaatgccttgcccccatgcatgatggaacaatc

SEQ ID NO: 145929 - DNA, 450 bp, Glycine max
agtctcacaagagagggcatctctaggcatatcatattttgatgtccctacacgatcatatacatgaaccgtccacacaggtggcacaatcttgtgctcctactattacccttgttccgccatcaattgctacgactcaaaagatatggttacaccatcagatccatcgttgcataatgcatcaatgacctttgttctttcatgatagaatcaactttgaatttttttggattaactaagttgcacggtcacaaccatgaataaatcgtggatgtatatgctgtgaaacacaacctgatatctacatggtttaatatttgccagtatagcagctcctagcttatatcattatcatattggatttgcaccatactaatcatactttcctatttatgataacttgcagcagtgcctcataaagccaaacattcacaaaagaggggatctcat

SEQ ID NO: 145930 - DNA, 467 bp, Glycine max
  unsure (1)..(467): unsure at all n locations
tcagaaccaagcaactcanaatctaggtagctaaaacccctcttttattgggttttcaagggttgagagtgaaaatgagaatggggtaaacttggagcaaactctcatctcaaacaagtctatatcatcaatctaaactcgctccaactggttttacgacgaaaaccctaccgaatcaaaagttgactcctcaacacccaattttaccctagaaatggctcttggtttcactttggtcactcatattcctcatttgcacagtctaagctttctcataagtcctaaatgacatttcaaactaggattaactccctttaacctccaaataccactaaatccagatttggccttccaactctcaaagcctcactctttntccactcataacaccacattctcactgtctaaccctatggtaactctacccttcatctctagcaggtttccataagcaatttcagcacata

SEQ ID NO: 145931 - DNA, 415 bp, Glycine max
agtacacaaatagtgcttaatccggagttttgcgtctcttctttggatcgacacccctagctgcaaatgcacctctctcagagccttggacttacaagtaagcttttcctacatgcttaattaatcaccactgatatttagatatgcattccttcaatgtctacaaatctacactccatatgtgcatttatcattactgagatttgtctgtatgtttgtcatgttggggatcaaggtctggctgctgttggacagtgttgcaagcagctagaagacttgaatctgcgattctgccatcgattgactgatactggtctggatgaatcatccatatgtgtggggaagtcattgaaatctcttggtgtggcggctagtaccaagataactgatttcataatggatgctgatgatcaca

SEQ ID NO: 145932 - DNA, 438 bp, Glycine max
  unsure (1)..(438): unsure at all n locations
tcttcggtaagtccatagcaacatccttttctgggaaccttgatgttagtattgaaagaaacaaacaagggctgtcactgacgagcacactgccacaagtgatgccgcagcgaagactttgaaagcatgttgtccactcaacactgtcacaccagttacctcattgtcaccacctgctattgctgttgaggttgtgaatgctactgctgcaacaagtgctgcaactactgagcatgactctgatgtcttggacagccattttcttccctctctcacgagtggttggtgagtgatgatgaaaacctgtttaactgtttgtaccttgatgttgtaacgtgcatagaaatttggaggcatggaattcttaacaagctgaataggcacaaataaattatgagcaaaggaaagtggaaacttatatgtatntaccccgtctat

SEQ ID NO: 145933 - DNA, 405 bp, Glycine max
agtctctcactcggagagtttttctggcttcaccttggtctcgccatacgagggcaccaggttgctggctcgtggttgaaccttcttattgcatctcattgctactcgaagcttggcagcttcttccctaatcctctctatttcttggactttgtctgcggtttgaagctctaccctcatattttcttcattttgctattgctagaacaatagtctacttgtcgacggttccctaacttcaacggggatcatggtgtttgtgccatatgtgagtctataaggagcttcattggttgttgtctggtgtgaaccatggttcactccgactatgttggtgagcttctatttcatatacccttaaattgccgtatctttatagcactctcttgatactagtctgtttct

SEQ ID NO: 145934 - DNA, 463 bp, Glycine max
  unsure (1)..(463): unsure at all n locations
cactctaaaactaagcttaaactagttctccttcacttcttaggttcgtcacatattatattttatgcctcanggnngggaaattacaggtttagttgttattcttattcttggtggcctgctattcttctagtacaaagggtgcaagtgtgaagtttatgtagatgttccatgtttgagttccttttttagtccgtgcaatgttttttagattgtttgtaggtgcatgcatcagaaactattgatctggtgagactacctacacattcttttccaagctgatataactctataaagtgatgaattaatatgatatacaacattttgtccatattntagattgacactacctacaccatctattatattggaagtggaattttcttgttgaaaaaaatactaatatccaccatgatggtccaatggcanttggctgcagtatatatttttccattttagaaca

SEQ ID NO: 145935 - DNA, 410 bp, Glycine max
attaagaaagacttattgtttttaaagatacaaacgagttcaaggaagacgtgaataaaagatagattattcttctaaaatttccactcaaccatgttatgactttgaaagtctaaagtaaaagacaacatagcttcaccttgaaaatgatgagatttgaaagacagatctaatctattggaagaccttttaaagttgaaaaatcaattggaaggcttacaaaaagagtataccacactcagtaaacttcatgattgcctaaagaaggagaagcgtaatctattgaaagaatgttcacaaatccataataattatgaaaacttagaggcaagtaaacataacttatgggttgaatgtgaaggatataataacagcctgaaattctcaaatgataaaattgatcaatatga

SEQ ID NO: 145936 - DNA, 455 bp, Glycine max
  unsure (1)..(455): unsure at all n locations
aatcatttccaaatatgcatgttaattangacgcatcaacaagaatcaagccaggctattgtgcaagcaatcaatggggcaaaacacaccaaatgattatgatgatggatggctcaaattctcacaaaagtaaaatcatcactttcaaattgagctttcaaaactatcatgacatgtagagaagaatcaaggatttcaagtcacaaaatgtcaagaacttttattttcaaaacaattacccatttcttgaacatatcctataattcaaagaaaaacatgcaaagtcgtacgagcacacaaaattgacccaaaatattaaactaaaaatccgacgaaactaacaacattaacaaattaacacaactaacaaattaacaaaaccaacaaaactagcagaatcaaagaacactcccncaccccatacttaaacaacacattgtcctcaatgtagctca

SEQ ID NO: 145937 - DNA, 460 bp, Glycine max
tgctgcaagcttcttagtttcagatgatgtatctgtgtttgtatctacctcatgcactcctctaatgctatagcatcatttctggcgctaaactgctgggagttggaagccatcttctcaattaaatttctggcttcagcaggagtcatgtctccaagggctccaccactggcagcatctatcatacttctctccatattactgagtccttcataaaaatattggagaagcagctgttctgaaatctgatggtgagggcaactggcacatagttttttaaatctctcctagtattcatataggctctctccactgagttgtctaatacctgagatatccttcctgatggctgtggtcctggaagcaaggaaatatttttctaagaatactctcttcaagtcatcccagctcgtgatggaccttggagcaagggtatacagccagtcctttgcactccctc

SEQ ID NO: 145938 - DNA, 398 bp, Glycine max
  unsure (1)..(398): unsure at all n locations
ntagtagtttagtcttagaaaaaaattcaccattttatgttttatgtgattagttagntcttgttcaacgggaaaaaaaattcatgtaacgcgcaggtctaatttaaagactaatttcatgacagtttgaatgattaattgaataaattaatgtcaaaaactttggaagaccatggtaacacttttcattattgacgaacagaatcaagaaccaaagtaatgacattagtatgggtcttactttggtacattgtacatatatgtcgacgtgtacttcagtatatttggtacatgtttttttctttgtagcattgtcatttgtaatgaatttcttttgcactatggtaacaatttttcgccttggttcaggtgatgtatcaaggtgcccttctgataca

SEQ ID NO: 145939 - DNA, 420 bp, Glycine max
  unsure (1)..(420): unsure at all n locations
tgcaagctntangcatatttgtagttagaagattattgatatcattcgtacttgctttgctatgagatgatctttaaagtttatagtgacattgacatgattttaagcctaatccattttatttggtgcagttaatggcccttttactcttgaggcatgcactttctgtcacagattctgacgctgaagatgatccatccactttnttctctgtgagtgactttagttcattttggataagtggttaacacagtatttgtattgcattcaaatacattgtcggcctaacctaattacacaaccaaactctgcagcttttcttgcttcgtgctgctggttttcttttaccttgctatatcatggcttgggcaatcagtattttgcaacgccggcgacaaagacaagtaagttccagtcttg

SEQ ID NO: 145940 - DNA, 415 bp, Glycine max
ctttgcggattggtcttcgccggtgaaaggatcgatgggtgttcattatggcaaatttgtcatcctactacgacgactgagaaaactggggcaaatgaagagggtgagaaagagggagaaacccatgctgtgactgccattcctatacggccaagtttcccaccaaacccaacaatgtcattactcagtcaataacaaacctcctccttacccaccacccagttatccacaaaggccatccctaaatcaaccacaaagcctgtctaccgcacttccaatgacgaagatcacctttagcacaaaccaaaaaaacaccaacaaaaagaaattttgcagcaaaaagcctgtggggttcaccccaaattcccgtgtcatatgctaaacttgatcccatatccactcaataattcaatgg

SEQ ID NO: 145941 - DNA, 420 bp, Glycine max
tcgaagggaagagagataccaatcacgagcactttcatgttcttgaaagaggagttacggcttgctcaaggtccaaaagaagcttgtctcagcgtttatgtgagacagagaccaacatgttagccatcgtcagcaagtaccaagaagagctaaatctagccacggcccacgagcataaagtggcggacgattatgcccgagtgtacgcagaaaaggaggctagaggaagggtgatcgactcattacatcaagaggcaacaatgtggatggaccgatttgctcttactttgaacgggagtcaagaacttccccgattgcttgccaaggccaaagcaatggcggacacctactccgcccccgaggagatccacggacttctcagctattggcagcatatgatagacttaatggctcatataa

SEQ ID NO: 145942 - DNA, 448 bp, Glycine max
  unsure (1)..(448): unsure at all n locations
tgcngcaagcttgtatcttatatgaggaagcagacatctattatttttcactaggtgaggctagctgctaaatcaaaagacaccattggtttctatcttcaactgaaccctttgctagtccattgagataaaatataaacataaaaaaaaaatccaggtaacaatgtctactctagtcatgatgatcagcatttgggtaatgaaacacaaataactgttaaattttttggctggctggatcaattatgcttttggctggctggatcaatcaatttatacctgctgttgctgctaggagtggtcactggtcaaccagttcttccactacagagactgaagcaaaggggatcagttagctctaggtgactttgccatctaaccaattgccatttccaccagtcactggcaaataccaatactccaattgccacctgcataactcgaaact

SEQ ID NO: 145943 - DNA, 443 bp, Glycine max
  unsure (1)..(443): unsure at all n locations
cctctataagcgcgggtctgggagacaaaggtcaagtggtcgttatatgcgaagatgatgttcaagtacattggatttggtacgaccatgccctcctgatttccggctgggaaattggcgagtggaggaacgccccggcatttacgcaacgagcataatgtaaacctttacggttttaaaagctctatagttgggcctaggctttagagtttttccttttgttaaggctttgtgtcttttgttttttaatttataatacaaggatctttcttcatctgttcctacgtctctacccattctcattcatttgcatgtttacttctttttctgaaacggcagatccgatgacgagtcccncgagggtactaatacctgggacccgcctatcgacttcgagccagaaatgagtcaaatgaagatgaaggaacaggatggggacttcc

SEQ ID NO: 145944 - DNA, 126 bp, Glycine max
aaagaaaggaaaaagggggaaaaaaaccgagaggaaagagggaaaaagaagagagaggaccgggcgggaaaggcacaacaaagggcagggacggaggaaaagaaagagacaaagaagagaaacaag

SEQ ID NO: 145945 - DNA, 227 bp, Glycine max
aaacatataccggcgaggaaaaaaaagacaatcccacctccattggacacagctcgtgcacacaactttggcgcatttgtatccacagatgaatattctacggagctcaactgtataagagcatcaccgaaccacgatgattgatttttgaaaaatctcaactgcttatctgattcaacagatttctaatgcatgacttaaattctgcatgtctgcttcccctctga

SEQ ID NO: 145946 - DNA, 383 bp, Glycine max
  unsure (1)..(383): unsure at all n locations
agcttggttcgaggtacttacccgttgaatatcgaacaacgatgaagaacgaatcggaacgtctaagaacggtttatacctttgcgaaattcttcacggaaaacgttacggaaacgtttcggaagcgcctcggcttatattttcttcacggaaacaatttttctcagctaattctaaagagagagaagtgcctaaggggctgaacacttttcttcttcacttcctcccctatntatagcaaaataggggaggtggttgccgcccagctcgcccaggcgagccaggttgcttcctccagaagcaacagccttctggaggaatattctggagggcccaagtgggcctgggtgctatttgcacacccattnttactaagtacaccc

SEQ ID NO: 145947 - DNA, 413 bp, Glycine max
  unsure (1)..(413): unsure at all n locations
tcttcttgtttctctccccatttgaaaccaacatttttcttgagcacttcatgagaggtgctgccaatgtgctaaaatccgtctataaaaacttgctaagccatgaaaactcctcacctcggtcacagacttaggtgtaggccattcttgaatagccctaaccttctcctcatcaacttgcactccttttgaactcacaacaaaaccaagaaacacaacatggttagtacaaaagatgcatttttcaagattggcatacaattgttcttctctaagcacagtcaagacagattttaaatgatcaatatgcaaatcaagtgaagtgctatagataagaatatcatcaaagtacaccacaacgaacttccctatgaactctctcaagatatncgtcattaatctcatgaaagtgc

SEQ ID NO: 145948 - DNA, 438 bp, Glycine max
  unsure (1)..(438): unsure at all n locations
agttctcgatatattatagcgcctgaatcttttcttttgtgtgatcaagacatgaccattaagaantatcccgacacacatacgtttgttctaattttgagccgttctcgatatattcatgctgcctgaattcgagatgtcccgagtgactatgatattgaccatcttgagttctctcgagagcctttcgatgttcaatttccaccttctcgatatattatggccctgaatcggacttcgtgtgaaaagctaagaccattggaatttctcagagcttccgatctctattgtagcgtcccgattattatgccctgaatacgacttcgggggcaggtcttgacctctggctttctcgagactcttgggtcaattcagcttctcattttgtccgcaatcctcgctcgttcgagagtattctccttgtttctctaaattacg

SEQ ID NO: 145949 - DNA, 381 bp, Glycine max
  unsure (1)..(381): unsure at all n locations
tctcgatatattatgcgcctgaatcagacttccgnnacatattttatgtatcatatgaattctcgaggccttcgttgttcaatttcgagcgtcttgatatagtatgcgcctgaatcggacttccgtgtgataagttatgaccatttgaatttgtcgagagcttccgattttcaatttaaagcttctcgatatattatgaacctgaatcggacttccgtgtgacaagttatgaccatttgaatacctagatagcattcgttgttcaatttcgagcgtctcgatatattatgcgcctgaatcggacttccgtgtgacaagttaagaccatttgaatttctcgagagctcccgttgctagatctcgagcgtctcgatatattat

SEQ ID NO: 145950 - DNA, 142 bp, Glycine max
gagaccacgacacacaaaggaccgaccaaaaagggagcaaaaaaggggcaggaagaagaccggagaaaaggaacgcgcaccgggcacgaaacagacacagacacgaacgaggaaggaaggagaaaggcgacagaccgagggg

SEQ ID NO: 145951 - DNA, 166 bp, Glycine max
aacaggtttaaagcaggctttttttttttaaagaagcggcctgcaccgatacacccccccccaaaacttgaattgaattcacaggcatcataccaatgttggacgataccgctcaaaatggaatcaaatcaatggtaaccttaaaataatggtaacataccaacat

SEQ ID NO: 145952 - DNA, 264 bp, Glycine max
aaggggtaaaaagaaagagttttcttatttgacccaaagaggccgcggacatgagcctacccccccccccaaacaggaacaaactaggaaagggcaccacgcgccaccaaaaatgaccaaacaatcctagtccgggtgctactaggaacacaccaacttttttctggggcacccacaacatagcggagaaaaaaaactcttccaacacaacgagacatacactgatgaataaacagaattgtccattaaaccaatccccgataa

SEQ ID NO: 145953 - DNA, 363 bp, Glycine max
  unsure (1)..(363): unsure at all n locations
agctgtaggcctgggatcttctacaacatttttatttttttgcttctcgaanaacaagggcaacatgtcggagaaggaagaaagatgattggagacgccacttcaaggagaagatgagtcaagaaaaagctcaccaccataggaagtcatggataagagcttgaaggatggataagatgattggaggtatacggagagaaagagcacaatattttgtgtctcataagagatctgaactttgaagtgtaattctcacattatctaatgtgaaaatattcactcacatggtctttatttatagctctagtgttccacaaaattggagggaaatcacatacttctattaaatctcacttcaatttg

SEQ ID NO: 145954 - DNA, 439 bp, Glycine max
  unsure (1)..(439): unsure at all n locations
ttctctctattactgtcaactattcttcatttttcttcctcnntncaccnagctcttccatttttgttgcacaaattttgtggcttttccattggtgatgatcatggaaggctaaatacttaatcaatccaaggatccactccaagcaagactaaatttgagttctggtttagtatttctaattttgcgtgaatgttcatttttttctgtaatcctattcttgattttcatgattatgaatatgcttacgattgacagccaattaaattgtttggatgatattctaacctaatttgtgatctcaatgaatctaaggattaattccattaaactaactctaatgacattaaatgaacctttacaactgatcattctctatgaactgcgaaattcattgcatgggtagcgaattgcatgagatttaatagtttatgactat

SEQ ID NO: 145955 - DNA, 396 bp, Glycine max
  unsure (1)..(396): unsure at all n locations
gcagcagcagcacggcaaaaagggcggacactatttatcanaaaggatcgccaatgaaacgctcccacgcgcccacaacatatataagtgcgtggagagaaagagaacatcgaactagcatatcttatgcaagagagagaaacgctgcggagaacaacgagaatcacaagagagaaagactactacctccacataagcatagacgctctactcatccactaggtcaaaaagatcccccacaaaacacacaagcggtaacaagagctatatacttacgggacctgaaccatggaaggtgaaggagagaaatatgacctatgggaagtgaaaaagcaaacccaccaggatacccaggagaaaggggacgctgcagaagaggagtacgaaagatacccg

SEQ ID NO: 145956 - DNA, 282 bp, Glycine max
ttgaagctacggaatcggacttttcttttttttccccagagcagggcctgcctcgcccagtattatgatcagccactgaggtgctctacctttggggacttctcactatcacccatggtagaagaatttgaagagatcctatgatgtcctcaagggggaaggagaccatacctcttctcagggctttatccctcattagctagaatttctaagatagtcccaatttctgcgcaagaattagaccacagaacgcctgtcgaacatggggtggttggaataccg

SEQ ID NO: 145957 - DNA, 282 bp, Glycine max
agaaagggagagaaaagagaaagagaaaaaatgaaagggaggggaagaaaggaaggaagagaaagaaaggagagaggaggagaaaaaaagaaaaaagaaagaagaggagggaaaagaggaaggaaaggaaagaagaggaaagaaggggaaggagggaaaggaaggaatgggggagaaggaaggaggagaaggaaagagagggagagggagaaagagaagggaagaagagggggaaggagaaaagaaaaggaagagagagaaagggaagaggaagaaaggaga

SEQ ID NO: 145958 - DNA, 397 bp, Glycine max
  unsure (1)..(397): unsure at all n locations
ccaagaggatgaaacttcgctactcatcactgaaaagaaataaaatgcatctttaaaagggctaggcctcttaagattcaagccagaggaggcattaacaaatacgactatgaaataatctctcttaacatcttctcggtgacataccaagatcttcaagttcatccactgagtgattcttaaagtgaacacctattatcttctgtaacccattgtaagcactgtgagtgctagatttgtgtgaaagtcgctagcctaaagaggctttcaaatagcaatcaatactggtgtaataacccagaagagacctattgataaagaacactatgctnttggtctgagccctgaagagactattatgaactaagaggacagttggtaccatgcagagacttcc

SEQ ID NO: 145959 - DNA, 311 bp, Glycine max
gctattaggaggtggggtcgaaaatcctggctggtttatgatttattcttgttctcttttcagccattgtccttttctctctacaacttgttggagcaaagtctacccctgtataatatgcttctgcgccatgtgaagaagaagccatcccttctaggcactcccttacctactcctgatcttccagttcctgcaaatgagaaattgcttgcctgggttggtaatgagatagtaccacgtgagagtgcaaggtacttatcgaaaacttttagggctcctttgagtaaataagcatctgctaatgtggtgat

SEQ ID NO: 145960 - DNA, 266 bp, Glycine max
  unsure (1)..(266): unsure at all n locations
agcctgggaggaaagatggtgactttgtgttgatagaaangaggatatgggctacggggagcacctgagctcagttggaggtgggcaacaggggatggtgggtttaagcacgctctgtggatggggaaaacttttcgtgcaccatcgcccgaccaccacctagaaccacatgggacgggcaccccataggcccaccaacttgatatgaggaagcgcagaacggcgaaactccctgccttcatccgacgaccacagagtggcaccca

SEQ ID NO: 145961 - DNA, 405 bp, Glycine max
acacatgatactaagcttctatagaaggtcgtcctaattctctcaattgcattatctctcaatgagcagtgaggaagaatgtggcatttacctgcggtgaaaaacaagagcaagcctttgctttgctaaaaaaaaggcttactaaggcacctgttctagctcttcctaatttttctaaaacttttgagctagaatgtgatgcctctggagtgggagttggagtttttttgttacaaggttggcaccctattgcttattttagtgaaaaacttcatggtgccacccttaactaccctacctatgataaagagctttatgccttaataagagcactccgaaattgggaacactacctttgttccaaggaaattgtcattcatagtgatcatcaactacttaagttca

SEQ ID NO: 145962 - DNA, 447 bp, Glycine max
  unsure (1)..(447): unsure at all n locations
agcntttaaaatatagattcaaatttctatatgttgttactaacaggttaaactctggtaatcaattacataccttgtgtaatcgattacaagcttttaaattcaaatttgaaatttgcaaattgtttcataaatcaatttagccactggtaattgattacatcctctggtaatcgattaccagagaggatatagcatagttgtgaaaagataatcgttcttaaaatttttttgtaaaatatttcctttagccaaacctgtgcagcatcaattaaggaattctttctaagatcctatcaactaagtatatcgttcttcttgcatttctgaattcttgacttgaatcgcgcttatctttggcatcatcaaaacttcatatcatatatgcttctacaatctccccttttgtgatgatgacaataatctaaaatcaagaataacgataca

SEQ ID NO: 145963 - DNA, 409 bp, Glycine max
  unsure (1)..(409): unsure at all n locations
tcctcggggccatttcctgcgaaggcaaaaattttgaatgttagttttaccaggggacactactcttaaaacaaaaacggcatacaacctcctcccataaatacaaacatcaatgtaaatttagagcaagcttatgcgcatatttccttacgaacgttcacttgcacaagacattctatcaactaagaaaaatgcacccatatacaatcaaggtagcttcattacctagattatttacatgtacttccaaggtgtatttgttatttacatcacacacgcctccttggctgaatntacatacatacatactcaaagcattttggggtaccaaaaactgcacatgcgctcatcttggtatttctaatacccatacatatacaaacctcacgatgaatcttgactacctaca

SEQ ID NO: 145964 - DNA, 452 bp, Glycine max
tgcctgtccgatgcagcagtaatgatggcccgagttatgtttggaaactgttactaacccggaatggtttgggcaaagacaacaacggcatatctagcctgataaatgccaaaggaaatcgtgggaagtatggtttatgctataagcccactcacgcggatataaagggaagcatcgcgggaagaaagagcggtggtcaaagctcgcggttgaggcaagaaagtgaaggaagcccgccctgccacataagtagaagctttataagcgtgggcctgggagacgaaggtcaagtggtcgcgatatacgaagatgatgttccgagtacattggatttggtacgaccatgccctcctgattccagctaagaaattggcgagtggaggaacgcctccgcatttacgcaacgagcataatgtagacctttacggtcttaaagctctatagttgggcct

SEQ ID NO: 145965 - DNA, 199 bp, Glycine max
gccgcacgaagaccaagaagggaatgaaatccttgctgtgcaaagaggagggaagacgcggacacagagcgacccaacatggccacaggggggatgctaaccccctgtccaggcaaaatacaagaatcaaacaacctcaacgatgccatgcagcaacgggcgctataactcaacgaccagaaacaagaaatgaagtgga

SEQ ID NO: 145966 - DNA, 442 bp, Glycine max
  unsure (1)..(442): unsure at all n locations
gaccatagtcatagaaggagatttttagttttcaagtttgacagccncggccgccggattgatgttgaaaacggagaaagatgtatgaacactatgctatttgatactttgagatagaaatgtaacttgaggtgcaccaaagtaagtcgtgctaagtaattctgacccatttattttgtggacaagtccagttttgcctgtttatttgttggtttatgccgatcgaattaacttgaatactcaattatagatgtgttaagaaaagagataataatgataatcataataataataataataatcataatcataatcatgataacaataactataatgaatggattgttgtcaccataaaaagaacgtttatggtatatgggtctgacatatcattattctaccaaaatcgagagaaattcttaaaagtacatataccttgtct

SEQ ID NO: 145967 - DNA, 409 bp, Glycine max
  unsure (1)..(409): unsure at all n locations
agctantgtgtgattgaatcaagaaaatgatttattcttactnccatatggacaacaattcttaactacaatacaaatatgcatgtattatgtcatatatgagagaagtagttatagaggtacctgaatatcaagaattgcttgccatgcgaaaggaacaggagcatgtggattgtttataataaagttgaacaatacacaagtcttcatgacaaagttaaatgacaatagagagtcactgatactcgacatgactcactctatatatagtgagtcatgacatgaatttcaactatgcatttatcttttccataataatgtacatgagagaaactactcttattgtactgtttcatgacatttaaagaagtgtgtgttacatataaaaattgctgtaattgaggaacac

SEQ ID NO: 145968 - DNA, 371 bp, Glycine max
gcggcgcgatgaagcataaaacttggacgttctattttgtttgttcgacaaagaacaatcaggcaacaataaactgactacgagggagtggttaaatatagagtaatcacgtcacatcatcggctccaaaatagtgttttactaaagcgcacgtatattgagtatgctgtccattctgaacctcatagcacaaggcaaaacctccatatctaacctatggtaaaatacaaggccatactaagatatatgctcatcattagccatcctttctaaatgataaaatgaagggataagacataaaattcttcttgatcaagtgtaattttccttccctttaacatctataatcctatatggtctctcgaaaaaat

SEQ ID NO: 145969 - DNA, 442 bp, Glycine max
gacctcagagccacctgctgcagcaagcttcatactagaatgaggatgttcatgttttattattgaattcatggggctcctaatcggttgagaatggagaatcgcacaaagcaatcactacgcatagctccaaactcgaaggtggaggacacatgaacgaaaacgctattcatggggctcctaaaaaggttgataatggagaaattgactaagcaatctctacgcatagctccaaactcgaaggtggaggacacatgaacgaaaacgcaattcatggtgctccgaacaaggttgagaatggagaaatacacttggcaatcactactcatagatccatactcgaaggtggaggacacatgaaccaaaacgatattcatggtgctctgaaaaatgtttgaaatggtaaatagcactaacacatcactacgcatagtccctaaca

SEQ ID NO: 145970 - DNA, 291 bp, Glycine max
  unsure (1)..(291): unsure at all n locations
gctggagcagacccattatctgttcttctctctacaacaatatccctaggctcttgaccttgacttgatagaacctcttttttagcgaaggcatttgacttgattccatgttttactaaagtgaacaaaaatcggtgcgaattaaaacttcgacatctatcatgggtggaatggttgaatgcatgaaggaatgctcatgagacaaatgcgatttatgaatacagtatcctggtgaaaatggctncgttttagatacaaccgctagtggttacaaagtgcccaacatatttt

SEQ ID NO: 145971 - DNA, 402 bp, Glycine max
  unsure (1)..(402): unsure at all n locations
ntacatcagttaanataaccattggcataggctcaacacttattgttttttcatgcagatagaagtgaactgagtgccaatttgaggtgggtgagatgatgtttctcaaactaaggctgcacaggcagcaatccttgggtgcttgaatctgccccaaactctctccaaggtattacatcccatttcagactttggagaaaattggtgcggtggcttacaagctgcaagtgcctgaagggagtcgcattcatcccatttttcatgtatcgttgctaaaaaaaagctgttgggaagtacactgtcaagggaactcttcccgagttggagagtgacaccacgaatcccatcacactggtgggcgtcctcattacccatgtcattacacaaggatgtgactcacta

SEQ ID NO: 145972 - DNA, 312 bp, Glycine max
tgcaggcaccaagcttagatgttagtggtgaatgcattattttttaattatccatcagcgaaaaaataggtgctatagagctacaaacgtcttggattggatacatacagatatttgtgggccatcttatacaccttcatggaatggtcaccaatattttatatcattcatattacgattactccagatatgcatacttgactcctatacatgacaagtcacaatctttggatgtgttcaaaatatttaaagttgaagttgaacatcaacttatcataaacaataaaattgtgtcagatctgaccgtgatgg

SEQ ID NO: 145973 - DNA, 391 bp, Glycine max
  unsure (1)..(391): unsure at all n locations
gagcagctacaaaaattntggaacctggactgcaaagcagaagtagagctaaaaattctcttacatatcctgcttccatgtatcctcccaagactggcattgtgacaaatggtgtggaagatgggtcaacgattatgcaaaatcaatcttgttttgaaaccagctcatgcaagcaattgatggggcagacctcttgcaaaaactgtggtaatttgctagatgttcttgactgcaagcttgaggttgggagacagtcattggttcctccacccattgtttcagatgtgatcactgctacctctatgggatcattagagaagaaaggaaagcattccctcctcatggacatgatagagatgtagttcttccgagaagtcacgataagctcata

SEQ ID NO: 145974 - DNA, 155 bp, Glycine max
aaaaaaaaagggacggcgaggcaagagaaagaggaatgaatttttataacacagcagtaagaagaaacgaagaaaggaaacagaaagaaggaaaaatggaaaaaatacgaggaagaaggaggaaagaaggagaagaggaggaaagggagaacgaa

SEQ ID NO: 145975 - DNA, 382 bp, Glycine max
  unsure (1)..(382): unsure at all n locations
agctcttaatggaagtcaagagcatgatattgtgccgataccgcngactggtgactcgtatatcaccgggttcgacacctgaatactgtatttgggaagacccaaatgaaggataacagtcctagttgcatatggaagaagaggtccattttctttgatcttccgtactggtgtgatcttgactttagacattgtattgatgttatgcatgaggagaaaaatgtttgtgacagtgtgattgggacgctccttaacattcaaggcaagacgaaggatggcttgaatacccgttaagatctagttgatatgggtatacgatcacagttgcatccaaggtctgatgggaagaaaatatacctgtccctagcctgccatactttgt

SEQ ID NO: 145976 - DNA, 448 bp, Glycine max
  unsure (1)..(448): unsure at all n locations
tcagctctcaacccanactcccttacaaaatctgattttatgcttaaataggggccttgttcgtgctcgtgtgcttagcgcaattctgaaccgcttagcgcacattagtgaatttcggcttagcgcgttcttttctcgctcagtggatagactgaagcaatgcgcttagtgagatgaagtggtgtgcttagtgaacatgtacagctcatcttcttccagattcttcctcgcacttatccaatgagtgttgcgcttagcgaacactcgctaagccagcagattggcttagcgagaaggtgaaaaataacacttttcagagtcacctaattaacctgaaattgagagaaaatgattattaaagatgttctgtcttggattctagaggtgaccacgagcaagttnttactgctctcagtggctaacttttcatttctcatagaactcaagt

SEQ ID NO: 145977 - DNA, 455 bp, Glycine max
agctccatcacattgtctggtggcatgcttcttgttcttgaccgccttgagatcgttagtggtccccgccttaacgtttatctcctttcaaaaccaagagatcgttaatggtctaacgccttaacgtttctcccctttcaaaatcaaaagatcgtttaatgatccaacgccttaaacgacttttgttcagttaaaatatatcttgcgaaaaatgataaaaataacttaaccaacgtttagttctcaaagaactacgtaggtctgatttcctcatcacaattgaggatacgtaggagcgagggaaacacccttgtcgaccacaaaaagatttgataatacacaacaacatacaaaagcatacaaacacaaaaagacatatgaaagggaaaataaaacattttgaagtcatatttgcacactggattaaaggcttccgtcctttgtgacggacgcgt

SEQ ID NO: 145978 - DNA, 458 bp, Glycine max
  unsure (1)..(458): unsure at all n locations
tgttttggggtgcaagaaagcatgataatgagagcatgttggtgtttgttttcttttangccacacttggtttgggctataccataatgatttctttgtacctagatggtgtgaaaatgttgttcactgtgtacatgggtatatagagtaggtagccaagttctctgcaagtgtgcatgtatgttgagtatggcacgaaaatgcttctcaaaataggaatatatgacatgaaattgcctttcaaaaatatgaattagtaatacaaaaattgcctttccaatgaatgtgtaaacatgaaattgcttttcacatgagtgtaaatatgtgtgaacatgcatagcatagaagctgctctccagtctatgaccatatatgtgaatagaatgtgaacatataacacaaatgctgttcaaatggagtagataggtagcacaatgcctctgagatatgtatgtgta

SEQ ID NO: 145979 - DNA, 460 bp, Glycine max
  unsure (1)..(460): unsure at all n locations
agctgtacattttgctaaacgagccgagtgtgatcttgtcttaaactagangcgtcataggccttcgcggacgacttaacttacatccatccctatcgataatggtcttgagtagggtttatctagtgaatgatatttgtgatttttagcataaccaaaactattttaatctatgaaattattgagtctttgatatgcacttctatgaaatacttgaagaaaaaaattgttgcactcgagtataatattgagggttgggttcgtgtaattttttaaaacccaaatcaaaccaactggttcatataccagataaagtactcgcatcagggcgagaaaacacttagtgcctccaaactgagtaccctctcggtcacgtactcacatatttcgtatgacacgtctcagtcttcaacacaagacaattctagcacctacgcctagtantatcgtcaattaatat

SEQ ID NO: 145980 - DNA, 429 bp, Glycine max
  unsure (1)..(429): unsure at all n locations
actcaagctggacacgagttaatctagtttaattagcatgaacaggttatgctttcttgtataatccaaaactccgagtttggccatttagtaaagtcctaaagttaatttttataatattaaggtgttgagaatgtgagaatctcgagaacattgggtgttctgggggctcaagattgatgatggatttggtgacccactatagatgaaccatgaaaatctatgttagcttatatataaataaatagataataataataatataagataagttgatatcttttgtgctgtaaatgttgggtgatggcaaggggtggtatgcttttatattccatagaccactatgagctaacgatcacacttgggtctctttggtctattcccacagcagacagtcattctcctanaattgttcaagaagagtaaaac

SEQ ID NO: 145981 - DNA, 415 bp, Glycine max
agctccatcatgtggtaatcagagcacaatatcttcaagtttgtgctccttaaacctccattaatcgttgctttaccttctcttccattgtggattcttcatattttctccatgtatctcctcacatgtcttgtgataaatgttcttaacatgattctttagagtttccaccgactaaacttgctatagacgctagatttgattatctatggatcaaatatcttgttcttgttcttgaaccatgaattgtgttgagtctacgttcctttgagttttgacttgttattcttttgcggctgaaacctaaaccatataattcttacaaaaatattaaagtgtaagataaactcacaaatctagagtgacttgatcacctattgtagctttgtcatataagtcatgtctagtcatgaaa

SEQ ID NO: 145982 - DNA, 444 bp, Glycine max
tatgcacggaaaatgtaattatgaaattgagatgcccgtttatacactcttttttatttaaccatgcttaggtaccatgttcaattattttgtttttaagtgaaacgggtttatgatcccaacatggttggctcgtggtgcctaacacatgaaactaagaatgtagtgtgaagtttcacgcttcccccttttttgtttttgttttgtagaggaaaacgcaaggatgagcaaacatgaaaacaaatggtatgcaattttgcagatcaaacagtttgttgaacgcatatgcatgatgatgccatgactcatgcaaaatgtgaggctggaatatgataacggacaaatgcaggatatgtccattatgatgttatgaagagatgcttatgtggtgcatgatatgaatgcattttacggacacgagagcccggagaatatctcttttac

SEQ ID NO: 145983 - DNA, 364 bp, Glycine max
catagccctgatgtttggaacaatgctctgggacctcggaagcagacggtaagtcaaagattagtgaagtcttaaaataaattcttattacccaacagaataaaataccatataatatattttgtcacatcttctaattccactcgcttttggtgattttacagtacaacaagaggagacctgttgaatgctctaagctcaatgtatactgctgttctcttccttggaatacaaaatgcttcctctgctcagccagtggtagcagttgaaaggactgtcttttatagagaaaaagctgcgggaatgtattctgccttaccctatgcattggcgcaggtaacttcatcattatttattttagaca

SEQ ID NO: 145984 - DNA, 295 bp, Glycine max
acccccgaagcgggagcctctctctcattggtgctccaacacgtggggaagccatggccttgatagttctgcatcttggagctgctgcttcaatccacactaaaacatacaaaaaagagcaggctagttaccttctcctataaacagccgcccaaggcataccgagacttgactcatctaaagtaaacgaatccctttagaagctacaattatgaatcactgacaacattgacttttaatcgtatgtgaacctacctaacatagcaaatcataaatacgttagaacaccaactgt

SEQ ID NO: 145985 - DNA, 452 bp, Glycine max
  unsure (1)..(452): unsure at all n locations
ggcaagctatgaataataatatcttgattgtaatattacccattttctctcccactatggcaacccagaaaggcccaagtgcgtaaaataaaacatacatgaataattcgaaaacatacatacaacacaattccaaattagagtacataccactagacatatataccatagaaaaataattaagtttaacacacataaccataaacaaccaaaagcaagtaaatataagcatcatgttcagtcatactaagcacatattaaaataaatactaagtgttcaaatgtcataaaaatatagccaaatacaaggctttagaagacaaaatataataatctaagtctatgaggatggtggtggaagatcaaagcactgacgaacaanactaagatcactctcaagtttggtgatacgtgtgtccatccatgctaatcgtacatgcatggcatcaata

SEQ ID NO: 145986 - DNA, 384 bp, Glycine max
  unsure (1)..(384): unsure at all n locations
taacgctgaacaaaaaatctcaaaaaacntaatgtctgataattgtgttctgcttancccacagacccgcttagcaggctcatcactcacgttcatcagcagggatgaacgcgcttagcacgacatggtccgcttaaagcgttcatctagaaatccaaaattttgacatttccagactgaaccacaggggtctttatccctttcaaccacattgcccctaatgggcttctaagttacctaaaatcctacattgactaaccctaaaactaataaccttaacctaacaacaaccaactaagaaaacaagaagtcatctatcctaaggttggaagaatgaaaaataaaaacagaaatgtgctgacttacttgggatggttcttgaat

SEQ ID NO: 145987 - DNA, 441 bp, Glycine max
  unsure (1)..(441): unsure at all n locations
gcaagcttgttntatgcagaattagggtaagctcttctttctagcagagaatcatcaaagcagacttgtgcatagtgcaaaaatcgaggaagaagctctgaagacaacaagaggagcagcttttgcagagaaacttagttttctcaattgaggagaggttattaagctgtagagttgttgtgagaggctgagaagaggaggagggatcccccttctttgtaaggaacaattattgttcactctaactctctattttattagggtttttctgtaatggctagctaagcacccttgttggggatttctaatgaacagctgatgtaattattttcatatctaattgattgtgtttatgtgttcaatgcttctttccatgcttaatttctgcatgctcttggtctgatcacccatttgtgtgtttagttagatgactctatcatt

SEQ ID NO: 145988 - DNA, 348 bp, Glycine max
tagggatggaacacttacttgttggtgatgaacaaaagctctttctgaatcaaaaaagcgaaaaatgatgaccctatggctgcaaactcgtcaatcccgtgggtatggcttttgaaaggggggaaaagaagtttttgaatgcaaaaacgtcccccctttcgtcattcttataatttggtgcaggggtggctcgcccaggcgagctaacctgcatttgttttttagaggaatattgaccatgtcccctccttccttatggtttagcgtcttgcttaacttgaacttacttaaattagagttaggcattgattacttatctttaaaacaaacaaaaaagtaaagaaaact

SEQ ID NO: 145989 - DNA, 249 bp, Glycine max
  unsure (1)..(249): unsure at all n locations
agcatacaagtacgggaagctangcgataaaaatcttgatacgaacaagaagggataaaaaccaaaaaaaaacgggctgatgatgcaatatgtattctaaaaaattttatactaaaaaacaatgggttcgttttattctagctaaagctcacacagtagcatcatgtttgaccttgtacaattatagccctaactcgcttttatttatcagattgaccaccatatatacttatgaataccttataaatt

SEQ ID NO: 145990 - DNA, 450 bp, Glycine max
agactttctggaagtgacttattgtttatgttcataggaaataaatccttataagccaacataaacaataaaatacaatgtattaaaagttgattttatgtttaagaaaatattcctttaaattaatgatttagaaaatattaacgtagttttcctgttcaaatataatttaaatttaatttttgtgcataaaaaataatctttttattttgttaattcaaaaggtgttactatttagagtttgatttatataccttatacacgtagaacatctttatacagaaatctaataagatttaaccattttattttaattaatataataatttaatctttatatattgttaatataaaagagagttacataagcaataaattaaaaataatcagtaatattattgttaatactactatcgttaaaatcaaccgtcttactatgacataaaaatg

SEQ ID NO: 145991 - DNA, 362 bp, Glycine max
  unsure (1)..(362): unsure at all n locations
tntatctagccaagatcatacaaaagtgttacaactgaatctatacgggtctaatttatgggccatcaaatctatcgtgtgttgacaataattgattagcccgtgaatttcctctggggctgaacacacttcggtgatggcctttgctttggctagtagtcacgggaggtcttgacttccatttaaggtcaaggcaaacctatccatccacatggtcgcttcttgatgcaatgcatcaatcaccctccctcttgcttccttctcggcgtatgattgtgcgaagtcctctactatcttttgttcatgggtcaatggctggtttaactcttctttgtactggcctattatagctagcatgcttt

SEQ ID NO: 145992 - DNA, 365 bp, Glycine max
agctttgagccaaaatcctgacttaccatttttcttgacccagggtgagaatgtcctccttaccctcggaagcaaaaaaggaatagaagggaaatttccaatcaaagaaaaagagaaggaaaatttccaatgaaagcaaaaaaagaaaggaagggaaatttccaatcaaagaaaaaaagaaggaaaattccccaatcaaagagtgggagaaagcaaaaagaaaagaaaggaaattcccaatcaaagaatgggagaaagtaaaaaaggaagaagaagaaggaaagaaagccctgatcggggatcgaaggagaaaacagaagaaatatgcagagaggtctttggaccggacaatatctgaacaatac

SEQ ID NO: 145993 - DNA, 395 bp, Glycine max
ctaagagcaattcctttctttttcgtatcattcttctcatgttgattcaatccatcaattccatttcatgttcatgtaactttccaaacaatgtaggaggagacatgttaaataggtctcgtgattcagtaatggctgttaccttgggttgccattccctacttaagcatctcaaaactttattgataagatcttcatttggaaatgtttttcctaaagattcaagatgattaattatgtgtgtaaacctcttttgcatgtcttgtatggtttcatttggattcattctaaataattcatattcatgagtcaaagtatttgtcctagatcttttcacatctattgttccttcatgggttactttgaagggaatccacatatctttttgattttta

SEQ ID NO: 145994 - DNA, 450 bp, Glycine max
  unsure (1)..(450): unsure at all n locations
agcttggaaggatacttcaatggaggaatttataagatggagagaaagagagagggcggagcacgaaattgaatgaataaaagagggagagaagtggaactttgaagtatgtctcacaagactctcattcatcaaagttacaacaagtattgcacatgcttctatttatagactaggtaggcttcttgagaagcattcttgagaaaacttccttgagaaacttctttgagaaaacttccttgagaagctagagcttagctacacacacccctctcataactaagctcacctccttgagaagcttccttaagaagattcctaaagaagctagagcttagctacacatacctctctaatagctaagctcacctncttgagatgagaagctagaacttatgtacacaccccctataatagctaaactcacccccatgancaaaaacatgaaaa

SEQ ID NO: 145995 - DNA, 451 bp, Glycine max
  unsure (1)..(451): unsure at all n locations
tcaatgggtgaatctctacagggaagttgcatccttgtttatcactttttaactaaaatttgacaaagcatgattatccttacaaaactaacgaacatggtgtcaattgatttgcagcttctttactgttcatggcattcccaaaaatcatcaacaagtatgacaaagtctcatttggttctaaaagattaaatatggctacaagctttttcagttgtgttctttactactaactatttataaccgttaactaatgactaaatttgtaataacataattttttctcttatgatgggttctggtaatggcttacaacattatgttgccttaaggagagacaaggtaatggcctangtcacttttctttnttccccccaattcttttgccctatgtattacaattcaagttagacaatgaatatcagtttaaatatgttgcctatcctgatca

SEQ ID NO: 145996 - DNA, 451 bp, Glycine max
agctgcatcaaggggtaatcagagcataatatcttttagtttgttctccttaaacctacattaattcttgctctaccttctcttccattggagattcttcatttttgtctccatgtatctcctcacatgtcttgtgctaaatgttgctaacatgattctttagagtttccaccgattaaacttgctatagaaggtagatttgattttctatgggtcaaatttcttgttcttgttcttgaaccatgaattgtgttgagtttaggttcctttgagctatgccttgttattttttgtggctgaaacctataccataaaattcttacaaaaatattaatgtagaagaaaaccttcaaaatctagagtgacttgttcacctattgtagttttgtcatagaagtcatgtctagtcatgacacttgcacataagattcttatgttggcgtgatttatt

SEQ ID NO: 145997 - DNA, 428 bp, Glycine max
taagctccttcaactgcacaaggctcttaatattggaagagtatccttgtggaaccttcacctgacaagacactgacaaaaacttatcttctccttcttggacaaagtatggcaggctgggggcaagtaaattttcttcccatcagaccttggatgcaactgtgctcttatacccatatcagctagatcttgacgggtattcaagccatccttcgtcttgccttgaatgttaaggagcgtcccaatcacactgtcacaaacatttttctccacatgcataacatcaatacaatgtctaacgtcaagatcacaccagtacggaagatcaaagaaaatggacctcttcttccatatgcaactctgacttttatccttcttttgggtcttcccacatacaatggtcaggtgttgaacccgctgatatacct

SEQ ID NO: 145998 - DNA, 422 bp, Glycine max
  unsure (1)..(422): unsure at all n locations
aagtcacctgcggcgtgcaacgtctaagagattngaatcgctctatcttgatatgtggnggttcttggccattggttctattagccacacaagtattcttttactgtattggatgatttcagaagatttgtatacattattatatagtggaaatccaaagctgaaagaaagcaggccagcatcatatttagaattgtgttgttatggtagaaactcaacatgaagcataagtgaatatgattcatgcaaataatggatatgaaattctgattccttagttatgtgcatctaatggaattattcaccaaaaatcttgtgtcgaatctccccaactaaacggaagaattgaggggaagcaccaccatatagtgttacacaatctaaaacatgaataaccaaggagatataacgtgagttggatg

SEQ ID NO: 145999 - DNA, 452 bp, Glycine max
  unsure (1)..(452): unsure at all n locations
acactctacgaaactcaagcttgtctgctccacagagactccaggaatctcaacgaatctatcattcttttacaagggtatttgttttccatacttctcttattattatttgatgatagtctttgtcttcttatgaatttatttaatgttgcttttggagttctttgcgacttctgatttcacgaatcggattaccttgctcttggtcggtgcttaaagttcccgtaaaatggcatgtgttttaatttctaacagatattgctgaaagcaccgtacacttgaatgtgtttatcaattatcatcactcttatttgtttttntttcatctaaaatatcttccttctatnttatttattgatcaaattaacacgtagagtattttagtatttatatataaaacatgcttacatagatgtggccaatctcatgacagtgacgatatatattttgat

SEQ ID NO: 146000 - DNA, 442 bp, Glycine max
gcaagctagcagcaatcttcatgtaacatctttttgttattttttcttttactcatgaaagggtctacaactggcctcagatatcttaagaagggggggttgaattaagatatcacaagttatttccccaattaaaaattctatttatctttctattccagctataaatacccttaataatgaatttattatatattgattcaacttgaacaaattgaatatgaatataaaacaataataaatcaacgagtttaagggaagagaaaatgcaaactcagatttatactggttcgaccacacccttgtgcctacgtccagtccccaagcaactcgcttgagagttccactatcttgtgaattccttttacaagttctaaacacacaacgacaaccctctctttggtttagaattctctcacaacaagagaccctccgtctctta

SEQ ID NO: 146001 - DNA, 450 bp, Glycine max
  unsure (1)..(450): unsure at all n locations
aagctggacaagtcgactggggnaactattatttattataattataataaacnnatttatcaaatcttatcttatccagattttattctatctagattttattttattcagattttattctatctagattttatttcttccagattttatttcatcccatcttattttatcttgtctagattttattttatttcatttatggacttggatttaaaatagatttgtaagctttggggctgaggacctatataacagcaccaaggttttagtgtaggagttttctttcggagagaagtataattctagggatttagaattccagtttttattattgttcatacacactgttcacgtagaataaaattcattttctgcanatcatctctaatccatacattttttaatattatgctctttattttcttttgatatactttatgttctaacgac

SEQ ID NO: 146002 - DNA, 459 bp, Glycine max
agctcgtccgtagatccctcatgtaagattgggcctaaactaaacagcattatggtaacagcatagcaaaaccaaaacttaacccgcaaatccctcatgtaaggctaagtttcaatcctgcttcaatcaagttctaaggcaatagtacattttccaatgctaaagtcacctaactatgcacacaaatgggtgatcagaccaatagcatacaaacattaagcattgagggaagcattgaacacagaaaacataatcaattagatattaggtatttacatcagttgttcattagaaatccccaactagggtgtttaaccaaccattacaaagaaaccctaacaataaatgagaataaaagtcgagaatgatagttccttacacaagaagagggattccttcttctcttctcaacatctcacactcactctctactcaataatctctcacatgacacaacct

SEQ ID NO: 146003 - DNA, 481 bp, Glycine max
  unsure (1)..(481): unsure at all n locations
aactcaagcttataagaacaaaatngccttaatcatttccaaatatgcatgtgaatttttatcgcatcaacaagaatcaaccaaggctattgtgcaagcaatcaatggggcaaaacacaccaaatgattataatgatggatggctcaaattctcacaaaggtaaaatcatcactttcaaattgagctttcaaaactatcatgacatgtagagaagaatcaaggatttcaagtcacaaaatgtcaagaacttttattttcaaaacaattacccatttcttgaacatatcctataattcaaagaaaaacatgcaaagtcatacgtgcacatgaaattgacccanaatattaaactgaaaatccgacgaaactaacaacattaacaaattaacacaactaacaaattaacaaaaccaacaaaactagcaaaaccaaagaacacttccccccccccccatacttaaacaacacattgtcctcaat

SEQ ID NO: 146004 - DNA, 132 bp, Glycine max
ttaccatgctttttttttttttggggcatacattccttgtcgagtttataaatattaaaccgcgagatccatatggttcctaactcttggcttttttacaccccatgcctgcgacataaaaaagtttcactt

SEQ ID NO: 146005 - DNA, 450 bp, Glycine max
  unsure (1)..(450): unsure at all n locations
tctctccttcttaattctgctttctattggtttgcagccgtgtccattgctttactgttctttctctactacagcttgttcagcttgagttccatctgcatttccattgctttcttgccccccttgtatatttccatccattttgccttctggtgaagaatttgtgttatgattggatttcccattttcctttcccgacacggtcaaagattccacacttgggttcacttcangtacggtacatggcaagtgttgagatgaagtacctgagccacgtggagggaggaagactcctgtgccacgaacagggattctaggaggaggatgcctctaatgagctgaggtccatccggtggaaccaggtgggattggtacgggtgtatgaaatgacatgggaggtgcaactggtgctggcacaaacaatggctgcatactgtctggaggtgcatg

SEQ ID NO: 146006 - DNA, 445 bp, Glycine max
agcccgcattgcgttcagttcaaactgccctcccggagtgaagagcttggcccaatggcctggtggtcggggtatgtgtgcacgtactgggagtatgatggatactcctccctttttgggataacaagaggggtctctagaaagtcattcaatgtctcagcatcgaatcgaatgactttcccccgaatccagcaacgcttcaacgtgccatcctctgggtcataggcatttgcatagaactccttcaccaaagcgatgtcaattttttctctgggaagtgtgtgagccattggtgccactgtctcctctagagctccccttagaactcgtcgtacatagtgggggcgagctccacgttcctctccggaaggatgttgtggaggtgaacgctatcctcgtatctctgtcaagtgatctctgaagtgaactaagagaagccccatgt

SEQ ID NO: 146007 - DNA, 366 bp, Glycine max
  unsure (1)..(366): unsure at all n locations
tcttagtttcagatgatgcagatgggtttgtatctaccttatgcactcctctaatgacatggcatcatttctggcgctaaactgctgggagttggaagccatcttctcaattaaatttctggcttcagcaggagtcatgtctccaagggctccaccactggcagcatctatcatacttctctccatattactgagtccttcataaaaatattggagaagaagctgttctgaaatctgatggtggggcaactggcacatagtttcttaaatctctcccagtactcatacaagctctctccactgagttgtctaatacctgagatatccttcctgatggcttgggtcctggaagcanggaaaattttt

SEQ ID NO: 146008 - DNA, 365 bp, Glycine max
  unsure (1)..(365): unsure at all n locations
tgatccaccaaggtncgtagttgcccactcagacatattaagatataaaagtttgatttcgaacattcatgtataagaaaattattgtttgtgactctagctagaaatggcaatgactaggtaactttcaaattttataagaggactaaaatgatcataatccgagagggagtatctcatataatgaatcacaagtgataatgatgtttatcctttatttatagtagatcgtgattaaatatgataatgtgaataaatgtgtgatgatcaatacgacgctacaatgttcagcgtgccaacttggtgagattgaagcgagatagttttagtgtgacaaaagcatgatcggaaaacaacaatatagg

SEQ ID NO: 146009 - DNA, 359 bp, Glycine max
tctgggtgttattgattcttggtataacaccttttatatctttttgtaccgctcaactgatacatccactgtaaaaaaataggaccacacaatcggatatccctcacgagagaaccattatgtcaaaaattgatggaggaaaatacatctccatttgacaaaggacaatggaagtcacattctccaaatcatccaattgttgagggtcaataactttgctacaaataacattaaaaacaaagcataaacgagttatggctaccctaactctgtcaagcaagatatcacgaatggctatgggcaataatttgtgcattaacacatgacattatgagatttcaacccaccattttaaatta

SEQ ID NO: 146010 - DNA, 449 bp, Glycine max
tcaagctttagacatgtgagcagaggcatatattatttgatacgatcctttaattaagtgggtcgcatttgaatattaccacttcaccatcaaagttgacaatgtcatcgggctaagagtcctcatcatctgaacttgtgtccagtgctagttctactttaccggtggacgcatcagccatcagacacaagttggcttcttcctcggtgtcctcgtcagacgatgaattgtctaggtcctcccaagtgctcatgtggtcttccttttggacttgaagaatatcttcttcttatactttggctttttaaggtcatggcattctggcttgaagttccctggcttcttgcattcatagcagatgactggacttttctttctcttgtggaaagatcttttggatgattcgtcgaacctggaggagttcttggttctccacatatagttttatc

SEQ ID NO: 146011 - DNA, 464 bp, Glycine max
  unsure (1)..(464): unsure at all n locations
tgtaccacatttctcaatagcaacatcaatatatccacgttcaangggcgacatcaggtacagttgggaatgacagttccagtggagattattttttggagggtgaaatagacatgactgcaaatttatgaaggatatataaggtctgatcgtccaactgcagcgactagacacctagaattgggagcgagattcaagtgggggatatacaattgggaatgcttatatgatgcttgatagggattcgacaaatgaaaatcaggatggagagtttactacattatggaagttaaaaatcccaagtaaaggcttattctttgcttggagattaatccgggaaggactgccaacaaagagtaacttaagaagcaagaatatggaaatcaacaacgtccaatgaccattatgcagaaatcatgacacagatgcatgtcacccatcttttagctgtgttagaatcatgt

SEQ ID NO: 146012 - DNA, 419 bp, Glycine max
  unsure (1)..(419): unsure at all n locations
ctcggatattttctgagatgaatgattctgcttttgtacctgacgttgtaacttacccacatttattgcaacttatgctgctgactctatgattgctgaggctattgacgtanttcgatacatgatcaggctaggatgtaagccagaccagaatacttataactccattggtgattggttattgaagctcgaccaccggtatgaggccaacagttttgttaaaaaccttactaatcttgacccacatgtctctaaagatgaggaaagtatgttgctatacataatagcaaaaatgcggtcataagtaggttcatgacactcttctttctccttgggtgccccagtatataatatattggcatggagactggattcaccgtatgctttataaattgaggtgttccttattggtgagttct

SEQ ID NO: 146013 - DNA, 486 bp, Glycine max
  unsure (1)..(486): unsure at all n locations
tacggacctataaaactcagcttaacatagaaatntagtcagccttcttgggttntgcttgtctggtgaaaaaaagatacttcttatgaatatgtgcacaaccaaggtctccactatattctctttgctaggttcatctttctgaattatgtcatactttgcatgcctgctttgattttattttaattttttgcttccagtttttgccctgttggccagttcagtatatacataataaccgatcaacgtgtcaatgtttcttctaaatgactacatttttcatatgacttgaatattttgtccaatttgtagatcctgaaaagcaaaggaagttggattgggggacaccttacaagactattgaagggattactctaaacattcgatattttcataaagattttagacttaaaatcatacatcgtgatcttaaagttaataacttattggtggatggagatataaattcanatatcccaaattttg

SEQ ID NO: 146014 - DNA, 414 bp, Glycine max
  unsure (1)..(414): unsure at all n locations
agctggtntagttagggcgtttgttggattattatatagatttccactaagaaactgattcaacaagatgcttcttctaatgcctagagttgtgatcaatgaagcttcctattgtcaaattttcaagaccctcaatggaaggaatctaaatgtggaaggtgtcatttgattgcagccaagggtgattgaacacatttatggaatttccatttccaattctccactctaaaccttgttttaacaccacctatgaaacgtggatattatgccaaacaaaacttgaattgttcccatgttggagttaagaaatccttataacgaaaatatttagctttgaaaactttgtaacaatagtatcgtggctggtcatcaatcaccaatttgctttcctagcatggcaagattaaaagcatg

SEQ ID NO: 146015 - DNA, 387 bp, Glycine max
  unsure (1)..(387): unsure at all n locations
tctcactntncttgctnccattttcttcttcaatgaatagtacatctctgagaacataactttattactttgtggcaagaatattctataggcttttgatgttgagctatagcctacaaagattcccgcttccgcctttttatcaagtttgtctctcttaacctgtggaatataagagaaacacaagcagccaaagactttcaacttcatcaattntggtttgaaagagcttttgttgacgatctgttcagcaaanaaaaatagaagtgcttgcagcctctgcccaaattttttttggaagatctttgtcatgaagtaaacatctcgccatttccaagaccgttctatttttgcgctccacaaccccattntgctgtgggggtatgc

SEQ ID NO: 146016 - DNA, 328 bp, Glycine max
  unsure (1)..(328): unsure at all n locations
catgcaagctgcacaaaagtaactatcntttttttggacaaatgaagatacttatgtaacgtccactactatatacagttactactaagaaggaatggatgtgccttgattaagccaatctaatgtacctgattaaaccaattacacaaagcaaagcccaaaattgcagcccaattattcatgtgcagaggttttgacttccaagcccaacttgaccctcgaaatgatagaataggcccaagcttattgttgacaaaatgtaagaaattttcttagctttacagggattgcacacatgctccatttagagttctgaatatttctatag

SEQ ID NO: 146017 - DNA, 317 bp, Glycine max
  unsure (1)..(317): unsure at all n locations
tgttaaagaacttaganaaaatcaagtacaagcttgnttgtacatcgttcgcgctatgatatccagtcgacaaggtttgaagtaaaggagaccttcaatcctataacgcaacgtggcggacaaaagtgggcagttaacttgaatggccattattgtcaacgcggaaagtattatgcgcttcactatccatgttcacacattattgcaacttgtggttacgtgagcatgaactacttccaatatatagatgttgtttacacaaatgagcacatcttaaaagcttactacgcacaatgatggtcttttgggaatgaaac

SEQ ID NO: 146018 - DNA, 416 bp, Glycine max
  unsure (1)..(416): unsure at all n locations
agcttataatatatcgaggcgctcaanatttgtcaacagaagctcttgagaattctatggccataacttttaactcggatgtgcaactcatgcgcatgacatatagagacgctatactatgaacaacggaagctcttcataagttaaaatggtcataagttctcacactgatgtccgattcacgcttatattatatcgagacgctcaaaattaaacatccgaagctctcgagaaattcaaatggacatgacttttcactcggatgtccgatgtaggcgcatcacatatacagacgctctagaatgaacatacgaagctcttgagagattctaatggtcataagcttttacactgaggtccgatccaggcttataatatatctaggatctcgaaataaacatctggagctctcaaga

SEQ ID NO: 146019 - DNA, 418 bp, Glycine max
tctacttatgtggcagggcgggctttcttcatctacttgtctccaacgcgaacttgaccatggttcttccttcccgcgatgcttcttttcgtgtccgcctgagtgggcttatagcctaaaccatacttcccacgatttccttgggtatttatcaagctagttatgccgccgctgttttttcctaaacccatcccgggttcataaccgttccccaacataactcgggccatcattaccgctgcatcggacagacaaggctgtccaaagagggagtccacggaggaaatgctgaccacctcaaaagactggaaagcagtttctaacgattcttctgcggcttccacataaggcatggaggatgggcagcttaccaagatatcttcctcgcctgacacgatgaccaagtgcccctccacta

SEQ ID NO: 146020 - DNA, 445 bp, Glycine max
  unsure (1)..(445): unsure at all n locations
agcnnatcaagtggcacaagtaatataagatggtaggaacgagtttctattttttcagatactatgctngnatatctaacgattaagcaattagtgactcaaatcaaatcttgttcattgattaactagacgaattaactacaaagcaagaaacacaaaggttgagaaaaccataaatatgcgaataaacacaaggataaacaataataacaacattatattaaaagatagtttagaatcattacattaaaaagagtttggtttgtagagttcccaacaacgggtgggttttagtctcttattattatgagagacttacaaatataaaggtgggataaaaagggagaaaatggaagagaaatagattgatacggattggtcagaacttcgaaaacaaagttagaatcattacatcacagagagtgtgatttgtagagttctcaac

SEQ ID NO: 146021 - DNA, 439 bp, Glycine max
tagaatggctagacatgatacatgtcagggcttggtttggttcaaggattaaatggatgccccacattatttccatgacacatatgcaaaaaatgatgatttggaaattttatgcaaaactggtcatgcatgcgcctatgcggacgctcaagtgtcaaatttttatggacatgtttctgtttttgtttagtgcggggcgaaaaagttgtatcgcacgggattttggttggtaatcaaagggagaagaccattttaggtcgcgggttcctttccttctttttgttcatttggtgacaattctgtattgttcagatattgtccggtccaaagacctttctgcacatttcttctgttttccttcgatccctgatcaggagctttctttccttcttcttcttccttttttactttctcccattctttgatagggaattttctt

SEQ ID NO: 146022 - DNA, 446 bp, Glycine max
  unsure (1)..(446): unsure at all n locations
tgtacgtgccttgtgagagaatactcacttagtggtcttctatagcaaaatttgttagggtctattaaattataaaatgagtttcgggggaaccaatcaagtgcttaatctgcactgatgcagaaacaaaatgcacacacgagaccaaactaacatgaaggaattacttgataatcggaaaaaccctttggaagtggttaagactaaactaagttagaaatagtgattgatctcgaattccaagaactatccttgtttgcgtgtgtgaaataagacaatgttggttatggtagttaaatctatgtgataattatgtgtaattgactaaaangggggccatctaaactcactcatcacgtgtgaacttaacatctcaaattttaccgcacaaacacacaaattatgaataatttaatatagttagtaagcaacaattgacactcaat

SEQ ID NO: 146023 - DNA, 444 bp, Glycine max
  unsure (1)..(444): unsure at all n locations
taactaccaacttatggagatgcaagatgaggcanaagcttagctacaatatgagaagctcaaatctaaaaaagttgttcaacaacttacacgctcatcttggaccctaggtggatgcagttgaaccttcgcttgttgaaagctcttcccaacctattgttgaagatgcccttgcaacgattatcacttccaatactgcatgtgaggtaactcttttgaccgcccttactccaacggtgtgtctgaagagaggattcaagaaatgttgcacctttaataggccaatctggaagaaactatggaaaaatgattccttgttgaacgcattgaaacaaatttgttgatcaagaacaccttagaatctttgctcaagtccttcaatgactctgtccttttaacatgaatatacttatgcaatagaggctgcctctaaccatccaacct

SEQ ID NO: 146024 - DNA, 434 bp, Glycine max
  unsure (1)..(434): unsure at all n locations
tcttatccaagccttatcttggtggtgaagctccttcttccatggcttattccctagcggatggcgcctcacctcttctcctttgtcttccgctgcatctccatggtggaaaaccaccattaaaggacctcattgaagctcaaagatccagcctccatagaagctccacaagcaagcttccatcacccgtgggagtcctcatttgttacgtgtacttttattctcgtttcatttactttccggacccacatgggacatgactgaaacatttactaaagtcattntctcgactaatcaaaaaatgaaataaattatctaccgatcattgaatacagaatatccgctaatctttgatgatatgaaatccgacacgtcgagaacgccgttacctcgttgcgaaccggagagaggatctataataatatatatgacgg

SEQ ID NO: 146025 - DNA, 429 bp, Glycine max
  unsure (1)..(429): unsure at all n locations
atagaatactaagctataagaancaaaatgccttaatcatttttcaatatgcatgtgaattangacgcatcaacaagaatcaagccaaggctattgtgcaagcaatcaatggggcaaaacacaccaaatgattataatgatggatggctcaaattctcacaaaggtaaaatcatcactttcaaattgagctttcaaaactatcatgacatgtagagaagaatcaaggatttcaagtcacaaaatgtcaagaacttttattttcaaaacaattacccatttcttgaacatatcctataattcaaagaaaaacatgcaaagtcgtacgtgcacatgaaattgacccaaaatataaaactgaaaatccgacgaaactaacaacattaacaaattaacacaactaacaaattaacaaaaccaacaaaactaga

SEQ ID NO: 146026 - DNA, 427 bp, Glycine max
  unsure (1)..(427): unsure at all n locations
tcttgcccaagtntgtatgataatgtaaaattttacaattaatcatgcattaaactttttttttttagttatagaaaaagaattcataaattcccctatttcatttcaaaagagaatgtttattccatgtttaaacaaaataacatattcaataagttaattaagtcacatgttagtaagcaagagagtttctatttatattaaaagtatattaacaataaattaaaaaataattaatttaactctaataatttaaatgttaatgtaattttaggtacgcaagttgttccttcctttgagttaagtgtaaattctgattcttgatttaataaaaaatattcatctctagagtttgattntatacatgatatatgtgggttatatattactaagtttatctatataatatcaacgtataagagaaaat

SEQ ID NO: 146027 - DNA, 434 bp, Glycine max
  unsure (1)..(434): unsure at all n locations
tctaaggaggtgagcttagttatgagaggggtgtgtgtatctaagctctagcttctcaaggaagttttctcaaagaagcttctcaaggaagttttctcaagatagcttctcaaggaagctacctagtctataaatagaagcatgtgtaacacttgttgtaactttgatgaatgagagtcttgtgagacatacttcaaagntccacttctatacctcttttattccttcaatttcgtgctcccccctctctctttctctccctctttcttttcctccattgaagcatcctctccaagcttcttatccaaggctcatcttggtggagaagctccttcttccatggcttattccttaatggatggcgcctcctctcacctattttcctttgtattcgctgcatctccatggtggaaaatcaccattataagaccccc

SEQ ID NO: 146028 - DNA, 421 bp, Glycine max
  unsure (1)..(421): unsure at all n locations
ntataatgataaattgactgttctccacattttgtttcttgaaattggtattctttctatgggtgagaaacttgccccatttgtatggcctatattttcaagggttttgctcatttatcagcttctccaaaggcttgacctcagtttcatgcgaaaggtagaagaatggaatggagaacctttctttctcagagttgaccaccactctgtgttccacactctcatatgcatcattgctccaaacctgcacaaacaactccaatcctcaaataaaaattctctccactaattacgggaataaatagttcataaactcaaagattagaatatgttttttttatggtcatcatgacattggtgtgaagtatttatacttttgttagtgactaatctctcctgngaagctgggcagaccactatt

SEQ ID NO: 146029 - DNA, 422 bp, Glycine max
  unsure (1)..(422): unsure at all n locations
ntctaggtaccacaacgtcagtgtatctctcccaagcctctagggaagtgaacctggatctatcaaatttgtcttgggtaggtatagagggtgttttcctcttcttagatgccatctgcaaaatataagacaaacacaagagattagtacatgttattttcacaaaaacagaaaaataaaactgaaattttgactgggcgcttagcgcaacatgctgagcttagcgcgccttatgaaattttactcaagcgctaagcgcagcaagctggcgcttagctcgaagacacataaaacattttnttctgcataatatgcttagcgcacagctgagcttagcctaagtctacaattttaaaaaccgcaaaggattggagcttagcgcaacatgttggcacttagctcagcctcaatagaaagacact

SEQ ID NO: 146030 - DNA, 412 bp, Glycine max
  unsure (1)..(412): unsure at all n locations
tcagcatcctttcggtactctnttttcccctttaatatttcgttttctcttaattgttatataatctgttgggaatcgaaagattttttattggccctgccttttgtattgtaaaaataataatttcgaaattattggggaatgacaaggatctttttagctttttatctatagggatagaaggatgaacgtgtttactatgttcgcgtgagtgttttgttttgagattctaaaacccttggttcattggaccacactaactacttggtaattttttacgtgtcagagagaaggcaggctaaagcttctcgcattagagagaaatatcctgatagaatacctttaagattgtactctgtttaggtaccctgtttatatatttatttattcttttaaaactcttgttcatata

SEQ ID NO: 146031 - DNA, 428 bp, Glycine max
  unsure (1)..(428): unsure at all n locations
cttttgatgaacaaattccacgcacttaatatgttaaaatataccctatttcaagacatgctntgcagttatgtcgtatcgaatagtactgttattctttgtagtcttgtttgctgatatattttttccattaagtttctgtaaactacaatgtgttatgctagatatgtaatagaatttaaattttttgacaaacattttcatacatatgatttttattgcttcatcattgattttcgctttggagaatctcttaaacactcagaatatacataacattctttatttgtaggtgagacattgtgtgtgcacacgcatgtttgtggtttcaatttatcagttgtatcatctatggcgttgacaaatgctaccacagttgtggtcttcacacagatcaaaaaatgttgctgccacaattacagatgcaa

SEQ ID NO: 146032 - DNA, 436 bp, Glycine max
  unsure (1)..(436): unsure at all n locations
tggatatatatcgtaattaatcttttaattatttcgtttcatgcactgctcattntggttcaacctttgtaatagttgcttaatttgataggggatctgtagagtctttttttaaaaaagaattggtgatgattggaaggtgatgttaaatgaacaggcgaggtttctgcttaaaaatgtgagtggagaagctaagcctggaagattattagccataatgggaccttcaggttcaaggaagacgacgttgcttaatgttcttgcgggtcagctaacagcatctcctcggttgcatctgagtggcgttttggagttcaatggaaagcctggttccaagaatgcttacaagtatgcttgtttgtttgtgattcagaattgcatttgctgtagtttacacacacacacacacacacccacatatatatatatatatata

SEQ ID NO: 146033 - DNA, 450 bp, Glycine max
  unsure (1)..(450): unsure at all n locations
actcaagcttgggttcctaggcctaaggtatatgtgggcacctatcctatcttctaaaagttgtccttaaactcatcaatggcaaccactcatgcccaagtcatttccatcagcaaaattcacgaaatcatgcgcaaatgccattgaggcatttcaccgaacacatggtgggtgcacatttagacatggacaaaagggaaatgggggcaatgtgtcacgccccattatttcagaacactccttatgcctaaggccatccctacaactccctaattcaaccaaacaagcacaaattcaaggatgaattggttctcagattcaagcaaatacatacaatttgggagcaccaaaatacatcaatggaaagctagagaaccaaagaatgatgtactttcttattgngagtgaatcaaagcgtganaagggaagcaaaaactcaacagtggaagc

SEQ ID NO: 146034 - DNA, 374 bp, Glycine max
catacagatcagcatggttactaggagccttgacgtaagtaactaatcttttgaagattttcccatcattctcaaacttccaaggtcctatttcgagttctgtattgctctgtacttcagccaatgacttgagaaaatttgaatctgatgaaaatagtagctcgttcaagtcttctggtgcaatgacatattgttgatcaataaacacccctgctggtaaattgctaggaatttcactgccttgatctgcagactgaagttttctcatagcttcttcaaaagtctcattagaggactgatcctcaaccttcatctcactaacttctactttactaatttcagattggtacaagtcaatgcttttaccggatgca

SEQ ID NO: 146035 - DNA, 428 bp, Glycine max
  unsure (1)..(428): unsure at all n locations
tgctgaganagctctctttctctgataaaaatatcaatattgttgtgagcccgtgacagaagtcacacttttcatcatcattaggcattatctacttcaactctttctagaactgttgcttgtctgtttaataacctctgaaagattaaaaccaattattgatatttttgttagtctccacagcaaatcaagatggggttatttgtccttgcaggttgaggcagagcttactgaactaccagttgaagaacgacaagaatatttgcaatctcttggtgttagtgaaagtggtcttggcaacctaataagggcaacatatgaccttctgggtctcagaacttactttacttctggtgagaaggtaagaggaaaactggaattttttttggagataatacagttagaatatcccattaaacatgtatagt

SEQ ID NO: 146036 - DNA, 448 bp, Glycine max
  unsure (1)..(448): unsure at all n locations
ctattacggacctatgaaactaagcttgacatgcctcttatcccttctatttgttggcaatntttcacactcctatgtctcaacaatagaatttcatatctaccatcatcatccaccctcttttcttagaaaaaacaacaaccttattgattgaaaacacatttattgagactcttattaggcatgtaatcatcaaccaacaaaagctcgttcctttttctacaatactattggatttggaccaagtttttttgttgtaacctctccatgatcgatatctccaccatgaattgttgtaacacttgcttctaatcgtggttcgcacatttcacagtaatttgagtgttattcagtaatgtgcttctacactctcacaaaccctccagaacctgacaacatctctttcctaaattcccttgtcacttaacttaaatccaagttggaaaac

SEQ ID NO: 146037 - DNA, 334 bp, Glycine max
atgtaagctatacttgcaactatagttgtgaaactcagcgcgagcattgaccaaaacaaaatattaggtgggcgggccaacggcgttggaccagtaattggacttgtgtgacctgatatactataaaaatttaaaatcatatatctatctatatataagtatataactaacataatttgagcgaaaaaaatccatccatactccataatccaatacaacaattgataataataacacatcaaaacaacacccgaagaggtgatttattatagtttttttgccaaatcagtcaagtcggactggtccaaccgggatctggtggctaagtgaccta

SEQ ID NO: 146038 - DNA, 454 bp, Glycine max
ggacactatgaaactcagcttttattttagtagatgaagatgaatctgtggccaccttatggactcctctaaggacaatagcatcatttcttgcactgaattgttgggagttggaagtcatcttctcaatcaaattcctagcctcagcaggtgtcatatcaccaagggctccaccattggcagcatcaatcatactcctctccatgttgctaagtccctcatagaaatattgaagaatgagttgctcagaaatttagtggtgaggacagcttgcacataatttcttgaatctttcctagtactcatacaagctctctccactaagttgcctgatgcctgaaatgtctttgccgatggtagtggtcctagatgcagggaagaatttctccaagaacaccctcttaaggtcatcccagctgaaaatggacctgcgagcaaggtagtatagccaatc

SEQ ID NO: 146039 - DNA, 417 bp, Glycine max
gttcaatttaatgaggttgtatgacaaaccatcttggttctcaaagcgagcaatatattgatgcaccttcaagacttcattcttatccattgactctcttatgttcctttgcctcaacatttccatttttctccaattgattgcatttttggatttttacaaaacttgtccattggcctttttttagtctcacactttgtctttgcggccaaagcagtagcattgctagagtcctcaaactcatcttcactttcatcacatccaattggttcactaaattcaaaatctcttatatttggcatattaccaccaccagtactattgtaagtggccccactttttttgttagccatatatcccttgagctcttcgactacatctggtggagttttcttgcaagatgcaacgttactcgac

SEQ ID NO: 146040 - DNA, 426 bp, Glycine max
ggttacagaacttaggaataatcaagaacaagcttggtttcacatcgttcgcgtgtatgatatccactcgacaaggtttgaagtagaggagaccttcaatcctataacgcaacgtggcagacaaaaatgggcagttaacttgaatgaccattattgtcaatgcggaaggtattctgcgcttcactatccatgttcacacattattgcagcttgtggttacgtgagcatgaactactaccaatatatagatgttgtttacaccaatgagcacatcttaaaagcatactccgcacaatggtggcctcttgggaatgaagcggcaattcctccttctgatgaggcatggacactaatccctgacccaactacaattcgtgcgataggtcggccaaaatcaacaaggataaggaatgagatggattgagt

SEQ ID NO: 146041 - DNA, 436 bp, Glycine max
  unsure (1)..(436): unsure at all n locations
atgctacattggatgataagatagagggggagattgagagatgtgggagcacganattgaaggaagaaaaagggagagaagttgaactctgagttgtgtctcacaagactctcattcatcaaagttacaacaagtgttacacatgcttctatttatagactaggtagcttccttgagaagctttcttaagacaacttccttgagaagcttctttgagaaaacttccttgagaagctagagcttagctatacacacccatctaaaaactaagctcacctccttgagaagcttccttgagaagctagagcttagctacacacacccatctaaaaactaagctcacctccttgacaaaatacatgaaaatacaaaaaaaaagtccctactacaaagactactcaaaatgccctgaaatacaaggctaagaccctatact

SEQ ID NO: 146042 - DNA, 435 bp, Glycine max
  unsure (1)..(435): unsure at all n locations
acttcctgcgtctcgcgaacctatccttgctcaggtgtacccaaacccaatcacctggatcaagcacgactttctttctgcttttgatggcttgccttgcatagcttgcattnttcttttcaatttgaaccttcacttgctcatgcaacttcttcacatactcagctttagcctgtgcatccttatgcttaaacatagcaatgttagacataggcaacaaatcaagaggagtcaaaggattaaatccatacactatctcaaatggtgaacaattagttgtgctatggacagcccgattataagcaaactcaacatgaggcaaacaggcttcccaagatttaagatttttctttaaaacagtcctaagcagtgtgcctaaagtccgattgactacctcagtttgaccatcagtttgtgggtgacaagaagtacaaa

SEQ ID NO: 146043 - DNA, 440 bp, Glycine max
  unsure (1)..(440): unsure at all n locations
cttgagaaaattcaaacgacaataactntntactcggatgtctgattgagtcccgtaatatatcgagacgctcgaaattgaataccgaagcgctgagcaaattcaaacaacaataactntttactcggatgtctgattgagtcccgtaatatatcgaaaagctcgaatgtgaatgtagaagctcagagcaaattcaaacgacaataactttttactcggatgtctgattgagtcccgtaatatatcgagatgctcgaaatggaataccgaagctctgagcaaattcaaacaataataactttttactcggatgtccgattgagtcccgtaatttatcggaacgcttgaaattgaatgttgaagctctgagcaaattcaaacgacaataaacttttactccgatgtctgattgagtcccgtaatatatcgagacgctcgaa

SEQ ID NO: 146044 - DNA, 455 bp, Glycine max
  unsure (1)..(455): unsure at all n locations
actcaagcttatgcgcatatntccttacgaacgttctcttgcacaagacattctattaattaagaaaaatgcacccatatacaatcaaggcagcttcgttacctagattatttacacgtacttccaaggtgtatttgttacttacatcacacacatctccttggctaaattcacatacatgcacactcaaagcattttggggtaccaaaaattgcacatgtgcacatcttggtatttctaatacctatacatacacaaacttcatgatgaatcttgactatcttcacaaaaaggtgctacacttcatcccttttttcaagtttttgctacctaaagccgcatgcaaattcaagcatatnttcctttgctgactaaaatngtattcaaattaaaaggtatatattttttttgtaatatgttttcttcacataacatgcaacatatntatatatatt

SEQ ID NO: 146045 - DNA, 338 bp, Glycine max
  unsure (1)..(338): unsure at all n locations
gtcatgagcatgaaaaatagccttgatgcttcataaaaaaggatcacgatcaaatatgtcttaaactcttttactcaatatatntgacgagaatcattgtcccacacatgaaattatacaaataataagagttgaactctatatattaaaatatctttcgtgttcagatttgttgaatagttagactaactgcatcttagttattgtacattttggggctcgtatttacctcatgattatgtccttaaaatgcaatctaataaattaagaaaggagagtatttattatatatgagtgttcttgatactcataggatatgatattttgtgtgtggtgtt

SEQ ID NO: 146046 - DNA, 414 bp, Glycine max
  unsure (1)..(414): unsure at all n locations
aactaagcttgtgatgattattgtgatcgctgttctcaccattttgactttagagncataagtctatcatatattcctatcttccaaaagtatacaaaacaaactatgatcctcaatttcagtgcattttaaatgtttttttatacaatgttgattctcaataatgtttatgcaattcttgttgggctataagtagatgttaagtctcacattgaataaaagtgaaaagatgttgggtgaagctcttattattgaagagaatatcgatgaatctgaatgttaaggtttagtgttaaaatatggtgtcagggctccacacggagactactattggaaagagactcacacattgtgagttggttggtactacaggagtgatactcgaatgttaccaacaatgttatcttctgtata

SEQ ID NO: 146047 - DNA, 435 bp, Glycine max
  unsure (1)..(435): unsure at all n locations
ntacactaaaaaggatccagtatttgtaattntaagaatgtatcttattttttattattacttgttggattaaaattctattcattgctagataagaattacccaggaatgctcttttagggacataaataaccatttgttcagagattgagctgagaaagctttggcattgatcaaaagacacttttttagagtttacacttattctcttcctttgtataacaccaacatacaacattaagatgaaccgaaacagcaaacattaaatgttcagaatatagacaacctaaagcatatggtatatgatacatgacaaaataccatattaaataaattaccctattcattcataatgatacccacatccaatatgaaaattgaaacaacaaatcaagtgattcaattatacgtgtattaacaaaactatctaatgtc

SEQ ID NO: 146048 - DNA, 386 bp, Glycine max
  unsure (1)..(386): unsure at all n locations
atacagtgtgttgtagtaatgacccactaacttagaattatataacttaatgcccttaatctagggaatcaaaaaaaacttaatggctgtttgctncttccactgtatttccctctcctctccctctatattccccccgtttcccctcctttgttccctctcccagcttatccctctgttcgctactctttccttcttccctcttcatccttctctttctccatccctctctgctcatttactctcttcttatttctctttagcttcttgtccactctcgcctcttctctcttcctctgtaccccctccatctctgtccatccgttctctttctcctctctcattgtctcctattcccctttctccctgtctcttctctttctact

SEQ ID NO: 146049 - DNA, 434 bp, Glycine max
  unsure (1)..(434): unsure at all n locations
acggatggacatggtatatgtcacggtgttggtctggttcagggataaaaggtaatgtcccacattatttccatgacacaaatgcaacaatgatgatttgcacctatgtggacactcaagtgtcgaaatttttttggtcatgtgatgctagggctcataattcattttctctactttagtcaacccaatgtttccaaaatatgttcttctatcaatttgtgcattcatccgagtctatcttgggtgttcggaaaaactttcacagcatttacccttcaaatttgtacacacatttttttcaaaaattggttatgatcagggaatttttccaaagaatagccggaagtcatttcttttcaaaagcatgttggttgtttagctagacaacttatttttcgtttttcacttttttcctttntatcattagcctattt

SEQ ID NO: 146050 - DNA, 438 bp, Glycine max
agtcttcacgttgttcatgttgctaccccatctctaacaataattgctatgcatacgtaatttgtgtatttaaatcacatagcgattacctaattttcctctcttttatttctttttttgtatctaatcattagaaatttaacttcttctgagttttatccagtagatgctaaagtttgtaaatttacagtgtttttagttgtatactttttgtagagatacaatataaggcatgaaagaggatttaagagttggggaatcacacttagtgcgacagcctcactcaacgtgttaggactgttcagcccaagaagctcgcttagcgcacaaagccacatgggaagccaattgtcacgtgcaagtgcaataagcacgcaccatgcggcttagggtgtggtcacttaagccagttggactctttgcatcgtgcccagcatg

SEQ ID NO: 146051 - DNA, 440 bp, Glycine max
taagcgcgggttcgggagacacaggtcaagcgttcgttatatgcgaagatgatattccgagtactttggatttggtacgaccatgccctcctgatttccagctgggaaataggcgagtggaggaacgccccggcatttacgcaacaagcataatgtaaacctttacggttttaaaagctctatagttgggcctaggctttagagtttttccttttgttaaggctttgtgtcttttgtttttgaatttataatacaaggatctttcttcatctgttcctggtctctacccattctcattcatttgcatgtttacttctttttctgaaacggaagatccgatgacgagtcccccgaaggtactaatacctgggacccgtctatcgacttcgagcaagaaatgaatcatacggaagatgaatgaaatgaggatgtgggacttc

SEQ ID NO: 146052 - DNA, 433 bp, Glycine max
  unsure (1)..(433): unsure at all n locations
actcaagcttccttgtgtgtactcatntgtagtaccgaacaacgataatgatatgtgaaatttcaaataaattgagaggatttctttaactttacataagaaagacagctcccgaacctttttactttataaaataaataaaaactattttattttggtgaacctaaaattttgaattttaataatcttattcttggttgggtttactcatttgtggttatctgatccattaatccccctctctattaaaaggtttattatcttaatttagctaaaatataattttggtcttcttattttatcttgtaattttggtctctcaattttaaaactgagaaatataatttgtttaattttcaaaaacctgcaattttgatccaaccctcaatgttctctacatttgttacttgcctatattctaaattattaaatc

SEQ ID NO: 146053 - DNA, 430 bp, Glycine max
  unsure (1)..(430): unsure at all n locations
tctccttactcacttggtcacgcaggagatgaaacttggtttcaatatgtntactcctgccatgtgccacaggatgcttagctaaatcaattgctgatttgttagtgtaaattcctgacccgaagcttagttagtgtaaatttctcaagtttagttctttcattaaagcttccagccatagagcttgacaagctgccatagcagcagcaatatattctgcttcacatgttgacaaagcaactatactctgcttctttgagcaccaagagattggtgatgttccaaatttgaaaacataaccagtagtacttttcctatcatccttatcactacaccaatctgaatcactataaccaaacacttcttcttctatattcttctgactggtaggatataaaatgccaagatccaatgttcctttcacatacct

SEQ ID NO: 146054 - DNA, 392 bp, Glycine max
  unsure (1)..(392): unsure at all n locations
agagcgtggagaacgtacataactcatatgtcactgttataacttattagtttaattaaacatcatctatttcagcttaatttttttatgccaagtttcgttagaaactcttcaaaatgctccctaatctcataatctaagtaaccatgttcctcttgttattttacttacttttcttcctgttattgagatcacttggctgcgaataatttattgttaaaccctaaagaatttatcaataaaaaaatggtttaaacctaaatgaagaaaaattatgcactcagaaatgaatcttccattgatgatatgtgaagtccaaggaggaggccgttttgaattgaagntttttttttttttttttaatatcttttgggtcctcaatttgaagatat

SEQ ID NO: 146055 - DNA, 313 bp, Glycine max
cgacctttttttttttgccacctcaactaaccgccaaaactgcgcgtaacccccagtagggacataaacaacacccttgctttatatatgggcacatacatatacatactttactgaccctacacccattccataactacaaaaccacaataatgaacttgcctgacgaatacagaaggtgaaactgcgaaataactatactacaaccagcccttaactgagtaagttgcaccaattgatgtacaccagaaagctatagaaattatgagttcaattccacaacctcattggtggttaatgtgtggctgggtat

SEQ ID NO: 146056 - DNA, 435 bp, Glycine max
tgaataacagttccttatctgcaatcatgtacttgagtatgtgtacttttttgccttgatttggttatgtgcctcaacagtattcaattgcaatagtctatgtttgtctttcagcaaaaaattgcttcagttgagaaagagggatacagtttacactaggtcaatccacgggttttcacttcggaaatccagagttttaggtgttggggggtgtagtttaaaatggtccaaatccattgagaagaactcaaagctagctaatgaggttagtttggtgttttatagtagtgtgcttttccatgaagtttccttttaagttaggcataatttatattaagtaataaaatagatcttagctatgattcatacaattttttgtgatcattgtaggaagccacacttgctgttgctgcagtatagaggaagaagagagag

SEQ ID NO: 146057 - DNA, 351 bp, Glycine max
  unsure (1)..(351): unsure at all n locations
tctaaatacaataatatcataatgcaatactatagaaaatgtgaaactnttataagttcaactagataagacattttattaagctttcaattcttctattttcacttcctatcaatgtactcaaccaatcagaaaccaactttggtgtaatagtcaacaaacattgaatgacggtgtaaaaaatctttataccgacaatgtatatatattattgattcctttcacttcaatgctgaaccctttanaggtggtgagtaacgatcaagttagaaaataatgcatcaataactcgaagtggtaagagagctataccttcccaagtacagtgcggtgccaaggaaaattttggac

SEQ ID NO: 146058 - DNA, 437 bp, Glycine max
  unsure (1)..(437): unsure at all n locations
tggaatntaacatatgagtatcggtgagataatcgaatgtatactttctttgacaaatgttaataccagaggttccatgagtaacttcaaatccaagaaaatactccaaattatcaaggtctttgatcttaaaagtgtcatctagtaattttgtaatatgagaaataacagagagatcattcccactcagaacaatatcatcaacgtagaccaataatgcagtgaatgaattttctcttttcaaagtaaaaagagaatagtcagcactagactgtttgaagccatgagccacaagaaaagtagataatcgagcataccattgactactggcctgtttcaacccatagagagatctttgtaacttacaaacttgaccaagtttagtatatttcatacctggaggtagaaccatatacacctcttcattaagatcacca

SEQ ID NO: 146059 - DNA, 423 bp, Glycine max
  unsure (1)..(423): unsure at all n locations
ntcccaacatccaagtaatacaacattcaaacagcacatattatcacagccaagcaaaatagggcaaaggcagaaaaactctgcccaaaacaccaaccaaaatcacagcttttctcacttaaagaccccagtaacaattccttcgttccaattcgttaaccgttggatcgactcgaaaattttactggaagtctatagtacttaagcctacattgtgaccgttgggatctactagcaaacatctagaactcattctgtactactctttccacagcccaccacacacaagtatttttctgcacaaagccaaaattctgctgcacctatttgacagcaaaattctgcataagtgcagatttcgaaaatcacacttcccctcatccaatcttgcccaaatcaaatcctacaagtcccanatcatgt

SEQ ID NO: 146060 - DNA, 428 bp, Glycine max
  unsure (1)..(428): unsure at all n locations
tctttgggaccttgaacaggcaactaactcctctntcataaccatgctatgttctcgcgactggtccctctcttcccttcgcagcttgagttcattgttgctaccccacagagctccgcaaaatttgttccagccatactcttccttgcgagccctcttggtctcttgttcaagggctcgtgcggtagttgcattctcttcccgtaatccggcacactccttccggatgtatgtagcggccaacatgaacttctccttggcaagtttcgcctttcctaactcgcttttgagagcttggacttcttcgtcctcttccggtgcttcaaaactctcttcgctgacgacttttaacttggcgagccaatccaaacatcgcatatngaacttcagccattcatggtaaccaccaatggcaccattacgaatgc

SEQ ID NO: 146061 - DNA, 458 bp, Glycine max
tacggtgcttcattctcagcttagcttcttaggaatcttcttaggaagcttctcaaggaggtgagcttagttatgatagggatatgtgtagctaagctctagcttatcaaggaagttttctcaaagaagcttctcaaggaagttttctcaagaaagcttctcaaggaagttttctcaagaaagcttctcaaggaagctacctagtctataaatagaagcatttgtaacacttattgtaactttgatgaatgagagtcttgtgagacacaactcaaagttcaacttctctccctcttttattccttcaatttcgtgctcccccttatgtctttcttttcctccattaaagcatccacttcaagcttcttatccaaggcacattcttggtggtgaagctctttcttccatggcttattccctagtggatggcgcctcttctcacctcttctcctttgtct

SEQ ID NO: 146062 - DNA, 418 bp, Glycine max
  unsure (1)..(418): unsure at all n locations
taaagcaatgcttatttgatgaagcaagcttgtattcatcatgaagcaatgcttaacctctgaatgcttgcagaagccatctctgaatataaccttggctgatctattctcaggcagtcatgcaaaaccatgctattcatgagcattcagcatatctatgactntatcaaagatggcctctgaagagctcatagctggtcatcgatcacaaacctctggctagggagtgcatgattcacaatactaattctcaaccctttttcagagtcgttctatcaaaattatcttctgggaatcgatcaccagagccttgatctatcggaaacactaattctgaggcaaatgcttgatcttgaataaatctcgaagcattgctcgtatgatgaagcagccttgtattaatctggaagcaatgctt

SEQ ID NO: 146063 - DNA, 447 bp, Glycine max
tgaaaatgttcgttaacaactttaacaaacaacttgagataaattccttcttctcaaattaaaattgctgcaagaactgtgttaggaggtgattgtaaatggacaaataaatatcctcacaaacactctcttacgtgtttacactcaataattttttactggtgtttctcttttttacttttttcctttaatagtctcaccactcttgtcttttaccgctcaacttctccttatgagctcttaactaagaacatttgggattgaacaacacacaacaagggatcaattagaacttagtgaataagaacaagacaaggaacaaaccaaaggaagattgatggagcaagaagaagatgacacagtagtcacactttgttttgttaacttgtaaacaaatgtaaaaactgtccagaattttttttctactttcttttgtaccgtctttgg

SEQ ID NO: 146064 - DNA, 439 bp, Glycine max
aatgccttaatcatttccaaatatgcatgtgaattatgatgaatcaacaagaatcaagccaaggctattgtgcaagcaatcaatggggcaaaacacaccaaatgattataatgatggatggctcaaattatcacaaaggtaaaatcatcactttcaaattgagctttcaaaactatcatgacatgtagagaagaatcaaggatttcaagtcacaaaatgtcaagaacttttattttcaaaacaattacccatttcttgaacatatcctataattcaaagaaaaacatgcaaagtcgtacgtgcacatgaaattgacccaaaatattaaactgaaaatccgacgaaactaacaacattaacaaattaacacaactaacaaattaacaaaaccaacaaaactagcaaaaccaaagaacactccccccctcatacttaaaca

SEQ ID NO: 146065 - DNA, 415 bp, Glycine max
  unsure (1)..(415): unsure at all n locations
tcaaactnttatacaaagtaacgagtgtgttcttatgacttagatatatatatatatatatatatatatatatatatatatatgcgaaaaaataacacggcgatataataagataaactaattaaagattttcttacaatctgtatttattgggcaaatgaactttattctggtatctcaacataaatatattaattttctaaagattcggctgttttattttaatcatactaatttggcttcccaaggaatccaactatctattaaatctgttggaacctattagtatcaagaagattctctttttttttgcagaagatctnttctagtgattgaaagatgaaaaaaaattgcattttgactcttaattctctatttataaatacttaacaagataattaacagataaatatta

SEQ ID NO: 146066 - DNA, 420 bp, Glycine max
tagtaaaataaacccctaaaagcaggattaattaaggattacaagtttattgaggaaacaagggctaattgaagaaagcagggcaaattaagaaaaaaagattaattgatgaaagcaagataattgaggaaaacaaggttaataaaggaaagaagaataatcaaggaaagtaagattaattaaggaaagtaaaggcggacttagtgcaaaaaatccactaatctgcacctataaaagatgaagagaaaagaaggaaaagacaccgaaattccaacagaatacaatttcttagagaaggcaaatgctaaaagaaggagaaacaagcaatgagagtcattccttccccccattccttatcttatcttttccccttttactaaatattacactcttgcaattgtaaagtcttcatgataatga

SEQ ID NO: 146067 - DNA, 208 bp, Glycine max
tgttatccaaggctcatcttggttgtgaagctccttcttccatggcttattccgaaatggatggtgcctcctctcacctcttctcctttgtcatccgctgcacctccatggtggaaaatcaccattaaaggacctcattgaagctcaaagattcagcctccatagaagccccacaagcaagcttccatcaactggtatcagagcaacc

SEQ ID NO: 146068 - DNA, 437 bp, Glycine max
  unsure (1)..(437): unsure at all n locations
ntgtgattcgagtgtggcctctggtaatagattaccaatgttgtgtaattgattaccagagatgaaaagcctagagataccctttttacttgcatgtagtgttaagggacgcattgtgttgctacgtagttagatatcgcgtgaaagagtctacccctttcttttctttcttgtagatcgtgatggcggcgcagctaatccatgatcgagtggagatggagtgcctagagggagcttgggagaccctcgaaggcaacacgaggtgccgatttcggggcacgattcgatttacggctacttcattggtgcatccagatgaacccgcgcgcacgcttcagcgcactgtagagtggatactacccacgcctacaccataccgtctagtggagctagtccacatgattgaggtgacgtcatccgaggaagaccctgaggag

SEQ ID NO: 146069 - DNA, 435 bp, Glycine max
  unsure (1)..(435): unsure at all n locations
tgtaataagccaaccttagaaggtgagtcctatgaattttgtgagaaaattgtatcagnatgcatttatgaaatcagacacacgtatatttatcaaagcatcaacagaaaaagataagatattggaactattaattccaactgaaaaatttcacagaaacaggtttgaagttttatttgtttccttagattatgtcaagaaaccacaaagagttcaaaaaatcaccacactcctataaataaaatcccccacatcattctactgtgacttgtttgacatcctttttgggcttctcagtcctaggaatggttacagttaggacaccatctttcaactctgccttaatgtcatcagccttggcatcatcaggcaaaagcaggcttgtgttatagtatccatagctacttgttgatgaccaatgctcatcatcatctt

SEQ ID NO: 146070 - DNA, 392 bp, Glycine max
  unsure (1)..(392): unsure at all n locations
ctcagcttctatataagctgaaccattttatcaataaacacaagttgttttttattcagaaaattagagtttatctcttttatcttagtgagagtgattctcctaaattcttgagtgattcaagaacaccctggctgtatcaaaggactttttcacaacctttgtgtgttgccctcgctggaaaaagtgattctttccttcctatcatctccacccttgttctttcaaaccacaattccagaaaatccacctctgcccaaaattatctcgtgaccataactcccattntacacactcaaattaagtgattcttgagcctaaattgaatttcanaacgagacctttcacctcgttttggaatcacctcatttggagccatgtagcttccgtta

SEQ ID NO: 146071 - DNA, 427 bp, Glycine max
  unsure (1)..(427): unsure at all n locations
tcgcggacttaagtcaatggtcaaaccttcatcattcttcgcgaagccaacaacattgtcgagaactaccctaggtcacatgttcttaccatgtgtgctaagacatgtttgcttccttttgggcttctactgagtctaaggttgatgctctcataagacaagttatgttcgacaatggtgctagtcacagtgaagagtaagatggagaaaaaaagacaatgagtgagatgaaaagggtaaagtgggaactttacaatttttggggggtgcaccaaacaaaaaatgaggtacattaagtatttgtgcaagttatattangctagtgaaatgtaagctatcaaccattcagccctatntggcttatttttttatacaaaaatcatatagatgattgtaaaaatgaaaaaataaaatcgattcgatctac

SEQ ID NO: 146072 - DNA, 447 bp, Glycine max
tcagcttaacttcataggtgatggagcctctaaacaaaataaataacgattaaagtttgctataagaatttccagatatgtaaatattgtcataaaaaagtgtttgaaagaggggattctcaacatccaatgagaaaacccattcaaagatatttatttgcactcaatagcatgagtaagagtaacatgttagagttcataccaactagagttatcctcaatcttgtgaaagtagtgcatcagaaatttcttgtacttgtgaaggtagtgcatcaaaaagatgtgtagtatcatgcaaacaaatgctacaacaacattttccagagcacctttccatagattaaaatcatgaaagaatttaaagtatatcttaattctaagggcattgcaaaggtatataagtaacaactgaagaaaacaaataattataattttcttaaagaaaag

SEQ ID NO: 146073 - DNA, 452 bp, Glycine max
  unsure (1)..(452): unsure at all n locations
ctatagacaactcaagcttgataacccatggaagctcctaatatctactacactatgtgtggtgggcctttcttggatggcgntgattttctcagggtccacttggaccccatttctacaaactacaaaccctaagaaaactatattatctacacaaagggtacaattctctatattttcatagagggtgtttttcctaaggactgaaagaacttgcctgagatgtcctaaatgatcatctaggctcctactgttcactaaaatattatcaaaataaacaactacaaatatacttatgaaatcccttaagacatgatgcataagcctcataaaggcgcttggtgcattagtgagcccaaaacgcattactagccattcatacaaaccaaacttggtcttgaaagcggctcttcactcatcaccctctttcatcctgatttggtgataaccac

SEQ ID NO: 146074 - DNA, 446 bp, Glycine max
  unsure (1)..(446): unsure at all n locations
ntgacatagtgtctagggggtgcatcttcattaacttcaatcagctactctttgcccttgaagcaatctaccttaggatttagtactagcttgtctgtaatgccctccattaaaataacaacccgtactaaaagaatataaaatctcacaattataataataggaaaatacctcatgtataataaataaagtcaaataaataagtttttacataagtaaaaatattatcctcaaaatatgggcatctaaactaaatgaatactaaaaatataatgaaagtgatcgcattcaacgtcttattttgaagtactaactaagctaaaattaatgtaactaagtaaactatatcttgaagtctcctcaaactcaacaacttcttcttggtgttctgaaaacaacacttataatgagatgataatcccatagaataaaataattgacaaaag

SEQ ID NO: 146075 - DNA, 450 bp, Glycine max
  unsure (1)..(450): unsure at all n locations
actcaaccttgtgttcgtaagctatggtagtgttggtggtggtttattttttttatttttgcttcgnttgtgggtatgcacatggaagttaaattatacttgtgtttttaagctacggtagtacatcctttcgtatatagttgtggcctcgtgggttatgcatatggtagtagcttcgtgtacacactactagaaaataggctttggtggcacagttctattttttgttctggttctagttttggtaaaatatcagaggaaatatgaaaggaaatgttgcatggttttggttcctccataacaagagcatttagaaatttttagtgaaatcattgtctattctatntgttntgcagaattattggtgttctggatgtttgcatagttttggttatgggtggtttcgatagcgtaagcctcattattatttgttgcatgggtctggttcct

SEQ ID NO: 146076 - DNA, 452 bp, Glycine max
actcaagcttgaggcctgactcctcatctggttgtactcgcactgctggcattcatccattatcagtggatgcccaaaaaattggctgatggcatctctgtcaaaaggaatccactggcctcgcacccaagagcacatgtctcggactccctcctccgtaggccaggaattagcataaaattccatgactacttcaggatcgaacttagccatgggtgaaacgagtggagcccaatgcctccgggctatctcctcttggaactcaacgaactcttcatcccttagctgaactcgtctctctctgaggaacgactagcctttgatggtctcaaaccgctgctagtgttccacactccagaatcggtgtctatcaaagtccatatcagcctgtggggccgcactggaaccctttccaatggtgtctttccgggacctcttcgcggggagctttc

SEQ ID NO: 146077 - DNA, 359 bp, Glycine max
gttgttgatagtaattgtagctctactcatagtaactctgtattgaagctactaaaaaagttttacctgtatccctgttaagttgctctccaaaagcaatatcaggaagagcagacgcacaaaatatgtagaaagttggagccaatatcctaacattattcaaagagtcacaaatcaaaattaaggacatataacacaccaccacacaaagaaaagggggtaagtctcatcaatatgcaatgggtaaattgctttcccaaaagcccaagataaacaagaattacctaatgccagaacagattggactagcccaatcatgtttatacattcaaccctttctttgcatcttgaattattct

SEQ ID NO: 146078 - DNA, 403 bp, Glycine max
tggaaatgaacaacggaagccctcgagatattcaaatgtgtcttaacttgtcacacggaagtccgattcacgcgcagactatatcgagacgcttgaaattgaacaacgaatgctctcgaaaaattcatatggccataacttgtcacacggatgtctgattcaggcgcataatatatcgagacgctcgaaatctaacaacggatgctctcgacaaattcaaatggtcataacttgtcacacggaagtccgattcaggcgcataatatatcgagacgctcgaaattgaacaacgaatgctatcgagaaattcaaatggtcataacttgtgacacggaataccgaggagagatctatatgtgtatagattctgaaactggaaactgatacacgctcatgatatatc

SEQ ID NO: 146079 - DNA, 458 bp, Glycine max
  unsure (1)..(458): unsure at all n locations
tacggacctctgaatactaagcttanagggaagagagagactaatcacgagcacatagcatggtcttgaaagaggagttagctgcttgctcaaggtccaaaagaaacttgtctcagcgtttatgcgagagagagaccaacatgttagccatcgtcagcaagtaccaagaagaactaaatctagccacggcccacgagcataaagtggcggacgagtatgcccaagtgtatgcagaaaaggaggctagaggaaggatgatcgacgcgttacatcaagaggcaacaatgtggatggaccgatttgctcttaccttgaacgggagtcaagagcttccccgattgcaagccaaggccaaagcaatggcggacacctactccgccctcgaggagatccacagacttctcagctattgtcagctcatgatagacttaatggcccatataattagaaattgctag

SEQ ID NO: 146080 - DNA, 437 bp, Glycine max
ctaagctttgaaggacgtaatgacccccagaatgtttatctacatagccttgcttaaggcgggcatgattccctacggtgggcgcagagaagattcttgcttaatgcatctgggtgtactccatgacatggaaacatgtttggcagtaagagatctattagaacagatgatagactaaggctggcttgaggtcgacagtgagagggaggaggaacaacatgtatacatgcagtcggcagatgaagaaggacctaaaaaacctaaacccttggtaatacacttcaccagggacacgactccccaaagacctcaacacccatcagcagtgtcggcggtagatctattctatttccttacaagaacaaccgcgcagttccgtggaggtatgcccctccgggcgttaggaagggagaagctaccgatatcagctcactatc

SEQ ID NO: 146081 - DNA, 440 bp, Glycine max
  unsure (1)..(440): unsure at all n locations
tgatgtgaganagcgtggaagagttagtcttcctacttttgtttgttgaccacaaagtggtacctggagatatgtcgcgggggtcaggagaccttggggacgtcaggtggggtgctatttcccaaaaccaatcttgaccaatcccgacccaacccggccatagtcagtcagtgagaacctttgacgtacctaaacaggcgagctcctggcaatcaaccaataaaagaacaaagtccacaaagcaaggaggcttgtgtggcggctggccagctatgtatcttgggtggtatctgaaatttagagtctggtaatcgattaccattcgtgggtaatcgaatacaaggcttaaaaatggagacaagatgttaaatggcctttggtaattgattaccaatggtgtgtaatcgattacacagagtaacagggcactggtaatcgat

SEQ ID NO: 146082 - DNA, 427 bp, Glycine max
  unsure (1)..(427): unsure at all n locations
tgtaggattatggngtacccatcacatgtggtactaggtggcggtcgagcaatggtgcaagacaattctccacatccacaaatcacgtataaacccaccatcccctgttgcccacctccaattgagctcacgtactcccacgtagcccttatcctcgttcctctcaacgccgggtccccatcaatcctctcaagctcccacaacatccaagaaattcaacatcccatcatcacaaactaaccaaaccaagcaaaacagggcaaaggcagaaaactctgcccagaacacaaaccaaaaatcacagcttttcacatacaaatactccagtaacattttcttcgttccaattcgttaaccgttggatcgactcgaaaattttactggaagtctctagtacatgagtctacantttgaccgttgggatcta

SEQ ID NO: 146083 - DNA, 429 bp, Glycine max
  unsure (1)..(429): unsure at all n locations
ntgactngagtcatcaagagattataaatatgtgaccatggcatgaatttaattaataatttatctttcaatcttttttcatcatctctcaacatctttgaactctttctacagaattttctgattcatttctcttcatctttcttaaagtttttgttcaatactttttctttgaagaaaagttctttgatcaaaaacttgtgttattcatctttttcattctcttctccctttgccaaaagaacagaaggactaaccgcctaaattcttttgtgtctctcttctcccttttccaaaagaatagaaggactaaccacctgaattcttttgtgtctctcttctcccttacaaaagattcanaggactaaccgcctaagaattcttttgattcttccctttcccttaagcaaaagatttcaaaggactaac

SEQ ID NO: 146084 - DNA, 416 bp, Glycine max
  unsure (1)..(416): unsure at all n locations
caagtggtaatcagagcacaagagcttcaagtatgtgctccttaacctccatttattntttttctttaccttctcttccattgatgtttcttcatttttctccatgtatctcctcacatgtcttgttctaaatgttgttaacatgattctttagagtttccaccgattaaacttgctatagaagttagatttgattttctatggttcaaatttcttgttcttgttcttgaaccatgaattgtgttgagtttaggctcctttgagttttgccttgttattttttgtggctgaaacctaaaccataaaattcttacaaaaatattaaagtagaagataacctcataaatctagagtgacttgttcacctattgtagttttgtcatagaagtcatgtctagtcatgaaacttgtcacat

SEQ ID NO: 146085 - DNA, 378 bp, Glycine max
  unsure (1)..(378): unsure at all n locations
ataactgtgtttatttattattcagtccaggatcctcaaaatgtcaagatccatcctgaaattgtttaagctacaaaagcattgtgcataatctaatatgaaataatgatatcacanaaatcagttgtgtgagcttgcacggaatgagacttgttgtattatatattaaaagattcggctcgtatatacaacatcatatgattgaattttagtgagattattgtacactaaaaggttattaaaaagactagtttgctcagctattctccttgaattgacataccattcttcactcgatggatagtaattctgtgcctnttatactaatctctataaaaaattttttaattaaaaaacgctatatgcagtactctcttt

SEQ ID NO: 146086 - DNA, 443 bp, Glycine max
  unsure (1)..(443): unsure at all n locations
gaatgtcgaataacataagaaacactctgataacctaaagaaaaataatgtaatattaagtcggcgaggtttcaagtatattatctaatntctatattcttaacctctttctacaaactctaattaacttgaatgcttgagttcaccacatgcaataagaaaagattatgtttaaatattcctccctctttagacgaatactacacaaatataaacatcttcggtgaaaattttaaatctttgattcattagtttgtgaaagtctaatccttaactcgtgttgataccaagttatcaccttttcagaatcagtatgtctgaatgtacactatcaagggctaaactaacacattatcagttttaaggccaaactaaattaaacttgtaataatataaaatatctgccacattaataaattatgcaaggctattaatttgataca

SEQ ID NO: 146087 - DNA, 440 bp, Glycine max
  unsure (1)..(440): unsure at all n locations
ttgaacaaacttttacaactcataaactgtagttnttggttcttggagatttcttatcaaagtttctctgaaagttatgtgattattgagttgcaaacacatttgagataaagagaggtccattcaatcaagtcttttgttcttgcatttgaatgtaaaggttgtatctctccttgactatgtttcatatggtttttacacattgatactgcatgtgcaagcgttttagtgcatgctagaataggtgtttataatttgaagctaagagtaagtttctcttatgcttagattcactaaggaccctgcgttgggtgcctaagtttcattttctacgtagaatttgaaattgcttgtaaactcacattgcctattgaaaatctaattcatgttgaattagataactagattaactctgatatacatacgtaatatgaatattt

SEQ ID NO: 146088 - DNA, 437 bp, Glycine max
  unsure (1)..(437): unsure at all n locations
agtgtcgttgtcagttgcagaattatctgagtacatatatatatatatatgtctacctgcacatccatgtatgaggtttttttcacatagtttaatggaatgatattatgtgtattattcacaccccttgcttacactaaactagaaataggccattttcaatttcttttgttgatggacaagcacaagctattgtcattacaattaatgattaagaacttaaaatgcacaattacttcatagcaaggatgctagtgattatatatactatatttaattcgagacctgtaattgtataatattataatagtacccaaaaagcatgtcatgaaaaatataacattgttaatgtctttagcaaggtatctacacacgtacgtacacttcactattgatgatgacgctnttattttgccatatagagtgcatgtggcatc

SEQ ID NO: 146089 - DNA, 425 bp, Glycine max
  unsure (1)..(425): unsure at all n locations
taagagtgaaacacttattgtgaggacaagttgttatgccattaaattngattgccattcttgttgcatatttctaaccttgcacttgatttggtggagctaaaatgttgaatgtgggcaccatacttagttgattgaagcacatgaacaaaaaaaatattgaataaagggacaagaagagtgtgtatgtaacttgtcattgtgtatccttagtctttagttttaatttgtcttttgtttttgagtcctagttcaattttgtttttgagtcttagtttaattttgtttttgagtccttactttcttttaagtagtttttattgttttagtagttttagttagtcttgcttgaggacaagcaaggttctaagtttggagtgttgataaacgtcaaaattaccgaattttcatatacattttgtgac

SEQ ID NO: 146090 - DNA, 415 bp, Glycine max
ttacgtgctatgagaacaaattacgtgacaactaatactttcactatttttgctatatttcattcaaatcaatataaaatatacaccaagcttataagtgagcttgttaagcaaattgatcttacttccttattcttgatcctttaagttatgcttcacaatatatttcagtttgttgttaatttttttattaattaaagaaaattgttgactatttaataaataatttttttaatactttcaacattttttagatgttacttgaagtaacataaaatgttctaattttttatgttttattctctttctattcttaatatatttggcaaattttatgattatattttttacataaaatataattttattatttgttacaccatacaactattttaacaattatttaatagttaat

SEQ ID NO: 146091 - DNA, 384 bp, Glycine max
  unsure (1)..(384): unsure at all n locations
ataaggnactctaactcattacatcaatcttataacgccaaatcaaatggacaaataaagataatctacatgttcaatacactagtgttaaaaaaagcattgatctctactaactttacttataaccatgttcgtgatttgacttttgtataattcaatatatcatcttagtcaaagggaacaccaagaaatgcaacatatggttatgcataatttcaaaagaccaaaccatttgctaaaaaaaaaaaaacatgacacaattctttccttattaaaaaagcgataaactgtatatagtgagcataaatattattatgtaggactctaaatacccaaattttacataaacttatgaaaataagtgataattataatgattcacta

SEQ ID NO: 146092 - DNA, 436 bp, Glycine max
  unsure (1)..(436): unsure at all n locations
tgtgactcttggcaatttctttaaaactagtcacttaatatgttgacttttgaaaaaatcttcagaaacaagtcacttgaagaattgtgacttttggaaatgtactttttgaaatcagtcactggtaatcgattaccattaaggtgtaatcgattacacatcaacagatgtgactcttcattttaaattttgaaaatcaaaacatttaggagctctagtaatccattacaagtattgtgtaatcgattacacatgtttaaaatgatttgaaaatgtttaaacacaagttgtaactcttgaaatttgaaatcttaatgatcgaggccgtacccgaatcaaataaacatganaatgtagtaactaggaagtgatcctaggtcgtttcccaacgagtagtgacaaaccaaatgttcataatatacttgcagtaacagta

SEQ ID NO: 146093 - DNA, 429 bp, Glycine max
  unsure (1)..(429): unsure at all n locations
tccaggttcaagtatggccaagttactcgtcttggagtatactctggtaatgatagttcttgatcctgttgttgtggtggaggtgaaggtggttcacctgggtcttcttcctcagctttttcttgaggtagttgagcaggtataagaatattcttctccactttttcttcatcccaattccaagaagcgtactcatcaacttcaacatcttgactggtaacgagtttcttagtttgcaagttgtagacacgatagcccttagagatattgctatacccaaggaagatacctcgtatagtcttgtcttcaagtttgtgcctcttcacgtctggaatatgaatgtagcatatagatccaaagacccttangtgctttgttgatggcttcttcccgttccaagcttcaattggagtcttgtcttttatagat

SEQ ID NO: 146094 - DNA, 382 bp, Glycine max
tatgaaactaagctaacagaattcaacagaatcctaatgagctctaaagctctatactaactactctaacatggatgttgtgtgctgtgtttctgtttttaaatagtactaaatggaaaagttgctaataagaggtgacacccatgcgaattatcagcatagacatattggaatgggggttgtcaggtccatattgtaatggcgatgctgaaaattggagataaagtttgtcagataatcagagattcagaataagagagactatgtaaaaatttcccccagctagatgcttgtgaaatattgacagcatattctgtcactgtcattcgtgcattccttaatcatactccagtcaggcacctagaatctctttccaattaat

SEQ ID NO: 146095 - DNA, 432 bp, Glycine max
tcctcggggccatttcctgcgaaggcaaacatttggaaagttagttttaccaagaaatgctactcttaaaacgaaaatggcatacaacctcctccaataaacacaaacatcaatgtaaattttgagcaaactcatgcacatacttccttacgaacattcactcgcacaagatattcttctaactaaaaaaatgcacccatgcacaatcaaggcaccttcgttacctagatcacttatatgcacttccaaggtgtatttgctacctacatcacatgcatttcctttgctaaatttacatacatgcatactcaaggcactttggctaccgaaaattgcatacgtgcacattcaggtatttctaatacctatacatacacaaacttcgtgatgaatcttggctacctacacaataaggtgctacatttcatgctt

SEQ ID NO: 146096 - DNA, 443 bp, Glycine max
  unsure (1)..(443): unsure at all n locations
tcctccgagccatntccagtgaagacagacagttggaaagttagtctacaagaaaatgcttatttttaacacaaaaatgacatgctaatctttccgatttagaacgaactcatgcacacatttatgagcatgcgtatgtgtaaaatatcctactatttatgtcaacatacaaggacatccaacacattctagttaccacatatatatacatctttgaaaagaatacacattctcgtgctcagggccttgtgtcaaaattacacctattcacatccaaaacattttgctatcacaaactacctacacatatttgaagtatttaacatacaaatttttgttgtttcactcacatttatttatatgcacatcggaaagctaattatgtcacgtacgtacttgcatttgaaaaggaaattccatgccatcatatattctattaggaa

SEQ ID NO: 146097 - DNA, 432 bp, Glycine max
  unsure (1)..(432): unsure at all n locations
ctcagctaatggtgtaccaactcttgctgtaggaagttgtgtgtgcttcctccatcaatgagaatctgaacacggtggtttccaatgaggcccgtgactcgcaaggtttctggggctccgtgaccagaaagcgtatgaagacttatctgagctggtgatgtctcctatggagctacaagagctgttggagacaactggttggaatcagaatcctgcaggcactcctcatcctctgtaacaaacaggaacaaggacggggtgcacttatggcctcgtgagtatttttcttcacaatttaaacataatagcttctcccttcnaataactaattctgtggaaatgcgtttaaagggaatggtggttgtggcacgtttagctgatgaaagagataagagcggctcaactggtttagtgataactgaatgtgatgat

SEQ ID NO: 146098 - DNA, 445 bp, Glycine max
  unsure (1)..(445): unsure at all n locations
ntgaagatttggtggtcccgtgaagtagttgtttcgtatttgaagatttggtggtcctgtgaagcagctgttccgtatttgaagttgtgttagtcgtcgctcttcctatttcgtcggaggtacgcatttatcggtatttttgtgttttctggctagtttttagagaagataaacagtaaaaagctatttccgaaagaaattttaaccacatgaggaagtagtttcggaatgagaatgttggatttccagaagtacttctttcggaagttactaaggtcaatttcggaagaagtggtcccggaagtaagcctacgcctctcgggaacatcatcatggtcattctgtctatctctgtctataactctacctatagcacgacctaaacctcgtgttctaactatgatatgcaaatcatgtggaacacgtattcttttctgtctaacat

SEQ ID NO: 146099 - DNA, 437 bp, Glycine max
tttaatagaccacttctctcttccttagcgtcagttgttgcaatttttttaaataaattatttattatcaaaaaatccctccttagtgtcagttgttacatatacagattcgcttctcttctccttttctctctctcatgcattttcactctttcttttctttccttttcttttcttttgactttggactaccttcttctctctcttcctctcttcctcagcaagtttgttttctttgactttattggttatggataaattttttcatcttcatcaaaaaattttgggttttatgatatttcccaagacaaaatctttaatttttttcaagtgttctccctttattgtgtctgttgagttttcgcaaatattctcttatataccctcttctcatatctttattagtgcatacctgtcatattatatacatgttgatt

SEQ ID NO: 146100 - DNA, 426 bp, Glycine max
ccctgttcagtgtatagcactaagcgagtctattctgctattctcaatcagctctctgagagagaattaggctcagcgagccatgctcatttagccaccgcgttgttacaactaagcgagagtggctcgcttagccactgtctttgtttttgtgtagccgcgctaatcgcgccttgcgtgctaagtgagccaaactcactaagcgtccagcttgtttttcaattttacttttctgatttcagatgaaataaaaacttgtctaacttgattcttgtgactctttctgatgcacatggcctctaggaagaggaagtccaccatctccagaccctgggagccctatgacaccactcgatttatattatagggcgcctgggagagagattcccagaactgttactctcatagaggaacgtccttctttat

SEQ ID NO: 146101 - DNA, 433 bp, Glycine max
tatcaacactaacagcagcccatcaagaaaagccgggacaggatcacaacaacaagttattcaaagccttgcatctggcacagtattaccattcatacaacacattgctaaccacaaaacataatatcttattacatcatctaaacgtaggattcatgctaggacacataacaaactacggctccagatgcaagccaactctttatgcgccaaagatagaaatggtttgatcaactctcaacccggattaccaaagccattaaagtggattaaaatttaaaaatggacaggactggtccagtaaaagataagtttgggtcaaatggatttttgacccatacttatgaagaagaaaatgtaaacaaggtgaactgaggttacctcttcgtttgacctcaactgatggctctgctgtagcccgcctcatcaactc

SEQ ID NO: 146102 - DNA, 375 bp, Glycine max
tacttacgctttggattcactactttgtgaaatcttctttgactgtttatcacatagcggcaaggtaaagtgagatagcattggatgggacgtgtggtcactggagagggtggctatcacccgtctatcctttgtatacgacatccaatcttggttcctcttatgctttatcattctcatcttttctgtttgatgctggtgcaacacagttgtattcgaattgtaccattactgagattcgttatggatatgatctcaagttcacagcttgaaatctctcatatcaaaaagaagcatatcttcttctctttatgactggacgaatcatctgacgttgcactaaaacaaactcaaatatccttatgcactctcatc

SEQ ID NO: 146103 - DNA, 438 bp, Glycine max
tgagctcactgttgctaccccacaaagatctacgaaatttgtcttggccatgctcttccttgcgagccctcttggtttcttgttcaaggactcttgcggtagctgcattttcttctcgtaactcggcacactccttccaaacgtcagtagcgaccaacttgaatttttctttggcaagtcttgcttttcctagttctgtttttagagctcggacttcttcatcctcttccagagcttcgaagttctcttcgttgataatctttaacttggagagccaatctaaccctcgcgtatgaactttcagccattcatgataactaccgatgatgccattacgaatgcccctaagttctttatctttccttaatgggctttcccacgccttatggactctttgtataatcttgaaactctgcgcaccgaaatctctcgcaaggg

SEQ ID NO: 146104 - DNA, 433 bp, Glycine max
  unsure (1)..(433): unsure at all n locations
ctttattgtttcatttcataccttatgattcttttcctccattgtaccagatgatttaccccaatatgcatcttttggcttctggtttttctcctttcttgttgtctcaataaatatgttaacaatgctatcattggggtccttgcagattgatgaaaagatgaaagatgctcttcaagttgactgcactcgctatgctccaggaattgagatcttaagtgtccgtgtcacaaagccaactattccagaaagcataagacgcaatttcgaacaaatggaagaggagcgtactaaggtatatttccattaagaagagctgtcatgttaatatgtgtggagctacatatgtaaaacttagttgagaattntatttgaaggaaccagggttattaaacatgggtgagcacatgcacatatcnagtgcattttcacc

SEQ ID NO: 146105 - DNA, 360 bp, Glycine max
  unsure (1)..(360): unsure at all n locations
tccatcactcatcgngcattattggtaaaggtcctcaactaagcccacgtagcacacgacatctcagtcgagggttttgaaggcattgttaatcacataactaccaataactatctcgcgttcgcggaagatgagattccagttgaggggagagggcacaacaaagctctacatgtgtctgtcagatgcatggaccatgtcgtcgctaaggtactcatcgataatggttcaagtttaaatgtgatgccaaagaccaccttggagaaacttccttttaatgtgtcacgtctaaaactgagttcaatggtagtacgagcttttgatggtagtcggcgggaggtgatgggggaaattgacatc

SEQ ID NO: 146106 - DNA, 411 bp, Glycine max
tcttatccaggcactctcttggtggtaaaacttctcctttcatggcttattccctaatggatggtgcctcctttctccctttctcctttatcttccactacatctccatggcggaaaatcaccatcgaaggaactcattgaagctcatagatcgagcctccatagaagcttctcaagcaagcttccatcatgtggtatcagagcacaagagcttcaagtaggtgctccttaaacctccattaattttcagctttaccttctcctccatttttgtttcttcatttatctccatgtatctcctcacatgacttgttttgaattttgctaacatgatcttctaaaatatccaccgattaaacttgctatagaagatagatttgatttctatgggaaaatatcttgctcttgtct

SEQ ID NO: 146107 - DNA, 391 bp, Glycine max
  unsure (1)..(391): unsure at all n locations
agcgtgtagataatttatactgggttgcttgttatgatgtggagnnctcttaagtcttaagtcaccgcttagttctcttatgtcttaagtcacagttcttcttttctctttctttggcataaacatcacactcacacgagtgtactaataggttatttctatctgaattgcttttctatataatgcgtttagagcctcttaccgtcaccggagttttgcaatttttacacctttagataaacgttggatcacttttgactttaagaaaagtaactcttgcgcggtaaattgaaatgtttatattaagctttattagttgtcacttcaggttataattcaagtcaattcatttaatattttttaataaaactaagatattcaaaacagttta

SEQ ID NO: 146108 - DNA, 462 bp, Glycine max
  unsure (1)..(462): unsure at all n locations
ngtaatgtagaggctatgaataatactacaatataatttatgatcatttgcagaagaaaaaaaattgttggcacaatttatctgattaaactccttacagtacctaatgcataacattaagcttgatccacggtcggcggacttaattgaaatattgggttaacttaagctatgctaccaagacaatatatgttgtatttataagattatttattatataaccaaataattatttaaaaaaaatattatttagtaaagtgtgaattgcatttcctttacgcaaccaacttgggctaggcaagggtgactgattaactactaatgagttaaggcatgccataagtcaaatggaaaatgacgtatacaataaggccgtgctatttcattntntattcgacttttgttttaataaaataaaataaaagccaaggctatttcaatcttttaattcacttttgtagg

SEQ ID NO: 146109 - DNA, 315 bp, Glycine max
aacccccgctgcgtgctggagatttatatcttgcttttggaatatccgcgcgttacaggaatccgcgtgaactcactattgaaggggagttatcataaactaccacttacaccattgttagattaggaacctactatgaggatatcttcctgtccttgtgcatgctgattttccttcaaaaaaattacctttctactaatgggatgcgatatctatattgtgatgaattatattgttttggcatgtttaatgctgcgcagaagaaatcatattgttgacgttggtcgaactgttgtcgatattgcttttgacgac

SEQ ID NO: 146110 - DNA, 340 bp, Glycine max
  unsure (1)..(340): unsure at all n locations
cccatcacatgtggtgctaggtgttggtcnggcgatggtgcacaacaagctttccacatccacaatgcgcgcataaacccaccatcccctgttgcccaccttcatctgagctgacgtactcccacttagcccatatactcgtttctctcaacaccgggtgcccatcaattctctcaagcttccacaacatccaagccaaacaacattcaaacagcacaagctatcacagccaagcaaaacagagcaaaagcaggaaactctgcttaacacatccaccaaaatcacagcttttctcactttaagaccccagtaacaattccttcgatccaattcggtaacc

SEQ ID NO: 146111 - DNA, 312 bp, Glycine max
acttatgtgtgcaggcggtctttctttactatcttgttttcaatgcgagctctgaccactgttctttctttccgcgatgctatttttcatgatcaccttgagtgggcttatagcctaaaccatacttcccacgattttcttggatttttatcaagctatttatgccggcattgtctctgcctaaacccatccctgagttataaccgttcctcaacataattcgggccataattaccgtcgcatcggacatacaaagtcgcccaaatagggagtccacggaggaaatgctgaccactctaaaagactggaaag

SEQ ID NO: 146112 - DNA, 422 bp, Glycine max
  unsure (1)..(422): unsure at all n locations
gctcgtttcctaaatttaagagttgacaaattcatttcatgctaattntatatcaaatactatgttttaaaacataaggaacttaatttcatggtcaaaatctatagaaatcaagcctatatgtacaattcattcaaaacagtgcatgatttaccgaaaaagcacaaaacttgaaattatggttccataggctatactaactcaaatggttgtatttatgtctaaccctaggttattggacccaataatttcaattttaaggtccatatcaacagattccaattccaatttcaaaagttctgaaaaacatagcatgagaagcacatattttgccctaacttgaaagttaaattcccaaggctacacaactccaaatgagacatatcatgtatgattttgaggtttttggggtcaaggaactc

SEQ ID NO: 146113 - DNA, 263 bp, Glycine max
  unsure (1)..(263): unsure at all n locations
ttacttagaaattttctttgctntattataattttaagaattttttaatttattgttctaataggtttaaagtaattacttagacaatattatntattatttatcatcttttcattttcataaaatattgaaactctttctatacctatgtaaatataatttaattatatattgatatctatttgtaaatttaccagtataaaaattatgtataaataaaactcaagagataaacatctttttatgaaatcaaatcagatttt

SEQ ID NO: 146114 - DNA, 398 bp, Glycine max
atggctttactacttggaagatccatcaagcctaatagtagtgctacatagctcttatttcttactacaaaatgcttatcatgttaaatgtcaaaactcacaatataatgtctctctcacattaagaaagttatgatcacttacaatatacccgtctggagtccaccttatgacatcccatctgattgtaatattgccagttggatcaagtgcatcatgggcttctgtatatgaacaaccatgaaaagtggaagacttaattctcatcaagtatgcttaaaacaaacaattttacagaacaaagccacatatatatcactggattgtttctcaagtggagattagagaagccctaaaatagtaattgtatccatgcctatggcaacatcgcacacact

SEQ ID NO: 146115 - DNA, 360 bp, Glycine max
agagcattgagagaatgacaattgttacctatatatagctatttttttactatgaaaaaatgagtttagacaatttatattaaatatttgttaaaagaacttctcagttaacgcatttaaacataaattataacttgtgaatgagaattatttacgaaggagcattaattgaaatttgcggtaaggagaatgatattggcgatcatgcatgaacgaaagtggtgaaaaaaaattaaggttattgccaatccgaaaccctgagagaatatggggttgtcgcggttggatatatctggatatatacgaaagggattttggttttttgccggattagttgaaataattcttttcatcattatt

SEQ ID NO: 146116 - DNA, 428 bp, Glycine max
gctcattgaactccaaagaagcatatatgtttctatatgtaaaaaatggatctaaatcgaagatgcttaacccattatgatttctgaatgtcatgctcatccacacctacacaatcccatgcaatcgcagcttaaaaatatatagtaactatgttgacttttaattctacgagattctatttgtttattagaaaacagtaccaaaagtacttaaggaaatgcatgtaagttatgtcttttatgaattttgattaaaaactctctttatttcaaagacattccttatttaccaattaattatatgacatccctagttgccatggccaatatgtcagcacttgaaaccttattctggcagcgaggtacactgttcaccgcaacattggctttgatcacagtggtcaacccatcaccagcttgcaccacag

SEQ ID NO: 146117 - DNA, 429 bp, Glycine max
  unsure (1)..(429): unsure at all n locations
cacgtatnatttcgacgagttgaagtttgtgtgtagcgntaactctcgagacatctaattcttccactgcaactggctcactatacaaagtgatgatcatcgtggatatgattttatctcggactacttggaaactcgtcgttggccaaacattgtgagactcaaggcttatatgacactgtattttgaagtgaaacagattctttccaccattcttcaagggctacttagcttaagcttcgaatttctgtctttgaattatattagggatgagatggacgctgcttccactcctgatcttccactgtttaagaatttagttcagctaaggattttccttaaaagggatgattccttactttctgaacttccatcanagtgttccaagcttgagggtcttcaggttatatcacgcataacctatcaatt

SEQ ID NO: 146118 - DNA, 371 bp, Glycine max
  unsure (1)..(371): unsure at all n locations
agctntggtcaatttcaggaacgagaaagaggatattatcaccattgtcaattctgaattgggtggcattggttggcctcaaatctctaaagagtgtcttgtcaaaggtcatgtgattggtacaaccactatcaatcaaccaatttttacttgattcactactcaagaaacaagtgactacaaaaagttagtcctcctcctcttgactagcaatctaagctccttaaccatgccgatttttgttgtcgcaaatcacagcttcatgcccccatctagatgcacttactgtattttgtatctaacctcttccaacaactataaggtggatgttcttttctgccacaatgttgacaaggtggatagtttttctt

SEQ ID NO: 146119 - DNA, 408 bp, Glycine max
  unsure (1)..(408): unsure at all n locations
tcgtagaaacacacctcaatagtctttcttcaaatgcatatgatagtaggctttcattttaagataatgaaacaagacagttctatttattaaattttcaaaatataagaataataatctattactagctagttgtaattggttattttattctttcgggacctgggtttaagactttaaatgcatttacaattaattggacatgtaatcaattaaaacatgaacttgtatttcaataacaaacaaagctttatttgttatcgattaaaacacgaccggctctagttttagattcaagccctagcttgtgtaactgatttacctggtaggtaatcaattaccacaactttatgtgtcttaattntcatattacaataagaacaatgtnnatcatgactacttattttc

SEQ ID NO: 146120 - DNA, 432 bp, Glycine max
gcttcgacagagaaagcaagcacacccaacctgtatgtcatgtggaagtttgaagataaaaatcaaagcttttgtcttgcaaaggaagaacaatactcaaccacaattaaataaagttgaggaacacaaaaaaattcaatcttttgtaccaacagaacccagaaatcaaatatatcacaatgaacacgttggagaaggcttaaaaacacaaaataaaggcataacacccaaaaaaaatcaaatccaaatcaaatagtatttgtacatgacaaaaaggggagagaaaagcactgaaaaaatataaaaaacgcttcaatcatacacaatagatgtaaaaaatacatataagacaagaagtgaaatgaaaactaattaaggattattatgcgtatgccgcttcggcgggaaatgaaattaataaatggtgagaac

SEQ ID NO: 146121 - DNA, 429 bp, Glycine max
  unsure (1)..(429): unsure at all n locations
agctccttgaactatcactaaaataataaacgaacaanaattaactcagttaagccactattattggattattgatataagagggtagtttgtagttgattataaatttgaagtctctatgctcccgacattatacaaaaatacgaagcttcttaaactatcgtcaaaataatagacgaacaaaaattaaattacatggcaatctcaaatgaaactntcgtaagaatgaataggacgacatattcaactagattaaatcatattattaagaagaaaataagataatagtgaaggaatgaagtcaatgaactataggtacttgttgagcttcgattttgtgttntcttgatcttgagtcacttatctatttagaaatgatcataagaaactcagcccttctcacctttcgctaaagaaattaacgagaaa

SEQ ID NO: 146122 - DNA, 232 bp, Glycine max
ataatgatgggatggggatctcgtgatatctaaaaagagcacgcaaccaatgaatgtgagtgtgagatcctcgtgggaggtgaaatctttcaaacagagcggaacaatttcaatctaagcctctctttttttttagtgtgagagagaatacatccgaataatgaaggatggaggaccatgactacatacataacacgatcgacccctttttctataacccctccttacctgc

SEQ ID NO: 146123 - DNA, 388 bp, Glycine max
caccgcagcatcagctgtttaaatttttttaaatctttttattatattgaattttcttctcttattaatatatatgtgaggcgtatagggttcacactttcttatcattatcctatgttattattatattaatgtttttcctattcttaccaataatattgtgattatatatgtatatgcattcaaatctaattaattgatatctctgctttcctattccttagcctaagcattgatcgtaaaaatattcttgttcaaagcaagtgcatcctcacatatttgatctagacttagttcatatttaaatctaaggaccttcgtgttccaattatttgttataaacatctggaaatttaatttttcaattgataaatgttataacaattac

SEQ ID NO: 146124 - DNA, 432 bp, Glycine max
  unsure (1)..(432): unsure at all n locations
ttccctctntgaacaaatacccctcagccatatagaatctatctgggcctttntcccacaactctggtaaatgggagagaaatgttcatctaaagcatacaagtccctaatgttatcaaatcctaaaatttgagctcctagggagcaaaacaatgtgtgtctcctagagagggcatcagctaccacatttgtntttccctttttgtatttgataacatatggaaattgctctaggtactctacccattttgcatgccttttgtttaacttgctttgccctctaatgaacgtaagtgattgatgatcaccatgaatgacaaattcctttgaaacaaggtaatgttcccaagttcgaagtgctcttattaaggcataaagctctttatcataggtggggtagttaagggtggcaccatgaagtnttcactaaaa

SEQ ID NO: 146125 - DNA, 192 bp, Glycine max
aaacctaagagtacaatgggcttaaacctcctacacatttgtccttaggtttgaaacctgcaagtggatttgccttttcaacacccttaaagtggacctgcatttctcaacctccttaaagtgacttgcattttaaccgcctttaagtgtataagattctatatagccggatttaccatgggatcataccat

SEQ ID NO: 146126 - DNA, 420 bp, Glycine max
  unsure (1)..(420): unsure at all n locations
aactaagcttatcaccatttgcagacacctttattctgtagctctcaatatttagattggacttgaaatcttcaagtgttatggagtccttgactacacttaagacaacttcattaaattatcataagagggagggagagaggctaacaaaatcatcaccaaatcttcatcttccatcttgacaccactatcgcgtaactccatcagaacaaagtttagctcatcaagatgtttctttagtggcacacattcccttatttggaggccaaacatacatttatccattagctacttgttggagattgatttactcgtgaagaattatttccatggttattaaactctcgatgtaacctcgttacctcttgcaagtttacgagatcacttactctctgcgagtngactcgtgtgttaactcta

SEQ ID NO: 146127 - DNA, 475 bp, Glycine max
gacctatgaaactcagctggattgatatccctaaaggccttgctgcctaagttgttttatactctatacatattacagcttactcattgtcaaccattgtgcaattcacatacgatctgaactaagatcctgtactctgcttccgaggaggacttagtatatttcttatcagctaatattaatttgtatgagtgttagttttgttcgctaagaatatagaactcacgattttttattttttttgtttccttctcccttaagcatcaaactcatctaatatctccgaagaggatttagatatagtaggttgtttcttgcttttcctagaagccagtgaaaatcctataaaaaaaaacccgtgattgaccttctggtatccaaacattgttcccattctgaatcactaaaccttcttgaagttattgtcggtgcttacttgaaacaaatactctcagcttggtgaaattttgatgtt

SEQ ID NO: 146128 - DNA, 419 bp, Glycine max
agcttgccactgcagttttttaatgaacaaatgaagcgtccacagtcattggatggttgcttggtagaggtacatgctaataactaataaaaattcctgtgcagggtatcattgtttttgcatgactgatggctaccttggggctggagaatttggttgaatctgcctcaagtgttattttgaaggtaatgagaataatctttgttggtgtttgtttattatatacctaaatttgggttgaagactagctattcaacatgtggaatatctaccataagattgtcttataagtgattttaatatttgagcagatgatattattcattgaccttgcttttgctttgattccgctcctaaagttcaagtacacgcaagtgactagcagcacaagcattgaagacgtgtgtttcctccttgtt

SEQ ID NO: 146129 - DNA, 451 bp, Glycine max
  unsure (1)..(451): unsure at all n locations
tatattgtatctacatgaataaaagaggtaatgttcatttctacaatctttacacctaanaaataattaattgatgactaactatctgcttctacatatccttgatgcaaaccaaacattccgtaattaatagaagtcttgttttcttatgccttattataggtagttgttgggcgttttcaactattgtagttgtttaagttattaaccaaatcaagacacataagctagtgcccttgtttgagcaagaacttgtagattgtgacactacacaaaatcaaggacgcaatggtgggttaatggaatctgcgttcgagtttatctagcaatatggtataactacagcaagcaattacccttatgaagcaaaagatggaacttgtgatgcatcaatggtgcacactgatctttaactattgtgcttaatatattaatcaaaattantttattg

SEQ ID NO: 146130 - DNA, 380 bp, Glycine max
tatttgttacccacctggccttgaatcacaaatctgtacttgtcgcaagggtatgtggattgtgctccgctgctgaccaccatacagaccatagccctttcctgcattaactctggagcaaattgagcagcctgaagcttatgctgcaaatatttacaaataaacttcatcaccttagcagcatactctaccacagcagagcaattatgaccttaccagcaacagataccaccctggatggaggaatcaccctaacctcagatggtccagccctcagcaacaacaacagcagcctgctccttccttccaaaatgctgctggcccaagcagaccatacattcctccaccaatccaacatcagcaacaaccccagagatagc

SEQ ID NO: 146131 - DNA, 454 bp, Glycine max
  unsure (1)..(454): unsure at all n locations
tgtgcatatcatatcactcctacattgtatctctagcatgtatttgttgttggtctcgtcccttgtcacgggaagccggaaggtccatatcaccttcttaattgtacacatggggcactgcgcccccaaatgcgcgagtaaagagagaataatttccgggctctcgtgtccgtaaaatgcattcatatcatgcatcgcataagcatctcttcataacatcataatggacatatcctgcatttgtccattatcatattccagcctcacattttgcatgagtcatggcatcatcatgcatatgcgttcaacaaactttttgatctgcanaattgcataccatntgttttcatgtttgctcatccttgcgttttcctctacaaaacaaaaacaaagaagggggaagcgtgaaacttcacactacattcttagtttcatgtgttaggagccaaccatg

SEQ ID NO: 146132 - DNA, 74 bp, Glycine max
accactgcaaaaaggttatttatatcattttaccagacaagacatctagccctccctaaaagaacctccataaa

SEQ ID NO: 146133 - DNA, 397 bp, Glycine max
gagaaatagagaggggggagcaccatattgaaggaagaaaaagggagagaagttgaactttgagttgtgtctcacaagactctcattcatcaaagttaccacaagtgttacacatgcttctatttatagcctaggtcactaactaaatgaaagcttcctttagaagcttccttgagaagctagagtttagctacacactccatctaatagctaagctcacctccttgagaagcatccttgagaagctagagcttatctacacacacccctctaacagttaagctcaccccatgccaaaatacatgaaaatgcttagctacacacacccctttaatagctaagctcacccccatgcctaaatacatgaaaatacaaaaaagtcccaactacaaagact

SEQ ID NO: 146134 - DNA, 445 bp, Glycine max
  unsure (1)..(445): unsure at all n locations
tgcttaactatgtatggcanaacttcattattggtgttcaagacatacaagtgagcttgtaacaaatcttctacacttggagtgatcacatgcagtccttttgaacccttaccacccactttgtcatcatgccgagactcaagaagcccaacaggtttagccttctctaagtattctgaacaaaaatcaatggcttcttctgcaatgacctctcaacaatagatgcttctggacgatatagattctttgtatacccttttaagatcttcatgtatcgctcaatcgggtacatccaccgtagataaacaggaccacaacatttgatttctctgaccagatgcacaatcaagtgaatcatgatgtcaaagaaagcaaggggaaaatacatctccaactgacacattataattgcgggctcattntctaactcatcaaacatgactgg

SEQ ID NO: 146135 - DNA, 378 bp, Glycine max
  unsure (1)..(378): unsure at all n locations
aatattaagacaatctcaattagcaaactaaacagcttttcaacagaagacaagtgcctcgaggattataataatgagtaatcctttgtattctaattctaattcaaaattcataagcatcaaaatttgaggcataaaaattcaaattatagaacaaaaacgaaaaatctttatgtcgcaaaattataagaataaatataaagaattcaatctagtctcaatatatattcataaatttcaaaactaattgggtttatcatttagttnttaacctctctcaaattggtctaagacctgnaagatgaagaaaatacgtgattgatgaatgagagttgtaacataggatntattttattagtagaatctcaattctgcagc

SEQ ID NO: 146136 - DNA, 349 bp, Glycine max
gaatggccatcacaggcctatatatatgtgactcgagacacgaatttgctaagagttttcagaacgacagtgctattctctcaaaagaagaatcgttatcctcttagaattcttggccaattcaattgcaattcattaaggaatcatttgagtgctcacattgtaaaatctatctctttcaagagagagtcattctttttctctttctaattcactaacggattaagagaccgagggtctcttgttgtaaaagaattcttaacacaaaggaaggattgtccttgtgtgtttagaacttgttaaacgaatttacaagatagtggaactctcatgcgggttgcttggggac

SEQ ID NO: 146137 - DNA, 327 bp, Glycine max
tataaaaccattctttagctaacattctttttatcaaagatcactttagatcgtttcaaggtccaacgccttaatgattctctcctctttacaaaaaaatcaaaagatcgtttcaaggaccaacgccttaaacgactctctccacttttcaaaaatcatcagattgtttcaaggtccaacgccttatacaacttttgttctcgattaaaaacaatcctttcaataacataaaaataatgtcacacatatacttttatactttacgaactacgtacgtctgatttcctcatcttacctgaggatacataaaagcaaaggcaacaccct

SEQ ID NO: 146138 - DNA, 436 bp, Glycine max
gaccctcttgccctccctattgagtatattttgcattcttgatcaaaacatcaaatgatcatctgttttacactaaaactagcgttcaacactgtatgtcaactatcaaggatcaaaagatcaacaaacgatagtccccggatgaaattatggtatgacaagcccacttaaagaggtgaatactcggattgtctctcccatggtgttatggttaagacaggttatctccaagccatgaccaagtgtggtgctattataagagagatgatgtgaagtccaacaaattgttgacatttataaaaatccagcatgctattggttgtgttagtggaaatcttatcaatttgagagaggacctaatgtacctcaagaatgacgtgaatacacataaagatctctaatgtgaattctttcttacattgcactattaattatg

SEQ ID NO: 146139 - DNA, 299 bp, Glycine max
  unsure (1)..(299): unsure at all n locations
agcaccgcagctgcaacttcttctcctacgagggggactttgttttaactgcttggaaacagntcctattaaattcatgttctttagcaagaagatcactattcagtttagtataagcttctctaatattacacaatgacataaagctctaatccttaactaatactccaccaataattgaaccgccgaggttgctcagacctattaaaatgtttatccattaaaataaaaaaaaattgttttaaaatatctgttgactagcttacagactgctagttataaagggaaagaacaatcat

SEQ ID NO: 146140 - DNA, 244 bp, Glycine max
tctaagtgcagaactctatatttcatctctacagagatgtattgcgagaagacaaactatccaagtcattcactccctatctaggacaactcgctattgagctggcctccctaagattgataatattcctaaatgtatccgactctactatcatgaatgaaatgccctgattatctttatcttaaacaagcttggattatttattacaattaagctaatacactctcttattcctgagtattat

SEQ ID NO: 146141 - DNA, 348 bp, Glycine max
  unsure (1)..(348): unsure at all n locations
tccacagtgatgtcaccgtgtttctctccgtcngtgacaaatcgggtcgggttttatgaggcaaataagagcggcgtggttccttcgtgtgaatcggtggcgaaccggttgaataatctggagcggttcttgcaggtcatcacgccctccgtgcatgctttgtatctggctaaggtttgcttttgagtcactggaactggaacaagtgttttgaaaaaaaaaaaaaaaggttttatttaaactgggttattggtgaaatcgcgtttcatttattagaataggtttgatgggaatttgatttaaagttcacgtctttgtttgtgagttgaacgaaagccttccatggga

SEQ ID NO: 146142 - DNA, 404 bp, Glycine max
  unsure (1)..(404): unsure at all n locations
ctgagtgctacgttntgtcgtgaagttgttggagaagtgttatacaatttctcttgaatctccataagctttatttaatcatggacatgagactcctttttaatccataagatattgtcatgtttatgaagcattgcccacacttggataaattattcatctgtgtgagtatattattaattaatccttaactaattaacaataactactcatttgattgtaaaatcctatctatcaacaattagtagttacggttatactcacaccgataaacagtttctccaagagtaggcaactcttcattaacatggcaatatcatatggattgcaaaaaagtctcttgccatgatctagtgaaactcttgatgattcaaaaatgtgtatcatgttnttctcaatactcc

SEQ ID NO: 146143 - DNA, 291 bp, Glycine max
atgtgtctactatcattgacatcatctttttttcggtcattgaggtgccacttgagctgccaggtctctccacctttgggtgtattctttgaaagatctgtgcccctttttgcacatgttctgttgttgcattctatccagaaccatatcaaaatgtactgatactgcctaacgaaggcaaccattaggtccttccaagaatggactcgggaaggttccaagttagtgtaccatgtaacagctaccccagtaagactttctttggaagaatgtataaccaattctcttttt

SEQ ID NO: 146144 - DNA, 456 bp, Glycine max
  unsure (1)..(456): unsure at all n locations
ntgtccgcataagtcactcataactcgtttaaggtccaactctttaanacggncctctttgcttttattggttaaaatggaccattcaaagcataaaatcaacacataactttatcgttnttgcaagaactacgtaggtctgatttcctcatcgcaattgaggatacgtaggagcaaaagcctcgcttttgtcaaccacccccaagagatcgttaatggtccaacgccttaacgtttctctcctttcaccaccaagagatcgttaatggtccaacaccttaacgtttctctcctttcaaaaaccaagagatcgttaatggtccaacgccttaacgtttctctcctttcaaaaccaagaaatcgttaatggtccaacgccttaacgtttctctcctttcataaaccaagagatcgttaatggtccaacgccttaacgattctctcctttcaatacca

SEQ ID NO: 146145 - DNA, 424 bp, Glycine max
gcttgtatcttttatgatgaagcagctattatatattttcactaggtgaggctagctgcataaatcaaaagacaccattgttttctatcttcaactaaaccctttgctagtccatttagataaaatataaacataaaaaaaaaatccaggttttcatgtctactctagtcatgatgatcaagttttgggtaatgaaacacaaataactctgaaattttttgagagaactaaataagaaaaatcctaacaataaggggaaaaaaataattaagaaaatcaagagatgtacacattacagatgtacaagaaagcaggatagtgagacccctagatcaaccaaaaaaaggatatttagatttccaaatggttttattataggggttaggagactcagatttccaaatggttgtgcccctgatgtatt

SEQ ID NO: 146146 - DNA, 426 bp, Glycine max
  unsure (1)..(426): unsure at all n locations
caacaaggccatttggtagatgttcaaatgatcaaagcttaaccatcaagagtagaagctaaaaataatgcttaaccactcaagacagaagcaaaacaacaatccaatgcttaaccattcatgacaaaagctcaaacaatgtttaatcaccatggacagaagcttacatcaacaaatagaagaacacanaatctgtcttctatgaggacttttcacaaacactttgtgaatcaagaacaaccaaggcttaaccatccatggcagaagctaaaacaatacttaaccaccttggacaaatgtaaacaaatgaacaatgcttaaccaccacacatggcagaagctaaaatcatcaaaaaaagcctaaaaggctcaaaacaataagccaaaacaggccaaatatccatgaaacaatgaaaagattaatca

SEQ ID NO: 146147 - DNA, 72 bp, Glycine max
ggaaaccagcctacgctatggttgctaatttgttaatctctctcacacccaagttctgaccaagtagtaaaa

SEQ ID NO: 146148 - DNA, 479 bp, Glycine max
  unsure (1)..(479): unsure at all n locations
ggacctatgaaactcagcttcataactacattcacgactacacacaatataagggagttaagtagtcatgcgtntacacatcaagaaagacacactcatccaagatatatatatggtccataaggttcttgcaacactaatccacgcatcaaaggagaaataagctaactaacaacatacacacaggatgatagaggttcgttagcacattatcaatcaatatcaagactacttgcatcacccaatggcttgccataatgtccaaccgcacttcgcaaattatagagatggccagtctcataactcatgactcaacaatgaatttatggtatagcaaacattaaggatgcaaggcacatacaagcattattattaagtcttatttaatcatgtaggagaaaatacaaataaaaattcaagcatgctcaacaaaagtactcataagtaaccacacagagtgcacaccagaatatgataag

SEQ ID NO: 146149 - DNA, 350 bp, Glycine max
ttgaaggaataaaagagggagagaagcggaactttgaaggtgtctcataagactttattctgaaagtacacaagtgtacagacgttattacctaggtgcttctgagagacatccttgagaaatttccttgagaagctttctcgaaaaacctccttggaaaattttcttgaaaagcttccttgataagcgtgagcctaactacacacacccctctaataactaagctcacctccttgagaaaccttcttgaaaagcttccttgagaagattcctagagaagctagagcttactacacacacctcttaataactaaactcacctccttgaaagagagctagagctcactttt

SEQ ID NO: 146150 - DNA, 458 bp, Glycine max
  unsure (1)..(458): unsure at all n locations
ntacaattacaatatgcattcctctagatacaattccagtgtatactaattggttgggatatngattatcatgttctctnttgctcaagtggcattttctacttgaagtctagacattgaatntatgaggttttttcttccttattgctaaatcacatgaggcataattaattagaaagagcatctatgcctaaatataatattcaaagtgcatcagtcttatttatttatttggataaacataattgataatttattaagatagaaaggagaggtacgaatgtgagagaataagaaactaaatagtaacaaaataaaaaggaaaataaaaataaaaatgagaaacatacaatagaaaacaagccaatctttctgaacgtctaaccttcaccccttaagaagaaatgcttgatcctaaatgaattaagaagtatccaatgaccaataatatattctat

SEQ ID NO: 146151 - DNA, 408 bp, Glycine max
  unsure (1)..(408): unsure at all n locations
agctnttccttgatcttattctttatcctttgggtgttcaccatgttgctccccctatctctaacaattaccatttgattcacaatttgatgatggtacatatgaagatttgggtgtagttcaattgtcttcttcanagttaagaaaacacatcaaaattgagtgactatccttcttggatgttttttgtaggatgttgaataaatataatggataaggtggattatgttagggaaatggatgttttttgcggtctaaaaccaattatgaattatgcaacaaagtgtgttcttttgaaagacatttatgaactcattttgttttgctggctagctttgtgttgatttattggatgttttcacatacatctaatgtattaaactatgtgataactataccattaatttt

SEQ ID NO: 146152 - DNA, 460 bp, Glycine max
  unsure (1)..(460): unsure at all n locations
tctatagaaggttcggtcctaatttctctacaattgcatcttctctcaatgagctggtgaagaagaatgtggcatttacatggggtgaaaaacaggagctcttgttgtagtttatctttagagctcacccctacaggaattccaaggtaaagaaaagggaaattccagttgactgcagttgagagaaaaagctgcctccctacaccagccttcagatntacccagacacccgaattggctcttattgtagtttatctttagaccagaaaccaattcaaagcatttcaagatacactttaaaactctaacattatcattagtggcagccccaaagaacaaggtgtcatttgcatatttaagtatattaacttcctcttttttctttcccacttgatagctgctgaagagattttttgctactgttgatctcatcaacccggtaaggccttccactactata

SEQ ID NO: 146153 - DNA, 324 bp, Glycine max
  unsure (1)..(324): unsure at all n locations
aaaatggacctagcacttatccataagctctagttgatatcattcacgctagaccagcaatctgcattaagggttaccatagaagctcaatgtcagtaaatatagataatcattatccatgagtgaactagttctaacaatatctatattaaaagacaacctgaacacattgttnccaaatgaacacaaataaccctatttgtccaaataagagactgaaaccaaatttttctaaatgacggtacaacaaaagtgtctttcaaatccaaataaaaaccagtacataataataatctaaagtgccctatagcttccacttccatc

SEQ ID NO: 146154 - DNA, 450 bp, Glycine max
  unsure (1)..(450): unsure at all n locations
tgtagccattataagagaatgagcatgtgatnggaagtattattganaatgttagtcaagttgttagattgatggtgaaggaatgcattaatcgtatcccggtgagagtgtgatccttaaattttgagagaaatgactatcatttagtactgattttcgcgtgaatctctgaagtatggattagatgcatgaaattgaggatgatgaanggccatgttgattgtgatagtcacttagccaaaaagctaatcatgtgcttgaatgaattatcccttgtacccaatttgaattgaatgaattattgattgattgaaccctgagcccatacagtgttatctcctgctaccttgacttaggttgtaggagagcatcatttacaggaagcgtggttcaaagcaaatttgtcccaaatttaggggagtaattatcaaggtaaatttgttccaattt

SEQ ID NO: 146155 - DNA, 386 bp, Glycine max
tctgtatggtggtcatcataggagcacaaaccacaaacctttgcgacaggtacagatttttgattcaaggccagctgggttaccaggttaaccaatgcatccagtttgccttcaagcttcttaatttcagatgatgcagatgggtttgtagctacctcatgcactcctctaatgattatggcatcatttctggcgctaaactgctgggagttggaagccatcttctcaattaaatttatggcttcaacagcagtcatgtctccaagggctccaccactggcagcatctatcatacttctctccatattgctgagtccttcataaaaatattggagaagaagttgttctgaaatctgatggtgggggcaactggcacatagtttctt

SEQ ID NO: 146156 - DNA, 386 bp, Glycine max
  unsure (1)..(386): unsure at all n locations
cttcgcanagcttacggtaatatctgggacctagccatggtagatgtctctacagaggccattgccccccttgcccagtattatgatcagccgttgaggtgcttcacctttggggacttccagctatcacccatggtggaagaatttgaagagatcctaggatgccctctaggggggaagaaaccatatctcttcacagggttctatccctcattagctagaatatccaatatagtccaaatctcggcgcacgaattagaccacacgaagcaagtcgaaaatggggtggtcggaataccgagaaaatatttggaagtaaaagcaagaatcttggcagatgaaggcgagtgggtcccgttcatagatattctcgcactgttgaattt

SEQ ID NO: 146157 - DNA, 384 bp, Glycine max
  unsure (1)..(384): unsure at all n locations
ttccgctctggagtacgacagtcaccgcttcatgagcgttgtacaccaacagcgcttcgaagccatcaagggatggtcgtttctccgggagcgacgcgtccagctcagggacgacgagtatacttgattccangaagaaatagggcgccggcggtgggcaccactggttactcccatggccaagtttgatccagaaatagtccttgagttttacgccaatgcttggccaacagaggagggcgtgcgtgacatgagatcctgggttaggggtcagtggatcccgttcgatgccgatgctatcagccagctcctgggatatccgatggtattggaagagggccaggaatgcgagtatggccagaggaggaaccggtctgatgggtt

SEQ ID NO: 146158 - DNA, 391 bp, Glycine max
  unsure (1)..(391): unsure at all n locations
caattatctaatcattccaatccactcaaattattctattgctcattcaaatcattctcaaacactcatttcatgcaaaacaatccactacatatcattttcaatcaattcattgttcaaacacgcttttggtacaaacaaacaactcanagtgctgaaatttatataattgaaatttaaaaaaattgaaatataaaatctgaaattaaaatgactgaacataaatcataaaataattgaaaataaactaaaatgttcgagatgcacaaatttaaatgtcctgctcctgtggttgctcctatgcatgctcattaaggtccaacacctgagcagctggtgcagatggtgtggcataatcaaatatgggtgctagggatggctttgggatctg

SEQ ID NO: 146159 - DNA, 393 bp, Glycine max
taagcatctgagctgcagctattcttagttagatccaattgttttatttattattattcaattatgcaattattatattatatttaaagatttatatatagtttttatgtaaaaatacttttattatgacattttaaattaaaattttaatagaatacccctaaaatgctagatttgttgcaatatcgattattattaatgccaactgagatttatatgtatgtagttttaatattactatattttattatagtagaggaaattaagtagtatattttttttgcagagtgttggaacttagtacctacaaacctttgtgtaaaatttttattgtctattcgatataatacatttttaacttatctaaagagatgcttgtttagggatgacact

SEQ ID NO: 146160 - DNA, 424 bp, Glycine max
ctccctttagagaagatgatttcatgcttaaataggtggtcttgtctgtgctcgtgcgcttagcgcaattttgaaccgcttagcgcacattagtgaatttcggcttaacgcgtgctgcatgtctcgatttttacatgcttgtgacttgatcatccatttgtatgtatagttaggatttttagcattggaaagtgcttttaagccttagaacttgatagagaaagctagaaaactgtatgtctaggaatggagtgcagcaatctagtccatattatggtgtagactaaatgcaactcttttaggctgagtttgttgagggatcaaggatgaggtttaaaaagagttaggcccattcactcgagggatctttggttgggctaattcttcgcctagaacactttgatacctttaataaagaaaattt

SEQ ID NO: 146161 - DNA, 454 bp, Glycine max
  unsure (1)..(454): unsure at all n locations
accttaagtcatttgacgcatgcaagctccaccttctggtcctcctatagntgttgatgagaaaacatgctctattttcatctcccactccaagtaggcctccggatcattctttcctttaaatggaggaatgttgagtttaataccatcaattcggttttgtctaagaacaccatcattccctcttctcctcctttcttcttcattatgagctctattctccatttgatccaacctctcatggagcgcatcatctcgttgtttcattaacctctccatatgttgcatcaaagcttgcatttggaattgcgaaagccccactccatcattaggattagtacctgacatctcaaacaaacaaatcaaacgtaacaagacaattatagttgctgtttgaatacctcacccactcaagtgtatcacacaattatggcttttctctaatgaaacactc

SEQ ID NO: 146162 - DNA, 416 bp, Glycine max
cctattctcaatttcgagtgtctcgatatattacgggactcattcggacatccgagtaaaaacttattgtcgtttgaatttgcttagagcatatattctcaatttcgagtgtctcgatgtattacgtgactcaatcgaacatccgagtaaaatgttattgcagtttgcatttgcaacaagcttctgatttcaatttggatcgtctcgatctatgatgggactcaatcggacatccgagttaaaagttattgcggtttgcatttgctacgagcttccgctttcaactacgagcgtcttgatatattactggactcaatcgaacatcagaataaaaagttattgttgttagaatttttttcagaggcctctgtttccattaggagcgtctcgatatattacgggactccatcggacat

SEQ ID NO: 146163 - DNA, 430 bp, Glycine max
  unsure (1)..(430): unsure at all n locations
tcaaganacccgctgcatgcaagcgttcaagaatttttattattctngggttttatcgggcacggctatggatgagccacatatcgatgacttatttggcattcgcccattttatatcaataaaggtataatgcgatgctgcattctattatttgacttatcgactataaatattatatatacggctgagataccatcatctagccattggatttcccccctcaaaataattgttatggacggagagatgttatgagctaatgaatacacattttacactctacaactgtctttatctggaattacaaatatgttgaattttatttttgagttgtatattgtattaaatatatatgccaccggattcagatatataatgttgaatatatatgcgctggcacttgagtcacacacaggtgttcgttgatgg

SEQ ID NO: 146164 - DNA, 315 bp, Glycine max
  unsure (1)..(315): unsure at all n locations
ctatgaaactcaccnngatctagccgtccaccctttttttttgtacttttagggggtcaaagcccttttctacaatacacattatctcacaccatggtgttgcaacccaagataaaactaagcggataggaaacaaactgctctcctaatcaccaccagctaagcaacattcagttaatatgaccaaaatccgtacatacttgatttatgggactgatttgtacttgggtgatatgtttgtacatataattgctacagagattctactgttataagaagtatgatttatagtgagatgttcccaactattcctga

SEQ ID NO: 146165 - DNA, 382 bp, Glycine max
tgctctgatggatcatcaacactgaccccgctattctgcacactacttttatcatcctgggactttgtgtagaaagaatactgattgatatcatatcccttccaagtgggaacattcatatttggacccacacctatcaatcttaatgtgtctgaagcactgtcatcggcgaagattgtttgtctaaaccatgatatgaaagttctattgtgctcttgcaacaacctcatcatgttcatttttgggtgaatacaacacaaatgttgtttgtgagcatctatgtatgggatcacctcagctgcgttgtgtatacatatagatgagcttgtgccatctgttggcgattcatggttactacattgaaaccccgtgtgcccctacc

SEQ ID NO: 146166 - DNA, 464 bp, Glycine max
  unsure (1)..(464): unsure at all n locations
ntagtctccatgttatacatgttgctccctctatctctaacacatacagcccacaccttttgcatatgagatgcaaaccctcatactccacatgaaagtagtgacctcaaaaccacatcataccaaccgtaggttgattaagatctatttacacacaaaccctagcaaacttgccacttgatgcatccattgggtctaatatccacttgatgggactccctacgattgatgccaatgcaagaagtaaactttcatcaaaatactccattcccaaggatggaaatcctatccaaactaatgttcttttaatctttgttttggatgcaatgaaatcatgcatccatggtcttatagccaggtagtgatcaaacaccatccacaaatctccattaaccatattctctttatcttaagggaggccaaaattaaccatataaaacccaaacccaacatccattatatca

SEQ ID NO: 146167 - DNA, 412 bp, Glycine max
  unsure (1)..(412): unsure at all n locations
ngcctgtccgatgcagcagtaatgatggtccgagttatgttggtggaacggtacgaacccaaaatgggcttaggcaaagacaacggcggcataactagcctgataaatgccaaaagaaatcgtgggaaatatggtttaggctataaacccactcaggcggatataaagagaagcatctcaggaagaaagagcgtgggtcaaagctcgcggttgagacaagaaagtgaatgaagcccgccctgccacataagtagaagctttataagcgcgggtctgggagacgaaggtcaagtggtcacgatatacgaagatgatgttccgagtacattggatttggtatgaccatgccctcctgatttccagctgggaaattggcgagtggaggaacgcccctgcatttacgcaacgagca

SEQ ID NO: 146168 - DNA, 396 bp, Glycine max
catgcagcttgaggattattgtgacccatcacattttgtactaggcggcggtttgtcgattgtgcccaacaagttatccacatacacaaagcgcacataaacccacaatactctgttgcccacctacaactgagctcacgtacttccacagagcccataagcttttttctttaaaaccagggtccccataaatcctcccaagcttcccaacatcgaagcaaaacaacattcaaccggacaagctattgtagccaagcaaaacagaaccaagggctacaactctggccaaacaccaaccaaatcacacgtttctcactttaaacccaggaaaattccttcgaccaattattaacccgggggtcacactaaaatttttcggaaagtctttaaaatata

SEQ ID NO: 146169 - DNA, 454 bp, Glycine max
  unsure (1)..(454): unsure at all n locations
ctgctaacccatggaagctcctaatatctcccacactttttgtggtgggccattcttggatggccttgattatctcagggtccacttggaccccatttctaccaactacaaaccctaagaaaacaatattatctacacaaaaggtacacttctctatatttgcatagatggtgtttttcctaaggactggaagaacttgcctgagatgtcctaagtgatcatctaggctcctactgtacactaaaatatcatcaaaataaacaactacaaatctacctatgaaatcccttaagacatgatgcataaacctcataaaggtgcttggtgcattatgtagaagcaaagcttcatgatgcaaagattttnttatgataacaaagatgatgacaaatgtgatgacaaaaagctcatacgtcaatcaaagaatgagttcaagatgttcacgatagaatca

SEQ ID NO: 146170 - DNA, 411 bp, Glycine max
tctatttttgttttatttatgattacataacattggtaattgtttatctatggcacatatggggtgactttgttgtttgtgtctttcgtgctgtaatcaaactccttccttgtcttcctggcactactgtttctggacttgtgtgattgcgacaagtcaaggtcatgacttgtgaataagactttcttctaattgaacttgatttgtcaaagggtcccttaaacatagactacactttgtgagactgggtatgcgtcttattccccactatatatggtgcttcataactcatccacacccactagtaccttccttcatctaggacaccatgccccactacttaaaaaaatgaaacccaattgtttctataacagaaaactaacggttaatcatcccgcatgctctttttat

SEQ ID NO: 146171 - DNA, 407 bp, Glycine max
  unsure (1)..(407): unsure at all n locations
taacanagaatggtttntacaaccttagcatgccacctctacttgatagatcatccattgngcttgaaatgtaattgacctacttaaactaaaggctactttaatttgttaggcagaaaatttagcaagagcagcaaagatcgaatcctagaccacttgatttattgctttgctctcccactacattgctgcagtgactacaaaggaattgatccttataaaatgcattatagtagcaaaacaaagtttgctatcatgaagcaatatacacaaaaacatggacttgtaacatacatcgcaagtgcggagaatggagatggttatgccaaatgattggntttacttaagaattccttctaattntttttgtttactccacaatatataaagtgatnaaagaacattaa

SEQ ID NO: 146172 - DNA, 364 bp, Glycine max
aaagctcgatgacaatactcctcattattctgtcactgctgaattgagtggtttgcgtgttactcattatatggacttttggcaattttactgatatgttgctgtcctacctatattttatatatagctctaatattggctctatttatcacgttatatccttaaatgaggttcagttacagcacatgtgccttgtgtgggattatatctgcacttgtagattaagagaaaagtaagttcattgctagaagctcgacttgaaatatgaagaaaaacatttgaaatattgttttcttgtttttcagagtgtacagcaagggtctatatttatatcccttggcataaaaacgtatgctaagattat

SEQ ID NO: 146173 - DNA, 441 bp, Glycine max
  unsure (1)..(441): unsure at all n locations
tcctcttattaaaattacgttcaacacgaacacaagaaatacttaaatcaaatacacactgaaatggaaatccaaacaaacgaatgataagatgtggtagtgatacctttgctgcatctggcagtggaattgtgcatgttcttatgtagaggttatttatatgcaaacaactttactgtctggagaaaggtaaacgaagttattgtaagatagacaaaacattgaaccttttaaccactccactttntaaagttctcagtagagtaggaaagcaccaattcaccaacaacaaaatgtgacactgttgctatcactgcgattgttgtgtttctttggctgtgttttgctttgtaaatattatacgtggctntntggtctgatggcttgtagctactacaatgctccgtaattgctgccaaatgcaccatatataattcacac

SEQ ID NO: 146174 - DNA, 321 bp, Glycine max
atgcgagcctttggagaatcgactaagaaattttctgtcttgggttttagaaagactcaccaacggcggaccttgagtttgatgagcctatgaaactcaacaaggggggacctttggttttatgagcctttggagattcgaccagtgacctgtccgacctggattttggtgagattcaccaagggccgatgttattcgtcttatacgactaacttttgtataaaaaacttttacaaaatgtatattaactccccatttatagttcttttgtagaatggtaataaatttgcttgttttgaactatgtcattaaaagctcttt

SEQ ID NO: 146175 - DNA, 381 bp, Glycine max
atgcaagactctaccaatattactctctggggtttatcttctcctcccatggctaatactctagaggatgtcgccccctctcacctcttctcatttatcttgcgctgcaactccatggctgaatatcacccatactaagaccctattgaagttcaaaaatcccctttatagaacctccctctagatttacataaaagatggagaccggaagtattttgttattcttatttattatggcttaatatagaataaccagtggcatggcttcttatgaaatggccttttaaaaggatataatttgtaatccccatattcatctggcaattcctcatggggttgaaaacctgggcaacctttcaatttttttttttcaaaaaggtg

SEQ ID NO: 146176 - DNA, 444 bp, Glycine max
  unsure (1)..(444): unsure at all n locations
tgtcacttttgtgagtcactcatgacagccctaagnttaattcaattggcgtctttatagaacttgtctcttcttaatacacttaagcaaactcataaataggcattaattgaaaatgcttatgatttgtgtttagaaggtttgtaataattaaagcatcaatggttttggactcaacaaatttcccataaaataagatgttaaaacaattatcaaagagacattggagaacattcaccatacaaggatagagagcacatatgaactaatcaaactgaatggtacacatattgaaataataagggactaaacaataaatatctaaacttcatataacccggttaaattacctgctacaaccaagtcgatttggtgaatcatcgtgcactgcccatttcanatacattctaacacttatgatggggtgaaggggttacattgttg

SEQ ID NO: 146177 - DNA, 354 bp, Glycine max
  unsure (1)..(354): unsure at all n locations
atcactttctgattgttaaagaatcccacatcgtatgcatactagaaaagatttgtgccgaaaaaggcccttgattttgaacacgatgctttggactttatcggtgcaaaatcctgccgttctgttanggatgcaaaaattgatgcttgaatctgatgagctttgcttggtaaaagatcaatatttcttagcttaccaacttgaaagtctagagcttttgtccattcatgtgtttactacaaactaacctcatttttttcctcggaattctggctacccctataatgctctgcagactgggatcgcttcccatgattagattgttgatttgctggatctggctttgtcatctga

SEQ ID NO: 146178 - DNA, 357 bp, Glycine max
gctccttaaacctccattaattttttttctttaccttctcttccattgatgtttctacatttttctccatgtatctcctcacatgtcttcgtctatatgtttctaacatgattctttatagttctcaccgattaaactcgctattaaagttaaatatgattttctatggttcaaaattcttgttcttgttcttgaaccatgaattttgttgagtttacgttcctctgagttttgtctcgttatttttgtgtggctgaaacctaaaccataaaattcttacaataatattaaagtataagaaaacctcataaatctagagcgacttcgtcacctattgtagatttggcatataagtca

SEQ ID NO: 146179 - DNA, 431 bp, Glycine max
  unsure (1)..(431): unsure at all n locations
ntccattctcttggaagttcataattcgatatggctncttcttgangatcttcattgcttcctttcccttttcctttagaatcttgtccataaatatgcactttttctaaagattctgcaatatcatctacaatatcctttcttggaggaataacattatactcatcaaaggaatcatgaatacattcttcaatagtcatagatctcttattatatattctataagctttactatgcacggaataaccaatgaaaattccttcatcttacttaccatcatacttttctaagtcttctattccattgttaatacaaagcatttgccaccaaaaacattaaggtgtgaaactgtangttttctaccatgaaacaactcatatggagtattctttatatgggtcttattaaagccctattcatgatatatcatg

SEQ ID NO: 146180 - DNA, 294 bp, Glycine max
caaaacaagccccaggtggactacattccaggaggaaagccctcgtgatatatgtccttctccaatcagtctccgcgtgccatgttcctgaataacacacgagatatcagtgaaggatactgagacatttaacgaacgaattacctgacttaatgaaattaaattatatggacactgagcaatgaaaaacacataattccatttcagagaacgagataaagaagcttgaccacttgcttgagacgcaaccatggaactcttggccacagtcaacaggtgaggaatttttgggaa

SEQ ID NO: 146181 - DNA, 291 bp, Glycine max
acacttaaaactccgcttcgacatcaccttctagccagtggattgtctagtctttctagatgtagcatctgaaggagtatctgaatgtggaggggaggttggaggtattgtcatgagactacactactgaaacaaataaagtcaccatgacatggcttttttaacaacatataagcattaacctgaaaatattcatatacctataagtattacaactattgcgatatgttttatactttaccatgcaaacacataagcaattaccgtatgattattctcccataaaccttc

SEQ ID NO: 146182 - DNA, 454 bp, Glycine max
  unsure (1)..(454): unsure at all n locations
ttaagtcatctgcacgctgcaagcttcttgaacgtgatcaatacattcattgtgtttttattgaaggatgaagttgtggtgcgtgatctattttggtatcacccagatgcagtaaagttatgcaatgcatgtcatctggtgttttttatatacaatacctacaaaacaaacatgtacagactcccactacttgactttgttgtggtgacaccaacgacgatgacattctctgatgggtttgcatatctggaggctgagcgtgttaataatattgtatgggctttggaacgatttcgaggcctatttttaagaaacgatcgcctctctgttgttattgtcattgacagagacctagcactgatgaatgcagtgaanactgtgttcccggagtgtacaaatttgttgtgcaggtttcatatcgacaagaatgtgaaggcgaagtccaaatctttaa

SEQ ID NO: 146183 - DNA, 430 bp, Glycine max
  unsure (1)..(430): unsure at all n locations
tcgcttctataaagaataatacattntactaacattggcattacacttttttagtacatggcaacaacttttgaggaagcatgccttaatttggcatgccaagtaggaaagaatacatctatattaaaattacctgtatgtgacacctaattacatgtttagtattgacaattatgaattatgataggaagatgaagttgaactacaaggaaatttatcaaacacaatttgtacaaatggagaatttgcaatgtgaatatataaattgtaaaggagaaagaagaaacaatagtgggattttttgccactaattggtcaaacaagttctaattctataaatatatcatagccataattgagagaaagaggaananaggggttaagagttgagagaaactataatgagtgtcantttttatttattatgtat

SEQ ID NO: 146184 - DNA, 344 bp, Glycine max
  unsure (1)..(344): unsure at all n locations
tcttttctctctattactctcaattgttcttcattcttctttatctttacactgttgttacaccattttcttcacaacatttcatgtgcttgcattggtgatgatcatggacggtaaaaaataatccatccaaggatccactctaagcaatgatgaatttgagttctggtttggtttctatacctcttgngaattgttctctttctctcaaatcctattttcatttaaacagtgattaagtgatattacaacccatacgaaaggtggattttatttaaccgctaattaaccaaaattccggtttaaccaaccggccaaaactttgctttgaacaaaaaaaaaaa

SEQ ID NO: 146185 - DNA, 419 bp, Glycine max
ccctattgtatcttcatgtatttaggcatgtgggtgagcttatctattggatgggtgttagtaaccctcctttattttctctaggaagctttcttcctctagcctcccaaggaagctaccttccttgcttctcaaggaagataggaagtttcccctgtgctacgctataaatataaacatgtgtaacacttgccactaatctgatgaatgagaaacatgtgagacaaacttcaaagtttaactattctccctaatctccttcaattaccacgtcccccaccctctctgtcattctcttcctccattaaagcttcctactctagctccttattcaacgcacttctttgtgggtgaagcttccactttcatggctgaatctctagtggatggcacctcctctcaccttttctactttatct

SEQ ID NO: 146186 - DNA, 355 bp, Glycine max
  unsure (1)..(355): unsure at all n locations
ctcatgcaacttttttagtntgggctatactagacatcttgccaaacaaaaacaggttagccataactcgcttgtgctttttctaccatgctatatagagcaaagccattgatcctatgacgattgatgaactggacaatgaggcgcaattatactgtgccaagtagagatgtattatccgcctactttctttgacatcatgattcacttgaattgtgcatctggtcaaaaaaacaaaagttgtggacttgtatatctacgggggatgtacccgattgagcgatacatgaatatctttaagggtataaaagaattttatcttcttaagcattattgctggaagtacattacgaaa

SEQ ID NO: 146187 - DNA, 376 bp, Glycine max
tcggtcttaattataacaagatcgatgctcgtccaaaccattgtttgttgtctttgttgtatgatgcacaaagttaggatgcttgtaagcattgcggtacatctatatggaaacccaaccatacgaagacaatagctgcatagggtttactttactttccatcgaaaccaagattgcaaagattgttcacatgtcgtaatgactgctaaagatttgagatggcttgttctggatgacacataagattggttgttatgctcccaagatatctgaaggccgggacacatatgatttatccattctgagattctttgatcctcacaagttcgcttggccttgttccgatggttatatcctgctggaccttgagtctacc

SEQ ID NO: 146188 - DNA, 363 bp, Glycine max
  unsure (1)..(363): unsure at all n locations
ttctcatggtgcagtttagattaaaaataaagttaccggcaaagtctttaaagtgaacagtcaccaactcaagctttttcatgagagcccccaagtggaggatgaatntgtggtgaacctctctttaatctagccaaatttatgagatgatgtgccttgaatggcacatgaggaagttcctttcccttttctctctcttcgngtgcacttcattacatgctcacattgaagacaatgtgcatcttatgtgtgggggaagggtttagaaaattctggttctctatttttctgttatctctggtttctattgtaatgttgacacaattatttgtccgaatatattttagattctattagctgtat

SEQ ID NO: 146189 - DNA, 351 bp, Glycine max
tgaaacccagctctaggactgaaacagagaatctcgtgttaaaaaattcattattctttctgcaatttttcttttataaatccttgtaaagttaaaagaaatctcaaaataccttgaacatattgagagaaaaggactaagcacttatttgtatattcgtctataagacatttctacactactacaatttatagattcaacatcgcaaggttaacatcggttattcacaaaaccgatgttaacaaaagcacggagacatctttgtaaataagtagacttagttaacatcggtgttggaaaacccgaagttagtatctcgttaacatcagcttgggaaaaaccgatgttatc

SEQ ID NO: 146190 - DNA, 399 bp, Glycine max
  unsure (1)..(399): unsure at all n locations
catgctatcatacagggattgttttttgttatcaatattttgccatggaanttcttttgagtatacaaaagaagccattcttacctgcaatattcttacatattcttcttggaacctgaatgtgacaattctcctgtccaaggattggtaatggtagcggaggttctggttttcctcaagtaagcgaacatactcaagatggaacccctcatattgtcttctcagagcaactatattggctttcagaccatctacgtcttttgttttgactgtaataatattcaaggcggctaagttcagctctcaatctggctctttcttcctccacagactaaatttcttctgaaattgaactttccatcttaatccctctggtgttttcttacagaatccatgcct

SEQ ID NO: 146191 - DNA, 364 bp, Glycine max
ttaatactagctgctttctaatataaatcattttggaaaaaatttgttattaaagttttttagggcctaactaaataaattaattgaattatgaagtagcaacattttgcagactaatgtgtggtagcatggcaaaatgagttatgttactatatgcgagtacagtttatcaatacaactgatagatctaaaatttaagagagcaattatatgaatgcttgacaaaattaaagccacaatcatgaaaaattggagtggagtaaaaatttacactgagaaaacactggagaatgacattgtacatgatttgaagatataatggttatgtgacatagtaaatgaaccattacaaaaggtgtatgag

SEQ ID NO: 146192 - DNA, 323 bp, Glycine max
caccatctaaggcttgccactgaaaatggcctgcgagcaggtatttaaccaatcttttgcctctccatctatagaatgaagaaaaaccctttgaaaaattttatcttcttggacatcaagaggcttaatggtggaacaaacaatatggaactccttaagacgctaatgaggatcttctcctgcaagaccatgaaacacccttatcaggatattgaatacactagctttcttaagggaaatcaagtgcaaccatctctctaagagtcctctcacgaggtggaggttgagcgatgttcttaatatgaagactattagtggaatgc

SEQ ID NO: 146193 - DNA, 359 bp, Glycine max
  unsure (1)..(359): unsure at all n locations
cctcccctatgtgtgctataaatatgggaggtgggctgatttataatggntcatcaccctcggaatccaaactttacttaaaattagtgcacgacagaatacagaacgagaatatcaatgccgaggcacaacaaggatgttgtgtacttatttgatgaagagtgcttaagggtcttccattctctataagcccacactattactcgctctgtgattatagctcaaatttttagttgcgaatcagtactcatagtgcttcgtacccgactattcatttggcgcaatgttttgacacagataatgtacggtatgtcttttcttctttatatcactccgactcgattgacctcattgtattc

SEQ ID NO: 146194 - DNA, 332 bp, Glycine max
ctgtgtcagcataacaggattgagcttgctcttgttttggttgcatgtttatcctctggctggataaactctcacacaaatccatcggagtcactcccgagtggaatgtgcatcacatcttgcaatcctaacatgttagcatggtgcgcctcatgacattccgccttgctgaaggcagttatgtcatttgcaaaacacatgttggtggtcgcgaatgctgtctcactacgtcttgcctccctcatatgtgacacttaagagcatgctctcaggaaaccgtagacctcttactccgccgcaaaacttacatgagccacattcgacacataatt

SEQ ID NO: 146195 - DNA, 279 bp, Glycine max
taatcacttaaagcactcaccctggaatgttaatcactttttgatcatggatacacacttgccacctactggattgtgaaaatgtacccaatgtaccaaagatgaccttaaacttgacgaacattccgtcgacaaattacacatttcttcatcttagtaaataataaaaaaaaagtcccagatggcataaagtatttacacaacaagtatgtacgacatatatctcatgttaagaacatgcccggcatttttttcagcaggggcccatttaaattctaa

SEQ ID NO: 146196 - DNA, 459 bp, Glycine max
  unsure (1)..(459): unsure at all n locations
tggattctacgactacatcgaaccgttgaccatgtacctttacttcntccgtgaacttgagggtgaccgcacctctatgaggggtgaaccactcgggaagaggactgtggaatacgccacgcttggtgttgctactgcttttgtccctccaccctatcatcaccacaatgggtactttggtgctgccatgcccatggggacttacgttagggaagcgccaccaaatacagccttctcccatcaccaccaccaccaccaccaccaccatgctcgtggaatctccaatgctcatgaaccaaatgctcgctccatataaaattatataattatgactacgattcacaacaagacttgatgatgattagcttaactctcagtaattggtgctagagtactactgttgttgaggatactctattttataattaatggctgggaacggagttagtatatctctat

SEQ ID NO: 146197 - DNA, 328 bp, Glycine max
  unsure (1)..(328): unsure at all n locations
ntagntgattaaaatagntgaattatatataaaaaaatgatctntcattatagaatgggtttggcatgcaacgcacattatatgagttgtgttgttattcgcttgtacaaaagttattttaaatatttgacaaactatcgacaaaaatgcatttcataaactcaactcatgtcaattaccaaccactccgaaatttcaattcctaaattcgtaatgacacccacccctgaatcaagggtgatactgaccgattgttctgttttttatacgtagttgtctttctaaaaagctatggatgtccaaaccagtactcgctgatgggtggaca

SEQ ID NO: 146198 - DNA, 332 bp, Glycine max
tgacagtgattaatacttgtaacttgttgaagttaatgaaacttggtggttagccaaaaactggacatatggggggatgatgcaatcctacccccaagggcattggatataagactccaagaagaatgggtcaaaactacttgaaaaaagccctatggttaagtttatggcccatggactatatatgagctcacttatctctgtacatattagattaaggtgtcattattttttggccttgcatttacggctccatagtgtagggagggtaccctactaaagtaggatctttctccctattatattacggcacaaaactattttcgattagg

SEQ ID NO: 146199 - DNA, 398 bp, Glycine max
gctcctcaaggaagctacctagtctataaattgaagcatgtgtaactcttgttataactttgatgaatgaaagtcttatgagacacacttcaaaattccacttctctccctctattattccttcaatttcgtgctcccccattctctctttcttttcctccattaaggcatcctcttctagcttcttatcgaaggcgcattcttggtggtgaagctccttcttccatggcttattcccttgtggatggtgccttcccttttctcttttccttttccttccgctgcatcttcatggtggaaaatcaccattgaagctcaaagatctagcctccatagaagcttcacaagcaagcttccatcatgggccctgtgagtgcctaactttactggagtttaaa

SEQ ID NO: 146200 - DNA, 407 bp, Glycine max
  unsure (1)..(407): unsure at all n locations
cttcagaattcgtcttcgccagtgaaatgatcaatgtatgtcctaaaagaggcaaatttgatcatcctactangacgactgagnaaactggggcaaatgaagatggtgagaaagagggagaaacccatgctgtgactgccattcctatacggccaagtttcccaccaaacccaacaatgtcattactcaatccataacaaacattctccttatacaccacccagttattcacaaaggccatccctaaatcaaccacaaagcctgtctaccgcacttccaatgacgaagaccacctttagcacaaaccaaaatacacccacaaataggaattttgcagcaaaaagcatgtatggttcaccccacattccagtgtcatatgctaaacttgatcccatatcactcataat

SEQ ID NO: 146201 - DNA, 399 bp, Glycine max
  unsure (1)..(399): unsure at all n locations
agcttctttaagaagattcctaaagaagctatagcttatctacacatttcttntctaatagctaagctcacctccttgagatgagaagctagagcttatctacacacccctataatagctaagctcacccgcatgacaaaaaaaaacatgaaaattcaaaaaaaatagtttttactacaaagacttctcanaatgccccgaaatacaaggctaaaaccctatactattagaatggccaaaatacaaggcccatacgaagaaaaaaacctattctaatatttacaaagataagcgggtcatgcttagcccatgggctcgaaatctaccctaaggctcatgagaaccttagggccttccttggatctctagcccaatttacttggagtcttctacccaatg

SEQ ID NO: 146202 - DNA, 449 bp, Glycine max
  unsure (1)..(449): unsure at all n locations
tcttccattttacttnttgggctgcaaatcaagaatttcgcataattctttaatggtcttaattttgtgggattaattaagtttttcaaactattagaaaatatgcattttatattggttatttatgactttccacatcggtttttaaccgatgttgaaagtattatcgttaacatcgattttctagaaccaatgttaacgtagaatggacaacatcggttatttaaataaccgatgttatataataagaattacaccaaaaaaaggtatgaatgttaacagttcacatcagttttgtgttaacatcggttttatgttaaaccaatgttaacttatgcattaacatcatcagtttttgtagaaaccgatgtaacatttgttatgtaacatcagttcactcacaagtgatgttacgtataattaacatcggtctttgtaaaaccgatgtg

SEQ ID NO: 146203 - DNA, 418 bp, Glycine max
  unsure (1)..(418): unsure at all n locations
cacctgcngcatgcagctcgttaagaacttagaaaaaatcaagaacaagcttgttcgcacatcgttcgtgtgtatgacatccactccacaaggtttgaagtagaggagaccttcaatcctattacgcaacgtggcggacaaaagtgggcaattaacttgaatggtcattattgtcaatgcggaaagtattatgcgccttactatccatgttcacataatattgcagcttgtggctacgtgagcctgaactactaccaatatatagatgttgtttacacaaatgagcacatcttaaaagcttatccctgacccaactacaattcatgccaaaggttggccaaaatcaacaaggataatgaatgagatggattgggtcgaaccatctgaacactgacaaaaatgccataaatgtggagcc

SEQ ID NO: 146204 - DNA, 436 bp, Glycine max
  unsure (1)..(436): unsure at all n locations
tagcgtgaagaaggcccatgaagaagctcanaggcgcgtgatctctgccatactctctaagcctaaatgtcgctgcactcagcgcatgatcatcgtcatacccgctaatcctagaagggcgcgcttagtgttaggtcgcatgaattttaagctaccttacacctattaaaagagtatgaagcaaaggagaaggacacattgagacttagagctctctattgaatacacataaagtctgagcatctctaatagaggaaaccctctttctttaaccattctcccatcctccattatccatccctcttcttcttccatcctcatcaacccctaatgtgtaacgcctcttatggcattgagaggctaaacccctattgttgggagcctaacagctaatgcgctcggaatgtaatctcttcttactatccactataatgca

SEQ ID NO: 146205 - DNA, 412 bp, Glycine max
  unsure (1)..(412): unsure at all n locations
acctgcacgcatgcaagctctgacatcttcctgcatcttaggccagatgatattgatcncntcttccttgccagagtgctagttatacctgcatgccctccaataagtgagctatgatattcttggagtatnttgttcacaatctcttcctcagcaggtattactactctttctatccaatacagtaagccttccctaactgttaatgaactgcattatcaccttgcttgtatgtctccatcaactgtgtcaaatgaggatcactacatagtcttatctctcaattctttcaagaagatagaatgaggttctgaccatgctagcataaacattcttgataaaacataagctgctcgattatcttttccaggcttatattcaatatttgaaatcatactcctaagaatttgtg

SEQ ID NO: 146206 - DNA, 414 bp, Glycine max
tgctggagaatggacagacaagtattcggcatcaaaatgctcaagccatatactttttacctgattctttccatggcattagctgaggtaagacctgtggacagatatgttggaaaattactccctgaattagcagtcttgttatttaccctttccttaccattggtgctatcttgaagtgtgcagttgcaaagattggctttgagaagatacaagtatctcaaggttttgaagctcttgctcgtgcccagtgccttctaagaagtaaaccgtctctagcataaatgacactgctatctcatgtaagagacttttttgaagtgtgtgtcactaaagatctcaagttaatagctgattggctaatacatatcttatgatcgagatattgggttataaacttgaaccctccattca

SEQ ID NO: 146207 - DNA, 423 bp, Glycine max
  unsure (1)..(423): unsure at all n locations
agctntaatttcgtgcaataagaaatgaatgttttagacttcanaagattttcttcacaaaggccaataagctatggtgtaagctctcattgacaaggctttgtgacacttgaatgacccccttggcagccaattttaacctaccaagccataccacagatgggtagtttttctttttgctaaactaccgaaaattgaaagggtagattttgccaaaaatgagtatttttgcttcttatcaaaactagtaaatctttttttaaccgcctaagttattatgctaatatcccaaggaatacatgtacccaaagtgatcctcacacaaagaacactctcacacaaagttaaattacactattgcttaatgcacgatgcaattttgctactgatggaattttttcactgaggcaattctttttgaat

SEQ ID NO: 146208 - DNA, 463 bp, Glycine max
  unsure (1)..(463): unsure at all n locations
tcaacgggatccatggacccatggcatccctctatgatctttaattagcaaagttttataccaaagagtagcaatccattggcaccaatggttcatgtggttgatcctgaagccttatatttccttgatgtgcagagtaatcaaagttttaaacaaaaagaaagggacgaaccgtggaatcaatattttggttgattgattaaatgtcaaatggctccactaccattatccaaaatggccaagcaattgaatcatacaaaatatacattatgaggaagcctctaaagagatctgcaaaagataggatgaggttgcatgaatcatcacatcttttagaaagaaatagttaatttgtgtgtttcntttttttaaaatagacccagaaaagtataacaagagtgaaagaatgtcatgggcatttgcacggttttatgactcaaaaccttttgcattgcattgttac

SEQ ID NO: 146209 - DNA, 452 bp, Glycine max
tggttcgaggtacttacccgttgatgatcgaagaacgatatataacgaatgaagaacgtctaataacggtcgaaaccttcgcgaaattccttacggaaacgtttccgaagcgcctcggctcggattatataaccctatttcacttcacttctccccctatttatagaaaattgggggagaagcttgccacccagctcgcccaggcgagctcagcttgcccaggcaagcaaggttgcttcctccagaagcaacagccttctggaggaatcttctggagggcccaagtgggcctgtgtgctatatgcacccccattcttactatgtacaccccctgcctgtttttggtgattctgttttcgtaaaggtatggaaacgtacgaatttccgcacgatactgggtttctttcgaatggtacagaacctagcggatacataaccatcccctctttgac

SEQ ID NO: 146210 - DNA, 382 bp, Glycine max
aaaaatgtgattcttggtatcaagccaaatattctttacagggttttactacatgtattgaaagagaaactaacttgcttgaattggttcatactgatgtatgtgataataatgatgtgttattaacacacggtggtaagagatactttattactttcattgatggattctccaaatattggtatgtgtatatagttcatcacatgagttgtttgataagttcaaagaatataaaacagaagtagaaaagtctttagaaagaaaaattaaaattctacattctaataaaggtggagaatacacatctttagacatgagtactttttgtgaaatgcatgattttattcatgaaatgaaccctccgtttgctccttaatctaat

SEQ ID NO: 146211 - DNA, 456 bp, Glycine max
  unsure (1)..(456): unsure at all n locations
taagggtgttcaggggaatanaaagttggttaacacagcctttataatgcaaggatgtgaggcatgtatagtgtgggcagacaaaacttcaaacagttgccaagaatggaccaggatatcaccttaatggtgtttagagaaaaaagaaatcacgtggtaaacagggccaacataaagtgtgcatgtgaagaatgtacgatagcatcatataaaatttcaaacagtttccaagaatgtgtaccaagatataagcttatgggaaaaagaaaatcaattggtaaatacaaccaactaggaaaatttattcgtaaattattgaaaaggggcaaaaaagtaaccanagctacacacttcaaattcacatatatggaagtcccccataaaagaatgccccattgcaaataaagttaataaaaatcatataacctcttgtcacatgtgatataacaagcaagc

SEQ ID NO: 146212 - DNA, 170 bp, Glycine max
tgggcctggcaactcccggaagggtcctttaacccccttattctaagtggaatgaccttaatgctacatgtaagcaccatgagggtgtcccggggcattctcgttcaacaaagtttggtccttattatcaatcgccaacatttaatggatgcccggtggctgacttttca

SEQ ID NO: 146213 - DNA, 274 bp, Glycine max
cataggtgtagcatgatgatgaccagtagcaaccagttctatacgcgccaccaccacctctacgatagacaccatccctggagcacatctttgctcacctgtggaggatagagctccacatgcacgcatatatgcaacatgggactggccatcaggcggctaattatatggctcaggtgcagtagaatgagagcatctaccggtacatctttgcaccatctgagcctagaccctaacctttcccatggtctatcccgagcaattcggggccaca

SEQ ID NO: 146214 - DNA, 294 bp, Glycine max
ttattggtgaccacagagtggtacctggagatatgtcgccggggtcaagaaaccttggggacatcaagtggggtgctattggccataaccaagcttgaccaattccgacccaacccgggcatagtcggtcaaggagaaccttgtgatgttcctaaacaagcgagctcctgtctggcaacagaatataggaacaaagaccacatagccaggaggcttgttgtggctggccaactgtgaaattttgtgtgatatgtggattatggcctcttgtaatcgactacacagggtgaggta

SEQ ID NO: 146215 - DNA, 258 bp, Glycine max
  unsure (1)..(258): unsure at all n locations
ctngaataatcaagaatttcatggtcaacctcaacatgttgtcttacatcatgaggaaataagaaccttaaaaactacattgccacatttgtcaacggaatatattatcttaaccaactattaggatgttgtagaagttccttatacaaatctataaaccgatatgatgggaaagtatatgttcatgatgaggacaccattgtctgttatttatgtggaaaaactagacacatgacgttcacatgcaacgatcgttct

SEQ ID NO: 146216 - DNA, 423 bp, Glycine max
  unsure (1)..(423): unsure at all n locations
agcttatgcgcatatttccttacgaacgttcacttgcacaagacattctattaactaagaaaaatgcacccatatacaatcaaggcagcttcgttacctatattatttacatgtacttccaaggtgtatttgttacctacatcacacacatttcctttgctaaattcacatacatgcatactctaagcactttggctatcgaaaattgcatacgtgcacatccttgtatttctaatacctatacatacacaaactttatgataaatcttgactatctacacaataaggtgctacatttcatgcttttttcaagtntttgctacctaaagccgcatgcaaattcaagtatattttcttttgctgactaaaattgtattcaaattaaaaggtatttttgtaatgtatttcatgcaacatatttat

SEQ ID NO: 146217 - DNA, 419 bp, Glycine max
  unsure (1)..(419): unsure at all n locations
tcactnganattaagttatttaattatatgagttcttgatttaatcccaactttctctccccctttggcatcaacaaaaagccaaagtgcgtatagagacataaaatcatacacaaactcataatcatccaaacaaggaagataataatgcatacataaactaagcaaggatgataataattcattcataaaatataatgtcagataatttagagagtcatccaagataaccaaattaaaacaactaagttagaaagtaacatactaataagtgtttcaaaacatagccaaatacacggctagaaatcaaaatgctagtaataatagtaatgtctaaactgatggtggtagtggaggtaaatcaaagcagtcgcaaatgatggtgacatcttcttcaacctttgcaatccttaagttca

SEQ ID NO: 146218 - DNA, 446 bp, Glycine max
taagtcacctgcgggctgcaagctcgaaagagcccgggtagtcaaagagatattcaagtccatagccatcaaagtctgaagagagtatgatgaactaagggacgtcaatatggccaccgctgaagccttggaacgagaaaccaagaaggtctgaaaggaagaacacgaccaaaacaagttttgaggggctttatagggcaccaatagtgagctcaaactccgaagaggtgaaaggaatcatcacgggtcaaaggcatgatctggaaggacgagctaaaggcttgccttaggtcgaaaagaaatttgtcccaacagttaaggtgagactgaagggaatatgtgggccatcatcgataagtgcaaagagaagctaaatctatcggcgactcacgagcaaaggctagaggatgagtacgccaagatatcactagaaagggaagcaaggg

SEQ ID NO: 146219 - DNA, 409 bp, Glycine max
  unsure (1)..(409): unsure at all n locations
actcagcttttatccaagcaattcttggtggtgaagctccttcttccttggcttattccctattggatggtgcctcccctctcctcgtctcctttgccttccgctgcatctccatggngaaaaatcaccattgaaggacctcattgaagctcaaagatccagcctccatagaagccccacaagcaagcttccatcatagccgcaattgatgctttccttgcatatcaccatagcaaagagagcccggtggtagctatcttggcgggcttattttacacatttgactgaagatgcgaaaagagtatcgcacggatcatctgttgtttacccgctctatccttgcatatcacttaaagttcgtagaccacgtcttttccggttcttctgatgatttctctcaataaaccgt

SEQ ID NO: 146220 - DNA, 414 bp, Glycine max
  unsure (1)..(414): unsure at all n locations
aacttgataaagtcttcttgcttgatgcggctggtgattatgtcagctacttggtctatatacttcacatattatgcatgtacattctttctttccatgcactcctttatgtaaggctaataggaatcaatatgtgttttcgatcatggaacactaaattatttgtctaagtaatggctatattattatccacaaagaacttggtcggctcttcttgtgacatgcctaaatcttttaacaaattcctaagccagactatgacaaacacatgaagtagctnctacatgttctgcctcacaagtcgaaagagtgactatgggttcgttttttgacattcaagtgaaagttgtgatcccccgtgaaaacacaaacccactggtacttttgttatcattttcatcttcagcccaatcg

SEQ ID NO: 146221 - DNA, 144 bp, Glycine max
ggactataataaagcttggaccatcgtgtcttgtgtttggaacagttaattgaagcgatcttggttgatttatttaatataaacactggataaatgttacgaactggttgctctcagggtggacatattttggacaattccaca

SEQ ID NO: 146222 - DNA, 435 bp, Glycine max
  unsure (1)..(435): unsure at all n locations
agcttctatcccaaatcctgatgaattgcgagattgatatcaaaataagtttattttttattggtttattaatgaataatgattaatctcaaaataatttatgcaggtttaacaaaaaagttaaaatttggaaattaagtttaagcacttacaaaagaagagaaagagacttgagacttccagatactacgatcaagttcattntcttgacaaccaaaattaggctttattgttttagctcattcttattttatatactcatctttatagcgctttatatattataatttttaatttcatacaaaaatatatataatacgtatctcaactagaaaatatgaattaagttattcaaaactttaaaaaaagagaagagttgaagctctaattgcattacaaaaaggagctatggataaatttatataaatagatgag

SEQ ID NO: 146223 - DNA, 361 bp, Glycine max
gggctgcgacatatgcagttagtaaccaccacatattgcacagcttcgttcaaagtgaaggagtgacagtactttcacacacattgtaatgcttggtatgttacagtgcatactcaaaatggttttattttgatccaaagcatgcctgctctttctgtaacttccacttcccattcttgcatgcattctaccatccttgttcgtcttaattatggttagcgacaaactgctcatgctaccttaagcatctgtctgaatatatgaactgcataccatggttcttaagcgtgtgctgacttaatgtgattgagttaacaacctacgttccatacgtttctactgcgacctcattataacttct

SEQ ID NO: 146224 - DNA, 409 bp, Glycine max
agcttattgtgaaagtatgtcaattataaaaaacgacaacaggatgaagctatattcacctcatccataattttttgtttatgaaaattaagtaacaaagagcataaaattggaattgcaattgttattgcttaatacaaagttgacacacctcacgttaacaaaattctttcactaaggtgagagtgactttttgaaagatttgttacaaagggaatataaaatatgtaaaattgaattaattattaagaattgtctataaaacaccatttcctcctccccttctgcttttaccaccacaccacataaaaacaccttgcaaaatgtgtaaaattgaattaattattaagaattgtgttgactctaagtataattagaaggcaaaatagaaaacctgaaaaaaaaaaac

SEQ ID NO: 146225 - DNA, 163 bp, Glycine max
gcaactttaacctctcatttgctaataatgggctgctccatagacctattgttatagcctgtcctctcaagaattccaatgcgatagaatggaattatatcatttacgtaaattgagagaagatgctggcctccatacaccacgtctcagatttgccgaaaca

SEQ ID NO: 146226 - DNA, 296 bp, Glycine max
tttgctagagaactctatctctcactatggtccttccaacagaaagagaatcgcatgtgataatgatatttgaggtggagtattatattttgtggatgcggcatctccaaatgcaccacagtgcgatgcttaatctacacttaacctccatggggagggtttcaagaaggtgaagagtcaagtccatagccggatctgcatggttcatatataaactaacctggttctaaattcctgcttcttcccacacgtttctaacttgttggcagccaaagaaaactcgtgcaatggactcc

SEQ ID NO: 146227 - DNA, 373 bp, Glycine max
  unsure (1)..(373): unsure at all n locations
ccctctatacactatgttgtaatgattctttctatacaattcctattgtcatctctttgattgaaacaagagtcatttctaaagagccaaagctcatgcacagtttctgtcaaagctaatctaacaagtncagatttccagcctttacctccatagcaattcaaaatccaatttatctcctcattccaaantcttggagtatgatggataccaagcctatgaagtatttcaacccagaacttcttctacataaaaaaatcaaagaataaatgatcaatggtttcaacctcagcacaaaagacacattgattattattcaacatttcaaaccgatgcaatctggcctttgtggctaaatttccatgacagatca

SEQ ID NO: 146228 - DNA, 334 bp, Glycine max
ctgagttttgtgccatgaatgtttatttcttggctattccacttctcacaaaggctacaagtgtctctcacctaatggaaaactgtatgtgttcaaagatgctgtcttaatgagcttaaatattcctacaatgatgtttttccatccctatccaactctgtcactccatttaagagtaactttttaccaactgctcatattcccattgtttcaccttcttctaatgaacccagtctttcctcttaaactgctgaaactaatcctccttctataaatgctgaccctcctatttcccttaatgctgaatccaccaatttcccaaaaagtaacacta

SEQ ID NO: 146229 - DNA, 255 bp, Glycine max
ttatacatatgagtattacaaactctatcaactgtttcgttctactgcaacatactacccaactacctaaccaactatcccttggtccatacaatgcatgactcaacctatccatgcatgcagctctacatagagagaagtcttcctgccgcatcctacttctaacaatccctaccccatcaaaaacaccttgtcctcaatgtgttggatgcacaacaatagaacatgaataaatggaagctcagcctgtgccac

SEQ ID NO: 146230 - DNA, 339 bp, Glycine max
ctgaatatctgctctggctgagtgaggagagagataagctttctggttttaaataaaaagggttatcccctttttttttccattattttattcaagctctgccacatgtccctatttgataggaacaaaaaaggcccactttctctttatgactgtgacccatactcagtcacaaaagtgagaaaaatctgacctttgaaacgctacaatcctgcctcggtttgcgtgccgtttctctgattccagtttctcgcgtatctctgcgtccgtcggggccagttctctaaagcaagcaatatatatatcacaacgctcagaataaaacccccagcgtggttc

SEQ ID NO: 146231 - DNA, 304 bp, Glycine max
  unsure (1)..(304): unsure at all n locations
tgaggtggagtgttagantacatttatctctacatcatcttgtattcattattacatagaaacatatgagtctgattgatatgtaattacctaataatcagcaacttgattgatatgttaccacgatcgattctgatttcctccatctataataaagaagagattcaagacacaccacactacaatataacaccgttatagttcccccaagtgtcaacctttttaacaaatctacactaccatgttgtcaactagcaaacaatttcactcctataatgaccaataatttgtataaaagaaaact

SEQ ID NO: 146232 - DNA, 422 bp, Glycine max
  unsure (1)..(422): unsure at all n locations
tctcaggaagctacctantctatagatagaagcatgtgttacactagttgtaactctgatgaatgagagtcttatgagatacacttcaaagctccacttctttccctcttttattccttcaatttcgagctccccccttctctctttcttttcctccattaaagcatcctcttgaagcttcttatccaaggcaattcttggaggtgaagctccttcttccttggcttattccctaaaggatggtgcctgccctatcctcttctactttgccttccgctgcatctccatggtgaaaaatcaccattgaaggacctcattgaagctcacagatccagcctccatagaagctccacaagccagcttccatcatgaatgaagagatttctaatgttagtgtgtttaagcccttcatgatggacttg

SEQ ID NO: 146233 - DNA, 424 bp, Glycine max
  unsure (1)..(424): unsure at all n locations
agctcgngcaaatcaaatcactcctacattttatctctagcatgcattgtatggtgggctcgacctttgtcacgggaagcccggaaggccatatcaccttctttattgacacatggggcactgcgcccccaaatgctcgagaaagaagaaaaaaatttcccggctctcgtgtccgtaaaatgcatacatatcatgcatcgcataagcatctcttcataacatcataatggacatatcctgcatttgtccgttatcatatttcagcctcacattgtgcatgagtcatggaatcatcatgcatatgcgttcaaagaactntttaatctgcgaaatagaataccatcttgtttcatccttgcgtttcctctacaaacaacacaaagaagaggaagcgtgaacttcacactacattcttagttcatgt

SEQ ID NO: 146234 - DNA, 461 bp, Glycine max
  unsure (1)..(461): unsure at all n locations
gttgtcctcatttcttattattgtattatagactatgttctatgtctccatttgagtggagcaaaaagggcccactttccctttntgactgtgacccatactcagccacaaaagtgaggaaaatctgacctttgaaacgctaaaatcttgcctcggtttgcatgccgtttctatggttccagttcctcgcgtttctctgcgtccgtcggggccagttttcgaaagtaaccaatatatatatcaaaacgctcaaaataaaaccccgagcgtggttcaaaggttggtttcgttaaattctaagtcgcacacaaaacgatgatttttaactaattaattatgaattaacccataacctcccagttatggatatctcttccttaattagcctaacccgcgtatcttgcccccactactcctatttctaccaagaacatatatgcatatacactgaataatactta

SEQ ID NO: 146235 - DNA, 450 bp, Glycine max
  unsure (1)..(450): unsure at all n locations
agctaacaaacttagaaatcaagtggtcttatattccgaaatatagggggagtaaacgcacattttatctatatacaattgttagctgcttgcttgaatcttgatttcaggtattgtattgtcatcatcaaaaagggggagattgtagatgcaaatgcctttggtgtcttgatgatgatcatgatgatatgatgcaattgatgcaaatgggcttttcaagattaccagcagttaataaacgttttaattcaaattttaaaagctgtaatcgattacacaattcctgtaatcgattaccagacaggatcttcatataaataattctaagagtcacatcttttcaaaggctctattcttgaccaccaatggtctatatatatgtgactganacacgaatttgctcagagattatataacaacatgtgtttatcctctcaaagagcataatca

SEQ ID NO: 146236 - DNA, 466 bp, Glycine max
  unsure (1)..(466): unsure at all n locations
tcaagaaaaagatggcctcagcaaattccttattttcatataggaattctatcaatagacctccaatctttaatggagagggttaccactactggaaaacccgaatgcaaattnttatcgaggcaatagatctaaatatctgggaagccatagaaatagggccttatatacccaccacagtagaaagagtttcaatagatggtagttcatcaagtgaaagcataaccatagaaaaacctacagatagatggtctgaagaggatagaaaacgagtacaatacaacctaaaagccaaaaacataataacatctgccctaggaatggatgaatatttcagagtttcaaattgcaagagtgctaaggaaatgtgggacactcttctattaacacatgaaggaactacagatgttaaaagatctatgataaatgcactaactcatgagtatgaattatctagaatgaatac

SEQ ID NO: 146237 - DNA, 399 bp, Glycine max
  unsure (1)..(399): unsure at all n locations
cgggttgcgacgcctagaatcgcataccggctattatttattctctacgtgctgtcctcatacatatagaatagcgccacagtccaaagttcacaaaaccatgcncatatgtcgttgaggcattccaccgagcacttggtgggcgcatgtgtaagcatgaatatcaagagaatgggggcaatgtggcatgccccattacttcagaatgcaccctaggcctaaggccatcccttacaacccctcaattcaacaaaaacaagcaacaattaaaggataaatccctcacgttttttaacaaatacatgcaacttagagcaccaaaatacatcaatggaaagctagagagcccacgaatgaggtacttacttgttggagatgaataatagcgcagaacggaat

SEQ ID NO: 146238 - DNA, 242 bp, Glycine max
aggacccacaaaaggacaggggttcgcaagagccacaagagtccaccacaagccgcataaccccaccctgtgcaccccacgagctcagtctcccaaaccatatctcgtcattaaacgggcccataaactcagttccacacaatatacacttaccagacaacatccagcaacaaacaggcgaaggaaaaactcgctaaaacaccaccaaaatcaagctttctactaaagacccaaaacaatct

SEQ ID NO: 146239 - DNA, 325 bp, Glycine max
catgaaaagcaaacggaatttttcttgtcaacgcgcccacgacgagaaaaaaagagcgcaatgacacccgatatcagatcatgagggaaacccgaatcacacctgaacataaataccaaaaaggcacaccttccaagaaaagatgaccacccggattcctgcacaacacacgcctaaatatacaccatacccaccgcacagaaatcactgaacccacataacttaaacccaaaggagggagtaacaaccacattaaacgaaccatttgcgacaagaggaaaaaaaaactcagcattgggaccacacatatgctatagtcaccaga

SEQ ID NO: 146240 - DNA, 395 bp, Glycine max
  unsure (1)..(395): unsure at all n locations
cgcggtataattgatgtctcgatacaaagtacaatagggtgtggactattgtcgcttgacccttgcggatatatataattgcaaattaaaatggtagcaaggtcactttactaaaaattcttctgtttcaggatttaataaccttttactaaaagggatttctatgatgcggtgttatgtattgagggcaaagactaaagaatttaaatccggttgttcatcaattgctaacccatatcaaatgaagggcttaactaaacttacatagcggtcgatttaattgacaacacatgaaatatgatacaaaaagcgagggactttngaactccaatggctaatttatgaagccatatgcccatatcaatattataaccactatcctagcttttcttccc

SEQ ID NO: 146241 - DNA, 456 bp, Glycine max
  unsure (1)..(456): unsure at all n locations
ttacaacatgtccaggatcaatgaacaattccttgatacttttatttattaaattaaggcttagaaaagctaaagatgagagtatcccaattaaggacttctagccccaaagtcacctaccttatataaaattaaactggaataaaaagaacaatacaaaaaaggtggggggattataccaaaacccacaacaacttagtgaaacctgtaatacgaaagagacgatctatttctaagaaactcattcctaacaaaaatgggaatcgagtcccagcaagtgcaagaatcacgagacaaagcatcaacattagccagcttgtcagcacaaaagtttccttctctataaatatgagagatgactaacactatatctctacaaagaaaaaattggcaagcttcccatcttttgcacagcttccanaggacaatggagggattataacaagcttgaatgac

SEQ ID NO: 146242 - DNA, 335 bp, Glycine max
ttatacaacctaagtatttttgtgttaccaagctactcccgtctctataaatcaaaaaagatatgtattttgtgtattcacaatgactaactttatgagtgtctcacagatggatataccattaacaactaatcttttctcttaattggtccaaaggtgttgaaaacttttttatatatggccttattattaatggttgtgtcttcaccaagggagttcttacctggcctcggttgaaatattgcctctaaacacttaaggtgtgtaaaatgcatccttccctgttagaaaccctttgatggcttcattaagactttaaaaaaaacattcctgtt

SEQ ID NO: 146243 - DNA, 433 bp, Glycine max
tctcaggaggtgagcttagtttctagatgagtgtgtgtatctatgctctagcttctcaaggaagtattctcaaagaagcttctcaaggaagttttctttaaaaagcttctcaaggaagctacctagtctataaatagaagcatgagtaacacttgttgtaactctgatgaatgaaagtctaatgagatacacttcaaagttccacttctctccctcttttattccttcaatttcctgctccccccttctctctttcttttcctccattaaagaatcctcttcaagcttcttatccaaggaattcttggtggagaagctccttctttcttggcttattccctagtggatggtgccgtccctctgctcttctcctttgccttccgctgcatcttcattgtgaaaaataaccattgaaggacctcattgaagctca

SEQ ID NO: 146244 - DNA, 460 bp, Glycine max
atcttctattggaccttgaaaggcaactaactcctcttacaaaccatgctatgtgctcgcgactggtccctttcttcccttcgcaacttgagttcactatttctaccacatagagctacgcgaaatttgttacggtcatactcttgcttgcgagccctcttggtctattgatccagggctcttgcggtaattgcattctcttctcgtaacccggcacactccttccgaacgtgtgtagcggccaacttgaacttctccttggcaagttttgcctttcctaactcgcttttgagagcttggacttcttcgtcctcttccggtgcttcaaaattctcttcgctgacgactgttaacttggcgagccaatctaaacctcgtatatgaactttcaaccattcgtggtacccaccaatgatgccattacgaatgcctctaagctctagatctttccttaacgggg

SEQ ID NO: 146245 - DNA, 420 bp, Glycine max
gatcaacgccaaatgactgaggcgctcgtatcttgtgatctcctgcgcccatgccatgaggggaaccttgaggatattgatgtgtacgacaccatatatgatcatcgatgcaagtcgtcccctgtctactatcgtccgagctctaaaatgagggtccattcttaatatcacaggcgctatcttcgtatgctggcagggagctaccttgtcctgtgaactccgaagtgccttcctgagcgactcttagcatttgcatatcttcttgacactttgcacctctcttatgaaagagttcatcttagataaccccaagttacaggctttagctttttgtcatcttgcactttctttatacgcattgtcattcatcccatttttataactagttatcattgacctcttagttgggatacaggctct

SEQ ID NO: 146246 - DNA, 443 bp, Glycine max
  unsure (1)..(443): unsure at all n locations
ggccttgagctnatgaacacaacactgtcttctatcttcttctatctgccaagcccggaaaatacagattaaacttctattgccacattcccggactattatatgcgaaacaaaaagttaaattaaattatgcatcttaccgtgattattggaagtacagggccaaagatttcctcagccatgactgctgaatcaagtggcggatccagcaatattggcggatcaataaatctgtacaacaattgtcacgtgataatataataatgtgaaagaaaattggtctgtcccattaatgtgggaagtgaacttctcaggatcctatgctaaaaatggaaaaacatcttggaagctagcaacttagaaaagagagtattggttgccaaaatattagatgtaaaagaatactactcaccagttattttcttccattgtaacaccataaa

SEQ ID NO: 146247 - DNA, 438 bp, Glycine max
  unsure (1)..(438): unsure at all n locations
agctntctacattgtatgttttatacttttacaaaatatgttgcccatttcttgtgaatagttgatattgtctccgtgtctaatgtcttgccatcaacaaaccactacaaaatatgaaatatacaaataatgtcatgtacatgtaattgttgttttgaataaaaaagttatagtgaagtacttattccaagttgttcaagcaaacataccgtgctccaatcattttataaacccctgcttactatgttccccatcccatgcattacatattagtcacactcatagcctcctctttgaacatggctttacattcaatataaataatcattgaatcgaacaagtgtactgaatgtaccatctaaacatcaccagtcataaataagcatgaattaaatgacttacctctacttcaatccacttaagagttgcttgatcatt

SEQ ID NO: 146248 - DNA, 445 bp, Glycine max
gctgccaggttggagaagatgatgagggcaacctcatcatttctgagtactgagaactcataagccttcttgagcaatccatttcttctcttagacaatgtgacttccctgttaattgtgttctctatcctctccaattcaattatcccccttcctggaaactccctttcttgtattggctaagacataacagtgttttcttaaatggcctctttgcttacggtaccataaggaataaacaactatgaacgaaataaaacaagaaacttgaaaaaggttgccttatgatgtttggttttcatctctctgccgcatagccactataatatgttaatatgctaaacaataaaatggcaaactttttgtgcttgcatactaatttgacatagatgctcatatatctcgttcgtaccttatcttagtaccccacaaagatgaacttaat

SEQ ID NO: 146249 - DNA, 456 bp, Glycine max
agcttctggatgatataattgtctaggttgggatcctaatttggttagatacaatgtgatgttaactgtgctgtgcaaggatgggagaaccgaataggctattaaacttttccaggaattgtctgtgaaatggttcaatcctaatgttgtgagttataacattttgctgatgattttgtgctatgaagggcggtgggatgaatctaatgagcttctggctgatatggataaagaggaccagcctccctcagcggtcacttacaacatattgattacttcgctttctctcaatggaagaacagaacaagctttcaaggttttggatgaaatgacatcgatcgggttcaaggcgagtgctactaactataatcctatcattgcccactctctgcaaggaatgggaatgtggatcttgctctcaagtgtctataccaaatgattcaccgacgctgtcat

SEQ ID NO: 146250 - DNA, 427 bp, Glycine max
  unsure (1)..(427): unsure at all n locations
gcttcgtcttntcttaagctagattgtgaacatttccctttttttctctcgataatcgcatattcttgctactcgttgctgatctattcaaagatcattatctgaattcgttacgttagtttagctgtcgggatgggtaattttgggttaccggaattcaacatttacccatgatggattacggctttgcatttaattatgctttaattgtatatgcattgtcttattgcagatgtcttctacttccttgatcatcgtagaagagaagaaatgtgtctctatgcgtttggtggaagcagaaagaattctcaagtcattttaatattttgaggtgcacgctatgtgtcgttgggacttcaatggcagtgaccgaagctcagaatcctcttcttgtagaaaacacatgtggttcctttgtataaaagct

SEQ ID NO: 146251 - DNA, 455 bp, Glycine max
agctatgcacgtatcagtcaagtgtatggaccatatcttagccaaagtgctcatcaataatgggtccagtttaaacgtgatgcctaacagccctatggagaaattaccattcaatgctttccactttaagccgacgtcaattgtgagtcctgccttcgatggcacccgccgagaggttaagggagagatcaatctcccaagacagataggtcttcacacctgtcaagataccttccaaataatggatattaacccccctacaactgtctgtttgggcgcccgtggatccactcattaggagttgtttcctcaacacatcaccaaaagttgacattcgatgtggaagggcatctggtcatcgtatacagtgaggaagacatattggtgagctgcccatcctctatgccttatgtggaagccgcagaggagtcattataaaccgcattccagcctat

SEQ ID NO: 146252 - DNA, 376 bp, Glycine max
agctgaacataatctctttgaggacgttgttctaccatctctgaatccagagatcaactccattacattgcacccataataccctttatctaacgctggttctattctgaccaactatcgattctggcgacatgtaaaatggtgtccctataatctcgactctcccatactcagcatctgcatcttctatagtattggcgacccataatcagcatcctcaatcgatacctcgcttgatcttatccataaagaatcagaaagatcttcccggttcgtaatcacaagtggcgagctctttctcagaatgcaagataacctcttgagattcttctaatgttgactcactctacactccactgaattggtacactctcta

SEQ ID NO: 146253 - DNA, 455 bp, Glycine max
agctttatgatatgttgaaaccctgtatatagatcttgattaccacttggccaaggaattaatggaaatctatgagtccatgggcgacacattatcctttcaatatggggggtctgcaacacacaataaggaaatctctctaccttctggagtttggactttatggattttgaaatgtaatttgggatcacaatttctgcacataattatcttatctacgatctgcatgagtttatcttaagcttaacatcgaatacagaatgacataagttaatctaattctgaaagcttattgcttttattaggaagtctcacaatccaataaaaatatgcctctatatttgattcgcaatcttctgcggaatgtagggcttaatttgtagacgtatggtaattatatggatgcagtattcatcacatgattcttgttactaggccctatactttaaattata

SEQ ID NO: 146254 - DNA, 443 bp, Glycine max
agctatatgtctactctatcatgtttggtatttactgatcgctattaaaatgttgatctaccaaaatcctgagactaatttacatggcaccaaaatactgacacaaacaggctttaatgacagaaatggattgcctcaccccctgcctgagaaaacaactgccacatataaaacataactgtcgaacatgccgaaaaaaaaaactctcgtacacaaattgtaacttgtttattttttatttaagataattcctcattcaaaataagaaatacattaaattaataagatattttttattgataaaaataaaaaaatactatttaaaatttacaataagttacttgtcaatttatcatgtttaaccacttgaactagaataataagataatattaaaaataaaattaaagagttaagatgcgtatatttaatatctggacaagac

SEQ ID NO: 146255 - DNA, 465 bp, Glycine max
  unsure (1)..(465): unsure at all n locations
tctcaatctgtccactaaacaaatctgtatatccatagttgtgttatnctttgagaatatattcgctgtcaaaaaccaacaatccaacaacagtgacagagagttgttcgacccctatgtcactcctaatctcatcacctccaataactcagatgacacaaatatcacatctatcacagaaacaccacaacatactccataacctgctcagttagatcctgctacaactattcaacttgaaattcctattgaagaacccctaagaaggtctaccagggtttcaaaccctccaagacatctcattaattatcattgctagaatgtgaccaacattaataaagtcacctaccctatatagaattacttagactactcaaaactttctaattcccataaacactacatttgccaaagttcatagaactatgagcctcaactaatagccaagcaatcaagcataaacca

SEQ ID NO: 146256 - DNA, 483 bp, Glycine max
ctcttcccggatcttaagtcacctgcggctgcagcttgaatgaggaagtgtagaagggtggaacttcctgcttttattcgctgaccacagagtggtacctggagatatgtcgcgggggtcaagagactatggggacgtcaggtggggtgctattgcccacaaccaagcttgatcaatcccgacccaacccgggcatagtcagtcagtgagaacctgtgatgtacctaagcaggcgagctcttggcaatcaacagataaaaggaacaaagaccacaaagcaaggaggcttgtgtggtggctggccagctgtgaatcttgagtgatatatgggttatggcctctggtaatcaattaccaagggtgggtaatcgattacacggcttaaaaatgaagacaggaggctaagatggtctctggtaatcattaccaacgggtgaatctatacctgcttgaactatgtacgagctataatctatggaatca

SEQ ID NO: 146257 - DNA, 222 bp, Glycine max
  unsure (1)..(222): unsure at all n locations
tctatggaatctggatctttgagcttcaatgaggtcctttatatggtgattntcaaccatggagatgcagcagaagataaaggagaagaggtgagaggaggcggcatccactagggaataagccatggaaggaggagcttcaccaccaagagagtgccttggataataagcttagaaagaaagcttcaatggaggaaaagaatgagagagaagggggggggg

SEQ ID NO: 146258 - DNA, 51 bp, Glycine max
tgcagcctgggtgcctatgagtgaaccattctttttattgtgttggctcac

SEQ ID NO: 146259 - DNA, 465 bp, Glycine max
agcttattcactattacatattaacatgaagtccttgtataatttacttattaatactggccatcagaaaaaaattaaactaaaagagagaaccttattgaacctgaatcatgaagtccttgtgtaatatgttacgaacaccatgaagagtagatgcaacaacataagcatacctaaaacaatgatacataagaaaaacataaaaaaagtcaagtgaggttaagacaagatattagtatggacaagagaaagaaagcaaataaagttacatttcaagcatccatccaaaagctttatcagtttcaggatccttcgttgccagagaaacattcatccaagtgggagcaatcttctagaggaattcctaacatgttttccacagaaaattaataaaaaggcccaaaatagagagtattcattattatcaaagaaaattatttgaccgataccttcctaacaataaca

SEQ ID NO: 146260 - DNA, 449 bp, Glycine max
tcaacctacactctctcggtctagtgcagaggtcgagtatatgggtgttgctaatgtggtctctgagtcgtgttggcttcgaaatttgttattggaattgcattgtccggttaccaaggctactattgtgtattgtgacaatgttagtgctatctatttgtcgggaaacccggtgcaacatcaacgtaccaaacatattgagatggacatacattttatacgggtctttcgcgtgtatatatggccttatattattagtttcctagtttcctaagattacgcctggtacattgtatatattccaagtcagtgaatgaaatcccttgaggaaaatattcttttaatgccttttgcactttgccatttggtttaaaaagtttgtttctcctgtttatctgcacgaattgagaatcactcatttgaagggagactgcgtcttggtggaccat

SEQ ID NO: 146261 - DNA, 428 bp, Glycine max
ctgtaatcgaccgcagctgcagcttggatcatataggtggagtgacttatttttatataaacattactttctgggtggagctcttatggtgaatattgtacataattggagttctgtactacaaacacatcttctagacgtgaaaatctttacttgaaaaaaaaaagatgtattctcataaacgttcatactctacctcaaagccttatgatgctttgcgggttatctatcatatataccctcgcatatcgaaagactgaccaaagttctacatgaaatatcttaaaagtccgctctcatcattacacctgagtctgtcgacatcctaaaaaggtgacattgtcgatccaaaggacattttgcttcacacgacaagcgaaggagtcatacacgatcaacatgtgtacggcattaagactcatatatac

SEQ ID NO: 146262 - DNA, 461 bp, Glycine max
  unsure (1)..(461): unsure at all n locations
tatggacaagctccanaggcttatacaaagaagaatgagtgttttatataatatagacaaacaaatggaactactccttttaagagctggacttacggaggaggaaagaacaagcataactaggttccttagtgggcttaatatggaagtgagggacaagtttgaactccttccatataaggacctagatgagctagtccaactttgtataagagtggagcaacaacttaaaagaaagtgatcgaggccgtacccgaatcaaataaacatgaaaatgcagtaactaggaagtgatcctaggtcgtttcccaacgagcaatgacaaaccaaatgttcataatatacttgcgcagtaacagtaacgattgngggggtttggttgttntgtgattaaagagtataacaagtaaaatggaatttgaaactactaatattaaaaaacgggttgtttcctctgattc

SEQ ID NO: 146263 - DNA, 463 bp, Glycine max
atggtgcatcaagccaagaaaatggagagactacttgagaggaagtattcatataagaagacctatcattatgactctcttagtgataaggacaagtccaagaaggagggatctttccccacctaagcaacaaggttcaaagtctccaagtggtaaacatgttcctaaccctagcgcttcttctacttctcggagtagttcaattaaatgctttaaatgcttgggtcaaggtcatattgcattacactgtccaaacaagaaaaccaaagttttgagggacaatgagattgtcactagtaagttttcttttattagttcatctaatatctctagtgataatgataatggatgtggtaccagatctctagatgatggatattgataatgtgtaggaggttgttgggtatccaatgtaaggatatggatgggattcacaagaagaccatatttcacactacatgat

SEQ ID NO: 146264 - DNA, 412 bp, Glycine max
agctagcggcctgattgggccctctcattgtataagtccttgaccttgaaactcatcgagctcatcttcctccccacttccacgcctccgattttcagacgctctccatcttctctaatctccgactttctttatgcaaatccagaggttgtccaaacaacgcccaaggactccgtaaagacttttttttctctctctctctcacttccatcattataatataatatatgctattgtggtccattaccctctctcacttcactcttcactctcattattccctacccaacaacaatgatcccagaacactactccgactcatctctcttccaccgctccctccttaccctcttcctaatcgcaccccccacctttctctccctcaccttcctccaggccccctacggcaagc

SEQ ID NO: 146265 - DNA, 459 bp, Glycine max
tcagaagccttgccatggtaagcatgagcacatattattgttgtccatgcaacagtatcaggcttatctattgccaaaaatgcttgatgtgcatagtccactttgccgcattttgagtacatagtgatcatagcactctccccagagaggtatgcaactagccccttctttattgcatctgcatggatttgagcaccgcaaatcaaatctgagacagcagagcatgcttggaaaatgttgttatagatgaatgaattcaataacactcctttacttcttattgtcttaaaaacctcaagagccctgtcaaatttaccactttggcaatatccagcgattaaagcactccatgagaaatcatttggttcatgtatgctctcaaatgcttgacgcgcagcttcaaaccttgcacacttaacataaagatccactagtggagtaccaacggagacctcggat

SEQ ID NO: 146266 - DNA, 458 bp, Glycine max
agcttcttttggaccttgaacaagcaatctactcctctttcagaaccatgctatgtgctcgcgactggtccctttcttcccttcgcaacttgagttcattattgctaccccatagagctccgcgaaatttgttccggccatactcttccttgcgagccctcttggtctcttgttcaagggctcttgcggtaattgcattctcttcccgtaacccggcacactccttccgaacgtgtgtagcagccaacttgaacttctccttggcgagttttgcctttcctaactcgctcttgagagcttggacttcttcgtcctcttccggtgcttcaaaattctcttcgctgacgacttttaacttggcgagccaatctaaacctcgtatgcgaactttcagccattcgtggtacccaccaatgatgccattacgaatgcctctaagctcttgatctttccttaac

SEQ ID NO: 146267 - DNA, 454 bp, Glycine max
  unsure (1)..(454): unsure at all n locations
tctatccctgaganactggttcccagaagacaacatggtgtgaatattgctgaaaaccctagccttgcaacaagtcctatggaagtagacacggagatggacaagaaaatccgcagtattgtgagtagcattttgaaagaagcctctgtgcctgaagctaatggagatgttccaacatcttccaccccgaatgtttctgtgcctgatgttgagaaagatgttccaacatcttccgttccaaatgctgaagccgtcccttcacccagtgaagaggaatcaacgggagaagatgatcaagccgcagaggagacccctgcaccaagggcaccagaacctgctccaggtgacctcattgacctggaagaagtcgaatctgatgaagaacccattgccaacaggttggcacctggcattgcagatagacttcaaacagaaagggaaaaccccccttaag

SEQ ID NO: 146268 - DNA, 460 bp, Glycine max
  unsure (1)..(460): unsure at all n locations
agcctgcctgtgcgagctgggcggcaaccacctccctcattattgctataaaatggtgtgaggggctgaggaaanaagggtcaacatctttggcactcaggattcactaataataagtgaggaaaagaagaaagaaggaaaaaatccaagctgagacgcttccataatgattccatgacatttttgtgatcaattacgctaatgttcttcaccattctttgcctttcttcgttcgttcttcatcgttcatcgatcttcaaccggttagttttcgatttcgaagctntgaattcattatatgcacccttaggggtccattcttgctttgtatgtcntcatcttcatctcgtttactttcggtattcttttcttcgttntaaacgagtntcgactgatcgtttaagccgtaacctcaatgaatgataaaatgaatttcaattgatcatttgtgttgtaatgt

SEQ ID NO: 146269 - DNA, 477 bp, Glycine max
accttagaatctcagcttaacatagaccacttcaggtgctggaactacttcttatggatttgatggggcctatgcaagttgaaagccttggaggaaagaggtatgcctatgttgttgtggatgatttctccagatttacctgtgtaaactttatcagagagaaatcagaaacctttgaagtattcaaagagttgagtctaagacttcaaagagagaaagactgtgtcatcaagagaatcaggagtgaccatggcagagaatttgaaaacagcaggttcactgaattctgcacatctgaaggcatcactcatgagttctctgcagccattacaccacaacagaatgggatagttgagaggaaaaacaggaccttgcaagaggctgctcgggtcatgcttcatgccaaagaacttccctataatctctgggctgaagccatgaacacagcatgctacatccacaacagagtcacactga

SEQ ID NO: 146270 - DNA, 445 bp, Glycine max
agcttatgaaaaggtttagccaaagactgtattttcatttgtctatggtccaaggagttaattcacatataaaggaaaaggaaaatatctgaatggaaacatcattgaaacaagtttagaagtattaataagatattttcactgctagattagcaaacctaactaatgacatgattttccttttacttgcttcacgctgaacttgaagctgtatgaaaaccatgacttattagtcagtataatgctataaaacctacaataaattaaaactattatggtttataactatttgaggctttctctcagtcatgcaatcttgttgaacctaataggatgattgtgccctaatgggaaaaaaaggtgaagaaaacaaatagatgaaacttttaggaacaactattaatctatgtgaatatcaaagtaaaatactagatacacttatgag

SEQ ID NO: 146271 - DNA, 481 bp, Glycine max
  unsure (1)..(481): unsure at all n locations
tacggacctataaaactcagctnttatgaatntcttcactggtaatcgattacaggtttctggtaatcgattacacagttatattttgaagggtcaagagtttcgttgctggtaatcgattacacacatctggtaatcgattacaggttcaaatttcaaattcaaaacccttttaaacaactatttttcaaacttgtcttctggtaatcaactacactgtctggtaatcgattaccagagccttgcatgtcttggaaacactttgtttcgaggcaaggcttgatctttaatgaatcttgaaacaaggctttgtttgttgaagcaatcttgtattaatcttgaagcaatgcttatcctttgaagcagccttgtttgattattctttggcataatcaaaattcatgtattcatacattcacattctccccctttttgatgatgacaatcatcatcaagaaaattctttttgacatcatcaaaa

SEQ ID NO: 146272 - DNA, 424 bp, Glycine max
  unsure (1)..(424): unsure at all n locations
agcttggctttggtttatacatgattgtatcatgatttgggacttgtacgatttgattcgggcacgatcggatgaggggaagtgtgattntctaaatctgcactttgtgcagattcttgctgtgaaattgtgcaccagacatttgcatgagtgcacacaaatgcttgtgtgtgattggctgtggaaagagtagtgcacaatgagttctggatgtttgctattagatcccaacggtcacaatgtaggcttatgtactatatacttccagtaaaattttggagtcgatccaacggtaaacgaattggatcgaatgaattcgtactggggtctttaagagagacaagctgtgatttggttggtgttatggcacaatatctcgctatgctctgtgttgcttggctgtgatagctcagccgattgatgc

SEQ ID NO: 146273 - DNA, 443 bp, Glycine max
cgcgtgccgccacgggagtttccgactatgctcttgtgtggtggtactatctacacaaggagagagcacgaaatgaagagccaatggttgatacatggacggacatgaataagatcatgaggaagcggtatgttccggctagttactcaagggacttgaaattcaagctcctaaaactaacccaaggcaacaagggggttgaggagtattttaaggaaatggatgtgctcatgattcaagcaaatattgaagaagatgaggaggtaactatggctcgatttcttaatggtttgactaatgatatccgtgatattggcgagctgcatgagtttgtcgaaatggatgatttgcttcacaatgcaatccatgtggagcaacaattaaaaaggaagggagtggctatgaggagtcttacaacatatgctcttctagttggaaagaca

SEQ ID NO: 146274 - DNA, 452 bp, Glycine max
tgtgcagagttgtgagcaacaaaggggatctaattataataacttaaaattaataatcaaatagtattgataaaaaaaatgtgcataaatcaagtacaaatccttcaaaacaaagtaagatcaaatagttattttagcagataagagaaaaagaagcaaaaaaaaaagataagcaactaaagttagaagctaaacgtaagaacaaaaccaaaaccattgtaatttaaggtgtgtgtgagagaactgagccgaaggaattgtgacctatgaagaacaaatcaaagtgaaaatgcatagaagagtgtcattttcttttaactaagaaatatatactttacggcatggttcttgcacaaccatatcataatcatcccttgaaaccattgagaaatcaagatccatttgcaatttcataagatcaaagtctaaattcaggtgaaaccacatatcga

SEQ ID NO: 146275 - DNA, 323 bp, Glycine max
  unsure (1)..(323): unsure at all n locations
gcagcntgggatgagatttatagaacacgaatgaattatggctttagagccacnagcaacagcaaacatggactagatggaagaagaagcgagcagatgaagctcnaacaaagagcgctatgcngccagatgggagtcccgttttgagtcgtcttattgattcaggaagaatggatagccatggcttcgaacctacatcagagagcagctcaggttgatgttcacaacaccttcgagaacatcacaacgaggctaaagaacatagaaactaggctaacccttaataaccttaacccggatgaggatgaagcagtaacatgttc

SEQ ID NO: 146276 - DNA, 426 bp, Glycine max
actcaagctctgagccgtctagcaacagaagatctccctcctctactatatgtatatgttatgtccatctctctacaacctgtcatgcagttattactttaatctaaactctgagagatatggacttttcagtctagtttgataggtgttacacattgaagtggctctgatctgatcaattctgtgaaccatctggtttacaagaaaccaatggctgttttcaacaaaggaaagtccccatgtgactactgttagaaaaatatcacaatttagttatgccttcaattgaagtggtatcaaatgataatgtccaaattataaatggaagctgccaattgtttgtcttatgaaagccaattcggatgcccttgtgaagaagaatattcggacttcggtgaagtcgttgctgcagcatctttggttatt

SEQ ID NO: 146277 - DNA, 469 bp, Glycine max
  unsure (1)..(469): unsure at all n locations
agcttgaggaaggtattatcacctctcacttttgtcttataggacaacagcctattttttagaattatggaaattgtgttacctaactctatttctttttattttttgaggtcgacaaaagcggggcttttgttcctacgtaccctcctttagagaggaaatcagacctacgtagttctttcacatgcgtgaatcaagtgattcttttttacttgaggggtgatcatcttaaggcgttggaccttaaatatgatccattttacttggtaagaaactgaaatgataaactctcaaaaacctatntttgtggacgagcttgactaggcggattgttttagccttaatttcgctttagttattagtcaattcaattaagaatgagaaatcccaaagagaaaacgtccgattgacttttcgctttactctactatgaggtattttntntatcattatattattatcttacctc

SEQ ID NO: 146278 - DNA, 464 bp, Glycine max
  unsure (1)..(464): unsure at all n locations
tctcaagcaagctttcatcagaacgtgagtttccattgatgatgtgggtgatagatggatatacactggggtgtagtgggcggagaggttcaaagaacctatgggaattagtgagtggtgactacctangatttggtgcactcatttagcacgggtaactcacacgcctcactttgctattcttgacgggctccgagactatgctttttaagttgggagatgaagggtcagtgtacgatatatccgtatgtagtgattgctccagactatcatccacatgattttgtaagaccactaagacttgggaggattggtggtagaaattaggccaaatagtgaattaagtgtgatagttatgcgcttaggatactagagtgttgtttgtttagataaccacacgcagtggttacgtagattatgtgttttaattttggtttactattgcctattatttgtggcattcc

SEQ ID NO: 146279 - DNA, 439 bp, Glycine max
ctaacctaagctccttaactgcacaggctctaatattagatgtgtattcttgtggaaccttcacccgacgaagacactatcaaaaacttattcttctctttcttggacaaagtatggcaggctgggggcaagtaaatattcttcccatcaaaccttggaagcaactgtgatacgatgcccatatcagctagatcttgacgggtattcaagccatccttcatcttgccttgaatgttaaggagcgtctcaatcacactgtcacaaacatttttcttcacatgcataacatcaatacaatgtctaacgtcaagatcagaccaatactgaagatcaatgaaaatggacctcttcttcatatgcaactcttacttttatccttcttttgagtcatcccaaatacagtattcaggtgttcaacccgctgatatacctgctttcc

SEQ ID NO: 146280 - DNA, 193 bp, Glycine max
aaggaccccccgaacgagcaatcacagaaaaccaatagaccacaaacgcaaaccaccggaaaggcataagggcacaaaaactacacaaaacaagaaagcaaagaaaaacaacatcacccacccacaacacgccagaggaaaaaaaaaaacaacacgaaggaaccccaccgcgacccgaaccacagcaaacacc

SEQ ID NO: 146281 - DNA, 329 bp, Glycine max
gactgaaaaccacctgaacggttacattatgagatgaacaccgcaacataactgtcacaagcccacaaaaagaccatattccactgaacactgggagtaagtcatcactttggattgctggacaagacgagcataatgcgggccccatggatctggagcattatcaacctcgactactactgattggaagcatttctgtaaacatttataaaaaactatggagggataagggactgggacaagctatctggttaacaaccaagcttaataaatccgcctgattaaatgtatgataccaccaatggaaaggatttgtgtaccgctttttt

SEQ ID NO: 146282 - DNA, 461 bp, Glycine max
  unsure (1)..(461): unsure at all n locations
agcttggagatgaagctccaatgtgtgattatatatatcagaagggcgaggggagcacgacattgaaggaataaaagagggagagaagtggaactctgaactgtgtctcacaacactatcattcatcaaagtacaacaagngtcacacatgctactatttatagactaagtagcttccttgagaagctttcttgagaaaacttccttgagaagcttcttcgagaacactcccctgagaagctagagcttagctacacacaagccctctaataactaagctcacctccttgagaggcttccttgagaagattcctacagaagctagagcttagctacacacaccccctataatagctaagctcacccccatgcacaaatacatgaaaagtataaaaacaggcctattacaaagactactcaaaatgccctgaaaaacaaagctaacaccctatactacaaga

SEQ ID NO: 146283 - DNA, 438 bp, Glycine max
  unsure (1)..(438): unsure at all n locations
tcctcggggccatttcttgttggtgattaatacaagcgcttaattgtttccacaaatgcgaatatagtgaccctatggctgcaaactcgtaaattccgtgggtattgcttttgaatggggggaaaagaagtttttgaatgcaaaaacgtcccccttcttcattctttatattttggtacaggggttgctcgcccacgcgatctaacctgcacttttattttatattttttaacaaaaatggtcgattgatttaagaggcgactatacacgggaatggctcgcgtgaggggaccaaagcttttgatgctccgccagccactccgtaaggtactgatcgaaactcctcaggatagattacgcatcgaacaaaggtgataattactataattncaaaggatcctgggctgcttacagcagcgctttccgctcgttccgggc

SEQ ID NO: 146284 - DNA, 401 bp, Glycine max
ggtgatattggagagatcacaatttactgagctattggtatattgtggtcttttgggaataaaagactatcctatgatattgcttagaactgtgtctgttctgggatggggtttgtacatgattatattaggtttagaacgctgattttctcttttttttaaggttgagaaaccctaactggtattcactttttggtgtaatttgttgagtgtttctgagctcacaattccacactcaaacttgatgatttccccatgattgcactagagtattattctgcatgtattttggagttcaaggccttaggaaaattctataatcatttgatttcatggttaccatgtcagttttacaacattgtatatgctattaattgtctgccccttctgtttgattgtac

SEQ ID NO: 146285 - DNA, 446 bp, Glycine max
  unsure (1)..(446): unsure at all n locations
tctcttttcttggtnnaatattatattagganttaatttatgttttgactatggttntattacatttgagcacttattagttcttttaatacttgcttagtatgactgaacatgatgattatatngacttgttcttggttgtttatgatcatgtgttttaaacttaattactttgatgatatatgactaaaggtatgcacttttatttggttattatgaatgactttctggattatatgacattctatgaagtattatctttctaagattgatgaatggttaaaatatcttgcttgattgattttctattcttgtgtatgtcatttatgtggtttttatatatatttgatctaatcatgtttcttgctacatgattagttcatatttttccatgaatgttatatggatgctcagttatattttgatgcttcaaatttgttacgcac

SEQ ID NO: 146286 - DNA, 261 bp, Glycine max
tccactatgacatatcaccaacaagtgggatggcatccatagccaatcacccagcgtagggaagatcaacaaaggactaggacaactcatgattatgaatcccacagatcaacaccaccatccaacttgccgcttcatgcactggtttcccacgaagcctgaagggacaaccacatctaccactcccagcgactatacaacaaaatctaaaacacacacttgtacagaccacatccttccacccaataacacaaaagaact

SEQ ID NO: 146287 - DNA, 378 bp, Glycine max
  unsure (1)..(378): unsure at all n locations
cgcctgcgtgacatncagacacaagaacgaacatttatattttatggcacgcaccaccacagaaccaccgagagacaaacagcaagaagaatcgacccaaggcaaaacgcaagcgcattcaattaatgcaccactacgacacgcgcgaggcatgtatataaaacaatcaccactagaaaaagctgagtcaacatcggcggattaacatccggtattgtcaaaaaccgacgttaacgcaaacacggcggcataacagcaaataatgtatatctcttaacatcggctgtatgaaaatcgatgataaagaagagactctaacatcagccgtcaagaaaaccgatgataacgaaccgacggtaacaccggtttcaataaacc

SEQ ID NO: 146288 - DNA, 435 bp, Glycine max
  unsure (1)..(435): unsure at all n locations
agcttattgataacatatttgattatgagtttccttcttctaccccatcaagcctaatcaaaagagaatgaatgcatctagttcagttgtccaaaaaggtttctcacatcttctttaaatttcttatctcttctccttgctaatctttgtcttctcctaatagatccaccttcaagttctatagggtctaaaccaacggacatagatgctctacttgaatctcctaagcttcgatctgttcccatattagctggtgggcttagacaacaaactcatcaatcgacgacactctatacttgatttctagattgaattatgagcatcaatgtggcacttttaaggtctctaaataggttcttgatcccttctcttagttcctttgaaatgcctatccaatatntatgtatcacttaaatgtatctatccttaagctga

SEQ ID NO: 146289 - DNA, 467 bp, Glycine max
  unsure (1)..(467): unsure at all n locations
caccaaactaagctgaagggcttttattccctaaatgacatagatgcccttatgtntctggtcaagctctacaatgcgatatctaaacttttctttgttgtcatacatctcagatatcatcacacgatgttgaactaccacaatttccataaaaaagttaatcaataacatgacattcactaagaaaatgtccttgcaacctacctgtttggaagaccttccatagatcagcagtgatttttctgattttggaatggactgcaagaaggtgatataacatgaataacacataacaattggtagtaaagagaatttattgagaaaaacaagtatagtattaggttggggatcttttcctgcatattacaagccaaccaagagaattcaatatcacgaccaaatgcttatacttaaggaccaccgtgaaggtcaggttgtctccaatatctggcaaacattcccacatt

SEQ ID NO: 146290 - DNA, 334 bp, Glycine max
cacgtcactggtgaatcgattcaccattaagggtgttatctgattacacatcaacagaggtgactcttcattttatattctgacaatcaaaacatttatgagctctagtcatccattacaagtattgtgtaatcgattacacatgtttaaaatgatttgaaaatgtttaaacacaagtcgtgactcttgaaatttgaaatcttaatgatcgaggccgtagcccgaacatataaacatgaaaatgttgtaactaagaagtgatcctaggtcgtatcccaacgagttgtgacaaccaaatgttcttatatacttgcggaacagtaacgagtggggg

SEQ ID NO: 146291 - DNA, 409 bp, Glycine max
aaccactcttttctaaatgcttcttaccgagttacttggttcaaatgatacaatttcctttcctttgctcgcatactttgtatacccttatattttcttctcaatatgggccttgactttcccatgcaacttcttgatatattctactttaacttgcccagacttatctttaaattgagaaatgttaggtaaaggcgacaaatcctaacgagtcacaggattaaaaccgtaaacaatttcaaagggtgacatctgagtagtactatgtacaaccctattatatgctaattcaacatgtggtaaacacttttcccaagtcttaagattttcgctaataatgactattagaagagtacactgagttctattaatcacctcagttttcccattggtttggggatgacatagc

SEQ ID NO: 146292 - DNA, 341 bp, Glycine max
atgttaacacttatttccgtcaagcaagtgtttgttaaactaaaacttgggtttcatcatggatacaatgtgcttgttttgaatatggttagacggcctaatagacgcctaaggggaggggtgacgaactccctgcttattctataaattgcgatgagcgcactaagcgccttgctgcgctaagcgagatcatcatttatgttgaacatttggatttccaaatgaactcactaagcgtggccctgtctcgctaagcgcgctcatcttctctgattgaaagtcaatatcttatgaactagctaagtgcatctgcgctctgagcgagtaatgtgttctcacgc

SEQ ID NO: 146293 - DNA, 428 bp, Glycine max
ccgctcgagatgaggaagtgtagaagggtgaaacttcctgcttttattcgttgaccacagagtggtacctggagatatgtcgcgggggtcatgagaccttggggacgtcaggtggggtgctattgcccaaaaccaagcttgaccaatcccgacccaacccgagcatagtcggtcagtgagaacctgtgatgtacctaaacaggcgagctcttggaagtcaacagataataggaacaaagaccacaaagcaaggaggcttgtggtggctggccagctgtgaaacttgattgatatgtgagatatggtctctggtaatcgattaccaagggtgggtaatcgattacaaggcttaaaaatgaagacaggaggctaagatggtctctggtaatcgattaccaaagggtgtaatcgattaccacgttttgaaa

SEQ ID NO: 146294 - DNA, 464 bp, Glycine max
  unsure (1)..(464): unsure at all n locations
tcgggtagagnttgcaagtgtaagagtcaaaagtggcagtgaacaatacttgtaactntgataagttatttgaaacttggtggctataataactggacatagtcttgtggttgagacgaacccgtataaattctttgtgtgtgtcacaacctacccttcggcgggagggcgaggcgaaataagaaagtgtgtcttcccatgaagaaaatgcgtgggagtcgccaccaacgtttattcgaggaaaatgctagaaaaaccaaaaagacaaaggtctgcgcattttgaaaataagggttcgggagttgtttacgcataggaaagggattagcaccccacgcactcgtcacaagggatgacaacctttaatcgagtgtacaaaacaaaacttcaaaattgtgtattttccctttttaaatattttattttttaggggtagacaagggtgttgcccttgctcctacgta

SEQ ID NO: 146295 - DNA, 457 bp, Glycine max
  unsure (1)..(457): unsure at all n locations
agctttataagtgcgggtctgggagactattgtcaagtggncgcgatatgtgaagatgatgttccaagaactctggatttggtccgaccatgccctcctgatttccagttgggagattggcgggtggaggaacgcccctgcatttacacaacaagcataatgtaaacctttacggctttaaaagctctatagttgggcctaggctttagagttttcattctgttaaggctctgtgtctcttgtctttgagtttataatacaaagatctttcttcatctgttcctggtctctacccattctcattcatttgcatgtttacttctttttctgaaacggcagatccgatgacgagtcccccgaatgtactaatacctgtgacccgtctatcaatttcgagcacaaaatgaaccatacggaagatgaatgagatgacggggtgggacttacttcggaacta

SEQ ID NO: 146296 - DNA, 419 bp, Glycine max
  unsure (1)..(419): unsure at all n locations
cttccanagtggtcttcggcatcacatataaactctttctattgtcgataagcacctttgcgacaacatggtccatacaccttaccgacacatgaaaagccttgttgtgtcctctcccctctactggaatctcttcttccgcacacgcgatataattgttggtggttatatgattaatgatgccttcaaaaccttccactgagatatcgtgggctacatggtgctcattgatgaactttatcaacagcgcacgatgatgctcggagtttatgagcagttcaagcaacgagatccttgctggagtttattcagttgctcgactacctcatactcactttgttggatgaggcgacggaactcatgagcctcttccaaagtcaccgtctatccttgaaaggcctctttcttttcagccgctc

SEQ ID NO: 146297 - DNA, 437 bp, Glycine max
  unsure (1)..(437): unsure at all n locations
agctacaagaataaaggtcttatcaaactatttatttcctaaagggaatataataaattggcctcctattattaatggattgggttaccattactggaaaacccatatacaaatttttatagaggcaatatatttaaatgtctgggatgcaatataagtagggccttatatatccaccatggctgctggaaatacaacaatanacaagcctatggaagattggagtgaggaagaaagaagactattacaatacaacttacaagccaaaaacataattacatctgccctatgaatggatgactactttagggtatcaaactgttaaagtgcaaaggatatgtgggatactctacaagtaacacatgaaggcacaacatatgttaatagatctatgataaacacattaactcatgaatatgaactatctatgatgaatg

SEQ ID NO: 146298 - DNA, 452 bp, Glycine max
  unsure (1)..(452): unsure at all n locations
cgactntgcgagcggattntagccttagtttcactatatttattagccaattcaattaagacagagaaatcccatagagaaacgcccgattgcttttntttttggtttatcttactaaaagatactttttgattattttacctttttttggtttccaacgtggttacggcatgaccgaacggtcggatttcattttaacaaaaattaacggatattacaaatcaaatgatcggcggaaatttattttattttttgattaggcgagaaaatgacttaagtaaatgactaaagcatgtcaaaagcgggtacggaaagtcaatgaaatgaaaataaaagcacacgaaacaagtggggaccaccaatggtacatagaatgaattgaaaagttcgatttcgggaacttaccggtggaagaccgaagaacgacgatgaacgaacgacgatcgatgaat

SEQ ID NO: 146299 - DNA, 68 bp, Glycine max
  unsure (1)..(68): unsure at all n locations
cgcccaacggccaaggacggcgaaagaaaaacaagaggactgtctgtgacctgaanccccccgaagac

SEQ ID NO: 146300 - DNA, 404 bp, Glycine max
cgatcttaccgcaccgcggctgcagcttctgatatgaatcaagtcgattatgttctttgtgatgccaacaactcacaagagtgatgttcagattgagtcaataagtcaagatcaagatcgattttctgattcaagagatagacatccacaaacttcacgattcaagagacgatgaattcgttactctatagataaaagtgagcaacgacctgcctaaacttcccccgggacagatttgaagagattgttcataactccacataccacagttttgtttgacaagagaggtatctccaattactctcacttaccagagtgtttctctctggtaatcgagaccagtgtcctgtacgtatcacccatgcagaaatgtggtcaccgaatccttctaactgtagccgcaa

SEQ ID NO: 146301 - DNA, 302 bp, Glycine max
ttgagggaagcttgcttgaggggcgtcttaagtaagactgtacatctgatcaccactgaggtgcctcaatggtaattatcaccatggaatgctccggacacaaaagagaataagcgagaggatgcgccctccactatggaattacccatggaaaaaggagcttcaccaccaacatgagccttggataataagcttggaaaggatgcttctatggaggaaaaagaatatggatataaagagacacgggggagcacgaaattgaacgaatcacatatggagagaagcggcactttgaagtatgt

SEQ ID NO: 146302 - DNA, 464 bp, Glycine max
agctagaatgaccatttgatggccatgttttgtgtgcccaacggtgtcataaatacgtagctctgcttttgaatcttataaccaacaatggataaagtaggctcacacaaaaactgtaaataatgcttttgctaaagctgataaatatcatcctaatcttccataactagagtgcttacctcccttgggatatgtgtacttaaagtgaaactagctcagaatctactcacacacaaacaaatgacactgcgactcactgcgcattgttattcttgcacagatgaaaatctaactcaaattgtttgtgttctgtattaagcatactaaacacaatattatgtctctctctccacacacatagcacaaaattctatgattaagacatataactactaaaattacatttgtacgtgcacaaatgccacaacacagctgtctctattagttagagtagtaatttctca

SEQ ID NO: 146303 - DNA, 468 bp, Glycine max
  unsure (1)..(468): unsure at all n locations
tactaagctcgaagaaattaaacactagaanagaatgcttaaaaatctttgtttagaatcgcagtcagcatatattctacaccatatagtatttgcacaatcattctcatccaaagctgccttatttatcaataaatatctaattagcaatgattaaatattccacattctatcaaagcatttatgagttattacgacacagaagcatcatatgggacttcaacattttaaccacaagcaggtcaataaaacccatttaatctgcaatcagttgttggatgcctattcataatgtgctatactagtaaagtggtaaccatatccttatctctgattatgtacaatgaatttttgtttctgcttcaatccatgatcaacaatcccattactggaatattttgagctgaaagattacatcttctttctgcttattattgaaccaaatcacaactacaccaattacaattt

SEQ ID NO: 146304 - DNA, 418 bp, Glycine max
  unsure (1)..(418): unsure at all n locations
gctttgggagttacattggtgtagtgcatatcatggtgtgaatatctggatcaaaatgttggctcctcagtggactctgcatactaaaccgtgtagtcaacgtgttcaagtcattcataattatgtccaccggtgactgcaaatgcaaaacctgcttcctcaaatcatcctgggacatcagatacatgtttttcatcagtctgatataatttttagggtctgaaataaattatattgcatatgtttttgaaacacattacctgattttcttcttttccttcatcttgttgtggagatttgacaaacttctcttttgccttcggtgagggaatgctttccacacagctatgacttgtnttanaaataagtcagaaatatcatgaacctgttgcatgaatataattaaacatataaaaaa

SEQ ID NO: 146305 - DNA, 323 bp, Glycine max
gcacttgtgccacacttttttttagattctaaaagaccatgtatcacacatgaaggtatcgtacagcccataagcctctgtaacgatcagatctgaatcatacagactgccgacagtgaatcaatcgtgatggtatcgtaccaaccatctagctattttagagaaaatatttatgccaaaactctatatgactattcataaaaacactaaattcatcttcattctatatcacagaactatatctatcataaacagattcaacagatcacatatatctacttcaagtaaagtaatcatatcatcactatcataccaatcatcta

SEQ ID NO: 146306 - DNA, 456 bp, Glycine max
tagctttcatcccttccgaaacttctacatatctgtgatatgggtacagccacacacagatgaacgaacgaatataaataagggcataaaaaagtacaccggaaattaatgaaataatgttaggtgtagaaaaaatttgcctgtaagaagcaaatccctaagattccaataactgttaatgggccatgatcaatgtttgaggagaaatcggcttgtatgaggccctcaatatcccatgcaactaatttataccaagattaacattgctaaaaatataagacaagaaatgaatcgtctatccctatcctggctacccacactttcttttcaatgcctaaaaaaaaagaacagtgctactcagaacctgtactctagcatcaaaaggaatgagctcaagatgtggaccacttatacgctagagccaagattattcatagacatggatcaaaccaatat

SEQ ID NO: 146307 - DNA, 463 bp, Glycine max
gggaaacatgattcatgaaacatgttactgtcctaattatatgactccttatcaaggcatgtgacataaaattagatgctagtcactgacaataaccaactttctatggacaaccagttaatcaataattaaattaaaaaagatacacttaattatataaaaataaccatcaaacaggaacaagtaccattttagaatctactgaatactgctctaaaactttccatttaaaatgcatatcacttactaagaagccaataaatgcaattgaattacctgtccaaggaacccagtagttccactttcaaccaaaggaacattagctgccaagcacaagcgattcacatgccggcgtgcatctagattgtcaagtccatttagaacaacattaaattgcttatagaagtccacattgaattcaggatctttgacatttgcatggtatggtgcaatgtttatgtgg

SEQ ID NO: 146308 - DNA, 437 bp, Glycine max
  unsure (1)..(437): unsure at all n locations
agcttatgctagcccataataataataatttttataataataatacataatctcatatattcctaatatttcttaacaattatataaaataaaatttaatatttaaacaatgacaactgccattccttccaccacttccctgtcactcattcccaaaccatttccgaaatcaaacaagacatggcataaattttcaacagagtattattatatattcttatgtaaagtaacatcttataagatgtaattaatataatatttcaaatcacctgatacataaagaaagaattgatgtcattatttatacatcatgcttgaatattactttcactgatgattcttatatccttgagcatttagaanagttaatttgaataactcatgtgtattaaaatgctttttaattggattgattgcttaaatctcttatatatgct

SEQ ID NO: 146309 - DNA, 452 bp, Glycine max
  unsure (1)..(452): unsure at all n locations
tagaatanatggatccttaatctcgtgtgcacaacccaacaaatccataaaaaaacagataaaataattattttattaataaactatttcttatataagcttaaaataaatggattgttagtcttatgtgcctaagccaacgtcctatttatttattaattagatgattaattttcggtaaaaaactgactaatcacatttagtgattttttttatcaataatatttttttctgtgcataggatttaaaaggaaacattacttaaagaaattaaatctattagtactactcaaatcaacaatttattcatctttaaatatgattacttttattatacaaattaataaccaagtcaaattaagaatgtctacattatataaataattattatataggtcgaactatattgctctatatataaattgagaaaacatgttggcacaccaagcttt

SEQ ID NO: 146310 - DNA, 437 bp, Glycine max
  unsure (1)..(437): unsure at all n locations
agctnggttgaccttccttgacacttgtcatgcctgctagcctatttcattattgctacttaatgcacatgttcatgtctttgaatataatgcacttcactttggaaggttgttggttgatgcatgttaagtcatctatgtttgtgtgattgatacatatgaggcaagcaccattttggttaaccattcttgattccttttgcttgaggacaagaaaactgttattttctttgcttgaggataagcaaaactgtacatttgggggagtttgttaattgttattcatgagcctttattgcattgaaaataagtgaaaaaatagcaatgtgcctctaatttacagtttcttttgtgaagattgtaaatattttcattcttgtatgaatctataaagtagaaacaccatttgtgtgaactaatgttgaatttaacttagt

SEQ ID NO: 146311 - DNA, 456 bp, Glycine max
cgcttgtggcgcttctatggaggctggatctttgagcttcaatggggtcctttaatggtgattttccaccatggagatgcagcggaagacaaatgaaaagaggtgagaggaggcgccatccattaatgaataagccatggaagaatgagcttcaccaccaagatgagcctcggataagaagcttggagaggatgcttcaatggaggaaaacaaagagggagagaaagagggaggggggagcaccaaattgatcgaagaaaaagggagagaagttgaactttgagttgtgtctcacaagactctcattcatcaaagttacaacaagtgttacacatgcttctatttatagactaggtatcttccttgacaagatatcttgagaaaacttccttgagaagcttctttgagaaaacttacttgagaagctagagcttatctacacacactcctctcatt

SEQ ID NO: 146312 - DNA, 293 bp, Glycine max
gtgcaagatatgcttctagtgtgattacacattgccaacaagttactatcaagcaaagaaaatactatgtctgatgggtatggagtatcaaataatacatgtatgccttaatgattgcatattgtatagatatgggcttgaaaaaaaatgaataaatgcccaaagagtggggtattaccgctcatagtgaaggatgatgaaaggtgttacgataatgaaagcatattcaaaagcccccccacgaaggagttatggaattcttcgatcattccacggtttaagcgcttattcgc

SEQ ID NO: 146313 - DNA, 403 bp, Glycine max
agcttatactgagttcagcctaccatccttatactgattgcctaactgaaccgaccattcagtcattggaggaccttttgacggtatgtgtcttacagcataaaggaagtagggagagatttcttccattgatagagtccacttataataacctgtttcactctaccattggaatgacttcctatgatactctgtatggtagaaggtgtacgacacccctatgttggttagagcccggagaacgcctcaccttatgaccagaagtggtacaccataccactgagaaagttaatctaattcaggaaaggatgagaactgttcatagtacccagaaaagttctcatgattataggaggaaagatctggaattccacgctggtgatcatgtattcttgagagtcac

SEQ ID NO: 146314 - DNA, 363 bp, Glycine max
ctgtaggattatggtgcacccatcacatgtggtactacgtggtgttctgtctatggtgcacaacaagctttccacatccacaatgcgcgcataaacccaccattccctgttgcccacctccaactgagctcacgtactcccacgtagcccatatcctcggttctctcaataccgggtccccatcaatcctccctagcttccacaacatccaagaaaaacaacattcaaacagcacaagctatcacagccaagcaaaacagagcaaaggcagaaaactctgtcaaaacaccaaccaaatcacagcttttctcacttaaagaccccagtaacaattccttcgttccaggtcattaaccgttggat

SEQ ID NO: 146315 - DNA, 458 bp, Glycine max
  unsure (1)..(458): unsure at all n locations
agctctaccacatgtaaaatgggttatgtcttagagcaaaacctattaaaggcatcaagactagtaaacctcatacccccattctccttcaagatgcataacttatcccaccctagccatccaacacctttggaatctcttatattagggccccactaataagaaatcatcatcctttgtaatcactactagaaaataaggttttcacatcggttatttaagactttcaacattggctattaactgatgttgaaagtaatatcgttaccatcggtttttcaaaaccaatgttaactaataaatacaacatcgattatttaaataaccgatgttagatgataagagttatgagaaaataangctataaatctacatatcaacatcggtttttaaaaaaccgatgtaactggcctaacacatctggcttatatgttggatcatccacaaaccttatatct

SEQ ID NO: 146316 - DNA, 239 bp, Glycine max
ctcatctaattcgacagtccaatgtaatcaaatacaatttataaacctcataaaactaactgtatgtctgattacatcaccataaaatagcttatataggtaaatcgtaaaatagatgaaactcatcttcttataatgctctttatattcagcaatgaagctaataatcatacgaaagatacattgcttgttttgcagctatacttatgcttaatattaatatagacgacgtacctctt

SEQ ID NO: 146317 - DNA, 438 bp, Glycine max
  unsure (1)..(438): unsure at all n locations
ctgtgactctnggcaaatatcttaaaactagtcaccttttataaattgtgactctcttgaaaactagtcacttaaaaagatgtgactnttgataaaatcttcagaaacaagtcacttgaagaattgcgacttttgtaaatttttttttcgaaatcagtcactggtaatcgattaccatgaaggtgtaatcgattacacatcaacagatgtgactcctcagcttaagtgttaaaatcaaaagttagaagctctgaatcatacatattttggaatcgattacacaagtcaaatgatttaaaatgttaacacaagttgcactcttgaaatttgaatctaacatttaaaaacactggtaattgattacatactcatggtaatcgattacaactatgtaaattagttttgaaaacaatgctggctactggtaatcgattacta

SEQ ID NO: 146318 - DNA, 461 bp, Glycine max
  unsure (1)..(461): unsure at all n locations
agctttacagcagatatantaatgactttctatcctagaattaaaataacttaatgccattaacctagggaattaaaacaaacttaatggctgagtgtaactgaaattgtggcaaccaaaagtcaccctcaacagccaacaagtcagccaccatttggtctcccaaaaggctgatgcctatgttgccaattgggcccttattacaacttgaactaaagcccttttagttgattaacccaaaacatattattggccagccaactgtacaaggattgggccattatttagacaaacaaaacactctaaaattgaaataaagtggtgtcatttattactcctccatttgggccatgatacaactcacaaccttggacttttttccttgaaacttgggcttgtattcaaatagtatggacaacacttgttgaagagcttccttggctttgcttgctctaaccctt

SEQ ID NO: 146319 - DNA, 461 bp, Glycine max
  unsure (1)..(461): unsure at all n locations
nntacagcagatttagtaatgacccactaacctagaatttatataacttaatgccattaacctagggaattaaaacaaactaaatggctgagtgtaactgaaattgttggcaaccaaaagtcacccccaacagccaacaagtcagccaccatttggtctcccaaaaggctgatgcctaggttgccaattgggcccttattacaacttgaactaaagcccttttagttgattaacccaaaacatatttttggtcagccaactttacaaggattgggccattatttagacaaactaaacactctaaaattgaaataaagtggtgtcatttagtcctccatttgggccatgatacaaatcacaaccttggacagcacttgttgaagagcttccttggctatccttgctctagcccttgtcataggtcctccaagctcttcaagtggatccttgcccttgctctt

SEQ ID NO: 146320 - DNA, 437 bp, Glycine max
  unsure (1)..(437): unsure at all n locations
agcttgcctcaaagaggtccaataaggatttgcggtcgaaggaactatttccgctccggagtacgacagtcaccgctttatgagcgctgtacaccagcagcgcttcgaagccatcaagggatggtcgtttctccgggagcgacgcgtccagctcagggacgacgagtatactgattttcaggaggaaatatggcgccggcagtgggcaccactggttactcctatgaccaagtttgatccagaaatagtccttgagttttatgccaatgcttggccaacagaggagggcgtgcgtgacatgagatcctgngttaggggtcagtggatcccgttcgatgccgacgctatcagccagctcctgtgatatccgatggtgttggaagagggccaggaatgcgagtatggccagaggaggaaccggtctgatgggttcgatg

SEQ ID NO: 146321 - DNA, 163 bp, Glycine max
ttttattcatggccagttggattaccaagtttaccaacgcatctagtttaccttccacttcttatctcactgatgaagataatctgggctcttattcactcctctatgtacaatatcatcaattctggcactatattgctgggagtttgaaaccctcttttct

SEQ ID NO: 146322 - DNA, 327 bp, Glycine max
tgccatccagccgaccaaatctaatatcaccgttttccgagcgaagctagcgcaccccacacgcaaacgcttcttacaaccaattcgcaaccgattatacaaacgtgcaagtgcttgcacaaaatcgatcggcgcaagatcctataacatgtcaaatatatgaaaggggagcgacacattaacgcgggaagcctgatagcctatcgcaaaaatgaccgaatcccatgcgaagaccattttgcgaaacgcataatgaccccctccaaataacatgcgatcctatgtaatggagtgactagacgcatccatttccacatttgacacatg

SEQ ID NO: 146323 - DNA, 465 bp, Glycine max
  unsure (1)..(465): unsure at all n locations
aagtcacctgcngcatgcaagcttcttagtntcagatgatgcagatgggtttgtatctacctcatgcactcctctaatgactatggcatcatttctggcgctaaactgctgggagttggaagccatcttctcaattaaatttctggcttcagcaggagtcatgtctccaagggttccaccactggcagcatctatcatacatctctccatattactgagtccttcataaaaatattggagaagaagctgttctgaaatctgatggtgggggcaactggcacatagtttcttaaatctctcccagtactcatacaggctctctccactgagttgtctaatacctgagatatccttcctgatggctgtggtcctggaagcagggaaatttttttctaagaatactctcttaaggtcatcccagctcgtgatggaccttggagcaaggtaatacagccagtcctttgc

SEQ ID NO: 146324 - DNA, 472 bp, Glycine max
  unsure (1)..(472): unsure at all n locations
tactaagctgccgctgagctgcctattaacttccctaactctntttttcttgttatccctcggctcttgaccttgacttgatagaacctctttttgagtgaaggcatttgacttgatcctatgttttactaaagtgaaaaaaaccggtgcgaatcaaaactccgacatctatcatgggtggaatggatgaatgcatgaagaaatgcatatgacacagatgcaatttatgaatacgggagctcgggaaattgtctccttcttagatacaacatcttggaggtagcaaagtgcccgacatatgtatttaagaaggtgacacggaccctccgttggtttgccaaagagaggggattaagacgggacccacgtatgatgcatatgcgaaagttacaacacggtgatgtacatagtacgacaatattcacaaacaaatataagcaaaagggtacttaacacttatgcatggcagtgt

SEQ ID NO: 146325 - DNA, 351 bp, Glycine max
ttattcgtgaccacagagtggtacctggagatatgtcgcgggggtcaggagaccttggggacgtcaggtggggtgctattgcccaaaaccaagcttgaccaatcccgacccaacccgggcatagtcagtcagtgagaacctgtgatgtacctaaacaggcgagctcctggcagtcaacaaataaaaggaacaaagaccacaaagcaaggaggcttgtggtggctggccagctgtgaaacttgattgatatgtgagatatggtctctggtaatcgattaccaagggtgggtaatcgattacaagctttaaaatgaatacaggaggctaagatggtctcttgttatcgattac

SEQ ID NO: 146326 - DNA, 464 bp, Glycine max
  unsure (1)..(464): unsure at all n locations
agctggttcgaggtacttacccattgaagatcgaagaacgattaattctattgaataacgtcgaagaacgggcgaagaacggtcgaaaccttcgcgaaattcttcacggaaaacgttacggaaacgattcggaagcgcctcggcttagattttcttcacggaaacaatttttccaagcaaattcgaaagagagagaagtgcctaagggctgaacccttttcttcttcacttcctcccctatttatagcaaaatagaggaggtggttgccgcccagctcgcccaggcgagccaggttgcttcctccagaagcaacagccttctggagggcccaagtgggcctgggtgctatttgcacccccatctttactaagtacacccnctctgcttgttttgggtgattcttgtatcgtaaagatacggaaacttacgaatttcgtaacgatacttggtgtctttccgtaat

SEQ ID NO: 146327 - DNA, 407 bp, Glycine max
  unsure (1)..(407): unsure at all n locations
agctngttgcaggcgagggcgaagttggttgttttatatngctgatggtttggagttctaaagcaagacgacgccaatggctgtgcccgaagcatcggtgtctaggtaaaatggaatcgtaaaatctggggaagccaatatagagcttgtgtcataagtgactttaagtggtcgaatgccttctgtgcatcggtgctccactggaacttatctcgacaaagaagcgtcattaacggtgcagcagtggcggcatagcctcgaatgaaccttctatagaatctcgtgagacccacaaaacttttgatgtctgtgggcgatgcgggcacaggccaagaaagcattgcctggattttatcggggtctggcgcgatccccaccgccgagatgacatggccgaggtagatgag

SEQ ID NO: 146328 - DNA, 424 bp, Glycine max
  unsure (1)..(424): unsure at all n locations
ngaatctttcgggtgaactcgaagggggttcaatgtccattgtattataatngcagaaacaagacaaccccagaagcaatttaacaagacagcactattaagacagtttttttgtcacaatgatgagaaagtcacaaggaacaaacaaccccttcctcttcaacaaccaagcacaaatttgatgactttttgcagtatattaccatcataccctccctaatattcgtaaaccaaatcatccaccaagtgacgtgtttgatttagtttattgagaaatataataatgcattgcccactgcatctgcatgaatcaattgacgcttaagttgtttaaggttaacaagaaatatcgttttgatttctggttatataaaaatacaaataaatganagaaaatttttattggtctataataatattatct

SEQ ID NO: 146329 - DNA, 454 bp, Glycine max
  unsure (1)..(454): unsure at all n locations
agagncacctgaggcatgcaagcttgcngtgggttggtacaaaaagaatgtgaatcttgtgtgtcttaaatagagcaactaaagtatatcaaagggtattgagtggggctataaacatataaacaaattatctttttttttacgtacttaacattaagacatcctttgtttgtttgttttttaagaaatcttttaaattctttcaaaaaaagaaaaaagaaatcttttaaatgaaaaatatattaaaggtttacatttatgacttctctattaatagttactaactattcttagttagttcttatatatacgaactaaaatattaagggattctttaaatgattttatgtataaataaatatatgtttttataagaatatctttattctattaattgtgggatcatataatttgaagataaatgaccattactcttttttgttatttattcatt

SEQ ID NO: 146330 - DNA, 389 bp, Glycine max
  unsure (1)..(389): unsure at all n locations
tgcgccaattctgccatttcgagggtcaaatgggctnggttgttatatactctgcacttgaataatcgggttgcgaaattgggctttgctttgtgtaattggtttaattaggtagataagtagggcctaancactgcccatccttttcttatgagtagacactatatgcatcaatggatctagttatatattcagttagttacttcattttgcacaaaaacagatttagaaacttgttgtgcaagctttaggatcaaactctcttccctctttttttctcaaatgttcttccttttttcttgcacaaatttcattgcacttccactagttatgatcatggaaggcgaaacacttaattaatccaaggatccattccaagcaagactaaa

SEQ ID NO: 146331 - DNA, 433 bp, Glycine max
  unsure (1)..(433): unsure at all n locations
agcttagagccaattcaaacgacaataacatttttcttgatgtctganngagncctgccatatatcgagacgctcgaaattgaatgttgaagcttatagccaattcagacgacaataactttttactcggatgtctgattgagactcgtaatataatgagacgctcgaaattgaatgtttaagctntgagccaattcaaacgacaataactttttactcggatgtctgattgagtcctgtcatatatcgagacgctcgaaattgaatgttgaagctctgagcctattcaaacgacaataactttttactcggatgcgtgattgagtcccgtcatatatcgagaagctcgaaattgaatgttgaagctctgagccaattcaaacgacaataactatttacttggatgtctgattgagtcctgtcatatatcgag

SEQ ID NO: 146332 - DNA, 445 bp, Glycine max
  unsure (1)..(445): unsure at all n locations
acacacgatactaagctaaatattcaatttcgagcgtctcgatatattacgagtctatattttcttccgagananaagttattgtcgtctgaatatgctcagaggttcaacattcaatttcgagcgtctcgttatattacaggactcaatcagacatccgagtaaaaagttattgtcgtttgaattggctcagagcttcaacattcaatttcgagcgtctcgatatatgacaggacgcaatcagacatccgtgtaaaaagttattgtcgtttgaattagctcagaggttctacattcaatttcgagcgtctcattaaatttcaggactcaatgagacatctgactaaaacgttattgtcgtttgaattggctcagagcttcaacattcaatttcgagcgtctcgatatatgacatgactcaatcagacatccgagttaaaagtat

SEQ ID NO: 146333 - DNA, 343 bp, Glycine max
  unsure (1)..(343): unsure at all n locations
gcattgataaatctttgaggaggaaagaacctcactatgaattttgcctccacctcttaccaagagttgaggcttttagttggatatgattggagccatgttttttacttacctgctaatgaaaattgaaaagctctgaggtagacagctntatcatcttcctcagaagctcccatagtactacatagtttcatgaaggtagacaaatgcgtgtatggatcctcatgatccattccaacaaagggatgtgagctaattagactaagcagtgctggctataattccacgaccttattactgatagtaggaatgactatgctgttgtaatgttttggtccttgct

SEQ ID NO: 146334 - DNA, 323 bp, Glycine max
  unsure (1)..(323): unsure at all n locations
tatcctatcaaatacaaactgattagctaggttaagaatactgatagaatatcttatcatatattttaataatatattctatcaaatacaaactgattagttaggctaagaatacttatagaatatcttatcatattttctatcacatatgtatttttatggaggttatttttacaatttgcgctgtagatggctttttttcttctttttaactttatatttagtcatttatagtatcaatggttatattttgtaaaagtaattntgaaatgcacacttattacaggttattattaaataaaacagtgaaaaattaaacatca

SEQ ID NO: 146335 - DNA, 457 bp, Glycine max
ctactgccttagcatcatatttgtctatgggggttcttttgttttccattccttcttgctatggggtatttgtatctcttgctgatttcatatttgtctgccttgttgtatgctgcttctgcattgaactctgatgggttggctttgttgtccctctcgagggactggactattgtgcctagtgacataaactccacatggaagttgtctgattccactccgtgctcatcttgggcaggagtgcattgtgataatgccaataatgtggtttctctaaacctcactagttattctatatttggtcaattatgacctgatcttggacgtatggttcacttgcataccatagacttatcatataatgatctatttggaaaaattcccgcagaattagacaactgtaccatgcttgagtacttggacctttctgttaacaactctatttgaggaatacctc

SEQ ID NO: 146336 - DNA, 289 bp, Glycine max
  unsure (1)..(289): unsure at all n locations
ctgcngcctgcaagctggaaggaaatatgattttatattatgttacagtgagaggtgaccacaaagatatctcccgcaatggtggtggcatacacatcttggccttgggaaatagataccttaaagcttgaccaacctctgtaggttttttttcctcaaactagccattacatttacatctcttcttaccataggaatacaagcagagctcctagtttttcatactgattcattattattatcagtagatgtcacttttttccctcagactttttttacagctcaactg

SEQ ID NO: 146337 - DNA, 425 bp, Glycine max
  unsure (1)..(425): unsure at all n locations
agcttgtcctcaccacacatcatcacgggttctgttgctactagttaccactttntttttttttaccatagttaatttcattttggttggtcatgtgtagaatcatggttatttgtttaggatattttagagtctccttttagatagatgctgtaatttgggtccatatagtttaactcagggctcttattacttctaaattaactttacctagcttagaactgtggttaatatcgccactttgggattttaatatccgaatatgtactactactatctatgcttaaatagggcttcttttatcctaaaaaaatgaatgtagactgacttggtctttntcatatagatttttttttcatgttatttctgcttgtgttgatagcacaaaattgtgtacgaataatataaatggaattactcggctc

SEQ ID NO: 146338 - DNA, 450 bp, Glycine max
tataacttgtaatttattatctttgtacaatgttattcttattacattttagaataaattacattttctcctgagagatgatattatactgctttcttcacttatgtttttttattttatttttaaaagcaaaacattacatccaaccaagataatagcagagccacaagaagtcacctagctaagtccaaaaaaaataaaattcaggacattttatttttagtgtgcaaggagtttcataaaaaataaaaaaatataaaacaaagagtgtaaataacaaatccaagaattcatgttgtgatgtcgcgggattgcagaatctaatgaacaattaaataattattttacaagtgttataaattatccgccaaagtttcaaaatctagcacatattattacgaaactcgagccaagggatactagcataaggttagttttcacattggttta

SEQ ID NO: 146339 - DNA, 422 bp, Glycine max
  unsure (1)..(422): unsure at all n locations
agctntttcatgagagcccctatgtattttattatatttgtggggaacctctctttggtcttgccaccaattttatgttatgatgtcccttgaatggcacttgaggaatttcctttcccttttcttttatatgttgttcctttgtttgcatttcattacatgctcacattgaggacaatgtgcatttcaagtatggggggagggtttagaaaaatttgttttctgtttttctattttgctttatgttttctattttgttgtatttgttttgttgtgttgttttactgtttttacataaaggaaaaaaattagttcctgaaagtgtaaaaagtgtgacaaatatatccaaatattaatagtagattgtgactaattattataattttgaaaaatttatattgatcgcngcaaaatattatcaa

SEQ ID NO: 146340 - DNA, 448 bp, Glycine max
actagctgcttgcctctactgtgcctatccattattgctctgtcactttggcaactgcaatttaccaaggaacatgaactgcagttgtggttcatttgaaccaacttcttcttcagccttttaacttccttcacaacctcagatgacattttcaattctctggttgcaggttttttcagatcttttattgagatttctttgccctttatcctatggaattcaatataaacatctcctactagtgcccatgccttggcccagaaaaggtaagtagaagactttctttcaatatagccattaacagtctcatcttttacatcatcctgccacgtcttttcattaagatcaatgagttttctctctaaggatgagccactgaccattgaagaaataaattatgtgtcttcaagatgtggaggcattgatccataaacagaacatgatagct

SEQ ID NO: 146341 - DNA, 380 bp, Glycine max
  unsure (1)..(380): unsure at all n locations
tgcagagcttgaaagagcccgagtagtctaatagaagttcaagtccatagccatcaaagtctgaaaagagtatgatgaactaagggacgtcaatatggccaccgctgatgccttggaacgagaaaccaagaatgcccaaaaggaagaacacgtgccagcaaagttttgaggggctntatagggcaacaatagtaagctcaagctccgaagaggtgaaaggaatcatcacgggtcataggcatgatcttgaaggacgagctaaaggcttaccttatgtcgaaaagaagtttgtcccaacagttaagcgagactgaagggaatatgtgggccgtcatcgatgagtgcaaatagaagctaaatctatcggcgactcacgagca

SEQ ID NO: 146342 - DNA, 434 bp, Glycine max
  unsure (1)..(434): unsure at all n locations
ctatgaaactaagcttgcaacgtcaactctaaactngcattgttattattctcaatactagacaaccttntgtgccaacaagttagactcaaagctctggggacttatgtactgtctaggattcacagaatgatgtggcaagtgacgtgacattaatatatgcacgtcaaccctggtacatgaacatggataccactcgcttaacaactgagtcattgggctaataagttgttaatatatttgaaacttaatgataatgtcattgtcctcttatcaaattgcacgtacccacttatttcgtaccaatgaattatctataggggtgctacgctactattataagctcaacaatcaaagaaccttgtgctcccatccgacattgtaaataattacgttctaccttcaattttcatttattctcaactcactcacat

SEQ ID NO: 146343 - DNA, 398 bp, Glycine max
  unsure (1)..(398): unsure at all n locations
gctatacgcatatgaaaagtgtagtcgattataaaacatactaagattgaactcacataaggaatagtacgagtagaagacttgattagatgcatcagaccttgttgacaaaactntgtcaagctcttttacattgaaaaccacaaatctaggaaattcctttttttttttatcgaacattggttacaaatagagaaaaaatttatgcacttgaaaagataaaataaatctatattatgactttagtatcttctctagtctcatatataataaacaaaattgtttgatatgatagacttaaatacaaacaagatcaacgaattggggttaatttaatgcaatcatttctaaagatctttatgtaagtagcaatgtattttcagtactctctttattca

SEQ ID NO: 146344 - DNA, 429 bp, Glycine max
  unsure (1)..(429): unsure at all n locations
tcttattntttaattctttgtcaaatccttattttttttttttttataataataancaaacaataatttagtgctacaaaaaaggtaagcaacccatatttgtgttgttcttgtacatgtcacatggccatttagattttgaggcctacttgggaatattagcaacccataatatgttgggtagagtagggacgtgaaaagacaactttttttccttatgaaattctttgaacgtcctatattggtcaacacagctcatcttttctctatcttttcccccgtaattcacgaaatcaggacacacaaattaattaacggcatatatgtgtcggggtgaatacatcatgatgtctagcctcctccacatttgatgattatgataattattaatattggctttgctcatcgttatttcatctcattaactcc

SEQ ID NO: 146345 - DNA, 447 bp, Glycine max
  unsure (1)..(447): unsure at all n locations
agctntacaaacgaataacacttggacccttacagactttctcagctaataagaaagctattgggtgtcgttgggtttataagattaagtatcatgctgatggctccgttgaacgatataaggctcgacttgtagccaaggggtatactcaaatggaaggattggatttccttgatactttttctccagttgcgaagctcacaacagtcggattattgttagcattggctgctattcatggttggcaccttcgtcagctcgatgttaacaatgcattccttcgtggagaattaaatgaagaagtctatatgcagctgcctccaagaatgcaagtctcacaccctaatcaagtttgtcaattacaacgatcactttatggtttgaaacaggctagtcgacagtggtttcatcgtttgtcctcatttcttcttactcatggtttcactc

SEQ ID NO: 146346 - DNA, 463 bp, Glycine max
  unsure (1)..(463): unsure at all n locations
ggttataacctaatatttgatccatccaagaatgagtattacattatctatatattaaaaacaaccaaagagatatgggatttgttgagcatcaactacgaaggtacaaaagatgttcaacttggaatagtgccactctgatgaggcactatgagagtttctccatgaaagaagaattatttgtggatgacatgtttggaagacttcaagttcttataaatggacttgaagctctagggcaccttcaccaaagctcaaataaacctcaagattttagacaactttcccaaggtgtgagaaccaaaaaccatagccattcaaaaggatagaaacctgaaaactcttgccttggatgaattggtgggtatcctaagagtccatgaagtgcatctttagaatatagatcatcttccaaanaaagattatgatgccctcatgtctaaagagaccatctctagaaaag

SEQ ID NO: 146347 - DNA, 271 bp, Glycine max
aacaaacaggagagttttacacccttcattgcatagccattcttccactaatccttcttattgaaatagtattggagatgctttttctctgcacaacatcctctccttatggtattaacaaccttcctttgttttattatatgggagaacagtcgctagaatgctcttatccacttttaatctaatcctatacctttttcctaacggcgtaactaactttgccgatacatcagtccctctgccacttagaggcgaagattcaacctcaact

SEQ ID NO: 146348 - DNA, 429 bp, Glycine max
  unsure (1)..(429): unsure at all n locations
tcttagtctcagatgatgcagctgagtttggagctaccnaattgtactcctctaatgactatggcatcatttctggcgctaaactgctgagagttggaagccatcttctcaattaaatttctagcttcagcaggagtcatgtctccaagggctccaccactggcagcatctatcatacttctctccatattactgagtccttcataaaaatattggagaagaagctgctctgaaatctgatggtgagggcaactggcgcatagttttttaaatcgctcccagtactcatacaggctctctccactgagttgtctaatacctgagatatccttcatgatggctgtggtcctggaagcagggaaaattttttctaagaatactctcttaaggtcatcccagcttgtgatggaccttggagcaaggtaatac

SEQ ID NO: 146349 - DNA, 443 bp, Glycine max
  unsure (1)..(443): unsure at all n locations
cgtctttgtgatggtctctatttggttggctatgatcttgttttgggctagtagtgcgtcttgtgatgtgagcttaagaagactcttctttgtaggtgtgtaagctcgaccacgaaggatgacatggtcactagctgctatgttttcaatcaactccatagctgctatgttttcaaccaaactccatagcttcaaccacctttgaatgagtccaagaggtggtggaataaagagatctccacctttcccttagtgatcttggactttggaaaatttttcttaaaaaatttgtccaccacctcatcccatgtctacaagttttttttcccttgaatgagtgccaaccaccttttacttcaccaaccaaagagaaagaaaataggttgaggcggatcttcangaacttcaactatattcattgtgttgaaatctctatgtatgta

SEQ ID NO: 146350 - DNA, 438 bp, Glycine max
  unsure (1)..(438): unsure at all n locations
cctgangcatgcaagctaaagaagacgcggaacggatctgattttgatatttatgaatgaatgancctaagacttctaatcttccgcttgaagtttccgcttcttctttatatgattgactcctaaattctaatgacttgtcatttgtcaattccgctcttaaaacactctgccacagctcaatctctgtcaatttttgttaacactacaagtcctggttcatttttcatcattgatgttcgcatctattacaaaattttatttgaataatgttttttgaggttgaaaaaaaaatactgctttatcttagttactgtgcacatcataataccgtgtcatatcattctcactaatcaatggtgaagaagacctctgacatgtaataattgattggcactcttagtctttccctccgtagctgcaactgaagcacttatt

SEQ ID NO: 146351 - DNA, 373 bp, Glycine max
aaaacacataagtgtaatgacaaaagtacatataaagcaactaaaaaatggtgctataattatggccaaacttggaaccaaactgcacctatataatggaaacaaaaaaataaaaaagacaaaacaaaattataaagggcaacacaataaataagcaattgcaaaatcacagacaaaagcatagaatagaacagttatatgccataagattctaaatcaaaaaaaacacaaagataagagaaagactcaagtacgaaacatacagaataaatgataaaatagcacagatcgaaaaaaacacaagagagagaaaatgtattagagaaacaaccaccactataacgccgaggagaaacccaacatcctaaaaaaa

SEQ ID NO: 146352 - DNA, 410 bp, Glycine max
tcgaccttgctctagcctctggaaaaataaattaagttatttgtttaagtacataaaggaatgttttgataatggcacattgcatctcattgcgctactgagtgatggtggagttcactccagacttgatcagttgcaggtgattatttggggttggagctgtttttccttcatgtgtattcagtttattctttctaactaactacttttgtacagttgttgcttaaaggagttagtgagcgaggtgttaaaagagtccgtgtccatattcttacatatggccgtgatgttttggatggctcaagtgtggggtttgtggaaaccctcgaaaatgatcttgcaaacttgcgcgcaaaaggtgtcgatgctacgatagcatcatgtggaggtcgtatgaatgtcacaatgga

SEQ ID NO: 146353 - DNA, 438 bp, Glycine max
  unsure (1)..(438): unsure at all n locations
tgctctgttcatgctctcccaatattctatatgtttatctaggatctctatctgatactatgttagatggcacaccatgtaatctaacaatctcacttatatacaaggtggtcaacttcttcaaagaaaatatgatattgatgggaatgaagtgagcagacttattcaatctgtcaacaataactcatatagaatctaaacctctacgggttctaggtagtcttaccacataatccatggaaatactatcccacttccactggggtatctctaaaggttgtaacttccctgaaggactctgatgttctatcttagccttctgacaaactangcacgcatagacaaactcactaacctctctctttatgttgggccaccaaaacatcatctttanatcctgacacgtcttggtagcaccacgatggatgctcaaattac

SEQ ID NO: 146354 - DNA, 424 bp, Glycine max
  unsure (1)..(424): unsure at all n locations
agcttgccgcccagctcgcccatgcgagcttctgttgcttcctccagaagcaacagccttctggaggaatcttctggagggcccaagtgggcctggntgctatttgcaccccctgtttactaaatgcacccccttttctattatttgtaattctttttccgtaacgttacgaaactttacaaatttcgtaacgatacttattttccttccgcaaggttacgaatccttacggattatgtatttactcttttttggctctcaaagaagttacggaaactcacggattgcgcaaaaacacctttttttcattttcgtcttatacggaatatcacggattacgcaagcctgctttcttttggatttatgagacgtctccggacttcatttattgtatgtcatcaagtaattatccccggacgaaatt

SEQ ID NO: 146355 - DNA, 423 bp, Glycine max
atgcggattgggtcttcaccggtcaaaggatcgatttgtgtctaacaaagggcaaatctgatcatcatgctttcatgaaaaaaactggggcaagtaaagagagtgagaatgagagacaaacccatgccgtgactgccattcctatacagccaagtataccaccaacccaacaatgtcgttactcaaccaataacaaaccttcttcttccccaccacccaattattcataaaggccatacctaaatcaaccataaagcctgtctaccacacaaccaatgctaaacaccacctttagcacgaaccaaaacaccaaccaaaaaggagatttgcagcaaatagcctgtacgattcaccccaaattccgatgtcatatgctaaacttgctctcatatctactcgataatacaatggtagccataaccc

SEQ ID NO: 146356 - DNA, 452 bp, Glycine max
  unsure (1)..(452): unsure at all n locations
cttaagtcacctgcggcatgcagcttgtagggtaaagtctcacgattgtctctttctcatgcaacaattgtnnagccgggctatacgagacatcttgccaaacaaagtcaggttaacgataactcgcctgtgctttntcttccatgctatatgtagcaaagtcattgatccagtcatgtttgatgagttggaaaatgaggccgcaattatactgtgccagttggagatgtattttccccctattttctttgacatcatgattcacttgattgtgcatctggtcagagaaatcaaatgttgtggttctgtttatctacggtggatgtacccggttgagcaatacatgaagatcttaaaagggtatacaaagaatctatatcgtccagaagcatctattggtgagaggtacattgcagaagaagccattgatatttcgtcagaatacttagaga

SEQ ID NO: 146357 - DNA, 434 bp, Glycine max
  unsure (1)..(434): unsure at all n locations
taaaggaagtgaacaaattagcatgggcagaaatgtcttcgtattgattggtaaatctgtttcccaaattcctgaaaaatgtaaagatccaggtacattcagcataccttgtattatagggaatagtaagttcgacaatgccatgctagatttaggagcttctattagtgttatgcctttgtctatttntaattctctatctctaggtcccttgcagtcaactgatgtggtaattcatttagctaatagaagtgttgcctatcctgttggtttcatagaagatgtcttagttagagttggtgaactgattttccctgttgatttttatattttgaatatggaggatggattntctcaaggattggttcccatcattctatgcagaccctttatgaaaactgctagaactaagatagatgtttatgcaggcacac

SEQ ID NO: 146358 - DNA, 389 bp, Glycine max
acaaagacaggagagcccccaatatttctccattggcgccatttaagaatgacccttcccctttacgtccacacacacaaaaagaattctaagctgaaatattcatctccaacaattaaataggcttcgatgtacatttgggttgtcatggttgtcaacagtttgtttaatagattatagtatagcttaaaatgcatagcacatgcatttacctggctgccaaagaaatttctatgcactgtacaatcaagtccaccaaccaaatattgtccaccagtcttctgtcctgaaatgatgtttgtcatataacatttctaaactattatctaattctttcaagtgagaaaaaaaactaagaataagatagctgattttgcttaaattcaaca

SEQ ID NO: 146359 - DNA, 465 bp, Glycine max
  unsure (1)..(465): unsure at all n locations
atcaccagggtctacccttgatgaggctattttgnttantttacccaacgaccgcccttggcgagtctcaccaaaatctatgacgaacgcatcactagtcgattctccaaagactcgtcaaacccacagtctgccatttgaataaatagtcacttttgtccctaaatgtgtaattcgatgataaatgtgtccctgaaagatgaaaatataaaatttagtccccgaaagtgtaaaaagtgaaacaaatatatccgactgttaactctcgttcgtaaccgttaataaaataacctacgtggcatagaggaatgaatttgtcattgaaatgattgccaacgtggtcatctctaattgtcagcatggggacatattngtcatataatatttcnttttactgttcgtcttcctactcctgacaaataggtccctgaaagatgaacatacaaaatttagtctcccaaagta

SEQ ID NO: 146360 - DNA, 439 bp, Glycine max
  unsure (1)..(439): unsure at all n locations
agcttccatgtcattctttttggatgcttcttcttcacatnnganggcttncacatcagtgctccagagactagtatcaacactgatggaattcacattggaaaatcgactgatgtgaaaattcttaacaccaacattgccaccggagatgattgcgtctcactgggagatggcagcatacatgtaactgtccaaaatgtgaattgtggacctggccatggcattagtgttggaagccttggcaagtacacgaacgaagagcctgtgaaagatcttttagtcaaaaactgcactttgacaaatactgagaatggtgtgaggatcaagacttggcctaattcttcacaaacttatcttgtcactgatatgcattttgaagatattaccatggttgatgtcttgaatccggtgatcatagaccaagagtattgtccttgga

SEQ ID NO: 146361 - DNA, 387 bp, Glycine max
  unsure (1)..(387): unsure at all n locations
tagcctatgttttccttcccttcggctgtatgactatatatatgaactgcgacactgtcaagtttttaaaatgacaaataaagggatacaaatcacttttgccgatggttattgaatatttatctgattttcagtttcaatgttttctagaactcatttaacagatagtatataacctttttttttctttttagcagttctgcataggtaccataaaagatgatatcctgtgtatgatcaacgaccctgcaacaatttaaaaaccccttactgtacttttnttttanataggagcatttaatgattgctactcttctactaagaagcttatttaaatcagtttttaaaatatgaataattttaaataaacttaatgttcatatcata

SEQ ID NO: 146362 - DNA, 419 bp, Glycine max
  unsure (1)..(419): unsure at all n locations
agctttacagcaaatgccaccctacttcaatcnttttaaggatatgnnaacacggaaacataagtatattcaccaagaaaacattgttgtggaatgaagctgtagtgctgtgattcaaaagatccttccacccaagcataaagaccctggaagtgtaaccattccttgttcaattggagaagtcactgtgggaaaggttcttattgacctgtgaaccaatattaacttaatgccactctccatgtgcagaaggttgggagagatggagatcatgcccactatgatgactttacaacttgctgaccgctccattaccagaccatatggagtaattgagaatgtgctagtcagagtataacattttaatcttccggaagacattagtgtaatggatatctatgaagatactgacattcctg

SEQ ID NO: 146363 - DNA, 405 bp, Glycine max
  unsure (1)..(405): unsure at all n locations
tgccttgccccttgatatatttgagggacttatgtgtcactatgaatgacaaattccttgggataaaggtagtgttgccatgttttcaaagcacgtactaaggcatacaactccttatcataagttgaatagttaagggtaggaccacttaactttttactaaaataagcaattggatggccttcttgcatcaacacagccccaatcccaacatttgaagcatcacactcaatttcaaaagatttttgaaagtttggcaacgcaagtatgggggcattagttagcttttgcttaagaacattgaaagcttcttcttgtttctctccccatttgaaaccaacattnttcttgagcacttcattgagaggtgctgccaatgtgctaaaatccttcacaaatcgtcta

SEQ ID NO: 146364 - DNA, 442 bp, Glycine max
  unsure (1)..(442): unsure at all n locations
atgcaagctttctcacgtatntgaaaagaatgccttttgtgttctttttcttttcgacgaaaagatatatagttcaccaaaccctaaaaactaaataaattggtgcagctgaaaaggcataagttctagccacaaaccaccaaatatttatttaattgcaataattaaataataaaataaaaataaaaataatggaaacatgggccttcaatcatcatcaatggcagctatacaaataaccaaccttgtctctgtgacgtgttaggcctgtttaagtctgcctctggtcatggacccttcaagtgcttcatggtccttgcccttaattgtgtcatcatcactgagatgggcccttttaagtatgcctcttgtcatgggcccttcaagtgcttcatggtcctttcccttaattgngtcttcatcactccctccttcttgaaat

SEQ ID NO: 146365 - DNA, 458 bp, Glycine max
ttaagactgtatattgatttctttaatatgcacactatgtgtttttctttctttaaatgaaaaccccatgggttggttcatataaacattcgtctctaaatctccattgagaaagacagtgttcacatccatttgatgtagctccaaggcataatgagctaataatgtcatgataatcataaaagaattctttcttgagaccggtggagacatctctttataatcaatgctgtcttgttgagtaaataccttagctacaaagatagccttgtcacattcaagatttccatgagagtcacgtttagtcttgaagacccacttacaatcaactatcttacaaccctttggcgattctatgagatcccaaacaccattatgttccatgaaatatatctcttctatcatgatatgtaaccacttcttacaaatatcacaacttacagcttgtgaaaatgaaa

SEQ ID NO: 146366 - DNA, 442 bp, Glycine max
  unsure (1)..(442): unsure at all n locations
accaagcacctgagctgcagctttgccatgctttcaaaaatggaagtttgtatttttatccttaacggnnncacttatgaaatagttgtctgctaatgagaatgacatgacaaagaaactttatgaaatgattcgggaagcctattttgatttactcgtgctgtttaatcctgttgatttatgcaatgcattctttggtggtgtgaatggactatttggagattgacattaacttcatttggtgaaaaacaatttaaactgtggtcctgattctcggtaccttcttcccaatttgattttgtcttcatgctcatagagaaatgcagtttactgaaatttcagttatgcttattaccatggcaaatctctatgagaaataacctagtgattaattgattataggatactgcctttatgagtgagggtcttgaagatctaattt

SEQ ID NO: 146367 - DNA, 419 bp, Glycine max
  unsure (1)..(419): unsure at all n locations
tcacatcacctcactgatctctattttctttctttggcaanaagagggacttnaaaccatgtgtgttcctggcctctagtcttgccaagtactaaaatattgcatctctcctcaacagctaaaacccattttggctcacgcctgagaaaatctaacagccattcataagaaagagagttatcaccaaaatggagagagtccagatatggagcagtaatgtcaaaagcatccgcgagaacccttttgcgttccagcttagaacattcatcatcacatatcagctttctttgtgctaggggaactatcttgccatttgcatcaactggatgaagaggtacaagcaatgtttgaataatggacgcttcatgtatggcatcagcattataattgctactgctaccaccaacatcacaaggaac

SEQ ID NO: 146368 - DNA, 398 bp, Glycine max
  unsure (1)..(398): unsure at all n locations
cggaaancaacacagcggtaacaatggagtagcaagatatatgcatcagagtatcaaatacaataagccaaactcacaaacaagaaataatcaaaccagaattgaaataacataaaatgtcaacaaccacaaaacatccaagactgaaatataaaatccacaaaataagcaaagtacttagcataataatgtaaattctaagaaactaaaagccaaaatacacggctgataaaagataaataatcataacctaaaatctaggaagacggaggtggtggtggaagatctaaactctgacgaatgtatccgacatcctcttgaagctgtataagacgaatgtccataccggcaaagcgtgaatctaacgagtcgaagccgtcaccaacatacgaacgaag

SEQ ID NO: 146369 - DNA, 450 bp, Glycine max
agcttgtgaaatcaatggaatccaagatttctcttgtttcttgtcgttcaattctgttcttagaaatgtgacctaagcgcttatgccataatgcttctgagtttgtattatcaattctacgcttagtaccacgcaattctgcattaaaggattcaccagaggaagctatagtatcaagtaaatatacattatcattaaccaagagtgaaccagttccaacaatatatgaattaaaagacaacctgaacacattgtttccaaatgaacacaaataacccaatttgtccaaataagaaactgaaaccaaattctttctaaatgacggtacaacaaaagtgtctttctaatccaaataaaaaccagtacataataataatctaaagtgccctatagcttccacttctaccgtattaccatctccaacatagatccgtctttcaaatcaattgg

SEQ ID NO: 146370 - DNA, 447 bp, Glycine max
atgctgcaaatatttacaatagacctcctcaacctcagtagtttattcaaccacagcagaacaattatgacctctccagcaacagatacaaccctggatggtggaatcaccctaatctcagatggtccagccctcagcaacaacaacagcaacctgctccttccttccaaaatgctgctggcccaagcagaccatacattcctccaccaatccaacaacagcaacaaccccagaaacagccaacagttgaggcccctacacaaccttccctcgaagaacttgtgaggcaaatgactatgcaaaacatgcagtttcaacaagagaccagagcatccattcagagcttgactaatcagatgggacaattagctacacaattgaatcaacaacagtcccagaattctgacaagctaccttctcaagctatccaaaatcccaaaaatgtca

SEQ ID NO: 146371 - DNA, 482 bp, Glycine max
  unsure (1)..(482): unsure at all n locations
actaagcttaaaccacagcaacacaaaatctatgtgtccaaaaccctttttattatttgtattttctacgctcgagaagcgaaatttagaatgaggtaaatttgaagcaaactctcacctcacacaagtccataacatcaatctaaacttgctcaaactggatttacacctaaaattccaccgaatcaaaatttgactcctcaacacccaattttgccctagaaatggctcttggttcactttggtcatttgtttttctctctagcgcagcctaacctttctcataagtcctaaatggcatttcaagctaggattaactcattntaacctccatttactatagaatccagatntagcctttcaactctcaaagcctcactctttttccactcataacaccacattctcactatctaaccctaggttaactctacctttcatctctaacagttttccataagcaatttcagtacatgaacatc

SEQ ID NO: 146372 - DNA, 347 bp, Glycine max
caaaattaggcaattctgcataaattaataattaatgcactgttaggataggggtggtttggttgaagagagaaaattactattcaagaagaatttttcaaaaaaataacgtgggtcccacacctctttctctactttaactaaaatatttcttctgatttctcttccattcttttctcttctacacaaccaaacacacacttaagagattttaacacagaacggaagcgaccatggatctacaattggctgagcccaaatatatgagccagtatcgttatgtgcctttctcctcaccaaatatgaagtctgtcttgagtactctatgtgaacgaacacactaacaa

SEQ ID NO: 146373 - DNA, 412 bp, Glycine max
ctcaccttgatgctgcttggactctggaagccgcgttgttttttttattatcgaagttttatttgaccgatgtatttcgatatgtttcctatattcatgttttcaattattttttctttttttcttttctcttttttctttaatgttgatatattgtattctctgaggtagaagtgttttcaacacattccagcttactggggtattagacataaaattaatttagttagttactataagttatttgagtaagttagttggttattcaagttatagttactagaagttatttgagtaagttagtgttagttactcaagttagttattctctatctttgtataaatacatcaacattgtaatactttgatcaatgaataaatgaatgtattctaaacctgctttttatctatc

SEQ ID NO: 146374 - DNA, 420 bp, Glycine max
  unsure (1)..(420): unsure at all n locations
gctctggtgggacatctagacttgcttttttatctatcttcaccacagattctgccttcttctattttcagattgggaatgcctctaacagcacctttgtcaatgattntcttcatgcctcttaagtgcagatgtccaaatctttgatgccatattttgacttcatcttctttggaggatagacatgtggaggagtaactggtttcttgaggtgtccataggtaacagntgtcctttgatctgctgtccttcattagaactttactcttctcatttgtcaccaagcattctgactttgtgaagtttacattgaatccttcatcacacaactgactgatgctgattaagtttgcagtcagtcccttcaccagcagtactttgttcatactatgaagtccttcatggactaactttcccatt

SEQ ID NO: 146375 - DNA, 430 bp, Glycine max
  unsure (1)..(430): unsure at all n locations
cctatgacctttatagccagctgttttgtttttgtgtggtatggnactgggcacgatgagagatattgtagggttatattttcagatatcgggttactgttcacgcgcatggtactattcacgtagagactccattttcattttctgcttcaaattccagtttcattttctgcttttaattccagtttcattttcattcctgtcttcgaatttcgattcgttttatgcctttgatttccttttttcatgctattaatggaaggctgaatctctagtgttgttatctcttgaggattaagcatagctctctttgaggtttngttattaatataaaaatttgatcagtttttccccttcaccaattaatttgtattttgttgctgatattaatccatgcatgcttaatgcttgattaattgactctgtgctt

SEQ ID NO: 146376 - DNA, 426 bp, Glycine max
  unsure (1)..(426): unsure at all n locations
agctctatccatggggtaatcattgatgtttatcttctaccatggatggttaagcattggtgtgttgcttatgcctttatagtggctaagcattcaaaaattgtgttttgcttctgtcttgagtggttaagcaccatgtttagtatatgctcttgatggttaagctttgttgattctacctatatgatggttaagtacttgttgtcggcttgcttttgtcttgagtggttaagcaccatgtttagcttctgctcttgatggttaagctttgttgattctacctatatgatggtgtngctggcttgcttctatcttgagtggttaagcatcatgcgtagcttctgctcttgatgattaatgttggtctgctcctaccatttatgtggttaagtgtgttagcttctgttaagaggtaaacattgtgtt

SEQ ID NO: 146377 - DNA, 446 bp, Glycine max
tggtggagggtatataccaatgctgcaaacctctatattatataaaatgaggccttacaatccctatgaagaaacagcagattcatcccatatggctgtcacgacaacattcccacgtgggtttgctttggaaattctgcacgtgtattctggaccaccagtgatcgtgtacaagttcatgcactggggctacatggagggtcctttcaaacgccacgccccaactggagagaaaattcaattctatggaatggcaattttcacggtaacataacttccatccacagataatcataagcaaccattttcttaacattaatactaaaataattaatgttaagaaggtacaaaatggataatataattattaagattttttcaataagacaactcttcacatttatgtacttcaaattcaagcatgtttcctatcaacctgattatct

SEQ ID NO: 146378 - DNA, 406 bp, Glycine max
  unsure (1)..(406): unsure at all n locations
agcttagcttctaaggaagcttctcaaggatgtgatcttagttnncagatgggtgtgtgtagctaagctctagcttctcaaggaagttttctcaaagaagcttctctaggaagttttttcaagaaagcttcttaaggaagctacctactctataaatagaagtatgtgtaacacttgttgtaactttgatgaatgagagtcttgtgagacacaactcaaagttcaacttctctccctttttcttccttcaatttcgtgctcccccctctctctttctctccctctttctttttctccattgaagcatcctctccaagcttcttatccaaggctcatcttggtggtgaagctccttcttccatggcttattccctagtggatgacgcctcctctcacctcttctcct

SEQ ID NO: 146379 - DNA, 446 bp, Glycine max
taggtgccaaagggtgtcggtgtttttgcgaagctgcgctcttgttgaaatatattaccaaaggtttgggcttcgcaagactgctctccctcgcggactgcatgcagatatgctgctcttctcttccctcactgccgacttccagtcgaccttgatctatcatctgctgtaacaattcctccacttacaaacacgtttccatgttatgcagctcgctggaatgcagcaaactagaatcctccttatgcccaccatggggaatcacacctcccttttgtagggcctcaatgataaacctcctatgggttgccacatcctttaaaggtttagaccggcagggcctatctgacccaatggcgttaaccgcccccccttcatgattggcgagcgggttggttttcacgttgggccgatcctcttggaacgtcagccatccagcatctatc

SEQ ID NO: 146380 - DNA, 333 bp, Glycine max
  unsure (1)..(333): unsure at all n locations
ttaagtcacctgcggctgcaagcttgactggcgagttgattttatccttattttcactntagnnattagccaattcaattaagaatgagaaatcccaaagagaaaaaatgtccgattgattntttcgcttttattttactaaaaggtattttttgattattatattattattttacctctttttttgatttccaacgtggttacggcacgaccgaacggtcggaattcattttaaccaaaattaacggatgatacaattcaaacgatcggtggaaatttattttatttttagattaagcgagaaattacttatataaatggcttaagcacctc

SEQ ID NO: 146381 - DNA, 449 bp, Glycine max
  unsure (1)..(449): unsure at all n locations
tctaaaccacgccgtttctctncccctctggcaacttttttaagccaaagtacgtgggaaccaacacaagatggaagaaaaaatataaataaattacacataatcattcataagtcaaagccaaatataatccaaccaaatataatacaatcataaaatactaagtgccaaataccgaaagataataaaagttcagaaaatgataacttaaaaagcatagccaaatacacggcttataataaacgataataataatctaaaactaagaaggcggtggaaggacgaagcaccgacaaagataacccacgtcctcttcaagttgggtgatgcgagtatccatgccttcaaagcgaccatccaaggaatcaaatcattcaccaacatatgtgcggagaccccttaattccgaaagaacttcattcataaggggtgaggaatcatctcgttga

SEQ ID NO: 146382 - DNA, 405 bp, Glycine max
agccttagaaaaccctctatgaatctcggtatgttcctgctaagccaagaaagctcctaatctcaaacactgacttaggactctcccaactcatcactgcctctaccttggaaggatctactgctatccctcccttagatataacgtgctctaagaagctcacctcctctagccaaaaatcacacttggacaacttagcatacattctattgtctttaagggtttgcaacacaactctcaaatgctcctcatgttcctctctagtcttagaatacactaagatatcatctatgaagaccactacaaaactatctaggtaggggtgaaagatcctattcatataatccatgaacacaccaagggcgttggtcacaccaaaaggcataaccaagtactcataatgac

SEQ ID NO: 146383 - DNA, 450 bp, Glycine max
  unsure (1)..(450): unsure at all n locations
gaggatataagagatatgtgtggcctcctcctgtgtttgcttagcaaaaataatagtcgtgtgcaaaaaaaaaagtgtgagatcatgggatatgattgggacacttttatcccttacctctaattccactgactttataagtaaagcaaagatagcttcaacacatagaataaacaaatatgaggataatgaatctccttgtctaagacccctctgagggtggaaaactctatgaggactcccatttaccataattgaaaaagaaataatagacacacatgtgataatgagagcaacctangaatcaagaaaacccatagtgagaaggacttggcttataaactctcactcaactctctcctaagcctttgacatgtccaatttgagccccatgtattctatattacctttgtccttcttcatataatgagaacactcaaagaatatcat

SEQ ID NO: 146384 - DNA, 359 bp, Glycine max
  unsure (1)..(359): unsure at all n locations
accaggtatagtcctgccaaaagataagggcgaatataagaaagaaagaaacacccatgtggacagtgggttagataatcagggaaacccatgcaggtcacatgcccccttttttttttttgtaattgacaacgtctaaatacaaggacaagcaacagnttgcatgcattattagcttggaggagtaagattgacatgctccttatgtaagtaagattgacattccctcatacatggtacggagaaaatgctttttttttctacacaaactaactataaaaagtgattttttttaatgttagaaaaatatattataaatataattcattattacatatctgttttatatctatcaattt

SEQ ID NO: 146385 - DNA, 433 bp, Glycine max
  unsure (1)..(433): unsure at all n locations
taaacatgtcanagnggaacctatcttcaccaatttcnattttttttgtgancgaaaangnncagggtgagattataagaacaacaatcacaacactcatgataataaattaataataacttatgttaataaacaattgttatagtgattatacaaattaaagtaataacaatagtgatgactttgattggatagtacattatgataatgataatatgtagattttttaagtgattgaaatgtaccttgagagtatgagtaattcatttttgtaattaaaaactaaaatttgatgactttctaaattgagcttanataatttcaagaccgtgtctaattaaactccacatgagccaaacatattttatttttaaaaatgtatgtaaaaactaacacttacacccactccaaagaaactccgatatttatattt

SEQ ID NO: 146386 - DNA, 428 bp, Glycine max
  unsure (1)..(428): unsure at all n locations
gttttaagtncttcctcatttctgttctattcaaagttcccaaagtcctattaacaacttccgtttgcccatcggtttgtgggtgacaagtggttgaaaataacaatttagtgcccaacttgctccacaaagtcctccaaaaatggcttaggaacttagagtccctatcactaacaatgctccttggcaaaccatggagtctcacaatctccttgaaaaacaaatcagccacatgggaagcatcatcaattnttttacatggaatagaatgagccattttagaaaacctatcaacaaccacaaaaatggaatctctaccattgcttgtttttggcagccccaaaacaaaatccatggataaatcaatccaaggatactccggaattggcaatggagtatacaatccatgaggctttaccttagacttc

SEQ ID NO: 146387 - DNA, 433 bp, Glycine max
gttgatttagcctttgtttcacttggttatttatcatctcatttaaaataactttcaaagtaagatgtccgattggagcttatttacctttttttgattaacagaggttatagtatgaacgatcggttgaattttattttaaaaatgattaaatgagattacaacataaatgatcggttgaaattcattttatcatttattaggcgaaataacggctaaacgatcggtcgaagctagttaaaaatggaagaaaaagataccgatatgaagaggaaagcaaacaaagcaagaatcgaccactaagggtacatagaatgaattaaaagctttgaaattgaaaactaaccggttgaagctcgatgaatgatgaagaacgaacaaagaacgacaaagaacgacgaagaacgtccacgaaattgatcatgaaaacgtc

SEQ ID NO: 146388 - DNA, 445 bp, Glycine max
  unsure (1)..(445): unsure at all n locations
agcttaccatacatattacagtaaanaaaacttttattgtgtcaacgcattctagttaaattcaaatgaaagtcacccttaataacataatataacccagtgccaaaaggttcctcgctatgcagaaatatgaggaagggtcattgtacgcaatcatacccttgcatatatacaaagagactgttttcgaacttacaaccaatcgattatcaagcacaactttatcactacgccaggactcgcctttaagaatcacacctttatttgagtcaaagtttctctttaatatattttaataaataatatatgcaccgataaaggttttcacaccattatccaagcttgaaccgccatgtaggtttttacaccaccttacaagtcatgttagagaaagtaatatcaaanatgatntctgattggttaaccgtataaaattctacccttt

SEQ ID NO: 146389 - DNA, 461 bp, Glycine max
  unsure (1)..(461): unsure at all n locations
actaagctactggtaatacaagaaatngngtatatacatgcaggatcctatttggttgaagaatcttcaatgaagatacttgcgagttatgatttactatccgaattacttgaaaaaattaactacatttgtaaatataaccaagttcacccgcaatttcttctctgtgtaatggctaaaaaaagtcccggttataagtacctaaagtggatttctgagaccaaacttgggatactgacacaatgctgcttgtctaatagtgctaatgaaggggaggacaaatattatactaatctggctctcaagatcaatgccaagcttggcggcagtaacgtggagctcagtaatggactaccttactatgagggtgaaggagatgttatgtttttaagggctgatgtcaaccatcctggttatcaagacaccaggagtccatcaattgcagctgtgggtgctactgt

SEQ ID NO: 146390 - DNA, 378 bp, Glycine max
gggggacatggaagaagtgattacaatctacacagtgaagaatgatttcatgggaaagcttagacataagcattattctggaatcacgaacataaaagcatggcaagttgaagagtactcaagaaataatcccacttaaaaaacactcactttacaatccttctaaatatgagcatcacgggtaccctcctatacaagtaacctctacctgttttatgtttaaagcgggacatttcataaaacacactcataattaaaataaacatatcggtttgtgaacaacatatgtaccttaaaaatctaactgatgcactactgaatctttgtcaaactgaataactctagcaaattttcaaaaattgacaacttttattaaat

SEQ ID NO: 146391 - DNA, 380 bp, Glycine max
gatttggttcttgagagggcacaagtttgtctcacaaaaattaaacacttgaagacattcttattgccgccctcctgaaatttggacgtaaatgtcgtgtgtagaaagtaaaataacattttttgtcactatgccatccatggtgcctattttgtatggattggttgatagcatagctgttatccgtattgttaagcaagggttaagattagcaccaaatgtccaagtgcttttttggttgtgggggaatgaactactattatttatgagtatatctttaaaaaataatggctatttcatatctttttctgtactctaatataaatatttcttctcaaattctctcattctattttccgtgcacaaaattaaacccaccc

SEQ ID NO: 146392 - DNA, 409 bp, Glycine max
  unsure (1)..(409): unsure at all n locations
agcttaacaaaaggcatgcgaagagggtggtattcctatatctattcccttatgtnatcaaacataaaaagggaaaaggtgatattgtagccgatgctctttctcggcgtcatgcattactttctatgcttgaaacaaaattgattggtcttgaatgtttgaaaagcatgtatgaaaatgatgaaacttttggagaaatttttaaaaattgtgaaaaattttcagaaaatggtttctttatacatgaatgctttcttttcaaagaaaacaaattgtgtgtgcctaaatgttctactacaaatttgcttgttcgtgaagcactcgaaggatgtttaatggggcttgttcgggtccaaaagactctatatacattacaagaacattcttattggcctcgtatgagaaagat

SEQ ID NO: 146393 - DNA, 154 bp, Glycine max
atctacctctattagcaccgatgctcggtttttttccattaagccggttctgtattcacgtgattatcatgacgcttcgggaagttactttattcaagcttctgtaattcacttatttatcaccgaaactcgtgaagggaccttattggaactt

SEQ ID NO: 146394 - DNA, 441 bp, Glycine max
  unsure (1)..(441): unsure at all n locations
agtcactgcggctgcagcttgaactttataaaactcttacattttcttattgtgcttacaacttcaaaagtactggtctattctaagcacctctaattaggtgtttatagttcatttttcatgacaacaattaaatgggagaacccaattaaaaaaaggtcaaagatctaaatgaaaatttaataaaagtatggggacccacagaataattaaacctatattttaaaaaggtattggtaccttttcattataaaccaataaattaggttgtacattaaattacatcttaattgggttgtaattcaattttaataatggtggtttacattttatgattgcaaaatnaaaactattgttgttcatttcaattttttaaaattcaatattaaacttgaaaaaaaaatgttttccgtaatgaattgcgcaacaaaagtactccta

SEQ ID NO: 146395 - DNA, 470 bp, Glycine max
tggggtacccatcacatgtggtactaagtgtgttgtctggctattgtgcacaacaaggttttcaattcacacaacgcgcataaacccaccatcccctgttgcccaccttcaactgagctcacgtactcccacgtagcccatatcctcgtttctctcaacacccggccctccatcaattcttccaagctttcccaacatcaaagtaatacaacattcaaatagcacaagctatcacagccaagcaaaacatggcataggcagaaaactctacccaaaacaccaaccaaatcacagcttttcacacacagatacaccagaaacatttccttcgttccggttcattaaccgttggatcgaactacaaatattactgtatgtctatattgcataagcctacattttgaccgttgggatctactatcaaacatacagaactcattcttcactactctttccacagccaaacacac

SEQ ID NO: 146396 - DNA, 363 bp, Glycine max
aaggcaaaaagatatgataagctcgctgctttcatgcaacaaacaatacacaaaatgtttcagaagacgcaacaagatgctccatcagcacgtaatccacctagaggtgagagatccaacccctattcttgtgggactcgtatggctacgttggaatctccaagattcaatggtgaatgaataaaacagtggcacatccagtgtgaaatttttttttcggatgaaatacacctgataaattcaaggaacgtttagcactagcccattttgaaggaatagcactgtggtggcatagtgcttacactaaatctgtacgagtggagaatcttgcttcgtggaatgaatactagaccttgtgacttg

SEQ ID NO: 146397 - DNA, 451 bp, Glycine max
  unsure (1)..(451): unsure at all n locations
atctattntaagtcgcagcccatgcacgatataataatttattggacacgatcagataagatgggatgaaataaaatctagacgaactacaatctagatgaaataaaatctggattagataagatttgataaaataaaattgtctgctctcttcaagttcaagcccaattccggattcaagtctaattgtgtataattctcctgaaattaaattaaaaacacaaaattagtcaagtaggcccaaatgataaaactacataattaatttgacaattaaggctgatcagtaattaaaatggtgacaaaaagggttaagaaatatgagaaaataatgacacatcaccaggtgaacatatttaattaatacattctgttttgcatccatgttgaacctgtgaacactaacacatcaataagttatatgtactcactactagctcaagtttatgat

SEQ ID NO: 146398 - DNA, 443 bp, Glycine max
gtcaccgcagctgcagctctaaatagcacagatgtgttttttatttatgtggaacgtgccttctatttcagctaataaagatttatttgtagatgattgcaatgaccattgcttaaatcccacctttactcatcttacttcccgaagaggaaacttcacatattaattaaaccataataggaggggaaaagaaaaaattaaaaaatgagaggaaaattaataagtttccacagggaagaaaattgtacatttgaaatctcaagagttaaataatatctatgttgtatcaatgtccttgataaaaaaaaaaataaaacaaaacacgctttgtttactagttcttcatgtggtgtctttgtcatcactgatgtgccctgatcatagtaactatcatcaacaatgccttctcccctagaaagaaatggtgctgtaatatacattac

SEQ ID NO: 146399 - DNA, 447 bp, Glycine max
tacctgatactgcaccaaacttagaattcttctcaattgttttactggctggaaaacaaggacagatcacaactcgagactcaatcttccttgaatgtgcgaggcaacaactctaccatgcatgaggacataatgtacctattttgaagttttatttagatgcttgactaattattttttaaatgtggccacttacgtatttttcttaattgtgtatagttgctgaacgatgaagatgtttcattgtgatttgctgttatctctctttctctcatatctaactgggcctgaccttcaatttgatagtttcgtattactcttcaagttaataaaacagaaatggaggtttattaatttagtttttttttcctttctttttttcataacaagtttccatatttacttaataatgaaacaaacagagctgctttcataaagtcttaaaca

SEQ ID NO: 146400 - DNA, 426 bp, Glycine max
agcttatagaatatataatagatatcaatgtcttttgatgaatcgattcatgtttcctttgatgagtctaatgctatttctccaagaaaggatattttagatgatattgcagaatcattagaacaaatgcatattcatggagaagattctaaaggaaaaggagaaggaagcaatgaagatcctccagtagaagtcaaagcaaataatgatcttccaagagagtggaaagcttcaagagatcatccccttgacaacattattggtgatatctcaaaaggggtaacaactagacactctctcaaagatttatgtaataatatggcgtttgtatctacgattgaacctaaaaattctaatgaagtcataatagatgaaaattggattatagctatgcaggaagaactaaaccacatttgaagaaattat

SEQ ID NO: 146401 - DNA, 451 bp, Glycine max
  unsure (1)..(451): unsure at all n locations
acacttgaaactaagcttacgcccaacacctacggtgagacccgacatgtttctctctgacccacacctgccaggtcgaaccatgccactaatccaccatctncagggcggatccatcttcttcaagcttgaagcagctccctcatcttcacctattattattatctctgaagactctatagagtcagcatctggatgagctactactccttctgctacccctgttttccatctaacagatgaggaggatacacaggaccagtcacaggaattctaaattcttgatttttcctttttggaaattattataactactatggtttagtacattattttttgtgattttggtttataattataattatatacttgtgtttttattgtgaatacttagtgtgcatgntttgaagcatactgaacagcttaactagattctctgagtatacagtgc

SEQ ID NO: 146402 - DNA, 440 bp, Glycine max
  unsure (1)..(440): unsure at all n locations
agctnttaacactctctacacaaaaacttatatgtttgttaaattccaacnatncacataaaatggaagaatttagagagaaaaatcaacaattcctacataatttaatcccaaaatatacctatacatagtagttatcaatcatcaaaattaaaagctacacaaacaatcacaacaaataaatgcttttaaaaatggtgacaatttaaaacttcataaaatcttgataattaatcatagcaattgccactgtattgtggaacaatttgtgatcaatagacttgtttgtatcaacaagaatattttgactctaaattagaaataatcattgctcaatatgatgataccaaaactaaaattttattaagaaatgtgatatctaaattatactatagtagcaacaatagaatcaaataacatgatgcaacagagaccaccat

SEQ ID NO: 146403 - DNA, 440 bp, Glycine max
tatgcacggaaaatgtaattatgaaattgagatgctcttttatcaccatttcctagttaaccatgcattaggtaccatgttcaattattttgttttgttgttgtgtgtttatttattttttagaaatgggtttatgatcccaacatggttggcttatggtgcctaacacatgcaactaataatgtagtgtgaagtttcacgcttccccttttttgtttttgttttgtagaggaaaacgcaaggatgagcaaacatgaaaacaaatggtatgcaattttgcagatcaaaaagtttcttgaacgcatatgcatgatgatgccatgactcatgcaaaatgtgaggttgtaatatgataacagacaaatgcatgaacgatatgttcattatgatgccatgaagagatgtttatgcgatgcatgatatgaatgcatttacggaca

SEQ ID NO: 146404 - DNA, 377 bp, Glycine max
agcttggaggaaggcaactgatctttgcttattttcactgaaaccaacttagtgcagcaaaaagaagcaacccaaaggcgctcgtcctctggagtatggtgatattcaaaaaaattgattgatcttgaatatcgaggcaggagcattggtgttgtcgaatcgaggaacatcaatattcatgcgaggaggaggtggtctgggtgaatgggtgggagaggcggtttccagtgcttgaaggcgagatacaatctcatcgagcctataatgtagggaagtctgggtggttgtaagagtattttggttttggataaggagggtaacgacttcttctaagcgggataatggttgggagtgggtgtttgctgccattggaggga

SEQ ID NO: 146405 - DNA, 420 bp, Glycine max
  unsure (1)..(420): unsure at all n locations
tccatggttaccatagcaccgtnttggaatttaatttctttctgtttaagctaatgcacagtttgaagactaattaattctctatgaaaatgctgtctttcagatattgagaggaatacactatattgatgtatattagtatctatttttaatcaataaatattaatatattttataatttaaaataaattaaatgtactctcattattttaaagaagtgaaatatatatgatattttcaatatatatatatatatatatatatatatatatatatatatgtatatatataaccctagtgattatatcgttgcaattatgaattaaaatataccttctatgtctaaaattacctgttgcatcaataaatacatgaagtactttactctcatttatttcacatttcttgtacacaatctac

SEQ ID NO: 146406 - DNA, 441 bp, Glycine max
  unsure (1)..(441): unsure at all n locations
agcttatgcgcatatnttcttatttacgttctcttgcacaagacattctattaaccgaaaaaaatgcacccatatacaatcaaggcagcttcgttacctagattatttacacgtacttccaaggtgtatttgttacttacatcacacacctccttggctaaattcacatacatgcatactcaaagcattttggggtaccaaaaattgcacatgtgcacatcttggtatttctaacacctatacatacacaaacttcatgatgaatcttgactatctacacaataaggtgctacatttcatgctcttttcaagtttttgctacctaaagccgcatgcaaattcaagtatatgttcctttgctgactaaaattgtattcaaattaagaggtatacatttgttggtaatgtatcttctttacataacatgcaacatatttatgt

SEQ ID NO: 146407 - DNA, 441 bp, Glycine max
  unsure (1)..(441): unsure at all n locations
ntgaggggattattgggcttaactggntgctacatgatttttgtgaaagattatgggaagaatgctaaaccactcactgatttgttgaagaaaggagcttttaattggagtgcagcggccactgagtcctttaatgcacttaaggacgcattaacccactctccaattttgactttaccagactttaaggaacctttttccattgaatgtgatgcttgcggaacaaggataggagctgtgttaacacaagggaaacgtccagttgcatatttcagcaaagggttagctacttcagttttaagtaaatctgtgtacgagaaggagttaatggctttggtcttagcaatccagcattggaggccttacctattgtgaagacgtntcactgtattcactgaccacnaaagcttgaagtacttgcttgaacaacggataaccact

SEQ ID NO: 146408 - DNA, 402 bp, Glycine max
agcttgatttcctttgttccggaaacctttcttttctcatgtgcacccaaacccaatctccgggttcgaagacaaccttctttctccctttgttggcttgtttagcatagcttttatttttcctctcaatttgatctttgactctctcatgaagcttcttcacatagtccgcctttgcttgaccttctttatgcttaaaaacagaaacattaggcataggcaaaagatcaagaggagttagtgggttaaaaccataaacaacttcaaaaggagaacaattagtggtgctatgaacagctctattgtaagcaaattcaacatggggtaaacaagcttcccaagtttttaagttcttcctcaaaactgtcctaagcaaagttcccaaagtcctattaacaactt

SEQ ID NO: 146409 - DNA, 446 bp, Glycine max
  unsure (1)..(446): unsure at all n locations
nttaagtgcgggtctgggagacgaaggtcaagtgttctctatatgtgaagatgatgttccaagtacttcggatttggtccgaccatgccctcctgatttccagctgggaaattggcgagtggaggaacgccccggcatttacgcaacaagcataatgtaaacctttacggttttaaaagctctatagttgggcctaggcttcagagttttcattttgttaaggctttgtgtcttttgttttttaatttataatacaaggatctttcttcatctgttcctggtctctacccattctcattcatttgcatgtttacttctttttctaaaacggcagattcgatgacgagtcccccgaaggtactaatacctgggacccgtctatcaacttcgagcaagaaatgaaccaaacggaagatgaatgagatgatgatgtgggacttccttcc

SEQ ID NO: 146410 - DNA, 446 bp, Glycine max
  unsure (1)..(446): unsure at all n locations
agcttattcccctctttatntgggctnttttacttttccacagagtgatttaaacctaccccctcctcagctgcagcttccttttgataagggggcattaaatttgaatcagagttgaccagaggtgtaaaatcatggatattgaccaatggttcatcctgctttaccctgtggatataagagtttttgaaagcaggcagaggtatatcttcaacgtctccttcctgaattggggtctgttgttggctagggcagaaagacataggttctgccatgtcaacaggatgcatgtccaaacaatttggatcaatgcattcccattggcccgcgacagaaggtgtcagggcggcatcagctggcagctgctcgtgacagaggagggaagacatgtaagcacctatcgcggtatcgttgcccctgcgagttgggtaaggcccctcagtccg

SEQ ID NO: 146411 - DNA, 417 bp, Glycine max
taaagtatgcccgagtcattcatccctatgagatgttgttgaagtattttcgatcagaattgccattccttggattatagggttgaaccaagctcatgcttttacaaaaaggttcatcaagtcaagttgaaatatggaagtaaccgtcttgcaaaattggggcgaaagatgaatcgagtcacatcactgcttcgtctactgccaaacatatttaggattattgatgtccttgttacttccagtttcaccttgacaaagatgtcatggaccatgttgaaaatctaaattgattcaaccccatattctgcgtaaaaattcgcaatacttcgactgtacatcattctcatgcacccatgactttcattggttgcattgctcattgcattctctccttgaaaaataaaataaaatgaactt

SEQ ID NO: 146412 - DNA, 339 bp, Glycine max
atattatcgacagtcacatctttttatgtggctcttgaatggctatcaaacgcctatatatatgtgactcgagacaccaatcttccataagtcctttataacaaaatggtcttatcctcttaaagagaaaatatcgtctttccccttacaaatacttgccaaattacttgggattacataaggaacctttgcatactcaaattgtcaatctaccctataagagagatctctctttctcttctcattctgaaagggattaaaacccaggctctgttgtaaaaattctaaccacagaagttgcctttgtgtacaactcgaaagaattcaaaaccggactct

SEQ ID NO: 146413 - DNA, 440 bp, Glycine max
aagctctattatgctgaccatttatcataaacacagtttattttattttaaaatcagagatatctcttgttcttttgagagtgatctcctaaattcttgagtgatgcaagaacaccctggctgtatcaaaggactttcacaacctttgtgtgttgccctcgctggaaagagtgattctttccttcctatcatctccacccttgttctttcaaaccacaataccagaaaattcacctctgcccaaaattatctcgtgaccataactcccattttacacactcaaattaagtgattcttgatcctaaattgaatttcaaaacgagatctttcacctcgttctggaatcacctcatttggagccctgtagcttccgttattgccatttctatcttgctgtccagccaccacttaacctactttttaccatcccattcgttcat

SEQ ID NO: 146414 - DNA, 273 bp, Glycine max
aaagaaaccaggactcctttcaatagacccaatttttactgcttctacagtatcggcaatgttgaccggaactgttacaaaagaatctacaaataacattatctaatagaaaccgacaagttagctacaataattcatgattattacaactcattaatcgacgagcaatgatatgccaaaacagttatctatattctggtagaatggatcatctgcttggtcatacatattctctgatgatacagtttccttcgtggaaggatcttctttcac

SEQ ID NO: 146415 - DNA, 440 bp, Glycine max
  unsure (1)..(440): unsure at all n locations
ctaagcttaagctccttctactgcacaaggctcttaatatatgaagttttttcttgtggaaccttacctgacgaagacactgacaaanacttatcttctcctttttggacaaagtatgacaagctggggcaagtaaatattcttcccatcaaaccatggatgcaactgtgatcgtatccccatcttaactagatcttgatgggtacttaacccatccttcgtcttgccttgaatgtgtaggagcgtcccaatcacattgtcacatacattattctccacatgcataacatcaatacaatgtctaacgtctagatcagaccagtaggatgatgaaagaaattggacctcttcttccatatgcaagtcttacttttatccttcttttgggttctgtcaaatacagtattcacgtgttgaacccactggtatacctgctcact

SEQ ID NO: 146416 - DNA, 450 bp, Glycine max
gacctcagagcaccagaggccgcagcttgaaggatgcttaatggaggaattttagtttatataaagagagaggggggagcacgaaattgaacgaagataaagggagagaagtcgaactttgagttgtgtctcacaagactctcattcatcaaagttacaacaagtgttacacatgcttctatttatagactaggtagctgccttgagaagctttcttaagaaaacttccttgagaagcttctttgagaaaactttcttgagaagctagagcttagctatacacacccatctaaaaactaagctcacctccttgagaagctttcttgagaagctagagcttagctacacacacccatctaaaaactaagctcacctccttgacaaaatacatgagaatacaaaaataaagtccctactactaagactactcagaatgccctgaaatacaag

SEQ ID NO: 146417 - DNA, 403 bp, Glycine max
atgaataggggcataaactatttatgcaaaaagaaagaaaatcacacgagagaaatgatgtgtaaaaacaagtagaaacacattggccttcctaataggtgtctgatgctgaaaagatattctctatctaacaatgctcatgtgttcttatggtgtctcctgagatactaaaccccgattcctcatgatagtttagcctaatcctgatcaagcatcatccgcagattcctcttgtaggcctaaactcaaccaggactgcattaagacacacatacacaactaacttatcgcaccccgattcctcatgatagtacgacaacttagcgctgtactatcaaggactttagagtcagaccaatttccactgttgaatgaccctaacaaagcatgcatctacatgatc

SEQ ID NO: 146418 - DNA, 349 bp, Glycine max
ggggcctatgcaagttgaaagccttggaggaaagacgtatgcctatgttgttgtggatgatttctccagatttacctgggtcaactttatcagagagaaatcagaaacctttgaagtattcaaagagttgagtctgagacttcttagagaaaaggactgcgtgatcaatagaatcaggagcgaccatggcagagaatttgaaaacagcaggttcactgacatctgcacatctgaaggcattactcatgagttctctgcagcctttacaccacaacagaatggcgtagttgatacgaaaaacaggaccttgcaagaggctgctcgggtcatgcttcatgcccaagaactt

SEQ ID NO: 146419 - DNA, 287 bp, Glycine max
  unsure (1)..(287): unsure at all n locations
gctggccttgccacaccaatggggacataacagacaagtcttcttcgatgattttcgcggtgataaaacaaccttgatcattaacggtggcacgagggagaatcttgtcgtcgtanctacataagaggttgatagttngaccgggnttggattccatgactcattctcattactcagtaacgtattttgttgttgaatgaaaataacgctggaatttgaagattctataaagagagagaaatgttgaaggaactcttgcagggagaatatctctttcccctctttct

SEQ ID NO: 146420 - DNA, 436 bp, Glycine max
ctgcaactgaactaaattataaattatatatgataataatatatatgcaatcatgttctagagtgaatagtataatttcaccctaaatcttaaaaaattatttaattttaatttatattatactattttctatcaaagggaataatattattacttaactcccatcaaatggggaaaacgaaactcctatcgcatcagctgctacaaacgaggctaggaggagtgtacagaacgtagcacatacataggagaattagattcatgtcctagatttgctaaaattatactaatttaaatatatttatgacatataatatcaaattatataattataatttcttaatgaaaaaattaatacgaatatatggataaaaatatcaatcttttaattattcattgattaatatactcttctatactctgcaatattggacct

SEQ ID NO: 146421 - DNA, 367 bp, Glycine max
tttggctgggtgcagtgcaattatagtttggattttgagagccaaaaaagagcaagttgaatagaaaagcggtcagaggcgccacgtggacgccacttgtatcgtctctgtacaccgtaagtaaattccttcgttcgtagtacaagtatatcatatcacttccctttggttttgttttgtgttttctctctcaacacacattttctagtgtccttcctcactctaaatccgccattgccattgggatggcgaagaagcgaaggtccgtggccacgcgccttgacgaagtggatcgaaccatgtactcgactttctgcagcaccgccaactccctctctcatctctacacccacgccatgaaccaaca

SEQ ID NO: 146422 - DNA, 417 bp, Glycine max
  unsure (1)..(417): unsure at all n locations
agaaccgcagctgcgctgaaacatgggctctattggatttattatntcatccggcgacgctctnctcttgctagtaagtaattattctacaataccattttcttcaacatatttatttccaggtgctcaaccctattgccaactaaacaaccatggtttccactctatgccaagaataagatgcaccacatatcaggaatggggatttgaacagttgtaggaatattttataccacggatctatgcttgaaatatgaacaagtgctaattggggttttatattgaatagctgtaacaatgatatctgagcatataattcagaaagttttttccaacccaaagtccaaagctaacagactttgtggttgcccctgtccacagctttgcgtggagaggatgaacatgctgttggcacca

SEQ ID NO: 146423 - DNA, 455 bp, Glycine max
  unsure (1)..(455): unsure at all n locations
ctaagcttgccacatcttggcgagaccaanatctgctattttatcctgaactctgagtccaacagtatattgctagacttgacatctcggtggatgaccgggggtgagcaatcatggtgcatgtaacacagaccttgtgcagtcccaatggcaatattcaacctctgtggccaactcaacctataaggtgacgttttcttctttccatgaagccatttgtccacgctctgattttccatgtattcataaacaagaagtttggagtcttcactagcataacaacacaaaagcttcactatattctagtgccgaatattacccaggatctcaacctcagccataaactctttctccaacttgccatccatatccttgcgattccaaatcttcttcaccgcacaatactcacctggacgatttgaagcatccggtaaacattttcaaacccttcactt

SEQ ID NO: 146424 - DNA, 422 bp, Glycine max
  unsure (1)..(422): unsure at all n locations
agctctacccttcacttgcaagaaccacttctatatcatctgcgcacactcncctgctagggtccacaacagtctccttagtccaaaagaaattcataatactgttgtatctagttcttttaaactttgacatcaaagactaggccatcctaacaaggatgcactagcaattgtactaaattagttcttttaaactttggcatcaaagactaggccatcctaacaaggatgcactagcaattgtactaaataaatgtgatataccctttatcaataaaactagcagtganttttgtaattcttgctctatagccaaatcttacaaactaccctcttctccctcttctactgtttatactgcacctcttgaattagtaattcttgatgtgtgggggccctcttcagtagagtcatcttgtgga

SEQ ID NO: 146425 - DNA, 440 bp, Glycine max
  unsure (1)..(440): unsure at all n locations
ngatgaacttattcaccaacttcataaaccagacacatttagtctcaccttcatcctcgtctaccattccacctcctatttcataatcttcatcacaccgtatgaaacttgaggttccgaggctttatggtacggaccccctgcgttggatcttcaagatcacccaatttttttagtaccattccactcttgagcatgagcacctcacgatcgcatcattttatatggagggtcgtgccttttcttggttccaatggatgaccagcaatggccaactcacttcatggcctgtctttctccaggcccttccgactcgctttgcctcttcccagtatgaaaatcctactagtgcctagttcaaattgacacaacggggcctagtcagtacgtatctttcagagttcgaagacctagctaaccgtatcactaatctttcgtcg

SEQ ID NO: 146426 - DNA, 346 bp, Glycine max
  unsure (1)..(346): unsure at all n locations
ctctatagtcacctgccgcatgcaagctnttacaaaaaggttcatcaagtcaagttgaaatattgaagnaaccatcctgcacaagtggggcaaaagatgaatcgagtcacatcactgcttcgtctattgccaaacatatttaggattattgatgtccttgttacttccagtttcaccttgacaaagatgtcatggaccatgttgaaaatctaaattgattcaaccccatatcctgcgtaaaaattcgcaatacttcgactgtacatcattcgcatgcattcatgcttttcattggttgcattgctcattgcatctcttccttgagaaataaaataaaattaaatga

SEQ ID NO: 146427 - DNA, 437 bp, Glycine max
  unsure (1)..(437): unsure at all n locations
ctttcttcgtgggttgatgggttctgtctccgaaatttttgttctctggctcacatgttctcaattagctcagttgcttcttccggggtcttaagttttatctttccccctgcagaagcatctaacagatgcttggtttgtggtcttaacccatctataaacatattcaattggattggctcacaaaacccatgagtgggagttcttctcaacaagcctctgaacctctccaatgcttcactcaaagattcatcangaaactgatgaaatgaagagattgcagctttcccttccgcagtgttggactctgggaagtatttctttatgaacttttcaataacttcttcccacgttttcagactgttacctttgaatgagtggagccacctcttggcttctcctgccaatcttaatagtgttgcatatttcaatgaacg

SEQ ID NO: 146428 - DNA, 438 bp, Glycine max
  unsure (1)..(438): unsure at all n locations
agcttcttacctccattatcaaaaagcttttcatctcgttntcactttntcctgtggcattgcctctggttcgtgggggtaacaacattgagcgcagcggtgaaggtaaagtttccggcgtcaagctttgtggtggtcggtggcggcaaacgaggtacgcagatggtgtttgttcgtcgcggacgtacggatgacttccagatcaacttgatccgtaagagtattaacaagcttccgaatcaagttgatccgtaaaaagcttacggatcaacttgattcgtaagtgtattatttttggtattttctgtttttgcatctgttnttgcatttttgcatctatttttccatttattttcctnttttcttttaaattactaattttttngtatggccattttttggttgatttggttagatggatgaagatgagtggatgta

SEQ ID NO: 146429 - DNA, 441 bp, Glycine max
  unsure (1)..(441): unsure at all n locations
ntgagtttctttgagcagatgaaggagggttgtgttttctcttttcaaatacatgaaatggtttgctggaacatacaggagaattcttgtagaatatgatctcattagagtttcttggcttgtatgtctcatcataacagttagaaagtggtagctggttttggaatctaaatgcttcaatggtatgtgatgttttgtttatcatacgaattgatgttggcatatgtgatcttgaggtcatccttgtctatgatttgtatgacttttgtctaaatctgtcactttttttcacttcattttctactatcattttgtatcaaaaaaggataaatgtaaatggcattttatagtgagggactaaaatattatttatttataaagttaacgaataaagtgatagatgattatgattctaacttctaacggataggatgttacaca

SEQ ID NO: 146430 - DNA, 443 bp, Glycine max
  unsure (1)..(443): unsure at all n locations
acctgcggcatgcaagctttcctaagaagatcgcttttaattctcttgatgcaataaacccaagagtgacaacttgttctttcgtctcttggccataaaactctcagtcaagtcctctatttttcttgctagagactttgcttggctctacatgtaacaatatctgtgagaggatccattacacattaaaaaattcaaactaaatttgtcttctttgatactttaaacaaaaataaataaataaatatctgtgttcatatcagtgttcctgccatgactgaataagaggatagtttntatccattactacagcaaaatactccgttaaatcattaaatgtaaacagagtgtatttattttgagaacaattaatacacttcatctcatgtagatatatgtncaaaatgaaggtagcccgtgaacaatccactgctntaaatctc

SEQ ID NO: 146431 - DNA, 417 bp, Glycine max
  unsure (1)..(417): unsure at all n locations
tgccgtcgctcggcagcttctccggcatgactgtcttcttatctggccgccaccggaacgcctgtttgaagagccagagctcgccgaagataagctccgctatggtcatgaaaatccatacaaagcttggttccagtaagatgtggcttatgcggtagtaatagagaaacaagagtgccaccgagtggaataagatgtggagtctgctcaaggccaaccctgattgcacgggttctgtgtggaaggtcnccatgtttacccgtcaacatgcatataattggtaatatatatatatatatatatataacaagaggcgtaattttttccatcttaaaataattcattcctcactttatatattctcctcgatacttatctcaaatataaataaaatttaaataaatatgtcttattaat

SEQ ID NO: 146432 - DNA, 432 bp, Glycine max
  unsure (1)..(432): unsure at all n locations
agctggatgagataaacaagaaggctgaaacagagttgactttgattggaatcatgggagctgaactggtgaggtcaaaagcctggagcagggaatatattaataagttctcggcatctctcctctcattctgacccctttagatctgtgtttgaagatgactttagtttttcttactgttatttatctgattgtttcttgaaacaatatacaattgtagaacatagccctataaggtaccattcatgggtgtattggacatacgtgtagcttctagttgctattgtaacattatgttgtaagatatgtaatatggacatgtaatcatatgtaaggcagtgatgccaagtaatttggtcctggccgtaaaacggggcatatganagtctcatcttcttcactgcattggagtatctcacttctttaatcatg

SEQ ID NO: 146433 - DNA, 443 bp, Glycine max
  unsure (1)..(443): unsure at all n locations
tctctctttgaacaaatacccctcagccaaatagaatctatttgttcctttntcccacaactcttgtaaatgggagagaaattttcatctaaagcatacaagtccctaatgttatcaaatcctaaaatttgagctcctagggagcaaaacaatgtgtgtctcctagagaggacatcagctaccacatttgtttttccctttttgtctttgataacatatggaaattgctctatgtgctctacccattttgcatgccttttttttaactttctttgccctctaatgaacttaagtgattgatgatctctatgaatgacaaattccttggaaacaaggtaatgttcccaagttcggagtggtcttattaaggcataaagctctttatcatatgtagggtagttttatctaaaattttgcatcttgtatgaaatatgttctctctt

SEQ ID NO: 146434 - DNA, 393 bp, Glycine max
gaagctaggggaacttgatgatttgtcaagaactaaacatagtttcagtggttgatacgaaccaatataaattcatgcatcttatatctcaatatactttatgctaattgacttagggtttgaatatgattttgttgtgaaaagaaatattttttacaaaatctattattatcaactgcctatctatttgtgaaaacttgttatatgctttcaaagctttattggacgataactttgtcttgtgaaaaaagatttaaaaaatttctaaaatcacaactcaatcctctttcttgtaatacttgtcgttacacaaatgaatttgaccatcattaataagatgctttatgtgcgatgacatcaacattaatattatgttggctgagaaaatactta

SEQ ID NO: 146435 - DNA, 461 bp, Glycine max
cttgaaactagctgttgatcttaagaaagagtcagctatgccttttattatacaagggctagggaaaaagctactcttctcaataactattaagagttggaaaaaacctgaaagatctttaaaaggatatgaaggagcttaatgaacttcatgattatcaaaagggaaatatgatatatggagagaatatgcacaagcacacaaagaatatgaagacctaaaaataagtaaacataatatttgggtgaaatatgaagaacacaagaaatttgtgaaattcttaaatgataagcttttgaagaatcaagaatttaatggtcaacctcaagatgttgtcaaacatcatgaggaaataagaaccttaaaaactacattgtcgcaaattgtcaatggaataaataatcttaacaaactattatgatgttgtagaagttccttatacaaatctagaaacggatatg

SEQ ID NO: 146436 - DNA, 327 bp, Glycine max
aagaatagaacggaaaactccaatcagcgacaaagagaaagaaaacatccaacgaaagcaacacaaagaaaagaaggaaaactccccatcaaagagtgggagaacgcaaacagaaaagacacgaaaaacccaaccaaagaatgggagaaagcgacaaaggaagaaaaacaaggaaagaaagctcctgatcaaggagcgaacgaaaaacaaaagaaacgtgcacagacgtctctggacacaacaacagaccaacaatacagaacgggcacccaacgagcaaaaaagaaggaaaggaaaacacgacctacaacggacttctaccctcga

SEQ ID NO: 146437 - DNA, 435 bp, Glycine max
  unsure (1)..(435): unsure at all n locations
agcttggccaactcatcattgagggctctctccttctttttgttctctnggancaacagactcaacctctccttttgttcttctgacaaatcctccaaagctgtgttcacaacctgaaaagacactcctggcttgaaccccccaacccaaagaaaggttctttccaatgaactgaaccatggtggtgagaaaacaagaagaacattttggtgggcaatctttgatttctcttcaaagtattgtccatagtggcagattaccctgctgattaattgcctcacatcatcatcatcctgcatctcctgatagtgttgctgagctgagagaagctcgtctaggttacctttttggcgcaccatccacccttggagaaatgcctcaaatgaaaccacatctgcatcaattatctatgtattcacgagagagagaggggga

SEQ ID NO: 146438 - DNA, 395 bp, Glycine max
  unsure (1)..(395): unsure at all n locations
ctcagctttccatttctctgaagctcatcaagttggcttgtattctatccttaatggttatggcgttcagtgctcgatagtcgacacaacaatgccagctcccgtcctttttcttcactaacagtaccagagaagaaaacatgctatggcttggacggatgagatcagcttcgagcatggcggtgacttggcgttctaactcgtttttctgggggtaggggtatcggtagggacgcacgttcactgggctagaattgggaaggagatggatgaggtgggtgatggtgtgaggagggggaagctggttgggttcctgatacaaggtggagtaatgctgaagaagatgggcgagtaaggtggggtgaacattantaagtggtggtgtgggtggagtg

SEQ ID NO: 146439 - DNA, 389 bp, Glycine max
  unsure (1)..(389): unsure at all n locations
agcttgacaatattcagttgcaggagataatcagtcttanttttatactacatacggggccaactggctgagtatgaatgccatatccaacgtcagaaatcattacattctatcgatcgtgtacatattagtatttagtacatggggttagtatttctggttcagttgtgtggatctatgcaacatggtggctttagttaaacctctacccatggatagttttttctgagtaatctattgttaattattagctttttcctgctttggggaagtataaacccacagagaatatggtgtcaaactctgattggagatgtgaaatcgcactttatttgcttaacaaaaaagtagttattgatttgtgcttgtcatatttgatgagttctact

SEQ ID NO: 146440 - DNA, 448 bp, Glycine max
  unsure (1)..(448): unsure at all n locations
atactaagctctatgcttcaaagtaaattggtggagcatatctttctgcttatggaatattaatataccatggtgtgtcttgactcttgacatttaatcattaaacaggcatcaaaggtgggtaacaaagttaagtcaaggatctggacgggagaaaacaatttggatcgtgaaagtgggagtggtgaaagtcatcattctgagcatagattgtcggaatctgtttttttagagcagagagaggatgctaattccagtggagctagcacccccagaggtgatgtgccaccatcccattttggtgcgtttcctcatgtcgaagaanaatcccagggaaaagctctgagagagtctggtgatgagagtgaaggaaaatctattcacaaaatcatacctaaggcggaagcctggattcaaggaaaacattatcatggtcatggagaacaaa

SEQ ID NO: 146441 - DNA, 375 bp, Glycine max
cacagggcaaagttgattatgataaaagattgtctgaccaagtgaaggtgcaaattgcagataagaatgaaagctatgccaatctagccatctcgataaggactgaagtggtattcgaacccggtgatgattctggacatttgaggacaaatgtattccaagaaggagggaatgatgagaatcatgaaactggccacatacatgctatagacccatgtgtagaaagaccatcgcctaattggagaacgacataaccccctagtgcagaatgatgaaggcctagaggcatagacactatcaatacaattaattgctgcaaatgccccgactaaattgaaggcacaagataaaaatgtgctaataataattcattta

SEQ ID NO: 146442 - DNA, 411 bp, Glycine max
  unsure (1)..(411): unsure at all n locations
agcaccgcagctgcagctancatataaataaggtttgatttaatttttatacacaantcaccatatttaatactatatatacgatttacttggtacaaaaatagcaaaaacttgtacgagggtgggttaactgtggngacaaaatagtcacgttacaaatctccatcttcatcttcatctgaagcgtgtgcataaacataacaatgacatgcgatctatactgtaacataacagagcttgagccttgaaccttgaaccttgaatcttgagccacgagccaccctcagactcagtcaccaacaccgaccaacgcaacaatggcatcggcgttcgtcaagctcgactattcccctatgtttcatagacaggtgcgctgctatcattctcttcaataccaatcatgggtcacac

SEQ ID NO: 146443 - DNA, 446 bp, Glycine max
  unsure (1)..(446): unsure at all n locations
tgaatggtttccacagcaacatgaanacgacactttaaatatatgttcaaggtataaacagtaaagcccggcccagctcgatctacccactagaactgcccaattttggacaagtcaatccatctacgtaatttagcctccttaaccgacaaagactacttacctgcgtaaccttatttctgtttttttggaaattgtcgtatacaaatgtgtctgagtccaagtttggcttcaattttcattctgagcgaaaccgaagaaagtgagatcaaaatatgcatacaaaacatccatatgcttatgtgtatacttttgagaaatatatgctaataactttgatatatcttcacattcatatcgtatacaaggtatgattgtatatatgaaccatatattatttgatttaactgcggttctaaacttataaactgcattattacccatga

SEQ ID NO: 146444 - DNA, 326 bp, Glycine max
  unsure (1)..(326): unsure at all n locations
agcttctattctatgatgactctttctatgtttatctatcatcnngncatcccacctagagttcttttcttatattaattttcctctcttttttctccctttatggcactcccataatataccatgtgaaaaatcttttgcgatatttatacctgaatttcatgtcttttcttttctccatgcctgcttctattaattttgtggcttttatttagccatcataagtagtagtgcttaatgcctgcgtgttcagagctcaaacttggtggagacaatttccatggaaataacgaagcctggtgtgggaagttggaatacatacatca

SEQ ID NO: 146445 - DNA, 454 bp, Glycine max
  unsure (1)..(454): unsure at all n locations
tgtgaagaaacaagaaggaggaggagcagcacggttcaataatattctctctggggtcatcaaaaagtgcctaatgaagtgcatgaacaagtttgttgtttctcatgatcatcatgcagtcaaacacatgccatgctccatggtgaatgtgtcagtgccgccaccactaccaccaccaccacatgagattagttggtaccatcaagggaaattaaaagggtcacttgtgaggaagcaacaacaagggagtgaggaacttaaggaagaaaaaaaagagaagcctttccctgtgcctcctatatatagaagcagaaccatagcactttcaggaccnttggaatatggtggtagaatgcatcatgagaaaatggtccacagcagggccttgaagctatctggaccacttgatggaagaatgcatgagagaatgatgatgatgaatagtactaatagt

SEQ ID NO: 146446 - DNA, 210 bp, Glycine max
aaaaaaagaccaatctgcacggagacaccgacaaactaaggaaccacgagaggcaaagaagcatgggtaaaccaaaccacgcaaaaccaacgaatacagacaacaaaagaaaaaaagatcgaaagaaaaagatgaaaaaaacggaacacgaagaaaacaaacaaaaaacaggcccaccaaaagaacgacacagcaaaaaaccattccaaa

SEQ ID NO: 146447 - DNA, 447 bp, Glycine max
ctaagcttaagttaaggactaagagaaaaacaaaatacttagtgttttcagctttctaacgattaaccgtcttaaaaaagtaatcattctaagacggttattacataataattatcttggaatgtctactcttctaagacgattcttaaataatcgtcttaaaatgtcaactttctaagatgattattacatcagaatcatcttaaaatattcgcattttcaaatacggtattttttgaaaccatcgttaattgaaatttacttttaacaaggttataataacggttgacaattattgttaaaagtttaatttaactgtcggttgaaaggctttattgcagtagtgaatgttagaagaaaaaaaaaaactaaccgagtaaaattggacaaataatagagataatagtgaaactgtagcgtgaaataagaaagaatgaatataaatat

SEQ ID NO: 146448 - DNA, 310 bp, Glycine max
  unsure (1)..(310): unsure at all n locations
agctngctctaaatatacattgatgtttgtatttatgggaggaggttgtatgccatttttgttttaagagtagtgtcccactggtaaaactaacttcccaaatgtttgccttcgcaggaaatggccccgaggaaccttgcctcaaagaggtccaggaaggacaaggcagccgaagaaactagttccgctccggagtatgacagtcaccgctttaggagcgctgtacaccagcagcgcttctaggccatcaagggatggtcgtttcttctggagcgacgcgttcagctcagggacgatgagtatactgatt

SEQ ID NO: 146449 - DNA, 423 bp, Glycine max
  unsure (1)..(423): unsure at all n locations
ctgataatttctttgtctttttcaatcaaaagtttatttttatttagagattgttaatgcactcagaccctttttttagtaggaatgcattagcaatcaacaccatatatttataacaaagttaccgattcatttattttgtcttagttaattagaatatagatattgtagtaatttgacacttatttaaaaaataaaaagcattttctctcttgtcccccgtctcacctcacattcaagtaggcacctcaccctctctctntattccactttctaggtgttgaacacagaacccccaatttgtatctttaacttggattgaaacttaataactaattgaaaataataaaatatgggagaattctaactattcaacactactacaaataagggattccatgactanttttagggcatttcatg

SEQ ID NO: 146450 - DNA, 440 bp, Glycine max
  unsure (1)..(440): unsure at all n locations
agcttaagaatatggtctattttacntttatttccagaaggaaattcaatcaatagacctccaaatctttaatggagagaattaccactactggaaaacccgaatgcaaatttttattgaggcaatagacttaaatatttgggaagccatagaaataaggccttatatacccacgacagtagaaagaaccacaatagatggaagcacaacaagtggaagcacaacaatagaaaaacctagagaaagatggtctgaggaggatagaagacgagtacaatataaactaaaagccaaaaatataattacatctgccctgngaatggatgaatatntcagggtttcaaattgtaagagtgctaaagaaatgtgggacactttacaagtaacacatgaagggacaacagatgttaaaagatctangatanacacattaactcatg

SEQ ID NO: 146451 - DNA, 365 bp, Glycine max
  unsure (1)..(365): unsure at all n locations
tgcacttacttatctcaggagcaatgggtcttcttaacttgttgtggctnaacacaatcttagagagttgttgcatcatcccaatctgaggaggaattcgccccgtaaaatcgttaccattaagaacaagcttctgcatgctactgaagttgccaatggtgcatggcaacgacccacagagctggttattagagagactaatctgaccaacatcagtggcgatggaaccatcttccggaaactgccccgtgagaagattatcttgaagctcaacctgtgtaagcttcggaagcccaaatagacccttctgaatagaaccgctcagaatgctctctcccattctaatcctattcagagacttgcat

SEQ ID NO: 146452 - DNA, 431 bp, Glycine max
  unsure (1)..(431): unsure at all n locations
agctntaaccgatcgttaagccgttttctcgtcttataaatgatgaaatgaatttcaatcgattatttgtgttgtaatctcgtttaatcactgttaaaacataatctaaccgatcgtttacgttgtaacctcggttaaaccaaaaaagggcaaaataataataaaataatcaaaatatctttaaataaaataataaaaaaaaatcgatcagacgtctttctttggaagtttccatgaatgaattgactaataaccaaggtgaaactaaggttaaaatcaactcacaaatcaagccttgtccgcaaaaatcactgaaaaccgctttagggtccaacgccttaaaatggtcctctttgcttttatcggttaacatggaccattcaaaagcataaaatcaacatgtaactttaccgcatatgcgagaactacgt

SEQ ID NO: 146453 - DNA, 455 bp, Glycine max
  unsure (1)..(455): unsure at all n locations
actaaccttttagtctagcgaagaagagaanactggctacttcattcactccncnaangacaatagcatcacttctggcactaaattgctgggagttggaagccatcttctcaattaaatttttggcttcaataagggtcatgtctccaagggctccaccactggcagcatctatcatacttctctccatgttactgagcccttcataaaaatattggagaagaagctgctcacaaatctggtagtgagggcaactgacacatactttcttaaatctctcccaatattcatataggctctctccattaagttgcttaatgcctgaaatatcctttctgatggtcgtggtcctggaagcacggaaaaattttctaagaatactctcttgaggtcatcccagctcatgatgggacctggagcaaggtaatataaccagtcctttgccactccctcta

SEQ ID NO: 146454 - DNA, 450 bp, Glycine max
  unsure (1)..(450): unsure at all n locations
actgagctgcagctggcttttgtgtctggaaccttttcttttattgtttcccaaacccaatcacctggttcaagcacgactatctttttgcttttgttggcttgccttgcatagctcacatttttcttttcaatttgagccttcacttgctcatgcaacttcttcacatactcagctttagcctgtgcatcattatgcttaaacatagcaatgttaggcataggcaacaaatcaagaggagtcaaaggattaaatccatatactatctcaaatggtgaacaattagttgtgctatggacagctcgattataagcaaactcaacatgaggcaaacaggcttcccaagatttaagatttttctttaaaacagtcctaagcagtgttcctaaagtcctatngactacctcangttgaccatcagtttgtgggtgaaaagtagtacaaaacaac

SEQ ID NO: 146455 - DNA, 449 bp, Glycine max
  unsure (1)..(449): unsure at all n locations
ntgganaatgatntatatacaaaagttagtcgnataaagttactaacatgccgcagtcaaagtagttactcgatgcttctgcaggaggaaaaattaagttgaagacacctgaagaagccatggacttaattgaaaacatggctgccagtgaccatgtaatttttgcatgatagagttcatattcctaccaaaaagagtttattggaactttcatctcaaaattgcatgctagcaacctttactctattttgcaggttataggttgcacactttgtggtggagctcatgggtcaggcttgtgtattcccactgaagaaacatctcatgaagttaattacatgggaaaccagcctagacaaaattttaatgcaggtggattttctggatttcaacatggccaaccttaccagcagcataatcaatggagaactcaccctggtaatcagctc

SEQ ID NO: 146456 - DNA, 369 bp, Glycine max
  unsure (1)..(369): unsure at all n locations
aagtganctgaggccgcaagcttagtctatagataatccgaaatgttttttttgtgtgtcgaaaaagcatacaagactttctgtgattggtttatagatacaatctttgtccatgaaaatgctttagaaacattaataaagctcgcagatgggcctaaaagaaatgatataacttggctaggatacgacataaactagttttcattttacacaaaagcacatgatgacaaaagtacaatgtataacagcggggtcaccctaagagctgaatctcaacactatgctagtgtgcatgacaccaatccctgtgtagctaccatcccttactttgggttcattgatgaaattcgggagcttaactatgtgaaa

SEQ ID NO: 146457 - DNA, 90 bp, Glycine max
  unsure (1)..(90): unsure at all n locations
actcaagcttctaaactntatacaagaatgaagctctgagaccacttgttggtcattgtggcctcaaaaacaaacgaagggggggggggg

SEQ ID NO: 146458 - DNA, 328 bp, Glycine max
gaacagaacagctgtatctgacacaatggtcttaggcaaaccatcgatagagtctcgtaacttccctgaaaaacagttttgtgatgtaggacatatcatccaccttgtgaagtggtataaagagtgtcatcttgctaaacctattcactaccacaaagatagagactacacctcctgggttctatgaagcccaacgacaaagaccatactaatgtcctaccgaaagtgcaggtgggatgagtaaacgcgtgtatagctcacgaggcatcaccctagacttggcctgtagagcacccccaccctagtgcactgctatggacatctgttt

SEQ ID NO: 146459 - DNA, 471 bp, Glycine max
  unsure (1)..(471): unsure at all n locations
actcaagctttccctctntgaacaaatacccctcagccaaatagaatctatcttggtttctttttcccacaactactcgaaatgggagagaaatgttcatctaaagcatacaagtccctaatgttatcaaatcctaaaatttgagctcctagggagcaaaacaatgtgtgtctcctaaagagggcatcaactacaacatttgtttttccctttttgtatttgataacatatggaaattgctctaggtactctacccatnttgcatgccttttgtttaacttgctttgccatctaatgaacttaagtgattgatgatcactatgaatgacaaattccttggaaacaacgtaatgttcccaagttcagagtgctcttattaaggcataaagctctttatcataggtggcgtagttaacggtggcaccatcgaagtttcctaatgactgaaagaacttgcctaagatgtcctaa

SEQ ID NO: 146460 - DNA, 431 bp, Glycine max
  unsure (1)..(431): unsure at all n locations
agcttcttagtttcagatgaagcagaagggtttgtattctcctcatgcactcctctaatgactatggcatcatttctggcactaaactgctgggagttggaggccatcttctcaattaaatttctggcttcagcaggagtcatgtctccaagggctccaccactggcagcatctatcatacttctctccatattactgagtccttcataaaaatattggagaagaagttgttctgaaatctgatggtgagggcaactggcacataatttcttaaatctctcccagtactcatacaggctctctccactgagttgtctaatacctgagatatccttcctgatggctgtggtcctggaagcanggaaaaattttctaaagaatactctcttaaggcatcccagctcgtgatggaccttggagcaagggaatac

SEQ ID NO: 146461 - DNA, 423 bp, Glycine max
tactcaagccttcggggctggaaaactatataacaacaccaagggggctagttttttttctcttctctctctctcctaattttgttttttggaattccagttctgacttttagttttatcaataaaatttcgttcttcaatctataatttcgttctctattggttaatggaaggctaagtccccaacgttgttttctcttgaggatcaagcacaattctctttgaggttctattattactgttaaattctgttcagtttttcctcttcactaattactctgaatttgttgctatcaattaatgcttagtgcttgcttaattgtctctgcgcttaatttacgttcatgcttaatgatcgtttataagtaattggtgtatgtgttgcttaatcacataatgaatgccttatgttaaatttcgctt

SEQ ID NO: 146462 - DNA, 483 bp, Glycine max
  unsure (1)..(483): unsure at all n locations
tctaagcttaaagtgcagatggtgagtctgatactcanataaatttctgatggatccacaaatgatgaagtgactcttatgtacagaaagttcaaataaacgatgaagaagaaaggatagttcatgcattcctctagacaaaaagatacaatattcaaaaataaacacaagggggaaagtaatgagatcatctgtttgaaatgcaaaaagcctggacatatgaaggtggagtgtcctcagttaaaaagaaagatacactctggtgataagaaaaaganaagtctgatggtcacttgggatgactcatacagtgagaagagtacgagttcagatgatgagcaaaccaacatctgcttgatggtagatactgatgataaagttgacgtaaaaaaacatgctctaaatttgatacttcttattgctcttcatgagataatgaanagatatgccttatgatattcttctttagagcagtcatatgat

SEQ ID NO: 146463 - DNA, 353 bp, Glycine max
  unsure (1)..(353): unsure at all n locations
catgcaagcttggttcgaggacanacccttttttttatcttttaacgaagaagaacgagagaagaacgttgaagaacggtcgatacctctgcgaaattcctcacgaaaaacgttacggaaacgtttcaaaagcgcctcggcttagattatcttcacggaaacaatatttccaagcaaattcgaaagagatagaagtgcctaaggggctgaacccttttcttcttcacttcctcccctatttatagcaaaataggggagatggttgccgaccagctcgcccaggcgagcagggttgttttctccataagcaacaaccttttggagggcccaagagggcctggatgctacttgca

SEQ ID NO: 146464 - DNA, 354 bp, Glycine max
tatgtttacgtgagttgagagagtgagtgacaagtgtggggtggaccaaagatcatggagttttattgtccaaaggattataatattttgcacatctaatgggtattaagggattttatgacaataagctaattaacataggtaatcatgtaagttacctatatcaacatgtaatttaaattaatcatgcacaatgtttatttacacagcgtgaatttatattgtctaatctttcatagtgtagaaattaaattctaatgaaatttaaattctactaactttgtcacataatataatatgtatataattgatatcgcgattaattaaattgaattaattttcattcaaataaat

SEQ ID NO: 146465 - DNA, 377 bp, Glycine max
  unsure (1)..(377): unsure at all n locations
caaagaagagcggcccggcgagtataangccagctccacccgcaangacccngactaatctcttattattcgaatggcaaatccgatttgagaacaaatccttctcaagagggagagaatgatgatgacatgaccaaaagcaagggcaaggatccacttgaacgacttggaggacctatgacaagggctagagcaatgagagccatggaagctcttcaacaagtgttgtccatactatatgaatacaaacccaactttccaggagaaaagtccatggtgtgaattgtatcatggcctaaatggaggaggactaaatggcgccactttgcatcattttaaagtgtttagtcctgctaaataatgggccaatacttgta

SEQ ID NO: 146466 - DNA, 317 bp, Glycine max
  unsure (1)..(317): unsure at all n locations
cgccgcgagaagcgnncatggaacaccacgcccggatgagtctacaaagggtgtggtttggtgtgagatcggcgtaatctatcaagggcagtttggtaatggggcatgtcgtgtttttcttcgaaaacagccagggttcgatgctttcacggtcgtatgtgatgcccgttgagaccgtcactggatccttcatgatatctatcgaaatggggcagagaaagaacgaacgaacatcgatttcgttcatgtccaagtagatatataaaattaaccttaacctttcgtatatcagaaaaggaattgaatatgagtatgtg

SEQ ID NO: 146467 - DNA, 429 bp, Glycine max
  unsure (1)..(429): unsure at all n locations
agcttccctgtgtcatatgatcttctaaatatttatgtataaaacacagcatgacattaaacataatgcaggttcttattatacaatatactaagtcggactgtgaaacataaaggtaattactcacaatgttgtctgatatttcttgggctgttgtagaggtcatctgcccatatcgctttgtgtgggccatcttccacttcacatgtcttcaaacgggggatggtgggtcaacacttagtgataaattntcactaaactatgcttggtgttctcgtgtcttctatttctagtccattaagttttttttctaacagttcataacccctacaagacagtaagtgggggcaatcattgtatatttgaatttctaggacttttttgattcccttacaataaccaaaaattttgacaaattataaataaata

SEQ ID NO: 146468 - DNA, 416 bp, Glycine max
  unsure (1)..(416): unsure at all n locations
cttcctaacaaannatttcatgcagatggaccttcttctttttattataacttaccacagcctcctatccctcttccattcccacctagagcaattccaaacaaaaaaatggaagaagcggaaaaggagatcttggagaccttcatgaaagtagaggtgaacatacctctgctagatgccataaagaagattccaagatatgccaagtttctaaaggagttgtgcacccacaaaaggaagctcaaatgtaatgaaaggattagcatgggcagaaatgtgtgagcattgataggtaaatctgttcctcacattcctaagaaatgtaaggacccaggtactttctgtataccttgcattattgggaatagtaaaattgagaatgccatgctagatctaggtccattttcaattcttta

SEQ ID NO: 146469 - DNA, 379 bp, Glycine max
  unsure (1)..(379): unsure at all n locations
agcttgcctcanagaggtccatgatttattangcggccgaaggaactagttccgctcctgagtatgacagtcaccgctttaggagcgctgtacaccagcagcgcttcgaggccatcaaggggatggtcatttctccaggagcgacgcgtccaactcagggatgatgagtatactgatttccaggaggagataggtcgtcgacggtgggcatcactggttacccccatggccaagttcgatccagaagtagtccttgagtatatgccaatgcttggccaacagaggagggcgtgcgtgacatgaggtcctgggtgaggggtcagtggaatcgcgttgatgcagatgctatctgccagctcctgngatatccgttggtgct

SEQ ID NO: 146470 - DNA, 449 bp, Glycine max
  unsure (1)..(449): unsure at all n locations
tcaagagatcatccncttgacaacattcttgtttacntctcataaagggtgacaactagacattctcttaaagatttatgcaataatatggcttttgtgtctatgattgaacctaaaaatataaatgaagccataatagatgatcattggatagttgctatgcaagaagaactaaatcagtttgagagaaacaatgtgtgggaactagtagagaaacctgaaaactaccccatcatatgaacaaaattggtatttatgaataagttagatgaacatggcataatcattaggaataagactagattagttgcaaaaggatataatcaagaagaaggaatagattatgaagaaacatatgctccagttgcaagaatggaagccattagaatgcttntagctttatgcatccataatgaatttaagctttatcaaatggatgttaaaagtgc

SEQ ID NO: 146471 - DNA, 428 bp, Glycine max
agcttctgcgtgtgtatgaagttctatagatagaaaggtccaaattctagagagttctgagagatttttctgtgtgaagatctacaaagacgagagctcgaagcggatgccgttctgagagcttgagatgagtctgtgagtgattgtgagatcctataggtgaaggagacatcctcaccacttgtattttcgcaatctttcatcttgttcttctctgtgttgtaaaggaggttttcggactatggaaagctaaatcctctgctggatcttccctctaggtacttgatgtaaatatatttatatgtatgtaatgatgaattgtgtgggctctatgctatctgcttttcattccagtatgtctttaccttgatcatgtacatgcatgctttgttagggtcattcaatagtggaaactagtctgattctaa

SEQ ID NO: 146472 - DNA, 400 bp, Glycine max
  unsure (1)..(400): unsure at all n locations
actaagctttcattattctatgtctcgggggtccaatttttttctgtatttnnatncncgnnncatttactttttatacccgcttttgatgtgcttaagccattttatttaagtcatttctcgcttaacctaaaaataaaataaatttccaccgatcgtttgaattgtattatccattaacttcggttaaaaagaattccgaccgttcggtcgtgccgtaaccacgttggaaataaaaaaaagaggtaaaataataatataataataaaaaaaataccttttagtaaaataaagcgaanaatcaatcggacgttttctctttgggatttctcattcttaatcgaattgactaataactaaagtgaaactaaggctaaaatcaactcgcctagtcaagctc

SEQ ID NO: 146473 - DNA, 428 bp, Glycine max
  unsure (1)..(428): unsure at all n locations
agcttaagctccttcaactgcacaatgctcttattatnagaagagtatccttgtagaaccttcacccgacgaagacactgacaaaaacttatcttttcctttttggacaaagtatgacaagctgggggcaagtaaattttcttcccatcaaaccttggttgcaactgtgatcgtatccccatctcagctagatcttgacgggtattcaagccatcctttgtcttgccttaaatgttaaggagcgtctcaatcacactttcacatacatttttctccacatgcattacatcaatacaatgtctaacgtctagatcaaaccaatagggaagatcaaagaaaatggacctcttcttccatatgcaagtcttactgttatccttctttatgtctttcccaatcagcattcatgtgttgaacccgtggtatac

SEQ ID NO: 146474 - DNA, 445 bp, Glycine max
  unsure (1)..(445): unsure at all n locations
gacacaaaaactacgctggttgacaaagtgctaaaataaattattagttatttatatagcnaagaagatgaaatactagcttattaattaaaagtattatataaaattaatagttgaaaaatgtaaaataaaagaaaaataataaaattataatttatttttaaaaaagtaacaagaaaaatgaataaatatatcggataaaaataaaaaatataaaaaattagaagttaaccattttaaaaaatgctacttctagtagttttttaaaaaattagaaactaatgaaaaattattaaaaaaaagttatctatcaaacaatcaaattaattttttaattagttaaaaaaattaaaaatcaactaaaatatcttgttaaacatattcaaaagagactcatacattgggttacttcacacgtgcttgagatattcaacagtgggttaat

SEQ ID NO: 146475 - DNA, 425 bp, Glycine max
  unsure (1)..(425): unsure at all n locations
tgggcacatatccacatcttgcaaaggggtcggtggtggagtctgattgattggcatctgacacagccgcaactgatcacaagggtggaatggatcagaatcagatcatataactgtccaactttctagcacttgggaactcatgattcatgggcatggctcccctgactttggaaataagaaattcacccttatcatcataagaattaaataatagtaatatcttatttggaactatatcataccatttaaatatttgcaaggtgtcacaaattgtatgtagatagatagtgataatttttttgaaacattattggtccatatagctcttcagctgcatctcattcacagaactggccaagttagttctatatatgggtttctggatggatctggttggaatgtatngtatttttaagaatatt

SEQ ID NO: 146476 - DNA, 413 bp, Glycine max
  unsure (1)..(413): unsure at all n locations
ntcctttgatgaacgaatttgaatggtttgtcttgtatgtatgtgtatgtatgtttgttgcctttgtccttgcaacgctctgtacttgtggccatatgaagaagacataggaagcaagaccttgttgatgtagaagtaagaccgtagtggtcttgtaaagagtaaagtgacacaaaattatctcaggtttgatttcaacttgattaaaggtcttgtcacccatctggtagggcttccttttattttgtggagtttctccccttattgttatgaggggttgtgtttgaattgcccctggttgaaggtctttcctaaccagtatggggataggtcgcttgacctgctgagttcctcctctgatggttatgagttgtaagtgtgagctacacttgattgaaggtctgtcatgcaat

SEQ ID NO: 146477 - DNA, 305 bp, Glycine max
agcttgtaagattatggggtacccatcacatgtggttctatgtggcggtcgggtgatggtgcacaacatgttttccacattcacaaatcgcgcataaacccaccatcccctattgcccacctccaactgagcccacgtactcccacatagcccatatcctcgtttctctcaataatgggtgcccatcaaatcctcccagcttccccaacattcaagaaatcaacatccaaaatcatcacaaactaacaaaccaagcaaaacatggcaaaggcaaaaaactctgcctaaaaaccaaccaaatcaca

SEQ ID NO: 146478 - DNA, 452 bp, Glycine max
  unsure (1)..(452): unsure at all n locations
tgcaacatcagagaacatgataaactggtcttgagagtctgagtgngtttagatgtgaaaacacagttacctaggggaattttgcggtctgctccgagtcaactacactagtttggcactaggtttgatgacatgtcaacgagttacttacagaaatgatccaacaattgaatcagctcggctaagggtctggtttccgattcaaccagccgagccgagccgagtttaataacactgattgggagggttccttacttagtattgaaaatcttgctttcaatttgatagtaggtagtaaagttcttcttcatggagtatgtctcattaatattctcccgcatttcacaaatggaggtagaaaacatacaattacagcttattntttgaatcagagtgccataaccaggtttatgataagagcatcctcattatccctggcctcaaactttggg

SEQ ID NO: 146479 - DNA, 418 bp, Glycine max
agcttatcttacctatctatctcccaaatgtctttttttatattcaatggataaaaaacatgaagttctaattcaagatgttttctttgttgcatgggcataatgcaatcactctatgtctagcaatgattttattaagatgtccctacctttgagttctactaaaaattatcctctctcgagcgactaatccctaaaactgatgcatataaaaccttcaatgtatttctactaaggattaccctctttcaagcgccaaacccctaaagatgatgcaaggatgaagcatataatacatttgttggcattttaggcctgccaagccctaactaaacgggtttagcctttcattgtcatgagagacttttacactttagggggttgatattaatggaagaagatggatggatagaggaag

SEQ ID NO: 146480 - DNA, 446 bp, Glycine max
  unsure (1)..(446): unsure at all n locations
actaagctttacatgcatgttcaaaccatatntactatacttcgatctactgatgctatctatnnganngaaaagataatttatattacacttctaatgtagtcgacaactaanaaaaaatataacagaaagtaatgcttaagccaatcaaatcaaatcatttagaatctcatcattactatcatgcatctcaaagagaaggagaatcaggcatcataatgtatagcacaacaaaacattaaaagaaaacatgccttctaaagccaaccaaggtaaaaatgtatttatatttgtgaactttttcaaaattataacacatatataaccatatataaaaacatggttgaacaatctgaccacatgcacaacgcattccacacattatttctgaaaatgagtggtaagggaatataataaagcattgttattaaaactgtatgtgcact

SEQ ID NO: 146481 - DNA, 316 bp, Glycine max
atcctgactcaccatttttcttgttccgcgtgagaatgtcaatccttaccctcggaagccaaaaagaaaaaaagggaaatttcctatcgaagagaaagccaaaagaaaagaagggaaatttccaatccaagagaaagccaaaagaaaagaaagaaaattcccgatcaaagaatgggagaaaagtaaaaaagggagaagaagaagggaagaaagcttctgatcaaggatccgaagaaaacaaaagatatgtgcagaaagggctttggaccggaacatatctgaaccattcagaatttgtccccaattaaccaaaaaa

SEQ ID NO: 146482 - DNA, 442 bp, Glycine max
  unsure (1)..(442): unsure at all n locations
tcctcggggccatttcctgcgaaggcagaacattggaatgttatttttaccagtgggatactattcttaaaacaaaaatgacatacaacctcctcccataaatacaaacatcaatgtaaatttagaggaagcttatgcgcatatttccttacaaacgttctcttgcacaagacattctattaaccaaaaaaaaaatgcacccatatacaatcaaggcagcttcgttacctagattatttacacgtacttccaaggtgtatttgttacttacatcacacacctccttggctaaattcacatacatgcatactcaaagcattttggggtaccaaaaattgcacatgtgcacatctttgtatttctaatacctatacatacacaaacttcatgatgaatcttgactatctacacaataanggtgctacatttatgctcttttcaa

SEQ ID NO: 146483 - DNA, 302 bp, Glycine max
gagaccggactaatgccgcgctcactgaaagagttttttgttttttgggccagctgcccggggtcaatcacagggaccttcttgccccaattgttattggttgttgatgaatgcctggcacttactttaaaacctatttaaccaccccggttaccactgactgtcatttcctatcggtttgtcaaatcacattttagccaattactacctcctacaagcaatatcattgcctttttaccatgaacacattgatgttgttggtgggtgatgactaccatctctgtaaaatatgtgggatatat

SEQ ID NO: 146484 - DNA, 467 bp, Glycine max
  unsure (1)..(467): unsure at all n locations
tcgtactgaccaagcatacagtcagatgttgttntttgttctgcgtatatgcatctttagcaagttttacaaagttaggcggaaggtctgcagtctctgaagcaccacaaacctggatcagagaagacatcaccaaataatgcacaagtacaataaacgaacattttaaatgagacaatgatacatagcagagtagttgaagaagtaccatgcacaaccagccaggtgggaagaataactcctttagcttcaattctgatggctggagacaagacagtatatatgcagccagaagtcagatgatgggggtcattaatagagttccatggcgtaaaatccagaatagcgtataatttacaagtatatatgggcgataagatgatcaaagaacaataacaaattattattgggcgatacaaatcctgtgaaatatccttataggaactgtagactttattatgaatttg

SEQ ID NO: 146485 - DNA, 378 bp, Glycine max
acccgcgatccttacagcaccgcagctgcagcttggtctctacagatcttttactttttttctctcaaactctctggaacttggacctttctctctctagaatctctcacatgcagaagctccgtgagaaaagggccaaactccctctctaaatctgatttcttgcttaaattggtggctttgttcgtgctcgtgcgcttagcgcaactctggtccattcagtgcacacttctgaatatctacttatcacgtggttttctcacttaacggatggactgaagcgatgctcttagtgtgatgacgccgtgctcatcgaacatgcatagctcatccttctttctaatattcctctcgctacccgaggaatgttgcctcatt

SEQ ID NO: 146486 - DNA, 434 bp, Glycine max
  unsure (1)..(434): unsure at all n locations
ntataatatgctatcagtgcaagaagcctagactctttataaattgctcaacactggagaaggctcaagacaggatgaaacactacaagaccaaagaaaagaagggtcttatgagcacctatggagatctagatgacacttcatttgatgaagatgaagaagaagccaatttatccctaacggcgaaaatagccgttgaagaatctaaatcagattaagaggataaggtaaatctcaatgacccagaatctcttaaaaaggcttattataaacaaatgttgaactcatccattctttcaaaagcttacaaaaacatgccaaaagatttcaaaaaactatccaaagatcatttaaaacttgagaaaatccttcangatcaagtagatgtttcactgaatgagtatactcagacatgtggagcatgtgtaactctc

SEQ ID NO: 146487 - DNA, 427 bp, Glycine max
  unsure (1)..(427): unsure at all n locations
agctngaggaatcttaaggaactactatattttctgctatcacttccagactacacacttgagtgtgcttagaggtaagggatgaatttattgcaattggggataaaatgaacatgtgcatggatccttagagaattaaattggagtttattttgggatgtttattgaattataatttttcctttatgattataaatacaatattattgtgtttgacataccaaatgatgttctgatgagaattggttgataaacttgagtgttcttaatgttttcgtgttttgacctatgattttgattcattgattttaatatgattgtgtaaaattgtctaaggcgttttacttctcatgttgtgaaaagcatcttgtataaaatgttatatggagattatgacatggagattcatattgtgagtaagtgacaa

SEQ ID NO: 146488 - DNA, 460 bp, Glycine max
gacacatagaaactcagctgttctgatttttctaagttcttaacaagctttgattatatacttacccttcatttaactgtctctgcgcttggcggccacgctcaaaaaagtactttcgacacctactgtacgttgatttgaccaatgctgctatgggaatgttgcgacaatccttcaaaaccttgttgatacattctgagaggttggttgtcatgtggccatatcgacgtcattctctatcataagccatcgtccatttttcctttgaaatgcgatcaatccatgttgatatggctggactcagttcacgaaatttttctaaattttgatcaaaaatgtgcttgcaaggagtgtacgctgcataaaattagttatgaataacgtggataagtatatatgaaaggtgaataaacgggaccatcaaatatgaaatcttacccaatttcttcaacatttcttt

SEQ ID NO: 146489 - DNA, 433 bp, Glycine max
  unsure (1)..(433): unsure at all n locations
agctntaactnttatgctgtgttttgtttttgttattttggcattngactctgttcatgaaacttggactactgtgattattgttttctgtcttggatgccaaaattgagttccttgaccgccaatacctaggaaagcctataaagtttgttgaatttgaatttgtgtagtgaaagttatgttaaaatcaagttttagacccttttaaactgatatttgctttatttggggaaaggtgaaattggggttgaaattggaacttgtggacttcaaaaatggatttttcatgcttgaaaactttgagaaatatatagagttttcagaaatgggacttctatgtcaatggaaaaaattatgtctaagctattgttgctattatgaaattgcttactagttgtgcctctatcatgagaatacttctaaaatatgtttc

SEQ ID NO: 146490 - DNA, 438 bp, Glycine max
  unsure (1)..(438): unsure at all n locations
ntatccaatntagggtataaaggaagttcatgtgttatatactgaattaaaacaaaatattgaaatgcttgaaggcaattaaacacttcatcatcaaacaaagctaagtctatgaacttagggttgataatggaacaagaagagaaaagagaattgcatcggatacgttgttctttcgaggaaaacaacgtaggagatgatatggagggaggaattgatgcaatcctaccccgcaagggcattggatagaaaactccaagtagattgggccagagatgcaagagaaggccctacggttcttatgagccttanggtagatttctggcccatgggctaagtacgagcccacttatctntgtaaatattagattaacggttcattatttttgggccttgtatatatggctccataatgtacgtagggtaccctataaatat

SEQ ID NO: 146491 - DNA, 294 bp, Glycine max
agctaggatctcctttatgaaggaatctatccttcctaagatggagccaaacccaatcacccttattaagaattaactctgtacttcctctattgcctttaggtgaatacacctttgtttggttcttaaccctctcatgcaacttctttacaaactctaacctagattctccttctatgtgtataaaagaagcgtccaatggaaggagaatgaagtcttacagtgttaggggattgaacccatagactacttcaaaatgggattgcttggcggttctatgaacccccctgttgt

SEQ ID NO: 146492 - DNA, 408 bp, Glycine max
  unsure (1)..(408): unsure at all n locations
tgagaggatngatggngacccggtgttgagagattctatgatatggtctacgtgggagtacgtgagctcagatggaggtgggcaacacgggatggtgggtttatgcgcgctttgtggatgtgaaaaacttgttgtgcaccatcgcccgaccgccacctagtaccacatgtgatgggtaccccataatcctacaagcttgatatgaggaagtgttgaagggtgaaacttcctgcttttattgttgaccacagagtggtacctggagatatgtcacgggggtcaggagaccttggggacgtcatgtggggtgctattgcccagaaccaagcttgaccaatcccgacccaacccgggcatagtctgtctgtgagaacctgtgatgtacctaatcaggcgagctcctggcag

SEQ ID NO: 146493 - DNA, 277 bp, Glycine max
aggctatgcataataattgacgtattacacacaggttcaaacttcaaaagaaaagatgattgtggtaagcatattaaaattttacttctacttagcaaccaccattagttatcaattatgctcaaaactatctcccataccttccttctgacaactgttgagtattactaagagtggatgaatctataagactattgggacagctatcctcctaaagtctatcttgtacgtttgaatccgaatgtgtattaaaagcaatttgaccctgaactgcacc

SEQ ID NO: 146494 - DNA, 320 bp, Glycine max
ccagaaacaaaaagcgtttattgtgttttaaatatgggcaaatcacttatttgtctctgacagtgtttaatgcaataaccttaacatgctttttggatgacatatttaatgtacgtacgttccaaattttagcccaattccgaaaagacgcagaagctacatatctaaacacacgattagttctttaaactaagaaaattcaaaaggtttatgaaatggtaacgtgccaatcatattactccacctgtttaaataatgtgaactaacggataatataataacataatttcagaaaccaaaatgatagatagtagttaaat

SEQ ID NO: 146495 - DNA, 412 bp, Glycine max
agcttcttatccaaggctcatcttgttgtgttaagctccttcttccatgacttattccttaatcgatggcgccttctctcacctcttttcctttgtcttccgctgcatctccatggtggaaaatcaccattaaaggaccccattgaagctcaaagatccagcctccatagaagccccacaagcaagtttctatcatctttcatcctctcacaaacacatctttgcttatttggcttccaccggaatgtgggtgcaagccattggtctgtttgctcaagagacctgcgctcctgagtttggacttccaacaccgttcaatcagaaattactcgtcttgcacgttggtgggggtgccataaaacaacgagtaaagttcacaacaaatatgtttcataatataataaaagagttc

SEQ ID NO: 146496 - DNA, 425 bp, Glycine max
  unsure (1)..(425): unsure at all n locations
tgtcaaataatgtctcattgcttataaaaattgattgtctctcaaacacttccacagtcttacattttatcttttaagcataaacgtgtcaaagataagatccttatcatgtataacttatctttgtggacctttgggataagtcctcaagatgtccagctataatgggtcctagtaaaattggcgagatgaaatttgagtcacaaagaggcttatagctacactaatgagatggaggccacttgggacatgttatttcaaatgttggggttatgttctatttttggtcagaaatgtgaggaaagaaagttacaggctggtggggaggcctactttgacttactatctgttgtgtctnttaaagaacagcgatggaaaaagaaacgtgaatgtgtagcttatgatgtgactaactgagactacac

SEQ ID NO: 146497 - DNA, 429 bp, Glycine max
agcttgttcatgaaggattactcctacctatacttggtcctaagggcatcaaggcacctatgttggatcaagtggcctcacaataattaagaaaggggggttgaattaattattcctaaacctttactaattaaaaatttactcttctaagacttttactatgttgttaagtaaatgaagaatagaaaagaaacttaaccaaaagtaaaagcgggaattaaagtgcactgcggaaattaaaagagtaaggaagaaggggacaaacacacaagagtttttatactagtttggcaacaacctgtgcctacatccagtccccaagtgacctgcggtccttgagatttcttttcaaccttgtaaaattcctttacaagcaaagatccacaagggatgtaccctcccttgttctcttttaacaacctagtggat

SEQ ID NO: 146498 - DNA, 445 bp, Glycine max
  unsure (1)..(445): unsure at all n locations
tgacaaaggaagaagaagaagtagaagttctttgtttattggaaaagnngtaataattcttcttgaaatgcaagtcaaggtcttgcttttatagactcttcatgtctggtcaagaaaactattagaagagttataacctctagaaaaacttgaaaaccattggaagagttacatcttttgatttttattcaaaacttgtcattggtaatcgattaccaaaaccatgtaatcgattacacaaagcttttcatgaaaggatatgactcttcacaattgattttgaattccaacattcagatgcactggtaatcgattaccaatatcttgtaatcgattacaccattttgaaataattggaacgttcaaattcagttgaaacttttgaaatcaaacttgcactggtaatcgatacagaaactggtatcgattacagagagtaaactct

SEQ ID NO: 146499 - DNA, 459 bp, Glycine max
  unsure (1)..(459): unsure at all n locations
agcttacaggtgaaaccagatgaagctttttaagctttaatattagtgttttcagcatcctcttctgaagctaccatgtgaaaacattaacacactgcacaagaatcataaatggaagccatgtgctagcttcacgagtgctaagtattgtttttttttgcactttcattgttgcacattgattgaacaacacactgcattaaacaagcttcatgtaaaatgccaaaatggtgcagttttattcaacattttccagcactttaactgcattctctacacctaatgttgctgcattaaacaagatttctgcaatctgcaatgaaaacgcgaagcaaaatggtaaaaggaatgcagctagacgtgcatgtngaagtcgagaagattcaaacgacttcaaagtcgttgaactacctacgaattcattattcatggatgaatggtgtagattcaaccatggag

SEQ ID NO: 146500 - DNA, 468 bp, Glycine max
tccttacagtcacctgcggcatgcaagcttgcatgatttacattctccccctttctcaagcaaattcttaattcttcttgacatcatcaaaatctcatgatttacattctcaaaacatcatatttttctcaatgtcatattacatacaacatcatctcatccacatctcatataactttctcaaaacattatagtctatacagttatgcattcaaaaagaatattttttcataccaaattgagagtatttcatgttacaacaattaagacatgtacttgcatcatcagttcaacaattagtatttataagttcccatgtacatataattacccaaacataacatatcataatcatcttatattagttcataaaataaagttcattgcataataataatgataaatcaactccattcatttcatttaaggttcacatttacctcaagaagcatttaagattgaatttca

SEQ ID NO: 146501 - DNA, 242 bp, Glycine max
tatgattagggctggaggatcccgacacacagagtctcgactcgagatttctgcatgatcaagccatgccccacaatgaaatgatttcaagacataccaggcacatgtgatccattaccaatacatgttatccatgtccatatacgatttgcaagggatatctgcaacagacacatcttatcatgacgacttttgatggccctctgaggcctgtatatatgtgtgacttgtgactaaattac

SEQ ID NO: 146502 - DNA, 445 bp, Glycine max
  unsure (1)..(445): unsure at all n locations
agcttgcattggaattgcgaaagccccactccatcattaggatttgtacctgccatctcaaacaaacaaatcaaacgtaacaagacaattatagttgctgtttgaatatctcactcactcaagtgtatcacacaattatggcttttctctaatgaaaacactcttgccttttaccactctaattccccttgagttcttaggcaattcaagatattatggtcacaacaaagaacaattcaccaatttgtgaaaggtaaggctaaagagacaaggaaaaggttaaccaagaaaaaggctaacaatgtttttaggcacaattgaaggaaataaaattcagaatttaggaattcaagtaacactccttcatacaaccaatatattaccttaaagagatttttttaagttcttcaagcatgaaccattcagcccaattntnttttttttt

SEQ ID NO: 146503 - DNA, 178 bp, Glycine max
actttgagggccttgacagaaatggaaccacataggccttcataagaaatacaagagcgaaaagccctattattcataaattctgtaaagacacttgacgtcagatacttggcctgacctaatctcctggcaagggcatagcggaattagaagttggacattcatagacactaaacca

SEQ ID NO: 146504 - DNA, 452 bp, Glycine max
agcttctcaaggaagttttcttaagaaagtttctcaaggatgttttcttaagaaagcttctcaaggaagttttcttaagaaagcttctcaaggaagctacctagtctataaatagaagcatgtgtaacacttgttgtaactttgatgaatgaaagtcttatgagatacacttcaaagttccacttctttccctcttttattccttcaatttcgtgctccccccttctctctttcttttcctccattaaagcatcctcttcaagcttcttatccaaggaaattcttggtggtgaagctccttcttccttggcttattccctagtggatggtgcctcccctcttctcttctcctttgccttccgctgcatctccatggtaaaaaatcagcattgaaggacctcattgaagctcaaagatccatgccttaaagaagctccacaagcaagcattca

SEQ ID NO: 146505 - DNA, 314 bp, Glycine max
gaccaccgcggggccttccgcgaggctgctgtttatacccgcctgactgggattatagcctaaaccatacttgccatgatgacctttggcatttatcaagctagttatgccgccgttgactttgcctaaacccattccggggtcgtaaccgttccccaacataactcgggccatcattactgctgcattggataggcaagcttgcccatagaaggagtccaccgaggaaatgcttaccacctcaaaagactggaaagcggttactaatgactcctctgcggcttccacataaggcgtagaggaagggcagctca

SEQ ID NO: 146506 - DNA, 421 bp, Glycine max
  unsure (1)..(421): unsure at all n locations
agctnttacatgcatgttcacaccatatttactatactttgatcaactgatgcaatctatttgattgaaaagataatttatattactcttctaatgtagtcgacaactaaaaaaaatataacagaaagtaatgcttaagccaatcaaatcaagtcattttgaatctcatcattactatcatgcatctcaaagagaaggagaatcaggcatcgtaatgcatagcacaacaaaacattaaaagaaaacatgccttctaaagccaaccaaggtaaaaatgtatttatatttgtgaactttttcaaaattataacacatatataaaaacatggtggaacaatctgaccacatgcacaacacattccacacattatttctgaaaatgagtggtaagggaatataataaagcattggtattaaaact

SEQ ID NO: 146507 - DNA, 356 bp, Glycine max
  unsure (1)..(356): unsure at all n locations
tttgggcgccagcctttatgatttttaagtttaatgtgctaagttgtttcaattttcaaagactatttttcagcctagacgccttagatgtgcaatgcacgccacacaaaagttaaatgcttgtattatttttttcaaatagaaaattccatataaaatattatgcatgaatctatatggagattgtgtttaactattttnttatttttcaaaatctttcatgctaaataaaactgagagaatcgctcaagctctatgagttattggaaaacgccaaatattctttgatataaatcctaagggtataaacatanctttcgctgatgttgaagaatgaatttttgcacaataaatta

SEQ ID NO: 146508 - DNA, 436 bp, Glycine max
  unsure (1)..(436): unsure at all n locations
agctgtcattcctatttgtttaacacaattactcctcagctgagaatcaatagtaattttccgaggtattaaaatttattgaaagggatgcttttttttattccaaacacacaagttttgagattgaattcctgatcggtcacaagtttaaataataagattttttgtcattcatatcatgttatataatcctaattctattttttttataagagggttagtcgtaacaacactatttttaacactttccttcttaaatactttctattattagttaatttattgaaaactataaaataagaagtatattcactcattaaataacaagtaaaaactataaatctttttttataattnttaataaaattcatttagtacaaatgaatattcagaagactnntataaatgataaacaactacttttattcttataagt

SEQ ID NO: 146509 - DNA, 369 bp, Glycine max
  unsure (1)..(369): unsure at all n locations
actctgttttaaagaatcaaataaccttcacaatcttacatatttctaatgttctctctattttttgggtatacagcaccgacaacaataaagttaaatgctaataataggttctaaaacacactctttaaaacctctttgntatccggtgaaatttattaaagatttatgaaataacataaatttcacttcttatataattatctcaataaaatttggtcaataataaagaatgtatttgataaaatgaattaaacagattgctttattaagatttgtcatcatgtcatgggttaaactgccctctgtgacatgcacagnctttggatactacggttgtncaatatgagtgaaacttgttcacttaca

SEQ ID NO: 146510 - DNA, 429 bp, Glycine max
agcttgagaatacttaatataataaagtttgtatcaccgttagctataacttttgacttgatgataagtgcttcatcaaataggtttgagtcttttgtataaagaaaatagttgctgggatccactcagattaatcaaggtctaaagtaatttctgaattccaagggtctaagacccaaaaacaaacccttagcttctgaggatttagtttttctaaatgatgagtgtactatagagcgttaaagtacaaagactaattattgattgaaaaatcaatgtttgacattttaacatcattgtttactgtaaatgtattttttttttatcacaatttcaattggtgattctccaatatactattgtaactctacagttctaaagtgcacttttcgtttagagtagactaatccttatcttagacttgctgat

SEQ ID NO: 146511 - DNA, 340 bp, Glycine max
  unsure (1)..(340): unsure at all n locations
tcttatccaggcactctcttgggtgtattctcctccttccttggcttattccctagnggatgacgcctcctctcacctcttctcctttaccttccgctgcatctccatggttgaaaatcaccattgaaggacctcattgagctcaaagattcagcctccatagaagcttctcaagcaagcttccatcactattggtgtcaagtgggtgtacaaaatagagaacaatgcatagggagaaaatgaaagatacaaggctaggctagttgcaaaaggttacagtcaaaagactatgattgattatgacgaggtgttagctccgatcgctcgcatggagaccata

SEQ ID NO: 146512 - DNA, 449 bp, Glycine max
  unsure (1)..(449): unsure at all n locations
agcttggaggagtgcttatcanctatatttttcccaaacgatatgagtctcccataatttatatttttcataaacccaagattctctttgccattttgaaatgcaccgcaagtatcattgttcttgttcttctttacactgcagttataggatacatcagctgaccaatcaaggccaccccatatagtatccccacctttgggtatcattgacatggttgaatcccacgttcgggtcatccgcattagatgctgtaaagttttaagaccaaaaacatccttatcccaaaaacctggtgcgaaagtcctgtatgaggtttagagattcattacattatatatgtattcgcagctaacatgattcattntataacaatatcatcaatggaaattacagaacaattcaccctaacaaaacttgagaaaattctatatatgtcacgaaacaca

SEQ ID NO: 146513 - DNA, 406 bp, Glycine max
  unsure (1)..(406): unsure at all n locations
agcttcttaaggaagctacctagtctataaatagtagcatgtgtaacacttgttgtaactttgatgaatgagagtcttgtgagacacaacacaaagttcaacttctctccctttttcttccttcaatttcgtgctcccccctctctctttctctccctctttcttttcctccattgaagcatcctctccaagcttcttatccaaggctcatcttggtggtgaagctccttcttccaaggcttattccctagtggatggcgcctcctctctcctcttctcctttgtcttccgctgcatctccatggtggaaaatcaccattaaaggacctcattngagctcanagatccagcctccatagaagccccacaagcaagcttccatcagttgctctgctttattttactg

SEQ ID NO: 146514 - DNA, 357 bp, Glycine max
  unsure (1)..(357): unsure at all n locations
atcatgtgttgacagtcatcgagtaacccatgaatatactcgagggccgaacacacttcagccatggattttgctctgggtaatagacgcgggaggtcttgacttccattcaaggtcaaggtgaacctatccatccacatagtcgcttcttgatgcaatgcgtcaatcacccttcctcttgcttctttntcggcgtatacttgtgcaaaatactccactatcttttgttcatgggccatagacatggtcaattcttccttgtattgccctatgatagctagcatgctttgctccgtggcttccaagagttgagccatacttctttttgacctcgcgcacgtaactaactcttcttta

SEQ ID NO: 146515 - DNA, 389 bp, Glycine max
  unsure (1)..(389): unsure at all n locations
agctntgaaaggatcaaaacttgctgagtgagcttcattttcatacttagagacataattaatacaatttattattagaccaagttaaatagtcatgtatatttgcatcagagaactgttgctattcaatcctcaataaacttagtttatgttataataaaatttgtggctgaatgcaataaaatcttatctgcaagaagcttatagaggcaaacaagtttggtgtgtttgttgagagctagagagtggtttgactttgaaagttgacaatggaaataaactaaaggcccgtttgttacaattatttttttccataaaaagaataatttttcgtacaatgatcactgaattattttttggaaatgccgattaaagtgcattgcagaaat

SEQ ID NO: 146516 - DNA, 458 bp, Glycine max
  unsure (1)..(458): unsure at all n locations
agcttatattaaatactatcatgtcaatgtgttagaagacatttactattgctttgaaagagcagatcaccatatttaaagttgtatcaattggtattcagaaaaattactgaaaaaaaagtttgaatgagattagccatttgataggtgtttagcagttgtacctattggctgtaatctatcaatcgctcttacttaacatacgaagatgccaattcgtgtttattttttatctttgttttacttgaatattaggttattttcatataagttttaaataaaaattaatatgtgaacttagtcatcattcaatgaatgaggggaacaatgccatgtgtcaatgagtaacattgttacatgattaaggaatgcaattttctgttttgtgtattgtccaatttaagaaatgcccatcacaaggttgttgtgcttatntaatgtcaaaattcctaatattt

SEQ ID NO: 146517 - DNA, 416 bp, Glycine max
  unsure (1)..(416): unsure at all n locations
actttttgaaaaattatccncagaaacaagtcacttgaagaattgtgactattggaaatgtatttttcgaaatcagtcactaataatcgattacaccttaatggtaatcgattaaacatcaacagatgtgactcttcatattgaatattgaaaattaaaatgtttagaagctctggtaatcgattacaagtgttgtgtaatcgattacactagtttaaaatgatttgaaactgttaaacacaagttgtaactcttgaaatttgaaatattaacgttttaaaacactggtaatcgattactaccttctggtaatcgattaccagagagtaaaactctctggtaatgattttgtgaaaacttcttgagctactcaatgctttggaaaacttnttagtacttatcttgattgagtcttc

SEQ ID NO: 146518 - DNA, 462 bp, Glycine max
  unsure (1)..(462): unsure at all n locations
tgtatgcatgcaagcttctcaaacgcttctagagtcacatttatcgattattatttattaaaatgtttccatccacttcagtgttctccctcgttacttagacaaattaatgatttggtcttgatctaatataatgatataaggtagccaacatataacgcataggatccaaatagtaaaattgtgtaataagagactttatgtatgttttagtttggtttcttatgtttaaaaagtttcaatttagtctcttgttctcttttcactctcattttttatttgatcctcacaaacctcacttggagacataggtgtgagggtaacctttttccttttatgaacaaatgannaattgtttgtgacaccattatggacaacatccttatcatactgccaaggccttncacgtaagagattgctagcctccatagggactacatcaaacagtatctcatcaacata

SEQ ID NO: 146519 - DNA, 449 bp, Glycine max
  unsure (1)..(449): unsure at all n locations
agnncttgggctggaaaactatatagcagttccaaggttctattttagccctcttctcttttcttctttcttctctctctcctatttcatttttagttttaggcttttcattagacattattttcgttttgcaattctagcttttacttttcatttcagcaataaaatttcattcttcaatctataattttgttctctattgattaatggaaggctaagtccccagcgttgttttctcttgaggatcaagcatagttctctttgaggttctattattattgttaaattctgttcagttctttttactcttcattaattactctgaatttgttgctattaattcatgcatgcttagtgcttgattaattgtctctgcgcttaatttacgttaatgcttaatgatcgcttatgagtaattggtgtatgtgatgcttaatcacataatgaat

SEQ ID NO: 146520 - DNA, 450 bp, Glycine max
agcttgtagagttaagtcccgtatcgatttaatcaattacttatatctcgtaatcgattacattggtggttgagacaatgactgatttagtcaggagtctctactttaatcgattaccaagtgaattagaatactgagtaaaacctatagaggattagaatacttggtgtgagggctcgtgaaggctttaaaagaaagaataccagggttgtgtgtttgatcttagtggagaaagcctacaaatgtaggtactagacatagccaaggttgtaatgattcaatataattcatttgtgcattgtatccttctttattggttatcatttattctttgttggtgcatgcttgtctttaagttttggaaaaccttgtttacaaaagacttactctgatattttatcaaaagatttttacaaaacaattttaattattattcagaagtatcatcta

SEQ ID NO: 146521 - DNA, 474 bp, Glycine max
  unsure (1)..(474): unsure at all n locations
catgcacgcttccacaacatccaagcaaaacaacattcaaacagcacaagctatcacagccaagcaaaacagagccaaggcagaaaactctgctcaacacatcaaccaaaatcacagcttttctcacgtaaagaccacagtaacaattccttcgatccaattcgttaaccgttggatcgactccaaaattttactggaagtctatagtgtataagcctgcattttgaccgttgggatatactagcaaacatccagaactcattctgcactagactttccacagccaaccacacacaagcatttttctgcacttgtgcaaaattctgctgcacaatttcacagcaaaaattctgcataagtgcagatttcgaaaatcacccttcctctcatccaatcttgcccaaatcaaatcctacaagtcccaaatcatgtatcanacatgtctaaaccaaagccaagcttcataccacagca

SEQ ID NO: 146522 - DNA, 427 bp, Glycine max
  unsure (1)..(427): unsure at all n locations
agcttcttanaatgagtttatacattntgtttctttctggtgtgtaaagntagttctctttcctgttattaagaattttatctagggggaaatttaattaaatttgaaggttaagggggcccggtattggctataataattggttgaagtgatgcagggaaatgtcaagcataactgcattgaaaccacatgataaagttcttttcaaaatgacagcaaatttagtaagtgttctagatcatggtcattcaaaggaatttggattcatgagtcaaaattcagcattcaaacatactatttgaatgatagttccaataaaattgaaacataatcataaacatttgtagatgatgtattgtagttctgcaggacaattattattggctctgtagaggtaatagataattctaattagaactacattact

SEQ ID NO: 146523 - DNA, 424 bp, Glycine max
  unsure (1)..(424): unsure at all n locations
acactngtacgaaatgatatagagaatatttgaaacaaaactntaaaagaaaggacactaaaagtctaaaacaaaaacctaaattaaacggagccaataaaccatatttttccttaaatttgcatattatctatccactaatcaacaaagccattgttaataaatccgaaaatatgatcttaattttaacctagtgtttatcagagaatgagcagcggtttacgtgtacgtcaacatactgaaacagagtttgccctcttttttcttcctttttgaattntatgaacgattgtttagtggtacaagtaaagtacaaggctttttanaaaataaaaacaaaaatattgtccaaggacagccccccaaaaccacagttatttgactctagctctactacgtacgaggatctatcatgagtggttat

SEQ ID NO: 146524 - DNA, 426 bp, Glycine max
  unsure (1)..(426): unsure at all n locations
agcttgtacagtttgttaagaggttntgattgataaaaaanaagaatctacttcaaccaatacacctttaggcacgaccatacataacatagaaatcacactcggaaaaggtggacaattagctagagcaacaggtgctgtagtaaaactaattgcaaaagaagggaaatcggccacattaaaattaccttttgggaggttcgtttgatatccaaaaaatggttgacaacaatcaaacaagtgggaaatgttggagtaaaccaaaaaaaaaattangtagagctggatctaagtgttggataggtaagcatcttgtagtagaggagtagttgtgatccccgtatttatgaaccacaaaggaattatgattagtagtggcttttctttatgttctagactagagcaacaagttcccattctgtaata

SEQ ID NO: 146525 - DNA, 270 bp, Glycine max
tattacaacaagtattctgacttgccactcctgacttataagtattcttctaggccactactggtataatgcttagactccccctgaatctacaaacacccaagtattattatgtcacttagcttgtctttcacaaacaacaatttgtagaatcacatattctaacacatagagagtgtgtgtacaataaagtataggtagataaccctggttagaataggattgactctataagtacaatgcttctctctcattttcttatgctatgga

SEQ ID NO: 146526 - DNA, 416 bp, Glycine max
  unsure (1)..(416): unsure at all n locations
agcttagataacttattatcgatgatgcnttggtagcaaggtggagacctgagtgacacatgtttcatcttccaatcggtgaatacacaataactttggaagatgttgttcttcatttgggtttatgagtcgatagaaaaataattagtgacccaacttattttgattgggaacaaagcacaaaatatctaggtgtcattcccccataaatggttgtgctagttggattaacattaaaatggacgaatgtacattgttgttgtagtcttgggcatggtatcgcatgccattcattcgactaaaggtcgagcgttaaccatcatatccacttgtaattaggtaaataaagattgctcactcaaatttgtaggtcaagtatttgacactaatgtattacatattntattagatggagt

SEQ ID NO: 146527 - DNA, 386 bp, Glycine max
agcttaaagatccagcctcatagaagcttctcaagcaagcttccatcaagtggtatcagagcacaagaacttcaagtaggttgctccttaaacctccattaatttttagctttaccttctcctccattgttgtttcttcattttctccatgtatctcctcacatgtcttgtgttgaatgttgttaacatgattttttagaatttccactgattaaacttgctatagaagctagatttgattttctatggtacaaatttcttgttcttgttcttgaaccatgagttgtgttgagtctaggttccattgagttttgttttgctattttttgtggctgaaactgatgagaatcctgaaactggccaaatacaggctaaaggcccaagtg

SEQ ID NO: 146528 - DNA, 352 bp, Glycine max
  unsure (1)..(352): unsure at all n locations
agcttggaaacgatgaatttaagccataaaagaggagctagggtggaactactgatttgtacaagagatgctaggtttgtataatccaaaaagggatttcaacttacaactaagtaaaattagggtttaaacaaacagaaactcacaatgtcaacaaattgatattatcataaacaccaggcatgcatcaatgaaacctattttatcgaggacaacacgaacaaccaacttacgcctgaaaacaatattggtacttaccgcacgatggtcgaagtgaagaccaagcttgtggttggctattgagacttanacagacaatggcaaggttgcgactaccacaattccaagctca

SEQ ID NO: 146529 - DNA, 326 bp, Glycine max
  unsure (1)..(326): unsure at all n locations
cataagaagaaatcaagaagatgcagagaatcacagaagaagaattgatcttctaagattcatagagagagaatgacattcatagaattcatagagaaagaacattaagatagaccttcacaaaggcgatgtatttgataaagaatntttctaaaaaacaacatacgcatacgttttgtttttcaaaagagtctatctcaaaatattctaagttactagagtttttattctctggtaatcgattaccagtttcctggtatcgattaccagtggctaagtttgatttcacaagttttcaactgaatttgcaacattctaattggatt

SEQ ID NO: 146530 - DNA, 378 bp, Glycine max
  unsure (1)..(378): unsure at all n locations
agctttgttggtgcgtagctcaccatcttttcatagnagagtaccgataatgtgtctaccatcacgattatcgtctccctttttgcacatgttctgtagttgcatcctatccggaaccatatcagaatagtactgatactgcttaacgaaggcaaccattaggtccttccaagtatggactcgggaaggttccaagttagtgtaccaggtaacagctaccccagtaagactttcttggaagaaatgtattagcagttcctcatcttttacgtattcccccatcttctgacaatacatctttagatggttcttgggacaagtagtccccttgtacttgtcaaagtccagcaccttgaacttgggaggggtgatgatatt

SEQ ID NO: 146531 - DNA, 479 bp, Glycine max
  unsure (1)..(479): unsure at all n locations
cttacagcacctgcggcatgcaagcttcatctggggtggattctcattgttgagttttagtccaatggtctggcctctcccctgatgagacctcatgggaaagctggccccaattgtgccgagattatccccttgcagacaaggtgcatttgcaagggtcgtggaatgataaggaaacaagggtgcaacaagcaactagtagtgagcctagtaaagacattaacagtggggtgcaactagaaaacaaagcaaaaagaacaatcacaaagccctcatacctgtaggactacgtgtgaggatcttgctgagctggttcaagggaaaatttgcagatgattgttgtctggaatcaggggacagcaataccaaaatcgttntgcctgtgatcttttcgtttttgcttctaatctttcctagcaacagaatcacaattctgttaggaagattactctataaatatagccatgtaattacctaca

SEQ ID NO: 146532 - DNA, 463 bp, Glycine max
  unsure (1)..(463): unsure at all n locations
actgcggctgcacgctgtagaaataaccttaaaagatatcaaattattgtctccactagacatggttgtaatagcaagatattagaccaaaagagaaccatagaacactgctaaagtctggcagaaaaggtaccacaagaaaagggatctgagaatggaggactagaattcctttgaaggttgacagttgctggagtaacgtcatcatgatacaatttacaaggctaaggctgagtgagtgctatttccttgacactaattcctaaaagaaaaaggcacagttctgttacagtccattgtctcttattttatatgtttatgtgattctgttatgattttacgggtaaaaggtatgtacccagttattataaagtttaatttttgtgatggttgtgcttgcatcctgtntctgcacggttgatactgtgtacctcgatgacgaccttcgcgttgaaaagatatc

SEQ ID NO: 146533 - DNA, 442 bp, Glycine max
  unsure (1)..(442): unsure at all n locations
agctntgcttccacacagatcattaagtatttaaaattaaaatggatgaattcgagtatcaaactcagggaactagtcttagacaaaattatattcagaattgaggcattaatggaacaagcattgataattaatgattaaaggtaaagtaaactaattctatgatgaaaatagtaaatgcaagttaataaaattgacaatagtaggtaaaaacgttgggtctttctaacaaacaagctaatgtatataaggatatttctctaattaatcatgcttttatgttctatgttgtagcctaagatactaaaccacgatccctactaagactggattagtccaagcttcgtcctcagacccctcgtgttggactaggcttactttaaacaaccctcgtaggtttagactaatgtcacctaagcttcgtccgcaaatccctcttgta

SEQ ID NO: 146534 - DNA, 440 bp, Glycine max
  unsure (1)..(440): unsure at all n locations
agctntaagttattgtggagactaaaccttctccaatttgccttctatcccaacgtaaaatttcaagcaaacaaagcaccaaaaattccaatgcatgaatatatattcatgcagacataatagtttcgaaataaccatattttcacataacatccactatcaaagtgagaatctaacttccaggcacataatttcaaggattttcttaaacattcttagcatacaaaatcacaggatatagaagccaagaatatcaatcaatcatcatactcacaaatagttctatacaaaagataggatgagcttccctcaatgtgatgctaaaaataataacagcttgaaggaggaaagaatgaagaaattttagtctcccgaacaaaacttctggaccactacgtactatgaaccctcaacaaatcanaatccaggaacttggaaac

SEQ ID NO: 146535 - DNA, 461 bp, Glycine max
  unsure (1)..(461): unsure at all n locations
agctngngtgaaaataacattatttagccataaaggtgtcttcaaaaggtatatgaatactctaatatagaaaattttgtacggacacaattcctaatgatgtctaaaactggcaaaacaacatatttttggattagttgattgtgctgaatacaacaactaaagtctttcccattaggtgaggtaagctacatacatcacatcatatcattaggctcagttaaaagacctaattttcatagatatgccatgtttatcttttaacattattcaaagccttttcgagttaacaacatgaaacttaaatagatggagggatgaaaaatattggagattntaagttttaacttttaaagtccaaggtgataaaatctagcttaacttttagggatttggtaatgtacacacccacttggttgtattttaanaaactgcagttacaatttgctaacatattcttt

SEQ ID NO: 146536 - DNA, 445 bp, Glycine max
agcttaggtcttgaagttgagaagagaattatgagaatctgttagctcaacaaaggggttttcatcaacaacacccaataatggatcatgagctccaagaagagaagtgagcaccttgtcttgaaggggattaagcctcgtccttgggaagcctctatgtgctcttgagaggaaagagggaggagctcttgagagaaggaggaactaagtttttgagggaaaatgaacgagaaatcccttagtggcataagtgttgcttataatttaatactacatcaattttttagagattgatataaaaagcctttttatactagtgtgttagtcttgaaatattagatcttatttgtttacattgggttgtgaaatattttattttcttaatattagtggaaaaaaaatgacttatccattcttcttaatattaatgatgaattacaagatt

SEQ ID NO: 146537 - DNA, 373 bp, Glycine max
  unsure (1)..(373): unsure at all n locations
agctngaacctctacatcttgctgctcattggtcttttgaatgaaggcagatgggaagctggggagaggttgatgtccgatatgattgtgaagggttgcgagccgaacattgtgacctacagtgttntgattagttcgctgtgtcccgatgggaaagctggggaggctgtggatgtgttgagggttatgaaggagaaggggttgaaccctgatgcttattgctatgatccgttgatttctgctttctgcaaagaggggaaagttgatttggctatatggttcgtggacgatatgatatctgctgggtgggtgccggatattgtcaactacaacacaatcatggggtctttgtgtaagaagggaagagctgatg

SEQ ID NO: 146538 - DNA, 393 bp, Glycine max
  unsure (1)..(393): unsure at all n locations
agcttcctttctcccttatggagacaagcttacccataatcgtcgacgatttggcctgtataatcattgacgacaaccacgacagtactggtgtgcttcacgacggcaaccaacttagagagacaagcttaagggtacaaaatgagtgaggtaatgcgggctagggtacagtgcgagtatgcaagagaaaaagataaaaatctacttcagattcaaagacggtgttcataaaacccgtctttggataatgtagttcaacaacggtgcagtaaacccgtttttgtaacgcgcagataacgtcattnttaataaaaacgtcattgaaataaatctcttatttactaaaatgccaccgcctctaaaacaacatcatatttggaaccaccgatgttg

SEQ ID NO: 146539 - DNA, 268 bp, Glycine max
  unsure (1)..(268): unsure at all n locations
agcttgttgggaattgattangtacattcttttcaaaacccatcaaaattcagggtgccccattaagagagaggaactcactcaacttgttacgaagaactatcatcagcgtaaccttcctacctttgtgatcaatgaggctaaggagaagctttcctttgtatttggctatgaaatgagggagcttcaaagggcccacccttcttccaaagcccagacacggtcctcccaacaaagtgagcattttgcttctctctctctctctctc

SEQ ID NO: 146540 - DNA, 393 bp, Glycine max
agcttagtggagtgtaacttccctaaggcagttatgttttatgtttggcagcttcgatctgctcactaagcgcgagtgacttgctaagcaagcactcagtgacgtttgaattattagaatttaaactcatgcgcttagcgggactgactcgcttagcctaattcgaaaaataagaaacccgagaggcttttaggcttagtgtggaggagcgctttgtgacactctttaccccatacatatatgtattaataataaaaggaataaaaattcaaatattaattaaaagtatttaatttttttttaaatacaaacctttcaaaaggataaaaggcccacattcacctttctaacatcataataaaacttgtctaaataaataataaattcactttg

SEQ ID NO: 146541 - DNA, 433 bp, Glycine max
  unsure (1)..(433): unsure at all n locations
agctntaaattattataatatccttaaataaattaattaaaattaaaataaaggtttttttttccaatttgtttgtgttgattggtaacgcactcaactgaaaataggatgtttgttaataaatccctttatgaatatatttataacaaatgggtgtaaaaattaaaaattaagttaaatgtcttatcaaatatataatttattacaataaatacatttatttgtagtattataattttatcaggtatcattgagacattaagttctgaattagaaaattatttttgagataggatattaaatntttaattatttttatatagatcaactcatgtaatttaattagtgacttaatagttaatttgatcttagtaatttagtagagttgattacgggttgaaattttataactgagttaaactcttgtccttat

SEQ ID NO: 146542 - DNA, 424 bp, Glycine max
agcttcctttccatagctggtcttcagcaatgtctatagtctttagctaatgtttcctgtttggtagggtgatgatttgtgtagggtgttttctattcctgatcttacaggatcttattatttgtatcttccagaatttataataaatcatcataatggaaaggaaaaacatgcattcctgagtctaaattagctctgtctggtactttatctattctaatataaattatctttactttccaaaaaaaaatgcattccaagcatcatcatagcttaaaccactacactctttatcagacaaggcaccacactggacaggagaatgggaccccattttgaaatcccttcagcatgtctcatagcacttgtaagcaactataatgacttagtatcatcttagtctaatttaaatctccaaattcac

SEQ ID NO: 146543 - DNA, 461 bp, Glycine max
  unsure (1)..(461): unsure at all n locations
cacctgcggcatgcacgcttttatttctctgtcaatttccttcattctcctatgggttttagtaggcagaaacctacaaatatacattgttccatcccatgatttttataatatgtagaggatgcttttttctaactcaactgcagtactctagtggtagatctattgacagtaagcataatttggttctctaacagttagaattttgctattacaagctgtaaattgtggtagatcatatcttcttgccacacaatgttggtaaaggaataggcatggtagataagataaagattcatgaataataaaaggttactttctagtagttccaaacgtaattttttcctattcaagttgcattagagagaaaccacatattccagagtaaatatttgataaatttngtggcctataannatatatttctttattcttaatataattatttattgctaatcatt

SEQ ID NO: 146544 - DNA, 436 bp, Glycine max
  unsure (1)..(436): unsure at all n locations
agcttggttcgaggtacttacccgttgattatcgaagaacgatgaagaacgaatgaagaacgtcgaagaacggttgaaatctttgcgagattcctcacggaaaacgttacggaaacgtttcggaagcgcctcggcttagattttcttcacggaaacaatttttccaagcgaattcgaaagagagagaagtgcctaaggggctggctcttcttccttcttcatttcctcccctatttatagcaaaataggggaggtggttgccgcccagctcgcccaggcgagctcagctcgcccaggcgagcagggttgcttcctccagaagcaaccgccttctggaggaatcttctggagggcccaaatgggcctgggtgctatatgcacccccattnttactaaggacaccctcctctgctgattttggtgatctttttcttaa

SEQ ID NO: 146545 - DNA, 283 bp, Glycine max
  unsure (1)..(283): unsure at all n locations
tggagaaagaagggagacntagaacccggagatagcgttcgggtgcacataagaaaagaaaggtttccggaacaaaggaaatcaaagcttctaccaatgggagattgaccatttcaagtgcttgaaaaaatcaatgaccatgcttacatagttgatctgccctgtgagtataatgttagttccaccttcaatgtctctgatttatctcttttcgatgcagatggagaatcccatgtgatgacaaatctctctcaagacggagagactgatgaggacatgacca

SEQ ID NO: 146546 - DNA, 421 bp, Glycine max
agcttgttatgttcttgtcatatcatacatgttatcctacttgcatatcctatcccattggataggagtaaagtttaaatcactttccggtaattaaaaataatttttcctgttttcaaattataattataataatagtaattgtaataattataatgattgttaggattggttgatagcaatatagtttttaatagttataattctaatttaccagaattactagacaatattcacctcactatttccctatttaaatcccttgtgatttgatttctgctattaggaagaaacactagatttttttttttaagattgtggtgagtggttgatgtacataattgataccaataaaaatcttttactatgtcaagttttgttctgttatcctcttattcgttgggttcctttattttgttta

SEQ ID NO: 146547 - DNA, 436 bp, Glycine max
  unsure (1)..(436): unsure at all n locations
agctntanacaggtgcagctcatactcactcctcataaccatcagaggaggaactcaataggtctcaaacaacctaccccccgactggttggcaagaccttcaaccaagggcaagtcaaacataactcttcacaaccattagggaagaagcttcataaaacagaaggaagccccaccaaatgggtgataagacctttaaccatattgaaatcaaatctaaaatgacttcacgtcactttactctttacaagaccaccacgttcctacctctacatcaacaaagtcttgttttgtatgttgtctacatcatgaccacctattcaaatggccacaaatacgaagtgttgcaattacaaaggccacatacattatatacacacaagacaaacaatccaaaaatcatcatcaaagaaaaacatatgcattgaagaaaaac

SEQ ID NO: 146548 - DNA, 391 bp, Glycine max
agcttgaaaaccacgtttagcacaatcatctgccacaacaaaatgaaaccccacattacaattcttattgatacttttatatggttagccaagtggacaaaatgacccaataatttgataagaaccttcggacaatgccacctcactgattaagaacttactaagaagagcaacaaactaaggtagagctcataccttgttaactggcagcatagaaagctttgagctttgagcacccacgactgttccaagagcagtgtagggttttcttcaacccacagttccaacagcagtgtagggttttcttcgacttttcttcgataggagggtttgtgggttccagcgagcggtttccgacagtattgaaatgaatgtggggcaatgtgggtgt

SEQ ID NO: 146549 - DNA, 414 bp, Glycine max
  unsure (1)..(414): unsure at all n locations
agctntgcttccatactatcattattggttctaagttttcacttgaaattagtgaggagaagaagaaagaaggagcaaatccaaaccgaggtactttcgtaacacttccgagacgtttccgtgatcgattcagtggacgtttttcgccgttctttgttcgttcttcgtcgttcttcgatcttcaaccggttagtttttgattttgaagctttgaattcattctatgcacccttaggggttaattcttgctttgtgtgtttgcatcttcattcttctacttttgatatttcttttcagcgttntaagcgagtttcgactaatcgtttaagccttaatctcacttaatcaatgtntaaatgaatctccactgatggtttgtgtgtgatctcgtttagcccccctaaaataaaatct

SEQ ID NO: 146550 - DNA, 418 bp, Glycine max
  unsure (1)..(418): unsure at all n locations
agcttatgcgcatattttcttacgaacgttcacttgcacaagacattctattaactaagaaaaatgcacccatatacaatcaaggcagcttcgttacctagattatttacatgtacttccaaggtgtatttgttacctacatcacacacatttcctttgctaaattcacatacatgcatactctaagcactttggctatcgaaaattgcatacgtgcacatcctggtatttctaatacctatacatacacaaactttatgataaatcttgactatctacacaataaggtgctacatttcatgcttttttcaagtntttgctacctaaagccgcatgcaaattcaagtatattttcttttgctgactaaacatgtattcaaattaaaagggtattttgtaatgtatttcatgcaacata

SEQ ID NO: 146551 - DNA, 438 bp, Glycine max
  unsure (1)..(438): unsure at all n locations
agctntagcgtcacttctgaccatggtcgtagttggcctcttcaaactaatattttaaggaagctatatataggtctctatacttcataaaaacaattgtttgtttaattttatctttttacgaatttaggagaaccttgaaagcttttgagagatgtaaagcctataaaacaccgtgaggatggatcatgatcattgttcctgccttattggcatgtctatgtctattttgtataggattgttattttatctttgatcatgagcagtcaatccccgtagtctgagagttatgatgtaactatccaaatgtaccattctccctattcttaaaggaattcctcattggttaatgttaattaattctcttccttgcctttattgttatttgaaatcggcattctatactcaattgttacatagtagtgatcactgcatgt

SEQ ID NO: 146552 - DNA, 449 bp, Glycine max
  unsure (1)..(449): unsure at all n locations
agcttagtgngaagcaagaagcatttctcttcattggcctctacttgttggcctttggcagtgcaggtttgaaggcttccctgccatcacatggtgctgatcaatttgatgaaagagaccccaaagaagcaatgcaaatgtcaagcttcttcaacggtctctttttagcactttgcgttggtggtgcagtcagcttaacatttaatgtgtatatacaagacaataatggatggatctggggctttgggatctccaccgttgctattgttttgggcaccattatctttgcctctggattgccactataccgaattcatgctgcacattcaacaaacggaatcttggagatcattcangtatacactctnttgcaaaccttattttgtgctgcatatatttcaatttgaaaatcatattttttttttaccatgatgatattagtgtggaac

SEQ ID NO: 146553 - DNA, 429 bp, Glycine max
  unsure (1)..(429): unsure at all n locations
agctntatttntctggaggtgaccgacactctggctgcttctgcttaagagagaacaatcatttaaaattgattaaattactcatttcacgatttttaccttttaggttttatagtttcaaatttcttataatttatattttaattctcttttaatttttataatttaaattttttttaaaatttttttaatttttattttaatttttatttagtctttatagtttgaaaataatatttttaattcttataatttatattttaattactttttaatttttattataaaaaaatatataaaaataattaactacaaattaattataaattatcaattantttttttattataaattatcttaccataaattaattatgaattatttaattatattctttgaattaaatataattaataatattacttata

SEQ ID NO: 146554 - DNA, 434 bp, Glycine max
  unsure (1)..(434): unsure at all n locations
agcttatagccaaatttcacaatattggtattgttctcctctctaaaggctatgttttctacaaactacaatcatcattgcatccacgtaacggcttttgctgttactgtatacaatttattctggagtttggtttacaatatatccactgttccaatttcaagcttctcatattgaaacctgaatcctgcggtatttcagtaaagaaacattccttgctttagatcataccaacaaaattatattggcattggagttaattccctttgatgatgtttgtggttctcagctntggaggaatggcgaaagaggaagatggagagggccagacaaagagaattggagaaaaatggaacaacttcttctcaagcttgactttatatattctcttatatcaagtgaannagtgacatgctgattcaatacataatggg

SEQ ID NO: 146555 - DNA, 450 bp, Glycine max
  unsure (1)..(450): unsure at all n locations
agctntgaaggtgcgtagcccaccatnttctatagtagaatactggtaatgtgtctactatcattgtcatcgttttttcgtcattgaggtgccacttgagctgccaggttctccacctttgggcgtattctttgaaagatccgtgccccctttttttgcacatgttttgtagttgcatcctatccgaagtcattatacagacactgcctaacgaaggcaaccattaggtcctcccaggaatggactcgggaaggttccaagttagtataccaggtaacaactaccccagtaagactttcttggaaggaatgtatcaacaattcctcatcttttgtgtatgcccccatcttacgacaatacatctttagatggttcttggggcaagtaatccccttgtacttgtcaaagtccagcaccttgaacttgngaggggtgatgatattgggtact

SEQ ID NO: 146556 - DNA, 439 bp, Glycine max
  unsure (1)..(439): unsure at all n locations
agcttgcacgtacttcctttaaagtttaatcttcacacaatattataataaaattaaatatcattattgtacatatgtgcgatcatatttgcactaattcattcgatcttatctgaactttatagttatacatgattgagcgaaaataatactgtgatggatgatctcgtgaaatataaaacaaaatgtattggagtgtatttaataagttattttaattaatctataattttattttactactaaaacatatgagaggaaaataaatttattccagtaaattatagtattttcttgactntacttgaaatgatatttaaactcatatcttattattgctctcttttatttctattggtagctcgaaaaaatatttntattattttatttaatacaactattacaatatttactgtaatgaagattattactaaatatt

SEQ ID NO: 146557 - DNA, 445 bp, Glycine max
  unsure (1)..(445): unsure at all n locations
agcttccccctcttagctntttcacacactaacttcattaatagcccaaaaaaagtatgcttaaagcattggaagattataaaattattcatatatgagggagctagtactctcagcatcaaatagagttttcataactcactagggttggccaagtggtacgagttctaaataatttacataaggtcctaggttcaagtttcattgccttcattgtatacacataaacttaaaaaagagtttcctatcatcaatgcaagagctgagacaaggatgttataaatgtgtggaaagatgaggtgaatggattattactatatcacaaagaagaaattaaactggggagtttatcgggataaagaaaaaagaaattaaattgnggagttgttgaatataagatgtatcataccaatacatttaagtgtcccccataaattgtaaaatg

SEQ ID NO: 146558 - DNA, 428 bp, Glycine max
  unsure (1)..(428): unsure at all n locations
gaacaatatactngtccttcatttaactggctntgggtttggcgaccattctcaacatagtactttcgacacctactgtacgttgatttcaccaatgttgttatgggaatgttgcgacaatcctttaaaaccttattgatacattctgagaggttggttgtcatgtggccatatcgacgtccttctctatcataagtcatcgtccatttttcctttgaaatgcgatcaatccatgttgctatggctggactcagttgacgaaatttttctaaattttgatcaaaaatgtgcttgcaatgagtgtaggctgcataaaactagttatgaataacaattttaagtatatatgaaagttaaataaacgtgaccatcaatttattatatcttacccaatttcttcaacatttctttttgtttgacattattga

SEQ ID NO: 146559 - DNA, 450 bp, Glycine max
  unsure (1)..(450): unsure at all n locations
agcttcaaagaatgacccaagggagtaagattgcagatgatttctacaaagaccttgaaatagctctgatttgagccaatgttgaggaggatagggaggcaaccatggcaaggtttcttaatgggctgaatggagatataagggatatggtggagctgcaaaattatgtggagatagaggatatagtccatcatgctatgaaagtggagcagcaattaaagagataatgtgtaaggaagagttcatctaattttgataactctaggtggaaggaggggtttaagaaagaggaaacttcagccgataagaccccaagggctgcaccaatgcccacccaaaattgtggcaaggaagtggccaacaattctcggtctagagacataaagtgctttaagtgnttgggtagaggaaacatagcttctgagtgtcctactaagaaaagtatgatat

SEQ ID NO: 146560 - DNA, 344 bp, Glycine max
  unsure (1)..(344): unsure at all n locations
acctgangcatgcacgctcggctgatagactgactatacatgttcatcgtgcttttgtgcatgctatatatgatcggcagaggcatcgccatctttacaaaacctcttctgaacatagtgctgatcgctttgtaaggagttattatagccaaacgatgcaaggccatactatcatgtcatggcaattacaatagtaactggatgcggtgccctcacatactanacacaattgaatacgaaactgcatgttcatgcgcttcgttgataacggaccttccccgtggcattcgtcatgggcaccataaccttggcctctggatgtgccacttaccaaatgcatgctg

SEQ ID NO: 146561 - DNA, 440 bp, Glycine max
  unsure (1)..(440): unsure at all n locations
agctgtatcgaacatattcttctgaactttgttgcaaaaggtttgtatacgatggagggaaaactttgtacacagtgggtcctctgccgctaaataagtatgagttcaaagtgttgctggagaaatcatttacaaaacggtatgtcttgtgtatgactgtcttatttgcatcatgttttatttttcccttaaatctcactgttccaactctagcagcagtgccgactgcgagagtcatggtgctaacggaagccttcatgaggaaactaaaagaacctcattatatttttcccttacactagtttatttntctagatgtgtcaacaactgttatcataaaacctggacctgtaatagaaccccattatattgactgggaaaaggtgacaaacttgtacatatggntcatgaatctgcataataattgcccgcgttctttt

SEQ ID NO: 146562 - DNA, 388 bp, Glycine max
agcttccacaacatccatgcaattcaacatccaaacattatgaactatccaaaccaagaaaatagggccgaggcagaaaactctgcccaaaacacattccaataccacagttttcctcactcaaataccccagtaacattctcttcgttttgatttgctaaccgttggatcgactctaaaattttactggaggtccctagtacataagtctacattttgaccgttgggatctgctataaaacgtccataacccaatatgtacaacctttttcacaaccagccatgcataagcattttctgcacaagcacaaaattctgctgcacatttcaacagcaaaattctacataatagtgcagattttcgaaatcactctttgcttcatccaat

SEQ ID NO: 146563 - DNA, 444 bp, Glycine max
  unsure (1)..(444): unsure at all n locations
agcttcatgatgatgtttcaagttgattctagtagttttaatgatgacaaagatgatgacaaacagctccaaagaataattttaagattgagtcaacaagttcaagatcaagtttaatttcaagcttcatgagaagaaatcaagaagattcaagaatcaagagaagtttgatttcaagattcaagaaaagatgaattcaagattcaagagaagaaatcaagaagacttcacaagggaagtattgaaaatatttttcaaaaaataaacatagcacaatttttttttcaaaagagtttttctcaaaattttctaagttaccagagtttttactctctggtaatcgattaccagtttcctataatcgattaatagtgggaaagtgtggtttcaaaagcttttaactgaatntgcaaccgtcctattgattttaaatggtgaatcgat

SEQ ID NO: 146564 - DNA, 432 bp, Glycine max
agcttaaagtatgcccgagtcattcattcctatgagatgttgttgaagtattggcgatcagaattgccattccttggattatagggttgaaccaagctcatgcttttacaaaaaggttcatcaagtcaagttgaaatatggaagtaaccgtcttgcaaaattggggcaaaagatgaatcgagtcacatcactgcttcgtctactgccacacatatttaggattattgatgtccttgttacttccagtttcaccttgacaaagatgtcatggaccatgttgaaaatctaaattgattcaaccccatatcttgcgtagaaattcgcaatacttcaactgtacatcattcgcatgcatccatgcttttcattggttgcattgctcgttgcattctctccttgaaacataaataaaatgaacttattcattggtat

SEQ ID NO: 146565 - DNA, 399 bp, Glycine max
  unsure (1)..(399): unsure at all n locations
agctntcaacaagtttcttcacaaataactatcatgaagcagaaaactagcaagactacccatcatatctcccaaaaccccatacccacgaaatttaagagagaaagaagtccacccaaacctgaagtttcgaagtcccactcgtagccacgcacttcacgactccaaaaatgccctcctttcacgatttggggcataaatgatggccaaaggttggagctttgttgggcaacaatggtggaggaagaagaaggagaaaagcaacgtgagggagagggagagcttctgaatttttttgctttggctgagtgaggagagagaaaagctntttggttttaaataaagggttttctctttttctattattntatntaagcaatgccacatgtctccatttgg

SEQ ID NO: 146566 - DNA, 388 bp, Glycine max
  unsure (1)..(388): unsure at all n locations
agcttcttagtttcagatgatgcagttgtatttgtagctacctcatgcactcctctaatgactatagcatcatttctggcgctaaactgctgggagttggaagccatcttctcaattaaatttctggctttagcaggagtcatgtctccaagggctccaccactggcagcatctatcatacttctctccatattactgagtccttcataaaaatattggagaagaagctgctccgaaatctgatggtgagggcaactgtcacatagttttttaaatctctcccagtattcatacaggctctctccactgagttgtctaatacctgagatatccttcctgatggntgtgggcctggaagcacggaaaaatttttctaaaaatactctct

SEQ ID NO: 146567 - DNA, 434 bp, Glycine max
  unsure (1)..(434): unsure at all n locations
agcttctgaaaacaattcaagcagcaaattcccaagtctcattatgtgtttcctgtattccagcagtatatctctgcaagagtatgcaagccatcagcagggtggaaattcaatttcagacatttcagaatttgtcagttagcttctatagtagttaaaattttctaactttatcttttaacatgttatattacgttaaaatgaacacaagtcgcagattaacacaacctttgattaacaaatttataaatttaagcctccaaatttgtgtactttatttaacctgaatgaaacctatcttttttaggatgaacccgggatatattaggagtttaaaatgatcatacattgatagtataaaattggttttacattggtcttcaatgacaaatcactggtggtattgctttntaccgaaattattataaaagtct

SEQ ID NO: 146568 - DNA, 434 bp, Glycine max
agcttctccatattttattccatatgctttctatagaatcttagaaactatttatactggcctctggtggttgaaaaggcataccctgcagtaatagatgatttagtatttcacaatttgttgtcataacatcaccaataattaacatattttgtgaagaatcagaagactaactttctaatgaacttatctacggggaacaattctacaatatcaaattcatgtctcagactcggactgatctgctattgattacctagagcttattactaaccattttaagtaattagaaacaaaatattaaatgtatttatgtagtgatactgcagataaaagaactgctgtaaagtcttctttgtcgtcctgtccaacagttcaaaataactatagttgttaaagtttgataaaaagaccaacgggcaatggtgaaacat

SEQ ID NO: 146569 - DNA, 469 bp, Glycine max
  unsure (1)..(469): unsure at all n locations
tcttaagtcacctgcggcatgcaagcttccttaagaagattcctaaagaagctagagcttagcttcacatacctctctaatagctaagctcacctccttgagatgagaagctagagcttagctacacaccccctataatagcttagctcacccccatgacaaaaatacatgaaaatacaaaaaaaatccccactacaaagactactcaaaatgcctcgaaatacaaggctaaaaccctatactactataatggcacaaatacaaggcccaaatgaaggaaaaacctattctaatatttacaaagataagcgggctcatacttagcccatgggctcaaaatctaccctaaggctcatgagaaccttagggccttcccttggatctccagcccaatctacttggagccttctatccaatgcccttgcggggtaggattgcatcangactagtcactaaagccatgaacaag

SEQ ID NO: 146570 - DNA, 450 bp, Glycine max
  unsure (1)..(450): unsure at all n locations
agcttactgccaatgctggtggtagacctttaagaacatctcctaacccaccagttntgcaccatggagccacctccgttcctataattatgaaagtcatgccacatgtgattatacctttaggccaggcattcttgccttgaggtcccttcctcatagcttgcattgcattggttttaattggggttctgttaagtagctcatccaccgggttaaaaattctaagtccactatgagtatttgtctgctttagagatctaagtcccattgctactgctttagactcatatgaagcagttgttggtccatgatggacatgagaatttctagagactaagttacttgaagcagtcaatgttgccatctttgatacctgctgtgaacaacaaaggttccttcagaattagacctctgtagcaacacatttgtacttattgtatgacttatgag

SEQ ID NO: 146571 - DNA, 461 bp, Glycine max
  unsure (1)..(461): unsure at all n locations
ttcagtcacctgcggcatgcaagcttctataanaatatttctagaagaattaaataataagataaatatcaaatgagtttttttataaactaaaataaattattcattagttaatttataaatatcacttgattttttaaggaaaatatgagaaattttttataaattagttgataaaaaatcattttaactcataaaagattttatcttatttttttaattaaaagtatttttaaagaaacttatcaaaacaaccactataaaacagtcttaagacataaactatgaacaacaaaggttatagagtctagtgagttggagaattgaagatgcatatgcagatggaagtgtgctccaatcgctcttttctcagctntgcaagaatctctctctgactgcgtcagcctttgtgctggtcgtacttncgaccgtcttattaccaaatgacgaacccctttctc

SEQ ID NO: 146572 - DNA, 220 bp, Glycine max
gagagcgaaccccaaaaggaaagaggaaaggagagcagaaaagacaggggggaaaacagcggaccggccgggcacacgaaggagagggaaaagagaagaagggagaaacgacaaacaggggaagaagaagaaaaaagcaagaggaaaggaaacaacaggaaaagaaggaagcgaaggaaaaggagcgaacagaagggagcagaagaaaaaagggggaaag

SEQ ID NO: 146573 - DNA, 454 bp, Glycine max
  unsure (1)..(454): unsure at all n locations
aagagtttaataagaaaaatttcatctttagaatgattagtgtaatcaattgttacatattaaacaagctgattagtgtgagttatttagtcttttcatttgcctagataatgtgttgttacataggggtttaatgcctagtaattttttctggtattaaatgaggctaaagcccaaggaaacggattacatcagaacattacgaggaaattgaattacaaacacatcagaatcaagcaactgacttaaccaagctggttattgctccaaaatcacatactcctcctccatagcacaagcataattggccaaagcatctgcacatccattagcttctctgtaaatatgacaaagatagcattctatcttctaccaataagccaacaaatagtattaataagactccacccagatgctgatcccctgttagagattntgatgctaacaactacta

SEQ ID NO: 146574 - DNA, 426 bp, Glycine max
  unsure (1)..(426): unsure at all n locations
agctntntatttattttcgtctacctagtatgtgaatattaaattaatgacataattagttgagtaacactaatccctacttagtcaactaacccttaaccttacttagtcacataaccctaattagtcacacaaccctaaaccctaattagtcacacagccctaaaccctaatgtcgcaacctacccttcggtgggagggcgatgcgtgactcgcgggtgcgtgttccaagaaaggaatacgcgcggagtcgccaccaatgtttattttgaggaaaacgtcggaaaaatcggaaaagacgtggtctatgaactttaagtgaaaggttcgggagttgtatttacgcacggggaaggtattagcacccgacgcgtncgcacaacagacgggagcctntaatcaaatgtgcgaatatgacttcaattt

SEQ ID NO: 146575 - DNA, 442 bp, Glycine max
  unsure (1)..(442): unsure at all n locations
agctgtatgcanaactggtcatgcatgctctctatgtggtcactcaagtgtcaaatntttatggtcatgtgatgctagggctcacgattcatttcctctattttaaatcaacccaatgtttccaaaatatgttcttttatcaatttgtgcattcatccgagtccatttcgggcgtccgggaaaatttcacagcattcacccttcaggtgtatacacatttttttcaaaaattggttatgatcaatgattttttttaaagaaaagttggaagtcatctcttttcaaaagcatgtcggtttttcagctagacaacttatttttctttttcccaccttttttcttacttgcttgctttatgcttatgcgctctctcttttctattttcattattatatctttctatnttcattcttatcatgattcttgtttgtttacatatata

SEQ ID NO: 146576 - DNA, 442 bp, Glycine max
  unsure (1)..(442): unsure at all n locations
actcagctttcnatcaagaggcagcaagattctagctcaatcatatgataataagngaagaattgtacagatccaagttttgttggagttcgaaaagcaccaaactatgtaccaatggctcacaatataagtattataaaaaatcccctgtattgacacaagagttgcaatttatcaatcaaatatagctagggaaccaacatgatgttgtccttctttttttgtttatcttttcccaaatattttttttacagtggttctctatattagtatgtattacaccttagaaattggtatatgtttgggttaattaaaagtattacaaagaatagttagacattgttggagctaatagagaaatggactaaagcaatgattcaacatattacatgaatcacaacagtttgaatatccatctcataaaattaataagcatatactg

SEQ ID NO: 146577 - DNA, 358 bp, Glycine max
  unsure (1)..(358): unsure at all n locations
agcttgagatgaggaagtgtagaagggtgaacttcctgctnttattcgttgaccacagagtggtacctggagatatgtcgcgggggtcaggagaccttggggacgtcaggtggggtgctattgcccaaaaccaagcttgaccaatcccgacccaacccgggcatagtcggtcagtgagaacctgtgatgtacctaaacaggcgagctcctggcagtcaacagataaaaggaacaaagaccacaaagcaaggaggcttgtggtggctggccagttgtgaatttttgtgtgatatatgggttgtggcctctggtaatcgattaccaagggtgggtaatcgattacaaggcttaaaaatga

SEQ ID NO: 146578 - DNA, 256 bp, Glycine max
aggcgcctgagtcatctcaagacataaatgtcttttgactaaacatgcatgctagtatgtttagctttccaagccactatcctccattatgaaactctatcagttaaaactaatgattctcaacttgccaggtgataatactatcttgcatagactttgagaatttttaactatgctacgtacattttttgtcatacttacatatgcccctaaaccaattttctaatatggatcttgaagttgcatgtgtttttaa

SEQ ID NO: 146579 - DNA, 362 bp, Glycine max
  unsure (1)..(362): unsure at all n locations
agctnttatatcaacttgtgttattgtcttagtatctagcatttctgctttgacataatcccaaacatgtcaattgagagagaaagaaaaaagaagacacaagttgaggtgaagaggtattccatacgccaatggcattatacttgggacatgagtggataaattttcctttggtgggagccattgcataatcatcaacgtaatttgttgtaattgaaatccaagaaggccagcaattagttagatctaatcctctcaattgatactattatgctttctttcattcacactaacttttcagcatacataacaaatatggatttttcctattaggtttcatagttggtcatgacctcgtatat

SEQ ID NO: 146580 - DNA, 150 bp, Glycine max
catggatatacagcggaaagtaaacgaaaagaggtgagaggaggcgacatccattatggaataagccatgggatgagaagcttcaccaccaagagagtgccttggataagaagcttaaatggaggaaaagaatgagaggggggtgggggg

SEQ ID NO: 146581 - DNA, 438 bp, Glycine max
agcttccacaaaatgctcaacgaacaattgtttggatcttgaagtctcaagcttcaacagatgaaaaaaaattggaaccaagcgtaagggctttgcatgaaggtgatgaagaaatgagaagaaaaaaagagttttaagagcttcttacaaaggctttgagaatgaggttccaagcttccacgatttctgttttgtgctatcaaccgcgtgctctcacacatgtatatctgtattgtgtcatcaatcatctgctgcattgcctcgtcattttgtcatgggaagtcagaaggtccgtgtcaccttcttaaatgcatacatggggcactgtggtgatgattgaaaatgaatcatgatgcccaaatgtttgtgagtaagaagagacgatctttcgggctctttgtgttgaaaatgcatttgtgtcatgcatagcataagcat

SEQ ID NO: 146582 - DNA, 400 bp, Glycine max
  unsure (1)..(400): unsure at all n locations
ggacaactacatcaatatagatagtaacttgtcagctttatttngnaacacatttactttatccttagcatttgactttaatattttaatcgatatcatacaatatacatgcatgtttctcttaactggtgctttgaagcgattcaatgataaacacgaaagtaaattcaaaggaaaatgctaaatggattccagttaaagtaagtaatttaaacaatgattgatctcttcaaaatgacattttattactttgtacactaattgtgggataaattcaaatttttttgaattgagtgtaataagcaaagaagaagcactaagtgcgactattacgtcatgcattggatgtcaactatagtcctaaaaagtttaacgataattgaaaaatgataattggtta

SEQ ID NO: 146583 - DNA, 453 bp, Glycine max
  unsure (1)..(453): unsure at all n locations
agcttgtccgcaaaagtcccttaaaaccgtnttaaggtccaacgccttaaacagtcctctttgcttttatcggttaacatggaccgttcaaaagcataaaatcaacatgtaactttaccgcttttgcaagaactacgtaggtctgatttcctcatcgcaattgaggatacgtaggagcaaaagccccgcttttgtcaaccaccccaagagatctttaatggtccaaggccttaacgtttctctcctttcaaaaccaagagatcgttaatggtccaacgccttantgtttctctcctttcaaaaacaaaagatcgtttaatggtccaatgccttaaacgacatttgttcagtcaaaatatatctttcaaaaaagataaaaaaacaacttaaccaatgtntagttctcgaagaactacgtaggtcttgattccttaccacaattgaggaatacgt

SEQ ID NO: 146584 - DNA, 438 bp, Glycine max
  unsure (1)..(438): unsure at all n locations
agcttgtagtaggtacaaagacnnnagttattcnggatattattctctctgcgagacnnnnnggggggcagatgccaaaaattatctacatgtgcaccccatgttccttcactcaaatgcaacttcgcataagtgggcatttggtggtatgttcttaccatctgtataaacttgcgtcttatttatgactactntaattgaccacctttgtgatatgttttcatgagctgatcttcttctttgtttctgtttgcagccatagcagagcttcttgataatgcagttgatgaggcgattatttctgatgttggaactatcgaaatgcatgatatttaaacaatatattagctgtcattttcttttgtatctgcgcatactaagctattgccgatgcctgtgatagtaacatcgcatgaattattttaacacactaatgtc

SEQ ID NO: 146585 - DNA, 452 bp, Glycine max
agcttcatgagagagtcaaagatcaaattgagaggaaaaataaaagttatgctaaacaagccaacaaagggagaaagaaggttgtcttcgaacccggagattgggtttgggtgcacatgagaaaagaaaggtttccggaacaaaggaaatcaaagcttcaaccaaggggagatggaccatttcaagtgcttgaaagaatcaatgacaatgcttacaaagttgagctgcccggtgagtataatgttagttccaccttcaatgtctctgatttatctctttttgatgcagatggagaatccgatttgaggacaaatccttctcaagagggagagaatgatgaggacatgttcaagagcaagggcaaggatccacttgaaggacttggaggacctatgacaaggtctagagcaaggaaagccaaggaagctcttcaacaagtgttgccatactat

SEQ ID NO: 146586 - DNA, 419 bp, Glycine max
agcttatgactcagtttcttggggattcctaaactatatgatgatgaggatgggattttgtgaaagatggggaaaatggatccatggatgcctttctagtgcaactatatcaattttgatcaatggcagcactactagagaatttgtgcctgagaggggacagaggcaaggagatccccttgcacctttcctatttaatatagcagctgagggactcactggtttgatgaggacaactgtctccaaaaaccttttcagcagctataaagtggggaggcaaaaggaggagattaacatcttgcagtatgcagatgatacactattttttggaactgcaactacagcttatgttagagtcatgaaatctatcctcagaattttcgagttggtttcaggactcacgattaactatgctaaaa

SEQ ID NO: 146587 - DNA, 467 bp, Glycine max
ctgctgcatgcacgcttgtctcctgaaagtaggcagctgttcctaagtggattgaagttaaggttagtgatatgtaccatgcgttattgctgtctagatatgtcatgtgataagtgaatgtataggatattcaaattgtgttcatatgtaaaatcacgttcaaaccggatgatatgaatgtggatattacgtaatgcattggatgtggaacatcctaaccagcgagataaagagtgactaatgcatggtatgcataaacttgactttctaacattgctgactgcgattggaactgaaaaatgttatttgcagtactaactttgagatattaatacttgtagggcgttgctgatgcgacatcgttggacatcgacaacatcacaacgattctaaacagatgggcaagatattttatataggctgcgtgtaacaacggctaatgatggcttatgagtattctttttgct

SEQ ID NO: 146588 - DNA, 226 bp, Glycine max
gaacaagggaaagcccccaagggccggccagaccagaaccaaaccagcagacacgacaaggacaccaagaacaaccggaaacccagggagcccaaacaaaagcaagcggagagcaaaaaaacggagccgcaccacgacaaagccaccccaagcgcccaaaaaagaagcccgcggcgagacagggaggcgcaaccagcaaccaaccgaaacgccacagaagggaaac

SEQ ID NO: 146589 - DNA, 444 bp, Glycine max
agcttgtcattatttgttgcagcaagtttacttaaataataaggtaaactatactgacattagttgtgattgatacattttttttaatatttataatacctcttacaaaatacacgacgtaatatattatttggacaataaaaacagtgtaatttaaaactattaaggaaaatattgtagaaatttttaaaaaacaagaatgtgatatgaaatgatgtaatttgccctaaaaaacattctacatggttatttccttctcttagagcacatggaatctcagtctagttctttcactattacacctaggcatcaaatataaagggttaagggtaacatagatgtcctggtaagggtcagagcatcatgtaatcaatttcaagctccacatttatatttcatgcaattagagtgtgaatgtgggtcaaccttgcttatctgaattag

SEQ ID NO: 146590 - DNA, 407 bp, Glycine max
  unsure (1)..(407): unsure at all n locations
agcttgagatgaggaagtgttgaaagctgcctcttccttcttttattgntgaccacagagtggtacctggagatatgtcgcgggggtcaggagaccttggggacgtcaggtggggtgctattgcccaaaaccaagcttgaccaatcccgacccaacccgggcatagtcggtcagtgagaacctgtgatgtacctaagcaggcgagctcctggcagtcaacagataaaaggaaaacaagaccacaaagcaaggaggcttgtggtggctggccagctgtgaattttgtgtaatatgtggattgtggcctttggtaatcgattaccaagggggggtaatcgattacaaggcttaaaaatgaagacagggggctaagatggtctctggtaatcgattaccangcttgaaaa

SEQ ID NO: 146591 - DNA, 350 bp, Glycine max
ttaccctccaagatatattattcttgcaaggatgaaggcacccatgatggctacaataattattatcaaagggttgaaagcagtaacaaaaacaggcccttcttctgcatgactatcccttgaacatagtaggtgatacctgatgatattattccctggttcaccaaagtttacgtccatttagattgtcatatgatatggttcaacaacaaatacacagaaaaatataataaaaattattgtgtaatctgagactagcacatgtctataatctggactcctcgttcatataataattattcaatagatctagatggatagacatatagagagaaagtggattaccgctt

SEQ ID NO: 146592 - DNA, 427 bp, Glycine max
  unsure (1)..(427): unsure at all n locations
agctgtggtcactaacttcagtggtcctaaaattattacctaatttatgcgcaattattgttgccaagttagcccgctcaataatgattattctaatgtcatgaacctagctaactttattttccgtggcttaatgatgatctggccaggccttcaaaatcagatcactagtcccaagtgtgagaagaggaccgatcgaccccccttgcattcactctcagtttcgtttcaatgtcaatgtgatcatattaaagcctgaaagctacccttatagattggttgaaccaagttaagaaatccatggtacaagaaatcttcaaaagatttagaaataaagagcaagtaacatatgtgaaaatacaaatgggtcgttggggaagggggtcaaactttcaacagaacatgcacgttctatgtntctttatac

SEQ ID NO: 146593 - DNA, 414 bp, Glycine max
agcttatggaggaagcctcttaatgaagtttctagagaaagctacatgaagctgcctcggtaaaaacgcttccgagactttgttaaccgttggatcttcttgaaatttggttttcaagtttacaagacaattttccatgatctgaccgttgggatctttgagaagatgtctagagtgggctagaagcttccgttcccgagagcatctcttatttaagcatttcagcctttgctttcttgtagcttatgaaaaacatcatttcttcttctttctttcttccaaagacatttataaagttacaagaactttctccatcacccaaaaccaccattagccaccacagaccatcattgttcttcattgagatcccataccgagaggaacccttcaaccgaagcggaatcttccaacttg

SEQ ID NO: 146594 - DNA, 393 bp, Glycine max
  unsure (1)..(393): unsure at all n locations
acgagcccaaggaaggggcctatgcgaaaacatcgacatagtacagacattgacaccaacgtatggaattgctatgaagagccaactggtattatcgttaatattacaatgaagcgccagtaaatagaatggtatggtgcaatatctgaactctattagtggagctggtattagaatagcagttgtagccaaaaaagtatgccaaaacccagatttgggggtgaaatttccatgtttggaaaaagtattagttataacttcgttagtaattaagaaaaagacaaagaagaatgctatgctagctaaggctatgtactanctcaacatatggaaatggagagccatgaacatatgttaactgcgaccagaagatacttgagtgactgatgaaca

SEQ ID NO: 146595 - DNA, 438 bp, Glycine max
agcttcacaaggaagcttccatcaagtggtaatcagagcacaagagcttcaagtaagtgctccttaaacctccattaattttcagctttaccttttcctccattgatgtttcttcatttttctccttgcatctcctcaaatatcttgtgctaaatgttgttaacatgattctttagaatttccaccgattaaacatgttatagaagctagatttgattttctatggttaaaatttcctgttcttgttcttgaaccatgaattctgatgagtttaggttcctttgagttttgtcttgctattttttgtggctgaaacctcaaccataaaattcttacaaaagcattatagtataagaaaacctaaaaaatctagagtgacttgttcacctatttgtgttttgccatagaagtcatgtctagtcatgaaacttgacacat

SEQ ID NO: 146596 - DNA, 286 bp, Glycine max
  unsure (1)..(286): unsure at all n locations
ccaaacccagncaccctcattaagaataagctcttttcttcctctattgcctttagttgaatacacctttttttggttctctatatagttcttaaccctctcatgtaacttctttataaactctaaccttgattccccttctttatgtataaaagaagtgtcaagtgggaggggaatgaggtctaacagtgttaggggattaaacctatagacaacctcaaaagggtactgcttggtgtgtctatgaacccccgtgttataggcaatatctacatgaggaagatac

SEQ ID NO: 146597 - DNA, 457 bp, Glycine max
  unsure (1)..(457): unsure at all n locations
agctngtcaagaaccactctctcttctctgtttgttnnnangncanncaanangntatgaaactagatcacattaattcacnttgatacctccactccactctggagtgtctcattatgaaactctcaccattggatcttggtgcgatgttgtttgttagttcaactaacantcntttgcagtgcatganatactaatanngttgcagtctaatgtattcagcctagcttgctttgtcgagcctagtcttcctgatgtgaaccttgctgacatgcatatgttggcttttgaaataaatttaagtatttaactgataaaactggatgctatataaaagaaaagctgataataattagcaatgatagtctcagcttatacaatattgataataatttttctattacctgattacttttttgaaatctttatcctaaagattgatattgatttaacaaac

SEQ ID NO: 146598 - DNA, 430 bp, Glycine max
  unsure (1)..(430): unsure at all n locations
agctntaaattattataatatccttaaataaattaattaaaattaaaataaaggttnttttttccaatttgtttgtgttgattggtaacgcactcaactgaaaataggatgtttgttaataaatccctttatgaatatatttataacaaatgggtgtaaaaattaaaaattaagttaaatgtcttatcaaatatataatttattacaataaatacatttatttgtagtattataattttatcaggtatcattgagacattaagttctgaattagaaaattatttttgagataggatattaaatttttaattatttttatatagatcaactcatgtaatttaattagtgacttaatagttaatttgatcttagtaatttagtagagttgattacggggttgaattttataactgagttaactcttgtctta

SEQ ID NO: 146599 - DNA, 366 bp, Glycine max
ggatccttcagtcacctgccgcatgcaagcttgagaagacagtgtataaaagagtatctatcatcatttttggtaaaatagatgtaggtgtcataaaaataatacttcctaacagaacgtaacacctgaagaacctcgtggtgcacaacattgtcacttccatcatagccaaaagtggaggctttttaagaatccattcacacaatctgactctagaagttcctagcatcatgagtgtctggaacgcattaaaaaaaatgcagtatctaggaagtgatcctaggtcgtctctcagtgagcaatgatcaaccaaacgttcataacatatgttaatcaaacagtaatgaagtgggtgggtgggggggg

SEQ ID NO: 146600 - DNA, 412 bp, Glycine max
agcttaaatctcagataaaccaaatatatatataaacatttttaagcatattgcagaagatacaaaacttttctacatcggtgattgtcaaggtacagaattaaaaaaatatcttatatttttattatgattacaaaacctattaaacaagccgcacaaatatacaaaagatcgaagtttaagctctgcagaaaattttaaaacatgacaatttctaaagaattatgttcacaatcagacctttgaaaataccatcatcgaagacaataaaataaaataactatttagcgaccgagactaaaaacatcacataaaacttagatattaataataacaccatactatattagggttcgcatatgcacacgatctgttatgtcttgaaactaagttcgaattgctttgaagataa

SEQ ID NO: 146601 - DNA, 479 bp, Glycine max
  unsure (1)..(479): unsure at all n locations
cagtcacctgcggcatgcacgcttagccctttctttntccatatacaatcttgtatcatttaacattnttttagttattaaattgagtaattaaacaaagctttccattcttttttccatatatctaaacacaacatttaatgttacttttcaaaagtgacattcaacgttaaatactcgagagtcgagatcacatgctttttaaagacatcaattctgtgaaaatggaactttggaaagtgatatgtaggaattatgtgaaaatggaattgtatcttggcacttgtatatatagaccaccatagtgagccaagtgtaagacaaatcaacgaaaggggttgcttttccagcagtgttaaagttgcttttgcattctaaaaggacatttaatgaaacaaagatgtagaagaaatgtccaataattatatcacttcctctatccaaaaaatctaanaaccatatggctggctcacttcagt

SEQ ID NO: 146602 - DNA, 458 bp, Glycine max
  unsure (1)..(458): unsure at all n locations
cgcttcatacaatcaatatagaacctatatcctaatgtcatattctatcagagcgttgtgttcccgtgtcctctatcttgaggttcttcatagtcatccacctattcatctgctcccccgaacacaagttcaagatcatcacaggatccaaacacaacaatacacagggagtgagctatcacattcctagctaatagagaaacaagacaattaaatatacatattatataaatgagataccacttgcttaaacatagctcacgtaacttcaccacttcgtcattcaaaattcacttttcaatcatcaatcacattacacaagaatcccacacttcaatcaatatataataacacatcaattagcaagcatatgcaacagttatgctaagactcaatcctatatgcaatgtggtaccatgtcagtgaaaaaccaccccctgggcgctangagcacataa

SEQ ID NO: 146603 - DNA, 447 bp, Glycine max
  unsure (1)..(447): unsure at all n locations
agcttgttatggtaagaaaagagcaacacacacagtcaataatatgcagcaagtattaaaaaaaattgtaagtataaaataaaagtgtgtgtgcggctaattaagaaaaagaaaagctaagtgcggaaaagcaagtaatagagctggaataaaaagaaaaaggttggtctaaggatgaatgctctcctagaatctatgcttttacatcctagaaaaaccatgaattgtttgcagcccagccttgttacaagcctagaaaagaccttcggattcaatttgtgtgttcttgactgtatggcatgagatgaattgcaaagattaagacttgtgttagttgttgattgttgaataagcctaaacacttatgcttgagtgaaacaatgactgtganggctttggtaatgatcctntcttgatatcttgcattcttactaacctaattcagct

SEQ ID NO: 146604 - DNA, 381 bp, Glycine max
  unsure (1)..(381): unsure at all n locations
agctgtctcntttgtgcaactatctcattctctntttcaggcgtagaatgaagcttgacaggttcaggtgcaggtgctgctactggtggaggcacttgaatttggttgccaaacctctaggtgatagcactcacatttttcggattctgcacaatttgtgaaggcaatttgtcaaaaattttgggactgagcttggttcaactgagtagccatctgccccatctgatttgtcagactctgaatggaggctcttgtctcttgctgaaattgcatattctggatggtcatntgcctcactaactcttctaaggatggttgaggagaagcctcanttgcttgttgtctttgttgtgactgctactgtattggaggaggaacata

SEQ ID NO: 146605 - DNA, 406 bp, Glycine max
  unsure (1)..(406): unsure at all n locations
agcttattgganaaaacttatatttcctttctccattttaactttggcaatctcttgccttttgttatttttatcatagataatgcacgtatcttcttcaaggtgaagataatagcctttctccatcatttagccaatgctcaagagattttctttatgatttggaactagtaagacatttttttatgatctcttacctttctttgtctccaccatgacagtgccttttccttttgactctaccatggtgtcatttcccaattgaactttgactttgacagtgtcgtcaatttccttaaaaatgcttctataattagccatgtgatttctgcaaccgctatccaagtaccatntgctacctatcacatcactagaatctcaagtagcatagaaaagatgttgctca

SEQ ID NO: 146606 - DNA, 352 bp, Glycine max
  unsure (1)..(352): unsure at all n locations
cttatggccggccaccggacttgtctcnccgagcctactttgaagannnaagccaagcccctgcttgcgaggggcaactcccaccttatgaagactatcccgggcaagatgatggggaaggagatacccatcttggccccctgctccacctcaaagatctgtccccacatgaactaccccaaccgaacatagtccgccataccccggcctcacccacacctttaaaagaatctgttcccttcgcggaagataatggaaagattgaggcgctcgaagagaggttaagagcagtctagggccttggcaattacccattctcggatttagcggatatatgtctcgtgcccaatat

SEQ ID NO: 146607 - DNA, 430 bp, Glycine max
  unsure (1)..(430): unsure at all n locations
agcttatgctgtaaacatttataatagacttcttcagcaacaaaactaacaacagcagaataattatgacctttcaagcaatagatgcaatctaggttggaggaatcatccaaatctgagatggacaagtcctccgcaacaacaacagcctgtccctccttttcagaatactgctggtccatgcaagccatatgttccccctccaatacagcaatagcaataacaacagtcacaacaaagacaacaagcaactgaggctcctcctcaaccttccttagaagagttagtgaggcaaatgaccatctagaatatgcaatttcagcaagagataagagcctacattcagagtctaaaaaatcaaatggggcagatggctactcagttgaaccaaactcnagtccaaaattctgacaaattaccttcacaaact

SEQ ID NO: 146608 - DNA, 322 bp, Glycine max
  unsure (1)..(322): unsure at all n locations
aaaancagaaaattcagagacaccctcaacaaaaagcgcaaaaggcacaaaaggaccaggaagcacactaagcccaactaancnacgaaagggggcatctatttcaggatcaaagggctgcaaatcacctgtatagccctagtcatgaactatatgtagcaaataatgtggttgtcaacgagcacctaacaaggggggtaaaactatagctatactcaaacgatattaaaatgagctgaaattgtgtgatgcacacccttaaatcatgaaaagatagcacacaaaatttcaacaaaaattagagttaactatgaaactacct

SEQ ID NO: 146609 - DNA, 405 bp, Glycine max
  unsure (1)..(405): unsure at all n locations
agctgggggtttaatacttcttaatgggtttctganattatttccattcaactaaatccccataggttgttgctaatatatgctacttaggaggggtgggggtacgggttccactttggcaaatctcttatagaatgtggtatactgttggagaatttaatcaaacatattgtattctaaccattctacccagcatatggtctagttattttttcttgtctttactccagtagcaaattcataattctttttattaatctaacaaataatataaaagagcacgaagataatgggatgcagatgctaatgtcttagataataagattggagtgatacatgtatacattcaattcaggctgatatcgagttatttgtatggaatactgtattttgtttggaatgctg

SEQ ID NO: 146610 - DNA, 350 bp, Glycine max
  unsure (1)..(350): unsure at all n locations
agcttctacttatgtggcagggcgggcttccttcactttcttgtctccaatgcgagctctgaccactgttcttccttcccgcgatgcttcttttcatgtccgcctgagtgggcttatagcctaaaccatacttcccacgatttccttgggtttttatcaggctagttatgccgccattgtctttgcctaaacccatcccgggttcataaccgttccccaacataactcgggccatcattaccgccgcatcggacagacaaggttgcccaaagagggagtccacggaggaaatgctgaccacctcanaagactgganagcggtttctaacgattcttccgcggcttccacg

SEQ ID NO: 146611 - DNA, 416 bp, Glycine max
agcttacaaataaactatctagtatcaaattgaagctacatcagaatgatgaagaacttcaatttaaagactgaaccttataatgtagttcgtaatggtatagaatgcacctcaaagacaacattatgtcttccatatgatgtcacacatatagaggtcacatcaaaagactgtggttgataacatttcaatttccatatactgctacatatattgagggcacattagaaagtgaatgctaactacattagaagaaacaaacaagttaaaagctaaaattgtccatgtgaagtgtaacatccataatttttggcttctcagtggatctcacacaatgacacttcactcaacatccttgttaatctgaaccctccataggtagccctgatgcaatcctacctcccaagggtattgga

SEQ ID NO: 146612 - DNA, 429 bp, Glycine max
  unsure (1)..(429): unsure at all n locations
agcttattaaactaatagtagnaatgattaaaaagatggtttaaatattgttatggtttttgtttttataataaagaaattaaatgaatataaatagatatttaagtgatgataagaatgagcaggggttatcactctctagtaccaatttttccccagttaattatcgatttccaaaatcaattaaagcctattatcaaggtaagaatatgttattttccttaaatcaatacccctaatgatcatggatatatcaatttaagtcaaaggatacgataaattctagggatgattaattaaagattaactaatttatcgaagattaaccaaacagtttgatcacgcaatntggtgcaaaacactctctacttagatctgctaattacatgcagatgatcactactatgcaatggattgagtttaaaatgg

SEQ ID NO: 146613 - DNA, 337 bp, Glycine max
  unsure (1)..(337): unsure at all n locations
agctagaagcagtaacaccatctccttatattattanngnnnctgatnccccatccagagaagtagttgttgtcccctgcatcccattaacagatgccgtcgatttgaacaagagaaaccccatatgacatcttctatttggcattatgtaaccttgtccagcacatcacaaatttttctttgatttctcttcgccatagattagacctgttttatatagttctactttgctgtagntaaaatcaagattaaagttacgtaagccatcaatgaagttaaaaattgccaccgaaatatcgagcacatgattttagcanagcagggatagccaccaaaa

SEQ ID NO: 146614 - DNA, 294 bp, Glycine max
tgagatgaggaagtgttgaagggtgaaacttcctgcttttattgttgaccacagagtggtacctggagatatgtcgcgggggtcatgagaccttggggacgtcatgtggggtgctattgcccaaaaccaagcttgaccaatcccgacccaacccgggcatagtccgtcagtgagaacatgtgacgtacctaagcaggcgagctcctggcagccaacagataaaatgataacaagaccaccgagcaaggaggcttgtggtggctggccagctgtgaattatgtgtaatatgtgga

SEQ ID NO: 146615 - DNA, 405 bp, Glycine max
  unsure (1)..(405): unsure at all n locations
agcttatgaaccnncgagaagattgtcgatcgataaattaatggagaaaaaaatgcacatcatagncaactccacatgcatgcattgaaagttaagcatttgttttaaggaaagttaagcatgttagatttagtgaaagttgagtagtacatttccatactttctatagtctcatataaaaaaaaaacattttttatgtcaaatgtaaaaaaatttctatcaattctatttgatttaatgttattatctttaaaatatccttaatttaatataggagataatttcaataaccttttcttatctttgataccaagtttcaatgaagaataaattaatatatatgtatgtatatatatatatatatatatatatatatatatatatatatatatatatatatatata

SEQ ID NO: 146616 - DNA, 448 bp, Glycine max
  unsure (1)..(448): unsure at all n locations
ngacaataatctgtttgtaaactatcaatacattattatattcaaggcatatgagtaaataatatattaaattttatcaaataactttttaaaatattattttttttgcacaagaattatattttttatataaattattggacgagtatgggtagggaattgatatacctaatccccaataggagagattgaaaaaaaaattcacgtccatcataaatcggaaaaagaacgattttgagagaaaaatgaaaagaaaaaaccacacattccttcccatttcaccccattgtcatgtgtagtttacatgaattttcataatgtttccaactctaatggactttggacaaagtgtatttgggtcaagtataacttttccttagttatatttttaactgttacaaaattatgctatattgtttatagaagccacatataaactcataacagt

SEQ ID NO: 146617 - DNA, 412 bp, Glycine max
agcttcaatggaggataataatgagagagtttttatataggggggaacatgaaattgaaagaggaaaagatggagataagttgaactttgaagtgtgtctcacaagactctcattcatcaaagttacaacaagtgttacagatgcttctatttatagcctaggtagcttccttaagaaacttccttgaagagcttccttgagaaacttccttgagaagctagagcttagatacacacacctctctaatagctaagctcacctccttgagatgtgaaactagaacttagctacacacaccccctataatagctaagctcacccctatgctcaaatacatgagaatacaaagaagtccatactacaaagactactcaaaatgccctgaaatacatggctaaaatcctatactac

SEQ ID NO: 146618 - DNA, 433 bp, Glycine max
tcccacggactagccagatcgtgatgaattcaaagtccttttctgccacgtgccaaattccttgggtttggtgaagaaagaggcgttcgtccctcggtttgtgggcctgggcccgtaccatcaccgtgctggatcatgacagatgaattgaagttgcactactagaaaaagctgatttaacatcggcggattaacatcggttttgtcaaaaaccgatgttaacgtaaacgcggtggcataattgtaaataatgtgtatttcttaacatcggttttatgaaaaccgatgttaatgaagtgactctaacatcagttttcaagaaaaccgatgttaacgaagcgacgttaacatcggttttcataaaaccgatgttagagtcaatttgtaacatcgggtttgaaaaaaaccgatgttataagcgattcgttaacat

SEQ ID NO: 146619 - DNA, 313 bp, Glycine max
  unsure (1)..(313): unsure at all n locations
tagctcaacnnaaatngatgagatgaagaattattattctcttttaaccatnaaaatatgtacttaaatgaacttttataataaatgtttcatttaatcatgcatgaatatatgagaaatcaattttaaatatcaatcaagcatatattgaacaaatgacctcaataacttaagatgagagatgtgaattaagttttaaaaattttcgactaataagtgtttaatcctcttttaaatgataaatgataggttagaatgcaagagaagcaacaattaaattaatcaatattctttaaacatgtaagataaaatc

SEQ ID NO: 146620 - DNA, 414 bp, Glycine max
  unsure (1)..(414): unsure at all n locations
ttggcattgaaggctaagaggaaaatgtctttttattatttaataaatccctaaaaacantttatgaccatggtatggtaaaattgacagctacttgattaacaaaaaattccaaagaagcatgagtgagctgttagtcgccttatacgactaacttttgtataaaaacttttacaaattgtatatattttccccaatttatggttccttttgtaggattataaatagaatntgctttgtttttatctgtgctcagtagaagccttgtgtatggaattaatggcaatttctcttcatttcacgcaaaaggagttattttgaagagtactaagttgatgctcgctagcgagctcatgcgctagcgagttcattcgttagcaggcatcacacgcttatgataaaagatctgaagga

SEQ ID NO: 146621 - DNA, 358 bp, Glycine max
  unsure (1)..(358): unsure at all n locations
gagccgaccggcgagcatgcaagctngaagcagttccacgcatctcctttctctttanngncnctgatnccccatccagagaagtagttggtccccctcgatcccactaatcgatgccgccaatttgaacaaggaagaccccatattacatcttctatttggcattatgtaaccttgtccagcacatcacaaatttttctttgatttctcttcgccatagattagacctgttttatatagttctactttgctgtagntaaaatcaagattaaagttacgtaagccatcaatgaagttaaaaattgccactgaaatatcgagcacatgattttagccnagcagggatagcttccaaaat

SEQ ID NO: 146622 - DNA, 341 bp, Glycine max
  unsure (1)..(341): unsure at all n locations
attgtgctattcttgttgaccacagagtggtacctggagatatgttccggggggaggacaccttgatgacgtcatgtggggtgctattgcccaaaaccaagcttgtccaattcggacccaacccgggcatactctgtcagtgagaacatgtgacgtacctaagcaggcgagcttctggccctcaaccaatgatatgaaaacacgacctcatagcaaggaggcttgtggtggctggccaactgtgaattatgtgtaatatgtggattgnagcctctggtaatcgattaccaatggcgggtaattgctcacaaagcttaatattgacgaccggaggcttacat

SEQ ID NO: 146623 - DNA, 398 bp, Glycine max
  unsure (1)..(398): unsure at all n locations
agctagcaatggaagacattgatatatgttgatgaacnnnccattcactaatacaaatttgtttaatttgtacgctcaaatctattagctcatgtgttcaatttgaaatatgaaatttctattttacatcttttattaggcattatgtaaccttgtccagcacatcacaaatttttctttgatttctcttcgccatagattagacctgttttatatagttctactttgctgtagttaaaatcaagattaaagttacgtaagccatcaatgaagttaaaaattgcaactgaaatatcgagcacatgattttagcaaagcagtgatagctaccaaaatggagtgataacattcatggccaacacattcccaataaagaaatatgatgtcaagatagaaac

SEQ ID NO: 146624 - DNA, 484 bp, Glycine max
ctaagctccacacgactaatacacttgtaagaacatagaaagttattttaaaaagatgaatataccatcaattgatattttgttatatgttactcatcaacaacaacaacaacaacaacaacgccttatcccactatgtggggtcggttacatggatcaacttccgccataatgttctatcaagtaccatacttctatccaaaccattaatttcgagatcctttttgataacccctcttatagtctttttgggtcttcctctgcctcgaatagtttgtcttctctccatctggtctactctcctcactacagagtctaccggtcttctctctacatgcccaaaccacctaagtctattttccaccatcttctctacaatatgcgctactccaaccctctctctaatagctttgtttctaattttatcctgtcgagtcttaccacacatccaccgcaacattctcatctccgctcaactacttta

SEQ ID NO: 146625 - DNA, 409 bp, Glycine max
  unsure (1)..(409): unsure at all n locations
agcttcanactagtgaaaatgagagtggggtaattnnggagtaaactctcatctcaaacaagtctataacattaatttagacttgctcaaactgattttaaagcgaaaactccaccgattcaagatttgacccctcaacacccaatttgccctagaaatgactcttgctttcacatttgtcactcatttttttctcatttgctctgcccaagctttcctacaagtcctaattgacattttaaactaggatcaactcactttagactccaatttacactaaccccaaatttagcttctctaaccctcaaaatctcacacttttctacctacaacattggcatcctcacatttaaccttaagttaactttccccatcatctctaccagcgttatatcaacaatttcagcac

SEQ ID NO: 146626 - DNA, 398 bp, Glycine max
tgaattctatattaccaattgtggctagtggtaatggtgaatcaatagtttgctctctcatctggcattcatctcatattgtgaacttattccgcgtcgtccagatttaaaacaaacttctcttactttatttcaaaatcattcttttgtttaccttacaactcactcaactctatcattacctttttttaatatgcagaattaccaacatgcaaacatatctaatccagcaaatggcagcatcaataggcaagctatgatccagaagcagcgagacgcctcatctcccatttctttcatcttctaaattgattgtaccttctgcatatttaaaacaagcatatggtccctgaattcaacatgaatctactggttagcgtatgatgtcactcattctg

SEQ ID NO: 146627 - DNA, 386 bp, Glycine max
  unsure (1)..(386): unsure at all n locations
atcttgggaagattgatggggatcccttgttgagagaaacgaagatatgggctacgtgggagtacgtgagctcagttggaagtgggcaacaagggatggagggtttatgcgcgatttgagaatgtggaaaacttgttgtgcaccatcgcccgaccgccacctagtaccacatgtgatgggtaccccataatcctacaagcttgagatgaagaagtgtanaaaggtgagacttcttgcttttattcgttgaccacagagaggtacctggagatatgtcgcaagggtcaagagacctcggggacgtcaagaggggtgccattgcccaaaaccaagcttgaccaatcccgacccaacccaggcatattcagtcagtgagaacctgtgat

SEQ ID NO: 146628 - DNA, 449 bp, Glycine max
  unsure (1)..(449): unsure at all n locations
tcacatacaanannaaaagaaaaagagattagactctcatgaaacctttaatccattgttgtagaaatccactataagatcccatgagaaacctacttcgagacgcattaaaatataaaaaataaaataaaggattgatatcacctgattatgatgaatttacaaatatattaatgataagcacacttagcctttttctctatgatgactcttcaaaactctttgagagatccattagatttttgttaaagcatgaaaaaaattggttaattttctctctaaaacttagttttgtatttcacttttctctcaataaagtgtagacatatttggaataagagtcacttttgttttaaacttacaattcattatttatagtttaaaaatataattggttgttttgtgatcataatcaaatattttgatcttagaaatacttggcttcaaca

SEQ ID NO: 146629 - DNA, 349 bp, Glycine max
  unsure (1)..(349): unsure at all n locations
nagcttaaaagaagtgaacgatttagcatgggcagaaatgtctccgcattgatatggaaatctgttcctcaaattcctgaaaaatgcgaagatccaggtacattcagcataccttgtattataagagaatagaagtttgacaatgccatgctagatttaagagcctctgttagtgttatgcctctgtcgatttttaattctctatctctaagtcccttgcagncaactgatgtgagaattcatttagctaatagaagagttgcctatcctgttggtttcatagaagatgtcttagttagagttggagaactgattctccctgttgatttttatatcttgaatatggaag

SEQ ID NO: 146630 - DNA, 454 bp, Glycine max
  unsure (1)..(454): unsure at all n locations
gatgatgattcaagtatgaatcaagtagttttgttgaatacaaaatgcccaaaagaatgattgcaaaattgagtcaacaagttcaaaatcaagattaatttcaagattcattagaagaaatcaagaagattcaagattcaagagaagttgatttcaagattcaagagaagatgaattcaagattcaagagaagaaatcaagaagacttcacaagggaagtattgaaaaagatttttcanaaaccaaacatagcacaattttgttttacaaaagagttttctcaaatttttctaagttactagagtatttactctctggtaatcggttaccagtgtcctataatcgattaccaaggataaaatttgatttcaaaaagttttaactgaatttgcaatgttccaatgattttaaatggtgaatcaatacatatttggtatcgatactagtgatctaa

SEQ ID NO: 146631 - DNA, 290 bp, Glycine max
gaagggggggggttgtggttcttgatgaagtgggaaacggtcgtttggtgatgctgaaacagcccttaggtaattgcttctaagaaatatggatttttatgtgttatctctaacttaataaagttggattttcactaatctgtgactcccacgtggttgaaatcaaataacaattattgtgacttgtcaggaaaagatttgcatgcatcttgatatctgagctgaattgacgttgtttttcgatgatgcctctatcaagtagcttattctgttttcgaatgggttttatt

SEQ ID NO: 146632 - DNA, 376 bp, Glycine max
  unsure (1)..(376): unsure at all n locations
agctagtaccaaacgacatggcaataggtacccttaaataganncgaattcagaataaagataagtctgcgtaaaagcttcgctgatatatctggaatatcattaatcagattattttgagacatattcagcatttccatattgaacaagttgttccaaaaccattctagtacagaatcattaagctcactatcagagatatctagtctaagtagaaaactttgagtccgatgctaactaagaaaagtcgagcccaacttgcaagatctaggtctcaagaagtctaattggaaaataagaacccagctaagggcaaattttacagacaataattttgagataggtagaaggtttccaacttggaaaaattagaaag

SEQ ID NO: 146633 - DNA, 456 bp, Glycine max
  unsure (1)..(456): unsure at all n locations
taagctataactcatgtatctgatcacgtacacgagtacaagttctatttttttttatcattgaattaataattgggttaaataacatagaaaatcaattaccccgtcaaatcatggtaatattatataaagcagaaacaactatttattattttacctttatcataaaattataattcattatttcttactacaatgttaatttaaacacatataataattcttttatatgcatggaacattacatccttacatttatcaaagtgaaattgaattttgaattctcaaactntgtgaattaaaaaacaagattgagagaggatattccataaaaaataatcaatcaaattctctaacaaaattaataaccaataaagttgataaatatgacctacanattattaaaataaaattagtatacatgattgatataaaatatccttataacatgttata

SEQ ID NO: 146634 - DNA, 385 bp, Glycine max
  unsure (1)..(385): unsure at all n locations
agcttaaataaaggatattcacactatgtatgatttattgagnnnatnccttgacctgagtaattagcaccattggctaagttaattagatagagttttacttctttaggtaaaagccaagatgtcttttatgcctaattgatggaagcttgcatgagaagcttctatggaagttggatctttgagctttaatgaagtcctccaatggagattttcaaccatggatatgtagcggaagataaaggataagaggtgagaggaggcgccttccactaaggaataagccatggaaggaagagcttcaccaccaaaagagagccttggacaagaagctnagagaggaagctccnatggaggattagaatgagagagatagggggggggg

SEQ ID NO: 146635 - DNA, 460 bp, Glycine max
  unsure (1)..(460): unsure at all n locations
ctattctaacctcgaaattaaagaagcacnttgatttcttgtgtttatgggataaaaatggtcattgaccaatccctattctatgacttgacccaattatctagtgaaggtgtaccatttgaaggtgcactgaatgatgattggaaatttgatttctctgtacatgatgcccgccggttggtttgcaccaaccaagtggatatgatcggaaggcttcttgccggttcactggctttttaaagccgcatccttcattagctcattgtgcatattttgcttccaagatcttcaaaccttgcacaggtttctaaggaagatcttattgtcatgtgggcttttcatacaggcggacaaattgattgggcacacttagtccgatatcgcatgcataaggcattgcgattaaatgctccattgccatatccacacctagtcactctcttccttcaacactttaaca

SEQ ID NO: 146636 - DNA, 413 bp, Glycine max
  unsure (1)..(413): unsure at all n locations
agctttaaaaannaataaataaatgtgatgttatattnnncgataatcaagacatgaagcaattaatcaaataattaagcatgaaataatcacttaaccaaatttgtatgacttgattaaccaataatcttatttcttaagtacatagaatntgatcttcaggtatgcctgtaaggataaaaatcttttcaatagaccaacaaagtcaacaatattttgtaagtattttcccccttattccatcgatgcacctttttagaataaaatcgngagatccatacgatactggaactaaataatatctcgctcgtagncacactaaataatgtgnagattgagagtaaaacaatatttggtaagaaaaatcaatatcttaaaagattaatctttaatttctaatcgaaagataccta

SEQ ID NO: 146637 - DNA, 477 bp, Glycine max
  unsure (1)..(477): unsure at all n locations
tactaagctagaacctcgaatcttgagatcatcatctgtgttatcatgtaatgttcttgacctttgagctttttgtcatcacctttgttatcatcaaaacttctttgaatcaatcttgattcatcatgaagcttgcttctacattaatattacatgtttctacattgtgagtgaaccatagtttcccatttgagattcaatacaatgattaatatagacagtttgtattaattattgtattgaaacttgaattgtccgttttgacagtttgagaaggataattattttttacttaattctttcttataagttaagtatgttgtgttaattntgactaaatttcaatttattgcatcttgctttgttctctaagtgtgtacaggattgtggtgttgatgtcaccgctttcatgtcgtgtacttggagatcaaagtgaaagctgccaaatttctacaaatttacatactcgcttaactt

SEQ ID NO: 146638 - DNA, 455 bp, Glycine max
  unsure (1)..(455): unsure at all n locations
actaagcttgacactctgatccctcacaacagaagtgcttttataattatggcagngaatcccgatcaaccacctccgaaattttgtactcttgtgagtacataagaccggcggaatctgatatggtgcttccaaggaccccagttgtctgtaaaccctttgatgatgcatttgataatgctttcaagttagcagatattgacccacaaagaacagtaagaatatggacccttccctcatttgtgtagccgttcaaatttgaggacacacttccacaaaataactaattatttgcttgattcatactaaataactaattactacacgtaataactaattattttcttgattcatactatataactaattactaacgttggtctcacattcgtctataaaagctattggtttcaaactactgtcaatttaatcgtctttaaacctgaaaaatataa

SEQ ID NO: 146639 - DNA, 393 bp, Glycine max
agctgctatagaaagggcggtgctaatttctctacagttgtactccctctcaaagagctagagaagaagaatgtggcatttaactggggagaaaaacaagagcaagcctttgctttgcttaaagaaaagcttactaaagcacctgttctagctcttcctaacttttctaaaacttttgagctaaaatgagatacctctggagagggagttggagctgttttgtagcaaagagggcaccctatcgcttattttagagaaaaacttcatggagcgacccttaactaccccacctatgataaagagctttatgccttattaagagcactccgaacttgggaacattaccttgtttccaaagaatatgtcattcatagcgatcaacaatcacttaag

SEQ ID NO: 146640 - DNA, 384 bp, Glycine max
  unsure (1)..(384): unsure at all n locations
tactcagctgaatcgacctcgtgtgaaagttatgaccatttgttttctctttagcttccgntgnacaatttccagcgagtctacatattatgcgcccgaatcagacatccgtgtgaaacgttatgaccatttgaatttctccagagctattgatgtttaatttcgagcgtctcgatatattatctgcctgaatcggacctcagtgtgaagacttatgaccattttcctttctggaaagcattcgctgtacattttttagcgtctatatatgagatgcgcccgaatcggacatccgaattaaaagttatgaccaatatgaattctcaagagcgttcgttgtacaattttcagcgctcctttatatgataaacctgaatctgacct

SEQ ID NO: 146641 - DNA, 384 bp, Glycine max
  unsure (1)..(384): unsure at all n locations
agcttgaaaggtagtacatgaccaaatctttatttaatcgnctttacctaaagtagtctttctattcagttaaaatgcatgaagatagatcagtaggagaataattggatttatttgataaattgattctagatcttgaaaatatcgatatcaccattaatgatgaagatcaagctttactattgttgagctatttgcctaagagttactctcatttcaaagagactttactgttaggaagagactttatttctcttgatgaagagcaagctgctttgaactcnnaaagaattgtatgaaagataagaacagaagtccttaacaagtggtgaaaggctgacatcaagatgcaagatctttaagagagatagtnaatttgacaag

SEQ ID NO: 146642 - DNA, 355 bp, Glycine max
  unsure (1)..(355): unsure at all n locations
tctcgagctcctcaacggctaacgtcactatatctccagagattttttgtctcttgaccaaatatggaatctccggtgacataacactgcctaaagcatcatcttgttgtctatgccatgacgcgacnatgaggttcccactgtgagtgatactgaaaatccatgtggaaaccagctactattcttatggggcttaacaaacactagtgatagaaatgcaccatacactaactagatgtagaatatgctatactccttgtgcacctcaacgatcttgactatatgcttaccccacctgtatttctagaacaatatatttctgttccatgaatgaatctccataacgacctatact

SEQ ID NO: 146643 - DNA, 293 bp, Glycine max
  unsure (1)..(293): unsure at all n locations
aaaaaatcttcagaaactaggcacttgtagaattgtgactttcggaaatgtatttntcgaaaccagtccctggtaatcgatttccatttatgagtgatcgattacacctcaacaaatgtgactcttcattttgaatttcgaaaattaaaacgtctagaagccctgagtatccattacaagtcttgtgtaatcgattaccctagcttataatagattaaaactgtcaaacacaagttgtcactcttgaaatctgaaatcttaacgctttaaaacactgtgtatcgattactacc

SEQ ID NO: 146644 - DNA, 447 bp, Glycine max
  unsure (1)..(447): unsure at all n locations
tgcttgtggagcttctatggaagctggatctctgttcttattgaggtccttcaatggtgctnttacaccatggagatgtatcggaaggcaaaagataatatgagaggggaggcaccatccactaatgaataagccaaggaagaaggatctttaccaccaagaattgccttggataagaagcttgaagaggatgctttaatggaggaaaagaaataaggagagaaagagagggggagcacgaatattaacgaataaaagagggagagaagtggaactttgaagtatgtctcacaagactctcatgtctcaaagttacaacaagtgttacgcatgcttctatttatagactatgtagctaccttgagaagctgtcttgagaaaacttccttgagaaactttttgatgaacttccttgagaagctcaacttatctcacacacccctttat

SEQ ID NO: 146645 - DNA, 396 bp, Glycine max
  unsure (1)..(396): unsure at all n locations
agcttaganaaatgaatatatgagaaactaataaaccnannacacaaaactttcttaagatgaaagaggatccatgaagaatgtggcctgtgactactggatgctcctgctgaaagaactgtagaacttaaaaaaatactttgttggcatcgaaacccactaaatccataagttgcctcctgggaagctctcgtttaatgtctcaagctcgatgaatcataagggacaagtcatctaccctcgaagagggtgatgtttcctttctacagcaaactcttagaatgcccatttaccctgtggcctaaagcaagaacaagggtactagctccttctntcttatctctcatgccatttctcagattctttctcagatagtctgtccaccccacacttgga

SEQ ID NO: 146646 - DNA, 416 bp, Glycine max
  unsure (1)..(416): unsure at all n locations
nntgcggcgaacgaagttggagggagaaagtgatatcttatttgtcaaacctgaagctgaagcactgctctcatcgtcgttttattcctcattcaacccacacgcatgcagggtgacgccacgtaacttcaactcttcaacataagtatttctcttttcaacactatgtatatttatttttaccttttaagaataagttaaattaatttcacaaaaatttcaaaataaattcaagtttttaaatattgttattggataggtgttagttccttttntctgttataaattcaaggcttactctcttgtttattaaatatcatgaatgtatgaagtatattaaatttaggtaaattttaaaaatattaattaagaaccatgttgatataaattagttttaaaaaatatccattaatgat

SEQ ID NO: 146647 - DNA, 414 bp, Glycine max
  unsure (1)..(414): unsure at all n locations
agctagctagttaactttgcaatagtgagatttagcaaatcacaagactcttcaattttagagatcttggcttcaaacttgtcaagagccaaaaccatgattttttcaaagaccttatgatttgtaaatgatgcctcaccaacaagtcccatttgatttacaacatccattaatcttccagaataatctttgacagatacattgcccatctgttaagaataaatttatatgctcacaatctaaatcatcatataatcaattctaattntaataataaagtattattttattttcattgtcatatttcactatttgattaaatgggccatttgataatgtccttgattaaaattaaagacttgttattataatagagattatgataatgaaaaacaaatttgctctaattttaat

SEQ ID NO: 146648 - DNA, 365 bp, Glycine max
  unsure (1)..(365): unsure at all n locations
atgcttctacttgtgatgaagagagtgtatcatattagagaagatgtacaagctctntgataaatatgtgagtgtaaagtcaagttcatctacttcatcaagttctcaacaacctactgttgaagaagatttcagtatagaagaaaatcaagagatggatgatccatataatgttagtcttttcttttgtttgattatttaattgttttatgattcaatttatttaatttaatgtttctcttatattgtcataggaatatatcaattatgtgagccaaaatgtttatgtcaatgacaagtctgaattagatctctatttggctgagacaccacttgagccaaagtttttcctacgttgatatttt

SEQ ID NO: 146649 - DNA, 223 bp, Glycine max
  unsure (1)..(223): unsure at all n locations
agcttgacctatcccgacccaacccgggcatatgncggncagagagaacctgtgatgtacctaagcaagcgagctcctggcagncaacagataaaaagaacaaagaccacnaagcaaagaagcttgaggaggctggccagctgagaaacttgattgatatgtgagatatggtctctgagaatcgattaccaaaggtgggtaatcgattacaaagcttaaaaat

SEQ ID NO: 146650 - DNA, 385 bp, Glycine max
tgttgtgcaccatcgcccgaccgccacctagtaccacatgtgatgggtaccccataattctacaagcttgagatgaggaagtgttgaagggtgaaacttcctgcttttattgttgaccacagagtggtacctggagatatgtcgcgggggtcaggagaccttggggacgtcaggtggggtgctattgcccaaaaccaagcttgaccaatcccgacccaacccgggcatagtcggtcagtgagaacctgtgatgtacctaagcaggcgagctcctggcagtcaacagataaaaggaaaacaagaccacaaagcaaggaggcttgtggtggctggccagctgtgaattttgtgtaatatgtggatggtggcctctggttatcgatta

SEQ ID NO: 146651 - DNA, 415 bp, Glycine max
  unsure (1)..(415): unsure at all n locations
agcttagcagatnnagtcttcgccagtgaaaagatctatgtgggnccaaaaagatgcaaatntgatcatcctactaagacgactgagaaaactggggcaaataaagagggtgaagatgaaggagaaacccatgctgagactgccattcctgtaacggccaaatttcccaccaacccaacaatatctttactcagccaataacaaactttctccttacccaccacccagttatccacaacggccatccctaaatctaccacaaagtctgtctaccacacttccaatgacgaacaccacctttagcacaaaccaaaaacaccaaccaagaagtgaattttgcagcgagaaagctagtagaattcaccccaattccagagtcctatgctgacttgctcccatatctactagataattc

SEQ ID NO: 146652 - DNA, 370 bp, Glycine max
tactaagctcaacctcattgtctctcacagtctttagatatgggagccaatccaatccttgtgtccgaactctcagccacttatgatagccgccgatgatcccattactgcttcccctaagctctctgtccttttcttcatgccgcatcccatgccttgcgaactccttggagtaccctcgcgttgtggtcactgaaaccccgtgcgatgaaaggcgtgatgctttcgtctgatggcactcctctcatggggtagccaagctgtcttatggcgaggacgggattataattaatacaaccccttgttcccatcaagggaacatttggacatccttcgcatgaagatagaatcctgattctccttccttcta

SEQ ID NO: 146653 - DNA, 421 bp, Glycine max
  unsure (1)..(421): unsure at all n locations
agctnttactagnnncagacttcagaatttattgtttctttgctatctataaatttgtaattgtattctggtcacatgaatgttttcttaattagncatgtattggattattctgattaaaagttacttgatcagctttatcgattccttgttcgaaagacagacagcaatttcaatgctgagatactcaagcgcttgttcatgagcaaggttaacaagcctccaatttctttgtcaaggttaattaagtatacgaaagggaaggtatgcctcactctatctttatatatatcagcactgatagctaattttcttaagttttgactattgtagntatctcttttttaatgtaagaggataaaattgctgtagtagaggggactgtaactgatgatatcagagtatatgaagttccagcatt

SEQ ID NO: 146654 - DNA, 386 bp, Glycine max
  unsure (1)..(386): unsure at all n locations
tataatctaagctcgtagcactngngtcaattctaaggatcttatagtaagtctttgttgctgacaagaactctatatttccatcgttgcagtagactttgtacctattgtctccacagtcctcgttagtgctgagtgggtatgggactacaaagtctccacaattcgaacaagcactataggttgatgcattgattactagaccaagactagttagtagaaagagtagaaaggctatcatctttgtttgaatatggaactagctatgaagatttatctctgattgggaatgtaaggattaatgcacaagcatgtgacctagttatactaccaaatgacgcatttctcttttgggctcaagagtttttatgacccaaatcaaacat

SEQ ID NO: 146655 - DNA, 237 bp, Glycine max
  unsure (1)..(237): unsure at all n locations
agcttctcttcaactccttattgaaagattgtgcttcgttggatgaaccatcgaaccttggcttcatgaacactgatttctgaaacattgntggtggcggtggtggatgacaanacttgtagaagcctttcttcctcactgaatcctctgtgtttatagacaacattataacatatgtgtttgaagacaacattataacttcagnttttctattggaattgcttgaaaatccttgag

SEQ ID NO: 146656 - DNA, 470 bp, Glycine max
  unsure (1)..(470): unsure at all n locations
ntaatgtacatttattaaanagaaaatatatatatatatatatatattgtatactaatnaaatntagcatgttaattttatacataaaaaatagaatagctgtattaaataagatcattttttggaaattttatttcttatgtataaatgatttctaattaaatttaattaatattcaaaatgttccttccaaaaaaatattcaaaatatttatattttttcctttttagaaaaaataataatttctaaaaatgatattcaatatagctattctaatgtttatatataacttatttctaaaattaatatgttaaattcacttaatattcaaaatatttttatttttaataaatatacattaattaagcttgttcagtctttttcttttatgagtacgcgtagtcattctttcttactttaataggccatttatatgaaataaaaaaatgaactaagtcaaatgatattta

SEQ ID NO: 146657 - DNA, 386 bp, Glycine max
  unsure (1)..(386): unsure at all n locations
agctttagctacaaccttgttctggccctttggtttcatcaaaaagcccaagaacccggaaatcaacacagttacaacaatggagtagcaagatataagcatcagagtattaaatacaataagccaaactcacaaacaagaaataatcaaaccagaatccaaataactgaaaatgtcaacaaccacaaaacatccaagactgaaattntaaaatccacaagataaataagcaaagtacttagcataataatgtaaattctaagaaactaaaagccaaaatacacggcttataaaagagaaataatcagaatctaaaagctaagaagacagaggaagtggtggaagatcgaaactctgacgaatgtatccaacatcctcttcaagct

SEQ ID NO: 146658 - DNA, 414 bp, Glycine max
  unsure (1)..(414): unsure at all n locations
ntacattcctaccaactacacctgagatacgaacaatgtgttgttaaacgacattcgcaaggaacaacagaagggacaataggcttacctcgatgaagaacggaacaacgaaagctcgcggaagaacgggaatgcgcagaagaaggagagccacttgcagggaacgaagacgcagctcgcggaagaagaagcaacacctcgcggaagaaagacgaaccagaagcttgcggaagaagaagaaacgcctcgcggattgatgctcaactcgcggaagaagggaagggaatgcgcagaagaagaaaaggctgggtgcacataaatgttttataaactaacaggggtatttctgccttttccccgttagtgttgggtgcaccaacattattgctgagtgcacctaacaacttcctaaac

SEQ ID NO: 146659 - DNA, 376 bp, Glycine max
  unsure (1)..(376): unsure at all n locations
agcttgtaagattatagagtacccgacacatgtggttctatgnggcggncgggcgatggagcaagtcgactatccacatccacaaatcacacataaatccaccatccccagttgcccaccttcaactgagctcacgtactcccacgtagcccttatcctcgttcctctcaacaccagaggcccatcaatccctccaaggttgcataacatccaagcgatttcaacatccaaacatcatgaactatcaaaaccaagccaaaacaaggcagaggcagagaactctgcccaaaacacaaaccacaaccacaacctttcttactcaaataccccaggaacattctcttcgttccaattagttcaccggaggatcgactcg

SEQ ID NO: 146660 - DNA, 455 bp, Glycine max
  unsure (1)..(455): unsure at all n locations
ctcaaccttgctccatcccatgagggaatatgcgtcaagcgagtgtctgttttatattctctnactaggatgcaacctagctctctttatttattttctcaaatcattgcatatagctaagtctcaacttgttaatgattgcttgagtaaggtatcaccatgttttgtacgataaatggtgtggcttaagcttctttgaagctgctgataaggaataaccttaaaaaaattcagtcatccactcgctcaacgcgccctgtgcgctaatcgaatcatcatacatgctctgagcgagtagtcactttcgcttatcgtgccaacccctacccataggctgatggggtctcgctatcgagatccttgctcttagctcaaaacctctctggaattgaatttatggaattgggctatccattcatttactatacgcatttggctctaaccgcatatcttat

SEQ ID NO: 146661 - DNA, 395 bp, Glycine max
  unsure (1)..(395): unsure at all n locations
agcnnnagaaggagcgtagcccaccatcttttcatagnngagcaccgataatgtgtctaccatcacgattatcgtctccctttttgcacatgttctgtagttgcatcctatccagaaccatatcaaaatggtactgatactgcctaacaaaggcaaccattaagtccttcaaagaaaggactcgggaagattccaagttagtgtaccaagtaacagctaccccagtaagactttcttggaaagaatgtatcagcaattcctcatcttttgcgcatgcccccatcttccgataatacatctttagatggttctaggggcaagtagtccccttgtacttgtcaaagtccaacaccttgaacttgggaggggtgatgatattgggtatagggaacaac

SEQ ID NO: 146662 - DNA, 389 bp, Glycine max
acgcgcactggaagtactaacattagagtgcctatactcaatagaaaatacttatcacactacaagcgggtgtgcgcttttgacaactgcaccggatcgggcctgtagtataaaatggggataaccgagtatgggactctctacgaacttgtgttatttggtgagctattccttcaaattggagtctggtgtgtgaagatgagtgcgaatctgaacatgtgtgtgaactatctatgctaaaagaaagataatcatgctagagagatgatgtgtgagaaccacgagagaaacacgttggccttcctaattagcgccttgtgctataacgagattatatatctacaatgctcatgtgtcctattgtgtgtctgagacgccaaatctcgatt

SEQ ID NO: 146663 - DNA, 414 bp, Glycine max
  unsure (1)..(414): unsure at all n locations
agcttagagccaaaatcctaactcaccatttaccttgacccanagagagaatgtcaatccttaccctcgaaagcaaaaaaaaagagagaaagaaaatttccaatcaaaggaaaaaagataggaaaagaaattcccaatcaaagagtgggagaaagcgaaaagaaaagaaagaaaattcccaaccaaagagtgggagaaagtaaaaagaaagaaagaaagctcctgatcaaagatcgaaagaaagctcctgatcaaagatcgaaagaaatcanaagaaatgtgcagaaaagtctttggaccggacaatatctgtacaatacagaattgtcaccaaatgaacaaaaaaaaaaggaaaggaaaccacgacctgaaagtggtcttctcccttctattaccaaccanaatcctgtgcgt

SEQ ID NO: 146664 - DNA, 363 bp, Glycine max
  unsure (1)..(363): unsure at all n locations
cgaaggtgagtggcccaccatcttctcatagtagaattctggttatgtgtctactatcattgtcatcatttttttctccatcattgaggtgccacttgagctgccaggtctctccacatttgggcgtattcttttgaaagattcgtgccccatttttgcacatgttctgtagttgcatcctattcaaagacattatactgacactgcctaacgaaggcgaccactatgtccttccaagaatggactcaggaaggttccaagttagtgtaccaggtaacagctaccccagtaagactttcttganaggaatgtattagtaattcctcatcttttgcgtatgcccccatctntagatggttcttg

SEQ ID NO: 146665 - DNA, 356 bp, Glycine max
  unsure (1)..(356): unsure at all n locations
agcttcagacaattatcaatcctaagttgcttaaagnngnctgaactaccactatcaagtaatatctgaaccaccatgccattaattgtaccactaaacttcatagttcctaagctcgaggaacctttaaaggcattataagataagagatggtctaaattcaaatttcccatggcttcctcaattctaagaagagggtccggttgcacttcaacattttcatcctcatccatttgcaacaataggtattgccgattaagacacctatgagaataagagaacttctcatcacatgtatagcatagccctttctccctttgaatatgcatttcaggtggagatattcttctgacatt

SEQ ID NO: 146666 - DNA, 471 bp, Glycine max
  unsure (1)..(471): unsure at all n locations
tatgtgataaccaaatcatgttctcacatgcgcatatatganaaccggaagatgactacaaaattttcctaaaagataaataattagagttaactttgcatctatttgcaaccagttgaggccacattaacatgtaagatacatgaattatggaaaaagttagcaaaatttgtacctaaaataatatagaacattagcacataattgactcatttgctgcttcattttgagcaaaagtcagaggtattgcatgtggtttgaagtcatctatgatgagttaggtgggttcttgaaaaattgctgtccttcaaatacccttgtctcttgatttttatcaatataactgaatccgacgctgctggatgttaatatgatgcatgtttgtgctttcattnggatggatgaatgcaaactgatgattaatatttaggttacttggtttcaagaatttctttggaactatgatattaa

SEQ ID NO: 146667 - DNA, 336 bp, Glycine max
  unsure (1)..(336): unsure at all n locations
agctnnacnagagttgataggagacaaactttattctatnganntnacatctaatctttaaaggatttagaaatatcaaatcattgtctcatatcaagcatcggcctaaaatctgaacataaagcgttaaattccaaatagcgtatacacctccatttgtgtctgcgagatattattattaaattgatttaaaaacttagaacaattaagattctcccgtgctagatgntggcgcaaggccagcattctcaaatgaattattaatattcgaaattcgctggcctgatttcctatataaacgcttgaaagcacaaacacattgaaaataagatgatg

SEQ ID NO: 146668 - DNA, 375 bp, Glycine max
tcatatgacacctagcaaaaacatttatgttttattggcattgtaataaatacaactttttttgattcaagataagaagctaccttggtggagatcctcgacagtagtgatgtcactaatgaataattatgttttttattggattataagatatgtgattagacacgtagctttataggatgtacgtggtgacaatattcagagaaatatggtaatcaactataatttcttcctgcaagcaaaggtgcgtatatttgggttaaaaaagattattcctgggtaattacataagctttcttggataagaagtgccattaatgcaaatatttagtaattaattgctatgaatgtgacacaattttttgtgattcttta

SEQ ID NO: 146669 - DNA, 353 bp, Glycine max
  unsure (1)..(353): unsure at all n locations
agcnnctnaagctagctacaacttctcttgtttttaagaaaagaatgaggggaaaaaatggtggtctgtgctcacacgaaaagcttttacttagaatgaaagcatgacttcgcaagactgctttcaaatagcaaagcatggcttaaatctattgtattacacgttaaggccaaggatatgattttttttaacatgtttctactttttatttggttctctggtagaaagctgaaatgaagctgtaccagaattctgatagcttcagttcttaggcatcattatgaaaagaaacttcttgagatggaacaagagaagaaaatgttgcaagtaattagtagcctgtgctgatatgt

SEQ ID NO: 146670 - DNA, 314 bp, Glycine max
ataaatcggttgaacacatgcttcgggatatctttaagtgagctgaaaacaaaataagaacatgagcattggtagctatacaggaaccatagtctaagcctttccacatgagagaatcttaagatttaagaactattgcaatataaaagataaacatttacagtttctgcaattcatcatagagcatcacatcggacagagagaaatcttagcaatatttttttttataacaaagtttattattatcaatggttgattttccttcataaggcggcagtttgattcaccatattccaaacttgcattattatgac

SEQ ID NO: 146671 - DNA, 399 bp, Glycine max
  unsure (1)..(399): unsure at all n locations
agctaggagaaaggctagacatgatacatgtcaaggctaggnnaggntcaaaggtaaaaaggatgccccacattatttccatgacacaaatgcaaaaatgatgatttggaaactttatgcaaaactggtcatgcatgcatctatgcggacactcaaaagtcaaatttttatggtcatgtgatgctaaggttcaagattcatttcctctattttaatcaacccaaagtttccaaaatatgttcttttatcaatttgagcattcatccgagtccatttcgggcgtctgggaaaatcttcacagcattcacccttcaagagtatacacattttttcaaaaactagntatgatcagagaatttttccaaagaaaagntggaagtcatctcttttcaaaagcat

SEQ ID NO: 146672 - DNA, 432 bp, Glycine max
  unsure (1)..(432): unsure at all n locations
tatatgccacagnggtttactcgtcagttcctcctctataaaacatccctatgtctgtcgctaccttcaccatagctgatttgcagtttggatgatgttgatttggacacttaagattgagagactaagattggtcaaacttctgtttagagattaaaaaaaaattcagttacaaaatatataattaactctttaaatgaacatcaattccttcctttccacatgcatgcatcattaatgctacaaaatagcaaaaccaccatattataataataataataataataataataataatagtgatataagacttgaagattcaacatgtccaactcaagggttaaaggatccttgagttgtaaatcttcatgcatgggcatcaatttccaaatacaacatgccacgccatttaccatgtctgacgatcacaaa

SEQ ID NO: 146673 - DNA, 461 bp, Glycine max
  unsure (1)..(461): unsure at all n locations
cttgaatttcttaattaacattntcaattcaagtattattaatagaataaaggtaagagttataacattattttgataattaagaaagaaagaagggagtgagacatcttgagtttgaatcattattactaatatataattatttatgtgtttctaacgagtttataatataaagattaatcggtaaaatatttatttatgaaattatttaaatttatttatatgatttttatttttaaggaaaaataatttcaaagatttcaaagtaaaattaaattattagttatttatttttaaaaaataaaaagtaaatatataaatttattattcaattactataacaataacatactttnaacaatttacataattatgaacatattataattagtcacaaaagttagaaaaacaattaattagtaccaatgacatgangcatatgttttcatatataatacaca

SEQ ID NO: 146674 - DNA, 343 bp, Glycine max
  unsure (1)..(343): unsure at all n locations
agagncgaccatgaagcatgcaagcttatgcaaccaaggtagatgggaaatcttagcagtctaaagaccttgcgntgacacatctttttctcatgaacaatattcattatattggcagatcggntcggaggtatgtctttgacatgttttggttactattttctttgaatcatcattntatagcatattttgatggttcaaaatcagcgttcctcctcacttaaaaaaaaaaagtcccttttcctcctaatcctcttctattttaagtctgaagccaaagatttactgggggatgatatgggtcaacgacataggaagattgtgcgcagcatgcaaatcaata

SEQ ID NO: 146675 - DNA, 473 bp, Glycine max
  unsure (1)..(473): unsure at all n locations
tccatcatcatggattcattcacggtcaaatactgtacatctcttaatgaatntcaacagcttctcccgctcctaaacaattnttttcgtgtaaatctttattacatttacgagatttatattntgtgctctcactgttgcatcagagcaaatttacattccaaaaaaaaattctcgaaatgtaatagaaaatgcaggatgcaataatggagatgcaggatgcaatagcctaacattattattcacaaattttgataaagccccacttatttaatgcccataaaataaagatagactttggtccgaaatggggtcaagttcaaggtttaatccactaatatacacattggcccaacaaacccanatactaaataacacttaatgaattgggttgagttgtgtctattggaacaatgtgtttatttgtaaattagacatgtaagatgatgtttcaatttatccgctcatcataa

SEQ ID NO: 146676 - DNA, 418 bp, Glycine max
  unsure (1)..(418): unsure at all n locations
agcttcagaagaggntntgagtggagacacaactacctgttcatgaaacaaagntaaatagccaaattttaagcacgctaaatgaattaatttaaaaagaagaaacatatagnaaggacaataagcgcctggagagataaagacttgattagatgtgtcggccaagcaaggaaagagagaagtgcctgccccactaaggaaacctcagcagagggtacaagaactggagcatctgcatctttaacctcatccacactcacctttacttggccaggcaacaaaggagagttatgaacaagattggatccctcataaactctccccacgagaaccaggcaggcaagatctgcttctatgtacaagccagacctgtcagagncacccgtctcaagatcatttnctgaagaatcaacacaac

SEQ ID NO: 146677 - DNA, 477 bp, Glycine max
  unsure (1)..(477): unsure at all n locations
ctaactntattttctcatgatttcattgtaacacacctatgtcttgtctttgttaaaaactgtttgtaaaagttgttttaagcttttggacaatcttttaaagatattgtttcctaagtccattgtaaaatctattttagaaaaaatatcattattctgaaaattattttaagtttacatgcatacactattcaaccccttcttctaatctgtttcggatatttccaatttattaataaatgttaatctttgtatgaaaacaatagtttcttgatatatctcatatcataaaaatcttactttggtgtgaaagattttcattttctttccatatacttctagaccattttctcttattatttctaccaatttattaaggtgattattatgtcggtttattccttttggaaaacaagaatgtcatcaaatatactaaagtaaattatgtgtattaattaaatatatcattcataatat

SEQ ID NO: 146678 - DNA, 233 bp, Glycine max
  unsure (1)..(233): unsure at all n locations
gagcgtatncgatatattatatagcccgagtcgtacatccgagttaaatgttatgaccatttgaatctctcaagagcttgtgttgttcaatttcgagcctcttgacatattatgcgcccgaatcggacatccgggtgaaaagctatggccatttgaatttctcgagagtctccgatgcttaatttcgagcgtatcgatgtattataagcctgaatcggacatccgtgagaaaa

SEQ ID NO: 146679 - DNA, 349 bp, Glycine max
actcagcttatatatatcgacccgctcgaacataagcgtcagaagctgttctcttattcatatggccatagcttttcacgcggatgttcgatcctggcgctttatatgttgcgaggctcggacctgaacgtcaaaagctctggacatattcatatggtcataactttccacactgatgtccgagccacgattattctatatcgccacgctcgaacttcaccatcagaagctctggccatattgatatggccatagcttttcatacggatgttcgatcctatcgcattatatttcgacaggctcgaacttgcacagtggaaactcttgacaaattcaaatgcgcataact

SEQ ID NO: 146680 - DNA, 394 bp, Glycine max
  unsure (1)..(394): unsure at all n locations
agctagncttttgacaacatgaatgcatgtattctctccagaagntgngaaactagaggtggcttcagagaacactaagtttctcactggattaacttctaatcagacaccaaacttggattccagctcatgaaataaatatagattagattgaggtttttgttatctgccagcagntacttcaactagtataccctaacaatgttaacatctacacaaaagagtaggttttttgtagcaatgggggtataactcagtattttgagggggagggagcagcctgccccctgtcagagcctattgttagctgntgcatgtgaaccttttagagaaactttcagaatcatttttcctttaaagctcttagacacttgnatttaanaaattaacagac

SEQ ID NO: 146681 - DNA, 446 bp, Glycine max
  unsure (1)..(446): unsure at all n locations
taganagctacgtcatcgtctaggtgacaaaatatcttccatatttagtcatggaggcatgacattcctacaaaataaaccctcattgagagtcgatgatgatggagtggtgattagagagttagttaagctaaagcagttaagggaactggcagtgctggattttagggcaaagcacgaaaagaccctatgttccttaataaataacatgcaactcttggaggtactaggtattgctacaactggtggaagtgaagtaattgacttgcacattacgtcccctatgcctacatttagaaatcttgtcttgtatgcaaagttaaaaattaaaggtgccaaattggaatccacagcttcaaaatcttgtgcaactgtatttgatttgctccctagtgattaatgatccatttgaattatcacttaaagatatgccaaggttgatggtc

SEQ ID NO: 146682 - DNA, 358 bp, Glycine max
  unsure (1)..(358): unsure at all n locations
agctcancgagaggccgagaaggatcacgcttttancgcgtggctngcacttagggcgcgaaacggactctgcatctccgatcttaacgcctcgcttagcgcttgtatagcttagcacgctcagcgcgtgacgagctgggcccgcttcagacttcttctttttcttcacttgctgttgcctttctgcttaatgtcacttcagttttcgtatttgctaccaaaaatccaatccaatcaattttctaacttttaaccacaaataacagctaaataattatattcaagccaaaatcagactaattctctaccattaggttacaattactttagcagtatcaaaatccctcaattaaacttt

SEQ ID NO: 146683 - DNA, 294 bp, Glycine max
  unsure (1)..(294): unsure at all n locations
actcaagcatgaagtcaattctacaccagtntgtcttcactctaaattctnttgcttatttaacctacaatcacagtctcatagcctacttgattgctagaagtattgatattaaaccttaatgattacttgagtgagatatctccacgtccttcaagggtgactcctattccactaccattggggttactatctccaacaacatagagcatccaccaatcacctctgtcactactactcgatctagatggaagctctaacctgaaataaaccataccttaagctgtaatgggt

SEQ ID NO: 146684 - DNA, 466 bp, Glycine max
cgttgaatgagatgattatgagatgtgctctgtgacacttctttgagggccaacaagctctacgtagctcttgacgccatctagaactgatcctgcaataacaattacaattagtgactattgtcaatgataatgtagaaaaaaatcaacaacccaatttgcattatctgacaagagtaggtacatagtttgctaatgggtgcacagactgcggctgtaatgggatgggcgataaatgtacaggaccacgtggtgtgtaacacccttaattaaaataacccccatactagaaagaatatacagtctgcaaattatattagtcttgaaatacatcatgtataattaataaagtcagataagtaagcgtttacactaaattaaatattagtttcaaatatgggcatctaaaataactaacgcttaaagtctacgtaatcaccacattcacatatattctgagcctaca

SEQ ID NO: 146685 - DNA, 413 bp, Glycine max
  unsure (1)..(413): unsure at all n locations
agctttncgattcattctatgtgcccgtagtggctctcattgagnnncgagcatttttattctcgntttgtttactttttataccccctgttgacgtgcttaagccattttacttaagtcatttctcgcttaacttaaaaataaaataaatttccaccgaacgtttgaatcgaattatccattaacttcggttaaaataaattccgaccgttcggtcgagccgtaaccacattgaaaatcaaagaggtaaaaaataatattataatcaaaaagacatcttttagtagaataaagcggaaaatcaatcggacgttttctctttgggatttctcattcttaatcgaattgattaataactaaagagaaactaaaggctaaaatcaattcgcctagtcaagctcagccataaaaat

SEQ ID NO: 146686 - DNA, 414 bp, Glycine max
  unsure (1)..(414): unsure at all n locations
cgaaggtgtgtaacctaccattttccataatagaacactttgtttatgtctactatcattgttattatttctttcttcgtcgttaagggaaacacttgggctgccagatccctccacctttgggcgtattctttaaaagatccgtgccccctttttgcacatgttttgtagttgcatcctatccgaagccattatactggcactgcctaacgaaggcaaccattaggtccttccaagaatggactcgggaaggttccaagctagtgtaccaggtaacagctaccccaataagactttcttggaaggaatgtatcagcaatttctcatcttttgcgtatgcccccatctttcgacaatacgtctntagatggttcttggggcaagtagtccccttgtacttgtcaaagtccaaca

SEQ ID NO: 146687 - DNA, 302 bp, Glycine max
  unsure (1)..(302): unsure at all n locations
ttatatggatgttagctcaaagaggagaatagtagggctgagaccaaaatccatatggaagnttattctggtatttttggtttggcctctgcctatataaggcaaggatgccctgtataagaaaaaagggcttccacttgtgtattgcatcagtaataaaaaactttatgttttctctcccctggatgtagccttaaagaaaggagaaccacataaatctgagtgntctttctcatctctctctccctttcattntgctgcaacatctgtgtacatgacatttcagntctgttgcatctcct

SEQ ID NO: 146688 - DNA, 463 bp, Glycine max
cttgaacaatatacttggccttcatttaactgtctctggtgcttggcggccacgctcaacaaagtactttcgacacctactgtacgttgctttgaccaaggctattatgggaatgttgcgacaatccttcaaaaccttattgatacattctgagaggttggttgtcatgtggccttatcgacgtccttctctatcataagccatcgtccatttttcctttgaaatgcgatcaatccatgttgctatggctggacttagtttacgaaaattttctaaattttgatcaaaaatgtgcttgcaaggagtgtaagctgcataaaattagttatcaataacaattttaagtatatatggaaggtaaataaacgtgaccattagatatgaaatcttacccaacttcttcaacaattctttttgttggcgtattgaatttcgattgaaagtgttgctatgtgtcgcacgc

SEQ ID NO: 146689 - DNA, 307 bp, Glycine max
atgtgacctacaatagcccatgtcataaccatatttcggtaatagagaattaagttttgaaagagacggagtctcctttgcatagcttgactgtgaggctggcagatcctttgaagaaataccagaagtatcaaagtctgacatgcctgcagcatgtgttcatcagaaaaatctctctcaacagttagatatcattggcagtaatttaattatagaaaacatgctttcatcaaaacaagattagcaataactaatctaccgaaagaaaagggcggccttctacacaaaaggacattcgataaaaaat

SEQ ID NO: 146690 - DNA, 451 bp, Glycine max
ctataaaactaagcttgatcgcactccccttctaagagagatggggaattaatttcctaacctaactcttctttgctgatatattatattagtcgcctggaatagtcactaatcccactaaatcagatcaatttaatattaatttaggaatcatgattacgtgaggtgctgttatgtttattttttctattcgtaaaaattgaagataaatttacgcaccttatatcttgtttatccaactaggctgaattccctcaacatctctatttttatttgtaacaaataagactgtatcgaacacaagattatgatgtaaaaaacaaacatttttctagataattgccattaaattatgatttacatttgcgttgtattgttgtagagattattaattgtttgatatacagtagttgaattggtgatgcaaattagaaatagagacgacttgatt

SEQ ID NO: 146691 - DNA, 394 bp, Glycine max
  unsure (1)..(394): unsure at all n locations
agcttagncttcaaatgtactttgccatattctttgagatgctcaaataggggcaatatgggttccatctcctcagttatggtcacctcagcctcacataaccctagatctaaaaaagtaagcctacgccaaaaaatgaggattatctttagaggtatgaagccaacaacatatttaaataactcacatccacatggaagaccgcgggtagtcctcatgacacatccacaacgagaaaggtttttgccagcttaaagtacacgctcatactcagcagcaatttcatttaaagcgtaccttgatagcattccaagtagttttttgtacaaagtaactttaaacacatgcccaaccatgtgtatacttgtctcaaaagatgatttaatttgggcgt

SEQ ID NO: 146692 - DNA, 447 bp, Glycine max
tcggagcttgaagaaagtttgcctgtgtacatgcccatctccttgagtgacatttgtattgattgttgcatcttagtcactatcttttcatatatagatcatgcatcatcatgtagaggtaggaagattgtttctaaagttagaaacttcttcggtgcataatagtctttgttttaattgattacaaggctatttgtaattgattacacaagtgtttgtagcttgcagagagatcctcgtttggtttaatcgattacctgttatctgtaatcgattacataattcagttgagaccatgtcaggtttttcatgaagtgtgtgcttaatcaattaccaggtgatcgtaatcgattacttcgttcttaagggtgtcccataagtgatcatggacacttcaattgattatatcaacaatctaatcgattacattggtcttgaaagctttct

SEQ ID NO: 146693 - DNA, 347 bp, Glycine max
  unsure (1)..(347): unsure at all n locations
tgaaattgaatgccgaagctctgagtgagatctttctatttaacctantactcagaagtgcgattgagtcctgtcatatatcgaaaagctcgaaatcgaatgtagaagctctgagcaaatgcaaacaacaataactttgtactcggatgtttgattgagtgccgtaatgtatcgaaatgctctaaatggaatatcgaagccctgagcaaattctaatgacagtaactttctactccgatggctgattgagtcccgtcatctatcgagatgctcgaaatggaataccgaagccctgagcaaaatcaaatgacagaaactttatactcggatgactgactgagtcccgt

SEQ ID NO: 146694 - DNA, 334 bp, Glycine max
  unsure (1)..(334): unsure at all n locations
agccnctaaactatatacaagaatgaagctctgataccactagntagacaagaggcctcagatatcttaagaaaggggggttgaattaagatattacaaactattttcccaattaaaattctatttcactttctattcaaggtacaaattcccttaataatgaacttcttaaatattgattcaaatagaacaatctgaatataaatataaaaaaataataaataaaagagtttaaaggaagagaaagtgcaaactcggatttatactggttcggccacacccttgtgcctacatccagtccccaagcaacccgctagagagtccactatcttct

SEQ ID NO: 146695 - DNA, 345 bp, Glycine max
  unsure (1)..(345): unsure at all n locations
tgcttctacatgaagctccctggttagcaacactctcattgactccctgatgatgttggtgttgtggttggggttgttggatttgtctttgataaaaatgatggtgttaataaaagagtaagtgaagatgatgaattgtgtgatgctactaactctgcagcaatggggaatgatgcaaactcaaacagtggaacagaggatgacattcattcttcaactgacnttgaattctacttacaaagattagagagggccaagataatagtgaataaaccattaccacaagtcacaatatcgnctggatagctgccttgggagttctcttgctaaaaaggatgatacatc

SEQ ID NO: 146696 - DNA, 416 bp, Glycine max
agcttgcaagaagaaaaaagagctaggcaatgttctgtttattgttaattacatgggtttaaatatggcaacagcaatagggaccacaatgtaaaggcattttgactcaccttatccacatcatgactgtaattgtgaccgacaacgttgtaaatatcggaggagattgagttactgtttcgtcatgtttgttaatattgagataaatcgcaaataaataccatcgatacagtctccaattgcgatcggattgtagtcgcaaacacaattaaaaaatcttgaagttacgacccaaattacgggcatgaactcatgtttaaaaccttgacggccacatcaattacattttcccacaatagcccacagtataaatgttttcatattcattcaccgcaatggcaatttatacatcttaa

SEQ ID NO: 146697 - DNA, 460 bp, Glycine max
  unsure (1)..(460): unsure at all n locations
tatgctacaaacatttataatacacccgctcagtagcataacctacaatagcagaataattatgatctttcaagcaacagatacaatccaggttggaggaatcatccaaatctgagataggcaagtcctccacaacaacaatagcatgtccctcctttccagaatgttgttggtccaagcaagccatatgttcctcctctaatacagcagcaacaacaacaattgtcacaacaaagacaatcggcaactgaggctcctcctcaaccttccttagaagagatagtgagacaaatgaccatccagaatatgcaatttcagcaagagacaagagcctccattcaaagtctaacaaatcatatggggcagatggctactcagttgaaccaaactcaatcccaaaattttgacaaattgccttcacanactgtgcagaantccaaaaatctgagtgcaatcacct

SEQ ID NO: 146698 - DNA, 415 bp, Glycine max
  unsure (1)..(415): unsure at all n locations
agctntataagcccaggtctgggagacgattgtcttgtggncncgatatacgaagatgatgttccgagtacattggatttggtacgaccatgccctcctgatttccagctgggaaattggcgagtggaggaacgccccggcatttatgcaacaagcataatgtaaacctttacgggtttaaaagctctatagttgggcctaagctttagagtttttcctttagttaaagctttgagtcttttgtttttgaatttataatacaaagacctttcttcatctgttcctacgtctctacccattctcattcattagcatgtttacttctttatttctgaaacggaagatccgatgacgagtccctcgaaggtactaatacctgagacccgcttatcaactttgagcaagaaacgaatca

SEQ ID NO: 146699 - DNA, 476 bp, Glycine max
  unsure (1)..(476): unsure at all n locations
actaagcttgagggtaactagatgcctnggttaacctggtaacccatctggccatgaataanaaatttgcacctgtcgccagactctgtggtttatgctcctctatcgaccaccacacatacctttgcctttctgtgcaacaatctgaagcaattgaatagcctgaagcttatgctgcaaacatctacaacaaacctcctcaacttcaatagcaaaatcagccacaacagaataattatgacctctccagcaataggtacaatcccagatggaggaatcatcccaaccttagatgatcgaatccttcacaacagcagcagcaacaacaacagccttattttcaaaatgctgctggcccaagcagactatacgttcctccaccaatccagcagcaacaacagcaacatcctcagatatagcaaacagttgatgcccctccacaaccttcccttgaagaaactttgagggcaatgact

SEQ ID NO: 146700 - DNA, 384 bp, Glycine max
  unsure (1)..(384): unsure at all n locations
cgcctactcataaccttctgttcacatagtgatgcacagacttgtgtcatgatgctatgncagtggcaaggatagattatgcatgtataaggttatggtgggagagaaggtgaatctgcctgaagtcatcttctattactgggtgcaagaattcaaagacaaattcaaccctaaagtgaagaagaaccttatgtcttttgggatcttattcactcagataatgaggaacattggagtggatgtgtcaactatggaaccatctactggaacctcatagcttaaaggggtaaccttcatgaagatggaaattgctaataatttctatgatatgctctaaagcatattaagaagatagtccagaaggatcccaaggaccaaccacta

SEQ ID NO: 146701 - DNA, 353 bp, Glycine max
  unsure (1)..(353): unsure at all n locations
agctagntaaagcggaagatatgaaagcagtatctgtcgagatgaagatgaaagaaagccaaacatgtatgaattgaaagcctcggatttgaacacttaccggttgaagaccgaaagacgaaccaagaacagatgaagaacgacggaaaatcttcacaaaattgctcacagaaactgtagacaaaagatcaagctgaaagttttgatgatgccaaaagattacatgaatcacatgcttctcaaagatttactcaagacaaagcaattagagatattcaagatggatgatcaagacagtctatagagtctctgaaagggtatatttaataggaagggaattccaattgaagtag

SEQ ID NO: 146702 - DNA, 392 bp, Glycine max
  unsure (1)..(392): unsure at all n locations
nttgtcactccacccatatctggccatgacattaacctgacttaacaccactaacaacaatgtcaaggaattgttgtagcccagatacaaaggcttctttgaatcaattttcaatgtatcatacataggggcatatgcttgctgaaaagactcttgtccaagatcacgaatcatatcctctaagcgatgtcccatttctacatcaaatggtttagattgggaccccctctacatgtctatcaactgacaatgtcatatccacgctgtataattcttcttaatcccattacacaacatatgctcccgtatgttgtcgagtatttggtggctcttggtcaaacaatttatacaaggacaaaaaaattntccatccccattcagttgacttcttt

SEQ ID NO: 146703 - DNA, 309 bp, Glycine max
  unsure (1)..(309): unsure at all n locations
gctaagctccctcgcgcgggtctgggagacaaaggtgaagtgttctcgttatgcgaagatgatgctccgagtaccgtggatttggtacgaccgtgccctcctgatttccagctgggaaattggcgagtggaggaacgctccggcgtttactnacgagcattatgtaacctttacggttttaaagctttatagtgggccttgctttaatagtatcctttgggaagctttgagtctttgttttgaactataataaacgatctttcttatctgacctgtctctacccattctatcattgctgttactttttt

SEQ ID NO: 146704 - DNA, 308 bp, Glycine max
  unsure (1)..(308): unsure at all n locations
gaataccattcacaagaactgtccgaggcactttataacaggcaagattcactatccaagagaagtaacctggcaagttcattaagtagctactatttttaatatggcattaagcattaccatctgctgacgcatgaaacttaactgtcactttctacatctagttctgtttctgttcccagatgtggagactaatgtaggattctatttgcaagatggaatttaagacttttgatgatacagagaattatttagactttcacaggccaaaaagattattctatnctagatgaatatcgatgttgaca

SEQ ID NO: 146705 - DNA, 404 bp, Glycine max
  unsure (1)..(404): unsure at all n locations
agctctgcatataatagcttctctatgtatgagagtaacttgcttatgatagtnctttntttatccttttcgaagatggttatctttgagaaataattgtttctaagttctttcataaagttacaaaaatacaatattttctttaaaataatcttattaaaatatatgccaaaaaatattgaataaatctcttggacagtatgagagatctaaacaagtagcaataaagctggaccactagaatattatatatctagatttttattacttttctaaaatattataaatcaatacttcaaaccaatttaatatagttatcatagtaaatactacatcaccattagatgaaaataattattgtggtacatatttagtccaacttattgtaaacaacaattgattac

SEQ ID NO: 146706 - DNA, 412 bp, Glycine max
  unsure (1)..(412): unsure at all n locations
agctaggnatatccttcttcactacatcaagattcaccgggttgagtcttctttgaggctgtcttactggtttagctccatcctctaaatttattcgatgcatacatgtggatgggctaataccaggaatgtccgccagagtccagcctatagccttcttatgcttcttgagaacatacaacaacttctcctcttgctcatcagcaaaggaagcagatataatcactggaaaacttttgctatcatccaagtaagcgtattttaaatttgatggcataggcttcaattttggagtggtcagctggatagtggtagaaagagatagtttctcagcctgtacctcataaagaaagtcagaagtatgagtacttcctgaaacatggntagncctatctgactctataaaatcaat

SEQ ID NO: 146707 - DNA, 390 bp, Glycine max
ttgacttgagttatcaagagattataaatatgtggccatggcatgaatttcaataatcaatgatctatcatatctttcaatcaatctttcaatattttctttcatctctttcaacagattttttctgattcatcttctcttcatctttctaaaagtttttgttcaatactttttctttcaagaaaagttctttgataaaaaacttgtgttattcatctttttcattctcttctccctttgccaaaagaacgaaggactaaccgcctgaattcttttgtgtttctcttctcccttacaaaagattcaaaggactaaccgactgagaattcttttgattcttcccttcccctaaagcaaaagatttcaaaggactaaccgcctgagatatct

SEQ ID NO: 146708 - DNA, 396 bp, Glycine max
  unsure (1)..(396): unsure at all n locations
agctagaaagtaaaaagttgacacagtttcatgttnaaagntactgacatcctgctgctaatagacattagacgtagctttactcttagtaagaatattagaacaacacagcaaacaaaacactttctatgcattgagcaaatgtattcaaaaaataattatggattagaactaagttttcacaaatcttaagcaagcatcagtaacatctttacctgcagcactagaaagaacccaattgtcatcataaagaacttgccacacagcatagccaagtaacttattttcccttgcataagaaaccttcattntgacaacctcaacatcatcataacctatccaagtcgatccataggagaagtaattaactacataagtagcattggacttgacatg

SEQ ID NO: 146709 - DNA, 450 bp, Glycine max
tctccccctatttgctataaatagggggagaagtgtttttataagggttcagccccttaggcccttctctctctttcgaatttgctgaggaagattattttcgtgaagaaaatccaagcctaggcgcttctgtaacgttttcgtaacgtttccgtgagtaattacgcgaagattctcgaccgttcttcaaagattcatcgttcgttcttcgttttcttcagtcttcaacgggtaagtacctcaaaccaagcttttcaattcactctatgtacccgtggtggtccacattttggttcatgtatttttattctcgtgttcatttacttgttatacccccttttgacgtgcttaaggcatttatttaagtcatttctcgcttatctaaaataaaataatttcaccgacgttgaattgttcatcgtaatttgggtaaatgattccacgtcggcg

SEQ ID NO: 146710 - DNA, 418 bp, Glycine max
  unsure (1)..(418): unsure at all n locations
tcaatgtctcctaagataagagaacaaccaagaattcattgcttgaaaaaagcacaaattattcaagagaaaacaatcttagaactttaaattctgaatttgataatgttatcaaactntacctgagatttttttaaccaagcaaagcataagaatatgttaatatctgtcaacaaagtcggtacaagatgtaccttgatcaaccaacataatggtgataaagaagcagccaaagaattgttataaaccccttacccaagccaatatattaatatctcatcttaattacattattaatcatttttaattaaattgccagaataattaaaggtattttatggtggtgaaaatataaattaagtgggggatattctacggttttatgaccaaagaatattggtgtatgggaaccttggtt

SEQ ID NO: 146711 - DNA, 267 bp, Glycine max
  unsure (1)..(267): unsure at all n locations
agctaggagagtaaaacctattattnncactcattcttncatcatatagctaagcacttcaatttggcgtttcatcctaaataaaatttagctcaaaacgtgctccacttattaattcttgaatatctcaaaacttaagtaagatgagtgttattcctcgcaattataagaagaaaaggctttgcttctatctttctatttaggggttgcttttcaaagaatcctcccgatccattagatgcatgagtaatccttgtctcttcagta

SEQ ID NO: 146712 - DNA, 356 bp, Glycine max
  unsure (1)..(356): unsure at all n locations
tttcgacatttgattattatggagcctgattaatctttttgtaggtgtgantnctttactagcgggtctccttcacattgatgtctaacgccatcatactggttaatataaataaattatttcatatctttagttaaattaagtgaataaaagcaattatttagacgatctaaacaaaacataatctaattaaagacacttttcaaataacattcgaacatgaaaaatacgctgatttcatcttcnatcaatacattattttttcacaactaagtaatccaacacatctgaatttatagattattcctaccttaaccttatttcttagcttgtgatcaaatttgagtatatatata

SEQ ID NO: 146713 - DNA, 407 bp, Glycine max
  unsure (1)..(407): unsure at all n locations
agctntaacctcataggctctcacagnctttagatnaaggatccaatccaatccttgtgtccagactctcagccacttatgatagccgccgatgatcccattactgcttcccctaagctcactgtcctttcttcacgccgcatcccatgccttgcgaactccttggagtaccctcgcgttgaggtcactgaaaccccgagcgatgaaaagcgtgatgctttcgtctgatggcactcttctcatgggacatccttcgcatgaagatagaatcctgattcttccttccttctagtgagggaaccaattaacagacgcccctccatgctagccaagagtagagcccaattcgcctttcctttntcgacgcacgagcggagaccttgtagcggatagatgggcctaccttc

SEQ ID NO: 146714 - DNA, 389 bp, Glycine max
  unsure (1)..(389): unsure at all n locations
atggngacccggtgttgagtgatacattgatatgggctacgtgggagtacgtgagctcagttggaggtgggcaacaagggatggtgggtttatgcgcgctttgtggatgtggaaaacttgttgtgcaccatcgcccgaccgccacctagtaccacatgtgatgggtaccccataatcctacaagcttgagatgatgaagtgtagaagggtgaaacttcctgcttttattgttgaccacagagtggtacctggagatatgtcgcgggggttaggagacctctgggacgtcaggtggggtgctattgcccaataccaagcttgaccaatcccgacccaacccgggcatagtcggtcagtgagaacctgtgatgtacttaaacaggcgagct

SEQ ID NO: 146715 - DNA, 256 bp, Glycine max
ctgcactttgcaaacactgtcccttttaaaattgacctcccagacaaaatatctgctccaaagatagaattgtggaaccgtctcttgtgaataacttcctgctgtggacgttgtaggattcaaaagtcctctgaatgggacactacttgcctaaccttacttttttatagtatggagattataatacaaccgcctatattatcaactttcttcattgcgaggatctatcattattaaatgcaatatatagtaaatt

SEQ ID NO: 146716 - DNA, 314 bp, Glycine max
tcgaacattggtcagctagtaagaatttctggtattgttatacgttgttcagatgttaaaccattgatgaaagtggctgtatacacatgcgaggattgtggatttgaaatttaccaggtgattgatgaaatgactgcgtgaactgcacaattttgacactggagtttatgccaataaaagaactactgcatgatatttgcttggtgtgatttaaaaaaaaaggtccattacagtttttgaattttctctctgccaacacgatttgattgccaagatgttaaacttcaatatttaaaggattatgactatctatc

SEQ ID NO: 146717 - DNA, 423 bp, Glycine max
  unsure (1)..(423): unsure at all n locations
cacctgcagctgcagctagnnncctgctcatatgtgaaatctattccttgnatgatngcaaataggagacatctgtatgagaatgtgtgtgttggctttaggacttctaaaatcaactgtggatctgtggctttggtatctgaagatgcagagagaggatacaaaagttttcctagtgttctgatagaaatagaaataatttgcaaccacagtttctcgaattaaacagcatgcaaatcttatcactttatccacgtacatttttaggagcatattcatagaacaaagctggtctttgatagttgcgaaatattcagtcttggttggcttaataagcatttggntgaatcagaacctttttgttagttagatatatctcaatatctntagggttccttatttatgtacttatttaactcctct

SEQ ID NO: 146718 - DNA, 475 bp, Glycine max
  unsure (1)..(475): unsure at all n locations
ggctcactntnttntatgagagaatttggttagaggagttcttctcctaattccctctattgtttctgctaatgtatctcacctctcttctggttgagtaatacaagtatttgantttttgaaaaaatgtaattcttagtgaggctgaaagtagcatgtttgatatagtataataaatagtgttgtacaagaacaccaaacgtatttcccattactttgtgtggtttgccccggaagcatatggaatccgttctagctaatactgccatatttattttcgatacaaagctagtatcatttttatgaaccataatactcaatactagatacccagtacatatgtgaattatggcaattcacgtgttagtgtagttttggaaaaatcatactccgatccatgatggccacacattcattntaaacacggtccaacatttgttntggtatatgaattgtntaaatccttcataaatgt

SEQ ID NO: 146719 - DNA, 414 bp, Glycine max
  unsure (1)..(414): unsure at all n locations
agcttctagagaaagctacatgaagctgcctctgttaaaatgcttcccagcctttgttaaccggtggatcttctctaaatttggtctgcaacttcacaagacattttccatgatctgaccgtagggatctttcagaagatctctggagtgtgctagaagcctcttaatgaagcttctggaggaagcctcttaatgaagcttctagagaaagctacatgaagctgcctcggtagaaacgcttcccagccttcgntaaccgttggatcttcttgaaatttggtttgcaacttcacaagacacttctccatgatctgaccgttgggatctttgagaagatgtatggagggtgctagaagcttccgttcctgagagcatctcttatttaagcatttcagcctttgctttcgtgtagct

SEQ ID NO: 146720 - DNA, 477 bp, Glycine max
  unsure (1)..(477): unsure at all n locations
tcgataggtcattcccagagtaccaattcaaagtgatgttctctgtgctaacaaccaatgcataagaattggggtggacttggagaaggtccttancaagatcaattgaaatgaggcctgcactgcatcccattccaccaaggttgaggctctntatgttccctctaagcttataatgattgataatcattgccgaaagtgatggcgtggggcaaaagaggctgcaattcacaatcagaattccaatgtccttaggtttcacagaagtctttgcaaacagctcatctattgcaccaaacataacagcttcagcctcttttcttgcctctttcattgaggggttgggaggatcattgagaacagcctcangaaagtaagtgctttccccaaggccagccctctcaagaatctttcgctggaattcaagagtttcctctgtgaaaaaaccactctttcnggactggtccatgaatatct

SEQ ID NO: 146721 - DNA, 326 bp, Glycine max
  unsure (1)..(326): unsure at all n locations
gaccgaacattatgtctcgaaagaccatgaacatcattgttgataagntacgctctggagaggtattactattggatttctcattaattctttaaatacgttattgtgagaactgaaaagcctgctatatgctagttattggctcaataaatgaattaaactatactcctgtagtatgtgtctataagtagcttattctcatacaagattctgagattttatctgatttgccatagatgtatagaaggaatgtaacatgtctnttactttgctcacctattaaatagctgggagctcctggagagttcagtaaaaaatattctacc

SEQ ID NO: 146722 - DNA, 292 bp, Glycine max
aagtggtctttatatgggtttacaaaattcaacaagagtcaaaataatctagagagatttacacaaaatgtgcatgttaaaaaacattaaaaagtaaagattatcctttaacatacaaaagcaattgaatgaattgatagcaggcataaaaattaaaatgtgctagttaaaaaacattagaaaattaaagataatcctgtgcacatgcagcgtcaatggcagtgatattaccataatttggttggttatggatccgttagttagttacagtcttatggatgcacatgtgatt

SEQ ID NO: 146723 - DNA, 471 bp, Glycine max
  unsure (1)..(471): unsure at all n locations
tagagtntaaggtgaagtaattattgatttgaaaaanattgtatataattatttagactaaatattttgacattttttttataactttaaaaatttaacttttcgtacatttatatttgtttaaaaagtaagcctgttgtttattctctctggttacccaaaaagagcaagcacggacctactacatgttagctgaggggaaaagtgaagaataccctccctcctattcttcttttgatcattattgacgaggaaatttatttcatcaaaaagacaaaatctaagtatactaatataaataatattgagagtggtttttaattaaagtaaaaatttattttaataagatatattaacctctaatagtaatttttattagagaaaattagtgatacaattatagggtaaatcaattttatacttctaatttaatacaaatttatcatgttaataaattattaattttacaat

SEQ ID NO: 146724 - DNA, 427 bp, Glycine max
  unsure (1)..(427): unsure at all n locations
agctagatacctctatcatagacaatagagtttagactacctncatttaagccttcagcaccaattcgaattatatttctagatatacactaaaaaaaaagagtactttcaatgatcaaaatctgttagaaacctcaaaaatctatcgctaagtcaaaatttccgacagattttcgatggaccaaaatccgtcagaaaaatggtcgtaagaaattttaaccaacagattttaactatacgttggaaatttccgacaaatatttccatcgaaaatgctattttataaacaatgaggtatatcattaggttttttattttatcatttaccatcgataatttaacaattattgtgtgcatttatattatttaacgcncaaatttgaattaacacatacatgtaattgatgaaatgttcaaattcataaat

SEQ ID NO: 146725 - DNA, 447 bp, Glycine max
  unsure (1)..(447): unsure at all n locations
agttgcaatttgtgattgtaacttcagttgttgcaatctattattgcatatttgttgtctgatttgacatgctttgacttgcaaatcacattctcaattagcttacttttttaataaaaaaattacatgctactaaaatcactaatcaaaattacagtttgacttggtctacagttaattaaaaacagattcatcatgttaataataagttttgtaaataattcattttgaaaaaaatgtgtgcaaaagtgactcatatgagtcaatcagcccatatatactcacacatataaggagtttgttaatataaaacctctaggacccagactaaaccatgactgctgtaccttttagataacttttttcctgacatgtagataaaaaagataaataaatnttctagatttataaaatcatctctattgatcttctcaaattaggtaatat

SEQ ID NO: 146726 - DNA, 414 bp, Glycine max
  unsure (1)..(414): unsure at all n locations
agctagatacctctatcattgtcaattgtgtttagactaccttcatttaagccttcagcaccaattcgaattatatttctagatatacactaaaaaaaaagagtactttcaatgatcaaaatctgttagaaacctcaaaaatctatcgctaagtcaaaatttccgacggattttcgatggaccaaaatccgtcagaaaaatggtcgtaagaaattttaaccaacagattttaactatacgtaggaaatttccgacaaatatttccatcgaaaatgctattntataaacaatgaggtatatcattagctnttttattntatcatttaccatcgataatttaacaattattgtttgcatttatattacttaagcgtcaaatttgaattaacacatacatgtaattgatgaaatgtt

SEQ ID NO: 146727 - DNA, 466 bp, Glycine max
  unsure (1)..(466): unsure at all n locations
acacatgatactcagcttgaattgcaattgtgattgtaactacagttgttgctttctataattgcatatntgttgtctgatttgacatgcttngacttgcaaatcacattctcaattagcttacttttgtaataaaaaaattacatgctactaaaatcactaatcaaaattacagtttgacttggtctacagttaattaaaaacagattcatcatgttaataataagttttgtaaataattcattttgaaaaaaatgtgtgcaaaagtgactcatatgagtcaatcagcccatatatacacacacatataaagagtttgtaaatataaaacctctatgacccaaactaaaccatgactgctgtaaccttttagataaactntttntcctgaacatgtaagataacaaaagattaaattaaatttttctaaatgtctataaaaatgcattttcttattgaatccttc

SEQ ID NO: 146728 - DNA, 365 bp, Glycine max
  unsure (1)..(365): unsure at all n locations
agctnatgcacagaaaatgtaattatgattttgagatgcccgaagaaacaccatttcctagttaaccatgcattaagtaccatgttcaattattttgtttttaagagaaacgggtttatgatcccaacatggttggctcctaacacatgaaactaagaatgtagtgtgaagtttcacactccccccttctttgtttttggttggaagaggaaaacccaaggatgaccaaccatgaaaccaattggtttgcatttttgcaaaccaaaaagtttgtggaacgcatatgcataataatgccatgactcatgcaaaatgtgaggctggaatatgataacggacaaatgcaagatatgtccattataatg

SEQ ID NO: 146729 - DNA, 444 bp, Glycine max
  unsure (1)..(444): unsure at all n locations
gaccatagatactaagctttgagaattcnatggtcattactttgcactctgagttcttatccangcgcataatatatcgagacgctcgatattgaacaacgaatgctctctataaattcacatggtcataacttttcactcagaggtccgattctggcgcataatatatcgagacgctcgaaattgaacaacggaagctctcgtgaaattcaaatggtcatgactnttcactcggaggtccgattcaggcgcattatatatcgagacactcgatattgaacaacgaaagctctcgagaaattcaaatggtcataacttttcactcggatgttcgattcatgcgcataatatatcgagacacttgaaattgtacaacggatgctctttggaaattcaattggtcatcacttttcactcagaggttcgatcgggcgcataatatat

SEQ ID NO: 146730 - DNA, 410 bp, Glycine max
  unsure (1)..(410): unsure at all n locations
agctnttactctctggtaatcgattacctgatgatgtnatcgatnaccagtggccaaatacgttttataacagctataaaaatttgaattcgaaattttaaaagctgtaatcgattacacaattgtggtaatcgattaccagcagttagtaaacgttttaattcaaattttaaaagctgtaatcgattacacaattgctgtaatcgattaccagacaagaatttcagaaaaataatttcaagagtcacaacttttcaaaagctttactcatgaccaccaatggtctatatatatgtgacttaaacatgaaattgctcagagattttcagaacaacaaagagtttatcctctcaaaaagcaatttcattttatcctcttaaagaattccttggccaattcaatagcaattc

SEQ ID NO: 146731 - DNA, 352 bp, Glycine max
  unsure (1)..(352): unsure at all n locations
tgagatgaggaagtgttgaagggtgaaacttcctgcttttattgttgaccacagagtggtacctggagatatgtcgcgggggtcaggagaccttggggacgtcaggtggggtgctattgcccaaaaccaagcttgaccaatcccgacccaacccgggcatagtcggtcagtgagaacctgtgatgtacctaagcaagcgagctcctggcagtcaacagataaaaggaaaacaagaccacaaagtaaggaggcttgtggtggctggccagctgtgaatnttgtgtaatatgtggatggtggcctctggtaatcgattactaagggtggggtatcgattaccaggcttaaaaat

SEQ ID NO: 146732 - DNA, 412 bp, Glycine max
gaagaattcttattctgtgacagattcttttactcatagagctgcttatggagaaacgttatatattttggatcctaacagaaagtctgaagccgtcaatttgatcgaagggtcaccaaataatatcgtgccaacgtaatgttcttacaccacctctagtttcatgctattaatcattaacacaacattgtgtcatgtttttaaactggtacaccactctcatgcatgggatgcacacctggtatggaatttgaaatttactatatgatactttaacatggttgacatgtctaagattctattacattgtgactgtcttgctaaaagctaactgaatttttgcctttctaaataatatagggcttgtactttattccccctgattaataaaatgaacatgagaatttgctaa

SEQ ID NO: 146733 - DNA, 420 bp, Glycine max
  unsure (1)..(420): unsure at all n locations
agctncacatgacaatctggcattatgctcttcttttctaaagctntagagacataagcttctttgtaataaacgtgcattaaagtagagaaagtatcaacaattggaataatttgcatctcaagcatcaaatcaagaacccaaatagcattgtcaatcttctttgaatttgcaagccctctaacaataagactcacaacaacattgagggagttgatgccaagagttttcatttcatcttgaaatttcaatagctccttttatgtttctaactctacacatgccattgattaaagagatatattagttatttgtaagaacataaccacttttcgacaagacttgcaaaacacaatgggctntatcaaaatcactagttctaatgagtccatcaaacatggcattctatgtatcaacact

SEQ ID NO: 146734 - DNA, 373 bp, Glycine max
atttcttagcagagaatagacaatatgatcttaagtgtatcatccaatgatttagtagagtttcgcttcaaagattttgctaatctcttctatatttttccctgttatgcttttgagtagagactgtcttttatagacttaagagaaggatccattataggattagcactgaatcttgatatggttgttgtctcgcatgtgggggcgagacaacgtgacacgctttgatttgagaggaaatgaacaaaatgtcagacaacaacatatgcttctctttcgcgtcaaaacgacttctacggaattttctgtgaataccctctattctcttctataatggcaatttcttaaattcaaatgttagaaattaaaataa

SEQ ID NO: 146735 - DNA, 389 bp, Glycine max
  unsure (1)..(389): unsure at all n locations
agctntagcatgtgtagagatttctatagtgagaaaaggccaagntccagagagttttgagagcttttgccatgcgaagattggcagataactaagcatgaagaggaagccatcctaaaatcatgagatgagtctgtgagtgattgggaagttctagaggtggaggagacatccccactacttgtatttcttcaatccttcattttgctcttctcttttttgtgaaggaagcttcctagatatggagagctaaatcctctgttggttattccttgtaagtactagatgtaaatacctgtatatctatttaatgatgtttcatgttttctctatgctatcagnacatcattttagtgagcttttgccttgatcacgtagatgcatgcttt

SEQ ID NO: 146736 - DNA, 386 bp, Glycine max
  unsure (1)..(386): unsure at all n locations
ntataagtgcgggttcaggagacaaaggtctagcgttctctatatgcgaagatgatattccgagtactttggaattggtacgaccatgccctcctgatttccagctgggaaattggcgagtggaggaacgccccggcatttacgcaacaagcataatgtaaacctttacggttttaaaagctctatagttgggcctaggctttagagttttcattttgttaaggctttgtgtcttttgtttttgaatttataatacaaggatctttcttcatctgttcctggtctctacccattctcattcatttgcatgtttacttctttttctgaaacggcagatccgatgacgagtcccccgaaggtactaatacctgggacccgtctatcga

SEQ ID NO: 146737 - DNA, 397 bp, Glycine max
actaccctgaagacatgccaagtgtgactattgatgtgtatatggggagcaagcaaatgctcacctccccttaaaattaattggatgagcttctcccaattcaattaaatttattttccaacacacacatcaaatattaacttaatgcatatgaaattacaaaactacccctaatctaaaaactagtctatgtgccccaaaatacaagggctgaaaaatcatacatttgtagggtaccctacctacgttatggagccctaaataaaaggcccaaaaataatgaaaccttaatctaatatgtactaaaataaattggcttacacttaaccccatggccctaaatctatctaaaggtcatgagaaccctatggtcttctcttgcatctctacccaatct

SEQ ID NO: 146738 - DNA, 228 bp, Glycine max
  unsure (1)..(228): unsure at all n locations
agctaggccaacaagcttaagcctttactccaattatgcatcncccctgaacaatcatcctttggtgaaggtagatcaatccttaacaatgaactcattccatttgaattttttcatcacatgaaatgccaaacaaaaaggaaaactggagaaaaaggcttgaaaatagacatcagtaaagcctctgacatggtttagtgggatcatataaagttgcgaaaaaaatgg

SEQ ID NO: 146739 - DNA, 440 bp, Glycine max
  unsure (1)..(440): unsure at all n locations
ngccgctggagctgacccattaactgccctaactctnttatactggtggtccctaggctcttgaccttaacttgatagaacctctttntaagcgaaggcatttgacttgatcctatgttttactaaagtgaacaaaaataggcgcgaatcaaaactccaacatctatcatgggtggaatggatgaatgcatgcggaaatatgacacaaattcaatttatgaacacgggagcccgggaaattgtctccttcttagatacaacatcttggggtagcaaagtgcctgacgtatgtattaaagaaggtgactcggaccgtccgttggttttccaatgtgcgtgatgcatatgcaaaaggcgcaacacgggaatgtacagtatgacaatattcacaaaatataagccaaatggtacgtgacacttatgcatggcagtgtgaaaaa

SEQ ID NO: 146740 - DNA, 394 bp, Glycine max
  unsure (1)..(394): unsure at all n locations
agctagaacttctggctgtgcaatactagtgaattattgnggcncaatanaacttaaataatcctccaaagttactcttcttggctcttcaaccatgatagtatcttcaactggttctatatgagaatgccctgcaatagaaaaaactataagatgcctcggaagatcgaggttcttcttctggagtagctgttgcttctaaatcctgcaaaaaaaaatagattctctctgaattatgccttctacaggaggcgttaatctccaaatcaacgggaatcaaatcacctgcagtagatcttctttgcatacaagataactgaacaaaaattatccaggncacaagatcaatgaatatacgataactaanatatgaacaataggattcattgaatta

SEQ ID NO: 146741 - DNA, 467 bp, Glycine max
  unsure (1)..(467): unsure at all n locations
ctatgactctnggcaatntctntaanactagtcacttattatatttgtgactnttgaaagaatcttcaaaaacaagtcacttgaagaattgtaacttttggaaatgtatttttcgaaatcggtcactggtaattgattaccattaaggtgtaatcaattacacatcaatagatgtgactcttcattttgaattttgaaaattgaaacattcagaaacactgttaatcgatttcaagttttgtgcaatcgattacacaagtttaaaatgatttaaaactgttgaaatttgaaatctaacgttttaaaaacactggtaatcgattactagagagtaaaactctntggtaatgattttgtgaaaacttcttgtgctaatcaatgttntgaaaaactnttttagtacttatcttgattgagtcttctcttgattgttgaatcttgtgtcttgaactngatcttgttattcg

SEQ ID NO: 146742 - DNA, 383 bp, Glycine max
  unsure (1)..(383): unsure at all n locations
agcttnagataatgttactactgttggcgttgttctttgttatcnaaccagaacaagatgggtcttggaaagatgaagtgttccagaaagatgaacccaaatcttgtgggttgcaccatcattctttgcaagttagcattttagagttgaagcatgggctactaaaaagttcagaaaaaattcttaaagttaaaaaggatgaaagcgtggaagcacaatcctttgaaatcaagatcaagaaaatcattgaaggaattaaagagatcaaaccaatgttacaattgttgatccagaaaaatggcatcaatgttgagtccaaataagatgagaaataacccatgcaagtagtatcaattttgctgccatggtgtgggtaataaagt

SEQ ID NO: 146743 - DNA, 296 bp, Glycine max
  unsure (1)..(296): unsure at all n locations
tctccgatatcttntaggatcaaaataatgctccctctaatagggtagcaatttttgatttggatccatgggactatcaattggtctacaatttgacatatcagtttcttttttttttttgctcagcacataccagtttctttaagtatgtctaacgcatactttctttgtgagatgataatcccatctcttgactgaacaacgttcattccaagaaaatatttaagttttcccacattcttagtctgaaaatgacttaataaatggtccttcaggtgaacaattttttcttggtc

SEQ ID NO: 146744 - DNA, 423 bp, Glycine max
  unsure (1)..(423): unsure at all n locations
agcttctatataagctgaaccatcttatcaatattctcaagnngagnnnnattcagaaaattagagtttatctcttttatcttagagagagagattctcctaaattcttgagagattcaagaacaccttggctgtatcaaaggactttcacaacctttgagagtagccctcgctggaaagatagattctttccttcctttcatcatcacccttgttctttcaaaccacaattccagaaaatccacctctgcccagaattatcttgaggccataactcccattttacgcactcaaattaagtgattcttgagcctaaattgaatttcaaaacgagaaatttcacctcgttttggaatcacctcatttggagccctgtagcttcagttattgccatttctatatttctagccagccaccacttaa

SEQ ID NO: 146745 - DNA, 334 bp, Glycine max
  unsure (1)..(334): unsure at all n locations
ntaagaaaattcatacgacaataactgtttactcggatttctgattgagtcccgtaatataacgagacgctcgaaattgaatgtttaagctttgagccaattctaacaacaataaatttttactcggatgaccgattgagtcccgtaatatatcgagacgctcgaaattgaatgttaaagctctgagccaattcaaacgacactaactttttactcggatgtccgattcagtgacgtaatatatcgggacgctcgaaattgaatggtgaacctctgagccaattcaaacgacaataactttatactcggatgtctgggtgagtcccataatata

SEQ ID NO: 146746 - DNA, 287 bp, Glycine max
cccttgcttacctttctctctccctttaacttatggcattcccggaaatgcgttatagacagaatcgtgcctagagacatctacactgcgtagtgtggcagaacatccattgtcactcaatcgaatcatgcctctgccctcgtagtagaacccttaggtttatccctgaacataatactctgtaatcccatggatacctgaatacaatttccttctctactctgcctcccgctatcaaattagtgctcctacatactattatcccccaacacgccactttctttttt

SEQ ID NO: 146747 - DNA, 413 bp, Glycine max
  unsure (1)..(413): unsure at all n locations
agctcatnatgtctcaaatgggaagctcttattccaccagaagattnntggnattctcactacagatggaaacatacaattcagttccacaataaatttcagataagagaatgcacttaattgaaaagaacaaataggaagaataagtcattactgaatgtgataaggaaatgtgtcccaagaaatgtttatcatctcccaaagaataattcttctcataaactcttttttaaacttatcccttcttgtcaaaaatggagattctctccttttactttctatagaaagcttctcattattaagccattcctcttgttccagttctcctagtcgagcatgtgaattgctgtacttgacatctttcccaaacttgtcttgattccgtccttctataaaaatagctccatcattaa

SEQ ID NO: 146748 - DNA, 439 bp, Glycine max
  unsure (1)..(439): unsure at all n locations
tctngatgacaggaagcatggactgtggagcgtcttttttttaatgtgatagtatcgctatggacaagcacatgatcagaaagacatcatcaataataaatatagcacaaattatggttgatttaatgatattatcccatatatgatgtttacctaaaattgaagttaattgaatacatatataaatgtcataattagaattttttataaaagaaaaacagaaaaatagacagcataatagaaaacgggataaagttggagcataacctgcagtgagtccaggaatagggaatattggtgacattggcatgtaatgccttttggacttctggcctatttaggtacacttcagtgtatacggatgcacaaagatcatatcatctggtttctgtcccccattctgttcaaacaaatggttacatcatgactagtctagact

SEQ ID NO: 146749 - DNA, 373 bp, Glycine max
agcttaccttaagtcgaaaagaaattagtcccaacagttaagcgagactgaaaggaatatgtgggccgtcatcgatgagagcaaagagaagctaaatctagcggcgactcacgagcaaaggctagatgatgagtacgccaagatatcagcagaaagcgaagcaaaggagatggtaattgattcatggcaccaagaggcaacaatgtggatggaccgatttgctcttactttgaacaggagtcaagaacttccccgattgctagccaaagccaaagcaatggcggacacctactccgcccccaagaagatccacggacttctcagctattgtcaacatatgatagactttatggaccatatgattagataccgc

SEQ ID NO: 146750 - DNA, 425 bp, Glycine max
  unsure (1)..(425): unsure at all n locations
taaacattcactntcgagcctcacgattattactgtactcaatcaaacatccgagaaaaaagttattgtcgtttgaatttgctcagaggttcaacattcaatttcgagcgtctcgatatgttttgggactcaatcagatatccgagtaaaaagttattgtcgtttgaattgactcagagcttcaacattcaatttcgagcgtctcgatatatgacgggactcaatcagacatccgagtaaaaagttattgtcgtttcaattggctcagaggttcaacattcaatatcgagggtctcgatatattacgggactcaatcagacatccgagtaaaaagttattgtcgtttgaataggctcanggcttcaacattcaatttcgagggtctcgatatatacgggactcattcgacatccgagaaaaagta

SEQ ID NO: 146751 - DNA, 346 bp, Glycine max
  unsure (1)..(346): unsure at all n locations
acatttattctcggncttcataaattaaattttataggaaatagaaccactgtagtcttgattgctttcttgttaatttatatgattattgnaagctcggctgtggggtttcgataggatagtctccttaaactcactgatacacgagccagaaacaacaagatgactcttatgcattatctttgtaaagtaaacgacctggtctccttaaatttcaatattaattgcttctgtacaaagagtctagttcctcctttgtgtacaaattagacagaaaatgatactgctttctgaaaacatcttcctctcttantatatattgactgcctgattggggaaatgccgc

SEQ ID NO: 146752 - DNA, 218 bp, Glycine max
  unsure (1)..(218): unsure at all n locations
agctnccatcaagagagatatagagcacaatatcttcnngnngngctccttanacctccattaattntctntctttaccttctcttccatagnngnctcttcatttntctacatggatctcctcacatgtcttgttctaaatgttgttaacatgattctttagagtttncaccgagcaaactagctatagaaactagatatagatctttatgattcaa

SEQ ID NO: 146753 - DNA, 367 bp, Glycine max
  unsure (1)..(367): unsure at all n locations
nagctagctagtggagcttctatggaatgcttatctttgagcttcaatgggagcctttaatggagattttccaccatggagatgcagcggaagacaaatgaaaatatgtgagaagaagcgccatccattaaagaataagccatggaataaagatcttcaccaccaagatgagccttggataagaagcttggagaggatgcttccctggaggaaaataaagatggagagaaagagagagggggggagcncnatattgaaggaataaaagatgtatagaagtggaactttgaagtatgtctcacaagactctcattcatcaaagntacaacaagtgttacacatgcttctatttatagactaagtagct

SEQ ID NO: 146754 - DNA, 468 bp, Glycine max
  unsure (1)..(468): unsure at all n locations
tatgcgcatatttccttacagatgttctcttgtctagtcattctattaaccgaaaaaatgcacccatatacaatcaaggcagctccgttacctagattatttacacgtacttccaaggtgtatttgttacttacatcacacacatctccttggctaaattcacatacatgcatactcaaagcattntggattaccaaaaattgcacatgtacacctcttggtatttctaatacctatacatacacaaactntatgatgaatcttgactatctacacaataaggtgctacatttcatgctctnttcaatntttgctacctaaagccgcatgcaaattccagtatattttcctttgctgactaaaattgtattcanattataaggtatacatttttttggtaatgtatcttctttacataacatgcaacatatttatgtatatttttttgtgagaacatttgactaccaa

SEQ ID NO: 146755 - DNA, 325 bp, Glycine max
  unsure (1)..(325): unsure at all n locations
agctagnagggggttagagttgatgtaaatatatatggngacggagctgagttagttgattgtgttgagttagtctttttattgcttggagcagntaggttttttttggacaaaaataaggtttttttggatagaagtaaggttttttggacagtagttaaggtcatttgcttcctggtcttttggagcgttagaaaagttttagatttttcctttttaccatttgatacagctgaagccttactagaggttggaatattttttcccttatcatgctatgattgtagcccatgttttctatagttatttgactgacaaattaaaa

SEQ ID NO: 146756 - DNA, 393 bp, Glycine max
  unsure (1)..(393): unsure at all n locations
ntgacacatggcactggtcttgctagtgtcactatcgatttgaggggcacgggactcaccagtttgactgacgagttgagctaagggaggtcttccatgcaatctagggttgcatggacgcgttgcatgagaagcaactntttcatgttggaatagccaatggaattggctaattgcactgtatttggaattgccagtaccactggcgagttgcccttggagtagtcattaccaatggcgagatcatcagctttaaataggcactctccttccacatttgctgtgcgtattttaaaaattactcaatctatttgaattgcttgctatccggatttagtcattgctgaaccttttgtttatgaagtcagccttcacggatgaagttcttaatga

SEQ ID NO: 146757 - DNA, 363 bp, Glycine max
  unsure (1)..(363): unsure at all n locations
agcccaagagaggggattatttatctcaactcttccnatnnaaccaaagagatnntttaaaaagcctaagcttatcttttttattaaacatgtcagctaagccataagtccctctcaacgaccaagtctcttctcatccctacttggaagcaaatattatgtattatttttgcttttaagctgaaagattattattaaagntgaataggtatcattcaagtattattcaatattaaattcagggtttagagctctaatttatttttttagattcaattaggtcttttatttttttttaggtcaatctaatcttctaattntttaaatagattcaattagattctttagcctaaataggaaaaa

SEQ ID NO: 146758 - DNA, 347 bp, Glycine max
  unsure (1)..(347): unsure at all n locations
tcgaatctcttngaacttcttcttcttctttgtaccaatatgctnncngaagatntgagggtgtctaaaccttgaaaacttgtgctattcatcttttcattctcttctccctttgccacaaagaactcgccaaggactaaccgcctgaattctttttgtgtcgtccttctccctttgccaaatagaattcgccaaggactaaccacctgaattctttgtgggtctctcttcttcctttccgaaagaacaaaggactaaccgcctgaattctttgtgtctcccttgtcaaagaattcaaaacgacacaagctgagaatttgtttatatcttcctttccctaatacaaa

SEQ ID NO: 146759 - DNA, 368 bp, Glycine max
  unsure (1)..(368): unsure at all n locations
gtctccagaccaattttctttaaagtataacaaagtaacgaaattgtacacaattagaaaaatatgaattttacaatttcagntaaaataaaaaaataacattagcatccatttcaacctttgaactaattcattaacaaaagaataatttaccttaaaatgctagaaaaaaagttcttgatgttcttttggaatcgctccccatgtaggccaaagctgaccaaattgtttcctaatggacaaagtgacagcctttgccacaaccttagatggatgaaacctaaatataaaaaatgattaatgaaaacagnaaaatccatcttatgtatcatatataatgatagntatataaattttggaatacttac

SEQ ID NO: 146760 - DNA, 470 bp, Glycine max
  unsure (1)..(470): unsure at all n locations
tccgatatgaaataagcgcatatacataaaagagtaatagacaaatcggaagcagagtaaacaaaaataccatacttgagtgttctcaaaaagtgaatgaggcttttagatgaggaatcatttgttggattgatatataacccaacaaatttattggaaagatggagcatttatgataacagtatatgcacacgaaacgttgagaatccaaagtgcacaggaacacatgtagactccaagcattcatttcatttatgaactttggatatgtagaatcattgtcggatgataaggttactcggattgggtgcaattntaggtggaaaaaattacctcagacttaactcactttgatattgttttctaatattatatgaatatattatatcaaattgtagtaagattaatagttagtatgtgaattgcgtcgtcttaattgcaaagcgtgagaagaagaaatgacacaagtg

SEQ ID NO: 146761 - DNA, 418 bp, Glycine max
  unsure (1)..(418): unsure at all n locations
agcttntagattagagtaccaaacaaccgttgtttctttctagctaactaggaaaaagagtattaacaacttttcatccctagagagtgcccccatcttgagacaatacatcttgagatggttcttatgacaagtcgtccctttatacttgtcaaaatcaggcactttgaattttggggggatgacgacatccgataccaagcaaagatttgtcatgtccacgaacggatagtcaccaaagccttcaacagccctcaatctcgcttcgaggagatcgagtttccttctttcttcagncgccgggggtgagccttctgaggataagaatattggttgagtagagaaggtgggtgtcggcccctcgatggggatcgaggggtagaactcnacatccncttgagcatactcctgatggtct

SEQ ID NO: 146762 - DNA, 495 bp, Glycine max
aggacctatgaaactaagcctgtgggttaaagtctcacgattgtcacgtgttgatgcaacatttgttagccatggctttgcgagacatcttgccaaacaaagtcaggttagccataactcacctgtgctttttcttccatgccatatgtagcaaagtcgttgatcctgtcaagtttgatgagctggaaaataaggccacaattatactgtgccagttggagatatattttccccctgctttctttgacatcatgactcacttgattgtgcatctggtcaaagaaatcgaatgttgtggtcttgtttatttgcggtggatgtacccggttgagtgatacatgaagatcttaaaagggtatacaaagaatctatatcgtctagaagcatctattgttgagaggtacattgcagaaaagccattgtaatttgttcagaatacgttgagaaggctaaacctgttggccttcctaagtctcgacatgatgacagagtggg

SEQ ID NO: 146763 - DNA, 219 bp, Glycine max
  unsure (1)..(219): unsure at all n locations
gatatataactcnncacctgctttgattgctaatgctactatggncaaattgaacaattaanccgatttaggtaaccataatggctgttttaaattccttaccagggggagatcacactaaacttacctaccttaacacaatttcggtactttccattggataatcgacctctaaaaggtatcaactcccccacttagaattggaggagatttaacaca

SEQ ID NO: 146764 - DNA, 430 bp, Glycine max
  unsure (1)..(430): unsure at all n locations
aactcaagcttctgttccagtgtcagtntataagaatgtagcaaagacttaatgcttttcaatgttgtatcctccagtagctcggtaattaccacagatgcacatttcagaaggttttcattacttacaaaaatccaaaaacatgtgatcttgagaacacactctgtacattccttgtacacttgatatgcctgatgaggatacagtgagcatactttaacagccttaattacgtaaaatctcacaggcacaaatatccttttatctccagttacacaatggcttcttcattgaggagacacaacctgggccgcacatttcaaagctccggttaatgcaagcatggtacacttatttgctcgtcaactttgtaaaatgccacccaatttgacgcaaaaacattcctttcagaactttaaaattgctgatt

SEQ ID NO: 146765 - DNA, 223 bp, Glycine max
  unsure (1)..(223): unsure at all n locations
aaccacaccaagtgaattcactgtctcatgctgnataattctttcgcctagtagatttacaagccgttctttgtacagaatatcttcccattatttttttgccttccatgaatagggagagcatcaccataacatccttaagtcaccccatttggttntaagtcctaacatcatgtcacataatactgggggcctatgaattccctggattaggatcaatata

SEQ ID NO: 146766 - DNA, 267 bp, Glycine max
  unsure (1)..(267): unsure at all n locations
tactaagcttcacagtgggagttcgatatgatgaagactntagacttgtgngataccttgcaaagtgctcgaaattcctngcatgataatattttgcaagctttcatgagacgaacgaagattaaataaagaatttatgcctattggtcctagagtcaacgagcttggtgttcttcgaacaagactacatagagtcagaggtcttgtgaatggaataaatatgggcttaggagcttttatgggttctgacccaaatcaaatcaaatg

SEQ ID NO: 146767 - DNA, 367 bp, Glycine max
  unsure (1)..(367): unsure at all n locations
agcttacccttatggctagcctcctgacttctctccccgagccgntccggaatatgtgagccaagcccctaccttcgaggggcaacttcctccttatgccgattaccctatgcaagaagacgacgaagaagatacccatctaagccctctgcttcccctcaaagatccatccccccatgaattacctcaaccaaatatagtccgccatgtcccatcttcacccgcacccagaaaagaatctgttcccttcacataagataaaggaaagattgatgcgcttgaagagaggctaagagcagtggaaggcctcggcaattacccgttctcagatttagcggacctatgtctcgtgcctaacatcagcatc

SEQ ID NO: 146768 - DNA, 399 bp, Glycine max
  unsure (1)..(399): unsure at all n locations
ntcaacaagagtcttcacaaatgactatcatgaatctgttaactaacaaaactacccatcatgtctcccaaaaccccatacccacgaaaatcaaaggagaaagaagtccacccaaacctgaaattttgaagtcccactcgtagacacgcacttcacgaaccccgaaaagccctcctttcacgatttggggcagaaatgatggccaaaggttggaactttgtttggagcttcaatggagaacgaagaagaagagaatgacaacatgagggagagagagagctgtctganattgtgctgagtgaggagagagagagtctttntagttttaaaaggggttttccctcttntattaataaatttattaagctatgccacatgtcttcatttgagtggagcaag

SEQ ID NO: 146769 - DNA, 292 bp, Glycine max
  unsure (1)..(292): unsure at all n locations
agcttatgattatatttattttctcatcactgcatcnaaanccctatncaaaacaaaatcatcttatggagtgcttgatagacaagacatccgatggacgacgagaaaattagaagatnaaatatattatgagactcatatctcttaccttctactctaagttaaaatctatttttgtatttattnccatcttctttaccatatagacttttaaggttcaaactttcacataacatatgatcgaggggaccaatatcgcttaccctagacacttgaacattgaatgaatttt

SEQ ID NO: 146770 - DNA, 417 bp, Glycine max
  unsure (1)..(417): unsure at all n locations
tctagagagttctacactactctagagttctccatgactttctaganagatttacactcttctagtctctccaattaaggagggatcccaacaaatctccccctcccgacttaattgggaggtagtagcaaaccggcaccttgacagcaatcttcaaatgtctttgtcggtagtactttggtcatcatgtctgatcagttctcgtttgtgtgaaccttgtcaagatgtactttcttttcctcgaggacatctcggatccaatgataccttatgccaatgtgctttgtatgggaatgaaatgttgagttccttgctcagtaaattgaactttaattatcgcacttcaacacatacctatcttgatctatgtccagctcctgcaacatgttctttatccacaacattcncttgcaagct

SEQ ID NO: 146771 - DNA, 336 bp, Glycine max
  unsure (1)..(336): unsure at all n locations
agcttccatcaagagagaatcagagcaccttatcttcaagnaagagctccttaaacctccattaattttttgctttaccttctcttccattggagnttcttcaatttatctccttgnatctcctcacatgtcttgagctaaatgttgntaacacgattctttagagtttccactgattaaacttgctatagaagctagatttgattttctatggntcaaatttcttgttcttgttcttgaaccacgaattgagttgagtttaagttcctttgagttttgtcttgttattttttgaggctgaaacctaaaccataaaattcttacaaaaatattaaa

SEQ ID NO: 146772 - DNA, 466 bp, Glycine max
taagataaagcttaacaaacttagaaatcaagtggtcatttattcataaatatacggggagtaaacgcacattttatctatatacaattgtttgttgcttgcttgaatcttgatttcaggtattgtattgtcatcatcaaagggggagattgtagatgcaattgcctttggtgttttgatgatgatcatgatgatatgatgaaattgatgcaaatgggcttttcaagattaaattcaagacaatacttcaagattacaagtcacaacatcaagataatcactagtaaattaggaagggaattcctaattaaattagcaaaaggtttggccaagtaatttaaattaaaaagtgtttttcaaaggttgtactctctggtaatcgattaccaaaggatgtaatcgattaccagtggccaaatatattttataacagctactgaaatttgaattcgaaattttagactgt

SEQ ID NO: 146773 - DNA, 199 bp, Glycine max
  unsure (1)..(199): unsure at all n locations
taaatactcagcttgtaggatgcttcantggaggaaaagagagagggttatattgagagaggcgggagctcgaaactgaatgataatagagggatagaagtggaactttgatgaatgagagtgatgcaagctccattggatcttgtgcgcctacgatcttcttcatcaatggattcctttgcttcttggaagataaatg

SEQ ID NO: 146774 - DNA, 395 bp, Glycine max
  unsure (1)..(395): unsure at all n locations
agcttcataggnttccttgcaagcattcctttgtttctaaaacagncnntgctcatctttgtactcgcaatcaccaggtaagttttggttgagctaattttgntaacttttcttagttataacttcccttaaactgagcttttaacttcccttagttggtcgcaacctacatttgctctatataggaaagctatagttagactgtttgaagcttcagataccctgagactaagttcaagccttttgatttgcactatatcagaagagagttaacctattggcagntacccctttgttcttagagattattatttgagttgncgctgatgaagcttcgttgatgtagctctaagagatgtacttgctatttctttcatccataaaaagaacattgc

SEQ ID NO: 146775 - DNA, 403 bp, Glycine max
  unsure (1)..(403): unsure at all n locations
gctgagaataatcatcttgtgtataagccacgtatatttgttgttatagaagttnctatcacaatcaagtgattagtgacgtctccatatgtgtgtacaccatggtcatgtattcgttcctagaattcatttggaatatttgctgttgattctgcatgagtgatccctcttgtgttaaaaattattggctcctaatcaatccagtgttcatcttatattgggttgttatcttccaatcatgtcttgttaaactgcttgataacatgcattgatgctcttctgttatgaatagagacagaattcagccttgaccatcacgttaaggagttctagaagaaatcttgagaggcatgatccctgtacctgttaacagagtcaacttattaagtctgacctatgttcc

SEQ ID NO: 146776 - DNA, 237 bp, Glycine max
  unsure (1)..(237): unsure at all n locations
tatcgggacaaattgagattaccaatcttaaaaaatcctcatgctatttaagcctagtggttgaaagncgntnttatcctaggagcctttatttatttcttatgagacataaagccttaactaatagtatattttcaaccagatagcctatgggtatgattttaatttgacctttaaatttctccaattcctttttaaaagagaaccttttttaaacttcaatggtagattttacct

SEQ ID NO: 146777 - DNA, 392 bp, Glycine max
  unsure (1)..(392): unsure at all n locations
ntaataaagaaggaagggtaaaggatttctgcaccacatcctcatacaaatattttaggagcaaactaaacaagttcttcagatgaaagaggatgcactaattggtctgaatgatggcttgtatatacattatcagttctagctagagctnttgttctctagtgttactaatttgaaggaaaatgaagttgaaagggagagggaatgagggatgggaggagagagagagagagatgtttgaatctatagactaattctagggctcaacttccatatatatcactggttttttttatatttcccttcctttatataagtaaactataatgtcaaattataaagaaattaatttattatgtacacaaaaagggaaaacaattagtaagcatttg

SEQ ID NO: 146778 - DNA, 366 bp, Glycine max
  unsure (1)..(366): unsure at all n locations
agcngaagagaggggaccatgccttctctcgcccnacgngnatgtagctcgctaagcgagatggttgtctcttctgcgctaagcgcgagatagccgctaagccaaatctcacttactcgcacttagcgcgagaaaggcattaaacgcgccttcatggacaagaagccctttcttaagcctgacttacagaaaatgaaagggagggctggaacagatcgctgaatacccgccagagtttgaagagcgaaatacacaaaggccaataacagagcaaaagagcccagctttgatcttttaagaagatttgcgagtttttgagtgattgtgagattcctagaagtggaggagacatcctcactcctttgt

SEQ ID NO: 146779 - DNA, 375 bp, Glycine max
  unsure (1)..(375): unsure at all n locations
agctncagagtgacagagagagtcaattnactactttttttatncagatgaaaataaaattttctaaatctaaatagtagaaaactaaaaagtattaaaatattgatataataagcatataaactgcatagagcaaagagacgaaattgaaatggttaaatgacgaaagcttaacattcagcacttgtgctaattaacgtagaattaagtgagtatttggattagttgagaaaataaagcttattccaatcattgatttctataatcattttttaaaatagaggatgagaaaattcattagatggttaatatttttttatccataaatattaattattaattagggaaaaaattattctttatttttttagatac

SEQ ID NO: 146780 - DNA, 411 bp, Glycine max
  unsure (1)..(411): unsure at all n locations
accttaaaactcagctgagacccaatgtggagaggggactcatcngtattgtgtgctgagacagcgatgtggccctcttaatagcgacttcctccttctaatgatcgacgaaagatgtgcccaaggtgtggcgcgcatggatctcgtattgtatgcaacggagacgacgttcctctgctccacgatgagttcttcgttgtcgacagcggcaagggaacacattaacattaataaagcttcgatgtggaccattaatgaaattttacttccccttcaacatggtcacaaggttttgatatgaacacataaagttgaacctcattctgaaggaacccaggaaaaaggtgaccaagacgcaatcaacaattattattntttacacactacatctttttttttataatgcggatg

SEQ ID NO: 146781 - DNA, 411 bp, Glycine max
  unsure (1)..(411): unsure at all n locations
aacagttccaaattccatcctctccctctgacttttttttctttctttnanatacgcccccagcaaatttaaatggtgaagttgtcttactggagctctacagacataaaggttgagaacttacatacaagtgagaattaaaactatttaattttaaccatacaattatttataaatggtctaaatttgacattctaatcttatcacattaaaacttacaaaaataaaaaccnnccggnngtcaaaaattaggacaacttggcatgacttgaagaataacttgaatgaacctcaattgaaaaggacacaaacaatttttcaaagataagtgacagaacatgtatatagatgtgtattcggaaacaactctgttttattactcataagatcaatataaaaaacggttaaata

SEQ ID NO: 146782 - DNA, 402 bp, Glycine max
  unsure (1)..(402): unsure at all n locations
agcttctccctatttgctataaatggttgattttgaatnaaaaaagggttcaaccccttaggcacttctctctctttcgaatatgctgaggaaaattatttccgtgaagaaaatccaagccgagacccttccgtaacatttccgtgagtaattacgcgaagattctcgaccgttattcaagatccatcgttcggtcttcgttttcttcagtcttcaacgggtaagtacctcaaaccaagcttttcaattcattatatgtacccgcgttggtccacattgtgtttcatgtattttcattctcggtatcatttactttttatacccccttgtgacgtgcttaagccatttatttaagtcatttctcacctaatctaaaaataaaataaatttccaccgatcgtt

SEQ ID NO: 146783 - DNA, 434 bp, Glycine max
  unsure (1)..(434): unsure at all n locations
gaaactaacgctggactctggcctcactcaccgnctttatgggttcatttctatctatcttatacttatcccaagtttcagaatttctacacctagaccactccttgaaacactccttttttactctaactntgctctgaacactttcattccaccaccacgattctttacccctaggtccaaaacctctagattcacccaacgtctctttagccactctaataatctcttgggacatcttgttccacagatcatttgcacttccttgtgattgtccacaccatccctcccatatcttttgttggaagattccttgtttctcacccttcaagtgccaccatttgatccttggtgctaccatangacttcttctctttgccctttctctaattcttacatccataaccaaaactctatgttgggtagtcaggctc

SEQ ID NO: 146784 - DNA, 403 bp, Glycine max
  unsure (1)..(403): unsure at all n locations
agcttctngaacgggatcaatatatncanatgcatttattttggatgaaaatgtggtacgtgatatcttttggtgtcaccttgatgcggtgaagctatgcaatgcatgtaatttggtgttcttgatagatagtacctataaaacaaacaagtacaatgcaagaagtgcatatcgttcttccgttaggggaaatgatactgaaatgcaacatttaatgaagcttcttgaacgggatcaatatattcattggcatagattaaaggatgaaaatgtggtacgtgatattctttggtgtcaccctgatgcggtgaagttatgcaatgcatgtaatttggtgtttttgatagatagtacctataaaacaaacaagtacaaattcccacttcttaactttgttggtgtg

SEQ ID NO: 146785 - DNA, 423 bp, Glycine max
  unsure (1)..(423): unsure at all n locations
ccttcatgatgatgaatcaagttgattcaagtagtnntcatgttatctattatgatgacttaaagcccaagagaatgatttctagattgagttaacaagattcaagaatcaagagaagtatgatttcaagattcaagagaagatgaattcaaggttcaagaaaagaaatcaagaagacttcacaagggaagtattgaaaagatttttcaaaaaacaaacatagcacagttttgtttttcaaaagagtttttctcaaaantttctaagttaccagagtttttactctctggtaatcgattaccaattacctgtgatcgattaccagtagcaaagtttgatttctaaagctattaactgaatttgcaacgctcccactgatttttaaatagtgtaatcgaatacaatatattggtcatcgagtac

SEQ ID NO: 146786 - DNA, 404 bp, Glycine max
agctttgatgtttgctgtggactctcggattaatatttataaagccgaagccggtcgaagatttctagaaattttgttttggtcaatgcattttcgacatatttaactatattctaagttttcaaattttattttcatttccttttatattgatgtattgtcttctccaacaccttcgagcttgcgagggtattataaaaattagtttaattggttacaagtaagttattagtttagattgttataaattagtttagttagttacaaattaattacaagtttaactatataagacttaatgtattcatgtaaaaattgatttgttcactttgagcattatctatagtaatactcaatttctgttctctgttcttatatctctctggcttgagctttttcaccat

SEQ ID NO: 146787 - DNA, 359 bp, Glycine max
  unsure (1)..(359): unsure at all n locations
gtccacagntggcacgtgtatcagctgcttacggtgtatatgctttatcatacacacgaacaacatcttcagtgccagatggtcgcacaaagcaccgaccttgggggtacttagctgtaaatgcagaagaggagtaccaagctgcaatattagtaaactgaaattctgcatttctatctttcacacttacaggcatacatggatggatgagactgagaaatatatagcaatcataagcaatcccgcctgccactnggactnggagaccanaatagcctacccctatccggtggaagagacctcctttcagtgaatatatcgtacaccgatgagaaaatttagggctacatgcctccctt

SEQ ID NO: 146788 - DNA, 340 bp, Glycine max
cctgcacgcatgcaagcttagcagccaactcctgaggatcatgtttctttagtgttaacccggaataagcacacaaattttccccctcttccagaataacaagggtcttcaggaaggtgtccaaattatcctcatcacaattcatcaagtgacctctcaccctctcctgcctaagtgatatatcctcctcggtccaaaggctagcgtaaaatttccttccaaaagcgacatttatgctgtcagcagtaaactagtcagctcctcataccagagtcttctctcgagactctcctttaactcatcaaacttagagccaaatactatgacacccctctcctgg

SEQ ID NO: 146789 - DNA, 242 bp, Glycine max
ggaattctttttcttttactccaacaccgggaaaggccccaagaaaccctattaaagattattttatgaggatcttaacatttctagaccttggaaaaactcaagtaactatgctttttggaatagtgggtacactttaatctggctccctgtaaaggctctctggatggtgaaagaaaccacctgggctatatataacaaggcaagaaaaaaaatcatctttacacataaacaccaaattt

SEQ ID NO: 146790 - DNA, 399 bp, Glycine max
  unsure (1)..(399): unsure at all n locations
agctnttgcgtaagaaccagttttccattgtttctatgactgtcaagtggcattcggaaggatcaaatgatgccttatgaatcctcctgtgcttacgccactagtgcctggaaggcccattatcctatacatgactatgttggatgagtcaatggggtgtatgctggggcaacatgacgagtctggaaagagggaacatgccatctattacctaagcaagaagttcacatcatgtgaaatgaactactctttgcttgaaaggacatgttgtgccttggtatgggcagcccaccgtctaaggcagtacatgttgagctacaccactttgttggtgtccaaaatggacccagtcaagtacatatttgaaatacccgcttttaccatacggatcgctctggt

SEQ ID NO: 146791 - DNA, 424 bp, Glycine max
  unsure (1)..(424): unsure at all n locations
ctcacgctgggatagatctcgagctntcagtagattatgtttattttttctccttgctgagagaaccactccaagtccagatacttgggtattctcacattctccatagcataaatcatcttctagtcattcttcttacttttgttagtaaaccatgtatctagcctgttgatagcaacttaagagcattcaccttgcttcctcttggaatacttggctttcttctgagctctggaagggttgctcgccatttttggaagggaaacaaagggtttggaagcagaagaaggttaggttcagagatgggtgtttcaaggaggtgttggtgtgatttgtggatgggttacggttgccttttatagagaggttgggacattctggttggtggcgaaagtaaatgcataaataatggtggttgatgagt

SEQ ID NO: 146792 - DNA, 417 bp, Glycine max
atcctctgagtcacctgaggcatcaagcttaatggctagtgaggattgtatgtcttttaggaagcaagtggagttggatatttccattggaaagtacaatgataaggttctttgtgatgttgttcctatggaggccagccacttactcttggggagaccatggcaatttgataagagggctaatcatgatggtttcaccaacaagatctctttcacgtatcaaggcaaaaagatagtgctcaaaccattgagtccacaagaagtgtgtgaggatcaaagaaaaatgagagagaaaattcttcacgaaaagagagaaaaagacaaagagagccaaacactcgagagttcaaagagtgaggacaaaaagagggaaacacatgagaggaaaaagatgagtgaaacacttgaagtggggga

SEQ ID NO: 146793 - DNA, 416 bp, Glycine max
  unsure (1)..(416): unsure at all n locations
ggctcaatgttgattgttgtggttaaaatcatgtgtggtttgatggtgtagtccgngctccatatggatgttggttcaagatggtgaattgttgggctatgaccaaaatccatatggaagtttattctgttattttttttttctgttttgtcctctacttatataaggcaatgatgccctgtattttcaaagataagcttccacttgtatattgcatcgataataaaagctctctatttttccctcccgtggatgtagtgaaccacgtaaatctgggtgttctttctcatctctctccctctttcatttttgttgcaacatcggtgtatgacatttctgttctgctgcatctattgctgctgttcttgttagttcttcatcacttccataacaacatttgtaaatatcacatagat

SEQ ID NO: 146794 - DNA, 395 bp, Glycine max
  unsure (1)..(395): unsure at all n locations
agcttaaggggtgtaaggnttggattatttttattttcgttatcattggaaataaaaaatggtgatggaaatgcgtatggttggattttttgagcgaaaatattttcccaaacgaaccaaaaattggaaacaataaaatctcattttcagtatttgcagttgaaaccataaacatcattttgaatacaatgaaagtgcggtggcaaaaaatgtaattttaagcaaatctaaaaatacattttcttttgaaaacacattttcattgtttttattttttgaaagcagaaaataagaagttcaaccaaacatgttttcagaattctaatcttttgaaaataaaaacagtcttcagataatgaaaacaggaaataaaaacagaatatgaaatgcaacca

SEQ ID NO: 146795 - DNA, 402 bp, Glycine max
  unsure (1)..(402): unsure at all n locations
tgatactagacattacatgacnttaattggtttttcttatattaaaaatagattgacacagaagaaaaccttatcgaaagtgttagggagccctgtgaaacactctatgatccactatgaatttgtaagctaagacaaacaaaattactaaacccattaggatcatcttgtattaattctctaatttgtaagttgatgttgtatgtaatatttgtggattgtatgatcaatgcttaaattaattgcaattattctctgagggttactattatgcctttaaatgttatggataccattaatgtgattgttgagatataaagtaaatgtcatgttcaatgttgagattgattgtacgcatgctcgatgactattattacgctttaaatgaatatatttcctact

SEQ ID NO: 146796 - DNA, 360 bp, Glycine max
agctttgattgtccataagcaatatttctgtctatatctgtataaaactcatatagagaaggaaattatgcgatttttgggaactcaaaacattggacatgaataatacacatttattatgaatgtttatagcatgagcttagtagaaaatattcaaatagggaaaaggtttattattgatttatcattccaaccagatcattaccccgattcatcattgatcttatcaaattgaatcccttcatgataagcaaatctgtgtgcctctgatgatagaataactattcttccttcctggttgcatactcggactgttgttttcatagtttctaacaaaaggtgtgtcaagagaaaatggcc

SEQ ID NO: 146797 - DNA, 204 bp, Glycine max
aaggaaagctagggaagccaccaggggaattgtttgaccaaaatacaaggatctaagacagactacactcaatactgcaaggggctggaaaggttgagggttgtaatgataattaaaaccttgaaaaaaaaagagacaaatgcctacctaccgaaaggataaaaggatcatgtaacctaaactactggaagtggctttaaaaag

SEQ ID NO: 146798 - DNA, 411 bp, Glycine max
  unsure (1)..(411): unsure at all n locations
agcttcaagaaaaagatggcctcttttttatttcttatttccggaagggaattctatcaatagacctccaatctttaatggagagggctaccactactggaaaacccgaatgcaaattttcatcgaggcaatagatctaaatatctgggaagccatagaaatagggccttatatacccaccacagtagaaagagtntcaatagatggtagttcatcaagtgaaagcataaccatagaaaaacctagagatagatggtctgaagaggatagaaaacgagtacaatacaacttaaaagccaaaaacataataacatctgccctaggaatggatgaatatttcagggtttcaaattgtaagagtgctaaagaaatgtgggacactcttcgattaacacatgaaggaactacaga

SEQ ID NO: 146799 - DNA, 422 bp, Glycine max
  unsure (1)..(422): unsure at all n locations
ccgcttcttagtttcagatgatgcagctgagtttgtagctaccttatgcactcctctaatgactatagcatcctttctggcgctaaactgctgggagttggaagccatcttctcaattaaatttatggcttcagcaagagtcatgtctccaagggctccaccaatggcagcatctatcatacttctctccatattactgagtccttcataaaaatattggagaagaagctgcttcgaaatctgatggtgagggcaactggcatatagtttttaaaatctctcccagtattcatacaagatctctccacttagttgtctaatacctgagatatccttcctgatggttgtggtcctggaagcaaggaaattnttttctaagaatactctcttaaggtcatcccagctagtgatggaccttggag

SEQ ID NO: 146800 - DNA, 393 bp, Glycine max
agcttctcaaggaagctacttagtctatttatagaagcatgtgtaacacttgttgtaactttgatgaatgagagtcttgtgagacacaactcaaagttcaacttctctccctttttcttccttcaattttgtgctccccactctctctttctctccctctttcttttcctccattgaagcatcctctctaagcttcttatccaaggctcatcttggtggtgaagctccttcttccatggcttattccctagtggatggcgcctcctctcacctattctcctttgtcttctgctgcatctccatggtggaaaatcaccattaaaggacctcattgaagctcaaagatccatcctccatataagacccacaagcaagcttccatcactccatatg

SEQ ID NO: 146801 - DNA, 380 bp, Glycine max
taattgcttgcggcagcttgtgtgctaagcggatatcttatccacctaacgctagcttcactgcatataaaatacatgatttttgctaagcgggctcagatatcggcttagcgagagttgcaggtttcctgatctgaagatcttgctaagcggtagctttaacttgctaagctaagtatttatgtgctaaataaaaacccaaacgactctcctgcttagcgcgagccccgctaagcggttggccttggaaaacaaaacgactctctcgcttagcgaacgcttcgctaagcggaaacgtcaaaaaaacattggttaagtgtaacttcagcacaatgacaagtgctgagtgtatggacagctggagaatgctttccttaacc

SEQ ID NO: 146802 - DNA, 397 bp, Glycine max
  unsure (1)..(397): unsure at all n locations
agcttcatagggagccatgccaatggtataatgaanattgntgttataagtgaactctatcaatggaagaaaactctcctagcttcccttctgctctaagacacatgctcttaaaaggtcctccaacgaatgaatggtccgttcagtttggccatcagtctgaggatggtaggctgaactcattctaagcttggttcccaatgctctgttcaagctctcccaaaacctagaggtaaatctaggatctctatcagatactatgctagatggcacaccatgtaacctgacaacctcacttatatacaaggtggtcaacttttccaaggaaaatcttatattaataggaatgaagtgagcagacttagtcaatctgtcaacaataacccagatagaatct

SEQ ID NO: 146803 - DNA, 410 bp, Glycine max
cccttagcccaactgctacaatttgcaattcaaaacatagcattttttcccctaaaaatgcacagatttcatcattaaatccaatggaaatgttctagagatagcgttaaccataaaataagatttattttcaaaaatcactacaaaataaccataaattggggaactatacaagctttggaaaatgatttatgtacaaaggttagtcatatggagcgactaacacacaatcttaggacctgacagaacatgggtggtgaatggccaaagattgaaactataccatggtggagagtttggaaaggaaaacaccatcttaaatttgatatcacccaactctgatttctttcattttgtttttcatgcattgcataagttggaatttgctttatgatcattgaaaaaggggt

SEQ ID NO: 146804 - DNA, 411 bp, Glycine max
  unsure (1)..(411): unsure at all n locations
agctngctaacccatggaagctcctaatattcttctacactttttggggtgggccattcttggatggccttgattttctcagggttcacttggaccccatttctaccaactacaaaccctaagaaaactatattatttacacaaaagtacacttctctatatttgcatagagggtgtttttcctaaggactgaaagaacttgcctgagatgtcctaagtgatcatctaggctcctactgtacactaaaatatcatcaaaataaacaactacaaatctacctatgaaatcccttaagacatgatgcataagcctcataaaggtgcttggtgcattagtgagcccaaaaggcatcactagccattcatacaaaccaaacttggtcttgaaagcggntttccactcatcaccct

SEQ ID NO: 146805 - DNA, 416 bp, Glycine max
aaaggatgtgactcttcacatttgaatatgtttttcatctttcaaatttactggtaatcgagtaccaaaacattgtaatcgattacagctttttgaaatcaattggaacgttgtaaattcatttgaaaactttttcaaattcattttgctactggtaatcgattacaccaatctggtaatcgattaccagagagtaaaaactctttggtaaacatgttttgagaaaaatcatgtgctactcaatttttgagaaaaactttccatacttagcttgattaagccttctcttgattcttgaatcttgagtcttgaatcttgatcttgattcttgagatcttgaaccttaaatcttgattctagactcttaactttcttcttgagtcttggattcttctcgattctatcgttgacgcttg

SEQ ID NO: 146806 - DNA, 425 bp, Glycine max
  unsure (1)..(425): unsure at all n locations
ttaagncacctgcggcatgcaagcttcaacaacccagtcaataacgtttggtttattctatacactaatttcagnaatttatataaagttcacacttttaacaattccatagttactttctttggctgtaggtttgggaaaaatacccagtaacatccaacatttgagttttaagataaagataaaaatatagaaaacaaaacaatcatataattgccgtcaaaattataaatatatgggaaaactttaagaatggcattaaaaataactaagtgtgagggaagttcttttactgctgatgtttgtttgtaatgttggtctgatgttccctgatgttacttggaaggaagacgcaggtgacaagttagttgttgctgaaaaacaactactgggctgcaaacgggtcagtgcccattttcttcttt

SEQ ID NO: 146807 - DNA, 426 bp, Glycine max
  unsure (1)..(426): unsure at all n locations
aaactcaactatctgctcatatagtccgctctattaatactttatgttctatcccntttttnngnctatgtttatagtgtccaagctaaaaatatgattaatatctctatttgtactaaaaatgttctattttttatatgtatctttccttattaattatcatttttcctatatacttattatttatttattcatgtattaggtgtgtctttcctgtgaacatttgttcaagtgtatgagagagtattagaaagaagatttataaataataaaaaaacatttaacgaatctccatgttttcttcaagcaacaataattgctttctttaatttatggtagaggggattcaatctaaaaggagacaaaaaaaaaaaaaaacatatccaacactttaaatgcacgggctaacaaccaacacttatattt

SEQ ID NO: 146808 - DNA, 406 bp, Glycine max
agcttgcttctacaatctccccctttttgatgatgacaaccgtgaaatcaagaaacacatacacattctttttcctagacgatcactcacttaattctacatattctccccctttgtttttgattttgagcttcacttgaaattaaattacttaattatattagttcttgatttaatccctattttctctccccctttggcatcaacaaaaagccaaagttcataaaacatacatgattttagaaaaatcctacacatagcatccattgtaaatcaatcataaaagattctaaactaatcatgaagcatgtcatgattgaaccaaacttaaaatatgaaacccctagttatataacataattcataaatggtcagccctactaagcaaatattaaaagaaatacta

SEQ ID NO: 146809 - DNA, 409 bp, Glycine max
  unsure (1)..(409): unsure at all n locations
gacatccctcttggggngaagcgacttctttttggtttatgcattggagtccatcagtcaccaccatatcagcggccatcattggagtccttcttagcacacctacagaggaagaagctccatatgcaaacatacatgcattgctttcctgatcaacaggcggtcaaccataggggccaaatgtagttgaatgataacttttattattatacattgcaccagcatcgccaggaacataatccctaccctatgatagaggtgcaaccaacccgtctaatgatcctttacataggattgaaaggcttatgacaaggtccaagactaagaggatgaagcatgcattgcaaggcctgattgtaaagatcaaagagaaacaagaccaatgtgaattaagggttgcacctaattg

SEQ ID NO: 146810 - DNA, 195 bp, Glycine max
cgataccataatccgtagctttttgcgcgacttcaacaaggattcaggagtacgtcattcttagctcagcatttagtggtgacctcactgtgatcacaacactgctacaaacagggaattaatgaacccggagccacctgcaaatgaacaacatcgttatataagaagttctagaacaaccacgccaagcagacg

SEQ ID NO: 146811 - DNA, 408 bp, Glycine max
  unsure (1)..(408): unsure at all n locations
agctntantccgctcagctaagattatgctttttttgtcttataagctggtgctgagcggtcaatagcatcgcttatcgcatatactaccgcaagcgattgagcttagcaaccatgagtggcgttaagctgcagtgaatccagtttaaaccacaagaatattcgcttagccagcgaattacgcgctcagccccatggtcctcaattctgaccgcaatgaatcgcgcttggcgacataaggtctcgcttagccaaggcgaagccatcgctcatcgatcaggctgtcgcttagaggaattcaactcgaattgattttggcttaaccaaacattggcgaagctagctgaaataatcaacctcacgtgtagggtggtgcgctaaacgcttgaactctcggctaacgcatgag

SEQ ID NO: 146812 - DNA, 400 bp, Glycine max
gatgcaagcccatcatcatagattgatttgtttgttttacaacaaaacaaacgtgacaagacaattatccttgctgaccgaatacctcacccactcaagtgtgtcacacaacaatggcttttctctaatgaaacactcttgccttttaccacgataattccccttgagatcttatgcaattcaacagattatggccactacaaaaaacaattcaccaatatgtgtaaggtagtgctcgatagacaaggaaaaggatgaccaagaaaaaggctaaccatgtttttaggcgcaaatgaaggaaataaaattcacaatttaggaattcaagttacaatccttcatgcaaccaatatattaccttaaagagatcttttttaaagttcttcacgcgtgaaccatt

SEQ ID NO: 146813 - DNA, 402 bp, Glycine max
  unsure (1)..(402): unsure at all n locations
agcttaacgcatagncattntttatagcttgtatttgcgacgtnttgaagaatataaaagggcacatgattgtgctttcggagggagttagtcagcaagggcacgaaatatagccaaagtcactcactttggagctcttcttccattttgtttgtttcatctttgttttctagcctctcatgactatgagaggctaaattacccattgttgggggcttggataccaaacactctttgatgaaatgatctttactatacatctaatgttattttaatattattgctttccttctaagtttattgctttgtttatggtttgatcatccattcacatgtatgttataggattttaatgattgagaaatgtttttaccctaagaacttgaaggagcttctatgcaa

SEQ ID NO: 146814 - DNA, 412 bp, Glycine max
tgacattgaaactagcttattcaaaaacaaaagaaggataatcttttccttttctaattttaatactacgcgtctagaaatcacaatttgttaactcaggaagaaccatttgctaattctcctcatttttcggtaaaattgcaacctccatacaatcattctgaaaacaaaaccatccaatcattctaacatccatctaaataaaaaataattcgcccaaaccagaacccagaccgccatcaatttcaagcttcaaccgaaaaacagaacaacacaaacaatatacacatttgggatccacaagttccacactttctatttaccaatgtactaataattaattattaatccactagtttacaccactaaaagcttgcgatagattacacttacactcgctatgtacaaaaaa

SEQ ID NO: 146815 - DNA, 318 bp, Glycine max
gaaaagataggcgagatcggaccccactatacatcacgctgaacgcactaggctatagcagcaacgctcagcagtgcacacctctggcgtcgacttggcaagccataatcagaagataaaccaatcccaaatcactcatcagaagctataataaggtcctccaccagcattcgaaagctggggaaccaataagaaaagagcgtgagggcagaaatttagtcctacacatctccacgtaaaaatgaccatcaatttataaactagcacttggaagggaaactagcttaccttcacttggttaacaagtggtatcggcac

SEQ ID NO: 146816 - DNA, 394 bp, Glycine max
agcttctgtaacaagataaattttgttgtactcatgttatctacaatcacttgttacgttgattcttaagaaagtcctctaagacaacaccccatatgccatgtctctcatttggtcccatgactcctatctgatgtccctgcatcaccaataatttaagtgcccaactaatggttccatgcatatccttatgtctatataaatattcatggccgcaagcattgaggaccaacacaaatcattcacatcataaagtgtttgaaattcaaaattctcaacacttctcttcaaccattctcttctcagatcaatacaacaatgggatttcgtttatctggcatcagaaaggcatcaaaagcgggggacgcacccaaaggctatcttgcagtctatg

SEQ ID NO: 146817 - DNA, 406 bp, Glycine max
tggaacgggaagaagccatcagcaaagcacttatgggtttttggatctatatgctacattcatattctagacgtgaagaggcacaagcttgaagacaagactatacgaggtatcttccttgggtatagcaatatctctaagggctaccgtgtctacaacttgcaaactaagaaactcgtcatcagtcaagatgttgaagttgatgagtatgcttcttggaattgggatgaagaaaaagtggagaagaacgttcttatacccgctcaactacctcaagaagaagctgaggaagaagacctaggtgaaccaccttcaccttcaccacaacaacaagatcaagaactatcatcaccagagtctactccaagacgagtaagatctttggtggacatatatgaaacctgta

SEQ ID NO: 146818 - DNA, 404 bp, Glycine max
  unsure (1)..(404): unsure at all n locations
agctttatgtgttgtcatgttgatgtgtgttttaatctgagtgtctaatccttatccaaaggcagctctccccttctctctctctttctctgtactatatatatatacgtgttaataaaaagctaagtgctgagtgtgacaattttctccactcattcaaattcaagttctggagtatctcaaatcctcaagcaatgtagttctctatttttaacacattcaaattacacatcaagatctttaaatcaaactattataaaactcttaaactcaaactaacatagaatcacatggactaaactaaaaatttacagaattttatatgaactaactaagaacaactatcaacagttgaatgtgaattgatcaaaacanacacaaaccgaatcaaacacaacttgcat

SEQ ID NO: 146819 - DNA, 386 bp, Glycine max
tgagatgaggaagtgttgaagggtgaaactttctgcttttattgttgaccacagagtggtacctggagatatgtcgcgggggtcaggagaccttggggacgtcaggtggggtgctattgcccaaaaccaagcttgaccaatcccgacccaacccgggcatagtcggtcagtgagaacctgtgatgtacctaaacaggcgagctcctggcagtcaacagataaaaggaacaaagaccacaaagcaagggggcttgtggtggctggccagctgtgacatttgtgtgatatgtggattatggcctctggtaatcgattaccaagggtgggtaatcgattcaaggcttaatattgaagacaggaggctaaaatggtctctggtaatcgat

SEQ ID NO: 146820 - DNA, 390 bp, Glycine max
agcttgtaattcctgatccttatataacatatgtggtaaaggttgggactggaacgagtcaccaatggctttcttgaggagagagacatgaaagatcggatgaattttactgtgagatggaagatccaacttataagcaacaacacccacctagtttaacacttggaaaggaccataaaaccgaggggagagtttttcattaatccttttagccaaggatcttcttctgtaaggttgcatcttcaagaacacccaatcactgactgcatattctatgtcccgacggcgtttggtgacatttgctcacatgatatcttgagacttcaacaaattttctcttagagtagccaataattcattccgaggcaatgttagtttattgacttcttc

SEQ ID NO: 146821 - DNA, 396 bp, Glycine max
  unsure (1)..(396): unsure at all n locations
actaagcttcagagactcgnaaatgcttagaatactacctgatcgttgtttatgattnggacgattaacaattggacaatcttctttctccattacgacgctttctcacatctctcaagagtgggagatgaacaatgccgcctgctgaaacatatgtctgtatgtgcatttgacgatcgtcccaacatggaggatttgatcgttcacggagtcgttgtactataagatcttattggaagtggaccaggaacctgtgatcatattagacaaggcaaaagtgatcttacaaaactgatactctctatagataggaaaatctgcacttttgggacgccactgtatctacaatttctcgtttgatcccccgattgattaattcacgaatctgatccccct

SEQ ID NO: 146822 - DNA, 403 bp, Glycine max
  unsure (1)..(403): unsure at all n locations
agcttgtcacttgggctttattgtgcttgtttaaacatcgcatgaaatcattgagctcaaacatcattaggcactgccaaatttgctatcgacaatttcagatcatgcgaaatccctcttttgtccactcaccaaatttacacatgcatcgcatttgtactatctagttactagaaaaaacctattatcaaactaaataaatcacaattaataaactcaaattaagattgaatagtgctaaaatataccatgcatgatattaaattcaaacccaatctaatcatatgtaatttttaatttggtttggatgaccttttaagtaaaaatcgaatcanattgcattgcgaacactcctaatatatgaatacttgaataggaatntaatgcgttgttttttaaaaaa

SEQ ID NO: 146823 - DNA, 411 bp, Glycine max
ctatcaattagctgacaaatggattatggaagccacattatttgcatataataagccgagatagaaataagcacaaagcttgccaaagtaagcctttcagccttattcaaaagcccttgcttccaagaagcaagtctcgaattgagcttatcaataagaaaactaaaatcattcttagtgactctttgatgcaaaatggggaatccctagtatttaccaatagagagggtgctatgaatggaagttatatcaataacctcccttttttggttggaaggaccccaatagagaaaataactctaaactgcatgacattaaccttgagagctgcagctttggcaaaagggtctagcacattagctaaaaaaaaggcttgacactttttagctttcatgaataaaaggacatcat

SEQ ID NO: 146824 - DNA, 384 bp, Glycine max
gatccttgagtcacctgcggcatgcagcttatcacttgagggtggtttttatatcgcgaaaataaacaacacctgaacaatgcatacaaatttgtaaatactattattgctcaaagacacaatgcagctttgttaaataagtgaaaattgattgggaataaaaataaaataaaaaagtttccaaatattgtcccctatctagagacttagagtcccaggcttcttacgtttttgatcatagtctcccttccattgtcattaacccgaatgcaggagtctattattgccctccttatcggctcctgaaaattaataaaactccttcattccccacaatgacaataatgggaaattgtaaaagttttctctttgttattaattcta

SEQ ID NO: 146825 - DNA, 412 bp, Glycine max
  unsure (1)..(412): unsure at all n locations
ctatagaaactcatgcttatacgaagcagaaccaattatctctatttctaaattttacataacgaaatttcatatatctaaatggccaaatacctaaaagcatgcaattcgatggtaaatttttaatttatttgaacacaatattatatattattttcaacatgaatttgtggagtaaaaaaaagcttggttgacgtgaacttcattagcatgatgcattctttcaatccagcaagggagtttgctacataatcaatcttactaaagttataactgatattatgattgattcggatntacaatgctatcagatcctaaccctttgtgtgtaacaaactttatctcttttccttaatgccttagtgccttaagttcaatttaataagtttctttttgttaatctggctatcaa

SEQ ID NO: 146826 - DNA, 408 bp, Glycine max
  unsure (1)..(408): unsure at all n locations
agcttctgccacaacaaatccaggaatcctcattcatcctacttggatcaattgcaaatcaatacttgcaacctattgtcatccaacaaccctttgttcaagctgcacctacctctataccagcaaccttcgaacaagttgaacatgatcaaccttaacatccacatccaaaatcaccacgaaatgaagatccacctcagcagccataaatgataatgatagtttatcattttccatctttcaaacctgtatttgttgattacataagagggagaaattggaattttgatgtatcatgagcttagacttatctttcatctttatatgctntgttgtaatatatatgttgtaacatatgttatgttgcttttataaatgagttggttggattattcaatttcgcctctt

SEQ ID NO: 146827 - DNA, 421 bp, Glycine max
atggatggaatacttacttgttggtgatgaacaaatgttctaaactgaatcattatttgcgaaaaatgatgaccctatggctgcaaactcgtaaatcccgtgggtatggcttttgaaaggggggaaaagaagtttttgaatgcaaaaacgtcccccctttcgtcatccttatattttggtgcaggggtggctcgcccaggcgagctaacctgcattttttttttttgagaggaacattaaccatgtcccctccttccttatggtttagcgctttgcctaacttgaacttacttaagttagaattaggcgttgattacttatttttaaaacaaacaaatagtaaggcaactgcgaatacaaaggatacagggctgccttgcagcgacgttctctgcttgtctagcgcagagaaagggcaata

SEQ ID NO: 146828 - DNA, 402 bp, Glycine max
agcctgtggttgatagtatcacatcccactctttttctatctcagagggaggaaacttagttaatgaatgtaaggaattaatgagtcaaacttcatcctttgagttacgatttgtaaaaagacaagctaatggaattgcttatcaatcagtaaggttggccctatttcatcttagtctctatgttttgttatcatgcaatactttgtgtggagaattcgatgattaatgagatgagataagttttattcagtcaacaaaaaaagtttcatgttgatgtggtttattccacttttagggcaagaggaaaggggagtaaaataaaataaacacaccaaaattctaaactttcattgttgaatcttaatgacaaaacgattaaatatccccaagggcttcaagca

SEQ ID NO: 146829 - DNA, 344 bp, Glycine max
  unsure (1)..(344): unsure at all n locations
aactaagctacttctacagaaaaagaacaagctaaagcacagccttcttagttttaactattnactacggcggaaggtgaggatgtacaacgtatgtttggtcgctgaaatgatactaaacaaacttaggtctctaggtataccttttggtaactatgaccatattaacacaattttgagaagttgtctcgaatatgaataccacaggttacaacattgagagttttgaagaatcttgacaccatattccttgaagagctcattgaaaatcttaatgtgcgtgaaacaaaacttctacacgataaaagacttacaatggacaaatcttccgttcttaaagtcat

SEQ ID NO: 146830 - DNA, 405 bp, Glycine max
  unsure (1)..(405): unsure at all n locations
agctnctaatattcttagatagaagggtaaatcnnttntctcgagncaaanccctcttgggaggagaagatctgccatctgtgcagttgaatcacatatatacttattctgtaaagactagcagtggttggcagtgaagaaatctatggtattgttggtgtaacaaaggcctggttgaagtccaataggaaactagcaggttgatgaaatccagtggtgttcttgttcagttgtgaactggttgtgttagtgaaatctcatctttaagggtgaggattggacgtaccccaaggttggggtgaatcactgtaaatatatttagtgcactgtgtccttttcccttcctctattttgttttacatagatctaaaatctttttcttacaaaaacattaatttttttact

SEQ ID NO: 146831 - DNA, 418 bp, Glycine max
  unsure (1)..(418): unsure at all n locations
actcagcttttgaacaagatcatactataacaagcactaatccaagtttggcttttggatgcttcgcaccngaatggctaaggtatgcaccaataactgccaaaggtgacacaatcagtgttggggctaagaccctacttctagtgtatgtttgtgataacactactctacccttaggggagttgctatcataacaattacatcaaaacattcaaacaatgcatcagctccaacaatcaatgcattgcgattcacacacctaaactagtatgaaagattcgaaaattgaagaaatgggatacctgaaaaatggccaagaaaccacattaagaaaggcagacaatatatggacaatcatgaaagaattattctctctttgtattttcggactaaaaattttatcggtgaaacaaacacc

SEQ ID NO: 146832 - DNA, 397 bp, Glycine max
  unsure (1)..(397): unsure at all n locations
agctntacagtttaaaatttaaaggactggttgcttttgatagtatgatgtagtaaagaaacatgcataatgagattaaagtagtggttactagtggtaattacagtatatatggttgataactggagagtaataaacctagcgaggtgtaatatatcaagtgtgatagaaaatgtgttactagtatttcacatatactaattacagaaaactacttatgtttttattcaagttaattagcttttactttgtatgtggcagttctttcttctgtgtctgttgagtggctgtagcatctgttggttcaacacagtattgtttgttctctgcattaggaatttcccagttaacagaccccttgcattatcactcactgtgagtttcaatggtgtgagtg

SEQ ID NO: 146833 - DNA, 420 bp, Glycine max
aactaagcttaagcagagttaatcataaatatcgggaccactttccaatttttcctgctaacagtaatttaaacaacaaaataatttatttatttttcagttccccacaagtatcttccttcagagatagtcttatttgagacaagacactgtctgacactaaatgtgaatatctcccaggctattcaaaccttagttcatcacgtgatggagattaaccccttccactagaactaaccctcgctggtaaaagttccacctatcccttactcactatatccttatttctcgggaaaaattcaattaaaaaaaaggtgtttttactactaccctttactcttctgtgcccaatccacttcctttatcatatacatacatttgctataccattctataaaggaactccgacaacacaaaaac

SEQ ID NO: 146834 - DNA, 408 bp, Glycine max
acccaagcgacgcagctgcaagctgcttgagtttcggagagaactatgcttattcttaccttcacgaatttctttgaggtaaccatgattttaagcttgttccttggtagtttaagcttatctttgcatcttttctgactttggaaccatcattgtacgttttacgcttcctttgaaaaaacttagagaaaaagactttgtaaaagttatctttctatgaaatggatgttattttcgtgaccttcactgaactctggtcacattggcatgatcgaaatttcaaaatgatattccttttcgtaaaatccgaaacaaccctcagccctttcatgtagtgacatgagtatttgactcagagtattgttgttaactctatttctgagatccatagtaatttccttcgttttg

SEQ ID NO: 146835 - DNA, 413 bp, Glycine max
tactactacaactatttcttgataaggggcatttttattattccattctaataaaactcttttgttgaggataatcaaacaagatcttctcccattgccaaccccataagaaaagaaactcaaatcttgtactagctagaagccaaggatggtatgcaaagcaatgggtcctttttgcttcacatcttacagctatgtaatggggtcatgaagttagacttattcaatactaaccgatactagatatttagaaattagaattgagttcctttgttggtggggaaagcaatcgcgcgaagttcaaaacaggtgtaagaaatggtttaaggctacagctcaattattgaaacaaaagtcactatttgtaattgagtccacctaccattggttttcctcccaataatggcgtgtta

SEQ ID NO: 146836 - DNA, 285 bp, Glycine max
ttaggaataccaacgcgtactcgactcggtatgacacaccatgtgtctggagtgaacctctctgtctctgccgagatagtttactccactcgtccacagttacactgactttaaaacactagacccctattgactgatcgtagctcacagatagacacaaatccccgagcgatcgatacctgggtcgcaacgtcttatactcgtgtgcgaaccggtgcacttgtcgggagccaaacagcttaaccactcactaccggctgtggagctaaacgtctcccccgtgcc

SEQ ID NO: 146837 - DNA, 402 bp, Glycine max
  unsure (1)..(402): unsure at all n locations
agcttggccggcgatggacgaattctttttttattgntcaattatgtgattcaaaacctccgcctatccattagtttgtgggtgatacgaggagctcatccgcaaaaatgtcccactcgaacggaagagttcttgtcagaatctgctaatgaaaagggcgtctttgtcagagaccacactctgaggaatcccatggattttgacgaaaatgttgattaataaagaggcagacatgtgagttgtgtgcatctcgggtaatatgccaaggtagatccactattagaaaatacaccttctacatcggttatataggactttttacatcagtttttaaccaatgttgaaagtattatctgttacatcggttttacaaagtcgatgttaacgtaaacttgacaacat

SEQ ID NO: 146838 - DNA, 434 bp, Glycine max
cactatccacaactcaagcttcttagtctcagctgatgaagatgaattcgtggctactttatgcactcttctaatgacaatagcatcatttctctagcactaaattgttgggagtttgaagccatcctctcaattaaatttttggcttcaacagaggtcatgtcttcaagggctccaccactggcagcatctatcatacttctctccatgttactgagtccttcataaaaatattggaggagaagctgctcagaaatatgatggtgagggcaactggcacatagtttcttaaatctctctcagtattcatataagctctctccactgagatgcctaatgccgaaaatatcttttctgatagtcatggtcctggaagcacggaaaaatttttctaagaatactcctttgaggtcatcccagctcgtgatggacca

SEQ ID NO: 146839 - DNA, 393 bp, Glycine max
  unsure (1)..(393): unsure at all n locations
agcttgttctttnctttnggaaacatanattatgttctttnnnttncaaggaaagaatgcaataagcaatgcaaccaatgaacaacatggatgtatgcgaatgatgcacagttgaagtattgcgaatttttacacaggatatggggttgaatcaatttagattttcaacatggtccatgacatcttcgtcaaggtgaaaccggaagtaagagggacatcgacagtcctaaatatgtttggcagtagacgaagcagcgatgtaactcgatccatcttttgccccaattttttgcaagatggttacttccatacttcaacttgacttgatgaaccttttttaaaagcacgagcttggttaaccctaaacccagggaatggaaatttgatcgccat

SEQ ID NO: 146840 - DNA, 362 bp, Glycine max
  unsure (1)..(362): unsure at all n locations
ntaaggatttcaaattctgcctaacaaacaataaattatgttttattgtcagnaaattataaattttggctactaaagaaaatcaaagaagaaaactaaaatacctgaatatcctctcatatcaaatccttctgagcagtagggacttccttccacgtgtcgtatgtgacgtcgaccttatcacgagcgacaatccccaaatatgttcttaatttcttcttgtgtggaccgccaaccttgtcggtcgcaggatcgacgttgaccactggtctctctgccctatgtggtctagtggccaaagatcgtanccatgtcgctttgcgtgttcgcttctgggtggacagagacactgatgctactgc

SEQ ID NO: 146841 - DNA, 332 bp, Glycine max
  unsure (1)..(332): unsure at all n locations
caaacctatatatctcatgcaagataagaaaggaatttgatattatttcnttttgagcacacgcaaaccgcggagcacacgtagttaatgtatctgttccatcagcaggcattctggcgatgtgtgtatcacaacatgccatatgtatcattaatgattgtactggcatacataaagaaagctaatttacggtactgggttcgaacataaatcgatgtaccaataggaaagaggcctcttcgagacaggccaatggaagattctccaactgctgcaaatgattgacaggacggatgattctgttaccccattactaaattaatggacctatt

SEQ ID NO: 146842 - DNA, 410 bp, Glycine max
agcttctacttatgtggcagggcgtgttttctttactttcttgtctccaacgcgagctttgaccactgttcttccttcccgcgatgcttcttttcatatccgcctgagtgggcttatagcctaaaccatacttcccacggtttccttgagtatttatcaagctagttatgccgccgttgtctttgcctaaacccatcccgggttcataaccgttccccaacataactcgggccatcattaccgctgcatcggacagacaaggctgcccaaagagggagtccacggaggaaatgctgaccacctcaaaagactggaaagcggtttctaacgattcttctgcggcttccacataaggcatggaggatgggcagcttaccaagatgtcttcctcgcctgacacgatgaccaag

SEQ ID NO: 146843 - DNA, 418 bp, Glycine max
  unsure (1)..(418): unsure at all n locations
nttcgtcttacaaacagcaaaaaagaagttttacggtttaccactcgggtatttccgctcatcagcgtgactcaaatgtgagtatgacagatcttttgagcgcggaagatgacgtaaatctccgcgtgtcaacgggcttgtcggccgcgattgacgaagtgcgcagaagactacgttagtctttgcgtgctatcatgcttttcgtcttacagacagcaaaaaagaatgtttatacggataaccactcgggtatttcagcccgtcagcgtgactcaaatgtaagtaagacagatcttgtgggcgcggaagatgatgtaaatctccgcgtgtcaacgggcttgtcggccacgattgacgaagggcgcagaagacgacgttagtctcttcgtgctataaggcttttcgtctaacagacagc

SEQ ID NO: 146844 - DNA, 394 bp, Glycine max
  unsure (1)..(394): unsure at all n locations
agcttgaagaactatccggaaaggccatactccaaacatggaactccattcatttgaagttttactgcaattaaatcatgtaaaaggtggtatactatttttcctacctcgaccttttatccctataaaaatgtaaaaaggtttttgtcgagaaggttttaacgaggcacacctaaacttatactatcaatgaatacatttttccaacaattatacttgtcatttttttttatagtaccctctcgaataccctttttggcagaggttgaactctacgataacaacatgtgttccctctcgaataacttatttgatcgaggatgaacttatttcgttaagcaatagttccctcttgaataatccctttgccgaggatganatatcacaatatatc

SEQ ID NO: 146845 - DNA, 385 bp, Glycine max
  unsure (1)..(385): unsure at all n locations
ntacggtgcccttaccaaacccgtgctatagctagagtttttggtgaagtagaggatgtgcaagagcaaatgaatgccgacatggaggccatgtaagagaaaattgtcacaatgatggaggccatgatgagcatgaagaagataatggaagccaatgcggttacaattgccgctaccagcactgttgctaaggtgaacccgatgcccccatctggcctcaaccaaatgaatcatccaaccttagctatggtaggcaaagatttgggaagtatgaatggccccatgatgtgcaaattcaaaacgagcacgccttcccgccatatggcttgccttccaacttacaccaaccaatgtggcgtacactcccaatgagaatgtcaataac

SEQ ID NO: 146846 - DNA, 374 bp, Glycine max
  unsure (1)..(374): unsure at all n locations
agcatgnntatncacactcacgtgacctttantttttataaaanncgcgcctaaaagtttttagatttatagttggtggcaaatggatctaacccctaattctctatgacttttaaaatactccctcttatgtttaagtaaaaaaaattaatttatatctttgactaaactatatataaatctcactaattgtatgtttaattaataatatcattcccaaaatatctttcatttaaatctaattttattttcatcatgatatcaaattttaattaagaatattttagaaataaccctttaaatattttttagcccgtccaaattatttttttaaagtaatcttatctttacttgaaataattaaatttaaatat

SEQ ID NO: 146847 - DNA, 392 bp, Glycine max
  unsure (1)..(392): unsure at all n locations
tgtcacgtgagagcntttaacatgagttgtactgggaatcttaaattaaagaagcttgttttgacaagttataagaacaccatgatacttccatatgcttaaagaggttttgtgtaagctattaatttcaaagcctctgaataaatatgtaccaaaaaataaatccctctaaataaatggtgatggttacctgaactgagacgtatgaggaagcttggagttaatagactggggagaaatataggtaaagagcgaatccaatggatattctgatagattcagtcttcttttctttacagccacaactatagcttgagctatacttgttagtggagctggaccagttgctttaacttttacgtaataattgctttccatgtagtagagtgtgc

SEQ ID NO: 146848 - DNA, 406 bp, Glycine max
  unsure (1)..(406): unsure at all n locations
agctttgaatctctntgttttccttcttcttctttgtgccaaaagctatccaaagttttctggttttctaaaccttgaaaacttgtgctattcattcttttcatctcttctccctttgccaaaaagaattctccaaggactaaccttctgaattctttttgtgtctctcttctcccttttctaaaagaacaaaggactaaccgcctgaattattttgtgtctcccttctcccttgtcaaagaattcaaaatgacacagcctgataatccttttgattcttccttttcccatatacaaaagacttcaaaggactaaccgcctgagaattcttttgtatccccattcacaaagtattaaacgtttaaccgcctgagatctttgtcttaacacattggagggtacatcc

SEQ ID NO: 146849 - DNA, 411 bp, Glycine max
  unsure (1)..(411): unsure at all n locations
atgcaagaaccatcagtggctgcgtcattgccgatcctgaaaattctaaaggttattgatgatatngtgctagccatagaacaagaatagtcgagtctaatactgctaagatcattgacaatcgttggttgcaggcgagtcagaaatcatgaaaggtggatattgtagagactcatggtaaatcttcttcacctatagtttctcatgaagatgttgctcctttggttatgttatagtcaaacaacacccacagacaaagtgataacattaataacccacaagatgaacacatatgtgatgaactagtagacaatgtgcaagtcacacatgaacaagtgatagaaaaggcgtaagaaataacaccaacgaggtctgaaaggcaaaagaaaccaactatttttagccattatg

SEQ ID NO: 146850 - DNA, 408 bp, Glycine max
  unsure (1)..(408): unsure at all n locations
agcttagagtgagttatggagtgctagggtctctttatgttangaattgtgcaaaaaatgaaaaaaaaattgtgacttaggataatagggtagcgaagttcacgaccagcctatgaatttcatgttgcccgtgaaataatttcaaacagggcaacaaagatcacatccagcccgtgaaacactttcagacatgacaacaaagatcacaaccaacctgtgaattctctattgcccgtgaaccaatgtagaactcccaaaattcaaagatcacaaccagctcgtgaattccccgcttcttgtgaataaactttggtgctttctgacactagtcactaaagttcataggtagcccatgaaattgagtttactcatgaaacacctacaataatttttattntgctagggtct

SEQ ID NO: 146851 - DNA, 401 bp, Glycine max
  unsure (1)..(401): unsure at all n locations
cacactgaaactcaagccttgacgccaacattggagaggttaatgaagcaacgagattatgcgctccatgagaggnnggatcaaatggagaatagagatcataatgaagaagaaaggaggagaagagggaataatggtgttcctagacaaaaccgaattgatggtattaaactcaacattcctccctttaaaggaaagaatgatccagaggcctacttggagtgagagatgaagatagagcatgttttctcatgcaacaactatgatgaggaccaaaaggtgaagcttgccgccatgaaattttccaactatgctcaaatggatcaaatagccatcatactattaaaaaggggggggggttgaatttattatgcatgtacttacccatatcaaagctttta

SEQ ID NO: 146852 - DNA, 401 bp, Glycine max
  unsure (1)..(401): unsure at all n locations
agcgaccngaggcatgcaagcttgtgatgagagctactagtaattcttcttatttttaacccctntaggggcctcanaaggtcgatgtatatggtgtgtggatggtcaaaaagaacgttctccatcaagtgaaataatacgaacttgtggaggtcagacaaagttggattgaacctgctttatgaagaacaattttgtttagaatgttggcctatatcttcgctttctctcacttcaggttgtagacattcattttctggttgccaacctcgtcaacattctccccatagattgctcttgtggcatgggagtcataatccttctttcaacgttcctaaataaatattgccttcatgcaaacatcctgttggcttagcaatagtgtcagtggacaacaccac

SEQ ID NO: 146853 - DNA, 431 bp, Glycine max
  unsure (1)..(431): unsure at all n locations
aaactcaagctttaaccgccccaaaatggctttttccctataaacagccgtgttggtttttgggttttaggggncccaagggtcaagagttgatagaagaaagaaagacgacgaaacaaagatgaggcgctaccgaatcgcgactgtgatcattccgctacatcgttttctcgtacagtgttcctcatgcaacaatgagggtcgtagagtaattaagaggacgagtactatctactcggacgtacgagggcggattgtgcttatgtgcatattcagacgctccatatatcatagtgaaactcttggaaaattctgacaactataacttttactctgacggcccatttaaatccgtcatttaccgagacgctcgctaatgaacacaacacgctttataccatctcatcgaccgaactttttacttcgaggtc

SEQ ID NO: 146854 - DNA, 397 bp, Glycine max
agcttcctagacaattgttgttagtcgattatttttactaacttttgtgtataaaacctatgtatattgtatcaaactttcccaattaatggttgttttgtaatactataagtactttttgttaaatataggtaatagataatttatacttttgttttgtgcgtctaataatcaattactctcaatttcaggttaaataggcaactttggcaaagtgttttttttcactctttcgctaagccaagttgctggcttagcgagaattcactaagcgcaaccttcagtggctaagcgaaagaaagaatccaaaagaaaatgagttgtcaagttcgctaagcacgttgctctatgtcatcaagcgcaccgcttcaactcatcctctaagcgaaacaagcgc

SEQ ID NO: 146855 - DNA, 429 bp, Glycine max
  unsure (1)..(429): unsure at all n locations
gaaactcaagcttggaaattcaattgttaacaaaaattggctctcaagtaatcttattttctaaccgtnatngnngnaatgggatgctgatggagatataatggaatatcttatattttgttttattttattttattttatatttgtatagatttgattctatgtaatgattaatttcatcattaattgtccaatatgacagtgaatttgaaatattattcatttgcctttccctcaaaattaaggatttccaatctgttggacagcctgtctggttaagttgatcataacaacttatggtatatcgattccttgagcaatagagcattgctctcatttcagagatatctactaatcatgttgagtgattgtcacgatgtttatcaattctcaatgttgatgaggccatggntagctagttcttgcatt

SEQ ID NO: 146856 - DNA, 413 bp, Glycine max
  unsure (1)..(413): unsure at all n locations
agctttatggccatataaacactaaggcttatggtttnnttttccccgntcaaaacaaaccaatgcttctaacaatgctctttttatcaatttacgaacacattcgagtccatttaggaatttgggaaaaaatttcattgcattcaccctttaggggcacacacattttttttttcaaaaatccatttatgttctgacccgtgaattttccaaagaaaactggcggtcatcttcttttaaaagcgtgttagtttttttcttttggctttttctttcaatcaatctcttttaagcaaaaatgattagaaaaggtttgcaacccgggcacagttggcatctgagatacgctctatcggaaggagtaaaaagcgtgcggataataatacacaagacccctattttggcatttaaat

SEQ ID NO: 146857 - DNA, 408 bp, Glycine max
agaggatgcttcaatggaggaaaagaaagaggagatattatggaggggggttatcacgaaattgaaggaagaaaaagggagagaagttgaactttgagttgtgtctcacaagactctcattcatcaaagttacaacaagtgttacacatgcttctatttatagactaggtagcttccttgagaagctttcttgagaaaacttccttgagaagcttctttgagaaaacttccttgagaagctagagcttagctacacacacccctctcataactaagctcacctccttgagaagcttccttaagaagattcctaaagaagctaaagcttagctacacatacctctctaatagctaagctcacctccttgagatgagaagctagagcttagctacacaccccctataata

SEQ ID NO: 146858 - DNA, 405 bp, Glycine max
  unsure (1)..(405): unsure at all n locations
agctntgagcaaattcaaacgacatttattttttactcgnatgtctgattgagtcccgtaatatatcgagacgctcgaaattgaataccgaagctctgagcaaattcaaacgacaataactttttactcgaatgtccgattgagtcccgtaatatatcgaaacgctcgaaattgaatgttgaagctctgagcatattcaaacgacaataactttttactcggatgtctgattgagtcccgtaatgtatcaaaacgctcgaaattgaatgttgaagctctgagcacattcaaacgacaacaagtttttactcggatgttcgattgagtcccgtaatatatcgaaacgctcgaaatggaatatcgaagctctgagcaaattcaaacgacaataactttttacttgga

SEQ ID NO: 146859 - DNA, 408 bp, Glycine max
  unsure (1)..(408): unsure at all n locations
tccacattcaatatcgagcagnncgacatatttcgggactgaatcagacatccgagtaaaaagttattgtcgttttaatttgctcagagcttcggtattccatttcgagcgtctcgatatgttacgggactcaatcagacatccgagtaaaaagttattgtcgtttgaacttgcttagagatttgataatcaatttcgagcgtctcgatataatacgggactctgtcagacaaccgagtaaaaagttattctcgtttgaatttgctcaatgcttcggtattcaatttcgagcgtctcgacatattacgggactcaatcaaacatccgagtaaaaagttattgtccgttgagttttctcagagccttgggatgcaattttgagcgcatcgatatattaccggactcaat

SEQ ID NO: 146860 - DNA, 403 bp, Glycine max
agcttgggaaagatttagaggttttcttatgaaatctctcactggttttgatgaagctctccaaatcaacatgtttctagagggattgaaagctctgagcaagcttatgcttgatgctttagctgctgggaaaatctctctcaagattccaagagaggctatacagataattgagaacatgattgtcaatgctacaacaatcaaggagaagttcaatacatcaacaaccaatggcaagggaactaccaaaactacaacaatcaaggatacaaacctcatccaagcataagtcaagatcaaggaagtagtttcgatgacatgcctacgcagaacctatatgaaaagaaaggaaagttagaggaaaccctcacataattcatgcaagtatctctttccaaccata

SEQ ID NO: 146861 - DNA, 418 bp, Glycine max
ggtctcaattcagcttgtgctttctccctcactcttggatttctcatcatttctgccatagcccactccagtgttgatgctgaagtatcagttccagcagcaaatatgtcctggtgaaacaaataaaatatctttatataaagtttggtaaaatgaaaagagaaattgcatttatataactaaatcgggcaacttttttaatagaaaaggagatgagaagaaaaggaagaaaaatgtaagataaagtaattagtacaaatgagaggattaaagagattaatgttataaaaagagatgttagtgagaaaaaacgtacttcagaaacaggaaatataatagaagttttgaggcatttacttaccaatatcaaagctttgatgttgttagtcgtcatttggatgtcgagagtgtcatcttg

SEQ ID NO: 146862 - DNA, 396 bp, Glycine max
agcttgcatttggaattgcgaaattctctcttcatcattaggattagtacctgacatctcaaacaaacaaatcaaacgtaacaagacaattatagttgctgtttgaatacctcacccactcaagtgtatcacacaattatggcttttctctaatgaaacactcttgccttttaccactctaattccccttgagttcttaggcaattcaagagattatggccacaacaaagaacaattcaccaatatgtgtaaggtaaggctagacaaggaaaaggttaaccaagaaaaaggctaacaatgtttttatgcacaaatgaaggatataaaattcagaatttatgaattcaagtaacaatccttcatgcaaccaatatattacctttaaagaggtttttt

SEQ ID NO: 146863 - DNA, 411 bp, Glycine max
  unsure (1)..(411): unsure at all n locations
tatagcaaattcgaacgacaataactatntatttcttatgttcgatngagncccgnaatatatcgagacgcttgtaattgaaaatagaaactctgagcaaattcaaacgacaataacttttgactcggatgtccgactgtgtcccgtagtataccgagactctcgaaattgaaaactgaaggtctcagaaaaatcaaacgacaataactttttactcggatgttcgattgtggattgtgccccgtagtatatcaagacgctagaaattgaaaactgaaactctgggaaaaatctaacgacaataactctttactcggatgtccgattaagttccgtaatatatcgagacgctcgtaattgaaaacagaagctctgagcaaattcaaacgacaataacttttgactcggatg

SEQ ID NO: 146864 - DNA, 392 bp, Glycine max
cccggaccttaagcacctgcagctgcagcttgaagtgcgtacccaccatttttttattgtaaaacattgcgaacgggtccactatcactgttatcatctccctttccgtcattgggggcgccagttgggctgccatatcctttgaaggattcatgcccctttttacccatgttatgtaattgcatcctatccggagccacatcagaattgtactgatactgtctaacaaaggcaaccattaggtccttcctagaatggacttgggaaggttccaagttagtataccaagtggcagctgccccagtaagactttcttggaggaaatgtataacaatttctcatctcttgcgtatgcccccatctttcgacaatacatctttagatgattcttg

SEQ ID NO: 146865 - DNA, 421 bp, Glycine max
gaccttagaaactaagcttttatcaaacacttctgggggaagtctttctttctggcttattctctagaggagggcgcctcctctcacctcttctcctttatcttccgctgcaactctatggctggaaatcaccattgaaggacctcattgaagctcaaagattcaacctccatagaagtttctcaaccaagcttccatcatgcagtcatacttttggccatgaatagctagtctccttagtccacgattatgatgtagtcatacttttgtaccccttttctaattttaatgaaactctcgatgtttttcagtcatttaaatatttttttgttctttaatgttaatttggaattgatcactctgaatcttgatctattgcattacagtgaccatctggatgtaactgattgacttatgaaga

SEQ ID NO: 146866 - DNA, 425 bp, Glycine max
  unsure (1)..(425): unsure at all n locations
cttaagncacctgcagcatgcaagcttgaattcctgaacctcattttatttttgttgttaagggcgggactggaacgagtctcccatggctttcttgaggagagagacatgaaagatcggatgaattttactgtgagatggaagatccaacttataagcaacaacacccacctaggttaacacttggaaaggaccataaaaccgaggggagagtttttcattaatccttcttgccaaggatcttcttctgtaaggttgcatctttaagaacacccaatcactgactgcatattctatgtcccgacggcgtttgttgacatttgctcacatgatatcttgagacttcacaaattttctcttatagtagccaataatttattccgagcaattggtatttattgacttctccacgcaggaagaatggt

SEQ ID NO: 146867 - DNA, 408 bp, Glycine max
actaagaaactaagcttcagagacacgataatgcttagaatactaccagatcgttgaataggagtttgacgattaacaattggacaatcttctgtctccataacgacgctttctcacatcttgcaagagtgggagatgaacaatgccgcctgctgaaacatatgtctgtatctgcatggcacgatcgtcccatcatggaggatttgaacgatcacagagtcgttgaactataagatcatgtgggaagtggaccaggaacctgtgagcatattagacagggcaaaagtgagcttacaaaactgatactctttatagataggaacctctgcactcttgggccgccactgtatctacaatatcgcgtttgatcccccgattgattaattctcgaatctgatccccctgttg

SEQ ID NO: 146868 - DNA, 398 bp, Glycine max
  unsure (1)..(398): unsure at all n locations
agcttattctgaaacaatttctttaacttttcacgtataggaaatgagtgacaacaaattttccctttagtataagaacaaggaaagttaattaaaccaactggtaatgagaatgagatttcttgtcttggctgatttttttcctttgcagcaacagcgcaccatggatagttccaacgcgaacaaaacccggagaaagggttcgtgtgtaattgatcacgcgttagtgtaattatttttaaatctgaaccgttagtaaaattgaatagacgatgaagatgtaaaaatatttttagagtaatttgaatccctccatatatatnntatttttaaatgtgatggaaaaatgtctgagacgtaaaaaagttaagcaaaatatattctaagttaaacaattt

SEQ ID NO: 146869 - DNA, 407 bp, Glycine max
tcgtttcccttaccctcctcttccaattgttcgattacactctgttctgttgcttaatgtttgcttgttctctgcacaaatatgagaaatcgatttcggtaactctgctttctcaatttcaatcgtctcctagtagtctttaaagcttaaccttaacactctgaatgtatcaatgtgatcgattgcattgtctaaacttaattgaagatgcacttaagataactcagtggatgctgttacattttatttttttatcggcaaattgttaatttaattgtttttagtttttttcccttctccttttaccacccaaccaaccttataacttctaatgttgttacatttgatttggtattggtgaacgtttaacggtaatggatgtggtttggtttggcagtgttcaattc

SEQ ID NO: 146870 - DNA, 366 bp, Glycine max
  unsure (1)..(366): unsure at all n locations
agctngccacccagctcgcccaggcgagcttttgttgcttctctagaagcaacagccttctaaaggaatcttctggagggcccaagtgggcctagttgctgtttgcacccccatttttactaaatacaccccccttgcccttttttggtgattcttttttcgtaaagttacgaaaacttaacggatttcgcaacgatacttgttttctttccgtaacgtcacggaaccttgcggattacataatcatccccttttttgacttatggaatgttacggaacctcactaattgtgcaacgatgcttccttttgatttccgatgtgtcacggaaccttatggatngtgcatcaataccttcttttgattt

SEQ ID NO: 146871 - DNA, 399 bp, Glycine max
  unsure (1)..(399): unsure at all n locations
tctatataagctgaaccattttatcaataatcacaagttgagttttattcagaaaattagagtttatctcttttatcttagtgagagtgattctcctaaattcttgagtgattcaagaacaccctggctgtatcaaaggactttcacaacctttgtgagttgccctcgctggaaagagtgattctttccttcctttcatcttcacccttgttctttcaaaccacaattccagaaaatccacctctgcccagaattatctcgtggccataactcccattttacgcactcaaattaagtgattcttgagcctaaattgactttaaaaacgagacctttcnacctcgtttggaatcacctcatttggagccctgtagcttcagttattgccatttctatatt

SEQ ID NO: 146872 - DNA, 392 bp, Glycine max
  unsure (1)..(392): unsure at all n locations
agctntgaacaatatactngtccttcatataattttctttgggctnggcggccacgctcaacaaagtattttcgacacctactatacgttgatttgaccaacgctgttatgggaatgttgcggcaatccttcaaaaccttattgatacattccgagaggttggttgtcatgtggccatatcgatgtccttctctatcataagtcatcgtccatttttcttttgaaatgcgatcaatccatgttgctatgactcagttcacgaaatttttctagattttgataaaaaatgtgcttgcaaggagtgtacgctgcataaacttagttatgaataacaattttaagtatatatcaaagttaaataaacgtgaccatgaaatatgaaatcttaccca

SEQ ID NO: 146873 - DNA, 404 bp, Glycine max
  unsure (1)..(404): unsure at all n locations
agcttctatcttcattatcggtaaagaacacatgcatcttgctcgnacctacttaatattaacggatcataataatagtcaaagttctttgtatgctaactctttttggttctcaaacttagtattgactatgaaagaaaaagaaaaaaagttaaccagtgtcataagatgattttgtgtagctgaatttagaaaccccatgcatgagctggggtttagccttctgttccttaataaaattattttgcttattaaaaaaaataaagccgatcgtttgaataattagttaataagttaagataattttttcaaagaattataacgcttaatattattattatatctttatcgtatttttaaaaaacatattatttattaattctttaagcatagtttcattatag

SEQ ID NO: 146874 - DNA, 420 bp, Glycine max
catgatttacattctccccctttctcaagcaaattcataattctttttgacatcatcaaaatctggatgatttacattctccccctttttgatgatgacaaccacctgtatgttatgagcaacaacaaagaaaaaatatctatttgcatatagtttactcccccttggttttgcaatgattgcttatatgagacagttgaagatttcatatttttcatatgtaaacaaattgtctcataaacaacagataatttttcttactattttatctccccctttgtcaacataaaaaacaaatcatgaatagataggagaaagatgttaccacttgttgcaatgtatgagaatcaagtgataccaaaaggcattataacaatcattcaatattaatcaagcaaaaacaagtacaataacacatca

SEQ ID NO: 146875 - DNA, 317 bp, Glycine max
  unsure (1)..(317): unsure at all n locations
caccgcggcatgcaagctctagccaaaggaccgacccgaattattcctagtgattcctncgagcctaggccccctttccttgttttgaagctcactacaagccttaagtgaaaaaccatgatattaccatatccttaaggaattttggagctttggaattgttggggaataattggggggggtttgtctcattggacaacttgttttgttggctatgcttcatgatgaattttgggccatacttgaagtacattggaatatcggtaaatggtggacatgatgaatgagatgttgtttctcaaaggcctaagagttca

SEQ ID NO: 146876 - DNA, 424 bp, Glycine max
aactcaagctggggtcacgttgcgcgtactgatgggtaccaagaggcgtttgctggttcttgacccaagcgggcgtggaagagatggcatgggcatctccttccttcctttttgcccctgttgccccgattcttttggcgttaacgtttgtggaggaaacgtaatcaaactttcctctcttcaatccaacctctattctttccctggcaaacaccagatccgcatagctggacggcatgtaacccactagcttctcatagtagaacactggcagagtgtctaccatcatggtgatcatctctctctcaaccatgggaggagctactcgtgccgtcaaatcccttcatcggtgcgcatataatttaaggtttcaccctctttcttgaacatattctgcatttgaatacggtcaagagccatatca

SEQ ID NO: 146877 - DNA, 367 bp, Glycine max
  unsure (1)..(367): unsure at all n locations
agcttctcgatatattatgcggctgaatctgacttttttgtgacaagtnatgaccatttgaatttctcgagagctttcgttgttcaatttcgagcgtctccatatactatgcgcctgaattggacttccgtgtgataagtaatgaccatttgaatttttcaagagcttccgttgttaaatttcaagcttctcgatataatatgcgcctgaattggacttccatttgtaaagttatgactatttcaatttctcgagagcttttgttgttcaattcagaccttctcgatatattatccaccggaatcggacctccgtgtcataagttatgaccatttagatattcgagagctcccgtggtcaattcgag

SEQ ID NO: 146878 - DNA, 434 bp, Glycine max
  unsure (1)..(434): unsure at all n locations
aactcaagctaganactgaacaacggaagctctcgagaaagagaaaaggtcttaacttatgacacggaagaccaattcaggcgcataatatatcaagacgctcgatattgcacaaccgaagctctccagaaattcaaattgtcataacttttcaaacggaagtcaaattaaggggcataataaatcgagaagcttgaaattgaacaacgtaagctctcaagaaattcaaatggtcgtaacttgtcacacggaagtccgattctgacgcataatataccgagacgctcgaaattgaacaacggaagctgtccagaaattcaaatggtcataactaatcacacgtaagtccaattcacgcgcataatatatcgagacgctcgatattgaacaacgaatgctctcgagatattaaaatggtcataacttgtcacacg

SEQ ID NO: 146879 - DNA, 394 bp, Glycine max
agctttctattctaatttagaaatccatgttatttcttttatgtctgagggttatgggattaagatggtcattgaccaatccctattttatgatttaacaaaattgcctagtgaaggtgtgccttttgaaggtgcactgattgatgaatggaaattccatttctctgtgcatgatgcccgccggttggtttgcaccaaccaagcggatatgaccagaagactttttgccggttcattggcttttgaaagttgcatcctccattatcttattgttcgcattttgcttcctatatcttcaaaccttgcccaggtttttgaagaagatctcatagtcatgtggacctttcataaaagtttacaaattgattgggcacaccttgttagatatcgcatg

SEQ ID NO: 146880 - DNA, 426 bp, Glycine max
actcaagctggggctgttgccaagggtggctcctataagcaagggagatgtttttttttttggggaagaaatggggtgaaaatggcttcacccctcccctttttaaattttcacgtcagacacgctcgctcaagcgagctaaacattatttttgtgttattgcggaaacctttgcagaattgagatgttcattgttatatatattatttaaaaatgctataattgcatataaacttaggcaaattcaggatataattcaagaaaatgaacaagtatgaaacaggaaattaaaaagcaaagttagagatactaggatgcctcctaagagtgcttcttcagcgtctttagccggacgccggatgatgatcgatcgatcatgggcctagcacctgttcgtacctgcccctaagcttagacaaagaaagt

SEQ ID NO: 146881 - DNA, 395 bp, Glycine max
agctttctcttccctccaacataaataaattttaactcccatttctctctgttgggttcctccaaccctcccccaaaaccttgcattcccaatatcaacaatcttcatacctcaaattccaatgcatgggcaaacaaaaaggtatccattttataaaaaaaaaatcattggttttgtgtttagttttacaccaaagggtccagttatatattataattctgcagcatgcaacactttcgtttctttcggtttaattcgaaaagaaaaaaaatggttcttaatttgttgaaaatgcgtttcctttgattcctccttgcttactttgtatttggctgttcatgtgcctattattgcaaggttggaattcttaagtaccttcatggaactaaggtgca

SEQ ID NO: 146882 - DNA, 423 bp, Glycine max
  unsure (1)..(423): unsure at all n locations
tcaacgctttaacaattttaataggtgtgagatgaataatttattttttttagtcatatatgnacataagtaacattaatctttaatggtaagtaaattataaaaatggagctaattagaaatataatataagaaaatacatgaagtactatatttaagtatatctttttcttttttatttatgttccaatgtatagataaatttagtatatgaaattgcaatccagttgagtgtaaaagtatagagatttcacctaaagatatttttaatacacaaattataaaattgaattaaattattataaattaattggacttgagaaccgatatgtataaagtgtgtttgtataaacatcttatccttcgttacacatgttccaagacatcaatgctggtcatgtttgaaaatacggtaacccaaac

SEQ ID NO: 146883 - DNA, 397 bp, Glycine max
  unsure (1)..(397): unsure at all n locations
agctnttaactgaatttgcaacgttttaattgtttttcaaatggngtaatcaattacaatatattggtaatcgattaccattgtatctgaacgttgaaattcaaattcaattgtgaagagtcacatcttttcataaaatgttttgtgtaatcgattacatggttttggtaatcgattaccagtgacaagttttgaataaaaaaaaagtcaagagatgtaactcttccaatggttttcaggtttttctcaaggttataactctttcaatagttttcttgaccagacatgaagagtctataaaagcaagaccttgacgtgcattttaatatctttttaacaattcttcataacaacttttgagaaacctttgctacttattctccttcttcttcctttg

SEQ ID NO: 146884 - DNA, 426 bp, Glycine max
  unsure (1)..(426): unsure at all n locations
ctatgaaactcagcttaggttgctcattgactccagattgggcatataagtttagatctgtatggngattngcagaagaacatagatcacaaactcttgcaacaggtgcagatttcagattcatggcaagctgagttactaggttgaccaaggcatcaagttttccttcaagctttttattttcagtagatgaagatgaatccgtggccacctcatggactcctctaaggacaatagcatcatttcttgcactgaattgtttggagttggaagtcatcttctcaatcaaattcctagcttcaacaggggtcatatcaccaagagctccaccactggcagcatcaatcatactcctcttcatgttgctaagtccctcatagaaatattggagaaggagttgctcagaaatttggtggtgaggacaac

SEQ ID NO: 146885 - DNA, 384 bp, Glycine max
  unsure (1)..(384): unsure at all n locations
ctgcaacttctcccaanggcgaatataggtgtagaagagaagngaaaaagggttcagccccttaggcacttctctctctttcgaatatgcttggaaaaattgcttccgcgaagaatatctaagccgaggcgcttccgaaacatttccgtaacgttttcgtgaggaatttctcaaagggtttgaccgttcttcgacgttcttcattcattcttcatcgttcttcgatcttcaacgggtaagtacctcgaaccaagcttttcgattcattctatgtacccgtggcggtccacattgggggttgcgtatttctattctcgtttaattactttttatacccccttttgacgtgcttagcctttttattaagtcattctcgcttaacta

SEQ ID NO: 146886 - DNA, 420 bp, Glycine max
  unsure (1)..(420): unsure at all n locations
ttagaaactaacctttatggtaaagatcacaaaaacctattcaaatatttcttngaccnatcttggaggtcgtagcttaagatgtgaggatgaaatctaatattagatgttaacaacttttcgaaataatattgatgtccaggtattggtaaaatttaaaaatcaatatgtgtaaagagaaataggtgtgatttgtggggtgtagtgttaatcttttgagtatttataaaagagggtggactataaatggaagatacaaatttcatcctacatctttaattgacctttcacattaaaatgttgattctgacgtgacacttctatagaccgttgagattgtacttatggaaatgtgataaatgatgtgaaaaataaaaaaatggtcgattagaaattaatttaagaaatagtctttgtcct

SEQ ID NO: 146887 - DNA, 407 bp, Glycine max
tcccggatccttaagcaccgcggctgcaacttggttgtgtagggttttttttatttcttaacattatataggagatcataataagtttagtaaaaaggtagtgcatctgaatagaaatcgatcctacttgagataacttttcatgcaagtctgttgcttttttgggtttgcgtctgtactatgtatcaccacatggatgctttgctgaacccttgaaatattttgctttctgaatcaggtccttagctcacttcaacctttggattatattggtgctgccattttgcctggtattagtgaggttaaaagaggctactctccttggcttattttgcctttcttatttatttttcatcatttgactgatatcacatattatcatctttaattccaggaactacttttcc

SEQ ID NO: 146888 - DNA, 419 bp, Glycine max
  unsure (1)..(419): unsure at all n locations
cctntaaataataataaattcttataaggaaccatgtaaaatttttcaagatacaaatactatattatattattttaatatataataataataatgtatattattttattatatataataataataatgccttagaaaattttaatatatattattttacagtatataatactataaatatttttagttattttgtgaaatatatactttaatgtaccttattttataaaaaattaaacattgtcaaatattatttaatttattattaatgtgaaaattattatttaaaatagtattaaaattatgtaattagggttaatacatttaaatgactatagatgaacttaattgaaaattatatttcacaaatatgttaacatagagttcaggtttatttatttattttacataaaattcaa

SEQ ID NO: 146889 - DNA, 409 bp, Glycine max
agcttcgttgcaagccagcggctgtttgttattgctggatggtgaagttgatttgtggagtgcataatcatgaattggccaagtcattagttggacatccatatgcggggcgattgactaaagctgaaaagacacttattgctgatatgacgaagtccatggtgaagccaagaaacattctgctaactctgaaggaacacaatgccaatatttgtacgactattaaacagatatacaatgcaagaagtgcattccgttcttccataagaggaagcgatcttgaaatgcaacatctgatgaagcttcttgaacatgatcaatatatttattggcacacaataaaggatgaagacgtggttcgtgatatcttttggtgtcaccctgattcagtgaagttagtcaacgcatg

SEQ ID NO: 146890 - DNA, 432 bp, Glycine max
acactatagccaactcacgcttagtgcttcttgtagcacctttctttggctattttgtttgttttcctttagtacaatccacacaaatattcaaatcaataaaatatagatttggaagaatttcattctttattaatctttccattttttctctaaaaaatatggcccaaatgtttatgccacaagaaagcataacgtttattcactaaactacgtttagtgccaacattatggtgcaaagtcaaaatcatttcagcatacaaaccatttaaattcaacttatataaaccatcacaaagaatattggtaccaatgagattattatacttaaataaactgaaatatccattaccaaaattaaaagagtacatatcctttaacatcgagtttagataatgaaactaaattcctagataaactaaaaacataaag

SEQ ID NO: 146891 - DNA, 304 bp, Glycine max
agcttgaatttgcgaggagattcttcgttttatttcgagagtctcgatatgttacgggccgcaatcgaacatccgagtcaagacttatcataatttgaatttgcccaaacttctgtgtcgaatttcaagcgtcacggtatatgttgggtctcaatccaacatcgatgtcaaaatttatagcgggttgaatatgctccatctttcgtgtcccatttcgagtgtctcgatattcaagttaaaagtatggctgtttgattttcctggagcttttggctttcatctccaacgtctcgatatgttatgg

SEQ ID NO: 146892 - DNA, 409 bp, Glycine max
  unsure (1)..(409): unsure at all n locations
ntatacacaaaagttattcgtaatcaccgtctaacaacttccccaaatttacagttttgcttgtcctcaagcaaaaagagaacagctcacttgtcctcaagtgacaataacatgcagtgactatgtacaaaggtgtatgcaacaaaagctactgattgcatgataagagaatgaagcattatgtactcatcacttgtctttcacaaaatatgcagctattcaaagagaagaataaaatgtaagcatactattagatgaagttaatcataagatagatattaaggaaagtagcttacaccacagtctcacggctactgtttcactcaagcacaagtgtttaagctattcattaataacaactagcaagaggtccaatctttgcacttcatctcatgccataaagtcagaa

SEQ ID NO: 146893 - DNA, 420 bp, Glycine max
  unsure (1)..(420): unsure at all n locations
gcttatgatgatagggactaaattatgtctatcatgatttttttcctactatatgatttatgagctatgatgtagaaattatgaaaaattgttatgttttgagttgtaagaccaattaagtgtgtgaccacttggcaatgaatgttgcatgattatgactataagctttattaataacaaaaattgttgtgatttgggattggtgtatgctagtgaaccacacgtggcagttacgtaggttatgcatagaaatgtgaagtcggataccatgagtggtgtatgctagtgaaccacacgtggcagttacgtaggttatgcataggacttaaggtttgtgtttgtggcttttgaggggatgaagtactcactcccttgttaccattttanggatctgatgccacgtgtgatgttgactctcta

SEQ ID NO: 146894 - DNA, 178 bp, Glycine max
cccctcgagaagaagggttcttctcttattaatgagacttaactataaacagttgcaataaaaaagcgtataatacaaaaaccaatggcatcagacacagtttacagtgggccacgaaaatacgtaggatgacaaagcaaagcccataggctttaatccaatcttcaaacttacatct

SEQ ID NO: 146895 - DNA, 291 bp, Glycine max
  unsure (1)..(291): unsure at all n locations
agctggaagatgatgctttaatggaggatattttttatattttggtggagcacaaaagngaaggaatgaacgagggatagacattgatctttcaattgggtcttaaaagactgtcgttcattaaatttacgatatgtgttacacaagcttttatttatagactaggtagtcttctttggaatctttcatgagaatacattcaagataagctttcttgtgaaaaattccttgagaagttatatcttacttacacaccccgtctatatcttaattccgcatcctgagaatcct

SEQ ID NO: 146896 - DNA, 429 bp, Glycine max
  unsure (1)..(429): unsure at all n locations
gacacatgaaactcaactagccgaaggatgcctagcgccacatcatcatttttaattattggaagtgtgcttagcacaggtagtggcgctaagcctgaatcactcactgtaagttgaagcttgatgtacgctaagcctcgcatctcaggctaagcgcatattgcagaaagatttttggtgttgcaaattcacttcccaagaggcttgggaaagatacatagatgttattgtgcctaggaagcttttggcagagaggaatgtggnggtctactatacagagtttgatgagttcaaggaggaactcgagacacaccactaggatgaggagttgactgactttggtgacagcaacattgatgttgccattgtgaaggaattctacgccaacctctatgaccccgaggacaaatcacctaagcaggtgagggt

SEQ ID NO: 146897 - DNA, 420 bp, Glycine max
  unsure (1)..(420): unsure at all n locations
agctnttcgattcattctatgtancccgttgtgtgtctcactattgtgtttcgnggcatttttaattctcaattttgtttaactttctatanccccctgttgacgnttgcttaagccattttancttaagtcantttcttcgctttaacttaaaaataaaataaaatttcccaccgaacgtttgaattgtattatccattaacttcggttaaaataaattccgaccgtttggtcgtgccgtaaccacattggaaatcaaaaagaggtaaaaaataatataataatcaaaaagacatcttttagtaaaataaagcggaaaatcaagtgggacatttctctntgggatttctcattcttaatcgaatggattaataactaaagtgaaactaaaggctataatcatttccctagtcagctcgt

SEQ ID NO: 146898 - DNA, 416 bp, Glycine max
actagctcacatcagaccacttcgggtactggaactacttcttatgtacttgatggggcctatgcaagttgaaagccttggaggaaagaggtatgcctatgttgttgtggatgatttctccagatttacctgggtcaactttattagagagaaatcagacacctttgaagtattcaaggagttgagtctaagacttcaaagagaaaaagactgtgtcatcaagagaatcaggagtgaccatggcagagagtttgaaaatagcaagtttactgaattctgcacatctgaaggcatcactcatgagttctctgcagccattacaccacaacaaaatggcatagttgaaaggaaaaacaggactttgcaagaagctgctagggtcatgcttcatgccaaagaacttccctataatctct

SEQ ID NO: 146899 - DNA, 416 bp, Glycine max
  unsure (1)..(416): unsure at all n locations
agcttatgctgcanacatttacaatagactcttttattctcagcaacaaaatcaaccacaacagaacaattatgacctctccagcaacagatacaaccctggatggaggaatcaccctaatctcagatggtctaaccctcagcaacaacaacagcagcctgctccttccttccaaaatgttgttggcccaagcagaccatacattcctccaccaatccaacaacagcaacagccccagaaacaaccaacagttgaggctcctccgcaaccttccctcaaagaacttgtgaggcaaatgaccatgcagaacatgcaagttcaacaagagaccagaccctccattcagagcttataccaatatatgggacaatcggctacacaattaaatcaacaacagtcccagaattctgacaagc

SEQ ID NO: 146900 - DNA, 368 bp, Glycine max
cctcatactcgtaggggatcactatgaccaaatctattccaatgtactatttgaggattttttaaattccacaatttcttgaggatgatttagataaaatgatgaatttataattgtgggatcaaacatgagagatgcaaaagaggttcattgtctttttctttttatttcttttttctttttcacaattttctattttttttttcttttacattgtatttctggtttctcgctactccttctctctcattaaatttaatgtcatcttcaatgtcatgacgacccgaagatgctgtcaacaaaagcacctacactgtttccagccatagtacattctcggtccctaccaccttgcacaaaccattgac

SEQ ID NO: 146901 - DNA, 402 bp, Glycine max
  unsure (1)..(402): unsure at all n locations
agcttatccagcaactagatccttctatgtagtttcgagggctctcttcataactcaaccgcttttccactattttattttttctcctagctaattttttttttgtattttaacttttgattcatgtaactaaacttcaacactcaatagcttttctgtatgtaacatttttaatttcttgccaaatagaaagtgcaaatgtcacatttctcataaggggtgttgaagggtcggattgagtcggatttgattaaacccatgacccaattctatcaaaattttatgagtcaggtttctgtacttttttttatagactcaaaccaactcgatcataaacgagttctttggtcaggttagatgagttggatttgaatatctgaaaaatatttntttattttctaa

SEQ ID NO: 146902 - DNA, 399 bp, Glycine max
  unsure (1)..(399): unsure at all n locations
agcttgagaaccaatattagtattttgaatcntattaaatatatcacgaaataatgagaactataccatatcaatatcaaatctctgaactgccagtgtaatctgtggggccaaaaacacatcagcctgcataatacaacatttactttgttagatatgcctttccaggttggaagtttaagcaattaacttcaaaatatcagaaaatttcagtgttccagctagattgttacattaatcaattcaagcatagtaaacattttaaatgacaaagatgggcatgaaaaagataacgcatataaacctttgaagattatgaatgtgcaacaagatgcatagaaatttaaaattcacttccaaggagcaagaatctcaaagtataaaaacaaaataatgctg

SEQ ID NO: 146903 - DNA, 414 bp, Glycine max
  unsure (1)..(414): unsure at all n locations
ctcagcttagcttggaaaagattgcaccctaaatacgttttatcgggctangnatcagatgctggacacggagtgcagtaatctattttattatgctataatcataatgcaattcatttaggctaagttcaacgagacatccgagagcaaggtttaaataggattaggtcattcacacgaagaatcgcggtttggagtctttgccctcagcatataacacctgaacttctttgaatagagaaaaacccttaattgcatcaagtaactcagtaggaggatccaacgcttttaattatttgttttaacacccatttgctcatattgtctataattagcaataagaatagaatacaccagagtttattcatgaatacctgcttctctatacaaactgtctgcttattgaatgacact

SEQ ID NO: 146904 - DNA, 378 bp, Glycine max
  unsure (1)..(378): unsure at all n locations
agcttgcatccatgatacgtgactttgttttgctttcttactcaannccaacaanaggagggacatgacgacgaagatgtcatacatactgcacaataaactataatgcgctaaatccacaaaagaatttatacattattgttacataatatcaataaaacaagacacatttgtaaaaacgttattaaagattaatacataaatgtgtaataagtaacacaatatatacatttgaatttatatatatcgacaacaaaagatattatacatacaatcaatgttcaatatattctgcagataaattaaaatacatgtgaagacaaacgtttaattaaaatacaaacaaactttataatggaaaaaataatttacaaaata

SEQ ID NO: 146905 - DNA, 420 bp, Glycine max
  unsure (1)..(420): unsure at all n locations
aacttcaaactaagctgacaataatgtccgcaaacagcaaaaattttttttttgcatgtaancgccgcgcctcttaccattgaaagaaatccaacccagaaagggaagcagcatgatactgatctaataaaacaccacaacaaaaaccacagagaagaaagcaccgtcccaaggtcatcaaagatagcaaacccaaaagaactcggaagcctgctaccccaaagcctgttcaaccaaaagaaaacacacctgtcaagaggaagtatgtgagacagaatacagtgaacaagacttctactcctcctaccgaagaggctagggaattgagtaaagaaatgtcttgtaaaacgtccttaaatttctacatatgaacaacagatgaaagtcttgctgccatatataatacaactgcactattgc

SEQ ID NO: 146906 - DNA, 431 bp, Glycine max
tcccggatcttaagtcacctgcagctgcaacttaactccttaactgcaaaagactcttatatttgaatgtatccttgggaaccttcactcgacaaagacactgacaaaaacttatcttctcctttttggacaaagtatgacaagctgggggcaagtaaattttctttccatcagaccttggatgcaactgtgatcgtatccccatatcagctagatcttgacggtattcaagccatccttcgtcttgccttgaatgttaaggagcgtcccaatcacactgtcacaaacatttttctccacatgcataacatcaatacaatgtctaatgtccagatcagaccagtaccgaagatcaaagaagatgtacctcttcttccatatgcaactcttacttttatccttcttttgggtttttccattaaaagcttttt

SEQ ID NO: 146907 - DNA, 412 bp, Glycine max
  unsure (1)..(412): unsure at all n locations
tatatatatatgtgtgacctangngatgttggggatgcctttgatactctgggagtggagcatgttgagagtttccttgtcgacctcgatgtggtcggtgtttatggcagagacatcggggcgaagtccgacgcccaagctcatcctcgatgcagcacttcttgctatgtgagggaacagtgaatgacaaagagaatggaatggaagaaaattttattgatttagggttacccaacctcgcccaattataacatgccacgtcaacaacagaaagtggaaaaacaatgttttcatagacggttttgaaaaagcgattttgtaaagcatatttaaagtcattttttaggaaactgcctttaaaaagttacaactatttacaaaaatgtcatcactttacttactacatcggtct

SEQ ID NO: 146908 - DNA, 398 bp, Glycine max
agcttgttcagaagggcagcagtgagttgtttctgtcactgtcactgtccttctctctccatcttgtactctatatatatatatatatatatatatcttttttgaaatgaataaagctgtgagagaaaggaggaaatttctccttcagtttcaagttggtaccagagcaggtttcgaccgtcgtccttcgtcgcgccgttcgtcgtcctccactgtgtcgctgtcgtctgtcgtcgtcgtcgatcgtcgtcatctccgatggatttttcggcgagaccagggttcggatcgcctcgaaaagcgtgatccacccctggaacttgcgcagccgtcggacgccccacgcgtcgcttcttcctcgcgtgtttgtcgacgcgtgcagctcatgcgtccccgtg

SEQ ID NO: 146909 - DNA, 312 bp, Glycine max
  unsure (1)..(312): unsure at all n locations
ttggcggatcaaggagaatggtctttattctttgatatattatcactattggggtttgggatcgtactctttccaaatgtagataggctagtggatttagtagcgatcgatgctttcttgcttatcaccacagcaaggaaagcctgatcattgctgttttggccgatgcatatgacacattcgacctgaaatgcaaaaagagcagtgcgagaattgtctgttgtacactcgctctntatgtatgggtggtctcccacatttttcgttatgaaggtagacctgtttgtcccttacaaggtcatcgcatgtgtg

SEQ ID NO: 146910 - DNA, 373 bp, Glycine max
agcttgcctttagcgcttgtacctcatctttttcttccgaagctttaacctcattgtctctcacagtctttagatttgggagccaatccaatccttgtgtccggactctcagccacttatgatagccgccgatgatcccattactgcttcccctaagctctctgtcctttcttcatgctgcatcccatgccttgcgaactccttggagtacccttgcgttgtagtcactgaaaccccgtgcgatgaaaggcgtgatgctttcgtctgatggcactcctctcatggggtagccatgctgtcttatggcgaggacgggattataattaatacaacccttgttcccatcaggggacattttgacatccttccatga

SEQ ID NO: 146911 - DNA, 409 bp, Glycine max
tgatcagtaagctgtatgtcttgttatgaaaagtcagaatgagagtgctttttcaagaattcaaccaaattcacagtcgaatggggataaaattaacaaagcccaaacttggccaggttgatgtatatcttttactaggaaatgatataaattttctacgacaagctagttacttattttatatgcatgtattgataacgatgctagtttttttaagaacatcttggtttatattattgacaaatatatcataatactcctatatattttgatatttttaattaaaatcgagaaatttaaggctctagtttaagtatttgtttcctttttttgttgaaatgattagtcttatttaaatatttatttattttattgagctagttcattattaacaataacttatagttat

SEQ ID NO: 146912 - DNA, 400 bp, Glycine max
agcttggatcgatgaagcatataattaaaatagatttcgtttcctcctctcctctctgttatttttcttataattcttccaacaaaaattgatatattgattttagcattgaacaaatcattctgacacatcactatatggaaccaatcatgaatatcatacccttataactctgtttttccttttctgtttcctaccaataaagggcccgcagccatccatctcatagttccttaattatttatatgagctcatcaaactgaaagcgagagaattccagggaaaaaaaaaatcacacgatgtttgattacaagtgtgaaagaaagatccgagtagcaattaaaaaagttgaatcatatatataaataaataaataaattaaaggttggtatcaaatttg

SEQ ID NO: 146913 - DNA, 419 bp, Glycine max
ttgatggtgttgagaagaaatcacatgtttgtcatcatatatttgttgagaatgtgaatgtatgtatacatgattttgatgatgtcaaaagaagaatcaaacaaggctcattttgcttcaagattaatacaagattgtttcaacaaacaaagccttgattcaagatttcttcaagatcaagccttgcctcacaatgaaaggtttcaagtcattcaaggcacatgtaatcgattaccaatacatgtaatcgattaccaatggtttgaaagtgtgtaatcgattacacatcatatgtaattgattaccagagactctgaacgttgggaattcaaattttaaatgaagggtcacaactgttcaagaaaaacaactgtgtaatcgattaccagagaggattttcaaggaatatcgccaacagt

SEQ ID NO: 146914 - DNA, 409 bp, Glycine max
agcttataaaactcctctcattacacacattgtaatttattaagaaaatgtagagaaaaatatggaaaaaaattatgaaaaccttacataccttttagtaatgatgttgaatgaaaaaaataatatagaagataaagaatacgcaaaccatcttgtaccatgttgtttatataactaaaaagttgtatccctaggaaattaactaattttataatcgtatgttaccttttcaaattattgcatttaactcataaattttaaactgacaagattattgcagttaactgaattcaattgacatgcttctttttatcttaatatataacgaaaaaattgtaactccagaaaattaatttaattttgtaatcgcgatcgtatgtttcttttttcaagtaattacatttaacta

SEQ ID NO: 146915 - DNA, 419 bp, Glycine max
  unsure (1)..(419): unsure at all n locations
tgtcgcattcacggcagacaagaatgttttttagcggggatagattttttgatttttnnnnnanncnatcttattctcagatcttatcttagtattttatgatccatccttgtttaatagattttttatttttagaatcatgatttctagaagagcaaatctgaagaaataaatccagatatccatcaacttgtatagatgctaaggtctgaaattaatcctctgcaaaaggattttctcccaaactattagtgtttgaatgacatttcacatttgagtaaactaacttacttaagaattttataacaattttttttaaagagaaatgactcatatttaaaaagtattattaaaagaataatttaataaaatatcttgtcacaaaagtgaagaaatactatgagaggtgatcgaacaaa

SEQ ID NO: 146916 - DNA, 386 bp, Glycine max
agcttgtccttctccattgtaatgctccatccaattcattcttttgcctttctaaaccattttccgtgctcaaacagctcatcaccatccagccgggtgcgcaacaacttggtaagaacactaccaacctatgaaggtagttgatggtttgacctcacgacctcagcaaaggcgataatggtgttgccgccttaggacactccattctctaaacactttaagcagtgaccctccacttgccaatcttcacctctaaagacgccaccttgctcaaagcctctaggggtcattgtctattctcctccagaatcgctcaaacttctctgcagggagacccatgccaaaatagctatctttctaaccccaactggccgaatgaatttttt

SEQ ID NO: 146917 - DNA, 423 bp, Glycine max
  unsure (1)..(423): unsure at all n locations
tctttcgtcttggtctcaacaatttcaaatgcgagcagaatatatgttttaattatcatcntgggcaatgacagtcaataaagtaccttgatattttttgttaaaaatgtgtcattaacttgcatgatcggcttgcaatatggtaatccttcaatgcatggcttaaaaggccaaaacacaaattacgaatcaaggtagagtcatcttgattatccataattgtgcctgatgtcttgtatttgacaattgtaccaggtagaaagtgttgaacaactttcatccatctaggtaggtaactgtatgccttaataggggacattatcaaaggaaacatgatttatctaacatggttgcaacaaaattttcaagaacttttttgttgatgttgatgttgatgttgatgatgttgtgattgcacaacat

SEQ ID NO: 146918 - DNA, 414 bp, Glycine max
  unsure (1)..(414): unsure at all n locations
agcttatccctaacatccatcagcagatcctgcatagcaatattagataagagcagcaaccaacaacaactcccattactttatctgggtgcatctcaaaagccaaatttaggaaaactttgtaatcaacaaatcacaaagcataactggtccatacctgacgagctgcaacgacatcaattgtgtaaccttcatcaatttccgcatttttcaaacccataacagccttaactatttcatctttctcagctcgatcaggaacaccaatgagctgcaaaatgacataactgagaggtcattggtcaagtataaatcttaagacaaatatganaattagcctttggcaaggattatctaacacaagaaacaaaactggataattaacactctaactgtaagcataaaattgtaaaa

SEQ ID NO: 146919 - DNA, 416 bp, Glycine max
  unsure (1)..(416): unsure at all n locations
ntagtagaagatntaatcatcctcatctatctcaaaattatcaactttattgaaaaagtttcatcagactacagccattaccaaaaacacctatctggtttgaaaattcaatcccctcgacttcttaattttgcacacaaacttcatatttaatattgaagttgtagaggaaaatcaattattcgaaccaatttatagcttcatctccattatttgctaaaggtaatctataaaccagaaaattgatctccattcatacaactatacagtaagaataataattaaatataaagaagcaaataactgggggaggaaggacttacctttgcttcaacatatttccatttcacaaaaagacaatgtttttcaccccaaccatttgccaacggaagattcataatgttatcttgagcctg

SEQ ID NO: 146920 - DNA, 430 bp, Glycine max
cttaagtcacctgcggcatgcaagcttgaatcaactcggatacaagcaaattgttgttgtattctctctgaccactgtaccataaaaaatatgtgaagtgtgcttagcttccaaacaacccaaaaattccttcaagactaatatgcaagtgagagtaacataagtgctagcagtggtgcattttgatgtatatgggtcattagaggtgtcttcactaaaaggtaattgattaaccactttttgagcgatgttatttgtgagtttttgtgtcattttgcatgcattttcttggcagaactcacgtttggacactaattttgtattgtagaataatagccactcaattgagtgaaagagatggaaattgtatggttttatgaagattaaagacttgcacttgacacagctatggtcatttaccatgaccatg

SEQ ID NO: 146921 - DNA, 431 bp, Glycine max
actaagcttctaaaacaagtatgtggctagaaactacatagaagtttgttaaaattgttcacaaaaaaaaaaatagtctttcttaaaaaaaacatatcttaaatttcttggacgatgtaaaataataaaaataatcgactaaaagatgtacacaaattgatcgtctttaaaaaagcaaatgttctggctcttactttatttgaagcttatctttgttaccttatgttgcattcttcttcaggctaatggaacaacatcaatccacgtacgtggcaaaacctcatatagctgttaccgtcttttgccgataacgatgtgccaatcgcggagggaagggatattttatgattaaatttgagaagattacgaaaaataaattaaaattatatgacaaaaaacaaaagacaatgcctttcatttgctttttcttc

SEQ ID NO: 146922 - DNA, 369 bp, Glycine max
aagcacagactaccaatctgcgagacccacaccccaaacggaatagaaagcataaaccaccaaaccgggaaccccacaccccacaaaacaaacgaagagaagcgcctaagagaaagcagagaccaccaaaccgagagcccgagaacccaaaaacaaacgatggaaacacgggacgaacgagcacaaaaacagcaaacgaaccgccacgcggcaacaaacaaaagggagagagaaaaaggacccgcaaaaacggcaacacaaccccaaaaagggaaaggagacacaaccgcctggccccgcgagcacaccagcgagcagaaatctccgcagaaagcggaagaaccacaaggccaaggacaagaaaggaac

SEQ ID NO: 146923 - DNA, 401 bp, Glycine max
  unsure (1)..(401): unsure at all n locations
gggagcgctatccgcagactcaacagaagtgtattgggttatatattagaccacgaacatgaatcttacacccagcgggttattgataggaccaagagcttcggcctaccctaccgcttacctagatacctatcgtccaccatcccaccatcatccttgcctatcccctttgatactaaggaagagtttcatgaacaattaaccaaagaaaggcaagaaaaagaaacttggaagaggagatgccaggagctcgagcaagagaatgagactttgaaggggaagatagcccaacagagccgtgagctttttatccanaaccanaagatggttgataaagacgacttgcttcttcggaaagacgctttgcttcaccgagatgctagaaggaagaggagggttat

SEQ ID NO: 146924 - DNA, 399 bp, Glycine max
  unsure (1)..(399): unsure at all n locations
agctngaatgcttgatgccaaagacatgactattgttgctggnnaannatagacacttacaattgatataggagtctggttgaaaatatgcctaaatatctgcaattccctagtttttaggaattttcgttatatttcaaatttttaggatattatttttatcatttagacttaaggatacaatcactttgattttaagattacagtgttgctgtctgttgatattttttaattttaggttaccctttgactccatatataatgctaaagaataaaagtttaataagtttctttgcctaatgcctaacatatcactacttcttttgaaaaatcttttcttctaaaaaatcccaacaagttctttatctttgcaaggcgcacacaacttangagatttct

SEQ ID NO: 146925 - DNA, 401 bp, Glycine max
  unsure (1)..(401): unsure at all n locations
ntgctactngagcaaagctagctncggagggtacaccatgattgatttccaaannncntatnacttcaacaatgtaatgaaagaaaataagcaagcgattgaatgactagagaagatcccaaaagaaaaatggactactggttgggacagtgggcgacaatggagtcacatgacaaccaatcttgttgaggccatgaattcaatgttgaaagaaacaatgagtctcccaatctttgtgttggtcaatagtacttatgaaagatgcaacaaatactttgtcaagaggggcagggaagccataacaatgatggcaccagataaagaattggttgacaatgttgacaacatcattgagcccgaagaaaaaaaaggctaactccatgcgtgttattgtagtcaat

SEQ ID NO: 146926 - DNA, 382 bp, Glycine max
  unsure (1)..(382): unsure at all n locations
agcttcttatccaagggtcatctttgtggttaagctccttcttccatggcttattccttaatggatggcgcctcctctcacctcttctcctttgtcttccgctgcatctccatggtggaaaatcaccattaaaggacctcattgaagctcaaagatccagcctccatagaagctccacaagaaagcttccatcagctacctactcacaaatacacatattttgaaaaacacttttacgctacccatccaaacactttgtaaggcacttcatgctatatgtattcatattacgcaaggcattntcatgctatatatattcatattttgcaaggcattttattcaacattttgcaagggaatttatgctacatatntacataca

SEQ ID NO: 146927 - DNA, 414 bp, Glycine max
  unsure (1)..(414): unsure at all n locations
nggaaggatgcttcaatggaggaaaagaaagatggagtatattgagagaggggggaacacgaaattgaaggaataaaagagggagagaagtggaactttgaagtatgtctcacaagactctcattcatcaaagttacaacaagtgttacacatgcttctatttatagactaggtagcttccttgaaaagctttcttgagaaaacttccttgagaagcttctttgagaaaacttccttgagaagctagagcttagctacacacacccctctcataactaagctcacttccttgagaagcttccttaagaagattcctaaagaagctagagcttagctacacatacctctctaatagctaagctcacctccttgagatgagatgctagagcttagctacacaccccctaaaatagc

SEQ ID NO: 146928 - DNA, 369 bp, Glycine max
  unsure (1)..(369): unsure at all n locations
agctntggtgaagaggtgaacatatttttatcttatattattngncagnngntcactcgctaagtgccaagtattcatacgctaagcgagcccctgctcacgctaagcgcttaaacccctgattagtggctggatggtagcgctaagcccaattatctctctagaatctgaatttctcgaattaggcttagcaaggtgatgcgctaagcacaattccctctctattttggaaatctttggaatagcactaagcgcaagccatcactgcatggaggagcatgtttatgcgctaagccccacctttagcagctaaacgcagagcgcaggtcctcgcgcttagcctaaaaacctctctggaaattgaaattt

SEQ ID NO: 146929 - DNA, 438 bp, Glycine max
ggacactatgaaactaagcttccacaacatccaagcaatttcaacatccaatcatcatgttctatcaaaaccaagaaaacagggcagaggcagaaaactctgcccaaaacacaaaccaataccacaactttttcttactcaattaccccagcaacattctcttcgttccaattcgttcaccgttggatcgactcgaaacttttactggagatccctagtacataagtctacattttgaccgttgggatcttctaggaaacgtccagaacccaatatatacaaccctttccacaaccagcaatgcataagcattttctgcaccaacacaaaattctgctgcacactttaacagcaaaattctgcatagaagtgcagattttcgaaatcactcttgccctcatccaaaattgcccaaattggatcctacaagtcctaaat

SEQ ID NO: 146930 - DNA, 401 bp, Glycine max
agcttccatcacttttctttactctaactatgatgatgaatgatgtaatacaaatatcatatgtattagaagacacaacacaagataacaaccaatacaaattccacttaagggagttaggcatgtaaaagtctaaaaatcttcaaaacttctttaacatttgccttgagaggttgttcaccatattgctgatctcatgttactccccctatctctaacaatctccctttttttggctttgatgatgccaaacttaaatatgacattgagtgcatttggagggtttgggtcttgagattggagctttgatccttagacttatcctgaaaaattcttaacacttaagaagagaataattcatcatcatctcatatatattaattcatcatcatataatcata

SEQ ID NO: 146931 - DNA, 403 bp, Glycine max
tggcgttgtgtagcgaagcagccatcatactctctagttctctgtgatcaaacttcctttctttttcaaatattctatgagatgggtcatcttctagaattttaattggatgatcaaagttcgattgaagcttatattgtggctaatctaggtctcctctacttgattccatagtaaaatttgagaaaatatcattttcttcttgtaccctcaagtgtcctctagctttcatcaaggaatttcaagaattgcgggtaagggaagctccaacctatgctaaattgtgttgtgatggtgaaatattgagtaatgagatggctgcgtgtaggcttatccttttgccattttgaaaatttagggattttcaaaattaagtttgattgacgatgttattgggcatatt

SEQ ID NO: 146932 - DNA, 399 bp, Glycine max
  unsure (1)..(399): unsure at all n locations
agcttgaacatacaaatggattattgtatttcatanaaacaaatttctttatgtttactaattactcctctaattgaaaaatgctaccaagtactaacatagtaacatgcccttagtccaagttattcagtaatatccatcgtaaaactttatccaataatatttgaaaagtgatcaaaactagaagtagttttgatgctgccctagatttttaagcataggaaggtagtaatttaagccaaaactcattatgccttttaacatgctatcctatcaaattatgacaattttataaatttataatcattactctcaaaattcttgcanaccataaaatgttcgtctagttttctttctttttggatatcctttggccgagagtcaaaaactaatttttta

SEQ ID NO: 146933 - DNA, 379 bp, Glycine max
tgaagcatgcttggcaatctgttaacaactgtaacatgttattggaaccaggttgtgttgagattgtggaaattctcattcctggtgggaggatacgatttgtatgcatgtttgtgctctctatcgtcaacatggttggtgtgcttgggatcttatgtgcagtactgttggcatctgtgagtgtattactcctttactgtccataagtgtaactatgttaaatataacttctaaaatcttgttaagtgtaactatcttagttagacagctgtgagtctgtgactgagtctctgtatatattaggtactgtgaacagagactcagtgcctttgtagtggttacattttaaatacaattcccaattttttctttaacatct

SEQ ID NO: 146934 - DNA, 342 bp, Glycine max
  unsure (1)..(342): unsure at all n locations
gcggacggacacacccagatggctaatatcacgttcaagaggatgtcaacctgcaacanactttgaattactctaccttaatgaaccaagatgtgacttgataaggctccaaacaccccctcccatgtaccgctgaagatgaaaactcatgtacgaacagttggaccttagaggatgttcatgctctcacatgcagaataatcaaggatgattgcgccttcggagtgctatggatgcgaatctggatccattggatcactaacatatggtgactttgcactcactaaatctcgctagtgactactacctcctgatcaatgcaaagaaccagactcacttgcc

SEQ ID NO: 146935 - DNA, 389 bp, Glycine max
  unsure (1)..(389): unsure at all n locations
tgctcgccagccccatnggatctttacgttatccaaatataatattagcatatggcatgctgatcactgttgcaccctgctgccgacaattcagtactgttctgtccgctattggacagaatcgcactcagcttccttgcgatgcacggtctagacaattatctcttccattgttatgcaagtagacccaataatttattgaactttaacataagcaggaaattaacatgtttaaaggattataattctaaatattctcccaattgttgagtaatgagtaatactaccggggtacaatnttcattactagaatggtcatatcacgttggagaaagtaaatatcaccattgaacatacatatttgtgaatgtaaacaggaattataatta

SEQ ID NO: 146936 - DNA, 417 bp, Glycine max
agtcaccgcggctgcagcttgggcggaggacccaaaaagttgtgattctcttcatgctcccgagataattcattgatgttgtgatatcttcatctcatctatgcaagctttctcctttgcatgattcttatactgcttgctgtattttattaatggggataaaaaatctacacaatttggcttctggttatctcaagtatctacaagtacaactactaccctgcttgttctcgtctattcaagttttcctttacatgattctcgtactgctaaatgctaattgtattgaaattaaataatgggaatgaaaaatctacacaattttcttctggttatctcaagtctctacaactacccctcttgttttcatgtaaatttgctgtacgtgcctagcttgcttgatgtacacactttcct

SEQ ID NO: 146937 - DNA, 419 bp, Glycine max
  unsure (1)..(419): unsure at all n locations
tgaacagtatatggattagccaccatgttgaaaggcacttttattncttatctcattctttttccctgttgacttggccttctttaagaccttgtttggttccacataaccagttactgttactttctgctgcttcctgtttatctccaccgattctactcctacacttacaccaccattttttagttaatttcatcaccttcatacgtgttgaatgctatataattaatatatcacactattaattttcaccaaaagaaaaatattacactattaattgataacatactctctaacacttttgttttaacatattatttattattaattaaaatttattgaaaaccataaattataaattataagtgaaaccgtaaaataaagagtcatatcaaacattttttgtgattttcaacaaa

SEQ ID NO: 146938 - DNA, 362 bp, Glycine max
  unsure (1)..(362): unsure at all n locations
gagctgcagcttggacgngggaagggacaggataaattattttttgaagacngnccccaggctcacgaaaaaaagacttaaacactcagtgttgcgctctcgggaaagaacctttttcacacaccaataaatattgacatcgaacggtcgatcgtgaacatctgcctgtgaaccaccagaccaaatttgagaagaccaacggtaatgaatgcaagagggcctttactgagacagctaaggaagcttcttgaaagcttttctcgataggcttctttgaaacttccttgaaggcttcttgaaagcttctcgaaggcttcttcagagctttttgaaactaaatttaactattaccccctcaatac

SEQ ID NO: 146939 - DNA, 354 bp, Glycine max
  unsure (1)..(354): unsure at all n locations
gcacccggagatatgtcgcgggggtcaggagaccttggggacgtcacgtggggtgctattgcccaaaaccaaacttgaccaatccctacccaacccgggcatagtcagtcagtgagaacctgtgatgtacctaagcaggctagctcctggcagtcaacagataaaaggaacaaagaccacaaancaaagaggcttgtgtggtggctggccacttgtgaatcttgtgtgatatatgggttatggtctctcgtaatcgattaccaagggtgggtgatcgattacaaggcttgaaaattaacacacgaggctaacataatctctggtaatcgattaccaggtgttgcaacctaccct

SEQ ID NO: 146940 - DNA, 393 bp, Glycine max
  unsure (1)..(393): unsure at all n locations
acctgaggcatgcaagcttagaccaaagaacataaaanctatgtattcgaaattctctcaattaacggancttcaagggttgagaagtgaaattgagaatgaggtaaatttggagcaaactctcacctcacacaagtctataacatcaatctaaacttgctcaaactagatttacacctaaaattccaccgaatcaaaatttgactcctcaacacccaattttaccctagaaatggctctttgttcactttggtcatttgtttttctctcttgcacagcccaagcttcctcataagtcctaaatgacatttcaaactaggattaactcactttaacctccaaataccactaaatccagatttggccctccaactctcagaaaccctactcttt

SEQ ID NO: 146941 - DNA, 420 bp, Glycine max
tctagattggtataccatgccacagccgctccggccaatctgtcttgttagaaatggaccaacagcttttcgtccgcagaatacgcccccatctttcggcaatacatccgaagattccctttcggacatgttgtccctttgtacttatcaaaatccggtactttgaacttgggagggatgacgatgttaggcacgagacataggtccgctaaatccgagaacgggtaattgccgaggccctctactgctcttagcctctcttcaagcgcatcaatctttcccttatcttctgtgaagggaacagattcttttactggtgcgggtgaagatgggagatggcggactatgtttggttgaggtaattcatggggggatggatccttgaggggaagcagagggcctagatgggtatctcctttg

SEQ ID NO: 146942 - DNA, 411 bp, Glycine max
  unsure (1)..(411): unsure at all n locations
agctttgagtaatcgattacattgatttgtttttctattaccagngattgtttctaaataaatcaaaagatgtaactcttcaaaatggtttttgactttttcaaattggttttaagtttttctaaaagttataactcttcaaaatgatcctcttgaccagacatgaagagtctataaaagcaaggctttgttttgtattcattcattcattcaatcaatcaatctttcaatcaatccaatcaattcattacaatcctttacaagccttgaatctctttgaacttcttcttcttctttgtgccaaaagctttccaaagttttctggttttctgaaccttgaaaacttgtgctattcattattttcatctcttctccctttgccaaaaagaattcgcaaagactaaccgcctg

SEQ ID NO: 146943 - DNA, 418 bp, Glycine max
  unsure (1)..(418): unsure at all n locations
tgngaggattgatggngacccggtgttgagagaaacgattattttgtttacgtgggagtacgtgagctcagttggaggtgggcaacaggggatggtgggtttatgcgcgatttgtggatgtggaaaacttgttgtgcaccatcgcccgaccgccacctagtaccacatgtgatgggtaccccataatcctacaagcttgagatgaggaagtgtagaagggtgaaacttcctgcttatattcgttgaccacagagtggtacctggagatatgtcgcgggggtcaggagaccttggggacgtcaggtggggtgctattgcccaaaaccaagcttgaccaatcccgacccaacccgggcatagtcagtcagtgagaacctgtgatgtacctaagcaggcgagctcctggcagtcaacagat

SEQ ID NO: 146944 - DNA, 409 bp, Glycine max
agctttcttgagagaacttccttgagaagtttttttgagaaaacttccttgagaagctagagcttagctacacacacccctctcataactaagctcacttccttgagaagcttccttaagaagattcctaaagaagctagagcttagctacacatacctctctaatagctaagctcacctccttgagatgataagctagaacttagctacacacccctaataatagctaagctcacccccatgacaaaaaacatgaaaatacaaaaaaaaagtccttactacaaagactactcaaaatgccccgaaatacaaggctaaaactctatactactagaatgaccaaaatacaaggcccaaccgaaggaaaaacctattctaatatttacaaagataagcgggctcatactta

SEQ ID NO: 146945 - DNA, 426 bp, Glycine max
  unsure (1)..(426): unsure at all n locations
aactatgaaactaagctttaacactntntgaatgaaaacttaaatgatgttaaattttcaattattcacataaaaagaaggaaaataagagagaaaaattaacaaatcctacataagtcaatcccaaaatatacctatacataacagttattattgacaggctgcagcaactctagactcttgtaaacttattttaaatgaatccatatttttaatagctctaggatgtattggaatctaatctaatgtaccttaatccaatatgcgctttctataaaacttatggatagacataaaaagtgttacacaaaattccagtttgaatttaatggagtattttcttttgcaagtgcaagttatttgttttggttgtctctgtttttcttttttgttgtgttttggaagctatattcatgaataaattgt

SEQ ID NO: 146946 - DNA, 400 bp, Glycine max
  unsure (1)..(400): unsure at all n locations
agctngcttctacaatcatcagtttttanttagnttttgnnagaacatactaaagattttgaaggacttccttaaaaaccacattggttgttatgttaagtggttttccatctttatcatgaataaggatttttagtccattcttggtctgaactctggagaataccacataaagttggacatgactaaaaacaagtttaggaagatataatcctacactttgaagagattgtccttgggatttattgattgtcatggcatatgaaactatgaacataaattgtcttctagtcattttgaatggccatggagattgagatggtgataaagacattcacataagatacaccaaacttcttatgttnttccctgtaactattcgcgcttcaataacatgatt

SEQ ID NO: 146947 - DNA, 411 bp, Glycine max
  unsure (1)..(411): unsure at all n locations
actcaacttttatccaagctcatcttgggggaagtttatttttttggcttattccctatggatggtgcctcctctcacctcttctcctttgtcttccgctgcatctccatggtggaaaaccaccattaaaggacctcattgaagctcaaagatccagcctccatagaagccccgcaagtaagcttccatcaatagtgtagggttttcttcgagttttcttcgatagggggttctgtgggtttgtgcgagcggtttccggcagtattgaaaataatgtgggacaatgtgggtgtcgagcgaacggtttccagtagaattcatgcgggaggagaaagagaacaacgagtgtacgggtttcaagtgcgcacgttgtgaaatttcaatgttttaacttatanacataacaacatc

SEQ ID NO: 146948 - DNA, 395 bp, Glycine max
  unsure (1)..(395): unsure at all n locations
agcttgtntgaaggacagantctctttattcattttttgcaggaactagatcagcataggccaattatgagtgtatagtagttcattgagaaggtggcctggtctgaagcccgaccttcttttgtgggagataatgaaagttttacagcccaggcaccttaacagcatgaaccagaaccataaaatgatcactcatttaatgcccccatcctagagccatgtgatatatgagaagatgcagaggagacataggtgagacaggtagctgctaccactcctgagtgatcccttgaagctaccttagagccttttgcaccaatggttaacctaccctcaccttagcctggagaaaaccccttcactcctcttctacagatgcttgaggacccctcttc

SEQ ID NO: 146949 - DNA, 382 bp, Glycine max
  unsure (1)..(382): unsure at all n locations
gctaccacacacttctgcagcatctttaaaattttattgtttttcctttactaaancagactaatgatggaaatccaaagatatgatgtttgtgatcctctagccaggacttggtttggggatctacacaaatgagaacacaaccagatttattgttcatacaatttttaatcagaacaataggcacgacatgagatagaattgcatccgtcttacctccaagatatgcaaatccaaaaaacctctgcatgttttcaacagtctcatcaagcacccattctcttaaagcatggtcccttgtgacctaaaagtttggattaaggttgcaggtagactacaggactttataccattggtaagttcataaaggagaaacaagtac

SEQ ID NO: 146950 - DNA, 362 bp, Glycine max
  unsure (1)..(362): unsure at all n locations
ggatccttagagncacctggcgcgtgcagcttgagataacaaganttttcgtttgtgttctgcggacaacactganggcatcaaatgatgatgcacagttagctcaagagattcccagatcatccatcttttgataatctagacaagtcttgagggtcagaatcagtaaaaatccatgactcatgcataatggctcgatacgcgattcaagatcatgattcgggactcgtgattcgagaatgaagacaagactcatgtcaagataaggatctaaaaggttttcaaaacgatgaatagcacatgagtggttgacacatccgtttccaaacagaacttactctctggtactgatacaccatact

SEQ ID NO: 146951 - DNA, 380 bp, Glycine max
  unsure (1)..(380): unsure at all n locations
actcagctttgttaccccaggggtccattanggaagagtttgtgttttattgccatgagggcgggctcatgggccactatgggatataccagacccttgtcttactcaaagaaagagccttttggccccatattgcgaatgatgtccataagcagtgcactaagtgtgaggcttgttgacgacccacttctacggcgatgcctcatgggctatacacacccttacccatgccatttgtaccttgggggcacatataacggacttagatcttgcgcttactagaacccatagatgtgaagactctatctctgaggtggtggatatgattagcgatgagggaccactttataccatgccacaagtggctgatgcttcccaca

SEQ ID NO: 146952 - DNA, 316 bp, Glycine max
gaacttaatgatatgaagcattatttgttatgttctttgtcttgacatggctgccaacacgattcaaccagagatgaatgccattgactattcatgatacacttatccactcttgttaggagttgaacgccaataaagataccgcttgctgaagcatagtgttatcgattataatgatatatccatatgggcatggagagagcttgtatatatggatacattgaataaataaaatatgttaaaccactctatagggttgtacacacaaaataagccatatatgtttttagatgaatagatttttatggcagagaca

SEQ ID NO: 146953 - DNA, 412 bp, Glycine max
tactttgctgtcttctataatgaaggcagccttgctactttcatccttctgccgagctccacactctgttgacttcgtggttcttcccttatctcgcttcagcagagaacgtcgaaagggtgctttttgaaaatgctgcgtacaaacatccgtttgaggacagagtatttgtgcccaatgagcttaaaaagcaaagaacgttagctctaccaaaagaagcgcaaaatcagagaagctcttcaaggtcttgcctaataatccctaaactcaatggcctttattatctctcatataataattatatatatttttgcagaagggaagcgcatacccactgaactcagaaacgaggaagctgctcttcgccgcgcaatcgacctcgaagatgaatacaccgctggtatatttacat

SEQ ID NO: 146954 - DNA, 385 bp, Glycine max
  unsure (1)..(385): unsure at all n locations
agcttgtgctaaacggcataccttgttccttactccgncacttatacaggcctactctctgagtacaaagtgattcacaatagtttggtgaggaattaagcattcatctctgtatggcacaatttgatatcatattgttatctaatatgagtatcttttgcatttcaagatgtgtcaagtaccatgttctcctttatgaaagctgcaagattcactcatctgaacttggaagggaccaaatgtagaataggttataatcttcataggaagaccacaaaaattggatatggatggaagacttttgcacaaacacaaaatgtgctttctggaacacaaattatatttgagttcccagatgcaacttctaacttagtttattctggtt

SEQ ID NO: 146955 - DNA, 348 bp, Glycine max
  unsure (1)..(348): unsure at all n locations
caactagntaaacaattttacccataatagttagttgtgtgtttactaaaaacttactggatgttgtaacatcaaagcacttacataatgttccttatgatgaacgcatccgccattgggggggcccacatggacaacatagtggctacattaaagatggaaagaatgatatgttcaacgtgaatcaaaagtgaaaggtcaaaatgccaaaaaatattaaagggaggtgggatcaaacactaatgctatatttcttattacttcctttgaataatgtcttttaaaatttggagttagaaggccacctgagtgtactccataatatgaccctattaatctcacagtcta

SEQ ID NO: 146956 - DNA, 398 bp, Glycine max
  unsure (1)..(398): unsure at all n locations
agcttgtaagaattgcaatatcatcttccttgacaactccgcgaaaaagattgccgtcaatatgaagagataacaatttagagagtgatccaagactttcaaatggatttccactgaatttattcatagagagatcgagatatcttaatgatgaaagttttccaaatgatctaggaagagcatcaccaattgagttgttggaaaaaagtaacgtgtcaatatttttaaatgccccaatatgatctgtcagattgcctgaaagtcgtgaactctgaactgcaagtgttgtgagtccatgggaaatacaacgagcaaagaatntctaaaaggtcatttaacctgttggttgagtttgagatatgataaatctatcacccttaagttgcagagaataccca

SEQ ID NO: 146957 - DNA, 372 bp, Glycine max
  unsure (1)..(372): unsure at all n locations
tatgcattaagattgcaaatcttcataagttagatatttttataaattatatatttatttttctcttctatcactattcttaaaatatcaccacacaagtaaatgaaattcagacaaagactttaatatatgaagacttgtggtctaacaataaaatagctaagaccatagataaataatttaaaaaaacatgccacacttcttggtatatcatatcctctaatttactttntaagctaaatatgatctataatatatgtgagaaattggaccaagacttatacaagaaaaaagttatgctctcaataattatggtagaccaagttaaacaagcattttacacttctttgatcttactaattaaattttaat

SEQ ID NO: 146958 - DNA, 403 bp, Glycine max
agcttgtgaacttcaatttttgtttctattcttaacatacgacaatttcaatcaaaaagatctactactattcacatacaaaatgaaacaattgaacgaatttcaaatagaccgactaaatattcacggtgtgaaaatgaaggttatcatcatgataattatccatataggcaatgaacgatgataaatatcttgcaaactttaatctttcaagcataattaactactatatattgttcaacatacacatttcgtccatataccacttttcttataatatattattataaaaaaatcataaatcatcaaatttaacatcaaatataactcatcttaaataacattactaagatcgtacacaatacaatttcaatttttaaaaaagacaaatataaaaatatgt

SEQ ID NO: 146959 - DNA, 366 bp, Glycine max
tattacggacctataaatctaagctatgattcattatgtgaattgtatgtttttggctattgtcaatgacacttttcaatgtggtgaccaatgcttatgtatgccaactcggccctaaaaatatattatttgacgctaactcctactgatgtatggggagggggtgattcctggcatgataattaacctcgattgcaaatactcttagcgacgaataggttgctgatgtgccattctagatgttaataggactcttacatctattgcatattacgtattgtattgatcacacagcaaacaactttgatatcttctttccacacacttataatgataccagccttccactatacacatcttagtttt

SEQ ID NO: 146960 - DNA, 363 bp, Glycine max
acaccggactcatgctactaataacatcaatcataaggtgataatatgtcgagttaattgcattaaatggcactatagcatctatcatccattttgcaatggctttgtcacacttttctacaattttcttattttgcaagacactcttcaagctaggtagagctctaagagatgttctaagcatgaaatagtcatctacatgaatagagttctttcctttttgagacttggaagaaacaagagattttggagttcttcttaattcctcaactattctcacaaggtcttcatccatttcaaatgtattattttcctcaaataggcctacacttttcttttcttgtttttttttccaaactattc

SEQ ID NO: 146961 - DNA, 377 bp, Glycine max
  unsure (1)..(377): unsure at all n locations
aatatncaactnntaattagccttgtgtgttgagtctcctgagtatacaatcaaagtctgatatcattttaatcaaagacactntgagaatgatttcacaatccactttaatcagaggtcaagcaatattagacaagggtttttgcttatgtagagggtagtacacacagaacagctatagatgtacaccacacaaatagttcctatttgactacttctgcactacatataatactcaatactctttagaattagtacctctgagactctatttcatattaatacaattaactttgctgatcaaaaaaaatatttaataaacgaaaggatttttattgaagaaacctgaaccagagccgaccctgtgtgtcttcact

SEQ ID NO: 146962 - DNA, 427 bp, Glycine max
  unsure (1)..(427): unsure at all n locations
tctttcagagccccatgaatagcgnnttcgttcatgcattctcctcctccgagnnaggagccatgcgtagagattgcttagtgcaattctccattctcaatcttttttcggagccccatgaattgcattttcgttcatgcgtcctccacccacgagtttggagccatgcgtagagatagcttagtgcaattctccattctcaaccctttttcggagccccataaattgcattttcgttcatgcgtcctccaaccacgagttggagccatgcgtagaggttgcttagagcaattctccattctcaatcttttttcagagccccataaatagcgttttcgttcatgcgacctccacccacgagtttggagacatgcgcagagattgctttgtgcaattctccattctcaatcttttttcggagccccat

SEQ ID NO: 146963 - DNA, 365 bp, Glycine max
  unsure (1)..(365): unsure at all n locations
ctcgagcgctgagcacaatnctgaaccgnttaacgcgcattagagaatttcagcttatggcggctnttctcgctcagcggatggactgaagcggagcgcttagagggatggcccttcgctcaacgaacaagcacaactcatccttcttccagattcttcctcgcgcttagccgaagaatgttgcactcatcaaatggctcgctaatccagcatattggcttagcgagagggagaaaactagcacttcaaaacttgcctaattaacctgaaattgagagaaaatgattattaaactcacaaaatggaagtactaagtatttattacctatctttaacaaaaagnaattacaacactacaaaataac

SEQ ID NO: 146964 - DNA, 334 bp, Glycine max
  unsure (1)..(334): unsure at all n locations
atataacctcctcccataaatacaaacatcaatggaaatttagagcaagctgatgcgcatatttccttacaaacgttctcttgcacaagacattctattaaccgaaaaaaaaaatgcacccatatacaatcaaggcagcttcgntacctagattatttacacgtacttccaaagagatttagtacttacatcacacacatctccttggctaaattcacatacaagcatactcaaagcattttggggtaccaaaaattgcacatgtgcacatcnttggatttctaatacctatacatacacaaacttcatgatgaatcttgactatctacacaat

SEQ ID NO: 146965 - DNA, 340 bp, Glycine max
  unsure (1)..(340): unsure at all n locations
nttcgncttacagacagcaaataataatagggatacagatcatccctcgagnatttccgccagtcagcgtgactcaaatgtgagtatgacagatcttgtgagcgcggaagatgacgtaaatctccgcgtgccaacaggcttgtcagctgtgattgacgtaaggcgcataagacgacgttagtctttgcgtgctatcaagcttttcgtcttacagacagcaaaaaagaatgttcatacagatgaccactcgggtatttccgcctgtcagcgggacttaaatgtcagtattacagatcttgagagcgcggaagatgacgtaaatctccgcgtgtcaacaggc

SEQ ID NO: 146966 - DNA, 360 bp, Glycine max
  unsure (1)..(360): unsure at all n locations
tcaaagaatactcaccccaatgagtgtatgaatgttgtttttatcccncaaacgnatncttcttggatgtaatatgtatatatcccaaattaaccatgtgggttaagtttggatgtgagataagtgattcccatggtagattagtaactttgagagagtctctaagattgtatccttaagaagctaaagagaaataatactttagtagtctaaaaaagagaaagaaatacttgtattatctcttccatgaccaagaggatgtcgaggttgagtggattttgcttcccaagagtaaagagaatcattctacaggttttgcccacccaaagaagtgaagtatatttggattgtctctcccat

SEQ ID NO: 146967 - DNA, 302 bp, Glycine max
  unsure (1)..(302): unsure at all n locations
atactcaagctagaatgctttgaacctaagagacatatgtgagttnaattctacttggngnnnnnncagacagaaggcccaattggtggctanaaccacagtgctgctggcagagtnctatgtcatcactgacaacaccatcatcgngacccaacgcatcttcaagaagctcccaatagatgccaacttcaagctcacaaatagcaagtccaccctcgcaaagcctccaccctacaccctcgcaaatctggttgtcgatgtagaggcatccatcggaggatgagacagaggtgcacagtgtc

SEQ ID NO: 146968 - DNA, 296 bp, Glycine max
  unsure (1)..(296): unsure at all n locations
atagaacgcgcgggcnaaggggnctatngnnagaagnnnncagaaggggctcgnatncatccgggatttcactgggcccttttgaagccattccacggagaccccattcttgattcacccaattcactgccgacacgctttattaacggtcaaccgatgctttcaccgcttgccattcttgattatcggcgacattaagagagggacacgtgggaagtatttggccagaggcatggactttcccctgatgaatcctcttgggaagtctgggaacagcttaagcaagatcatcacct

SEQ ID NO: 146969 - DNA, 320 bp, Glycine max
  unsure (1)..(320): unsure at all n locations
atattgtaaaagtataaaatataattaatcccttttctatattatgagttcacaaaacgagttgaatttatctatctatttaactcgntattttatgtgtngaacgagatcttcaaaccattttatctattctgtttaacttgttaaaaaaataaaataagataaatcaacctgttaattttttttttatagaaaacaatcaatatttgggtattttgacttttttcgaagagatttaacacattataactattatnnaaactactattctatctattagagttagnagacaggtcaatagaagaaatattttttaatgc

SEQ ID NO: 146970 - DNA, 359 bp, Glycine max
  unsure (1)..(359): unsure at all n locations
acacacatgtnncaaacgagttgagataatcaatttaatgccattaagaagaatccccaccttttgcagatcaatataatcccaaacatcatccaaaataagcagagttttttctcttttctccaactctgacgtcaaaattgttgctctagtcatctcatctccgtaaagcttaacctgtattgtttctgcaatgtcatgttgcaatttgaaagaggagaaatcatcggaaacagagacccagaagacatccttgaaagtcccctttcttttaatctcattcttgatatgagttgccatgaatgtttttccaactccccccattccatctatgccaataatgaagacttcctcatcct

SEQ ID NO: 146971 - DNA, 312 bp, Glycine max
  unsure (1)..(312): unsure at all n locations
ctttggtcattacaggttccactcctcgcaacgagaccatatgacccaagtattcgacctgattctgggcaaaagagcatttcaaaaattttagaacaaattgctctgccaacaaaacttgaaatgctttctccaaaagaagtaaatgagcctccaatgtacgactgtatatgagaatgtcgncaaataagaagacaataaaatggtggcnaaatggtcgaaaaattatgttcatagaggcttaaaatgacaaatagcgcgtacaaatcccaaatggcgtcaccctgaactcatagtgtccatggagtgtgc

SEQ ID NO: 146972 - DNA, 374 bp, Glycine max
  unsure (1)..(374): unsure at all n locations
tgcacagaaagcattgcatttattattaaccgntcataaagctgctatcatgtattcaaatgaactcagaaagaaaagaatgaatttttggntacctgcctgagaccacctttgctatttctgtccatctattaccaaatattttttgagcctacagaaaaaatggcaaaatataagatcacatttatccatgtgtagtaaagagcagntagagccatccacaggagtatacatatatacatatgagatccaagttggttagggtgaacctactcctaataataagctaagctgctcctcagtactcaagttcatcaatggattttgnctactggacagaagcatcagacaattacaacaacaaaagccttatc

SEQ ID NO: 146973 - DNA, 366 bp, Glycine max
  unsure (1)..(366): unsure at all n locations
cccgctccatggcttttcagtgcaatattaaaaaaatgtgacatgcacagncttgggtgtgacttgagtgagttgagataccagtaccccataccgactacaaaaatggccaaagtagagctagtcaagnataaacaataaataatatttatacaaaagtagatagaaattttattttgccccccagctgctgcaaatgactgccactaggcctgagattgactatagaccatgacttagtttttcattggcataacattttttaacaagaatagnttttagcttctttgctgatttatgttgaatctttggagttgaaagagatatctgaagagatatnnnttttgcttttcttttctctgtttc

SEQ ID NO: 146974 - DNA, 446 bp, Glycine max
ggaactataaatctaagctaggacgacctagaagaggatgattcctgctgatattaacattacttcattagaagaaacataggcatcaatagaagacatttgatgctacagatttgtactatgctcaattgcatctactagtcaaagcacaatatgcataatattagaggaagacagataaatattttggaatataaactcattcctagatctctaaatcacatccaacacgacaacaaaaatagtattccactttctgttgtcaacctccttgcaagacaacatattagatctcaaccaaagacaaagctgaatctggaacaaaaatcaagaggatatcagctagaaaccacaagtaccaaacaactctgagccaaaggaacaaaacacatgatcaatatcacaatcagcccgcatagaaatatgcctcgatcttctgctttcat

SEQ ID NO: 146975 - DNA, 394 bp, Glycine max
  unsure (1)..(394): unsure at all n locations
tataagatcaaaatagcctcaatcatttccaaatatgcatgtgaatnattacgcatcaacaagaatcaagccaaagctattgtgcaagaaatcaatgggagcaaaacacaccaaatgattatgatgatggatggctcanattctcacaaaagtaaaatcatcactttcaaatagagctttcaaaactatcatgacatgtagataagaatcaaagatttcaagtcacaaaatgtcaagaacttttattttcaaaataattacccatttcttgaacatttcctataattcaaagaaaaacatgcaaagtcgtacgtgcacacaaaattgacccaaaatattaaactaaaaatccgacgaaactaacaacattaacaaattaacacaactaacaaat

SEQ ID NO: 146976 - DNA, 367 bp, Glycine max
  unsure (1)..(367): unsure at all n locations
gacaccaancanaaacaaaaggagnnntgnntgcaccagaaacactattaaaaaatactgggaactggactgcttataatacagtagaaaaatctgctatactgcaaattttgttaaattcttgaaaaaaaaacaatactcaaatttacccccaccacattaacaataactgatacaagatgtagaatttcataaattacagaaaataaaaaatgttgacaagaatgaaatttaaaataatatagcaataaacaaaacttagccagaagcttgtgtgcaacactcctcatctgctgtgaatccaccacaagagattagtgaacgtattcccatcatcaaatcctgtcaactttctaatattctgcag

SEQ ID NO: 146977 - DNA, 361 bp, Glycine max
  unsure (1)..(361): unsure at all n locations
ccatgagaagacaaagcacatagatgtgaaactacacttcatcagagatgtgattgaatctgataatgagaaagtagagaaagtttcaacagataaaaacccgactaatatgttcacaaagtccctctctagtgtcaagttcaagcactgcttggacttgataaattntgaagatgcctaaagcagattggtagaagagcagccttgaatcacaaagtagacacttgctgatttagagtcaaagaggagatttgaggagtgtgactcanaatcacaaatgacacaagtgagaagactctaaagtaatgatgtcataactgttttcagttattataactgaattgggtttggcaccaaagca

SEQ ID NO: 146978 - DNA, 401 bp, Glycine max
  unsure (1)..(401): unsure at all n locations
agagtccantggatgaaaagaaaaagtcaaaattgatntatgagaccaancaccaaacctggaatcctgctgtcttctcaaaatgtagaatcttatgcacaaacccaaaagctgaaaagacctacataagagtacaataactttcagaatgatatttaacaacatgaatcttactaattgaacaagaaatgaacaatgtctggtgtcatctatggtataaagtagagaacaaggagcattaacaaatatacaatttcaaagataattcagtatacaaaaaattggaagcaggcttaaaagggggtaaaaagagatagtttaactgagagaattcaattagataattttccttaactgaataactgctaaaatatataactgaaataaataacattaatatt

SEQ ID NO: 146979 - DNA, 412 bp, Glycine max
  unsure (1)..(412): unsure at all n locations
tggagatcaagagaatnctcacaaatggtcatatcaagatcctcattataaaagnncnnagaccaagatnttggctgcaacatcaaagtnttagaccgattgcgaccacaatcggnagcagntgtcagtgatttaccgcaatgtcaagaatcatgacaaaaccgcgtgagtgagaccacaagtaaaaaccttggactatatatataacactagaaatatcaagttcaccacagaaatttttaaacaatgagaatttgatccatatacacagaagagataaagaaaaggaaattataaaagaatgaataaatgaaggtcactaatcacttataagtgtcacaaaccgcttccacaagctagggagatcaagagaattctcacaaatgggcatatcaagaatgctataataaat

SEQ ID NO: 146980 - DNA, 346 bp, Glycine max
  unsure (1)..(346): unsure at all n locations
nttaagagagnncnnagacatgagatcagaacctgctcttgtgctccancnnttnncaccccattgatctatataaagntgaattgggcaagcatgttagagatataaatnagctaggcattcataggcctctacctacaacccttagctttgctcattgacaaaaatgtcaattttccatccacttagataccataattgaaattataggctccctaaaattctcaattcacttccctttcgagcctgtttcaccaaataacaccagctcgtacttttcaagagcggacactggcgccattttcactgatcaccagcttgnactacaaataaatttcttttttct

SEQ ID NO: 146981 - DNA, 311 bp, Glycine max
  unsure (1)..(311): unsure at all n locations
acaccaatagattataatgatggctggctcatactcctacaaaaggaaaatcaatcactctcaaaatagagcttgcaaaactaccacgacatgtacagaagaatcaagagattccaagacacaaaaagtcaagaactattattttcaaaacaaatacccatttcttgaacatatcctataattcaaagaaaaacatgcaaagtncgacgtgcacacgaaattgacccaaaatattaaactgagaatccgcgaaactaacaacattaacaaattaacacaactaaccaattaacaaaaccaacaaaactagc

SEQ ID NO: 146982 - DNA, 317 bp, Glycine max
  unsure (1)..(317): unsure at all n locations
acacaaaaagagatttgcaagtcaataacatatgtcaagcatttaacaatgtaataatggagtacaaagacaagccaattattactctactggaaggaatccaattttacacaagttccaaaattttgaagttgaagactatcctcatgaagtatgaaggttccattngtcccaaagttcagcaaatcattgaaaaaaataaaaaagcatgtgaagcatagcgaccacattggtctagagatgctgatttgtctttgttagaaattcaaaaggcatagaaaaaattagnagcaatcttaaacatcagacatgttctt

SEQ ID NO: 146983 - DNA, 409 bp, Glycine max
  unsure (1)..(409): unsure at all n locations
gaccaaataataagcccacagcaatgcacagaagcactatatttnncaaatagnncgctncgcaaaagagaaaaaatatttttctacttccagaggggatataatggcactataaatactagattccacgaaaaatttgtttcctatgaagtcataccggagaaaagatttcaatgagattactatttcaattatcaaagaaaaagagccacaaaacacgtacaggggacttaaggaatatatcagcaagcagttttctgtatcgtttgactggctggcgtgatcttgacctcaaatctggacagcaaacacacatgttcccacatgctgggaagatcttccgagagatgacacccatttcctgcaattacaagatccagagcaaaatgtggccaaattcagaacaaac

SEQ ID NO: 146984 - DNA, 433 bp, Glycine max
  unsure (1)..(433): unsure at all n locations
agcnnacaacagatnntagnnatgacccactaacctagaatttaaattcttttatgccnnnaaccnaaggaatnaaaaaaaaacttaaaggctgagagtaactgaaattgaggcaaccaaaagtcacccccaacatccaacaagtcagccaccattaggtctcccaaaatgctgatgcctatgttgccaatagggcccttattacaacttgaactaaacctactaaagctcttttagttgattaacccaaaacatatttttggtcagccaactttataaagatagggccattatttagacaaactaaacactctaaaattgagacaaagaggagccatttagtcctcctccatttgggccatgatacaactcacaaccttggacttttctccttgaaacttgagcttgtattcaaatagtatagacagcactt

SEQ ID NO: 146985 - DNA, 367 bp, Glycine max
  unsure (1)..(367): unsure at all n locations
gcattcatcgnatccactaacagacgttgatgcgccgccaactgatggtactcggcaccaccaccacctgctccagccataattcaacaagaaaaaaaaaatgtgcaataaaaatcattaaagtttcaagacctcacaacactctactcacgtctcttagatggtagtacactcgcgtttaatgctctcaataagcttttagagaatgtattccctcttgccttttaccactcgtgtttcctcttaagttcctggatggaccaaattagacacacaagggaatataaaataaaaagaaagacaatataatgatcacaaacagatttgatttgggataacaacttggactcgatnggataacaatata

SEQ ID NO: 146986 - DNA, 329 bp, Glycine max
aatactcaaagaatatagaacatgggaactaagcgatctagaaaaagatctcatagccaaaacgacgacaagtattgacgcaccaagaaagaaagaataaaagagtgtagtctctcattggattttcccagaaagagctccttcaatagactgttgctcctctgcctctcttctttagaaagattcacatcggtaccgtctggctaacgctatagccattgatatatgacatctatctaaatcatagagctgcgagaattgaagtttcaatataggaattaaggcaggtttatatatgaagcagagctttcatgatataaaaatatata

SEQ ID NO: 146987 - DNA, 356 bp, Glycine max
  unsure (1)..(356): unsure at all n locations
ccaccagctccataatatcaatactcagccaatatcagcccttctcattacccaccaccctatcaaccaagaacacccaatcatccacaaaggccacccctaaatcctcaaataccaaacaccacgcaaaacactaaccaaagaaggaattttctaactaagaagcctgtagaattcaccccaatttcggagtcatatgctaacttactcccatatctactcaataaatggtagccataaccgcagccaaaggtcctcaaccttcattnttctgaagatacaactcaaacacaacatgcgcttatcatggaagagttccggggcattccattgagcattgtatgaccctgaaacat

SEQ ID NO: 146988 - DNA, 335 bp, Glycine max
  unsure (1)..(335): unsure at all n locations
actccattagaatcatcccatataggctccttagagtctgcaatttcaccttctttaactttgcatctcctgaatatgccttttccaagaagcaccatgcctcctttgatgtctttgcatgagcaatcttctggaaattcgccttggccacactttgatgaataaaaaatagagtcttgcaatcacgtnnctaggcatcnttgcatgcggctttctgcggatcactcgattgcttttcaagttcagcaattccacattccacaacctcaagaacatcttgaaatccaaatacaacttgcatctgaatccaccattctccctaattcgttccatca

SEQ ID NO: 146989 - DNA, 428 bp, Glycine max
  unsure (1)..(428): unsure at all n locations
ntgagcatatncaaacgacaataatcttttactcggatgtctgtntgagncccgnaatatatcgagatgctcgaaatggaataccgaatctctgagcaaattcaaatgacaataactttttactcggatgtctgattgagtcccgtaatatatcgaaaagctcgaaatagaatgtagaagctctgaacaaattcaaacaacaataactttttactcggatgtctgattgagtcccgtaatatatcgaaaagctcgaaattgaatgtagaagctctgagcaaattcaaacgacaataactttttactcggatgtccgattgagtcccgtaatatatcgagacgctcgaaatggaatgccgaagctctgagcatattcaaacgacaataactttttactcggatgtccgattgagtcccagaatatatcg

SEQ ID NO: 146990 - DNA, 418 bp, Glycine max
  unsure (1)..(418): unsure at all n locations
agagctagagctagncagtgagagagtcgaaattgncactgtctaanactnataaannnagaaaaataactatacgtaacctaagaggtagaaaagaaacaatataaattcttgagagttattctttactgcttttctttgagtttgactaataaaagctctaaattagnttttagatcttatatttgctttgatataataaagaaaatcattgnttgataaagctctttcaacatccttttatttgttttttttttgagaaacttgtatacaacaataaatgagtttttggtcaaagaaaaattttaaaatttctaaaaacacaatttaacctctcattcttatgttatttgcttctatgctagcttttcaactaattttgtcaaatataacctataaagttactaagacactactt

SEQ ID NO: 146991 - DNA, 413 bp, Glycine max
  unsure (1)..(413): unsure at all n locations
tagaacaatataccaggccttcatttaactgtctagggtctgtcgnccaagancaacaaagnactttcgacacctactatatgttgatttggccaacgctgttatcagtatgttgcgacaatccttcaataccttatttatacattctgagaagttcgctgtcatgtgttcatatcgacggccttctctatcataagccatgatccatttttcctttgaaatgcgatcaatccatgttgctatggagagactcagntgacggaatttttctaaatcttgataaaaaaaaatatgctagcaaggagtgtagcccgcatgaaatcagntagcaacaataatttgaatgatacatgaaagctaaatttacgcgaccatgataaaagaaatnctacttaatgtcttcaacatttctt

SEQ ID NO: 146992 - DNA, 312 bp, Glycine max
  unsure (1)..(312): unsure at all n locations
ggtacttttgggaagctttatactcataaatgatgggttctagagattgggtacttttctagatctttgttgnctttctaagtctcccttccatgttaaatttatgccctttttactttttggagataccctgcatgatgctctattcaagaatttggtctgggttactgtaattatacatctaatcgagagaatgcaatattaaattaatattttggatgggtacaaacatgagtaatctgatcatgtcatattcgncttgctgcacttgctgttagccatttggagaaggctgccacttcttgcactatg

SEQ ID NO: 146993 - DNA, 428 bp, Glycine max
  unsure (1)..(428): unsure at all n locations
agagctacgacaatccagagttcagtctcacattnactatgataaancnctcgcaaccacgataagtgtacgtatgccccttgacactgcactgtctcaactctagcttcatctccagtaactttaagtaactccactaatatcaacaccacttcgtcgacataaagatagtcgaagctgaggaaagctcctatgatgagcagatggagcaaagaggccacatcatcgagaggagatggagacttctcctactggaagatggaaactattcgtttccttatgccacctctcgacaaaagaagatataagtccccaatcgcccgagttcaatgaacatcatctgaatcatgattattctctctccccaaagctcttcttataactctgcctaagacacgccttatacctctagttataaccataatctg

SEQ ID NO: 146994 - DNA, 428 bp, Glycine max
  unsure (1)..(428): unsure at all n locations
gctnncccaacatncaggggatgcaacatacaaaacatctctttcttacaaaccaagcaaaacaaggcaaaagcagaaaactctgcccaaaactcaaaccaaaatcaccgctttttctcacttaaagaccccagtaacctttttctctagtacataagtctacgttttgaccgtagggatctactagcaaacatccagaactcattttgtactactctttccacagccaaccacacacaagcatttttctgcacaaaaccaaaattctgctgcacctatttggcagcaaaattctgcataagtgcagattttcgaaaactactcttgccttcatccaattttgcccaaattgaatcctaaaagtcctaaatcatgtaccaatcatgtctaaaccaaagacaatgcttaaaccacagcaacacaaaatc

SEQ ID NO: 146995 - DNA, 333 bp, Glycine max
aaacctttgcgatattcctcacagaaaacgttacggaaacgtttcagaagcgcctcagcttagattttcttcacagaaacaatttttccaagcaaattcgaaagagagagtagtgccttatgggctgtaccccttccttcttgccttcctcccctatttatagcaaaatatgggaggaggttgacgcccatctcgccctggcgtgctctgctcgcccaggcgatcaaggttgcttcctccagattcaaccgccttctggatgtatattccggattggcctagtgggcctgggtgctatttgcacccccatttttacttagtacacccccctct

SEQ ID NO: 146996 - DNA, 371 bp, Glycine max
  unsure (1)..(371): unsure at all n locations
ctcagccacatatcgatatgccgncgatgatncccattactatgcttcccctaatgctctctgtgcctttcttcatcgccagcatcccatagcctttgcaatctccttggagtatccctcgcgttagtggtcactcgaaatccccgagcgatgaaaagcatgatgctttcgtctgatggcactcctctcatgggagtatccaagctgtcttatggcgaagccgggattataattaatacaaccccttggtccatcaaaggaacatttggacatccttcgcatgaagatagaatcctgattcttccttccttctagcgaaggaacaaattaacagacgcccctccatgctagccaagagttgagcccaattc

SEQ ID NO: 146997 - DNA, 393 bp, Glycine max
cctctttctacaccaccaccatcaccaccaaacaacatcaataaatttaaaaaaaaaatcaaaattcacgttcttctagctgtttcatgtacaaatcttccaaaacaaagacaaattatatcttcatcttcattattacacacaaaaataaaaaacaaaaacataaaaaaatatattattttttgcaaaaactcacttgctccatgtggccttgtgggaaatagaagactctctggccaacacgatgaacatccacctgtggtcccgcgcatgccttccactgctgctcatacagctcatcctcaccactctctccagtaccaaccactgcaaaaaataaaaaaaaaataaacaacaacaacaacgtttaccaaaacaaacaaacctcaaatt

SEQ ID NO: 146998 - DNA, 433 bp, Glycine max
  unsure (1)..(433): unsure at all n locations
agcccagagaaagagnccacagaagatatgcttaccacctcaaatgtctggaaagcggnnnctaatgactcctctacggcttccacataaagcatagaagatgggcagctcaccaagatgtcttcctcgcctgatacgaagaccagatgcccttccactacgaatttcaactttaggtcgagtgttgatggaacaactcctactgagtggatccacaggcgccccaacagacagctgtaaggggggttaatatccattatttggaatagaacttgacaggagagaaggcctatctgtactgggagatcgatctctcccctaacctcttggcgggagtcgncgaaagcacgaaccaccattgaactcagctntaagtgggaagcattgaataggaatttctccaaagagctcttaagcatcacagttaaactgg

SEQ ID NO: 146999 - DNA, 374 bp, Glycine max
  unsure (1)..(374): unsure at all n locations
nagagctgctcaatagctctaaggtgctgcatggaaagtcttttgtctgtactagaggncagcagaagagcacaaaccacagacccttgcaacaagtaaaaatttctagttcaaggccagcttggttaccaatttaaccaatgcatcaagtttgccttcaagcttcttagtttcagatgatgcagctgattttagagctacctcatgcactcctctaatagtctatagcatcatttctatagctaaactgctgggagttggaatccatcttctcaattgaatttctggcttcagcaaaattcatagtctccaaaggctccaccactggcagcatctatcatacttctctccatattactgagnccttcataaaa

SEQ ID NO: 147000 - DNA, 426 bp, Glycine max
  unsure (1)..(426): unsure at all n locations
ntgaatncattatgaaagataaagttctataagtggtgtttttgaccacgctgagattttcagccttctgaccttatactaagttcatgtggagttaggtaacatataagtctaaggctcatgtaacgaatgtggtcgagttatataacaataggtaaatgagccacattagtttagaccgaattgaaataaatgggcacatttgtcacatgcttttttcttgtttagacatcgagcattttcaaaatattaaagttaagagacatgtgtctcaatctacgtggttaactgtgcgacaacccttgggaagacaaaaaggagtaaataggataaagattcctccaaatgcaatgttgggaaaaatgttgcaagctctgaggagaggcaagctgaagtcagcaacgcccatgtggagatcatctgtgt

SEQ ID NO: 147001 - DNA, 426 bp, Glycine max
  unsure (1)..(426): unsure at all n locations
agctagagatatgctcaccaattccaaccagagggctatcttggtaaaggcatggnctaacatgggtattccttgtcaacttggtctaaatattaacatggnctaacatgggtattccttgtcaactgcactcttgtttaaatgccaaagtcgntgattttatctataataggaaaaggagtattcctccccccttttctaacaagcaccctaccatttttgttgctattttatccatggttattccattggatcattgagaagataaactagtctggacttattctacagattgatagcattctgataagtaggttgtcactttagtttctcaacctcaaaacgaagttggttaaggtaagaaaatttggagcccttccattcctccttctaaatcttttttggtgaggcaacttctccataaaa

SEQ ID NO: 147002 - DNA, 417 bp, Glycine max
  unsure (1)..(417): unsure at all n locations
tcaatgggatnataggcagcagcactacaaaagtgctctatttgaccatcaacactgaccccgctattctgcacactacttttatcatcctgagactttgagtagaaagaatactgattgatatcatatcccttccgagttggaacattcatatttggacccacagctagcaatcttaatgagtctgaaacactatcatcgacgaagattgttagtctaaaccacgatatgaaagttctatagagctcttgcaacaacctcatcatgttcatttttgggagaatacgacacagatgtagntagagagcatctatgtaaaggattacctcagctgagttagagaatacatataaatgagcttgtgccagctgttggcgatccatggttacaacattgaacccccgagtgcccctacct

SEQ ID NO: 147003 - DNA, 414 bp, Glycine max
  unsure (1)..(414): unsure at all n locations
ntgaagaagaaagaanaattaaagatggttggtgnncttctcttatatgnnagaaaaaatnncttctattaaataattaaatctctttagaatatttttactcttatatatatcttaacgaggcattatactgaattatatatgtaattctgagcagttttattattggcttttaaaataagattatacagctcttaatatagagnatatatataaatattatttactatttagggtccttaaattaaataattaatcaagttccctattacttcacaacatggagaattatagtttcaaataatttttattgcaaggagaagagactacatttattaaccgatgatgtcttaagcatgattggcttcgaagactggtaaaaaagagggatntatatatataatatataaaata

SEQ ID NO: 147004 - DNA, 418 bp, Glycine max
  unsure (1)..(418): unsure at all n locations
cctagataaagccacacgaaagtcccattcttcttttatgcatgacctcaattntaaagaggtntttgtaaacttactcatgtaaaggatcacattggcatccccttcgtatatgagaaactacctaattaagaccatctagaatcacaaggaaagggactgtatcacgttaaccgaaagaaacttaataagcaaatccgcttattaaaggagtagccaaagccttatcactttgctttgagagagctgtttgcactgaattactaattataattttgaagaaattctgaaagagatatcacatcgntaatcattccttaacattacttattccaggagtactaattatataaaaagcatacaagaaagctacatatattatatattctaatttgataagaaagctaattaacctgct

SEQ ID NO: 147005 - DNA, 350 bp, Glycine max
  unsure (1)..(350): unsure at all n locations
tacaagagagagaacaancattacaaacaaaggccaaacaacactcctcatggcccgagtgtcaacatgcactttataaaataatcatattggggtcgagctattttatgacacatacgtatttgcacacataaaaattttgtgtgaagcattttacgacacctatccatgtacatattttngacaaaccttttcatgctacatcctatatatatacacacacacttttttggaaagcttcttttgntacctactcacaaatacacatantttgaaaaacacttttacgctacccatccaaatcttggaaagcacttcatgctatatatattcacattatgcaaagattt

SEQ ID NO: 147006 - DNA, 368 bp, Glycine max
  unsure (1)..(368): unsure at all n locations
cacaagcaaagcattcacgaccctatccaaataattgaagagatacagcagcgaaaacaatattatgtttaatgcctaactcaaagacaacataatttgcatataaaatcatgatcaaacttcagtaacaactttctcaagactaaaaaattaaaagcagaacaattatagcacagacagaaaatccatacttagaaaagtactggtatagcctgcctttggataagagtaggttctctaaatccaagttccttcagattgcgcaacaaatatgaaagacagntatatctgcaaacaatttattaagaatgagaatagnccctttcttgtnaacaaaatgagcagaatgagaagcaaacggaatacaa

SEQ ID NO: 147007 - DNA, 426 bp, Glycine max
  unsure (1)..(426): unsure at all n locations
ctagcagctcacatacatataatagcccaatgatgagttgctctttttggnaaanccccattgagccagntatcaaaggaaattaatatttccaagaaaatttctaccaacaaagcataacaaatcaaactcctttcaaataatctttggcaaaaacaataactaaagctttcaaagaacatttttggttgctttaaactatcagntttttttttccatttaattatttgntaagagagaaattttgttgcattcagcacttgaactttcctatgcctgatccggtatctcttcttcagatgattagaagatgtcaggagatgcacaaaatcctcaagcaacactatcactgcatcactggctgagccccacaatcattttgagataaggagtaatctgcctatgagaaaacttctcacaaaacta

SEQ ID NO: 147008 - DNA, 448 bp, Glycine max
  unsure (1)..(448): unsure at all n locations
agacacctctagaaactcaagccccagagtgaaagaatgagactctncacattagaattagtatttcttcttagaaaggcactgagaatcgattaccaaaacattagaatcgattacagctttttgaaattaattggaacattgnaaattcaatttaaaaatctttttcaaatccattttgctactggtaatcgattacaacaatatgagaatcgattaccagagagtaaaaactctttgagaaacatgttttgagaaaaaccatgtgctattcaattttttagaaaaaccttttcatacttatcttgattaatccttctcttgattcttgaatattgagtcttgaatcttgatcttgattcttgagatcttgaaccttgaatcttgattcttgattctaaactttcttcttgagtcttgaattcttcttgattcttatcttgaactc

SEQ ID NO: 147009 - DNA, 192 bp, Glycine max
tcttctatggttaacaactatgattcctttgtcatatccactttgtaaccactaacctatttaccaacagctgcaataactctcctacaacaattcacctcatgatcttgcattcttcttttgccctcatgtccattggagctggatgcataagatcatcctctttggcctttggagttgatcagttgagtt

SEQ ID NO: 147010 - DNA, 339 bp, Glycine max
  unsure (1)..(339): unsure at all n locations
aactaagctagagtagatnagtatatnnagaggagtacaacaagatctattttatagaaagaaaaaaaaaaagagaaaacaaggntgacacatttcccctcatctagcaacttttgcagataacaaacaacaaatgaattaaaagaaatgaaataacattggagataaaataaaccctaaagcctcttcatataccgaagcatcatgggcagcatttgaatatgcaagagcagagtttccacaatagacatcctanttgngaagagagtgaagatgaaagagaagagaacaaatgagaaattgaagactagagtatagaaaaaaaaaaagagaaagcaa

SEQ ID NO: 147011 - DNA, 424 bp, Glycine max
  unsure (1)..(424): unsure at all n locations
agacaccatagctaggagctttcattgctgattcttatgtagtaaagnncaggactgnnactggagcttccattttataccagatagtaaagatcctctcccgactctttttcttatgattgacaagnattacttatatatcaaattttaacttcttggagttccaatcatgtattttgtattcttaccattcgataaaagtagaatgttatctgcagagatatggatattattattaagagaatggagctagaagatcaaaggatccctttccctaaccctaattttattgaaaattgtatcggaatattctagtttttattggntagncattatgattatctttatcatgcnttattagagagagaaatttaaatttaggatctcttttttacttctacaatactcaactaccaactctatc

SEQ ID NO: 147012 - DNA, 426 bp, Glycine max
  unsure (1)..(426): unsure at all n locations
tcaggattccatttcgagatactcgatatatntcaagactctatcagacatncaagagaaaaggtataggcgnttgaatttgcttagagcttcgataatcaatttcaagcgtctcgatatattactgaactcagtcagacaacggagagaaacgttattgtcgnttgaattttctcagagcttcggtattcaattttgagcgtctcgacatattacgggactcaatcagacatctgagtaaaaagtgattgtcgntagaatttgctcagagcttcggaattccatttcgagcgtctcgatatattacgggactcaatcagacatccgagtaaatagttgttagcctttaaatttgcttaaagatttgacattcaattttgaccggttcgatatattatgggactcaatcggacatccgagtaaaaa

SEQ ID NO: 147013 - DNA, 383 bp, Glycine max
  unsure (1)..(383): unsure at all n locations
agcaaagaaagatatnaagtatttaagagtnctgtgtgtctttctagacacataaaccaaagccataattcaaaataagtaagatagaaaagatgacagncattggcacaaatatagacttctgtaactgctactaagcttgcgaaggaagatattgtatatacagnaatgaactttccattcattaacacaaatttgtttaatttgtacgctcaaatctattagctcagagagttcaacatgaaatcttaaatttctattttacatcttttatttggcattatgtaacaaaagatgcaaaacaaagtttactaaacgtttatatcagagatgggcatcggntgtttatatattgcttgtcaagcgcaccacaaattcctttt

SEQ ID NO: 147014 - DNA, 393 bp, Glycine max
  unsure (1)..(393): unsure at all n locations
nagctagacttcaccnaagagtagttctagataatnattcttataatacnnncaagccaaccaaagattcactagttttttattagctttttttttattccgggcttgatctcttctacaacctaactatgtgtttggtattgaagtaaaagctactagtagcatgcatagtctgctactaacagtagctttcacgctttttttcttcttacaagtagaagagatttagcttcaaacatccaaattacacacactaattaagcatgaagttgacatatgatgagtcatttgaattaaacttgtctgataggctcaaactaggatggnatgtgatctttgagacatcaactccaagcaaagtgagagcttcattctagnaacattcactcttat

SEQ ID NO: 147015 - DNA, 305 bp, Glycine max
  unsure (1)..(305): unsure at all n locations
atgaaggcaccagagaaaanncaaagagcgacttgtattcttttctctnnccttaagaagncatggagatgagttgatcgaatctaacaagaatagnacatttataatcacctatagaaagagtaacaaagagccaatttttgaaagattctataaaagtcttgaggcatgtaaagctgcttttgtaacaacatgtagacccttgattgggttagatggatgttctctgaaaagctattatggaggccatttggtaccaccattgggaaagatggaaataacccaatgattcctattgcatatgt

SEQ ID NO: 147016 - DNA, 408 bp, Glycine max
  unsure (1)..(408): unsure at all n locations
atgaaggcactngagaaaatncaaatgagcttctttattctatacccncacttaagaattcatggagatgagttgatcgaatcttacaagaatagnacattaataatcacctatagaatgattaacaaagagccaatttttgaaagattctataagagtcttgaagcatgtaaagctgcttttagaacaacatgtagacctttgatagggttagatggatgttttctgaaaagntattatggaggccatttgttgacaaccattgggaaagatggaaataaccaaatgattcctattgcatatgtagtagtcgaagctgaaaccatagactcatgattatgggctattgacttgctacttaaagacttggatgggattactgaataaaagagggcttttatctctgac

SEQ ID NO: 147017 - DNA, 357 bp, Glycine max
  unsure (1)..(357): unsure at all n locations
catatagagctacagacgtcttggaattgaaacatacggacatttgtgggccatttcatacaccttcatggaatgttcaacaatattttatatcattcatagacgattactccagatatgcatacctgtttcttatacatgaaaagtcacaatctctggatgtgttcaaaacatttaaagtagaagttgaaaatcaactcaacaaaagaattaagagagtcagatctgaccgtggaggagaatactatggccgatatgacagttcaagtgaacaacatccgaagttctttgccaagtacctagatgaatgtggaatcgncccacagtacaccataccgaggtcacctagcatgaatg

SEQ ID NO: 147018 - DNA, 433 bp, Glycine max
  unsure (1)..(433): unsure at all n locations
ntntatatgaatcttgaaattcaagacaacactttgatttctgtagtttttgggataaaaatggncatagaccaatcccttttccatgacttaacccaattgtccagagacggagtaccatttgaaagtacactgaatgacgattggaaatttgatttctctgcacatgatgcccgccagttggtttgcaccaacaatgcggatatgaccagttgccttcttgccggttcattggcttttgaaagccgcattcttcattatctgatagagcagattttgcttccacgatcttccaatcttgcccaggtttctgaagaagatcttgntatcatgtgggcctttcataccgggcgtcaacttgactgggcacatttagttagatatcgcatgcataaagcattgcgattaaatgctcctttgccatatccacacc

SEQ ID NO: 147019 - DNA, 346 bp, Glycine max
  unsure (1)..(346): unsure at all n locations
attgccaatccccatatacatgcgtgagaatgatggaatgngataccatataatcgngaaccgcgggtgaagaatggntatttgaaattaaaagagactaaatnattaaatgttatattaaataagcgctttaaagaaaattcaatggcaactgtcaatctttccagtgggcaagatgatatcgtaagaagactaagctagcccatcatcccttactcacagctaccacactttcttccaaagagacctagaacaagttaactttttgtcgagtagaacaaggaagtgtacctcaacaagcttaaaagataaaaatcacatatcaaaacaacttctagcatcaccc

SEQ ID NO: 147020 - DNA, 431 bp, Glycine max
  unsure (1)..(431): unsure at all n locations
agcnncatataagcagaaccatnnnatcaataaacacaagttttgtnntattctgaaaannagagnnnatctcttttatcttagtgagatagattctcctaaattcttgagtgattcaagaacaccctggatgtatcaaaagacattcacaacctttgagtgttgccctcgctggaaatagagattctttccttcctttcatcttcacccttgttctttcaaaccacaattccagaaaatccacctctgcccagaattatctcgaggccataactcccattttacgcactcaaattaagagattcttgagccttaattgaatttcaaaacgagacctttcacctcgttttggaatcacctcattaggagccctgtagcttcagttattgccatttctatatttctgtccagccaccacttaacctacgttt

SEQ ID NO: 147021 - DNA, 396 bp, Glycine max
  unsure (1)..(396): unsure at all n locations
nctaaattagaagaagcattcnctcctaaaattagagaatgttgcaccttgncnagagtagctnctaaatctagaagaagacatcttttgaatacaatagcttcacttgttcttgaaattactgggagataaaaacaacaaagctttgaacgaattattgcacaacgaaaatttttgcgacatacattaatattgntgatgggagttaagaaattagtaagtgtgaagatattatattgcaaaccttaaacagttagaatataagcaaaaaatcaaggcaaaataagctcagncatctctaacaattgagatatcaataaaatgagctttatgcttaatgttccttgtaaactatatgttagcaaaacatgaaagnattttttatgtagactaaat

SEQ ID NO: 147022 - DNA, 295 bp, Glycine max
  unsure (1)..(295): unsure at all n locations
aaacacagagccnaaggacgaacatacctctgcttctttcttnagcatattncacaataggacattcaagaatatattattttataaatatncnctcattacataccaattcagcaacatcactttcttcctaactgattacaaaatgacaacatcttgacttgcaaaccaccaacaccaaattacaacaccaaattatagaccttacagacctcgggtacataatacacacactaacaagcaaagacagacccaacacacaaccaaaagaatccctaaaaaaatttccttcctc

SEQ ID NO: 147023 - DNA, 260 bp, Glycine max
  unsure (1)..(260): unsure at all n locations
gaaaatnagcagcccaatcctcaaaaacagaaagggcagaatcaccggcaacagaatactcaaaatgcacagtatgatctagatgcacactatgccttactaatctatgaaaagntatatctatttcaagatcaaaaggctgtgaatcacctggattgcccctagtaatgcaccatatgcagcaaaccatgtatgtctaaacaagcccccaggggaaaaatgggcaaaaacttaggagaaaactacaactttactcaaac

SEQ ID NO: 147024 - DNA, 338 bp, Glycine max
  unsure (1)..(338): unsure at all n locations
agctacatatataacagactagaggacctctcttctgtttttgttaaacatncaccagatgatcatttgaatagtcaaagctagaggagattcacccaacaaaatttgctctttaataaaaagacatctcttatgaaggaatattacatagntaggtattttgttgtcaagaatagaggacaatatccaattagtgaggttattagctcttactatgtgtagttgcagcggagactcagcacgaacaatactatccgacattggaatctctggcttacatccttcctcaataacatgagggaacattgcaagaaccaaatcttgtacttcagcaagta

SEQ ID NO: 147025 - DNA, 423 bp, Glycine max
  unsure (1)..(423): unsure at all n locations
ncttatccaagactcatctaggaggagaagcttcttcttccatggcnnattccctagaggatggcgcctcctctcacctcttctcctttgtcttctgctgcatctccatggagaaaaatcaccattaaaagacctcattgaagctctaagatccagcctccatagaagccacacaagcaagtttctatcacaagtcatacagtcatattattccgaactttagtttacaaattcatgaactgacataactaactatagtttcaaaacctagcctatgccagcaaatttaacgttagagaagaaaagcttcatggagaatgagattcaaaagagtttngatgataactatgatgacaacaaaagatgatgacaaaagtgatgaacaaaaagctctaagatgatagaacaactcaagtgaatcaa

SEQ ID NO: 147026 - DNA, 400 bp, Glycine max
  unsure (1)..(400): unsure at all n locations
tctcgatatattatgcgcctgaatcggacttccttgtgttattgtttgaccatnagaatnncttgagagcttctggttttcaattcagagcatctcgataagtgatgcgccagaatcgaagttccgtgtgataagttatggccattggaatttctcgagtgcttccgatgttcaatttcgagcttctggatatattatgtacctgaatcagatttccgagtgacaagttatgaccatttgaatttctcgtaagcattcgtagttcaattctgagcgtctcgatatattatgcgcctaaatcggacttccgtgtgacaagttaagaccattggatattctcgagagcctccgatgctcaattncgagctactggatatattatgtgcctgaatcggacatc

SEQ ID NO: 147027 - DNA, 317 bp, Glycine max
  unsure (1)..(317): unsure at all n locations
tttacaactatataacttttttaattgggaatataatgcagcaaaaaaaaataatttacaatatcacacacaatttcttcccaaaagcaaccatagaagaagaatatatatatatatatatataatattcnagcacaaaagatttctccaatgcctaatgcaagttccatctaagatacacccaaaggagaccatacgagatttttcttcaaaattatatctggaagtaactagtagctagaaataaaaacagcnaaaactttactagccttctagagacgccaaatatatgtaattctaatctacaaaaatgacaa

SEQ ID NO: 147028 - DNA, 412 bp, Glycine max
  unsure (1)..(412): unsure at all n locations
agaccttagatactcagcttatgatgatgaaccaagcaattgtgatgttgccatttgtcctagaganagatncaagacttcaagatcaagcatcaagtatccaatccaagattctagattcaagataagaaatctagtagcaacaagtcaagacttcacacatgataagtattaaaagattttttcaaaaaccaaatagtatagntttgttttacaaaagaattttctcaaattttctaagttaccaaagagattactctctgagaatcgattaccagttatcatgaatcgattaccagagaccaacttggtttccaaaatgttttcaaatggtttgcaacgttccaaaatgattttcaaacagtggaatcgattacactatattatgaatcgattacaagtgaatctgaac

SEQ ID NO: 147029 - DNA, 392 bp, Glycine max
  unsure (1)..(392): unsure at all n locations
agataaagaatnatcaaagctacatgagttctcttgcttttctgtataggaagaaagcataagnagcaaagcatcagntaacaccaacactgaagctacaatgcatacccaacatatggacagncttaaaaaatatacaaaggaacccactggatgaaacattagaaagatccatctagtaactcaaatcatatgtgatccaatagaaagcatccaaacaaggtcatcactctaatcacaaagtcatactacactgatcttataagtcaaacctaaacacacagacaaagcaatgcaagacaagaactaagagaaagctatccaagaagatctcgatcaattccaaaataatgatgtttaaagaagttcataaagctcaaccaattccgaaa

SEQ ID NO: 147030 - DNA, 391 bp, Glycine max
  unsure (1)..(391): unsure at all n locations
tctcgataggcacgtgctcatgcatcaattcttctccgnggctatacgagacatctagccaaacaaagtcaagttcacgataactcgcctgagctttttcttccatgctatatgtagcaaagagatagatccagcaatgttagatgagttggaaaatgaagccgnaattatactctgccagtaggagatgtattttccccctgctttctttgacatcatgattcacttgatagagcatctggtcagagaaatcaaatgttgagagcctgtttatctacagtggatgtacccggntgagcgatacatgaagatcttaaaagaggatacaaagaatctatatncgccggaagcatctattggtgagaagtacattgcagaagataccattaaa

SEQ ID NO: 147031 - DNA, 355 bp, Glycine max
  unsure (1)..(355): unsure at all n locations
agaatagacgatnaaagccaaacgagaaaatatactccaaaccttaacctgttcaaaacctaaaccacccagaactacatcaaaacacacgcattcaactcacaattcaataacgcctaagcgcactggttaaggagagaaaaaggagaaagcatttactgtaagaatcataggagaacccaaaaaatcatgaacatatatgtttatataataagcatctttggattgtagnattgtattcgactcaatccttttaggaaaagataggaccgagnttaattgcgattaattctctgctacaaagtatccattgcttggaattaaattcgatctccttccatacttcacaagcagc

SEQ ID NO: 147032 - DNA, 178 bp, Glycine max
  unsure (1)..(178): unsure at all n locations
tatctttgctttcctcttatctccgatgagaagtaagtaaagaagggcaactgtcataccctaatttcgnccggggattattacttgatgacatgcaacctttggttagccgctttgagatacttggcgtcctttgntgcacatgaaatgaagtcccgagacgtctcanaaatcaaaa

SEQ ID NO: 147033 - DNA, 197 bp, Glycine max
  unsure (1)..(197): unsure at all n locations
taatttntatcctttatgtaattntacaaattctagttactttactaaataattgtatcaaacacttacaattcaataagatagtttttcaactttcaatttcaaactaatggttcatctttcatctaatttttcagctagtgtaattaaacataatcaaaagtatattgtttttctcttttgtgcatagcatgcac

SEQ ID NO: 147034 - DNA, 357 bp, Glycine max
  unsure (1)..(357): unsure at all n locations
gangatgatnaaagatgatgaccaaagtgatgacnaaaagctctcagatcaatcaaagaacaactcaagtgaatcaagaataattcaagagttcaagaaaagaatcaagaagaattcaagactcatgaagaaagcctagaataaagaatcaagattccaagttcaagatctcaagaatcaagattcaaagctcaagatctcaagaatcaaaatcaagattcaagactcaagattcaagaatgaagaaaagacttaatcaagataagcattaaaaagtctttcaaaactttgaatagcacatgagatnttgacaaaaccttttacccaagatggttttactctctgggaatcgattac

SEQ ID NO: 147035 - DNA, 345 bp, Glycine max
  unsure (1)..(345): unsure at all n locations
gcatgccaaaatacttacagnnaatataggaaaaaatcctagagcataattgatagaagttgtaagcctctcgctcccttatattagtggatcgacaatgcatcctgcacactatttacaaagagtagaaagataaatattccaacgaagaagcctaaaaaggggaataatcaaatctaagaagcaaaaacaaatagaaagataaagcaatcttgaaaggcaatgaggctgagtagttagcttgctgacagagacagaatagaaaaggttattaagctgtcgctgnntttaggtactgatacacaaaggaatctaggtgaatcagaggcttaaactggatgatga

SEQ ID NO: 147036 - DNA, 426 bp, Glycine max
  unsure (1)..(426): unsure at all n locations
tctttgagataacttccttgagaagcttctttgagttctgtttagacccgcctcgncgctacgggatccacactctaatattcgataatttcaatttttataaaaagaactcccttaatttttttgattatgaaaatagaagagattttgtcacaacataaattcatccaacaacacactattacttaagagaatatgcataattacatagaaacaataattcagtacatgtcatacacataacgaaaattaaatatgtgcatatatatatataattaaaattccagntttacatctttaactcaacaaaataaaacttaaaagccaacttcggaagagttgattacaaaacacaactctctcccaaaataacgccaacgtcatcacgtctgctcggcgactcctcaccagaatcttactccctac

SEQ ID NO: 147037 - DNA, 444 bp, Glycine max
  unsure (1)..(444): unsure at all n locations
gagacacatagaaactcaagcttcctaacatgggaaggatatatnaatgaactcttgatgatttgagnnngcaagatgagcctttctcccaaaggtcaccatccaatgttttcacgtcgcttatgtttggtgncatatcatgtttatcctattcgtcaacaaaatttccccattttcttgagcttatatccaaataaacaaacaaataaaatacaatgatatcaattgaaggtactcaatctagctaaaatctttggaagagccaacatttcaattatgtatatcccacgaccaaagaaaaacatatatggttgcgggttcctttcaatgcatcaactatagtttcccagagtaacatgcccgtgcagagccttccatgtgatgcacagacacaactaataggccccatgagcaaccatttgttntacacagagaaaaaatata

SEQ ID NO: 147038 - DNA, 389 bp, Glycine max
  unsure (1)..(389): unsure at all n locations
tagaaactcagcttagcattcagnccgagcgcacgatatattacagtactaatctgacatgcgagnaaaaagnnacaggcgntagaataggcttagagcttccgtatcgaatttcgagcgtctcgatttattacaggactcagtcggacatccgagctaaaagngattatcgatcgaatttgcgcagagacttaaccttccatttcgagcgctcggatatcttacgggactctatcggacatcggagcacaaagtcattggcgtttgtatccacccagagctccagtgcgctatttccagtgcctcgatatattacgagactctaccatacattcgagtcacaagttattgccgattgaacttgctcagatgttcgacactcgaggccg

SEQ ID NO: 147039 - DNA, 427 bp, Glycine max
  unsure (1)..(427): unsure at all n locations
agccacccagctcgccaagcgagctaaggagcttnctcctatttgctcctncttctagagaacttnctggaaagcccaaatgggcctatttgctatttgcacccccctttttactaaatacaccccttgcctaagtagatgatttgctagatgagttgcatggagccaatatcttttcaaaaatagatcttaaaagagggtatcaccaaatcaagatgaaaaatggtgatgagtggaaaaccgctttcaagaccaagtttggtttgtatgaatggntagagatgccttttgggctcacaaatgcaccaagcacctttatgaagctnatgcatcatgtcttaaaggatttcataagtagattagtagntgnttattttcatgatattttagcgtatagnaagagcctagatgatcacttatgacatct

SEQ ID NO: 147040 - DNA, 446 bp, Glycine max
  unsure (1)..(446): unsure at all n locations
gaaacncaagcctatcaatactacatagaagnctttcagccatagaaagctttgtcttttctctctnnnnnacctnncttaacactaccttgtccaacatttgaggcagctcgagtttcaagaataacattatgtcaactaggtcttcaatgtctttagcaaattgagtatcaacttctttatcaatttcttccacagcaataaaatggtcttcaacattttctcctgtggctgcatgcccaatatcatagaagtaaagaaaattaaagcttgttgtagagtcctttatcatcaagatgggactataagaaaaattataaacataatattaaaataaataaaattatataaaaaataccaaaaatgtaataaaaaaaattaaggtcattggctcatttccaagcaatgccatgttcaaccaaacattcaactgggactctatcatt

SEQ ID NO: 147041 - DNA, 366 bp, Glycine max
  unsure (1)..(366): unsure at all n locations
gaacagattnnaaacatcaatnaataagnnntccttgatgtataaatgttgacttcactttagcatttctaataaatgttttatttttacgggtgtttggtgtaagtgatattcatgtttgatttcgcattgttagccaatagttaactacacttgagatacacattcacaatgntgnatgtagnaatagagaactttccaatttatctgatagtttgntttgncttttgtttgaagtaagatattgtctttcttcaaatgtaagattctcgctcatttccatctaatcatcttccaatgattttaatgtatgtcgattttataattgccattttgatatgtatttctgagcgtgcaacttttgtt

SEQ ID NO: 147042 - DNA, 413 bp, Glycine max
  unsure (1)..(413): unsure at all n locations
agactaggtaagctaagcgccaatatgcttatgttttcatacctttgtataaagctaagcgcagcctgctgtgctaatccgnagntaagtttcatggaagtagagctaagcgcgccatgtgcactaagcctaaaggtcatttagatgaagctgagctaagcgagccatgctgctcagagcccagaccctcttctgttttgaaaatagtagacttaagctaagcccaacatgctacgctaagcctaatttgcaaaaaaatatttttagagtctttaagctaagcgcgagtttgctgagcttagcccatgagtcaaattttaaaatgcgcactaagcccagctagttgtgctaagcgcccagntcaatttttagaggtatttttctattttggagaaaataaccctgactaatct

SEQ ID NO: 147043 - DNA, 336 bp, Glycine max
  unsure (1)..(336): unsure at all n locations
gaccttagaatactcagctaagtatgagtagagatagntccttgtcctttgttatacacaatgctaaagatagacatcaagaatgtcaacattacattgaatcatgggtcaaagagtcacaacgacaagagtacttaagagcttacttgaatcagnaagttaaatttatgtagtacactcaaaatattttcattatacatacctaattataattgtcgactttatggcacgttgacaacttgttgttctgagttcatgggataatattgntgntaggntttgntctttgaagcctgatattaacatcaaagctgcaattaacagatttttttaaaa

SEQ ID NO: 147044 - DNA, 400 bp, Glycine max
  unsure (1)..(400): unsure at all n locations
ntgagcgaatntaaacgacaataactgtttactcggatgtctgtagagncccgnaatatatcgagaccgtcgaaattgaatgttgaagctctgagccaattcaaacgacaataacgttttactcggatgtctgattgagtcccgtcatataccgagaagctcgaaattgaatgttgaagctccgagccaatttaaacgacaataactttttactcggatgtctgattgagtcccgcaatatatcgagaccctcgaaattgaaagtagaatctctgagccaattcaaacgacaataactttttactcggatgtctgattgagtcccgtcatatatcgagacgctcgaaattgaatgttgaagctctgagccaattcaaacgacaataactntttactcgga

SEQ ID NO: 147045 - DNA, 372 bp, Glycine max
cactggacgagtccaaccaaccaatcccaaacaaagtcgtattccatcgaatttttagggcatttaaagcatccatagatgagtttgcattttgtaaacccattgagcaaatcgatggatcaaggctatatggaagatacaaatggacactgttagttgcagttgcacaagatggcgctaacaacatatttccattggcattttccattgtcgaaggtgagacaacatatgggaggcactttttttgcaaaacttgagaacacatgtgacaccacaacatgggatatgcttaatctctgacaagcatgagtcaatcaaaagagcatacagatgagctgacaaagagaggacagcagacaactctgcacatgt

SEQ ID NO: 147046 - DNA, 417 bp, Glycine max
  unsure (1)..(417): unsure at all n locations
nttaagnnagaaagacattaagatgataatagataatggttattgnnaaagcaaatatcataagatagggggttgaattgagattttagagnttttaaagcctttttgtaatcaacaaagttttatgtctgaaacaaaacctttagaaaaacatataatagattttcaaaaccatagncaaacgnagaaaattacaatctacacttagncttttctctcaatatgtncaaattgtttctagagcttttgaattttacaagaataaacataaatctttttatagaaagaataaagaatgttagngtgcaaaggtcagagccttgttcttcaaagcttctagtatttataacctttatcttcaagtgtgttgnctcacaacgagtagatttctttactaggtcttcttctgaatgcaca

SEQ ID NO: 147047 - DNA, 433 bp, Glycine max
  unsure (1)..(433): unsure at all n locations
agatattcacactcctcaagtcttcagacaacacaagtctcttttaaataataaagcatnnatcaataatagacatatcgcatcccattagtcaaaaaaatagtttttcttgaaaaccaacatgcaatatggaaagacatacatccccatagttatgttccctaactccaactacggtatcaaagagagaaaccaaaataacctcccctcacctatcgagatgctctccgtcagttcccctttgcatcggtcaatgtcctctcttgttcatgttcgtcagtccaaacataagattctatataccaaaatcgaaagaagtttagtacatatttcaaaaacaaaggtaataacaacattcgaagtcaattacccctatcaaaacataaaggactaagaggagtttcagattctaagaaaaagagacatcattttg

SEQ ID NO: 147048 - DNA, 409 bp, Glycine max
tctcatcaagacctagatagcttttacattctacaatgatgctttcccaaagaaaattgagtcatcaacatactgaagtaagctaatgtccgcctcatcctttcctatcttaatcccttcataaggcttctgttcctggagcttctctcatcaagctaagaagcccctcggctacaaagttgaacaagaaatgagtcagagggtctccttgccttagacctctctcaagagtaaattcatcttaagactaccatttaccaggatagatattgaggttgacttcaagcatccttcaatccacttaattcatttggcgcaaaagcccattcaattcatcatgtaataaagaaaatcccagctcacagagtcataagccttttcatagtctactttaaagaccaagcaactc

SEQ ID NO: 147049 - DNA, 415 bp, Glycine max
  unsure (1)..(415): unsure at all n locations
tataagatcaaaatagcctcaatcatttccaaatatgcatgtgaatnaagaagcatcaacaagaatcaagccaaagctatagagtaagcaatcaatggggcaaaacacaccaaaagattatgatgatggatggctcaaattctcacaaaggtaaactcatcactttaaaatagagctttcaaaactatcatgacatgtagaggagaatcaaagatttcaagncacaaaaaggcaagaacttttattnncaaaataattacccatttcttgaacatatcctataattcaaagaaaaacatgcaaagtncgacatgcacacaaaattgaaccaaaatattaaactaaaaatctgacgaaactaacaacattaacaaatttacacaactaacaaattaacaaaaccaacaaaactagc

SEQ ID NO: 147050 - DNA, 202 bp, Glycine max
tgttcccggagagcagaagaagctgtgttcctggtataaagatgaatctgtccaaataaaagatctccggaaattacatatggcgtatgttataattgtattatctagggcataatggtactttcaataaattgctgggcgcaccacctatattgccgggtgcacctagcaacttccaaacatatatgaacccagtctctgg

SEQ ID NO: 147051 - DNA, 324 bp, Glycine max
agtattgtccacgcaaaactcaggttttttatgcggacctttggaactacagagagacactatggcgttaacttctaataacatatgatggggataatcaatgataaatatactgtggattctgggctttgaataggtgcatgactatatctcttgccaacaaagggggcctgaaatttaaataagagatattagccaactgccaataaaagactataggaattgacacaattgatcacttccggccatgctcactggttgtgacttatacatgatattcatatatatcgtgatggtaagcaatacacaaataccgctataaat

SEQ ID NO: 147052 - DNA, 344 bp, Glycine max
  unsure (1)..(344): unsure at all n locations
gaaaacaaccttgagaagctncctctgttaaaactcccgggagaagctagagcttagctacacacacccctctcataactaagctcgcctgcttgagaagcttgcttaagaagattcctaaagaagctggagctgagctacacatacctctgtaatagctaagctcacctccttgagaggagaagctagagcttagctacacacccgctataatagctaagctcacccccatgacagaaaacatgaaaatacataaaaaaagtccttactacaaagactactcaaaatgccccgaaatacaaggcgtaaaccctatactactacaatggcccaaatacaaggcc

SEQ ID NO: 147053 - DNA, 388 bp, Glycine max
tgtaggattatggggtacccatcacatgggatttgttgttgcgaacgacggtgcacaacaagttttctacatccacaaagcgcgcataaacccaccatcccctgttgcccacctccaactgagctcacgtactcccacgtagcccataacctcggttctctcaacaccgggtgctcatcaatcctcccaagactacccaacatcaaagtaaatcaacattcaaacagcacaaattaccacagccaagaaaacagggcaaaggcagaaaactctgcccaaaacaccaaccaaaatcacagcgtttctcacttaaagaccccagtaacaattccttcgatccaattcggtaaccgttggatcgactccaaaattttactggaagtctata

SEQ ID NO: 147054 - DNA, 213 bp, Glycine max
  unsure (1)..(213): unsure at all n locations
agcttgagatgaggaagtgtataagagagtttattttctgcntttattcgaagacaacagagaggtacccgtagatatgtctcggcggtcacgataccatgtggacgccatgtgatgatctattgcccaaaactaagcttgactcgatcctactcaaaccgggcataatcagtctaagagaacctcggatgttctcttaacaagtgatctcct

SEQ ID NO: 147055 - DNA, 388 bp, Glycine max
  unsure (1)..(388): unsure at all n locations
agcttgggaggattgatggggacccggtgttgacattaactangatatgggctacgtgggagtacgtgagctcagttggaggtgggcaacatgggattgtgggtttatgcgcgacttgtggatgtggaaaaactagttgtgcaccatcgcccgaccttcacctagtaccacatgtgatgggtaccccataatcctacaagcttgagatgaggaagtgtagaagggtgaaacttcctgcttttattctttgaccacagagtggtacctagagatatgtcacgggggtcaggagaccttggggacgtttggtggggttctattgcctcaaaccaagcttgaccaatcccgacccaacccgggcatagtcattcagtgagaacctgtgttg

SEQ ID NO: 147056 - DNA, 386 bp, Glycine max
tgttatccaaggctcatcttggtggtgaagctccttcttccatggcttattccctagtggatggcgccttctctcacctattctcctttgtcttccgctacatctccatggtggaaaatcaccattgaaggacctcattgaatatcaaagatccagcctccataaaagccccacaagcaagcttccatcacctagagagggcatcaacaaccacatttgtttttcccattttgcatgcctttttcttaacttgctttgccctatgatgtacttaagtgattcatgatcactatgaatgacaaattctttggaaacaaggtaatgttcccaagtttggagggttcttattaaggtataaagctctttatcataagtggggtagttga

SEQ ID NO: 147057 - DNA, 326 bp, Glycine max
agcgtggagagacttatttaaacagaacttttgtatatccttcttaggcttagagaatactgtggtgaagcctatctaggtgtttcaaaagaacacttaggagaagcctggacaggctcttttaaaaaataaaccttgggtgaaccttgtagaggcttacataatattggttgtacgaactagtgcaggcttacaataacaaaaacctcgattggtgctcgtgttactggaaatcctataggtgcatggactagacgtagcccaatgcggtgggcacataaagatcatttgagctcgtgcttttacttatctactacaaatataga

SEQ ID NO: 147058 - DNA, 396 bp, Glycine max
  unsure (1)..(396): unsure at all n locations
ttganaagggttgttnttcaccttatcgctaagctctattttctggcttagagagtgtccgctaagcgcaacactcattggctaagcgcaaggaagaatctggaagaagatgagttgtacaggtttgctaagcgcaccgcttcagtccatccgctaagcaagaaaggcacgcgctaagccgaaattcactaatgtgtgctaagtggtccagaattacgcttagcgcacgagcacgaacaaggccacctatttaagcctgaaatcacatcttgtgaagggagtttgggctgggattcaaagctttgcatgtctagagattctagagagagaaaggtctaagttccaaagagttttgaaagattttgttgtgtgaagatctgcacagactatagcttg

SEQ ID NO: 147059 - DNA, 357 bp, Glycine max
gaccgcaagagccgcagctgcagcagaaccaacggatgttccttttgttccgtgaccacaacaaacccacactgagaaacagaatcaccccgatgcaagaaggaacaggccacacatcatcctgccaggaaacaatgctaagcgaacgggccgaagacccacacacaactcgtccctctaaatacctcaagagctacaaccctcaccagctgctggccaaaaaccgctgagactgcgaaggacccataaaaaacacaaggggaggaagagataacgcccaagcatacacaaacatgattgggcgaacaagagaccggtcaaccccaagcataacccaaacacaaggaacagctaagg

SEQ ID NO: 147060 - DNA, 318 bp, Glycine max
gcctaaagatgtttccgatactgctttgtacctggcaagtgatgagtctatgtatgttagtgggcacaatcttggggttgatggaggctatcactgtggttaataatgggtattgtgtacttggggcatttttcgagaaaatattatgcctttctctggagaatgacccttttatattttgaataagtcacaaactattgttatgttttcacttttcactgtttgagacagcctcgaaaaaacatggtttggctctatagaatattatgacactttgattgtgggcacccctacattacaccccgacattacagacac

SEQ ID NO: 147061 - DNA, 414 bp, Glycine max
  unsure (1)..(414): unsure at all n locations
agctttatacgtataatattatataacgtattaaaactaatgaatatatctttcaccagagttttttttgtaacatagatgatgtcatattgtcttcattatataacaataatgatattttttaatattatatatttatattcttaattctattttaatttaaacatcattatatacaataatttattggatgaaaaaatttactttttttttcctcttacgttccgatctaacacatttactctttaaacctttgtgtacttattattatcttggtagtgatttcatataagggttagacagacttacccctgtaatgatttttttcttttataaaaaatcattattattaaatgccaccgaggaccaagggttccncaaatactttaaagataatacctatcgcgtctacta

SEQ ID NO: 147062 - DNA, 388 bp, Glycine max
tcgagaagagaacacagggattcgcctaatgcatgaacatattgatattaatgtcaagcatttcgttcttcgagataacgatcctgagaacttgaataaattacagcccaaaaatcaaccaaattagtgcgatccattttgttctttaattaatcatccactgtggcaatatgatccacaattagtggggtaaagtttatacacaagtcaaatcaaaataagaaaattttaagtttatgcaaaacattggatattattcctcaaaatatattaaaatgaatgacatatatgtggcattttcgttgtgaagaataacatttcctccactgacacctcatgtataggttgcagccagcatgcatgcaatgagatatatatggatgaaagc

SEQ ID NO: 147063 - DNA, 472 bp, Glycine max
gacccggatccttaagtcacctgccgcatgcagcttgttgagactggaattattattatattgtgtgcaagctgccctcaccaccatatttctgagcaacttcttcttcaatatttctatgagggacttagctacatggagaggagtatgattgatgctgctagtggcggagctcttggtgatatgacccctgctgaggctaggaatttgattgagaagatggcttccaactcccaacaattcagtgcaagaaatgatgctattattcttagaggagtccatgaggtggccatggattcatcttcatctactgaaaataaaaagcttgaaggaaaacttgatgccttggtcaacctagtaactcagcttgccatgatttaaaaatctacaccttgtgcaggagtctgtggtctatgtccttctttacaacattctggagtcaatgatcaacctgaagcctatgctgcaaaca

SEQ ID NO: 147064 - DNA, 388 bp, Glycine max
ttaaagtagttaactaagttaactaaccttagctttataacaaaaattttaaaaacaaggttaaaggaagcttacttggataattgaaattggatgcacagaaggaagcaaggagagcaagctaagagtgagagcacagtgcagagaaaaagcaccaacgaaatgccaaaatgcagtttaaaagcacaaacgaaaatgtaactgccaaaggcagttatgccttatttttggcagttttgaatgcctcgcttagcgtgtcaactcgctaaacgagcatacatgatgtttaagtttccaaacacatgcgcttagggggcaaactcacttagcccaatgcaaaaattcaaatttttcagagtagactttgggcttagcgcgaagagtcgcg

SEQ ID NO: 147065 - DNA, 443 bp, Glycine max
agctttcccatacaataagaatgtaatatctagcaatttcgtatattctatgggcacattatgcacattgacgatgtcaatcaacctcagcaacctttttaggtgtgccatatggtctttagaggttgccccatggaattaatttctttctatcatttgcaagaagccatgactcaactcaaaattgactcatgcccccagagttggcaacaatgtgttgttaactatccctacttgaaaacaatgcaaaattaagagaattcgtatataacataacaatgaatcaaaataatgcaaaaggtcacatatcaaaatagctcaaagttagctatctctaactagaacccaaaatagtacatactacacaccatattttcataactagcacaacaaatgtggcattgctatattcatacctctttttacatattcacctcattttc

SEQ ID NO: 147066 - DNA, 387 bp, Glycine max
ctctatgatgctaactgggcatcacatgtggattacaggtgctctacctcaagggctcgctattttcttggtccaaacttaatctcttggtggtctcaaaagccgaaagttactaccatgtctagtacagaatctgagtatcgtaatatagctcacactcccactgaattaacttggattcatactctgctaacagaattgcaagtttcattcactcactccaattattttttgtgataatcagagtgcagtttctattgcacacaatccattttttcacaaccgtaccaaacacatggaaattgatgtcttatttgtaatagagaagattctggccaagcaacttactattgtccatgttccaactatagatcagtgggatgatat

SEQ ID NO: 147067 - DNA, 443 bp, Glycine max
  unsure (1)..(443): unsure at all n locations
agcttgaagtgaggaagtgtataagggtgatacttcctacttttattcgttgaccacagactggtacctggagatatgtcgccggggtcaagagaccttggggacgtcaggtggggtgctattgcccaaaaccaagcttgaccaatcccgacccaacccgggcatagtcagtcagtgagaacctgtgatgtacctaaacaggtgaactcctggcagtcaaccgataaaagaacaatgaccacaaagcaaggaggcttgtgtggtggctggccagctatggatcttgagtgatatttgggatatggcctctggtaattgattaccaagggtgggtaatcgattacaaggcttaaaagtgaagacaggaagttaagatggtctctagtaattgattacagaggaggtgtaatcgattaccaggcctanaaataggaccaggaagt

SEQ ID NO: 147068 - DNA, 386 bp, Glycine max
gttgtcaatatactcacaaatagacttatggtgattcatagactgcgtaacataacacggtaatgcttgcgaaactgactttgtaaccatgaccattgttagtcgtcatttatgactaacttttgtgttgaaaagtttaataaaatgtatgtcttttactcaatttatggctctttttgtaggtttgtacatatttttatgtgtagtttaatttttttctcagtagatactccctatattgtgaattaatgtggttcaacttcagtttcaggtgaaaagatgaagaataagaaggttgaagtagctggtgtctcgctaagtgaggcatatgcgcctagcgagttacatccactaagcgaggcactcagctcgcttagtgggttggg

SEQ ID NO: 147069 - DNA, 425 bp, Glycine max
agcttgcattatatagcataaccaccccaccccataggctgataatctaaccaacattccctcactaccttctgaaatagcttgttcattagccatccatcataaaccttaaaaggtttagggccccaatcactgcatttagaatgcatgataatatgacagtgatcagaataattcctctcatggttaaattgagagctatcatgccatttggacaaccatccatcagagacacacactctgtccagtttgcttttgcaggaaccattatgcctaacccaagtaaagggtttacccacacaaggaatatcatcaacctccattgcagcaagccaatcattgaaatcagatattacgccattatctgaattgttgcgattgcttcccaatctttcaggggattcctaacacaattgaaatcccct

SEQ ID NO: 147070 - DNA, 383 bp, Glycine max
ttgtggcaagccagtggttaggggacaatgctggacggtgaagttgatttgtgggattcataatcatgaattggccaagtcattagttggacatccatatgtcggacgattaagtaaagctgaaaagatacttattggtgatatgatgaagtcaatggtcaaaccaagaaacattttgctgactttgaaggagcacaatgccaatagttgtacaaccatcaaacaaatatacaatgcaagaagtgcatatcgttcttccataagaggaagtgatactgaaatgcaatacctaatgaagcttcttgaacgagatcagtatattcattggcacaaattaaaggatgaagacatggttcgtgatattttttggtgtcaccttgatg

SEQ ID NO: 147071 - DNA, 435 bp, Glycine max
  unsure (1)..(435): unsure at all n locations
gcttaaggcactttaattataaactgattctagcattctcttggcaaatagctagggctngaatcaagcaagtatgtatcatacattttaagcaagagaactaccgcagacagctatccagacgacattgtgacttgtggtaatggtatattcactattatcttggccctctctaatccttgtaagtagaattcaaagtcagttgaagaatgaaagtcatcctttgttccactgtttgagtttgcatcattccccattgctgcagagttagtagcatcacccaattcatcatcttcacttactcttttattaacaccatcatttttatcaaagacaaatgcaacaaccccaaccacaacaccaacatcatcaggtgggcaatggtgcgtngctaaccagggagcttcatgtagaagcaagcttcatgatgaatca

SEQ ID NO: 147072 - DNA, 454 bp, Glycine max
  unsure (1)..(454): unsure at all n locations
agcttcaaggatggatgaacctcgatatcacgcatgaatattctatcttcaatatctagattgctcacatccacaacaattnttgaaggaatgtgctcagatggacagagaaattttagactaggtctgatcttattcaaaattcctcctgcaatggcataaaagtttcaaccatattatcattagaacagaacattagaaccacaaaaaaattccccatgatattatattaaattgaatttgcaacaattggcaaccgcccccctccaaaaataatgatattcagagcattcatgaactatgaatgttgatgtcagaagttagacaacggcatattttagcaaagcatggaatgtaagtcaattgacccaacataacagcagtcttcccaaggcataacaagctaaagtcatcaaccattgaaagtcggaaggctgaacactgatcttaaaca

SEQ ID NO: 147073 - DNA, 390 bp, Glycine max
tttgaattatcaatatccaaacttgcttctacactcataattcttgcacctaattggaaatatggttttgagctcatatgttacgcaagtgattatgtagttggtgttgtcttgggacaaaaaacagaagacaaaatttttcatgctatacattatgctagtaaagtccttaatgagcatcaagtgaattatgcaacaaccaaaaatgaattactagctataatctatgcattggaaaaatttagatcttatctcatttgctctaaagtggttgtttatacagattatgcaactattaagtatctcctatctaagcccgattccaaaccaaggcttattaggtggatacttatgttgtaggaatatgatcttgaaatcaaggataagaag

SEQ ID NO: 147074 - DNA, 436 bp, Glycine max
  unsure (1)..(436): unsure at all n locations
agctntagcttctcaaggaagtattctcattaaagcttctctaggaagctacctagtctataaatagaagcatgtgtaacacttgttgtaactttgatgaatgaaagtcttatgagacacacttcaaagttccacttctctccctcttttattccttcaatttcgtgctccccccttctctctttcttttcctccattgaagcatcatctccaagcttcttatccaaggctcatcttggtggtgaagctccttcttccatggcttattccttaatggatggcgcctcctctcacctcgttttctttgtcttccgctgcatcttcatggtggagaatcaccattaaaggaccccattgaagctcatagatccagcctccatagaagccccacaagcaagcttccatcatgtggtaatcagagcacaagagcttcaag

SEQ ID NO: 147075 - DNA, 382 bp, Glycine max
  unsure (1)..(382): unsure at all n locations
tntacgtaagaaccangcggtcctgtggaacagcttattttcattaagcctctccagaagaatcaacagagtgttgcataacccccggtgcttatggcacctggtaccaggaaaacctcttttcttgtacatgaccgtgttgaacgagtctattgggtgcatgttgggtcagcacgatgattctgggaaaaaggaacaagccatttactatctaagcaagaagtttaccgcatgtgagatgaattactcaatgctggaaaggacgtgttgtgctctggtatgggcataacatcggcttaggcagtacatgctcagccataccacgtggcttatttccaaaatggatcccgtgatatacatttgtgagaaaccggccctcacg

SEQ ID NO: 147076 - DNA, 455 bp, Glycine max
agctttacatgcatgttcacaccatatttttctttctttgatcaactgatgcaatctatttgattgaaaagatagtttatattactcttctaatgtagccgacaactaaaaaaaatataacagaaaggaatgcttaagccattcaaatcaagtcatttggaatctcatcattactatcatgcatctcaaagagaatgagaatcaagcatcgtaatgcatagcacaacaaaacattaaaagaaaacatgtcttctatagccaaccaaggtaaaaatgtatttatatttgtgaactttttctaaattataacacatatataaaaacatggtggaacaatctgaccacatgcacaacacattccacacattatttctgaaaatgagtggtaagggaatataataatgcattgttattaaaactgtacgtgcactaagataacacgggtgtcatgacaa

SEQ ID NO: 147077 - DNA, 388 bp, Glycine max
catgcatgtgcacaccatatttactaaactttgatcttctgatgcaatctatttgactgaaaagataatttatactactcttatgatgtagtgttcaactaaaaaaattatgtaatagaaaatcgtgcttaagccattcaagtcaagtcattttgaatctcatcattagtgtcatacatctatatgtgtcaaacagaacgagaaacatgcctggtgatgcataacacaacaaaacattatatgaaaacatgctttctaaacccaaccaaggtgaaaatattttcatatatcatgaaatagcatggcttcctatggccgaacaatgatattaatttggcgagtcagtcttgagaatgttcaagtaattcttaatctgaatttgaaaata

SEQ ID NO: 147078 - DNA, 477 bp, Glycine max
  unsure (1)..(477): unsure at all n locations
atccttaagtcacctgcggcatgcaagcttacatataccttcaccgagattatatcatgtataattggagtcaacgcattgttgcagtaactggaggaggtgtcttaggctttcaaatcatcaagtgtaaaccaatcaaattcaaaagtaccacatgattcagaagcttatagttcatatacagaccaaaatgattcaaaggcacaaaaccatcataactcacaaccatcattactcaatggatcataaagcacaaagataaacatcaataattacatgtcaagctcgtgtcacaagtattacgagggtttagaagtataaattaatgtataattattcatatntttttcttctttntggtgtttcgtttttcttgtcctggtcccgacttgttctaaaagtttttgacaaattaatttcaatagaacctttctcccaagtctcaaccaacaaaaattcattgggatacgaagttta

SEQ ID NO: 147079 - DNA, 389 bp, Glycine max
tgacctcttcgataagagccttaaggttcttcgcatcatatgccaaaacctaccatagttaaagcacattaatgcactgctatataaaacagccaactttcaagcaatgaacttaaaataatagcaaattacaatctaagaccataatccaaatttgcattgttacaaaagcaagacaaaagggagcaactattttcttgcataatacaattacaatgtaattttctttccaatcttctaagctgataaatttcctcataataccactacttaaatattacagttggctattacaattagcatcatatttcaatggtgagagaaaaaggaattacaaatacctcagaaccttcttttatgcattcattatactggcttgtcttcaagta

SEQ ID NO: 147080 - DNA, 473 bp, Glycine max
  unsure (1)..(473): unsure at all n locations
atccttaagtcacctgaggcatgcaagctntactcaaattaattgcncctgaattaatgaactgttctatctccttaggtccataaaatactaaacttgacatggttactatcaattaagagaaatacaggtattgcgtgtttggatgtaaaattttaagaaagtgatgtattttttaaaagaatatataatgttccacactttgttttttgacatgataaaatggtccacactgaaatgctatattaggatttttttacaaagaattttaaaatttacagataatttcatcggatatttttattacctaaaagcaaggaaattaaaattagcccccaaagaggtagaattcccaaaatcttcagattctcttgcgtgattctctatttcataattatctatttactaaaaagagaatttcttttctaaaatactacgtgtcggtgcgggataaatttagaggatgcgactac

SEQ ID NO: 147081 - DNA, 393 bp, Glycine max
tcaccaagagatgattatataaattgtgccgcggttctgtgtgtgttttgaatgatctctttcataccttgttattacatattctgctggtgaaagaagctgaaacctagtgatgtggattttaaagctttgcttctggatcccctgctaatagagtataagttcgagacttatatttcatctgatatatcaccatcttactaattgagaatttctccagatttgtgattttgggcttgcaaaatggttaccaaaactgtgtactcaccgtaatgtatcaaaattttaaggcacaatggggttagcaaatatatatacatatgataaactactagaactatagttagagaattttttgttctcatgatctaatgtttacccctgatcatttaa

SEQ ID NO: 147082 - DNA, 427 bp, Glycine max
agcttagctccaaactctttgggtggatgttgaatgaacagcgctaggcaatgacattcatggggctccgaatgaaagtggagaatggagaattggcgaacagcgctacgcaatgacattcgcgggtctccagactcgacggtggagaacacatgaacagcgctaggcaatgtcattcatggggctccgaataaaagtggagaatggagaattggcgaacagtgctaggcaatgacattctcggggctccagactctaatgtggaggacaaatgaacagctctaggcaatgacattcatggtgctccgaaaaaagtggagaatggaggattgcactatagggtccacacttaggcaatcatgaagcatagctccaaactctttgggtggaggatgaatgaacagcgctaggcaatgacattcatggg

SEQ ID NO: 147083 - DNA, 167 bp, Glycine max
acactaccatttctacatgggcgaatttttcaccagctccataatatcaatactcagcccatatcagcccttctcattacccaccaccctatcaaccaagaacacccaatcatccacaaaggccacccctaaatcctcaaataccaaacaccacgcaaaacactaac

SEQ ID NO: 147084 - DNA, 348 bp, Glycine max
cggcctgctggcaacgccccatctccaatcactgttatgatgctgctagccataaccaagacatcacgcgcaacagacatgcccaaaacaagtgagaagtggtcgaacggggagaaacatcatacatgcctccatgtggggataataggacagccataaaactggggagaactatgagcaatgatatggtcatgaaacaaaactgatgaaatgatgttgtggtctcaaaacataagaatcctaccaagaccagcagatacgctcgtagaactgtgccctacgccataagcatgatgaacactctcaacccgtataagaaagcctgctagccctgaaccctccccaatg

SEQ ID NO: 147085 - DNA, 416 bp, Glycine max
agcaccgcggctgcagctgctcgctgcgattttacattttactttgccgaggatgaccgatgaacaattatggatcatcttgaaacttatgtgcttcaagtgagaagaaatgcttctttctccacttgtgaagatgatcaaagtttgtctatgaagatggttcaaactgagaaacatttggtatttttccattggctaataaacttattgagctagctttgatattgccggtgtcgacagcatccgttgaaagagctttttcagccatgaacattatcaagtctaaattgcgcaataagatcaacgatgtgtgtgtcaatgacttgatggtatgttacaccgagcgggagatttcaagtctcttgacgatattgatattattcgaacatttaccgcataaaagtctcggaaaggac

SEQ ID NO: 147086 - DNA, 373 bp, Glycine max
ctcagctggaccttcttttgtcatagaaactattttttctcctcattgatcaccctgctgattcttatggttacatccgcctttattactccatcgcttcgcatgatgggcccaagatgcttaaactgcttgacttgtggtaaggaacggcctctaagttttacttattatctaaaatcactgtgcctcttgctaaacttatattccctataccctgtcttatacttaaaacaaaattaagcttgtctccacatctctatcttcccatttattttctttatcgactctccaactcggactatattattctaaaatgcatgcactgaggcactgactcttacatatgctcagttaacacattcaagaccagtgc

SEQ ID NO: 147087 - DNA, 223 bp, Glycine max
tgggttcttgccgttgggtttgggacgcctctaattttttaaccctgggtcgatttattaatggccttagataattcactattgtgtctattcctgagtaagatataccgccgctggctcatcaatcttcaacacttatgctatggagtgcggattggagaagttaagctcacacctttgggagggacttaactgcccccgacattttcttcttttcccttaa

SEQ ID NO: 147088 - DNA, 439 bp, Glycine max
agcttcgaagggaagagagagaccaatctctagcacatagcatggtcttgaaacaggatttagctgcttgctcaaggtccaaaagaaacttgtctcagcgtttatgcgagacagagaccaacatgttagctatcgtcagcaagtaccaagaagaactaaatctagccacggcccacgagcacaaagtggcggacgagtatgcccaagtgtacgcaaaaaaggaggctagaggaagggtgatcgacgcgttacatcaagaggcaacaatgtggatggaccgatttgctcttaccttgaacgagagtcaagagcttccctgattgctagccaaggccaaagcaatggcggacacctactccgcccccgaggagatccacagacttataagctatggtcagcatatgatagacttgatggcccatataattagaaatcgcta

SEQ ID NO: 147089 - DNA, 375 bp, Glycine max
tctccaggtggtctctggcatcacgtttaaacttgaaccattgtcgataagtacctttgcgacgacatggttcatacatcttacagacacatgtagagccttgttgtgccctctcccctcaacgggaatctcttcttccgcaaacgcgatatagttattggtggttatatgattaatgatgccttcaaaaccctcaactgagatgtcgtgtgctacgtgggcttcgttgaggacctttatcaataacgcacgatgaggctcggagtttataagcagttcgagcaaagagatccatgctggagttttattcagttgctcaactactttaaactcgctttgttggatgagacgaaggaactcatgagcctcttcaaa

SEQ ID NO: 147090 - DNA, 446 bp, Glycine max
  unsure (1)..(446): unsure at all n locations
agcttctatataagctgaaccattttatcattaaacacaagttgagttttattcagaaaattagagtttatctcttttatcttagtgagagtgattctcctaaattcttgagtgattcaagaacaccctggctgtatcaaaggactttcacaacctttgtgtgttgccctcgttggaaagagtgattctttccttcctttcatcttcacccttgttctttcaaaccacaattccagaaaatccacctctgcccagaattatctcgtggccataactcccattntacgcactcaaattaagtgattcttgagcctaaattgactttcaaaacgagacctttcacctcgttntggaatcatctcatttggagccctgtagcttcagttattgccatttctatatttctgtccagccaccacttaacctacattntaccatcccattca

SEQ ID NO: 147091 - DNA, 393 bp, Glycine max
  unsure (1)..(393): unsure at all n locations
tctatataagttgaaccattttatcaataaacacaagttgttttttattcagaaaattagagtttatctcttttatcttagtgagattgattctcgtaaattcttgagtgattcaagaacaccttggctgtatcaaaagactttcacaatctttgtgtgttgccctcgctggaaaaagtgattctttcattcctttcatcttcacctgatgaggacatgaccaaaaacaaaggcaaggatccacttgaaagacttggagggcctaccacaagggctagaacaaggaaagccaaaaaagctcttcaacaagtgctgtccatactatttgaatacaagcccaagttttcaaggagaaaagtccaaggttgtgagttgtatcatggcccanatgga

SEQ ID NO: 147092 - DNA, 450 bp, Glycine max
  unsure (1)..(450): unsure at all n locations
agcttccatcaagtggtatcagagcacaatatcttctatttgtgctccttaaacctccattaactttttgctttaccttctcttccattgttgtttcttcatttttctccatgtatctcctcacatgtcttgtgctaaatgttgttaacatgattctttagagtttccaccgattagacttgctatagaacctagatttgattttctatggttcaaatttcttgttcttgttcttattcttgaaccatgaattgtgttgagtttaggttcctttgagatttgtcttgttattttttgtggctgaaacctaaaccataaaattcttacaaaaatattaaagtagaagaaaacctcanaaatctagagtgacttgttcacctattgtagttttgtcatagaagtcatgtctagtcatgaaacttgtcacataagatttcttatgttgtgctg

SEQ ID NO: 147093 - DNA, 395 bp, Glycine max
tcatgatgatgaatcaagttgattcaagaagttttgtattttgacaagatgttgacaaaaagcctaaagaatgatttcaagattaaatcaagaacaaattcaagaatcaagagaagtttgatttcaagattcaagaaaagatgaattcaagttccaagagaagaaatcaagaagacttcacaagggaagtattgaaaagatttttcaaaaaacaaacatagcacaatttttttttcaaaagagttttcacaaaattttctaagttaccagagtttttactctctagtaatcgattaccaatttcctgtaatcgattagcagtggcaaagtttgatttcaaaagcttttaactgaatttacaacgttccaattgatttcaaaatggtgtaatcgtt

SEQ ID NO: 147094 - DNA, 413 bp, Glycine max
agcctggtagaggttgagacaatgctttttaaacctatcattcttttaaggaggaggttaaatttgtagagtttcatatgaacagcgagggtgttgctgtgcccaatggtttaatcagatgttccttctagcactactaggatgtggttggagatactgcctatcagtcagtgctgcaatgtttgaagttagggtggattctacaaaatttaaattctaatatgttagggtggattcctaaaacttcagaggcagattctatagataactataggcctatcatttagcttgttcttgttgatgtatgtcgtaattcagttacttagttatgagttaggagttagttagtttgacagctatgatagttattatagctacatgtgtactatataaaaatattagtgatcattaat

SEQ ID NO: 147095 - DNA, 387 bp, Glycine max
ttggggctgaaaaactatataacagcaccaagggtctagtttagctctctctctctcctctctctctcttgtatttttcatttttagttttagtctctcttctctttctcttttattttcgttttttacaattccagttcagacttttagttttatcaataaaatttcgttctctatttgatcaatggaaggctaagtccgcagggttgttttctcttaaggatcaagcacagttctctttgaggttctattattactgttaaattctattcagtgtttcctcttcactaattactctgaatgtgtggctattaattcatgcatgcttagtggttgattaattgtctctgcgcttaatttacgttcatgcttaatgatcgtttatga

SEQ ID NO: 147096 - DNA, 451 bp, Glycine max
  unsure (1)..(451): unsure at all n locations
agcgttgaccttagttacaggctgtaactactgtttacttgcttctccacctttgtcaaagcagcaaccttacgattatcctctaagaatttcgtaacaaccctaccatctcttcatcaagcttcccatgattgctcaaaattntgacccttggcatatagtgaaaggatgcacattataaagttgtgtagtaatgtagtcccagtcagctttctaaacatgcagcttcaagtgttcattttaaatacgaatttcattaggttaaccaaatatagaggcagactctaccttgagagatcagagtccttacgttttgttcagaagcacatctacactatccagagctcctcctccaaagacagcatctctacctaaacttaatgaaaacatcaagaagcacatgttctattgctagggattaattattaatcttctgccaatgccatttgat

SEQ ID NO: 147097 - DNA, 388 bp, Glycine max
ctgtcatttggggagagggctaagttgttgaatattccatttggacagaggttgtttgagataatggctgagaaggagagtaatatgtgtttggctgctaatgttggaactggagctaaattgcttgaaatttttgagaaggtagttctgatatcttttttaagaacaagtgctattttgttcacttggatcatcagcttgcaatgtattttcttacttagaacttgtaattttgttttcttgcttatatacatgaaagaatcctgtgttctctggcttattaacatcaactggattctaattagaagattggccatgatcatatattttcttttaactaatttaaacggttttctctttcaagttggacctgaaatatgcttgctga

SEQ ID NO: 147098 - DNA, 471 bp, Glycine max
  unsure (1)..(471): unsure at all n locations
cccgagatcttaagtcacctgcngcatgcaaacttgcttttgcaattccattacactttatagcttccacgnatattacatgtcctatttgtacttttctatctaatgtgaatcctacataatcagaatatgaaaaccctgttaagtttaaggaggtgcctttgggataccacaaacctacattggttgtgcccttaagatacttgataatccctttaacatcaggtaagtgagattctttatgattggactggtatcttgcacataagttaatgcttagcatgatatccggtctacttgcagttaggtagagaagtgatccaatcatacctctgtatcttgattcatccactgttatacctttctcatctaagtcaaagtaggttgatctagcctagagagtagatgtttccttgcattctttcgtaccaaacatccttatcagttctatgcagtattttgtttgactga

SEQ ID NO: 147099 - DNA, 388 bp, Glycine max
  unsure (1)..(388): unsure at all n locations
taacaagctnttttttatagttagagcttggcctttttatctaaaaaggatttttaaaaagcttgagcttggcctttatagtaaacaagccgagccgagccgagccttacataggccgagccaaaggccttcgacaagctactcggctcatttccacccatgcacaacgtagtatggttaagagggcactcccaaaagagcaagatgtttccttctttattgcctccatgagaaagatgagttagagtttgtacacaaaataaagagggaaaaaatagatcactaattgtttggagacattgtataccttttctagtgagtgtccatatgaagctatgtaagcagaattgactgtagccaaatgtatgctgcttttctcactaaaaat

SEQ ID NO: 147100 - DNA, 444 bp, Glycine max
  unsure (1)..(444): unsure at all n locations
agcttatccgattacaatatttatctaactcctaatgtcacgtggataaagttntcaagatttgttataattaagtttaaatgctctttatactaaccaaatagtaatcaatgtcaaaacaaataaaaataataattcaaaccaatatgcatttatttctcaagagtatgatgcatatacaattatactaaaatctatttgtatgacagaatattaattacaaacatgattagagattaaacaaacttcctacttgcacccacccttcaatgttacaatagccacaattttttttctactgaaataaaaggtaaacaacacataaatggtgatggtcatataattgaacctacttggcaagtctactaaagttggaaattagggaataaatgacccaggtgatatcaagcccataaaggctttcataaatagtttctctaatct

SEQ ID NO: 147101 - DNA, 386 bp, Glycine max
tgaccaatattacaacttggtaataccatgatttataaacatctaagacaacttgacagcaggtagattcattcaatctgacaatgtctttctaatttgttagaggaaagttgtgcggataaaatttgagagcttcttggttcatcatccaattcattagatgataggcgctttgtcggtgttaatggaatgcttagaagtgggtcatgatctgctatgacagacataaattactgcataaaacattaactgattagtaagctaaatgtaaagttggaatgactttaattttattggcatcatggcaaaatgcatcagagtaaaacacacaagaacaatgttagcttacaaattcaagttgtgtagcatcattggagtgtaggatt

SEQ ID NO: 147102 - DNA, 432 bp, Glycine max
  unsure (1)..(432): unsure at all n locations
agctntcatcaatatttaaggctataatcttgcattcaactcaaatgttatggccgtttgactttatcacgggattccttgttcaattttgagcatctaagtatactttgggctcaacgagacatccaagtcaaaagttatggccgcttgaatttacctcgagattttgtgttcaatttcaagcgtcttgatctattataggcggtaatcgaatatccgagtcaaaagctatggccgtttgaagtttcctagtgattctctattcaatttcaagcgtctcgatatatttaaggatgtaatcggacattcaagtcaaaagttattgtcgtttgatttatcacggtattccttgttcaattttgggcatgtaagaatatttcgggtcaaccggacatccgagtcanaagttatggccgcttgaattacctcaaa

SEQ ID NO: 147103 - DNA, 385 bp, Glycine max
  unsure (1)..(385): unsure at all n locations
nttagctcgtccttcaagatcatgcctttgacccgtgatgattcctttcacctcttcggagcttgagctcactattgctgtcctataaagcccctcaaaactttgctttggccgtgttcttcctttcgggccttcttggtttctcgttccaaggcttcagcggtggccatattgacgtcccttagttcatcatactcttttcagactttgatggctatggacttgaacttctcttcgactacccgggctctttcaagctctgcctttagggcttgtacctcatcactttcttccgaagctttaacctcatcatctctcatagtctttagatttgggagccaatccaatccttgtgtccggactctcagccacttatgatagtcgc

SEQ ID NO: 147104 - DNA, 443 bp, Glycine max
agcttaagaacccaagctcttagtttcaatgctagtatcatggcttatgtctaaaaatctgaattttggttataaaagtagacaggcatgaaagttaggatatgcttgtgagagtttttacccgaatttgggctgccccatgaggggtactttgcacctaggtagcatggaaaatacctttcaatggtatgtaaatatgtgtgtaaatataggtagcatggaaaacacctttcaatggtgtgtatatatgtgaatatatggcataaaattccttgcaaagtgggaacgagtagcagaaaaatgtctttcaacatattcgtatttgaggataggtagctttatgagccttttagaaaatgtacccatgtctaaaagggcctatgacgcttcctaatgaatatatgatggcttggaatttcctattcaaatgcaagtatgtgcat

SEQ ID NO: 147105 - DNA, 382 bp, Glycine max
taaaggaagtgaaagaattagtatgggcataaatgtctttttattgattagtaaaattgttccccaaatcgctgaaaaatgtaaagatccaggtacattcaacataccttgtattatagggaacagtaagtttgacaatgccatgctagatttaggagcttctgttagtgttatgcctttgtctatttttaattctctatctcttggtcatttgcagtcaactgatgtggtaattcatttagctaatagaagtgttgcctatcctgctggtttcatagaggatgtcttagttagagttggtgaactgattttccttattgatttttatattttaaatatggaggaaggatttttctaaggatcagttcccatcattctagga

SEQ ID NO: 147106 - DNA, 466 bp, Glycine max
  unsure (1)..(466): unsure at all n locations
cggatccttaagcacctgagcatgcaagcntgtaggcgttgggtggttaatgatttttagactcaactnggataccaaccttgtgcaacaacaattgcagcaagacccactatccacaatgagataacaatttttgtttaaaaccttgcatcttgtatgaaagatgttttctcttatggtttgggtaaggtgacaagattgactcccaatgagctttctcaccattagaagatcaccttcttcataagggtaaacctctttaatactctcatcacccttggcttcaccttcacttccacttgaggaaggagaagaactagcctccttttggctattatagatgtcttgacccctcatgatcatggttttctctgtggggcattgagaaacaatgtggcctttcccaatacatttgaagcactcgatgttactagttctatttgtggactaacctttggagtgattt

SEQ ID NO: 147107 - DNA, 390 bp, Glycine max
agcctccaagtttctggttttcaaccttttttcttgtgttattcatctttttcattcccttctccctttgccaaaaagaattcaccaaggactaaccgcctgaattctttttgtgtctctcttctcccttttccaaaagaacaaaggactaaccgcctgaattcttttgtatctcccttctcccttgtcaaagaattcaaaacgacatagtctgagaattcttttgattcttccctttctcatatacaaaagatttcaaaggactaaccgcctgagaattcttttgtatccccattcacaaagtttcaaaggtttaaccacctgagatctttgtcttaacacattggagggtacatccactacgttgttcaaagagaacaacggatggta

SEQ ID NO: 147108 - DNA, 441 bp, Glycine max
  unsure (1)..(441): unsure at all n locations
agctntacagcagattttagtaatgaccttctaacctagaattaaaataacttaatgccattaacctagggaattaaaacaaacttaatggctgagtgtaactgaaattgttggcaaccaaaagtcacccccaacagccaacaagtcagccaccatttggtctcccaaaaggctgatgcctaagttgccaattgggcccttattacaacttgaactaaagcccttttagttgattaacccaaaacatatttttggtcagccaactttacaaggattgggccattatttagacaaactaaacactctaaaattgaaataaagtggtgtcagttagtcctccatttgtgccatgatacaactcacaacctnggacttttcttcttgaaacttgngcttgtattcaaatattatggacagcacttgttgaagagcttccttggc

SEQ ID NO: 147109 - DNA, 383 bp, Glycine max
tcaccttctggtcctcctcatagttgttgcatgataaaacatgctctattttcatctcccactccaagtaggcctccggatcattctttcctttaaatggaggaatgttgagtttaataccatcaattcggttttgtctaggaacacgatcattccctcttctcctcctttcttcttcattatgatctctattctccatttgatccaacctctcatggagcgcatcatcttgttatttcattaacctctccatatgttgcatcaaagcttgcatttggaattgcgaaagtccccctccatcattaggatttgttcctgccatctcaaacaaacaaatcaaacgtaacaagacaattatagttgctgtttgaatacctcaccca

SEQ ID NO: 147110 - DNA, 443 bp, Glycine max
agcttctactccaaatattcataaccccttctatacaaaacgtggggggcagtgttctatttctgaatggcttgcgcctttttccgcacatcctgcaaaaataaaacaataatctttcaaattggtagaatgaattataacaatttaatgttttttgaaaaacaacttaaatggcaaggtacataccttccaagaagggtctttgcgagtctggcaaaactgggcccatttttccttgcttatgtcgtatttctcacggacagtgtcgttcacaccgtcctgatcggctgcaagggcctatttccttgtgaggtctgatttaaactgcctccatctcttgccgacagtctgaagtaacttgttttttgtcctactatcagaagcctctgggatttcaaattccgcttgacaataacaaataaggtttatttgttacaataatg

SEQ ID NO: 147111 - DNA, 344 bp, Glycine max
tcatgccacacttggcataggcatgtaatttacttgcatgtaagcatggcaccggcgcggggcggggtcatggagtactcccccgctctctagccccgaatcttaccctacttctggtcccagctttttgtggtgggggtatttttttgtccaaattacggatcccagctccccgccgagacatgtgaaaaccatgcttatattaaaaaaagtcaaaaattataaaaaaaatctataatttttttttatatctatttttcaacaataataaatttaaggtttaattctaaagttaacacatgactaaaaatttctaaattaaatcaatattaatagtgataaaa

SEQ ID NO: 147112 - DNA, 65 bp, Glycine max
  unsure (1)..(65): unsure at all n locations
ttctaaactntatacaagaatgaacttctgataccacttgttggacaagtggcctcatatatctt

SEQ ID NO: 147113 - DNA, 412 bp, Glycine max
gtgacactataaatctcagcttacatgtctgagtggactcatccaatgaaacatctacttgatcttgaagggttttctcaagttttaaatgatctatggttagattcttgaaatatttttgtaggtttttgtaagcttttgagagaatagatgagtttgatagaatctcatgataagcttttctaagagattcaggatcatcaaaatttacctcataatcttcatcagacgaggtgttgtccaggtcctcccaggtactcataagacccttattttctctagtcttgaagaatttcttcttatcatgactcttcttcaatttttggcattcaaacttgaaatgtccaggctttttgcactcatagaaaattatggagcttttgtctttatctttcttttctttggacgttct

SEQ ID NO: 147114 - DNA, 452 bp, Glycine max
  unsure (1)..(452): unsure at all n locations
agcttcaagaataatggtctcatcaaactatctattttccgaagggaattctataaataagcctcccatttntaatgacgtgggtaaccactattggaaaacccgcatgcaaattttttagaggcaatatatctaaatatttgggaagcaatagaaatagggctctacattcccactatggcggtaggaaatacaatcatacaaaaacctatggatcaatggagtgaggaggaaaagagattagtccaatacaatttaaaagccaaaaatataattacatctactttaggaatggatgattactttagggtatcaaattgtaaaagtgcgaaagatatgtgggataccctacaggtaacacatgaaggtacaatagatgtaaagagatctaagaataatacactaactcatgaatatgaattatttagaatgactccaaatgacaatattta

SEQ ID NO: 147115 - DNA, 391 bp, Glycine max
cttgcagaagaaaatgagaaatttaacaaacattgtgttgttatgtttttcatttttaattgtaatgttagttttagggggaatgtattttatgtaaaatgtgcaataacagcttttgatattgtaattgttgttttgctgaagaatttgtagtaggaagtagcttttgtagtgtaatagcagcttttgttgctactgtcaattgttgttttgctgaagaatttgtagtaggaagtagcttttgtagtgtaatagcagcttttgttgctactgtcaattacccatttcaattaaatataatttgttggtgaaagagaagcttttggagtgggatggattgtactactccaactccaaatccaacacagtgtataatttataaaagaaagag

SEQ ID NO: 147116 - DNA, 458 bp, Glycine max
  unsure (1)..(458): unsure at all n locations
acctgcngcatgcaagcttggtctggtcccattggagtgccatatcggaagaaacactctgtatgtgatgcatgggacttgtcaaaaccacagaaagatgccctcaaggacatggctagaggaaagaaaattttagatattagtacattcttatagagttaattaagaatctgcctttgctgcctcattttcgggtgcagaccaactgctgcgcaatgcgcttgtgaaaatgtcgtgctgcttgcccacttcctgagtaaaagtataatagcttctcagtagacagcaagggataaaaatcatccccccccatcttacaccttcaatttctttctcaagtgtttatttcctggcctttattaaatgaaaatattcttttctgttcaatctgttagtatgatgagagaatactactttgtcatcgtgatttatttttaaaggagcccgtgttatatctg

SEQ ID NO: 147117 - DNA, 392 bp, Glycine max
tgatattttctttctcgagtgataccagcacacttttatctttcttatgaacaggaggcaagaattctgctagctagggattggggtaggataaaacggcacccactacaatgaagaagactttgcaaaaaagactatttactattctttcttgtctatacgattctgttgagaataggaaacaagcatccccatccgatttcatgccgggtgtcctaacaagcctaattcttaaaataataatttatttcgcactaataatatgattaaaaaataataataaatacaaacaataatcagtgtataacatttcatgcttgtttttctttctaaatttatttataacccaagtcgactcaaaaataaaataaagtgttcatattacacataaa

SEQ ID NO: 147118 - DNA, 455 bp, Glycine max
agcttgaacatctcttaattagttcgtgcttatccgtggagcagatatttgtggcggatgaaaactcgggtcaccatcatcatttcagaatatctgctccaactgaactggtgagcatttcaaattgctttaatttgttctttcttatgttagacttattagcattctattgtgaacctcaagcatattatcaactgtgtgatataggttccgattttccccaacttggagacatttgtgatttctcacatggacaacttgaagtcaatatggcccgaccaactcactgaaaattccttctataaattgaaaaagatggaaatcacatcctgtaacaatctcttgaatgtgttcccatgtcatgtgctagacaaattacaaagcctggaatcactgaatttatggaactgtatggcactaaaagttgtatatgaaattgatggcataaacacagg

SEQ ID NO: 147119 - DNA, 381 bp, Glycine max
tgtaggtgcaaaatgacaagggacgaatttaattattatttttaaaatatgagaatttaacctaagtaataagtttcaagctattaatctatataaatcactcttatatttttctttttatatttaacagttttagataataattcacaatgtatcacattttcaggtggtgcattcttatttattttgctatttccctcgtcatttgagttcaaacttccttttacttccaaaacaaactaacctttttcagtacgtaacaccctaaccctatcttaaggaagattcaatcgcttgaattttgtcgttgtgtattttaattcaaatataattctatcaagagaatatcttttctttagtcccatcccgtgcggactgtgt

SEQ ID NO: 147120 - DNA, 447 bp, Glycine max
  unsure (1)..(447): unsure at all n locations
agcttcttagtggtatgtctacccctttatctaatactgtttgcaaactgaaacgctctttatatggattaaaacaggcaccaagagtatggtttgaaaagtttcgctcgacactacttgttttttaattcactcaaagtcagtatgatccctctcttttcctacaaaggactcctaaaggcatcgtggtgcttctcgtttatgtgaatgacattgtggtcactggttcagatcaagatgttgtttctagaatcaaaaatcagttgcattcaacctttcagatgaaagacttaggccatctcacttatttcttgggtttagaggtgcattatcatcaccaaggcatntctttatgtcaacacaagtatattcaagacttggtccaactagctggactcccaaatgccacccctgttgacactcccatggaagttaatggttaatatc

SEQ ID NO: 147121 - DNA, 393 bp, Glycine max
tgctcaatgtagatggttggggttaaaatcatgtgtttttggagggtgcagctcgtgttttatatggatgttggttcaaggtggtgaattgttgggctgtgaccaaaatccatatggaagtttattttgttatttttctgttttgtcctttgtttatataaagcaaggatgccctgtattttacataaaggataagcttccacttgtataatgcaaccataacaaaagctttctgtttttccctcctgtggatgtagccttactcaaagtgaaccacgtaaatatgcttgggtgttctttctctcatctctttctctttcaattttgttgcaacatcgtgtgtgacataacattctgctgcatctgctgctgctattcttggttggtcttcat

SEQ ID NO: 147122 - DNA, 441 bp, Glycine max
agcttgaaggagaatcatgcattatggattaatttcactttaaaaggcggatccaatcggcatcctagtattcagctaacctatttggatgtgggatcatggcagataggtcccagctttccatcgtggattcagtcacaaaaaaaaacttaaatatttaggcatgtctaacacagggattattgattctattcctacacagatgtgggaagcacaatctcaagttttgtatctaaaccactctcataatcatatccatggtgagctcgtgactacattaaaaaatccaatatctatcctaactgttgatctaagcacaaatcacttatgtggtgaatcaccctatctctaaatgatgtgtatgggttaaacctttcaaccaattcattctctgaatcatgcaagatgttttatgtacaatcacgacaagcaatgcaataa

SEQ ID NO: 147123 - DNA, 377 bp, Glycine max
  unsure (1)..(377): unsure at all n locations
tgtaagatgtgcaagatcatcatcgcagttaactccttgaaaattatggccatcaataagaagcgttgacaatttaaagagtgatccaagactttcaaatggattgccactgaatttattaatagagagatagagatatgataaatctgtctcccatcagttgcggagatgtcccaaaaaagtcggaattgttccttcaagttgattacgcgataaatcaagttcaacaagagaagtcaaatttcccaaagaagttggaatggttccttcaagttgattatatgacaaatcaagttcaacaagagaagtcaaatttcccagggcatcagaaatagtcccatgcaaantgctggaacttaggtccaaagacttgagac

SEQ ID NO: 147124 - DNA, 444 bp, Glycine max
  unsure (1)..(444): unsure at all n locations
agcattaagtgtgattaaagtgctcagttactctttgtatcttttctcctagacttgactccctttttatagtggttggagtagacttgggtctacgtactcgcactaagcctgcgttgctcgcttaacgcaggtgcctattttcacgtttagcacgcctcttctcgcttagtgaggatacttgtatttgcactgggtgcgtattgtgcgctgagcgcgtcttgagctatgcctttatcaattttttgttattttatgtatcttttttgcttttaatccttcctttccatatctggtagccatgaatgagaaaaacatcatttcttagtaagtaagcattaataattactaaataacattctaaaggatatttccattatattgttattataaataatangtcatatttaataattatcataacagtagcaagatacagaaatt

SEQ ID NO: 147125 - DNA, 386 bp, Glycine max
  unsure (1)..(386): unsure at all n locations
tnctctctctgtaaaagcactcctccagtcgcttcttcttttgaacgagtccgtcacgctctttaacgagagaactggtttcgttctcgagacgggcggcgaggtcattgagctggcgcttgagaaccgcaacctcgtagtccttctctccgacgagcgtgtcgaagcgaaggttcatttcctcgagctggtttttgaagaagacagaaacgacagcgttttggacgtcaaaggcgaggttggtgtcttaggtgacggcggattgctggagcgcggactggagagagtgaatctgctggcggcgttgggtggtctccttgagaaggacggcgttgaggtttttgaggttctgaatctgcagatctgaggagccatcgcgtggagta

SEQ ID NO: 147126 - DNA, 433 bp, Glycine max
  unsure (1)..(433): unsure at all n locations
agcttcaggaatatcaaatttatcctggctaacaataaaataggttttattgtttgtaaattataaattttggctaataaagaaaatgaaagatgaaaactaaaatacttgaatatcctcccatatcaaatccttctaagcagcagggacttccatccaagccttgtatgtcacatcgatcttatcacgagcgcgatccccaaatatgttcttaatttcttcttgtggggaccgtcggccttcccggtcgcaggatcgatgttgaccaccgatctctctgccctaggtagtctagtggccaaggatcatagccatgtggctttgcatgtccgcttcaaggtagatggagatgctgatgctattgcacgaggaggaggtggaggaggagaatgaggatgaggaggcnangcangtggattatccatgggcctat

SEQ ID NO: 147127 - DNA, 326 bp, Glycine max
cattcagggtagttatcttcttcacccttttttcacagtcaattaatattaagcgttgatgtttgtgtcttagtgagtatgttgaatgaatcttttagttttatatgcacagctggtgtagcaagtctagatcttgatcgtattcgtaattgccaaaggggagttgtgaaaaaaaaattgtttgatttaacctatgcatggaaattacatgcaattaatgttaattggtattgttgttggggcttgaaaaaagttctatgacattctcttgtgttaaaaaagattacgcaatttttggaggtcacatccaattatccattctcaag

SEQ ID NO: 147128 - DNA, 442 bp, Glycine max
agcttcttagtttcagatgatgcagatgggtttgtagctacctcatgcactcctctaatgactatggcatcatttctggcgctaaactgctgggagttggaggccatcttctcaattaaatttctggcttcagcaggagtcatgtctccaagggctccaccactggcagcatctatcatacttctctccatattactgagtccttcataaaaatattggagaagaagttgttctgaaatctgatggtgggggcaactggcacatagtttcttaaatctctcccagtactcatacaggctctctccactgagttgtctaatacctgagatatccttcctgatggctgtggtcctggaagcagggaaaattttttctaagaatactctcttaaggtcatcccagctcgtgatggaccttggagcaaggtaatacagccagtcct

SEQ ID NO: 147129 - DNA, 385 bp, Glycine max
  unsure (1)..(385): unsure at all n locations
tcattctacacctaanaaaaagggtgagctagctgcacaaaagagaaagcttccggatcatgagggagctaacaaaaattttcatgcaggtggaccttcttctagtagttctgacgtgcagcagcctcctatccctattccatttccacctagagcatcagttagtgtcatgcctctgtccattttcaattctttatctcttggacctttgcaacctacagatgtggtgattcacttggcaaataaaagtgttgcttaccccgcaggtttcataaaggatgtgttggttcgggttgatgaacttatttttcttgctgatttttatgttcttgatatggaagagggattttcctatggttcaattccaattattttaggcaggcca

SEQ ID NO: 147130 - DNA, 445 bp, Glycine max
  unsure (1)..(445): unsure at all n locations
agccttgacgaataaggtgatgcacttattatacacaacaacaaacaggtgtgaaaattgtcatttttatattatggtttaggaattaatggattttaattcttatattngtgtattattttttgtgtatttcaaatgcagggttgaatctgcttattgggctttaaaaagactattacataatagtcttatagacatatgtagtgtttgggaagccatgaacaacatgatcactgaaattaagccatcctttgagacaaatacatatgtggttgagcatgtttttaaagttaccttatacaagaggctacttggcacagtatcaaggtatgctttaaatcagattgttgctgagtttgaacgtatacattatgttggcaaaaactcttctctgtgtggatgtgtcatgagaactactcacggtcttccatgtgcatgtgagcta

SEQ ID NO: 147131 - DNA, 390 bp, Glycine max
  unsure (1)..(390): unsure at all n locations
tagcgcaacagccgtgctaagcgcacttccaagaattcattaatagtaaaagattggcacttagcgcttcctgccccactaagcccagctcaaaagctcaaattacagaatggatctggggcttaactcangatagcgcgcttagcgctgctacaatcaaatttttccagagaagaagtggcgcttagcgcatcatccacgctaagcccactgattaagattcaattacattgaagatattgggcttagcgcagtgatatgcgcttagttgaactattcagccaaccaatcaggggtctctgcgcttagcgcgagcaagctcgggctgagcgggtgaagaatgagcgcttagcggatagacaattgcaaaaattttctaagtctcttttt

SEQ ID NO: 147132 - DNA, 361 bp, Glycine max
ggacgaattatcaaataagtgttccaatgccttcttggatgaacacgcttactgagcttttctacatacacttgtttttttaccgcctaacatgaatatcttcatctgagctcacaatgctcacaacacttacatcacaactcgcatatgatgaagctaaaaggacttacctggagtgtacccctctttgctaatgccaacaatgtaccccaaatgcaatattatctgattttctacctaccaacaacaatatatctgggaaacaatagcctgaatggcagtatccctatagagattggcgaactgaaagtccttcatcagctggacctgatgaacaacaaattctctggcgatatcccat

SEQ ID NO: 147133 - DNA, 445 bp, Glycine max
agcttttctaaaccttttcttcccctttggcaacatcaaaaagccaaagaactcggaaatcaacacagatatgataatggagtagaaaaatatataaatatcagagtataacaaacaataaaccaaactcacaaacaagaaataatcaaactagaatccaaataactgaaaatgtcaacaaccacaaaacattcaagactgaaatttaaaaaccacaagataaataagcaaagtacttagcataataatgtaaattctaagaaactaaaagccaaaatacacggcttataaaagataaataatcagaaactaaaatctaagaagacggaggtggtggtggaagatcgaaactctgacgaatgtatccgacatcctcttcaagatgtgtaagacgaatgtccataccggcaaagcatgaatctaacgagtcgaagcggtcaccaac

SEQ ID NO: 147134 - DNA, 381 bp, Glycine max
tgcatttggagaggttccatcaaccgccctaatttcttgatgctggtggtatctaagcttttaaccttgacttggtagaacctcttgtcggtttgatttgttcccatgcttgctaaagtgagacaaaagctggtgcaaatcaaaactctgatatctcatgggtcgaatggatgaatgcatgaaggaatgcatataacacagatgcaatctatgaatgcgggagtccggggaattcgtccccttcttagacacaacgtctaggggtagcaaagtgccccaacgtacgtttttaagaaggcaacacggaccctccgttggtttgtttacacaagggatcaagacagaacccatatgcgatgcctatgcaaaagacacaatgcg

SEQ ID NO: 147135 - DNA, 448 bp, Glycine max
  unsure (1)..(448): unsure at all n locations
agctntctccttcttagcataggtgtggttatttaactgtggatgtgtccatggagccaccccatcagtgaaagtaggtaacttttcaaaagaggaagatgcttgaaacttccatatttactatggctagaccttcaaagtcattaagaattctactgatggctagagccaccttcttctccaggtgagtatggagatatacttttttttttactatctttgaattcttaaggtagggtactaatatccataggtcctaaggttttctttggatttttgtttatgtaagaaaagaatgaaatggaaaaatgataaggacttgcttttttattttttagctcgcttaattgttggaagattaaggggggtgtatgacatttttataagttgattcaatataattttagaaattattgtgcatcaagtatggctttatattcgttatcta

SEQ ID NO: 147136 - DNA, 415 bp, Glycine max
  unsure (1)..(415): unsure at all n locations
agctttaaggtcatcgcgaaaatcatggttttttttacccaaaactgatgagatgnttagatagccttataaatgacgtggaaagctgttataatggtatagtgatacataaattatatgattggattaatctatgcacttattgtttatgaaatgaattatattaatgatgagataattatgttaaatgattatatcttgagttgtgttgggttgatcttcttaatgatgatatgaacttacttagataaggtgaatatggtaatgttgataagatgatgatcttgtcttgtgaccatccatatgtgttagaagggttaactatggtctttgagaaagctntcattgaaataaaaatggtatacttgggagggtgagttctatgctcaaactctgccttactaaacctaatttt

SEQ ID NO: 147137 - DNA, 381 bp, Glycine max
tgaatcgtccaattattattgtagagtatatctttttattattattgctttctttttatattttcgtttgctagctgtttgggtagagtcttccttttataaacatcagtgaaggatccattacgagattagtgttgagtcattgaaatgactgttgtctaacactgggagataaggctatgtggcatgctctgattcgagaggaaaggaacaaaggtacaaacagcgacatgtattcctagtcctagatgaaaatgaccctcgcagaatattatgtgtagacattctattcttttctattctatcattttcttaaattcaaatgttaaaaattcaaataaagagaaacttatgagcagaagtacatgtactttccttttc

SEQ ID NO: 147138 - DNA, 454 bp, Glycine max
  unsure (1)..(454): unsure at all n locations
agcttcttctacacctganaaagaggatgatgattttgctcattagagaaagnntcctaacaaaaaatttcatgcatgtggaccttcttctagtgattctgactaacagcagcctcctatccctcttccattccaacctagagcaattccaaacaaaaagatggaagaggtggaaaaggatatcttggagaccttcacgaaagtagaggtgaacatacctctgttggatgccacagggcagattccaagatatgccaagtttgtaaaggagttgtgcacccacacaaggaagctcaaatgcaatgaaaggattancctgcgcagaaacatgtcagcattgataggtaaatctattcctcacattcctgagaaatgtaacgacccacgtactttctgtataccttgcattattgggaacaggaaatttgagaataccatgctagatctaggagca

SEQ ID NO: 147139 - DNA, 389 bp, Glycine max
taaccctctagctcaagagatagattgggtgtcattcacttttcttagtacaaacaggtgttagacaaccaatgattgaaaatccacaaattattcaaaacaatcatacagatcaagttattgatgaggaatatcaagataatgttgaacaacctgttgaacaaccggttgagcaacaagttcctcaagaaagtgatgaggtaacattaagaagatctactagagtcaaaagattagcaattcctagtgattatgtagtgtatctgcaagaatcagactacaacattggagctgcaaatgatccagaaacattttcacaggccataagttataaagaatcaaacttgtggcacaatgccatgaaagatgagatggattctatggcgttt

SEQ ID NO: 147140 - DNA, 453 bp, Glycine max
agcttagaatgaccataggggaaatgggctcctaattgtgaaggacctttcatcatgaagaaagcattctcgggaggagcattggtgcttgccagcatggacgaggaggaattgccttcgctcgtgaatttcgatattgtcaaacgatattatgcttagtacttggggtagctaaagggttcaatacgtgattgttctccaaagactcattgggatctccaaagtcttccaatcctgtgtaaaccatgatcgcaacattaatatacattggattgatgatttgcatttcaacttcgtgtgttgcgtcttttatttctttagagtacacactctcgatcttgaatccagagccatttggctcaatctataaggtgccatatagcgtgtaagtaaaattgaacataataaacactcgtgtgattgttacacttaaagtacctaatcataagcatg

SEQ ID NO: 147141 - DNA, 394 bp, Glycine max
actaagcttgagccaaatccaacttaccataaaccttttttattttgataatgtcaatccttgccctcggaagaaaacaaagaaaagaaagttcccgacccaagaatcggaaaaaaaacaaagagaaaattcccaatcaaaagagtggaaaaaaaggggggaaaggaaagaaaattcccgatcattgatcgaaagaaaatagaagaaatatgcagaaaggtctttgcaccagacaacatctgaacagatacagagttaccaccaaataaacaaaaagaagaagaaagaaaggaaaccacgacctaaagtggtcttctcccttggattgccaaccaaagtccaatgcgtcggtgacttgttcacctcgctctaaacaaaaacagaaaagggaatg

SEQ ID NO: 147142 - DNA, 453 bp, Glycine max
  unsure (1)..(453): unsure at all n locations
agctntcttttgtggattaaatgtagcttctcactctctctttgaatgtacccaaatgtgtatactttgttataaaattttgcatggaatttaaaatcacagtcttgttcagtattgggtagctgagtaatcagcaaaggaaatcccttgtttcatatgttatgtaacgatccgcctcgtcactatgataccaccactctaaaccgcgtaaatttcaatttttaaacgaaaactccattaatttgcttatgaaaaatgaaagtaaaatttctgcgatatacactcaccaaacaacacacaattacttaaatgaatatatatgtgtgtgtgtgtgtgtgtatatatatatatatatatatatatatatatatagtaaagcagtacacattcttcacataatggaaagtgaattaattcataatataattaaatttgtgattacatcctcaattc

SEQ ID NO: 147143 - DNA, 391 bp, Glycine max
  unsure (1)..(391): unsure at all n locations
tagatggagaagaagagagcgtgaaagcttagatggagaataagacaacgcacacttcatagggctcactatattttttaaaatataagttcaacatcggtttttttaaaaaaccaatgttaacaacatgatgttcaggttaacatcagttttctggaaaaaaaccgatgttaacttatcaaacgttaacatcggttttctcaaaagccgatgttaacaaacttatgttaacatcggttattgggaaaccgatgttaactaatcaatgttaacatcagttttccaataaccgatgttaacgtcacttcgttaacatcggattntcacaaaaccgatgttaacggatacaccgtatttacaattatgccaccgcgcttacattaacatcgat

SEQ ID NO: 147144 - DNA, 398 bp, Glycine max
  unsure (1)..(398): unsure at all n locations
tgaggggattgataaagctcaaattaacttacaggcacatgctaatttgtagaagatctctcatcttttatagaagttacatgaaaaagcttctacacattagcttatggaaagactcatttcacttttacttctcctagaaactaagaagcatggacacttctcttgttcgaagtgtcgccatgtcagacatttttctgacaccccgacacttgtttaacacctcttattaggtgtccattttaaaaattatatnttggtggctcgaacacttaaaccgtcacgtttacacagctaatacacttgaaaaaacataaaaggttggtttaaaaaatgaatatgccatcaatttaaataatntggtatatgttactcatatttcatttcattagagtctc

SEQ ID NO: 147145 - DNA, 382 bp, Glycine max
  unsure (1)..(382): unsure at all n locations
gattgctntgtaccatggctgccattgttttttagcagcaggttaccttgaagcttatggttagcaaagaaagaaatgaagttttcttaatcaaggcagcaaaggactttggggaagttatgcttagcttcttaacatttcctttaggaaacattgctatacaaatggaaaaggagccaattgaggttggatcactgagctcactttatcaaagtgtggcaaatattgaataagtgtgtatgtccaaggaaatgttactgcaactgaggaactcattggaagcttatatggataatctgaaggtgaagattgacgacattttgctcacacagtattttatatgtaatgacttggtcaagtgtcgacacaaaagccaggtctt

SEQ ID NO: 147146 - DNA, 439 bp, Glycine max
  unsure (1)..(439): unsure at all n locations
tcaagcttttataaaacattattatatgtatatagatataganggggcactaaaaataaaataaaatgacatagacttgtttggcattggccacaaataaatttaagtgaattaaaaatttatgaataaatgtgtgtgatagcgtgtttctatagctcatattattcctaaataggtttatacacctccaattaagcagaagaaagggagggtccacatcatgaatggaggtgacacgtggtatggccaatagaggtggaagtgtgggccctgcaaaaagagggcaacatgttgcagagtaagtggaccaacgcggaagagtgggacccacggaaactcatctgtcaccatcgcttaaaaacaaaccggccccactctcacgtacgtgcgcgtttactacacgtccttttncgcccaccttatttatacaagtgccact

SEQ ID NO: 147147 - DNA, 387 bp, Glycine max
  unsure (1)..(387): unsure at all n locations
ttgaggagagggagaataggaataaagttttggttataaatatatatttgaaattaagagggaaaagaaaaaaaataaaagcgtgatgatctgtaaagntaagtgattgcttggaaaattaaactaaagtaacaagggaacagttgtagtctgacttatttatgttgtctagaattcgttgttgcaaaagttataatgtatatcattgagtaagcttaaatatacctaaatgccatcgtttgaggggagatggaaaaattagtgaagttgagaggaaaaaattataatagagaaaaaaaaattaattgagttcgagaatttttattttttgcttcagtgcgagaaaatgtatgacagggaaatcctatttacttaaattggatttat

SEQ ID NO: 147148 - DNA, 472 bp, Glycine max
  unsure (1)..(472): unsure at all n locations
ctcgacccggatcttaagcacctgggctgcagcttgatgacaggaattgtgtgatctttgtatgcagtggtttgtttggtatgaaatgagtgtttgaaaatgatttgattgagcaaatgtatgaattgaatggattgtcatgattagatgattgttttgatcaagtttgcagtcattagaagtatgtcttaaaatgttagttggttgtcagattgattgtgaaggaatgcattaaccgtatcccggtgagattgtgatccttaaattttgagagaaatgagtatcatttagtactaatttttgcatgaatctctgaagtatggactggatgcataaatttgaggatgatgaaggtcatgtttgtatatgaatagccacttanctcaaaagctgaccatatgttggaatgaattatcccttgcacccacattgagttgaatgaattgattgatcgattgaacctggagcctat

SEQ ID NO: 147149 - DNA, 388 bp, Glycine max
  unsure (1)..(388): unsure at all n locations
tctatggaggctagatctttgagcttctatgaggtcctttaatggtgatttttagccttggagttgtagcggaagataaaggagaagaggtgagaggaggtgccatccactagggaataagccatggaagaagaagctacaccaccaagagagtgtcttggataagaagcttagagaggaagtttcaatggaggaagagaattagagagagagaaagtggcatggaaaattgaaggaagaaaaggagagaagttgaactttgaagtatgtctcacaagactctcattcatcaaatttcccttatacttgatggagtgggccactcangaatgacatttattctcttaaggtccgtggaaacaccttgatcactatttacaaaattaag

SEQ ID NO: 147150 - DNA, 437 bp, Glycine max
  unsure (1)..(437): unsure at all n locations
agcttgctaacanaaatattcatgtatgttgaccttcttctactaatattgactcacagcagcctcctatccctcttccattcccacctagagcaatntcaaacaaaaagatggaagaagcagaaaaagagatcttggagaccttcagaaaaagtagaggtgaacatacctctactagatgccatcaagcagattccaagatatgctaagtttctaaacgagctgtgcacccacaaaaggaagttcaagggcaatgaaaggattagcatgggcagaaacgtgtcagcattgataggtaaatctgttcctcatattcctgagaaatgtaaggacccangtactttctgtataccttgcattattgggaacagtaatattgagaatgccatgctagatctaggagcatcagttagtgtcatgcctctgtccattttcaa

SEQ ID NO: 147151 - DNA, 385 bp, Glycine max
  unsure (1)..(385): unsure at all n locations
tcatgatgatgaaccaagcaattntgatgatgctttttgttcaagtgattgattcaagacttcaagatcaagcatcaagaatccaatccaagattcaagattcaagagaagaaatcaagaagcaacaagtcaagacttcacacatgataagtattaaaagattttttcaaaaaccaaatagtatagttttgttttacaaaagaattttctcaaattttctaagttaccaaagtgattactctctggtaatcgattaccagttatcagtaatcgattaccagtgaccaacttggtttccaaaatgttttcaaatggtttgcaacgttccaaaatgattttcaaacagtgtaatcgattacactatattagtaatcgattacaagtg

SEQ ID NO: 147152 - DNA, 421 bp, Glycine max
  unsure (1)..(421): unsure at all n locations
agcttctcccccattntcttataaatagttgttgaggtgaagagaaatttcgttcagccctcctggtaattcagaatcacttaaaattagtgaaaaaaattggttccgtgaagaaaatccgaggtgaggcgcttccataacgtttccgtgggtgatttcgcgaaggttttcgaccgttcttcgatgttcttcattcgttcttcatcgttcttcggtcttcaaccggtaagttccctaaatcaaacttttcaattcattctatgtacccttagtggtcctcatttgcttttacgtgctttcatttacatttcatttactttccgtacccccttttgacgtgctttagtcatttgcttaagttattttctcgcctaatcaaaaaataaaataaatttccactgatcatttggatagaatatct

SEQ ID NO: 147153 - DNA, 376 bp, Glycine max
tcacacaagtgttcttgaagcttctttcctaaatctttggtaagagactcttaatcttcattctctttttgtttcctcaccatttttgtgcaaaactctcattcttgggtccaaatttcttttttcatccgttgaagctcgggaacatccagatctgagttcttggttcatttgagcatttttgtgtaagcttcatcaaggtaagggggatctttccacttcttgaaccttgatattgttatctttggaagctagacttcattgcatgttgtgttgatgttcaaattttcgtagctattgccttggatggaaatgtgtgatatgttgttcttattgaagttttaacgttaaaaatgatttctttggttgtaaaaac

SEQ ID NO: 147154 - DNA, 442 bp, Glycine max
agcttgccgcccagctcgcccaggcgagcaatgttgcttcctccagaagcaacagccttctggatggcccaagtgggcctggttgctatttgcaccccctttttactaaatgcaccccctttctatttttttggtaattctttttccgtaacgttacgaaacttcacgaatttcgtaacgatgcttatttttcttccgcaaggttatgaatccttacggattatgtatttactttttttagctttcgaagaagctacgaaaacttacggattgcgcaaaaatacctcttttcgatttccgtcacaatacggaatttcacggattgcgcaagcctgcttctttttgatttctgacacgtctcgcgacttcattcattgtgcaaccaatgacacccagtgtctcgaagcgaccaatcaaagatggtatatcatcaaataataat

SEQ ID NO: 147155 - DNA, 410 bp, Glycine max
tatgcaagcgacactatacaatactccatcttcgcgagtatgaacgccaaatctgaatttcgtggtatttggaggtgcacgggagctaatcctatgatggaatgccatttctgacttatgagaaagtctgtgctgtgcaagagagaaaaacaaatgacccaagtgacaagcggactcatttctagggtaaaattgggtgttgaggagtcatatttctattcagcatagttttacgcgtactacctgttcgtgcaaacgttgatggatgttatcgactcgtgtcatatgagagtttgctccaaatgtaccccattctcattctcacttctcagaccttgaaaatgcattatatcgaggggttctggatacctagattttgagatgctatggtctgaagctagtacttggtt

SEQ ID NO: 147156 - DNA, 440 bp, Glycine max
agcttcttcaactgctcaaggctcttaatatttgaagagtatccttgtggaaccttcacccgacgaagacactgacaaaaacttatcttctccttcttggacaaagtatggcaggctgggggcaagtaaattttcttcccatcagaccttggatgcaactgtgatcgtatacccatatcaactagatcttgacgggtattcaagccatccttcgtcttgccttgaatgttaaggagcgtcccaatcacactatcacaaacatttttctccacatgcataacatcaatacaatgtctaacgtcaagatcacaccagtacggaagatcaaagaaaatggacttcttcttccatatgcaactctgacttttatccttcttttgggtcttcccaaatacagtattctggtgttcaacccgtgatatacctgctcaccagacaac

SEQ ID NO: 147157 - DNA, 381 bp, Glycine max
  unsure (1)..(381): unsure at all n locations
tgtatatacaaaagtaggagtcaggattaatattttatttatattnttccgttcttttcaaggataaaagagtaattttttataattctttatcttaaaaaggaaataatttcccactcataattttaaggctaatattgtaattttaacttttttgctctttttaaggataaaagtgtaattgtaaaattattattcatattataaccgtaataaaagaaaaattaaactcacgaaagtaaaatgctcacttcttatgtgagaaagtttttgtgggaaattaattaagaaaaaaaaataactaaatttttcaatctatgattctcaaaaaaaaaaaaaaaaaattctcctactaaacgttttcttatatagatcgttcaa

SEQ ID NO: 147158 - DNA, 455 bp, Glycine max
  unsure (1)..(455): unsure at all n locations
agctnttgtgtgaaaggaagagactctttttatttgaatntgaatttcaacgctcaaaggcactggtaatcgattaccaaaacattgtaattgattacagctttttgaaaataattggaacgttgtaaattcaatttgaaaacttttttaaaacaattttgctactggtaatcgattacaacaatatggtaatcgattaccaaagagtaaaaactctttggtaaaaggttttgtcaaaaattcatgtgctattcaaagttttgagaaaaaaacttttcatacttatcttgattgagccttctcttgattcttgaatcttgagtcttgaatcttgctcttgattcttgagatcttgaaccttgaatcttgattcttgattcttgactctagactatcttcttgagtcttgaattcttcttgattcttatcttgaactcttgaattgtacttgattg

SEQ ID NO: 147159 - DNA, 390 bp, Glycine max
  unsure (1)..(390): unsure at all n locations
ntagcgactgtgtgcaaccacaaattttacattgagtgttctcattgaaatgttctacagtcgattttgcataaatttttaattgtcataacatatgattcgtggatatgatttaggctttctttctttttttacattttaagccactgccaaaaagctatcccaatgtatattatttttgccatttgcaagccttttgagccaaacacttgatattttgttggaacactaacctaggataaaagtttcctaccttatcctaggttaggagagcaaaggtgttttgttggagatttctatcatttggtggctaaagtgatgtaaatactctatttttaatatgagtattaagggaaaatagaaaagaaaaaaataatataaaagaaaaag

SEQ ID NO: 147160 - DNA, 471 bp, Glycine max
  unsure (1)..(471): unsure at all n locations
caagtcacctgcggcatgcaagcttctcagccagcttccatcgagagttcatattatatagtgactntnttaattattatcttcctttgagaacatgaattatgtttgttatatttgtttatttagggaaaacaagaaaaaaaatttaaataataaggagaaattttaggtttttttttagttttataggtcgacaagggatctgtccttgttcttatgtattcctaggtgcaatgaaaaaatcaaacttacgtagttctttgtagaaaaagagttcgtgtgttgggttgattttattttattttattttattttctaaaatattttggttttgtggtaaactttgtgaagtcaagcaagtcagggacctatcatggcattcacaaaattnactcacactttattgaaacaccgccaagcaagtgagagacactgcattgagtgcgcaaaacatttaaaaggagaattgac

SEQ ID NO: 147161 - DNA, 388 bp, Glycine max
cgagatgaggaagtgttgaagggtgaaacttcctgcttttattgttgaccacagagtggtacctggagatatgtcgcgggggtcaggagaccttggggacgtcaggtggggtgctattgcccaaaaccaagcttgaccaatcccgacccaacccgggcatagtcggtcagtgagaacctgtgatgtacctaagcaggcgagctcctggcagtcaacagataaaaggaaaacaagaccacaaagcaaagaggcttgtggtggctggccagctgtgaattttgtgtaatatgtggattgtggcctctggtaatcgattaccaaaggtgagtaatcgattacaaggcttaaaattgaggacaggaggctaaaatggtctctggtaatcgat

SEQ ID NO: 147162 - DNA, 434 bp, Glycine max
  unsure (1)..(434): unsure at all n locations
cagcatgcaagcttggatagatacaatattgagtcggattatgtctcatttatcttgtataacacaanccaagagagcttaagacttattttgattcacaaatacagccacaactcatcaccacaactcaacttcatcataggcgtcatgtaggaaacttataatacataaaaaaagttcaagaacaagaactagaaatttgaaccatataaaatcaaatctagcttctatagcaagtgtaattggtggaaaatctaaacaatcatgtcaaaaacatttaccacaagacatgtgaggagatacatggcgaaaaaaatgacaaagcaaccacggaagagaagggaaagcaaaaaattaatggaggtgtaaggagcacctactagaagctcttggctctgataccactgatggaagcatgcttgtggagcttctat

SEQ ID NO: 147163 - DNA, 370 bp, Glycine max
taccaactcaaaagggctactaatggtaaataggatgttgtatattttggctaactttgcccaatatgtcatcaagaaaggaaactcttttccatcttttttgtgattgtatggatactaagttgatgtggcaattttttattcgagtataaggttcaatacaacatcaattttttcataaccaattgtcgcaacctacccttttgcgggtgtcgcaacatgcccttttgcgggcgagcgaaggcgaggctcacgggtgcgctttccaaaagaggaaagatgcgcggagtcgccaccaacgtttatttgtgggaaacgttggaaatacccattgaaaccggtcgaaatgaaaattcttatttcaggagtt

SEQ ID NO: 147164 - DNA, 476 bp, Glycine max
  unsure (1)..(476): unsure at all n locations
atccttaagtcacctgcggcatgcaagcttctgcaatctgctgccaatgcagttttgaaggataaatttctaaatgctattcctttgcatcacattgatagaactagaacaaatcttgaaaacttcatacggtggctttctaaaatgtattccccttgcaaagaagagaagctatcaagattttccagactaaaccactcaatgctaatgtgggacactctcaagtactctntgacatcaatggagattgctgcccggtgtggaaagacttctttaactccaaactttgctcttagtgcattgtatgaagaactcaaatcttcaagtggctntatcttatccctgatgctgaaacttgttcaaaagacacgaagtaataattctcttcatgtgctacanagatttagaggtgttcaactctttgcagaatcaatttgttctgatgtttccctgaattacacaaataatgagtctgg

SEQ ID NO: 147165 - DNA, 392 bp, Glycine max
catttaaaatagtcgagtttaacatttgtggactttatatttacaattcatgttattatgtctgtatttttaagatttttaggtttatttacatgtttacctagaaattataattttattttgcctaaatattattttgattcattatgttttagtataattttattttgatatattaagttttaaaagttttattttaattttttatattttcgaaatatattattttgatctattttttaattttacaattataaatcgaacaaaataatacatctcaaaagtataaaaaatcaaaataaatcttttaaaacttaatttactaaaatgaaattatactaaaacataatgaatcaaaattaacatttaatttttactttttatccttctag

SEQ ID NO: 147166 - DNA, 437 bp, Glycine max
  unsure (1)..(437): unsure at all n locations
agctnggcttaccttgaaattattcttctgcacatctttaccaagaggttnngcagcttcttcaatcttcttgattatctcattggcagggcattttgatgtgaaccttatttcccttttaaatccctgtaaccaataactttagattaacaatccacacattaacttaaagtaagaaacctcataaagttaacggtcatgaccaactctttttactctagagttaaagctgaaaataagagttttaaagacatctgtttggcaattttagcttaaaaactgcttttaagctaaaagctctgtttcattgtcctaattagttcaggatgagaaggagcgcaaggctatgatatgcaacttatttgaaatagttactccagttagttntttcttaaaagctactcccncnccttttctaattaagctctttatatttt

SEQ ID NO: 147167 - DNA, 394 bp, Glycine max
cgacacatggacttatttatattttctttctttgtctcctataagcaaatcatgtctacatgctccttcttgatcaatcttctaactgctgcccacttaaccccccttcccaaacctctgatgttgtaggagactatattcatggagtactccaaatttctgctacctttttgtctctttcttccatgaattttattttttcaatgaatttgtcttgatcagaccctcttgtaacctcaactgcttagccatactccaaatttcagctgcctcttgaatctgatggtttacattgtcaccttcaatccgtgttattggttctgttgccgagccactattttcattaagaccattcccagcttgttccatgtcccttgggtactgaatatgtggg

SEQ ID NO: 147168 - DNA, 450 bp, Glycine max
agcttgcatccagaaaccatttttgtttttatatattaagccttagccattttagttttctgtaggagatctcttatatatttgccttgagttagaagaatagagccatcagttaaggtcttgacttcaattcccaaaaaataatccagtttcccaagttgtttaagggaaaaattagagtgaattttgacagtgaactgctggactaaattgacagaactgccagtgattataatatcatcaacatacaccaaaagatagacgatatgagaggttatcttgaagacaaaaagagatggatcacacttgcttgcagaaaagccaagatgcaagagtgtagattttagtctatcaaaccactgtcttggtgcttgtttaagcccatatagagccttattcaatttacaaaccaagagaaagattgggattttcacatccagtggactgctg

SEQ ID NO: 147169 - DNA, 387 bp, Glycine max
tactcaggtttctgtcacctaactgcatgcatattttcccttcatccttctttgcgctgcagatttcaatttgccccctgcttatcattccctgtggtagctccttagctattgggcatgtttccacatcgtgcaatgcccctagatgcattaagcacgaatctcctttgtcaccgttaaggtcaactataccagcctcgtgcaatgcttccaatatgaaccgccaggaagtcgacacatcccctattcgcttcagcccttgagactcccatcgttccactatgttcactgtcaagcctccatgattggcaagtggattagtcctcacatttagactatcctcttgaaatgtcagccatctagcatcaatcaagctttgtaccttgt

SEQ ID NO: 147170 - DNA, 441 bp, Glycine max
  unsure (1)..(441): unsure at all n locations
agcttgctgcatgagcatgttatctgttttggttggngntngaggggatattcctggatcttcaantaactttttcatggcatagcaagttntccaggataggactattcactctcttactttgtgattccacttgggaaaattttactggtccctttcatataatttttatagcatcatcattttgttttttattttggtagatgtcttatcctcctgttatatattttttctattttcactgtagtatgcagcaatgaatgtatgctttgaatttttttccttttaattctggtgctcgttttacagaatcggctcacatattgttttatgatttttatttgatcatgttaatgttcttacttaatctgcagtggctgggttattgctatatgctctttgatggttcgcccgcgtgcagatgtcttgatttctgtattg

SEQ ID NO: 147171 - DNA, 384 bp, Glycine max
  unsure (1)..(384): unsure at all n locations
tagaaatatatttaaaaaataaactngtttaagatttaattgaagttaattacatatttttctaattttattttattgggttattgattgaaaggtaataaaaataagaatgaattatactaaccttgtctgttacacaaacttacattgcttttttaagttttaaccattacagaaacttctcttgcaagggagccagcgcaatgtttttaaacaataagggcagtgctgttaaaaaaattgaattggactggtgtttaattcaactgttctgtaatttagtttttaaagttgaactgctccaaaactgaatttatgagattaaaaatgtgaaaattttgcttcaaagtaagatatttattgagaacaatttaaagtagttcg

SEQ ID NO: 147172 - DNA, 289 bp, Glycine max
  unsure (1)..(289): unsure at all n locations
atagatcaggacccaagattcaataggagaaatacatgggcgataggcactancaattcaagcttccaacatagggcactgaggaaccattctgaagtcactatatcaaggacatacccacaagtcattggggctatgacacagggtccaacccgcctttatcaaaaaagtgaaagcgacaactctagtcgagccagaaccgagaccaccactaagtgaaggatgaaaaagactccgcccagccaaagggcggatcttaacgacatgagagagaagtacccaacgacca

SEQ ID NO: 147173 - DNA, 369 bp, Glycine max
  unsure (1)..(369): unsure at all n locations
cgatgagatatagcaaaagcagagggatttttgtttttataagacacaaggcacataacggattgttaatattcaacccccttctcatggtcaattgattcacttcacactagttctaccactggttgactcaaggtaatnttaataaattaatattttgcaaacttttctttcaagggcatcaatggttctaatattcacctccactggactacctaccatagttgctaaagacaataggttacattaaccataatactccatcccgtggctataaattgcagacgtggctgacgattattattcataaaaactttatattggcacgaaaagtgcctaatgcaataacaaatccaattgcgattacat

SEQ ID NO: 147174 - DNA, 431 bp, Glycine max
agcttgttgtatgatctgatgttgactcgtgtcgtctggaacaactctaaggtccaacaagctctgcatagctcctaacaccatctagaattaatcctacaataataattacaattagcaactatttttcagtgacaatttaggaaagagaaatcaacaaaatccaatttgcattagctagcaagagtagtctccacctggtagatagtctgccagtagctgcccaggctgtggctgtactgggatgggcagtaaacatatatgcaagaccacgtggtggttgtctctcctcaggtggaatgacatggggatgggaaaccttgtaaaaccaaggcatatagtcagaagtgcacaaggtgggtgtgcattgatgcagtcactctatgatgcctctttgcaacatcttctcctttctacgaagggccttcagg

SEQ ID NO: 147175 - DNA, 383 bp, Glycine max
ggcaggagttaaacatgagcactttttggcctatatgtaactccttcctaacaatcctagagtcatgaaatctcttaactttctccttgtcaatcttggaggtgatataagcttctaatcagatctcctctagttcttgcaattgaagcttactttccatacccgtttcattaaatgccatgttacaatccttcaccacccaataagcatggtgctcaatctccaccggaatgtggcatgccttaccaaaaaccaccctacagggagacatccctaaaggtgttcggtaagtgatcccgtgggcccatagagcatcctcaagtagctcgcttcaatcctttctgttgggttgtgctaccttctgcaacacttgcttgatctct

SEQ ID NO: 147176 - DNA, 436 bp, Glycine max
  unsure (1)..(436): unsure at all n locations
agcttccctgattnttaaacattattattattgattactgatatatagctcgtccagggatgtgtgatattttaacttaatttttggtcatgcttttcctagatactagtatggcataagccaattaagctagtagaacatattagttttatgtatataaggtaatagccttcttgactatttttttcctaagctttcttcgaaatataaattattctttttcctattattttaaattgcttaatatattattgctcacactcttatgctttntgataagtgccatatctagttatttttgggattaaaatattagcacttatcttttgattgtaatagtttttcttataaactacccttaaatctagttgttntatagatatngtacatttactagagcttatgtgtaaatatgaaagatcaaccaggatttgta

SEQ ID NO: 147177 - DNA, 364 bp, Glycine max
  unsure (1)..(364): unsure at all n locations
tctcgccaatggtatttgagggntaaagattctctttttttctttagagtcaacgaaaatattgtttatcggtgtatgtatatgaacgtcagtgggagtaaggttattttctaattctgtatattgatgatatcttgcttgcaactaacgatcttggtcttcttcatgagactaagaaatatctttctttaaactctgaagcgaaagatatgggtgaggtaagctatgtgataggggtagaaattttccatcatagactcacaacgattgctaggcttatctcctaaagtatatatattgataaagtgctacaaagattctatatggaaaggtgtttaacctcgccccttcttattttaaaatg

SEQ ID NO: 147178 - DNA, 434 bp, Glycine max
  unsure (1)..(434): unsure at all n locations
agcttgcatacaagtatttccttgtctgtctctncaaaaccttctggttgggccatatagatgtcttcctctacatccccatgcaagaatgcaggtttaacatctaactgctccaagtgaagaatctctgcagctactatgctcagaataactctgatggtagtcatctttacaactggagagaagatctctgtgaaatcaatttcttgtttctgctgagaccctttcaccacaagtctcgccttgtatcttcttctaccgtcagattgttcctttagcctatagacccacctattctgaatgccttctttccttctggccatttatgttaagaccacgtcttattcttctgaagggatgccatctcatctttcatcgctagctcccactcaatagtgtcattcccctgtgtagcactattgagacattctggc

SEQ ID NO: 147179 - DNA, 380 bp, Glycine max
  unsure (1)..(380): unsure at all n locations
tgtacaagtgtattagnagctattaatttatatttgatnnnacctttactgtcaatgtttgtaaatcaatcatgcctcgttgaaattcaaaggcaggacattgatgtaagtgatattagtaaaaactttataccattttattttaatgtttaaaaagggtacattccaactgcagggtcccatttaacatacgtgtggtgaaaatttatgcaagtcgcacatccaacagatgaaaggatccttctgtccttcatgaaattacttctataatattgttccctttggaaaactctcttgtctggctgaagagacaggcaatgattctccttaaatttattttttttagttcctataataagtgatttttttcttctaaattt

SEQ ID NO: 147180 - DNA, 423 bp, Glycine max
agcttctcctggcggataagactaagaattatctggaggaagctgcacagtcaggaagctgtgatggcgtcatcgaccctccatccccggtcagacaccacgtgaagtggaaggtggcccgcacgaagaaaacaggggagatgacgactgaggctgctaaggaaatcgctgagaagattgtaagtcattttcaactaaccattacaattatattccaacattttctgaattccatgtaccactgtgtgttttctgtgcaggattcctttgaggagcaggccacatagggatcctttgtctcccatggacgtcaggatgttctcactgctgctattggacgtccagagcaccctggacgtgtccgtgctgctggagccggtgtcaccatccagcaatactttggaccaactccacggtcctccc

SEQ ID NO: 147181 - DNA, 406 bp, Glycine max
  unsure (1)..(406): unsure at all n locations
gacactataaaatactcccgcttgtaatcgattacacaagtntggttaccgattattatatgagattttcagaaaattatttccaagggtcacaacttttcaaatggtttttacatggccatcaaaggtctatttatatgtgacttggaacacgaattcgctcaaagtttttcagaacaaaaagtcttatcctctcaaaaagcaaaatcattttatcctcttaagaattccttggccaatacacttgcaattcaataaggaattaattgagtgctcaattgtacaatctatctctttcaagagagatttattcttttctccattctatttctcaaaagggattaagagactgagggtctcttattgtaaagaaatctaaacacaaaggaagggttgtccttgtgtg

SEQ ID NO: 147182 - DNA, 456 bp, Glycine max
  unsure (1)..(456): unsure at all n locations
agcttgtgcaaatcaaatcactcctacatttcatctctagcatgcatcttctttctttacccactcctcacgtntggttttttcggggaaaaacaccataactaaacgcaccgcaagggatccctatcgcaccagatccaaatctagaacgatgggtgatcaagaggagacgcaggaacagatgaaagccgacatgtcggctctgaaagaacaaatggcctccatgatggaggccatgttaagtatgaagcagctcatagagaaaaacgcggccaccgccgccgctgccagttcggctgccgaagcagacccgactctctttggaactacgcaccatcctccctcaaacatagtatgacggggaagggacacactgtggcacaatggcagccctcacctgngatacaaccgagcggcttacccttatggattgccgcccaactattcaccacccgt

SEQ ID NO: 147183 - DNA, 390 bp, Glycine max
  unsure (1)..(390): unsure at all n locations
ttgcttctacaaaaagttatgggcgtttgaatnttccttgtgcttccatgtntaattncgagcatctcaatatactatgcgcctgaatcggacatccgattgacaaattatgagtatttaaatttcttgagagatttcgttgttcaattatgagtgtttcgatatattattggcctgaatcggacatccaagtcgaaagttatgaccttttgaatttgccttgcgctttcatgtttaatttctagcatcttgatatattatgtgcctgaatcggacatccaagtgaaatgttatgaccatttgaatttctagagaactttcgttgttcaattccgagcctctcgatatattatccgtctcaattggacatccgagtcaaaagttatggcc

SEQ ID NO: 147184 - DNA, 453 bp, Glycine max
  unsure (1)..(453): unsure at all n locations
agcttatacaaattggtcaattcataagcctcatactaattngtttacatatataaatttttatgaaacctatgatttttatttaaaatttatacatgtaaaaaaataaattattagatcaaaattaattgtaataaagtaaaaaaatacattaatagatttattttaataaacctatgatttttatttacggtttatatatataaacaaacaaattattagatcaaaattaattgtcataaaatttattatctaaatttgcatgtgcattaaatatatattaaaaattttagtgttacatataataatattaattattttataatataattgacctattaacttaattgattagaacgctatgctaatgatatgaaaagttctattgtgctgggtgcacggagaaaaacccttattnttaatatattccttagcccatcaaacttacgttac

SEQ ID NO: 147185 - DNA, 389 bp, Glycine max
tcttctgttgaattaaggcttatgctcttttatctctctgttcaatgaaggtttttgtacgagctgtccatgaagctaactggatgaatgggatggagatcagtatctatgactcgtggtttgatcctgtagtatcctccttgcctggacttattcctgatggttttatctatcttaaggcaagtcctgacacttgccataagagaatgatgttaagaaaaagaacagaagaaggtggagtcagccttgactatctctgcgacctccatgaaaagcatgaaagctggttatttccctcccaaagtggtaatcatggagtattatctgtcaatcagctgccccatcatattgacaactctttacaccctgatataagagaccgcgttttt

SEQ ID NO: 147186 - DNA, 450 bp, Glycine max
  unsure (1)..(450): unsure at all n locations
agctnttcgattcattctatgtacccgttgtggtccacattgtgtttcatggatttttattctcgttttgtttactttttataccccctgttgacgtgcttaagccattttacttaagtcatttctcgcttaacttaaaaataaaataaatttccaccgaacgtttgaattgtattatccattaacttcggttaaaataaattccgaccgttcggtcgtgccgtaaccacgttggaaatcaaaaagaggtaaaaaataatataataatcaaaaagacatcttttagtagaataaagcggaaaatcaatcggacgttttctctttgggatttctcattcttaatcgaattgattaataactaaagtgaaactaaaggctaaaatcaattcgcctagtcaagctcgtccataaaaataggctttttgaagttgtcatttcattttctcacta

SEQ ID NO: 147187 - DNA, 391 bp, Glycine max
  unsure (1)..(391): unsure at all n locations
ngaaatgaggaagtgtgaaagggtgagacttccttcttttattgttgaccacagagtggtacctggagatatgtcgcgggggtcaggaaaccttggggacgtcaggtggggtgctattgcccaaaaccaagcttgagcaatcccgacccaacccgggcatagtcagtcagtgagaacctgtgatgtacctaaacaggtgagctcctggcagtcaacagataaaaagaactaagaccacaaagcaaggaggcttgtgtggtggctggccagctgtgaactttgattgatatatgggatatggcctctggtaatcgattaccaagggtgggtaatcgattataaggcttaaaatgaagacaggagactaagatggtctctggtaatcgattac

SEQ ID NO: 147188 - DNA, 444 bp, Glycine max
agcttgagatgaggaagtgtagaagggtgaaacttcttacttttattcgttgaccacagagtggtacctagagatatgtcgcgggggtcaggagaccttggtgacgtcaggtggggtgctattgcccaaaaccaagcttgaccaatcccgacccaacccgggcatagtcggtcagtgagaacctgtgatgtacctaaacaggtgagctcctggcagtcaacagataaaaggaacaaagaccacaaagcaaggaggcttgtggtggctggccagctgtgagttttgtgtgatatatgggttgtggtctctggtaatcgattaccaagggtgggtaatcgattacaaggcttaaaaatgaagacaggaggctaagatggtctctggtaatcgattaccaagggggtgtaatcgataaccaggcttgaatacgaaatcaggaagcta

SEQ ID NO: 147189 - DNA, 389 bp, Glycine max
cgtagggttaaagtctcacgattgtcacgtgttgatgcatcaattattagccgtggctatacgagacatcttgccaaacaaagtcaggttagccataactcgcctgttctttttcttccatgccatatgtagcaaagtcattgatcctgtcaagtttgatgagctggaaaatcaggccacaattatactgtgccagttggagatgtattttcccctgccttctttgacatcatgattcacttgattgtgcatctggtcagagaaatcaaatgttgtgttcatgtttatttgtggtggatgtacccggttgagtgatacatgaagatcttaaaaggatacacaaagaatctgtattatccaaaagcatctattgttgagaggtacattgc

SEQ ID NO: 147190 - DNA, 440 bp, Glycine max
  unsure (1)..(440): unsure at all n locations
tgcagcttggcctacttgattttacagctctgaaatcttatattgaggtccttttctacttctaaaatttgaaattgatcacattaattacccttcgggactgtatttcanatatttgtttttgacattagcaaaaaaaaaaaaaacatttgtttttgaaataccgttgttgactcctaaatgttgatcacattaaaaactaaaaatcacctttcactccttaacgaatcaagttgaagttgttgaaattatgttctttcgagacaaatttaataaatcctaccaaaattacagagttagtaatgcgactggtcctaaatcttttaggactaaaatggtcactatcattttgtcaaccaaaatattggcagcttctgcgaacaatatagaattntataaatttttcaaccatcttgaaagctatattctaaccatgttac

SEQ ID NO: 147191 - DNA, 394 bp, Glycine max
tgaagaggatgcttcaatggatgaaaagaaagaggttgagtattagagaggggggagcaagaaattgaaggaagaaaaaagggagagaagttgaactttgagttgtgtctcacaagactctcattcatcaaagttacaacaagtgttacacatgcttctatttatagactaggtagcttccttgagaagctttcttgagaaaacttccttgagaagcttctttgagaaaacttccttgggaagttagagcttagctacacacacccctctcataactaagctcacctccttgagatgagaagctagagcttagctacaaaccccctataatagctaagctcacccccattccaaaaatacatgaaaatacaaaaaaaaagttcctactacaaag

SEQ ID NO: 147192 - DNA, 393 bp, Glycine max
agctgcaacattgaaattgcattttatgttatataaccgaaagcaaaaccactgcacctgaataattggatatcagagatgggcattcgtatgagtaattagtctaattacgtagaatagatgggcctaatcaatgcccatccaatccttctcaatagtgaaagtaagttagttactacccgctctatatattatagacactagttaattatagggaagatacttcatttagcacaaaacttgagcaaactttcccttaactctctattaatcttatttctgcttcatcatatcacttctgttccaccattttctcgcacaatatttacctgcatttatttggtgatgatcatagaggactaaacaattaatcaatccaagtatccccttaaa

SEQ ID NO: 147193 - DNA, 408 bp, Glycine max
  unsure (1)..(408): unsure at all n locations
gagacaanacatacaactcaagcttgaaggtgtgtgacccaccatccntcattttttttctctgttaatgcgtctactatcattgttatcatttctttctccgtcattgaggagccacttgagctgccaggactctccacctttgggtgtattcttcgaaagaatcatgcccatttttgcacatgttctgtagttgcatcctatccacagtcatatcagaattgtactgatactgcctaactaaggcaaccattatgtccttccaagaatggactcgggaaggttcaagattaatgtaccatgtggcggctaccctacttaggctctcatgaaagaaatgcatcaacaatttttcatctttcacgtacgcccccattttccgatagtacagattcaagtgattcttgg

SEQ ID NO: 147194 - DNA, 320 bp, Glycine max
aacagggcggaggctgacaactctgcccaaaacaccattcaaattccactgacttccctactgatataccccagtaacaatctcattgttctgattcgtgaaccattggatcgactagaaaattttactaaaggttcctattacataaggctacatcttgaccgatgggatctacttgaaaatgtccagaacccaatatgtgctaccttttccataaccaacaatgcacaagctatgtttgcacatggtgaaaaatgatgctgcacatttgatcaacagtttctctgcattatacggcactatatccaaatccatcttgc

SEQ ID NO: 147195 - DNA, 446 bp, Glycine max
  unsure (1)..(446): unsure at all n locations
agcttttcgaacaacttccgcatgttgacaaggtgttcctccttggttntagatttggcaattatgtcttccacatagacctcgatctcttggtgcatcatatcgtgaaacaaagctaccatagcccattgataagttgccccagcattcttgagtccaaaggacatcaccttgtagcagaacgtcccccatagggtgacgaaggtagtcttttccatatcctccggcgccatttttatctgattgtaatcggagaatccgtccataaaggaaaacaaagcaaaattggccgtattatccacgaggatatcgatgtgcggcaaaggaaaattgtctttgggactggctcgattcaaattccgataatccacacacattcgtaccttcccatccttcttagggactggcacaatgttggcaacccattctgggtatcgagcgacagc

SEQ ID NO: 147196 - DNA, 51 bp, Glycine max
tagttcagcttatcatcctcaaacagattgtcttactgaacgaaccattca

SEQ ID NO: 147197 - DNA, 439 bp, Glycine max
  unsure (1)..(439): unsure at all n locations
agctncanaagacatgctctattcatagttttcatggngcacagggccattcctctacacaccttagacattgtacttcacccaacagcatgaaccctccttttatcttgtcgatctccctaaataaaagctctctcaagtctttctatatctttcaaaactccaactggaacaacattagtcatcatagagtagactggtaaagactgaacaactgacttggcaagagtaatccttctgccatagaaagtagtttggatttccaccctgccaatctattagccaacttgtcaagaagaaactaaatatccctacgtttaggagccttacctgttaaaggaatatccaaatatggtcctaaagaattaacttttagagaaagcactcattgtactcacgtgtcttctcatgtgatgatggacatttatagagaaataaa

SEQ ID NO: 147198 - DNA, 375 bp, Glycine max
  unsure (1)..(375): unsure at all n locations
gctgctcaacaaattaagcctttattaatgtttttgcagaaatncagacaaccttctggaactggcattgaaatctcaatgttagaggagacaggactgaccaaagtaggtgacacagaagtttatcctcttgtgctgaaggctgaggttcgaccattaaaccattatgaaaatgagggaaacccatcttctcaaattactttggctagttttggaaaaagggagaggggtgagtacaaggtccaagtaatgaaacaggttctctgggtcaatgggaagaggtatgaactgcaggagatatacggcattgggaatgttagtgatggtgataaccatgaatctggtggagattgtgttatttgtttgtcagaaccg

SEQ ID NO: 147199 - DNA, 444 bp, Glycine max
  unsure (1)..(444): unsure at all n locations
agctntgagacgcatgtgatcttttggctttatcaaaacatcggcttgatcctttgtctacagatttgttttcaaaaatatacacaatgtcatatctgaactcatgcagtcaagaccaactataatgatcctgcatagcaactttggtgggcataagaaaacattcatcctttatcatagaattttataacaattaagtgggtctctatattttgaatgggaagaagaaaatatcttccagccaatcatgactatgactaagattgcaacatttttaatctatatatgtaaacaggttttcagtatatatactaagaataaaaaaacataaagagccaacaacaacaatatcaacaagccatagctcactgggtgaagttatttcctacatggcataactgaccctagtgagaaacctacctcataaaaatagcacagataaca

SEQ ID NO: 147200 - DNA, 399 bp, Glycine max
ggaccttaaaactcagcttcttatccaggcaattcttggtggtgattctctttcttccttggcttattccctagtggatggtgcctcccctatcctcttctcctttgcctttcgctgcatctccatggtgaaaaatcaccattgaaggacctcattgaagctcaaagatccagcctccatagaagctccacaagcaagcttccatcatcctatggtgacgatcttcttctagactcatcttctccttgaagtggcgtctcctctctctcttccgtctccattccgctgccattcatcttccaagaagcaaaagaatccattgatgaagaagattcgaggcctacaagctccaatggagcttacatcatgtggtatcaagagcatcttcatctaggtgat

SEQ ID NO: 147201 - DNA, 422 bp, Glycine max
  unsure (1)..(422): unsure at all n locations
agcttctgtctacctaaatatgtantcttgattgaagaacgatgaagaacaaaaatcgttatggatgattaaagataaacatctgttgagaaacacactgtgttaagagagtccattcttcgtgatatacaaggtacttgtgagagattataacttcattgtaaatatactcgttgagtgttgtaaataatatttgattctatatcaaacttttgtttgtgatagttatgagtggcctattgacaaaacaatactngagtattcttagattcagggggagtctaggtgttgtgctagtataggccttgagaatacttgtaagccaaaagtggcatgaaaaaatactttttataattaattttgattaatggaaccctccgttgattggtcaaggagaactatacatatatcaagttgagtga

SEQ ID NO: 147202 - DNA, 385 bp, Glycine max
ttacttgcagagattcctttatgggaaagaccgattccttctgtgttgatccattgggatagtaccgcggctattgcaaaaattgagaaccgttattacattggtaagaaatgacagatacgtcgtaagcacaacactgttagagaattactctcaacaggagctgttagagtggatcacgtacgcactgatgataatttagcagatcctttgacgaaaggattagctagagagaaagtccataacacttctaaaagaatgggactattgcccttactgagatgatcattcatgatggtaacccgacctatatgactggagatcccaagaactaggttcaatgggtaataacaagttataaaatgatatgagatgaacatgttgt

SEQ ID NO: 147203 - DNA, 479 bp, Glycine max
  unsure (1)..(479): unsure at all n locations
gatcctctaactcacctgcggcatgcaagcttgtccataaaaataggttntggaagtttgtcatttcaatttcttactaagtgaatggatcatttttcaaggtccaacgccttaaaatggtcacctcttaagtaaaaaaaaagaatcacttgataagaaagaactacgtcggtctgatttcctcgtcgcaaattgaggaatacgtaggagcaaagggaaacacccttgtcgaccacaaaaaagaaaaaatataaaaagggtataaaggatataaggacataaaagggaacataaaaatcaaagtcatgtttgcacattctattaaaggctgccgtcccttgggacggacgtgtggggtgctaataccttccccgtgcgtaaatacaactcccgaacctttcacttaaaagttcgtagatcgcgtctnttccgacgtttttctcaaataaacgttggtggcgactctgcgcgtattcctt

SEQ ID NO: 147204 - DNA, 378 bp, Glycine max
  unsure (1)..(378): unsure at all n locations
ntataagtgcaggtctaagacacaaaggccaagttgctgcgatatgcaaggatgactccccgaggagatcggatttggtatggccatgtcctcctggtttccgactaggaaattggcgagtggaggagcgcccagacatttacgcgacaagcataatgtaaccttttgtagctttaaaactctacggttgggcctaggctttagagtttccttttgttaaggaattatgtcttttgttcttgagtttataatataaagatctttcttcatctgttcctgcgcctctgcccattctcattcatttgcatgtttatttctttacgcataaaacgccagatctgacaacgagtccctcgaaggtactaatacccgggaccc

SEQ ID NO: 147205 - DNA, 451 bp, Glycine max
  unsure (1)..(451): unsure at all n locations
agctngccaattntnttggtaaaatatagttatagttctttctcatatttatagagaaggaaacttttgtgtagacaagctggctaatgttggtgctttgtctcgtgatttcttcaattggtggaacttgattcccgtttttgttaggaaggagttacttagaaatagattgtctctttcgaattaccggtttcgccaagttgttgtgggttttgatataataccccccactttcttcatattgttctttttaattccaatttaatgttattcaaggcaggtgactttaatttggggttgggtgtcctttgctgggatactcccctcctcagctattctaagccttcctcagctattctaagccttaatttaatgagaaaaatgtttgtaaccagaaaacaatatcataactaacgaatttgggttttaattaaatcctaaaatacgaaaa

SEQ ID NO: 147206 - DNA, 401 bp, Glycine max
actcaagcttgaagatcagactatacgaggtatcttccttggatatagcaatatttcttagggctactatgtctacaacttgcaaactaagaaactcatcatcagtcgagatgttgaagttgatgagtatgcttcttggaattgggatgaagaaaattaaagtggagaagaacgttcttatacccgctcaactacctcaagaagaagctgaggaagaagacccaggtgaaccatcttcacctccaccacaacagcaagatcaagaactatcatcaccagagtctactccaagacaagtaagatctttggtggacatatatgaaacctgtaacttggccatacttgaacctggaagctttgaagaagtgtcaaagcaggaaatatgggtcaaggcaatcgaa

SEQ ID NO: 147207 - DNA, 452 bp, Glycine max
  unsure (1)..(452): unsure at all n locations
agctntcagaacaaccaagaattactctttcaagtttttctgtctttgataagtctaggatctcaaatcaagtcttggaagcaataaagatcaattgtcatttatcttggaaggttttgtaacagaaaagatacatcacaatactcgaaaatcattgaattcttacttgcgagtttttttaaaaagagaaacctaagcatacataaagcacatgtagctcctaggtgtggcttttgtgaatgagctaccagttaccacttaggactctgccgtactttacagaccaaaagaaaaaacgagatcacctaaaaaaacgaggcataaacataataccaatattcacacattctcacaatatgaatgaaaaaaaaggagggcgaactcagtccatggtttagttagacttnttccttcgtttagaaaagaaaaatcctcataagttaaatatattt

SEQ ID NO: 147208 - DNA, 390 bp, Glycine max
  unsure (1)..(390): unsure at all n locations
ttntgcaccaatcggtacagggtaagctggaagactttttatctgacctgatcagtcgaaaagaagtcagtaattaagcagcatatctattaagtaatgcacaaggaatacactgaacatctttgttcctataacaatcaaaaggaaataaactaacacaattcaaaagttgatatgaacaactcctatctaaacaaggtagaatgattatctaaacaagtatccttgtaactaaccgaatccggaacctataaaattttttatatcgtgcccataatgccttagcttgttagctgattatgcacgatacttgcctaattgtcattattcttttctatagaaaatgattaatgaaccatctcagtaaagttattgttatagcatgcgcta

SEQ ID NO: 147209 - DNA, 421 bp, Glycine max
  unsure (1)..(421): unsure at all n locations
tagcttgccgcccatttctactattttagctcagctcgcccaggcgagcaaggttgcttcctccagaagcaacaaccctctggaggaatcttctggaagacccaagtgggcctggttgctatttgcacctcctagttactaaatgcaccccctattctatttttttgtaattctctttccgtaacgttacgaaactttacaaatttcgtaacgatacttattttccttccgcaagggtacgaatccttacggattatgtatttactctttttttgctgtcgaagaagttacggaaacccacggattgcgcagaaacaccntttttcgacttccgccacattacataatatcacggatggcgcaggcctgctttctttatgatgtctgagacgtctcacgacttcatatattgcatgtcatc

SEQ ID NO: 147210 - DNA, 436 bp, Glycine max
  unsure (1)..(436): unsure at all n locations
agctnttgggcttagcgcatcttatgcgcttagcgagaacgttcagccaatgatcaggggtcaatgcgcttagcgcaagcaagagctcgcttagcgcatgaagaaaatggcgcctagcgcgagtgatgtgcttagcgagtggaaaacaaaaaaaaattaagttatttttttgtccataacttcacaaaagctttttaacccctttttcaatactaaacatgctaaattcatacaatcacaagcactcaacttaactaaatgcaagaaaaacaaatttaaaaagggctgggttgccaccagtaagcgctcatttaacgtcattagcttgacgcatagttctttgttatcttggatcaatcttggttctctccttcagaaccttctcatcaaactccttcacctgtaaacaaacattctggtccagcaattttctttc

SEQ ID NO: 147211 - DNA, 386 bp, Glycine max
tccataatatccaagcaaatcaattccaactatcgtgaaactaccctcaaccaagaaaacagagtagaggcagaaaaatctgcccaaaacacattcacatattacaactttccttactcaaataccccagtaatattctcttcgttccgattcgttaaccgttggatcgacttgaaaattttactagaggttcccagtaaataaatctacattttgaccgttggggtcttctagaaaatgtccataacccaatatgtactacctttcccataaccagtaatgcacaagcattttctgcacacgttgaaaattctgctgcacaaatttgatagctttttgctgcacaatttggcagatttcgaaattcatcttacccacatccaatt

SEQ ID NO: 147212 - DNA, 313 bp, Glycine max
  unsure (1)..(313): unsure at all n locations
agcttctcaaggaggtgancnttttntctttgatggtgtgagagnanctatatctctaccctcgacagtggaattttgtcacccttactcctgtaccgatccgttcgacatgaaagcgtttctcagttcactacctggttccatgtatacaatgatgtaggactcttgatctattctaacttatttagatgcatggacatgatttttataatctcctttcaaccttgtttatcctacagtcactccacccccgatatgttttttgcctctctattacgcccgggacatccgttgatgcttcaatctttactga

SEQ ID NO: 147213 - DNA, 387 bp, Glycine max
tttcactcgtctttacaaaatcagagccatcaacagacttcaaaaacatggtaccagcttgagagttaatcaaaaaattaatgatgtatctttgtttccgatcagtccatgcatcagacataatagtacaaccatacttgacccattgctccctatggcctttcatcaaattttcagtatattcaacttccgtcttgaggagtggaactctgatgtcatgatagctaggaatgggcaaatgtggtccatattgaccaatggctgcaaccatattctcaaagcttttcaatttaatgaggttgaatgacaaacctgcttgataccaaaagcgagcaatatgttgatgcacctttaatacttcattcttatccactgactctctaatgg

SEQ ID NO: 147214 - DNA, 447 bp, Glycine max
agcttctcgcattcgcacctgtaaggatctgattaccgccttccgggaaagatcttccagtctctgttcccaaaatggtataaccctagcgcaacctgcacataccatgggggaaccccaggctactcgatcaaatagtgcttggccttgaaaagaaaggtccaaagcttgatagaagccagatggttgacttttcaagaggacaggcccaacaaaaaaacaaacctgcttgccaatcatggagggggggcggttaatgccatcgaggtgagtaagtcacacgagcccaaacttttgaaggatctaacgacctccagaaggttcatctacaaagtgttagacaagtggcctcagatatcttaagatgggggggttgaattaagatattacaaactatttccccaattaaaattctatcaagttataaattcccttaaaaatgaactt

SEQ ID NO: 147215 - DNA, 388 bp, Glycine max
tgactttgggttagacatgattgatacatgattttggacttgtaggatttgatttgggcaagattggatgaggggaagtgtggttttcgaaatctgcactttgtgcagatttttgctgtgaaattgtgcagcagaattttgcacaagtgcagaaaaatgcttgtgtgtgattggctgtggaaagagtagtgcagaatgagttctggatgtttgctagtagatcccaacggtcaaaatgtaggcttatgcactatagacctccagtagaattttggagtcgatccaacggttaacgaattggatcgaaggaattgttactggggtctttaagtgagaaaagctgtgatttggttggtgttttggcagagttttctgcctctgccctgtt

SEQ ID NO: 147216 - DNA, 442 bp, Glycine max
agcttcaacatcagaccactttcaggtgctggaactacttcacatggacttgatggggcctatgcaagttgaaagccttggaggaaagaggtatgcctatgttgttgtggatgatttctccagatttacctgggtcaactttatcagagaaaaatcagacacctttgaagtattcaaggagttgagtctaagacttcaaagagaaaaagactgtgtcatcaagagaatcaggagtgaccatggcagagagtttgaaaacagcaggtttactgaattctgcacatctgaaggcatcactcatgagttctctgcagccattacaccacaacagaatggcatagttgaaaggaaaaacaggactttgcaagaggctgctagggtcatgcttcatgccaaagaacttccctattatttctgggctgaagccatgaacacagcatgc

SEQ ID NO: 147217 - DNA, 388 bp, Glycine max
tgtagaccacgtcttttccggtttttccgacgtttttcttttataaacgttggtggtgactctgcgcgtattcctttcttggaacacacacccgcgagtcacgcgtcgcccaccctccgaagggtaggttgcgacaaggtccaacgccttaaatgacccccttccaagtaaaaagaatcacttgattcgccccttttcaaagaactacgtaggtctgatttccttatcacaattgaggaatacgtaggagcaagggaaacacccttgtccaccacaaaaagataaaaaatacaaaaagcgtaaaaagacataaaaagataagaaaagggaaaataaaacaaattgaagtcatatttgcacacttgattaaaggctgtcgtcccttgtg

SEQ ID NO: 147218 - DNA, 443 bp, Glycine max
  unsure (1)..(443): unsure at all n locations
agcttgtctcagcgtttatgcgttatggtgaccaatatgctagctatcatcgccaagtaccaagaagagttaggtctagccgcggcccacgagcataggattgcggacgaatatgcccaagtatacgcggaaaaagaggctagaggaagggtgatcgactctttacaccaagaggcaaccatgtggatggatcggtttgctcttaccttgaacggtagtcaagaacttccccgattgttagccaaggccaaggcgatggcagacacctactccgcccccgaagagattcatgggcttctcggctattgtcagcatatgatagacttaatggcccacataattagaaatcgttaggaaacttgtatggtctctcagaccttgactagatacgacttcctttntgaaataaaatgaagtggtcccatgtttctanctccaaaaag

SEQ ID NO: 147219 - DNA, 401 bp, Glycine max
ggaccctctcaatactcaagctttttggagtagaaacatgggacttatttattttatttcaaaaaggaagtcatatctagtcaaggtctgagagaccatacaagtttcctaacgatttctaattatgtgggccattaagtctatcatatgctgacaatagccgagaagcccatgaatctcttcgggggcggagtaagtgtctgccatcgccttggccttggctaacaatcggggaagttcttgactcccgttcaaggtaagagcaaaccgatccatccacatggttgcctcttggtgtaaagagtcgatcacccttcctctagcctctttttccgcgtatacttgggcatactcatccgcgattctatgctcgtgggccgtggctagacctaactcttctt

SEQ ID NO: 147220 - DNA, 432 bp, Glycine max
agcttaatcaattgataattgacggtgttatattttccctggactctactaggggcaattttccttggcacccttaatcatgttcaatttgttggtaagtttaggtcttttaatccaaaaaaggaaacttggttaccatgtgagagtaatttggataaatgaaaatagttttggttgttatatgaatgagtatttcgatgcttgtttgcaacaatgtattataaaaaagtacctaccacatagagagttgctatgtgtcataccctaatttcgtccggggactattgtttgatggcatgcaacctttttttgaccgctttgaggtacttggcaccctttgtcacaccaaacgtgaagtcccgagagatgccggaaatcaaaaggaaacattgttacgcaatccgtgaaattctgtatacatgccgaaataaa

SEQ ID NO: 147221 - DNA, 380 bp, Glycine max
  unsure (1)..(380): unsure at all n locations
tcacaactagttnttgtcttcactattttattcttgtttggttgctcaaattaaatgtattgttctaattttttaacattgctatatttctttgtaggggaaaacacacccaactcaattttttttgctattgatgtccaccccaacccaattatttgtttttaagctgtattagcagtgtgatttgttatattttgtgaaaacttggaatttcattctgtaattgtctgtttgtgtactgggctggttttattgcaaaagcaaaggagacactctcttgttttgtaactgccttttctctcactttggtgtctaacagatgaaaatgtatgtttctaccatttttgtttgttttcaaaattaatacactaatttcaatt

SEQ ID NO: 147222 - DNA, 375 bp, Glycine max
agaggtcttggattggacgaattatcaatattgtgtttcaatgcctcctaggaagaacacacttactgagcttttctacctacacatgacttttaaccgccctccatgaatatcttccactgagctcacaaggctcccaacactaacatcacaacacgcatttgatgaagtagaaaggacttacctgcagtgacccctctttgctaatgccaacaatgtaccccaaatgcaatataatctgattttcaacctaacaccaacaatatatctgggaaacaatagcctcaatggcagtatccctatatgagattggcgaactgaaagtccttcatcagctggacctgatgaacaacaaattctatggcgatatcccat

SEQ ID NO: 147223 - DNA, 287 bp, Glycine max
accaacatgtccaagaaaagagcatactttctgcacaaaagtgggagaagagaaataaaaaataacatcgatctttgccttatcgacctcaatacctgtactagataccaaatgccctaagactatacccctatggaccagaaaatgacattttacaaagctaagaacacaggtaggctcaatgcatcgatcaagatctctagagaagctatccaaacatgcatcaaagaaagaaccataaagagagaaatcatccataaacaacctcatgtaaatctcttattaat

SEQ ID NO: 147224 - DNA, 299 bp, Glycine max
  unsure (1)..(299): unsure at all n locations
tcataaagtcttctccgctagcactgaagaactaatgggtgnacccataatcttcttgtctcttgatagatgatgagggtatggcttgaattaatatgatagagcatgaaggtgtagnccttcatcatgcatgctggcaacgactggtgagctttgctatagaagatgttgnctattttccatgtctggagctaaacaagatgtggcagcaacgtttggatgagttgcaaaccattgtttggaaaattttgaatttgctcggtaccaattcatgtagagactcatatgctcaatctttc

SEQ ID NO: 147225 - DNA, 309 bp, Glycine max
  unsure (1)..(309): unsure at all n locations
acattnttatactactaatatacaaccaagtagacatgagatggnntccaagaaaaagataaaaattgntgattatcttcagagttgcacctaatgntaagggtagaaagacaaaatngntcaaaattaaaaagaatctcaatttttgttttatccggtagcatgtatgaaaaaatgtataagctacaactatgatagtatcacttactcagaagagtcatcatagagctggctaggggctaatagcctactttataaaggcaactacttagcagttccatctaagcaccaaatttcgcactttataat

SEQ ID NO: 147226 - DNA, 348 bp, Glycine max
  unsure (1)..(348): unsure at all n locations
agcttagctacacatacgccttattatctaagcccacctncttgagaagcttccttaagaagctagagcttagctacacacacccctctaacagctaagctcacctcctttagatgagaaactagagcttagctacacacacccctctaatagctaagctcacttcctttagatgagaagctagagcttagctacacacacccnctataatagctaagctcatcgntatgccaaaatatatgaaaatacaaaggaaaaatacttactacaaagactactcaaaatggcttataatacaaagctaaaatcctatactactagaatgaccaaaatacaaggcctaaaata

SEQ ID NO: 147227 - DNA, 426 bp, Glycine max
  unsure (1)..(426): unsure at all n locations
ctgcagcttctatccaagctatcttgggaggtttttcttctccatggctattccttaaggatggcgcctcctctcacctcttgtcctctgtcttccgctgcatctccatggaggaaaatcaccattaaaagacctcattgaagctcaaagatccatcctncatataagctccacaagcaagcttccatcaagagagaatcagagcacaagagcttcaagtaggtgctccttaaacctccattaatttttagctttaccttctcttccataggtttttcttcattattttctccatgtatctcctcaaatgtctagagctaaaagtttntaacatgattctttagagntttcaccgattaaacttgctattaaagctagatnttattttctatggntcaaatttcttagtcttgttcttgaaccatg

SEQ ID NO: 147228 - DNA, 356 bp, Glycine max
  unsure (1)..(356): unsure at all n locations
gcgcatatatacttatgaacggtcacttgctcaagacatcctatcaactaagaaaaatagccccatatacaatcaaagtagcttcattacctagattatttacatgtacttccaaaggagatttgntatttacatcacacacgcctccttggctgaatttacatacatacatactcaaagcatttaggggtaccaaaaattgcacatgcgctcatcttggtatttctaatacccatacatatacaaacttcacgatgaatcttgactacctacacaataaggagctacatttcatgcttcttttttcaagtttttgctacctaaagccacatgcaaatncaagcatattntccttt

SEQ ID NO: 147229 - DNA, 291 bp, Glycine max
  unsure (1)..(291): unsure at all n locations
cttcttgatatcatcaaaatcttcatgatcccgactcgntggaggaagatgcangaatgacaatcaattcatggagctccgaattatagtggagatatgaagataggcgaatatcgcttagcaatcaatccgcggntctcccgactcgttggtggaagattaatgattgacattcaactcatggggctccgaataacagtggtgaatggatgataagagactatcgctaggcaatcaattcgcgcggctgcagactcgatggtggaagattcataaatgacaatcaactaa

SEQ ID NO: 147230 - DNA, 210 bp, Glycine max
  unsure (1)..(210): unsure at all n locations
attcaagattgcttcaacaaactaagcccttggtcaagattcactaaagaccaagccttgccttataacaaagagctttcaagacatgcaaggctctggtaatcgatcaccaggatatgttatcgattaccagaagacaaggttgagatatagntgcagaaaaaagttctgaattagaatnttcaacatgtaatcgatctccatatgtct

SEQ ID NO: 147231 - DNA, 285 bp, Glycine max
  unsure (1)..(285): unsure at all n locations
cgtacgtaccaattaacaatcacattgtgcagcaaaaattaagatgttatcgacttatagattgagatttggatctatcctttgtcaatacatgcaataaaacatcaattattgcaactggagggtacatcaattattgggacatttgcccttaatcagatttgaatatgtatgttggtataaggtagcgtcacgcaaattagnactatttttattattcatttgngacaacgaaagcatgtgaagcattntttcttcttttttggagtgagggtacaaacattc

SEQ ID NO: 147232 - DNA, 315 bp, Glycine max
  unsure (1)..(315): unsure at all n locations
cctatcatttcanacaaacaaatcaaacattacaagactattattgncgctgttggaatacctcacccactcaagtgtagcacacaatcatggattttctctaatgaaaacactcttgccttttaccactctaattccccttgagttcttaagcaattcaagagattatggtcacaacaaaggacaattcaccaatatgcgtaagagaaggctagagagacaaagaaaaggttaacaatgagtttaagcacaattgaaagatataaaatttataatttaagaatccaagtaacaatccttcatacaaccaatata

SEQ ID NO: 147233 - DNA, 307 bp, Glycine max
  unsure (1)..(307): unsure at all n locations
cttcactacatctagaatcaccgggntgagtcttctctgagggtgncttactggtttagctccatcctctaaatttattcgatgcatacatgtggatgggctaataccaggaatgtccgccaaggtccagcctatagccttcttatgctgcttgagaactgacaacaacttctcctcttgctcatcagcaaaggaggcagatataatcactggaaaactcttgctatcatccaatgaagcgtattntaaatttgatggcagaagctctaattctggtgtggtcagctggacagaggaggaaagggat

SEQ ID NO: 147234 - DNA, 306 bp, Glycine max
  unsure (1)..(306): unsure at all n locations
tactatttttcctacctcgaccttttatccctataaaaatagaaaaagggctttggcgagataagtttaacgaagcacaccttaacttatactatcaatgaatacacttttccaacaattatacttgncattcttttttatagtaccctctcgaataccctctttggcagaagttgaactctacgataacaacatgtgttccctctcgaataacttatttgatcgaagatgaacttatntcgttaagcaatagttccctcttgaataatccctttggccgatgatgatattatcacaattatatcg

SEQ ID NO: 147235 - DNA, 329 bp, Glycine max
  unsure (1)..(329): unsure at all n locations
taaatctagtgcgccttccgagtttacgcttcctttgagtttcactttcactctcagcctgagagctgggtagtttttgcaagctttggaggcttttgcaaattagttggaagtagttgttaggagaaagttaaaagttggagggttctatcctagttgctcttcttattccctcggaggtacgcattttatggctgtttntagtttctttctgtagccatatgtnacagaagaagcagcaaaatgttgaagaaagttattcatgaaaaacttcttccggaagacgttccttcttccagaagaagtagntccggaagtagatgctactt

SEQ ID NO: 147236 - DNA, 318 bp, Glycine max
  unsure (1)..(318): unsure at all n locations
aaaaaaaaatggctacacattaacattagattatacattctttacatttaatggataatcaacctaaaatatatttctaaattatacatttgntaaatatatgactttttttttgncaccataacattgatatagagtaactacaaactaaccacaaaattctaacaaccacgtcatgattatttcattagattttacctcataatttgaccaagctccaaattcataagccataacacaatattgaacatatatttttcatatatcaactacaaactagcaaacaatctcctccactctaacatagacaaaagtacc

SEQ ID NO: 147237 - DNA, 352 bp, Glycine max
  unsure (1)..(352): unsure at all n locations
tccatggcttattccctagaggatggcgcctcctctcacctcttctcctttgtcttccgctgcatctccatggaggaaaatcaccattaaaagacctcattgaagctcaaatatccagcctccatagcagccccacaagcaagcttccatcaagatggaatcagagcataagagcttcaagtaagagctcattaaacctccattaaagtttagctttatcttctcttccattggagnttcttcatttttctccatgtatctcctcacatgtctagagctaaattntgntaacatgattctttagagtctccaccgattaaacttgctatagaagctagatttgattttctat

SEQ ID NO: 147238 - DNA, 358 bp, Glycine max
  unsure (1)..(358): unsure at all n locations
agactgatcaacacttgcacagaggccaaagatgcgtgggagatcctgaaaaccactcatgaaagaacctccaaagtaaagatgtccagactgcaactataggctacaaaattcnaaaatctgaagatgaaagaagaagagtgtattcatgacttccacatgaacattcttgaaattgccaatgcttgcactgccttgggagagaagatgacagattgaaagctggtgagaaagatcctcagatccttgcctaagagatttgacatgaaagncactgcaatagaagaagcccaagacatttgcaacatgagagtggatgaactcattggttcccttcatacctttgagctaagactct

SEQ ID NO: 147239 - DNA, 301 bp, Glycine max
  unsure (1)..(301): unsure at all n locations
acttctttgctcctagnagaattgattccccagatagttcctccaacttgagccttgagtgaaattcctctcctgattgaatcccagcgatcctccttggtagtagccttggaatccgaggcgattctgtactcccatgtagntcacgtccctggaaaaatcttcttggactatgcattgccctagctcgtgtgctcctccatagatgaggcatccccctatctgcatgactgaagagtgagaaagacttaccgatgatcacgaaagatggcgagatcactggccaccatagtttctatca

SEQ ID NO: 147240 - DNA, 287 bp, Glycine max
  unsure (1)..(287): unsure at all n locations
acatatgcttntttaggaagaaaaacaaatgagnctaccggagaaagagattatgctgatgaaatcttctcattaccataaatgagattttggatgttagcctttncgttctaaatgaccatttagaggaaacactgggntcaataaaaatagaagaaaattacctcaagtgtatcgatctcacacaggtaagggtttcatccttatttcgaaccatagatatgtcattacttgattntagcaatcatttccctgtcaatcaaagattacatgcgtgatcatggatc

SEQ ID NO: 147241 - DNA, 362 bp, Glycine max
  unsure (1)..(362): unsure at all n locations
tatttacctctgcatctgattcagaattagatccttttgatgcagagtctgccatcagacagaggtagactttcttcattagatgatgtctcccacgagctcattagtactttcttagccttaggttcgaagtacttcttcttataggctgatatatcaaaatttggacattttgacttgaaatgtcctggtttcttgcactcataagatacgatggagcttttctctagctttctctatgagttgntttaggatccattccagntagatccatttattttcttccacaagttccttatcttccttgagatgaaagctaatagattatcttcatctgagccatcatcattgactcatcatca

SEQ ID NO: 147242 - DNA, 379 bp, Glycine max
  unsure (1)..(379): unsure at all n locations
catgcactcctctaatgactatagcatcattttaggcgctaaactgctgggagttggaagccatcttctcaatttaatttctggcttcagcaagggtcatgtctccaaaggctccaccactggcagcatctatcatacttctctccatattactgagnccttcataaaaatattggagataatactgntctgaaatctgatggagggggcaactgatacatagnttcttaaatctctcccagtactcatacaagctctctccactgagtagtctaatacctgagatatccttcctgatggctgagagcctggaagcaaggaattctttttctaagaatactctcttaaagcatcccagctcgtgatggaccttggagca

SEQ ID NO: 147243 - DNA, 323 bp, Glycine max
  unsure (1)..(323): unsure at all n locations
aaagctccctaacaaaaatnttcatgcaagagaaccttcttctagtaagttcgactaaccacaacctcttatccctcttccattcccacctagagcaattcccaacaaaaagatggaagaagcggaaaaggagatcttggagaccttcaggaaagtagaggtgaacatacctctgctagatgtcatcaagcaaatcccaagatatgccaagtttctaaaggaggtgagcacccacaaaaagaagctcataggccatgagaggattatcataagcagaaacgtgtcagcatagatagagaaatcctgtcctcacattcctgaga

SEQ ID NO: 147244 - DNA, 340 bp, Glycine max
tacctttctaatagcttagcccaccttcttgagatgagaagctagagcctaactacacaccccctataatagctaaactcacccccatgagaaaaaacatgaaaataaccaaaaaatgccttattacaaagacaactcaaaatgccccgaaatacaaggcttaaaccctatactactagaatggccaaaatacaaagcctagacgaaagaaaaacctattctaatatttaccaagataagcgggctcatacttagcccatgggctcgaaatctaccctaaagctcatgagaaccctaaggcctttccttggatctctagcccaatctacttggagtcttc

SEQ ID NO: 147245 - DNA, 410 bp, Glycine max
  unsure (1)..(410): unsure at all n locations
tccataaagagcctaaccaaacccaactaaatgagcacatagccacacaaatttcctatctcttctcatatacagaaatcaattcgagagctcgagataaatccattgctccttacaggcttaacataaataaatcttactatgagtttatatctatcaaactaacatacaaatacacagagaacacactaagactatgcttggcagaagcagacacagcaatcaaaacttcacacccttcccaatttcagntaaaatcagttaatcaaaggtggccaaatgttacagctgaaacaaacaaaaattaatataaaaacataccagaacattatcataacataacggctaattcaactaagacaaaatccccgagaataaagatgtcttgggaatgatactattaatacata

SEQ ID NO: 147246 - DNA, 320 bp, Glycine max
  unsure (1)..(320): unsure at all n locations
tcttctggcttcaatccatcagagggctccccctcagagccagcatccagggatgtncccagcccctgttgacagctttccaagngctgccatccagagatttgaggaaggccaccatccttgctttccagtattcatagtagggtccatccagaataggaggtcagttcactaggcctccttctttctccatgtgcatcagaatttatctccctaggtctcactcagagatttcgagagccagctctgacaccaatagaaactctgacaccaaagccagatgtcgnacaagatgtcacgacatcacgcttcagaacatg

SEQ ID NO: 147247 - DNA, 274 bp, Glycine max
  unsure (1)..(274): unsure at all n locations
gaatatatcgagatactggcaatggaaaacagaagctcgcaaataatggaaatcgcaataactttttactcggatgaccgattgagtcccgtaatatatcgagacgctcgaaactgaaaacagaagctctgagcaaattccaacgacaataagatttaactcggatgtccgattgagtcatttaatgatccaatagagtaccgncctatatcgagacgcatgatattgaaaatagaagctctcagcatattcaaacaacaataactgcttactc

SEQ ID NO: 147248 - DNA, 295 bp, Glycine max
  unsure (1)..(295): unsure at all n locations
acccttcaaaacttgtattggaagagttttggntagaatgcatgtcctagaggaagcatttgcctgaacaatcaagactgtgcagntccaaacacagatgtgccaaagaatggggggagtgcctgcaacttgagaatacagntggcattctcaaggactgacaagaatctcgatgctcttaattcttggtatgaagcgcaaaatctacggcagtactccctctatggtctattctccaatcttcgagactccatcatcgggccatatgaaaatctcttttaagtctacatatttc

SEQ ID NO: 147249 - DNA, 386 bp, Glycine max
  unsure (1)..(386): unsure at all n locations
acatacctagacttaatnccttagatagcccttnagagccttgtttccctttcctagtttgaagctcactacaagccttaagagaaaaaccacttcatcaccatatccttaaggaatnnaggagcttaggaatagtttagggaataagagaggggggttttcgtttcataggataacatattttggaggccatgcttcatgatatatctagagccatacttgatgtacattgcatattggataaaagtaggacatgctgaatatgatgagtcgcaacctacccttcggcgggaaggcgacgcgagactcgcgggatgcgtgttccacgataagaatacgcgcggagtcgccaccaacgtntatttgaagaaaacgtcagatcaacc

SEQ ID NO: 147250 - DNA, 290 bp, Glycine max
  unsure (1)..(290): unsure at all n locations
ataaatataaatcttataatttcaacatatnaaaatttcacaaaacttatccttagacttaatttctaaccaatatctaacgaagtttgcattactacttaatttgcacctatatggctatgctttagatacctataaggttgncaccaaataaggaccacaatcatttcttctttggtagagggaataaacccatcgaaatgaaagccctataagtacctacattatcaaagactactccacgcctgcaaagctatgtnagagaaacctctaagatntttcaccacaca

SEQ ID NO: 147251 - DNA, 363 bp, Glycine max
  unsure (1)..(363): unsure at all n locations
cgaccacgatcaacaaagtactttcagcacctactatatgttgactagaccaacgctgntataggaatgctgcttctatctttcaacaccttattcacacattctgataagtaggntgncatgtgaccatactagtcgccagatgtatcagaagccatgctccatttttcctttgaaatgcagncaatccatctagctatggctggactcaatagacgaaatttttataagttttgatcaaacacatgcttgcaaagagagtacgctgcatcaaatntgntatcatcaaaagttagacgtagacatcaaactcaaattaaattaatggataaaataaaccttacccaattncttgaacatctc

SEQ ID NO: 147252 - DNA, 339 bp, Glycine max
  unsure (1)..(339): unsure at all n locations
tgccatctcaaaccaacaaatcaaacataacaagacaattatagntggtgttgaatacctcactcactcaagtgtatcacacaattatggcttttctctaatgaaaacactctagccttttaccactctaattcccctttagttcttaagctattcaagagattatggccacaacaaagaacaattcaccaatatgtgtaaagttaggctagagagacaaggaaaatgtnaaccaagaanaaagctaacaatgtntttaggcacaaatgaaagaaataaaattcagaatttaagaattcaagtaacaatccttcatacaaccaatatattatcttaaag

SEQ ID NO: 147253 - DNA, 369 bp, Glycine max
tcatgacacacatgcaaaaatgatgatctggaaactttaatgcaaaactggtcttgcatgcacctatgaggacactcaagagccaaacttttatggccatgtgatgctaaggctcaagattatattcctccattttaaatcaacccaatgtttccaaaatatgtgcttttatcaatttgtgcattcctccaagtccatttaaggcatccggagaaatttcacagcattcacccttcaagagtagacacgttttttttcaaaaactagctatgatcagcgatattttcttcatagagaagtacaaatcatctcttttcaaagcatgccgatttttagctagacacctattttctcttgtccacctttttc

SEQ ID NO: 147254 - DNA, 263 bp, Glycine max
  unsure (1)..(263): unsure at all n locations
gacactactcttaaagcaaaaatggcatataacctcctctcataaataccaacatcaatgtaaatntagagcaagcttatgcgcctatttccttacgaacggtctcttgcacaagacattctattaactaaaaaaaatgcacccatatacaatcaaagcagcttcgntacctatatatntacacgtacttccaatgagtattagtactnacatcacacacatctccttagctaaattacatacatgcttactcaaagcatttt

SEQ ID NO: 147255 - DNA, 201 bp, Glycine max
  unsure (1)..(201): unsure at all n locations
gaagaaaaaataaaccacacagtgaaggaataggcgatctgagctcccatcaatnncaaatagcaaacaacaaaggactacccaaataaccaagctgtcaccccaataacatcccagatccacaaagggaaaaaaagatagcaaatccaatgaagaacaactatgccacatgagattctatcaacatcatacagcaaacac

SEQ ID NO: 147256 - DNA, 344 bp, Glycine max
  unsure (1)..(344): unsure at all n locations
aagatgatgacaaaggtgatgacnaaaaactcaaaggtcaatcaaagaatgagttcaagatgctcaagatagaatcaagatcacttcaagattcaagaggaaagntgatttcaagattcaagaatcaagattcaaagatcaagctttcaagaatcaagatcaagattcaagactcaagattcaagaatcaagagaagacttaatcaagataagtatgaaaaggttttttcaaaaactgagtagcacatggatttttctcanaacatagtcaccaaagatgtttgactcatatggaatagattactagataggtagaatcgattaccagtagcaaaatgaatttg

SEQ ID NO: 147257 - DNA, 306 bp, Glycine max
  unsure (1)..(306): unsure at all n locations
ctaaagctaactggcgaaagagacaagtncagataagtgattctatgtgccctttttgcataaataaagaagaagatgcatcccacttattctttgattgcaccaaaacacaacctttatagagggaatccctatcttggactaaaaccctagggccatttctgtcaatccaaagcatcattttttgcagcacgtaaacggagttgatggatagaaaaaatacaacagatggaagtgcttgggggtagccctaacttggaccattngacagcatagatataagagtattttntcgaatgaaccatt

SEQ ID NO: 147258 - DNA, 290 bp, Glycine max
  unsure (1)..(290): unsure at all n locations
cacaaagaatcattccatcagtcaggttgagccatagatagnctgccttgtcacatttagcacatttccacccagatggcggaataacaacaccattgtcaatctagttagaaattcgngcataagaactaactgttttcttatcagcagtccaagctgcaagtagctcctttcgntcagnaccctcagctagnacgatggcatcaactgccaaccttacctaaaatatttttaacaaatgagagaactaaactaaactcctattagcatgcatattctctcttaataat

SEQ ID NO: 147259 - DNA, 299 bp, Glycine max
  unsure (1)..(299): unsure at all n locations
atttatctcagcctcatttgtcacaagatagagacatggagntgatggtnaatatttgtcacaacttgtctcaacctaatttggtgcagcactccatttttatatattacaattattcatgttaggcatttgcatgtaagtccctacaactattgttccaccaatagcaaggaataagctaaccataacaagatccaaacaaaagaaagttgctgataaagatgatgcagnataaagaaaactgaagacccatttttagttgcattttgaaagttgctgagntagaaagttgctgatga

SEQ ID NO: 147260 - DNA, 241 bp, Glycine max
  unsure (1)..(241): unsure at all n locations
attgattcagccttactaaggatcaagggttagnaattaaagcaacagcatagaacacaaaagcatgattgattagagaaatatccttatatgcctcagctagtttagtagaaagacccaacacttttacctactgctgntaatcttacttacttgcataaagaaaataggaccaaaaagtaactgcaagggaaatcccacaaaatatttatggcgccgntgccggagatctagattcatt

SEQ ID NO: 147261 - DNA, 384 bp, Glycine max
  unsure (1)..(384): unsure at all n locations
cacgctaagcgctcccagctcgctcaatggaaaatcacttactcgcgcttagcgcaaaaatggcgctaagtgatccttcgaagtcagaaagcccttaaaagctgaagntggcaaaaaaataagtagaatgcttgagagcctatgcaatagagcgacataatagagcaagggagcaccaaaaaacctcagctctcaagaagattctaagttntagagagatttttaagttcttagaagaggaagagacatccctaccactagagaatctgaattttgcttccaaaatctcctattagaactgaaaggagataacttgccatggaaagctaaagcttttgttcggaatttctgctgagccttgatagaaatattctntactatcta

SEQ ID NO: 147262 - DNA, 298 bp, Glycine max
  unsure (1)..(298): unsure at all n locations
aaatctgattcttttaagctgacccaagtagatattatgccaaaaagaattcttttatttttaactaaaaaaaaatcacacgtgaatattcctccccaactattaattttatacttaataatcaattaagattcaaatcttaaactactttattgagagacacaaattttccacttatgtcaatcgntattaaattcccaagtgctgcatatcaatccacataaacctacatggacttcaggttaagagatctgcaagagtataccaacttaatggatgaaagacctaaccaaaatct

SEQ ID NO: 147263 - DNA, 348 bp, Glycine max
  unsure (1)..(348): unsure at all n locations
aattatagctgccggaaaccaaaattcaaaatgtaccttgccaagtaagattaagcaaaatagctcctcatacttcaaatcaataccttctgaagctatcaaacattcacatatgcctttagctttgntaatcngcataatattaatacaaataactatgatcaagatgaagttcagaaagccattgtttgagaatgtatgccaagaaaacagtattaatgaaatatggactatggcaagattattaaaatatgcctacaagattcagagaagagtattaccaactctctttgcttgctggaacacccaatagccatatgagctttaacaactcgataaaaacaatta

SEQ ID NO: 147264 - DNA, 276 bp, Glycine max
  unsure (1)..(276): unsure at all n locations
aactaccaaaacttaaatgatagagagagagttgagcctagcgcagcaaggcgcttatctcaacctcctcaacacataacaaaggcttagcacagcagntgtgcttagccttattcaaaggaaaactacagaagcatagaggcgcttatcctgacatgttaggcttagcgctgaacaaaaattctcaaaaatcttaatgtctgaacactagncttgcttagcgcacagacgcgcttagcgggctcatcactttcatccatcaataaggatgaacga

SEQ ID NO: 147265 - DNA, 339 bp, Glycine max
  unsure (1)..(339): unsure at all n locations
gatgcgctccctgagaaggtggatctaatggagaacagaatttattatgaaaaaaaaaagaggagaagatggagtgatggtggtcctaaacaaaaccgaattgatggtattaaactcaacattcctccctttaaaagaaagaacgatcggnaagcctacttggagtgggagatgaaaatagagcatgttttctcatgcaacaactatgaagaagaccaaaaagagaatcttgctgccacagagttttccgactatgctcttgtgtggaggaacaagctacaaaaaaagagagcaagaaatgaagatccaataggtaatacatgggcggagatgaaaatg

SEQ ID NO: 147266 - DNA, 305 bp, Glycine max
  unsure (1)..(305): unsure at all n locations
gccattttttctttaagagtaaaggcccactaaaactaactttccaaatgtttgccttcgcaagaatggcaccgatgaatcttgcctcatatattgccaggaaagacaaagcggccgaaagtactaattccgccccggagtacgacagtcaccgctttaagatcgtagtacaccagcaacgtttcgaatccatcaaaggatggtcgnttctccgagagcgacgcgtccagctcaaggaggacgagtatactgatttccaggaagaaataaggcgccggcggagggcaccactggttactcccatg

SEQ ID NO: 147267 - DNA, 382 bp, Glycine max
  unsure (1)..(382): unsure at all n locations
gacaacctgaaatcaagaaatgcatacaagctctatcttctaatcgatcactcacttaattctccccctttgtttttgagtttaagcttcacttgaaattaagntatttaattatatgagttcttgatttaatcccaactttctctccccctttggcatcaacaaaaagccaaagtgcgtatagagacataaaatcatacataaactttctctccccctttaagcaaggatgataataattcattcataaactacaatataatggcagatactttagagagtcatccaagataaccaaattaaaacaactaaattagaaagtaacatactaataagtgtttcataacatagccaaataaacgactagaaatcagaatactta

SEQ ID NO: 147268 - DNA, 349 bp, Glycine max
  unsure (1)..(349): unsure at all n locations
caacttttccttttgagtcctgaattagctcttgatttcttcttgaacatcttgaactcatcctttgatagacctttgagctttttgtcatcaccttttgttatcatcttttgttatcatcattggtatcatcaaaacatctttgaatcacttttgattcaccataaagctttgcttctataatctccccctttntgatgatgacaacttctaaaatcaagaaacacacacacacactgttttctagncgatcactcacataaattctcccccttaggtttgaatttatgcctatcttaaaattaagnatagatcactcatttgagntcttgaattaatccctatttct

SEQ ID NO: 147269 - DNA, 207 bp, Glycine max
  unsure (1)..(207): unsure at all n locations
accacccttgcccagacatggagagagtatcatactccaaccttgccccacctctcacacgtccgattttaacatggatagggcgaagttagtctacaggctagtgatgaagatggatatggacttgggctcgctcatttctggccagatctctcagattagccagnctaactcctctcggcttggctttcctgcactcatcacagc

SEQ ID NO: 147270 - DNA, 376 bp, Glycine max
  unsure (1)..(376): unsure at all n locations
gagaagctagagcatagctacagacacccatctaataactaagctcacctccttgaaaagctagagcatagctacacactcccatctaaaaactaagctcacctccttgactaaatgcatgatnatacaaaaaaaagtcactactacaaagactacccaagatgccctcatatacaaagctaaaaccctatactacaagaatggccaaaatacaaagcccaaaagaaagaaaaacctattctaatatntacatagataagcgggctcatacttatcccattgggcccaaatctaccctaaagctcatgagaaccctatggccttccnttggatctctgagccaaattacttggaggcttctatccaatgcccttac

SEQ ID NO: 147271 - DNA, 240 bp, Glycine max
  unsure (1)..(240): unsure at all n locations
caattatatatgctagcttcaccatgaaaatatgggcgaacttattggttaccgcacagatgagaaaaacaagcttctagtttatgagtttatgcagaatagaagttaggaaaccttttaacagcaaatcacttagaagacaaatttttccccactagcacaacatgtcccagnattacaaggaatgtgaaatgctccaccctacaaaccagagtcatgaagcataatttctataacaat

SEQ ID NO: 147272 - DNA, 294 bp, Glycine max
  unsure (1)..(294): unsure at all n locations
tcttagaatgttcaaaatcaaaatgttccaaactataattgcttaaaatcaccaataacagaatgctcaagatgctcaaaagatactaaatgatagccaacttatctatgaaatgtcctatctatctcaagatcaaaagggtagaagtcagatggattgcctctagtcatacactatattcagcatgcacaactagntgccttcttattgcaagaacagagtaagtttgaactacagctaccattaaatgatatccaaatgactagaaattttgntagcaaccttataaaatga

SEQ ID NO: 147273 - DNA, 263 bp, Glycine max
gtagacatcttgattgatattaaacagcttgaaccataacccagagagatagtgaactccattgttgagagaacgactagcatagatcaggattttagatcaatctctgaattttagaatgaaatgcatatatgtggatatgatgtaagccattattgttttgaaatgcccttgaccaaaaagctcacctatttatcaatgataatatcatttgcacccatctgagaactgaattgtaattagcatattgaaccttaagcttt

SEQ ID NO: 147274 - DNA, 274 bp, Glycine max
  unsure (1)..(274): unsure at all n locations
tcaacacatatacatctctgggaattcctttcaaagatgccaatattatggattgaagaacatgtgaaaaacataaacaatgcttaagtaaacaaactatttgntgaaagagacaattggatatagaagaaacactttaaagacaatgaactaggaacttgaacctaaaactcttccttacttnctagttntttccattcttccttacttccttacaagaagatttcacaaagagtgagaagcaacttcagaatctcagagagactctcaaaca

SEQ ID NO: 147275 - DNA, 433 bp, Glycine max
  unsure (1)..(433): unsure at all n locations
atggaaaaacaaaaaacagnnatacaatgctgataactaataaagccatccggatacacaccgagtgttgcataccaacattattttgcagncgagtaccttatacgtccctccatcattattaagnnctatcacttaatttggtaattnttataagnnaatctatgaatgaatacatatataatnntttttaataaactttaaatagatttaataaactttaaataaatntagnagactcttaaatttattattgagtcaacgagttactaagataagaaaattagactaaaacgtaaatcattttaaattatttggtagctatttagagttcaacatatctctatctattatgttattctcgaattaaataatnctcacatctaataatattaagatgcctaatttataataacatcaaattttcgataaa

SEQ ID NO: 147276 - DNA, 259 bp, Glycine max
  unsure (1)..(259): unsure at all n locations
cctggagatatgtcgcggggagcaagagaccttggggacgtcaagaggggagctattgcccaaaaccaagctagaccaatcccgacccaacccgggcatagtcggncagagagaacctgtgatgtacctaagcaggcgagctcctggcagncaacagataaaaagaacaaagatcccaaagcaaagaagctagtggtggctggccagctgagaaacttgattgatatgtgagatatgagctctgagaatcgattaccaa

SEQ ID NO: 147277 - DNA, 389 bp, Glycine max
  unsure (1)..(389): unsure at all n locations
tgagagaccatacaagnttcctaatgatttctaattatgagggccattaagtctatcatatgctgacaatagacgagaagcccatgaatctcttcgggggcggagtaagagtctgccatcgccttggcctctgctaacaagcggagaagttcttgactcccattcaagtgaagagcaaaccgatccatccacatggntgcctctaggagtaaagagtcgatcacccttcctctagcctctttttccgcgtatacttgagcatactncgccgcgattctatgctcgtgggccgaggctagacctaactcttcttggtactaggcgattatagctagcatgttggnctccgnctcgcataaacgctgagacaagcttcttttggaccttga

SEQ ID NO: 147278 - DNA, 389 bp, Glycine max
  unsure (1)..(389): unsure at all n locations
agtctgagccctgacagtctaccaagaaagcctagacaacatattcaatgtagattcgagcaacgacacttctgatagaggcccaaagcctactgaagaactcgtcaagctacaactcggacccaaactcgggtagagcatgtagctcaacaaggacctcaccagccatgagcacagacgcatagntgatgtcttacataggaacacagacctatttgcttgacaaccatctaacatgccgggaatccaccctagcattatctgccacaagcttggcatttgtccctaagcgaaaccagtctcnccaaagataaagaagatgggagaagaatgacgcccagcgatcaaagaagaagtggacaagctcctcaaagccaacttcatcagag

SEQ ID NO: 147279 - DNA, 362 bp, Glycine max
  unsure (1)..(362): unsure at all n locations
cctttcaagaggaccacccaagctcatatggctatcgagcagctcaagcatgcactagcttcagcaccatgcctcgccctacctaaatncgagttgccctttacagaggagaccgatgcctctaaggagggcatggaggcaattctctcacaacaaggacaccccattgctttctttagtaaaccgntcagtcagaaacttctctggtcttcaacctatgttaaggaattatgcgcaataaccacagcggtgaagaaatggaagcaatacctnctgngccatcacttcattatcctcactgatcatcgtagcctcaaagagctactaactcaaacaattcatacgccgaagcagcatatgta

SEQ ID NO: 147280 - DNA, 211 bp, Glycine max
  unsure (1)..(211): unsure at all n locations
aactcatagatgaatattctttcctacaacattagaagagctggcaaaggcagtcacaaaatacatatacagaaaggcagnagataaaaatatatatgggggtggagaaattnagatgaaggaagatattgcagcttacactcccattagtagaaagaccaaatgcagctcaatcaaatagaagagtcaatcaaaataaaagaccaaattc

SEQ ID NO: 147281 - DNA, 324 bp, Glycine max
  unsure (1)..(324): unsure at all n locations
atcatcaaaaaaggggagaatgngaatggatgtatacctgattctgatgatgnccaagaagaatcttaccaggctgcctcaaatgataagcctttgcttcaagaataattcaagatagcttcaacaaacaaagccttgtttcaagagtcactatagatccaaccttgccttaaaacaaagtgctttcaagacatgcaaagctctgagaatcgattaccaggaagtgtaatcgattaccagaagacaaggttgagaaatagctgctgaaaaaagctntgaatttgaattttcaacatgtaatcgattaccatatgtcttgaatcg

SEQ ID NO: 147282 - DNA, 265 bp, Glycine max
  unsure (1)..(265): unsure at all n locations
aacgtctcacacagagaaaagccttagtcacagctcacaaagagagaaagccccacaagagctgtagctattcctattgcgcggcatatcggcagcaaattgtgcaaagatcacacactacttgaaaacgatacaagcataagggggggcactgtaagaacgtattcttgcaatataaggccacaaatcagagtcgcggcgntcatgaaatccagagatcaacatccaccatgtgcggtagatcctcaaaccaatattcgcacaa

SEQ ID NO: 147283 - DNA, 261 bp, Glycine max
ggaaactccattaatatgcctgctataataaacggtaacggttatcactattgaacaacccgaatgcaaatctttaatgaagccgttgatataaatatactggatgctattgaaattggtcccttcattcctacaatggttgtggcagatgcaactataggaaaacctacataaaaatgggatcatgatgacagaagaagggttcaatacattatacaggccaatagtctattcactttcgcattaagcatggatgaatac

SEQ ID NO: 147284 - DNA, 480 bp, Glycine max
  unsure (1)..(480): unsure at all n locations
agcttagaaaaatcctctcacagagagtcatnagtggcactgttattttatctctcacatatatctggacgatgtggaatggactttcataatctctgcaaaatagagtggtatctacgcttcctcttataaagccattttcagttgaaaaataactcaacttttcataccaagttcgacgagctcgctttataccatacaaggcattattaagtttgaaaacatgatgaggatagatagaactttcaaacctagagggttgttctacatagacttcttccttaataagtccattgaggaacatgctttttacatccatttgatacaacatcgtaccatgatgagtagcaaaggatagtaaaatgtgtacttcctctagattcgcaacaagagacagagtgcaatataatctataccttcctggtgtgagtgacctctggccacaagcctagccttgttcctcgcaactttacctatttc

SEQ ID NO: 147285 - DNA, 314 bp, Glycine max
cagcacaagacattctattaaccgaaaaaaggcacccatatacaatcaaggcagctccgatacccagataatttacacgtactaccaacgggaatatgccacttacatcacacacagaggacttggctaaaatcacatacatgcatactcaaagcatcatggggaaccaaaagaacacatgaccaccactggagaaaactaagacctagacatacacaaacatcaagatgaagcctgactaactacacaagaaggtgctacacttgatgcgcttctgaagcccatgatacctaaagccgcacgcaaattgcagg

SEQ ID NO: 147286 - DNA, 281 bp, Glycine max
  unsure (1)..(281): unsure at all n locations
gtctatctcagggagggactgataacatgttggtcaatcaaaaatgttgaggaattcaatcagctcgagggagaaaaaataaagatccattgtccaacccagacagggcattaacaccatcgctagaggtttcatttggggtggggccactgccttcgcatgaaaaagacacattccacaagntccatccatcaacatggtcttccggcatcgagtacccaacatgtcacccattacctttacaaaagatgactgtaaggccatcgacctttgctgatgac

SEQ ID NO: 147287 - DNA, 489 bp, Glycine max
  unsure (1)..(489): unsure at all n locations
gaaactaagcttgactctgttatgtccgggaaaaggggctccactgtattctattgatgaagtgacaataacggagataatggatgagcagccagcatcccgaacaagttcccccgcatatctaactggtgtgaaaaataaatgaccaaattattatttccatagagactatcattttacttgcacaagttttagacctgaactataaagataaaagagtgcccctgaactatagaagtcaagcagccttgacgagatccagcaaaagtatcaaactcaagaccaagacaacacactcaagcacctgacacctatgatagatatttattttgaaatgctaaagtgtttaacaatataaacaaatttttagatttatcattccatgcataccccaagtgtgcatgagaccaaaatacactntaaaatttaagtaactacacattgtgcatacaaacattgaatgcaaccagtaaaatagaacacaatgca

SEQ ID NO: 147288 - DNA, 386 bp, Glycine max
  unsure (1)..(386): unsure at all n locations
atgaggagattctgatgttttgagttatatctcaaccttcagttaattcctcaggtggtattctgtgtatatggagtgataaatcattcaagttggaaaggaagattactggagctggctctattatgttggtggggaagtggcagcatgaggcacaaacacttaacattatcaacatttattcactgtgtgatattcaaagcaaaagagtactatgggataatatcaagcaattgaaaagtcacaatattggggaattgnggtgcatattgggggacttcaataacattatggccccgcagagagagtctgagcttataacagggggatggatgtaagcaattctatggagtctaattaatggattgcacgattggacgtggaag

SEQ ID NO: 147289 - DNA, 353 bp, Glycine max
  unsure (1)..(353): unsure at all n locations
tacttaccaagcaactaagttcatgacatgtngcttgttattatttaacatgtagatgttacctatccttttacctatgtgaacaacctcaccagatatagcttcacaaatgagacaatagttcttgttgaatttaattatgaagcctttgtcacatagttgatttatgctcaagagattgtgcataagtccattaacatatagaacattttttatttgagtcttgtgctgatttccaatgtttccttctcctataatttgtcccttattgttgtctccaaaagtgacatatcctccttcctttgacacaaagtcagtaagtctggacttatcacccgtcatgtgcctagagt

SEQ ID NO: 147290 - DNA, 408 bp, Glycine max
  unsure (1)..(408): unsure at all n locations
aacaatgaaacttctaaaaccagcccccaaggccacttgaattccaatgagaattgcccataattcagttgctaccactgagcataggagaaaaggacagaaccgcaatggttgtggaacacacctccaactgttgctttgttaacaaaaaggtccacaacggaatcaatattaataagcatcaactggccaagagggggctgctcccagttgttataattgctggtatggctcctttgagcacaagtagggatggcaatagaatggttctctccgtccccatccttgcaaaagatgggacaagtacaggtacgagtataaaagaaacangttaaaaatttaacactcattctcattctcgtcaaaatttattgggttcggatatattcataagtaatcactacactc

SEQ ID NO: 147291 - DNA, 372 bp, Glycine max
  unsure (1)..(372): unsure at all n locations
ataaaaaatctgcacctgtcaccagactctgtggtttatgctcctctgccgaccaccacacagacctttgcccttctgtgcaacaatctgaagcaattgaacaacctgaagctattgttgcaaacatctacaatagacctcctcaacctcagcagcaaaatcagccacaacaaaataattatgaactctccagcaacagatacaatcccgggtggaggaatcatcccaaccttagatggtcaaatccttcacaacagcagcaacaacaacaacaaccttattttcagaatgctgctggcccaagccgaccatacattcctccaccaatccaacaacaacaacagcaacagcctcaaaaacaacannacaatg

SEQ ID NO: 147292 - DNA, 486 bp, Glycine max
  unsure (1)..(486): unsure at all n locations
gaccttaagtcacctgcggctgcagctatcttgctatgcataactttactatatatatgtccnngagctcattaatttcaaacgactaacatatatcaggcttcgtattctactaacaaatatgaaaccatttcaatttttcctaaaaatgacaaactagggaagattagtgccaaaccattatttaaaaagcataatcatattgtgtgtaaaacatcaattaattaataatttgagaagaaaaaaatttactatgaaaaatgataatatatcacattaataagatgaaaaaaagtaaaataagcaaaggaataatgggttgtcatcatacacctaaatgctctgatgaggaggcaacaatgcgttgtgttgatgtgaagagacaacaaagatattntaattctctccaaaatggataataccggttttggtatggggtagtagcatctaatgtggttcaaacattaggggaaacataatgatgat

SEQ ID NO: 147293 - DNA, 430 bp, Glycine max
  unsure (1)..(430): unsure at all n locations
ttatatanngcaactctattaagaaaagataatcatatgtacacgttagctagatgtatctaaggaccagaaagataccctcttgaacatcaaggatgaacttctattcatactaattgtttaaatatgaaatacattctcatacactcagggaaaacttaaaagggagagaaaaaaaagaagcttatgataacacatgagaccaaaaaaatgcctatgagaattaagagaatttcatcactcttgttacctttctggatcccacgaattatcaaaacacacccatcttgatggaagaagcgcacttgctggcaatatgcaccacttgatacaatcttcacattgagcccactggaatctttcactggcacaaataaagatcattgctggcaattaatgtacatacatacaatacataaaaaatatcatc

SEQ ID NO: 147294 - DNA, 408 bp, Glycine max
gcattcgggaccatactatttacgaatgtagatgggctagtggatatatcatcgatcgatacctttcttgcttatcaccacagcaaggaaagccccatcattgctgatttggcggatgcatatgatacatttgacttggacgccaaaagaacaccgcgagaattgtctattgtacgcctgctctttatgtatgagtggtatcccatgtttattttatcatgaaggtagatctatttgtcccctacaaaatcatcgcatgtgctccgaaaagggtaaagcatattgggaagaactcttggcatgcatgatgggagagtccgctagttggttcccacggtagacagaaagaggggcatgagtgttatactcatgcgaaaatacttaaatgtcccttgataggatgagggt

SEQ ID NO: 147295 - DNA, 341 bp, Glycine max
  unsure (1)..(341): unsure at all n locations
aaaaaaaaaagaaggaacgaaaatgacgnccggggtgtgtttgggcttttttcatcagcccaactcaactagtcgtgggctaagggcctggtaggcccgttttgattaatgacttgtaagttgcaacgaacatcatagacatggtttctttttcatttcacagatcggagggaggagcaagttgagcagaggaaaaacacgcgaatagagaaagaaaagaagaaaaaatggtgggagaagaagtacttccaatggacgacaaagcgaagaagatgctagatctgctatccagtttttactcccctgaccctttcatcttcaacaacacctacaaacacgct

SEQ ID NO: 147296 - DNA, 439 bp, Glycine max
  unsure (1)..(439): unsure at all n locations
ctgcagctttactgggccgggctatatttttgttaagctcttgncatattcatcaatgtgggactaactatgcatctggtgctcccctaacgaaaggaagatacctcgcattcccattttgcttaactcggntgcagaaaagaacaaagatagacactctntcgactgagaacaaactggattcccttcacttcatttctagctgcatgagttatatagctctttagtgactttcttcatgcttggttttaataaaatatattttgtatggctaagatttcaacacctaanaatttaagagcacaggatcttaatcctcttgttagacattttcttttatgttgtaaaatttatctttattaaacatttatttantttttaattacattgacatttcttttatattctaacatttcaaaatatattgaatttacatata

SEQ ID NO: 147297 - DNA, 450 bp, Glycine max
  unsure (1)..(450): unsure at all n locations
ctaagcttagctttaaatttatgtaaaataatattgattggaaataaagnngngaataaaatgagtaaccactatactctaaaaactgcaaaacagggcatgtcaataaatatgagctaggtttctctttcgttctttctagtattgacatgtacaagaaagtttaaagactaagctgaacccacaaaaggtaaaggatacacgttggaagaaagctaagtctctaattaatcctattgagaaacagcggataccactaaataatgacttaatgtcataaaaaggaaagaaattaacaaggaggaaaatatgcatataccaatgatgggaatggggagaggtgatgggttcaaattccccgctaataaaagctaatatattactaacaaataatatttgtggataacaaanaatacatataccaatgacaatgacaattgagtcagtaca

SEQ ID NO: 147298 - DNA, 422 bp, Glycine max
  unsure (1)..(422): unsure at all n locations
ttacaatagaagtttgtgtctggttaataaaatatatttattatgattcgcatgcatgtttttatattttactcttgtagttaattgcatagtttcaactttttaaatatatcacaattaattaaataaaaatattttttttattattttgatctatattgcatagataattgattattgtaactatattccagaaaactattctacttgtttaacttatatattggaattagaaaaaaaaataatggccatttaattactaattagacacttattttttgaattaaatttattacttgcacttaattaccttaactagctacatgttaaattatcactttatccttaatatgggcattngtttcctgcaaagtacattctcccatttttaacagtattatttaattgattatccaaataaa

SEQ ID NO: 147299 - DNA, 463 bp, Glycine max
  unsure (1)..(463): unsure at all n locations
tcatgatgaatcaacaaagattcaaaggtgttttgatgttcacaatgatgacaacaaaagatgatgaccaaggtgatgaacaaaaagctcaaaagatcaaagaacaactcaagtgaatcaaagaacatctcaagtgaatcaagaacaagtcaagagttcaagaatcaagaagaattctagactcaagaagaatgccttctatcaagaatctagattcaagattcaagatctcaagaatcaagatcaagattcaagactcaagattcaagaataaagaaaggactcaatcaagataagtattaaaaagtttttcaaaactttgaatagcacatgtagttttgacaaaacctttaccaaagagtttttattctctggtaatcgattaccatattgttgtaatcgattaccagtagcataatgagttngaaaaagttgtcaaactgaatttacaacgttccaaata

SEQ ID NO: 147300 - DNA, 392 bp, Glycine max
  unsure (1)..(392): unsure at all n locations
ggaaaggaaaatntaactgtatcgacaaatatacatctctagaattaagtatttacttgtaaaaatatttctaacactactactatttttagatataacatcggacggttaacatcggttattcacaacaccgatgttaacaaaagcgcagtggcatttttgtaaataagtagacttaattaacatcggttttaccgaaaccgatgttaactagtcgatattaacatcggttattntaataaccgatgttactatggagtagttaacatcggtttcagaaaaaccgatgttagtatgccgttgttaacatcggttttgtaaaaaccaatgttatcgagtcgatgttaacatcggttttaagaaaaccgatgttacgtagtngatgctaacat

SEQ ID NO: 147301 - DNA, 479 bp, Glycine max
  unsure (1)..(479): unsure at all n locations
gggagaagcaaagtggagtccatntccaaccaaagatgttttctattctgtcaatgggtgnnncaatagcaataatagccaccataacctctgcaaaaaatgcagtttgaacccctaagttaagagaaaaatctcctatgaaagaaacattattgttgatgaacaatcccccactactagccataccaaggctaccctaggcaaccccatcagtgttacatttaatccaaggatgagagggaaacttcaagagaacttgcttaatagaggtatccttcctcggatgactgctgattgagaatctaagaagcacggacgcggcacttcaacgcgtgtcccgcgttggactcgcaccggacacgactccggtgcgacgcggtgtccattgcttccgccgtcaccggacacggttggacagccggacacgcgcgattggatgcagtccaacaagtggacgcggacacctcaactggttttaa

SEQ ID NO: 147302 - DNA, 422 bp, Glycine max
  unsure (1)..(422): unsure at all n locations
tccccctcgtattctttgaacaacccctccgtaattgttttaaaaggaaccctctttcgtaaatttgccttcatagttgtctttctgaatttcacaatattttaatgcatttgaagttatataaattataaaatgaaaataaaaaatgaatagccaatttaattatttcagtgataataacattttagaattaaataaggattaatagtgatctttatctctaatactgacaaattcgtccgcaaaagatgaaaattcaaattntagtcatcgaaagtgaaaaattgtgatgaatccatccatatgttaactttgtccgttaccgttaatgaaagaccctaagtgacatagagagacaaaaaatgtcataaaaatgattgtcaacatgactactaaatatattggaccanaatgtcactaaa

SEQ ID NO: 147303 - DNA, 463 bp, Glycine max
  unsure (1)..(463): unsure at all n locations
taactatagctgttaaagactgtgatcattctgtactatgataaaaanaactttaatatagntcttcaagttttttttaatattattatgtaatcataattagagttntattccaaaaaatccatgtagtaaaaatttacattaaaaatcatcataggttattaaaataaaagtatgattctaaagagaatttaatttagttaatctaaagagatttaatttacttttgtattataaaaataaaaaagtagtaaaactaaatataaatctattttatccactgtaaaagttatctaaagttgcattgtatcagctcaaaatcaatttaaaattaatttttgaacgtgaaattaaataagtaaatatttacttaanaccacgtaaggtgatatttcaaagtatcttatggttagtcaatttcaaagttatcttatgggtagtcaatgaattataattattacgt

SEQ ID NO: 147304 - DNA, 484 bp, Glycine max
  unsure (1)..(484): unsure at all n locations
ggtacgcactgcaagtctgcaacagtgatttggcccatatgtttgtatttgttcccttgcgcaaaatctgattcttttaggctgacccaagtagatattagtccaaaatgaatttttttatttttaactaaaaaaaaatcacacgtgaatattcctccccaactatttattttatatttaataatcaattaagattcaaatcttaaactactttattgagagacacaaattntccacttatgtcaatcgttattaaattcccaagtgctgcatatcaatccacataaacctacatggactacgggttaggtgaactgcaggagtataccaacttaatggagtaaggacctaaccaaaatctattaattntaggaaagttatcaacgtacaccctatttttggaagacagtttaatagatttaagattattatcccaactttaattctattaactctcctttataaattaaattctttaattatt

SEQ ID NO: 147305 - DNA, 433 bp, Glycine max
  unsure (1)..(433): unsure at all n locations
gcccaagtgattgattcaagacttcaagatcagaaatcaagaatccaatccaagattcaagagaagaaatcaagaagcaacaagtcaagacttcatataggataagtattaaaataatttttcaaaaaccaaatagcacagttttgttntacaaaataattttctcaaattttctaagttaccacagtgattactctctggtaatcgattaccagttatcagtaatcaattaccaatgaccagtttggttttcaaaatgttttcaaatgatttgtaacatttcaaaatgattttgaactagtgtaatcgattacactatattagtaatcgattacgcgtgaatctgaacattggagatcaaatccaattgtgaagagtcacaacttttcataaaatacatcgtgtaaatcgattacaccattgtggtaatcga

SEQ ID NO: 147306 - DNA, 480 bp, Glycine max
  unsure (1)..(480): unsure at all n locations
nttagaaaatggaagaacacanagtgaacagcaccacctgcttctctctctcaacacaagcaagcaccttctttttcaccaccttcacgacacaaattttacaaggaagcacaaccaccaccctctctgcacttgggtttttaaatcccacctgaagctgaacgtgctaaccccactggcgcctccctctcaagcaaatcgccacctcgagtggcgccttccagctacggacggagcagctgcaggtgctgcagcctacgcttgcagctctgcaaaactgaagtcgctggtcaaaccagcgcttccatgcacctttggagtggcgacatgcagtcctttgtcgccagttgtagtggcgacatgccacgtggctcgtccctgtcgaagatgccatcagcattggcgccatgcatggctggtacataaaaaacagcacctggggggaataacttcgaaaacagccctagtttggaaaattct

SEQ ID NO: 147307 - DNA, 402 bp, Glycine max
  unsure (1)..(402): unsure at all n locations
tgtccccggtcagttgctcgccgcgttcgaccgcaccgtcgttttatcccgccagatcatagtcgccatcggcatacatgccgggcatctcggcggtctcgccgccgatcagcgcgcagccggcctggcggcagccatcggcgatcgaggcgataacgcgctcggccaccccgttttcgagccggccggtcgcataataatcgaggaagaacagcggctcggcgccctggacgatcaggtcgttggcgcacatcgccaccagatcgattccgacgccgtcgtgccggtcatgctcgatcgcgagcttcagcttggtgccgaccccgtcattggccgcgaccaanagcggatcgcgatagcccgccgctttcggatcgaagaatccgccgaaaccgccgagtt

SEQ ID NO: 147308 - DNA, 450 bp, Glycine max
  unsure (1)..(450): unsure at all n locations
agctntgagcaaattcaaaagacanaagttttnttctatgatgcnnganngagncccgnaatatatcgagccgctcgaaattgaatgttgaacctctgatccaattcaaaaaacaataacttttttctcgaatgtctgattgagtcccgtaatatatcgagacgctcgatattgaatgttgaacctctgagccaattcaaacgacaataaatttttactcggatgtctgattgagtcccgcaatatatcgagacgctcggaattgaatgttgaagctttaagcaaattcaaacgacaataactttttactcggatgtctgattgagtcccgtaatatatctagacgctaaaaattgaatgttgaagctctgagccaattcaaacgacaatatacttttactcggatgatagatagagtcccgtattatatcgagaccctcgaaattgaat

SEQ ID NO: 147309 - DNA, 421 bp, Glycine max
  unsure (1)..(421): unsure at all n locations
actcagcttaacattcaaattcgagcgtcncgnnnatatataggtcgcattcatacatccgagaaaaaagntattgacgtttgaatttgctcagagcttcaacattcaatttcgagcgtgtcgctatattacgggactatatcagacatccgagtaaaaagttattgtcgtttgaatttgctcagagcttcaacattcaatttcgaacgtgtcgatatattacgggactcaatcagacatccgagtaaaatgttattgacgtttgaatttgctcagagcttcaacattcaagttcgagcgtctcgttatattatacgactcaattagacatccgagtaaaaagttattgtcatttgaatttgctctgagcttcaacattcaatttcgagcgtgtcgatatattacgggactcaatcagaca

SEQ ID NO: 147310 - DNA, 444 bp, Glycine max
  unsure (1)..(444): unsure at all n locations
cagctgcagcttctcaaaagttctggattgttatattcttatctatccacacccctgtattaactaaattaacttgcttaaaaataattaccgatgaaaataacgcaacaaataatcaagcatcaaacataattactaataagatatagatatatatatatcagggtgttacagtaagaccctaacggattctctagagtctaagccttgagggtaaatacattcagcttgagtgcttctttaagcctatgtggatcccatatgattggagcattatcgcaaaacagtgtgaccctgactagtcaccttatgatttcacttagtgagaatgaccacatagaccccttgtgtggcgtgtcttgttatgtactcttaagcacctccgatgttgttttcactaacatggcatcacattgcatatangacttagtcttagcgtatctg

SEQ ID NO: 147311 - DNA, 447 bp, Glycine max
  unsure (1)..(447): unsure at all n locations
ngacttggcgggttgattttagccttagtttcacnttagntttatttcaattcaattaagaatgagagatctcaaagagaaaacgtccgattgattctttcgctttactttactaaaaggtatttttttattatattatttttattttacctcttttttattttcaacgtggtatggcacgaccaacgcggaattatttaacagaaattaacggatattacaaatcaaatgatcgatgaaaatttattttattttttattaggcgagaaatgacttaaataaatgactgaagcatgtctaaaaggggtacgaaaagtaaatgataatgagaatataagtacatgaaacaaatggtgaccaccacgggtacatagaatgaattgaaaagctcggtttgtggtacttaccagttgaagaccgaagataacgaagaccgaacgatgaatg

SEQ ID NO: 147312 - DNA, 475 bp, Glycine max
  unsure (1)..(475): unsure at all n locations
tgtctctcaacactataaagctatacacctnacattcttttngttaaaatctgccagctgcatttcagtgctgcaatacctcaaatccagctacttcttgctcaccttttccctcaaaaaatgaaatctagtctcaatatattttgatcttccatgtgttactggattcatggccaaactgatagtaaaatttgtggctacatacaatctagctggcctctgaatttccaccttcaattcttcaagcaaggagtccaaccacaaggcttgacatgcaacatagcaagctgctatgtactctgcctcacatgaggataaagccaccacttgctatttcttggaacaccagcttattgatgtacccataaacttgaaaagatagcctgtagtgcttttcctttccacgttgtctccacaccaatcagaatctgagaagccaattaattctgaaatttccaccttgtctatgaaagca

SEQ ID NO: 147313 - DNA, 469 bp, Glycine max
  unsure (1)..(469): unsure at all n locations
acctgcggcatgcaagcttaatcttcatgttgctccccctactcnttcttttattaacatatttcaatgttgaggaccaaaaaggactcaaaatttcgcaaggacaaattccaaacatttggatatttattgggacaaaaaacatattttagcctataatttaagttttaaaaaatatcacgtaggctcagattcatcctagcctagctctaggccaaaaaaataatacatttcaattttaagaggaagaaaaacatattgaaaattttgcagggacgaaaaacatatttaaattaattagacctttggatcatataattgccccttttatctctctttgcattaactaaatacttcattttgatgttatgttataatgttcagacttcaggggatatgatatacctctaatttctcataacatatatggagattgaattgaataaaaatccttataaattaaaatata

SEQ ID NO: 147314 - DNA, 484 bp, Glycine max
  unsure (1)..(484): unsure at all n locations
aactaagcttattanaccctaaacattatcatttcttcttattttatgttagtttctangagagttnagagcagcaaaacttcttctccttctcgctcttgagggctggtctagaaaccttgaagcctgttggtaagcaagttaacccttcactctagccttgttcattcttcttcatcacttgaattttctctcatgttcttgagctttgttgaagcttgttttttactcaagagacttcattcttggttgtacctttctctttcacatggagactacaagaggtaaggggggtctctccaatctttgaatcctaaccatgtgatgcatggaaacttagcttcaaaaatgtagttgtggtgttcttgaagttttcgtgcttgctgccatttcttggaactatatgctangctattnttttcttgaaattntgatgccaaatatgagttctttggctattaaaacctagggttagacttatggg

SEQ ID NO: 147315 - DNA, 444 bp, Glycine max
  unsure (1)..(444): unsure at all n locations
gcttcttatccaaagcacattctttgtgttttatctcctctctccaaggcttattccctagtggatggcgcctcctctcacctcttctactttgtcttccattgcacctccatggtggaaaatcaccattgaaggacctcattgaacctctaagatccagcctccatataagcttcacaagcaagcatctatcatatgataaagtggctagtgcatctgccaagtggctatcttcatgaggaatgtgctcaaacgtgatttcatcaaattgtttcaccaattccttgatgtgggttcggcaaagaattanccttgcatcttgagattcccattcaccttttaactaatggatcactagtgctgagtcaccataaacctcaagtttatttatttttgattccacagatgcctattaccccaaagtgtgtgcctcatactttgcta

SEQ ID NO: 147316 - DNA, 447 bp, Glycine max
  unsure (1)..(447): unsure at all n locations
tgaagggtgcgtaccccaccattttcatagtataagactggtaatgtgtctactattattgtgatcatctctttcttcgtcattggaggtgccacatgagctgccaggtctctccacctttgggcgtattctttgaaagatctgtgccccctcttgcatatgctctgtagttgcatcctatccggagccatattagaattgtaccgatactgcctaacgagggcaaccattaggtctttccaagaatggactcgggaaggttccaagttagtataccaggtgacaactgccctagtaagactttcttggaagaaatgtatcagcagttcctcatcttttgcgtatgctcccccatcttccgacaatacatccttagatggttcttggngcaagtagtccccttgtacttgtcaaagtccgacaccttgaacttggagggtgatgata

SEQ ID NO: 147317 - DNA, 272 bp, Glycine max
  unsure (1)..(272): unsure at all n locations
aatgctgacgcgacacctatacttggtgacttgggaagattcgcttcaaagatatcttatcctctcgtacacattggacacgtccaacaacttgctaacttgacaacgcatgctggcgtggatcctaaaatgaaagcttcaaaaatcttatgcatgttattgttggtacctacgttacagctgtattgaactaattgcactgcctcctcctcatggtctcaacttgatgggtttttgatctctgattggcacacacttcaantttcctcgtg

SEQ ID NO: 147318 - DNA, 424 bp, Glycine max
  unsure (1)..(424): unsure at all n locations
taatggncacttntttagtatcatcagccattgtcttggctcttgttctatgtaggtgcagtggacagaaaacggataaatttgtgccttctagaggaatcatcgacatgtaaaatatgttaggcttacacaagggacacgtgcacctaacacaatagtaataatggactcgaaagttcgaatgttgaacccaaaggaccaatttatttccaattaattaaatttattaaactaaaaatagaattgattagaaatatgatttaaatatttttgtggttgtggtttttataagagaacaaataaacaaatataaagaagagtttgagttatgataaaaatggctagaggttatgactcactagtaccaattttcctccaatccaagtcgtaataaaattccttcccaagttaattaccgattccg

SEQ ID NO: 147319 - DNA, 381 bp, Glycine max
cccacaaacatgcactaaattgcctatgaactcaaaacgtgcctaattgaatttattttaaactctgccatatgtgtggcattacaacaatgaggcatctcactgctaaatttggatcagctcggtccttatgtccttgctgccaatggcctgcataatgatagtttatagcacagtcgattctcttctatggtcaatctctagtacgactttaaggattttattttttatttatgacataaatgttgattggattaagatatatgaaaactggaacttcaaaagagtcatattactcttcatgccttattctggaatacgacagcttccttgaattctatataacctataaaaaaacgcagatggatatggcttcataca

SEQ ID NO: 147320 - DNA, 483 bp, Glycine max
  unsure (1)..(483): unsure at all n locations
actaagctntntatagtagaatggccaanaactcttataaccatattctcaagatatcctagaaaagattgtatgcttggaaggcaaggacaatgtttttgcaggttggagggactcttggcaaataaagtttcttgggcacaggattgacaaaactctgacaatgaaggatttatttaaaggtgaaggatgggatgtggagtanttaactcattcattacctaatgatataggtgagtgtgtgagaaatttggtgccctttgattcttagcaaaaatatggtggggtgggggaacttgaattttgaaggctttatgttagcaccttcgagcccaatagacccaagagacacacccagaggtccacataccccagggatttcatgtaattccctcagccagattgagacaaggtagcagaatattcaccaacaccatattagatnntcctgcttccattcttgcaacatatgcaattctgtat

SEQ ID NO: 147321 - DNA, 432 bp, Glycine max
  unsure (1)..(432): unsure at all n locations
cagcttctanccaaatggactttaccttgatttatttttctttgatagcccttgntgagccttgtttccctttccttggtttgaagctcactacaagccttaagtgaaaaaccatgatatcaccatatccttaaggaattttggagctttggaattgttttgggaataagtgtggggggtttttgtttcattggacaacttgttttgttggctatgcttcatgatgtattctgggccatacttgatgtacattgtatattggttaaatgttggacatgctgaatgaaatgttgtttctcaaaggctatagggttctaaaaaaaaaaatcgaaaaataaaattcgaaaaaagaaaaagaatacactaaagttgagtgaataagaatctaaatggcacaagagtgatgaaactctcggctctactcttcatgtt

SEQ ID NO: 147322 - DNA, 473 bp, Glycine max
  unsure (1)..(473): unsure at all n locations
nntgcgaaagcttgccgctggagctgacccataacttttttttctttttagacttgtgatccctaggctcttgaccttgactagatacaaccttgttttaagcgaaggtgtttgactagatcccatgttttactaaagtgaaacaaaatccgtgcgaattaaaactccgacatctatcatgggtggaatggatgaatgcntgaacaaatgcatataacacagatgcaatctatgaatacgggatcccgagtaaatgactccttcttagatacaacgacttgggggtagcaaagtgctcgacgtatgtatttaagaaggtggtacggaccctccgttggtttgccaaagagaggggatcaaaatacaattcgtgcgtgatgcatatgcgaaaggcacaacacgggaatgtacatagtatgacaatattcacaaaatataagcacaatggtacatgacacctatgcatggcatca

SEQ ID NO: 147323 - DNA, 422 bp, Glycine max
aaactggactgatacattgcttcaaagtacatggcctctcacgtgaagacccgcacaaacatttgaaagaatttcacattgtctgctccaccatgaaatccccagatgtccaagacgatcacatatttctgaaggcttttcctcattcattagagggagtggcaaaggactggctgtaataccttgctccaaggtccatcacgagctgggatgaccttaaaagagtattcttagaagatatattccctgcttccagaaccacagccatcatgaaggatatctcaggttttagacaactcaatggagagagcctgtatgagtactggtagagatttaagacactatgtgccagttgcctccaccatcagatttcaaaacaacttcttcttcaatattcttatgaatgactcactaatatggag

SEQ ID NO: 147324 - DNA, 468 bp, Glycine max
  unsure (1)..(468): unsure at all n locations
ctattaagtgcttggggcatcccttgttctgatcttaaggctcangttactacacaccttttaaagcacaaagcgaggatcggaacctcaatcctacgttctttttaaaagactgcgatgagagagaattacagaggacaggaatccctgtgggaaaccaagaagaacacacnacaataaaaacatgcagcgacttcctcaattgccccagatcttaagtgtagtatcgcttgacaacgtcgaagttcacgggtgaaggtagctcctcgtcatccatgttggcgagcactatggcccctccggagaaagacctttttacaatgaaaggccctttgtagttcggggcccactttcctctgntatcttttagatcttgggagactntctttagcaccaagttcccttcgctgaacctacgcgagcgtaccttcttgtcaaaagcgttcttcactcgtttctgatataaac

SEQ ID NO: 147325 - DNA, 445 bp, Glycine max
  unsure (1)..(445): unsure at all n locations
tgccatcgtcgcatgcatagntgttttacaacactcgcctccgaaaataatgcaattagataactcacgttccggatctattaaaaaataattaattactatttgtaagataaaaaaagacttaatatgttaaaaaataatcacacattaataaaaaataacttagcatgtttaaggtaaaaaaaaaaaaataattaaaatttgcatcagaactcacttatggttggatccttcctgcctagttagaagcacatatgcgtgcgtgtcttacaatcttggggcatattccttgttccagctagtataacttttttaagatataaaaatgttgataattgtcatgtacggtatnggaatgcatttctacagatgtaaatcgtataaatgctntctactggactctatctttattggcatacaataggtatcatcacttatgactcac

SEQ ID NO: 147326 - DNA, 424 bp, Glycine max
ttttttttggcaaaggtctgtatggtggtcagcaaaggagcacacaaaccacaaactcttgcgacaggaacagatttctgattcaaggccagctgggttactaagttaaccaatgcatccagtttgccttcaagcttcttattttcagatgatgcagatgggcttgtagctacctcatgcactcctctaatgactattgcatcatttctggcgctaaactggtgggagttggaagccatcttctcaattaaatgtctggcttcagcaagagtcatgtctccaagggctccaccactggcagcatctatcatacttctctccatattgctgagtccttcataaaaatattggagaagaagctgctctgaaatctgatggtggtggcaactggcacatagtttcttaaatctctcctagtactcat

SEQ ID NO: 147327 - DNA, 420 bp, Glycine max
  unsure (1)..(420): unsure at all n locations
tacgatattctttggagaagcatctatggcaaatgtcaaaactgtgaagggtattctcacgacgtttgagctggtttctggattgagaattaattttgctcagagcaaatttggagctgttggtcaatctaaggagtggggtcttcatgctgcaagctacctcaattgtgctttgctccaatttcctttctgctatttaggtattccgattggtgtcaatcccaaaagaaaggtggtgtgggatcctataattaggatatttgaggataggctgaaccccttnnaaatgggtatgggtgaccaaattctgttctgggaagatgcttgggttgacgataggattcccctctaagaccaatttccaaattatatcggattcctctcaaagaaacacatagtggctgatatgggatcttctct

SEQ ID NO: 147328 - DNA, 466 bp, Glycine max
  unsure (1)..(466): unsure at all n locations
agcttangctaaattaggctaaactttctaagtctcttgagctgagtctagtcttacatgagggatctgtggatgaaactcaatttaagttagtctaaacctaagagggttgtctatatcgtgcctagtcttacatgagggatttgcagacgaagcttggattaattcgacctgacaagggatcgagggtttagtaatttaggctacatcatagaacacaagagcatgattgattagagaaatatatttctatgcatcaacttgtttcttagaaagacccaacatttctacctactgctgtcattatatttaccttgcattttatagttattatcatacaagtttattctaaattctggttgaaattatcattcatacatgttctctcaacaatgcttcaattctgaactcaattcaggctaacattagttccctgtgtttgctggatcaagtggcctcggaataa

SEQ ID NO: 147329 - DNA, 388 bp, Glycine max
  unsure (1)..(388): unsure at all n locations
tntgggacggatctgcgaaaggccaaattgtcttttatctaaattaggctgngatccaaccaggcctaaatagttcgattgaacacctgtacgacaggacaggatctgtggattcaagtaaaatgaccatatttcattcacttcttcttcattgtccggatcgacagcaagaaaatcgtcagtgaaccaggcccggcccgacctctcaactaatgaatggagcatgttggggaagaaacttgtcagaactcagataaatcttcatgtacttgaggaacagcttttgtgggtattgatcgaacgtcttgggtgttaatcgaagtgctctctggccttcgatcgagcgattggcaacttcttcagcataatcttgtgggattattaatcc

SEQ ID NO: 147330 - DNA, 462 bp, Glycine max
  unsure (1)..(462): unsure at all n locations
ctgcagcttgagaccatcaagcctttttattttatctgacaggnacaacataatnggcttgaacttggaaaggattagtatccacttgcataggcttttcttcaaacttcaacatttcttcatcaatagtcttttgtatcatatctctgaaagggaaacaactataagtccaatgtccatagacatatttaaatttgcaatatctatttccttttctttgctcaaatgttgtaattttatgatcatcactaagtgcaatttgtttatcctttaattatacatcaaaaattttatcagacttagtaacgtcaaaactatactttgagtatacaaatcttttttcttctggttttaacaatggacaaatataaggaggaccatattgtaattttgctaaataaacttcattttcctaattatcgaaatctatgtcttgaaaattacataattatcatactcatt

SEQ ID NO: 147331 - DNA, 467 bp, Glycine max
  unsure (1)..(467): unsure at all n locations
tggttggctgttccagaaatgggagagtttggggtgttctctattttggacgtataacatcctcatttctcttaatattaagaataataaggtcaaattggcaactaaatattttgcaaggatgaaagaggccttccttgaggcagacgttgtgagttacctaaccctgttgtatgcatactcgactaggaaaaagggtccaagaagcggaagagctcatacgggagatgggcaaaagggatcttgagattgatgaattcacccaatttgcgttgactagaatgtatgtagaatcaggtatgcttgagcagtcgtggttgtggttcaggaggtttcacctagctggaaatatcacatctgattgttattatgccaatattgatgcatatggaaagcggcggtatactttagcagccgagaaagtctntatttgctgcanagaaaagaagaagctcactgtccttgag

SEQ ID NO: 147332 - DNA, 408 bp, Glycine max
  unsure (1)..(408): unsure at all n locations
ttaagcacctgcagctgcaagctgttatctgttttcaagaggttctgtgggtatttgacaatgagggtgattattaaaaaagtgcatgagagcgtgtttatggctattaaaaaggactaacttataatttcttgttttttcctataaggtatggaaattacccaacaggataaactttttgtttgacactaatatcctataattagtgtaaaatgagataaatatatagggataatggactgaaactgtgtgtcagagtacacaatgaatgcttggtaatatagacaggttgtattgattacacataattagaggatattcaatctcctctatatcagatcctctanatcatatatcatatcctatcacataattatacatcaaattcttggttctcatcacttaccc

SEQ ID NO: 147333 - DNA, 407 bp, Glycine max
  unsure (1)..(407): unsure at all n locations
tgcttaactatgtatggcaaaacttcattacagttgttatgacatacaagngagcttgtaacaaatcttctacacttggagtgatcacctgcagtcctcttgaacccttaccacccactctgtcatcatgccgagactcaggaagcccaacagctttagccttctctaagtattctaaacaaaatttaatgccttcttctgcaatgtacctctcaacaatagatgcttctggacgatatagattctttgtatacccttttaagatcttcatgtatcgctcaaccgagtacatccaccgtagatatacaagaccacaacatttgatttctctgaccagatgcacaatcaagtgaatcatgatgtcaaagaaagcagggggaaatacatctcccactggcacagtataa

SEQ ID NO: 147334 - DNA, 386 bp, Glycine max
  unsure (1)..(386): unsure at all n locations
ataaaatggatgccccacattatttccatgacacacatgcaaaaatgatgatttggaaattttatgcaaaactggtcatgcatgcacctatgtggacgctcaagtgtcaaatatttatggtcatgtgatgctagggctcaagattcattccctctattttaaatcaacccaatggttccaaaatatgttcttttatcaatatgtgcattcatcctagtccatttcgggcgtccggggaaatttcacagcattcacccttcaggtgtagacacantttttaaaaattgggtatgatcaatgaattttcttcaaagaaagagtggaaatcatctcttttcaatagcatgttggtttttagctagacaacttattttctctttttacac

SEQ ID NO: 147335 - DNA, 99 bp, Glycine max
cttccctacacttttaattatccgctgtgcacttttaattatcgcttttacttttggttaagattcaattactgctctttactttcttaacttggcagt

SEQ ID NO: 147336 - DNA, 355 bp, Glycine max
ttgcttgatgcttaaaacgtcctttctgatggtagtggtcctagatgcacggaagaatttcttcgagaacaccctcttaaggtcatcccatctggagatggatctgggagcaaggtagaacaaccaatcttttgccactcccttcagtgaatgatgaaaagtgatgcaatcctaccccgcagggcatgtgatagaaaactccaagtagattgggccagagatgcaagagtatgccctacggttcttatgagccttatggtagatttcgggcccatgggctaattactagcccacttatctgtgtaaatattagattaacggttcattattattgggccttgtatttaaggctcca

SEQ ID NO: 147337 - DNA, 350 bp, Glycine max
cgaaaaacccattctagtaccagcttagtacctgttcaatattttgtttgttgctgcgtgattattttttctttttcttttttaaaaatgggtttatgatcccaacatggttggctcatggtgcctaacacatgcaactaagaatgttgcgtgaagtttcacgcttcaccttctttgtttttgttttgtagaggaaaacgcacggatgagcaaacatgaaaacaaatggtatgcaattttgcagatcaaaaatgttgttgaacgcatatgcatgacgatgccatgactcatgcataatgtgaggctgtaatatgataacagacaaatgcaggaactatatgttcattatg

SEQ ID NO: 147338 - DNA, 415 bp, Glycine max
  unsure (1)..(415): unsure at all n locations
agaactctcgncgncctcgaaagaacgccaattacattcaacgtaattggattttaaacatgcacttacaaattgtgctatttcacgttacttttactcttcactcatactcttttgatatagtaaagggttatgattctatttattgggtgggcaaggtcatgactaattataaatgacttaatggactttaattgtctcatctcttcacctaatttgctgttatgatagtaaaattttctaagactcaaaatacaataaaataactttttgaaaaaaaaaatatttcgaaataaatcacattaaaattttcaatgtaacattaatcattgttgttcattaatatattgtataaatgttactttaatttatgaatctaatattaaactatctttctatctggttaataagatta

SEQ ID NO: 147339 - DNA, 293 bp, Glycine max
  unsure (1)..(293): unsure at all n locations
agcttgtacttatgaggcagggctggctttcntctcttaccggncnccaacgcgagctttgaccactgttctttactcccgcgaagctacttttgatgtccggctgaatgggcttatagcctaaaccatactttccacggtttccttgagtatttatcaggctagatatgcacccgttgtatctgtctaaacccatcccgggttcataaccgtgccccaacataactcacgccatgattactgatgcaagctccattggagcttgtgagcctaagatcttcctcatcaaagga

SEQ ID NO: 147340 - DNA, 378 bp, Glycine max
  unsure (1)..(378): unsure at all n locations
gtccatcaggtggtcatcagagcacgagagcttcagnattttgctgcctanaccaccattaacatgttgctgcaccttctctaccattgatctcttcgtcattttatctccatgtatctcctcagacgtccagcgctaaacgttgctaacatgattctctagagttttcagcgagtaaactcgctatagaagctagaggttatctccatggttcaaattctagtaatagccttgaaccacaattgtgttgagtgaggttcctatggcgatgtctcgaatctttagtggtgaaaccagacctaaaatcttacaaatataaagggaccatgcctcgaaatctaaggacttgtacctgtgtcgtggtatacagtatgctat

SEQ ID NO: 147341 - DNA, 411 bp, Glycine max
cgggcgatagtgcaaaacagttctccacatccacaaatcacgtataaacccaccatcccctgttgcccacctcaactgagctcacgtacttccacgtagctcttatcctcgttcctctctacgccgggtccccatcaatcctcccaagcttccacaacatccaagtaattcaacatccaagcatcatgaactaacatagccaagaaaacagggcagaggcagaaaactctgcccaaaacacaaaccaacatcacagcttttcacactcaaataccacagtaatattctcctcgttccaattcattaaccggtggatcgactcgaaaattttactggaagtctctagcacataaatctacattatgaccgttgggatctgctagaaaacgggcaaaacccactctgtactac

SEQ ID NO: 147342 - DNA, 492 bp, Glycine max
  unsure (1)..(492): unsure at all n locations
actaagcttgtatattcatgggcaggataatgatctctgatcaatatattctattctcaatcgccaacaacaaagtccacagatcaatgcttctgtcagcctataattaacttgtatttttcagtggaagctatcaattgagcatgagtttgttcgtgcacctggcgaagttaggagatgaactcctcaatggtggtataagaacacancttgactagggaaacttatcaagtcaaagggggccacgagtaatcatgcaataaataacgtggaaaggactagcctggtactatgattatcgacattattgtgagaaaatatatcttgacagagtctaacatcccaagactttaaatgatcgccaaccaaaatgcatagcangttaccaagggaacgattaagcacttcaatgtcactgttagtttgtgtattgtaagcactgctgaagttgatgctggtgttaactaaacgccacatacttctncaaatatg

SEQ ID NO: 147343 - DNA, 469 bp, Glycine max
  unsure (1)..(469): unsure at all n locations
gcttcttcatttatagccttaactttttttttttgttgccctcagcggatggttcttcactatattcttcattaaagtcttgaagctcttggagcatttaatgcatgtctcttcttcatgcaaagtctatgctaatagctaggttgacatgtcttatacttcaacaagaaagtcacttcttccatcagagcaggtatgcaccagcaaagtgcgtctttcgatgaagatcaacactttcaaactatggactttatttattattcataggatttaatagattctaggagaatgttttccgcaacaaagaatctcatacataaaatattaaatgtaggtattaattaaatgcactacttaatgttatgacaagatcatcttatattgatgtaacatcagaaaactcaaacccagaaatacaaaccataatctgataacacatcannacacaattttatcatttatatttatt

SEQ ID NO: 147344 - DNA, 427 bp, Glycine max
  unsure (1)..(427): unsure at all n locations
ttgatgtcgnngtttgggggataataatttcgagaaaacggaacgattactagctgaatgattacaaacaccataatccaaaatccaataggtgtagaatgagacaaaccatagaattacaatagttaactacaatggcttanggaggaacctggttgggatgctttaagttgaaggtatcctttattgtccctatgctcgtgaatatttatttgcatcattttaatttttttatttcatagaatcgttcatcaaacctcttgtgtccacatgccttggcattgtcgagaaaaaaattaacacttggttgaaacaactaataccctactacttcattgcaatgttctttgaatttggagcaatattattatagcgtgttaattgtccaatcacatgccttcctccatgctntagaacaaagtcctca

SEQ ID NO: 147345 - DNA, 453 bp, Glycine max
  unsure (1)..(453): unsure at all n locations
gattcactgacaccccatatttctggtttatttccgtgatcaaggctggaagctctagtgtcctgttggacttcttcaggtctagtgggtgtctgtgaggcatgatccctgcaaattgatagatgacatctgagatcaactaggccacatgaacactcacctgcgtcaagatggcatataccagctggcacttcggcagggggaggtcagaattatgatcactgtggaggatgttgctgagcagcaatgtcatccaaatctgtgttaagttggtcgtgctactgcgcatgatctgcacccgtctccctgccacgcttctggcgaagtcctaccccataatacacagctgtngactgatggcctctctatcgaaccccgaggcttgctcctccttgattgaatctaagtgttgccctctttacgactaaggatgcccaaaactaataatggcat

SEQ ID NO: 147346 - DNA, 482 bp, Glycine max
  unsure (1)..(482): unsure at all n locations
gcttcccctcctcggcaccatatgtagaggcagcggaggaattattataatttgtttnccaatccttcgagggggtaagttgagcctttgtggaaacaagtccattgctaccttgtctctataatgcggtcttgatggcggcgcgggtaatgctcatgcactgttatgagtccggaatgggtctgggcaatggacaccacagttatgccgtcttggttgacattacgggtaacccgtacaaatatgggttggggtatgaacccgggaaacctggaataaagaatgcaccatcaagactctgggcatataaggcatgacccgatcatgttagccattgtttcacaagtgccaagatacctgtcgaggaagaagaggtggctataggagaagaggctcctcgagatccgcacagtttcgtgcgatcatgacatcccaatttacaagcagggaactggcacgtgatgaactagacggatctctat

SEQ ID NO: 147347 - DNA, 438 bp, Glycine max
tttatttttaatgaagcattgttggctaaatggagatgggctctatttcatagtaagggagcactatgggagaaattttttaggtcaaaatatggtggatggataggcttgttggaggagttccctaattccttaatgtctatttggtggaaggatttaaggtccatttatgaggatgaggaggagtccaagtggtttgataatatgatacaatggaaggatagtgagggaaacattacaagattttggtttgatgcgtggttgcaaggtcaaagtctctttaccatttatggtaggatcttctccaactcaacacaaaaagatgattgcattggaaatatatgtagttgggaggacgtggtgtgcatctggtgatgacaatcctaataacgatcaaattatggattttcattatataacaaagaaatataataagat

SEQ ID NO: 147348 - DNA, 482 bp, Glycine max
  unsure (1)..(482): unsure at all n locations
taataaatctatatatggtttanaacaagactcccgtatgttgtccttaagtttcatgggataatttcttcatttggttttgatgaaaatcccatggatcaatgcatataccacaaggttagtgagagtaaaatatgttttcttgttttatatgcaaatgatattttaattacatgaggtgaaacaatttctttttaagaattttgacatgaaggatatgggtgatgcatcttatgtcatcggcattaagattcatagagatagacctcgaggtattttaggtctatcacaggacacctatattaacaaaattntgagagattttggatgaaagattattcaccaagtgttgctcccattgtagagggtgataggtttaatttgaaccaatgcccaaagaatgactctaaaagggaacaaatganaaacattcattatgcttcagttgttggaagcctcatgtatgttcaagtgtgcacaag

SEQ ID NO: 147349 - DNA, 457 bp, Glycine max
  unsure (1)..(457): unsure at all n locations
cacctgaggcatgcaagcttgtagaaaggctagacaaatacatgcatggttttttggnncaagaaaaagggatgccccacattatttccatgacacaaatgccaaaatgatgatttggaaactttatgcaaaactggtcatgcatgcacctatgtggacactcaagtgtcaaatttttatggtcatgtgatgctagggctcaagatttatttcctctattttagtcaacccaacgtttccaaaatatgttcttttatcaatttgtgcattcatccgagtccattttgggcgtctgggaaaattttcacagcattcacccttcaggtgtatacacattttttcaaaaactagttatgatcagtgaactttttcaaagaaaagttggaagtcatctcttatcaaaagcatgttggtgttcacttgacaacttatttccttttttctcttttttttcata

SEQ ID NO: 147350 - DNA, 487 bp, Glycine max
  unsure (1)..(487): unsure at all n locations
actatgatactaagcttgatgttggttctgttgcatcagttgtgatccctattgtctcaataaagtttacgagggattnttgtaccttcttgttcctttgtcctgaacaagataatagctcactctctttacataccaagtatctattttttgccaaacatttgctatattccctttgcataactatcttgcttgtaagaatttttcatctgtggataagttttaacatatagtctttgacactttgtaggaatacagcgaaaacattttatgcttccagcatcttttttgatattcttaatcaatttggagcagttcaacctgatgtgtgtatttcatgcattgaattgaaccttccttttttatgcatgtctcattgcatttccatgttttccacanagcctttcttatttggaaacaatntgcagcaagaatacaacttcctataaccgtatggttaatgcttttttgagttcttttatagctg

SEQ ID NO: 147351 - DNA, 428 bp, Glycine max
  unsure (1)..(428): unsure at all n locations
cccacacggatcggatggggcctatgctagttgaaagccacggaggaaagatgtatgcctatgttgctgtggatgatttctccagatttacctgtgtcaactctatcagagagaaatcagaaacctttgaagtattcgaagagttgagtctaagacttcaaagagaaaaggactgtgtgatcaagagaatcatgagcgaccatggtagagaatttgaaaacagcaggttcactgaattctgcacatctgaaggcatcactcatgagttctctgcagccattacaccacaacagaatggcatagttgaaaggaacaacaggaccttgcaagaggctgctcgggtcatgcttcatgccaaagaacttccctataatctctgggctgaagccatgaacacagcatgctacatncactacagagtctcactg

SEQ ID NO: 147352 - DNA, 390 bp, Glycine max
  unsure (1)..(390): unsure at all n locations
ttaactgcacattatgttggtgcaaattgtgagttgaatagtcaaatgcttaattcttctcattttcctcctccacacttggngcgtgagatggctaatgttatatatggttctttggaagaatggcggattgagaagaaaatattttcattacttctgataatgcttcttccaatgataaaatgcaagactatttgaaggaaagacttcttttgcatactaatggtttactaagtggtggtgaattttttcatatacgatgttgtgccttaaaccttactgctcaagattggtagaaagtagtcggtcctgctgtaaacaaaattaaagagagcattaagtatgttaagggatcagagggtaaaatgaatgttttaaagcttgtgtgca

SEQ ID NO: 147353 - DNA, 339 bp, Glycine max
  unsure (1)..(339): unsure at all n locations
aagaatcaagaatcaagaacaattaagatcaagattcaagactcaagattcaagaatcaagagaagacttaatcaagataagtactaanaaagtttttcaaaacattgagtagcacaagactttttcacaaatcttttaccaaagagtnttactcttttgtaatcgattaccagaatgtagtaatcgattaccagtagccagcattggtttcaaaactgaattatcaagccggaatcgattaccataatcatggtatcgaataccaatattttaaaacattagatttcaatttcaagagtcacaactagtgataaaacattttcaaatcattttaactt

SEQ ID NO: 147354 - DNA, 461 bp, Glycine max
agcttgcatattatatatattcggtttggcttatttacgtgtacttcaaccttaaaagcatgcttctaaagtcttaaacaaaaccgaaacttggttgtctcttttaaaaattgatcttctacctcaaataataataaataaaactataaacatgatggagagaaaataataataggaaatatgtagaaatatcatcaatcgatatcatgctgcgaaacacagaaccaccacgttgtgattttaatatttaataaagtaacatatatatgcacattaatttaactgtccaaattggagagcagagaggcagtttcgcacattcgtgttgtctggagtgcaccacgtgtgatgtcacatggcattctaaaaggtgatagacaagaacaagcaaaggtggcagtactagacattactcaaacctacaaaagggattgtgtatctgaacgtcacaacttgacccc

SEQ ID NO: 147355 - DNA, 468 bp, Glycine max
tattatacagtgatgatgaccgtgaagcaaggtttcttctctctgcgaggctcactcctcttcttcgcaatcctcacccttctctccttcacctacctttctctcaaatactccaccccaacaccccaggtacccctttttctctttttcctccaaccccattttgaaatttctcatttttcaccgctttctcgattacccttttgctctaagttgccaagctctcggtcgagaacctcaacgatgcgccggtaagcgagaaagaagagaaagaagaggttccggacacgtaccactcgccgcgcgtgttcaagctgaactatgaggaaatggagaagaagttcaaggtttatatatacccagatggggatcctaacacgttctaccagacgccgaggaagctcaccggaaagtacgccagcgaaggctatttcttccagaacatcagagagagtcgcttctgcaccg

SEQ ID NO: 147356 - DNA, 333 bp, Glycine max
ccttcccctatttataggagattggggaggtggttgccacccaaagacttcttgaggaagattcctaagcgcacccccaattgataagttcaccccccctctagggttgcttagtgagtaagttttctaagcgcacccgccaattgattagttcaccccaccttccaaagtgttctagatgaagttttctgagcgcatcccccgtgtttgataagtgcaccccctctagggttgctttaagtttccttagtgcaccccctaattgataagttcacccacctctagggatgcttactgattaaagttcttgagtacacccgccgattgattatg

SEQ ID NO: 147357 - DNA, 205 bp, Glycine max
ggagacattcgctgagactcatctggtgtgtggaaacttggctatggcatcctccaatttggccgaaggaaaattacacacagttgggatcatccatgagcacgaaatgagagcaccaaaatgttatgaataagcaaattcctagacttcgagggccacacctcccaagcacaaagccaaagataaatatcggggattgaaattc

SEQ ID NO: 147358 - DNA, 449 bp, Glycine max
  unsure (1)..(449): unsure at all n locations
agcttgcggatttggcttgccagtgttggatcggngngggnctgaaaaaaggcaaatttagtcatcctgcttggacgaatgagaaaactggggcaaatgaagagggtgaggatgaaggaaaaacccatgctgtgactgccattcctatacagccaagtttcccaccaacccaaaaatgtcattactcaacccttctccttacctaccgcccatttatccacaaaggccatccctaaatcaaccacaaagtatgtctaccgcacttccaatgacgaacaccacctttagcacaaaccaaaaacaccaaccaaaaaataaattttgcagcgaagagcctgtaagattcaccccaaattctggtgtcatatgctaacttgctcccatatctacttgataatgcaatggtagccataacccctgctaggttccctcaaacccccatttttctg

SEQ ID NO: 147359 - DNA, 481 bp, Glycine max
  unsure (1)..(481): unsure at all n locations
tactaagctnttcgtcttacaaacagcatataagaatgtttatacggataactcctcgggtatttccgctcatcagcgtgactcaaatgtgagtatgacagatcttttgagcgcggaagatgacgtaaatctccgcgtgtcaacgggcttgtcggccgcgattgacgaagtgcgcagaagactacgttagtctntgcgtgctatcatgcttttcgtcttacagacagcaaaaaagaatgtttatacggataaccactcgggtatttcagcccgtcagcgtgactcanatgtaagtaagacagatcttgtgggcgcggaagatgttgtaaatctccgcgtgtcaacgggcttgtcggccacgattgacgaagggcgtagaagacgacgttagtctcttcgtgctataaggctnttcgtctaacagacagcatanaagaatggttatacggataaccactcgtgtatttcagcccgtcagcgt

SEQ ID NO: 147360 - DNA, 374 bp, Glycine max
ctgagctgcactatcatatgtatatagcttttttttttttacatctattcgcgatccagatgtccacattactcacaaggaatgctgttaaaatgattaaatgggaaatggtattctcgctccacctaagacatattaagttaggcattgatctgcatatgccagataagaaaaagatactcgaacgtactaccacaagctttgcattctcagggagtgaaattgacttcacatttttccctctacataattgtattctcgcatctacagacaaaatgaactgaaagttttcattttccaggggaccggtgagaccctgattaaatctattctggatgagctactgtggggacaccattggggagatagcactc

SEQ ID NO: 147361 - DNA, 437 bp, Glycine max
  unsure (1)..(437): unsure at all n locations
aaaacctgttttgttgatacttaaagcctaacattttacatttataattataatagggggataatgtggcatatgtaatattccaattcttgaatattattatattgcattgatgtgtgtatttctctcttttgttccatccctaactgcctctttataatggagaataattatttcatacagaaacaggaaagggggatggataaatattatcaggtaacatgataaaaaacaaaaggaaagaaaagaaagagacagaattaaaatattaggagggtatgaagaggttgcacacaatctatgtgagcaaaagccagaacccttactacaatatgccatgtncttaatggtcggttagggaaaaattagtctctagtctctacacatacctgacttctttaagaattacccattgatgttacagttaactgtttcta

SEQ ID NO: 147362 - DNA, 423 bp, Glycine max
  unsure (1)..(423): unsure at all n locations
tctaagctggcgcattcatgaggatacttgatcccctgctttttatttttatatggancncnnnaaacaatttaacttaaggaatgcanttatttggaagttaagatatggctaaaaggatttctatgatatcatggcagcatcaacacacgatcaagatgtcttcagtttctatccgagtgaaaaaatttgctgatggaattgaagaagagttgagtccgtataaggaaaatgttccttatattcgacttgcaaggtatgagataactatatttctttctactatggaacactctttttactccagttataatattccaaggttgagttaaggacacattataattacaggtcctactccattcgcgccaataatagaaatggccatgagcattgttgaccagagtggaggccagcaccatg

SEQ ID NO: 147363 - DNA, 482 bp, Glycine max
  unsure (1)..(482): unsure at all n locations
tatcatctatggtgatntattactagatgaaggnagtatttttcacctttctaatatagacgattgactcagaatctaaactatagacatgaaaataaagatacttacgaatccccaaccacttttagtgaactcctgcccaacggttctgaccttacagttggtacttgacattaatatttcaatataagggaagctcagtaacaaacggtcacaacccctccatctttaggtcctttctcgagggcatcaatatatgcctccatatttttcaacgtaactatccttgatggttgtatattgagttcctctgtcaaatacttgcgtgcaaatgacccttcttgaattccaattggttgagtacctgatatcaagctgtcaatgccttcaatttgtgatgacagctgctgcactgtgaggatggatgttaaactagctgtgtagctcgaattgataattaacaccacgaaaagccatatgat

SEQ ID NO: 147364 - DNA, 468 bp, Glycine max
  unsure (1)..(468): unsure at all n locations
tgcagctttttactaaaaaacttatcgtttctgttgtaaagaaattgcgcaatgtcggccgaaagatatcagtcggggccatataacgaccgacaccggccattgtttattctattcaatccctgaataacaattggatgatgtcgattgggaaatgttcgaacggcatgatccggtgaagcttcattntagacctcgatcggtcgtctttcctggccgacgatgactgtcatttttttcgatcaatatcggtgaataatatttttttgccgaggtgggctaatgttttcctggccgaataaatgggaatatgccagtttcggccgaagcgaaacatcggttgagctcgcacgaaaaaacctaaccgacctacattgtaagttttttatgcgacaccgaaacaagaaaacttcccctgctgtaagaaaaaacattatccgccagcaagcgttttttttntaaaaatgc

SEQ ID NO: 147365 - DNA, 456 bp, Glycine max
  unsure (1)..(456): unsure at all n locations
tctcattttcaatttctagcgtctcgatatattatgcgcctgtttcggacctctgtgtgaaaaggtatgaccatttgaatatctcgagagcttccactgttcaatttcgagtgtctcgatatgtgatgctcctgaatcggacatccaagtgcaaagttatgaccctnttaatttctcgagagcttccgttgttcaatttcaagcatctcgatatattaatcgcctgaattggacatccgactgaaaagttatgaccatttgaagatttggagagcttccgctgttcaatttcgagcgtctcgatatgtgatgcgcctgaattggacctccgtgtgaaacgtttcgaccatctgaatttctcgagggcttccggtgttcaatttcgaacgtctcgatatataatgcgcctgaatcggacctccgtgtgaaaatgtttgaccatttgacattctcgag

SEQ ID NO: 147366 - DNA, 496 bp, Glycine max
ttaagtcacctgccgcatgcaagctctgagccacaatcccaacttaccatttaccttgttccgagatgagactatccatcctcgccctctatagaaaacaaaaaaagaaaaataaagttcccggtccaagatcggaagataacaaagaaaaggattcccggtcaaagatcggaagaaaacaaaggaaaaataatccccgatcaaagatcggaagaaaatgaaagaattatacataagggtctttagaccagacaaatatcctaacaatacaaaatagccacaaccaaataatgaaagaattatacaaaaaggaatcctgtgcgctggcgactatctcgccccgcacaaaacaaaaacataatagggaaaggccaaaacactcatagccaaatttcccacgcaaaacactattcccaaaaaggtcctattgatccatgatcacgcatgtaatctttgatttgataggaaatgattagcaaagtcaaatcatgacata

SEQ ID NO: 147367 - DNA, 470 bp, Glycine max
  unsure (1)..(470): unsure at all n locations
tctacttatgtggcagggcaggcttccttcactttcttgtctttatcgcgagctntgaccacgactcttccttcccgcgatgcttcttttcatatccgcctgagtgggcttatagcctaaaccatacttccaggatttcctttggcatttatcaggctagttatgccgccattgtccttgcctaaacccatttcgggttcgtaaccattccctacataactcgggccatcattactgctgcatcggacagacaaggctgcccagagaaggaatccacggaggaaatgctgaccacctcataagactggaaagcgtgttctaacgattcttctgcggcttccacataaggcatagaggatgggcagctcaccaagatgtcttcctcgcctaacacgatgaccaagtgcccctccactacgaatttcaacttttggtggagtgtagagggcacaactcccactgaatggatc

SEQ ID NO: 147368 - DNA, 224 bp, Glycine max
aatatcatgaagcataaaggatatacggtgatcccccccacagtgggacagcatatacatggaggaagttcccctcaaagtggggaagcgaataaaaatgaagtcccataatactggataagtataggacaggagaagaaatagcctgacaagatcgagaaacaaaaaatgtcagaacgctgaccgacatattgacaactattccccgctgacaaaaatgaaga

SEQ ID NO: 147369 - DNA, 467 bp, Glycine max
  unsure (1)..(467): unsure at all n locations
tagcttgatgcaacatttggagaggtatatgaaacaccttgttgatgttctccatgagagggtgggtcaaacggataatatatatcataacgaacaacaaaggacgagaagagggaatgatggcgttcctagacaaaaccgaattgatggtattaaactcaacattcctccatttaaaggaaagaatgattcgtcgcctacttcgagtgggagatgaaaatacagcatgttttctcatgcaacaactatgaggaggaccagaaggtgaagcttgccgccacggagttttccgactatgctcttgtgtggtggaacaagctacaanacgagagagcaagacatgaagagccaatggttgatacatggacggagatgatacagatcatgacgaagcggtatgtgccggcctattactcaagggacttgaaatcaagctcacaaactaaccaagcaacaaggcgtgagag

SEQ ID NO: 147370 - DNA, 431 bp, Glycine max
ctccttcttccatggcttattccctagaggatggcgcctcctctcaccttttctcctttgtcttccgctgcatctccatggtggaaaatcaccattaaaggacctcatcgaagctcaaagatccagcctccatagaagccccacaagcaagcttccatcacctatgctataaatagaaacatgtgtaacacttatcataactttgatgaatgagagtctcgtgagacacatttcaaagttcaacttctctccctctttttctccttcaattctatgccccttcctctctctctctctctcattcttttcctccattgaagcttcttgtctaagcttcttctccaaggaactctcttggtttgaaactcctccttccatggcttattccctagtggatggcacctcctctcacctcttctcctgtatcttcc

SEQ ID NO: 147371 - DNA, 372 bp, Glycine max
  unsure (1)..(372): unsure at all n locations
gtgcaacagaaaactaaatttccctttaattcttcaatttaatttgtaggggccaactcgagcacttttggctgcaacaattgggaacatcctaggatattcttcaagtgctagtggaaagtggaacaagtgagactttgcttatatcttgtgcttatttcatatttttgtacatagctatatatgtaaagtccattctgcatatgttttttcctttaattctgttgatttggcacatcaacaaagacacacgaggagctatgagctatctctatttcccatagacatgtgcttctaaggtctataaattacaatttccatgaagaacgtnttcaatttgatctagttaaacttttctatacaacaaaatca

SEQ ID NO: 147372 - DNA, 419 bp, Glycine max
  unsure (1)..(419): unsure at all n locations
tcttatccaaggctcatcnntggggngattcttcttcttccatggcttattccttagtggatggcgcctcctctcacctcttctcctttgtcttccgctgcatctccatggtgaaaaatcaccattgaaggacctcattgaagctcaaagatccagcctccatagaagctccacaagcaagcttccatcacctttcgcacttttgcctataggaggatgcctttcggtctatgcaatgcccctggtaccttccagcgatgcatgattagtattttcaatgattttttggaaaattggatagaggtgtttacagatgatttcactgtaaatggatcctcttttgatgcttgtttggatagtctggaaaaggttttgaatagatgcactgaaactaaccttgttctaaattttgaanaatg

SEQ ID NO: 147373 - DNA, 102 bp, Glycine max
  unsure (1)..(102): unsure at all n locations
tgcaagcttccagattatttgatgataccattgattantattgatccattcaaacaagattaaagaatcatgaagattcaagtgaagaatcaagagaagact

SEQ ID NO: 147374 - DNA, 354 bp, Glycine max
  unsure (1)..(354): unsure at all n locations
gatgcatgcatatgttttgtatttatccacgaaggtcagcaagtgtccacccaacgacctntttgttgcctctcaaaacatgcaacaacttattctcatgctcaagtgaaaggctgctagatatgatgactgggagcttctaagcatcatcttaattagcctactttaaggtgctcaggtgttgggtttatttcctaggaaggggattgaaccgcggaaggaaaatgaagggtgaccatcggtggaagagaaataagatgatcagaacctgcgtctgcgtcacaatcggaatgaattgcgaaaaatctcttccaatactacatagagtcgttacttcagaatctcataggatag

SEQ ID NO: 147375 - DNA, 347 bp, Glycine max
gacgggtaataaacatggactgtggacgcatgctcgactcacatttgaagccttatcgagctcatcacactagaaagggtgcattaccactggagcggtacttatgagcatactcatactgaaacacacaaaccgtcatcaaacctgatcttgacccgtaatgttgacatcttactataaccctccatttgtggggtgtataagcgtgggttaggcatatccgtacatcatgacacttattcatcttaaatatacctgctgcaaacaagacctatgtcgtgaaatctgtgcatcttcagagtgacgaacatataccatcatttcgttacctatcaccgataccatgc

SEQ ID NO: 147376 - DNA, 453 bp, Glycine max
agcttagatagagaataagagagcttagatttgtattgtataagagagcgcgagccaaatagggctcacgcctgatatatttttaaatgtcagtccaacatcggttgtcaataaaaaaaaaaaccgatgttaacaaaatgatgttaaagtaaacatctggttttctggacgaggaggtagtggtccaccacactgatcggtgctaccacagggggggatgtatggtggtgcggttggggaggaacttagtggcacgctgctttggtcttgccataaggcagagtcgacggctcgagtgtagggagatcgagtctagggtctaaagatcgtgttatttcaaaaccatcttaaattaactttcatttaatttcaaaaatgtcaatgttttttatacagcggtttctatgtctgtcttgacataaccagtgtataaagtcattcacatgcttattt

SEQ ID NO: 147377 - DNA, 457 bp, Glycine max
  unsure (1)..(457): unsure at all n locations
agcnnttgggctgagaacctatataacnatanctttgttttagttttaagagtccttttcgttctggagaggagaataatcctagttttcttcgttttctactacaatttcattttctactgattaatggaaggctaagtctccagcgttgttttctcttgaggatcaagcacaactctctgtgaggttnttttttattactatggaattctgatcagtttttcctcttcaccaattactttgtatttgttgctattaatccatgcatgcttagtgcttgattaattgtctctgcgcttaatttacgttcatgcttattgatcagtttcgttcatgattaattggtgcatttgttgcttaatcacataatgactaccttatgttaaatctcgcttattaatttaatttaagattggattaagtgcgtgaactgttaaatgataaattctcgtcacct

SEQ ID NO: 147378 - DNA, 417 bp, Glycine max
  unsure (1)..(417): unsure at all n locations
cttggtcgctccacatgcctccttctctagccttcttctattgttttctctgaactgcgttatgtcatctcctcaccttctcccgtttgcttattttcttcatttatgtggtctgtttcttacagcttcacttgccgctgaatatttcccttgctgacggtttccattttttgttcgctacacgaggtttccttctccctttctatcttctccatattgatggtccgtcttttccatctccactttcagggtttgctttggtttgttattgagatcctgatgttagcatggtttccttttaactgatagttatttttatattactgaattttctactctntgttagatcctttcttatcttttcgctgaccaggctatcgatgaagaagcatcttgcacgcgagtttcttccctttt

SEQ ID NO: 147379 - DNA, 455 bp, Glycine max
  unsure (1)..(455): unsure at all n locations
ttatgccctctcgcctctgtgtgatttcttcttcggcgaaggcgagatagttgttggcagtgatattattgaccagccctccgaaaccttctaccgagatatcttgggccacgtgggcctcgatcataaccttcactagcaaggctcggagctcatgagtgactccaacagcgagaccctggccggggtgttgttgagctgtncgataaccttgaattcgctctgctgaattatacggaggaactcgctggcttcctctagcgacacctactttataccatcctttttctccggaaggcctttagccggaatatctgtatacgaagcatggggtgctttgccatcttgatcctcccccacttttcctattcccttgacgtccgtgggttggactggtaggtcccgaggcgcgaacacacgaccactactggtcacaccactcagtcccgtgatat

SEQ ID NO: 147380 - DNA, 469 bp, Glycine max
  unsure (1)..(469): unsure at all n locations
tggacttaccttgactaattccngataantcctctttgagccttggttcccttcccttgttttgaagctcactacaagccttaagtgaaaaaccatgatatcaccatatccttaaggaatnttggagctttggaattgttttgggaataggtgtgggggttttgtttcattggataacatgttttgttacccatgcttcatgatatattttgagccatacttgatgtacattgcatattggctaaatgttggacatgctgaatatgatgtcgtttctcaaaaggctacagagtaaaaaaaaattattaaaaaaaaatcgaaaaagaaaaaagaatagcagtatagttgagtgaataagatcttaaatgacaaaagaatgatgagactcttggttctactctttatgtttaaatnttatctttacttctttttattttcttatgtgttctaaatatgcacttattccccc

SEQ ID NO: 147381 - DNA, 469 bp, Glycine max
  unsure (1)..(469): unsure at all n locations
agcttgccgctggagctgccccattaacttttctttctatttagactggngatccctaggctcttgaccttgacttgatagaacctctttttaagcgaaggcatttaacttgatcccatgttttactaaagtgaaacaaaatcggtgcgaatcaaaactccgacatctatcatgggtggaatggataaatgcatgaagaaatgcatatgacatatatgcaatttatgaatatgagagcccggaaaattgtctccttcttatatacaacgtcttggggtagcacagtgcccgacgtatgtatttaagaaagtgacacggaccctccgttggtttgctaaagagaagggatcaagacagaatccatgcatgatgtatatgcgaaaggcataacacggtgatgtacataatattcacaaacaaatattagccaaagggtacatgacacttatgcatggcagtgtgaaaaatg

SEQ ID NO: 147382 - DNA, 471 bp, Glycine max
  unsure (1)..(471): unsure at all n locations
cttgatataacaattngcactattcataaaatatgagctatgctcttttatctcaaccttggtgaatatttagcctcgtggaagataaataacaaatccacctcagtctcctgggttaagggtcctgtcacatctagcatgagcaacattcaacaagtccaagcaaagtttgcacttgttaagtttgactatcattgtcaagatattaactgcattttctgtagtgtgaaccttgcatagcaaaacctggctagatgtgattaactccctgatcttgtgaaacatcacatcaatatgattggttctcgaatgatacaactgagtctttgcgaaatcaatagtattctatctattgcaatgcaactgaacaacaacttgctcaatgcccaactcattcactaaccctttctaaccacacagtttccttgctagccattgctaccagtatgtactctacttcagatgttgaca

SEQ ID NO: 147383 - DNA, 469 bp, Glycine max
  unsure (1)..(469): unsure at all n locations
ntcctcgaccagnttttagccatggacaattatatgtatctctctcaagtacaaagttaaaaggatngaatatatcaatacatgaataagaaggaaatgacatataaacaaccaccaatgttatatttcaggaggttgtccaaaatctctgatcatcaaaaatttaattttttatacttaacaacaatttatgtgttattataatgttaattattttccttttctgaattcataatttatgcacacaacataatcttttggatttttttggaacaagacatactatgttaaggtatggttgattacttcaactataactatattatgaaactattgtaacttttgcacacatgtgactacttttcctaagtgacaatngttaacaaattgcattntgtttcattatagtttaacacataaatagctatctattggaatggaccttccaaagngtcatgctcatatcata

SEQ ID NO: 147384 - DNA, 429 bp, Glycine max
  unsure (1)..(429): unsure at all n locations
tgaagtatggaagnaaccatcttgcaaaaaattggggcaaaagatggatcgtgttacatcgctgcttcatctactgccaaacacatttagggctgtcgatgtccctgttacttccagtttcaccttgacgaagatgtcatggaccatgtagaaaatctaaattgattcaaccccatatcctgtgtaaaaattcataatacttcaactgtgcatcattcgcatacatccatgcttttcattggttgcattgcttattgcattctttcctaaaaagaaaaaaaaggagagaacttaatcattgttataaaaaagaaaagaacccgctttacggcacccttaccgaacctgtgctagagctagagtaatgggtaaagtataggaggtgcaagagaaggtgaatgccgacatggaggccatgaaagagaaaat

SEQ ID NO: 147385 - DNA, 267 bp, Glycine max
  unsure (1)..(267): unsure at all n locations
agatagatntatntagtttgctaactatagacttcgagtcacctgatacaaaggtttnttggttgcatcatataaattgtctcttcaatatcaccatttataaacacagtcttaacatccatctgatgtacttgtaaataataatgagctaccattgccattatcgttttaaaagaactctttgaaatattggaaaaaaggttttttcatagtcaatgccttcttttgggtaaatcctttacgactagatgagccttatattatcaa

SEQ ID NO: 147386 - DNA, 467 bp, Glycine max
  unsure (1)..(467): unsure at all n locations
agctngaatagcagagaagattatttatgtgattgttttctatgacanatgagtggtatctttttttttcttcaacttataagaacatttctttcccgttttattgtttattatcaaaagtttagagttgagggaaagttgcccccattctaaagttaagagaacaataatcttaacgagagtaagcaattgataatagattacacatcgatgaggaatacatgatttggatttaaattatatagttgtcatgagcgaataaccacagaatattcaaatatatattattattaatgggaaaatggttgactcttgtaataattatttaagtattgactaaagacacaacacctagcttatctctaagcatatgttctttggaagctccgtcaaatgctctaactagttgttgttcggatntgtagtaggccgaacttagctatccttattcacttgatctctcaaaa

SEQ ID NO: 147387 - DNA, 374 bp, Glycine max
  unsure (1)..(374): unsure at all n locations
catgatatgggccggaagggaggcttcaaaataaccttgcctaaaagtggcaggctctgagtgtgatgtgtccacaatgcaggcagaattaagacgttctgttgctcccctcctcttgcacagactatgaacttacttccatagctatggtacgagcaataaagtgaggcttaataactngaaagaggctgatactttacgaaccttaggtgaattaagtagaccatactgatgaaataatacgccattcagcgtctagaatactgagaaagccgtctgccttatatacttatacattatctttcttgctaatcacatcttatgtaataaattataatgaanaaaccgactttagactgatatgtaaatctcac

SEQ ID NO: 147388 - DNA, 398 bp, Glycine max
tctgaaaaacctattaaagttaaggatgtacctttgggataccacaaacctacattggttatgctcttaagatacttaatgatcctacaattaagtgagattccttaagattggactggtttcttgcacataagaaaacacttagcacgatatccgatctacttgcagttaagtagagaagtgatccaatcatacctctatatcttgattcatccgctgatttacctttctcatctaagtcaaggtagattgaagtagccattggagtagatgcttctttgaatttttccataccgaattttttaatcaattctatgcagcatttgtgttgactaaggaaggttccatgtttcatttgctcgacttggagtcctagaaagaaatcaattctctcatat

SEQ ID NO: 147389 - DNA, 401 bp, Glycine max
accctaccaataatttcttttctctttccccaactcttgaaacgggagataaatgttcatctaaagcatactagtccttaatgttatcgaatcctaaaacttgagctcctatggagcaaaacaatgtgtgtcttctaaagagggcatgcccttccacattttgttgtatccctttgtggatttgataacatatggaaattgctctatgtactctacccattttgcatgccttctgtttaacttgctttgccctttaatgaacttaagtgattgatgatcactatgaatgacatataccttgcacacaaggtaatgttcccaagatcagagtgctcttattaaggcataaagctctttatcataggtagggtagctaagggtggcaccatgaagttttccac

SEQ ID NO: 147390 - DNA, 441 bp, Glycine max
tgccgctgcagcttctatccaggctcatctgggttgtagctcttcttcatggcttattccctaatggatggcgctatctctcacctcttctcctttgtcttccgctgcatctccatggtggaaaatgaccattaaaggacctcattgaagctcaaagatccagcctccatagaagccccgcaagcaagcttccatcattatgtttgccacatgcgcatgtgaatgcggttgtctcaacatcagtttttttgtagctgtaactgctaactgaataacacctcgaatggttatccataacaattctattaatggtgttgacagtaacacaaacaatttcctgaaaaataaacataggcgtcacattccaaaccaactggtacagccattgaataaatagcatgactttcattacagttcatagactttgatcaccgggacttt

SEQ ID NO: 147391 - DNA, 478 bp, Glycine max
  unsure (1)..(478): unsure at all n locations
actcagctaacatactatatatggtttaaacaagccttctgtcattttatctttaattncatgggataatctcttcattaggctgtgatgaaaacctcatggatcaatgcatattccacacggtcagtggcgagaaaatatgttatcttgcttcatatgtacatgatatattatttacatccaatgatcggtgtttgctacatgaaggtgaaatcttttctctctaagaattctgacatgacggataggggtgatgcaccttatgtcatcggcatcaagattcatagagatagaccttgaggtattttatgtctaccacaggaaacctatattaacaaaattttagagagattttggatgacagactgtcacccagcgtgctcccattggacagggatatgttaaatctgaacaatgcctaaagaatgactttgaagggaacagatgataacattcctcatgctntattgttggaacg

SEQ ID NO: 147392 - DNA, 460 bp, Glycine max
  unsure (1)..(460): unsure at all n locations
acctatggagatgctatattatattgtgtttgttagccgcaacccacaatattagatgttagtttggtagtatgtttacttagttgagtgtgataaagcaatgattgaggctgaacttgagctgtataaatagcctctatgtaattcaattcatctcattttagtatatgctttntcctgggattctctctttcttcccaacaattcctaatcatgaaattccaaaaaaattggtcacttgatgtgatcctgactaggagcggatcgcttgatacaagctatggagttctggatgacgccacttccagtgaaggaagataagtcatgatagacgccacaaggattaccttgataagtctgataattgtgtcaacaaagaacccaaagagaaactctcacaaaattttatcaaatgacaaaagctctttattgaaaaaaacactaatacttatagtgatct

SEQ ID NO: 147393 - DNA, 479 bp, Glycine max
  unsure (1)..(479): unsure at all n locations
gctgagctaananagacaagagtagagaatgattttctgattgtggcagtcactagagttaggaaagaatgtgataagctgaaagatatcaacatgaccgtggctgaagcgctagagtgggaaacaaaaaaagacagaaaggaagaatggagcaagaacaagttctgaagggctttgttaagcagtagtaatgagctcaaacttagaaaggccgagagagacaaatcaaggatggatagcatgatgttagaggataaattaaagagttttcagatttcaaagagaagtttgaaagagaaattgagcaagatggaagagaatatattgataatcattgatcaatgtaaataaaaagtgaaccaagctgctagtcataggaagatgctgaaagacgaataggcgaaggtgttggccttacgggttgagagggaagcgagagaagaggtgatagaattatttcataaagaaggcataaaatg

SEQ ID NO: 147394 - DNA, 419 bp, Glycine max
tcaacccttcttcggagccccatgaatggctgtttcgttgatgcgtccttcacccacgagtttggagtcgtccgtagtgattgcttagtgcaattctccattctcaatcctttttcgcagccccatgaattgcgttttcgatcatgcgtcctccacccacgagtcttgagccatgcgtagtgattgcttagtgcaattgtccattctcaaccctttttcggagccccatgaagtgcgttttcgttcatgcttcctccacccacgagtttggagccatgcgcctgaatgtgcttagtgcaatcctccttctcaatccttttcagagacccatgaatcgtgtttccgctatgcgtcctccactcacgagtttggagccatgcgtagagattgcttaagagattcttcattctctatccttt

SEQ ID NO: 147395 - DNA, 482 bp, Glycine max
aactaagcttagctcacatacctctctaatagctaagctcacctccttgtatgagaagctagagcttagctacacaccccctataatagctaagctcacccccatgagaaaaaacatgaaaataacaaaaaaagtccttattacagagacaactcataatgccccaaaatacaaggctaaaaccctatactactagaatgggcaaaatacaatgcctagacgaaggacaaacctattctaatatttacaaagataagcgggctcatacttagcccatgggctcgaaatctaccctaaggctcatgagaaccctagggcctttccttggatctctagcccaatctacttggagtcttctaaccaatgcccttgcggggtaggagtgcatcaactacatccttaacaagtatagttagttgatgagcaaatgaaagtccctcgtacctaaatcttccatataaaggattctcctgcatgttaca

SEQ ID NO: 147396 - DNA, 254 bp, Glycine max
  unsure (1)..(254): unsure at all n locations
aagaagactaattgaggaagacatggctaattaatgaagcacaatttttaacgaaagggtatctaaactaagccctcactagggataagttgatatttgtctagcctgttatacatctctattcttactgcaacttactattntagctctgcaaagggattcgggagagaaaatacataaattaggctcttctctgcatgggacaagagttagagtatactaatatatgcatgtttaattgagatattattaat

SEQ ID NO: 147397 - DNA, 458 bp, Glycine max
agttcagatgatgcaacagggtatggagctacctcattctctcctctaatgactatggcatcatttctggcgctcaactgttgagagttggaggccatcttctcaattaaatcactggcttcagcaggagacatgtctccaatggcttcaccactggcagcatctatcatacttctctccatattactgagccgccgtattaaaaatataggaacaagaagctgttctgaaatctgatggtgagggcaactggcacatagtttcttaaatcgctcccagtactcatacaggctctctccactgagctgtctaatacctgagatatctttcctgatggctgtggtcctggaagcagggaaaattgtttctaagaatactctcttaacgccatctcaactcgtgatggaccttggagcaagggaatacaaccagtcctctgcactctctctgatgaatga

SEQ ID NO: 147398 - DNA, 403 bp, Glycine max
aaaaagcctttctcccaaatgatgtgtccataacagcctcgagttggtgcctcccgcgaaggatatttatggtctacatcataaaaaaattaaaactaatgtactctatgatattattgaataagtaatctaaaattactttataataaaatagaactttgctatccacaataatattgagtatgattgtcttcgtaaatgataattcttggttctatgaaaactaaaattgtttaattcatgatattattgtttctaattgatttttttcacacaaaataatctcgagtaggattatcgctcgggaataatatttgtaatctttactataaaaaaaataaaactaatttaattacgatattattcataaagtaatagaaattattttgtgataataatatat

SEQ ID NO: 147399 - DNA, 467 bp, Glycine max
  unsure (1)..(467): unsure at all n locations
catgcaagcttctatataagctgaaccattttatatattattttatgctgagcgctacacagaaaagtagangctatctcttttatcttagtgagagtgatcctcctaaattcttgagtgattcaagaacaccctggctgtatcaaaggactttcacaacctttgtgtgttgccctcgctggaaagagtgattctttccttcctttcatcttcacccttgttctttcaaaccacaattccagaaaatccacctctgcccagaattatctcgtggccataactcccattttacgcactcaaattaagtgattcttgaacctaaattgactttcaaaacgagacctttcacctcgtttcggaatcatctcatttggagccctggagcctcaattattgccatttctatatatctgtccagccaccacttaacctacagtttacgctccctatcatccattgtatgccaa

SEQ ID NO: 147400 - DNA, 458 bp, Glycine max
  unsure (1)..(458): unsure at all n locations
taatgacccactaacctacaattttatttcttaatgccattaacctagggaattaacaaaaacttaatggctgaatgtaactgaaattgtggcaaccaaaagtcacccccaacagccaacaagtcagccaccatttggtctcccaaaaggctgatgcctaagatgccaattgcgcccttaatacgactngaactaaacctaactaaagcccttttagttgattaacccaaaacatatttttggtcagccaactttacaaggattgggccattatttagacagactaaacactctaaaattgaaacaaagtggtgtcatttagtcctcctccatttgggccatgatacaactcacaaccttggacttttctccttgaaacttgcgcttgtattcaaatagtatggacagcacttcgtgaagagcttccttggctttccttgctctacgccttgtcatag

SEQ ID NO: 147401 - DNA, 430 bp, Glycine max
ttgattcgatcattaactgaagatgaagcacagatgtttttgaaaaacatgcaattagcaagttctgtctattcttgaattcgcttcttgctgacagatattatatttcaaattctttttatgtctctatatttgacaatatttccaccttgtacccagctccaacaaatagattctgctttagacacacttttctgtggttgggcttgcaaggctcgtaaagatggtctgtgtttgtcttcaagtgtatcaagttgctgtccggcccagcgatttaccgatattgaagaatatactgttcaatcttcctgtacttctgcttctgcattgtctggtagagtctgctcggtattagctgaatcacatgggacccaacaaagatcagtcaagcgaaacatatcataggtgcacaagaatgaagatgtctctt

SEQ ID NO: 147402 - DNA, 437 bp, Glycine max
  unsure (1)..(437): unsure at all n locations
ttagagcgactgcagctgcaagctaatattatctgtaaaatataattattcgangaaanccatgctcacatggattggaatatatatactaatattagctttatttttattttatatattatatttttataatcttatatatttttatcacattattcaaaatctattttatgaagcaaatatatagtatcaagtttatctttaatgtatatttttttatataaattataatttcataaaatgatagtattgtattatctttttaatatttatatatgtgatctaataatggtattgttctacctatattaagatatttttctatttattataatagtatttgttattcatatttaactttacttaatcacgtacgaaattcttttagaagaattaaattatataaaaaaatattatcactaaatcacaagtattat

SEQ ID NO: 147403 - DNA, 466 bp, Glycine max
  unsure (1)..(466): unsure at all n locations
gtttcaatttggagggtctggatgaatactctattgaatcttgaaccttgaatcgagttttgaagacccnccctaatttattctattgatattctattatttaatgatttgtagttgtcatgcgtgttgatcgctgttgtattactgagtgtttttcatgtgtgttttaatggaaaaagtgtgaagtattgaatggaaattgtataattgtcaaaaagttgccctcatagattgaaatcttgaagtattactgagtgtttttgccacttcgataattcattttatggttgaatcgagacccaaaatttgtcttaatagtttcattgacatgaaaaatacaggaataaaaaattattttaaccaaaataacttatacacataacaatctaagtgccaaaaattacccttatgaattgaaatcttaaagtttcagtgaatatgtctcgctttgtaccacttcgttaat

SEQ ID NO: 147404 - DNA, 459 bp, Glycine max
  unsure (1)..(459): unsure at all n locations
gcttttattctaaccttgaaattcaatttattactcttgatttctgaggtctatgggataaagatggtcattgaccaatccctcttctatgatttgacccaattgtctagtgacggtgtaccatttgaaggtgcactaaatgttgattggaagtttgatttttctgtgcatgatgcctgccggttggtttgcaccaaccaagcggatatgaccggaaggctgcttgccggttcattggctcttgaaagccgcatccttcactatcttattattcatatnttactcctaagatcttcaaaccttgcacaggtttctgaagaagatcttatagtcatgtgggcctttcataccggccgataaattgattgggcacacctagtccgatatcgcatgcataaggcattgcgattaaatgctcctttaccatatccacatttaatcactttttttcttcaaaaa

SEQ ID NO: 147405 - DNA, 352 bp, Glycine max
aacttaacggctgactgtaactgaaattgtggcaaccaaaagtcacccccaacagccaacaagtcaaccaccatttggtctgccaaaacgctgatgcctaagttgcctattgggcccttattacagcttgaactacacctaactaaagcctttttagttgattaacccaatacataattctgggcaaccaactttacaaggattgggccattatttagacaaactaatcactctaaaattgaaacaaagtggagacatttagtcctcctacatttgggccatgatacaactcacaaccttggacttttctccttgaaacttgggcttgtattcaaatagtatggacaacact

SEQ ID NO: 147406 - DNA, 425 bp, Glycine max
  unsure (1)..(425): unsure at all n locations
tagtcgaagagaagttcaagtccatagccatcaaagtctgaaaagagtatgatgaactaagggatgtcaatatggccaccgatgaagccttggaatgagaaaccaagaaggcccgaaaggaagaacacgacccaaagcaaagttttgaggggctntatagggcagcaatagtgagctcaagctctgaagaggtgaaaggaatcatcacgggtcaaaggcatgatcttgaaggacgagctaaaggtttgccttangtcgaaaagaaatttgtcccaacagttaagcgagactgaagggaatatgtgggccatcatcgataagtgcaaagagaagctaaatctagcggcgactcacgagcaaaggctagaggatgagtacgccaagatatcagcagaaagggaagcaagggaaagggtaattgattc

SEQ ID NO: 147407 - DNA, 133 bp, Glycine max
cgagccaccaacacaccaacagacctccccacaagacaaagggaaagaacgaaaaccaccaccaccaccccaagccaacaaacgaccgcacggaacccaaaacacaaaaaagacccccccaacacccaaacgc

SEQ ID NO: 147408 - DNA, 67 bp, Glycine max
actaagcttggagaggctgcttcagtggaggattagaaagagggagttattttcatgtgtgggagca

SEQ ID NO: 147409 - DNA, 448 bp, Glycine max
  unsure (1)..(448): unsure at all n locations
tgatgatgaatctttttgcttactttgaggtcttctatgctctgcatagctcctgaccatctggaatcaatcatgcaataacaactacaattagtaactacttttttagtgacaatttagaaaaaaaaatcagcaaaatgccaattgcattgtctattaagtgtagtatccacctaatatgtaagtctaccaatagttgcctagggtgtggttgtactgggatggatagtaaatgtacaagaccacgtgatggctttccctcatctagcagaatgacatatgggtgcgaaaccttgtaaaaccaaggcaaatagttagaggtgcaagtccaaggatcctcaagtggcacaacatntgcctaaagaattatatattgttgtcactcacccatgcctaatcacaaagctgatacacaagagaaggaggtggctggcgtggaatgctctgt

SEQ ID NO: 147410 - DNA, 486 bp, Glycine max
  unsure (1)..(486): unsure at all n locations
tactcagctagggaaatccacccaatatgggcttatagaaacaacatttatctcggctaatttaaatngacaggacagagcatccgctgctntgttctctgggccaagtctgtaaatcacctcaaattgaaaccccatcaattcagaaagctagtattgttgatccgaggttgtaatccactgctgcaacaaatgttttaggctgctatggtcggtgtagaccttgaagctcctactgaaaaggtaatggcgccaatgctgaaccgagagtgccaacgccatgatttccttttcatacacagacctctttcttggtcagcattgtcaagggtggacaatcttgccataatctttcatgaatctcatgtattagcctgtgaggcccaagaatcctctcacttcttttgctgtacgaggaattggccaatccagaacagctngtactttcgaaggaatccatgttaactcccgagcagaaatgatgtg

SEQ ID NO: 147411 - DNA, 472 bp, Glycine max
  unsure (1)..(472): unsure at all n locations
tcttaagtcaccgcggctgcagctataaaagaaaaagcttttttgttatatactattaattagctattatcacaagggttgctccctgcctaacttcaatcattagttatttaataagttgttgcaaagcaaggaaaaaaatgcaacgaacaatttgtaattttaactttttaccatgtaaacctacaatttcacttaattcgatatcaattntatttttcttcaatccgaaaacatcttcagaacattgacagcatcaacgaacaacaaaatagcacgagtttcagctttcaacgtgctttatttaatttcgtaaaacgaaaactatgtcctaccggtggaaggatcgtaacgcgaccaaagcttggtcttcagcgtgtactcggcgttgaggaagcgaacccagacgccgtcatggcttncgtcggtttcgtcaacggcgtgcagcatcgagccaccgacaccgggcacc

SEQ ID NO: 147412 - DNA, 453 bp, Glycine max
ttccatttcttctggtgagccatatattctttgttattctgcttcctatgcttctttttcattttcttccatttacaaaagagttgttggaaatagttgtatgggtgtttaagataccatgaaacagccatcatcacgttgttgctcacttcgcaagtgaattctcagagtggatccttactagctcgtgaagtgaatatgtgatcactgatgacaatgcttttaattaattctatgattattatttaaatatattctgttatattaacaccatttaatatctcttatgcttggagaaatatgaattttatattttgtttaatcactcagatatctgattcttttaaaatttatttaatggcatgattatatctgtgaaaaaagcaattacttcgaatacattaaataacattggtatgagaagttgagattaaaatgtatgagattgagaat

SEQ ID NO: 147413 - DNA, 380 bp, Glycine max
  unsure (1)..(380): unsure at all n locations
gatatgtgaagatgatgttccaagtactttggatttggtccgaccatgccctcctgatttccagctaggaaattggcgagtggaggaacgccccggcatttacgcaacaagcataatgtaaacctttacggttntaaaagctctatatgtgggcctaggctttagagttttcattttgttaaggctttgtgtcttttggttttgaatttataatacaaggatctttcttcatctggtcctggtctctacccattctcattcatttgcatgtttacttctttntctaaaaaatggcagattcgatgacaagtcccccgaaggtactaatacctgtgacccgtctatcaacttcgagcaagaaatgaatcaaaccgaagatg

SEQ ID NO: 147414 - DNA, 465 bp, Glycine max
  unsure (1)..(465): unsure at all n locations
taggataagggtatggatcagtgcggattctcatttgtttactactaattgtgacaatgaagatggctcgagtattttcggtggaaagctccagttatctatttatggtccatggcctactcaatctttaataaatgaccaagttttacaaaaatcaaacttttgtttttctgaaggaaaaatcaacttattatttcggctttgattttaacattgttactcttacgtatcttgcaacagcgcaaggggtccagctccaaaatctagttgtggataaatctaaaattcaaatggatcaagtgtcattataaaatagacagttatgattctaggaatcccttctaaattgtcaatttttagactttggttatcacatncaaacttgttgttttggtttttttttttttttataggcaaatgttcattgttagtattgttaatctttcttagcacggattggtagta

SEQ ID NO: 147415 - DNA, 427 bp, Glycine max
  unsure (1)..(427): unsure at all n locations
agcttgccgcccagctcgcccaggctagctttgttttctttcttcanaagcagcagccttctggaggaatcttttggagggcccaattgggcctggttgctatttgcacccccctgtatactatatgcacccccgtttctatttttttgtaattctttttccgtaacgttacgaaactttacgaatttcgtaaccatatcttttttccttccgcaaggttacaaatccttacggattatgtatttactctgttttagctttcgaagaagttacggaaactcacagattgggcaaaaacacctcttttcgattcccgccacattacggaatttcacgaatcacgcaagcctgcttcctttcgatttctgagacgtctcgggacttcatttattgcatgtattaactaataatccccgaacgaaattgg

SEQ ID NO: 147416 - DNA, 432 bp, Glycine max
  unsure (1)..(432): unsure at all n locations
ataatagatcactgtgtattgtgtctactatcattatcatttgttctccgncattgaggtgccacttgagctgccaaggctctacacctttgggcgtatactttgaaagatctgtgcccctttttgcacatgttctgtgttgcatactatccggaaccatatcaaatttggactgatactgcctaatgaaggcaaccataaggtccttccaagagtggactcgagaaggttccaggctggtgtaccaggtaatagctaccccagtaagattttcttggaaggaatgtatcaacaattcctcatctgttgcgtttgcccccatctaccgataatacatctttagatggttcttggagcaagtagtcccttgtacttgtcacatccagctccttgaacttggaggggtgatgatattgggttctacggacaact

SEQ ID NO: 147417 - DNA, 414 bp, Glycine max
  unsure (1)..(414): unsure at all n locations
tcatattcaagagagagagcaagaatcagtcttttaagtctactttccctatacttttccctataattcttgaagggttatgactcagtatcagtatcacttatggtgttacattgtcctcattgatgtggtatcgagtattataatataattgtatcgcggaattatggtacatgttaagagtaatcaaaatttaattctatatactgtagaagctctcaactnntttgtgggtatatatattaatttcttgctttcgtggttcattgattttgtatacactgatcaatagagggtggacctttaccacttcactatctctatcatgctggatggaagtaaatcagtttggtagatgccacatctaaagttgaagcactcaaatatttgtgttgaaattaattcactttcatg

SEQ ID NO: 147418 - DNA, 386 bp, Glycine max
gacactcacatgaaaaatataaacaattgtttttctttttatcatactaaagacaaacagcgctgaagccagtgagcattcatccatacttaattagaaccgcaaccaaatgagcgtctcacatgatatggcaggatcctttcaaaaattctcaagctgtgttgagagtaacccttccattgaaatcaggctaacttgcagcctacacaaagaatatcagcacgaggaaaattaacatataataaaatacgacacacaaaagaatctatatatttgaatgatggacagaacatagaataatgccatacaggaagagtaacaaatattaaaggatcctaagatcagcaacgagccaacaaattaaaggaagaaaatacaactacaag

SEQ ID NO: 147419 - DNA, 270 bp, Glycine max
aagaacacttcatgataacaaagaagatgagctcaagaatcaaagaatgactgctaggagcaagaagaaaattgagttcaagaaacaagaaacagaggtcaagagtcaggtgccaagaatcaagatcaagatgcaagactcaagattcaagaatcacgagaagactcaatcaagataagtaagaaattctgtatcaaaaaccgagtagcacatggatccatctcaaaactagtttaccaaagagtattgactctctggtaatcgactacc

SEQ ID NO: 147420 - DNA, 479 bp, Glycine max
  unsure (1)..(479): unsure at all n locations
ggacctctaagcaccgcggctgcagctgtaatgtggcattttattcttatgtagctccattggagcttgaaggcctaagatcttcttcatcaatggattcctttgcttcttggaagatgaatggcaccggaatggagaaggaagagagaggacacgccactctaaggagaagatgagtctataagaagctcaccaccatataaggccatggataacagcttggaggaagaaggagatgaatgaagggagaggaagagaagagcataaaattttgtgctctaaaagagctctgaaatctgaaatttaattttcaaatgatcaaagttccaaaaaatgcacacacatgacctctttttatagcctaagtgtcatacaaaactggaggggaaattgaatntctattgaaatttacttgaatttgaattgaattgtggagccaattntgagccaaattcactgatatgattagtgaatttact

SEQ ID NO: 147421 - DNA, 470 bp, Glycine max
ggaactataaaactcagcttacagcataattattgcagattattatttctgattctgatgactgatgctcataatgttggagaagctgaagatctagaagatcaagatgttcaaagccatagtgcttcttctccctcaaaggcaaaatgaattccagagcccataatcaaattaaatgccatcaaggtggattctacatttaatgatcgtttgaacattgaagcagaatagaaccctccagctgcagaagagtaagttaggcataaaattcccactaatattcttgctcttgttcttgtcgttgaaacaaataaacctattatcaaacaaagtacgtagtaacaaatatctttcatcatgaccttatagttgggaacctattgtgtgagaacttctaatctgcccctaggttcacttgaggcttatgcacgatgcccctcactggcccagtataaggctttgagggacca

SEQ ID NO: 147422 - DNA, 412 bp, Glycine max
  unsure (1)..(412): unsure at all n locations
aaaacgttggtggtgactccgcgcattttcctttcttggaagacacacccgtgagccctcgcgtcgcccttccgccgaagggtaggtttcgacactcatgatagtctagcctaatcctgatcaagtatcgtccgcagattcctcttgttggactaaactcggccaggaccgcattaagacaaacatacaacaactaggttaccgtaccccaattcctcatgaaaatatgacaaactagccccatcctatcaagttctaagaatcagaccggtttacactgttgaatgatcctaanaacacatgcatctacatgatcaaggcaaaagcatggcagaatgaagttatgatagcacagtgaacacacaaaacatcagtnaataaataaaagaagatatttacatcaagtacctac

SEQ ID NO: 147423 - DNA, 480 bp, Glycine max
  unsure (1)..(480): unsure at all n locations
tctcagcttaactctgaaacaagggggagaatatgtgattgattgattagaagatagagcttttatgtgtgtcttgattttaggtttgtcatcatcaaaaagggggagattgtagaaacaagcttcatgatgatgaatcaatcaattttgatgatgccaaatgcccaagtgattgattcaagacttcaagatcaagcatccaggaatccaatccaagattcaagattcaagagaagaaatcaagaagcaacaagtcaagacttcatataggataagtattaaaagattttttcaaaaaccaaatagcacagttttgttttacaaaagaattttctcaaattttctaagttaccagagtgattactctctggtaattgattaccagttatcagtaatcgattaccagtgaccagtttggttttcataatgtnttcaaatgattttcacatagtgtaattgattacattatattagtaatcg

SEQ ID NO: 147424 - DNA, 416 bp, Glycine max
  unsure (1)..(416): unsure at all n locations
gacttggaggattcaatntgggcaaaattggatgagggaaatagtggttttcgaattcggcactttatgcagaattttgttgttgaaatgtgcagcaaaattttgtctaagtgcagaaaaatgctcgtgtatggctggttgtgaaaagggtagtacatatggggttctggacattttctagcagatcccaacggtcaaaatgtagacttatgtactagagactgccagtaaaattttcgagtcgatccaacggttaataaattggaacaaaggaaatgttactgtggtatttgtatgtgaaaagctgtgattttgagttgtgttttgggcagagttttctacctttgccctgttntgcttggttnntgtagtccatgatgattggatgtagaattacctggatgttgtggaagctt

SEQ ID NO: 147425 - DNA, 434 bp, Glycine max
  unsure (1)..(434): unsure at all n locations
ctgctctaaattacattgatgtntgattatatatattggttatatgccatatttgctctaagagtagtgtcccactggtaaaattaactttccaaatgtttgccttcgcaggaatggccccgaggaagcttgcctcaaagaggtccaggaaggacaaggcggccgaaggaactagttccgctcctgagtacgacagtcaccgctttaggagcgctgtacaccagcagcgcttcgaagccatcaagggatggtcgtttctccgggagcgactcgtccagctcaaggacgacgagtatactgattttcaggaggaaatagggcgccggcggtgggcaccactggttactcctatggccaagtntgatccagaaatagtccttgagttgtatgccaatgcttggccaacagaggagggcgtgcgtgacatgagatcc

SEQ ID NO: 147426 - DNA, 396 bp, Glycine max
  unsure (1)..(396): unsure at all n locations
gaagaggcancnccaatcacctttccttcttttccattccgnaggcatagatcttcaagaagcaaaaggctctattgatgaagaagatccaaagcttacaagctctatatggagctacatcagnttatgagatataagttgaagctgagtataatatttgatagatatcatntcttgggggatcaaagatatcatgcatatgttacaatttagatgcaaacaaaatttgcatagactaaccacccaatttgggagttgcaacaacattatgaactaaaagagaaaaatagtccaacaataaaaattacctttgatagaaagagcgaaccaattatgctgatataatntgcaccactccagntgcaagtgccttggctagaaagtagttccagtgcc

SEQ ID NO: 147427 - DNA, 345 bp, Glycine max
  unsure (1)..(345): unsure at all n locations
aacaactcaaaggtttgtagtgtgtgaactccgaagaagctgatcatgagaattaaagattgatagaaatagaagagatagaagacaaattggaggacatgatttttgatatgtccgcaaaagatgatgaaaatcaagctttgaagaagaaagaacaagatgcttatagcgagttagaagatgctaggcaacaaattattaaagtaaatgctctgttatgagaaaatccttattctaatccttatactaaggagatactctagntcataagtttattaaaccttttactctaatttttcaacttcacaaagaagaattcattattaacttttactttgcatcata

SEQ ID NO: 147428 - DNA, 213 bp, Glycine max
  unsure (1)..(213): unsure at all n locations
tatatatnaaacnagggctcaaatcattcgtnnattaatcactagacaatagctcttgttactcgacgacaaaactaaaaccctntatatatatatacatatatatatatatatatatatatatatatatgatcctcctcaatgccaaaagtatcataaatntatctaacacactactcaacctcctttgagagtgatttactgcattctcat

SEQ ID NO: 147429 - DNA, 378 bp, Glycine max
  unsure (1)..(378): unsure at all n locations
aacaccatgatgctnagnnntaattaattaagcaaagagattaaaccccctccgttgatcaataaagaatgatacaagttaagcactacttttagaggcaaatgatttcttgttcaaccaatcaaagcttttaaatgtctttcgtagaatcttaacatcgaatcgtttctctttttccaatggaaagaactttaagttattttttatggattggaagagaaatgagagtattggantgtcagacttgagcaccaaataacgctactaaaaaagatatgagaaaattctaagntactgattaaatataatagaatgttctcttatcatattacttttaaaatgatcatatcaaacatagaataaattaaataattctta

SEQ ID NO: 147430 - DNA, 402 bp, Glycine max
  unsure (1)..(402): unsure at all n locations
ctataganaacncaagcccccatagaaagttcgnncctaatttctctacaatagcatctcctctcaatgtgctagagaagaagaatgaggcatttacctgaggagaaaaacaagatcaagcctttgcttttctcaaagaaaagcttactaaagcacctattctagctcttcctgacttttctaaaacttttgagctagaatgtgatgcctctggagtgggagtaggagttagattggtacaaggagggcaccttattgcttattttagagaaaaacttcatagggccacactcaactaccccacctatgataaagagctntatgccttaataagatccctccaaacttgggaacattaccttgnntccaaagaatttgncattcatagagatcatcaatcac

SEQ ID NO: 147431 - DNA, 447 bp, Glycine max
  unsure (1)..(447): unsure at all n locations
tcctcacagnnactattnctctcatgcacataagtgtttcaagtgttttcttcatataaacaaccaacacaatncccaacatttgcacttcatctcattccatacactcatgtacacacaatgaggatccaaagagactctgttcgagcttgaatggggttgggctataaacaaattcatggcttttcttggatgcaacattttggttttagaagagcattctctatttggatgcaaaacctttcttttcctgccctcaaattcttcttactgcaattatccccatattagcatcattcaataatcccacaggcatcattgcttcagaattatttgtcatttgttgcacattttcatcttttctttttgaagcagattagaagcatagttgngccattttctacagnnttctttaagctgcatgatgctgatataatcatctaatga

SEQ ID NO: 147432 - DNA, 299 bp, Glycine max
  unsure (1)..(299): unsure at all n locations
cagaaaaatatcagncgtggctatattacgaccgatgtcaggtatttttgtttcaattcaatccctgaataattnttggatattgnccaacaggaaatgtccgatcggcgtcatcaagagatgctctgcttttattttagacctgctggaccggtcatctttcctggccgacatcgactatcattctttttatcagtgtcggagaataaagttttttggccgaagagggctgatgttcttctatccgagtaaatgagaacacgccagagtcggccgaaacacatcctcagttgagctcg

SEQ ID NO: 147433 - DNA, 422 bp, Glycine max
  unsure (1)..(422): unsure at all n locations
tacactactctagagntctncaagactttctatattatttacactnatgnagaaaactctataattttctagatcctctccaattaaagaaagatcccaacaaacctataccactctgatgcatcctcctaaaagcttgcaaagcttctcaatacttggctggncaatcttgcaaagctcctattctactaggaacttagatcaacaatattatcgncacttaaaatcatatatcatgcattagacctatgggaaatccttgcatgaaaacctcctaattttataaattcaccaacagcaagaaattcaagaaaataaattatatgaattttaataagccttaagacactagtcttcagcccactttgntttaacaccaaagcaattaccatggntgctcataaatccatatttacagaaca

SEQ ID NO: 147434 - DNA, 437 bp, Glycine max
  unsure (1)..(437): unsure at all n locations
agcaccctgagatcccatttatacacctattgttatnatancgaagcctggactaaagtattctagcaccaaaacaccagattcaaacattcatggcttatttactttaagactaacacagtctacaattttcccaataggtttcttcaatggagggattattttggcccaatagcagaaattttcccggagcaagtccaacaaagatatgctcaatttaacaaactgtataattcccaggaatcacgaattttggccgatctcaaatatttttctagttttgctctatcttggattctctctaagcaatacaaggaaataaaaccttcccatcacttcagagacatgccttcgtcaagtggtggacacaattagatgtatccaaagcagagccagagcaagtcaaactttggttcaaagctcatccagagctactc

SEQ ID NO: 147435 - DNA, 457 bp, Glycine max
  unsure (1)..(457): unsure at all n locations
cttagaagaatcaagaatcagaagggcaactctctatatgttgtctttctncatgaagaaatcaaaaccttaaaaactacattagccaaatntgataatggaacaaataatattaacaaactattaagatattgtagaagttcctcagaaaaatttgtnaatggaaatgatgagaaagtatatgtncatgatgaagacaacattatctattacttttgtggaaaaactagacacatgacatccagatgcaaggatcgaccaaagtaaggagcaatcaataccttcatggctaacacaaaagatcccaaaaatatttgggtacctaaagaaaatgttattcttattgcaaatgtccttgataacaagatagaaatgcctatcatggtacctggacaatggntgntcacagaacatgataagagaaaagtgtatgttccaatgcctgactcctcatcat

SEQ ID NO: 147436 - DNA, 398 bp, Glycine max
  unsure (1)..(398): unsure at all n locations
tatatacacatacataagctttaaatagnatagnatggactcacatgcatccattaatttttctgtcatattctgcaagcattactaaataattttcattatactggaaagaggcaacaaaacattcaagagctagcttggaatgaatatgttaatgtagatcaagtattcttttatcacatttaataattaatatacgcaaaatttattttaaaaaacttctgatgaacacaaatcagttacgtcgaaatacaaaagcaacacatgttataaatcctaattaatctgatgcaatttccacaaaattttcttatttaattaaatttcttaaaacactagctaaagaatagnttcattgaaaatgttattaatgcattagcattgagattnttaataca

SEQ ID NO: 147437 - DNA, 399 bp, Glycine max
  unsure (1)..(399): unsure at all n locations
aatngaaagaataaaagatggaaagaataggaactttgaagagtatctcataagactttcattcatcaaagntacaacaagaggacacatgcttctatttatagactaagtagcttccttgataagctttcttaagaaaacttccttgagaagctttcttaagaaaacttccttgagaagcttctttgagaaaacttccttgagaagctagattttagctacacacacccatctaaaaactaagctcacctccttgataagcttccttgagaagctagagcttagctacacacacccatctaataactaagctcacctccttgagaagcttncttgagaagctagagcttagctacacacccctataatagctaagctcacccccatgacacagaaaca

SEQ ID NO: 147438 - DNA, 454 bp, Glycine max
  unsure (1)..(454): unsure at all n locations
tgctcatcactactagaagataagccttctatttgnntcatatttacctcnnnnnctaaancaccattaagaaatgttgntttcacatccatttgttgcaactcaaagtcaaaatgaacaaataatatcaacataatacgaagagaatctttctcaatgttgcctaatgaatcccttttggtcttaaagacctatttacaaccaatggcctttgccccattaagaaactctacaaagttccaaacttctttactttgcatggaatttatctcatctttcatggcatcataccataaatttgactctttacaactcatggcttgatcaaaagtttcaagatcattttcagctccaatattatagncaaattcttgaaaatatacaatataatatctaggaatagctgattntcttactctagtagaccttcttaatgctgcatcaacattttctt

SEQ ID NO: 147439 - DNA, 463 bp, Glycine max
  unsure (1)..(463): unsure at all n locations
agatagaatctatatgtataaagaaatcttatnaaaggatttctattntatgtaaaggctataaaggtacaatgacaaataatctgaatgttgcaataaagcacataatcaatgatgatggaaatgtggacacttttgtcagagaaattacaagcttatctcatgtcagacaccctaatatcagcagntgcaaacaatcacagnttacttggagccaacttaaagaggaattaaacaaggtataaacttaaagntcataaaaaagttaaataatgctcaaaataggcaatcctagcttaaattttaccctttccttgatgtcacccaaagtcggcaagtacaacttatagaattcctctctgaatgcatccacaaacctaaataaagtttagaaaccatcaagaataagacaattagaatctggttgatttgataaatttaggaacaacaagaacatctacta

SEQ ID NO: 147440 - DNA, 410 bp, Glycine max
  unsure (1)..(410): unsure at all n locations
tgaaagaataaaagatggagagaagtggaactttgaagtgagtctcataagactttcattcatcaaagtacaataagagtacacatgcttctatttatagactaagtagcttccttgagaagctttcttgagaaaacttccttgagaagttgctttgagaaaacttccttgagaagctagagcttagctacacacacccctctaatatctaagctcacctccttgagaagcttccttgagaagattcctaaagaagctagagcttagctacacacacctctttaatacctaagctcacctcctatagatgagaagctaaagcttagctacacacccccctataatagctaagctcacccccatgacataatacatgaaatacaaaaaagnccctactacaaagactactc

SEQ ID NO: 147441 - DNA, 309 bp, Glycine max
  unsure (1)..(309): unsure at all n locations
ggttttatttgaatctttattttttagctagattgaaacttgagaatgacttggtttaacttgttggcttgattagatctaaaattaataatcatttatgcnncngtatttattatattaaatatagatatagaattagntatttgaatttaataacatacattatgtntatataacttaatttctaaatttttggtaaagaatactcaaacttgagacttttaatatattttaagaacaaatttgaatttcttattatatcaaagggatgttagatagaagagaaatatgtnnaagaatcatgattct

SEQ ID NO: 147442 - DNA, 469 bp, Glycine max
  unsure (1)..(469): unsure at all n locations
atcactaactcttcaagnaaataaccagnnagggtgtcatacttgttatccaatnncattnncaactcactcatttaactaatagttcaaatggactgcaatttacctcaccttacaccacttaaaacacctcataaacacaactcaagtcactctcattttaaaatcacatggctgaattcacagaaaatatgcaattacaaaggctaaaccaattcatccattttattcatgattaagctttgatttatttgacacaactaagctttgatttatttggcatctcaactaatgggtactggatgtcaacagaatcgcttgaaatagcattgaagtcaaaaatcttgattttctttgaaactcctcctgctgcaatgtgatcctcatcacggncaaaacttataacacacattacattggcagaactaagcaaatctctatttcttaatctgccacactcttcaaactt

SEQ ID NO: 147443 - DNA, 354 bp, Glycine max
  unsure (1)..(354): unsure at all n locations
ctttttcgntcttagttttaagcttctcttcttcttttagacactttttcgttttggaataataattctagttttcttcattttctactgattaatggaaagctaagtctccagcattgctttctcttgatgatcaagcacaactctctttgaaggtctattattactattaaattctgatcagnttttcctcttcaccaattagtctgtattttttgctattaaaccatgcatgcttagagcttgattaattgtctttgcgcttaatttacattcatgcttaatgtcgntcatgattaattggagtatgtgttgcttaatcacataatgaatgccttatgttaaattntgctt

SEQ ID NO: 147444 - DNA, 358 bp, Glycine max
ctcctctgctgaccaccatacagacctttgccattccatgcagcaacctggagcaatagagcagcctgaagcttatgctgcaaatatttacaataaacctcctcaacctcagcagcaaaatcaaccacagcagagcaattatgacctctccagcaacaaatacaaccctggatggaggaatcaccctaacctcagatggtccatccctcagcaacaacaacagcagcctgctccttccttccaaaatgctactggcccaagcagaccatacattcctccaccaatccaacaacagcaacaaccccagaaacagccaacagttgaggcccctccacaaccttccctcgaagaacatgtg

SEQ ID NO: 147445 - DNA, 399 bp, Glycine max
  unsure (1)..(399): unsure at all n locations
ntnngaatnaatgatcaaaagatagactttctttgcgttttcacananatacatnatgcataagtcccaattatccctatattacaaaagctatctccattagttattatgatataagagaaatattcccctatttatttatgatagataatcatattacaatcaaaacaattaattattactattttgggtaacacataaataattaggaagagagtctagcttagtcgataggagagaatagtataaatctttaatattaatctttaattcttatatataaaaaacacaaacaattttctggagaaacatgcttattacttgttagataaaaagaatcacattttatggattctaataaggctattaatggaatctttagtagtattagaatcttct

SEQ ID NO: 147446 - DNA, 428 bp, Glycine max
  unsure (1)..(428): unsure at all n locations
ncagctnatcatgaggcattatatnnagagcttaataatatttctttttatnnnagacnnagcgnatcaaataactatatgatttctcatacctaggnttcctaggagactacacctcgtatgatgcagatntggatagcagtggagttcttatatcacccttgacctatatttttgatgaagaaactccaagatggcgtcagctcctatctaaacttgggctgtagccatttatgatcaatctatggagtcatttgtggatgtttcgtttttcagatacttccaaagtagatgagcattaaatctatggagaaagctgcaaaagcctagtaccccaaaatggaagacgtagataactaaaattgcacttttagaatagaattnttggagcaagcctgtatcttcttcctttcgntctcttcataaca

SEQ ID NO: 147447 - DNA, 444 bp, Glycine max
  unsure (1)..(444): unsure at all n locations
gctagagaagaagatgcatgcctagcaggcaatcttcttgtttcttgtngnnnnaaganaaacccagaaagaagcatttctttccctcttttcttaaaacttctaaaccttgatctggttttagttcctaaaatatggtatgtgaggacaaagtatgtctttggaaacccacggtattgcaatatgttaatacaagtataagaagtagagcttggctccttttgctcagagatcactgatgactgatattgttctaatattccttttatcattttggctttcagcttttaggcatcaaacacctaaatctctaaatacaatatacgctctttgctagatttcatgtgacaacaacacattctgagtgaaacttacatgatcccatgcggaaacattgtaccgggcctcagtgtggaaagagatctgccaattatagatttgact

SEQ ID NO: 147448 - DNA, 283 bp, Glycine max
  unsure (1)..(283): unsure at all n locations
ttttattacttttaattcttacaaggnacgtatttttagtcccgctaaatgatgctgatttcatcgttaatttttaaaacacttctggtaacattctgaatagagaaaccgtcntatcctttaaagcattctcgaaatctaatataaacagtgttatttgcaagaacttaaagttaaaattatataatcttcgcaaggactaaaaataacaagcgctccattataaagtggagcatgaatcttcacaactcagatgtgaatcccgttaaacaaacaaaaacaa

SEQ ID NO: 147449 - DNA, 397 bp, Glycine max
  unsure (1)..(397): unsure at all n locations
tcttccgctgtagctccatggctaaaaatcaccattgaagaactttattgaagcttaaagatccagccttcatagaagcttctcaagcaagcttccatcaacttctaacatgagcaacactacacaaatcattcacattagccccaaaataatgtgtacatgtaatcaatatccaactaaactttaacagagagaaatttaccatttgcataatcattagttagtcatcctagcaacatccttaaattagttttactaagaacctcaaattaactttcgcataattaataattagncttactaaaaaaaaccttaaattagnctcactaacaaacttaaattagcatttgttgaaacattaattagtcttacaagcaacaaccttatttaacatttt

SEQ ID NO: 147450 - DNA, 455 bp, Glycine max
  unsure (1)..(455): unsure at all n locations
cagcagatnnttagaatgacccactaacctagaatttttataactttttgccattaacctaaggaattaaaacaaacttaaaggctgagtgtaactgaaattgaggcaaccaaaagtcacccccaacagccaacaagtcatccaccatttggtctcccaaaaagctgatgcctaagttgccaattgggcccttattacaacttgaactaaagcccttttagttgattaacccaaaacatatttttggtcagccaactttacaaagatagggtcattatttagacaaactaaacactctaaaattgaaataaagaggagtcatttagtcctcctccatttgggccatgatacaactcacaaccttggacttttctccttgaaacttgagctagtattcaaatagtatggacaacacttgttgaagagcttccttggctttccttgctctagccctt

SEQ ID NO: 147451 - DNA, 409 bp, Glycine max
  unsure (1)..(409): unsure at all n locations
aaagcnccaagatcaagatcaatncatgataacaaagatgatgatctcaagaatcaaagaatgagttcaagattgaatcaagaacacttcaaaggtcaagaggaaattagattttaagaattaagtttcaagattctagcttccaagaatttagatctagattcattcaagtatctagagaagactttatcaagataagtattaaaaagtttttttcaaaaactgagtagcacatgaatttttctcaaaaccttttaccaaagagttnttactctctgagaatcgattaccagattatatgaatcgattaccagnagcaaaataattttcaaaaatctttcaactgaatttactatgttccaattgatttcaaaatgttctaatcgattacaatagtttgggaatcgat

SEQ ID NO: 147452 - DNA, 357 bp, Glycine max
  unsure (1)..(357): unsure at all n locations
cgnaacggattgacgatgaagaccaaaagcgactatggcaagaggagccgnagatcaagactgttatgtcttttgaaatatgaatcgctactatctaagcatcgatgttggtactctggaataagcaggcagcaaagaggttgatccaaatgaataagttcacaagaaatgatcgaagaatagttntaagagaatgttaacagggnctaacacttatagagaatcataaaatatagcgagggaatctaatgattgtctacttataacgnntaattaataataaattgagttagaaaatgtaacaaaaaaaggagcgtgnnataaaaaatatgttgntaacacaagttctaattatag

SEQ ID NO: 147453 - DNA, 471 bp, Glycine max
  unsure (1)..(471): unsure at all n locations
aagccccctaaacctatatagaggtcatatatatgcaacaacctttcattttnaattctttaagnacannaaannnatataatgatncatgtggaacctcatgctacatccatcctttttggcatcaagagttaatctttcttacgaaacaataaccataaccatagtccttgaactctgtatcataactcactaaacttgtataatcaccctactcaaaccagccacactccacacatgacacatatcaacacaacatcgcactcgcaccacactaagaataaattnttaaaaaatggacatttaaaaatgaatctagtcaaaaataaaactgaatctaacatgtcctagaagtctctcagaaagacacaggttttctttattatattacaagcctcataaatggagaaatgcttggagtaaatgctatcatgagagttaagcttgaagccgnagnatgatctaccagct

SEQ ID NO: 147454 - DNA, 459 bp, Glycine max
  unsure (1)..(459): unsure at all n locations
ntcactntntagtttctcggaggagcaatcttgtttcatttttcttaccttctctgggagatgcgtggnttctctttccagagaacgttagccaagaagtagcccaaaaattccattagttatattggagagaaatgttttgtagactgtggatagaaattaaattctttgaatatcatatgaatgtagcgctatgttctatgaaagccaccttttggatttcctcccacttcatctctacgtgcttggaggagttgntattcaagaaactaagaaagttcttgaatttggggaatcaaataatattaaaaattaagagttgntgtagaaattaagactgatttattaaaacaaaattagaggcccttacaaaaatcatatttccatgtgcaacaatattcaatattagagcctcttatttgaggtacactctagtggatatccaactaatatattact

SEQ ID NO: 147455 - DNA, 349 bp, Glycine max
  unsure (1)..(349): unsure at all n locations
tccatactttcttcatctgggtttagcttgctataaaaatctagctaaaattagtcgnttgctttcagcaagagctttagcttaattatcaccaggaatttatttggcagncatggattattcatcatggatgattaacacttccttggatctcaacattaatccccacaagcttcatgaagaacttcccgtaagtataaacatattgggcggaagatcttctgagaaatgtttccctcagaataataattctttcttcttttcttcttgagagttcatttcagaaaaaagaggaggaaaacaactttctgtcattgaatttggaggtgaagaaatcttctgaaaacaa

SEQ ID NO: 147456 - DNA, 454 bp, Glycine max
  unsure (1)..(454): unsure at all n locations
tcttcttcgagtcatggctcgtagncgctctattatctctgtcttgatgctgnncgnnagggccttgnttctgcagtttcaggcccagagttgagaactcaaagagattcctatcaataccctctcccgcgaagaccaccttgtcctcaaatgtggaaaagtcgcgaacttctgaccattgtacccaggtggagtcttcaagaagtagaccttcccattgcactagcacgagtcgtattggaagagatgacgaagagtcaagcttagaatccaaaatgcacaaatggcgagagacaggcttctgggcgatgaattgtaataggaagttgtcattaggagagggtggggaaccgagatgttctcgcaagagcgaacagtgaaatacaagatgaatccttgcctcctcaggtagtttgagtttagatgagacttggnccacacgttcgattatctg

SEQ ID NO: 147457 - DNA, 449 bp, Glycine max
  unsure (1)..(449): unsure at all n locations
agacacaagaatactaagctagctcacttggagaaagaaatatctctgttactcttatnnagnagaggagagaggaccaaacgttngaaaaacaagaaagaaaaaaacaaagatgaagagtaattgccagaccttaatcttttttaacagctgctgtactcgaagctccttttcttgctttaatatattccacaacagataaaagagattccatgatgatgctaaatccaaaaggaccccggtatttttattaaattantaagagaaagtccagagaatcaaaagtcatttaagcaaagnagcttcatcaattattactcttttaatggccccatcaaaggaagatctcacaaatccaaaagcagcgaaagaagatgagaagaatgtggcctcaagaatcacaaaaagagaagcaaaaagaactcgtcaacatcccaccatagagaata

SEQ ID NO: 147458 - DNA, 358 bp, Glycine max
  unsure (1)..(358): unsure at all n locations
taaattctggctgaaattatcaatcatacatgttctctcaacaatgcttcatttctgaacttaactcaagctaacattagttccctgtgttcgttactcggattcatccgttttaattnttaaatacttggcgatccgagacgctttccggcaaaccgaatttcccttgaatatatttgtacgaagaaaaagtggaacaaaaagtaaccgcaagggaaatccaacaatgtatttatagcgctgctgctggggaactaagtagctagtagagntaagntaagntgtgcagcattgctttatttttgctctctttgatttatagattcttctgactaacatagnagntatagcacattca

SEQ ID NO: 147459 - DNA, 438 bp, Glycine max
  unsure (1)..(438): unsure at all n locations
tctaatccaaagatcatcnaggaggtgtatctccttctttctggctcattccttagaggatggcgcctcctctcacctcttctcctttgtcttccgctgcatctccatggaggaaaatcaccattaaaggacctcattgaagctcaaagatccagcctccatagaagccccacaagcaagcttcgatcacttttgctcctacgtatcctcaatttgagatgaggaactcagacctacgcagttcttgataattgagagactaaaaatagtctcggagttttcttcactaaaatgcgaacatgcttttagaaagagacaaaacttccaactgatcagagcaacatatgctttttggatgaaaaacaatgtgtctatcggggaaagagagtatgctgatgaaattttctcctcattcgaaatgagattttggatgttagc

SEQ ID NO: 147460 - DNA, 456 bp, Glycine max
  unsure (1)..(456): unsure at all n locations
cgagacacataaaactcagctaggcttgatttcctcaatctttttaagctttgttctttatactaggccttcatttaactgtctttgggcttggcggccacgctcaacaaagtactttcgacacctactgtacgttgatttcaccaatgctgttatgggaatgtagcgacaatcctttaaaaccttattgatacattctgagaagttcgntgtcatgtggccatatcgacgtccttctctatcgtaagccatcgtccatttttcttttgagatgcgatcaatccatgttgctatggctggactcagttcacgaaatttttctaaattttgataaaaaatgtgcttgcaaagagagtaagctgcataaaattagttatgaataacaatntaaagcataaatgataagaaaataaacgtggccatcaaatatgagattttacncaatttcttcaacat

SEQ ID NO: 147461 - DNA, 408 bp, Glycine max
  unsure (1)..(408): unsure at all n locations
caaaaagcatgcgaagagagagagatncctagagctattcccttctgttatcttacataaaaagggaaaagggggtatcgnagctaatgctctttctcagcgtcatgcattactttctatgctaggaacaaaatagattggtcttgaatgttcgaaaagcatgcttgaaaatgatgaaactttaggagaaattcttaaaaattgggaaaaattttcagaaaatgggtgctttagacatgaaagctttcttttcaaagaaaacaaattgagtgagcctaaatgttctactagaatatctgctaggcatgaagcacatgaaagaggttcaatggggcattntggggtccaaaagattctagaaacattacaagaacattnttattggcctcatatgataaaagatgtgca

SEQ ID NO: 147462 - DNA, 271 bp, Glycine max
  unsure (1)..(271): unsure at all n locations
atcctcaaagataaatacaacgctgctctagncagcggnatttggaagatcacaaacttcactgtaacaaactcgaaaaggctctaattattcgaaagcagcagatgctcggggtggatgatcatcaagatatttttcaggaagttggccaatggatgttgcattataaccaagatataacgtgcgaagcttcaaaggcatgttcctctatctcgaacctcacgagaggccctctaacacatatactacgaaggatggaaactggtatatt

SEQ ID NO: 147463 - DNA, 417 bp, Glycine max
  unsure (1)..(417): unsure at all n locations
gcccgagncatncatccctatgagaaggagtctgtattatcttcgttcanaanngccattccttggattataagggtgaaccaagctcatgcttttacaaaaaagttcatcaagtcaaggtgaaatatggaagtaaccgncttgcaaaattggggcaaaagatgaatcgagtcacatcactgcttcatctactgccaaacatatttaggattattgatgtccttgttacttccagattcaccttgacaaagatgtcatggaccatgttgaaaatctaaattgattcaaccccataccttgcgtaaaaattcgcaatacttcaattgtacatcattcgcatgcatgcatgcttttcattggttgcatttgatcgcgcattctttccttgaaaaataaataaaaatgaactctatcatt

SEQ ID NO: 147464 - DNA, 445 bp, Glycine max
  unsure (1)..(445): unsure at all n locations
agctaggaaatganncttacaaagtattcgataatgtgtttgctctttcaagccagggtctgaaaaagcaataaaatgacctttntgccctcccattagggaattttccacattcttatcgaaacatcgaataatattctatcttgcgcagcaataggagtcgaacaactcaattcggcaagggataatcaaaatgttggcgaatgatagtccccgaacgaaattagggtataacagttgcccctctttacttggcttttattggaaataaaatggaagtaaagataaggacactaatttcgttcgagcaatcttgttattcgaccagagactggcgaagaccaaagcagagaaacctgtcaaaagagaaaaaagcatgaagtattgagagtaccaaaagacattgaagtctttgaatagaaagaatattgtatagtcttgacaa

SEQ ID NO: 147465 - DNA, 456 bp, Glycine max
  unsure (1)..(456): unsure at all n locations
agcnnagagatcgaccgcaagcaccanagaaagatgacaagattattacaccctactatatgaccaaaagaaactnncttgatnnaagatcattgagagatgccatgggtttgncgatctcactaaaacttgatgacatgggccaatcccgaaaaaaatttatataacaaaggctaccctaggatttgaaaagaatcctaaagagtttgcatgagcgactaacatcaggagtaccctactatcacaattgtatttgggcatcttccatgagctcctgagtgaataagtttgcttctcaaatgtgcaagagcaaacctcgaagcttcttcttctttttcttcttcttctttattttnttttacaatcactagagagcggagtccattctagaatccaaactcaaaagcaaaattagncattccttgatccacatggactctattgagcttagaacat

SEQ ID NO: 147466 - DNA, 384 bp, Glycine max
  unsure (1)..(384): unsure at all n locations
accaagctagcgcaaggccctccatataaaacgagacaataagcaagtgttcatgatcagacatggaatgataatcgaaaaactgggagatcttgaagattcatcctccgatccatcaaagcggggtacctccagcttcattccgnggggaagaagatggggagtgtccgttgagtggtctcgagaaagagcatcctttgaagaagctcatccagcttggtagacatattattttgagtagctagaaagagaagctggttggaagtgagctaggcgataacatccttggatttcgaataagaggaatcagccattgatgctcaatgaaagcaccaaatatgttaagtgcaaaagaacaactcaagcatggatcccggattttga

SEQ ID NO: 147467 - DNA, 447 bp, Glycine max
  unsure (1)..(447): unsure at all n locations
acatagaaactcagctagactaatnnatagagtaatcncacatatagtcatnattctttgannngaganagaanncaagtggggaagataaataaacagagagagataaagaaagaaagatgggatgagagaagattaaagaaaagtggattttctaactaagaatctagctgtctgctcgctatctgtatcttgagtaaaggcataaggatagaagttactagaacagagaggagagagagaaaagaaacaggtagcagagaaaccgagcactgcacttcttgattatcagntcagtctctatctacaatacatcagccgntcactatttattggcagcaacccaatggntgacagttataaaatcctaaatgataatagctgcccaactaaccaactaacattcttttcttatttacatatcagattttatcataaaccagacta

SEQ ID NO: 147468 - DNA, 350 bp, Glycine max
  unsure (1)..(350): unsure at all n locations
tagctcacataggaagagaggagtattattacttgtnnctcttctntgnagaggagagaggaccaaacgttagaaaaacaagatagataaaaaacaagaggatgagtaattgccagaccttaatcttttttaacagcagctggactcgaagctccttttcttgctttaatatattccacaacagataaaagagattccatgaagatgctaaatccaaaaggaccccgagatttttatttaattagtaagataaagtccggtgaatcaaaagtcatttaagcaaagtagcttcatcaattattactcttttaatggccccatcaaaggaagatctcacaaatcctatagca

SEQ ID NO: 147469 - DNA, 438 bp, Glycine max
  unsure (1)..(438): unsure at all n locations
agaccttagattctaagcttgcttctacatcaaggaggatcgcgttatttggaaagtgtcatctctgggagnaatacccgaagtaagaagccgctatagactactccacaccatctgcaaaagtccttgtcaaggatttaactacaaaaatcaatagntatgtttcattttttttttctgactgcataccactttctattagcatgggaaatgcaattaagtttataaagagttgtattgccaagtagcctttgagagatactgaatctgaagcaaaagcagctctttgttcagatattaatcaattcatcaatgaaaaaataattcttactgataaagaggttgcaggacatgttgcttcnaaaattaaggatggagatgttcttcatacatatgaatcatcatgtgtaggagagatgattcttttatatgcccatg

SEQ ID NO: 147470 - DNA, 288 bp, Glycine max
  unsure (1)..(288): unsure at all n locations
ggacctacatgcctgatctcaaagccttagctttcacgcctctccgtcagcataaagaaaatncatatagggactatcccaattgtgaacaaaataagatagtttccatcttcctatgaaggtattcaagtctagtatcaggaagaatattcaacagtacgcccaccctagatgagcaccacactggctcaccttaagaagaatatgtagcatgaataacatccagcagnggggcaccattaggaagaagattcatgcactaccatacactgccataaaatcaggtag

SEQ ID NO: 147471 - DNA, 373 bp, Glycine max
  unsure (1)..(373): unsure at all n locations
tttaacttactatagctagttcttggtatattatgtctataaactagncattataagatttttttttacacagntctcacattttcattcttattcccattgtcattctcagattctctgattttaattntaaatcttttatttattccttggcatataaatccaaatcaatttaattgacaagcttatatgaatttgttacaaaattaccaacaatctccttctaacaagaatttgcaacatcctcttccattgtttgcctacatgccactaccacctttattaatgagcaaaaattctcataattctcctcatttcattttgaacttggcactaccacaaccaccaccagtaatttataagcaatcccttt

SEQ ID NO: 147472 - DNA, 460 bp, Glycine max
  unsure (1)..(460): unsure at all n locations
ncaatatgatcatatttagagaagaagagtcatgtccttactttcagctttctggctaactggncatgtcaataagataaagcagacgtgataaaagttcttttgttggaaaaagacgaggatgatatatgaattttaaagagttctattttgttagaatcatgatagctgaatttaattatattataagcctttagaggtatagaaaagtgaactgagttatatttgggttgaaaaattattgccacatcaagtttaattctaacttgcttttctgaattccataagctcatttaaatatttgaatatgagaatgcattattttgtttactgaggaagagttggctagaggagatccttggcacaatggcaaggttctgcatcaatactaggagttcaaatgtttctagntagagaaactacccctgtgctctctgagnttgggattcatacattagac

SEQ ID NO: 147473 - DNA, 418 bp, Glycine max
  unsure (1)..(418): unsure at all n locations
ccataatatatgtatnatcagcctataacataagacaactgtcttcaagttgttcgcannnaccgancccaactttagcattattagaccagaagcacaaacacaaacaattcaatactgttacaaaaatcactttactggatactgatatgcatcttgttttagnacacctatataaataccaactagttagataaatacctatattactcctgaatataattgattatgggcagagaacataccatcattcctaaccaggaagccagcatgtattcccctatagaaacatgagtcaccgacaagagataatttagcatgttaaacggtaagagtggaacataccgaagcagnaatactatctgtaaagacaagtcagnaaattcaaaatttagataaaacattacagaaaagaata

SEQ ID NO: 147474 - DNA, 454 bp, Glycine max
  unsure (1)..(454): unsure at all n locations
nnaagacatacatagaaacgnngaaactgaagaggagccttgtattttatttcaancaancnnagnagnagaccccgggttactcctaagtaactcatgagcatagtcccaaatctttgcgtattgtagggtaacatcaccttccaccaactgtcttgcttcttttaatgacctaaatagctaggagtcgntaatttgcactccaaattcctcctttaagnaatcaaagacttgtatatatgtgattgttggctgctgcctaatctttgcctcaagcttcttagagatccactttttctttgctgttttgtttttgaaaactctagcgcatgagtgttcactatagaaagtttagacttagaaacattttcacctttgttccaagaacaaaaaatctcccacttacactcttgttccttacacttngctctaaccctttcacgatcattcttct

SEQ ID NO: 147475 - DNA, 405 bp, Glycine max
  unsure (1)..(405): unsure at all n locations
nagagactattcacatgatgtaacaagaagcaaagaaagatctactattattttnaaaggcanncatcattcccatacctagatctcttccacaattccatcaaatttatatatgtttagatgcatgcaagcaaggattcaaagttggctacagacattttattggtcttgaaagttgntttacgaaaaggtactacgacagtcatttgcttgtagtagtcggacaagatgcaaacaatgcaatttttgagatagagtatgcgatagtaaattttgaagataaagataactggaagaggntcctcacattgttacattaacaccttggagactacaagcaatatggctagaattttatgtcagacatccaaaaagagcaatccaatagtttagctttgagtaatt

SEQ ID NO: 147476 - DNA, 414 bp, Glycine max
  unsure (1)..(414): unsure at all n locations
gaaactaagctnnnnnaacccctttccaaactaaacatgttgagttcttacaancacaagcnatcaaacttaactaaatgcaagagaaacaaaattaaaaaaggctgggttgcctcccagtaagcgctctgataacgtcattatctagacgcatagtctttgtcagcctggatcaagctagggtctcttcttcagaaccttctcttcactctccttcacctctagacaaacattttggtccagcaatttcctttcttcatcaaatagctcaaagctaatcttttggtcttcaatacccatttctagcttcttctttcccatgtctactacacagcttgcagtagccataaatggacatcccaaaattaaaggaatatatgtatcttcctttatgtccattaccacaaagncatc

SEQ ID NO: 147477 - DNA, 452 bp, Glycine max
  unsure (1)..(452): unsure at all n locations
agagcgaatcaaatcactcctgcattatatctctagcatgtattctttctttctttacccactcctcacgttaggttttttaaggaaaaacaccataactaaacgcgccacaaagcatccctatcgcaccagatccaaatctagaacgatgggtgatcaagaggagacacaggaacagatgaaatgccgcatgtcagctctgaaagaacagatggcttccatgatggaagccatgttaagaataaagcagctcatggagaaaaacgaggccaccgctgccgctagcagttcggctaccgaagcagacccaattctcttggctaccgagcgccatcctccctcaaacatatcaagacagagaaagaacacgctggggcatgacggcaaccctcatctgggatacaaccgagcggctnacccttatggaaagncagccaactactcatcacccg

SEQ ID NO: 147478 - DNA, 456 bp, Glycine max
  unsure (1)..(456): unsure at all n locations
agacctataaaactcagcttagaagataaaactataatcagaaattttttcttttattcagaagatnncacaagnataagactattcaagtaaaaaataaaaaaatacctttccaagatgaagagccattccaagagtagataagcatttgtcaactttaagcttatttttaccacctataagagnatatatatatatatatatatatcagataaggataatgcagttnagaaactttatattcttggcatgaaaaagaaaaattatagttgctaaagcaccaaagacatgtttaaaatatcccctgcacagnagagagacactcaaagagtctcttgagcacattaacaacaaaactaatgtcacagaaagagacgaatatgctgctaacataataagagtagcaagattaataccaagaaagcaaagagcaatatgcatatgcacctttgcttt

SEQ ID NO: 147479 - DNA, 368 bp, Glycine max
  unsure (1)..(368): unsure at all n locations
attacaaatnacgctnaattagnacgtaatacactntatatctatctatattataatatacgagtgcctcccaaataatagcccgacactgtctctcttgtcttttctcatgtcttatgaatcttgagttaggagagctgaatggtattggtcaaaagagaatatctacaaaagatactctaacattcaagttagagctctcaaccttggacaataaagaagataataactgcatacaaatgatggtttttacttgaagagcttatcctgctcataagaccttgagtctatgtgagctgattatcatttaattaagtaattcgncacctaagctgcattaactgacctaattntgagactatctttat

SEQ ID NO: 147480 - DNA, 432 bp, Glycine max
  unsure (1)..(432): unsure at all n locations
atagaaacncagctagagatgaagaagagagaaaggagaaactttttgctnttatttttgaccacagagaggnacctggagatatgtcgcggaggtcaagagaccttggggacgtcaagaggggagctatagcccaaaaccaagcttgaccaatcccgacccaacccgggcatagtcggncagagagaacctgtgatgtacctaagcaggcgagctcctggcagncaacagataaaaggaacaaacaccacaaagcaaagaagcttgtggtggctggccagctgtgaattttgagtgatatgaggattatggcctctgagaatcgattaccaaaggtgaggaatcgattacaaagcttaaaaatgaagacaggaagctgagatggtctctgagaatcgattaccaaagaggtgtaatcgattaccaggcttg

SEQ ID NO: 147481 - DNA, 258 bp, Glycine max
  unsure (1)..(258): unsure at all n locations
atccttatcaattagccagacatcatcaaaagatatgaacatatgatattaaatncatcaataggcnattaaaaaataatacattaattcaaattttttttataaaatttaccaagcaattttctaaaaacaaaaaacttcctatgtaaaaggaaagaagtatgaagaaatcttacttttatccatttttacatttgctttaaaaatgtatatatatatatatatattcggacataattaattaaattattcttttca

SEQ ID NO: 147482 - DNA, 234 bp, Glycine max
  unsure (1)..(234): unsure at all n locations
gcctaaaagtggcaggctctgagtgtgatatatccactatgcaggcagaattaatacgtcctgttgctgccttcctcttgcacagataggaaacttgctccataactatagtacgagcaataaagagaggcctaagaaattgaaagaagctgatactttacgaaccaaaagtgaattaagnagaccattctaataaaaaaataggccattcagcgctttgtatattgagaaagc

SEQ ID NO: 147483 - DNA, 330 bp, Glycine max
  unsure (1)..(330): unsure at all n locations
gaacttttctagctttttcttcgtcatcttcttcttcttcttcctcttcataatcataatcctgatcctcatccacaggcaaaagaggcatggatagtgggttggaccaggaatagaaagatgatcttctggaccacttggatgcaatcaaaacccttcttctcttgttgaaaggactctcttgcttttgcaactccttcagattactcaaattactcatttgagatagatctgagaacgattntgattgtccatcaaaatgactcgacaatgccctcctgcatcgntcaccataaaatcccaaaacatacccgcatcagattccataat

SEQ ID NO: 147484 - DNA, 380 bp, Glycine max
  unsure (1)..(380): unsure at all n locations
caaacgcagaatacatcgttatcatatataaaaaatgccatcgagcaggaaaatatcagacattttttgccccattatccaatccattaattcatataaatataataatcaagataatcagaacaaatatatcttctaattcgagaaaattaaagcaatcattatcaatatattatatggtttaattaagctaattacgagtattttattacttcaaatagggcaatctctcatttcaaacttcataactaacctagcattctcccgatcggagaatggctagctggtaaataatgggagagatttgnatcaatctgtaatgtcgagtttattacactggaaaaatactagcatccctttttctcctagctataaataac

SEQ ID NO: 147485 - DNA, 353 bp, Glycine max
  unsure (1)..(353): unsure at all n locations
aaaaaagccaaaaatgtttcaaaaccagntttatgatacaattttgagttttaaaaccagnncatatttgaatccgggttgattcttaaaatcagtncaatgtaaaaccggctggntctccaaaaagagtgctgttcataaccagtttactttaaccgtttgcattttnaggatgaagaaccaaactattagaatctgnttaggtcacttttaaaactggattttgcaccccccattgttatgatctacatatctatcggagcctaaacgtacacacatcatatgctcaactttcatttgggaaaacattgtctgctcacaaataaaaatgttcatttagatagggattggca

SEQ ID NO: 147486 - DNA, 453 bp, Glycine max
  unsure (1)..(453): unsure at all n locations
agaagctagagggacacccctccaatagctaagttctcccncctgtctaaanacaagaaagaagaaagcttctttgatatacttccttgagaagcttccttgggaagcaagtgttacacctctccaatagctaagctccccccccccccccaatacatgaaaatacaaaaaaaatccctactacaaagactactcaaaatgccttgaaatacaaagctaaaaccatatactactagggtacccttaactagtaaggtaaggagcccttaatttataagacaaaattcaaagcccaaaagaaagaaaacctattctaatatttgcaaagaaaagaggattcatacttagcccttgtgcccaaaatctaccctaagttcatgagaaccctaaggccttctcctgcatctttggcccaatcttcttagaatattctatccaatgcccttggggata

SEQ ID NO: 147487 - DNA, 267 bp, Glycine max
tgaacgccccaactactgatacacacccgaaaaacactaatcagctgaaaaacaaaaaatgggtcacagaaaaataaaggttctgaaaaaatggcgaaaacacgtgagactcacgtgatctttcagtcctccattgcctcaaatgcgtcgtgatcatcttgatggcgtcaaagacgaccatgttggccaccaattccaatccattggtgtatgtgcggtacgatgattcgggaatcggagagaatcttgcggggaataatgggtttg

SEQ ID NO: 147488 - DNA, 382 bp, Glycine max
  unsure (1)..(382): unsure at all n locations
acgaccttgattctttaactctttacgagtntgatattacccattcttttcattccttaagattcattgagaaatatgtaattggaggtgagtctgttagtttctctttaatgtctctagatttagccctagcttaggttttttttattttttattttgcccaggagtgcaaaaggctaagagtgaagggatttgatgagtcatcattttctcctatttcttaaccctttttgtcaccattttaattactgattagccttaattggcaaattaattatgcagntntaacatttgggcctattagattaattttgagtttttaatctaatttcaagagatttataagcaattgggcttgaatccagaattgagcttggacttg

SEQ ID NO: 147489 - DNA, 362 bp, Glycine max
  unsure (1)..(362): unsure at all n locations
atctcaagctttttatctaataaatgttttccaaactgaagaaaaaaattataagtcaaagtaatcctcaatttactttttttataaagnnatcttttcactgtcaaaaaaagntatctttcattaaatattcattttcttaaatggattttttattcgntcgaacaatgtaataatttacacacaaatatatatatatccctttttcgagtagacatattagtctgactcactccagntaacccatgtcaatcagnaggttaactgacctgaacaaaatcaacactaaaaaattgaataacatttggataactcgattaactcacgagccaaattcaactacatttactcatagcataata

SEQ ID NO: 147490 - DNA, 467 bp, Glycine max
  unsure (1)..(467): unsure at all n locations
gaccatagaaactcagctcnaaaggagaagagacattaagccagatatcaatatttcttcatnnnaannaanaaganngaagagaggaattactttttctttctcttttgctctcttgtttaacttgatttattggtagccgacgagagatgtacgcgtatataatcccagatgatagatggaagtatggaggagttgacgccaaaatccaaatagaaaattttgataaaaaattattgacaagtttgaataaattagttaggaaatgcttgaaacaaaaatttaaacgaaaattgatttagaaattcttatttagtttaaaagatattcttatttaagaggagcaataggaaaagcagtggagaggagacaagtgagtgactatgctatgacagcaagagcgtgttgtaatgatcttcttacgaccgcagaggaattcaacgaagagtgccacaagcacctgtgaa

SEQ ID NO: 147491 - DNA, 354 bp, Glycine max
  unsure (1)..(354): unsure at all n locations
cacttatttatttcaagattttctgtaatcggagaccagaattcaatatctccccatgtggccattgaatattgctttttacaccatgccatggtcacccaattggggattctgacaatagaaaaaaaaatgcaaaagaaagaccaaatgtgattttgattaataaaaaaaaactatagaagaaatggaaatgggaatataatatagatggcctatgttgtatctgtccacatcctgctccatataataaaaagcatgactattttcaaacaagtgacaatggtcataagtcaatgtggagttagcttaatgaaactcngaacacaaatgttaccatcacagcaaaaacagact

SEQ ID NO: 147492 - DNA, 436 bp, Glycine max
  unsure (1)..(436): unsure at all n locations
tagaaactcaagcttctcgatatattatgcacctgagtctgacttccatttgactcatttgaccatnngaatgnctggagagcttccgttgagcaattncgagcgtctcgatatattatgcgcctgaattggacttccgcgagattagttatggccatttgaatttctcgacagcttccgttgttcaatttcgagcgtctcggtatattatgcgccagaatcggacttccgcgtgacaagttatgaccatttgaatttctcgagagcttccgttgttcaattccaagcttctcgatttattatgcacctgaatcagacttccgcttgataagttatgaccatttgaatttctcgagagcttccattgtttaatttcaagctgctcgatatattatgcacctgaatcagacttccgctagataagtcatgaccattt

SEQ ID NO: 147493 - DNA, 448 bp, Glycine max
  unsure (1)..(448): unsure at all n locations
ntnncaattaggagaggtgaggatgtatatcctcaatttttttatgaaccntgaatcgagttttgaagaccccccctaatttattgtattgatattctattattnaaagatnagcagnaggcatgcgtgttgttcgttggtgtattactgagagtttctcatgtgtgttctaatggaaaaagtgtgaagtatgaattgaaattgtataagtgtcaaaaagttgccctcatagatagaaatcttgaagtattactgagtgtttttgccacttcgataattcattttaaggttgaatcgagacccaaaatttgtcttaatagttncattgacatgaaaaatacaagaataaaaaattattttaaccaaaataacttatacacctgacaannnaagtgccaaaaattacccttatgaattgaaatcttaaagtttcagagatgttttctcg

SEQ ID NO: 147494 - DNA, 316 bp, Glycine max
  unsure (1)..(316): unsure at all n locations
atatggagaatatatttagtggcacacattctctcttctctccctaaatattttttaaaaaaattttaagaatgagtgagagagagaaataaatgagtttttaaatataaacattaaattaccttattatccataaataaatttattatcataaaataagtagccaagttctttatccaaataattaggtatgttagcatacccctctatattgatatcttttntatttcttaaaacataatgtcggactatactttctaaaacaacatatatcaattccataaaatatattttaagactaagntgtaataaaata

SEQ ID NO: 147495 - DNA, 371 bp, Glycine max
  unsure (1)..(371): unsure at all n locations
gattatatgaaacgaaaccatccacaataatgaaatacaagccagaagtaagattattatggactcaacaaaccttgaaacaactagcctggaacacaacatccttcagaagaaaagagtattcgtcagatgggacaaatcccttattgacgccaatggagaaccaataagtctcacgggctgctacccagcgcaacctccagcagncatcaaatccaaaattgccgatagggggcctattccaaacatgaaacaaaacataatagatatgttacactatatctncctatgtatgtagcccatcaatgagcatcacatgtatcagagaatatataagcttcaaacacggaatgtctcaattatgctcagca

SEQ ID NO: 147496 - DNA, 426 bp, Glycine max
  unsure (1)..(426): unsure at all n locations
agatctgagaaatcaccaganaagatgaccagagcttttatctctctctattcaaagnnaccaccaaccatgaaataaaacagatttggctgcagtatacacttcttgatttgagagtaaacttcaaaatatgtaaaaccatatgtggaaggcctctttctttcatgacaaatccaagttagatcacctcattccttgtatcatcattctataaaatagcagatttggaagacaacttgagttccaactatgggacatctcttcaaagaagcgtagaaaagaagtacaatattcctgaaagtactaatttggcaacctagttcttgcttcacacacttctttcttctccatgactgtagtcgntggggctttctcaatcccatgcatatatatacatacaaatttcacgctataggactttatctc

SEQ ID NO: 147497 - DNA, 382 bp, Glycine max
  unsure (1)..(382): unsure at all n locations
tttggttttctaatagtcgaatgtcctaatagatcttagaacaactagatgtaagtcttcttgaagactgaaccagtataaattcagagtgtgattctttctttccctaaccctttgatttgtgaatcaatattgatattggaattgatatgtgtgggccattaaactttgttttctaaaggttttgaattcattagtttattgagtagtaatattttttacaagacttttgagagaccctttatttcataaaggganagattttaattgaatctaaaaatgattatagaaaagttttgaaaacaatctattcaaccccctttctatattctcgactaatccaacagntattcctaatctagtacctgagatatcttctttg

SEQ ID NO: 147498 - DNA, 331 bp, Glycine max
  unsure (1)..(331): unsure at all n locations
tccacaaaggaataagccatggaagaaagagcttcaccaccaagaatgtgccttggataagatacttgaagaagatgcttttatggaggaaaagaaagagataaagggggagcatgaaattgaaagaataaaagaaggagaaaagtggaaatttgaagtgtgtctcataagattttcattcatcaaagntacaacaagtgttacacatgcttctatttatagactaagtagcttccttgagaagttttcttgagaaaacttccttgagaagattctttgagaaaacttccttgagaagctagagcttagctacacacacccctctaaaagc

SEQ ID NO: 147499 - DNA, 406 bp, Glycine max
  unsure (1)..(406): unsure at all n locations
accatagaatctcagctagcatgattacattctnccnctttctctatctaattcttcttttcatcatcaaaatctgcatgatttacatgcttgttgnnnnggctcaaaattcgcnctataattggagcctagcttataccaattttagntctgaaatctctattgaaaattattgtgaaaacatgtgcctatacttgatgtttcttgagnctttttttttttggttatttttttactttaatctagagccattctaagtttctctttgagtccttgcttgcttttatgttctttacattgctttaattgangaatcatccttgaaaactagtcttgtaaaactatattggcttagctttcatctnatttttgtggacttaggctatttcttgcctcttttgttcct

SEQ ID NO: 147500 - DNA, 367 bp, Glycine max
  unsure (1)..(367): unsure at all n locations
accttagaaactcagctagctcctaaggagggatnaagctattgctgacttcttgccctgaagatccttaagaagaatatgaccacactcgntcagacttagagagttctttcttactccaacttgggccctacctcccacacttctgacatcacactggatcgggccaagttgatttatggcattatcatgaagatggacatgaatctgggctacctcatatcccaccagatttctatcattgcctagcatgactcctctaagctaggatttctagccttaatcacagctttgagtaaagctagaggagtcacatcagattccagatctttgtagatccttagccctgccattaacttggcatata

SEQ ID NO: 147501 - DNA, 181 bp, Glycine max
  unsure (1)..(181): unsure at all n locations
acacatagaaactaagcctcacttaaatnnactcggaccacattgttatatagacatacatttnncacccnnnaaaaagnatgcactcttgaacaaaggaatattaagatctactcacctcttttcatgataagctacataacttctcctatatcaagtatgncacactaattgattttta

SEQ ID NO: 147502 - DNA, 114 bp, Glycine max
tcttccggaagtcactggaattcttcctgaagattcttcttcctgaaacattccggatgtcgttcttccggaagttgtctgtgagtttttccggaagtcacaaattattcttcc

SEQ ID NO: 147503 - DNA, 426 bp, Glycine max
  unsure (1)..(426): unsure at all n locations
nctaaactntatacaagaatgaagctctggtacctcttgttgtaaaagaggccncatatatcttaagaaagaaggggagaattaagatattacaaattatttccccaattaaaaattggatttaactttctattcaagttattaattcccttaataatgaatttcttaaatattgattcaaatagaacaatttgaatatgaatataaaacaataataaataaaagagtttaaaggaagagaaagtgcaaactcatatttatactggttcggccacacccttgtgcctacgttcagtccccaagcaacccgcttgagagttccactatcttagaaattccttttacaagntctaaacacacaaagacaatccttcctttgagtttagaattctttcacaacaagagaccctcaggctctttatccct

SEQ ID NO: 147504 - DNA, 273 bp, Glycine max
  unsure (1)..(273): unsure at all n locations
aacctaanaagcaaatggctatgcgtnaaatatcgggaattagnnccacactccacagaaaaacctaaaaagcaaatggctatgcgttaaatcttgagaattagttccacactccacagataaaaagatagtctttcctttaaggagaaaagggaataagnnagatgtgcttttaattacaaatcattttgccacgttagactttacattattctttataatgagaatacacccatcatatatgagaagctcatttcataatataattacctc

SEQ ID NO: 147505 - DNA, 445 bp, Glycine max
  unsure (1)..(445): unsure at all n locations
agctctgcacanagggatgagaggctgtttatctttacaaatnnnggaacacatcgaacattgttaacataattctgaagctgatgtcgcaccacaactttcggtacatctacaaaatcatctggataaagttcaaccatcctcaacaattttttcacatcaaaagcttcaaatgatgatgagggacttagacatgaaacacattgtaaaagatcagtattatcttcatcaaacctatcattgagctcatgcaactacaaatctaaaacactaaataaataatcatgcttataatgatgcaaatcaaacacactagaagtggtagcacgtcgtctagggttctccccttgcacatacagtgtattcaaatgacgcacatcaatatcatgcttattgcaaatttccataaccttagatataagttgttcccatccatcattcctca

SEQ ID NO: 147506 - DNA, 391 bp, Glycine max
tgtatactcagctcccaagcaagttcatggtcttttcgattattgtcaacatatggtcgagttgatgtcccacataattaggaatcgcttaggcatttgtatttatgctttgactttgacaagataaaacaatgttggttcttaatgaaaatgagattttgattaatcctatttcttcgctgaaatttctacgtgggttcaatacttcgacaatttatcattgtcatgcattcatgtttagttttttgtggcacccctaccaaacgcgtgccaaaaccaaaatcatgagtgaaatagaggaagtgcaagagcagatgaaggctgacatggaggccatgaaagaccaaatgacctccatgatggaggccatgttgagtgtgagaccgatgat

SEQ ID NO: 147507 - DNA, 396 bp, Glycine max
agcttgtaaccacctataaataccatgtaatcatccgttgaaagcatagaataatacttgatcatttcttccttctcttgcttctgggaggtttcttgggcctcgaacaccaagtataacacatgttttcttgaatttctttgtctagaaaaccacatcattaaccagttgagccaactagggttaagcgacataaaggttaaattaaatttaaagtgagcttttgtggtaaactaaagatgattactcttttcattttgggaatgtgccatgcatcaatgggagagagcgcactcactctttttctgcttaacgtctacggtgtgtttgttacacatgaaagttgaggggtgaaagtgaaagacaagtgaaaagagctgaaagtaaaaaaaaatg

SEQ ID NO: 147508 - DNA, 442 bp, Glycine max
  unsure (1)..(442): unsure at all n locations
aactaagcttcagtatggattttgacaaaaaaaaagaaattgttatctattagctctcaccatggaattttaataattttcacaggactcaagacaaatattctctaatcaaacacacatataaaatcataattttttttaattaaaaacaattatattctctgatctacacataaaaccataaagttcattgattgaaaaaagtataaggtatgtgaaagaattaagtcatatctaataccaatgttctcaaaatatacatcattntgttccttctcatcctccccttgcgttgagtcatattcatctttcaaaaaattacaatatttttaaatcttcaaagcctgtaagagcaataanaaacaattcaccacatggtcttcttcttttacttggaaccctaattgcttttttttttttcacttatgccttttatttaata

SEQ ID NO: 147509 - DNA, 375 bp, Glycine max
agcttatgcgcatacttaattacgaacgttcacttgcacaagacattcttataactaagaaaaatgcacccatatacaagcaaggcaccttcgttacctatattatttacatgtacttccaaggtgtatttgttacctacatcacacacatttcctttgctaaaatcacatacatgcatactctaagcactttggctatctaaaattgcatacgtgcacatcttgggattcctaatacctatacatacacaaacttcatgatgaatcttgactatctacacaataaggtgctacattccatgcttttttcaagtatttgttttgtttttactacctaaagcccgatgcaaataccaatgtattggcttttgctca

SEQ ID NO: 147510 - DNA, 454 bp, Glycine max
agcttgtcttcgtcaaagaaggtatgaattcccttgtcacatatagccttgtagagattgccagtaaaaccatagcgtgtgtcttcccctctgaagctgaggaaaacatcgtagattgatgcacgagaacgtgttgccgcagccattattataagaaaaaagtttagtatggttatggttgatatggtaggaggtagaatgaaacttgaacaaatatgaaaatgatagtataccaaatgctgtgtattataaagaagatagccgcctttgtggaaaatatcttgttttttttcattctctgttataaaaagtcaagctcttataaagaaagatgctctcacttttgttcatttaaaaaatactttgtataatcaaattcttacaaataaactatataaagtattgttaataactggtattttatttaaaataattaactggggggactactaat

SEQ ID NO: 147511 - DNA, 359 bp, Glycine max
  unsure (1)..(359): unsure at all n locations
acctaagaaacacattacaccatatatccctgacactcctgtggtttcttgaaattttcacacgatactcctagnccactacctttttaaggaactcctttgaattgtttgaagcacattggacaatgtatccttattatccaagaaacacattgcatcatgcatccctataatggctggagtattgtgtgaaatttcaagaagccacatgaaccatgagcataatttgcccganaacattaatatatatgcttaacacaaaacaatgggttgtgaaaaaggaaaatacttggtcctgcagtctgcacattccctgttgtcaggtagcttaacaagtccctctaatatctgcattcatt

SEQ ID NO: 147512 - DNA, 446 bp, Glycine max
  unsure (1)..(446): unsure at all n locations
agctnttanaagggtaaaagactcacattcacctttctaacatcataataaaacttgtccaaataaataataaattcacgttggctcaaaacaaggccgtctaaaacttcatacaattaatatagaacctataccctaatgtcacatcctatcaaagcattgtgttctcgtgtcatctagcatcaggttcttcatagtcatccacctattcatctgctcccatgaacacaaggttcgagatcatcataggatccaaacacaaataacacaccgagagtgagttatcacattcctaacaaataacacaccgagagtgagttacctcatgctagaggacgcgggaacacaatgctctgataagatgtgacattgggctataggtttttatattaattacatgaagtcttggacgactttgttttgagctgagatgattttattattta

SEQ ID NO: 147513 - DNA, 281 bp, Glycine max
  unsure (1)..(281): unsure at all n locations
cctcccttcacgggaagggagcgtgactcaaggtgaattttctaaaagaaaatgcgcgggagtcgccaccaacctttattcaaggaaaatgttagaaaaaccaaaatggggtctatgacatttaagaataacggttcgggaagttgttacgtgcggggaaagtattaacaccccacgcatctgtcacaagggacagcagcctttaattgagtgcgaaaaatcatgagttcaatgtttattttattttccccctctatggntttttacattttggggcgaca

SEQ ID NO: 147514 - DNA, 444 bp, Glycine max
  unsure (1)..(444): unsure at all n locations
agctngnccatagaaataggaatttgaagtttgtcatttcaatttctgactaagtaaaatggatcatttttaaggtccaacgccttgaaatgatcacctcttaagtaaaaaaaaaaatcacttgataagctagaactacgtaggtctgatttcttcatcgcaattgaggatacgtaggagcaaaagccccgcttttgtcgaccaccccgagagatcgttaatggtccaacgccttaacgtttctctcctttcaaaatcaaaagatcatttaatggtccaacaccttaaatgacctttttgttcaatcaaaatatatcttgcaaaaagataaaaaacaacttaaccaaacactttgttccgaaagaactacgtaggtctgatttcctcatcgcaaattgaggaatacgtatgagcaaagggaaacacccttgtcgaccacaaaaa

SEQ ID NO: 147515 - DNA, 314 bp, Glycine max
  unsure (1)..(314): unsure at all n locations
acaccaaccaaatcacagcttttcttacttaaagaaccccgtaacaatttcttcgatccaattcgtaaccatggcatttcaagctaagattaactcactttaacctccatgtactacagaatccagaattaaccttccaactctcaaagcctcactctttttccactcacaacaccacattctcactgtctaaccctaggttaactctacccttcatctctaatagtttccataagcaatttcagcacatgaacatcacaagcatcatcataaaaacctanaacagaatgggtatgtttaactcattcaaacat

SEQ ID NO: 147516 - DNA, 439 bp, Glycine max
agcttctacttatgtggcagggcggtctttcttcactttcctgtctccaacgcgagctctgaccactgtccttccttcccgcggtgcttcttttcatgtccgcctgagtgggcttatagcctaaaccatacttcccacgatttccttgggtttttatcaggctagttatgccgccattgtctttgcctaaacccatcccgggttcataaccgttccccaacataactcgggccatcattaccgccgcatcggacagacaaggttgcccaaagagggagtccacggaggaaatgctgaccacctcaaaagactggaaagcggtttctaacgattcttctgcggcttccacataaggcatggaggatgggcagcttaccaagatatcttcctcgcctgatacgatgaccaagtgcccctccactacgaactttagcttttg

SEQ ID NO: 147517 - DNA, 230 bp, Glycine max
gctgatatatgatcatttgaaaacaaaaaagctaatgaaaaaaggaggacttcacctgaacgggcaatgcactaccaaataatcaagataactctataccatctaagaattgggcttaatggcctaacacaacaccacaaaaccagcttgaaaggtgagggttgtccacctcttatatacactacattggcctcatcactaatcaatctgggaactaaaccactaatttg

SEQ ID NO: 147518 - DNA, 439 bp, Glycine max
agcttggagcgctatccgcagactcatcttatttcagttggggaagaaatcagaccatgtgcatgaatcttacacccagtgggttattgataggaccaagagctttggcctaccctaccacttacctagatacctatcgtccaccatcccaccatcatccttgcctatcccctttgacactaaggaagagtttcatgaacaattaaccaaagaaaggctagaaaaagaaacttggaagaggagatgccaggagctcgagcgagagaatgagactttgaaggggaagatagcccaacagagccgtgagctttttatccagaaccagagggtgattgagaaggacgacttgcttcgtcggaaagacgctctgctccaccaagatgctagaaggaagaggaggtttatggatttgttctcccgtgcacattcatatatcgag

SEQ ID NO: 147519 - DNA, 425 bp, Glycine max
  unsure (1)..(425): unsure at all n locations
tactaagctgagtttagaaatgacccttatctaaaatgtaactgatacaggcgcaattaatgatgatgtgaatagacaaacgaaagtatagttgactcttttgaaccttataataaggtgcttcttgaattatcttttcatgttttggtaaaagacaacagttgtgcagttgacaaagacaagtcaatacaatatgttaaatttctaacattttcaattggtatactaataatgttgtgttgatattctatcacattaagcagttactaaattgcataaaaataccccagnttcattatgtttttcttagttcatatgttggaatatttcgagatctatgaatcatctggtgaaagttcaatcctccatgaatcatctgttcttatacttgaatcttcttgttgtaagattccgatcaacatagt

SEQ ID NO: 147520 - DNA, 295 bp, Glycine max
  unsure (1)..(295): unsure at all n locations
tgtttgcncatcctatacactcaatattgactcttgagtgaccctcgctctgccacaaaaaacgtgtgctgtaacattctggatatatctacccggaattattggaaacgatgtattctgaatgattatatttataagtgttattcagtgtatattcatatatgttcttggtaagggttcgaatagtgggggccagatactctggtttcgctaatttatgaagatagatccataactgcgagggtatgggtttattcttaagtaattattctaaaatgatgtgtttgcatgcgac

SEQ ID NO: 147521 - DNA, 281 bp, Glycine max
  unsure (1)..(281): unsure at all n locations
ctttccaccctcaaagtctcactcttatttcactcgtaacattacactctcacttttctaccccaggttaactctacatntcatctctaacacgtttccatgggcaatttctgcatataaacatcacaaacatcatcacaaaaaccctacaacagtatgggtatgtttaactcatccaaacatggcgatatcaacaagttntcagcaaatgtcttcacaagtaatcatcacacagcataaaccttgcgagactacccatcatatctcccaaaaccccctac

SEQ ID NO: 147522 - DNA, 401 bp, Glycine max
agcttctacttatgtggcagggcgggctttcttcaccttcttgtctccaacgcgaactttgaccattgttcttccttcccgcaatgcttcttttcatgtctgcctgagtgggcttatagcctaaaccatacttcccacgatttccttgagtattttatcaggctagttatgccgccgttgtttttttctaaacccatcccgggttcaaaaccgttccccaacataactcgggccatcattaccgctgcgtcggacagacaaggctgcccaaagagggagtccacggacgaattgctgaccacctcataagactggatagcactttctaatcgatcctgtgccgctttcacataaggtatgggggatgggcttttgatcaacgtataatttacgccttactc

SEQ ID NO: 147523 - DNA, 57 bp, Glycine max
ttaaacctccattaatttacagctttaccttctcctccatttgtgttcctacatttt

SEQ ID NO: 147524 - DNA, 418 bp, Glycine max
  unsure (1)..(418): unsure at all n locations
agctnntaatcaaattttatctacatacttttatcatactnttaattagatctttaaactttttttcccttttctaattgggtgccagaattttttttgattgtgtgttctctcatctaattatcatgatgaaaaattaatcacaaatatcaaattagaggtattaatgtaattcgattcatcaatctaaatattcttctaatttaagtatttttttcaggaatctcttataatttaaatattctttcacaagtctttcataattgtttggttaaaaatggtaactttgcataaaaacttttacaattaacttgattgcggttataacataatataaaaacattggtctactttttgcacctcaacatttaattatgtaaaatattttattagaatttatattacctacatccttaat

SEQ ID NO: 147525 - DNA, 349 bp, Glycine max
actagctgctagggagccagcttttttcatgctttattatttctcaaaagggggcgggctttacccacgcaattttttcattccctcatacttttgcatcttgcttacagagaagaaatgggtgttttgatgtatcatcctcaattatttggttatatgaccaatctcatttacctaggccttatattttattgcttgctatcatctctctattatatccacgaggacgatgttactaatatcagtttcattatttaaacacaaatggattgacagtgcataggacattatatataaactatttttgtcttaatttttatgtttttatgggaatgcactccatctaaaa

SEQ ID NO: 147526 - DNA, 441 bp, Glycine max
  unsure (1)..(441): unsure at all n locations
agctntngcatcctaggataaccagatattgtgtctcccagcctcattacaagcctattaaaagtccttcggattcggtttgtgtgtttataactgtatggcatgagatgacttgcaaagattgagacttatgttggttgttgattgatggataagcctaaacacttgtgcttgagtgaaacagtgaccgtgaggctttggttaatgatccttctttgatatctgttattcctactagcttattttagttgtaaatcctaatatatatgttcctatctttgaaaagttgcatgttttgtgaagggctttatattgaagcattttatgacattcatttcatgtgattgaatttttctttggaaacaaacacaattttgaataaccactatagactttgtcactcgaggacaagtgagttgttctttctttgcttgaggacaa

SEQ ID NO: 147527 - DNA, 360 bp, Glycine max
ttcaagggttcaaatattacatattttactggcggtgatgattatcaaaaaatagtcaagaaaaaataaaataacatcgctttttaataatgtgatgataaaatacaaaaaaataaaaacttttttactcataaaatttgtgaaatattaaaagtttagtgataaaattcatgaaaaaaaaaccttgggtgatacaatttgtaaaatgatgaaagttatgtgataaaatttgttattaaggcaaaaaaaatataatactactaattaattataaggcgaattagatattttctaataattattataaagcccattttattaaatgcttatttgaattgaaatcatgtagaatgataaatt

SEQ ID NO: 147528 - DNA, 444 bp, Glycine max
  unsure (1)..(444): unsure at all n locations
agcttcaaccaagaggggatggtccattttatgttcttgaaatgataaatgaaaatgcatacaagattgaattgcctggtgagtataatgtgagtactacatttaatgtgtctgacttaactctttttgatgtagatggagaagccgatttgaggacaaatccttttgaagaggtagagagtgatgaggacatggcaaggactaagggcaaggaacctttagaaggacttggaggacctatgccaagggctagaacaaagaaggccaaggaagctcttcaataagtgttaaccatgctatttgaatttaggtccaagttataagtggagaagcttcggattgtcaattgcaccatgttcccaggagagtagagggcgccacctttgttgagtggttctattagcattntgttaggtgaaataaaggcctacacttgtgttaaag

SEQ ID NO: 147529 - DNA, 153 bp, Glycine max
  unsure (1)..(153): unsure at all n locations
ctcatgagccttanggtagatttcnggcccatgggctaagtatgagcccactatctttgacatattagattagggtttcattattttttaaccatgcatttagggctccatagtgtanggaagtgtaaccctaagtaatgtaaggaatttttc

SEQ ID NO: 147530 - DNA, 436 bp, Glycine max
  unsure (1)..(436): unsure at all n locations
agccngcatgaacacaggctgagacaacatgggttctaacagttcttggctacctggcaaaattagttttgggaaatttagggtaagctataatgtatgatgcataatgaataatgatgctttgaactgttgcacatagttttacaaagattgcttactttaacaggtgttatgtntcttatctaacctaaaattttaaaattgtaacaggttgattgtttcagtggcgtgggtcactcatataattatctacctattaattgatcctccactttctcctttcttgaatgaagttttcattaaactatatgatgtctggggtatgttggaaggctcaagctatttttctttccttcagttatgtataataattgatacattatatgtaatattcattcanataatctagatgatatatgcacattgttctttcatc

SEQ ID NO: 147531 - DNA, 416 bp, Glycine max
agcttgggggattatgtgatagtgtattttccggagatgttgatgatagaaaaagtactaccggatttgtattttttatgggtgattgtgtttttacatggagttctaagaagcaaggcattgtgacactttctacttgtgaagccgagtatgtagctgcaacttcttgcacatgtcatgccatttggctaagaagattgttggaggaacttcagttgttgcaaaaggaaagcacaaagatctatgttgataatagatctgcacaagagcttgccaagaatccgatgttccatgaacgaagtaagcatatagatacaaggtatcatttcattagagagtgcattacaaagaaagacgtagaactgactcatgtgaaaactcaagatcaagatgcggatgttttcaccaagcctctc

SEQ ID NO: 147532 - DNA, 282 bp, Glycine max
aatgtgggaaataaactaaattatttatgaacattgtttgtgacatattgattcttcttcatttaatatgagctgtgattttacaatacaatgcaaaacctagaatattattctatgattaaaattataatattatctcaatgataaaaattgcactaaaataagttaatgcaaattatgaaaataactttttaattttaattacaacaataatattaaagaaatctatcataatgtattaaaatttcttttaaattagtacctattcatttaaaggtagat

SEQ ID NO: 147533 - DNA, 439 bp, Glycine max
ggcagcaagcttattgaggcgcttccttcctcttttattaatgactagtcccatttgggagaggcagatcgtgggaagattggtcagtctctctcaccaaaagtgtcaaacatgagagcccacgtttaatatgcttcttattctcctattctctaattgagctagtggttgtggttgtaggatcccaacgcatcaaagtcagaatataagagagaaaaaaagactccttttgttcatggagaggaaggagactattgatttttcttcttatttttatcttgaagcctctggtgactctgaagaagctgattttgatcacacctttgcttgtgaaatggtcaaatcagatggtgatggccaactcgaccacacctcttcttgaatgtatatcttctgtaatttggctcttgagtcgatcgtgctaattttatttttgttt

SEQ ID NO: 147534 - DNA, 370 bp, Glycine max
  unsure (1)..(370): unsure at all n locations
gctaaaatactctcattactaaattgaaaactctttctatagttctctaaaagagagagggaatctacaaattaactaatgggaagctaattttagcttatggagaagtntatttcattttcttcttattttcatctcttagaagtgcttctggagaagcttactcaaacacgccgtgattaagttgtaaaatgcaggttattgtgtgatgtatcctatgctactttattgattaagcttctattatgtctntttttacagtgatattcttcctggtgtaccttttgagtcacaatgtcagtacaaagatgagacaggctttgattcttctatgcgagaatccatttcactatatgatgttctcacaata

SEQ ID NO: 147535 - DNA, 448 bp, Glycine max
  unsure (1)..(448): unsure at all n locations
agctngccacttactagtagaaatggagcataaagcatactgggctttgaagtttttaaattttgatgagactctatcgagggagaaaaggatgctgtaactcttggagctggaagagataagattgaatgcatacgagccttccagactgtacaaagaaaaggtgaaggcttatcatgacaagaagttgctaaagaaagacttccgaccaggccaacaagttctattattcaactcaagattaaagttgtttctagacaagttaaaattcaaacggtctggaccattcaccatcaaggaagtcaagccttatggagcaatggaattatttgaccctcaatcagaaactccagatagaagttggacagtaaatggtcaaagattgaagctataccatgatgggaaaattgagagaatgaccaccattctgcaattacaagacctatag

SEQ ID NO: 147536 - DNA, 260 bp, Glycine max
atactattttacgcccaacttatgtttgtacactataaacacatacttttcttgcacatggttgcttctagctctcattccacaaaataaacaaacacttttttttacaagaatgaacaatcaacaataatactggactggagcaatttactgtatactacaactcacattagctggtgttggtattaatgtttcagcaaccaaaagttatcgaaaacactcccccaaattgggacaaattgtcttgatcatgagtgctc

SEQ ID NO: 147537 - DNA, 441 bp, Glycine max
  unsure (1)..(441): unsure at all n locations
agcttcaacatagaaatttagtcaggcttcttggngtttgcttgcaaggagaagagaagatacttgtttatgaatatgtgcccaacaaaagtctcgactatattctctttggtaggaccatctttctgaattctgtgtctactttacatgcctgctttgatttttattttttttgcttccagtttttgccctgttggcctgttcagtatatacataataatcgtcaatcgaccacaattcaagaagcgatgcgtaaaaattaggacagttatccgttggtcaaataataaattgtatatatttttcatgcaatcaaagtgtcgcaatgtttcttccaaattactacatntttaattgatatttttcatatgacttgaatattttgtccaatttctagatcctgaanagcanagggagttggattgggggagacgttacaag

SEQ ID NO: 147538 - DNA, 229 bp, Glycine max
agcttgctcgcgctaagcgcatagacccctgattggttggttgaatagtttagctaagcgcacaacactgtgctaagccccacatctttgcggtaattgaactttaaccagtgggcttagcgtggatgatgcgctaatcaccacttcttctcgggaaaaattttattgtagcagcgctaagcgtgctatgctgacctaagcccttgatccattttgtaacatgagttat

SEQ ID NO: 147539 - DNA, 409 bp, Glycine max
  unsure (1)..(409): unsure at all n locations
cagtgaggtctccgatttatttgattgcttgcttccttgcttgccctggtccctcttttgtatatgttgaaatttgtggaatgtttattcaaaggaaaaaaagtgtttgagagccttgacttgtggtcttggcattcaccattntgtctggccatttaaagcacttataaacttcttgttgtatactaggcattatactttcagtttggcatcaagttgaacaacgtagtggatacccaggtgagctttcttgttactaggctgcagctttccctgggttttctctcccaatcttataatgtcccgttaagttggcagaatgaattggttcacttccaaatagcaatatttctttcttatggactcataccatttttcttgagcaatattgatttggaatgcacatgta

SEQ ID NO: 147540 - DNA, 441 bp, Glycine max
  unsure (1)..(441): unsure at all n locations
agcttctggtattgacagtctttcttcaacaagngggagntgtctctaaatggatagatttcttcacttgagctcacgtctaaagattatgaaagtaggaacatttattgcttgcactaaatacacgtactccttcatgttggaaaaccactcttgtgagcttttgtgtagatcacttcagcagaaaaccacttgctttaagtcaaagcaggtcagtcaccaatagcgtatgtcttttgatggtgattgacagcttctatatcaataatctcattgattcttcattggtccaacaaatgctatgagaatgtctttgcgtaatgaatcacatacacagagtgatatatgaaatgttaaatgtcatcgatgtaatcttgtatcaaataatgacatgtctcttttattagtgtgacagcacagatgcatattgttaagcgcatg

SEQ ID NO: 147541 - DNA, 367 bp, Glycine max
acaatccttattatatctctgcagatgtaacttttttttatagaaaaaccatactttgcctccttcatgattgagtgcaatactcttccaggagtatttcctattgcccatcttggtccatcaccttgtttgcatgaatcagagtcaactgtagattctaccatagatattcctaacaatcctacactcgagcagactcaaagatcacccatcgtatattgacgtcgtcctcgaattcctgacacagaacttgatgggatgataaccaactgaatacttctactgcacagacaaccgacatggactactgagagatctgactgcccatgtctatgaaagactcgctcatgaatctatctatatactc

SEQ ID NO: 147542 - DNA, 311 bp, Glycine max
agcttctccagcttctcttgccatcatcatgtacaaacctctactgatgtagataaacactaccaagaaagctagcatctctctctacaataattgagagaattggcaaaaaaatatggatgtatactttcttttatatttttaccaacagtacatgaagatgttgaagttgaacaacaatctattttctaggcaagcgaggcagactaaaattgaagactaccagagcacaaaagtgaaaaataattgtgtccatatgttagctgatagaacctaaggcaatccgttttgccaaattcataaccaactgt

SEQ ID NO: 147543 - DNA, 355 bp, Glycine max
actaagctaaatttaaacatttgatgaacggaaggatctcacttagtgatccactggcttaagggtttcctaaaggttttaagtcttaaaaatataaatttttttttaagcctaaatttatgaaaatgccctatttttaattttaatatagtacctatttatttttataacctaaaataataaatttggggtccctcaatataattgttaaattttaagttcttataaagttcaaaagtatacttgttatattaagttgatcttttcgtcaatttataagactaatttgatctatttaatggcatctaaccatggtaaaaaaattgatgaaagaatcatttagttcaaagtacct

SEQ ID NO: 147544 - DNA, 456 bp, Glycine max
agcttgcacaacaagtaactaaatcttttttttacaaaatgaagtaactaactaactaaattatactaatatatagagttactacttagaaggaagggataagctttgattaaacccatctaatatacctatttaaactaattacacaaaacaaagcccaaactcccagcccaattatttaagtgcagagattctgacttctaagccaaatttgaaactcaaaatggaagaaatggcccaagcttatttgtgacaaaattgaatatactcttcttagctttccagggactactcacacgctccatttggagttatgtagtgtcctataggtcctgcacaattatcaattaagctcaatcattttcctaagaccaaaactaagttaaagtgagaaaataagggtcaacgacatgtcaattgagctaagaagaatagaaaaatactaaactacaagag

SEQ ID NO: 147545 - DNA, 338 bp, Glycine max
tctggtaatcgattacaggatgttgtaatcgattacaagctgcctgttcatgtgtaatcgattacactggatggtgatcgatttccagagcctatcctaggctagtttctaagagaatatctatatttatgctcaaatacatcctatatgactaattttcactactaatacactaaattcaatcattcaattactatatacacaagaaatcataaattctatcataaaaacaagaattctaacaagatcaaacaaaataatctactatctaaaggtaaaagtcaatcaaacaatcaatcaaccaatcaatccctattgttctaaatctcttacatcta

SEQ ID NO: 147546 - DNA, 292 bp, Glycine max
  unsure (1)..(292): unsure at all n locations
agctntagngaataaatctatccagttagatggcttaaacacttgttgaagaaggcctataaatactaaaagctttgaagacatgattacaaacttatgtgctctcattcaaattctttgtgaaaaagctttacataaattgtcgtatagttcataaatctcaaaacaccttgaacactttgagagataagattgagtgttgagattgtatatttgtctgtcgattatgagttagtcattatgtaaacaaacaacaaatctgttcgatttgcatactgctagttaggacctg

SEQ ID NO: 147547 - DNA, 441 bp, Glycine max
  unsure (1)..(441): unsure at all n locations
agctntttccatggcctcctatggtggtgagctttttcttgactcatcttctccttgaagtggcgtctcctctctctcttcctttctccattccgctgccattaatcttccaagaagcaaaggaatccattgatgaagaagatcctaggcctacaagctccaatggagcttacatcatgtggtatcaagagcatcttcatctaggtgatgttcttttgcttcctctatcttttagttcggtgaattctctttaattccttgttctacatcttattctccatgtatatcctccattgtcttgtggtttggtgctgtttanagtagatttaaaaaaaataaaccgattaaatcttagatctacacttgttcttgcatttctttggttcaaaatttggaaatctactctcgaatcttgttttggtgtgatttagggtctatcat

SEQ ID NO: 147548 - DNA, 305 bp, Glycine max
agctctgaccactggtcttcctttccgcgatgcttcttttcatgtccgcctgagtgggcttatagcctaaaccatacttcccacgatttccttgggtttttatcaggctagttatgccgccattggctttgcctatacccatcccgggttcataacacgttccccaacataatctcggccatcattaccgccgcatctgacagacaaggttgcccaaagagggagtccactgaggaaatgctgaccacctcaaaagactggaaagcgggttctaacgattcttctgcggctttcacaataagcat

SEQ ID NO: 147549 - DNA, 438 bp, Glycine max
  unsure (1)..(438): unsure at all n locations
cgcttctacttatgaggcagggcgggctttcttcactntcttgtctccaacgcgagctttgaccactgttcttccttcccgcgatgcttcttttcatgtccgcctgagtgggcttatagcctaaaccatacttcccacgatttccttgggtatttatcaagctagttatgccgccgttgtctttgcctaaacccatcccgagttcataaccgttccccaacataactcgggccatcattaccgctgcatcggacagacaaggctgcccaaagagggagtccacggaggaaatgctgaccacctcataagactggaaagcagtctctaactattcttctgcggcttccacataaggcatggaggatgggcagcttaccaagatagtctcctcgcctgacacgatgaccaagtgcccctccactacgaatttatcttttg

SEQ ID NO: 147550 - DNA, 440 bp, Glycine max
  unsure (1)..(440): unsure at all n locations
agcttgcagatatggtcttcgcctttgatttgatcaatgngggtccgaaaagaggcaaatttgatcatcctactacgacgactgagaaaactggggcaaataaagagggtgaggataagggagaaacccatgttgtgactgccattcctgtacgaccaagtttcccaccaacccaacaatatctttactcagccaataacaaacctcctccttacccaccacccagttatccacaaaggccatccctaaatcaaccacaaagtctgtctaccgcacttccaatgacgaagaccacccttagcacaaaccaaaaaaaaaaacacaccaacaagaaatgaattttgcagcgagaaagcctatagaattcaccccaattccagtgtcctatgctgacttgctcccatatctacttgataattcaatggtagccataaccctag

SEQ ID NO: 147551 - DNA, 430 bp, Glycine max
agcttgcccaactaaatccatatatttatgtacaaaatttcttattagttagtttttgaagaaaatccaagatgagggaccggatgggaccactcaattattttatttactctaaataaaaaagtgaatatgtcataatgtattattggcattagcgtaatgcattattaatgagattagctattcatttatgtcttttgtggaaaagttcacatgtaaacaatgtagctatgagctggatcctccgagtttgtaacatacagggtttccttcttttcactggaaacagaaaaacatgacttaagatacacctatatatatataataaaggtggccaaaaggaatggttctataagtgattctacacatagaataatttgagaatttggacagtgtttaagaagtttaaagtatagtagtacatatagga

SEQ ID NO: 147552 - DNA, 279 bp, Glycine max
  unsure (1)..(279): unsure at all n locations
gaatgatttcagatgagtcagaaccaatcaagaatcaggagaaagattccagagaaggttcaagtttcaagttctcaagaatcaagaatcaagaatcaagaataatcaagaacaagattcaagactcgagattcaggaatcaagaaaagactcaatccagataagtacttaaaagttnttcaaaacattgagtagcatatgaatttttcacaaaaccttttaccaaagagttnttacactttggtaatcgattaccagtttattggaatcgattatcag

SEQ ID NO: 147553 - DNA, 424 bp, Glycine max
agcttactaaccatgcttactcaatctctctctcataatgcatcaataaagtattttatgatttatttacactgctcaggtcgtgaattccacgaccccaaatgctcaatcaaaaaagcaaataaaaacaaaaaaacaaaaattaaatcaaataataaaaacaaaataaataaataaacacctttttcaagaaaaacaatttttttttaggaaatcgaaagctaatcaccaaccaatatttagaaaaggcatacaggaagagatcacaacaaattacatcaaacctcagaaaaaatagataagccacaatgctaaaataccatacagaataatctacatgtggatcgttaaatcgagcggagaggtgatatttcacagtcttgatcataacgcttataacgtaattcttacatacttcaatctc

SEQ ID NO: 147554 - DNA, 210 bp, Glycine max
tccccttccagactttttttttcagggagaagatagcagttgcatgcgtaactattggcgccacgtgtttctttgataggggctactaaattcaaacccaccaccaaaatggcttagaggaagattcgcctaaataaaggtatggtttgtgcacttgcattccctctaaaatatgcgggccaaaaagtgctgacaacaattataacgaaa

SEQ ID NO: 147555 - DNA, 441 bp, Glycine max
  unsure (1)..(441): unsure at all n locations
agcttaaaggagaatttcattgtaaactattacaattagcaatgctttatggtgattaatgttgaaaagcgaggtaccaagaacacaagtatcgaaaaaatgataatgttgcgatagaggaatggacttgcacaaatagaaaagaccgggaatgaatattatggagaaagtataagcagcgcttatagcaactttagaggggcctggactcttccacaataatatgaattctgatagaaatcaaattgaaacaaaactggaatgaatatttatattaggagaacacccccttctgttgattcccacatctaaaatgcgctgctccaacaaatattttaagcttctttaatcactattaatgacaaaatggcccacccnccaacaaatagtgcctccatttttgcactgcatacacaatagccatgaattcttttctacata

SEQ ID NO: 147556 - DNA, 429 bp, Glycine max
  unsure (1)..(429): unsure at all n locations
agcttgtgcaaatcaagtcactcctatcatttatctctagcatgcattttctttctttctttacccactcctcacgtttggttttttagggaaaaacaccataactaaacgcgccacaaggcatccctatcgcaccagatccaaatctagaacgatgggtgatcaagaggagacacaggaacagatgaaagccgacatgtcggctctgaaagaacaaatggcctccatgatggaggccatgttaggtatgaggcagctcatggagaagaacgcggccaccgctgctgctgccagttcggctgccgaagcagacccaactctcttggcaactgcgcaccatcctccctcaaacatattaggacgaggaaaggacacactggggcacgatggcagccctcacctgngatacaaccgaacggcttaccctta

SEQ ID NO: 147557 - DNA, 343 bp, Glycine max
  unsure (1)..(343): unsure at all n locations
tgcccgatgctagagttgtcgaagctttatatattccagacctgcccatcctctggtgtgcttgcacagtggtcgcctccaaatcatggggtggcccatgaactgataanagcaaactactagcccctcacctgtgagtgcaagcctcgattaagaattaagggtggaggaccttgagttctctgaaggcgcagatgtggagccctccaaaagcgaggacgtgcagccctttgaaggcgaggacgtgtagtcctatgaacgcgaggacatgcggcctctgaaggcgatggcgtgtagccctctgaaggcgagggcatgtagccctcttaaggcgagggcgtgt

SEQ ID NO: 147558 - DNA, 438 bp, Glycine max
  unsure (1)..(438): unsure at all n locations
agcttaggaacccaaacttgtttatcttctatgcaagaaaacatactcatgactatggaacccaaaattggttntagaattagaaaagcatgaaaaaagggacttgtttgtaagaatttggactgccccatgattggtactttgcacctaagtaatgtgggaaatgcttttcaatggtgtgtagatatatgtgtaaatataaggggcataaattcctcaccaagtatgaataaattgttttcctaaatgaatgtatgatggcatggaatgcccttttgaatgcaaatgtgtgtaggatgtaattagctctccgatatgcatataaataaatatgagagaaacaataaagatttgtatggtgtacttcanatgtatgtaagtagtttgtgatagcaaaatctttaggatatcaaatatgtgtgaagtttgatgcaacac

SEQ ID NO: 147559 - DNA, 322 bp, Glycine max
  unsure (1)..(322): unsure at all n locations
ttcattcatcaaaggtaccataagtgttacacatgcttctatttatagactacgtagctccttgagaactttctgagaaactacctagagaagctctttgagaaaacttccttgagaagctagagcttatctacacacacccctctaataactaagctcacctcctttngaagcttccttgagaagattcctaaagaagctagagcttagctacacacacctctctaatagctaagctcacctacttgagatgagaagctagagcttagcttcacaccccctataatagctaagctcacccccatgcaaatatacatgaaaa

SEQ ID NO: 147560 - DNA, 439 bp, Glycine max
agcttcagaccaaagtaattcataatctaggtatctaaaacccctcattttagttgaatttcaaggtttgagaagtgaaaatgagaatggggtaattttggagcaaactctcatctcacacaagtctataacattaatctaaacttgctcaaactggttttacgactaaaattccaccaaatcaaaatttgacccctcaacacccaatttaccctagaaatggctcttgttttcactttggtcactcattttcctcatttgctcagcccaagctttcccacaagtcctaaatgacattttaaactaggatttactcactttaacctccaattaccactaaatccagatttagcttttcaaatccttaaagcatcacacttttccactcatatcactacattctcactttttaaccctaggttaactctacccttcatct

SEQ ID NO: 147561 - DNA, 324 bp, Glycine max
  unsure (1)..(324): unsure at all n locations
atcatcaaccatacttatctatgggtttggctcaatcttggaaagaaaccttatatgcttgaaaagaatccttgtctagaccttgtcctcaggatcaccaatgaattggtactttggatgatgtttcctcagccagtatctagttggttctctaacttcttcaagttaatcatctagtggtgagtggacgcaagttgcttgacttgtgtgtagtgacctgacattatccatttcatcttcaagactatcactctgcttgcgactagctatgcttaatctattatgctctcatacangttaagttccttttgctgcatctaatca

SEQ ID NO: 147562 - DNA, 450 bp, Glycine max
agcttatcaaggtgatacaatttcttgatagttgatgaataagagaaaacccaatggaaaagctactcagagtttacaaattcaatgcactatatatttaccaaatgtcaaataacctataactataaagctaccttactcattgcgtctgaaacataacactttatcatatcctcatataaatcagctaatcgatgtatttctggtgcatcaggcgaatgttctaggaccaaataagcatattcacagaaagtgggagtttcaggagcaaagaatatagggtagtggagaaattttggaaattctgctgagagaaaaaacacacagcatagagagagaaaatgaagtacctaaatagcaaattgcctagttcctcctgccacaactgtaacaaggaccacttttccagattccatgtgtcctgccctttcaggaagaccaagacacgag

SEQ ID NO: 147563 - DNA, 165 bp, Glycine max
ttctcccggagcgacgcgtccaactcaaggacgacgaggatactgattccaggagaaaaaggcgccgcgggggcaccactggtacccaggcagttgccaaaaagctggtatgcagtgcaaagaggggaaaacggaggaggacgcacacccgcccgaacgggaaag

SEQ ID NO: 147564 - DNA, 437 bp, Glycine max
agcttctagaggttgggcttatctatcccatcctttacagcgcttgggtaagcccaatacaggtggtaccaaagaaagggggaatgacagtcatccgaaatgagaagaatgacttgataccaacacggactgtcattggctggcgaatgtgcattgactaccgcaagctaaataaagccacaagaaaggaccattttcctttgcccttcatggatcagatgttgaaaaggcttgcaggtcaatcatactactgctttttggatggatattcaggttataaccagattgttgtggaccccaaagatcaggagaagatggccttcacatgcccttttggtgtcttttcctatagacggatgccatttgggttatgtaatgcaccagccacattccaaaggtgcatgctggccatttttcagacatggtggagaaaagta

SEQ ID NO: 147565 - DNA, 365 bp, Glycine max
  unsure (1)..(365): unsure at all n locations
tacatgcacctttaccattgcctatgttaataggattacgaataagaaaagaaaaagaanaagaagtcaaactggactcaatgaggcccagcaaaccaaaacaaaaaaagaggaaaataactgatggaatagattgaagccaatgactgcagtagagcaatgactgcaacagagcaactataaaagtggcccatttgtgatcaggaatagattgatcatgtcacaatgccaaaaggactcttgacctagaagaatgtatgttctatatttagaatatcttgacctcgacaaanacagatggcattgataaataaatcaatattagaactnttcatacacagtagcagtactcaatcattcactta

SEQ ID NO: 147566 - DNA, 447 bp, Glycine max
agcttgggaaagatctaacagactcagcctattgttcatgagaatgactgttgcagacaatattaagacagctctccctaaaaccgatagtgctaaagagtttatggggttagtgggaaagcgctctcaaacagctgataagtctcttgctgggacattaatgagtacacgaaccaccatgaagtttgatggttcacgtactatgcatgaacatgtcattgagatgacaaacattgcagcaagacttaagaccttgcgaatggctgtgaatgagaacttccttgttcagtttattctaaactcattaccgtctgagtatggcccgtttcaaatgagctataataccatgaaagataaatggaatgtgcatgaattgcacagtatgttagtttatgaagaaacgatgcttaagaatcaaggaagtcactcaattcattatgtaagcca

SEQ ID NO: 147567 - DNA, 359 bp, Glycine max
  unsure (1)..(359): unsure at all n locations
ttagctttaggtgttatggatggtttcttcttttttcttgtacaantttttcccctaccatttagccttcatgttgaatttttttgtccaggctattgatcttctacagaagaaccacgataatgctaaagccagtttagaagttcttgctgctgatatgcaattcttgatgcaggttttgatgatgccaaaaataatttacttgataatggttgtcatcatcaaaacgggagagaatctgaatcatgcaagttctgatgatgctaaaaagaattacttgataatggttgcatcatcaaaaagggagaaaatgtgaatgtttgaatacaagtctttgatgattgccaagtattatctaa

SEQ ID NO: 147568 - DNA, 456 bp, Glycine max
tctgagtcacctgcggcatgcaagctttcataagtgaaatcaggtgcagccatctctctaagagtcctctcacgaggtgtaggttgagccatgttctcagtatgaaaattattagtagaatgctcaaaatcagaatgttcaaaattaccagcaacagaatactcagaatgctcaaaatgcacagaatgatcaggatgcacactatgcctaagtaatctatgaaaggttctatctatttcaggatcaaagggttgtaaatcacatggattgcccctagtcatgcactacatgcagctaatcatgtggttctcaacaagcaccaagggagggttaaaactacaactatagtcaaacgatatccaaatgagttgaaattttgtgagcaaccccctaaaatcatgaaaagatagcacaaaaattttcaaactaaaattcaaagtctaactaggaaaacta

SEQ ID NO: 147569 - DNA, 364 bp, Glycine max
gagtccattgcctccctcgcccagtattatgatcagccgttgaggtgcttcacttttgggaacttccagctatcacccatggtggaagaattcgaagaaatcctaggatgtcctctatggggaaggaaaccatacctcttctcagggttctatccctcattagctagaattcctaaaatagtccaaatcttggcgcatgaattagaccgccaaaaacaagtcgaaaatggggtggtcgggataccgagaaaatgtttggaggtaaaagcaagaatcttggccggtaagtaccaatgggccccgttcatagacattctcgcactgttgatctttggaagaaccctcttttcaaatatggatgggt

SEQ ID NO: 147570 - DNA, 412 bp, Glycine max
  unsure (1)..(412): unsure at all n locations
agctttctcccaattatgtaggtattaatactgtggttggagagaaaaatccttcctgaacccattattcggcatcatatgcaggaactagactcgtatagcagttcagtttctgcaggtgtccactcacaccgttctttaagaagagacaggccttttgatgaccctgttagagacatggagggtatgcttgatgaatatggaaggtatgaaattgttggaagaaaatattgactttatgattttctcgtacctctgcaagtgtgtttactgtttactcaagttgcatttggtcttgcagcaactcaagttttcagctacctggattttgcatgccccgaatgctcggagatggagggagtgattctgatggaagggagttngaggctgtgtcacctgatcatggatttgg

SEQ ID NO: 147571 - DNA, 268 bp, Glycine max
catgcaagcttaaaatatatataaaactgtattttctttcttatgagacaatactatggttaaaatttaaattattaaacttacacctttcaataaaaagacaattatatttgataaggaacatgtaagtatgtaataatattgacacattcaaaaggaaaaaatgcccactattccctctatccttcaaatagagacacatgcacataagaaatgagaataaacaaataggtactgagagctattactatgtgtcaaagaaaacaat

SEQ ID NO: 147572 - DNA, 449 bp, Glycine max
  unsure (1)..(449): unsure at all n locations
agcttcanaatagaaaactaaccgttcgacaaatgaggaacgacaaagaacggatgaagaacgatgaagaacgatcacggaatcgaccacggaaacgttatggaagcgcatttccttccaaaatgtcacaaaaccctatgaattgcatgacaattagtgttaagtagctcaattcggccggtaagaatccaaatgttggcaaacgatcgtcctcggatgaaattagggtatgatagttgcccctctttacttatcttttattggagataaaagggaagtaaagataaagacactaatttcgttcaagcgatctcaccctctgaccgaccactagtgaaagcccaaacagcgaaacctgtcaaaagaaaaggcataagagacattaggtatatcaacacaagatcttgaaggtcttgcaaagtaaggaagacatcaaagtcttaatgacg

SEQ ID NO: 147573 - DNA, 340 bp, Glycine max
  unsure (1)..(340): unsure at all n locations
tctcctctaatgactatggcatcatttctggcactaaactgcttggagttggaggccctcttctcgattaaaattctggcttcagcaggagtcatgtctccaagggctccaccactggcagcatctatcatacttctctccatattactgagtccttcataaaaatattggaaaagaagctgttctgaaatctgatggtgggggcaactggcacatagtttcttaaatctctcccagtactcatacaggctctctccactgagttgtctaatacctgagatatccttcctgatggctggngtcctggaagcacggaaaaatttttctaaaaatactctct

SEQ ID NO: 147574 - DNA, 348 bp, Glycine max
gaggaaaaatgtaatgcgcaaaaaaagtgttaaaggagatgacccacatgggtgcttgacttatctaaacttggccccttctttcttaagagaacaagtcaagcaaattctcacacaccttgtgcccgtacatgggcaacacctcagcgagttgttgtttgcgacatcaatcattcatcacttcattcaatctgggttttctggttactgaggtctggtttcatttcctatcaatgacaattgatagatacccttcatcattctatgtgcaaaatgcattcccattttttctttattcctaccttgaccatacatgtcccttccttttcatcctacatttcataattc

SEQ ID NO: 147575 - DNA, 361 bp, Glycine max
agcttgacacaatgctcatattatgacagttttcaaacgcttcttgtgagtgacaactctgtattcatcccaagattttgtgcctcacaattttatttattgatttattttacaggaaatattggatcgttgacaagatactgaattatggtacgcggagcatagggaccatatcagggaatgcaacttaactccggagaggctcattagaatggatagttcgatgaatgatgtcataacatggcttgccgaaccttgagatatccttgagggccttattgagttaccaatgatgcactacgatgataacacagatcgtgctctctaaatgcataaaatcgcaagggatatatgttatatt

SEQ ID NO: 147576 - DNA, 445 bp, Glycine max
  unsure (1)..(445): unsure at all n locations
agctnnttggtttataaataaaagggtgttctctttttctattattttatttgagcaatgccacatgtctccatttgagtggagcaagaagggcccactttccctttttgattgtgacccatactcagtcacaaaagtgaggaaaatctgacctttgaaacgctaaaatcctgcatcgatttgcgtgccgtttctctggttccaattcctcgcgtttctctgcgtccgtcggggccagtttttgaaagtaagcaatatatatatcaaaacactcagaataaaaccccgagcgtggttcagaggttggtttcgttaaatattaagtcgcacgcaaaacgatgatgttttagactagttaattaagaattaacccataacctnctaattatggacttctctttcttaattagcctaacccgcatatcttgcccgcactatttctact

SEQ ID NO: 147577 - DNA, 384 bp, Glycine max
  unsure (1)..(384): unsure at all n locations
aaagttttttaaaacatttttttccaaacagtctttcaaggggaaaaaggctcacattcattttcttctacatcatattcaaacttgtccaaataaataataaagtaatctcgtctcacacaaggtcctctaaacttcatacaattaatatagaacttatatcctaatgtcacatcctatcatagtgttgtgttcctgtgtcctctagcatgaggttcttcatagtcatccacctattcatctgtttccccgaacacaagttcaagatcatcacaggatccaaacacaacaacacacagggagtgagtcatcacattcatagcttatagagagacangacaataaatatagtattatataatgagatccacttgcttaacatac

SEQ ID NO: 147578 - DNA, 314 bp, Glycine max
tcaccctcagttgacttgaaaacttgcctcagggtgaaggaagcacatgaatggtcgctcttttggccggtaaacatcaatcgcatgattggtaattttggctcgttaagctcatcaaagttgccttcccaatgctggtttaaccaatcacatatgacagaaattggtatgccaaattgcatggggtggtctttcttccaagaggatgatgatgatgaagttgaagtttgaagaacattctgtattacgtgatggtggtaaattcataagatcgcatattataaaagcttagatgccgtgcacaataaaacctg

SEQ ID NO: 147579 - DNA, 475 bp, Glycine max
  unsure (1)..(475): unsure at all n locations
ctctgagtcacctgcggcatgcaagcttcanacctctcacataggagaagacatagtttagaagctgcatctccaaacaggtgagtttgaatccttacatatgaaagagtcggagtccattttcgattatttttcaagaattctcactatttcaaatcaactaataataaatggtgagaagtcaaaagatgtaagaattttggagaagatactacgcttgttagatcccaaatttgagcacattgttgtgacaatcgaggaaaccaaagatttagaaatcatgatagtagaacaacttcaaggatctctacaagcttatgaggagaagcataagaagaagcaagagatcattgagcaactcttcatgatgaaactgaaggagaaggaagaaagtcaaggaaatgagagaagtcaatgagaccgaggtagagggtcatgtcacagccgagggcaagntggacgtggcaacaatgga

SEQ ID NO: 147580 - DNA, 304 bp, Glycine max
taaccaaatttaataaagtatcacttcattattgcaatagaaatatgtaaaacctatactgcaaagcttgagcacagaagagtcagcatgtaaaattggccatgcaagtcttcaaatgccctaaaaatcaagtaagtgcaatataccaacacaatctgtatctgttgtatggcaataatgacaatacactcctgaaaaaatccatattcataatccaacacttgcaaggcattcatactaataatccttataaaagaaaaactattggccaccactgatggatatccaacagacaccggctaca

SEQ ID NO: 147581 - DNA, 440 bp, Glycine max
  unsure (1)..(440): unsure at all n locations
agcttgtggttggattgcaatctctaaactcccataattagatcaaactttntgatttgatggtctattaaatgatataggtaggtatcaagggtgatataaaaatagcaaattggtaggacgattctggtagattttatttattagcagtagttttttttttctttgtagtattatataatttaattgcacagctttactagtaattttattttagcaatacatatgcaacatgttagtgtctatggttgcatcgcaacaacattattttccaaggttctgcatattaaggatgttaattcggtgttgatgcatataaagacgatcttgtggtcttggatctgcattaaagggggtttggcttatggtgtagcttttggttcatggtacaatattctcctattgattgtataagtagatagccactggattctctttta

SEQ ID NO: 147582 - DNA, 414 bp, Glycine max
  unsure (1)..(414): unsure at all n locations
actagctactatatgtgccttggattctagaagagttttgtttgattttattcattctgngcgcattcttttcatatgtatgattgcattatcctcttgatttctttgttgaacgtgatctcaaacttgtttatttccttacaagcatgcttagttatgatatgccacgatcattggttgacttgtctatcattatctactatcatcgtcaccactagtttatattttgtaggatgtgaaatatcattcaactgataaaaattagatcaaacataatatgctctatattattatttggcaatttgtttacaagtgataaatgtctgcataccaaaccaattaagtatagtggtatcatggctgacacttatttgagatatttaacacctttgctattggtgtctactgcataaa

SEQ ID NO: 147583 - DNA, 416 bp, Glycine max
agcttcatgatgatgaatgcaagttgttttttgtagttttaatgatgacaaagatgatgacaaaaagcccaaagaatgattcatcaagaagattcaagattcaagaataatcaagatcaagattcaagactcaaagattcaagaatcaagagaagacttaatcaagataagtattaaaaattctttcaaaacattgagtagcacaagaagttttcacaaaatcattaccaaagagttttactctctggtaatcgattacaagaatgtagtaatcgattaccagtgttttaaaacgttaagattttcaaaattcaaaatgaagagtcacatatgctgatgtgtaatcgattacaccttaatcgaatacaagtgacagttttcgaaaaatcatttccaaagtacaattcttcaaggac

SEQ ID NO: 147584 - DNA, 443 bp, Glycine max
  unsure (1)..(443): unsure at all n locations
agcttcaagccagggccagattctttgtttgcanaggcttcttcaagaaaaaatcaaaactccctttgcaaatctaatttcaggcttaaataggtggccttgttcgtgctcgtgcgcttagtgcatatatggaccgcttagcgcactttagtgaattttggctcagtgcacttctctcgcttagcggatgagttgaagcagtgcgcttgaagacctggagctgtgtactcagcgaacttgacaactcatcttcttctggattcttcctcgcgcttagccactgagtgtcgcacttagcgaatgctccctaagccagcatattggcttaacgagaaggtgaaaacaacactttttccaattagcctaattaacctgaaattgagagaaattgatttttaaacacacaaaacacaagtatatattatctattaccaatatttaac

SEQ ID NO: 147585 - DNA, 445 bp, Glycine max
  unsure (1)..(445): unsure at all n locations
agcttagactaagttcagcctaccatcctcagactgatggtcaaactgaacggaccattcaatccctggaggaccttttgaggtcatgtgtcttagagcaaaaggggagagctttctttcattgatagagttcacttacaacaacagttntcactctaccattggcatggctccctatgaagctttgtatggtagaaggtgtaggacacctctatgttggctaaagccctgagaagacctcaccttaggacttgaagtggtacaacaaaccaccgagaaggtcaagttgatccaagaaaggatgaggactgctcagagtaggtagaaaagttatcatgataagaggaggaaagacttggaattcgaggttggtgatcatgtattcttgagagtcactctgtggactgtggttggtcgagcattgaaatcccaaaaactaacacct

SEQ ID NO: 147586 - DNA, 442 bp, Glycine max
  unsure (1)..(442): unsure at all n locations
agctttgaaggttcagcaactaagaatgattctggactaaaattcccaacaaaataagtaaatatttaacactcaacgacaacttagtccaaatcacatggattgaaaggattaaagtttatgaacaatgatgaacatgggatgaactcgaagaacacaaatgaaaaactatatcaactaaacaagaattgaagaaaaagacacattgggaaattgaaagaataaattatgaccaaacacatgttgtaacaaaattgcacaattcaaattgagcaatcaaaatttaggggtttaggattacccaaaaatacaaaacatgatggatgaactcaaccttatttccaaccctagaaccttgctctgaataccaaatgatgtgaatcccctttgccttgcttcaattcaaatcaattctaggatgaaattngcacaagaaattgag

SEQ ID NO: 147587 - DNA, 422 bp, Glycine max
  unsure (1)..(422): unsure at all n locations
tgatttatcaacaataaatagagttttaggaaaacaatgagatttttgtaattaaataaataagaagaaatagttttattgattaaaccaatgattttaaagtaaataaaataagtatatgtccgtagaaaatgaaaaaaaatgatgttttatttattcatttgatagagagtaaaatagagttcatttttataaaataattaaataaagaaatataaagtaaataataggctgagagtaccctaactataaatagagacatactaagtcattttttacattttatgatatatctctacactctccctctcaaattcgttntcccttcttcttttcccaaattctctcgttttcccgcatacagtcaaacatgaagattaagcacaaggttcggaactcattttcgcacatncctactattg

SEQ ID NO: 147588 - DNA, 388 bp, Glycine max
caagcttgatgcaacatttggagaggttaatgaaacaacgagatgatgcgctccatgagaggttggatcaaatggagaatagagatcataatgaagaaaaaaggaggagaagagggaatgatggtgttcctagacaaaaccgaattgatggtattaaactcaacattcctccatttaaaggaaagaatgatccggagacctacttggagtgggagatgaaaatagagcatgttttctcatgcaacaactatgaggaggaccaaaaggtgaagcttgccgccacggagttttccgactatgctcttgtgtggtggaacaagctacaaaaggagagagcaagaaatgaagagccaatggttgatacatggacggagatgaaaaagatatg

SEQ ID NO: 147589 - DNA, 303 bp, Glycine max
  unsure (1)..(303): unsure at all n locations
tgaacttgagccaaccctatagccttggtagcttccttgaaagttttattgaggtctggcatggttatgtagataatgggcatcctcttcttgntatctatcaccaggtgctaaatagtggccattctgatggttaccaccacaaaaatcacatctcanaattngttgaacttggtgagcttgatgtgntttttgtagaagcaagtttcatgatgatgaaccaagcaatnttgatgatgccaaaagcccaagtgattgattcaagacatcaagatcaagcatcaagaattcatccaagattca

SEQ ID NO: 147590 - DNA, 449 bp, Glycine max
agcttgtgctaaataacttggtatacactatatattagtatataccatgcacgtgttaggtttggtaaaataattgaacaaggtatatatcatctttatgagctagctagagatttatatttatgaaacgaagcaaggcatgtgggtgcctttaaaactggatagtagtagccagcaatgtttaggtttttggacccttctttgatttctttcctttggctataaattatttttccattcctagcaggggcaatcatctctttgttttttctttaatttcagggtcacaagtatctagacaaatgagtctggtagctacttgaatcaaactgttccatgtagtgattgtccaaattcacaatctggtagtagttgcaatgtggtagaattgatatcaatatcaatatcatcaccaccccacatctcaggggcaccaaacagcagtcact

SEQ ID NO: 147591 - DNA, 275 bp, Glycine max
atcttctaagagatctatggattcccctttccaagtccctcgtactttactgtgatatcatagtgctcttcacattgctaccaatccagtctttcatgaacacaccaaacacttggacattgattgtcatctagtccgtgaaaagtcccaagttggactcatgttactactcccagttccttcttcaaatcaacttgcggatatattcacaaaggctctccctcctcaatccttcagcaccaatctttccaagctgcagttacaaaacatttttg

SEQ ID NO: 147592 - DNA, 445 bp, Glycine max
  unsure (1)..(445): unsure at all n locations
agcttctagccaaatgaacttaccttgacttaatttctttgatagcccttttgagccttgtttccatttccttgttttgaagctcactacaagccttaagtgaaaaaccatgacatcaccatatccttaaggaattttggagctttggaattgttttgggaataagtgtgggggtttttgtttcattggataacatgttttgttggccatgcttcatgatatattttgagccatacttgatatacattgcatattggttaaatgttggacatgctgaatatgatgctgtttctcaaaaggctacagagtgaaaaaaaaatcgacaaagaaaaagaaaaacagttaagctgagtgaataagaaaagaatgataagactcttgggtctactctttatgtttaaatattatctgtacttctctttatnttctcatggtttcttaatat

SEQ ID NO: 147593 - DNA, 370 bp, Glycine max
  unsure (1)..(370): unsure at all n locations
cattctgatgtcattgatctttaagaagcaaagaactttattgatgaagaagatccaaggcctacaagctctatatggagctacaccatgtggtatcagagcatcttcatctaggtgatgttcttttgcttcctctatcttttgtttggtcaattcactttaattcattgttcttcatcatcttctccattgtcttgtggnttggtgatgnctanagtagatttaaaanaaaattaagtcgattaaatcttcaatctacactcgttcttgcatttctatggttcaaattttatagatctacttttgaatcatgtgtttttttggtgaatttaagctctatcatttttcattcataatcttcttgggttga

SEQ ID NO: 147594 - DNA, 447 bp, Glycine max
agcttgcatttgaaattgcgaaagccccactccatcattaggattagtacctgacatctcaaacaaacaaatcaaacataacaagacaattatagttgctgtttgaatacctcacccactcaagtgtatcacacaattatggcttttctctaatgaaacactcttgccttttaccactctaattccccttgagttcttaggcaattcaagagattatggccacaacaaagaacaattcaccaatatgtgtaaggtaaggctaaagagacaaggaaaaggttaaccaagaaaaaggctaacaatgtttttaggcacaaatgaaggaaataaaattcagaatttaggaattcaagtaacaatccttcatgcaaccaatatattaccttaaagagattttttttaaagttcttcaagcatgaaccattcagcccaattttttttttttaa

SEQ ID NO: 147595 - DNA, 252 bp, Glycine max
aactctgagccaaatctaatgacaataactctgtactcggatatctgattgtgtccatagtatatcgagacgctcgaaattcataattgaagctttgagcaaaatcaaacgactataaccttttactcggatgtccgattgtgtcccgtagtatatcgagattctcaaaattcagaacagaagctctgagcaaaatcagatgacattaacttcttactcggatatccgattgtgtcccgtaatgtgttcaga

SEQ ID NO: 147596 - DNA, 456 bp, Glycine max
agcttgaagaaagagtcatagatgcttttataaaatctataatttatagttggtaattgcagtaggtattattgaactcatcacctcacgaacgaattctattaattattttaatacggttaattctttggacataaaacataataacttgcatttgaaggatcaaatcagtataaagtaaaataaaggaggtaaataaggagaaattgtttatctttgaaggacataatgagaaattgttaagaaaataatcaaatactactgcccagttagatactttgacttggtgcccaacagcaattagagtgcatcgacaatttctattttgacttagtgtgcatgtgcaacagcaattatagctttcaacggtcaaggttctcactgccacattatactattgtgcccaagtggcacttatatatctacaatagtattacacaatataaaggagtaccg

SEQ ID NO: 147597 - DNA, 363 bp, Glycine max
attccaaggctaaaaactaggaccactcaaaggtttttggttccccattatttatcagtaaaaaaaatttgtgaaagtgtatatataattcatgctcaaatttaattttcatgttcaatttaaactttaatagacaacaattaatggtgatattttcaatattggaggaccaatagtacaatgaaaattttaagtgtcctatatcttttgtaggcaacaaataggttgatatgtgtctaatacttattttttaatgagaacacgattcctactcattccatgaccattgatcaaagaagagtttaaataatttaatacctcttgaggatatcctttatatacaggaacaattacttgatgtca

SEQ ID NO: 147598 - DNA, 166 bp, Glycine max
  unsure (1)..(166): unsure at all n locations
gcaagcttggccttggcctttcttgtcttcttctctttgngaatcttcaactgagcaactgtaggatttttaggcagtggccaaactgcatagtcttcttctatcggttccgaaagaactagtgcttcaagatgagttggcatccttgcagcccataggtatgacc

SEQ ID NO: 147599 - DNA, 59 bp, Glycine max
agtgatatctactatagagcttaagtgattaacttaaaccaaattcaagaagttgaaat

SEQ ID NO: 147600 - DNA, 446 bp, Glycine max
agcttagcctataaaaaagagacagaaactgctctgcggaaatcggctataaggttcatattaatgagtcgttgattataatcacatcgcctagcttccagttgaaattaaaaaataaaaataaaaatcttgcctaacgactatgacttctaattttagtgtagattagtgtgaaaagaagaaagaaaaaataaaatggtgaaagagaagataaatatgatgggaaagagagggaataaaaagaaaagtgatatgataaaagaaaaaaagtatgtattaaggtttttttctctatatatatatatatatatatgatgacggtatatatgaaaaaaaattgtatattcatgttaaacttcaaaatagtcagataaagaaatacttcaaaatagcagataacttaccacttatcatgaaattatattttgtcttaaatatacaaaata

SEQ ID NO: 147601 - DNA, 384 bp, Glycine max
  unsure (1)..(384): unsure at all n locations
cctacactcactgagctaccactgatggtacctaacgactaacccttagtgaaaggaaggttactctccttttgggccttcctaatgacacccacatgctgctatctacctcctgtgtcccccttgctaacggtaccctctgattatgatgtgtaacacttatgcaccgcagaaacaagatttaagcaaacctggttgcacatttgatagcctaggctttatctaanaccatatattgccatttcacgcgacgaanatacttcttatcatatactaatagctggtagcttgtgatgagaatgtgaaattttaccttccctgttaaaacacaatgtatagttacaattgaaataagacgaatgaaaattaaagaactaaatgata

SEQ ID NO: 147602 - DNA, 180 bp, Glycine max
ttcgcatgggtaagatgctgtcttatcgtccaaaaatattatatataattggtctcaacatttaaaacatgtgaagtacagtccttataacatgaattctcaaagaagagagactaaattcacacgctttttaaaggttaaaaactaaattcattgatagagtccaggaaccttgattgc

SEQ ID NO: 147603 - DNA, 448 bp, Glycine max
  unsure (1)..(448): unsure at all n locations
agctngagaaggttgattgtcgtctcaaattctgtgatgaaattgggatataattgtattaaagcatcaccagcctgaaaatttataggaagaaccgtttgtcaaacaaataaatttaaactataataagaatatgcacatcagagtatgaatattgtttcaatagaagtcaacaaaagttctatcagaagcaaaagaaagtaacaatactcacaaattgtgcaacataatgaatggaatcaaacataataggtaattgttaagtagaagcattagaaaaataatgactaaaatacaataaagttacttaagttttctcaaactacgcatcttgatactgaagtcaattgatgacgtggattgatgcttcaccacattgaataataacaaagataacaaagactttccaagtgcaatatgatgctctaaatggcgaaagaatccttgt

SEQ ID NO: 147604 - DNA, 346 bp, Glycine max
  unsure (1)..(346): unsure at all n locations
ccccacaagaaaccaatcccaccaccagaaagagcaacaacaacacctcttctcaaatgaattgctcctcgctacaacatccagcagcctgtgcttccctgcagagaaaaaagctaagcactaagcaacaattgctgggagagagattgtagattcagatctgtcatactaacaaaaactaacaatttaacaactaacatttctcgataaaaaaaataaaaaaaagaagcaacaattgcactcatatcaataagacaagttattgagcacacacgatggattatctacagatgaggtanttttctgacggcagtatggatgaaattaaatataataantctcatgt

SEQ ID NO: 147605 - DNA, 438 bp, Glycine max
agcttaggatgagtgatagtttctctaatattagtgcttaattattaatttcctagactctcactttcttttccttgtgtgtggttggcagagatatgattcatattttaccaaaatcagttcccaagattcaaaaatggtcagaggtgactttggctccttgcgtgattatgatttctgggataagaaatcccgtcaggatataaatcaaaggagaaatttttagagttttaccaatcctttgcatcacaagaactcttccctggatttgctaacagatataaataccaaatcccaatttctttctctccatgctcacaccttcattgtaagcatccatctaagattacccgataagaagtaactctcaattcctggtacatattggccatctatcttcttataattatgttatcacttatcttttttatcttctgt

SEQ ID NO: 147606 - DNA, 467 bp, Glycine max
ataaaactcagcttgtgaaatggttacttattttgtttttgagactatgtttgatttattcatgaatctctgctttaatcgattaccatgtgatataattgattacttctcccttaaaaagtgtttcaaaagttatcaagaacacattaatcaattacattgaggatctagtcgattacattgttcttaaaagttttctagttttcgggaagaacactttaattgattgaaatgataatataatcgattaactgatggaagcttgcttgtggggcttctatggaggctggatctttgagcttcaatgaggtcctctaatggtgatttctccaccatggagatgtagcggatgacaaacgagaagaagtgagaggaggcgccatccactacggaataagccatggaagaaagagcttcaccaccagatgagccttggataagaagcttggagaggatgcttcaatgga

SEQ ID NO: 147607 - DNA, 390 bp, Glycine max
  unsure (1)..(390): unsure at all n locations
agcttatgctgcaaatatttacaatanacctcctcaaccttagcagcaaaatcaaccacagcagaacaattatgacctttccagcaacagatacaaccctggatggaggaatcaccctaacctcagatggtccagccctcagcaacaacagcagcctgctccttccttccaaaatgctgctggcccaagcagaccatacattcctccaccaatccaacaacagcaacaaccccagaaacagccaacagttaaggcccctccacaaccttccctcgaagaacttgtgaggcaaatgactatgcagaacatgcagtttcagtaagagaccagagcctccattcagagcttaaccaatcagatgggacaattggctaccccattgaattaaca

SEQ ID NO: 147608 - DNA, 429 bp, Glycine max
agcttatatatggtgtatctgttattacatttttaaacgctccttatattatgtaaagtagcgtctggataaactttttaaaattttaagtaatttataatggatggaaacttaattactttagttatattttattttttatatattattcaaataaaataatttaattttctttgattttaaatatttttatgatatgtaaaataaaattaatatttttttatcaggtgcaggttcattcatcaattcgtctctaaatgaagtgagtttagttttcaacctatctccaccctccttaatgtgggttgaaaatacataaggatggattggtcactctaccacactattatgaaagagagggaaagagaagggaatataaaacatatgtgcaacatatattgagataaatgatagttttataaataacta

SEQ ID NO: 147609 - DNA, 437 bp, Glycine max
agcttatggtaatgtaatgtaaaatatatctatgtatatatatgctaaatacaaatattatatataatatattattatataaacagaccaatctatcaagtttaattaataggttatttttatagcctaaagtcgaacctttttaataaataagttcaattagatcagtaatattgataggataaagggtagtttctcgataaactctctcacatatttccatccctaattagaaagaatgtcaagatagagtatgagttcgcttgtttaaactcaaaaaataggttaaaataaatatttttaaaaataaaatttaataaacagataggatttacttattaaaataagaagaaaaggtcttattagccgtaacgattaataaataatatttcattttgaaaaatagacttacctaaaccaaaaataaactatgtata

SEQ ID NO: 147610 - DNA, 448 bp, Glycine max
agcttattaatggcttggcagcaaagtctgatcattcacccataatcatccacctccatgggactaatcgtagaagcttcaaaagacaatttagatttgagaattcttggcttcttgagctagacatggtcaatattgttgatcttgcatgggaaccacaacaaacgagtgactttattcaaataagatttcaataccaggaccaaattgatatatgtaagcatgaattggagtagagaaagaattcaaatgatgatgttaatggtgcggcctatttggaaacaaacaacaagttttgtactcttattgcgctagaagaagcttattggagatagaggtccaaggtgttcttgtgacaccctctacctcgacatacatataaataagaaaaacatatcagaatgtgaaatttaattaaatcacatttattcagatcatgtaaacaaat

SEQ ID NO: 147611 - DNA, 416 bp, Glycine max
  unsure (1)..(416): unsure at all n locations
agctngcttgtgaagcttctatgaaggctgtatatttcagcttcaatgagggccttcaatggtgattttccaccatggagatgcagcataagataaacgagaagaggtgagaggaggcgccaaacactatggaataagccatggaagaaggagcttcaccaccaagagagtgccttggataagaagcttatagaggaagctttaaaggaggaaaagaaagagagaaagagagagagggggggggggggagcactaaatttattgaggaaaagacggagatgaattgaactttcaactgtgtctcacaagattatcattcatcaatggtacaacaagtattacacttgcttatatttatagcctacgtagctgtcttaaataaattgcttgtaatgctctcttgagaatcttccttg

SEQ ID NO: 147612 - DNA, 253 bp, Glycine max
ccaagaaaactcgatgattttttgttatttactaaaaattttttttattattatattattattatacctctttttggtttccaatgggggttaccgcattaccgaacggtcggatttcattttaacggatattaccaatcaaatgatccgtggaaattcattttatttttttattatgcgaaaaaatgccgtaaatgatacaagaacgaacgaattgaaaagttaatgaaacaagaataaaagtacgtgaaac

SEQ ID NO: 147613 - DNA, 450 bp, Glycine max
  unsure (1)..(450): unsure at all n locations
agctntgatgatatggtcttcaccgacgaatggatcaaagtgagtctaanaagaggaaaatctgatcatcatactttgataaatgccaaaaaaactagggcaaatgaagagggtgagaatgtgtggagaagcccatgctgtgactgccattcctatacagccaagtttcccaccaacccaacaatgtcattactcagccaataacaaaccttctccttacccactgcccagttatccacaaaggcaatccctaaatcaaccacaaagtctgtctaccgcacttccaatgacaaacaccacctttagcacaaaccaaaaacaccaaccaagaaatgaattttgcagcgagaaagcctgttaaaatcaccccaattccagtgtcctatgctgacttgctcccatatctacttgataattcaatggtatccataaccccaaccatggttcatc

SEQ ID NO: 147614 - DNA, 303 bp, Glycine max
gccccttaggcacttctctctctcttcaaatacaacaacaacaaccacaacaacaacaacgccttatcccactaggtggggtcggctacatggatcaacttccgccataatgttctatcaagtaccatacttctatcaaaccattatttcgagacctttttataacctctcttatagtctttttgggtcttcctctgcctcgaattgtttgtcttctctccatctggtctactctcctcactacagagtctaccggtcttctctctttcgaaatagctgatgaaaataattccgtgaaaaaat

SEQ ID NO: 147615 - DNA, 457 bp, Glycine max
agcttatgctgcaaacatctacaacagacctcctcaacctcagcaccaaaatcagccacaacagaataactatgaactctccagcaacaggtacaatcccggatggaggaatcatcccaaccttagatggtcgaatccttcacaacagcagtagcaacaacaacaacaaccttattttcaaaatggttctggcccaagcacaccatacgttcctccaccaatcaagcagcaacaacaacaacaacaacagccccaaaaacagcaaacagttgaggccctggcgcaaccttcccttgaagaacttgtgaggcaaatgactatgcaaaacatgcagtttcaacaagagaccaaagcctccattcagagattaactaattagatgggacagttggctacatagttaaatcaacaacagtcccagaattctgatagattaccttctcaatctgtccaaaat

SEQ ID NO: 147616 - DNA, 421 bp, Glycine max
  unsure (1)..(421): unsure at all n locations
atgggtcgaccattatttgaccaaagaattttatttgaattatccttattctttatagactntagcttaaaaacttaagagtttaaccatgcctaggtatcctatgatagcatctcattntttaccatttcaatagtctaaaaccactacccaatcgaacgacaataatattgtctatcacacacacacacacaaaactgggatgttacaattcaaatcaattttcaaaattatattgaaaattttagtttttgatttttttcccgagtttttattaaattgttaatatttcttttntcaatgtacatcaattcaaataatgtnttatctattattattagatgatgaaatataattataaatatttattatatgaagttaaagncatgttntattctttgtattactaattataaaatct

SEQ ID NO: 147617 - DNA, 323 bp, Glycine max
  unsure (1)..(323): unsure at all n locations
agctngaggccagaggcttcttgtctcattatgaccacagaaatnttaagatcaatgctctaccgnggtgctgatattattcgagacattgaatgggtaagtaactctctggtttctcttcaactatgaaaaatcttgtccttgtgaatttgtgacaacttatctgtatttattttctgtcataaatgcggtaggttatatttgatgaggtgcactacgtcaatgatgttgaaagaggagttgtttggtaagaagtaattatcatgctcccaagacatatcaatatctgcctcccttcctccacggtataaattgatcctcag

SEQ ID NO: 147618 - DNA, 100 bp, Glycine max
aaaaaattaagaattaacatattagataaaaaggacaggcaacaaaaatttaactaaaacaaaatggaaatcacaaaaatgggcgtaagaggaccacaga

SEQ ID NO: 147619 - DNA, 441 bp, Glycine max
  unsure (1)..(441): unsure at all n locations
caagctttgtcattaattcctttaacttgtctaatacttgttgggcctctgagtgccacgagagttgatccttgcaaatgagagatgttaaaggttccacgatggcgacatagccctagattaatttttggcaaaaccctatcagacccaagaatccttttaaagtaggaggagaagtaagggtaggccaatccaccatgacctggattttagcagggtacgacgtgacaccctggacaaataccatgtgtctgagatactacagttgggtttgggtgaaaacacacttagattggcgcagcaggaactgtccatgtaatagtgaggaaatgattgattccaggtgcatgatgtgtgatgagagtgacngactatacacaaagatatcttctaagaagaccacagtgaattgatggagaaatggtggtaaaacatttttca

SEQ ID NO: 147620 - DNA, 224 bp, Glycine max
  unsure (1)..(224): unsure at all n locations
catctactatatgttgactttgaccaacgctgtatnggaatgatgcgacaatctttcaacaccttattcacacattctgatagggtggtgcatgtgaccatatcttcgtccagatgtatcgtaagccatgctccattntttctttgaaatgcgatcaatccatcttgctatggctggactcaactgacgaaaattttctaaagttttgatcaaacacatgcttg

SEQ ID NO: 147621 - DNA, 443 bp, Glycine max
agcttccatctaacccttgtagtagtcatagaagtcaagaagattgttagttatgaatgcagaaaagagaaatgagaaattgatagaaacaaacaaaggaagaaatggaatgttagtttcattaatgtaaaaggatagcttgttttcaatagaagatatttcattaaagttctattattttaacaataaataattaatttattaaaatgaactcaatcataaattgttaattaagtatgatataaatttgtcaagtttttcacaaattgaccaattttatattaattacttcaaaaatgatatttatgacaatttataattaaatattattagttaaaatattctacttagtgtatcgaaattaaaattttaaataattgatatatattgcgtataattatttctacttctcactttgttttatctttttatatagcacacct

SEQ ID NO: 147622 - DNA, 254 bp, Glycine max
tcttgaatcttgaagtgttcttcaactttcctcttgaatcttgaaactcattcttgattgacccttgaactttctgtcatcaccttggcatcatctttgtatcatcaagcattttgaataaactgatcatcagaacttgctttaccaacctgaaacaagggaaagtggcaaacaatgaaaaatctctacctttgagcacctaaaaaatcaaagagatgcaactgttaccaagcaaaagcaccatgtaagagagg

SEQ ID NO: 147623 - DNA, 438 bp, Glycine max
  unsure (1)..(438): unsure at all n locations
agctggatgtacgctaagcctctcatctcaggctaagcgcatattgcagaaagattnttggtgttacagaaagcgctaagcgccgcctgtcatgctaagccccaaatgctaacgggattttacaatttcaagttgggctttgcacgaggctaggctaagcgctagtgttttaaactcaaacgtcatgttggcacgctaagcgcagctgcgcgctaagcgcgccatgcataattcagtttttaaaaaacaaagacagaggcacttgggttgctaccttcgcactcaaacctctgcaccttctcatctctgagcattattntgctttctgctgtgtgtgtactgcttctctgcatcattattgcttcatttcaaagacaatctcaagtaagtagcatacttctattttactnttatgcttcaaccttaggaagttgatta

SEQ ID NO: 147624 - DNA, 334 bp, Glycine max
  unsure (1)..(334): unsure at all n locations
acacactagcaagtcaagtcactctcacttatgtttgcgagaatattccaaccatatgggatcaacatatgcttaaaggagcactcaagtcgggtgacccccaaggcctacactctgaagagtccgtcagggcctctccctcctgattcaggtccaacccagaaaacattttagcatgcagactctatctatgaactatacaagacacatgactcatcaattgttctcaaatattnttaactcgttgccctttaagggtcttgacattaactcgtcgcccttaaagggtcttagcattaactcgtcgcccttaaaggaacttaacattaactcg

SEQ ID NO: 147625 - DNA, 400 bp, Glycine max
ggatcttaagcaccgcggctgcagctaataagatagtatgataaggtctaggaatctgaggtgactcctcgggccatgcataaggcagtgatgagggctggaaatttgagcctcgaggagttggactgagccataagattgatctgtctagagatgagggctccaacattcatgttcatcttcatcactaatccatataccaacctttccctatccaagttcagatcagaagtgtgtgatgtaagggcaaggttgaaataagacagaacgctccaagtctgcgccagagtagtgaggatcttcctcagcagcttccatggcaggtcctcaacattcagaacaaatcctctaccagggatacaaagtccggtagccagctccccaaggtctggtcttaatc

SEQ ID NO: 147626 - DNA, 243 bp, Glycine max
ctgcaagctgggtattttatgtgtttttgatattcgtacgcgcagattatgattatgacattcatatagtttttaagtatagtatcttaaaagaaaagtggcaagaaagtagagctcatttcacctttgcctaaacctccagaggagtaaaaagaagaagaaataaccgcagcaagaggagaaaaaggaggagggtaaccacaacatttaacatcggtgcttacgtgaccagcgatgagtaac

SEQ ID NO: 147627 - DNA, 367 bp, Glycine max
  unsure (1)..(367): unsure at all n locations
atgtgttcgatttcccttataataatgacaagaaaaattacattaaacaatataaataattattgaattaagtttttttatgataataattgagagttcaatctagaggaggaattaatctntcattaaatgaagtatcaaagttcaaattcttgttaagaaagatgttcacgnttaggatatgtttgaattatgaaggaaagggtaaaagtaataaatcaacaaattatgggagataattttttacgtttttgataaaataaaaattaaaatcaagaaagatagttttggtctattttctatcgcttaataaagtgaaaagaatatatatatatatatatatctatatatatatatatatctatat

SEQ ID NO: 147628 - DNA, 448 bp, Glycine max
agcttgaaggaaaactggatgcattggttatacttgttaacccagctggccttgaatcataaatctgtacctgtcgcaagggtttgtggtttgtgctcctctgctgaccaccatacagacctttgccttccatgcagcaacctggagcaattgagcagcctgaagcttatgctgcaaatatttataatagacctcctcaacctcagcaacaaaatcaaccacagcagaacaattatgacctctccagcaacagatacaaccctggatggaggaatcaccctaacctcagatggtccagccctcagcaacaacaacagcagcctgctccttccttccaaaatgctgctggcccaagcagaccatacattcctccaccaatccaacagcagcaacaaccccagaaacaaccaacagttgaggcccctccacaaccttccctcgaagaact

SEQ ID NO: 147629 - DNA, 390 bp, Glycine max
  unsure (1)..(390): unsure at all n locations
agcttccattagtacatctgactgcttgttattgtgtctnggagacaaatgcaaaacgtcgctgaaagtttatcaaatttaacctaaccaacttaattggcacgtaacaatcaagtattaaaaatgtcttcctgaatgggatagggccatacctattttatcaaaaaagtgagattttgcatacatgtgggataacctagttagtatcacagaacaagaaaaatgaattgaacttggatgaaagcatcacgcataagtgaccagtatgagaatgtggttgaataattcttgcaatatatgcaacgaaatgcaccagtgatgggtggaaaatatgtttgttcatgtgttaaatgagcagatgggagatgatatttactccttgactgaatg

SEQ ID NO: 147630 - DNA, 314 bp, Glycine max
  unsure (1)..(314): unsure at all n locations
aaaagctctgaattctgtttggctgagtgaagagagagaacagcttcttggttctaaaaaaaaataaaaagggctttcccttctttttccattattttattcaactctgccacatgtccctatttgattggaacanaaagggccccacttttttttttgactgtgacccatactcagtcacaaaagtgagaaaaatctgacctttgaaacgctaaagtcctgcctcggtttgcgtgtcgntactctgattccaaattctcgcgtttctctgcgtccgccggggccaggttttgaaagcaagcaatatatatatc

SEQ ID NO: 147631 - DNA, 322 bp, Glycine max
  unsure (1)..(322): unsure at all n locations
agcttcaagatctgttggatatggcaagagttctctccagctgttatacaagtggaatgccacccacaatggcagcagccaaagatgcatgcattntgcgagtctaaagggattcacctaactgtaagtataacaaatactaattcaatgaaaatagttgatattcctacaaatacatgcagtgaaattgaaatttttttagggttcagggaaaaaaaaatttgcactttagcaaaattgtttagagccagttgaaactgattttgctatacatgaaggtaaatcaaaaaccacccatgactcttatgatatattagcaact

SEQ ID NO: 147632 - DNA, 295 bp, Glycine max
  unsure (1)..(295): unsure at all n locations
ttaagagacaagtccacaggggtacactgctttattatatccaggagctcctgagaacttcntgaaagcttcttgaaagcttcttgagaagctagagcttagttacatacgcccccctaataactaagctcacctncttaagaagcttccttgagcttccttatgaagcttcttgagaagatcctagagaagctagagcttagctacacacacccctctaatagctaagctcacctctttgagatgagaagctatagcttagctacacacaccctataatagctaatctcaccac

SEQ ID NO: 147633 - DNA, 409 bp, Glycine max
  unsure (1)..(409): unsure at all n locations
agcttngaaaaaggccctgtgttgtgatgttccttatagtatcacaagacccaccacacagttacatgagactaatgctgcacatatatatgctgacagtagttataaggatatgaggatttcgaacgtgaagaacgagagtatgatgacgattacaatttacaagtttttaaaggtgtgatatgtagtatcaagtgatgttaaaggatgatatgcataattattaagggtaagaattgaatgagttttgtgtttttgcgctaatacattcctttgatttggattatcttgggactatgatgatcaaattctttattttatttttattactaacgttatcttattgattctacatatttttctctttatttgctttatttttttttcccctgcattttatattatctac

SEQ ID NO: 147634 - DNA, 406 bp, Glycine max
  unsure (1)..(406): unsure at all n locations
catcatccaaaggctggatagattaggaaagagctttcttgtctctctttcttgaatcctttaaagtcttcttttgtgcttggaatagtgaagtctcatcttgccgctccttatagcctttttcaaccatttcccaaacatcatgtgctccaagaagggctttcattttgatgctccaattgtcataggtgcccncctttagaagtggaacttggaaggatgtcgttccatttcttacgataactctagaggaatttcttatcagaaccttagctatgataccactttgttggaaagagaaagttatatgaagttttgagataaagttggacgaggaattttttaaagaaaattggttttattacttgaaaatacttctgtgttgacttcatggcttctctttgga

SEQ ID NO: 147635 - DNA, 434 bp, Glycine max
  unsure (1)..(434): unsure at all n locations
agcttaaaggaatattatacagctactttcaaaccttcataagcaaagtgttgtaaagataagaatgtttcaaggagtgaatggacttgcaataaaaaataagagaaagtaggagtagcacccatgaaagaaaaaaaatggtagaatattagaattacacttaataaaggtttggccatgtgcaagtaagacttatagatgtcccattgtgagtagttgtttaggtggagcatancccagaagttagaggtataagatcatgaataactcaaagtgaactatttaaaaggactttgatctaattggcctctccttaacttttgtttttttgacataacactggacatgtgtgatatacgtagctaactctgtctagttgatactttatcttctcccccttaaggtttataatttgttttcagctacacctggta

SEQ ID NO: 147636 - DNA, 224 bp, Glycine max
accatgtgacataattgactacttctcccttaataagtggtgcgaaagttatcatgaacacatttatcaattacattgcggatctactcgattacattgttcttaaaagccttctaactttcgggaagaacactttatttgattgaaatgatattctcaatcgattaactgatgcaagcttgcttgtgaggctcatatggaagctcgatctctgagcaccaatg

SEQ ID NO: 147637 - DNA, 259 bp, Glycine max
  unsure (1)..(259): unsure at all n locations
agctntctaagcccactaaggtggtctattctctcagttatgngacccttcaaccccttccatggaagctggatcacaatgacctgtccctgagcacacttgatgccaacccaagctccagaacaagctccatagccactgtcgttccagcttctcaagaagcctttgggatcaaccagctcttgcttgaacgcttgaagtgctatgaagtttaattgccgtaaaactactcggctcaacatcttttttctcgtccctg

SEQ ID NO: 147638 - DNA, 362 bp, Glycine max
agcttcgattgtcgaaaggtatgttgctgtataatgtatcaagttttgttgccactacattgaaggtggtaaatctgtcgggcttcctaaaattcgtcatggtcgaacaccagggggtaagggtacacgaggatacaatgttgtcacaatgacttggcacgaggtctcacaagcgcatctatatatattaaacaatacaacagaggtcattccatacatagatgctcacaaaaaaaaaaactcacagcaatgaacccaaaaatgaacatgatgagggttttgcatgagcacaataaaactttcattaactggtttagagaaatatatttgttgatgatagtgttttcacaaactaaaattgt

SEQ ID NO: 147639 - DNA, 344 bp, Glycine max
ctgcaggcatgccaagcttcgcaatataaaattattcttatactaatctctagtcgacatgtgctttcacctttcatgaaagtatattcattacttttttttaaaatgaatgtaagagatatttactttgttcaatcatatttgaaatataattattttgtgaatttatcaacgaaaaaagaaaagtatacgctgatttcaattaattcttttggaatttagtttaaatcgaaagtgcaatatcatctaaataaatactaaataatctgggataggacataaattaagtctaaactagatacttgagcagtactgtaatttttctacttttctcttatattttt

SEQ ID NO: 147640 - DNA, 107 bp, Glycine max
ctctctaactccaactaggtccctaccctccacacttctgacatcacactggatccggccaagtagacttatggcataatcatgaagaaggacatgaaactgggcta

SEQ ID NO: 147641 - DNA, 313 bp, Glycine max
agcttgtagaattcaccccaattccagtgttctatgctgacttgctcccatatctacttgataattcaaatggtagccataaccctagccaaggttcatcaacctccatttctctgagaatacgactcgaacgcaacgtgtgcttgtcacggagaagccccggggcgttccattgagcattgtagggctctgaagcgtaaggtgcaaggtctaattgatgcgggctagctgaaatttgaggagaattgcgtgctaatcttgacattgacatgagaagccactcatgtggctaatttgtaagttgatgctaagt

SEQ ID NO: 147642 - DNA, 86 bp, Glycine max
tgctgacgaaaaatattttcgtgaagaaaatcccaaccgaggcgctttcctaatgattcccgaacgttttccgtgagtaattacgc

SEQ ID NO: 147643 - DNA, 377 bp, Glycine max
  unsure (1)..(377): unsure at all n locations
agctttatatttctgatagtagaaggaacttattagccgnttctgagacccgatattatacttattgcaccaatgcttcatcatctacccacgagagtgtgtcaccccccttcttctatttgttcaacgccgctagagtgatctgtactactgtaatgcttacctactccgccgttaagggcacaccgtgtactcgctgtttgttgatcgcaccatgctccatctcaaacaagtaggatataaacaattttttctataatctgatccacataaaaatagattctctataatgatgtatattttataagataacacttttgacttatagactggcaagaaaagatacaataagggtctacttaaaagcttattattac

SEQ ID NO: 147644 - DNA, 371 bp, Glycine max
  unsure (1)..(371): unsure at all n locations
gctgataagcataatcttgtgttaagagttctngggggcaagacatgagaagcaatcaagtataatgttacttccttcactaaagcggtgatccatctccacacatatgttatcgatagcgacataaaaaatctctgcacggcaatgatgaagattagtgatagtcctcccttctgctcttgaacgaccccaaactggtatctcgtcatccatatttggtaccagaatacttttagcaacacaaaatccttggacatcggcgaaaaaattattccaaccactctctctcattgtgcgctaccgagctttgacaacatcaactaattccatggcattcacaagattaagatcttttctttgcgatatctttg

SEQ ID NO: 147645 - DNA, 475 bp, Glycine max
  unsure (1)..(475): unsure at all n locations
gaccttaagcacctgcngctgcagctgagagtctgagtgatttgtattatctattgtggcaatcgatttcgatatgcttcgtacgttcataaaacactgggttgttcgcgatttgaatagctgattggttatcgcagtaaagggtagctggctgtataaaggaaacacaaaagtcttgaagaaggtacgttaaccattgcaactcacaagtggtggatgctagggcacgatactcagcctctgaagaactgcaggaaaccgtagattgcttctttgattgtcaagatattaatgaagaaccgaaatatatagaaaacacagtgattgagcgtcttgaatcccgacaccctgcccaatctgaatcgctgaaagcctgaagctgatgtgttcctgtggttgcgaagaanagtcccgatcctggtgtccccttaaggtagcatataatacgaaatgcagcttgatgatgactggtagt

SEQ ID NO: 147646 - DNA, 422 bp, Glycine max
  unsure (1)..(422): unsure at all n locations
aagctntgttgtctatagtgctcttactcaactagaacaagattggtctataccaaacatgtcattttgatgtctgatantttgaattcacttaaaaaaatcaattcctctcaaaactccccatccaaatttgatcactattgtgctactttggatattttgtgtagcgtcttataaaattatggaaaagagtgtccttttgccacgaaaatggccaaatattggtggagtacctgtattcacatgattcacctggatatgtatactacgagaatcttttaattctgtttgggttcctaaaatattctattgaccaataagttttttacacaacttttatacttcggataagactacaactacaactctatcttttactgtgtattctatactgaatagaagacaattatctatagtcagcc

SEQ ID NO: 147647 - DNA, 447 bp, Glycine max
agcttctgttctaaattgcgagcgtctcattattctactggacacaatcggacatccaagtaaaaagttattgtcgtttgaatttgctcagagcttttgttatcaacttcgagcttctcgacatactacgggacacaatcggacatcctagtaaaaagttattttcgttttgaattttctgttagcttccgttttcaattacgagcgtcacgatatattacgggactcattcggacatccgagtaaaaagttattgtcgttagaattttctcaaagcttctgttttgaatttcgagcgtctagacatactacggagcccaatcggacatccgggtaaaaggttattacatttgaatttgctacgagcatccgttttcaattacgagcatctcgatatattagaagacacaatcggacattcgagaaaaaagttattgtcgctagaat

SEQ ID NO: 147648 - DNA, 494 bp, Glycine max
  unsure (1)..(494): unsure at all n locations
actcagcttacaaacttagaaatcaagtgatcatgtattccgaaatattgttgagaaaacggatgcacattttatctatatacaattgtttgttgcttgcttgaatcttgatttcaggtattgtattgtcatcatcaaaaagggggagattgtagatgcaattggctttgatgttttgatgatgatcatgatgatgtgttgcaattgatgcaaatgggcttttcaagattaaaattcaagacaatacttcaagattacaaggcacaacatcaagatgatcactagaatattatgaagggaattcctaattgaattatcaaaggtttggccaagtaatttaatataaaaagtgtttttcaaaggttttactctctggtaatcgattaccagaggatgtaatcgattaccagtggccaaatacggtttataacagctatataaatttgaatttcaaatntagactgtgtaatcgatacacacatttggtatcatta

SEQ ID NO: 147649 - DNA, 420 bp, Glycine max
agcttacatgtagctacatcacaacctactcatatacaagaaaataagcttgcccaacaaatcataggtgtaaccaacaccattgctagcagattttcctataaagggaagtccaatcagtcccgtaagcatcacctacataccatttgggacattgacattaattgagttgatgcaccatcaccacgaagacttcttcccatcatattgacaacaagacactgctagggcatcaaccctatcaaccaagacaaccctatggttatcgccatcataattgccaactacatagcgtccaaggtcctcattgaccaacgtagccacatggacatactatactagaagacattctagacgctcgaagtctcatatgatataggccagccacactctggaccactcctgggctttggtggagaa

SEQ ID NO: 147650 - DNA, 247 bp, Glycine max
ccccaacaaagacattcaagggaaatgaaacaccggaaaacgcaccgggtcggcatgcattcaaaattaaaacagagtgactcgagtatcgaactcaaggaccttgcttataagacagagggctacgcacaaataaggcatagtaggaataacattgagaagggacggcgaaaacaaaaataaaccatctctatggtggaaacaatagacgcaagacacaaacagagacaaccacagggaaaaagag

SEQ ID NO: 147651 - DNA, 450 bp, Glycine max
  unsure (1)..(450): unsure at all n locations
agctntctgtcacagatcgtagctcaggttttggttcagaatcacagttcacgcatttgacctgtaatattaatgtaaaatatcaactacttcaaaatgagaggggattattagcatagagaaaaaactgaaacaacacagtaccacacacagaaacaaacatatagacatatctacaaacacttaaaattaagctaaagtcctacatacatataagacattcatatttgttaaaagggaggcaagactcatgctgcaaaatccatggaggaagaattatatagaagagcagtgataaacacaaagatcacaaggatcctaattatatattagattccctttaagactagttttggtattccttcattatctacgaggagtagacaccatatatgcttgatacatgatgcagtacctatgtactccatttcttccctcattcttgaccaa

SEQ ID NO: 147652 - DNA, 510 bp, Glycine max
  unsure (1)..(510): unsure at all n locations
ctaagctttgaaagaacanatcntcacctgccaagagagatgtgctcactagatatattcgaacatncncttcttcaatgctcagagcatagctcctacaataaacactaacactccacaattcccagagggtggctacattatcctcaaagtcaaagactcttccctctaaagagtgcaaatcgagatcgttccttttcagttgcccagaaaacaagtactactcaactnggaaaactcagagcagagtaaacactcacagtggtagaagggaaaattcaattgaaagaaaacaaaaacattgtcagtgtgacaagaaagctcgccaagtccacggtgtttgattcctagtaaagttggtgagaaagaaagagaagcttcaaataacaccgaatagattgagctatgtagataatcacaacaacaacatcaaactgagtgatggcatgagctggaaactgtgtgaaacagagagtgtgagaaagaacattaacattaacattactaaca

SEQ ID NO: 147653 - DNA, 447 bp, Glycine max
  unsure (1)..(447): unsure at all n locations
agcttaagcacaagcaagataacatgccagtagtggtcgtgcttgagccgactcaaagtaatagccttaagcctagatagtagttcaaattttttagctccagagttgggcttaatctgtaccaaagtgataggctgaagcctagacagtaaccttgttatttttctttcataattgggcttaagccattctaaagtggtagacttaatcctaggtagtaaaaatcttcaatttctcctttttttctctcttccaaaatggtgattaagcttttcaattcttttccaaatggttcttcagcaaatttcctacaaaacataaataaacaaacaaagatatcaagcataaaatgtagaaaattagataattctaaacaaagtaagcttttgttcacaacataacttaaaagaacacanagctcataagcgtaagaggcaacacataact

SEQ ID NO: 147654 - DNA, 407 bp, Glycine max
  unsure (1)..(407): unsure at all n locations
tatataataaattataaatgtatataaccttggatcttatatatattcaactaacgttagacttacatatcttatatcattttaatctatataaatacgcgtttaattttaaaaaatgctacttttataaatatattttcatttgtatataactattttatatacaaaattttaataagagatattatattataagttgttaaatattctaataagagatatatacacttatgaataatcatgaacagttattagaagacacataacaacagaatgaaaaattctcgcaaagtatctcctaaacatattataataatanatatcttaacaaatgattgacggtcaaatctatttatgatgaattctccaataaaaatcatattaattatatacctgagtgtcaatat

SEQ ID NO: 147655 - DNA, 135 bp, Glycine max
acgaaacacatgatcatactacaatgaaaaataacatgatcatactcgcgcagaatccaaagaggagatatataagtaaatcctgctagcgagctctaactctctcagtcgtgataatcatgtctgcctcatata

SEQ ID NO: 147656 - DNA, 437 bp, Glycine max
agcttgtcaaattctgcttgcactccaaatttttctcttttactattgtcaatggaactgtcattcaccaactcttctccacatgcaatctttctttccttggagaagtaaatattgacatgaattgggatggaggttcatatgaaggttggggtgaggaaagttcaatcatcatgaaatagctacatgtgctttccaatgtaaaattgttgacattttatccgcatgcatttcaaataatactaggcgcaagttattagtaccttttcgcctctttatttttttttaatattcataacttgtttgcattcatatgtcaaaatatttgattgctctcaatttcaaaatagcaatttaaatgcctccaatttactccaatcgtgtaggaactcttcaatcccatttcaatgagacctcaacctccgagttttgtagat

SEQ ID NO: 147657 - DNA, 335 bp, Glycine max
caacgactatagcatcatttttggcgctaaactgctgtgagttacaaaccatcttctcaattaaattcctatcttcagcaggatacatgtcttcaacggctccaccactggcagcgtctatcatacttctctccatattactgagtacttcataaaaatattggagataaagctgctcccaaatctgatggtgagggcaactggcacatagttttataaatcgctctcagtactcatacatgctctctccactgagttgtctaatacctgagatatctttcctgatggttgtggtcctcgaagcacggaaaattttttctaacaatgctctctta

SEQ ID NO: 147658 - DNA, 460 bp, Glycine max
  unsure (1)..(460): unsure at all n locations
agcttctatggtctgtaataatcgngaaatggtggcccaagaggtactggcgccacttcttcactacagaggtgatggcaaactgttctcgaacataagtggatgttgtcagaagcttcttagtaaatggtttgctgaagtaagcaatggggtatcctttctaagataggactgctcccataccattaccagaagcatcagtctccacgatgaagggtacctgaaagtcaggtaaagttagaattggagctatggacagagcagctttgaggttctcaaaagcttgttgagcctaaggggtccaatgaaaaggttcaatggtggtgactcggaccaagggatcaacaatcatggcatagcctttgataaattagcggtagaagccgaccaatcctaagaaactgcgcacgactttcgttgatagagggtgcggccaattgacaatggcagcaactttatc

SEQ ID NO: 147659 - DNA, 461 bp, Glycine max
  unsure (1)..(461): unsure at all n locations
agctngtacgcatcatggagaagattctgtctatatgaatacgacacgaatttacaaaaatagtttaaagcagaaaaggggcaaaataatcagaagttaaaagatgttggacttaagagatacaaatgatttccaggaggaaatattattaaaaatataagctctccatgcacacattgattaacaggttacgaaagagatctcacacagaagaggcagtattttttataaaatgaaaaggtcaatataatagacactattgctcacagacaattttgtttgcttagaaattgagagacaacaaaaccaaaattgttttaaacaatgtaatagacactatttagccaaattatattttttcgcctacaagttaagagaaaacaaaactattaattataagatgaaaagataatactaaataaaatagagatggacaacaaccaccaataaggagattaata

SEQ ID NO: 147660 - DNA, 412 bp, Glycine max
aacagacaattcaagatcactccaccgattaatgcaaattgtctacaagaatcattgtattcaatctcaaataggaatctaagtttcacttatcaatgaacataactttgtatatatgacaatactcattaatcacagtccacaagtgataaaaaagtgaattgataaacttaccgagaatcgcagcataaactagtgtgaagctgggttagagtggaacctagcaactcaagcctctaaagatagccaagcgagtctagacaccccaaatattggtcaaacaatgagatcatcacgttcattagaacccatagtgaacatacattgcatgttattatatcataatgaatgatggtcgattacacacacaaacctcaaataataggaagtggaggagattgcccttcatgga

SEQ ID NO: 147661 - DNA, 457 bp, Glycine max
  unsure (1)..(457): unsure at all n locations
agcttgtcggccgcgattgacaagggtgtttagacgatgttagtctctacgggctatcaggctttttgtcttacagacagcaaaaaagaatgtttatacggataaccactcgggtatctccgcccgtcagcgtgtctcaaatgtcagtatgacagatcttgtgagcgcgaaagatgacgtaaatctccgcgtgtcaacgggcttgtcggccgcgattgacgaaaggcgcagaagacgatgtcagtcttcgcatgctatcaggcatttcgtcttacagacagcaaaaaagaatgtttatacggataaccactcgggtatctccgcccgtcagcgtgtctcaaatgtcagtatgacagatcttgtgagcgcggaagatgacgtaaatctccacgtgtgaacgggcttgtcggccgcgattgacgaagggcgcanaagacgatgtcagtcttcgcatgct

SEQ ID NO: 147662 - DNA, 418 bp, Glycine max
  unsure (1)..(418): unsure at all n locations
aaaaagattatctgtattctacatatcatgattggcaccacctaaattatcctcaaagatatcttacattcattccaaaatagtgaaaaatgttacatatttaatctcgtaagcaaacataactcaatcacattaacattagtcctaaaagtaggacttttacaacttttttcttaatctaataaagaatgaccaatttaattacactttataattaaggaactatattgatatcaattgttttaaaaacaaaaatgaacaatcttgtattgtttttttaatacaaatacgcgcttattcnaaccaataataaatatttagataagtcatgaatcttaatntatgcataactatgcggncattaacttctttatttaagaataaacccacctaaggtacaatatgaaccttgaaactt

SEQ ID NO: 147663 - DNA, 464 bp, Glycine max
agctttctttctccctagattgctgcctattctttattattttaggtttgctaatttcttcacactttacaatttcttaacatccatgaatgtatagtgcataatttttcattgttcaataattgagttaattatgttttagttcatgaaattagggagttaatttttagtccctcaaattcaaaaaatattatttataatccattctaaatattttttttcactttttagcctctcaaatttcaacggatggactaaaaaaattattttttgaatttgaaagataaaaaaatatattttttatgaaaactaaaacaatagactctctaattgaagggattgaaaacataattgaccatcccaaatttgcgctcacctttcttctttgtgaatcttttccagttatttctgggacaagtgaagcaattgtattcaaaagatgtcatcaagtgttacacaagaca

SEQ ID NO: 147664 - DNA, 459 bp, Glycine max
agcttgagggaaaacttgatgctatggtcttactattaactcagcttgccatgaattagaaatctgcacctgttgcaagagtctgtggtctatgttcttctgcagatcaccatacagatctttgtccttctttgcagcaatctggagtcaatgagcaacctgaagcttatgctgcaaacatttataatagacctcctcaacagcaaaaccaacaacaacagaataattatgacctttcaagcaataaatacaatccgggttggaggaatcatccaaatctaagatggacaagtcctccacaacaacaacagcctgttgatcgaggccatacccgaatcaaataaacattaaaaatgcagtatctaggaagtgatcctaggtcgtctcccaatgagcaatggtcaaccaaatgttcataacaaatagtaataaaatagtaacgaattgggggggcgcgcc

SEQ ID NO: 147665 - DNA, 462 bp, Glycine max
agcttccagttctgtacgagcacagagattttgttttctatcctagctgggcgtatacactcccatcttggttccttagtatcccaacttccctgatagaggcaggatgctgggttgcggtctcatactatgcaagtggatatgatcctgcatttactaggtaactcttatgttcactgtgtgatttcaaatttcattcattcttagagtttctttttaagtgactattttgcgtactactggacctgcagatttttgcggcagttcttgctttttttctttctgcaccagatgtctataggtctgtttcgtttgataagatccttgggccggaatatgatagtatccaatacctttggatcctttgccatgttggttgtaatggctcttggtggatatatcattacaagaggtcgaacatgaattgcaatattctcgtgtatctaaattcggtttggaaag

SEQ ID NO: 147666 - DNA, 490 bp, Glycine max
  unsure (1)..(490): unsure at all n locations
ctaagcttataaagttatatggctngaacagcatcgaggattgttttaagaagtttaacgagtttatgagcaacttaggattcaacagatgtgacatggaccattgctgctacgttaaaaaatatactaatagctatgttatccttatcgtgtatgttgataccatgttgattacaggatctagtatgggagaaattaacaggttgaagcatcagttggtagaaaactttaaaatgaaggatcttggtccagctaaacaaatccttggtatgagaattcttagaaacaaatcataaggaatgttgaagttgtctcaggagaaatatatacacaagttgcttgacagaatttaccttgaagattctaagactaagaatacccctttgggatctcattcgaagttntcaacaaagcaatctttgcggacagatgaagaanaatttacatgtcaagagtccatatgcttagcattccggaattgatgtatgct

SEQ ID NO: 147667 - DNA, 457 bp, Glycine max
  unsure (1)..(457): unsure at all n locations
agcttaccgctntcaatatatggcctgaattttttctgagtggcaatggttattcctccgccggcaagagccagcctcaacatcagacgcagatcattagtcgtaatctgcggttcaatcgcaaggtcgaaagttctcccgttttcttcaaatggccagcgataaggcgcaacctccggggactgacgccagccgatacacttatgggtatttcccccggaggcgagaaagcactctccacgcccggccgcaaggatcaggacgacgggggcaggcatgaatcctcctcctgatggagacgtacagaggcgacttctgccagcacggagagtgccagagtatgcgcatcccgggctttggggaatatcccgacgggtgcccggatttgcgttgtttcctccctggaccatcccagctcgtggagctnttgcagacgtaacgtgtgggttcgatagct

SEQ ID NO: 147668 - DNA, 445 bp, Glycine max
  unsure (1)..(445): unsure at all n locations
ttggaatgatgctcgcgcgggttgaccgttcttctcatttgtcgaggcaagagggcaacggtacccgaagcgccacgctacatgaagccaccgcatgcggcagactgacagcggaagagagcattgaattcggaacactgagcaaagagtaccagcagtcgacctttgccgggcattttgtggaggtcggcgtgcatagcgcgacgggagaagttcgggtccggcgtatgctcgctgtgtgtgctgcaggacgcatcctgaatccgaaaactgcgcgcagccaggtcattggcgcaatgactatgggcatgggcgcggcactgatggaggagctggcggtggatgacacgttgggctacttcgttaatcacgatatggcggagtatgagggtgccggtcatgcggatatcccanaacaggaggtgatgttcctggatgataccga

SEQ ID NO: 147669 - DNA, 458 bp, Glycine max
  unsure (1)..(458): unsure at all n locations
agcttgcacaccaagtattccatctatggatgnattaccgattcacatcctcagacaatggggaaaggtaactgttattgatgtcaaacacaacctcttggcataagcggttgaaaaggtctgcaacttcagcatcactaccaagccaatgctcaattatgccacgataatgaaggtaccccacatcctctggggagttaatcaagttgtccatgaagataacataggatgtaatgtcattgctgcaatcaagatgacactgctcaaaggcaatcaggttgaggaacaaagacttggtaccgtcgtggatcaagagccgtggtattcgcagtttgccatccttaaatttgatgtcccagaagcgatcggtctttctcttcttgaacttgattccagcctctttaagctctgtgacgcaatgtatcagttgctgcctccgcttgtcggcaactctttga

SEQ ID NO: 147670 - DNA, 412 bp, Glycine max
  unsure (1)..(412): unsure at all n locations
aactaagcttaaccatctgagcctagataattggctcggtgaataactttgtgtgaccatgngtggtggaatgctgggcgaatgactttttctgaaaatcacccaccagttactacataatanaggtttgtcacttcaatggatcatgtattcaacaaaagggggatatatggctccatgagactaaacctattcgtgaacatcatcccatccaggtgtgctttgccttgatcaatccactaaccatgctactctcatgatattgctatgaatgggaaaagtacttgactctgcatcgcctccctttcctgggaggatagtcacttttgtatccatcttgctaagacaaaagaatatgagtggaaatgtgggtcaacattagcattgaccatgaaatatctttcatgatatg

SEQ ID NO: 147671 - DNA, 457 bp, Glycine max
  unsure (1)..(457): unsure at all n locations
accttaagtcacctgcggcatgcaagcttganggcacgctgagcgtcacatcaatagttatgcgcatatgggagaaaatttgggggtgcataaagcgctaagcgcagcctactgcgctaagccctaaatactcactgaaatttgaaacttcaagttgggcttagcgcgaggttaggctaagcgcttgggttttaaactcaaacgtcacatgggcatactaagcgcagctgtgcgctaagcatgccatacaaatttcagtttttaaaaaaccaaaggctgaggcacttgggtgttacccaaaaatcattagcctttacctttgctaaccttgagcatttgtgcaattcttttgtgtgcttgtactaacttgtctgtattctccttgcttccatctgcattacaatcacagtccaagtaagtgagtacctcttcaacttcattntcatccgtcaaacca

SEQ ID NO: 147672 - DNA, 281 bp, Glycine max
  unsure (1)..(281): unsure at all n locations
gggacagaagaggaactatgcatcatgtctcacaagactcttattcatcaaagctatgtcaatcatgaacattttgatgatatcaacataaatttgcttgagacatatggagatgtaaatcatgccagctttgatggtgtcgagacaacatcacatgtttgtcatccttcaaaacggggagaatgtgaacgtatgcatacatgatcttgatgattgcacagaagaatctaacacagcttgcttcaatgataagcattngcttcaagaataattcagattgc

SEQ ID NO: 147673 - DNA, 465 bp, Glycine max
  unsure (1)..(465): unsure at all n locations
agcttaagggacaaaatcatttatcaanaattctatttatattagttcattacttcactacaatgtctctattagactaaaatagtcattcgattagttattttgcactattagtattaattttgactgaaatgacaagtactcaataagaggaggtaaaatgggtcaggctaaccaggccggcccgaatccgcccaatgaaacatagagcttgggcttcaattttttagcccaaattaaatgtaggctttttagcccaactcgtcatggcccaatgcaggttaagcccgtaaaaatccattaaaagctcacaaaatcagggcttaggtttcattatttaggcccgaattgaatctggcacattatagcctgtaacccgcttcgggtctgcccacattgngccatgtagccttntttgccacctattcatatgacctaacatctctaagttgaccaacttagtta

SEQ ID NO: 147674 - DNA, 321 bp, Glycine max
  unsure (1)..(321): unsure at all n locations
ggcggcaaacgcacgatacttatggcagcaaaacgtagctgccgctaacgcgcagtgaggcttagcgtacatcaatatcgaaaaacaaactgtgctgggagaaaaagggagaaaccaaagaagcttctttggaaccaaaaaggagatagggcacgagagaagatggagaacccactcaattggggaccatttactccattttcttccacacctcttgtgtccttgttggatcattaacgttctcatgacaatgagaggttaaaccattcactgttggaagctcaacaaccaaacactctcgatataaagatnttaactatc

SEQ ID NO: 147675 - DNA, 459 bp, Glycine max
  unsure (1)..(459): unsure at all n locations
agcttgaaggtgtgtaacccaccatnacattattataacactagnaatatggctactatcattgttattatttctttctttgtcattaagggaaaacacttgggctgccagatccctccacctttgggaatattctttaaaagatccgtgccccctttttgcacatgttatgtagttgcatcctatccgaagacattatactgacactcctagtaagactttcttggaaggaatgtatcagcaattcctcatcttttgcgtatgcccccatcttccgacaatacatctttagatggttcttggggcaagtagtcccattgtacttgtcaaagtccagcaccttgaacttgggaggggtgatgatattgggtactaggaacaactcttcttggttagcanaggcataatctttacctccttcaatggcccttgagccttcctctagatgatccaactttc

SEQ ID NO: 147676 - DNA, 437 bp, Glycine max
  unsure (1)..(437): unsure at all n locations
ccacaactctcataaatgggagagatatgttcatctaaagcatacaagtccctaatattatcaaatcctaaaatttgagctcctagggagcaaaacaacgtgtgcctcctagagagggcatcaactacacatttgtttttccctttttgtatttgataacatatggaaattgctctacgtacgctacccattttgcatgcctcttgtttaacttgctttgccctctaatttacttaagtgattgatgatcactatgaatgacaaattccttggaaacaagataatgttcccaagtatggagggctcttattaaagcatanagctcttcatcatacgtggngtagttgacggtggcactcatgaagttttactaagataagcaatagagtgcccaccttgtaacaatacagctccaactctcactctagaggcataca

SEQ ID NO: 147677 - DNA, 456 bp, Glycine max
  unsure (1)..(456): unsure at all n locations
agcntgacaattttagatctcaaataatangctctttgtgagtatggatcttcatggggtaaaccatgaaacagatatctaaaggcgttgggtcctcctactgagtaagttgatgcaattaaagatgtttttctaattaaagatgttcttgtgttctatgctgaggacaaaaataccaaacactgattcctcgagagtttggactaatttaaatcaaactttgttcacagatccctcttgttgaacttagcctaatttaaacaacattatactcacaacataataaacaaaactaacaccctgcacattatccttagtgtcgcaacaagcccttttgtaggcgtgcgaggcgaggctcacgggtgcgctcttcaaacgaggaaagatgcgcggagtcgccatcaacgtttaattgtggaaaacgtcgaanaaaccgaatgagaccggtcaacatga

SEQ ID NO: 147678 - DNA, 390 bp, Glycine max
agcttacccaccacgaagagaggacgcggatatgatcagaaagcgcacactaacccgcgctaatgacggacttatgttatagcgccatcactacttaagtcgcacgctatatgtactcataacaccacataatcacactctaaccctatggattgtctacccaccatctgtaacatgttctctctagaccttagatcacacgctaccgggacatgcattactacctaacccctggaacataacgggcaatcgagactcactcctaacatggctggtaaacacgctatgaacaaatctactcacaaattacaatattgaagcatataccaacctaatctgcccatgatatttgccaaaaaccaatacccaggataatcacgtgagaaagag

SEQ ID NO: 147679 - DNA, 466 bp, Glycine max
  unsure (1)..(466): unsure at all n locations
agcttagaatatccgcgtggacggtacaaatcatgctatggatnccgttaaactcactcgtgaagaaaaggaaactagaagaagccttaccctagcttccaatagaactccaagacgttgatagaccttttcaaattcagcgttactaatatcacaaatttgccgccatgcattgtgaatcctttaaaaagaaagaaagagaagaccgaggtccacttattcactaattgatgtcactaaaagaaaagaccaggctcattagctattctgtgtctcacttctagagaaacacgatgagctaaacaaaagagagtcaaatgccttacgtgtttttggaatctaagactaacatatttaagattgacttctttcttccctatcaaagtcatatatagatctatatcacaataaacaagaaggaccagccgttcactgtcaactcttcaacctctatatcaatatatat

SEQ ID NO: 147680 - DNA, 459 bp, Glycine max
  unsure (1)..(459): unsure at all n locations
agcttcctcataagtgctaaatgacatnttatatcttgattaactcattttaacctccatttaccactgaatcatgttttagccttccaactctcaaagcctcactctttttctactcataacactacattctcactttctaaccctaggttagctctacccttcatctctaacagtttttccataagcaattttcaacacataaacatcacaagcatcattataaaaaccctaaaacagaatgggtaagcttgattcacaccaaacatggcaagttcaacatgctttcaacaaatctcttcacaaataactatcatgaagcagaaacctagcaaaactacccatcatatctcccaaaacccaatacccaagaaaatcaagtgagaaagaagtctacccaaacctgaaattttgaggtcccacacgtagaggtgcgcttcatgactccgaanatgcctt

SEQ ID NO: 147681 - DNA, 465 bp, Glycine max
  unsure (1)..(465): unsure at all n locations
agcttctatagaaggttcgttcctaatncttcttaattgcatcacctctcaatgagctggtgaagaagaatgtggcatttacctgnggtgaaaaacaagagcaagcctttgctttgctcaaagaaaagcttactaaggcacctgttctagctcttcctgacttttctaaaacttttgagctagaatgtgatgcctctggagtgggagttggagctgtattgttacaaggtgggcaccctattgcttattttagtgaaaaactacatagtgccaccctcaactaccccacctatgataaagagctttatgccttaataagagccctccaaacttgggaacattaccttgtttccaaggaatttgtcattcatagtgatcatcaatcacttaagtacattagagggcaaagcaagttaaacaagaggcatgcaaaatgggtagagtacctagagcaatttccatatg

SEQ ID NO: 147682 - DNA, 464 bp, Glycine max
  unsure (1)..(464): unsure at all n locations
tagctttcaaagtctgaanagcttccaagcattattcattattcttgaatactacgtatttgtttagaaagtttctcaatggtctggtgattttagagaactccttgatgaacctccgatagaaacctgcatgtccaataaaactcctaatacccttagcatttactggtggtggtagcttctcgatgaaatccatttttgctttgtccacctcaatgccttgggctaaaatcttgtgacctaacactattccttcttggaccatgaagagacactactcccaatttagcaccagatttgcttcaatacatcttcgtagcacaagctctaaattagtcaaccagcagtccaaggcgggcctaanaattgagaaatcgtccatgaagacctctatgcacttctncaccatattagcaaagatggctaacatgcacctctggaaagtggctggtacattacataat

SEQ ID NO: 147683 - DNA, 462 bp, Glycine max
agctgccactcagctcgcccaggcgagcttggttgttttctccagaaggcggtgccttctggaagaacttcctggaaggcccaagtgggcctggttgctatttgcaccccctatttactaaatacacccctacctttttttgctgattctttttccgtaacgttatggaactttacgaatttcgtaacgatacttgttttcctttcgtaatgttatggaaccttacggattacgtaatcatccctttttttggctttcggaatgttacggaacctcacggattgtgtaacaatgcttccttttgatttccggcatgtaacggaatttcacggatcgtgcagcaatgctctcttttgacttctggcacgttatggaacttcatgtatcgtgcaacaatgggtgccaagtacctcgaagttgtccaacaaagggtgcatgccatcaaacaatggtccccggacg

SEQ ID NO: 147684 - DNA, 383 bp, Glycine max
  unsure (1)..(383): unsure at all n locations
ggtaaactaaatgccttggtaacctggaacccttctggtatgaatcanaaatctgcacctgtcaccaaactctgtggtttatgctcctctgccaaccaccacacagaccttttcccttctgtgcaacaatctgaagcaattgaacagcctaaagcttatactgcaaacatctacaacagacctcctcaacctcaacagcaaaatcagccacaacaacataactatgacctctctagcaacaggtacaatcctggatggaggaatcatcccaaccttagatggtcgaatccttcactgttgttggcccaagcagaccatatgttcctccatcaatccagcaacacaacaacaacagcaacagccccagaaacaacaaacaattg

SEQ ID NO: 147685 - DNA, 483 bp, Glycine max
acccggatccttaagcacctgcagctgcagctatgcgcatactactggacgaacgttatttctcaagacatacttataactaagaaaaatgcacccatatacaatcaacgcgccatcgttacctaacttattatacatgtacttccaaggcgtatttgttacctacatcacacacattacctttgctaaattcaacatacatgcatactctaagcactttggctatcaaaaatgtgcatacgcgcacatctaggtatttctaatacctatacatacacaaacttcatgacgaatcttgactatctacacaataaggtgctacatttcatgcttttttatttcaagagtgttaactacctaaagccgcatgcaaattcaagtatatcttcttgtgctcactaatattgtgttaaaaataataagcatatttggaatgtatgtcctttaataacatgcgacatatttatagattcttgagagaca

SEQ ID NO: 147686 - DNA, 488 bp, Glycine max
  unsure (1)..(488): unsure at all n locations
tataggtcttccagnattgtggcgagagcccgcttgttttattttttattctncaaaaagcctctccaaacttcactcacccaacacttgtgttcactttgaactttagaagcaataatcccctactcactcttccgagcttttcctactaacccaaggggacggatgatcattgcaactctttgggattcctcctgttaaggctctctgtatgaaggcgtttatagatattcctacaaatttggctctgtatggctccacctagagtgttttttataagatttttctaatatggttattttggatagactattctatgaccttactatctcttattgtcactccttccttggaagttgctcaattgaatctgcatccatagatatagagctatcaatttatgggtcgtggaggtggaagttgacattanactactacatgagttgtctatgttcatacaactagtggttctacacattgcttctgct

SEQ ID NO: 147687 - DNA, 457 bp, Glycine max
  unsure (1)..(457): unsure at all n locations
agctnnngatgatgcgcagggaggaaagattttattatgancaaagccaagaacaagaatnctagagaaacgantaacaattattccattgtgtgttaaaagaattccttataagagacaacaaaggtttggccttaggttaattcttcaaaacatcttacaaaagtctttaagtaaaactctgtttatgaaaatatgttgttctctctggtaatcgattacaacagttgtgtaatcgattaccagtcacgaaattttgaaattcaaaatctgaagagtcataactccttaaaattaactgtgtaatcgattaccgcatatctgtaatcgattactagtgaggaatcttgaagataactccaagaagtcacaactattcacacgttctttaaatgtcacaagaggcctattaatatgtgactcgagttcataattctttatagtttttcacaactat

SEQ ID NO: 147688 - DNA, 189 bp, Glycine max
cagaaacaagcaaaacaaaacaaaaaacaaaaaaacgaaaaaaaaagggcaaggggaacaaaagaacaacaacgcacgcaaacgaaagcacacaaagccagacccgaagcacacacaacaagaaaaccacagggaggacaaaacgagcgggggccaaagcgccggacaaccagacacccagagaggccc

SEQ ID NO: 147689 - DNA, 449 bp, Glycine max
  unsure (1)..(449): unsure at all n locations
agcttgttacaattaaatgacgcgnncaattttattgtttcaggatacaaatctactgcgntcaccataatattgattgatttaattaactattatgttcactataattttgattaatttaattaactattaatctttgagaatagcaataatttttaatattggtttcgagtttttaacttgttcaataagaagttgcaagttttatttatgttcagcatacatttgctatttatcaacctatgtctgtattttaaatcagatgtagaattgtgcctgtattttagggttgattgatgttttgctgccattgtaatatgtagcttttagttgcacctgtacttggttcttttggggatatctgggagcttgatgtattatatataaaatgtgccatggatagcttatgtggcaatgagagtacagatggctcgtaataactgcatgta

SEQ ID NO: 147690 - DNA, 259 bp, Glycine max
ctacacaacgcagagccgggaggaagaacatcctggaacgccccaccggacggatacgccacaaaccccgcgtactaacgagagaccaccctaccggagcaggtggccagtctcaccgtgactttgaaaaacttcacgaatgaagaaacgacgcttcaattgagttcataagagctggaaacgatcacagtgggcacggaatcgatacctgtggctttgagagggaacggcaccttcaggtgtgaggagtaacaccctg

SEQ ID NO: 147691 - DNA, 436 bp, Glycine max
  unsure (1)..(436): unsure at all n locations
agcttaacagattctagtgaggaagngatattttattgcaataaactcatatattgcgataagttaattggagtactctatgacagaatatggatgcaatagtttttgtatgcacatgattttactattctaacaatccaataagtgatgatccattgcttgagtgattatatttgattgtttaataatctatatggatattgaatttgatcaatctaaggaataatcaatagaaaatttattaaatgaataatgaatagaaaatgtattaaatgaataattaatagaaaactcattaaatgaataataattttgcatacaatttaaaagtaattattgatagtaattcgtaagggtaagagtaaaactaactaacagtaggcttgttgaagtaagccaaaagaatcatcttccgcgggtcctccaaccacaaccc

SEQ ID NO: 147692 - DNA, 457 bp, Glycine max
  unsure (1)..(457): unsure at all n locations
agctnggagggtatccagtggatctngaagtttttnttctttgngtgcccatggatgttgcaatgagagcagaatggtctatccttgcgagtaggttttcccttggcattggattgggttacagcacaagccatttcagcaggaggagcagaatttggttgaacaccaacaagcctctgagtttcatcttgaagcaataatgagaaggtctcatcaatatccggaatcggtttcatcaacaagatttgacctctagcatgggcaaaactctcgttgacacccattagaaatggcatgacaaattcctctttgatggaagcaagaagtggagcaaccccgccgcagttacaactgtgattggccttgagttcacccagctcagcccaaagccctttgaatcgcgtgaagtaaatgttgatggagtccgtttcttgaacacaatcgagtatatgcttcc

SEQ ID NO: 147693 - DNA, 455 bp, Glycine max
agcttcaccttttggtcctgctcatagtagttgtatgataaaacatgctctatattcatctcccactccaagtaggcctccggatcattctttcctttaaatggaggaatgttgagtttaataccatcaattcggatttgtctaagaacaccatcattccctcttctcctcctttcttcttcattatgatctctattctacatttgatccaacctctcatggagcgcatcatctcgttgtttcattaacctctccaaatgttgcatcaaagcttgcatttggaattgcgaaagccccactccatcattaggattagtacctgacatctcatacaaacaaatcaaacgtaacaagactattatagttgctgtttgaatacctcacccactcaagtgtatcacacaattatggcgtttctctaatgaaacactcttgccttttaccactctaattcc

SEQ ID NO: 147694 - DNA, 402 bp, Glycine max
  unsure (1)..(402): unsure at all n locations
agcttttcacataatactgggcaccaaanataagttctaatttaaataccctcttttcaattgctctctttcagtgtgtgttttgctgctgattcttgttttttttcctttatggggttagttaatttgcttatgggggtgtcaatccgtgtgctttttggtgtgtttttgttttctcccccacatggccagctatcttttttagctgatggtgaaaaatgaaattatgaaaattgcttgttctgtattgagtttagagctctaaagcttgcatggttagttaatgatcatgaaaattgtcatgttagtgctttttgctatgctgttaaaacttgccctggttctgttggtcgggcaattgagaaaattgtggttaattgattttcttgatgttctggactt

SEQ ID NO: 147695 - DNA, 454 bp, Glycine max
  unsure (1)..(454): unsure at all n locations
agctntgactatcttcaagagcaatncaactcatattaaaatgattgcgagggggggaaatattgccaacaagttagtgtttaaatcggagaatggattcttttgattgaattttcacttaatcttttttaggcgaaaatctccaccaacaaaatcccatgtccccgtgattaattaattcttcttcattatctttaattaaggactgaaattttactggacaaatgtcaaataagagaatccaatcccatttaaatgggaattgctacacgcatcatttgttttgctggtacacccagcataatatatgtaatcctcatattgttcttttgtgattgcgttatggattcaaactccctaagccaattatagttcagcaatccatgacattctatgcaattgagctgataagctaattatgttataaaataattaatgtcattatatataacac

SEQ ID NO: 147696 - DNA, 456 bp, Glycine max
  unsure (1)..(456): unsure at all n locations
agcttgaagccacaaaagtgcatatggtnatgattaatagattcgggggcgcgataataattatgaaaggagttttttaacacaagcaatttgttgtaatttgtatcataatatatgtagttacttctcatgagaaaaatttatagaaagtttattttgattttatatttacttcaacttttttgacaatggccggattattattttttaattgaataaggtttttatgttgttgaatttgacaataatacatgtgttgaattatttatgtttttttattttatttacttgactacttagtactctcttttatatcaacattaatgtttattatgaatatgttgttttataactatgactaattatgcatattaaaaggattaatcacattttttagaaatttatattatgggaacttatattcttcatattcgtatcattgttaagtcaatagcg

SEQ ID NO: 147697 - DNA, 458 bp, Glycine max
  unsure (1)..(458): unsure at all n locations
agctntggagaaccaagccaatcagaatgttatacataatatagatgggaatagaggtaacaatggcggtaatgacggaccgaggcagaaccgggttaagggagtaaagctcaatgttcctcccttcaaaggcagaagtgatccagatgcctacctggactgggaaatgaagattgagcacgtatttgcctgcaatgactacactgatgtgcagaaagtcaagctaacagcagctgaattctccgactatgcccttgtttggtggcataaataccagagagaaatgttgagagaggaacgaccagaggtagatacatggactgagatgaaaagggtgatgagaaaaaggtatgtgcccactagctataacaaaaccatgcgacagaaactccaagggttgtcccaagggaatttaaccgtggaagaatattataaagagatggaaatggcgttagtga

SEQ ID NO: 147698 - DNA, 494 bp, Glycine max
  unsure (1)..(494): unsure at all n locations
tcctctctaagccttttatccaaagcaatctgggtggtgtttcttctcctttcatggcttatctcaagtagatggtgcctcctctcacctcttctcctttatcttttgctgcaactccatggctgaaaatcaccattgaaggaccttagtgaagctcaaagatccagcctccatagaagcttctcaagcaagcttccataagaaataatcatgaatctgatctcaaacctcatacaaatgggctgatctgagaactctggaaaggatcaacgtaaaaagcatcaaatgaaaccacataacaagaacttgatcccattactcccaggattcatacccaggattctcaatgggcttcacgatcttctttagagagaaatcataacagaatttgccgattgacaacaaatcgttgaagacgatgggacttaataactggctcaatttgttgacgccagagaagaaaagttgaatcattatgtntgtgtgaaatggaa

SEQ ID NO: 147699 - DNA, 462 bp, Glycine max
  unsure (1)..(462): unsure at all n locations
agctntaacctcattgtctgtcacagtctttatatttgggagccaatccaatccttgtgtccggactctcagccacttatgatagccgccgatgatcccattactgcttcccctaagctctctgtcctttcttcacgccgtatcccatgccttgcgaactccttggagtaccctcgcgtagtggtcactgaaaccccgtgcgatgaaaggcgtgatgctttcgtctgatggcacttctctcatggggtagtcaagctgtcttatggagaggacgagattataattaatacaaccccttgttcccatcaagggaacatttggacatccttcgcatgaagatagaatcctgattcttccttccttctagcgagggaaccaattaacagacgcccctctatgctagccaagaagtggtcccaattcgccttttctttttcgatgcacgagcggtgaccttgtagc

SEQ ID NO: 147700 - DNA, 157 bp, Glycine max
ccccacattatttctctgacacaaatgcaataacgattatctggaaactctttgcgaaactggtcatgcatgcacctatggggacactcaagcgtcaaatttttatggtcatgtgatgctagggcttacgatctctatccctctatcttactcatcc

SEQ ID NO: 147701 - DNA, 455 bp, Glycine max
agcttatggtaaaatctgggacctagccaatgtatatgtctccatagaggccattgcctccctcgcccagtattatgatcggctgttgaggtgcttcacctttggggacttccagctatcacccatggtggaagagtttgaagagatcctgggatgccctctagggggaaggaaaccatacctcttttcaggattctatccctctttagctagaatttctaagatagtccaaatcatggcgcaggaattagaccacataaagcaagtcgaaaatggggtggttggagtaccaaggaaatgtttggaagcaaaagggtcatgtccctccccccatccttgaaggggagcctcctcgatagtcggatgaggttcacaaggatcgttgagagcatgcccaggcagacatcgattcctactccccgttccccgtcgaggggccgacacccaacacacta

SEQ ID NO: 147702 - DNA, 398 bp, Glycine max
  unsure (1)..(398): unsure at all n locations
tcctttctggtgaatcgaattacacacgagaaagtaaatcttcttgggtaaaagactattttatacttaaattttctttggccctacacacttttgcnttacttcaattggagatatcccttccttatnntaatataccctcttctatagaactgntgatagactgtctgtgatcnnatctatcttgannatatctttaattgctcttgtcttcgaatatacagctttgagaacgcccatgtgatcttntggcatcatcacaaacattcagctggatcctcttgtctacaaatactccccctctttgatgatgacaatccctgatatcaagaacaactatatacaagatgatagcacgttcacacaaccctttactcccctatcttttggcatgtatg

SEQ ID NO: 147703 - DNA, 450 bp, Glycine max
  unsure (1)..(450): unsure at all n locations
agcttggcaaatcaagtcactcccgcnattatctctagcatgcattggatgttggtctcgtcctttgtcacgggaagccggaaggtccatatcaccttcttaattgtacacatggggcactgcgcccccaaatgcgcaagtaagaagagataattttccgggctctcgtgtccgtaaaatgcattcatatcatgcatcgcataagcatctcttcataacatcataatgggcatatcctgcatttgtccgttatcatattccggcctcacattttgcatgagtcatggcatcatcatgcatatgcgttcaacaaactttttgatctgcaaaattgcataccatttgttttcatgtttgctcatccttgcgttttcctctacaaaacaaaaacaanaaagggggaagcgtgaaacttcacactacattcttagttncatgtgttatgcacca

SEQ ID NO: 147704 - DNA, 427 bp, Glycine max
  unsure (1)..(427): unsure at all n locations
tcccttcttataagtatcttttcaagttgtntttgcattaattattttttaacccaaatacctttaattactttacaataaatgttatgcactaaaaagataaatgcatgatctctcttataaggattagataagaagactagtacacattaattaggcgggaaagtaattaagtgaaaaaagagagcttgagtcccaataattctaaggtagttttggttaaataaaacaaattgttaacaaatttaatgctactaactatattaactaactttttttatagtgcatgaattagttaaaagagtcttatatttagtgatagaaagagtaattcttttnccacaaacanaatgcatataagaagaaaaacatattcagtggcaacccctctctagttcaatcacacttgatcaagactatgtattta

SEQ ID NO: 147705 - DNA, 477 bp, Glycine max
  unsure (1)..(477): unsure at all n locations
gacctctaagcaccgcagctgcaagcttgatacccagggatccatcaggatantatttgtgaaagagagccangaaggagggcttatgggccattttgggatagacaagacccttgtcttactcaaagaaaagttttattggccccaggccccatatgaagaaagatgtccataagcattgcactaggtgtgtggcttgttacaagccaagtctagggtgatgcctcatgggctatacacacccttacccatcccatatgcaccttgggtagacattattatggactttgtccttgggcttcctagaacccaaagaggtgtacactctatctttgtggtggtggataggtttagcaagatggcacactttataccatgccacaaggtggatgatgctccccacatctcaaaactctttttcagggaagatgtgagactccatggtttgcctaggaccattgtgtcagatagagatgc

SEQ ID NO: 147706 - DNA, 287 bp, Glycine max
gccaacgcaaaccacggagggggactcggagacaagtcccaccgcccacgacaaccccgggacggcaggtggggtgctataggccaaaaccaaacttgaccaatcccgacccaccctcgccatggagcgcccgcgagtaccggtgacggacccacccaggcaagcaccggccactcaacacataaaagggcaacaatactcacatggcaaggacgcttgcggaggtagaccaccagaaataaagagaatatgccgattgcggcctctggaatctattaccaatggtg

SEQ ID NO: 147707 - DNA, 499 bp, Glycine max
  unsure (1)..(499): unsure at all n locations
tgtagaatggccagacatgatacatgtcagggtttggtttgttttttggtaaaaaggatgccccacattatttccatgacacaaatgcaaaaatgatgatttggaaactttatgcaaaactggtcatgcatgcacctatgtggacactcaagtgtcaaatttttatggtcatgtgatgctagggctcaggattcattccctctattttagtcaacccaatgtttccaaaatatgttcttttatccatttgtgcattcatccgagtccattttgggcgtccggggaaatttcacagcgttcacccttcgggtgtacacacatttttttcaaaaaccagctatgatcggtgaatttcccaaagaagagttggaagtcatctcatttcaaaagcatgtcggttgttcagctaaacaacttatttttcttttatttttcctctcttttttcttacttgctctctttntcccttactggctctcttctattctattagctctct

SEQ ID NO: 147708 - DNA, 415 bp, Glycine max
  unsure (1)..(415): unsure at all n locations
agctaggngtggatggggtgcaccgccactagtttgtcttcgagcgagcggactcagccaaggtggaggcttaatgaacgcaccaagctgttatgggtagtgaatttccttagagtttgacgcctaaggatcctgcagaaaacaagataagagatcgaactcttatttctgctcgcaaattcattacatggaatagctatttataggctcaatttgtcaattatttgttcctttcgcaggctctaaagggagccaacaataacagaattgcatagatatcctaccagaaaaagtatattcccgacaggatcattgatgtgcccaatcccacactgccagctgagcatgtttgctcatattctgtgatgaaatcccttaagtgctgaaggtgcacgctctgcctcttgcttctcag

SEQ ID NO: 147709 - DNA, 455 bp, Glycine max
  unsure (1)..(455): unsure at all n locations
agctggccattgactcgtaggaactnctttttgtttgtgagacatatgganagcaccacgagaatgattatgatgaataatccaactattattcccattagtacccacactttcaatccaaaaacaaatgttttcttggacaaccccgaattcagatcagatgccattttgctgctgccaaagccaaacaaatatgcagaagtgttaaattatcagaaggcacttggatgaattcagcaaatcaagcagcaaaaattaaaacatttgattagactaactatggatatgaattatgacaccagattttttaactggattcctcaaatcttacacaagaattaagaaagttaataacacaattagccgtaaaaaatgtcagcaacaaactgaattatacttgctaccatatacagaaatagctgataaaagagaggcaacaggagtacatctcccag

SEQ ID NO: 147710 - DNA, 479 bp, Glycine max
acctcagagtcacctgcggcatgcaagctggcttcaaatcaggggggcactttgtatctgcttccaagatgctcttctttctctccctagtcctctgcacatcactggtaatcatttatttctctatctttgcatttacttattcaaaaaggatagtcctgtattaattactcccttaatatgtaattgatattgacaaaataaattataatggtatggagagagtatatatattgtttattatttggaatatttttttttagtatgggatgatttcttttctaataactaaaagtttatatgaattgacttccatggatttattatgattagaacgaacttataagactcaaaaaatgtttatttatatattatctattaataaaattctcatattaactgcaaaaattaaatacacatattttattatctaattatgccactattattataagacaaacgaaatatgtatattgata

SEQ ID NO: 147711 - DNA, 454 bp, Glycine max
  unsure (1)..(454): unsure at all n locations
agcttgagatgaggaagtgttgaagggtgttactttctgcttttattgttgaccacagagtggtacctggagatatgtcgcgggggtcaggagaccttggggacgtcaggtggggtgctattgcccaaaaccaagcttgaccaatcccgacccaacccgggcatagtcggtcagtgagaacctgtgatgtacctaagcaggcgagctcctggcagtcaacagataaaaggaaaacaagaccacaaagcaaggaggcttgtggtggctggccagctgtgaattttgtgtaatatgtggattgtggcctctggtaatcgattaccaagggtgagtaatcgattacaaggcttaaaattgaggacaggaggctaagatggtctctggtaatcgattaccaaggggtgtaatcgattaccaggcttgaaaacgaagtcacgaaacttanggagcctct

SEQ ID NO: 147712 - DNA, 456 bp, Glycine max
  unsure (1)..(456): unsure at all n locations
agcttnctgatagggttgtggaacaagaattcatattttctctaacncaannaaatcagacatgcactctactatctattttccataaaatttccaacttggtcattattaaacttctgattgtctgcatatgaattatataattttttaatcttatatttataattttgttaaagaggtcaccctgctcagcatttcagggttaaagacaatttttaatcttataattatacttaagcgcccctatccaggaatggtaatcattctatttaacataacgcctaaatacaaatacatcacattctcgatttctcagtggttaaagaaagaggatagaaattgttacccatcatataaggaatacctggctctatgacaccattaaatataatctagacaacggagagtcatggcacaagcttccaaattaaattatggtaatatgtagcacaatga

SEQ ID NO: 147713 - DNA, 433 bp, Glycine max
  unsure (1)..(433): unsure at all n locations
agctnggaataaggtatgaggagngnnatgattttgtgatggagaaaaggctcgcggaaaacgaaaatgtatgttcttccgctttcttgatgccaaatgggcgtatggactttgtgatgttcatcaccaccatacaaatatagtaggataaattaataacaagactatctttgatataactggactgtgataagatgcactttctcatgttggtacacaaattcttttattataggaattctaacaaaaattaccattagagtttaaattgtgaaacactcttagcgtgtaaatattatatatgatatcatgtttaactataccatcatatataataggatgacgtataattaaataattaaattcttcctcccctagaagagtaaaattaaatatctcancagactatnttacatagatattttcttgaaat

SEQ ID NO: 147714 - DNA, 462 bp, Glycine max
  unsure (1)..(462): unsure at all n locations
actcaagctngaaggtgtgtaacccaccatctggataggagaatactgttaatttgtcttttatcacgantaccatctccctttccatcattgggggtgccacttatgctgccagatccctccacctttgggtgtattctttgaaagattcatgcccctttttgcacatgttctgtaggtgcatcctatccggaaccatatcacaattgtaatgatacttcctaacgaaggcaaccattatgtccttccaagaatggactcgggaaggttccaagctagtgtaccatgtaacggctaccccagtaagactatcttggaaggaatgtatcagcaaatcctcatcttttgcatatgcccccatcttccgacaatacatcaatatatgcttcttgtggcaagtagtccccttgtacttgtcaaagttcgacaccttgaacaagtgaatgaccatagttgagtact

SEQ ID NO: 147715 - DNA, 382 bp, Glycine max
  unsure (1)..(382): unsure at all n locations
agcttaantatgcctcactgaaccactcatcnattcttttatgccnacaaagnngagagnntatgtatctttcattttctaccaagtatatgagagctgatttgcataaatcaattgtgaagtgaatggataagggttttttgctagttttatcattgaagcgtgagaaatgtctctgctagggttcatccttgaaccattcgattttatcaagaattcctcaattcttatgatgatcctcaaggcttatcagacatcattgtctttcattcatatcttgttcttcctttcgcattttttgtgtccttgttaatttccgcaatgctaactttgtaattggatccaaacttcttatttgcctatccctcattttacttaatct

SEQ ID NO: 147716 - DNA, 436 bp, Glycine max
  unsure (1)..(436): unsure at all n locations
aagcttatgatgttgaatccaancgaggcggggcggggagttgttacttantacgangaccaaacgtccacgagaatgatttctagattgagtcatgaacaattcaacactcaagagaaattcgatttcacgattaaagaaaagatgaattcccgattcaagagaagaaatcacgaagacttccacgggaagtattgtaaagattgctcacaaaacacacatagcacaatgttgtttttcagaagaagttttcacagacatgtctaagttaccagaggttgtactctctggtaatcgattactaaaatcctgtgatcgattaccactaccacagtttggtttctaaagccttccactgaatttacaacgttccaattaatctcacaatggtgtattcgaataccagtgtgtttgatcgtcgaaatccacattctat

SEQ ID NO: 147717 - DNA, 186 bp, Glycine max
tcccccccgacgagaaagcacaccaaatgacccagcacaaggaacacaacatcacccaagcaggggacacagcccacgcacaggagggcaaccccccacgccaacagagggacaaagacaaaaaggaagaacaacaaggcaacaaagcccccgcccaccgacagagggaaacccgaccacctgcgc

SEQ ID NO: 147718 - DNA, 450 bp, Glycine max
  unsure (1)..(450): unsure at all n locations
agcttnttagtcttacctgatgaattncgttcttcttcatgcactcctctaatgacaatagcatcacttctggcactaaattgctgggagtttgaagccatcttctcaattaaatttttgccttcaacaggggtcatgtctccaagggctccaccactggcagcatctatcatacttctctccatgttgttgagtccttcataaaaatattggagaagaagctgctctaaaatctggtggtgagagcaactggcacataattttttaaatctctcccagtattcatatacgctctctccattgagttgtctaatacctgaaatatcctttatgattgtcgtggccctggaagcaagaacatttttttctaataatactctcttgaggtcatcccagctcgcgatggacctggagcaaggtaatataaccagtcctttgccactctctcta

SEQ ID NO: 147719 - DNA, 400 bp, Glycine max
agcagaacaattatgacctctccagcaacagatacaaccctggatggaggaatcaccctaacctcagatggtccagccctcagcaacaacaacagcagcctgctccttccttccaaaatgttgctggcccaagcagaccatacattcctccaccaatccaacaacagcaacaaccccagaaacaaccaacagttgaggcccctccacaaccttccctcgaagaacttgtgaggcaaatgactatgcagaacatgcagtttcagcaagagaccagagcctccattcagagcttaaccaatcagatgggacaattggctacccaatagaatcaacaacagtcccagaattctgaatgctgccttctaagctgtcaaatgtccaaaatgtcagtgcatttatt

SEQ ID NO: 147720 - DNA, 453 bp, Glycine max
agcttaaccacacaatcgtgtcggtgtcatcaccgaaacgtgtggctgggggaggagaagtgcctccagcaccaattcaatgccacgatggaggagattacatgcctacatggctgcttggtggagctcgatgactgaggagaagcatttttaggaacaataatggcttgaattcaaagtttatggcctccgcttctaagttttgggctgagaaagcctcgctgtggcaggtttgtgtgaatgtgcttcacttctatctgtttctttgtatgatttaattgtattttagtttaaattgcaatctttaactctgaccctgtatcaaatagagccctctagtgtattctttgtagttaacatcccttgggttcttagtttcgccaaaacctgcttaaatttaagcatatggcttattctctactaactagatcaattattattcgtaactattaa

SEQ ID NO: 147721 - DNA, 480 bp, Glycine max
ggaccttaagcaccgcagctgcagcttgagatggggagtgggagtggttcttatatatgcgggagaacatatatgggtcttcttagttagaaataagataaatgatacatatataaataagaagaaagtctaaatctcacgcacactcccttgtagtcttggacacggaccacacaaaaaatcaatactagtaaatgtaaagtctaaatctcagacgaccaagcaaaaatgaaaaaacctgtcccagatagcaccatgtccctatttcagatgcacaagttttggtgcttaattcaatagcctgttaagtattaactatattgaaaccaacatgatagtttcttttttcagttacgactctactccaaagcgacaaattcatataccatacgacaagaaactccggttgtttcagacaaagatatatgttgtacccaaagacaaaagtgtatattctcttatcctatctattgagtcatg

SEQ ID NO: 147722 - DNA, 425 bp, Glycine max
  unsure (1)..(425): unsure at all n locations
agctngaatataagtagggtaaaaacaattatcttttgccgcaaaagaaggccggcgctctttaagcaaacatcaatctcattagatagaaggaaatatttgacattccaagatctgtcgtcctatattttctagtgaacttgtttttaacaggatgacctactgatcatcagaaaaattgtatttggaacactatgatagtacctttcatataatgctatcgaaatttagagatgttattaacggattcgattaattcgagcttaatataaaaattgcgttgatttgatttaagttttgaactttttttagttgacccaaattataccaatctgattaataattggtttagcttgacgcatcaagtcatgaaaaaaactatgttnttccaaatctctatctttacttattatctcatatatata

SEQ ID NO: 147723 - DNA, 388 bp, Glycine max
ctagggaattaaaaaaaacttaatggctgagtgtaactgaaattgtggcaaccaaaagtcacccccaacagccaacaagtcagccaccatttggtctaccaaaaggctgatgcctaggttgccaattgggcccttattacaacttgaactaaacctaactaaagcccttttagttgattaacccaaaacatatttttggtcagccaactttacaaggattgggccattatttagacaaactaaacactctaaaatagaaacaaagtggtgtcatttagtcctcctccatttgggccatgatacaactcacaaccttggacttttcttcttgaaacttgggcttgtattcaaatagtatggacaacacttcgtgaagagcttccttggc

SEQ ID NO: 147724 - DNA, 445 bp, Glycine max
  unsure (1)..(445): unsure at all n locations
agcttcctcggggccatgtgctgcgaaggtttatatttggaaagatagttttaccaagaaatgctactcttaaaacgaaaatggcatacaacctcctccaataaacacaaacattaatgtaaatttagagcaaactcatgcacatacttccttacgaacattcactcgcacaagatattcttctaactaagaaaaatgcacccacgcacaatcaaggcaccttcgttacctagatcacttatatacacttccaaggtgtatttgctacctacatcacatgcatttcctttgctaaatttacatacatgcatactcaaagcactttggctatcaaaaattgcatacgtgcacantttggtatttctaatacctatacatacacaaacttcatgatgaatcttggctacctacacaataaggtactatatttcatgctntattcaag

SEQ ID NO: 147725 - DNA, 459 bp, Glycine max
agcttctcccctattatgctatacataggtttgtatttgaagggaaaaaacgttcaaccctcctggtatctgagattcacttaaaattagtgagaaaaattgttttcataaagaaaatccaagccgaggcgcttccgtaacgtttccgtgggtgatttcgcgaagattttcaaccattcttcgacgttcttcgatcattcttcgaagttcttcaggcttcaaccggtaagttcccaaaatcgaacttttcaattcattctatgtacccttagtggtcctcatttgtttcacgtgcttttaatatcatttcatttactttccgtacccccctttagacgtgctatagtcatttacataagtcattgtctcacctaatcaaaaaataaaataaatttccaccgatcatttgaattgtaacatccattaatttcggttaatatgaagtacgaccgttcggtc

SEQ ID NO: 147726 - DNA, 437 bp, Glycine max
  unsure (1)..(437): unsure at all n locations
agctnttaataccctcgatgctaagntagattttgttccagtgattacagcaccagactggggataagagtttgaattaatgtgtgatgcaagtgattatgcagtaggtgctgtgctgggacagcgaaagagcagaatttttcataccatttactatgccagtaaagtgttgaatgatgctaagatcaattatgccacccttgagaaagaattgctggcaatcgtttatgcacttgagaaatttcgatcttatttggtggggtcaaagatagtaatttacactgatcatgcagctattaaatatttgttgcgcaaagctgattccaaaccacgactgattagatggatgttgttactctaagaatttgatttactcatcatggtcaagaagggatctgaaaatgtggtagcagaccaactatccagattagtcaatg

SEQ ID NO: 147727 - DNA, 476 bp, Glycine max
  unsure (1)..(476): unsure at all n locations
acctgaggcatgcaagcttagcantacacagagcgtacacacacgatcactatttttatccacnncancacccggtacatataataactttgtgggtgatcatatcggagatggctcttgaaaaaccaccgaaaattccaaacttgaccttaaattaaatactcttaattgctggctcacgttgaacaactatcattcaatttacatatcatcgataatgttaaatttaagtaattattctaattgtcaatttttagtaacataataatacaaatcagataatatatattttataaaatatatattcacaatataataaaattgagtttattaggtgggtggggacagaaagcaaagacgagatcccagagttaattctgataatatgttatatttcatcttaaaactattaagtaaagctatcccacaaattacatttcacaaagtgagacggcccatgtgagactcgatatttc

SEQ ID NO: 147728 - DNA, 475 bp, Glycine max
  unsure (1)..(475): unsure at all n locations
actagcttgataatatcactatttagtgaagtggctttttattttatttggccatagcggagtaaaggaaagttagtgatctctcaaacaaaaccacagaaatatcctttcattaacggatttataattaaaagctctagctaatataatcagtcgctagctaaaaaaggaggtttctgtggtagtatattgatctagcacaagatctcactgcaatattcataatacaacatgcacctgcagtctataaatgatcttactgcaatactttgaggtgcttcctatatacatagtattntatatatatgctgatcatcatatacattatataatgtatatatgagatggcctatactagaaacagacccattatagtcttatagaagctataagtatatattatatctaaaccaaaatgatcaagggttgaatgatctaccaagttttggctttttgggataattcacaatcataa

SEQ ID NO: 147729 - DNA, 486 bp, Glycine max
  unsure (1)..(486): unsure at all n locations
accttaagncacctgcggcatgcaagcttccttaataagatgcctaaagaagctgatcgtttctacacatacctctctaatagctaagctcacctccttgaaatgagaagctagagcttagctacacaccccctataatagctaagctcacccccatgaaaaaatacaaaaaaaaatccttactacaaagactactcaaaatgcctcgaaatataaggctaaaaccctattctactagaatggccaaaatacaatgcccaaatgaaggaaaaacctattctaatatttacaaagataatcgggctcatacttagcccatgggctcgaaatctaccctaaggctcatgagaaccctagggccttcccttggatctctggcccaatatacttggagtcttctatccaatgcccttgcgggataggattgcatcattatgtacatattaatgttgatattttcaactctattatattattgaacaaata

SEQ ID NO: 147730 - DNA, 413 bp, Glycine max
  unsure (1)..(413): unsure at all n locations
aagcttgataactcttanaaaaagaatccaagtcgtggcgtattattgtgnattgctccagggaaagagttactgcgggaaaggctcttgttgacctgcgagccagtattaacttaatgccactctcaatgtgcagaaggttgggagagttggagatcatgcccactaggatgactttacaacttggtgactgctccattaccagatcatatggagtaattgaagatgtgctggtcagagtaaaacattttaacttcccgacatactttggggtactggatatctgtgaagataatgacattcctgtaatattgggaaggccattcatgttaactgcaagctgcatagtggatatagggagaaagaagctagagttccgctttgaagattagacaattgatcttgatttattt

SEQ ID NO: 147731 - DNA, 212 bp, Glycine max
cttatgtcatgagtgcaataaataatgaaaaacataaaaaagattttatctacatcaagaaagacatctaccatgcgtgtgtgtgtgagcaaaatattacaaaacaaatcatacaatgagcttctgtcatatcatgcagtgagcatacgtatcacgataaagtgaggccaccaagtgcgcgggtgcaaaggataacaactgaaataagtggg

SEQ ID NO: 147732 - DNA, 438 bp, Glycine max
  unsure (1)..(438): unsure at all n locations
agcttgttcaacacaaattaatgaaaccnctactctcttcacgaagtttgaagatggttcaatcttggtgcaacacgtggtgactccctgtgcgataccaacaaaaggcgaatctttgtatggtgtgggtggaagagagtgatggtgaggttgggggaattggtattgggattggaattcttggtgaattcgtttagggtttcgacgatgtcgttttgccaaagcttcttgcggaggtggaaaggtttgtggggttcgaggttgagggtgtggagccggtggtgacgtgctggttgtttcatcgttgccattataatggtttctctgtgtgcttcctttgatggggccactcagacaacgagtacacgtggcaccacacgtcgcatgccaacatgtccggttaacggtcacataaacagttaacggatctagattaac

SEQ ID NO: 147733 - DNA, 481 bp, Glycine max
  unsure (1)..(481): unsure at all n locations
tactaagcttaaccaagaagggatgggccatttcaagtacttgaattttattttacaatgcgtacaagattgaattgcccggtgagtataatgtgagtactacatttaatgtgtctgacttaactctttttgatgtagatggagaagccgatttgaggacaaatccttttgaagagggagagagtgatgaggacaaggcaaggaataaggacaaggaacctttataaggacttggaggacctatggcaagggctagaacgaagaatgccaaggaagctcttcaacaagtattaaccatgctattngaatttatgcccaagttacaagtggagatgcttcggattgttaattgcaccatgttccaagaagagtagagggtgccactattgtttgagtggtttattagcattnntgtagttgaaataaaggcccaaacttgtgtnntagtggtatcaattctcttgcgatctgcaccacctat

SEQ ID NO: 147734 - DNA, 474 bp, Glycine max
  unsure (1)..(474): unsure at all n locations
accttaagtcacctgcggcatgcaagcttgagccagagaggatagatgcagctttaatatcacttggctngcagccaagacaaattgctatatggttccagaacataggggctaggcggaagaccaagcagttggagaaagactatgatgttctcaaaagacagcatgaagctgtcaagtcacataatgatgcacttcaagctcagaaccaaaaacttcaggctgaagttagtagttttccttctaacacaatcaaattccaatcatttagcgctgtagggtagtatatctcctgtttactttcacatcattttttttattttgcttttgaactttatctttttatggaaaagtgaaaaataaataaacaaacgatgaatggacatgttgaatttatgctatgcgagactgttttgatgagattgctttgattctgcagaatgaagcttggtggtagctatgatgatctgtttt

SEQ ID NO: 147735 - DNA, 375 bp, Glycine max
  unsure (1)..(375): unsure at all n locations
caggcatgcaagcnngagagcaaaggacacagcgccttaagcatattggacaaaaccgcaacacgagcccaatccgacaagatcagccgcacaccccgacaatacaagaacagacgggaccacacacaacgccagccccgagcacagatgcacaaagaatcaactacaacaaacacaacaacaaccaccacgccccagaaggaagacaaccgagaacacaatcaagctcgcaatacaccggggccggggaccacacaccaagtgagtggaacggagaagccccgccctcaaactcatcacacagcatctgcagacccccgacggccgagaagaacactagcaggaccacatggacccccaggccaatagacaaga

SEQ ID NO: 147736 - DNA, 458 bp, Glycine max
  unsure (1)..(458): unsure at all n locations
agcttgtagaatggctagacatgatacaagtcattgtttggttnggttcaaggataaaagggatgccccacattatttccatgacacaaaaatgcaaaaatgatgatttggaaactttatgcaaaactggtcatgcatgcacctatgcggacactcaagtgtcaaatttttatggtcatgtgatgctagggctcaggattcatttcctctattttaatcaacccaatgtttccaaaatatgttcttttatcaatttgtgcattcatccgagtccatttcgggcgtccgggaaaatcttcacagcattcacccttcaggtgtatacacattttttcaaaagctagttacgatcagtgaatttttccaaagaaaagttggaaatcgtctcttttcaaaagcatgttggtctttcaacttgacaacttatnttttcctttttctacctttatccttactta

SEQ ID NO: 147737 - DNA, 392 bp, Glycine max
gaagctagacttcgctgcatgttgtgataatgttcacaattttgtaactacttccttggctgaactgtatgatatgttctcttgtcttgagattttaacgttaaaaataagttctttgggtgtcaaaacttatggttagcttgaaaattcacttaaatagacattttctagcaaaaagctatgaacaaaaacaagctttaggatatttataggattaaattgatcttgacactaaaatgattgctatgaatatatggattgttttctaaaagatttgactccaaatcttaggtgtgaacatatagggtatcatataacattcatgataaaccgattctcggagcacttatataattgaatattagtttatgaggagatcttctgtaaattga

SEQ ID NO: 147738 - DNA, 452 bp, Glycine max
  unsure (1)..(452): unsure at all n locations
agctngttgctcatgtgctgaagtgngaggtttgttcgtgttgaggatncganggaacctagtatttataggattggagcatagttacgggtccttgtttgtaggggttgttatagcctgtgcagataattctctacttacagataataattgggagcttgtagataatgttagagataaatcatagcttatagataaaaagccagaagataactctaccatgtagataatttgtgtctttgtagataattaactacctgccaagagataaaggtattcaaatatattccaatattaataggttagagataacttgtcggttagggagcccgattgctaagggctaagtgtccatgctcctattacagggctgacatggaggctcgacacatgtcacggattgccatgtaggatgtcacgtgtatgttatgagtcctggacaatacatgtat

SEQ ID NO: 147739 - DNA, 478 bp, Glycine max
  unsure (1)..(478): unsure at all n locations
cctcagagtcacctgcggcatgcaagcttcaattgatgatagtatgcacagggagatgntgttggtctagcactgannnnacatggaactgacatgtacactaatggaaagtgtcatcattttttagccatctctctcctgaagcgccacaatgcgtatgcaacttttcataatgagaaaaattttatcatatttagtatacgaatgtgtcaactagttaattggttagtgattctagtaaacaacacttcacaaagggtttgaagcaaaccaaaatgcatgcaaactttatgatatataacaggctgagtatatttctagacaaataatatggaagccaacgacaagatttttcactttaaggttaggaagacataatagctcgcatgcccaagaggtgtttggctcaaaccctatcctgctgcttggacgcatatgaagganatgaactaagggattcgatcatttatgtattact

SEQ ID NO: 147740 - DNA, 461 bp, Glycine max
  unsure (1)..(461): unsure at all n locations
agcttaggaacacatagccaaggagcatttttcttttcttagcataaatcgntggatcattatttgggatcgtgttgaagcaaagttcgtcaaaacataatacagctacctttacatttttacaggacaacaaatttgcatagttattttctagatatccttgctgaacttattgctttcttttgaattcatattttatttcagtttttttgttcatattcttgttagattcacctccaatcaagttctttatttagtaacttgagagtccacgtaaggtcaagaggcagattttttgtcttgacgatcaaattgtttgattcatacattcaaaatttggctgattgttaattactctcgcaacaacacccatatatcagaattcactcattggttctcactcctctaactaactcaattcccactcacaaagcacctcaacactaattctgaatggactt

SEQ ID NO: 147741 - DNA, 457 bp, Glycine max
  unsure (1)..(457): unsure at all n locations
agctngtctatggaaacagcatttatcaatangttgaacacatcatatacagcaggtagactcctatttacaatgctaatagcattattatttgggatcatattttgggacattggcctgaaaaggtatgtgaaagcaaacaatacattgacataaataaataaaatgatgtgaaaatggaattcacacaattttatcaccaagtaggttaatcatcactataaattaatgaaaatcacaggagtaaagagcaagatcttttcaatgctatgggttcaatgtatgctgcagttaccttcattggagtgcaaaatggtgcctcggtgcagcctataatagcggtagagagaacggtcttctacagagagagagcggctggaatgtattcagctntgccatatgcacttgcacaggtaaagtactaacttcaatacatgtaaaatgaacaagaaatgtg

SEQ ID NO: 147742 - DNA, 452 bp, Glycine max
  unsure (1)..(452): unsure at all n locations
agctnggaaggatgcttcagtggagganaataaatagggagagaaagagagaggggggagcacgaaattgaaggaagaaaaaagggagagaagttgaactttgagttgtgtctcacaagactctcattcatcaaagttataacaagtcttacacattcttctatttatagactaggtagcttccttgagaagctttcttgataaaacttccttgagaagcttctttgagaaaacttccttgagaagctagagcttagctacacacacccctctcataactaagctcacctccttgagaagcttccttaagaaaattcctaaagaagctagagcttagctatacacacctctctaatagctaaggtctcctccttgagatgagaagctagagcttagcaacacaccccctataatagctaagctcacccccatgagaaaatacatgataatac

SEQ ID NO: 147743 - DNA, 480 bp, Glycine max
  unsure (1)..(480): unsure at all n locations
cggaccttgaaactaagctttacttatgggcaggcgggctccttactttcttgtctcttgcgagctctgaccactgtttttccttcccgcgatgcttcttttcatgttcgcctgagtgggcttatagcctaaaccatacttcccacgatttccttgggtttttatcaggctagttatgccgccattgtctttgcctaaacccatcccgggttcataaccgttccccaacataactcgggccatcattaccgccgcatcggacaggcaaggttgcccaaagagggagtccatggaggaaatgctgaccacctcaaaagactggaaagcggtttctaacgattcttctgcggcttccacataaggcatggaggatgggcagcttaccaagatatcttcctcgcctgacacgatgaccaagtgccnctccactacgaacttcagctnttggtggagtgtagaaggcacaaactccactgagtg

SEQ ID NO: 147744 - DNA, 444 bp, Glycine max
  unsure (1)..(444): unsure at all n locations
agctgngagccataccaccttgctgtttgctttctccactnacgacagncgccgaggggcccgttgttactgcctctgagttctttgtccttcttttgcaccatctcccacgccttgcggaccttctgaagtgcctccatgttggtcttattgaagcctcgtgtaataataggcgcgagctcttcctctagtggtgctcttctcatagggtagccaagtggtcttataacaagaacgggattgtagctgatgcaacccctcgtccccatcaagggaacatttggaaatcctccgcatgaaataagaactccgactcttccttctttccatcgagggaaccagttgatagacgctccttctttgtttgctaagggttgatcccaatttgccccttttttctctgtgcatgaacggcggctatctagcaggcaagcatgcctcacc

SEQ ID NO: 147745 - DNA, 423 bp, Glycine max
actaagctttacatcgatataagactgcggagcggagcgtttcttttgttttactaacaacgctcaaaatatcaattgtacatcgggtatgaaaataatgatgaaatccactataccactatcagttttatgaaaattgatgtcttatagtaagatatatacaaaaaatgcgaaaacaacatcgattttggcagaaccaatgttgtaagctgcattacaacattaatttctcccaaaactgatgttgtatggtgcattacaacattagtttatgaagacctgatattcgtttcgaattattttaatatgctatctattctgtttattaaccaaaacgtgtgaattaagcacataaccaattatacagaatccaagtagtacaaatgtgcatatgatatatatatatatatctatatattaaaa

SEQ ID NO: 147746 - DNA, 450 bp, Glycine max
agcttctacttatgtggcagggcgggctctcatactttcttgtctcaaccgcgagctttgaccaccgctcttccttcccgcgatgcttctctttatatctgcctgagtgggcttatagcctaaaccatacttcccacgatttcctttggcatttatcaggctagttatgccgccattgtctttgcctaaacccattccgggtttgtaaccgttccccaacataactcgagccatcattactgctgcatcggacaggcaagcttgcccagagaaggagtccatggaggaaatgcttaccacctcaaaagactggaaagcggtttctaatgactcctctgcggcttccacataaggcatagaggatgggaagctcaccaagatgtcttcctcgcctgatacgatgaccagatgcccttccactatgaatttcaacttttggtggagtgttga

SEQ ID NO: 147747 - DNA, 432 bp, Glycine max
gagtgtagaagggagagactggtggcttttattcttgtccacagagtggtacctggagatatgtcgcgggggtcaggagaccttggggacgtcaagtggggtgctattgcccaaaaccaagcttgaccaatcccgacccaacccgggcatagtcagtcagtgagaacctgtgatgtacctaagcgggcgagctcctggcagtcaacagataaaaggaactaagaccacaaagcaaggaggcttgtgtggtggctggccaactgtgaactttgattgatatatgggatatggcctctggtaatcgattaccaagggtgggtaatcgattacaaggcttaaaaatgaagacaggagactaagatggtctctggtaatcgattaccaatggagtgtaatcgattaccaagctggacaacgatgtcatgaagctag

SEQ ID NO: 147748 - DNA, 432 bp, Glycine max
  unsure (1)..(432): unsure at all n locations
agcttatnacacttatctagctcccaganatcnttgttaagatacaacccctctaatgcatgacttctaaatactatatgtttgcatgaatgcatggacataaaatcatcattctatgtctaaaaatgactttcttatgaaatcttcttttgggcttattaggaggtactctctttcgagtatctaacccctaatactaatgcatgcatatggtgtttaaatattatataagagttgtctgttccaggaggttaacccccatctgattcttgcgatgaataatataagataaaaatagaaaagatgatatactagaagcacctgcagaagaatcctgccgcgttgatagatatgaagcacatcatacatcggtgtgtctttgtatgcctgtcagaccctaactatgggtctggtcactcatggccatgagga

SEQ ID NO: 147749 - DNA, 291 bp, Glycine max
gctacaagactatacaccaggatgtctctcggctttcactggtattgcaaatgatattccaaaatatctcagaaaaatcacatcctctcaaccctacacgagaaggtcttaatgatatcaagagggtcttcttagattgaactccttctgctgggctagttgcgatgcaacaccgtgatcaaagtaataaagcacggcaatcataattgccggatcaatgctccaattaaagagacaggcactccaccatgcctgcccatacaagaaatagaaccaaaactgcttttaggg

SEQ ID NO: 147750 - DNA, 457 bp, Glycine max
  unsure (1)..(457): unsure at all n locations
agcttgtnccttagtgaggggatncggataatattatcataaacacggaacagaacggacattgaaatgaaagaagatatcctgctttttatgtcacgcgttatttactataaaacaaataaagaatttcaaagaccgtaataaccttttatatgaatcttttaaatattatactactataaaatgcatactcttgttaagaatttcatatttgaaagcattttttttattggccataagtattttttttataggagatattcttgctcaagttaagtataaccagtatggagagctctttctcgaagtaatgttagaacaaatgagacaatgactgatagtctaaaaaagaatagataanaaaatctcaagtgtcacatcgctcaaagtaaacatttgaatagtgtttcactctctatatatagagagtccctatcttcattttttcttgtcctag

SEQ ID NO: 147751 - DNA, 460 bp, Glycine max
  unsure (1)..(460): unsure at all n locations
agcttgcaaacaaattagagatggaganatttattgataaacatgtaatatggcacaatctgttgaagtacagatataggaacgtccaattcgatattaactctagaatataccacctaaatcgtcaatttggtggaaagatgtcatggtattaaattataacaagagttgtcctataaattggtttttggagctagcaatgaggaatgttggtggtggactttagactttattttggatagatgtttggaagggaaattgtagtctcaaagatgttttgccccagttattttaagtagcaggaaatgaagatgatttggtggcaactatggttatagaatctgacgatggggatatcttggaattggaggtgaagacgacctttgtttgtttgggaagaaaagttgttagtagtttggggaatctattagcacacgctcgactgtgggttagagaacaa

SEQ ID NO: 147752 - DNA, 389 bp, Glycine max
cgactaacaatctttatgtatagacactttatagatattctaccatccagattgtatttacgattcactatcactataacgatagtgattgaaagtcttgaattacaaattcaaaaatgttttaaccacaaaatataattaaacatgattttattggttttaataattaataaatcgtaacaaatagtttctacaattttaatcttttaatattttcaaaatcgtgcaaaggaaatctattcatacaaaacatatcaattattaattatactctggaatgatacttaattatgttgaattatatattattttactgaaatgccgatcaatatttgttggaattagttttttcatttgagcgtctacatattaactaactagattatctt

SEQ ID NO: 147753 - DNA, 447 bp, Glycine max
  unsure (1)..(447): unsure at all n locations
agcttcntattcaggcgtgaggggagggataaacttcttnccncanggaccacacccgagaggatggcgcctcctgtcacctcttctcctttgtctatcgctgcatctacatagcggaaaatcaccattaaaggacctcattgaagctcaaagatccagcctccatagaagccccacaagcaagcttccatcaagtggtaatcagagcacaataccttcaagtaggtgctccttaaacctccattatttttttttgctttaccttctcttccattgacgcttcttgattatttctccatgtatatcctcacatgtcttgtgctgaatgttgttaacatgattctttagagtttacaccgattaaacttgctatagaaggtagatctgactttctatggatcaaatatccttgttcttgaaccatgaattatgttgagtttacgctcc

SEQ ID NO: 147754 - DNA, 454 bp, Glycine max
  unsure (1)..(454): unsure at all n locations
ctgcggcatgcaagcttcgaagggaagagagagaccaatcactagtcatagcatggnctngaaagaggagttagttgcttgcttaaggtccaaaagaaacttgtcttagcatttatacgagacagagaccaacatgttagccatcgtcagcaagtaccaagaagaattaaatctagccatggcccacgagcataaagtggcagacgagtatgcccaagtgtacgcggaaatggaggctagaggaagggtgatcgactcgttacatcaagaggcaacaatgtggatggaccgatttgctcttacattgaacgggagtcaagaacttccccaattgctagccaaggtcaaagcaatggcggacacctactccgcccccaaggagatccatggacttctcagctattgtcagcatatgatagacttaattacccatataattagaaaccgctaggaa

SEQ ID NO: 147755 - DNA, 457 bp, Glycine max
  unsure (1)..(457): unsure at all n locations
agctntaaccctacagacagagggtngagtagcttgaagctctcaaaaactgactcctaggtactatcggccctataggattctggaaaaggtaggtccagatgcctacaagttacagcttccagaaaactctcgaatccactcaacatttcatgtctctttactcaagttatgccctgacccctctgttaagtagaggcatcctcccattgattggccaaccatacctagttctatgttcctgaaaagattctcaacaaatgtgtggaaaggaagaagggttgtattatcactgaaattttggtgcaatagcgtggtttacctgatgtggaggctacatgggttcctcaattcgagtttcaacagcaattccctatttttgaaatacaagacccttgagggcaagggtcttcttttgggggaggggtattgatatgtcaaaagaagatgatgtcag

SEQ ID NO: 147756 - DNA, 459 bp, Glycine max
  unsure (1)..(459): unsure at all n locations
ctcagagacacctgcggcatgcaagcttcccagttatagagagcgacatccactgttgtttcttccttgcacgnacttgatgtaaatatctgtatatctatttaatgatgttttttgcgttcactgtgctatcaaaacttcattctaccatgcttttagcttgatcacgtagatgcatgtgtctttacgatcattcaacagtggaaactggtctgattcttagaacttgataggacggcgctagtttatcgtattatcacgagggattggggtacggtaacctacttgtcgtatgtttgtcttaatacggttctagtccagcttattccaacacgaggaatctgcggacgatgagtgatcaggattacgctccactatcatgacgaatccacgcttaccatttccgagacccatatacacatgccattgtcagaaagaatatccttagctcaaccccta

SEQ ID NO: 147757 - DNA, 456 bp, Glycine max
  unsure (1)..(456): unsure at all n locations
ctgcaagcttgctctggggtgcaccatcttacttgccatttgctccctcaacaacccaagaatggtactcctggcctccctctgagtccgcagcgattcctgcaacgccacaccgagttgactcatatcgaaccaaaaaaagagttacgaattgaagaagtgatgagggacgcgagtagtggtaggctagggccacagagatctcgtgagctggaagagcatttaaacagaaaacgacttcttaaacaagaatatatatatatatataaaattaatgtatgtaaaaattataaaaaaataaacagtgtttttaaaaaaatcttataattatcgatggagaataaagtaatttgctaaggatcatctattcataatattaagtgctacattttcatagttgagtaattaattcgaacacgtatcagtgctgtgtnggccggacttacaactaaagtc

SEQ ID NO: 147758 - DNA, 428 bp, Glycine max
  unsure (1)..(428): unsure at all n locations
agcttgaatctccatatctgnccctatcgtaatggccgtgtcttgtcaatttgtcgcgancngaaactcaactactacggtactgctgcttctacttctacccccatcctcctcttctttttcttcttttcaatctctttcgtctccatgatactctgcatgtgcctctccgcacctgaaccacgcttctgactgcaatggctcgtgcccgtttccctctttcaatccttctctctctggtcttcgttgctcttcctctttccctcgccaacactgacccttctgatggtgatatatcattattgttatatccttttctttctctgtttggtgtttttttttttctgagtgaacattatacgggtgattgatgtggtcggagttgaatgacttaatgtgtttggtttttggataaaagatggaatttg

SEQ ID NO: 147759 - DNA, 459 bp, Glycine max
  unsure (1)..(459): unsure at all n locations
agctnttaagaaaacgaagagatgttctacttatggatggnctttctcctagtatggtgcgtatagaagatgttttctatcatgtatgaaaatttaaatttactttatatttaggggacatttgatagacgaaaaatatttagtttctcaggaatcataaaatgagaaactatcatttttatgttttgtatgcaattaataaaaaaatattttcagaaaattatgatttttggaaatcaattttaaattctcaatgaggggcaagaatccaatttatattctatttattgtagagaaacctataatcattacatataacttctcaattaaaactttaaatgatcataatatcaataacccttcaaatgtttagtggttacataaaaaggaacaacgcctcttagacaagaataatgtcccttaataactcacaatactatatttcttaacattttattt

SEQ ID NO: 147760 - DNA, 390 bp, Glycine max
  unsure (1)..(390): unsure at all n locations
ctaagcttgtctcccatgtgaatngcatacatagagctgttatattttcctaatngnncgccttttgaagtcgtttatggttttaacccactaactcatcttgatctattgcctatgcctaatgtttctgttcttaagcataaagaatgtcaagcaaaggctgactatgtgaagaatcttcatgagagagtcaaagatcaaattgagaggaaaaataaaagctatgctaaacacgcgaacaaaaggagaaagaacgttgtcttccaaccctgagattgtgtatgggtgcacatgagaaaagaaaggtttccagaacataggatatcatatcttccaccaaagggatatggaccatttcaagtgctcgaaagaatctatgacaatcgctac

SEQ ID NO: 147761 - DNA, 424 bp, Glycine max
agcttgaagcattgatggcacggagaagctcattttggttcaaatggcgggaatcttggaacccaaaccattcttgggaagggttcaagattgcaatctcccaaaggtttcaagcgtctaacctagggaatcctttcaggcattgctggcactggaacaagaagaaacagtgcaagaattcataggccaattcgagaagcacatcggaatggtgaagggattggaggaaccatttttggtggagttgtttctcaaggggctaaaagaagagatcaacactgacgtaaggctccatgaaccaaaaaacttgatggaatctatggtcaaggtttgtacggcggaagataataatccaatcttatgaaagttacccagagtaattgtaaggtgtataattttcacaaacctagttattccggtgaga

SEQ ID NO: 147762 - DNA, 484 bp, Glycine max
  unsure (1)..(484): unsure at all n locations
aaactaagctcgtatacaaaacaacaactctgataaataaaaatggtcgtatctttggctgaaaaccatcgtcaggccgagccaagccaaaacgaaaacaaaaacgaggaagaaaataatggaaaatggaaaccatggagaggaaatccatacgggagagaattcagaggccacaatggaaatggaaatcggataaatgcaaaggcatgaacactgctgagccaagccgaaaacgaaaaacaaaaatgaggaagaaagacaatataaaatggataccatggagaggaaatccaagcgggagagaattcagaggccacaatggaaatggaaatcggataaatgcaaaggcatgaacactgcatagccaatctcaactctaaaagacaaaacaataagttcagtgttggtggaaacgatanaatgcattgatatattcactgtgcacacaatatgacgaatacaatatatgcactgtgaaaagaca

SEQ ID NO: 147763 - DNA, 457 bp, Glycine max
  unsure (1)..(457): unsure at all n locations
agcttgacaataacaagtagaaatnagggagtgatttgtttatggaccgaccgcatgaagagggaataaagagtttagataaactctccaagtcgatataaagtattcaaattatcatttcaccttgtaaaacattaaaaccaatataacaagacgtgcaaaatgaattggctggtgaaaattaaagttcaagaaaaagacaaaatatcattgggagatgctttcacaattatctatcatcattaaaaaaattcactatatatattgaaaataatgaaatataatttatacgtgtaattcaagcatcactcaaagcagggagatataattctgtattctaaaactaaatcagtaacaactaaaatagttgttttaaaaatataaatagttaagtntataaaatgatgatatgttaaatgtaagcatcccataatttccatgcaataacatacaagaa

SEQ ID NO: 147764 - DNA, 412 bp, Glycine max
  unsure (1)..(412): unsure at all n locations
agcttctggtgactgtgaagcacgttatactgntgttttccagatcggctccttcgtcgagtatgtgtatacgtgtatatgtgtattatgttccttgttctttgttattgtttgtattttgttttatgcagaagaaaaaagaaggaatggagacgagagtcttcatcacagaaagggcaggacggacgaaatcagtgtcctatctttgctttcctcttatctccgatgagaggtaagtaaagaggggcaactgtcataccctaatttcgtccggggattattacttgatgacatacaataaatgaagtcccgagatgtctcacaaatccaaaaggaagcaagcttgcgtaatccgtgaaattccgcaatgtggcagaaatcgaacagaggtgtttttgcacaatccgtgagt

SEQ ID NO: 147765 - DNA, 430 bp, Glycine max
agcttgccagtcacggagagtatgtgctaatacttcctactgcatcaacagcgaaagggcatatgttgcggtcggggttatccgtcttaggcacactgcggtacccgaccacaaacaacggctcaatgaatgccttcgtgaagaggtagcatgaggagacctctctcttccacctacttgttggagagatgaccctcacacaacatgatgagctatacggccagcatctgactaagacaaacactcccatggatcacataccatccgccgttgacagagactctatgaagattccgcttgtgaccctccttggcatatctacaaaagaagacgctctggagtctaccaccacacgtgccaaagagaggatgacgtggatagtcaacgtataccaccccgtctgtgtaattcagctataacatgaaggatg

SEQ ID NO: 147766 - DNA, 459 bp, Glycine max
  unsure (1)..(459): unsure at all n locations
agctttacatattcagaatacataggcaattattgagacataaagggaatgagatntgagttttgaaattcttgaatgcattcgaaactctcatcaggaaagaaatccatatctatgaatatagggtctatgagagaacgagagcagaaaaggtttgtgtaccatatacattgtccttcagatgagaacaataaagaggatgaaatggaggaaggaattggagtatcctgaacctcgaaatgtcgttggcttctactctaagaacctttgcgcttcttcgatggtttctccatttgagagactttttcgaaatttcaatcggttaaaatgaaagagaatgaagaaagatgaattttgggctttgtggggagtgagttggataagaaatgagtgagttatggcagaaatacgaattgcgaacgagggtttcgcgtgagagacggaggtttctgaattctg

SEQ ID NO: 147767 - DNA, 358 bp, Glycine max
gaggggttttttttcgaaagaactaatgatatggaattataatacacctcctcctctatacctgaattctcaccttaattgtatcatattctcatttaaaaaacgctaacgtgacatccatgactacacacaatagaaataatcttatcatatatatatatatatatatatgtcgagaaaactgatatgtcaaacacataaaataatttattggatatattaaagatggaaagattcccaaataacctaaataacataactgtggggaaaggacttatttatctgagaaactaactcagattaggatggtgttacatctacaatgccctttaagaaacacactatatccaagtttaaa

SEQ ID NO: 147768 - DNA, 459 bp, Glycine max
agctcgcctaattaagcgtgagaggagagataatgtttattaaacacacaaaatgaaaatactaattgtgtattacctatacttaacagaaaatacttataacattacaaaataaccataaattgagagagtttgatacaatttattcaagttttatacacaaaagtgagtcattttcactgactaacaacttccacaaatttacagttttgcttgttctcaagcaaaaagaaaacagctcacttgtcctcaagtgacaatgacatgcagtgactatgtacaaaggtgtatgctacaaagtgactgattgcatgataagagaatggagtaaaattccctcatcacttgtctttcacaaggtatgtagtatccaaagagaagtataaaatgtaaccttaacagatagatgaagttaggcataagacaaatatcaaggaaagtagcttaaaccacagtctc

SEQ ID NO: 147769 - DNA, 451 bp, Glycine max
  unsure (1)..(451): unsure at all n locations
agcttaattaatggccaaatgtatggggncttctgtttatttaaattagggtggttgggtgctagtttaacaaatgatgtaaagttgagttagttcttcatctcccatcaaatatttaaattttactatgtagtttctactctatgtagttaattttgtaatttttgtctagtgggctctcattgtggggtttatgtggttaacaatttactttttgagttgatatttaaatttaaatttttggtcttcagtcacttagtcttaattaattggttcttgtttccaaacattttaccactgaaatgtatatattagtgtcacttaactgttctaggtgttttctgttaatgctactaaggatgccattgagctggtcacaaaattacgggcctacctagtgcaatgggccaagtaaaaattattcaggtatgtatttagttaaatatcaatt

SEQ ID NO: 147770 - DNA, 360 bp, Glycine max
  unsure (1)..(360): unsure at all n locations
agcttgaaggattactgggcgcgctcacctttatcgttaagagaggcccaangaggcggaagacaggaagatagtagccagcctcgctccttagaaataataaaatatgaggtgctggaaaggtctggcgtggtgtttaagacgacctcattggacgacaagcgtgaaacagggaaggcttatggcgtaggtctgtggacgaagaagatgaggtctgacactcgattactaaatgagacacttgatcgagagtcttgagactgaagctgaagctgatgcgtatgagaacatatacgggcacctttactctattgagggagcctcgatagacattaacttatgcatgaagagcctgtggga

SEQ ID NO: 147771 - DNA, 463 bp, Glycine max
  unsure (1)..(463): unsure at all n locations
agcttcattctacacctaatagagaggangtgattgttgcacaaaagagaaagcttcctaacaaaaattttcatgcaggtggaccttcttctagtaattctgacttacagtagcctcctatccctcttccattcccacatagagcaattccaaacaaaaagatggaagaagtggaaaaggagatcttggagaccttcagaaaagtagaggtgaacatacctctgctagatgccatcaagcagattccaagatatgccaagtttctaaaggacctgtgcacccacaaaaggaagctcaaaggcaatgaatggattagcatgggcagaaatgtgtcagcattgataggtaaatctgttcctcacattcctgagaaatgtaaggacccaggtactttctgtataccttgcattattgggaacaataaatttgaaaatgccatgctagatctaggtgcatcagttag

SEQ ID NO: 147772 - DNA, 238 bp, Glycine max
  unsure (1)..(238): unsure at all n locations
gtctataccgctgattcaatgtaattagagcctatagatctccgtactcttttgttttgtgaaacctaccttattatataaacaaagagatcttgattcatctgttcttacaggaccaccctctctcatatcatnttgcatgttttctgtttatttagtcttgcttggtatatatatgagagtcgattctctgaggatcctaacaacgagggtttgaccatcgatttcaatccagata

SEQ ID NO: 147773 - DNA, 228 bp, Glycine max
ataaaataatatcttgatgagataaaatctacatatgataagaccaaatctagatgagataatatctcgataagataagagttgggagcataaaatagtctgctctcttcaagtccaagcccaattccggattcaaacccaactgcttataactttcctgagattaagattaaaacacacaagtaatccagtaggcccaaatgataaaactgcataattaatttgaca

SEQ ID NO: 147774 - DNA, 329 bp, Glycine max
  unsure (1)..(329): unsure at all n locations
ggcctaaagaagtggtacttgaagttgtcaatgatgcatctgaagccaaagcacaccaggttaaaatagctgaaagagttgaaacaacgtttggagaccactagtgaaatcttctataccactttcgctaacagagaagctgagcttgaaccagctatgatgcatgagcagatagccgaggaagaaaagagttcttgaagaagctatggggcaatttgttattggagcatctcttcctgaggaagaagagaacatagcagacatagatcgttgtgcaactcccatccgatcaagatctattctgacacaagaaagtngatgatgtctta

SEQ ID NO: 147775 - DNA, 328 bp, Glycine max
aatcaacaatttgtccgcaatcagaaacaaatgaacattggatcagaacacacaacaattagtaccttgatttcgagtctgagaggctgcaaatgcaagtaacaagagagaaaaacatgcaatacacacgtcaaataacacgagtcagtgcacggttccacagtagatcacatcgaaattgaaataggaagagctgtgataacgaattgcgaggctcgcatttcaagtaataggcagcatagcattccatactgaaagagccaacggaagaatgagaaaacatgtaatcgaagcgaattcggtccagatctaatgttgttaagaatgc

SEQ ID NO: 147776 - DNA, 367 bp, Glycine max
atatcgagacgctcgaaattgaatgttgatgctctgagcaaattcaaacgacaataaatctttactcggatgtctgattcagtcccgtcacatatctagatgctcgaaattgaatgttgatgctctgagcaaattcaaacgacaatatctttttactcgcatgtctgattcagtcccgtcacatatcgagatgctcgaaattgaatgttgaagctctcagccaattcaaacgacaataactttttaatcggatgtctgattgagttccgtaatatatcgagacgctcgaacttgatagtagatgctctgagcaaattcaaacgacaataaatctttactcggatgtctgattcatgcccgtcacata

SEQ ID NO: 147777 - DNA, 469 bp, Glycine max
actaacctcacattaatttgagctctcatatgtacgggtttgttcttatatccgagtaaaaagttattgtcgtttgaatttgctcagagcatcaacattcaatttcaagcatctcgatacgtgatgggactgaatcagacattcgagtaaaaagttattgtcgtttgaatttgctcagagcatgaacattcaatttcgagcgtctcgatatattacgggactcaatcagacatccgagtaaaaagatattgtcgtttgaatttacttagagcatcaacattcaatttcgagcacctagatatgtgacgggactgaatcagacatccgagtaagaagatattgtcgtttgaattggctcagagcttcaacattcaatttcgagcgtctcgatatgtgaccggactcgatcatacatccgagtaaaatgttattgtcgtttgaatttgctcataagcttaacattcaattt

SEQ ID NO: 147778 - DNA, 299 bp, Glycine max
  unsure (1)..(299): unsure at all n locations
caaaagcagaatactcagaatcaccctcaacaaaaagctcaaaaaggtcaaaatgcttcaaaagcccacaaggaacatgcaagccaccatacctaacttatctatctaaagcactatctactgtacgatcaaagggtnataaatcacccggattgcccctaggcatgaactatatgtcgcacattatgagctnctcagcttgcacctaacataggagggaaactacagctctactcaaacgagatccaaatgagcttataaattgtgaggaacaccccaaaatcatgaaaagatagcac

SEQ ID NO: 147779 - DNA, 464 bp, Glycine max
  unsure (1)..(464): unsure at all n locations
cttcatctgtacgtacaattaatcattgaatttaaacacgttgacagattaagatttcatttaatcattaaattaaaatcacagcggatttaaaaaacatttaagaagatacattttcttnttgttgcccatagaataatctatgccagaattacaacagagactactttattaaggtacaaagatctatttaagagattaactattctggatgctgtaaaaaagctattctcaatacatatatagttgtgattaagtcattgaggcacacaaattatttaagagtgtaactattctcagtagatatttttttcatatgtataaaatataattgtgaagatcgatcgaacaactgacctaatatttctgtttatcatgctacgtaaaagttaaaatggccttagctaatatctcgtaaacgtgagcttataattgtagtaacataaggtgtggctccttgcatc

SEQ ID NO: 147780 - DNA, 407 bp, Glycine max
  unsure (1)..(407): unsure at all n locations
ttttcttaanaataaaacaatatcaaaatgtgtataatactcacagatcctacttcacccactaacttaaattgcattagggaaagttcatatatatgaaaaccacaaattaatataattaattaatcctatattaatgtccaatacatatgaaattccatatatagcaaagccacatcaaataattaattctatgatgaaatatatttttctacactaccatttggttttcttttatgatctgactaacttggaaaaaatttaagtaagatggtatccgctaaagataaagggtaagtatttttattggttaacgaatttaaataaaaaatatttattgtaatcaaattcataagaggacctacaaaatcataaacatataattttatgttctgataataaaaaat

SEQ ID NO: 147781 - DNA, 338 bp, Glycine max
  unsure (1)..(338): unsure at all n locations
cctgattattacctttgctagaatcttctgncaatacaacaaatacagccccgagcctgataagaccgacaaagaaatgcaaccagncaggtctagacgtcctatcagaactcgtagcctcaagaagtagatggtatttgtagatagaagagaagcagatatcaaagagatacttagggaaaacaaaaaaaggagacacagcattggataagcattctagttcatcagccacctagttaaccaacccctntacattatttttggaggagcatccttttagtntgatccttttggcaccttagaatatagagttggacaatagacaaattagccacact

SEQ ID NO: 147782 - DNA, 249 bp, Glycine max
ttgatcatattgttccattaagtgcctcggatttgctaaaaaggtagcaattgcggcaaattcacttgccgcatctttatcatcattttatttcaaggcgcaggaacaaataatattgacaacgtgtgcttaaattaccacaccagctggatattattgtctttgcaaaatgctatccactctgcacccggtgatttatcagttattatgtaattaatatgactaaaatcagctaactggacaaaagct

SEQ ID NO: 147783 - DNA, 450 bp, Glycine max
actagcttggctacccaactggggcgcaaatttttgtttaattttggccgaatggatatgcttccagagagttggctgctctaatccacccaacgacttccttgtgatgggacaataaattataagctgctggctacgtcttatctcatcatgtggattgagataactatcatagttcatttaatttaacacttccgatggtagaggaaaattagatgttttgtgataacggttaattatcaatatatccttgaagctaaatcatataagaattcatcatattttttttactagatgatgtgctaattcatattaattaaacttttgtgcatcaaatatcataaaggggttctgattttctatgtatcatattatagtctaaacgactcagataatcatgtaagagggttaattagagaacaaagatttactaagaaaattatacttatt

SEQ ID NO: 147784 - DNA, 399 bp, Glycine max
  unsure (1)..(399): unsure at all n locations
agcatgcaagctagccacccagctcgcccaggcttactaatgttcttcctccagaagcaacagccttctggatgaatcttttggaaggcccaagagggcctggntgctatttgcacccccatttttactaaatacaccccctgcctttttaggtgattctttttttccgaaagttacggaaacttacgaatttncgaacaatacttgttttctttccgtaatgttacagaaccttgcggatcacataatcatcccctttttgacttacagaatggtacggaacctcactaattgtgcaacaatgcttccattagatttccggagtgtcacggaaccctacagattgagcatcaatattttcttctgaattctggcatgtcccggaacttcacaaaaatg

SEQ ID NO: 147785 - DNA, 421 bp, Glycine max
agacacattcccctgctttcatttactggaagttcaaaggtacttcatctctctcttattttgattaaacattgtaatctttatttttatgtgtttacaacgtacattaaattttcatgatagtatttttatgttacgacctctactagttagctatcaagtgtaatttattataattttttgtaattcattgttttgttggttccattggtttttattctaaatacctattcttattttataacatatatggtagtagttgtaacataaaaattagtattgaatcttaggttatgcttcttcccccaccaattattccttttagttagaataattattatagcgtttcttcttaatgtatattataatgttgggggggacttacttttttttatacaaattatactatgttatattatca

SEQ ID NO: 147786 - DNA, 354 bp, Glycine max
actagtcattcatgccagcttagacaaaaaacatataatccttttcctgttcaaagcataactcttgtatattggtttttcttatctcataatgaattcctaattatgcttatatataaggccctgaaagaagtactatctcagaattcttcatagcagtatgacccggacttttcttatactcgtcaatctgttgtccaggtaataatgtaatatacttaaaacaaccatgtcatcctttcaattttcatgatagtcgagatattgtttgaatcaaaataattttatacatgcaactctgtaatagtgtattggtcgctgataaatatattgacacataatcttcaatcctac

SEQ ID NO: 147787 - DNA, 463 bp, Glycine max
  unsure (1)..(463): unsure at all n locations
gcaggattctgaaaaaaacagatgctgaaaacttttacttgcatcttaangaaanccncaacatagnagctataagcaataactaagttgggtatgcagcactttagaaatattaacattaggtagcatcaataaagtgaaaacaaaaatattaaatagtgcaaagtttatgcagaaaaaaatgatgtggacacaatttatatgttttttctttttcattttagatatttgaaaaaaatataaagactttgggaaaaacaggtgtaagataaatatagtcaccatttatgagcagctacagtatactgatcatatgcagatgactagaccaacatctggtatttaaaagtgctatttcaagctctttctattggaaagtacttactgacttcagatgaaggtcattataaaaattatcgtgtcattcttaaagattatccatctctaaacttgctattcataa

SEQ ID NO: 147788 - DNA, 344 bp, Glycine max
  unsure (1)..(344): unsure at all n locations
ccgtgatatatctagacgctcgaactttataaccgaagctcgtagcaaattggaacgacaatgacatttcactcggaagtcctattgagtcccgtttttatcgagacgctcgaaatttataatcgaagctcgnggaaaatacgaacaacaattactttccactcggaagtccgattgagtcccgtaatatatcgagacactcaaaatttataacccaagctctcagatacttctaacgacaattacttttgactcggaagtcctattgagtcccgcaatatatcgagacgctcgatattaaatacgaagcccgnagcgaattcgaacgacaataacatttcact

SEQ ID NO: 147789 - DNA, 470 bp, Glycine max
  unsure (1)..(470): unsure at all n locations
agcttggtttaatttcagcgtctcgatatatacgggtctctatcttacttccttttganaagttattggcgntagaattagctgcgagccttcggtttaaatttcgagcgtctcgatatattacgggactcaatcggacttccgagtgaaatgttattgtcgttcgaatttgctacgagcttcggttttaaatttcgagcgtctcgatatgttacgggactcaatcggacttccgagtgaaatgttattgtcgttagcatttgctgcgagcttctgttttaaaattcgagcgtcacgatatattacgggactcaatcagacttccgagtgaaatgttattggtcgtagcatttgctgcgagcttccggtttaaatattgagcgtcttgatatattacgggactcaatcggacttccgagtgaaatggtattgtcgttcacaattgctacgagcttcgcgtttaaaattcg

SEQ ID NO: 147790 - DNA, 440 bp, Glycine max
  unsure (1)..(440): unsure at all n locations
ttaagcacctgcagctgcagcttgacttggcttatagaaacttgtctatccgagcctagccttacataagtcaaagcaaatgcccttgactcatttccacccctacttagtatattaaaggctatacacatcaacctcatcaacttgaagtaaatttagaggcctttgagccatatatattacttccgnctttatattaattataagatccttttacaaaaaatatttgntttttattaatnttttttaattncttgatgcgnnaattnttttttttacatattcttagngaattattttttttcaaatgttaataaaaaataattaaataaaaagataataaaagagtaattttagaatgataatacaaataattgataaattggatgtgataaactaaattaattactcttcttattagatgagaattaatacctaat

SEQ ID NO: 147791 - DNA, 455 bp, Glycine max
  unsure (1)..(455): unsure at all n locations
aactaactataaacaaattgagatatcaaattattaaaatatgaaataaaaaaaaaaaaaaaaggttatacctacgcaacaagaaacacgatgatgatgtgattgaacttgaggaaggatgtttgagtactaggttgatgcattaatctttacacaattttaattcaccaccatcaaacaacttcttataacatacattaaatatccttttgtagtgattgcataataacttgttcattttagtgaacataaaaacttatgtgcacttcgaatgaatgattgattttatactattggagattagaagaacataagtattaactcaagaaagcaagtgatattaacgttaagaaaaatagtgaataatgaagatgggattagctcttctatttataaatgtggaatnataatctttttactcatngataaggctaatctcatacatattgtaaatt

SEQ ID NO: 147792 - DNA, 260 bp, Glycine max
  unsure (1)..(260): unsure at all n locations
catgcagatgatgttggacagnacgaactgatctaacaagtctatcacacactaaaagtggtaacccagtttggagcaacgtcgcctacatctgggggcttccaagccagggaggatatccactcaattagtggtagttcgaagatctaacagccactgtttacaaccttctcacctaaccactacgcgggcagcctctacctaagagccactcttagatatgagatcccctctcactccctctcaatcactctcccgtg

SEQ ID NO: 147793 - DNA, 408 bp, Glycine max
  unsure (1)..(408): unsure at all n locations
gcgcgggtctgggggacgaagggcaagnggtctctatacacgaagaagttgtttcgagtacgnnggacttggtacgaccatgccctcctgatttccagctgggaaattggcgagtggaggaacgccccgacatttacgcaacgagcataatgtaaacctttacgggtttaaaaactctataggtaggcctacgctctagagtttcttttgttaaggctctgtgtcttttgttttaaatttataataccaggatctttcttcatctgttcctacatctctacccattctcatccatttgcatgtttacttctttatttctgaaacggcagatccgatgacgagtccgccgaatgtactaatacctgtgacccgcctatcaacttctagcaagatacgaatcaaacggaa

SEQ ID NO: 147794 - DNA, 205 bp, Glycine max
  unsure (1)..(205): unsure at all n locations
gcagaggcccaacacgggaagcccgcccaacaacgtggctaacagcacagagataagaggccccagcgaagcgaaaggtaagaagccacaagccgaagagccaggtccgaacacgccncagaacggacataacccggagccaccacgcacaacagccacgcccgggacattgcgaagacagggacgaagaaccgcgccccaagac

SEQ ID NO: 147795 - DNA, 449 bp, Glycine max
  unsure (1)..(449): unsure at all n locations
taaaaactaacttacaacttgtataaaagaaaatatttgcttctttttcagacggcccacaacacataaaccaagaatgagctatattctggcatgggcgcatcacaattcacaggtaggcattaggtatgaaataataagttggaataactaatacacagaatataaaaccatatctcaagccatagcatctctactaagcatccatctaagggaaggggaaacctacaactcattcatcttagcatcatattgacgagcatcaaattgtgatccttctggcgccaacccagccatgatagcaaactgcacagaanaatacacatcgattcatttcacaccctacagatcaaagtttatatactgatatttcacacatattaattcaccactatagctcaaagacaatttacaacacgaaaataaataataatccgatttagcgtact

SEQ ID NO: 147796 - DNA, 361 bp, Glycine max
  unsure (1)..(361): unsure at all n locations
gagaagcgctatatatagatcagcaaactgaataaacattcggagaaattaatccttctaattattggctatggttaagcgagtcaaattaatctccaaaataacatggataatatcattttcaacaaagacaaatagatgacttctacactttattgtattttttaccagctatatacttcacatgttaatcatgttttttgatagtgacggaccaatcaaaagatgaatggatttatgggagacgaatttaatattcaaacgattcatcgcaaggcagatcaaacacgataaacaccagactatctttagggtctccgccacagccagcttgaataattaatacatatacangaacctc

SEQ ID NO: 147797 - DNA, 439 bp, Glycine max
  unsure (1)..(439): unsure at all n locations
tccagaactgcagaacatgctaggacatttctagatctttgatgtcctactganctaggaggtccaagaagctttactccctgcattcaatatctcctatctgcaatcttaaaatggagagaataagcaatagctcatagtattggtctagatcctttgcaagatgagttttatctttagtcttgatttagtctatcatctataatttttgccacaagtgttagatggaagagtggggcttcacaggtttagttaatgtcggaaatggaaatgagagtgacctggaccagttgatatcacaacagaattttgcaaattcatcacccagtcaatccacagcacaaattcatgacataccccggtcttggtgaacttaacccgcaacagacaattttcagtattcaatatgtatgaagaattgcatttgcacattactatt

SEQ ID NO: 147798 - DNA, 323 bp, Glycine max
  unsure (1)..(323): unsure at all n locations
gggcgatggagcacaacaagttcttccacatccacaatgcgcgcataaacccaccatcccctgtagcccacctccaactgagctcacgtactcccacgtagcccatatnctcgtttctctcaacaccgggtccccatcaatcctcccaagcttccacaacatccaagcaaaacaacattgacacagcacaagctatcacagccaagcaaaacagagcaaaagcagaaaactctgccaaaacaccaaccaaaaatcacagcttttnccactcaaagaccccagtaacaattccttcgatccaatctcgtaaccggtggatcgac

SEQ ID NO: 147799 - DNA, 484 bp, Glycine max
cataaatactaagcttgttaagaactgaggaataatcaaaacattcttgtttcacatctttcgcgtgtatgaaatccactccacaaggtttgaagtagaggagagcttcaaccctataacgcaacgtggcagacaaaagtgggcagtaaacttgaatggtcgtcattgtcaatgcggaaggtattctgcgcttcactatccatgttcacacattattgcagcttgtggttacgtgagcatgaactactaccaatatatagatgttgtttatacaaacgagcacatcttaaaagcttactccgcacaatggtggcctcttgggaatgaagcggctattcctccttctgatgacgcatggacacttatccctgacccaactacaattcgtgcgaaaggtcggccaaaatcaacaacgataagaaatgagatggattgggtcgaaccatttgagcaccgaaccaaatgtattatattgtgagccgaa

SEQ ID NO: 147800 - DNA, 414 bp, Glycine max
  unsure (1)..(414): unsure at all n locations
ccaatgatgaaagtgagtttcatacgaatgtatagagttcccttcttggtcaactagttccgcataanaactcttaattccaacatgacctcttggaaactttatattctcaaatgtttttgttgcaattgatccgggtcccatttcaaaactcccagttacaaaaatagctggcttaatatgatttttaagcttttgatatagtgaatatgatgcactcggtagcaacaatagtattgagaatgaaagtatcattgcattagagataaactccatgttaacctaaacataaacaagtagtgtcacacaattagtaatgaactgtctatgatgttattcttttaacgtaagctcacttagatttaatttcaacacctgaataaaagattaggtgattgataagtaagttgaaaa

SEQ ID NO: 147801 - DNA, 275 bp, Glycine max
  unsure (1)..(275): unsure at all n locations
ccatgccccttcaccaagtcccatccgacagtaaccagaatgacacacatttagctccccttagtttgtatggctcccaacaaactcctggccaccattcgggagccccctctcctgtcggactgaacagctcctcatgccagtgagcgcaccacccactccatcgncaaaggccacaccaccaactccaataccaacaccacccacaccaaagcccacaccacccactccattgccacaccagcgagtnctaagcccacaccagccacaccaaa

SEQ ID NO: 147802 - DNA, 360 bp, Glycine max
  unsure (1)..(360): unsure at all n locations
ntaggagcatacacaggaagcaatgctgcttaagacattatgacatcgcanaccacagaaattctgcaagcctttcattgttaaataatctctcagtcatatgcttctataacattcatgagacgatcaattgatctgatagttaatatttggttctgttcctgctgtttgcttattgctccgctgctatgggttcttgcgccatgtagagctgtggtttctcttgaatgactaaatcaccattcacaggagattctgtttcatctggctctatattcagaggaagagctttacttgtctcattcaataagacattgatctcttcagtggctgcagctatttcaactntctcttcctctc

SEQ ID NO: 147803 - DNA, 340 bp, Glycine max
  unsure (1)..(340): unsure at all n locations
agcttctatgccaaaggacttacctagtatttattcctttgatagccattnagagccttgtttccctttccttgttttgaagctcactacaagccttaaatgaaaaaccatgatatcaccatatccttaaagaattcaggagctttggaatagttctgggaataagagtgggggggttcttgtttcattggataacatgtcttgttggccatgcttcatgatatattttgagccatactcgatgtacattgcatattggttaaatgttgggcatgctgaatatgatgctagttctcaaaagctacagagtaaaatatatatatatatatataaaatcgaa

SEQ ID NO: 147804 - DNA, 413 bp, Glycine max
ctcagctttctttcttatcaatatgtccattgactaacatatcttattgtgatcctactttcttggtctttctcatctacatacatgctcattcaaaactcatgatttcaacacatgcttcaccccttcatgcaatcaattcacaacaccaatttcataaacaaaataattatgtttgcactgcatactcagataatcaagtcaaactgttcattatgcttcaagacatgcatactattatctacaatcaaaagtaaaccaatatcaccacaaaaaagtgtactaaagacataagtataataattataatattaatccaaaaaaaaagaataggaatctaaaactcctgtgattggtcatcctgctggggtctcttgatcctcagtgccctcctcatctgtaaaattgtacac

SEQ ID NO: 147805 - DNA, 427 bp, Glycine max
  unsure (1)..(427): unsure at all n locations
agcttccatggagacccctacaaatttctctcatccctgcctaagataggggntccaaaaggcgacttagaatctatagaatttaagataatttttctaattacaatcttagaatttaaaaaataaaataaaaaaacctacagtaatatctttttatcaaataaaaactcaccataattgactatagaatttacaaatcatatttgataaaaatcgcctctcttcccaacatgatgatattttggtactcaataaaattaattttaaattcatgattgatttggagaaaaaaatcttaaaacttaaaagagagtcacatttttcacctaattataccatgcaataatattaaaaaattcaaatgagatnttaaattaaattatatatgaagattattttaatctctgatgatacgggaatcttaatt

SEQ ID NO: 147806 - DNA, 437 bp, Glycine max
  unsure (1)..(437): unsure at all n locations
gctgggntgcgcccaacaaagttctgaactacctgattatcgatctaaacttgagacttacaatccctctggttatacagaattgtttggtattcatcatcagcatttctagtgaatttcagcatgaagaagtctccattgttagacatgcacaatggtgaaatcattgatgtttcttcataatgacaaatattaagatgtaaataactaaaatttattaattgaatccaagacttgtcatctccaaactttctcatctgccacaagcaaagatgagtgttgctatcttgccaaacacacagcgagtctctaaaaactccaatatttgtatcaaaaaagcaaaaatcgtccggaagaaacagtgatctgcaagtctccttcttcaaggcaacagaaataattaccaattcagaatgaatgggtttctttcccttaat

SEQ ID NO: 147807 - DNA, 437 bp, Glycine max
  unsure (1)..(437): unsure at all n locations
gctctccccatttcttaattggggagaaggaagtttatatgtgtntattctcttaggcactactctctctctcgaaatagctgacgagaattagttccgtgaacaaaatccaagccgaggcgcttacgtaacgtttccgtgagtaattacgcagagattgtcgagccgtcttcaagattcataggacgatcttggatatcttcagtcttcaacgggtaagtaccgtcgaccaagcttttcaattcattctatgtacccgcggtggaccacattttgatgcatgtgtttatattctcggtttcatatactttatataccacccttttgacgggcttaagccatttattttagataatttctcgccttattctataaattaaagaagatttccaccgatcgcttgaatagtatcatcacggaatttctggtaaaaagaa

SEQ ID NO: 147808 - DNA, 432 bp, Glycine max
  unsure (1)..(432): unsure at all n locations
agcttatatagcagaatcacaggatcgaactcntatttaataaacaacagctctaaagaatagtgcctctgtgcaaggaaaattaaaaagtacgatgccttaaataaaattttagatataattgatttctaagtccgaagaacatttaaatgtagaagactataaaaattgaaagttaagaagaattaacaataatgttaaataaaaaaaaataggaaatgttgaaacttcaagagaaaacagnaataaaaagacacaaaatgcattggcagactaagagtcctccataaaacattactgtaaagttcaatgtaaggcaacatgcaaaatgcacaagcaaagcctctgactaactatcaaactatcaagtaccgccatgacactgngaccataaaaatcaaaacagaaacagagccggaataaagctcacct

SEQ ID NO: 147809 - DNA, 384 bp, Glycine max
cttctcgcttttattcttttatcacacagtggcacctggagatatgtcgcggtggtcaagagaccttggcgacgtcaagtggcgtgctattgcccacaaccaagcttgaccgatccctaaccaacccaggcatattcagtcagtgagaacctgtgatgtacttaaacaggcgagctcctggcactataccattaaacgatcatagaccacaaagctacgatgcttgtgtggtggctggccaactgtgaactctgattgatatatgggttatgggctctggtaatcaattatcaagggtgggcaatcgactacaaagctttaaaatgaagacaagaggctaagatagtctctggtaatccattaccaacgtgtgttatctattac

SEQ ID NO: 147810 - DNA, 365 bp, Glycine max
  unsure (1)..(365): unsure at all n locations
aagcancaacaagaatcaagccaaagctatagagcaagcaatcaatggggcaaaacacaccaaatgattatgaagatggatggctcaaattctacaaaagaaactcatcacattcaaatagagctttcaaaactatcatgacatgtagaggagaatcaaagatttcaagtcacaaaatgtcaagaacttttattttcaaaacaattacccatttcttgaacatatcctataattcaaagaaaaacatgcaaagtcgtacatgcacacaaaattgtcccaaaatattaaactaaaaatccgacgaaactaacaacattaacaaattaacacaactaacaaattatcaaaaccaacaaaactagcaa

SEQ ID NO: 147811 - DNA, 469 bp, Glycine max
  unsure (1)..(469): unsure at all n locations
ccttgatcttcttcataatggagtcctttctccttgttgttaattccagnggaatggagaaggagaagaggtgagaggagacgtcactttaatgagaagatgagttaagaacaagctcaccaccatatgaagccatggataagagcttgaaggtatgagaagatgagtgaagggagaaggagagaaggagcacaaaattttgtgcctcaaatgaggtctgaactttgaagtgtaattctcaaatgatcaaagttgaaggaaatgcacacacatgacctctgtttatagcctaagtgtcacacaaaattagaggaaaatttgaatttctattcaaatttcacttgaatttgaaattgattntgtggagccaaaagttcactaattatgattagttaattttagctatggttcagcccactaatccaagatcaagtccaagattctccactaagtgtgcttaggtgtcatg

SEQ ID NO: 147812 - DNA, 312 bp, Glycine max
  unsure (1)..(312): unsure at all n locations
tatatatatatatatgcattattatctatatcgtaataagaacaaaggcatcagagcatccctaccccaaaaccttaaagatagaaaatcatgacaaatacattaccttaagcaagttgctcagaaactatataactctgagtagctcgcagcaagtccataggagttacttcatgatatacctacttaccaatgaaatatttaaattgcaggcactatttacctagatctttgcatcgagatcacgacatttgntcctagacactatactgatcatcatcacagntacgattagttgcaatcaattctgat

SEQ ID NO: 147813 - DNA, 397 bp, Glycine max
  unsure (1)..(397): unsure at all n locations
actaagctgctctanattacattgatgttnggatttatgggaggaggttattttctcatttttgctttaagagtaatgtcccactggtaaaactaactttccaaatgtttgccttcgcaggaatggccccgaggaagcttgcctcatagaggtccaggaaggacaaggcggccgaaggaactatttccgccccggagtacgacagtcactgctttatgagcgttgtacaccagcagcgcttcgaagccatcaagggatggtcgtttctccgggagcgacgcgtccagctcatggacgacgagtatactgatttccaggaggaaatatggcgccggcggtgggcaccactggttactcccattgccaagtttgatccaaaaataatccttgagtttta

SEQ ID NO: 147814 - DNA, 416 bp, Glycine max
  unsure (1)..(416): unsure at all n locations
agctagggtccaattcaaacagncccctcctttgtattgagatgctnnaaatagagaaatggaagttctcgagaaattcaatcggtcataactttncactcggatgtcagattctagagcataatatacagagacgctcgaaattgaacaacagatgctctctagaaatctaaataggaaaattttctcacatggatgttatattcagacacataatatatcgagacgttcgaaattcaagaattcaaaaattaaagttctcaagatatatagagatgaaaaattatgaccatgggtgtacgatagagacccatgatatatcgatatgctcaaaattcacaaatatggccaattcaaaaattcaaagagccctatctnttgacatgggtgtacgattgaggcccatgaaatatcga

SEQ ID NO: 147815 - DNA, 382 bp, Glycine max
  unsure (1)..(382): unsure at all n locations
ctaacaagccaacttacaacagctttccccttgatactcagcataaggatgcacaagtcatagttgagtatgtgaaaagattgtatgaccaagtgaacgtgcaaattgcaaagaagaatgaaagttatactaagcaagccaacaagaaaatgaaggaagtggtacttgaacccggtgatgatcctggacatttgaggacaaatgttttccaagaaggagggaatgatgagaatcatgaaacaggccaaatacagtctaaaggcccaagtggagaatgacaaagcccccgagtggagaatgatgaangcccaagtggagaatgatgaacgcccacatgcagagacactatcaagactattaattgttgctgaaggcccaaact

SEQ ID NO: 147816 - DNA, 383 bp, Glycine max
ttctaaagctatcacccttacagaagattggaaaagattataatggaagtcaagagcacgaaactgcgcggataccgttaactggtgagcaggtcttccagcggattgaacaccttaatactatatttggaaagacccaaaagaaggataaaagtaagagttgcatatggaagaagatgtccattttctttgatcttccgtactggtctgaactagatgttagacattgtattgatgttttgcatgtagagaaaaatgtatgtgacagtgtcattgggacactccttaacattcaggcgagacgaaaaatggtctaatacctgtcagatctagctgacatagcatacaacgcagttgctacaagtctgatgtaaaaatatact

SEQ ID NO: 147817 - DNA, 483 bp, Glycine max
  unsure (1)..(483): unsure at all n locations
acaaaaactaagctaattggtaatgtanaatgccccttcctcntatgttcnttttctttccactcatgaattctgtcaacgagcagaaaaatactaccattaaaataaaatgaacctattattattatctaatattttaaatatgacgcttaactcatcaaataaatataataaatactgtaattgttaaaataaatactatattatgaaaaatatctaaaagtaatagcaaacaaaatataaaacccaattgtttatgagagggaaaaaaaagaataataaaatcatactctatgtaaaaaagtattaaaatgaaatctaataaatattaacagtaaaaatgaaataaaatataaaaataaaacaaacattaaaggttggcattttaagtaatgtcttactagctcctaaaataaactctttaccaaacaatattaaaaagacagataaaatttttaacagtaaaaaaaaaaactaaactta

SEQ ID NO: 147818 - DNA, 384 bp, Glycine max
  unsure (1)..(384): unsure at all n locations
agctttgagcaaantncttctattctatatcttttctcggatggccgatagagtctccgaatatatcgagaagctcgaaatggaataccaaagctctgagcaaattcaaacgacaataactttttactcggatgtcttattgagtcccataatttatcggaacgctcgaaatagaataccgaagctttgagcaaattctaacgacaataacctttttactcggaagtcggattgagccccgttatatatccagacgctcgaaattgaatgttgaagctctgagcaaattcaaacgacaataacctttttactcagatgtcggatagagccccgtaatatattgatacgctcgaattggaataccgaagctctgagcatatcaaa

SEQ ID NO: 147819 - DNA, 415 bp, Glycine max
  unsure (1)..(415): unsure at all n locations
actaagcttaacattcaatatcgagcgtttcgatatattacgagtttgttcagacatccgagtaaaaagttattgtcgttntaatttgctcagagcttcggtattgcatttcgagcgtctcgatatattacgggactcaatcagacatcagagtaaaaagttattatcgttttaacttgcttagagcttcgataatcaatttcgagcgtctcgatatattacgggactcagtcagacaaccgagtaaaaagttattgtcgtttgaatttgctcagagcttcngtattcaatttcgagcgtctcgacatattacgggactcaattagacatccgagtaaaaagttattgtccgttgagtattctcagagcttccgtatgcaatttcgagcgtctcgatatatttccgggactcatc

SEQ ID NO: 147820 - DNA, 315 bp, Glycine max
atcatcgccaagcaccaagaagagctaggtctagccccggcccacgagcataggagtagggacgaatactgcccagcatacgcggaaaaagaggccagaggaagggagatcgactcctttcaccaagaggcaaccacgtggatggatcggcttgctcttaccttgaacgggagtcaagaactcccccgatcgttagccaaggccaaagcgatggcagacacctactccgcccccgaagagattcatgggcttctcggctatagtcagcatatgatagacccaataggcccacataattagaaatccgtagggaac

SEQ ID NO: 147821 - DNA, 334 bp, Glycine max
  unsure (1)..(334): unsure at all n locations
ngctacattgatgcatcctgactatggcatcttcgattttgtcacttaaatnnnggaggcttaagttttctatcaaagaagaagatggtgagagtactaccctctattaaccaccctaatcaactttgtgaaggatgtttacttagcaagaaattcataatgagttttccaaaggagtcaaactcgagctaagaagccactcgagctaatacatgctgacgtctatgggccaatcaagccaagctcactaggtaaaaaaattatttcctccttttcattgatgatttttcaagaaaaacatgggtctatttcggtaagcacaaatcagaagtct

SEQ ID NO: 147822 - DNA, 290 bp, Glycine max
gccgatgcaagctctctccatataacggcaataaatgcaatcatggctacaatttcattgtcatccttgatattacattaaaaagcggccgtgattgcgggtcaagtaactcaaaaacctcgacttgtatatcaaacgtcaaaatcatttgtagaacttcacctttaagagtttcattttttgggtctagccttattttgctcaaaccatacaataatgtgattcccggaacattatgatatgggtgctccattgccactttatttcatatataccggccatatcttcta

SEQ ID NO: 147823 - DNA, 275 bp, Glycine max
  unsure (1)..(275): unsure at all n locations
gaaactaagctattaatgttagggtttcgtctataatggctggccaaatatcctttttgtggatnnctaaagaacaggggatgtaattattttcatatctaattgatcctgcttcttgtgctacatgcttcttcactgcttaaattttgtatgctcttggcctgatcaaccatttgtgtgcctagttacgtgattttaacattgggaaatgtattgttgccttacaacttgtatgaaacagaatcgaaacttactcttaccagagggatctatgg

SEQ ID NO: 147824 - DNA, 347 bp, Glycine max
  unsure (1)..(347): unsure at all n locations
cctcagatatcttaagaaagggggggctgaattaaaatattaccaactatttccccaattaaaattctatcaagntataaattcccttaataatgaacttcttaaatattgattcaaatagaacaatntgaatatgaatataaaacaataataaataaaggagtttaaaggaagagaaagagcaaactcaaatttatactggntcggccacacccttgagcctacgtccagnccccaagcaacccgcttgagagttccactatcctagaaattccttttacaagttctaaacacacaaagacaatcccttctttgtagttagaattcttttacaacaagagaccctc

SEQ ID NO: 147825 - DNA, 415 bp, Glycine max
  unsure (1)..(415): unsure at all n locations
ttttatgtcaacgcctctgtttaattaattggttaactatgcccatataatattgttatatatgcaagttgaattaagtcaaaaactagcaactagcttaaatagctatgagctatgcattatagggtctagtaaatgaaaacaaagggaggggaaaacaacgatagattaagaaccagtatagagtgtgaaagcttgaaaaggagccaatttaactatacaatatgcttgaatgcttgaggatgtaaattatatttgagtaaattaatttgaacactgcatcttactttcacactctcacaattagaaaaatagatttttaacaatataagactaaacttataatattatttaataactttctttctattgactatntgtaacattatttgagaagacttgttttttttttttt

SEQ ID NO: 147826 - DNA, 367 bp, Glycine max
  unsure (1)..(367): unsure at all n locations
gaacgtgtnttattatgacacccaccccaatcagcatcagtnttagagacatgatgatagatccaagatgtattgagatgatgatcaagtgttcctcgtaaataccgaataacgcgtttgagagctctgatatgagccaccctcagagtgtgcatatataagcacacctgttgcactgcataagagatatctggcatggtgagagtgagattctgtaaggccccaacaagaatcctataaagagtgggatcctcataagctgcgctagatgtagcacccaccttagcgttggtgtgaaccagtgggggagacaactttgaagaagacataccagcccagtcaataatttcttcggcatatttgcact

SEQ ID NO: 147827 - DNA, 438 bp, Glycine max
tcttgtattctgttatcttgtgaggatcaccaagtgtggagcttgtgtttgacgagtcttatatgcaatgcacatgttgtgctcttgcatacatgttactcactgtgggtggcatgtattggagatgtaatggtgtgaattagtaggactcaccaaggccagaccttgagttttgtgagccctttggaggattgaccagggaatggtccgaccacggttttgggtgtcgtgctcttgcatacatgccactcgccattggtggcacctactggagacgtagtggcatgctattgcatacatgccactcgtcgtgggtggcatgtactggagacatagtactttgctcgtgcgtacatctcactcactatgggtggcatgtactagagacatagtagtatactcatgcctacatgtcactcattatgggtgacatgtcct

SEQ ID NO: 147828 - DNA, 347 bp, Glycine max
aactctaccttatactcggaaattcgatatgttaaactctagcattcctttccggaaagatcctccggtccaaaatgttatctgcgtatacgctctaagctcccaaagataggaatctcctagtatcatactgagcttgaggcctggaagtggcgcttttccttttcctggatgccatatgtaaaaagaacccaaaattcacattagaccaaaatttattcaagtcaaaaaatagaaaagtaaagctgatattaactatgtgcgctcatcgggatactgctcgctatcgcaccctataaaatgtacactacgacttagctcaacaagggcacgcttagccaattatg

SEQ ID NO: 147829 - DNA, 336 bp, Glycine max
aaaaattggttccgtgaagtaaatccaagcccaggcgcttccgtaacgtttccgtgggtgatttcgcgaagattttcaaccgttcttcggcgttcttcatcgttcttcggtcttcaaccggtaagttcccaaaattgaacttttcaattcattctatgtacccttagtggtcctcatttgtttcgcgtacttttattttcatcccatttactttccgtacccccttttgacgtgctttagtcatttacttaagccattttctcgcctaatcaagaaattaaataaatttccaccgatcatttgaatttgtatgtcccgtaaattttggtaaatgaa

SEQ ID NO: 147830 - DNA, 401 bp, Glycine max
  unsure (1)..(401): unsure at all n locations
ntacgaaacaatacattttnttactcaattttctaactctacatgacgtatngagagnnngaacttttttntaaactatagatatcattttaggataattgtaatataattgtttactcaaaattactaattaagcataaataacttgtgatagttgatttatgcacagtatcctatgtacaaggtgtcttaactaagagtaagaagataaatggtttagatttggttgaattttgtctatttttcaatgcaaattacttaaaattaattagatttgattgaattggatttatgtcttgtattttgcaaaaagattattattgatctcgaaggggttgacacctttttttcacaaataccatcttcatgaaaatatgaatnttgtatacaattatgtaatg

SEQ ID NO: 147831 - DNA, 271 bp, Glycine max
aaacctttgcgaaattcttcacggaaaacgttacggaaacgtttcggaagcgcctcagcttagattttcttcacagaaacaatttttccgagcaaattcgaaaaggagagaagagccaaaagggctgaacccttttcttcttcacttcctcccctatttatagcaaaataagggaggtggtagccgcccagctcgcccaggcgagctcagctcgcccaggcgagccaagatgcttcctccagaagcaacagccttctagaggaatattctg

SEQ ID NO: 147832 - DNA, 352 bp, Glycine max
  unsure (1)..(352): unsure at all n locations
ntgtgctcaatttccactggaagatgacatgttttntctttagacaacccgataaggagacattcctatgggtgctttgtaggcaatccgatgtgcccagagagcatcatcaagcctggtactccaatctttcctgcttggctgcacaatcttctctaaaattccttgatttcccggtaaaattctgcttgccatggctgggggatgggtaaaccctggaccaccgactttaacagctcatgcctgtcaaaagggcctacacacattgttagactcacccaacaaaactaaagctgccactacatatattaggtggtcacattaaacttcatcagaattactccaaaaagaa

SEQ ID NO: 147833 - DNA, 459 bp, Glycine max
  unsure (1)..(459): unsure at all n locations
ctaacgcttagcctccctttatacggaaacccagttgtctgttatttgattgancaagaagcgaacatttattgttttcacatcctaaaatatctaaatgaacatttagcaaaaaaaaaaaaaatgatgctaaaccacaaaaattgatgctaaatgaacatttagtaaaaaaaaattgtgcttgagcaaacactaaatagtgtcaactaagttgacttataatatacactattatgagtctatttgnttttgtggtatttactacacgacatttattagtgtcaaattagattatgttaattatagtgttgacttaattgttgctactaatgtaggttagaccatgcaagcacaaatctaaaccttgaagcatccccatttttgtgttggcataactgacacaaactaaattatatgcaatctatagcgattatttgacctgaattaatcaatgctatg

SEQ ID NO: 147834 - DNA, 392 bp, Glycine max
atgaagcatgcaagctcttctttcacaatcaatccatctattatcttacaattctaatagcaagggcacattcttgttctttctttgtctaacatgcacatctactcaaactcatgaaaagaaacataaactccatcacaatcatgcattcaattcaaaatcacatcatacaccaatttcacaaaaagataaaaagagtttcacttccatatcatcaaaatcaagtcaaactgttccatatgcttcagaatgagcaaaccaactatccataaataaactagcagaggatgtaaacataaaagaaatattgtactaaaaccataatactaataataataataatcatcataataattaaaggcaaagcatcatcaagaatttagaattcctat

SEQ ID NO: 147835 - DNA, 470 bp, Glycine max
  unsure (1)..(470): unsure at all n locations
gcttacatgataatctccnttggctttctttgtttgccttctaaggctttatanaaagggcaataaagcattcaatgcatcatttaatctccttcgccaactggtcatttggacaagattaagcatctttcttttctctctttcttgtacaccaaatcttgtggcagatcgaggacatgtttcctttgtgttagaaagtatattgatattctttcttgttcacatgcatgtcttttgagaggtagtaggtgatacttttcattgtcctttctgtctgctctttctcatgaagatcccaagaatataacatattgtatactttataaataatcctgcatttagcatagattatgttttaaacttaagtttggtaaataatgatatataatgtgctctacgtttagatagttcttctcaagagtatgtttggtaaaatcaaatttgtttggataataataaaaaatattttt

SEQ ID NO: 147836 - DNA, 337 bp, Glycine max
  unsure (1)..(337): unsure at all n locations
agccttctagctnnncattgttgtattttgatctcccttaggagctctaaatnatgggagtatgctcaaatatataaggcaattctggtcaggtttcttgcttgattaagtcgaattaagggagtgtatgggatggccctaagcctataatgcatttttgaacaatgggacatgccacattgnccccgttctcttgctattgacgcctaaacgcgcgcccaccaagagttcggtgaaatgcctcaatggcattagcgcgtgacttttgtaaagaaacaacccacagagcattttggtttgtacacattttcttttttggaatatgtattcattcctg

SEQ ID NO: 147837 - DNA, 408 bp, Glycine max
  unsure (1)..(408): unsure at all n locations
tcatgatgatgaatcaagncgattcatgttgttntgattatgacagagntgatgacaaaaagcccaaagaatgatttcaagattaagtcaacaagaagaaatcaagaagattcaagaatcaagtgaagtttgatttcaagattcaaganaagatgaattcaagattcacgagaagaaatcaagaagacttcacaaggggagtattgaaaagtntttttcaaaaaacatacatagcacaattttgttttttcaaaagagttttctcaaaaaaatataagttaccagatgttttactctctggtaatcgattaccagtttcctgttatcaattaccagtggctaagtttgatttcaaaagctttcaactgaattagcaacgttcccattgatttaaaatgggtgtatcga

SEQ ID NO: 147838 - DNA, 350 bp, Glycine max
tacacatacctctttaagagctaagctcatctccttgagatgagaagctagagcttaggtacacaccccctataatagctaagctcacccccatgacgaataacatgaagataataaaaaacaaggccttattacaaagatcactcaaaatgccccgaaatacaaggctaaaaccctatactactagaatggccaaaatacaaggcctagacgaaggagaaacctattctaatatttacaaagataagcgggctcatacttagcccatgggctcgaaatctaccctaaagctcatgagaaccctagggccttctcttggatctctagcccaatctacttggagtcttcta

SEQ ID NO: 147839 - DNA, 363 bp, Glycine max
actagcaagactacccatcatatctcccaaaaccccatacccacgaaatttaagagagaaagaagtccacccaaacctgaatattcgaagtcccactcgtagccacgcacttcacgaccccgaaaatgccctcctttcgcgatttggggcagaaatgatggccaaaggttgaagctttgcttggagcttcaatggagaatgaagaagaagaagaaaatgggaacgtgagggagagagagagctgtctgaaaaaatgtggggctgagtgaagagagagataagctttttggtttaaataaaacgggtgtctcttttctattatttatttaagcatgccacatgtcttcatccgagtggagcaaa

SEQ ID NO: 147840 - DNA, 347 bp, Glycine max
  unsure (1)..(347): unsure at all n locations
aaaactaacgccgtgatataataaatgacattcatttagtgtacgatatatttgagnattttaggggactgataatgcattggagtcactcattatacaattgggataaggatattggaccaggaatataatttttattttacaatacattaatatttgtttattcttatgactaaagtatgtatttatgtgtagatattaaggagccacaactgccgatatcctgaagaattcagtaggggctaattttttaaaaaataaaataatttaagtctttggagcttaaattgaatccctagatagctacatgagtgttaaatgttggaaatggccaaattaatattatg

SEQ ID NO: 147841 - DNA, 446 bp, Glycine max
actaagctctataagcttactatgagaaaaagagattttgatcttgtcttcatagaaaaagtagctcatagccttatacatatactatatagctaatctatagaagctctcaaatttagtttatttaaaaacttattttaacttatgcgtaaactaattttaacttacaggcgaaacttgattcattttatctttatattctctttgcttagaagtgctaattcaaaagtatatccaaacaaggccttgtcagctaaaaattctcggcgtgcacataacagactatgttattgcctaataaagggagagtgaataaaatattggacaaaagtagctgaatcggtcttgcgtaccacattgttccagtattcatcggttaatagaacaacttctaacggtacatcaacctgcatatactaacacgaacataagcaccatttgaattt

SEQ ID NO: 147842 - DNA, 401 bp, Glycine max
  unsure (1)..(401): unsure at all n locations
aaagntacccaaacccacccattatctaacatccccctcaaactcacgatgcattagcaagaagcttagagagtttgttagtcaaaaaatgaaaaattttaatagaatgagatttggtgaacaagtcaagaatctgcatagctgaagaaacaaaaggcagagtaatggtgccatgtcgaagatgatgacaaataagaagacaatcaatttcaatatattttttgcgctcatgaaagatcgagttatgagtaatttggatggcactcttgttgtcatagtacataagagtgggtctaaagagagaaacacccatgtcaaaaagtagccaatgcaaccaaactacctatgcaatggtagaagccatggcatgatattcaacttctatagaagaacgagagata

SEQ ID NO: 147843 - DNA, 315 bp, Glycine max
  unsure (1)..(315): unsure at all n locations
acaacaatagcaacaagatccactatccacaatgagagaacaagcnctatctaaaattctgcatcttgtatgaaagatgttccctctatgggattaggatagatcacaagattgacctccaaggagccttctaaccattaggagggcacctttttcatgggggtagacttcctcactagactcttcaccccttacttcatcttcacttccactagaggaaagggaataagtagnctcctcatgaccactataaatgttttgacccctcataatcatgattttctttgtggggcattgagaggcaatgtgacctct

SEQ ID NO: 147844 - DNA, 471 bp, Glycine max
  unsure (1)..(471): unsure at all n locations
actaagctatgctgcaaattacaataacctcctaacctcattctctatatctaccacagcagaacaattatgacctttccagcaacagatacaaccctggatggaggaatcaccctaacctcagatggtctagccctcagcaacaacagcagcctgctccttccttccaaaatgctgctggcccaagcagaccatacattcctccaccaatccaacaacagcaacaaccccagaaacagccaacagttgaggcccctccacaaccttccctcgaagaacttgtgaggcaaatgactatgcagaacatgcagttntagcaagagaccagagcctccatttagagcttaaccaatcagatgggacaattggctacccaattgaatcaacaacagtcccagaattctgacaagctgccttctcaagctgtccaatatcccaaaaatgtcagtgccaattcattgatgtcgggaa

SEQ ID NO: 147845 - DNA, 363 bp, Glycine max
aactatcaacatggttatcagaacagaaatcactttttaaattttaataaacaaaacctcaatgttccgaaagaaacaagcatatctctatggttacaaggctatcaaacatcaaatgatccactagatagcagctcatcttaacccttagcatgcagagatactcaactcacatgtgaatttacaaaattccatcccaaagaaaaagcttcaatagctatctaggcattcacatattgcatatgaattccaatttaagaaaaaagcttcagatttatgcagcttagtataaaagagataatcattaaatcataagagctcatctaaattctgtacagcaaagccatgtagatatatacactg

SEQ ID NO: 147846 - DNA, 458 bp, Glycine max
  unsure (1)..(458): unsure at all n locations
tctatntatgactagacaaacatctttattttcttatgattcaaccctgagaagtcattttaaagtaaaccacagcgtgacaaagtcagtgcttttggttttgcaaatagccgaccagagcctgacttcactctttattaaaagatgagatatgagagaatgtattacgacacttcctctctttgggtccttttacagctgtctttactccatataacccaaatctcctttgttttcttcatcacattctatgccctttgcatattaggtgtccacacatgttcaattatgcactttcccaccctgatgtgtctccttatgctcgtgtaacatggtaacatattaacattaatgcattcaagggcaaaaagttactagattatatacacaattgtcgttgatgtgacagctctacaaccatctaattgttagctacctttgcaggatgtgagagctat

SEQ ID NO: 147847 - DNA, 444 bp, Glycine max
  unsure (1)..(444): unsure at all n locations
cagagcacctgaagctgcagctagcaaatattagggtntnnattcttttcagctatttcctacataagagctaaattnctcttccaactctcaatattttaagattttccatttcaaatatgagctaaatatttaagttgcattntccatgttatgattttgttagtgagattataggaagcattttaaactttacaggctatatatggttagattttggtaatgtcgactctaaatatcacctcataacaaggatagttgatgtttacttccaacattaaaatttctgagagcaatgtatgcacttagtttctagcctaaaggatcctctcttaatgcaagaagcacggaaacgctctgacaaagctagccttatttatgaccaggagcattctcaatcacaaattatttctaatttccccatgtatattcctcctgctttga

SEQ ID NO: 147848 - DNA, 470 bp, Glycine max
  unsure (1)..(470): unsure at all n locations
tgactctctgaggatgacatactntgngaagtatcttgttgtccctctccaccatgatagagggtccaagcaaaaccatcaatttattattgacaaagttaatcaaaggttgagcaattggaaaacgtccaatttatccatagcatgtagagtaactttaacaaaagttgttattcaagccatgcatatctatgtgatacaaactactttattactgtcttcggtgtgtgaagaaattgaaaaaaatgttgtaattttgtttggggccacacaaatacctctagcaaaattcattggcgaaattgagattctctatgcattccaaaaagaaatggcgaccttggtctgaggaaaactagttgtatcaaccaagtttctttaatggaggtggggtggaaattatgtatgcgacctaatgatttttgggtaccaagtgtagtacanagtacaaatgtagtaatgatgtactg

SEQ ID NO: 147849 - DNA, 352 bp, Glycine max
  unsure (1)..(352): unsure at all n locations
tcacaagtatctgagactgcactaagaaatgtttaattcttattcagataggaaagagaatttnttagagatggcatgtgatgtgtacgaatggccttctttttttgtaaacatagtttgagtgattgtatgcagagggtgagtagtgctcctggtgtcaacctatttgagatcatggccctatttgatgcctctcatttgaacccttaataaagaaaaaggtggggatggaaagtttttgggggaaaagatggtataattgggcatggggtatttgaatatgcaagttttcttgaacagaagtgagtaacatattactaatatcgggggaataggctttgtgactatgata

SEQ ID NO: 147850 - DNA, 354 bp, Glycine max
tccactcgacaagggttgaagtaaaggagaccttcaatcctataacgcaacgtggcggacaaaaatggacagttaacttgaatggccattattgtcaatgcggaaggtattctgcgcttcactatccatgttcacacattattgcagcttgtggttacgtgagcatgaactactaccaatatatagatgttgtttacaccaatgagcacatcttaaaagcatactccgcataagggtggcctcttgggaatgaggcggcaattcctccttctgatgaggcatggacactaatccctgaccccactacaattcgtgcgaaaggtcggccacaatccacagggatatgaatgagat

SEQ ID NO: 147851 - DNA, 356 bp, Glycine max
  unsure (1)..(356): unsure at all n locations
agcttaatcaaaagatttaacccctgtctctttatttatgtnnnnacaanaaaagccaatggtaaaaagacaaactccaatagaaaactctaagagggcaagatgcctaatctctcccaaagccctaattccaaattccaacctattatttcctccactaatattttctctctgcacaaccaactcaaattccctagctattgtcactactaattaatgccaacttgaactaaagaatttcattttcctatactaaggcaagagcattaaccctnctccttttccttgcatacttcttagtgatcttgggcttgggctagagggtctcttcatgtttttcctccttcttttccttc

SEQ ID NO: 147852 - DNA, 431 bp, Glycine max
caagctaaacatgcaaactgaaattttaactgttacatatatataaacccaaattataaaatgtactaaaaacaaaataataataaaagtgttcaaaagacaggaaaataaaaatcctatcatgggtcctgtggtgcagaagggtcatcatgtggtgcagaaggggcataatccatggctgtggcatcatcctcatcctcagatagctctagcacaggcgtagccaccgtcgatgcttgcaaagaagacaactccagcacaggtgtggtcactggtaatgcttgtggagtcatctctagcgaatcctccacagtgtcctcctgagcagttggatcaatctcttggatgtctggctcttaataactaggtcaacctctacaacatctggatcatcctcctgagtagcttctggctccggctgagacttctgg

SEQ ID NO: 147853 - DNA, 352 bp, Glycine max
  unsure (1)..(352): unsure at all n locations
tcgagtattttgctgcagttttattgttttcatccctttatccttatttttgcttttcttttctctgttgtcttcataatcttgtttaaagaggtaggaaacttgcttaatatgttcagtaaactgaggagntgcattgaagataaaaattcaagacatgtagaagaagtaaaggaagcaaaaaccaggattgctgcagccaaagaaaatagaacagccaacaaagagctatgttctttagatcgggatttgccttgctgtcaccttgngntcattattttgcatgcatgttatctacaagaaaaaggnctcaagcagaagttgcagaatgagacggntaaagctgttctgt

SEQ ID NO: 147854 - DNA, 437 bp, Glycine max
  unsure (1)..(437): unsure at all n locations
accgtaattgtttatgttngatatgnnnatttttgtttgtgtaatacaattattctctttgaacaaggatggtgatgttgatttgaatgcttcaccccaagtacttgataagctgctgggttatgaatttgctttcaacataaaggtgcaacccaagttcaggaattctgctgttttgaagtgttcagctgactcgagcttaataaatgttgtgatggatatgctagctgatgctgaggtaatgttcaatgcaagttatttgacattaactattgtgaaaagtatgtattctattcatatttatntgttntccatgggttgtgttatcttcaatgatgtcttattcagacatcttgcaaaatgaatatcccggnttctgattccaatcattctgctcaacatgaatctgtgaggtttgatcactgcttccatttttt

SEQ ID NO: 147855 - DNA, 370 bp, Glycine max
tttagccgacaagattcactttatgaaagaagcaaaccataacacaattctctaatgttccgtgataggataggaagataggaatggaaatcctcctccctggctatctgagtacttccattatcctttttattaaatattatttcatattgtctctgctcccacaataaaatgaccatttaaatatcggccacaaatactcgtacttgcaatatccaacactagtatgtattccgtacacaatgctaatagaagattcgcatgaagttctacattctcttatagttgcgtaataatttttacaccgactccaatcaaagatctcaaattttttattttttctgggcccagaaacgggtgggccccccta

SEQ ID NO: 147856 - DNA, 329 bp, Glycine max
  unsure (1)..(329): unsure at all n locations
cttaatggatggcgcctcctctcacctgttctcctttgncttccgctgcatctccatggaggaaaatcaccattaaaggacctcatagaagctcaaagatccatcctccatagaagctccacaagcaagcttccatcttgtgggaatcagagcacaagagcttcaagtaggagctcattaaacctccattaatgtttttgctttaccttctcgttcattgnggcgtcttgatatttttctccatgtatctcctcacatgtcttgagctaaatgtncctaacatgattccntacatgattctgaagaaggccaccgacaaacttgctata

SEQ ID NO: 147857 - DNA, 344 bp, Glycine max
ggaggacttgtacttgttcttgaactgtgctaaatggtttgcacgagactttctctccttgttgcgcactctggtctctgcacatgtcatgggagtgatcaaaccacttgtagctcttgttattgcccttcttgccttccattgtctaatgccacatgcattgcatatagactgcaccatcatcctttatatcgcatgttatactagccatacgaccgttattcatacgcttacttctgatattatgaactatggctgacagtaatacaaaatatgttgtttatcaccaaatatcttaagttgtgcgagaatgttaattatgtcacaaagaacatcaaattgcc

SEQ ID NO: 147858 - DNA, 453 bp, Glycine max
  unsure (1)..(453): unsure at all n locations
attctatctacccgtagtggtccacattgtttntcgtgcatttttattctcngccagattactctttataccccctgttgacgtgcttaagccattttacttaagtcatttctcgcttaacttaaaaataaaataaatttccaccgaacgtttgaattgtattatccattaacttcgggtaaaataaattccgaccgttcggtcgtgccgtaaccacgttggaaataaaaaagaggtgaaaaaaataatttaataatcaaaaagacatcttttacttaaataaagcggaaaatcaatcggacgctntctctttgngatttctaactcttaatcgaattgattaataactatagtgaaactaaaggctaaattcaattcgcctagtcaagctcgtccacaaaaataagcgtttgaaatttgtcatctcaatttctcactaagtagaatggatca

SEQ ID NO: 147859 - DNA, 313 bp, Glycine max
  unsure (1)..(313): unsure at all n locations
tgatttcaagatcatggctagaactcgaaggttaagtcgngccttatgtactagtagaggcagagacatgagtcaagatgcacatcattctaaagttccttgacgtaagcctactacttcagnacgtaagcaacgggttcatgtgactgatgatgttactcagacactagaagatgagcctcagttgaatgaagatgttcctcatgtgtctgacgctactccagatatgacaagcgctgtcgatgctgcgaacacagatggagtggctactgatggtagagagggctcatctgctgctaatgagggattccct

SEQ ID NO: 147860 - DNA, 452 bp, Glycine max
  unsure (1)..(452): unsure at all n locations
aaaaacttgttgagaggtacttacttattttttatatatcacgattctaacttcatgatattgatgcctagctacgccacaaatgaatcattgtataatggaacaaaaatatatggatgtatagagatggaaaagctgaccttctcgtctatttttgctctatagatgtcgacttgctccttggcagcactggtcatgtttttcagcttctcctttgaagattgcatctttgttcttcttgtctgtctctctctctctggctctttctatattatatcaaagagttccagtgttgaacgatttaatttgaacagaaaactcgacgtggtggaggattnatatgacaaagaagatgccaaccaaaccaatcctatacaaaagaatagcaaggcacgctaggttccgtgccacttgttaaactgcagagctattcccatcaatatgctgccacg

SEQ ID NO: 147861 - DNA, 472 bp, Glycine max
  unsure (1)..(472): unsure at all n locations
aagctgtacagaacttaggatatatcaagaacaagagtgtttgcatcattgttcgtgtgtacgaaatccactcgacaaggttngaagtaaaggagaccttcaatcctatcacgcaacgtggcggacaataatgggcagttaacttgaatggccattattgtcaatgcggaaggtattctgcgcttcactattcatgttcacacattattgcagcttgtggttacgtgagcatgaactactaccaatatatagatgttgtttacaccaatgaacacatcttaaaagcatactccgcacagtggtggcctcttgtgaatgaagcgacaattcctccttctgatgaagcatggacactaatccctgacccaactacaattcgtgcgagaggtcgngccaaatcaacaatgataatgaatgagatggattgggtcgaaccatctgaccaaccgacaaaatgtagtacatgtggagc

SEQ ID NO: 147862 - DNA, 304 bp, Glycine max
  unsure (1)..(304): unsure at all n locations
agcttgaagtgctatacactaacntttactcctttctttanaaagacgcanntgccactactccgtttttgttggaaaaatgatcatgntncctagacatcctaattcattttagatttggaacctttcgccatgtgcctattgatcatctctttccatgcatgcatatagggacatcaaaggggctaactagcttggtgactctgctggagtcgttaagctagctgattttgggatggctaagcatgtgagtcccaagcctccccctctctttgatttacatttnctactcagnccttttgca

SEQ ID NO: 147863 - DNA, 408 bp, Glycine max
  unsure (1)..(408): unsure at all n locations
tattattatggttagggngtcttctataatgtttgtctttacaccctagnngaggatgtctaatgaacagctgatgtaaatacttaatatctaattgattatgttttctgtgttcaatgcttccttcaatgcttaatgtttgtatgcttttggattgatcacccatttgtgtgcatagttaggtgactttagcattgggaaatgtactgttgccttataacttgattaaagcaggatcgaaactaagtcttacaagagggatctacggattaagttttggttttaattatgtctgtacaataatgttgattagtccaggcctagtcttataaaagggatctgcacacgaaactcagattaagttagtctaaacctaagatggccgtctaaattgggcctatcccaaca

SEQ ID NO: 147864 - DNA, 369 bp, Glycine max
  unsure (1)..(369): unsure at all n locations
catatgacacaaagtacccatgattaattggaaaattcaaatagaaaaaaggggattaaaattatttgggcatagaatagaattaagcattgaatgtgagaggcaagtggccagctgtgaatgtatgaatacatgatcttgatgattccaaagaataatcaaacaaagttgcgttcaagattacttcaataaagattcaaaggctaagcattgcttcaatattaatacaaaggtgcttctacaaacaagcattgcttcaagattaatccaagatcaagcattctcctcaaaaacaagngtttccaaaacatccaaagctctggtaatcgatnaccaggtagtgtaatagattaccaaaagacaattttg

SEQ ID NO: 147865 - DNA, 413 bp, Glycine max
gagttcttccacgccagcacgcacttatcgcgtatgcagtttgctaagcgaggcgattgtctcttctgcgctaagcacaagattgacgctaagccaaatattacttacctgtgctaagcacgagaatggtgctaagcgcgccttcaaggtcagaaagccctttttaagcctgatttgcacagaaaaaaagaaagagggtgacaacgtgaaaaaggtcagaattgactacgaattatgtgcagagaacagaggaaaagttgagcaaggaagcaaaggccttaacttttatgtagattctaagttttaaagttattttctaggttcttagaggtggaagagacatccccactgctttgaacctgatattttctttgaaacccttcctctatttgtgaaaactacccccttgtaat

SEQ ID NO: 147866 - DNA, 458 bp, Glycine max
  unsure (1)..(458): unsure at all n locations
tttctatgcacggtctctcttgatctccattcccaatatcttttatgcatctcccatatctttcatctcaaattcactactgagtagtgactttagattctaaatttcagacttgtcttgagatgctatgagcatgtcgtccatataaagtaaagaataggtgtgggaaccatcctccaccttaatatgataaacacatgagtcaaagggacttcttttgtactaatgagaaacaatgaactcatcgaatctcttataccactgccttggagtttccttcgacccatatgaagaccttttcaacctagagacataacttttcttcccttgcatctcanaacctttaagttgttgcaccagaatatctgcctccanatttccatagagaaaggttgttttgacatcaagtngctctaacttcatttccagagtttgctacaagagccagtaaaacacat

SEQ ID NO: 147867 - DNA, 444 bp, Glycine max
tatctctgaaaagatgtttcttttcttctctatggctcttttcccaaaataggcactgtggtatgctctgggatctgtgccaaccatatgcttaaagtctataacctaaatctgcataaggcaggctttaaatatgctctaaattcgagacgttgcgcttatcgccaccctcgtgcttagcgcaagtaagtggattcgggcttaacgtcagtcgtgcgctgagcctggctgaaggcacctgctgcgcttagcgtgcggccttgatattgatgccctgccagattcttcttcgtgctaagtgcactgaagctacgcttatcggtggatgtgcgcttatcccactgatgagctaagctcaactgtcactttttggcacttacggcttaacctctttttcacctgaaattgcacgtatctcatcattatattcaatggacatattct

SEQ ID NO: 147868 - DNA, 408 bp, Glycine max
  unsure (1)..(408): unsure at all n locations
agctnnccattataagcaaggatttacatcactttgttagcnnancnataggaagggagtgagcttagccccctctagcttctcaaagaagcttcccatgtgctaggctataaatagaaacatgtgtaacactagntataactttnatgaatgagaaacttgcgagacacacttcaaaggtcaacttctctccttaatttccttaaattcccatgccccccccccctcctctctctttcattctcttcctccattgaagcttcctctccaagccnnttatccaagacactctcctggaggagaaacttctcatttcatggcttattctctaaaggaaggagtcgtatcgcaccttttttcctttatcttccgctgctactccatggctgaaaagcaccattgaaagac

SEQ ID NO: 147869 - DNA, 475 bp, Glycine max
  unsure (1)..(475): unsure at all n locations
cgctttgaatcctagnaaaaccatgannngnngttattctattcctcttacaagcctagaaagtccttcggattcattttgtgtgttcattgttgtatgatatgatatgaaatgcaaaggttgggacttgcgttagttgtttatgatggaatgagcctaaacacttgagcttgagtgaaacaatgactgtgaggttttggttgatgatccttccttgatttctgccatccttaatagcttatttcagttgtgactctaatgtgtatgtttctatcttcgaaaagtttcatttttatgaaaagcaattgattgaagtagtccatgatattcagttcatatggttgaatttctctatgaagcaaacaccattttcagtgatcactatagtttgtcacttaaggacaagtgaactattctttctttgcttgangacaagcaaaactgtnatttttggggaagttgttagtcgtcttat

SEQ ID NO: 147870 - DNA, 318 bp, Glycine max
  unsure (1)..(318): unsure at all n locations
tctaaacatgcaaaagctttgagaattccccaaactctctctccatttntgattnaaagtttaaataagaggccttataggagcttgcgcgcttagcgcaactctggctcgcttagcgtgcataagagaatntgggcttatagcccagcttctcgcttatcgaatgcatgcaagtggagcgcttagcaggataagctcttgcttagcccatgtgtccagctcatccttcttccagattcttccttgcgctaagccagacagataggcttagcgaaaatctaaaaatcagcacttcacataattgcctaattaacctga

SEQ ID NO: 147871 - DNA, 392 bp, Glycine max
  unsure (1)..(392): unsure at all n locations
cttgatggtgcgcagcccaccatcttttcatattagagtttctataatgnggctaccatcacgattatcgtctccctttccattattgggggtaccacctgngccgccagatccctccaccttttgtgcgtgttctttgaatgatccgtccccctttttgcacatgttctgtagttgcatcctatccggaactatatcaaaattgtactgatactgcctaacaaaggcaaccattaggtccttccaagaatggactcgggaaggttccaagttagtgtaccaagtaacagctaccccagtaagactttcttggaaggaatgtatcagcaattcctcatctnttgcgtattcccccatcttctgacaatacatctttagatggttcttgatac

SEQ ID NO: 147872 - DNA, 369 bp, Glycine max
  unsure (1)..(369): unsure at all n locations
aaattgaggtctgaaaaagtgctgtaaacatgttttaaaattgagatagacagctttttttctgccacagaggccatgctttcattccaacacaaaggagctttcgtacaatttctctttccatcatgttcggntcaattagttcttgagatccaatgcatggaatcaggcctctacatgcacttttattatttaaatgttaatttatatgtactgaacattatgctatatattagtacctctatttgagatcatcatcttcttaatatatatcaattattaaaaacattcaatcaaatataaatggtagtaagataatgtctaactcattctactattatgataaatttgcttgaactaccaaacttt

SEQ ID NO: 147873 - DNA, 328 bp, Glycine max
gagaccctctatgcaaatttgacagcctgatctctgccttcctgaagacccactaaaaactacctaacccccccttgtgttactccataatctattctgcaataactacttaaagcagagacatatggtgctaaatcactacacattcagttacgattaaccctttgcgcctaactagggtttcgaaacatcacaacagagacagaccattgaacaatggattgtcatcgttaacatacaacagagaaagagatataacaataacgccctgtgttaaaatgacgaacgcctaattgtaaaatgaaaggatgtacctcaatggataaat

SEQ ID NO: 147874 - DNA, 314 bp, Glycine max
  unsure (1)..(314): unsure at all n locations
taaacctctattaattttcaattttaccctcttctccattgnagncncttcatttctctccctgtatcttctcacatgtcttgtgctaaatgctgncaagatgattctttagaatttccatcgactaatattgctacagaagctaaatattgattccccatggttcacatttctctgccttgtgctagaaccatgaattatgttgggtgtaggttcctttgagttttgtcttgcaattttttgtggctgagacctacatgtcgcaacatgcccttttgagggcgagcgaagcgaggctcacaggtgcactttcc

SEQ ID NO: 147875 - DNA, 297 bp, Glycine max
cacaatatctccctgacacaaatgcaacaatcatgatttggaaattgtatgcgaaactagtcatgcatgcacctatgcagacactcaagagaagaacaacttttggacgagcgatgctacggctcataattcatggtctctatcttagtcaaccccggatctccaaaatatgtactcttatcaatttgtgcattcatccgagtctattgagggtgttcggaagaactttcacagcattcaccctccaggcgtatatacatatatttcaaaaactagctatgatcagcacaaagaatt

SEQ ID NO: 147876 - DNA, 300 bp, Glycine max
  unsure (1)..(300): unsure at all n locations
ttagatgtatctttagagtagatttccctattttatcttggtgtaaaagacagcagtgagtactgtcttgtcaaagcttgtcaagctgtctctctcctatttgnatatatatatgctatttgaatgaaataaaactaagcaagagaatgaaaagttttcctcctcacatattcaaagcttcaagtgcatgtaagcatgttcaaataaaaatattcatcagttgagattaattactaattagctcctgtactattcctagaatttgggattgaggcctaaactcaatcccacaaaattagc

SEQ ID NO: 147877 - DNA, 470 bp, Glycine max
  unsure (1)..(470): unsure at all n locations
tccaaggaggtgagcttagttattagaggggtgcgtgttgttaatctatagcttctcaaggaagntttctcanagaagcttctcaaggaagttttctcaacaaagcttctcaaggaagctacctagtctataaatagaagcatgtgtaacacttattgtaactttgatgaatgagattcttgtgagacatacttcaaagttccacttctctccctcttttattccttcaatttcgtgctcccccctctctctttctctccctctttcttttcctccattgaagcatccttccaagcttcttatccaaggctcatcttggtggtgaagctccttcttccatggcttattccctagtggatggcgcctcctctcacctcttctcatttgtcttccgctgcatctncatggtggaaaatcaccattaaaggacctcatttgagttcaaagaatcaatctccatagaagcccca

SEQ ID NO: 147878 - DNA, 397 bp, Glycine max
  unsure (1)..(397): unsure at all n locations
cacctctagaacctcacaatcactcacaaactcatctcatgctctcaatacgacttcctcttcaagcttgggtctctgtatgtctttgcacagcaaaatctcaaaactctctagaacttggacctttctctctctagaaatctctagatctgcagaagcttcaagaaaaggccaaattcccctctttcaaaatctgatttcaggtttaaataggtggctttgattgtgcttgcacgctaagcgcaactctgaaccgcttagcgcgcattagtgaatttcggcttagtgcgcgtcttcttgctcaaaggatggactcaagcggtgcacttagcgtgatgaaccctcgctcaatgaacatgcacagctcatncttcttccaagttcttccttgcacaca

SEQ ID NO: 147879 - DNA, 412 bp, Glycine max
agcttgcaatcttaagcacataatgaattcttatcagtgaaaccctagctcgccttgcaagcaataagaaaaatatgaagctctatagaatcaaaatgaataaggcgggaaaacaaaaagaaaaatatacatgatgctagtcgaaaggaactgctatgatcttgccacttgctagaggtataacatattatattatggagagtaatactatgaatgccatgacatttaataagtacataactacaaagagcctaattcatgaaaagctttaagggaggcatcataatcatatctataacgtgattagataaaataaaatgataattaagtaacttcaatgctagttgattatttaaaaaaaatcccaaaaacctagctatatgatataagcttataaactagaacagagcag

SEQ ID NO: 147880 - DNA, 462 bp, Glycine max
  unsure (1)..(462): unsure at all n locations
actaagcttaatctnttaatccttaattngaggattaattatacttaaaactttntacttctttctaagaatgtatttgtgtgaattgaacttaagtcatctctccttctcactttctcttctacaagcattgttcttccatatcctccattcttttcatgtaatattttgcacctccattgcttcttttccgacagcattccattttgccacgaataagacaaaaaaactagttcatgttatgtcaactttgttaagatacaaaacagtcataacaaaaacttccaatgaatattttgataaaattttgacattttcgtcaagggtatttttatcaacaacaaaaaagtgagatgggaagttcgaaatcgtcagtatcatgggccatcccaaatatataaacctctataagaactaaacagccatataatatattacagtatcgcagagctgacacgatat

SEQ ID NO: 147881 - DNA, 401 bp, Glycine max
  unsure (1)..(401): unsure at all n locations
atataattatctattntagttaagcttcaaacggcatataattatttatgtgttagggttacttgactacctanggtctatggttacgtgactaattacggtttaagattagcttgtctatgtanggcttatggttattagattaacgtgggttttgggttaccttactagataggggttaggatcgcttaactaattagggtttaggattagcttacactaattttggtttagtgttacatttccaactatggaaaatagttatgtcgcaaattaagatttactggtacttgatcaattaggatttatggtntaattaatacttatggtttagtgtacgtgactaattatggtggttacaataattangggtattaaaggtttaacattgcattataaat

SEQ ID NO: 147882 - DNA, 297 bp, Glycine max
gcccttactttcgaagagcagctcccaccttatgacgactatcccgggccagacgatgaggaatgagatacccatctcgagcccctgctccacctcaaagatccagcctcccatgaactaccccaaccaaacatagtccgccatatgccagcttcacccacacccagaaaagaatctgctcccttcctggaagataaaggacagattgattgcctagaagagaagttgagagcagtcgaaggcctcagcaatcacccattctcggatctagcagacttatgtctcgcacccaatatt

SEQ ID NO: 147883 - DNA, 456 bp, Glycine max
  unsure (1)..(456): unsure at all n locations
taaatactcagcttcttacattgatactagacctccatcctttgttctttatctaattactcatcctccaatccaacaggactaattcctactccggctggggccatacaagcggccatgatgaatcgacaatagggagccattcccaactcaagaattcataatgtgtgcccaccaagtaacacaatgtgaatttaacagaaatctatggttatatgctttagatttcatttgatcacaaggtcaactaccataaaacatttattgtatttgatacacctaaacattcaattgattattaaatttgtataattgtaggattggtaaatcttgatgacacacctcataagacactattagggtccattgattatacttttgatcgtgtccctttaatggttgtcattgntcaaaagtaaaccccaaacaatattggtgacatgagagttacgcata

SEQ ID NO: 147884 - DNA, 418 bp, Glycine max
  unsure (1)..(418): unsure at all n locations
agcttggatttccttttagnaaggctctccttcttccttagatggagccnaacccagncaccctcattaagaactagcttttttcttcctctattgcctttagntgaatacacctttgttaggttctctatttgggtcttaaccctctcatgcaacttctttacaaactctgacctagattccccttctttatgcataaaagaagtgtccagagggagaggaatgaagtctaatggtgttaggggattcaacccacagacaacctcaaaaagggactgcttggtggttctatgaacccccctattgtaagcaaattctacatgaggaagatacccatcccaagacttatggnagtcttttataagatgcccttataaggaggataaagacctattcactacctctagttgcccatcag

SEQ ID NO: 147885 - DNA, 439 bp, Glycine max
aaaactaagctttttatgaatagacttaatgccatatttattctatcacttgtctttcacaagggatgcagttatctaaagagtagaataaaatgtaacctgaacagatagatgaaattaggcaaaagacatatatcaaggaaagtagcttaaaccacaatctcacggctattgattcactcaagcacaagtttttaagctattcattaataacaactagcaagaggtccaatctttgaatttcatctcatgccataaagtcagaaatgtataaaaagaatcaaaaggactttctcacgtttgtagtgaggcttggctacaaaaattcattggtttttctaggattcaaaggcttagattctaagagagcataaatccttgacttatcccaacggtcttgtattatacaagtagctttctcactatcttttcctcttaa

SEQ ID NO: 147886 - DNA, 273 bp, Glycine max
  unsure (1)..(273): unsure at all n locations
atccccatggactgagcgaaaaagctcgggtcatctaaagacttctcatctcttaaggcacaaagcgaggatcagaacaacgaaacccccatcctaccttccttaaaagactgccatgagaaaactcttgaggacaggaatccctgggggaaaccacagaaaataaaaacatgcagcgacttccttaattgccccacgtcttaagcgaagctcacttggcaatgaccgatttcagaagcgaaagagcnccttgtcatccatgttggcgagcac

SEQ ID NO: 147887 - DNA, 468 bp, Glycine max
  unsure (1)..(468): unsure at all n locations
tgtgcattcaatatccggaggaggatgnncttatgttttcttactagactaanacatgngctgcccaagtttcatggtcttgcaggtgaagatcctcataagcatcttaaggagttccatattgtttgttccaccatgaaacccccttatgttcaggaagatcatatctttctaaaagcttttcctcattctctggagggagtggcgaaagattggttgtactaccttgctcccagatccattaccagttgggatgaccttaaaagggtgttcttggagaaattcttccctgcatctangaccactgccatcagataagacatttcacgcatcangcaacttagtggaaagagctttatgagtactgggaaagattcaagatattgtgtgcatgctgtcctcaccaccataatttctgatcaactccttctgcaatatttctatgagggacttancaacatggagagg

SEQ ID NO: 147888 - DNA, 443 bp, Glycine max
  unsure (1)..(443): unsure at all n locations
aaaactaagcttggaataatcacttacagctaatatctttctgttatccactatcgccgngcattttgcagataccaaataaatnttcaaacttggggctctgcatgtttccatttcttcccctcctttctcctttattgacattcactttatttctttgaattctaaacctaatcagatggtacggagtaaaagctttttcttataaattaacagccaaaatcacattttgttgaatgataaagctttcatttcatgctaggtttccgaatacttccactgattaattagtcatacatgagctgtaacaattggtggttgtggatgacattcaaaattggatgtacgatagtaatgataataatgaccctaattcacaaagagatgttgacttcatgatgactaaaaatctggcgtttggatataacaaagatttggatata

SEQ ID NO: 147889 - DNA, 419 bp, Glycine max
  unsure (1)..(419): unsure at all n locations
agctagaagaactatnctttaatgccattttccaaacatggaactccattcattagaagctttactgcaattaaatcatgtaaaaagagagatactatttttcctacctcgaccttttatccctataaaaatgtaaaaaggtttttgtcgagaatgttttaacgaggcacacctaaacttatactatcaatgaatacatttttccaacaattatacttgtcatttttttttatagtaccctctcgaataccctttttggcagaggttgaactctacgataacaacatgtgttccctctcgaataacttatttgatcgaagatgaacttatttcgttaagcaatagttccctctagaataatacctttggccgaagatgaaattatcacaatatatcgcaaagctccatcccgaatactc

SEQ ID NO: 147890 - DNA, 447 bp, Glycine max
gtgtattcattctttcaaccgatgctgtaatctctcgacctgatttttcagaacgaaacgccccaacccgtggatagaggtctccatacaacaatcacaaactacctttataaaagatgtatcctcggaccagcaatcaagaagccataacagcgtgggacccgaatcaacaataatggaggtcaacataattggatagcgatctaagaaattgcggtacatgataaattgagtgcttccttgccacttggaaaaccattttgcagagacaaggatcctgtctaatttgctttcgactatcccatttggtttgtaccaagtaaatattcgccccacacaaggcacatcttcaacctctagatcaacgatccagtcattaaattcattcatgtgacgccccaaatactccctttgacatagtccaactctttttgatggccttctaat

SEQ ID NO: 147891 - DNA, 381 bp, Glycine max
  unsure (1)..(381): unsure at all n locations
ctactgcactcaagncccaaaatgcctaaacactatattacaacttttcctttttgcatcacaccaaagatcaaaagccttttagtttcatcaagcacttttgtattaacatacacacactcttatacttcggtatcaaaacctgtacactgagagtctatttcttatagtttccttccatgagtgtacactatgtgttgccacacggcctcatatctcaatgtncacactccacacctncttatctctatctattactatatctttattatactcttataaagcacaatgaccacttcaaaccttagcatatcctactgtattggcacaaccncatcatcatcgtcatccatggataggttccttaggctatccagaacc

SEQ ID NO: 147892 - DNA, 460 bp, Glycine max
  unsure (1)..(460): unsure at all n locations
tagagttatgtctcatattgatttaatcgattacagtattattttaatcaattacacttgtgtttgagacaatgactgattattttttttctgaagtctctgctttaatcgattactaggtggattaatcaattacttctctctcattttaagttgttcagaggtgaataagaacactttaatcgattacttaggccatctaatcaactacattgttcttgaattgttttccagaagttgaatgaacactttaatcgattactttgttgaaataattgattaccttatagatttaatcgattacaggcggttataactgctttttctataaataaccaactggtgttcacatctaagcaatctaaaaatcaagagatcattagagaatatccattacatctcanaaattacttcttagcctcataatgaacaagaattcatgtgtgtattcatgaacatg

SEQ ID NO: 147893 - DNA, 469 bp, Glycine max
  unsure (1)..(469): unsure at all n locations
gcgttggcccaaatcccacgctntgcttgaagggggatgataattttaatttatttgatngaataattgatttagtctttacatcattcatttattcattcattgattatagcctctagattgatttactcattccttagtcgtaggctctagactttctggaatctctatttattgtaggtttgctattctttaatgctatcagaagaacaattataccgatccttacaatgttcaacaatacggtgagagaaaaccaaccaatagaaagcctcgttgacgagcgtcctagcttggaatttcactgtcaggcttcgcatattgaacattaagatagaatctgctccaggaattggttctgaaagagaaaaaatgggcaaatgaaccttaataaatcacaataaacaaagatacataatcggaatatggtgatgatgagcggngagatggaaatggactggactgaaat

SEQ ID NO: 147894 - DNA, 358 bp, Glycine max
  unsure (1)..(358): unsure at all n locations
ttctagaagtggtatatttacgcgcgcatggttcatattatatttttagagaaacaacanaatctccactacaataataatatgattagaagtcaatgactatcgatgattgataaaaaataattacaccttctatcaattcgagatggcaagagcatatttttataactttctaagtgaccctaaatgttaatagacttattccatatcactatcctctattgaataatactataagattatcttaccctattctttcatataatagtaggataaaatgctagagggccactaggtactgttataagagagtatggacgtagtacaaatatcacacattgtgctataaccattattc

SEQ ID NO: 147895 - DNA, 450 bp, Glycine max
  unsure (1)..(450): unsure at all n locations
gatcttaagcacctgaagctgcagctttaacccnctttntaaaagataatttctataatgcagaagaagaagcaacaatcaatttaataatattctttaaacgtggaagacaaaattgattgcaataaaataaataatataagggaagagagaattgccaattcgatttatactggttcggccacttcccgtgcctacatccagtcctcaagcaatccactagagattttccactatctctgtaaatcttttaaagactttgaacacaccttgagatccctcacccttgagttcaagattctncaagagacaaccaatgtctagattacaattctcacaatccaagagacaaccagcctctcgattacaactgagttcaagatgaacaaaaagatttctctcctttagagtagatgatacaaattgaagatcttagaagagttctcaata

SEQ ID NO: 147896 - DNA, 356 bp, Glycine max
  unsure (1)..(356): unsure at all n locations
actaagcttaatataatttcttccaaatatggattaaaaattacactttaatctaagtgtaaatcacttaatccatgttgtcttagagtcatgtgtagtcatacgaattgtcacattatgttctatgtttgtgttgaatttttattatgttgattgaattgtagatacattggttcatgtattcttgtcattcttagcctatcttttgaatattgagtctaattcatgcatgttatttagttcataacatgttctaaatcaattcctaaaagtaggctcgttggtgaactctctttttgttattgtcttctaagntacctacatgatgcctatgatgaagatgagtttgggcgctg

SEQ ID NO: 147897 - DNA, 317 bp, Glycine max
  unsure (1)..(317): unsure at all n locations
atcttgcataatctttgatcttagaatgaaatgtataatgaggacatgatgaanaggctacagatttggggaagaatagagagaaagtgatgaaaagtgcgaaatcgacctgatcatcgttggggacaactttgcggaggatgaaagtgatggtagtgccactgataaaggaaaagagattccaatagaggtgtgaaggtactcacgaaggagatagaggtggagagaatgatgcaaagggaagaagagggtatatttgctgaaacaaaaaggaaaaaaatatttgtcccaaaaaagnctattttcttttaatgggg

SEQ ID NO: 147898 - DNA, 330 bp, Glycine max
  unsure (1)..(330): unsure at all n locations
catcagaatccccctgccactgcctcgcctctgcctcctccgacgaccgcagtgccagcgccaaacacaacaggtgggactctgagctgcaccagttctccgaggtcaccaatcaaggcaattcctactggaagtccctcaggaacgccgccgctgacgatcgcgtccacgtcgacagtggcgaccaagattgggattgggatcgccggcntttngaggaaatcgacgagcaagagcgcctcctctcgattttcaaagtacacggatctcaatttgtgtcttctcgcgagcctttaccaaaggttttgcgaaagccattattctaaatca

SEQ ID NO: 147899 - DNA, 458 bp, Glycine max
  unsure (1)..(458): unsure at all n locations
aaaactaagctaattatgttggatggcatgctacctgttgctggttatctgttctatacaacttatttacatcaactattgtcaaaactatgtattctacccatacttatttgttttgcatgggttgtgttgccatcaatgtatgtcttattcagacatcttcaaaaatcaatgtcccagtcttcggttccaatgatcctacccaacatgaatttgtgagttttaatcatgaccctcatcttttaatgtgatctttcttccaactcttccattttggcacttcatcactttcaacttagtattcaacttattcattggtggttgttttatccagcaatccatgtctgtgacaggataccatgatccactgcttgngctcccattgacacctacaaagcgacaaacatttcatgattgtgatgatgaagcaaggagctctcaaatttcacctgcatagc

SEQ ID NO: 147900 - DNA, 281 bp, Glycine max
tatgccgataatagaaccaaaaaaataggagaatcagtcaggaaacctagacgcccttaaagcaagatttgcagaagatccatagataaatcaagccctataaaccattgatgaatgagggtgaatttttaatgcaacctatccaaagattgaactatgatatgatactctacaaagaaaaaacattcttttacaaagatttaactactgcctcggataccatagatgctatatatcttctcactcttgctatgagttttgggatacatcaatactctcga

SEQ ID NO: 147901 - DNA, 351 bp, Glycine max
cgagaagtccgtggatctcctcgggggcggagtaggtgtccgccactgctttggccttggctagcaatcggggaagttcttgactaccgttcaaggtaagagcaaattgatccatccacatggttgcctcttggtgtaacgagtcgatcacccttcctctagcctctttttccgcgtacacttgggcatactcgtccgccaccctatgctcgtgggccgtggctagacttggttcctcttggtacttgctgatgatggctaacatgttggtctatgtctcgcataaacgctgagacaaacttctcttggacctcgagcaagccttcaactcatccttcgagatcaaactgt

SEQ ID NO: 147902 - DNA, 403 bp, Glycine max
gcccaacaagaatcaggccactgatattgtgcaagcaatcaatggggcgtaacacaccaaatgattatgatgatggatggctcaaatgctcacaaaggtaaactcatcactttcaaatagagctttcaaaaactatcatgacatgtataggaaaatcaatgatttcaagtcacaaaatgtcaagaacttttatttctaaaacaattacccatttcttgaacatatgctataattcaaagaaaaacatgcaaagtcgtacatgcacacaacatagacccacaatattaaacttaaaatccgacgaaactctcaacattaacaaatgaacacaactgacgaattaacaaaaccatccaatctagcacaacgcaataacacttcccccatacttatacacacattg

SEQ ID NO: 147903 - DNA, 368 bp, Glycine max
  unsure (1)..(368): unsure at all n locations
atacatnnnaattaaaaagaacacacatgttaacctaataattagaattataataattcttcattagacctaagaaggatcattatcattttattagtttgaataaacattttaataaaaaaacttaaaattttatttatgattttttttacgtatgatacttatcctcacacttttattaacacatacatttatttttttcctcaacatcatattacttattttcaaccatttnagaagnattaaatcttcaaactaattattaatcattaacataattctaacttggtcttcttgcaaaaaattggagaggtcataaaatcaccaccgntgaacatatgcgttagttaagttagaacaagtgagag

SEQ ID NO: 147904 - DNA, 405 bp, Glycine max
  unsure (1)..(405): unsure at all n locations
actaagctccatttattgcaaagagggtgggttgatgatttattgtatctcggatagaagctcttttgaaaagtagttatgtgttcttttttggaaatgggagtccaactaaggtatctaaaggtttgaggcaaggagatccatcgacatcgtatatgtctatggtggttgccgaaggattaataaaagaagctattgagttgaatatgttttcgagcttcaaggtgggaaatgaaggtgttcaagtgaatntattgcaatatacggatgatacaatatttgttggaagacttctttgaagaatgtcatgactatctaaacaatattagttagatgctctgagttagcttctggcctaaaagtaaatttttcacagaatcactttggaggattggagtggaaatg

SEQ ID NO: 147905 - DNA, 166 bp, Glycine max
  unsure (1)..(166): unsure at all n locations
gtaactgagtgttcaaatactgtaaataattgatcacagatctgttcaacaactcctcttaatatgggttcttgctcatgcgtcaccgagatcaacacgcttgctcaagcataanaaaacataataaaatagaatgcaataaagccaactactgtatgcaaatttg

SEQ ID NO: 147906 - DNA, 377 bp, Glycine max
  unsure (1)..(377): unsure at all n locations
cttttgtactttatctgtggagtnagaagacaacctttacctagatntgcttaattccaactttgttggaaaattaccactgtatagtgcatggaatagtcaagtttagctctccttgaataaagatatgcctcagcttggatcaagcaaaagaagcatccctgatggatgtgtatgatttacaccaagcacatgtgggagaatattgtcccataatgcaaaatctttgttcacattttgttagtactagaactagtattctgttattgttgaaagacaaaatgagatgagttgaacagattaatttctcactcaacaacttccaattttaccacaactgtagactgtgaaactctttgcaatcccttttcataatg

SEQ ID NO: 147907 - DNA, 401 bp, Glycine max
gtgtggaagagtatgtcttcctacttttattctttgaccacagagtggtacctggagatatgtcgcaagggtcatgagaccttggggatgtcaagtggggtgctattgcccaaaaccaagcttaaccaatcccgacccaacccaggcatagtcagtcagtgagaacctgtgacgtacctaaacaagcgagctcctggcagtcaaccgattaaagaacaaagaccacaaagcaaggaggcttgtgtggtggctggccagctatggatcttgagtgatatctacaatatggcctctggtaatcgattaccacaggtgtgtaatcaattacaatgcttaaaaatgaagacagaagttaagatgggctctggctattgaataccaagggtttgtattcgattacc

SEQ ID NO: 147908 - DNA, 176 bp, Glycine max
ttttaaaagagaagtttttttcttagttcctaaaaacctttgggggaccaaatgtcccaacatcatttgatattttgtggcatactcacctttttatttcttaagaattcatcatactaaaaaacccaggccccctttaacctcgtccaaaaaatgataatgaaaagcatgcagac

SEQ ID NO: 147909 - DNA, 365 bp, Glycine max
  unsure (1)..(365): unsure at all n locations
tcccggctctagaaacttacaaagctcttatagctgaccaaacatcacccccctataacgaagaacatactacaaagaatgaccgaagaaaaaaacgcaacacaaaatcaaacaccaaacataagcactaacaacgtagagagatatatatcacggtgatacactatatatacaagctcaacagacggaggcaacactctgcaaggggccacgatgactaaccaccccaagagtaatggggagataagggccaccatgacccgagtataggccgagctactgccataccataaagagagcaacagtggngcaagtagaatcacgacaaagaagaccatgaatatagaagcgggacaccagataac

SEQ ID NO: 147910 - DNA, 371 bp, Glycine max
  unsure (1)..(371): unsure at all n locations
acatatattattcgtgaaagtcacgagtgtcctactgacaaacaatatttagtcttaatctcacggggagactaatggtagtatcaagagtggtcttgagagtacttgttgtaccctcgaaggggcatatagaatacttggttctaatcaaagaattgattagagaaatcctttcagatttgaaggagagctggacatagccaagagttggggtgaactactataaaacatttatgatttctttactacttctatataaataagttgttcctacaatgtatctctacactactgtatccaagntctgtgaattggtttttaaacacactgtgatttcgaactcctttgatgaaacccatccgccattgata

SEQ ID NO: 147911 - DNA, 231 bp, Glycine max
tgcaatcaaaagaatttatgtttttgtcgatggccctctgcggctgggactcatatatcccgaagagtgcgtaccgtcttcgtctcggcttaccgattgggaaccccgatgaaattggtgctctgggagatagaatcagtcggcctatgggcccccctaaggttttgcggagtctaagacaaaatgatgccgccataagtgccttcctgccttggaaagtcgggaagatga

SEQ ID NO: 147912 - DNA, 367 bp, Glycine max
caaacacaaaccaattatataaaaatacttctcacaacatgcgaaataaaactcttaaaataatttcacataatcatatcaaaataaaaggaatcaaaatcataggttcaaaaacacgaaaacaccaagaacactcaattttatcaaccaattcgcatttggatatcaattggtctgtcaaacataaaaatctcatgattataatcataaaggcaaaattacaatatagtgaacatctcaaaacaaatcccaattcgattttataatgatccctatatatgttaattctaaccccaattgcgataaactcattccttatttctaagcggacttacgtgtgtggtccggcagtgatagtgacatctct

SEQ ID NO: 147913 - DNA, 375 bp, Glycine max
  unsure (1)..(375): unsure at all n locations
gtcaacgattctcaaaatgaagggtctgcgtttggaagtggcgatgacgtggagaacaacctcggtgtctgaggtagtgttgaagatggacccgctgtccttaaggttggttcggagggtgcggtagttgaccaggttgccgttgtgggccacgccgacggagccgaatcggtagccggcaacaaagggttgcacgtttttgagcatggattggccggcggtggagtatcggacgtggccgatggcgaggctgccagggagctggtccatctttcactggttgaacacctccgaaacgagaccaactccggtgatggtattgaagacgttgtngtgaaccctaacgatttctgcgccttcttgcccctgagctta

SEQ ID NO: 147914 - DNA, 447 bp, Glycine max
  unsure (1)..(447): unsure at all n locations
agaacatntatgaactaaggaccatatttatgtgcctttgagatagagaagcatctacatagcctttatgaaagtgtatatattcattcatatatacaaagccacacacacaaaaggatgtatcatacacactaaaattttcaactgcattgccaacttctcctaacagtggacctagtagttagttaagtggctattgattagcccaccacggcaataaaatgctactttatcttccatcaaagtgtaaacttcaaagtgaacttaattcttttacatactattagccttgatgataatgatcaattgaaccaaaagacaatttgtttatcactatatctgaccctagtcctacatataattgaatctatgttacaatttcccctaatataggcttactcctgcttatgccacatcatatgtatgctatggtatcttaatgcgtgc

SEQ ID NO: 147915 - DNA, 336 bp, Glycine max
gcagctttggaaacacacggaaagaagatgttttttttgtgatatccccccaaacaagccagacctgtagttaattccttggggttaataaaaataaaattggtcttccagtaaattccgttattttctacatatgtaatagaatattaccgtccatgatgtatactgcactgatagattatccttcttaactttagctttcacattcacccaacgttgtcctgaaatccacgttgttattataaacacaactattctacacttaccaaccaagcatgccattacaccattttaagatactcatttttatttatttattatgaagcaattgttgaa

SEQ ID NO: 147916 - DNA, 428 bp, Glycine max
  unsure (1)..(428): unsure at all n locations
ctcaagcttgtgatccatgacgaccgtcctagtcagaaacttcacttccattgttgtgtttcgatctcatgtggaattcgcttttcacataccgatccaaaagctgagactntcccaccccagagtccccaaccatcacaatcttgaacatgtagtcgataccctcatcagcatcaccctgccactgaaccattcttctacaaacaaaacaaccctttggaaaaatgcactcaacaaggcaaaccctgcataaaaacgagacctgttctatgtgcacacgctttgtttgtgtgctccaactccaaagaaagttgttctataggaaatagaaaaaggggtggctgggtttggctagaatggcatttgggtaagcaaaaaatggcatgtacatcacatgcactttcattaattggttgtatcgtgttgcc

SEQ ID NO: 147917 - DNA, 231 bp, Glycine max
acccaatacccatgggttatattgagaatgaaatttaacaatcttcaatagacactctgctagagtgatcttatgtgacatcgattctcagtgacatagaatagcatggagcaacaatcctctgtatgtgtaatgagtcaataaaaggccgaatattgcaatgcttgattctctatatgctaaacttgtacgcttctgatataaacacttctcttgcaggtttcctccggt

SEQ ID NO: 147918 - DNA, 381 bp, Glycine max
tgcatggatgcgtgtatgcatgattatgccaaagtacggagaaaacatggtgaagttaagtccaaaatgttggagttaagggtaaacacgccatttggtgaggactatggtttcatatgtacctgcatcacgggttctaccaagttcccaaagtcattgaccacttccgaatattgtcggattacgggactactcccggtccaacaacgtccataggaaagcctcgtttgagtgtagtatcgcgtatcaaccaattcaagactactcttgattagccaccgcactacgtcctaaaaggccaagatgggttaaaggtaactaaaggtcctcaacttcataggtcgctttgaaatatcaatgccggacacgactactcatgcc

SEQ ID NO: 147919 - DNA, 366 bp, Glycine max
  unsure (1)..(366): unsure at all n locations
attcatatnnaaacgactcattactaccattagatttaataaaaatacaaagtaactcaaaaaaattaatccttagagagtaacttaatcttcacaaatgatttctccccacaacctataaccaagtaaaattatagcctgagtttaactgtcacaatataaaataattttccagttattcaatcacaaaccatatttattatgattttttaaataattttataaaaataaataaatatatcatccacatgatgcagttgaatgtcagcataaaactacttctcttattttctctattgcatttcattttacaagcattaatgaaatacaacccaaaacgatacgaaaataaaatcttgatgctca

SEQ ID NO: 147920 - DNA, 247 bp, Glycine max
tcaatattaatggtgatggttcaccaaaacaaactattttagggggtggtgtaatatgttagccattatgctctatgtagcatgcttaattttaaaatataagatatattttggtgactatgaaatgttaagctttggatgtgagcttatgtgtttctcctcctgtattccactttctaatgtagcagaggtgccttcctcatataccagagctgtgttatgatcaaattcaacaaaagtcattagt

SEQ ID NO: 147921 - DNA, 476 bp, Glycine max
  unsure (1)..(476): unsure at all n locations
ggacactatgaatctcagcttgatttacatttgaatatcatccaaatttttgacatttcattgttacttccatcaatattgatattgtatcatgcttaattatatgcatttgcttattctgatcattgtgtgttgtgtgattatttcttccatgcaggtacattattcctatttgttgtgagagtgaaatgatgggcagcagcaccatttgaggtgagtgtatatttccttttttttgtctttatctttgttagtttgttatatattttttattttatatgtttgagttttaaatgtgtaaaaaatagaaatagaaaggtttgctatcattctttgaatgccatcatctacctttaatgattgacatctaaattggtccatgtttaattgaattaattagttattgctttagttngactggatagaagtatgatatgttttttttttggaaggcaaattatatatatgtattaata

SEQ ID NO: 147922 - DNA, 289 bp, Glycine max
  unsure (1)..(289): unsure at all n locations
tttctttcttgcttggaggcttctttgtgtgctttgaaagagaatttcgtgaaaataaaagtaaatacttgaggaaacctttagattttgagttgttctttccatttataagtttaaattctcactctcttgtctcaatcatctcccacatgtgcctagactcattggttggaagcaatagtactagtggcttttctcttttgcatttttttaaatcaacaccaaggtacgagggaatttattctctttctcatgccttttatngtgttgtggtgctggaatccatctt

SEQ ID NO: 147923 - DNA, 469 bp, Glycine max
cgcacaacatgaagtaactaactaactaaccaactaacttcttccaatatatacaattactactaagaaggaagggatgagccttgattaggctcatctaatccacctaattaaactaattacacaaagcaaagaccaaattctgcccaattattcaagtgcagagattttgacttctaagctcaatttgaccctcgaaatggcagaattggtccaagattatttttgacaaaattaaagataattttcttatctttccagcgactactgacatgctccatttggagttctacagtgtcatataggccctgcacaaggcagataggtcaagtaagcacaaaaatccaaaaataagccacaattatcgattaagcttaatcatttgccttagatcaaaactaaattaaagtgaaaaaataaggttcaaagaggtgtctattgagttaaaaagaatagaataatacttaac

SEQ ID NO: 147924 - DNA, 118 bp, Glycine max
ttttacagtttaatggttatttttctaactgtcctaagtagttccatattaactttgaattttggctgaaattttgtgcattttttataagttagggtgggcgcacaaatttcaagca

SEQ ID NO: 147925 - DNA, 478 bp, Glycine max
atactaaagctccgagcgagttatggagtgctagggacccttaagtattaattgtgctttatatgaaaaaaaaatcgtgacttatgataatatggtagcgaagttcacgaccagcctatgaatatcatgttgcccgtgaaataatttcaaacagggcaacaaagatcacatccagcccgtgaaacactttcagacatgacaacaaagatcacaaccaacctgtgaattctctattgcccgtgaaccaatgtagaactcccaaaattcaaagatcactaccagctcgtgaattccccgcttcttgtgaataaactttggtgctttctgacactagtcactaaaggtcataagtagcctctgagattgaagttactcttgaaacacctacaataattgtgtattttgctaaggtccagacttatattgacccactattttaaatgatacctttaggcgtagttaacaattgaactaactt

SEQ ID NO: 147926 - DNA, 251 bp, Glycine max
aaaacattgtctgttttctcttgtaaaaaaattgcgcaatgtcggctgaaaaacatcaattggggcttgttaactaccgatgctggctactgttttttctattccacccctgaataatacttggacgatgtcgatttggaaatgttcgatcggagtcattcggtcatgcttctttttaagacctcgatctgtcatcttttcctggccgacgtcggctagcatttttttcgatcaatatcggtgaatcatgc

SEQ ID NO: 147927 - DNA, 446 bp, Glycine max
  unsure (1)..(446): unsure at all n locations
acgacaataactntntactcggatgtctgattgagtcccgtaataaatcaacacgctcgaaattgaatgttgatgctctgagcaaattcaaacgacaataaattttaactcggatgtcggaattagtcccgtaatatatcgagacactcgaaattgaataccgaagctctgagcaaattcaaaggatgataacgttttactaggatgtctaattgattcccgtaatatatcgagacgctcgaaattgaataccgaagctctgagtaaattcaaaagacaataactattatctcgggtgtatggttgagtcccgtaatatatcgacacgctcgaaatttaatgttgatgctctgagcaaattcgagcgataataactntttactcggatgtctgattgagtcccgtaatatatcgagacgctcgaaaattaatgttgatggtcgtag

SEQ ID NO: 147928 - DNA, 104 bp, Glycine max
aagaaaccacatcataggcgacagccaccaaaaaaagaaagaacagaggacagcgcccacacagcaccaagcaaactccacaaacaggggcgcgaagaaaacca

SEQ ID NO: 147929 - DNA, 278 bp, Glycine max
aacgactggacttacactagtcacacttaaacacaccatcctcatttgctgacctctcaactgagctaacgcactcctacgaagcccttatacttgttcctctcaacatcggggccctatcaaccccttctagcttccacaatatccgagccattcaatgtcatatatcatgaggctacccttaaccaagacaacagaatataggcggaaaactttgcccgaaacacattgaaataccacagctttccatactgatataccccaggaacaatcttctc

SEQ ID NO: 147930 - DNA, 422 bp, Glycine max
  unsure (1)..(422): unsure at all n locations
gctgggtttgacgagtcctatgtgttgttcatgtgttatgcncncgcatacatggcactcatcatgggtggcatgtactggaggagtaatggcgtgaatctattagactcaccaagggtggaccttagnctttgcgagccctttggaagatcgactaaggaatggtccgacctgggttatgtgcgccatgctcttgcatacatgtcacttatcatggatggcatgcactaatgatgtaatggcatgctcttgcatacatgtcactcgttttgagtggcatatactggagttgtagtgcaaactcgaacatacatgttacttcgtcgtgggtgatatgtaccgaagatgtagtaatgtgctcatgcctacatgttactcgccatggaggacacataccgaagatgtagtagtgtgctcgtgcg

SEQ ID NO: 147931 - DNA, 199 bp, Glycine max
gcccaagggacgatgttcagaataagacatcccgcgccagatcaagatatattggcaggtgcgtcccaagaaatcaaggacaatcacgattcaagagggctttgattccgagagcccgagagcatcactcctggattggcgagaagaaatcttgaccacttcacaatgggagtgtcgaacaaattttctctaaaactaa

SEQ ID NO: 147932 - DNA, 253 bp, Glycine max
aataaaaatcccgtcagagatcctagtcccgtggagatggaggcgtcctgaattcaaggcctcacttcttcaagatccagtgcaagagcgtctgctaaatatgcctgtggagtaccctatgcgggcactagatcatcctatacaagatatggcttacgtggagtgggagtggcttaagaataggcatcctcctcggctggctgaggttcctgggctgctgaagcctacccctttccaaagaaaagaggactca

SEQ ID NO: 147933 - DNA, 431 bp, Glycine max
  unsure (1)..(431): unsure at all n locations
agctggatttcctttagtagggaatctattctttctaagatggagccaaacccagtcacccttattaagaactagctcttttcttcctctattgcctttagttgaatacacctttgtttgattctctatttggttcttaaccctctcatgcatcttctttacaaattctgacctagattccccttctttatgtataaaagaagtgtccagtgggaggggaatgaggtctaacggtgttaggggattgaacccatagacaacctcaaaaggggactgcttggtggttctatgaacccccctgttgtaggcaaattctacatgaggaagatactcatcccaagacttatggttgcctttcagaagagcccttaaaagggtggataaagacctattcactacctctgnttgcccatcagtttgtggatgacaag

SEQ ID NO: 147934 - DNA, 474 bp, Glycine max
  unsure (1)..(474): unsure at all n locations
tccttgagaagattcctagagaagctagagcttagctatactcaccagctaagttcacctccttgagatgagaagctagagcttagctacacacacccccatgccaaaatacatgaaaatacaaaaaaaaatccctactataaagactactcaaaatgccctgaaatacaaggctaaaaaccctatactactagaatggccaaaatacaaggcccaaaagaaggaaaaacctattctaatatttacaaaaaaaagtgaacccaaccttggcccataggctcagaaatctatcctgaggttcatgagaaccctagggccttctttagtagctctagctcaatcctcttggagtcttctatccaataccttgggggtaggattgcatcaagttatgcatgctccacatgnttgagtgatcacatctaatgaaattttacttgatggctgaagagattcttaagtgtaaatgatctt

SEQ ID NO: 147935 - DNA, 343 bp, Glycine max
  unsure (1)..(343): unsure at all n locations
ttcaataagcattttatattatcgtggctcaatgtccgacgttcatactataagctcctaaaggctgatcgaaactcccaaacatgctgtattcataatttatacattgnaactcctccaaactgttttggcaagatcattgtaacccaattaactggttgcactttcccatgccctgaatgatcgccccaaataaaggctccttgagtactttgaatctcctgaatattaactcttggggaaaaaagagggttatcatcgtgtcaataggcaaaaattgatgaatttagatgaattatttttttttttactaaaatcaacttaaaaattaaatatccacttg

SEQ ID NO: 147936 - DNA, 461 bp, Glycine max
ctcagcttaccaggaactccctcgtcaacttatgaagatccacttcatctcgttggcagcaccggttcccaccaaacgccaagatggtttcaagttctctctcacaacggacaacttctaattaacgctcggaacaaacatgctattgattaagtaaataaatagttttaatatttctgttaaatagttctaattaacttctacatttccttatagggttagcctctccttaagttttaatatttctgttatactatatgcagtttttttatatggtcaatattttttaacaatgagttatccatttattttccctaataagaataatcaaactcaatcacgacctacggcataattatgtgtaaaacattatttaatttggacttatctcgattacacatttttttaacctcctctattgttatcttaaaattattatagaacataaattatggtgatct

SEQ ID NO: 147937 - DNA, 352 bp, Glycine max
  unsure (1)..(352): unsure at all n locations
cctactttacgggacggtattatctcaatccttaattagggatccaacctctatgtctatatttgatttgaattcattcacactgcaaaaatcactgagtggaaatggattccacaccttcccacttgagttgatgtgacctaataattatgccaaataaaaggtcatttctttttgtttgttgcattaaataaatttaatcagaacagactttttagtacagtattatttaattataaaatagtatgtataatggaattggttgttttatataataaaacattntaattaatcaacagtgtaacatttcattagctatttttaaaaaattattcttattaaattgagaaat

SEQ ID NO: 147938 - DNA, 451 bp, Glycine max
  unsure (1)..(451): unsure at all n locations
ctaagctgtgacacttcatagaagttgaatccaacgcatcttatcttatttacaacaagaaataacatattcttgtaaatgtaacagttatgagaatgagtatgcccagcaaggttgaaggaccttctgatgacaggttttaagagatttgaaaagaaacaatttctacaacaaaaaaaaacaattatgaaaagtttaaattaaattttaataattgtttatagtatttgtaaatttctgttatttgtgtgttaaaatatattggtaaaaaaaaaagatccttattacctgcaaattctgccatcaaaaagtctagttcaccatttgttttcttttcagtggcatgtaacaaagggagtacactttcatgtctttctaatcctgaaaactgacgcacatactcaagctgtccagaanagcggccagatgggggctctttatccaacaagct

SEQ ID NO: 147939 - DNA, 382 bp, Glycine max
cttaaaatcaaaccttttttattatttgtgcctttaaagcacaaaaaaatcattggattgttgccaagctcacgtgcctagcctaacccatgtttaacttatttcactttgaaacacgtgaacttttgaggttgcacacttttataaacttttggtgattttatttttttatttggtaaaactataattagggtcttaggctcgcaagtgatacctcaagatatttttacaagttttgatcatttgaatcggttataggattaattattggtcgaaaactcacacttaaaactcatttctcttgataagagtgttatgcggatatccaatctaagtcatccttacaaactcagaatgtgtgtcgccaattgaattacactca

SEQ ID NO: 147940 - DNA, 412 bp, Glycine max
  unsure (1)..(412): unsure at all n locations
aaaagtagtntgtttacttaaaaaagaagtcacccaactatcataacagctagataacaattagttggacatgtggggcctataaaaggaaaaaggacaaaggaaaattgtaaaacatgagaatcaaggtaggagacaacttacattatgcagaaaccaaattcatctcatttccccactctagatgcattctgaagcttaaaatgattgcaatcgagtgcatatagcttaaagcttcaaagaagattcaccccaatgggtgttataaagttgtaaaatccccttaaacaccttatcatggtttgcaatttatatgtatcccaaattaaccatgtgggtcaagtttggttgtgagagaaatgatagcttatagagagtctctaatatgggcaactgaagaggctagagtgaa

SEQ ID NO: 147941 - DNA, 388 bp, Glycine max
gaaaatcttggttactattacaatgtaataagttattgaactcaataaaattaaataacgtgtagataaacttgattcaatttaattattaatttaaatgcaacatcattgtttaactaagtaaaatattgtattttattcaatatttagattggttattaacttgtttggattgttaatttattttatgacttataaaatgatgtttaattgaataaaataaattaacattaagtagcatctagtaattcgataagaacacgtttgtattcattgtcttgctaagagtatgatgtaaaaaaatagtgttctctctaattttaaattgatgagtgaacaaatagaacgtcttatagaaatgatagtagtgagcagtgttaacaaatta

SEQ ID NO: 147942 - DNA, 414 bp, Glycine max
gcagctgcagctgaacatggaattgccatggactttttttttttatctacgaacactttgcattatttgtcgaaaaaataactcttttcattctattgggtgttagatataatagccaggttgagaatcgaaccaaatccatcataaaattgaaaattaatccaaaaaatcgtgaaccacacacaaaataaagacatcaatttgattttttatttatcatactttggtttggtttctggattgacacaccaaaaccaaaccaaatcaaatcaaaccataccccttattttgatacacgactcatatgaattatatacatataccacaatgtgatattatattcattctaaatctaagattaaaacacttatcatgccatctttcactctctcttctctcgtgagaatcttaact

SEQ ID NO: 147943 - DNA, 344 bp, Glycine max
cacatggtaaatgtgttgtcctttaaacaaacgtgagtggtcttcttgaatttcaatgcgatcggcgtgcgatccatatggtgaatggataatttgccttttatgtttgttgctaggaaaccgatacttttctccttttatcttttgccctaagttgtacgtccactaatttgtgtaggttgtcaaaaatggatctatggtcctccaatgcttgtgtcttgcatgtgcaatataaatgagattttatttacttataacttcactataactatggactgatggtgattactcattgttgaaacctctaggaacttctttgcaaataaagtgaaccttttcaatac

SEQ ID NO: 147944 - DNA, 396 bp, Glycine max
  unsure (1)..(396): unsure at all n locations
ctgatgccacatgtcgcgataatgataataatataaaaggaagggtcggataaatctgataaagggggcaaaatagggttgcttaaaatatgtagtggcctccaactgcaacatgctgataatgtgccattgcactgttataacatatgcatgataactacaagtcaaagacttgctttatataaacactttgttggtaaatctgcttattagaactcaatatgaatttacaggtgaggacatgtgtaaccgttattctaatgcctcagcagtgaacttatgtgggtctcctatttactngcctgtcatgaaggccatctgttcaattatgagattatttgatatgcagtattgcagtcgaatctagttatatcttggacgccagctgatatgttt

SEQ ID NO: 147945 - DNA, 360 bp, Glycine max
tcaaactacaatatttttttatttttgaacaacccaccaaaaaacttggctagcataaaacttcgcccaaacgcaaaccaacattaaactttgccacttagaatccactgtaatatttcctcgtaccatttcgttaaccgctggatcgactcgaaaattttactggaagtctctagcacataaatatacattatgaccgttgggatctgctataaaatcgcccaaacccaatctatactactctttccacaaccagcaaattcacaacactttctgcacaaaaccaaaatctgctgacctatctgcagcaaatcttgataaaggacattatcaatcacactttcctcaccattttgccaa

SEQ ID NO: 147946 - DNA, 461 bp, Glycine max
  unsure (1)..(461): unsure at all n locations
actcagcttagtaagagatctgaaacattgatagaatactctatttgtctatgcatgatcctatagatnttcccattgataaggcctcagcaaccttccctcgagctgcttcatgcctccacaagaccaagaccgtgtttagcaaaggccatctaacatgagaatctgccttcttctgtgtgaagcctatgcccttgagcaataaatccaactgtctacaattaagaaaatcacaattagtaatggcaatgccatgtgagctttccaaatgttttcactaagtaagtaagtaaaaagttgcataaacctttcttatgtcatctagacctccttcagaaaatccatatataagatactcagtggacaccccagccaatgctatacatgaaaatatgttcaacgtctaataacaaaacaaaaaaggttggcacataactaaaatttcatgtgtataatgttga

SEQ ID NO: 147947 - DNA, 318 bp, Glycine max
  unsure (1)..(318): unsure at all n locations
gcggctgcagctggagagatgctcaaggattttttattttgtaagaaaaagagggggagcccaaattgaatgataaaacagtctacagcggaactttgaagtatgtctcacaagactctattcgtaaagttcaacaagtgtgacacccgcttccctccatcgactaggnnaggtttttgagaagctttctcgaaaaagcttctttgaaaaaacttccttgagaagctagagcttagctacacacacncctctcataacctagctcacctccttgagaagcttcctttaaagattcctaagaaactagagcctagctac

SEQ ID NO: 147948 - DNA, 377 bp, Glycine max
acagggcataggcagaaaactctgcccgaaacaccaaccataatcacagctgttcacatacaaataccccagatacattaccttcgtaccaattcgataaccgttggatcgactctaaaattttactggaagtctctagtacttaatcctaaattgtgaccgcagggatctactatcaaacatccagaactcattctgcactacaatttccacagccaatcacacacaagcgatttactgcacttgtgcaaaattctgctgcaccatttctcagcaaaaatctgcacaaagtgcagatttgaaaaccacacgttccctattcaatctttccaaattaaaactacaagtccaaatatgtattatcatgtctaaccaag

SEQ ID NO: 147949 - DNA, 292 bp, Glycine max
attttctttatgtcagtctaaagccaaatatacctgagagagaaaatagattcaacaggcaactgatgataggataggaaagctcgacaccaagaaattatcatgctactccgattacccttttttcttcccatgaataattacgtgcttgagaaataattaagctgcacttatgtattatgaccaaccatgtatttatatacactctttctttacatgatttgttactctggagtaaaactacatatgcaactgaaaaatgttgctttacaaaggtaaaccaatttatgcg

SEQ ID NO: 147950 - DNA, 466 bp, Glycine max
ctaaggtcttccaaagtctccctatgtgtcaattttttgtgtctacttcatcaaaatttcatcaacatcatctttttcgcgtattgactcttatgatgtattttatgacaatcacattgttatgtttcttaaatatgttatattctatccttaaacacgattttaagagtatttttgaactatgttgatcaaggtttgatcttatcatggccatgaaagagattgacacttaaaacatcacataagatacattgaacatctcactaattgacattgaggaagacttgtaattgacttgtatttttttaagtattcgacctatattttagtaccatacttgtatttgatattatattaatattcgagtcttctcttttatagcatcgaatttccaaatctatttgtcaattaactttagtcgataactattcatccaagggtataaatttaatataattcacttcta

SEQ ID NO: 147951 - DNA, 210 bp, Glycine max
  unsure (1)..(210): unsure at all n locations
aaagccctataaaggttggattaagaggatgaaaagtctgggaattgggtagctgcttggggaggaaaatgtgattttgaagtnacacatatgccttctcccccacccccccccccccccactccaaccttataggattggttggcctaccccgcagacatgccgtggctgccatactattcaaaaattttaaggtttgggattattgtg

SEQ ID NO: 147952 - DNA, 385 bp, Glycine max
accatggagatgcagcggaagacacaggagaagatgtgagaggagacgccatccactatggaataagccatggaagaaggagcttcaccaccaagatgagccttggataataagcttggagaggatgcttcaatggaggaaaagaaagagggagagaaagagagaggggggagcacgaaattgaaggaataaaagacgtatagaagtggaactttgagttgtgtctcacaagactctcattcatcaaagttacaacaagtgttacacatgcttctatttatagactaggtagcttccttgagaagctcttttagaaaacctccttgagaagcttctctgaaatacttccttgagaagctagagctttcttcacacacccctctta

SEQ ID NO: 147953 - DNA, 331 bp, Glycine max
tctgaccccatttattgaagccatatccacttgccattcaagtataaacctctcaccacaaagtttgaagaccttaaacctttccaaatcttcgaagaagagagaatcttctccctcatgtccttcttcaccaacatttctagcacccttctttacccaagagccatcatgctccttaatataaccaaaggatgctattactgaagcacctattaaggaatgatctcttgattggaacataaggttcagaatcaagaggggatgttgagtgttgaaggaaaagggtataatatgaggataatgcaaaggggctttcatccaatgccttatg

SEQ ID NO: 147954 - DNA, 419 bp, Glycine max
tattctaaattcagagattgatacaaaaatcatctctatgctagtcgctctctcaacaattaagttcacactctcaccgggttatggttcaagcttttctttctcaatcaatctgtccactgactaacatttctaattgtgatcctactttcttgttgtttctcatctacatacatgctcattcaaaactcatgacttcaacacatgcttcaccctttcatgctaccaattcacaacaccaatttcacaaaaaataattatgtttgcactgcatactaagataatcaagtcaaactgttcagtatgcttcaagacatgcatactactattcacaatcaaaagtaacccaatataatcacaaaaaagaatagtgtgctaaagacataagtataataattataattgtcatataaacaaaa

SEQ ID NO: 147955 - DNA, 424 bp, Glycine max
  unsure (1)..(424): unsure at all n locations
agcttgtcaataataatttaaaagctagtntttgatgtgtccacgcacgagaactacgtccctaacataaagggcatgtgtgtgttgagtttatgaattcttcctaaagaggcttgcctggattgaatctcctttctataggaagatagcttcattatgagttttggcccataatctgatagttcccaataagagaaatttggactatcttcaggatcatccaacaaaatatctttagtctgaaaggtcacgttgttaggtttggacgaccatgtgtctcatccaccttatgatttgatgaataacaataagaataaattattgatattctaatgagtctctgagaagtggacatgattactatgttaaaggaatttaaaacattaaatatcgttcacaacaatagagtatgtcttattttaac

SEQ ID NO: 147956 - DNA, 431 bp, Glycine max
gcccaaaagaatgatgtcaagattgaatcaacaagttcaagatcaagattaaagaaaagacatctagaagaatcaagattcaagagaagatgaattcaagattcacgaaaagaaaccaaaaagcaacaagtcaagacttcacaagggaagtattgaaaaatatttttcaaaaaccaaacatagcacagttttgttttacaagaaaagtttttccaaatttttctaagttaccagagtatttactctctgataatcaattaccaattacttgtaatcgattaccagtggtaaagtttgatttcaaaagctcttaactgaatttgcaatgttccaaatgttgtttaaatggtgtaattgattacaatatattggtaatcgattaccagtgtatctgaacgttgaaattcaaattcaattgtgaagagtcacat

SEQ ID NO: 147957 - DNA, 406 bp, Glycine max
  unsure (1)..(406): unsure at all n locations
agtctgctctgaagatattcttttttgtgatttccccaatggaaggatatgtatatgatgccactactttccacgcagaacaaatagaaggctttgaaagaatctttaatacaactggctaaactgacacacctaccgaggtgtgtacatggcttggtttgttaattctatattcatcaaatcttttttcagtggtgccctgtaaantaccatcttattaattacacaaattgtcttgttgagtctacacgtgccagattatttgtgctggagaattacactcgacattttccatgatcctgtaatcactccaagtggacttacatatgagagagcattgattttgagcatcttcagaaagtaacccgattgcatgtttaccttctctgctgaatgcttccacttc

SEQ ID NO: 147958 - DNA, 400 bp, Glycine max
  unsure (1)..(400): unsure at all n locations
ggacacaaaaactcagcttcctgtatggaaacaaatctctggggatatccttgttgtatngaagaaatatcttgtatctatttatgatgttatgtgtgttcactgtgctatcataactccattctaccatgcttgtgccttaatcacgtagatgcatgttgttttaggatcattcaacagtggaaacatggctgatttttagaacttgatacgacagggctagttcgcctattttccgaagaatcggggatgataacctaatggtttattgttggcttaatgcggccctgccgagtttggttcaacaagagaaatctgcggatgatgcttgatcaggaataagcttgactatcatgaagaatccggggttatccttttaagagaccccctacaacccatg

SEQ ID NO: 147959 - DNA, 320 bp, Glycine max
cgtgaaacaattactggtggggcaagtgctcttcaaatcagccagagttttatttattggaagacatgggacacaattgcaaaattattacaaaaaatcatgtttaaaccaagaggaatgcacttcggtttatacattaggagaaaggagaaaaactgcaattggatgaataaatggcaaagtgcaactgacccttttggcaagcttaccaaattcttatcaactgccatccatgtgtctgtgctcacaatgcttgatacattggctccatgatcagccaaaccaatgttcatctcaccccacatgaacttctcttcttc

SEQ ID NO: 147960 - DNA, 450 bp, Glycine max
actaagcttcatgggaatatataacagagcttttttttatctataataagctctgagtctaacaatgttggggtgcttgagcttccctacaacatccatgtactgttcaaactcatttctctcgcaggggttagcgtctttgagtctcttcacagccacggtgcagccgtcatcgagcaccgctctgtaaacagtccccaagcttccttttccgagcatctccgccgaagctcgaagcagatcctccaactcaaactggttcctcctatcgaaaaacacaagcttgcttctttccgtctcagtattggtcccatcgctgtctctatccaagttttcaccgttcccatacaccttcttctcgctcccactgctactcccactctttctcttggcactctcgctccccaccaccgagccagatgtggaacctcttgcgcaacaatgcgccac

SEQ ID NO: 147961 - DNA, 385 bp, Glycine max
cagcttgacagttgggacaactattagctttttaaacacctacagagaaacactcatgattacagaaagctcataaaccgaatacagagggcagtttatagattttggacatatttctttgaggcagttatctagtcacaaaatacagaaagctcataagatcagctgatacctgggaatctgatagccgaaatccacgaccaatcttctgattaaatccaagcacaacaatcataacaacagtcactatgttgaccgcaaaaactaaaacagtaggagatattaaaggaaaccaaatcatatatatatatatattattattatctgtatataatcaatggactagctggaagctaaaatctccaaatgaattatgatttttgtc

SEQ ID NO: 147962 - DNA, 442 bp, Glycine max
  unsure (1)..(442): unsure at all n locations
cttccttatcatcatttctttttntattatattntattcattttccaacataaacaaatattataatactttaaaacttcttttaataatttgttataattgttaaataaagttataattgtcaattaaaaattataaataaaaattaaaattactacgtcttgattatcacacatatgttctatattctttattactttaatagataaagagtaaaaaaattgttaattaaaaattaataaatagaattataccaaaaatacgtaagtatatataataaattataaaaatattaaatttttaataaaaatacgtaagtacataatatataataaaaaattaataactatttttaattaattataaaaagatacactctttaccacaccttctcttgagtccttctaaggccttaagacttcctagtgggtggtattctcta

SEQ ID NO: 147963 - DNA, 370 bp, Glycine max
ggacttagagtgacgcggctgcactgacctcgcccatcctttgatgattacagtccttccaagataatgccgcatatcccataacaagttcttcactaaagtctataaaaggatgtttcccttaatgaagcaactaacaaaaaatgagaaaactggacgtagctcacattgagcgacccagtttaaaccaagtgtttctacttatctttctataaatatttattgagtaatccttattatattgtctaacatcactttacaccaagtgtttctttgaaaaactattttaagaacctttcatttgcctatacaccaccattttgtgtctcactatatactgtcttatcctcattagaagacttgtgcttga

SEQ ID NO: 147964 - DNA, 55 bp, Glycine max
ccttcaatggaatgtcacatcagacaatgtcaaaaaccgtattaaattatggaga

SEQ ID NO: 147965 - DNA, 246 bp, Glycine max
tttgctctgttttgggaagcaaggacatgggagcggaatcgaggacactcgggaatgaactctagtcaagtacccggggttttatataatgaaatgccgacaatgagcgtgtttctgtgagaggtattagtaaaatttaaaatagaatatatgcccaatttagtttcttggaaggagtatggattcgaaatttaaacaaaaataaaaacaaaattgtgatatttaattagatctttaaatattaaa

SEQ ID NO: 147966 - DNA, 432 bp, Glycine max
  unsure (1)..(432): unsure at all n locations
tttctttncctattataatgatnnttcaaaaagatgcttaaaattgaaaaaaaataatcattttcagcattttcaaaggaaaataaaacagtacattgaaaacatggtggcacatatgtaattataactacattgtctttatttttcatttctttgattctccttgtctcatgaaggttggcttgtcccgttcatatcttcctttcctacaatttatagattcagtccatcttcgttactagcaatctcatccatgccgttgtcaccacccacaacctctcccccacattctcatgccctttagtcttcaagcacatcaacacccacttatccattcaaagctaatatattnttagctagtttactnttttaagctacttaaaataacatatgaaaagaatttattagctaataaaataaaactcatgtacc

SEQ ID NO: 147967 - DNA, 465 bp, Glycine max
tactcaagcgcgacgctcaagggaaagctcgaagaagtgctagaagatgttttgtcttctacatgaccaactcctttgagtggcatttgtattggatgctaacttgattgttgcatcttattacatatgatattcgcgttgcattgtgcatcatcatagtgtgagtgaagaaaattttatgagttagaaaatgttcttcataggcaaaagtagactattttaattgattataaaggtggcgtaatcaactacaacatgctgtctgaagcttgtagagttaagactcgtatcgatttaatcgaatatggtagtactttaatcgatcacactgttgtttgaaataatgactgagtttttaggagcctctactttaatcgattaccaggtggattaactgattactctcttctcatctaagtatgtcagaggtgaacaaagaacaatagaatcgattactttgggcaa

SEQ ID NO: 147968 - DNA, 306 bp, Glycine max
accagaacaaaaaagggagctgttgaaacaagcccaccccagaaccccgccaccaacaggaggaacacccacaaaaaaagaaaaagcaggagagaccccgcccaaaccccgccgtatacacgaacaaaggaacgaattaacgaagacaggccacaagaaacaaaaaaaagaaacgccccaaaacaaccaacgagaaaacaaaaaaaagcctaaccaaactcccaacgaaaaaggaaaaaaagacaacaaaacgaaacagacaaagccaaaaaaggaaccccagaaaaggcgcggaccgcaaaaaaa

SEQ ID NO: 147969 - DNA, 279 bp, Glycine max
  unsure (1)..(279): unsure at all n locations
aaaacaacccgggagaagcaagggcaccgatgttaaaaacgnaacggcacgagagaggcgaccagagccgcagaacgcgacagcgccaaggaggggccaaccaggaaacgaccagggaggggcgggacaggaagccgcagaggagaagaacggagaagctgccaaaaagcacaaaagcgagcaaccagggaagggcagaagaggaaacaagagctggagcccccaagacaacagggggaccaggaacagaaaaaccgcaacgaagaagaggaaacaggc

SEQ ID NO: 147970 - DNA, 405 bp, Glycine max
agcatgcaacttcaatgatcagcaccaatgttttttttatggtacggggcatcccaacagaagagacttcagatggactataatcctatatccacagtcgacctttttacgagaactctacttaaccctttggttaaatgaacggacaaataatgctgagttctcacaaacctacatccccaaattatgagaaaactcaaattcggtgtcttttgagccaaagttcaatggggtaaccttattctcttgtaggaattcggttcaacagtaacaggctggcacatagcctcaccacaaatccttcactaaatctgatacgatacatggaattcaccattctttcaggatctattttccttcggctcaccattttgatgtgggtaatggagcagctgatgatgtata

SEQ ID NO: 147971 - DNA, 301 bp, Glycine max
cgacccacaccagagcggcgagaatacaactagaaagcgcgaaaacctaaacaggaaatgaaaactccgagaagcttctcatgaaaaaggaaagcagatatgtcgcgagatacattcacgaaacaacggacagacgcgagcgagggagtgtgtgtattaacacaaaacacatcatgcacataaccgaaagcagaagagacatacacataagcaaatatgcgagaaacatcctcaactcagaaaaagagatagaaccaactacagaggaggggatatacaaaatacaactaagaaccaaaat

SEQ ID NO: 147972 - DNA, 346 bp, Glycine max
  unsure (1)..(346): unsure at all n locations
ctactaaatgacaaaccaaaagacatgaatgtgattagttacgacccatagaggcacaaccaatgaatacctagatttccaggaccaagaacaaaatntcacctgtgtggtgttaacataaagctttgggcccatgaagctaaactgtatagatgcagaactcctttgcttccgttgtggaccaaaaggaaggtcactgaatacaggtgcccactgccttggcagctggaattccaagaattggtggagctcttcaatcggcggtttatctgcataatggacaattgttatagacaaattaccgaaggaaatgttatttagataggatgtatggcaataaaaatag

SEQ ID NO: 147973 - DNA, 418 bp, Glycine max
  unsure (1)..(418): unsure at all n locations
nggtcatagcaaaccactttgcatgccaaacatgagttctcattctcttggttacatccccagaagtgcaaaaaccattctctgggtttttctttagttcatatctccgatgaacacaccgaggaagcttcttttggtgattctcctccaaacctgatttggcaagggctttatcaattattcccagtttctgcctctttcttctgcacccttttcttgcaatttggttatcaaacacagttgtccttcttctcttgttcttttgagacctataatcactgtttactctattttctatgatagattgaagactatggagttcgagagcacgggattcagcatatttctgcaaattgattttccaaggtggtggtggtggtgtacgtactgaaacttgaggcgttttggttccagcagt

SEQ ID NO: 147974 - DNA, 102 bp, Glycine max
aagaacagcaccacgtctgaccaccaggcaaaacaacaacccaaccctcgcgaccttcaaaatggaccaacacgacaaacactcaaagacaccccagaagcc

SEQ ID NO: 147975 - DNA, 397 bp, Glycine max
  unsure (1)..(397): unsure at all n locations
cgtatccattagaagagaatgagcatgtgagnggtagtatgactgtaaatggtagacagtacgtcagattgattgtgaaggaatacattaattgtatcccaatgagagtgtgaccctcaaaatctgagagaaatgactatcatttagcactgacaatagcatgaatctctgaagcattgactcaatgcacgacaatgatgatgatgaaggccatatttgattgtgatagccacttagccacaaagctgaccatgagcttgaatgaattatcccttatacctagcttgagctgaatgaatgattgatcgattgaaccctgagcctataacagtgtatctactgctacctagacttaagttgtcggagagcatcatccacaaaaagcgtgggtcaaagc

SEQ ID NO: 147976 - DNA, 394 bp, Glycine max
agcttctatcacttcgaccatgtgtattattttatttctatgatgcaaatccctgtcttaatgcatagtcccatgaaaatgaaaataccatctaggtcatctctgataatgcaaaaatcccgtgggtaacctggaaaagtctgtcctattaagctgataatttctaattttttaaacaattaaagatgaataaaatgaatcacatattctactattttatatcgctccagtacttctaaataatgcattataaaagaagaataaataggaaattggggctagaacatggaatgaatccttttctttcccttatttatatccatttcataagcttctggaaaaataaacgatttggatttgacacatatattctgaagagttacggtcatttctc

SEQ ID NO: 147977 - DNA, 399 bp, Glycine max
agctatctgatatatcatgaatttctgttatctcagataattctgtaggagagaacttaattgcaacttattttagaatgcagagttcctatgctaaccatataaaagtgaagctactctttcttgtaaataggtaatacactcattcagctcatttacacgacttagctctcttgctcactatcttcctcccttgacttcatcttcaagactcaaatctggtttctggtgtgagggtgcagcaagcatatgccctatcatatatgactaacgtgggcattggattgggtttgaagaaattccaatctcaatatattgctgtttacgttgttattcacttgagtttggtcttaaaatttaaatttagttaatctaatacaatttgtaaagttatttgat

SEQ ID NO: 147978 - DNA, 299 bp, Glycine max
ttcctcttgacatcttttggcttgaatggaattgccatgacaagttattgctactggctttgatatttaggagttgatatcgtgttgcgggaggtaattccgattggattaactcaccatctttaacttgccaatttggtatgacatttgttgtgggatcacttatgatgtcatgtctccaagggtaaactatatcatatctgatggcataagcatgaaaccaataaaagataaggacattaatcttgattctttcgacaaattcgtagaactcgtcttgaatttgctttttgtttgta

SEQ ID NO: 147979 - DNA, 418 bp, Glycine max
tcatcgcaattgaggatacgtaggtgcgagggaaacaccctcgtcgaccacaccaaaattaaaaacataaaaagcataaaaagacataaaaatacataaaaacataaaaatcataaaaagacataaaaacatgaaaagggaaaaataaacaaattgaagacatgatattgcacatctgattaaaggttgacgtcccttgtgacggacgtgtggggtgctaataccttctacgtgcgtaaaaataactcccgaacctttcacactcaaaggtcgtagactacacctttccgattctttcgacgttttcctcgaataaacgttggtgacgactccgcgcattttcctcttatggaagacacacccgtgagcaccacgtcgtcctcccgtctaagggtatgttgcgacagacatcatgtaa

SEQ ID NO: 147980 - DNA, 394 bp, Glycine max
ccaccatggagatgcagtggaagacaaacgagaagatgtgagaggatgcatcatccactatgtaataatccatggaagatagagcctcaccaccaagatgagtcttggataataagctatgacatgatgcttcaatcgacgaaaagaaagatggagagaaagagagaggggggagcacgaaattcaaggaagaaaaatggagagaagttgaactcttagttgtgtctcacaagactctctattcatcaaacttacaacaagtgtcacacatgcttctatttataaactacgtatctcccctgataagctttcttgaataaacttccttgtaaagcttctttgataaaactctcttgagaagctagagcttagctacacatactcattctaaaac

SEQ ID NO: 147981 - DNA, 347 bp, Glycine max
aattaacttaaagaaatgaggttgtgaattaatttctaaaccaaccttttacaagttaatcgaaacccaatgggtgttttaaaacaaacttgatgaaatccgacttatagtgaggaataaagcaagattggttgcaaaagaatacaaccaagaagaaggaagtgactatgatgaaacctacactccagctacaaggttaaaagctatacgattggtgcttgcatttggatgtattatgaatttcacacctttctagatggatgtaaaaagtgccttccttaatggacgcatttgagaagaagtgtatttataccacacccccaagtttttgggattatgaacatcct

SEQ ID NO: 147982 - DNA, 452 bp, Glycine max
  unsure (1)..(452): unsure at all n locations
tttgtgaagaggtggacagataaagaacttagaaaattttttatttgttcactcgctaagcgctacactcgtgctaagcgccaggtcttcatgcgctaagcactttgacccctgatcattggctggatggtcccgctaagtgtgctttgctgcactaagcccaaatatctcttcggattctaattttcttgaattgggcttagtgagctgatgtgctaagcgcaatttcttctttgttttgaaaattttagaattgcgctaagcgcgagcgacacgctaagcgcgggccactactgcatttagaagcatgtttatgcgctaagcaccaactttggtggctaagcgcaagttgcaggaccaatcaaagctacagctcccactaagcgtgaccttgcacgctaagcccaaaagctnttctggaattttaaaattttgaattgggcttagcgagc

SEQ ID NO: 147983 - DNA, 403 bp, Glycine max
  unsure (1)..(403): unsure at all n locations
tttattggatcttgttgttttttttttgacaagccgaatgggaaacagctttatgatgttattgtggaaaaaactggcccttcaaaaactagtggaccaaaagaaatctaggactgagatgtgtggttagaacctcaggtatcaacccttctggctgaaatataatcattctttatataccaattcaataaagggatatggatcgcttctgtttgataaaccaatcttgctaggcagtattgctatggcaattggcagagttatcatggatttctggcatccagttattactttattatattgagagtcaatctcattaacctgtgaatntttttgtcttctgagttccatgcttaggtctttagttgtgtaactgtgtcttctgtctactctgtnttcttcg

SEQ ID NO: 147984 - DNA, 466 bp, Glycine max
gtatcatcagttgggaggttaccatgtgaaagtcgccatatttcttatgacaaaggaggcagatggaggtatgtcagttatggtgccaatgttacaataataaaaaaaatctgagaattaataattcatatacttctgcattcaatattatcatatctacgtattatattgaatagaaatcatactctttgctataaaatagtcaattttacttgattatatattttttggtagacaatgtgttggtaactcttcaatcacttatttgttaactatgcgtactaatttccttgcgatgttacactacaagtagaggtaaattctaattcaaaaaccacatgaacaatacatggaacatggagagtgctccttgaaatattatttctgagatcaattaaacgagttcagacacaacaaagcaagtgcattacataattaaagtgccttctagatatttatctgctca

SEQ ID NO: 147985 - DNA, 227 bp, Glycine max
ggagagccgcgaaacaacgggacgcgcgaagaccgaccacgacagaacacaacaaaagcagacgggcgagacgactcacacaaacgggggaaacaagcggataacatagcaagacgcctgaaatgaaataggggatcacacgccaagatcaagacggcggacattagacccgcacggccgaccgaagagaagagacatggggaggagggaacacgaaccagaaagcg

SEQ ID NO: 147986 - DNA, 353 bp, Glycine max
acgcgatataacctctatttaagcgaaagcgttagacttgatcccatgttttaataaagcgaaaccaaatctagtgcgaatcaaaactccgacatctatcatgggttgaatggatgaatgcataatgaaatgcatatgatacagatgcaatttatgaatacgggagcccgggaaattgtctccttcttagatacaacatctaggggtagcacagtgcccatcgtatgtatttaataaagtgacacggaccctccgttggtttgccaacgagatgggatcaagacataacccatgcatgatgcatatgtgaaacgtaatacaccgtgatgtacactatactacaatattctcaa

SEQ ID NO: 147987 - DNA, 294 bp, Glycine max
gcgcaaccctcactaagaacaagctttttccttccttcattgcctttagaagaagacacctctgatggctctctatatggagcttaaccctctcatgcaacttctttacaaactctgacctacattcccctcttttatgtataaaagaagcgcccaacgggaggggaatgaggacaaaccgtgtgaggggaataaactcacatacaacctcaaaaggggactgctagggggttctataaacccccttggtgaaggaaaattctacatgaggaagaaactcatcccaagacttat

SEQ ID NO: 147988 - DNA, 415 bp, Glycine max
  unsure (1)..(415): unsure at all n locations
tggctttagtcncttggagtacttaagtatggtcttatccactctccaatgtgcctcaccaggggttgcttgatataaacatagtacacctagtgcataaacgacatctagacatgtgcaagtcatggtgtacatgatagctcccactgcactatcatatggtactccactgatgcggtctctttcttcaagaattgttggacgattctctctattgagaggaattcctacacctacaagctaatagccttggtaggaattatccatgttatatctctctaagactatatcaatggtcatagattgggagaagacaagcgaccttgtagatctatcttatgaatccttatacctagaatgttgactgcgttttccaaatccttcatggagaattgctctgatatccgaatctctg

SEQ ID NO: 147989 - DNA, 238 bp, Glycine max
tgtagttaattgtgctctattttgcctccttaatgttattaatattgttcatgtttatgtgtgagtagaaacttcctgcggaggaccaaaagggttataaatttatcattcggaacctacaaaatgtttaaaatatatggacctaaagaagaatatcacaacttcaagacataagggtattgaaccacaataaataactgtgctaacaatggcgggtgatagacactttaatccaaat

SEQ ID NO: 147990 - DNA, 379 bp, Glycine max
ttggagtggaatcagagcattgaactaaattgatcgatccactgggatgatggttttgattgctgcacatcaagtgtcattgtgagattttggtcccatgagttaaactacaacgactaataaaaccattgtcgtaactctaagggtcaaaagcataattaaacctcctatgtattcattactttttttaacaaccggttatatataagtaacagtttattctaaaccatgggctacgtgtgaaatcttcgaatactatgtaagaaaagtaattttcaaactttaatcattctgtatgtcaatgatgggtagcgccatttaaattctatggctaaatatactctttgtcttccccttccgaaacttatttcgcgcaaaa

SEQ ID NO: 147991 - DNA, 346 bp, Glycine max
tttttttgtctcacctctcaagagctggtgaagaagaatgggcatttccttgggtgaaaaacaacagaaagtctttgctttgctccaagaaaaactttcctagggtcctgttctaacttcttcctgactgtttctaaacttttgagctataatgagatgcctctggagtgggagctggagcttgtttggacaaggtgggcaccctattgcttattttagtgaaaaactcattttgcaccctccactaccccactatgataataatcttattccttataagatcgctcatattgggaacattcctggtttcaagaatttgcatcataggacatctttacctagtcat

SEQ ID NO: 147992 - DNA, 354 bp, Glycine max
gaagaggggagcagaactatctgggggagcattatgttttgagtactattcttggcaagagaacattcaacatatatttggtattcaaatttatattgggcaaatttgttagcatataaattaagctccatttttttgattctctgccatacattcaaacttaatagtttctaactagcagctaacctttttgtgtaccttgaacctaatcattaaagatcttcaaatcacaaaaatatgttgtttaaaattccgaatcttagaaatcttgactttcttccttggaaagcttgatttagttattttaatcaaaatgctcggagtatttcttacattactaactggagatctaga

SEQ ID NO: 147993 - DNA, 417 bp, Glycine max
gaagatagcatcatcagcaaattggaggatggtgattggaactctattcttgcctaccatgaaactgttgaagcaatttttggacacagcttccctcatcaaacctgtcaaaccttcagcaaccaggtcaaacaaaataggagccaaaggatctccttgtctcaagccactttggggtttaaattcttctgttggactttcatttactaaaacagatatggatgctgatgtaaggcagccctttacccattcaagccacctctcatgaaaccccattcttctcatcatgtagaagaggaattgccaagacaccgagtcatatgcttgttcaaaatccactttaaaaaccaggcaacgcttcttaaatctcttaacctcctctacaacctcattggcaatcataaccccgtgaacaat

SEQ ID NO: 147994 - DNA, 275 bp, Glycine max
gatctgcagctgcagctttacctccttgaagatttttttttttctcgaacacacaagacacgacgatgaagatgagataatacaatccctcattaacaattgctttttatgcactacaaaaattgatcgcccaaccaaaatgaaattacggatgagagaaatgcatactcgatttatactggttcggccacttttctggcctacgtcttgtcctcaatcaacccactcgagaatatacgtactctaaaaaaccttttacaacttcggaaccccga

SEQ ID NO: 147995 - DNA, 301 bp, Glycine max
cttattatgtttgatcaagaatctttgtcacacattcttctctcaaccctttattaaggagcttcgaatatatcttgggagttctccctcttgtttgaagccacaaaacattaaagttggtacatatgtgaaagtgagaagtgaaagacatatcatgcttgcgagtttgaaattcttgcataacaaaaattaacattctcaataactaatatttgcctaaaaagaaacgtagagttgataaaacattctactaatttactttgtatatgccatgccctaatatttagaaacactttttcct

SEQ ID NO: 147996 - DNA, 453 bp, Glycine max
taatattatctctgagagaagacagttttctgaatgtttgtctatgcgagcggacgaatttgaaatttccttacagtgttatacacttataggactaaaacgttgatttactcatcatcacataaataaattattggtcagtgatgtacccaacttacagtggtattattcacatcattctccggcgcaacagcactcactggagcactgtatgcaggaaattgatacattgctgcaaagcaattaaactcattatcaaatgcctcttctaagttgcattaaagactatgaatggaactaacgaagcgagacttatattgtagttacctttaggtggagcatattggtggtgaaaagaagcgttcttcttacgtgtggcagcactaatacgcattgggcgcgtggagcaataaacgccgttcatatcagtcattgggcggttcctctgggcct

SEQ ID NO: 147997 - DNA, 271 bp, Glycine max
ttgttttttcccggacccgcggtgcgcgacctaatcttcccttcactaacaggcccaccccttaaacttcaacctcatactttctggtttttaccacatactcaaacaagcccaacttcttttttcaatcttacaagccaccattaaatagctaaaaaccttcatggagaatcttcaacatacaaagggacctccccccacacagtgagccacccgcataaactttggaccccaccaatcctcttctttatctccagctacattgttcctc

SEQ ID NO: 147998 - DNA, 296 bp, Glycine max
  unsure (1)..(296): unsure at all n locations
gctccaaccttagcacaccaaatacaccccaaatcgcgaaaggaagccattntcagagtcctgaagcgcatctctaccttgtgggacttcaaatatcaagtttgggtaaacttcttctcacataaatattcgcgggaattgtgttttgggagatatgacgggtagttttactaaggttatgccttatggtacatgttttgtgaagaaatttgtttaaagcatgctaaacctagtcatgtatgggtgcgagtcatagctttacccatataatgttttaagggttctattgatgattg

SEQ ID NO: 147999 - DNA, 334 bp, Glycine max
atccctatggaaccttcacccgaccaagacacctgccaaaacttattttctcctttttggacaaagtatggcaggctgggggcaagtaaattttcttcctttcaaaccttggatgcaactgtgatccgttgcccatatcagctagatcttgacgggtattcaaatcatccttcgtctttccttgaatgttaaggagcatcccaatcacactgtcacaaacatatttctccacatgcataacatcaatacaatggctaacgtcaagatagaccagtacggaagaatcaaaaaaatggacctcttcttcatatgcaactcttaatttatccttctt

SEQ ID NO: 148000 - DNA, 364 bp, Glycine max
agttctactaatactgactacttataaggaagtgatgggcctctgttaggctcatctaatctatctaattaaactaattacagaaaaccaaacccaaactctgagcccaattattgaagtgcagaggttctgacttctaagctcatattgaccctcaaaatggcagaattggccaaaacatatttttgacaaaattgaatatctctttcttagattcaaagggactactcacactctccatttggagttctgtagtgttctctatgtcatgcacaatgcacatatgtcacgttagcccaaaatctaaaaataaactacaaatctcaatgaatgtcaatcatttgtataagaccacaactgagtt

SEQ ID NO: 148001 - DNA, 331 bp, Glycine max
agcttaagaaatacctaccccgttccccaactaaaaaaacctattctagcatgcctttaaaattcatgcataaacaaagtatgttgaaaacacacgaaaacgtagagtcaaagatagacacaatctgatcaatcctttgcaagaaccttgcttgaatgaataagtgccttcttgaactcaagaaagaatcaaagattagaagttgtgagtcaccctgtttctaagaactttctcttctcttctttcttttactaatgtcaactctagctcattcagaagttgttaaacttggtagaacatgtttgaagtgagaacacaatgtagctattta

SEQ ID NO: 148002 - DNA, 410 bp, Glycine max
  unsure (1)..(410): unsure at all n locations
tgcggatntggtcttgaccgacgaaaggatcaaagtttgtattggtaagatgcaaatatgatcatcccgctctgatgaatgtgaaaactggggcaaatgaagaggatgagaatgagggagaaacccatgctatgactgccattcctatacgaccaagtttcccaccaacccaacaatgtcattactcagccaataacaacccttcttcttgtccaccacccagttatccataaaggccatccctaaatcaaaccacagaacccacctaccacacgaccaatgctaaacaccactttaagcacgaaccgaagcaccaaccataatggaattttgcagctaaaagcctgtagaattcaccccaaattcccgtgtcatatgctaaacttgctctcatatctactcgataattc

SEQ ID NO: 148003 - DNA, 324 bp, Glycine max
atctgatgatgaagcttggattcgatcaccctaactagggatcaaggtttatgtatttatgcttcaacatataacacctaagcatgaatgattcgagaaacatttttatatacatcagctatgttgttaaaataccatcacatttacctactgttggcgatcttactcacttgcattattactctctttagcctagacttagtctaattttgtctgaaccatcaactatctatgttgccttaacaatgccttaattatgaattaaccctgactaatactagttcttgagttcgaactcggatcatccatttaatattaaaatta

SEQ ID NO: 148004 - DNA, 351 bp, Glycine max
  unsure (1)..(351): unsure at all n locations
catctnacactacaccactacgcagagcncattatttctttaaaccaaaatcccaaacccgtcactctcaaaaaactacaccaacgggttaaacgcaaacaacaacgcgtgagaatgagataggggcgggcaacaacgccggttaacacgagaagatcaaatgcagtgaaaaacaaaacccctacctctactggaaagcaccgattgcgacaatcaacactggagggggacgaacatcgacgtggaacatacaaaagcactgagcgcgtcaatgaatagtgaagggtgacgaagaatgacaaccaccaccattgggagagcgatgaacgaccgggacccagcacaggaacg

SEQ ID NO: 148005 - DNA, 259 bp, Glycine max
caaaagggcacccgcagccaacaaggatgatgaggacgaccactacaccgtgaaaaacacaacattgaccaagagaaaagggcctaggaatggtaaacccgccgagatcgcccatgggatggatgcgctaagaaattgaaagggaacactaagaaccaagactcagagagagtcaaaaatcaaaagaataaaggtgaagtaagaagaggcgcggaaaaaagcacaggccatccagaagcaaaacaccgccccccacggc

SEQ ID NO: 148006 - DNA, 280 bp, Glycine max
gccaaacagaggacaaacgaaaagcccagagaggacgcccaaaaacaccaacaccgagagcccagaacaccacgccggaaccgcacaaagaccaacgggaaaaaggaagccgaacaaccagacaaagaaccacgaacccacgacaaaaggcggacacgcaacggaaaccacaagcacacacacgccaaccggcacacacgacgcgcccggcaccaaaaaaggcggacgcgaacaacacaaccccaaagaaccacaagacacaaagccgaagcaccacaaa

SEQ ID NO: 148007 - DNA, 285 bp, Glycine max
tgcagctgggctctgccgactttctttttttgtgtccaacagcaactaactgtcccagagtaaattctcacctagaccactcctgaacactcctttactttacttgtctgaacatacattccaccccaagattttacccaggtcaaaccttatattccccacgttttttagccacttaataacttgggactctgtctacatcattgcacttctggatgtcacccaccctccaattttgtggagatcctgtactaccttaaggcccattgtcctgggcaccgagac

SEQ ID NO: 148008 - DNA, 262 bp, Glycine max
aaaagcgacaatgggctttcataaactctttgggagtgatattcaaatatttgaaattattggccgagtggctctccctatagggagatccccattattttagtgatgcattgtggaattaactcgctgtttgatgccattcaattgtgaacatgagttgaaaattgtgaaattgtgtccacaaggattgaccctgatgtaagctccattggagcttgtatgcctaagatctttctcattaatggattcctttgctttttgg

SEQ ID NO: 148009 - DNA, 386 bp, Glycine max
aatgccgattcttctcctttctttcttccaaagtcatttctaacgtcccaagcactttctccatcaccctcagccaccattaaccaccacaaaccgccgttgttctccgttgcaaccccacactgagaggaaccctttgactgaagcggaatcttccaacttgcctcgcgggttcggtagagaacaaaaccctagtctgacctttcattttccttgaggtgaccatggttctacgcttgcttcttgttagcttcacgatgtctttgcatcttatctgactttggaaccgccattgcatgtcttatgcttcctttgtaaaaccctacagagagagactctgtaaatgtgatcctttcatgaaatgcatgttattttcgtaacctaca

SEQ ID NO: 148010 - DNA, 340 bp, Glycine max
  unsure (1)..(340): unsure at all n locations
tgaattctggggatatgaggcctggggaaaattgagagaatataaaggagggaggaacccatgatgtgactaccattcctacatggcaaatnttccaccagctcaacaatattcaatacttagccaatatcaacccttctcattacccagcaccctattagccaagaccacccaatcatccacaaaggccacccctaaatcagccacaacacccgcctgctccacatccgaggccaagcaccacccctaataccaatcaaaacaccaacccaggaaggaactttctatataagaagcctgtataattcaccacaattgctacgccatatgctgacttact

SEQ ID NO: 148011 - DNA, 313 bp, Glycine max
catgtatggatttacacactccttggttatgtgcgaatctctgaaggcatgctagaatatgtggttctagtttgggctaatggtaagtttctcctaagctcttattcgcagtgatgggtgcctaaatctctttttccacggtgggaactatagattgtttgtgattgcttgtaaagattctttattcatagtgaaagactaattcaagttttggattatataacccgattagcttctctagtgattaagaattaactcctatttaaagatcgggtacttcctctcttgatcgtatccttcattcttcattctg

SEQ ID NO: 148012 - DNA, 324 bp, Glycine max
aaaaagggaagagaaaggggaatagttggttaggagaaaaaagggggagaaggaggtaaagagagaaggaaagaaaaaggggggggaaagaggggaaaagaggggggaagaaaaaagggagaagagggggggggaaggagggaaagaaaaggaaaagaaaaagggagaaaaaaggggggaggagagaaaaaagggggagtaagagagggaaaaaggggggaaaaaagggggaaaaagaggggagaaaggggagaaggagggggaaggaaggggagaaagagggaaagagagagaaaagaggagaagaaggaagaaaagaaggaa

SEQ ID NO: 148013 - DNA, 127 bp, Glycine max
aattaaaaaaatccagaaatctattatgaattaagatctacaatttgaatgaaattgaaaaaacataacactgtcactcctctccaatttaaatggtgacgaattgtttattccttctggaaggagt

SEQ ID NO: 148014 - DNA, 446 bp, Glycine max
ctcagcttgaaaagtttgtcattacatgtccaactctcttgagtgatcttttgttttgattattgtattgtgtgttgcatcttagtctctatattttcatatgtacataatgcatcatcatgtaggaataaaaagagtggttttaaagtcggtaactttcttcagtgcataaaactctattttaattgattacaagcatgatcataatcgattacacaagtgtttgtagcttgtagagaagttttttgtatcgatttaatctattacaagctaattgtaatctattacatagtgcggttgagacaatggttggtttttcaagagtctgctttaatcgattatcagatgatcataatcgattactttgctcttaaaagtgttcccacaagtgatcaatatcactttaatcgaatgtaacgagtatttaatcgatcacttctttgaaa

SEQ ID NO: 148015 - DNA, 320 bp, Glycine max
gatctctaatcacctcggctcaacttacacaaaaagttgttttttaccaaaaaaaacttagccttacctaggaattaaaaacttaatggtgggtactgaatgggcaaccaaatccccccacagcaacagcaccccattggctccaaagctgatgcctagtgcattggccctatacactgactaacctaactaagcccttagtataacccaaacatatttggcccactttacagatggcttttaaaactaccttaatgaacaagggcattatctctcttggcagaacataaactgattttcttaattgcttgatcaaaatg

SEQ ID NO: 148016 - DNA, 327 bp, Glycine max
tctcaaatgtttttttttattggcggtgagaacaatgaaccattttcacaacaagacccttgttggataaatttctcccaaaacacttattaaagaagaaaaatatgaaataagcctttttccaaaacaaaaaattgcttgggtgcaagttaaaaaagcttattggaaagctaaattttgaaccaaaagctgattttaaatatgcatacctaatttagacatgggagaaagttatttcaatttccttttaattatttttctcttggggtgaatataaaaaaactatccaaccagactttgtaagaacaaacatgtgaccattcacac

SEQ ID NO: 148017 - DNA, 367 bp, Glycine max
  unsure (1)..(367): unsure at all n locations
ttttttgttgtggcanctcggtcatcagctcattgcaaaattctgggcttgatcgtccaagagagagggacctatgattatattggaaacaaaccatggttctggatcacacaacgcatagagaagaagaatattgatttcaatgacatgttgaaggtttctaatttaatttgcttttgaaagttgagacaattcttgttttcaaaagatgtcctacgtacagagcaagagaaatgctccacaagctttgaaatttatgcaagtgcgaagtctcaaatgctacgtgatggagtgtacaacgttgattggaataacataaattaagaatgagccctcaaaacaaccatttttggcggtttatgattat

SEQ ID NO: 148018 - DNA, 226 bp, Glycine max
gcgcataaacccaccattccctgttacccaccctcaactggactcatcgtactcccacgtaacccattattctcgtttttcttcacaaccgggggccccataaatccctccaagcttccccaacatcaaagtaatacacatttcaatagcccaaactatcacagccaagaaacataacctaggctgaaaaattttgcaaacacacacaaaatacaggttttttctt

SEQ ID NO: 148019 - DNA, 439 bp, Glycine max
  unsure (1)..(439): unsure at all n locations
gcattaagaagcttccccagaaagcttnctcgttgttttttattgaagcttactcaagaggcatctttgagaaagtaacaccttaactactaacaccctcttaataactaaactcacctatttgaaaataattacggataaaacaatacaccaaacataatcaaccatcaaacataataactaataaaatataaatatatatatatatcatggtgttataactcacacatgcacctgattcaaatgttatggccgcttgaatttgccgagagctcccgtgaatatctcgagcgtctcaacatattatgcacctacaacagacattcgaatgatatggtatgaccatttcaatttctacaaaacccataatgagctatatcaagcctctcgatatatcaagagcctcacacatacacccaatgaaaaagatattgccaat

SEQ ID NO: 148020 - DNA, 141 bp, Glycine max
gctggtaccaggtagatatacggccacctacctatttaccctacattcagataagcacttgttgctcgaggcgtgatgactcaagaggttggtttgcttcatacggaagatatacacggcacagtttgaaatactccaacg

SEQ ID NO: 148021 - DNA, 279 bp, Glycine max
  unsure (1)..(279): unsure at all n locations
agctttacaacaaataccactctactccaaagtgnngtattgaatggcaacaaggaaacataagtatatttcccccgaaaacattcttcatgaacgaaactgtactgccgtgatctaaaagaacctctcacccaagcataaacaacctgggagtgaaccatctcttcgccattcggacaagaaccgcgggaaatgatcctactgccccagagcaaccattactcaatgccctccccttgcccccacgtagggaaaacagagaccatctcccttgaacga

SEQ ID NO: 148022 - DNA, 457 bp, Glycine max
  unsure (1)..(457): unsure at all n locations
ctcaagcttagaagaacaaaatngcctcaatcatatccaaatatgcatgtgaattatgatgcatcaacaagaagcaagccaaggatattgtgcaagcaatcaatggggcaaaacacaccaaatgattatgatgatggatggctcaaactctcacaaaggtaaactcatcactctcacattgagccttcaaaaatatcatgacatgtagaggagaatcaaggatttcaaggcacaaaatgtcaagaacttttattttcaaaacaattacccatgtcttgaacatagcctataattcaaagaaaaacatgcaaaggcgtacatgcacacataagtgacccacaatattaaactcaaaatccgacggaactaacaacatgtacaaatcaacaccactaacaaactaaccatacccacgaagctaacaaacccaaaaacactccccccatcttaacaacac

SEQ ID NO: 148023 - DNA, 321 bp, Glycine max
  unsure (1)..(321): unsure at all n locations
aagttctgggcctttctgcaagtaattataggatgnttttttaccagcgggacactactcttaaaacaagaactgcatacaacctcctcccataaatacaaacatcaatgtatacttagagcaagcttatgcgcatatttccttaccaacgctcactcgcacacgacattttattaacttagaaaaatgcacccatatacaatcaacgtagctcgcttacctagactatttacatgtacttgccaagtgtatttgttatttacatcacacacgcctgcttggatgaatgtacatacatacatacttaaagcattttgtggt

SEQ ID NO: 148024 - DNA, 499 bp, Glycine max
  unsure (1)..(499): unsure at all n locations
cgattgaccctttgagcccgagatcccgtgagtcacctgcagcatgcgagctatgcagcaattgaaatggtcacaactgttctctctgttttacgagaggggcacataagatattgagatgctcgaaattcatctatggatactcttgagcaatacaaatggtcagtgacttttcactgggaggtgcgatacacgctcatatgatatcgcgatgctatacattgaacaacagaagatctcgacagattcagaaggtcatatcctntcactcagaggtcttagtcaggcccctagcatatcgagacacgaatattgagagaacgaatggtctcgacaaattcatatggagagagattttcacttgtatgtctcatatatgcgcataaggaataaaaacgctcgggtctgttgatggagaggtctctagaaaacaaaggggcgttgtcttgcacgcatggcaattcagcacagagtgatgtgacctcggatatactcttcn

SEQ ID NO: 148025 - DNA, 152 bp, Glycine max
atatacatctcaacttatcacttgtatgtttaataaaataagatgaatcaagggaaataaataaaaggaaaataagacttcatttccttgcgttaaaatctaatggaagtataaagaatgaaatagctaccgtgatttttttttctttacaa

SEQ ID NO: 148026 - DNA, 428 bp, Glycine max
  unsure (1)..(428): unsure at all n locations
gaggaagcaaccctgctcgcctgggcgagctgagctcgcctgggcgagctgggcggcaaccacctcccctattttgctataaataggggaggaaatgaagaaggaaggggtccggcccctttggcacttctctctctttcgaatttgcttggaaaaattgtttccgtgaagaaaatctaagccgaggcgcttccgaaacgtttccgtaacgttttgcgtgaggaatctagcagaggtttcaaccgttcttcgacgatcttcattcgataagcatcgatcttcgaccttctgcgggtaagtaccgccaaccaagctgttcaatgagagttatggacctcgttggcttcacattcgcactcgtgctatattctcctatagcgctgacactagaacangaagctgatttgttgtagcaagtaaataagact

SEQ ID NO: 148027 - DNA, 354 bp, Glycine max
gtatcaaagaataaatatacatctcaacttttcacttgaatgtttaataaaataagatgaaacaagggaaataaagaataggaaaataagactttatttccttgcgttaaaatctaatggaagtataaagaatgaaatagtagcagtgatttttttttttttacaaattagctttctctgaatgttttccacaaatttttggagaataaaaagtaggaggtcagacccacattaattttacctccacttcccactcttcatttcctcctccatatctagacaataaaccatgacaatcttgtcaattttaattttccaaattagtcatcaaaataaagggttaagctggaaaga

SEQ ID NO: 148028 - DNA, 238 bp, Glycine max
  unsure (1)..(238): unsure at all n locations
aacattcttttcagctaangattatatacttatgttcttttcaaatgcanaatcactagatggatgaacatgatgacattgacatcttggcttctagcacaacaggagaaatgttaacgcttttctccgtagggcatanaaatcaatctattgcatgggatcacttttgataaatgccataccccaatcctttatcccaagctaaatgtcgacattgtggtgctntgatcaaatatag

SEQ ID NO: 148029 - DNA, 308 bp, Glycine max
tgtatgacaccttgtatgcaaagtcactgttaatcctcttttttatcaaagaaatctgtatcgatggatcttctctgatcatgcctgagaataacataacaaaatttaaatgacaattaacaaaaaattaacataatatgaacataaaatacgtacctactacacaagtggcgattaaatcataatcaagtatctcgtgatcttgtgtgatggtcatattcaaacatgtgtgtggttcaccccattgagtgactttgcacgtatctgcttttttagataaaattgccctcatatataaagggcatgga

SEQ ID NO: 148030 - DNA, 210 bp, Glycine max
  unsure (1)..(210): unsure at all n locations
tcatatctcccanaaccccatacncacgannattaagagagaaagaagtccacccagacctggattntcgaagtcccactcgtagccacgcacttcacgaccccgaanatgccctcctttcgcgatttggagcagaaatgagcaccaaaggttggagctnntgtcgggtttcaatggagaatggaggagaaggaaaaagcaacgtgagga

SEQ ID NO: 148031 - DNA, 499 bp, Glycine max
  unsure (1)..(499): unsure at all n locations
aggcctcgatttnaattaagcatcnatgtactgacactatgaatacacaagcccgcgaatggagaattgcactaagcaagtactacgcatagcttttttctctaacgtgtaggacgccacagcgaagacgttgttgaaggggctactaaacgagcgagaacggagaagtgcgctattccatcactactcatagttccagacgcaaaggtcgaggacatcattagtgaaaacgcaactgttggtgctgcgcaccaagcggacatggctaactgctatatacataaaatagtcatcacttcacattctgcggtggtagacgccatgcccatctacacctttggatgggctactaagaataggtggatgaacaatggacagagtacttacggtcattcgacgattagccggtgtgtgtagggagtaaaccccttattgggcactgatgtgagaatttacaatggtctaagcatctctgtacgttcggattttgggtgcgacg

SEQ ID NO: 148032 - DNA, 220 bp, Glycine max
  unsure (1)..(220): unsure at all n locations
gagtttcgaaacaagagtataaagtgtgcagagtcaaatctggtatttggcttggatgannatgggctagaatatatctaanatcagatacggnnggtggactgcatctggngtcggaatgagggananaaatatgcctaactcaactnntaaaaanaatcaactaaggctaccggagtactatacgaactntggtcatatgctntgatgatgagagatc

SEQ ID NO: 148033 - DNA, 455 bp, Glycine max
  unsure (1)..(455): unsure at all n locations
tcaagcttgacaagcccaaatgtattgggttggttcaattagacctagccttatcaaatcttgtcattcttgtttagttgcttgtaaatctgaaggtgacattccaggatgcgttgcctttgttgggctgatatcttcatttaatcaaaatgacagatcaacaaagtattctttatttttgcataaaggatatagatgtttgaaatcttcatgaccatctgcacataaagaagaaatttcttgtttaaattctccaacttctggtgggacttttgctaaagaaaaaaagcctaatcatttcttaaaaaggcttgaaatttcttttaaatttgatccctgtagaatgtaattgaagtttactggcagtagtatagacatccattcctatgaggagatctctgtcgggcagtttacttccaatgaccttggtccanatgatacaatcagggaaaaac

SEQ ID NO: 148034 - DNA, 209 bp, Glycine max
  unsure (1)..(209): unsure at all n locations
attattcagatgctttatgaatgacaatcaaaggtgacttggaaacaagaaattaaagagacttttcatttgccaaacagntntatcctctcaaaaagaataagaagtnttctgaactgaaatggtntatcctctcanaaagattctttggtcaaccacttgcatattcaataanggaatttgattgatcttcattgtacaatctatct

SEQ ID NO: 148035 - DNA, 253 bp, Glycine max
  unsure (1)..(253): unsure at all n locations
gtatgaaagaataaatatacatctcaactnttcactggtatgttatatataataagatgagacacgggaaataaagaaaaggaatataagactctatttccttgcgttaaaatctaatggaagtataaagaatgaaatagtagcagtgatcttctttttttacaaattaccttctctgaatgttttcaccactntttggagaataaaaagtagaagtcagaccacattaatttacctcacctcccactcttca

SEQ ID NO: 148036 - DNA, 194 bp, Glycine max
actactcataattaatgctactagaagaggatgactgataactattattactataatatccaacaagctactcaccatttaggaagttgatctgtattacctgaacaatggcaactatgacaatgatatgttatgttcaaacattataccttgagttaggctatgctgtagaaatgagactaattaatgtcatt

SEQ ID NO: 148037 - DNA, 229 bp, Glycine max
  unsure (1)..(229): unsure at all n locations
cttgtccgcgaaatcactgnaaanatgttttaaggtccaattgtttcaacttttctcaccaagtagggatggatcattttaagatccaacgccttatatgaccaccttccaagttaaagagagtcacttgattcaccctttttgaaagaactacgtatgtctgatatcatcttcgatggaaggtgcgtcagagcattagccccgattttgttgacctcggtcataacca

SEQ ID NO: 148038 - DNA, 366 bp, Glycine max
  unsure (1)..(366): unsure at all n locations
accatggtaatcagaatagaaagtctacttcttatgtaagagttgcagagattcctttctcacttctcacttattacagctagaacctatgtctagctgatggttctatcggctgtgatgcaaagattcactatcaccctgtatctaatataaaagtggacagattcagaattgttactttagaccacgtaaagaataatatgcatatttgacaatatagaccaagagaaactcagatagcacaatccagtggtagagaagcaacacttaatttagtgttcannagtcgtatatagacatgagaatagataccttgccanaattatccataagacatttatttccattccctaccagtgtattcat

SEQ ID NO: 148039 - DNA, 414 bp, Glycine max
  unsure (1)..(414): unsure at all n locations
acactatanacaactccagctagagatgaggaagtgttgaaaggtgaaacttcctgcttttattgttgaccacagagtggttactggagatatgtcgtgggggtcaggagaccttgaggacgtaatgtggggtgctattgcccaaaaccaagcttgaccattccctacccaacccgggcatataccgtcagtgagaacctgtgatgtacctaaacaggcgagctcctgtcaatcaattgataaaacgaacaaagaccacaaagcaaggaggctcgtggcggctggccagctgtgaagctggattgatatgtgagatatggtctctggtaatcgattaccaagggtgtgtaatcgattacaatgcttataaatgaatacaggaggcttagatggtctcttgtaatcgattaccac

SEQ ID NO: 148040 - DNA, 276 bp, Glycine max
  unsure (1)..(276): unsure at all n locations
atgccctctctctcttctcntttctctctctcttctggctctcctatattcgnttatagntctaggctcttcttagacactnntttcattntgcaattccactnttagtaataaaaattcgctcttcaatctataatttcgttctctattgattaatgcaaggctaagtctccagcgtctgtttctcttgaggatcaagcacagttctctctgaggtcttattattactgggtaaattctgntcagtttttctcttcactacatactctgaatttg

SEQ ID NO: 148041 - DNA, 460 bp, Glycine max
  unsure (1)..(460): unsure at all n locations
taaccgagactcgcgctcctggttaaggcgccagtagtttccttttatcagtttctgggccacccccctgatattggaggagggccaactgtgcgagcacaaccagagagggaggctatcacacagctactatgcatactgnggcaagatttcacccgtgccgctgcaaagagacgagtgcggatcatgcgcaccaacatgaccactcttacatagatatagatgacattgctacttagcaacattctgcccagcgaccgcaatgccgatctccccctgtggaagtatcagttggtctgtgtcgttccgacataggtaagtatgcatatggttcaattgatttctgatgccatctattattagcagggatcacacccacaaagacactccagtggacctgaagaagtccaacagggccctggggtttcagctctgttacgggactctgtcggcctacagg

SEQ ID NO: 148042 - DNA, 234 bp, Glycine max
  unsure (1)..(234): unsure at all n locations
caataatcaataatctatctttcaatcttctctcaacatcattcaatatctntcaactctttctacacnaatttctgattcatttctcttcatctttctaaaagtttttgttcaacactctctcttatgagaaaagttctttgttcanaaacttgtgttattcatccttttcattctcttctccctttgccaaaagaatgaagggactaaccgcctgaattctttgtgtctctc

SEQ ID NO: 148043 - DNA, 458 bp, Glycine max
  unsure (1)..(458): unsure at all n locations
ntacaagataaagaaagaaccaattatcattgtatgtgtcgagaatcaggaatttaatgtacaacgatgtgatatctaatttagaggaacctgaatatcctctaactatgtgtaatcaatactacctgtctatataaacaatcatctgttgtgtactctgatacacagtatacacacaaatatccctccatatttttctcttattttacagtatgcttcctgctatacagaacttttacctaagttttgttaccaaaaccctatgatctagtatttgtttctatactataagcctaaatttcctaaatccaaataactcatttcattagtgccacttgcaatcacaattttgagttctctctagccctgagagactcaagtagaaatagcagttagtcttttgaaaatttcatataactaccatcattatcttattagtagtatcaagaacaatgatt

SEQ ID NO: 148044 - DNA, 499 bp, Glycine max
  unsure (1)..(499): unsure at all n locations
atgacccttagancttcagaacnctctagagtccacctgangtatgcgagcttcagacagttagcaatcctgtggtgcattgttttatctgaactaccattatcaagtaatattggaaccaccatgccattaattgtaccactaaacttcatagttcctaggccagaggaacctttaagggcattataagatagatgatggtctaaattcatatgtgccatggcttcctcaataatagaaggtggctctggttgcacttcagcattttcatcctcatccattgcaatagtaggcattgccgattatgacacctatgataagaagtgaacttctcatgacatgtataacatagccctttctcccttcgaatctgcatttcagctggtgacattcttctaacatttcctgggatcggaaaacaggagtttgatctaactcagtctaggcacctgagtccacattcccttgaatggatatgctaagagagagacttgtgact

SEQ ID NO: 148045 - DNA, 416 bp, Glycine max
  unsure (1)..(416): unsure at all n locations
gtccgccgaaatcactgagaaaatggtttaaggtccaaattctctaacttttctcaccaagtaaaaatggatcattttaagatccaacgccttaaatgaccaccttccaagtaaaaaagaatcacttgattcgcccttnttgaaagtactacgtaggtctgatttcctcttcgatggaaggtacgtaagagcaagagccccgcttttgttgacctcaaaaataaaaaagaagtaaaagtttagatatataatttcacacaattcctatctaaggttgttgtcctttgggacaaacgtgagaggtgctaatacctgcctcaaacgtaaatacaacttccgaatctggaatattcttcatgaccgggttcctatggattttctaacgatttcctttcaataaacgttggtggcgactc

SEQ ID NO: 148046 - DNA, 299 bp, Glycine max
  unsure (1)..(299): unsure at all n locations
tgtcgctagagctgacccatcaactgtcctatctctntcagactggcgactcttangctcttgatcttgacttgatagaacctctntntaagtgaagggtgcctgactcgatcccatgtttactaaagtggaataaaaaccagtgcgaatcaagactgtgacatctatcacaggtgaaatggatgaatgcataaagaaatgcatatggcacagatgccatttacggatacganagcccgagagaatatctatttcttanatacaacattcnggcagcatagtgcccgatgcatgcattt

SEQ ID NO: 148047 - DNA, 318 bp, Glycine max
  unsure (1)..(318): unsure at all n locations
cacccgacgaagagactgacaaaaacttattctcttctttttggacaaagtattgcaagctgggggcaagttaattttcttaccatcaaaccttggatgcaactgtgaacgtatgcccatattagctaaatgttgacgggtattcaagccatccttcgtctctgcctgaatgttaaggagcagtccaatcacactggcacaaacattnttcttcacatgcataacatcaatacaatgtctaacgtcaggatcagaccagttcggaaaacaaagaatatagacctcttctttcatatgcaactcttacttttatacttc

SEQ ID NO: 148048 - DNA, 429 bp, Glycine max
  unsure (1)..(429): unsure at all n locations
attattatctgaactaccattatcaagtaatatttgaaccaccatgccattaattgtaccactaaacttcatagttcctaggccagaggaacctttaagggcattataagatagatgatggtctaaattcaaatttcccatggcttcctcaattctagaaggtggttctggttgcacttcagcattttcatcctcatccattgcaatagtaggtattgccgattaggacacctatgagaagaagtgaacttctcatcacatgtataacatagccctttctcccttcgaatctgcatttcagctggtgacattcttctaacatttcctggttntggaaaattgganngtgtaattcatttggggcttggaagtaacggcggcatgcttgttgacttttcttactgacactaccgctgacttctacttcct

SEQ ID NO: 148049 - DNA, 433 bp, Glycine max
  unsure (1)..(433): unsure at all n locations
atgactattgaataatctattcatgtttcctttgatgaatctaatgctatttctccaagaaaggatattttagatgatgttgcagaatctttagaacaaatgcatattcatggacaagattctaaagggaaagggaaaggaagcaatgaagatcctccagaagaagccaaatcaaatgatgaaggtggcatccatggagttcactgactatgctcttatttggtgggactaacaacaagaagatttggagaacctttggtgaatacttaggaggacatgaaaagattaatgagaagaagatttgttccttctcattataataaagaccttcataacaagcttcataggctcatacaaggaanaaaaagtgtagatggatattataaagagatggagaattccttgagtagagccagtcttaatgaagatcaat

SEQ ID NO: 148050 - DNA, 240 bp, Glycine max
  unsure (1)..(240): unsure at all n locations
acactcgnngatatgnggactntctctattcaactntnntgttcgtcctatcagtagaattcgtttgtagttccgtacacaattntctttgcttcttcagtttacagtgagttagatatgttctaattattaatttcttttctttttttttcgaatattccatntaccataaatagttgcagaagcttctgtcacacctataaaaacactntatatttgacttgacgaatntatatgtat

SEQ ID NO: 148051 - DNA, 495 bp, Glycine max
  unsure (1)..(495): unsure at all n locations
cgcacaatgatgcatcgatagactcactcgtanaacgcgaagcttgccctatctacctctggctatgtaagggcccaaagggagagctatttctggagtctacgtgaggaaccttcacgtgagatgagactgacctgactcatgctggtctttgtcgacactgtaccgaatgactgacactacctaatccttctaagttcacatcgtggtcgcaagtgtgaaccttgcgcataaagaccataggtcccacgatgtgcactcaggcttccgcctgcccagatgtgaggaccagtccaatcacactggcacaaacaattttctccacatgcataacaataatacaatgtctaacgttaggatcagaccagtacggaagatcaaagaaaatagacctcttctttcatatgcgaatcttacttttatccttcgttaggtcctccaaaatatgattaagtgttaacccgctcatatcctgttcctatcaatgaatcggcg

SEQ ID NO: 148052 - DNA, 437 bp, Glycine max
  unsure (1)..(437): unsure at all n locations
gtgtcccccatcgaaatganaaacctttattcaaacctttcanagntagtgagaaggctaaacgaaaaatagggaacttagaaaagctaaatccttaactgaaggcgtaggtgacaatcatagtgaattactaaacaagaatggtagtttacttaaggtcattccagatacctcccaagcctcggaaaatacttctaanatggtaacaagaagtaccttcaaatttaataatggtattaatgaagatagtgaccaaactcagatacacacttggataggacactatcagaaagatataatccaataattcaaaactgaaacacctcaaatatatatcacgtcactgccctgcctctatagagaagaggaaacatttaaagttagtgaatacattacgatgacataatgacaacgagatacatatgatacctcacata

SEQ ID NO: 148053 - DNA, 464 bp, Glycine max
tctacttatgtggcagggcgggcttccttcaccttcttgcctctattctaactttgaccattgttcttccttcccgcgatgcttcttttcatgtccgcctgagtgggcttatagcctaaaccatacttcccacgatgaccttgggtatttatcaggctagttatgccgccgatgacttttgctaaacccatcccgggttcataaccgttccccaacataactcgggccatcatgaccgctacatcggacagacaaggctgcccaaagagggagtccacggaggaaatgctgaccacctcaaaagactggaaagcagtttctaacgattcttctgcggcttgcacataaggcatggaggatgggcagcttaccaagatatcattctcgcctgacacgatgaccaagtgcccctctactacgaattacagctttttggtggagtgtagaacgcacaactcccactg

SEQ ID NO: 148054 - DNA, 505 bp, Glycine max
  unsure (1)..(505): unsure at all n locations
ntgaccctgaaccctggatctctaagtcactctgaagatgcacgcntangaganaccataaaaactaaggtagtttctaaactaaaatcaattgaggaagcttcgccaagtatccccattgaaaaacctttattcaaacctttcaaagttagtgagaaggctaaacgaataattagggaacttagaaaaactaaatccttaattgaaggcgtaggtgataaccatagtgaattacttaacaagattggtagtttacttaaagtcattccagatactccccaagccttggaaaatacttgcaaaatggtaacaagaagtacctacaaattaattaatgttataattgaagatagtgaccaaagctcagataacacaactgagataggatcagtgtcagaaatgaatataaattcaattaattccgagcactgggaaacaccctccaaattatattatcaacgtccaactggccctgaccttctattataagaaagaggagaaaacg

SEQ ID NO: 148055 - DNA, 461 bp, Glycine max
  unsure (1)..(461): unsure at all n locations
tgtggttnttagcgatactcaccaaaattgtgtaacacaagcntacatcaagtttatcatgtcctagaagatccagttgaacaacatcaaacacaaaatgttgagcaactttttgaacaacatcaaacacaagatgttgaacaacctgttgaacaacaaccaaaaggtgtggatgtaacattgagaagatcaactagaataaagaaacctgtaattcctagtgattatcatgtgtattcacaagagtctcaatatgactttggagttgaaaatgatcctgagtcatttttgcaagcaattaacagttgtgattctaagctatggtatgatgctatgaaagatgaattggaatctatggtaaataataaagtatgggatcttgtagagtttcctaatgggataaagcctattggatgtaaatgggttttcanaaccaagaaggattcattaggtaacattga

SEQ ID NO: 148056 - DNA, 424 bp, Glycine max
  unsure (1)..(424): unsure at all n locations
tgctgactcgagagacaaggacaacccactctaaagcatttacgccatcagactcactgcttgaggggttgtacatcatccagaaagcgaatcccaataataccgactcaagagacaaggacaactcatgcttaagcatttatgccattacgcttaatgcttgaggggttatacaccgtacaagatgaatattctattaataatgactcaggagacgaggaagactcacccttaagcattttaggcacaaggataaatgcttgaagagttgtacaccgctcgagatgagtattctggagatattgcctctagtgaggagatgacttatccctanacatttatgcgacaaggctgaatgcttgaggngttatacgccatttatgatgaatatcccananataccgacctaagcaaaagagacacg

SEQ ID NO: 148057 - DNA, 624 bp, Glycine max
  unsure (1)..(624): unsure at all n locations
cccttcaactgcgtctcaccgcganncccncacatattcacatccgcgtaatgantgtatacgtgtcaatgntgttactanntcaaatnnnnanncnnnaagggcgtatgcnnttttgatgccnttcgatgaaacncacgcgacacnanannaaantcaagcttacgctgccaaatttacaatagacctcctcaacctctgttgctttaatcaatcctacagcagaacaatgagtgagcttctccagcaacagatacaaccctggatggaggaatcaccctaatatcacatggaccagccctcagcaacaacaacagcagcctgctcctgccttcagaaatgttgctggcccaagtagaccatacattcctgcaccaatccaacaactgctacaaccccagagacagacatcaagttgaggctccctccacagcgcttccatggaagaacttgagaggcaaatgactatgcaaaacatgcagttgcaacgagagaccaaaggcttcattcacagcttgactaatcagatgggacaattagctacgcaatggaatcaacatagtcccgaactctgaaggctactttctaagctgtccaaatccagaatgaaatgcatatattgag

SEQ ID NO: 148058 - DNA, 511 bp, Glycine max
  unsure (1)..(511): unsure at all n locations
ntgaccctgaaaccctcgnagcacctgagataccctacagacgatgcgagngatgcaagcttccncaacatccaagtaactctacattctaacaacacaaaccatcacagccaagaatacagggcaaaggcagataactctgcccaaaacaccaaccaaaatcacagcttttctcacttaaagaccccagtaacaattccttcgttccaattcgttaaccgttggatcgactccaaaagattactggaagtctctagtacataagcctacattatgaccgttgggatctactagcaaacatccagaactcattctgaactactctgtccacagccaattacacacaagcattgttctgcacttgtgcaaaattctgctgcacaatttcacagcataaatctgcacaaagtgcagatttcgaataccacacttcctctcatccaatcttgcccaaatcaaatactacaagtcccnatcatgtatcaatcatgtctaaaccagagccaagctg

SEQ ID NO: 148059 - DNA, 289 bp, Glycine max
  unsure (1)..(289): unsure at all n locations
ttcaactccatagcgctttatagaagtntgtagatgctcaattatgttcgttttgaaaataaaaggccatattggattggagatcctatttggaacgagctgttatcacatcagaatgcacctgtgtatcgttccaagtatgtataggcaaaacaaaaattaggcatctaataagggtgggcgtatgcatacaagtggttctattagctagcaggaccatgacattcgcttggtatgtacattgaaattataatacatatttctttgcacctggataaattaccactta

SEQ ID NO: 148060 - DNA, 455 bp, Glycine max
  unsure (1)..(455): unsure at all n locations
ctgcttacaaactcttcaatcccctcaacntaagactctttcttttctcggntntaccactataacatctatcatacatccaatgatgatttcaaaattagaaaccttgatgtttagtcatgcatactcttagagtgatctccattatatattggtagcaagaattattatcatactttatgtgaaaacaatggcatacatataatgtttgactttctaaactcaccaagtatggaatataaataacataaccacaatcaaatatatatatatacttaacacatttagtataacaaatttcaaacacgtacaataaaagacctcaactaacctaaacaatagaacctaagtgtgagtaataaagcaatcactcaagacagactaactatgaacctgataataaaagagaaagaaaaaagttaaaaatcattatctaaatattttaacactttata

SEQ ID NO: 148061 - DNA, 257 bp, Glycine max
  unsure (1)..(257): unsure at all n locations
actattccaatacgctnggagcagcttaatagatctcaagctgtgcaaatattcagagctaatagattgagctgagtctaaataatgaaggaacagttattcaagttagcttcattatcctccgggattcggaaggacacattttgcattcgatataatgattcacatcgtgatgtagtcttgaattatcgtacatctatattacgccggttctctatttttgtacatgaatatagacagcaacatgcaatgaacag

SEQ ID NO: 148062 - DNA, 441 bp, Glycine max
actcagctaaccatgatggaaagtactgaccaaatagaatctttttatctttaggattagaacatatgatcaagccagcattaatgtttgggacgtgtatggtgatcaagaatcatttcatctcttaattcaatcatcttacaatatgatttatcaacaattaacaactatgataaaaactaagaccatttcaatataattaaacgtaaaatacttaattattcacagtaataattaagaataaaacttaatagattgatttatttattactccatccttgactttctttctagagaatagtagcttttatgtatctgtcattacaaagttcagaagatcatattaagtatgtttgatatcacatatacccttagatatttctctatctataatcaaatcttacatgtaaatgatgtaattaccatggagtggagagagag

SEQ ID NO: 148063 - DNA, 488 bp, Glycine max
  unsure (1)..(488): unsure at all n locations
acccattgaatcttgagaccatcgtananccagagatcctctagagacgacgtcgacgcatgcaagcttgggctgggcctacctccatccctagagtgagccgtatgaggcggaagctccacgtacggttntgaagccgagcctttctagcaatggngcctagggaccgatatgatgattggtttaggtagggcggccggcctactacgggcacctgtagggattagtgcttgagaccgcgatccacaaaagcatgggactcaccctttacttgagaatgaagaggggaatgacacgacgtttcaagagctatgcgaggggtgaaccaaactgcagagggatcttcctgaccaggcgtgatagagatgccctttattacccaactcatattatcattcaatcctgctttgtgccactcagtcttggcgggatccccctcctttctcttttctctcaaccggcgtccctttcctccacaaacgtgctcc

SEQ ID NO: 148064 - DNA, 431 bp, Glycine max
ggttgtttcacctatggagattctaaattaagggggtggttcatttgtaattcagaatattagatgtaagtttggtagttagtttagttagttgagtgtgataaggcagtgattgaagctgaacttgagctgtataaatagcctctatgtaattcaattcatctcattgtagtatatgctatttcctggatttctctctttctccccaacaattcctaatcatgacattccaaataaattggtcacttgatgtgatcctgactaggagcggatcgcttgatacaagctatggagttctggatgacgccacttccagtgaatgaagataagtcatgatagacgccacaaggattaccttgataagtctgataatcggttcaacaaggaacccagagagaaactctcacagaattttatcaaatgacaaaagt

SEQ ID NO: 148065 - DNA, 180 bp, Glycine max
  unsure (1)..(180): unsure at all n locations
tgcatctttcttcaactcctgaagccctatcatagcagactcaagaacatnctgcattccanagatcactttcattngaatgcactatgtattggtagtcttcccatccaggaatggtagatgcgttgaaggtccgttcccattcatctctgaaacactgaagcttcagggatcccacac

SEQ ID NO: 148066 - DNA, 513 bp, Glycine max
agacagtattttatgatgcttcgttgataccctgcattacggacactatgaatactaagctaatataagctttatatagaaagatacaatcaatcgatttttatatttttataagcgtagatattaaagttcattatgtactttagtgattctgatcaatcactgtaaaaacttaaaaagtattgttaagtttattacacaattttaaataagaaatgtattatgatatacatattttcacatatatatatatatattaaatatgtatataaatatctgttactataactttgtataaataaaataataatataacacaccagagatataataatataaaaagtttttttagtaacaacataaaaagttataagtaattaaattaacatccgcacatgacatggattattacactagccaattatatatatatatatatatatatatatatatatatacatatatatacatgtatatatatatatatatgccggtgttgtgatctatctagtg

SEQ ID NO: 148067 - DNA, 510 bp, Glycine max
  unsure (1)..(510): unsure at all n locations
ggtgcccttaggcttgagacccctgtagancccgtgatactttgcagacgacgcccangcatgcaagctatgatgatatggtcttcaccttcgaaatgatcaaagtgggtctgagaagaggcaaatctgatcatcttgctttgatacatgcgaacaaacaaagttggggcaaatacagagggtgatgatgaatgagaaccccgagctgtgactgacattcctatacagccgagtttcccaccaacccaacgatgtcattactcagtcgatagccaaccttctccttacccaccgcccagttatccacagaggccatccctataatatccacagagtttgtcgttcgcactctcaatgacgaccatcatctttagcacanacctagagcaccaaccaagatatgaatttagcagcgagaaagcctgtagaattaatcccattccagtgtcctatgctgacttgctcccatatctaattgataactcaatggtagccataaccccaaccacg

SEQ ID NO: 148068 - DNA, 193 bp, Glycine max
tcgtatacaaggctcatcttgagggagaatctacttctttcatgtctgatttcctagtggatggcgtctactctcacctctcatctttggcatgcgctgcatctacatgatggaaaatcaccagtgacggacctcattgcagttcaaagatccagcctccataaaagccccactagcaggcttgcatcattaa

SEQ ID NO: 148069 - DNA, 180 bp, Glycine max
  unsure (1)..(180): unsure at all n locations
catgcaagcttagcatacaccagcatcaaggaattagggtggntgatggaacctctccaaatgcaagctttccgcaagacttacggaaagatcttagagctgcccttatcagaggtatccatagaagccaatgtcttattcagcctatactgcaacctgcttttgagatgctcccctatc

SEQ ID NO: 148070 - DNA, 418 bp, Glycine max
  unsure (1)..(418): unsure at all n locations
ctagctaatataagctttctatagaaagatactttctatcgatttctatattagcataagcgtagatattaaagctcattatgtactttagtgattttgatcaatcactgtaaaaacttaaaaagtattgttaagtttattacacaattctaaataataaatgtattataatatacatattttcacatatatatatatatattaaatatttatataaatacttgttactataattttgtataaataagataataatataacacaccagagatataataatataaaaagtttttttagtaacaacatataaagttataattanttaaattaacatccgtacatgacatgggatattacactagccaattctatatatatatatatatatatctatatgtatatatatatctatattgat

SEQ ID NO: 148071 - DNA, 425 bp, Glycine max
  unsure (1)..(425): unsure at all n locations
acatttgcttgttgctcgtgtgctgagtgtgtgatgagatcgtgtagaggggtttgatggaacttatatttatattagttgagtgtggctgctagtccttgtttgtaggggatattgtagtctttgcagttaattctcggcttgtagatattaatcaatagcttacatataatgttagagataaacatttgcttatagataaaaaggtagaagataatcaaaccttgtagataatgtgtgggcttataaataattattttaactgccaatagataagatattcaaatacatttgaatattagtaggttagagataacctgtttgttggggagtccggctggtnacgttcatccctcctctcttttggcctgccttcattgtngttgcctcctcctcatgattcctttcttctacccctccttccg

SEQ ID NO: 148072 - DNA, 190 bp, Glycine max
  unsure (1)..(190): unsure at all n locations
tgaagacccgcacanacattngaaagaatntcacattgtctgctccaccatganacccccagatgtccaagaggatcacatatttctgaaggcttttcctcattcattagagggagtggcaaaggactggatgtattaccttgctccaaggtccatcacgagctgngatgaccttaagagagtattctta

SEQ ID NO: 148073 - DNA, 457 bp, Glycine max
  unsure (1)..(457): unsure at all n locations
tgaagaaatngctaaggaaaatgtgaaattatgaagtgatcttttcttttatattatgagtatgnggctttaagcaatgaagagtcatcctcaaatgaaaggaatgttggtggcataaactctgtaactgtccatgtgcctaatacatctgctatgactaggtttgatcaattaatgagccttatgcatgacaaggaaataattccaccaatgaaatcagaactagatgcttatcttgagaagaaaaatacttatattcctaataatggaaactcctcttttattgccttggagtggtggaggaataacaacttcaaatataagattttatcaaagatggcaagagatacactagttgttccagtatcaatcgttgcatcacaatctacatttagggctggaggtagagtaattgatgagtatcgttctagattgaatgaagaatctattgaagctc

SEQ ID NO: 148074 - DNA, 224 bp, Glycine max
  unsure (1)..(224): unsure at all n locations
atatannttttttagtattatatagaattgaatgttngaatttaattgatcctgaggctntggaatgtgattagcaatctaatgcataanagtattntatttaggcggtgggtgatcaagtcaatctctgcaaactgttcanatttcaatgagattntgggaaaagaatctgagctggtggaatanatagctgaggtctaatttcaatacaggaacattatact

SEQ ID NO: 148075 - DNA, 461 bp, Glycine max
  unsure (1)..(461): unsure at all n locations
gggagaaccaagatgcactggcccagatgtcaaggagttcattatttttgtgaattgagaaacgatctttgattgtaatagaattcaaggccctgtaatccacacacatgcgtcaagttccatccttctttttcacgagtaacactggagaggagaatgggcttcgactgtgttgcattaaactggaattgagtaattccataactgtcgttcaatttccgacttctggaagtatggatatttgtagggtctaacatatgttttgccttcaaaaaaaattatttgctgattaacagaaaatgagaaacgagcaactcattatataaagggaaataacgttttgaagatgatttaattatgaaaaaaggacaaattaaccggatatatttttacctctcttttcttctttgtggtttgaggatttttttggatggtggctnttgtcgccctcaccaacatta

SEQ ID NO: 148076 - DNA, 156 bp, Glycine max
  unsure (1)..(156): unsure at all n locations
tcttggatggctactcggngtataattagatagcagtagatcctaaagaccaagaaaaaaatggctttacatgccctttcggtgtctttacttacagaagggatgccattgngttatgtaatggccttgccaccttccaaagatgtatgctagcta

SEQ ID NO: 148077 - DNA, 467 bp, Glycine max
  unsure (1)..(467): unsure at all n locations
tgtagacaacactgcggctgcagtattcaatgctggccttttcttctctccgtcacccttgttgcccaaattcctttgatctctaagtacaccagccaatacacgttccatttccaaattccatgtaaaataaattcttgtttcctcattattttttcctaaaacttttcttttgtccgtcattttttcattagatgactccattgaagttaatgtcacttattcaacctgcacataacaaacattagatataacctactttattcatttgactagtccattgcacaatcatagaaaatatttcaagcaaagtttttatgcaatagcaaagtacataaaagtctatcttcaatagaaaaatacaatagtaacaaagcactcanagtttgtctgcaatagcaaattacatttaanaaagaactatccctaagcagagtttcttctaacatgatagttagcacacatat

SEQ ID NO: 148078 - DNA, 195 bp, Glycine max
  unsure (1)..(195): unsure at all n locations
aataccagaagaatccaggttctgaattccatatcttgattagaaggaaaggtagcataatcaagtaaagcaaaaagggattgaatttgactattttctttattgctcnnnnnnctngtattgtttgattgtcttaaactaattctcttgtttcaagcatggcaattacattcacaacttactcataatttatat

SEQ ID NO: 148079 - DNA, 581 bp, Glycine max
  unsure (1)..(581): unsure at all n locations
tcctctctgtccgctagcacttctattttaatctttatatctatgtatatatattttacttcccncnnnnnnnnnaggggcgtgggtttgtgccttgtaacacngacgcacctanacaaacgccagctgacattganaagacactatgaattctctagagggagacttattgttcgtgagttcttggaacatgcacggcattcgatctaccgtttttcatactattatacaccactactaagtttaagtaactctcttggttcataacgcttgtgagtcgtgcttggagaatcgtttactcgagcatgatactgaattgaaattaatgaattcacgtgatgacatgtatgcaactttaagtttgagtcactcaacactttgaagtctatactaccaatttaatggatacattttcacganaaatgtgcacgcgtctctatatacgtattcactacgttgtgcaattactcttaggaaccgactattaatgggcataccttgcataacaacaaaatctcactttggcacatttcttttgcttggtcgcgaatacaggctttgatttgacacaccattcctcg

SEQ ID NO: 148080 - DNA, 181 bp, Glycine max
ttccaccatggagatgcagcggaagacaaaggagaagaggtaagaggcggcgccatccactagggaataagccttggaagaaggagcttcaccaccaagatgagccttggataagaagcttggagatgatgcttcaatggaggaaaagaaagagggagagaaagagagaggggggagcacg

SEQ ID NO: 148081 - DNA, 373 bp, Glycine max
  unsure (1)..(373): unsure at all n locations
tagatatccatgctcggagctattgctgcacatgtacccatacttgcacctgtatttnaaacaatagaatcttcacgacaaccctttgctctaacacctccacctacttaacctccaccaccaccgtcaactcaggactgaatatgatatccatcactatatctctcttaaaaccatcatttctctcatgacaaaaggggaagaagatggaatcttgattgtaaagagccattcaattatgaataaaagtggttttgcagaaaatctaagcgtcttctttatctattattccgctaccatatattttatattgtcacatggtttatgctatgttaaactcaaggtgagtttaaatgcattacattcattttac

SEQ ID NO: 148082 - DNA, 274 bp, Glycine max
  unsure (1)..(274): unsure at all n locations
gcagctgagcganggtccaatcattacccattatttaccttcntgncttacatttcttgcaccaacaacttcgtcactttcatanttggaaggggtgctacatggaagttgagggcaggagaggaanaaagatggatataattatgtagcgagtggactgaagggatnggtgtggattcttccatcgtggtcttcacatanttttggttttgcatacaatacattgttggattacgaacacctaaatcggacgaccttgntagctcttcacata

SEQ ID NO: 148083 - DNA, 431 bp, Glycine max
  unsure (1)..(431): unsure at all n locations
tggttgctcttgtgggtggaatgatattctgtgcatcttatatgccattntttggntaagtttttgtcttatttttattcatatatagtgctctggtacaagagattattgtggggtgttatcaaattgattggaagattgtcatggtaagttatgttgtgggctcttggaggaactatattggattataagaaattttaagaactaaaaacaagatttcaagagaataaaatatattttttcttacaaaaaatcagactttacttttaattggatcataaaatgcatataagaatttcactatctaatttcttgaactcgtgatttgtgtagataaatatgattttgctattgatcataattgagaagttaggcccccagttcggtgtagtttacacgttttagttttgaaatatttgaaaatcaaacct

SEQ ID NO: 148084 - DNA, 249 bp, Glycine max
  unsure (1)..(249): unsure at all n locations
accatcacgattatcgtcttccttgtcattattgggggtaccacctgagccgccagatccctacaccttttgagcgtgttctttgaaagatccgtcctcctttgtgcacatgctcatgaggtgcatcctatccgaaaccatatcaagattgtactgatactgactaacacaggcaaccattatgtccttgcaagaatggactcgtgaatgctccaagttagtgtaccangtaacagctacctcagtaag

SEQ ID NO: 148085 - DNA, 189 bp, Glycine max
ctcagcttctcaggaagctacctactctataaatagaagcatgtgtatttcttgaggtatctatgaagaatgagaggcttgtgagacacaactcacagttcaacttctctccgcttctcttccttcactttcgtgctaccaccctactctgtgtgtcgacatcgttcttttactgcattgcatcatact

SEQ ID NO: 148086 - DNA, 246 bp, Glycine max
  unsure (1)..(246): unsure at all n locations
gtatctngttntccatcgatgtgccatcattntcttctatgttctanaccctgtctcgcaccatttaattattgattggtcttaattgtcaattaattaggcagttctattatttgngcccattcagccaatgtgatgcttttaatctaatttcaggaattaatgaagaattgngcttgaatctagcattgngcttgaatctagaattgngctcggacttgaagagggcaaactatattattctat

SEQ ID NO: 148087 - DNA, 451 bp, Glycine max
  unsure (1)..(451): unsure at all n locations
gtatactagtgaatgctaactagaaaaatgattgaatactcatgtacatggaataaaaaaaaactagacaaagacggtgaatatgacactacttattttaccctacttttaccaacaaaattaagtataacctatagtattttactcctgaattaattaattaaaggaatgtctatagaagtttttattttcttttcaaaattaaacattcctcgcttagtcgcttcgcttccttcatagcctcccaatcatattaatagttattccaccccattcggtgctatacaacctgaaaagttctgaatatgcttgatacggaattagttaagtctaaaataaaaaaattcanaacaatttcgaacattagttaagtctaaaatactttaaataatattaatcggctgaatagttgagtgagatgcgaaattttgtccctaccatatgatggata

SEQ ID NO: 148088 - DNA, 510 bp, Glycine max
  unsure (1)..(510): unsure at all n locations
gtactgcgcctcgtacttcacancnctgtagtacccggcatccttagagtcgacctgcggcatgcaagcttgctctanatnttcattgatgtttgtatttatgggaggaggttatatgtccattttgctttaagagtagcgtcccactggtaaaattaactttccaaatgtttgccttcgcaggaatggccccgaggaagcttgcctcaaagaggtccaggaaggacaacggcggcgaaagaactatttccgctccggagtacgacagtcaccgctttaggagcgctgtacaccagcagcgcttcgaagccatcaagggatggtcgtttctccgggagcgacgcgtccagctcagggatgacgagtatactgattttcaggaggaaatagggcgtcggcgatgggcaccactggttacttctatggncaagtttgatccagaaatagttcctgagntttattccaatgcttggcaacagaggatggcgtgcgtgacatgagatcttggcg

SEQ ID NO: 148089 - DNA, 590 bp, Glycine max
  unsure (1)..(590): unsure at all n locations
cgcacacgcgcacncgtaantcctcctaatngnatctatatactcaacttaataatgtgatntgaatannnnnncnnccaagcnncnccgcgcncttgatgccccctttganngcgactggananacgngacacncnagcanactcaagcatacgtagtttccaaccatcaagatgaccttgtttgtatacctttattcttcatggaagaccggcgagtgcgccacaaatatgagaaaagatgtgcaacgcaagggaacctcattagcgagacaccgacataacttatctgtacacttggagagtcttcattaccacagaccgccaggctggaatacaaccgcagatagagagctatcgatggaaaggggactaaggcgtaaagaagaggacggacgaagaaaaaagcgggcgcaaatagtatccatcgaacgtagaaacggcaatcgagcctaacgatgcaaccattcataatgtcttcgaacacggacatgcagtgagtcatgtgagagactatacgtgatgaaataaagcacacatcttcatgaagtagaaagaaaaccattatagagatgcgactgagcgagcacc

SEQ ID NO: 148090 - DNA, 207 bp, Glycine max
  unsure (1)..(207): unsure at all n locations
tctcatgcacttagtgtccanataatatatctatagttagaaatttattatgttatggtaaaaataggtttgttcaatctctgtaaaccatanttgtcatgntctttcaattaactgaaataatgagtctgtgagacatgacttaagtttaattctcacagaatacactcttngaaaatgatgattagctntaagtgtgactaagtc

SEQ ID NO: 148091 - DNA, 170 bp, Glycine max
attctccctatcgtgcgtcggcgttcgactcactgggcgactcgttacaacgacgcgtctgggtcaaccctgatgtcacccaacttcactacgtgtgttcttaccacattcaaagatggcgtaatacctaggaggcctaaccctttcgatctttcctacgtccgcaaatt

SEQ ID NO: 148092 - DNA, 460 bp, Glycine max
acaaagaaatcctttttttccttgagcttctcggggtctccttctttttctctttatatgacttttccccccacttccatgtgttgtgttgtgtttgttttagtgtgtgtgtgtgtgtgagagagagagagagagagagagagtgagagagagagagagagagagagagcgagtgagtgagagagagagagagagagacaaagatatagtttctatgaaaagtgagtgaggtttggatggggttggccatgggtttatgtgagtagatggagggtgagttgtcaagttgtagttttacatgcgctacgtgttgatttaatagcgattagaggtttacgtacacgatgtttagtttacactgtgtaattttacggtgtcattattgtatgatgaaattaaattttatcagacttgtatggtaaaatctatactttgtggggtattaatgttatacttgtct

SEQ ID NO: 148093 - DNA, 431 bp, Glycine max
tctggttgatgagttatcgacagcgatgactgcgaacagtcctgagaatgtgttcaggactgattacgtgagatgcaatctagaggattctgatctattagaagacttggttcatcattgcttgagactatgacctcgactatcctgagaacattctccgaagacttcggaagggatatattgaaatgaggtttcataactccttcatgccattgataaggatctcgacgagcttctttctctgtcttgtacgtcacgaaagatcctacgctctggcgatcgttcaccagaaacagggcatcggatcccactggcgatcattgctgtactattcattttcgtgcgctcaagacgcttgtttctgcattaccagaggtgttatcagaacgcgtcattcgcatatctctgccactgtcctcttggtagagaat

SEQ ID NO: 148094 - DNA, 354 bp, Glycine max
agatactcaagcttggctacagctgctcatcgagcaaagaagcttactccatttcttttgacctctggagggatcaatagagggccttagtgggcctgattgctgtcagcacacagaggtatactaaatgcaccctgttatatgaggtttgtaacacggtttacgtcacgtaactagactctacgaattacatgtcgagtctgagattccttgcgtatggctacgaactcttacagatcatgtgtttacaccttacaaggttccaaatacgttacgacacctgacggatctgcgaagagcacctatatgttatctaacgccacatgttctgcatgattctgatcgcgcaatcct

SEQ ID NO: 148095 - DNA, 481 bp, Glycine max
ttggcctggagctggtcttgagcaccccggctgcagcttgcccagcatctggatcacattttacgacgcaatttgttggtgccatttctcacgactaagttctctcctgctccttactcacaccacgaacaatatagtttagcgattacattgtaagagtattaggaacttgaaaactaagcacaggctacactttaactaatggccttgttgctctcgccattcttggaacctcagcctactaattgaaacgcttcgagcatgttgttattgactgcccatatgggggcgtttttcttataaaggaaaaaataattggttatataatccgggggctttgatattgacagactgctccacactaacttttggtttatttgaaccctcctttatagggctcaacacttgacacacgcccccaataaggccttgagaccaatatatgctttcctctatcctatggtgccttatctcctatacg

SEQ ID NO: 148096 - DNA, 277 bp, Glycine max
  unsure (1)..(277): unsure at all n locations
acctagactataaatagaagcatgtgtaagactaggtgtgactgtgatgaatgaaagtcttatgagatacacttcanagttgcacttctttgcctctgttattccttcaatttcgtgctccccccttctctctntcttttcctccattaaagcatcctcttcaagcttcttatccaaggcaattcttgggggtgaagctccttcttccttggcttattccctagtggatggtgcctcccctatcctcttctcctttgccttctatcgcaacctaccc

SEQ ID NO: 148097 - DNA, 360 bp, Glycine max
gggctcgaggtacttacccagtgaagatcgaagaacgatgatttacgtctataaacggctgacaccttcgcgaaattcttcacggaaaacgttacagaaacgtttcggaagcgcctcggcttagatcttcttcaccgaaacaagtgttcctagccaattcgaaagagagagaagtgcctaaggggctgaacccttttcttcttcacttccttccctatttatagcaaaatatgggaggtgagtgccgcccagctcgccaaggcgagctcagctcgcccaggcgagccaggttgcttcctccataagctacagccttctggcggaatattttggagggcccaagtgggcctgggtgctatt

SEQ ID NO: 148098 - DNA, 185 bp, Glycine max
ttaagagtcactatgactcgcacaataagattatagatggccgtattccatctgtgtgcccccataccaaaggattaatactgtggataaaaattcttacccaatttcacaccaatgagacgaatgattcattatataaatcaacatcatacattggatcccatataagtaagcaaataaatgcc

SEQ ID NO: 148099 - DNA, 283 bp, Glycine max
tgcttttgacagttggaatgataccgaagaggcgccgacctatctgccttctcactactgcgcagtctgaatggcgacggcgcctgatgcggcctttcttcttacacatctgagacgaatgcacaccggaatggcgcactctcagacgacatgatctgacgtctcatagttgacacatccatggcccgacacacccgtgacgaaatgctagtcccatatttgacaaatgctttacagctgtgagatacataaatggagtgcataccttaggttggcaccgatg

SEQ ID NO: 148100 - DNA, 279 bp, Glycine max
  unsure (1)..(279): unsure at all n locations
acatcccactgagatgcactatgtaagtacctttcanaaaacagacttgttgagaataagggagctagcatctntagtaagtgatccagntgattntcaagctcaccatgggaagttgctcagaattcttagagtagatgttgaggaaggatgcctagagaccctggttcagttctatgacccgctctaccattgcttcacatttcccgattaccagctngtcctcacactngaagagtactcctacctagttggcttacctgtgccagacaagatacc

SEQ ID NO: 148101 - DNA, 442 bp, Glycine max
  unsure (1)..(442): unsure at all n locations
taataaatctatatatggtttaaaacaagcctcctgtagtgtttccttaagtttcatgggataatttcttcatttgattttgatgaanaccccatggattaatgcatataccacaaggtaagtgggaagtaaaatatgtttcttgttttatatgttgatgatattttacttgacaccaatgatcgaggtttgctacatgaagtgaaacaatttcaatctaagaattttgacatgaaagatatggatgatgcatcttatgtcatcgacattaagattaatagagataaacctcgaggtattttgggtctatcacaggaaacctatattaacaaaactctagagagatttcggatganagattgttcacgaagggttgctcccattgtgaagggtgataggtttagtttgaaccagtgcccanagaatgactttgagagggaac

SEQ ID NO: 148102 - DNA, 220 bp, Glycine max
  unsure (1)..(220): unsure at all n locations
tcgtcttattcanaaccncaaccaattatganatccnctatctcccacttcacacctcggaacgcaccgttcttatagagagaggcgctntcacatcnttcttaggctgggagaggaaatgttcccatnttttatgatactccggngaacagatatccagtggagatgacggngtggngcctgtagctcagaggattagagcacgtggctacgaaccacg

SEQ ID NO: 148103 - DNA, 436 bp, Glycine max
  unsure (1)..(436): unsure at all n locations
ntggaatattattttcgggcgctcgagcgaaacccattcttactccaagcttttaataatatggccgggatctgtcattacgtgcgactatctccactatagaaagaaaaaagaaaagaacaagctaatccacaaatactaatataataaatactagaaataaaggctttctacatatacatatatcgtccaaaacaacgattnttatcagctgtagcaaagaatgaaacttcatagaagtcaaaatatgaagaaatcaatatgtctagatacccccttttctatggataaaagatctaattgataaaggaagcatcgtaaggatccattaacgcggttntgaaccgatacaataaaaactgcttacttatctcatgatagaaaagtcaggaatccacttatgtaatacagtagaatccccgatattntgagcagc

SEQ ID NO: 148104 - DNA, 379 bp, Glycine max
  unsure (1)..(379): unsure at all n locations
gcagcttagatgatagaggtggagactcaggtctttctcttgcttgacttctttataatgtggaggacttggcctgcgactcggctagatggggctatttgcgctacacgcctttctcgttacgccagctgttccgctaccgcatggtangccttcaatatttctagttgattcttttgacttaatcctttacgattgcaacaggaaggaaattttaattttacaatagcatgatactgtaatatttttagatatttatattttagataaatactatttagagtatacaccaagtgagtcacagtgtgaatgactgaatcagtgtacacgacaacagcaagtgaaatcggtgacaacagtctcacaaatatcggcacat

SEQ ID NO: 148105 - DNA, 443 bp, Glycine max
taggttatgattcagtgtatgatttccttgagcctcagtctatataacatgttaaggacagacatgaagaatgtcaacaatacattgaaacatgggtcaaggaatcacattgacaagtgtacttaagaccttacttgaatcactaaatgaaattcatgtcactattgtgaaaaaaagtctgcactataagtacctaattatagtttttcgacttcagggcacataggcaacttgttgttctgtgtccatggggcaatattgttggttggctatgttcttttcataagaagcctaatgttaacatcaaggttgcaattaacaagttattttttaaattataactaaattattgtataccaattgtattatatcaacatgataatgtttatcttatatacgttaacgttattttggaaactagagcaatgaagacattaaccact

SEQ ID NO: 148106 - DNA, 169 bp, Glycine max
atacctgtaatgctgcatagccacagaaaatctcttcttctgattaacaccaccttcgtgatcataagcttctggcattctatactggcagttcaggagaacatatgagccgttggaaagaaacatatagatttgtcaatttacttatatatgcccatatccctttgta

SEQ ID NO: 148107 - DNA, 405 bp, Glycine max
  unsure (1)..(405): unsure at all n locations
tatgctgcatacattgataatagacctcctcagctgcaaatcttatctcagtagaataattatgacctttcaagcaatagatactattctcctnggaggaataatacaaatgtgagatggacaagtaactccacaagaacaatagcctgttcttcatttttagaatgttgctggtccaagcaagccatatgttccttctccaatacagcagcagttacaataaagacaacaagcagtttcaacctttcttataagagttagtgagacaaatgaccttccagaatatgcgatttctagaagagacaagagccttcattcatagtctgacaaatcagatggcgcagatgggtactcatatgaaccaagcttagtcccaaaattttgacaaattgtttcacaagctgt

SEQ ID NO: 148108 - DNA, 497 bp, Glycine max
  unsure (1)..(497): unsure at all n locations
nttaacccgtgagctttgagacccttcgagnaccgtcatccttggagaagagtctaggcatgcgagcttgtgtaattagatacaaatgttaatgtttatttatataactgtgaaagcgcataagtgtggtgaaacaaaaacctgaagtaccatctcattagtcagagtatatacaagcatgtacgggtgatagaaaaaaaaaagatgttggaaggttggatgacttcttagtgcatagagtgttactcacggtgatgatttcttctcctgccaccaaatggcatatgtcggcgatggaatatatatgttagaagggagcctggcaatgatggcattatattattgctttcacatagatagatatgttttaataccttctgtcgacttccgtttatttatgaaatagtgggagggtgttatttcttgaatccttgattttttttaacgaccgaggtgacattctatttttgtctatagattataacactttatttaat

SEQ ID NO: 148109 - DNA, 501 bp, Glycine max
  unsure (1)..(501): unsure at all n locations
cggcaccccccccctgtaccccttgaacccctgctattacggacacttagaatactcagcttgtctcggacccgctcaacagccacgagctagctgttcacttgtctcaaccgcagaagcagaagccagctgcagcgcagaaggaggaacttgaagacgcacaatgcaacatggatgctgcactccttgtacagaagacggcatcgctagagaccgtcgatactaacgtgcttgtgataacagtatagatgcacgcagccgtgccatatgagacaagacagaagcggattgacgtaagagacaaagcaactgaatgagcacatcatcctatggacgcagcaccgacagaagagaagaccgaaggcgttttgactgactacaccaaagcagttcagtgaccgaagagatgaacgagcgatagtcatgttaacaactagagaagacccgtgangcccatgagatgacgttgagctcacgaggagatgatanactgagcgctga

SEQ ID NO: 148110 - DNA, 503 bp, Glycine max
  unsure (1)..(503): unsure at all n locations
tggggttttccggtttggcctatagtcctggacntcaagtgctctgaggtatgcagattaccatcagaccacttncagggtgctgtaactactttatatggacttgatggggcctatgcaagttgaaagccttggaggaaagaggtatgcctatgccgctgaggatgatttctgcagatttacctgggtcaactttatcagagagaaatcagacacctttgaagtattcaaagagctgagtctaagacttcaaagagaaaaagactgtgtcatcaagagaattaagagtgaccatggcagagagatagaaaacggcatgtgtactgtattatgtcatctgaccgcatcgctcatgaggtctctgcactcatcacaccacaactatatggcgtatttganatgctaacctcgactttgcgagaagttgcctggacttctttctcctttacaacttcactcatttctggttttttccttccaccgtctgctttttgatgtattcg

SEQ ID NO: 148111 - DNA, 345 bp, Glycine max
  unsure (1)..(345): unsure at all n locations
aactcagcatgtcagctacgcggccacatttaaatggacctggtcttgtccgccactttcaacagnaatactaatcgagacctactgagcgatgaatacaacacagcttggatgaataatgcagaactgatatggacaaaccctacagcaacacactgagaggttgctcattatgagaacgtagctgcggccagcaagccatatggtcctcctccatacatcctttgacacgccaaagacaacaggcgatatggaccgtccttatagaagatagtgtgacaaatgaccttccacaagatgctgcttcgacaggagactagagcctccattctgagactgacaaat

SEQ ID NO: 148112 - DNA, 259 bp, Glycine max
  unsure (1)..(259): unsure at all n locations
gtaatattatagccgatgctctntctcggcgtcatgcattactttctatgcttgaaacannaatgattggtcttgaatgtttgaanaacatgtatgaaaatgatgaaactnttggagaaattttttaaaattatgatattttttcagaanatggtttctttagacatgaaggctttcttttcaaagaaaacannatgtgtgtgcctaaattntctactagaaatttgcttgttttgtgaagcacatgaaggaggttaat

SEQ ID NO: 148113 - DNA, 351 bp, Glycine max
ctgaacaatatactcgaccttcatttaattgtctttgggcttgtcggccacgctcaacaaaatactttcgacacctactgtacgttgatctgatcaatgctgatatgggaatgttgcgacaatcctttaaaaccttattgatacattctgagaggttggttgtcatgtggccatatcgacgtccttctctatcataagtcatcgtccattcttcctttgaaatgcgatcaatccatgttgatatggctggactcagatgaggaaatttttctaaatattgatcaaaatgtgcttgcaaggagtgtatgctgcataaacattagtatgaataaaaaccttaagtatatatga

SEQ ID NO: 148114 - DNA, 300 bp, Glycine max
  unsure (1)..(300): unsure at all n locations
aatctcaataagtcaacaatgacattcgaagaaatcgaaatacgttatggaggggatgtactatagccaatgtgtggaaggcaatagaaagaatnggaaaccttaatctaatgctaagtgtagagagtgagagagagaatgggaacttagtaactcatganagactntgaagtctgaacaagttagtgaatgtgttagcactacatattgaagctttaaatataaaanatatgtaaacatataaacaacaatagtaattctaaagacatgtcacatcantgggtctatgggttgggtcat

SEQ ID NO: 148115 - DNA, 451 bp, Glycine max
  unsure (1)..(451): unsure at all n locations
taatcccttggaaatggagggtaggagaattgccctggattcagctagggactactttccttggcacccttatgttcaatatgttggataaataaaaatagtttttttttgctatatgcatgagagtttcaatgctagttgtcacacaaatgtattacacaaaagtacctatcacataaagagtggctatgcaatttagaatgcatcaagaagttttagattgtgtggctacattctttggaaccaaaggcattgcatggaaaaatcactacatacccatatctaacgggaatttgtattttcctgcttggcttttttgagggagctttcaccacacgttatacagtatggtggaagtagtcaatactgtatcatcatcgtgattntgcaaagaatattacttggcgaaagagcagtccatgcaatcatcgtgaatcatcatcgtgattta

SEQ ID NO: 148116 - DNA, 271 bp, Glycine max
  unsure (1)..(271): unsure at all n locations
aagaatgtgtatgtgtttcttgatttcagggttgtcatcatcaaanaggggaagattgtagaagcaagcttcatgatgatgaatcaagttgattcaagtagttctgatgataacatagatgatgacaaaaagccaaaagaatgatntcaagattgagtcaacaaatataagattaaattcaagaatcaagagtcaagattcaagaataatcaagatcaagaatcaagactcatagattcaaanatcaagagaagacttantcaagataagt

SEQ ID NO: 148117 - DNA, 460 bp, Glycine max
  unsure (1)..(460): unsure at all n locations
ggtccacaaaaatagggatttgaaagtttatcatttctgtttcttactaagtaaaatggatcattttcaaggtccaacgccttaaaatgatcacctttcaagtaaaaaagaatcacttgattcacgcataaagaaagaactacgtaggtctgatttcctcatcacaattgaggaatacgtaggagcaaagggaaacacccttgtcgaccacaaaaagagaaaaaaatataaaggatataaggacataaaagggaacataaaaatcaaagtcatgtttgcacattcgattaaaggctgttgtcctttgagacaaacgtgagaggtgctaataccttcctcaagcgtaaatacaactcccgaacttagaattttcctttntgaccggtttccttcggttnttccgacgtttctcacanataaacgttggtggcgactccgcgcgtattcctttcgtggaaca

SEQ ID NO: 148118 - DNA, 212 bp, Glycine max
  unsure (1)..(212): unsure at all n locations
gagagagagaggngaggngagcataatattgaaggaggacaagagagagagaagttgaactttgatatgtgtctcacaagactctcattcatcaaagttacaacaagtgttacacatgcttctatntatagcctaggtagcttccttgagaagcttctttcataagcttccttgagaagttagagcttagctacacacacccctctaataac

SEQ ID NO: 148119 - DNA, 462 bp, Glycine max
  unsure (1)..(462): unsure at all n locations
tccacaacatccaagcaaaacaacattcaaacagcacaagctatcacattcaagcaaaacagagcaaaggcagaaactctgctcaacacatcaaccaaaatcacagcttttctcacttaaagaccccagtaacaattccttcgatccaattcgttaaccgttggatcgactccaaaattttactggaagtctatagtgcataagcctacattgtgaccgttgggatcgactagcaaacatccagaactcattctgtactactctntccacagccaaccacacacaagcattttctgcaccaagctaaaattctgctgcacctattttgacagcaaaattctgcataagtgcagatttcgaaaatcacacttcccctcatccaatcttgctcaaatcaaatcctacaagtcccaaatcatgtatcaaacatgtctaaaccagagccaagcttcaaaccacagc

SEQ ID NO: 148120 - DNA, 266 bp, Glycine max
  unsure (1)..(266): unsure at all n locations
cacatcaacatgctngaaccttcactttttgtgagnaataagatttatntataagaatggngaacaaggatcaaactctagaccacacagttatagaggctccaattacatgtcatgaacttgntactcaaaagagctggtgagttaagacatatggatgaatttatgtctagcattcatgttatggtgttatatttgaatattgaatatactatatgctntgagaggttntaaacttaacttgctgtagaggaactgaaatatgg

SEQ ID NO: 148121 - DNA, 282 bp, Glycine max
ctgaacaatatactcgtccttcatttaattgtctttgggcttgtcggccactctcaacaaaatactttcgacacctactgcacgttgatttgatcaatgcttgtatgggaatgttgcgacaatactttaaaaccttattgatacattctgagaggttggttgtcatgtggccatatctacgtccttctctatcataagtcatcgtgcatacttcctttgaaatgcgatcaatccatgttgttatggctggactcaagtgaagacatttttctcaattttgat

SEQ ID NO: 148122 - DNA, 338 bp, Glycine max
  unsure (1)..(338): unsure at all n locations
acatctaactcagactaccgattcatgccaataatatatcgagacgcttganattgaacaacggaagctctcgagagattcaaatggtcataactnttcacatggatgtccaattcaagtgcataatattctgagatgctctaaatttaacatggaagcacaagggaaattanaacggccataacctataacaaggatgtccgattcaggccaataatatattgagacgctcgatattgaacacttatgctctcaagagattcanatngtcatacattntcactcggatgtccgattcagacgcataatataccaacatgctcgatattaaacatcac

SEQ ID NO: 148123 - DNA, 256 bp, Glycine max
tgctaagtcatggaagccctatattttccttatactaggtgtattggaccactcaagaatgacctttattcttttaggagtcgtgggaaccccttgattaccatttaataaattggggaaagtaatgcaataaaatgtacctttttttatattcgcatgttgaatactcctaccaaagagcatgacaatacctaaggtgtcccatatgagcacctacgtctgtattgatacaaaaattatgaccaaacctacctaa

SEQ ID NO: 148124 - DNA, 269 bp, Glycine max
  unsure (1)..(269): unsure at all n locations
tgacccacgcgggtgttgaagagacggcatgggcatctccctccttccttcttgcccctgatgccccgattcttntggcattcagcgttatggaagaaacgtaatcaaactttcctctnttcaatccaacctcgattctttccccggcaaacaccagatccgcaaagctggacggcatgtaacctactagcttctcatagtagaacactggcagagtgtctaccatcatggcgatcatctctctctcaaccatgggaggagctacttat

SEQ ID NO: 148125 - DNA, 412 bp, Glycine max
cgcggcgggattccttagagtatatattgatgcaggaatcttctaagaaccatatctctttggtgctggtattgtacgtggagtgtgatgatcagtgaaggtttaatttcttaaagcagaagcagtccatataaacgggagacccgatccaagagaagctgaagctttgggcttatttcatgcaattgaatgcatggaggaactgcgacttgagaatattatccaagacatagactgtaaaacggttactgatgctttatcttctacgagaaaaggcatagattaatttcattgtattattgggaaatgcaagtctatattagcaacaatttcaaactctagggtgagtttaattaggaagcaagtcaaccaagttgcccattcccttgctagggcatttaggtctcatgct

SEQ ID NO: 148126 - DNA, 246 bp, Glycine max
  unsure (1)..(246): unsure at all n locations
ctacactgactcccagcttgtctaagggctagtggcanacatatatcaagccaaggaggcagtattgctcaagtactatcatgctgcanaaacccttattgatgactntaatcgcttcaagatgtaccatatacggggggagaacatcaccagagcagacttgctctccaagttggctagcactaagagagctggacatcttaagaccattatgcaagagacactccaagcacctaccatagacac

SEQ ID NO: 148127 - DNA, 454 bp, Glycine max
tctacttatgtggcagggcgggcttccttcaccttcttgtctctaccgcgatctttgactaccgctcttccttcccgcgatgcttctctttacatctgcctgagtgggcccatagcctaacccatacttcccacgatttcctttggcatttatcaggctagttatgccgccgttgtctttgcctaaacccattccgggttcgtaaccgttccccaacataactcgggccatcattactgctgcatcgaacaggcaagcttgcccagagaaggagtccacggaggaaatgcttacaacctcaaaagactggaaagcggtttctaatgactcctctgcggcctccatataaggcatagaggatgggcagctcaccaagatgtcttcctcgcctgatacgatgaccagatgcccttctcactacgaatttaacttttggtggagtgtagagggaaca

SEQ ID NO: 148128 - DNA, 271 bp, Glycine max
  unsure (1)..(271): unsure at all n locations
acaacctcaagatttatcatatacttatcaagagaatcaatccttaagagagactntccanattcattggaagcactgagaatcttgacaaactgttaatatacagtagatgtccttctaacagatctggacatggatatgaaggagatacttatgttcatgataaggaaactaccaaatgttatttctgtggaaaggatcaatgttnggtcaaagatcgcattggagacccttctaccattgtcatgacttgagtgccttcaatcactat

SEQ ID NO: 148129 - DNA, 361 bp, Glycine max
  unsure (1)..(361): unsure at all n locations
tctaaggaggtgagcttagttatgagaggagngcgagtttcttatctctagcttctcaaggaagtatgtctcacagaatcttctcacagaagatttctcacgaaagcttctcaagcaagctacctagtctataaatagaagcatgtgtaacacttgttgtaactgtgatgaatgagagtcttgtgagacacaactcaaagttcaacttctctctctacttcttccttcaatttcgtgctcccccctctctctatctctctctctcattcttttcctccatggaatcatcctctccaagcttcttatccaaggctcatcttggtggtgaagctgcttcttacatggcttattccttaatgga

SEQ ID NO: 148130 - DNA, 425 bp, Glycine max
  unsure (1)..(425): unsure at all n locations
gatcggccgtatttcctggccgacgccgactgtcattnttttcgatcaatatcggtgaataatactttntttgccgaggtgggctaatgttttcctggccgaataaatgggaacatgccagtttcgggcgaaacgaaacatcggttgagctcgcacgaaaaaacctagcccacctacattgtaagttttttatgcaacaccgaaacaagaaaacttcccctgccgtaagaaaaaacattatcggccagcgagcatttttttttaaaaaaaattgcgcaatgtcggctgaaaaatatcagtcggngccatttcacgaccgatgtcggctattttggtttctattcaatccctgaatgaaatttgcatgatgtcgattaagaaatgttngatccgcgtgatccggtgatgcttttttttagaactcn

SEQ ID NO: 148131 - DNA, 501 bp, Glycine max
  unsure (1)..(501): unsure at all n locations
ngccccgtgtggggnaatgatgacatcggatgatgacggatgcannnacgagacacnctagcatgctcaagcttggaagcngatagactttcttagacttggtggtatggaccactcaagaatgacctttattgtcttatgagtcatgggaacctcttgattaccatctaaaaaattgaagaaaagaatgcaataaaatgaacctctctttatatgctcatgttgattactcctacacaaaagtatgacaaacctaaggtgtcccatatgaacacctagggttttttgtaacaaatataacaacacaacctccttatggagtccttatttacacaattcataaatattgtaggggcatgagtgattcacaaaaagggttgcaccctcaacaatttatatacccttatttgggcccacacaagcaaagtgtttaaattttacagccaaaccttattcaacactgtttacttataataaattaagccaaaggggggcgtgttc

SEQ ID NO: 148132 - DNA, 253 bp, Glycine max
  unsure (1)..(253): unsure at all n locations
tcttctcaatgtccgttaagtcttatggacttcttgcctataaaggataagccttttcttcctgcctctcattntttgcttcctgcacggntgcacctccaatatntttaatatccncttattacccctctctgcttcttctgttgggcttcttctcccttctcaacactatggcagagatcctatgcaactgaaccanaccanaatcttccatcaagaacaaaccanattngaaaaaccacaatggacaaac

SEQ ID NO: 148133 - DNA, 446 bp, Glycine max
  unsure (1)..(446): unsure at all n locations
tccnctcccnctcttttaagataaaagaaaataatttatcaatttattgataatcatcataaagaattaaatattntaaaaaattaacaactaanagattgagtgtttcgattggatatcgagttggagtttatattttcgttgctcatttgacttctgcttatttattctttgactgttgtgtgaattgaggtgttgtttatctaagattaattcttattaaatttcttctgttggaggattaagtaattaaaatcaatgaattntaccattttgaagttagtaaagtggaaatttttatacactgatgaataatgaagaaaacaaatttataatttattatacacttacgtatattcacatgtctaaccgatgaatttaaatcagagacgatattttcttaattaaaacattttanagaaatgaaacttanaactgattaatca

SEQ ID NO: 148134 - DNA, 393 bp, Glycine max
  unsure (1)..(393): unsure at all n locations
tgcttcttctagaagcaatcgccttctggaggaattttctggaaggcccaagtgggcctagttgctatttgcacccccatttttactaaatacaccacttgctctttttcggagatttccctccgcaccaaaccccaactctccccttgtctcgtcctctatcacgtcagccctcaaacctttcttgttgtcctcctcctccctcatcccaattactacccctacccaactacaaacatttacctcacgtcgcgtttacttcacatacctccccgtccctgcgcattcctctcctacccttcgccacctagtccccattttccctctntctccctctcacttcctgcttccacttaccccccccctcttccttctctcctctctcctctcccc

SEQ ID NO: 148135 - DNA, 416 bp, Glycine max
tattttcctgaatcggacatccgagtgaaaagttatgaccattggaatttctcgagagcttccgctgttcaaatttgagagtctcgatatattatgtccccaaatcggacatccgagagaaaagttatgaccaattgaatttctcgagagcctacgtcgttcaatatcgagcgtctccaatattatgcacctgaatcggacatccgagtgacaagttataaccaatcgtatttctcgcgagctttaggcgcgcattatactacacctccatacatatattccactgactcgtcatcctacactcaaacctattatcatctccatatctttttgataaaggtttcgatcccatactcactcctatctctccttcattctcgccatcagttcttattttctttccactcgatttatcc

SEQ ID NO: 148136 - DNA, 222 bp, Glycine max
catgcttctatcttgagattatgacacatgctaattcggaggagatgatgattcgcgagatgtatgcagtcatctcagatattgtggttggtactctctgaacaggtcattaagcgaacttagcatagttagctctcttttgctagaggacaagcaaaactatacatactggggagtttgatcattgacgtacataagtggattatgcaattaagacatata

SEQ ID NO: 148137 - DNA, 388 bp, Glycine max
tgcatgtggatatacaccaagtttggtcatgaggggtcatcgtcgaaggacctaaaagtccaatatgtgatagtgcacgcacacactttctacaacatactactgactagagcatattagaatgtgaactgtgctataatgtgcagcgccattagtctatgatataccccacaaataaaggatccgtcgaagagtacacaacgaccagaggaacgttagggaaggttacatggtaagcctcaagattaaccgtttcggagatagtgagtcgtgacgaactgtgcactatgtagaaatcatggacgggacctgtcaggactttcggcaagacgtaccaatgtcactatagaatttacatttataaaagagttcgacacacagggactcg

SEQ ID NO: 148138 - DNA, 429 bp, Glycine max
  unsure (1)..(429): unsure at all n locations
gggatgtgagctcttgtagacttttctttgcaggaatgtaagctttatccaagaganatgtatggtcattggttgtcatgttttcaattagctccatagcttcattaggtgtttttaactttatcttacctccaacggaagcgtctagaagttgcttcgagtgaggtcgtaagccatcaataaaaatatttagttgtattggctcactaaatccatgcattggagtctgacagagtaaaccgtggaagcaatctagagcttcgctgagtgattcgtctagggactgatgaaatgaaaagatatctacctttccttgtgcttgctttgattctggaaagtatttcttcaagaatttatccacaacctcttcccaagttctcaagttatttcctttaaacgagtgaaaccatctcttatctcactggcagg

SEQ ID NO: 148139 - DNA, 446 bp, Glycine max
ctaagcttatgtgtccgcactccatcatgctctacctattttgttcatccctttcgatctctgcttctaccatctccattgagaaggcccagcccaatcaatctgcataaacttaattgggcttattctctctttttggcgattgcttatattctacccatccttctcaagaatgtatgacatgggatagaacttaagtgtttccttccacagactcaatgtcaatgtgtatatgtagaatttcaggaactaatctctggaaattctgaaattcatttaacaaggttaactactctcaatatatgtactttgtactcacgtacttgagcttatactggaaaaacatgaatatcacacatgtcgtaattagacctattgtcactcacccagacaacacctttattctatctctttttatgacgaaattattattattggaaataatt

SEQ ID NO: 148140 - DNA, 215 bp, Glycine max
  unsure (1)..(215): unsure at all n locations
tctcactaccctgtttctgccataacttaagcctatagataattctttaccccatgtngtggtcctaaagaatagtataatcatcacatactaggtatcgtttggaatcttttaaatgagaaagaggatactatctcgataatcaatatataatcataattcatgagtatcaatctaatcaatataatcataattcatgctaatcaatatatact

SEQ ID NO: 148141 - DNA, 463 bp, Glycine max
  unsure (1)..(463): unsure at all n locations
ntatgaaactcagtaactaaatgatatttacaagacgtaacgatttatttaatctacaatattgctcatactttacgctatataatatatactatagactcaacagaagtccgtaagagtataagaccataacttaacatgctagctaactccgatggcgataggcacgtttcaaagtttctagaaatttcaatcaacaatccacggtattgtgtatagacaaggattacttggaattcattcatatcaacaccaggtattaacttcctgattntgacatgaattgattacgcgcgtgattctatgctcgagtttaggtacttgttggtttaagtgattgtaagagaaaatagtttagtaagaatatataattaaaacaaccaatatgtctttgtttaaaagaataaggtatcgaattcaagtgaataggataaataaaatcgagagaggacatttaatttca

SEQ ID NO: 148142 - DNA, 510 bp, Glycine max
  unsure (1)..(510): unsure at all n locations
atgacactgagactctttgnactnccctagaatcctctagagtcgatgctgaggcatgcaagcgttggcaaatggagaggaatattttgtttctatatggagacgacgaagagagcaaggtgttggaggtttctgacaaaattgaaaggatttgatttgatcgcaagcaataggtgtggtagtaagggtaggggacgaaggattggccgtgtgataggagggcaacgaacaaatttccaaggcaacgaaaaatgatttacattttttattntgttcgctaaatgtttcataagtcttactaaagtgaatgcaagcaaaagaaacaaatatataaaaaggataattaccattttagtcatccttgaaattgcaaggtgttgtcccattactccatgacaagaacaatattcatattaattcacgtgtctctcaatacgtccctacccttaaaactctttcatctcctcacccatcctgtcactctctctcttttccatctattatgtgtcg

SEQ ID NO: 148143 - DNA, 239 bp, Glycine max
  unsure (1)..(239): unsure at all n locations
atggtgtcttggagcgtgcttgtgattntntctttcgccatgctgcacaactntcaggtgttcccttgagaatggtggagagaagcagaaggcagttccctcttagaanagcccgtgatgctgcagaagacatgctctctgggctactcanagccaagggtgatggattcatgacattgatcgaaaatggtaaatggatgtgtgacgaggcacctcacagtggaaatgaatatgtaaac

SEQ ID NO: 148144 - DNA, 462 bp, Glycine max
  unsure (1)..(462): unsure at all n locations
tgagaagtgagaatgagactntagtttatggaaccttgttcttgcagattgttggtagcctgaggtttatttgtcacgacccacccttgtgacatgaccggcacacagactatagctttcctagtctggccagcctatcctgtacacaacaatctataacagaacacacacacatacacacacacacacacactatatatatatatatatatatatatatatatatatatatatatatatatatagacagatccatatacatatatctcattccatccacttaataacaaagctgattataattactaatcatcaagtgtctccaaacatcacaagcacatcttcatcatgtctatcagagagaactcattaaatatcgaaatacaataattctctctaaatctcttactaccctgacgcctatagctgcattatacactggagttaccattcacaatatcn

SEQ ID NO: 148145 - DNA, 255 bp, Glycine max
  unsure (1)..(255): unsure at all n locations
cgatggngcacaacaagctntccacatccacaatgcgcgcataaacccaccatccnctggtgcccacctccaactgagctcacgtactcccacgtagcccatctcctcgtttctctcaacaccgggtccccatcaatcctctcaagcttccacaacatccaagcanaacaacgttcaaacagcacaagctatcacagccaagcaaaacagagcagaggcagataactctgctcaacacatcaaccaaaatcacag

SEQ ID NO: 148146 - DNA, 458 bp, Glycine max
  unsure (1)..(458): unsure at all n locations
tcaagaattatggcctcatcaaactacttgtttcccgagggattttctataaatagacctcccatctttaatggagtgggttaccactactggaaaacccgcatgcaaatctttatagaggcaatagatttaaatatttgggaagccatagaacaaggaccttatgttcccactataatggccggaagtgcaacaatagaaaaacctagagcagattggattgaggaagaaagaagattagtacaatataatttaaaggccaaaaatattattacatctgccctaggaatagatgaatactttagggtttcaaattgtaaaagtgctaaggaaatgtgggatacactacaggtaacacatgaaggcactacagatgttaaaagctctaggataaacactntaactcgtgaatatgaactgttcanaatgaatgtaaatgaaagtatacaagacatgca

SEQ ID NO: 148147 - DNA, 230 bp, Glycine max
  unsure (1)..(230): unsure at all n locations
aatttctgggtccaaaataatgtccaatanaaatgcgactcatcactgtcaacgtaaacaattaacaatcaacatctaatttcggggctagagactaaaatagcgagattacaanaaaatggaagactcaattgataaattaaattacaggggaaccaaattgtgagctanaatggaagactcaatccgacggcctcagctaccgtttcgaactcattccggacaccaat

SEQ ID NO: 148148 - DNA, 398 bp, Glycine max
  unsure (1)..(398): unsure at all n locations
tgannatcatttatttgactaaatgactagttntacaagttgttcttcgggccattgaagaactcatgggatagaacaatataaggtcacgagaaggaaacgtgataagtgacttgactatgatttgagaaagaaaaaaaaaagactttaaattgaataagattaattaagttgaatgttacgatcagtaggtatacacagagatcagcaacacgtttaaaggaataaaaaaaactacatgtttaaaggagtcaatattaatttatcaaattctagctggatttttgtataaaaaagaaaaaaatagaattatttggtgtaaaatctcttcaacgtagagataggaagagaagatagataaaaactgatataattgtaatgtaatgtgataagaaaac

SEQ ID NO: 148149 - DNA, 224 bp, Glycine max
  unsure (1)..(224): unsure at all n locations
catctacaacagacctccttaacctcagcagtatattcatccacaacagaataattatgacctctccagcaacaggtacaatcccgagtggagaatcatcccaaccttagatggtcgaatccttcacaacaacagcagcaacaacaacaaccttaatttcanaatgctgctggcccaagcagaccatacgttcctccaccaatccagcaacaacaacagcaaca

SEQ ID NO: 148150 - DNA, 234 bp, Glycine max
  unsure (1)..(234): unsure at all n locations
ngtgcaaatcanaatcactcctacatttatctctagcatgcttgtatgttggtctcgtcctttgtcacgggaagccggaaggtccatatcaccttcttaattgtacacatggggcactgcgcccccaaatgcgcgagtaagaagagataattttccgggctctcgtgtccggtaaatgcattcatatcatgcatcgcataagcatctcttataaccatataatggacatattct

SEQ ID NO: 148151 - DNA, 426 bp, Glycine max
caggctccaccagttctagtgaacgtgctgcccataccattggcgctttcaatgcggcgcatagatgtgatcgcggcaattgaacccaaagcttccaatgggcatcgctacatcctagacgctatcgattacttcactaagagggaggaagccggttcatatgctaccgtgactagaaatgtggcggttaggatcataataaaggagataatttgcaaatatgggctgccgagctatatcatcactaacaacgccgccaacttgaataataagatgacgaatgagttgtgtgggtattccaagagaccacaccataatttgactccttatcgacccaagatgaatgatggagttgacgccgctcacaagaatactaagatgatcatcttagagatgacagcgacatacaaaggattgcacgagacg

SEQ ID NO: 148152 - DNA, 346 bp, Glycine max
tagctgaatacagatcgaatcgaagttagcttatctcaaccttggccagcttagcgggccaaatcagcctgagatgcactggtggggcgctacgcacctcagactctgggcttaccgcatgggtcgagatgcgctgagcgcgacgcttgctctcagcaaacagactatttctcacacactctcacactatatatattcatatctatatccatgaaattgaatccctaatgatatgcatacacagatcggtagacatacatctatgtacagactacatatcacggtgcagatgataaaacgcgtgatcaactgtctaacaacctcaccagcgattctaattggggtg

SEQ ID NO: 148153 - DNA, 505 bp, Glycine max
  unsure (1)..(505): unsure at all n locations
ttgacccctgagntttgagacccccgtagnatcgncgatnctttggagaagaantctaggcatgcaagcttttaatggaagtatagagcatganagtgttctgataccattaactagtcaatagggtcttgagcaggttgaggacatccatactatatttggaaagacccaaaagaaggaaaaaaagagtaaaacttgcatatggaagaagaggtcgatattgtttgatcttccatattggtttgatctagatgtcagacattgtagcaatgttatgcatgcggagaaaaatgtgtgtggtagtgtcattggcacacttcttaacattcaaggcatgacaaatgaggcgtagaacactcgacacgatcttattaatatgtggatctgagaccacttacttcctaggtttgacggtgaaatgttatcctctcctcccactagtgatactttgttcaataacacattaactttacttccatcttattctacgcttccttctcctccc

SEQ ID NO: 148154 - DNA, 432 bp, Glycine max
  unsure (1)..(432): unsure at all n locations
gttgattactattttttaacatcgattttagcgtcaaccgatataaaaagtgctttacaacaccgattttcattagaaccgatgtaaaaagtgctttacaacatcaattttcactagaaccgatattaatgtagttnttgcataattaaaaaaatattttgtttcacaagaaccattttcttcgtgatccatttttttaaaaacataatcctgtgaccatgaagaacaaaactaagacactataatattaatataataaatgcaacatgaagcagctagcgaacttcaaaaaaattattgcgaaccaatgatttgatgttccagtagcaacttggacccttggaatgctcgtattgcttatagcatcctanaagaataacaattattagttgcattgggtggtttccaattatccctgaaaatatgtcagct

SEQ ID NO: 148155 - DNA, 350 bp, Glycine max
actaacaaactcagcgtagcattcattgctgagctacatcaatgcaaatgacttttctaaccttgtgccagcttagcgggcgaaatcatgcctcagatgcaagggttgggcgctaagcactcaagacttcgggcttatcgcatgaatagagatgcgtttagcgtgaggcttgcgcttatcgagaggactatttatcagaaaatattttttaagtgtttgtcagacctttttccaagaaatttaaacccttatgttatgcattcaaagattggctgatatactcctatgttcagattacataacaagctccaaatgataaaatgcgtcgaaaacaaacatactaacataac

SEQ ID NO: 148156 - DNA, 206 bp, Glycine max
  unsure (1)..(206): unsure at all n locations
gcataatccataatgctgcanaacannatacacgcatgaataaactcttaatcgacatatggagtacataggaanatcctttcttaatagttccagcctccatagacaataacgttgcttatgaattaagaacaacaataaaactagtctgaatatgtgaaacacataatctgaagaaagaatagctatattcatcaacagcaata

SEQ ID NO: 148157 - DNA, 221 bp, Glycine max
  unsure (1)..(221): unsure at all n locations
tatagtaacaggcanacggaaggattccacacatactaagccttcattggtgatgacgaatttgttgaatntgatgagaacctcattgcaatcttcaagcacatattcaacctttatggagaatattctgatagtgccaaaaagaagatagccaagaactctattgcanaatcttgtctgcagaagggaaaaatganatgaataacataacataacattaa

SEQ ID NO: 148158 - DNA, 456 bp, Glycine max
cttgtgaggcttctatggagcctggatctttgagcttcattgttgtcctttaatggtggttttccacaatggagatgcagcggaagacaaaggagaagaggtgagaggaggcgtcatccactagggaataagccatggaagaaggagcttcaccaccaagatgagccttggataagaagcttggagaggatgcttcaatggaggaaaagaaagagggagagaaagagagaggggggagcatgaaattgaaggaagaaaaagggagagaagttgaactttgagttatgtctcacaagactctcattcatcaaagttacaacaaatgttacatatgcttctatttatagactaggtagcttccttgagaagctttcttgagaaaacatcctttagaaacttctttgagaaaacttccttgagaagctagagcttagctacacacacccctctcataac

SEQ ID NO: 148159 - DNA, 478 bp, Glycine max
  unsure (1)..(478): unsure at all n locations
gcctcgccaagcattcccattgaagaaccattattcanacctttcanagttagtgagaaggctaaaagaaaaattagggaacttagaanaactaaatccttaattgaaggagtaggcgataatcatggtgaattactaaacaaatnggtagtttacttaaggtcatcccagaaactccncaaacttcagataatacttccaaaatggtaacaagaagtacttncanataattaatgtattaatgaagaatgtgaccaacctcaaaaatcaagtggatagatcagttcagaaagaatataatcattaatccaacactggaaacacctctaatatatataacgccaactgcctgactttatagagaagagggaaacatntagagttagtgaacacattatgatggactgatgcaacgagatacatatgatcctcacacatgactgagtcactacaactcatgatgtaaaacatatatatt

SEQ ID NO: 148160 - DNA, 461 bp, Glycine max
  unsure (1)..(461): unsure at all n locations
ctaagcttcgtgngagataacaacttgagtgtttgtttagattagctttaatcaatcaattcctaaatcaagttaaaggccaaagcaacaaatggttgcttcaactttttcaatttttcaccatgactttgggagtcaaaatttattctaggaggtatccaaacacagaaactgtccaacttgccacacaagttaaacaagaaagatttggtcactgcaattggaagagaaaaaaaaacatatttctaatcttgatttgaattcttaaaactcctttgcctttgtaactcactttttctaatctgcgaggaacctctttctcaacaagacccaatttaagcctactatttatatattgtgcaattactttagttcggaaaatgatggcaaatgaaacattacatatatttgttagggaggngggccgtgatctaacgacaaaagtaacatgaggaaatcaa

SEQ ID NO: 148161 - DNA, 507 bp, Glycine max
  unsure (1)..(507): unsure at all n locations
agggatgactccttgagaccatcgatcctcagagacgatctcgcaggcatgccagcttaatgagtatggaagcgtcacaaataacttcttaggtttttataatctaatcaggaaccagaatctcggaggggtgaagacacccactacctgcgatgagttcccgggtggagtactctggctattgtaaatggtatagtcatgatagcttccattgtttagcactatcacgttttacattatggagaaggcgcagacagagcttattttattgctgacgtgcacgcccaggcgcagcactctcgagagagtcttttaacagtatacgcttctgcgccatctgtgctatgataattcgaggtgaaccagaatattcttatcatgctgctcaagaacaatgctagagtttatattctgagctatctaanacgatgggacattcgctactccgtgaaataacaaccgcccagaattctgcacgataccttctcatttattataatcccaaag

SEQ ID NO: 148162 - DNA, 290 bp, Glycine max
  unsure (1)..(290): unsure at all n locations
gtttaagtcttctaaactgcctatctatattccatagcctataacaacttccgtgtgcccatcggcttgtgggtgacaagccggtgacaataacaatttaatgcccaacttgctccacaaagtcctccananatggcttaagaacttagagtccctatcactaacaatgctccttggcataccatggagtctcacaatctccttgaataacacatcagccacatgggaagcatcatcaactttcttacatggaatataatgagccattntagaacacctatcaacaacca

SEQ ID NO: 148163 - DNA, 238 bp, Glycine max
gacactataaaactcagctcaacattaattcagcgctcgattgtacaagactctattctacattgctgaaaaacgttatgggggtttgaattggctcataggatcaacatctaatctcaagcgcattgagatgtaacgggactcaatgatacgttccaggaaaaagttatgcgccgtctgtattagctgtgagctttcacattcatttgcaagcgcctcgaaacgtacgggacacaat

SEQ ID NO: 148164 - DNA, 511 bp, Glycine max
  unsure (1)..(511): unsure at all n locations
aggctgttggggnatgatgcttcgttgataccctggattacccaaacccagcnnggatgnctgggatatgagcatatacttccttggcggtcgtctcaggcggttgattaaaagtgccgtgtggtctatgcagaaaatgttcaatgtttagggctactaggtacgacgtaggtcgacggtactttattagccttggcatcatgcaatactaataaagtgacctcgggaaccaattaagcataaaaccactcggggttctccacagtgaacggaaaaatatgcggtgctaaacaaacgggtgacagtgacccccgcccatcctccacattacaagcgataccgccacaaagcgccaagacaggtagacatgatgcttggcttgacacaaatcttttactgcctgcatagacctgtgtcggcactgacaggatcaagtagagatcatacttatcatattcttatcccaactttccactatgaaggatgaaagagagagtcggcagccacgtcg

SEQ ID NO: 148165 - DNA, 428 bp, Glycine max
gattggtgaatcttcctgcttttattggtgaccacagagtggtacctggagatatgtcgcggcggtcacgagaccttggggacgtcaggtggggtgctattgcccaaaaccaagcttgaccaatcccgacccaacccgggcatagtcggtcagtgagaacctgtgatgtacctaaacaggcgagctcctggcagtcaacagataaaaggaacaaagaccacaaagcaaggaggcttgtggtagctggccagctgtgaaacttgattgatatgtgagatatggtctctggtaatcgattaccaagggtggagaatcgattacaaggcttataaatgaagacaggttgctaacatggtctctggtaatccattaccatatgttgtacccgccaacaggctcggacactgattcgagaactataggacccg

SEQ ID NO: 148166 - DNA, 258 bp, Glycine max
agccctgccttggagtaacctgtacaggacgttccaccacacacctgcatagaccttgagagaagcttaaaggtgacacaagatgaagaagaagaagggagctcacttgtagacactagaacccatgcctagtactcattttctaatacggagacctcttttacccaatgcacaagccactattacactgggattgcttgaagcgactgaagcaacgcaaaaactcttcagaagtgctgaaatcttactacctcctcc

SEQ ID NO: 148167 - DNA, 421 bp, Glycine max
taacactttaacgtgcatatgttagcagggtgtaattaattacacactgcttccgtactgctaaaccagaacaaaagatgattaatggtagatgttttttattatcgataaatattaatttattaatttttgttaaaaatatagctcacaagagtaatatccaattcatatatggttctatattgtgatcccaaaagatgcacgacatttttttttcttctttccacatgaactcatatatcatcctaatctacaatggtataagtgaagattgtaccatacctcatataatactactgagatatgatcacgttcacaaatgaatttcattcccatttattctctactctggataacatcctccaactatattatcaacgcccacctgcccctgaccttttttagaaaaagaggtgtaacg

SEQ ID NO: 148168 - DNA, 369 bp, Glycine max
  unsure (1)..(369): unsure at all n locations
tataaacatgtagcgattctgaatcatgagatagctatcctagtttatgggagacgactacacacgggttagcagagaggacattgntatgtatgcataactctatattgtttttttctttgcatcatctattacctgaagccaagttatctgtatctggccaaataaacttggcgactatcagtgctcgtgggaagatgattcaatgcataccatttacaaacctgttttgctttgctgttacaaatcttcttatcaacaagactttacctagaccttgtatatgctgacagctcaattgcgtttatgaagggacaggctgcgctagacctcttccttctgattgtagaggaccccatatcaagtcta

SEQ ID NO: 148169 - DNA, 493 bp, Glycine max
  unsure (1)..(493): unsure at all n locations
ttgccctgaccctggacctcgagaacgtgatacttacactcacctgaagatgcagcttgagaatatgtctatactggattaaccnattatagccttatcataaacgactacacaattgctcttgagacaacgactgatttattcaagagactgtactttaatcgattaccatgccatataatcgattacttccctttgtatgcgtgtgtcagaagcgaacaagaacactttaattgattactttgagtatctaagtgattacatagtccttatgttctttccaattttcgagaagaacggtttaatcgattaccaagataatctaatcgatacatcattgaattgagcgattaccttgaagactcaactgataacagaccggtgtaggtgttttctctataaacaaccaacttgtgctatgtataacaacacaacaatttgatctctagcagagcctgcatcacttgttgttattaaataaagaaagaagcat

SEQ ID NO: 148170 - DNA, 436 bp, Glycine max
tagttgaattcagatcagagtggagttaacttatctcaacctttttcagcttagcggaccaaatcagcctcagatgcaagggctgggcgctaagcgcgtgagactcatagcttagcgcatgaacagcaatgcgcttagcgcgaggattgtgcttagcgaaaggattgatttttagaaaatgttttctaagttatttttcagtcgttcctacaagatattgaaacccttatgttaaacattctatggacagattatataccaagttccaaatgtacagattatataccaagttccaaatgattgaatgcatgacaaacaaagattaaagagattaataactgcgttgcctcccaagttttacttctctgggaaatctcatgttttggttctcaccttcagaacctcttgaccttctcccattacttgcaagcgaaca

SEQ ID NO: 148171 - DNA, 509 bp, Glycine max
  unsure (1)..(509): unsure at all n locations
ttgcccttgtanccttgntnacntccggagnnccgctgatggtatgcagtcgatctcggggcatgcnagactaagcgcatagttggggcatttatcactattacctgtatcacatacctgatccgattatgacttgtactgtaaagaatcacgagtgattgatattatgatcctcgccaccttgttcttgtacgaacacatcataacacttatagagnttgtactacacacagcacactctctgatttagggataggtgcatgcttgaactatgattgctgggattgctcgattgtagtttgagctcttttacgctgtaaactcgccgtgacttgagcccaacatcacttacatacactcttctatatgctcttactcgcttcaaatgtaatatgatttggaggcgactttaactcgcgtgtgacttgcccatgacaactcatatgactcttctcaaatcaatctacggccctatgttattaccaatgtgagttgatatcatcctaagg

SEQ ID NO: 148172 - DNA, 412 bp, Glycine max
ggactaaataatgaagacgctaacggcatgcatgtaggacgcgttatgagtctctgggcatgttacgtgccagcaactttctattcttaagacaaatagtgcaacacgtttcacggagtttcttataaaagggtatagagtcatagatttatagtagcgcgtgactcgaatattgcagtttcatttatggctttctcgtacttgtacgagaaataatctcggtggaaattgtcaggttcttgttgccgcaggcatattattaactttatttatgaagacacaacataggactagagtgagtgaatagagacatgacatagaacaacataattaccctgatcagtaactgcatcatgcatgaatgaatttgataaggcaacttatttcttttcttaatctctacttttctctc

SEQ ID NO: 148173 - DNA, 485 bp, Glycine max
  unsure (1)..(485): unsure at all n locations
atganccttgagccccctcgagngcccgggatccttagagtcgacccgcggcatgcaagctnggactcatgagcggcccgtttatgacttattgaattgagccttgtggtgttactagtgctattacttatggcaccgatgagagcgcaccgactactcactcaacagcctattgtaaatggacactgactaaacccattcctaacacaccgttctatagcgcgacgagtggcgtgagagacttacttactccagcctactctttcaacaccaagacttacagagaatttcatttcctatctccctcattaagtgtattacactagtgaccttctatgcgatggtttgactagaaaaagagcttaactcgtgccacactgacgactatgagcagtacattagagcgatgctgttaaatacagtccacctctattttccttgtcaagacaaatctacatggacctctgttagggggtttcccaacc

SEQ ID NO: 148174 - DNA, 474 bp, Glycine max
  unsure (1)..(474): unsure at all n locations
ntgtgcccatgagacgctgcatnacggacacatgaaactaagcttatatgagctctaagacgttgaagcttttttacgctttgtacatcatgacggcatgatgagacttgccttctactatcctgcttagtatgtttcagcataatagccattctacattgtaaccctacgaaactatcatgctatgtcttcagagtccctaagccatcgcagcccaggaccaagacatgcatcatctatagaaccctaagacagagtgggtgtgtataactcatccgaacatggcaggttccacatgcgtataacaagtgtcatcacacataatcatcacacagaccaaacctaggaagactacacatcatatctccgagagccgcatactcacgaaacttcagagagaaagatgtccactcgaacctggactttcggagtggactggtaggcaggcgctacacgagaacgataatgccctcg

SEQ ID NO: 148175 - DNA, 435 bp, Glycine max
  unsure (1)..(435): unsure at all n locations
ggaaaacttaggcaatagacactagtatcttagcaaaattattattattattattatttttactttaaagaatagctagtcattgaaatttttctcccccccccctttttttcttaaaattttatattattatctatatagtttttcctacacacacacacacacatatatatgtataggtatataattgtacatttatttctggcaaatcaagaagctaatttgtgcacaaaatcactctagaatagccttaacatgagtccaaaacaacatttaagcacaaatttaaatcctcttacttgcttcaaatttaataagaaatggtggtgacttaaactccacaagttacttgcccatcaacaactcanatgactnttctcaattcacacaacaaccctatggtaaataccaatttgagttgatatcatcctaagg

SEQ ID NO: 148176 - DNA, 443 bp, Glycine max
  unsure (1)..(443): unsure at all n locations
tggctcgatangnatgatacctcgtgatacctgcatnnccaananccngcaagtnagcggaataggttgttaatccacaggagattgttcctcgtcatgaacccacggggacttcgggtaataccttctatactaagacaatgggtgacacgggttataaggttatgtaaaaggtattgatccatttaccagttcaacgctgacttgaaccttggaatttcattatggcatggtgtaatttacaagaaacatctctctggactcaacatggtctattctcatatccttacattaacttgttattagaccaacaatgctacagtgcgtgatatagactctgaaggcacttgagaactgtctcaactcatctccgaatgaactaaaataactcatttttatctactaaccttcttgtgaaacagtccaagtatgtcgcctgttct

SEQ ID NO: 148177 - DNA, 244 bp, Glycine max
gccgggagagagggcaaaagaacggaattcgcgcgaacggaccgagggaacacccggcacgcgagaagatggaggcgggaacaaaggaaagaaagggcacaacagggaaaccgtggcgccaagactcgcgggatagccagctccaacgatgcggggacggcggcacacccaaaccaacacacgcgcggggagaaaaccccaaccggaaacaaacgcgagggaccatgccgaacagcccaccagc

SEQ ID NO: 148178 - DNA, 200 bp, Glycine max
atgaactctatggactagtactcattgtgctggatacatacttgataattgttattgttagcagcaccttctctgttcatttagtttcatatattcatccttagacatatatgatctttgtaggctgacatatatatgtaacatggagggaatgaaagccagcgcaattgcactcactgctctagcagaatatacaggtg

SEQ ID NO: 148179 - DNA, 466 bp, Glycine max
  unsure (1)..(466): unsure at all n locations
gctttcaagtgtaatcaaattacttgacttaagcatgcaacacanataatatcttgctctagaattagaaggtacgatcaaaagagtattccttatgaaatataacttgatatgagtcttccaactatagaatattagcatcactaagaacaaaacaatcacaaacaatcatactatctatgcaattaaggcagaacaccatactacaactatatatacttagaattataaggttcttataacaagtatataacgtacatataagaagtaagaattaaatagttaataaggatgtattaaggaatcacatacttcaactactacattcacgactacacacaaaataaagggagttaagtagtcatacgtttacacatcaagaaagacacactcatccaagatatatatatggtccacaaggttctcgcaacactaatccacacatcaagggagatataagctaact

SEQ ID NO: 148180 - DNA, 272 bp, Glycine max
  unsure (1)..(272): unsure at all n locations
gctcttaactgcacaaggctcttaatatgtgaagagtatccttgtgtaaccttcacncgacgaagacactgacanagacttatcttcttcttattggacacagtatggcaggctggcggcaagtaaatattcatcccatcagaccttggatgcaactgtgatcgtatgcccatatcagctagatcttaacgggtattcaagccatccttcgtcttgccttgaatggtaaggagcgtaccaatcacactgtcacaaacattgttctccacatg

SEQ ID NO: 148181 - DNA, 455 bp, Glycine max
  unsure (1)..(455): unsure at all n locations
ntcttggagtagaaacatgggaccaactcattntatttaanaatatgtcgtatctattcaaggcctgagagaccatacaagtttcctagcgatttctaattatgtgggtcattaagtctatcatatgctgaaaatagccgagaagcccatgaatttcttcgggggcggagtaggtgtccgccatcgccttggccttggctaacaatcggagaaggtcttgactctcgttcaaggtaagagcaaaccgatccatccacatggttgcctcttggtgtaaagaatcgatcacccttcctctagccattgtctccgcgtatacttggtcatactcgttcgcgaccctatgctcgtgggccgaggctagacctaactcttgttggacttggcgatgatagctagcatgtagagctccgtctcgcataaacgctgagacaagctgcttatagaccttgaac

SEQ ID NO: 148182 - DNA, 451 bp, Glycine max
  unsure (1)..(451): unsure at all n locations
cacgcctgttcatntgactttgccaccacaagtgggtgactctctatcgtactcacgctccaggacgcgtctcctgcacagaatgcagaactctctcactgcgcaaaaggagtgtatagacttttcttcatatatcgaggcccgcatgcatcttcgtgacactattgaccataaagcattcttgcacatgcatgatatgaaattctgatcctaatcatatgcctcctcangttcatctccaagtacagttgacagtgtgtgtttcttatgcacccttaactattgcaaatatgatgccggccactatacatatcacgctctctacaccagaggaccttttctatcttgaacacttcatatattgcgcccatgacctatcgcatccccactattacgccctgagtaccacaatgcttaccaatactcctctttctcattactacacaaaccg

SEQ ID NO: 148183 - DNA, 262 bp, Glycine max
  unsure (1)..(262): unsure at all n locations
gaactcttaagagaaaatgcattagaatctcttttgatgaatcttagannatattggaccgtgataagttcgcanaaagagtcagaanagacacanaacaagtaaagtatttatagatntagcaganagaaatagatccaaacgattagtaatcactggtatttgattaattngatcataatacctttgttntgcattntcaaaatcatggtaatcgattacaatatgtggtaatcgattatctcannataacatagatcat

SEQ ID NO: 148184 - DNA, 461 bp, Glycine max
  unsure (1)..(461): unsure at all n locations
ntggccaatgcagattggctcccttctatgcaacaagagtattatgccttgctaaagaacagaacttgggacttggtatcattacctccaaataagcaagctattggctgtaaatgggttttcagggtaaaggaaaatgttgatggttccattaacaggttcaaatctcaattggtagccaagggatttcatcaagtgcatggttttaattttcatgaaaccttttctcctgtgatcaaacctgttactattcggatcatccttactctagctttgtctcatgggtggaaattatttcaaattgatgtaaataatgctnttctgaatgggtcacttgaggaaactatcttcatgacacaggctcctggttntgaagttacacataagtcattggtctgcaaactcaacaaagccatttaaggcttaaaacatgatccaaggcagtggtttgcaggctatat

SEQ ID NO: 148185 - DNA, 146 bp, Glycine max
  unsure (1)..(146): unsure at all n locations
cttcattttctccatgtatttcctcacatgtcttatgtgaatggtgtaacatgattctntagaatttccaccaatttaacttgctatagaagctagattngatttcctctagttcanatttcttggtcttgntcttgaaccatgaa

SEQ ID NO: 148186 - DNA, 423 bp, Glycine max
  unsure (1)..(423): unsure at all n locations
ttatgcagggaagctaagtgtgaagtatgcaatcctgcatatgtttggcgctgcaaactgggtacccaccaatcacacttccactgttgccacaggtttgggtaaatttctgtatgctgttggaaccaagtccaaatttaattttggaaactatatttttgatcaaactgttaagcattcagaatcttttgctgtcaaattacccattgccttcccaactgtattgtgtggcattatgttgagtcaacatcccaatatcttaaacaacattgactctgtgatgaagagagaatctcctctatccctgcattacaaactgtntgaggggacacatgtcccagacattgtctcgacatcagggaaagctgctgcttcaggtgctgtgtccaaggatgcttttgatgctgaactcaaggacacatg

SEQ ID NO: 148187 - DNA, 455 bp, Glycine max
actcagcttgtacggtggtcagcaagaggaatggtgtaaggaattattgaatattaaaattcctagcacaataatagtttttgcttggcggctaataaaggacaaactaccaacaaggatgaatctgcataggagacaagtgcaactgcaggatctacgctgtcctttttgcagagaagctgaagagaagtcattagacacgcagctgatagaatgggaaccaatgtgtgtcttccagacactaaccttatagcacaattcaatgggaatcaatctctgtcttccagacactaacctcgaaatgcacacttcataacattaaacataggctaaaaatctggagcacagatgattgtggagatctgggcaacaaggtgaagttaatccagcataagctgaatgacttggagaagttcctcacagctcaacctactgatcagcgggtccaagagctc

SEQ ID NO: 148188 - DNA, 99 bp, Glycine max
cgtatcccggtgagagtgtgatcctttatatttgagagaaacagctatcatttagcattgatttttgcatgaatctctgaagtatggactgaatgcatg

SEQ ID NO: 148189 - DNA, 449 bp, Glycine max
  unsure (1)..(449): unsure at all n locations
ntaatgtgttctcccttgtagaactactaactgcagtaacagttgcagtccatctatccggtagtgatgacaatagaatcaattccttcacctcatcctcaaatttaatttgcactgactccaactgggcaagaatagtattaagttcattaatatgattagttatagagttagcttctcccatcttgaggttgaacaaccgacgcatcaagtatactttcttggctgcagatggcttctcgtacatatctganaacgccttcattaagtctgcagtagtcttctcgtttatgatgttgaatgcgacgttcttggctaatgtgaatctaatcacgccaagagcttgtcgatctagcaagttccattcttcttgcctcatgtcatctggcttatcccctgatcagggttgatacaacttcttctgatatagataatcctctatctgcatc

SEQ ID NO: 148190 - DNA, 227 bp, Glycine max
ctctctgacctgggaatttccgttcaacttattgaccattagtttcgagtcgatgaacacgtatcttgtatttattatattatttgtgagcggaagcgctattgttaatgcttgttcaagtaccaccccatatcaggattcctataagattctcgctccacatagtgttgtactggatgggccattgacaaatgtaacaccctctaccctcacacataacgaataaa

SEQ ID NO: 148191 - DNA, 373 bp, Glycine max
gttgtcgctgagaaactggttcccagaagattttttgagtgattattgctgaaaaccctagccctgcaacgagtcctacggaagtagacacggagatggacaagaaaatacggtgtattgtgagtagctttttgaaagacgcctctgtacctgaagctgatgaagatgtcccaacatcgtccaacccaaatgtttctgtgcctgatgtctagatagatgttctaacatcttccggcccaaatgctgaagtactctctttccccagcacagagagatcaacagaggaagatgatcaagcctcagaggagactcctgcaccaagggcaccagaacctgctccaggtaacctcattgaccttgaagaagtagaatc

SEQ ID NO: 148192 - DNA, 418 bp, Glycine max
accaattaaagagttcacttccaaacatcccagccttccgtattggtacaattgaaacattgagaaataatcaagacttgtgtggaaatgtctctggcttggaaccatgcccaaaagcaagtaaaaaatctcaaaatcataagactaacaaagtcatattggtatttttacccgttggtttgggtactttaatattggcattatttgcctttggagtctcatatcgtctttgtcgaagctcagagacaaaagaacaccaggatgcaaaaccaccaggccaaaatctatttgtgatatggagttttgatggaaaaatggtgtatgagaacatagttgacaccacataagagttcgacaataaacatctcattggagttggaggacaatgaagtgtttacaaagaagaaattgacatact

SEQ ID NO: 148193 - DNA, 506 bp, Glycine max
  unsure (1)..(506): unsure at all n locations
cgccgaacnnggatgtgcattttgangcgctgcannnaccacactctnaatgttgagctcacgtatgtaggctacttgtgattcgcgatgttgtttggcgctttaaacgggnggaccgatcgtcactcatctatcctgtgcacagcattactcacattacaggatgctgaagcaaccgcgtgcataatttgaacaccaaactctaaccctcaacacaagctttgatatcttcaaagtgtggctggccaacttgccattggcttgccatatgtagtgaccgcgcttaatccgccgtcaacatcaactttcatcacactggattactgggtacacttgaaactattagaattggtcacgtctcacaactgtactctggacagcagactccatactttgattggaatcatggaacagcgatgagtgatgttgtcacaactcacgacatcttgtatgactgacaatcagacccttgggagtgtcaattcaaccacacagtagtcaggact

SEQ ID NO: 148194 - DNA, 508 bp, Glycine max
  unsure (1)..(508): unsure at all n locations
atgaaccatgaancttgataccctcgaganccggcgaactctgagacgacccgcggcatgcaagcttgttgagatacctggcgaatctcattttttctatataaaggtaatagaactaaatcatataaataaaaggcagacaaaatgtccattgtaaagcatgaccacatcaatttcatttgcattagtcttgaagacataaagattctacatgttgcaagaataagaatgtaacagtagaacatcccatttctcagagaatgtttacctattccaaaatatggttgtcttcaatgctaagcaatgtagaccatgctcattgtgcccatccatttgaatttcactcaagtcatcaccaacgttaacaagttctctagagcacctgactatcagacgacaaagatcttttgataaagaaacctcgtgacaagtaacaacatcagcttccacaaggtgaaggttaatacttttcctcaatgactcattcatgcatgatgcatacacaccg

SEQ ID NO: 148195 - DNA, 206 bp, Glycine max
  unsure (1)..(206): unsure at all n locations
actaagctaacaatcagtgtcatactattgatcaaacattgcaggtatatatatgcaatactagactcaaaatatgcaacanacactagacctaaatcagtgtcacagaaattggaagaaaatattgtatccaagcacatacttgaagccttattccatgtatagtggggaagttatggctggccatatgggtagaggtgtcatac

SEQ ID NO: 148196 - DNA, 437 bp, Glycine max
cttcaaacacttgtgtaatcgattacgatcaacctgtaatcaattaaaacaaagagttttaactatagaggaaatcttctaactttagaacttttcttctaacccctacatgatgatgcatgatgcacatatgatatgatagagactaagatgcaacacacaatataacaatcaatacaaatgccactcaagagagttgggcatgtaaaaaataaaacatcttaaagctcttcttcaagcttcaaggctaacgtttcatgttgctcctcctatctctaacaatattttcatggcacaaaacatatatatatatatatatatatatatatatatatatatatatatatatatatatatatatatatatatatatatatatatatatatataaaagtgaatgatatgtttttcacatagaaggcgttccaccacaatag

SEQ ID NO: 148197 - DNA, 519 bp, Glycine max
  unsure (1)..(519): unsure at all n locations
cgtgttgannccatcgatnaactgacactctataatactcaagctgggcagcanacgtatgtatgattntaagttggcttgggagtggttgctgacattcctttctagttgcacctattactaatatttatgtttgaattcgcatgattctattttgattttaacatgacttatgtgggagcagggatgatttgcccccaccttggatattcgtctttgctccttggagccattctctccttcggagtgatatggccgctcattgatcgtcgcaagggagattggttccctaccaatttagatgagagcatcatgagagctttgtacggcgtcgaggtctttctaacagctgctctcatcctcggtgatggcttatacaactttgtcaagattttagttttctcaatccttagcgtacatgaaataactaagaaccgtggaaatggtatgacgtacatgtcaattcccactctcttgtctgatattagtcatgaaaattacgtcacaatgctcattccg

SEQ ID NO: 148198 - DNA, 453 bp, Glycine max
  unsure (1)..(453): unsure at all n locations
tatctccgacagccaatgggtgagtctcgtccaggtagtcccgaaaaagactggcctcacagtgatcagaaatgagaaggaggagctgattcctactcgggtgcagaacagttggagagtctgcattgactataggaggctgaaccaggttaccaaaaaggaccattttcccctgccattcattgaccagatgcttgaacgcctggcaggtaaatcccactactgtttccttgatggttnttctggttatatgcaaattactattgctcctgaggatcaggaaaagaccacattcacctgccccttcggcacttttgcttataggaggatgcctttcggcctgtgcaatgcccctggtaccttccagcgatgcatgaatagtattttcagtggatttttaaaaaattgcatagaggtgtttatggatgatttcactgtatatggatcctcttn

SEQ ID NO: 148199 - DNA, 265 bp, Glycine max
  unsure (1)..(265): unsure at all n locations
taacgatttctaattatgtgggccattaagtctatcatatgctaacaatagccgagaagcccatgaatctcttcggnggcggagtaggtgtctgccattgccttggccttggctaacaagcggngaagttcttgactcccgttcaaggtaagagcaaaccgatccatcaacatggttgcctcttagtgtaaagagtcgatcacccttcctctagcctctntttccgtgtatacttgagcatactcatccgcgattctatgctcgt

SEQ ID NO: 148200 - DNA, 456 bp, Glycine max
  unsure (1)..(456): unsure at all n locations
naggtgttttgatgataacaatgatgacaacaaaatatgatgaaaaaaaagctcaagtgaatcaaagaacatctcaagagaatcaagaacaagtcaagagttcaagaatcaagaagaattcaagattcaagaagaaagcctacaaacaagaatcaagattcaagattcaagatctcaagaatcaagatcaagattcaagactcaagattcaagaatgaagaaaagactcaatcaagataagtattaaaaagttttttcaaaactttgaatagcacatgagtttttgacaaaacctttaccaaagagtttttactctctggtaatcgattaccatattgttgtaatcaattaccagtagcanaatgagtttgaaaatgtnttcaaactgaatntacaacattccaaatattttcaaaaggctggaatcgattacaatgttgtggtaatcgattaccg

SEQ ID NO: 148201 - DNA, 264 bp, Glycine max
  unsure (1)..(264): unsure at all n locations
gtatcacaatatatgtagctacttcccttgagaaaaaattaatggaaaattaatttgattntatatnntacttcaattttttggcaatggccggattgaaaaatatttaattgaataagggtgttatattgttgaatntgtcaataatacatgtgttgaagttattttggttttttttacttgattacttagtacccttctctatattaacgtttattatanaataagtngtttataactatgactaatngttcatattaaaat

SEQ ID NO: 148202 - DNA, 246 bp, Glycine max
  unsure (1)..(246): unsure at all n locations
agcaattggcaatttatactggaatattctaaattacaaatgtntataagaaacaaacctgcaaatgactagctacttgctctcttatcaaagcagggatattcatagcttcaacaatcctctttggctttgcttctgaagaataatcaagggagaagattaattacaattatcatagaattaagccatatacatgttnttaaataccaactaagaggaatacanatggtgaagaataatcatact

SEQ ID NO: 148203 - DNA, 457 bp, Glycine max
  unsure (1)..(457): unsure at all n locations
taaaaactataaaatgcaaggtaaataaaatgacattcagtttgtagatatgttgggtctttctaacaaacaagctgatgcatagaaatatatttctctaatcaatcgtgctcttgtgttctatgttgtagcctaaattactaaaccctcgatccctcgtcaggatgaatatccaagctttgtccgcagatccctcatttaagactacacctgatttagacagccctcttaggtatagactaacttaaactgagtntcatccgcagatcccttatgtaagactagactcacttcagtagcttaccaaagttaagcctatttaagccaaagctttgaccgcatatccttatgtagactaggccaacctaaccagctttatgtacagcatatttaaaccaaccttacctcgcaatccctcatgaaggctaagttaatcctgttcatcaattctaggcag

SEQ ID NO: 148204 - DNA, 73 bp, Glycine max
  unsure (1)..(73): unsure at all n locations
tggaagagntagttttactatttttattcgttgagcacagagtggtagntggagatatgnnggggnggttaag

SEQ ID NO: 148205 - DNA, 429 bp, Glycine max
  unsure (1)..(429): unsure at all n locations
gctcactacaagccttaggtgataaaccatgatattaccatatccttaanggaatttggagctttggaattgttntgggaataagtgtgtggggtctatggttcataggaacacatgccttgttgactatgcttcatgatgtattntgggccatacttgatgtacattgcatattggctaaatgttggacatgctgaatgaaatgttgtttctcataggtaaaagaaaacaataaagagaacagcaatacagttgagtgaataagatcttaaatggcacaagaatgatgagactcttggttctactcttcatgtctaattctatcttgactcttttattgcgtagtgttttaatatgcactatcccttngctctctattctttggattaccactattcatattctcataccttgccttgcccatacacc

SEQ ID NO: 148206 - DNA, 544 bp, Glycine max
  unsure (1)..(544): unsure at all n locations
cgactgattgatttgattcagtactcgnagacgctgatcctttatcactcacctgcgcgcatgcaagctggcttctacaaccctgtcaaacttaagtgtgctcgnagngggactgacaacccacgtagagtctgaaaacgagagtcttcacagtgcacagtcatgactgtgatgagcctagtcctactcgggggcagatcatatggagagtctgctttgactattaggatgctgcaccacggttaccataaaaggaccattttctcctgccattcattgaccagatgcttgaccgcctggcacgtcaatctcactactgtctccttgatggtttctctggttatatgcagattactattgctcctgaggatcagggatagaccacattcacctgccccttcggcacttttgcttataagaggatgccctttcgcctgtgccatgcccctggtcctctcagccatgcatgattactattttcagtgattttatagaacattgcatataggtgttatggatgatctctctgttttcgatcctcttt

SEQ ID NO: 148207 - DNA, 133 bp, Glycine max
  unsure (1)..(133): unsure at all n locations
tgcacaagccanatgtattgagttggttcaattaaacctatccttagcatatcttggcattcttgtgtagctgctagtaaatctgagggtgacattccaggatgcgttgcctcttctgtgtctgttatcgtca

SEQ ID NO: 148208 - DNA, 451 bp, Glycine max
  unsure (1)..(451): unsure at all n locations
acanaatctatgtatccaaaacccctcaatttaatggattntcaagttttgagaagtgaaattgggaatgggataaatttggagcaaactctcacctcacacaagtctataacatcaatttaaacttgttcaaactggatttacacctaaaatttcactgaatcaaaatttgactcctcaacccccaattttaccctagaaatggctctttgttcagtttggtcatttgtttttctctttagcacagcccanactttctcataagtcctaaatgacatttcaagctaggattaactcactttaacctccaaataccactaaatccagatttggccttccaactctaaaaaattcactctttntccactcataacaccataatctcaccttctaacccttggtaattctacccttatctctaacagtttccataacaatttcaccacaacat

SEQ ID NO: 148209 - DNA, 54 bp, Glycine max
gtgaaagggctagtgatgtgcttgtgtgtgtgtgtgtatgtgtgtcttggagag

SEQ ID NO: 148210 - DNA, 457 bp, Glycine max
  unsure (1)..(457): unsure at all n locations
cccatcaactgccctaactctttcagactggtgattcctagtctcttgaccttgacttgatagaacctctttttaagcgaaggcgcctgactcgatcccatgttttacaaagtgaaacaaaacccaatgtgaatcaaaactccgacatctatcatgggtggaatggatgaatgcttgaagaaatgcatatgacacagatacattttatgaatacgggagcccgggaaattgtccccttcttagatacaacattttgggcagcatggcgcctgacgtatgtatttaagaaggcgaaatggaccctccgtcggtttgacaaagtgaggggaccaagacacaatccgtgcatgatgcatatgcggaaggcacaaaacggtgatgtacatagtacgacaatatccacaaacaaatataagcaaaggcatacatgacatttangactacatgcatgacagtg

SEQ ID NO: 148211 - DNA, 402 bp, Glycine max
  unsure (1)..(402): unsure at all n locations
gctagagcttagctacacatacctctctaatagctaagctcacctccttgagatgagaagctagagcttagctacacacccnctataatagctaagctcacccncatgacananaaaacatganaatacaaaanaaagtccttactacaaagactactcanaatgccccgaaatacaaggctaaaaccctatactattagaatggccaaaatacaaggcccaaacgaagaanaaacctattctaatatttacaaagataagcgggtcatgcttagcccatgggctcgaaatctaccctaaggctcatgagaaccttanggccttcctttgatctctagcccaatctacttggagtcttctacccaatgcccttgcaggataggattgcatcacatgtcatga

SEQ ID NO: 148212 - DNA, 457 bp, Glycine max
cccatcacatgtggtactaggtggcggtcgggcgatggtgcacaacaagttttccacatccacaaagcgcgcataaacccaccatcccctgttgcccacctccaactgagctcacgtactcccacgtagcccatatcctcttttctctcaacaccgggtccccatcaatcctcccaagctttcccaacatcaaagtaaaacgacattcaaacagcacaagctatcacagccaagcaaaacagagcaaaggcagaaaactctgccaaaacaccaaccatatcacagcttttctcacttaaagactccaataacaattccttcgttccggttcattaaccgttggatcgactcgaaaattgtactggaagtctttagtacataagcctacgatttgaccgttgggatctactagcacacatccagaactcattgtacattactctctccacaaccagcg

SEQ ID NO: 148213 - DNA, 219 bp, Glycine max
  unsure (1)..(219): unsure at all n locations
tattgtagccgatgctctttctcggcgtcatgcattactttctatgcttgaaacaaaattgattggtcttgaatgtttgaaaagcatgtatgaaaatgatgaaactnttggagaaatctttagaaattgtgagaaattttcagagnatggtttctttagacatgaaggctttcttttcanagaaaacaaattgtgtgtgcctaaatgttctactagaaa

SEQ ID NO: 148214 - DNA, 544 bp, Glycine max
  unsure (1)..(544): unsure at all n locations
ngggacgtggatgaattcctgcattgtccgcacccggtgatcctntacagccgacccgcacgcatgcaacctttatgaactcacggngganaagcctcgaactttgacactcccgacgcgtcacttattagggtttgtttcgtggagcgttttggcgacgatagagagggcgtggaggccgctctggagctcctcggcgaggaggtcgtagacgagacggtgtcgtttgacgaggctctggccctcgaacttgggcgatacgatcttcacgttgaagtgggtttctttgtcggaacttcccttcacggcggcgtggcccgcgtgctggtacgacacgtcgtccacctccaaaacggtggcttccagcgccgtttgaagcttcgagcgaatcctgctggctcgagatagcagcgcgctggctcctctcgaactcattggatcggatgaatggtggcgtcgggttanggttttgagaacggaggagtttccgcagatganaacatggacagaaattggggagggaaagttatatttcccctctgcn

SEQ ID NO: 148215 - DNA, 480 bp, Glycine max
  unsure (1)..(480): unsure at all n locations
ntgaacccanagtaacaactatgacttggctcaacaacacttgttgcgcttactctcaaccttcaaaagcaataactccctaattgatcttttaagattccctatcctaaatgagttttgtttggggacaaatacctaatacaaaaaaactcaccaataagtctctattgagaatatgtttacatacattctatggttaagtgaatttggctctaaaggcctatagagttatatatctacaaaatgacttctcctttccccaacatagtcatgagttntgctactttagaaaagtaagccttctttcttcacgtaagtgcagtttttttttcttgttttctagttgtattgcttgtataagacttatgatgacaaattaatctctcatttccagaatgattcatgtcttttggagagcttgtcacttcatatgcaaatatattgttgcatggcatctccttccttgcttctaatgtgtgg

SEQ ID NO: 148216 - DNA, 424 bp, Glycine max
gggagttttacatatatgacaaaggcgcaacgcgttatggttgaaaatacccttctggtctttgactaaaaatataggtattagatctggagtacagataatcaagctaaaggtataaaagatagcctatgtggatcataacactataaaggtgtgaccaggctttacagatttctactgttattatattctgtcttttgctctgactctgataattatcaagatcctttttcatatgtctccgcaccgcttcacattctaattcatttacgtgtatatttctttacactttagaaactacatccatcaaccatgcccttaacgtctaaatctgtgacctgtcatcgatcaagcagaagcggtccaacaaaagtgaaaagacacgatgcggactttcccatattggagagatattcctcagacg

SEQ ID NO: 148217 - DNA, 353 bp, Glycine max
  unsure (1)..(353): unsure at all n locations
cgacacataactcccaccgcatatagaatatcgggccttgtattggttagataccttatactccccacaagactcttgaagaccgtggaatctaccttctctccttcatcaaactttgatagcttcaagccaccttccatatgtgtgttcacgggattgcaatcaagcatattatatatcttcaacacttcttttgtgtagctttcttgtgagacacagataccattctcccgttgttcacttncattcccaagtatatgacatgagtccatatttgcatatcaattcacagacatgactcttgagtctcaacaatttggtattgcgataaataggcatccctaaacaataat

SEQ ID NO: 148218 - DNA, 436 bp, Glycine max
ccagtttcctgaaaatatcaaggaatctcgttagatggcggtcgttgtccttcttggaaggtaccacaggatatggtacttttgtatcctcatttgaagctttttcttgcttcttctctcttgctttctcacttctactcttttctttcccttctttatttttttcaactttttctttttcttcattttctttttctttctctacctctatttctttttcttggtcgtttatttctttcttctcgaccgttattggtttttcactctcctaacttgtcacatctgttgcctcctctttctttttctcaatgccatcctttacaacaatatgtttctccaaagccaccctatcctcatcctcaactaccaaacgcttatttcttgtcatcacaacattacattcctctgtgggattctcttctgtgttcgccccaag

SEQ ID NO: 148219 - DNA, 365 bp, Glycine max
  unsure (1)..(365): unsure at all n locations
ctctacaattgcatcacctctcaatgatctggtgaagaagaatgtggcatttacctgtggtgaaaaaaaggagcaagcctttgctttgctcaaagaaaagcttactaaggctncagttctagctcttcctgactnttctaanactttngagctagaatgtgatgcctctggagtgggagttagagctgtattngtacaaggtgggcactctattgcttattttagtgaanaacttcatagtgccaccctcaactaccccacctatgataaagagctntatgccttaataagagccctccanacttgnngaatataccttngttccangggaattgcattcatagtgatcatcaatcacttaagta

SEQ ID NO: 148220 - DNA, 453 bp, Glycine max
  unsure (1)..(453): unsure at all n locations
aaggccaagtcatcacgatatgcgaggatgactccccgagcaagttggatttggtatgaccatgccctcctggtttctgactaggaaattggcgagtggaggagcgcccagacatttacgcgacaagcataatgtaaccctttgtggcttttaaactctacggtggggcctaggctttagagtttccttttgttatggcattatgtcttttgttcttgaatttataaatataaagatctttcttcatctgttcctgcacctctacccattctcattcatttgcatgtttatttctttacgcttaanacactagatccaacaacgagtccctcgaaggtactaatacctgngacccggccatcgattcaagcaagaagcgggtcaaacagagagtgaagaggacgaggatgtgggacttcccccagagttggagaagatagtcactcacgaggt

SEQ ID NO: 148221 - DNA, 479 bp, Glycine max
  unsure (1)..(479): unsure at all n locations
nggaatggcacttggaccacctatttgaatctcctatgctgtacctacatacataaaaacagtcccaccatctcaatttttacaaaatcatattcatacaccattggggcatttcaccaagcacttggtgagcgcatgtttggacatgaattgcaagagaatgggagcaatgtggcatgccccattgcttcagaatacaacctaggcctaagaccttttcattcaaatcctcaattcaagaaaacaagcaccaaagcaaaccaaaactgcctcacaaatataagcatgttctcacaatttaaggcaccaaaagatgaagaaaacacatcaatgggaagcaaaaacatcaaggatggaatacttacttgttggagtgaattgaaacaccaaaaatgaaagcaaaaggcaaccaatagtggcttgagggggcaagaaccacaagccttcgtgttctttctttcttgaatgagaagggggan

SEQ ID NO: 148222 - DNA, 541 bp, Glycine max
  unsure (1)..(541): unsure at all n locations
cggcacgatgtttgttgcattcgtacccgagaccctctagagtcacctgcggcatgcaagctngaacagattaaagtcaacaacactgactgttntggttgagaggtggagacctgagtcacacatatttcatcttctagttggtgaatgcatagtcactttggaagatgttgctcttcacctgagtttatgcgttgatggaaaaccaattaatgacctaacatattatgattgggaacaaatgtgtgcaaaatatatacgtgttgttcccccaaagaatgcactagtgggatcaacactaaaactaanatggttaaaagaaaacatgctgactctcccagcanaatccacgcaacaataattagcaccccattgtaggcatacattntaggaccaattagacaagtcaggaaacanagttcacctgatgtatctacctctgttagcaaatcttgaacaggcaggatggtacaattgagaattgacatgtttagcacatttgtacagagaaatgtttatgacaatttatccatcatcaaan

SEQ ID NO: 148223 - DNA, 221 bp, Glycine max
  unsure (1)..(221): unsure at all n locations
gcctttcttcttcctgaacacacatggtcattaattcattgatagaccacttatctttatgtgtcgtgtaggaaatcttaaatggcccatattcatgccgaagggtgttcagaatgaaatgcactangaaggactcagacatatcaacctctagtttcttaagtngagctgaaatatctcgcattntcatgatgtactcacgcatcaccttcacacttgtg

SEQ ID NO: 148224 - DNA, 170 bp, Glycine max
  unsure (1)..(170): unsure at all n locations
agcacaactagtcctatgtcttctctttgagagatanagatactcataagagttgatgtactctactatacatagttctctcactgtgtnggtcaacttgatgaactctctcaagtgtttcataggatcttcatgagcaccaccactaaatacgttgtctatagcatctg

SEQ ID NO: 148225 - DNA, 256 bp, Glycine max
  unsure (1)..(256): unsure at all n locations
gctcgaaagagagttatgcnctgtacacttanacagtgttcagagtaatatattatgccannaataagagaacatgacacttggacccaatgatgtccaatntcacaaaactcaattaanaggcttcanaaccataataaaacatgtcanatatatgcaaaatgaaactataatgtatgctctaatattctctatcagaggacattcgataggaacanaatgaagtcccttanacaatattcttattgatgatgat

SEQ ID NO: 148226 - DNA, 260 bp, Glycine max
  unsure (1)..(260): unsure at all n locations
catgtggactatgtggcggtcgggcgatggtgctcaacaagttntccacatccacaatgcgcgcataaacccaccatcccctgatgcccacctccatctgagctcacgtactaccacgtagcccataatcctcgttgtctcaacaccgggtgcccatcaatcctcgcacagctccacaacatccaagcgaaacaacattcaaacagcacaagctatcacagccaaagcaaacagagcacaggcagaaactctgccaaaca

SEQ ID NO: 148227 - DNA, 523 bp, Glycine max
  unsure (1)..(523): unsure at all n locations
nccacgggnaagttccccagnnantcantnanatnganannaancaaananaataagagaacaatgaaaatggaagaattgattcatgtttcctttgatgagtctaatgttatttgtccaagaaaggatattttagatgatattgtagaatctttagaacaaatgcacattcatggacaagattctaaaggaaaaggagaaggaagcaatgaagatcctccagtagaagtcaaagaaaataatgatcttccaagagagtggaaagcttcaagagatcattcccttgacaacattattggtaatatctcaaaagggataacaactagacactctctcaaagatttatgcaataacatggtttttgtatctataattgaacctaaaaatttaaatgaagccataatagatgaaaattggataatagctatgcaggaagaactataaccaattgaaagaaataatggtntggagttagttgagaaacctgaaaactacccaatcattggaacaaaatgggtgttag

SEQ ID NO: 148228 - DNA, 468 bp, Glycine max
  unsure (1)..(468): unsure at all n locations
agactgagcgcttatcacaaggtctgtgcttagcggatagacaattgcaaaaaaaatttctaagtctttttctgtctatatcttcacacaagcttaaaaccccttgttcattactaaacaaactaaaattaatcacaatcacaatcaagatatcctaactacatgcaagaggtaataatgaaaatagaaaagggaaagaaaagctaggttgcctcccagtaagcgctcttttaacgtcactagcttgacgcatcgtcctgttatccaggaaccaagagagttcctacttcaaggaccttcttctcaggtctcttttcctccatcacatgcactntanaataaacattntggctaggtggatccttgttctcctgaaacaaatcaaagctgatcttctgatcttctatgcccatccgcagtatcttttttcccatgtncaccacacagcttgcagtagacatgaatggn

SEQ ID NO: 148229 - DNA, 472 bp, Glycine max
  unsure (1)..(472): unsure at all n locations
aagctccttcaactgcacaaggctcttaatatttgaagagtatccttgtggaaccttcacccaacgaagacactgacaaaaacttatcttctccttcttggacaaagtatggcaggctgggggcaagtaaattttcttcccatcagaccttggatgcaactgtgatcgtatacccatatcagctagatctatgtgtgtggctgtgtgtgtatggctgtgtgtgagtgtatctgtgtatgtgtgagtgtgtgtgtgtgtgtgtgtggttgtgtgtgtgtgtgtgtgtgtgtgtgtggttgtgagtgtgtgtgttagtatgagtgtgagcggctgagtgtgagcatatgtgcatgaagcgagaaccatatctcaacctctgtaattctatgtacatgcactccccttcaactttaatgcgcatctatcagcaacctttcattnctctccgtagaatgcttcgacaatccgcccg

SEQ ID NO: 148230 - DNA, 475 bp, Glycine max
  unsure (1)..(475): unsure at all n locations
cgattggtgcatcagtcccgagaccctatnatcaaactgaggcggcgtctcactgagagggcacgacccagactgttcttattagaggtggataccggactcaccattactataatctctaccctgtgcatgcctgggggctccagtagatgcggctcatcccctgagcttatacgcctatggtataccagatacggaccctttatagcaagagtgctaacaaagcgtgcgatgcggatatacatgtagatcgccctgatactgcctaatgggagcacgttctggccttatggataggaaagcgtgatgccagctagtgacctcacgcactttactagtagactttgtggcatgcatgttagaccatctacagtaggaaccccgcacgtgggacctcctctggacatactggacagcagcggtcgactagattgcacgccatccactgcagagaaggtataaattatcatatcag

SEQ ID NO: 148231 - DNA, 511 bp, Glycine max
  unsure (1)..(511): unsure at all n locations
gtgatgatgcatcattatctacgngaacatactcaagcttgctcggcacgaggtacttacccgttgaagatcgatgaacgttgattatcgaatgaagaacgttgaagaacggttgatacctttgagagattcctcaccgacaacgttgcggatacgcattcgaatcgcgtgcgcttagattgacttgatgtggacaagtaatgcgagcaaattggattgacacataggtgcctaatgggctcaacgccttaattcttgtctttctaacctatatataacaaaacaagggacgtggttgacgcccagctcgcccaggcgagctcaactcgcccaggcgagcagggttgcttcctccagaagcaaccgccttctggaggaatattccggagggcccaagtgtgcctgggtgctatttgcacccccatctttactaagaacaccacgctacgctgttttcggggagggtctataatacagtaccgtaacttacgatcgtctgaagaaagggggg

SEQ ID NO: 148232 - DNA, 421 bp, Glycine max
  unsure (1)..(421): unsure at all n locations
agttgcacatggatttttctcanaacattcttaccaaagagtttttactctttggtaatcgattaccagattattgtaatcgattaccagtagcaaaatggatttgaaaaagttttcaaattgaatttacaatgttccaattaatttcaaaaagctgtaatcgattacaatgttttggtaatcgattaccagttcctttgaacgttgacattcaaattcaaatgtgaagagtcacatcctttcacataaaagccttgtgtaatcgattacactgatttggtaatcgattatcaatgattatttctgaataaatcaaaagatgtaactcttcatattgttttgatttttcacatggattaagctctctaaaactatactcttcatatgggcgatngaccaacttaatagtcatacattttct

SEQ ID NO: 148233 - DNA, 234 bp, Glycine max
  unsure (1)..(234): unsure at all n locations
acatcatctactattgttcatctgcttccatgaatgaagattcatgatcatcacaggtaccacaccacaggtacaanaattgcagggtgagtntattataaaagaaataatcaagcattagatgacaataattagcaaggaaactataacaataaccataatcatacttaataattcatcagtttgacatacactanacatctagtcatcaactttcatcatttncaatcaatc

SEQ ID NO: 148234 - DNA, 221 bp, Glycine max
aacagttcaatcacatgcccataaccacatcctgtgcccctcactgagctagactcacgaccattctgttttaaacggtccatatctccaagttccacataaggatcacataccagccagtatacagcagcaacaggcaagaaaacttgtcaaaaccacaaataagttttactaagaacagtacattctcatcaatcgtaccgtgatcgatcaaattatga

SEQ ID NO: 148235 - DNA, 455 bp, Glycine max
  unsure (1)..(455): unsure at all n locations
ctgagcaaattcaaacgacaataactntataatcggatgtcctattgagtcccctaatatatcaaactgctccaaattgaaaatggaagctcgtagcatatttaaacgagaataactctttactcaaatgtgcgattgagtcacgtaatatatcgagacgctctaaattgaaaacggaagctcatagcaaatgtaaaccgtaataacttttaactcggatgtccgaatgagtcctgtgatatattgagacgctcataattgaaaacagatgctctgcgcatattctaacaacaataaccttttactctgttgtgcgaatgagtactggaatattgngagaccctcgaattgaacacaaagctcctaaaaaatcaaacaaaaacttttattttatgttcactgaaccgtattttcggacgctcacatggaacaaacttctttattcaacgcagtcg

SEQ ID NO: 148236 - DNA, 446 bp, Glycine max
  unsure (1)..(446): unsure at all n locations
tcaaggaagcttcttaaggaagtttctcaaggaagctacctagtctataaatagaagcatgtgtaacacttgtggtaactttgatgaataagagtcttgtgagacacaactcaaagttcaacttctctcccctttttcctccttcaattttgtgctcccccctctctctttcttttcctccattgaagaatcctctccaagcttcttatccaaggcacattcttggtggcgaagctccttcttccatggctntttccctagaggatggcgcctcttctcctttgtcttccactgcatctccgtggtggaaaatcaccattgaaggacctcattgaagctcaaagatccagcctncatagaagttcacaagtaagcttcatcatattctcttangcacaacactgtggcagtatggactaccagcgacaatgcatcaccatnaaaat

SEQ ID NO: 148237 - DNA, 482 bp, Glycine max
  unsure (1)..(482): unsure at all n locations
ctgatggtgtcgagaagagatcacatgtttgtcatcatcaaaaagggggagaatgtgaatgtatgtatacatgattttgatgatgtcaaagaagaatctaacaaggctacttcaaatgataagcatttgcttcaagaataattcaagattgcttcaacaaacaaagccttgtttcaagattcactaaagaccaagccttgccttataacaaagtgctttcaagacatgcaaggctctggtaatcgattaccaggaagtgtaatcgattacccgaagcagggttgagaaatagctgttgaaaaaggttttgaatttgaattttcaacatgtaatcgattaccatatgtctgtaatcgattaccagcaacgaaactntggaaattcaaattcaaaagtcataacccttcaaattataactgtgtagtcgattacacacacattgtaatcgattaccagtggagagtttcagaaaatctgccacg

SEQ ID NO: 148238 - DNA, 441 bp, Glycine max
  unsure (1)..(441): unsure at all n locations
attaggttgtcagttctgcaaagataacaatgcagacgtagcataattacattatagtaaaaaaattggtttgcagacacataccttgattttaaatttttgaacataaacgatcataagctctagaaaaaatactcaccagtctccaaaaacatggttggcaatggcacatggtgagtggccttggcctccaatgtaatctaaattagggaaataaatcaaattctaccaaaagtgcttttcaaatttcaaaatgtagacttaaaaaacacaaattaacactatgtcatcatcctccaacaaaaacaaacctgtgtttgcattctatgaagtgaactatttgtttaaatgattatgcatgaagacattanacacagttgtaccattaaatatgcaaactatgagaatntcanacaactcanataccaagccaactattta

SEQ ID NO: 148239 - DNA, 262 bp, Glycine max
  unsure (1)..(262): unsure at all n locations
cattctagcagntccttatgatataagctaagtcaatgaccagccttangttttcgtatgaggtgagagcatcagatccaacttcccttgatctacacaaggatgtgattaaagctgggaagcctanacgagaagagttagatngagccatcatggtcatttgtctagagatcaaaccgccaatgttcatgtccatccttgtgattaagccatagaccgacctagctctatcntgtgtcanatctgaaatgaaggatgtatg

SEQ ID NO: 148240 - DNA, 537 bp, Glycine max
  unsure (1)..(537): unsure at all n locations
ggtgactccatncnnnnatgaaacctctcgtagtacccgtgatcctctagagacgaccccgccgcatgcaagctntgcggatttggtcttcgccagtgaaatgatcgaagtggatctgaaaagaggcaaatttaatcatcctgcttagacgaatgagaaaactgnggcaaataaagagggtgaggatgagggagaaacccatgctgtgactgccattcctatacggccaagtttcccaccaaacccaacaatgtcattactcagtcaataacaaaccacctccttacccaccacccagttatccacaaaggccatccctaaatcaaccacaaagcctgtctaccgcacttccaatgacgaagaccacctttagcaaanaccaaanaaaaacaccaaccaagatatgaattttgcagcgaanagcctgtaggattcaccccaaattccggtgtcatatgctaacttgctcccatatctacttgataacgcaatggtagccataacccctgctagggttcctcaaacacctcatttttg

SEQ ID NO: 148241 - DNA, 512 bp, Glycine max
  unsure (1)..(512): unsure at all n locations
nggcgtgctatgtcctgagnatcnacngatntgaaaaaccaagctttattttgcttgattctctgcaattctctgcatccttgctcctcgaattgaaccttcaacctttgacattattttctccttcttcactatgagggaaggtaacttctttgtgtgagtgcttttggttttggttttgacgtaagtaggaggaaggttataggtaaaaaaaaaattataattattttttaatcattctgtagagaagaagttgtttattaagagagtgggtgagagaggttaattaataatggagaagttataactccctcctttatctaattgattcacatgatattttagaacaaacacaatatttccatttgtaataaacattcataaaattaaattcttcgattaattagcatgaatggtagcagtatgaagaattattatttntatcaatgaggcaagagatagttctaattttataaaacaagttaaatatgctnttagtccataataaattg

SEQ ID NO: 148242 - DNA, 533 bp, Glycine max
  unsure (1)..(533): unsure at all n locations
tggacaagttgacgcttgtaaactggaccatagagncaccctgcggcatgcaagcttatcgctgacttattatccacaaaaagcttcactccatcactctccttgattnttaattcctataataatgtgtccaaccagacagcttggcaagcactcattgcagctgcaacatactcagcttcacatgatgataaagccactatggattgcttcttagaactccatgatattggtgttgcaccatacatgaatatgtaacctgtagtactctttttgtcatctctgtctcctccccgatccgcatcagtatatcccactaattcttctgagttggtgttgtctttatttggaaatagaattccagtattgatggttccttttatgaaccttagaatcctcttagcagctaggagatgaggaattctgggtcttttcgtatatctacttaccagtccaacaacaaattccaaatcaggtcttgaatgatacaagtacctgatgagagaaccaacaatctggttgaactcagtttn

SEQ ID NO: 148243 - DNA, 301 bp, Glycine max
  unsure (1)..(301): unsure at all n locations
agagacatgaaagaccggatgagntttactgtgagatggaagatctaacttataagcaacaacacccaccttatntaacacctggaaaggaccataaaatcgangggagagnttttcattaatccttntagccaaggatcttctcttgtagggtgcatcttcaagaacacccaatcaccgactgtgtattctatgtcctgacgaacgtttgtggcattngctcgcatgatatcttgagacttcaacangatttctcttatagtagccaataattaatctaagcaannttgtagttattgac

SEQ ID NO: 148244 - DNA, 450 bp, Glycine max
  unsure (1)..(450): unsure at all n locations
attatcatgaaaccaccctanaccaagagaacagagtagaggcagaaaactctgcccaagactcattcaaattccacagttttccctactcaaataccccagtaacattctcttagttccgattcgttaaccattggatcaccttgaaacgtttactggaggttcctagtacataaatctacattttgaccgttgggatctactagaaaatatctagaacacgagatatactacctttcccgtgactggtgctgcacaagcattttttctgcacatttggtcaagtttgctgcacaatttgacagcttttgctgcacaatttggcagatttcanaatccaactttcccacantccaatttactcannatggatcctanaattcctaaatcatgtataaatcatanttaaaccanaaacaaacttcagaccaaggcanatcanaatatacg

SEQ ID NO: 148245 - DNA, 362 bp, Glycine max
  unsure (1)..(362): unsure at all n locations
ctcagtatgttccttgggtagataattaataattaacttagatacaattcacaattgtatataancattanatatgttataattaaagaaataactacctctcttgcccacactttggctaccacatgattaacatatgatgtcaacactaatgtatcttggggcccacctggaaaaccctatgaatcaacacctacatcctttgtaattggatcatganngttctcatgagtctcatcagcagcatcatcgatatgcccattatcctcgacaataggtgcagttgttcattatctacgtgtcgacactttcaatcttcgacgctgangggcttcttctcgtcaccactaacctctctacct

SEQ ID NO: 148246 - DNA, 531 bp, Glycine max
  unsure (1)..(531): unsure at all n locations
tgatgaatcatctcgancttgagatccttagagacaccctgcggcatgcaagctntgaccgcatcttaacaatatcttttgttctattnttgtgttgttnttaatcaatgtctttaagtgcatcttaacaatgtcttttggatagggatgacaaaatagacactaattttgtgggtatctataaaagtatttgcaaataggaaggataattatctgcttattgggactagagatggggcggngatactatagtaccatctcacccctccccgcacatgtatgtcatatattttatatattaatgtaattaaaaaataattataatttcctaattttatgactagcaataacaatctaacaaagaataaagaatcctaattcaacattgttatattaaatttgcttcacattctacataagaatatcgaactactatttactgtttatgtataaagtaatgactctgctaacaagttattataagattgacttgtgaaatggtattctgtgttgttcgatgcttcaaactag

SEQ ID NO: 148247 - DNA, 470 bp, Glycine max
  unsure (1)..(470): unsure at all n locations
atttcaatgcggaaagtattatgttcttcactatccatgttcacacattattgctgcttgtggttacgtgaacatgaattacttccaatatgtagatgttgtttacacaaatgagcacatcctanaagcttattccgcgcaatggtggcctcttgngaatgaagcgagtattcctccttctgatgagcaatggacacttatccctgatccaagtacaattcgtgcgaaaggtcggccaaaatcaacaaggataatgaatgagatggattggctggaccatctgacaccgacaanatgtntagatgtgaagagaagaccacagacgtgatgtcaatgaatctgatgtggaagttgtaataatgattatgtatttgttgtcacttaatgaatgacctatcatgacagctgttttaaatagtatatatattatggcggcctaactgacaatggtaatatatacataatgatat

SEQ ID NO: 148248 - DNA, 315 bp, Glycine max
  unsure (1)..(315): unsure at all n locations
ctgcagctagctgctggcagctggtggaagctccttctctatttnnnctataataggggaggagtgaaggagagaaatgttcagaccttctggtatttcgagatcacttgaaattagtgaaaaanactgtctccgtgaagaaaatacaagccgacgcgctttcgtaacgtttcgtggggatttcgcgaagaatttacctatntcttcgacgtcttcgttcgttcttcggtcttcaacccggtaagttctcgaaatcgaaactttcaattcattctatgtacccttagtggtcctcatttgtttcacgtgctttat

SEQ ID NO: 148249 - DNA, 352 bp, Glycine max
  unsure (1)..(352): unsure at all n locations
ctctctctnntcgaattgttgaggaagattatttccgtgaagaanatccaagccgagggcgcttcgtaacgtttccgtgagtaattacgcgaatattctcgaccgttcttcanagattcatcgttcgttcttcgttttcttcagtcttcaacgggtaagtacctcanacaaagctnttcaattcactctatgtacccgtggnggtccacattntggttcatggagttttattctcattntcatttactnttntataccccttttgacgtgcttaagccatntatttaagtcatttctcgcttaatctacnaaataaaataaatttccaccgatcggttgaatcgcatatccg

SEQ ID NO: 148250 - DNA, 514 bp, Glycine max
ctttgactgctgcatctgcgacccttagagacgaatcgaggcatgcaagcttagcaccactatcgcgcttagcgcgagtaaatggatttggacttggcgccaatgttgcactgagcctagcaagagatggacgactcgcttagcgagctgatctcgcgcttagggcgctgcttcgattcaggtgctcttccagattcctttttcacgctaagtgcactgaagccgtgcttagtgacggatacgcactaagtccactgagttcgcttagtgcgacacccagcttccgacttgaagacatcagtaacttattatcttagctcggccaaagtctacctctcctcatctcacagaggccccacgcatcgtactagcaccgctgcctgttattcgtacaagtagctgacaactatacacaggtacccttcatctatcgcatctacctcaacgcaagcatcagctactgtacgtatcgtctcatctccgcatcctctcgcgcactgccacgagacgtccg

SEQ ID NO: 148251 - DNA, 341 bp, Glycine max
  unsure (1)..(341): unsure at all n locations
tctacacctgttgcaagagtctgtggtctatgttcttctacagatcaccatacagatctcggtccttctttgtagcaatctggagtcaatgagcaacctgaagcttatgctgcatacatttataatagacctcctcagcagcaaaaccaacaacagaaaaataattatgacctttcaagcaatagatacaatctaggttggaggaatcatccaaatctgagatggacaagtccttcacaacaacaacagcttatcgcttctttctagaatgctgctggtccaagcaagccatatgtntcttctncaatacagcaacaacagtcacaaanaagacaacaagc

SEQ ID NO: 148252 - DNA, 450 bp, Glycine max
  unsure (1)..(450): unsure at all n locations
atgtatccaaaacccctcaatttaatggattttcaagttttgagaagtgaaattgggaatgggataaatttggagcaaactctcacctcacacaagtctataacatcaatttaaacttgatcaaactggatttacacctaaaatttcactgaatcagaatgtgactactcaacccccaattttaccctagaaatggctctttgttcagttaggtcatttgtttttctctttagcacagcccagactttctcataagtcctatatgacattgcaagctaggattaactgactgtaacctccacataccactaaatccagatttggccttccaactatanaacattcactctttttacactcataacaccataatctcaccttctaacccttggttaattctacacttcatctctaacagatctccataagcaagttcagcacacatacatn

SEQ ID NO: 148253 - DNA, 471 bp, Glycine max
  unsure (1)..(471): unsure at all n locations
cgtcagagtttanggattgagcttggttcaactgagtgtccatctgccccatctgattggtcaaactctgaatggaggctcttgtctcttgctgaaactgcatattttgtattgtcatttgccttactaactcctctaaggaaggttgagaaggggcctcagttgattgttgtctctgttgttgttgctgttgatgctattgttgttgttgcattggaggaggaatgtatggcctgcttggaccagcaacattttggaaggaaggagcaggttgttgttgctgttgttgagggctagaccatatgagattagggtgattcctccatccgagattgcatttgttgctagagaggtcataattgttctgctatggctgattctgctgctgaggatgaggaggtctattgtaaatgtttgcagcatatagcttangctgctcaattgctccagattgctgcatagaanggcacg

SEQ ID NO: 148254 - DNA, 446 bp, Glycine max
gtttccgttgttcaatttcgagcgtgtagatgagttatgtccccgaatcggacatctgtgtgaaaagttatgaccattcgattttctcgagagcttccgttgttcaatttcgagcgtctcgatatattatgaccccgaatcggacatctgtgtgaaaacgtatgaccattcgattttctcgagagcttccgttgatcaatttcgagcgtctagatgagttatgtccccgaatcgaacattcgagtgaaaacttatgaccattcgaatttctcgagagcttccgttgttcaatttcgagcgtctcgatatataatgtccccgaatcggacatccgagcgaaatgttatgaccattcgatcttctcgagagcttccgttgtcaatttcgagcgtctcgatatattatgtccgcgactcggacatccgtgtgaaaacttatgaccattg

SEQ ID NO: 148255 - DNA, 400 bp, Glycine max
gagtgattcaagaacaccctgtctgtatcatatgacattcacaacctttgcgtgttgccctcgctggaaagagcgagtctttccttcctttcatctatacccgttgatctttcaaaccacaagtccagaagatacacctctgcccagaattatatcgtggccataactcccattctacgcactcacattaagtgattcttgagcctatactgaatttcacaacgagttctttcacctcagtatggaacacctcattggagccttagctcagtatgtcattctaattttgtcaccacacttactagtttacatccattatcatttatgcaagaccacttatagacacgaatacactattcaccttctataatccctttcatagttatcaacatctagcact

SEQ ID NO: 148256 - DNA, 457 bp, Glycine max
  unsure (1)..(457): unsure at all n locations
tatacaatgttntcatgataaaagcctctgttgaccatcggaacaagatttccaaagggtgcctctggaaatgcagtccttgcattcatgaacctgaactgtgagatgaagatcgaagatcaaagatcggatggttcatgtctcgaatacttaatttaaattagattggtggagataaaatataattggtctgatcttcatacaatggttgcgattagccaaatgcctgaatatgggaaaattccctgactgccgtgaatcccaatccctctaattaaataagctttagaatgcagcactgaactaaaaaatttcttgcgtcatttatatacaatctagtaagtaatgcaccaaagttccaatttttgcatcanaggacagagctgatagcacataaactaaatggcataaaaatacaaccaaatcttatcactgagttctatcaatggaggaggcg

SEQ ID NO: 148257 - DNA, 260 bp, Glycine max
  unsure (1)..(260): unsure at all n locations
ctatcttaaagtaagctctatgaaatttataaatcgatatttatatttctaacacgatcttccttacaactgataaagacaaagagaacaaattcaattataaaataaaggataaaggaaaaaactcttgacccacacacacaaaagagacgtattatagtaaaaaatatttaaggcatgaaggataagcaagagtggntntaatttataattctgacgttctccttgtaattcccattcataattttcttctgtacttg

SEQ ID NO: 148258 - DNA, 446 bp, Glycine max
  unsure (1)..(446): unsure at all n locations
tccttcaaataacttgcaaattatggttctagaattctataattttctataggtttcagtctgctagctagttattagactgttggattctgaatagggtttatcccagatttattgtattttttgtttctaggtaatgtccagtcatgcttctttaaaatctaattatttgaaaccacaaaatttagagcctgcactttttaatgtgtttatgaaattcttcgtttttagctattcattatccttgcaatctcttatttcacatggtagtacaattcanattaacttcagattttgggtttattttgatgtttgctctcgaagcagtctggaattttcggtccttgtagacgggttcggntaatcctttcttatnggtntgtctgtactttgtaggaagcactcaagactagtgtggacgcttcagtcgttcccacatttgagag

SEQ ID NO: 148259 - DNA, 255 bp, Glycine max
  unsure (1)..(255): unsure at all n locations
gatctgtgcttgcaactgctntaagtagttaatcatctcatctaacattgaagctntatctgtctgcaattttgccaagtaatccaccacgtacaggaataatcaatccacatatatagaacnntgattgtgcattngattntggatngaatatgnttntaactatgtaattnttgataaaaatgaaatgatattagtctccgattctaactttaatcaatttaatccttannatttaaaagactgttntcgtca

SEQ ID NO: 148260 - DNA, 441 bp, Glycine max
  unsure (1)..(441): unsure at all n locations
ganaactaccaaaactacccatcatatctcccaaaaccccatacccacgaaatttaagagagaaagaagtccacccaaacctgaaatttcgaagtcccactcgtagccacgcacttcacgactccaaaaatgccctcctttcgcgatttggagcagaaatgagcaccaaaggttgaagctttgtttggagcttcaatggagaatgagggagaaagaaaggcaacgtgaggaagagagagagctgtctgaaaaaagtgtgggggctgagtgaagagagagaanagctttntggttataaaataaaagggttttctctttttctattattntattcanactctgccacgtgtccctaattgagtggagcanaagggcccactttctcttttactgtgacccacactcagccacanaagtgagaanaatctgacctttganact

SEQ ID NO: 148261 - DNA, 535 bp, Glycine max
  unsure (1)..(535): unsure at all n locations
agagccgataggttgggngcttgnacnantcgacantatatagtactcattgctgccaagaaggtggtggatctcgaggcccgactgaatgaattatagtccatgctcaaggagtctgagctacgggctgctagagagagggaggccagcaaggagcttgaggaggagtttttcattttcaagaaggaggccgtggagcagcatgaaaaagggccttaacaagccgttgggcaggctgggttcttcaccaaggaccttgacttgggtctctttgacccttttaaggacgtgaagaatggtgttttgcttgacaaagacgatattgctgctaaagaggagtaaggcgatgatgccattggttagggtgcctttcgtttattttcttcttttctccattgtttgaatttagccgcatgggccttgtaattatgacaaattatcttcataagctttccttcgatgacaaattntgcactatntatgtatgtcttgtgtgttggccttatctatgcaatgctccatgcttgtggtagtn

SEQ ID NO: 148262 - DNA, 406 bp, Glycine max
  unsure (1)..(406): unsure at all n locations
tacacctatactcgccactcctttcacagncaantaacacaaacaanagccttcctctactacctgtgttngtgcagaccttacaatcactgccacanatccattttcatgagcaacggatcgagcccaccgcanaacatnctctcggctgtcaatacctacaaccaatcagataatatcagttctacaacatattatttatttataaatactccaacataacgtattactaaaagattgacgcatcaacaacaatggattatcacccaattttctatttataatcaatcacttttaacataacttatcatcatgactcgcatatacataataaaattaaccataaacacccatcaactatctacatcaacttctatactctctgtaacagttataaacaataata

SEQ ID NO: 148263 - DNA, 466 bp, Glycine max
  unsure (1)..(466): unsure at all n locations
ttctacagaatccgtanagtttcgtgaggtttcggaaggaaaacaaccaaacaacacaaaaattgggggggggggtgaacttatcaagctaggagtgtaaatagcaattttcaaatcttggcagaggattctggaccttttctttcttcctggctaagcaacttgggcgagcagggtggcaagcacctccctcattttgttgaaaaatggcttccggcgcttccgtagaattcccgtaaccataaataagtatatttcacttaatatgggtgagaaggaagaaaaaaaaagaagaaaatcaagtccgatatgcttccgtaactttttcgtaaattacgaagaaggggggtgaacttatcaagtgcgaggtgtaaatagaaatttttgaactttcgaatctcggcccttccagaacattatggaagctcgggttgcttaggagggagcagcctacctcgcttgggcc

SEQ ID NO: 148264 - DNA, 444 bp, Glycine max
  unsure (1)..(444): unsure at all n locations
cataacatttctaagtgataaagttttcttcttgacttctctttgggttctgctcatggtttcttttacaagtctagttctaggctgatatgcagtggagttggaaatctttattccagtaatgaccttgggtattttttctgttttctttcttactttgnttgtgaggatatcttattctcctctatactggacacacttcctttctctcttcattaaactttcttctttatagagatctgaacttgtggaatttgtgtccaggttttgcaacagttgcagtctatgactctgatgaccaatctcataattttctttgtgtttctcttttggtatttctcaattacacatcgcgttgttatactctgttgattttaatcccttctatactagttgntcattgtgcttaatatagcttcttctattttaatctcatgcagcttg

SEQ ID NO: 148265 - DNA, 488 bp, Glycine max
  unsure (1)..(488): unsure at all n locations
atctccttcttcactacatcaagaatcaccgngttgagtcttctctgtggctgtcttactgggttagctccatcttctanatntattcgatgcatacatgtggatgggctaataccaggaatgtccgccagggtccagcctatagccttcttatgcttcttgagaactgacaacaacttctcctcttgctcatcagcaagggaggcagatataatcactggagaactcttgctatcatccaagtaagcgtattntaaatntgatggcagaggcttcaattctggtgtggtcggctggacagtggtagaaggagatggtttctcagcctttacctcataaagaaagtcagaggtatgtgtacttcctgaaacatggttagtcctatctgactctatnaaatcaatctcaagaggtanaacaccaccaccaggcatgcantcaatatcactctcagaatcactctcagcatcanattcagacatatgatc

SEQ ID NO: 148266 - DNA, 532 bp, Glycine max
  unsure (1)..(532): unsure at all n locations
ntttaatccctcagtgcccgagctccttaagaaaccccacgcatgcaagcttcacggtgaatctacagtgattcanagatgttntgatgataacaatgatgataacaaaagatgatgacaaaggtgatgacaaaaagctcaaaggtcaattaaaggatgagttcaagatgttcaagaaggaatcaagaacaattcaagactcaagacgaaaaggttgaaggacacttcaagattcaagaggaaagttgaattcaaaaatcaagattcaaggatcaagatttaagaatcaagatcaagattcaagattcaaggttcaagaactcaagagaagacttaatcaagataagtatganaaggttttttcaaaaactgagtagcacatggattnttcacanaacatgtttagcanagagtttntactctctggtaatcgattaccagattgctgtaatcgattactagtagcaaaatgttnttgaagttntcanattgaatntacaacgttccatttaatttcanaaagctgtaatcg

SEQ ID NO: 148267 - DNA, 290 bp, Glycine max
catttgcgtgcttatttctgtatggtatgagatgaaatgcaaaggttacgacttgtgttagtcggttataatggaatgagcctaaacacttgagcttgagtgaaacgacgactgtgaggctgtggttgaggatccttccttgatatctgtcattctcactagcttatttcaattatgactctaatgcatatctttctatctttgaaaagttgcatgtatgtgagaagcaattgattgaagcattccatgatattcatttcatatgattgaatttttctgtaaacaaacac

SEQ ID NO: 148268 - DNA, 377 bp, Glycine max
  unsure (1)..(377): unsure at all n locations
tatcacatatatatatatgttatgcgtacaacatatatcattacgcaatgacatttgagtataataaaaaatagttctgcagggcctaacatttcagtgcttatattaatttaggtaccacttaacatttattattgagtcaactctctaacgnatattcataatttctctttgtaatattaatttaattggntaaagaaacatatttcttatggataataatggctttcagnttcttagtgaaccacatctgannaatatacttgacaagaaatgtgttactatgtcatagntaatctttttttcttttaaatacatcatctcttatggacgattttagactcggaggacttattatatggacatacacttatata

SEQ ID NO: 148269 - DNA, 396 bp, Glycine max
  unsure (1)..(396): unsure at all n locations
cacacatgtagtgaacatctatgataacctgcttcgtgtaagcattgtgttagctataatntatgaagaaccacttctagttctataattgtacaacatattagcatatgccanactatgtgtatcatttggatcaccagaataagaatattacctcaataaaatctccttttggcattagtgctctgcatgcatctctantcctttggtatggtgatattaaactagtgatgcaaataacaccagcatctgcaaagaagttagccacctcacctgaanatntaaatcgtgatgtctaantattaataaaacaataaaatataatcggaagatatcaggganagcatttagaaagcaacataagaaaaaacagaataactcaccaatccttctaat

SEQ ID NO: 148270 - DNA, 225 bp, Glycine max
  unsure (1)..(225): unsure at all n locations
tagttaccttcttatgcctagccctatanatactcanaaactcttaattntaggagaattttgtagaattgaaattaagntgtgcttagagagagcattagcctcttctttggtnttgactagaaaccaaatggattcttctcaaagaagctattcctttatggcaaatcctcctactcggtatcgattcttcatggattgtggcatcgntctgtcatcttctca

SEQ ID NO: 148271 - DNA, 203 bp, Glycine max
  unsure (1)..(203): unsure at all n locations
acgttatctatagaacatttccattggatgtaatggatgaaattgtgcatctttaggtgagaaagaggctatgttttgaattgcanaatgtagcagttgggctaaacgcatatccaccggtaagcgcaatttcagcgtgcttagtgcanaggagaatctgggagagcatcaacatcaaagccgcgcgctaagagtgggattag

SEQ ID NO: 148272 - DNA, 455 bp, Glycine max
  unsure (1)..(455): unsure at all n locations
gacctaaatgaagactaaacatgcattgtttatgtaattgtattcattatgcgatataatttgttgtaagccattaataaccaattaatattattaagtactcgttttgttaagcaaaaaaattgttggtccaacaaaaatcatttacgcgtgtaggatacatcattgtcataattgacaacacataatgacatgcatgcgtattaaagtttgagcgcgacaccacattgactaacttgactacacattctgaaggaaacataaacacgaaacatgttcatgcgtgtctaattttttgtaaacaaagagaagcaatctgtctgtgacaaccatgtatatatatagcagacacaactaataaatcacacattatcttgctntcacatagtctcccaatggatacacanagtatgaaatttgtagagaaactagcagtcagatgattgcaactcacg

SEQ ID NO: 148273 - DNA, 483 bp, Glycine max
atgttagtctgctcacatcaaagagatatattgtcttctctctcagatatatttgatcctaatcttatcgttttcttatatgcgaactcatcagctgtaacattcttatcttatctacacacttgaggttatatttatagtaattaatacaacttatatcttatctttgattaacctgtgcagattgttaagctttcgagaattaaaaaaagaattagactcttgaggatcctgaattaaacgtgaacaagtatatataggagcaagtttatccattgtaatcattagattagaaataaaaactacttgtttgtgatagaaataaatatttatagttaacccacaatgaatttcggaatattattattgataattttatagtgcaaaggtatttacattatatacacttaggctcataattgtttgcccagaataaagcaacaaactattccaactataaagggaaataagtcagaaataaat

SEQ ID NO: 148274 - DNA, 448 bp, Glycine max
  unsure (1)..(448): unsure at all n locations
tagcattaaatgcacatccttcttgatgcaacaaaattactctgattggcttttgtgtagaatacttcagtataaaaccacttttccttggtcaaagcatgtttttcacatctgaatgcgtcttttgatgttgttttaacaattttttaactttagtttcatttattattcataggattcgacaaatcatatgagaatgtctctccaacatgaatctcagacacagaaaaataaatatagagcgaaatatcattttttaatgttgtatcaggtcatgacttggtcctatcttcatctaatacttttgacgcatgatgtatacaacatgatctgatatcgcataagatacaactattcaccctcgtatttatgtgcatcgaataagaacaattatgagtattgatttatcttatgacataaatgtcnttatcttaacatagatgaaatg

SEQ ID NO: 148275 - DNA, 277 bp, Glycine max
  unsure (1)..(277): unsure at all n locations
cctggagatatgtncgcggggtcaggagaaccttgggacgtcaagtggngtgctatngcccanaaccaagcttgaccaatcccgacccaacccgcgcatagtcggtcagtgagaacctgtgatgtacctaagcaggcgagctcctggcagtcaacagataanaggaaaacaagaccacanagcaaggaggcttgtggtggctggccagctgtgaattttgtgtaatatgtggattgtggcctctggtaatcgattaccaagggtgagtaatcgatta

SEQ ID NO: 148276 - DNA, 74 bp, Glycine max
  unsure (1)..(74): unsure at all n locations
atngcttaaatttcagaaccatggaagtaggttatgtgaaagattgagagattaagttggctctggaagaagaa

SEQ ID NO: 148277 - DNA, 302 bp, Glycine max
  unsure (1)..(302): unsure at all n locations
cggtgatactggtttctagaagtggctccagccattcccatgntttcacatttaaagaaaagggagaaacaaccaaccttatgtactccttgctaatgttgggttntttaacaatgtcacacaacctcaagaatctcctcanatgcatcacaagaagctctgnntgaactggtactnttaatcatctggaggaacccatgtgtgaactcanaagtaactcctcgaggaagtggtggtagttcaatgggtgtggtttctcccaccagatgggtgacataatacagcaatgtcagtgtagcatc

SEQ ID NO: 148278 - DNA, 436 bp, Glycine max
agatgaacaaccaaatgaaacatgacagtgaagaataaaggaggaaatatcatttccatgtggtataaagtgagaacaacttgattttgtaattagcctaaggtcttaacttccaataattaagccacctatattctattctgaatgactactactcaccaattatctgtacgcccccccctcccatccgttcacggatagcacacttgcgtgattcgttgttatattttactcagcggtcctccgcgcacccctcacgtatgcatatctgatacccctcggatcgtcttatacaccctccgtccttgcctctccgtctgactctttctaccgactatgtatcgtgatgactcgtattccgcgccgttctcgctcacgagccactctgctatctttgagtctcttatcttacttagctctacgtctttatagctct

SEQ ID NO: 148279 - DNA, 125 bp, Glycine max
ttactatttttccttcaataaatttgaaataaaaacacaccctcgaagactacttaagtaagagtacacagaccagcctgtatttaaatttgagagtatgtctgaccaaccgaagggaggcgatc

SEQ ID NO: 148280 - DNA, 350 bp, Glycine max
  unsure (1)..(350): unsure at all n locations
cttctagtttcactgatacttgtttactattactggacaacatatctagttctatgtctntcannattgnttattaaaaagctttcatttgtganaaagttattatctttgattaatgcactattcaacccttcattctagtgtgatnnttggtatttcatcatctattttaaaatcgagacatttgatcattctaatttaaaaattctgcaatcttggtctccctatttcataatacaaacatntggtctccatatntaagagaatctgcaattctggtccctatattntagaaaatcctcaatcttggcttaatctttaattgtgtctacattcttatttcttacttt

SEQ ID NO: 148281 - DNA, 505 bp, Glycine max
cttgaaccccatctagtacccgggatcctctaagccacctgaggcatgcaagcttgaacattctctcatttgattaagatattattactctacattttaagactgagacttatgagaaaaaacacaaaagctggtgggctagactattagcctaggacaagataaggcttgaagggggccaagttttatttgctcaatcgaaaatgcgaactaacaccaatccaatccggttatacttattatgtcaatgaaatcactattaaatcatctaaagtcaatgagatatcgtatgaattgttgctattaactaacacatacaccaaagactagaacaacgaattgatttagcatcgaatatgaagagtgaggagcaccaacaacattggcagtgtggcataattttctgcagacgcagcatccaccattcgtgtctttcgtttgatggtacattgctgatgacgcccccagagaaaagaaaggattggattgaatgaccatcattgct

SEQ ID NO: 148282 - DNA, 460 bp, Glycine max
caacacctattacaactcttaatgcatgctttcttgttgcatttaagctatcacccccaacaaatttgcttaaaccatatgaattcaaactcgtggtgagttaaccctcttttggaccatcaacgttgacctcaaccatatgtctctttgttcttacattagtgagtgggaattgatttgctgaattttcattaatgacaccaatgatgcatctgagttgggttattgattgtgatcaaactctggtgaatactgattgatgtaagcttttgagttaattaaggtctaaggtcaatcttctaatgattttgagctctccaacaataccaaacaaccgtgaaaagtgggtgggtacctataaaagatagaggcaaccctatgaggggggaggtgggtgatcccttttctttattttctggcgtttccttgcgcttctgtttctcttactctcgtgttctcg

SEQ ID NO: 148283 - DNA, 254 bp, Glycine max
tagcataatatacaaacctaggaaacacagattcagtatgggatacatatatgatatgacatgacaagaaacagacaatatggcacattttagaagttatacagatatgatatgtatcttaattctaacatggctacatgacatgaccactggtttcaagtgtatgtacttcttatttaagaattatgagagggaaggtgtttatcacagatatgtggcactatcagatatacaaaagtaatgagctatcaatc

SEQ ID NO: 148284 - DNA, 114 bp, Glycine max
  unsure (1)..(114): unsure at all n locations
gccttgtctctctctactctctatagtgtggtcatagatntatcatntaacgcataatatatagagaaatctaactctgggttctgatatctgaatcgaatgctgacattactc

SEQ ID NO: 148285 - DNA, 456 bp, Glycine max
  unsure (1)..(456): unsure at all n locations
caagttgttntgataatgacaaagatgatgacaaaaagcccaaagaatgatttcaagaatgagtcaacaagttcaagatcaagtttaatttcaagtttcatgagaagaaatcaagaagattcaagaatcaagagaagattgatttcaagaatcaagagaagattgatttcaagattcaagagaagatgaattcaagattcaagagaagaaatcaagaagacttcacaagggaagtattgaaaagatttttccaaaaacaacatagcacagttttgtttttcaaaagagtttttctcanaanatttctaagttaccagagtttttactctctagtaatcgattaccagtttcctgtaatcgattaccagtggcaaagtttggatttcaaagtntttaactggaattgcaacgttccaattgattncaaaatggtgtatatcaacacaagatattggn

SEQ ID NO: 148286 - DNA, 442 bp, Glycine max
taattgtttaattcttacttcttaaatgtacgttatatacttgttataggaaccttataattctaagtatatatagttgtagtatggtgctctgccttaattgcataggtagtatggttgtttgtgatttcttgttcatagtgatgctaatactctatagctggatgactcatatcaagttatatttcataaggaatactcttttgatcgtaccttctaattctagtgcaacctatctttttttgtgttgcgtgcttaagtcaaataaatctgattcacttgaaagcctgagtataattaattctgtgtgctatgagactacatcacacaatgggactacttgatgcttctatcacaatcaagtgattgctcatgtcttatacgatccaccttgcggtcatgtcttgttctcgacttcacgcaatctgctgttatctcaacg

SEQ ID NO: 148287 - DNA, 358 bp, Glycine max
  unsure (1)..(358): unsure at all n locations
gtatgtgtatgcagaagatgataggatgaagctaacttacaataattccatgtgctcctctatagtaactgcttgntatagtcctgaatcgctcctgtccagctgtatcccactaaacaaaacacaacanatgaatccaagcttggcatgcatgtggcaataatcatgaatatgatcaagtgaaatgatgatntcgctntgattctcattacccaacaccgacagaggtgaatgcagaaattatggtaaattacaccanacaaactanaaacacaataatatagaatcggggcattatanatgaagtagtcgggtaaagacattgattcgtgtcagtgaagtgtgatactcacaatct

SEQ ID NO: 148288 - DNA, 529 bp, Glycine max
  unsure (1)..(529): unsure at all n locations
tgcttgaatcatcgaancctggatcctctgagtcacctgcggcacgcaagcttcctcctattgttgatagagtgtgacatctatgatcctcatagtctcgtgctgtgctcagtgtacggttagattttgcgcttaagaaacaactgcagcatttgcagctgatatttctatcttctctctgcatttttcttacttgaaggacattaacaaaagccagtttttttttgtatttttcacacatttttgttttggtatttgacatttttgtcgcattaattaattatattatattaacatacaattagagcatgagagatggaatctattaacagtttcaaaattttagtttgagcctgacagcaccaaaaagacagaaattgcaaaatgaaaacagtgctaatattttcttttcttttttgcacgagacatatagttgaattggcagtatatttgcagagaatatctaaatacagctaaactatctcataatcttatctataatctcggatatagacagtatagataggct

SEQ ID NO: 148289 - DNA, 376 bp, Glycine max
  unsure (1)..(376): unsure at all n locations
accgtgaccatgtaccttcaccgctaccgtgtacttgatggtgaccgcacctctatgagggggtgaaccactcggaagaggactgtggaatacgccacgctcggtgttgctactgctnttgtccctccaccctatcatcaccacaatgggtactttggtgctgccatgcccatggngacttacgttagggaagcgccaccaaatacagnctncttccatcaccaccaccaccaccaccaccaccatgctcgtggaatctccaatgctcatgaaccaaatgctcgctccatataanantatataattatgactaggattcagaacaagactnngatgatgatatgctaactctcagtaattggtgctagagtactac

SEQ ID NO: 148290 - DNA, 435 bp, Glycine max
  unsure (1)..(435): unsure at all n locations
taactgtctttgggcttggcggccatgctcaacaaagtactttcgacacctactgtacgttgatttcaccaatgctgatatgggaatgctgctataatctctatcaaatcttatcgatccatgtagatagatattattcctggtcaaccaacgctaaaaattactgtctaattaatccttgctccttctactattgctagtttcaccatacttttccgtaaacttaatcgatgtatatgtttcgcgctgtcatagctgantcacagcctaagtcacgtatagacaatctaagatgcatggatgatagccctccacaagataacgatgactatgcttatgtttacctacttatcttgaatctaatcgaatggtgaatgactactatacattctatagttacctcaaattaacggcaagctcgtctgcagactaacc

SEQ ID NO: 148291 - DNA, 468 bp, Glycine max
  unsure (1)..(468): unsure at all n locations
ttgagaatcaatttgttggctcagtgtgtgattttcgtacaagccattcttttgttctttatgttaaagcttgcattctcaacgttntgaaaggaagattctgtttttatttctttttcttttcccttacgatcttatgcttctcttgactctgcatgctnttaactntnntctttttactatatactgatgactgtactttcaatagtattattaaagggtaatttcttccaattacccttattaatggttaccttccatctcaggatcaggaanttaattaataacatgtttcattcccacttaattagcanagntntctgaattaacanaaggtanaagggactatgtttctttttgtctctctttacacataagagagtatcctggtcaatactcaactcacgtaataaagttcttattgaataacctatgacaccctataatagctttatttagatatctaca

SEQ ID NO: 148292 - DNA, 137 bp, Glycine max
agcttccatcatctaatatcattaagagcctaataattaatagctaaattctatggttttctccactaaggttaaccaaaggagaagagtaaagggatagatgaatttacttggatcgtttatggatcgtgatagtg

SEQ ID NO: 148293 - DNA, 351 bp, Glycine max
  unsure (1)..(351): unsure at all n locations
tgtccctctcaagagattntngattgatttctagttggtaagcacccatcctcttctcctatggtcccttgagtttattttcttctcccaccaagtagacatganatggngtttcacttcanattatgattggtaggtgaaaatataattganatgagcctgagtcacaccaattcattanaatgaaagggaattgctatttgcactcctcctttataataatacaatccctatttatttatatttttccaaaatatccctaanaatacattcccaatgttcactccttgcaatnntctttcgtcanatccctactgtgagtgcgagcaaagagcaacaatacaccatcaa

SEQ ID NO: 148294 - DNA, 334 bp, Glycine max
  unsure (1)..(334): unsure at all n locations
tagaattcaaggccctgtaatccacacacatgcgtcaagttccatccttctttntcacgagtaacactgcggaggagaatgggcttcgactgtgttgcattacactggaatngagtaattccataactgtcgttcaatttccgacttctggaagtatggatatttgtanggtctaacatatngttngccttcaaaacaaattatctgctgattaaccagaaatgagaaacgagcaactcattatatatagggaaataacgttctgaagatgattcaattatgaaaaaaggacagattaaccgcatactattttacctctctcttcttctttgtg

SEQ ID NO: 148295 - DNA, 215 bp, Glycine max
  unsure (1)..(215): unsure at all n locations
ataatcatgcatatgagcatntcatcttcaaaagccaaagactaatgagctgttatcatcattagaagttaatattgcatgatcataacaagagagatagtgaaataccagctttaccatatgctgcatcagcaggttggactttggagccaacagcagcagcaccaatgagcacagttatagctaaacggcgagagattgngctgacatcaata

SEQ ID NO: 148296 - DNA, 416 bp, Glycine max
  unsure (1)..(416): unsure at all n locations
atgacgttatgttttgatccatttnttttaattcatattaagggtgtaaaataaagtanaaagtgtatgaaatttttatctttnttgtttanaatttcttttaagttaanactggttcgacaatttttttttataaagtttagaattatttaaaactaactgcatcactcaacannaaatatattgataaaataaacaacactaagntaaattttttngaaaaattatgtaaaattaactagtaatttagttgtgcaatgcacaagattgtaattaanaggtgaaaaattgaacaggngttctaaacaatcgagcactatnttcttaattntatcatccngatacaccacatctaaataaaaggctaaaaatatactatatatatcttagatntctttcatctccatgacatgact

SEQ ID NO: 148297 - DNA, 441 bp, Glycine max
tggagaatagaaagtcgccacaaacattagtatggaaagataaacatgttatttagggtttttgtgcaaatacaaggaaaaatgctattaccatcttgctcctcttagcctcttcatcactgtcattaccatcatcaccaacagctttcctggaaaagttcatagcattcttaaatgttaagtacatcaataacaatatgcatatcagaaaagtgaaacaacaaaacaaaataaagatattggacttcaaaccttctttttgcaatggcccgatcatcatgaccagcctcagcatggccatggccatggctgtagtcaggaaccctgctaacaacgtccctcagaaagcaaagacattatagcttgacacaatgttttctgtcatttcattcccacttgtacgcttatagttcgcagattatagagcttgaaacagatact

SEQ ID NO: 148298 - DNA, 333 bp, Glycine max
tattctatatttgtgatggttgctttgcagtgtgtggtgctgaatacatgatagtcgtgttattgattacaataattattagtctggggttaattttctttatgtgcgctattcacatgagatgttcgctatgaatgaccacatgttgtggaacaatgttaacaatgttagttatattgttccgctcgagcataagaggggtgcaactagacctcaaaactactgggagaggaaccttatgagaatctcaatcccactatattgaggaaacaacaacaagcaagtatcaacatagaagatgtgggagaattaaccacaatgagagaaagtgtg

SEQ ID NO: 148299 - DNA, 592 bp, Glycine max
  unsure (1)..(592): unsure at all n locations
tacacgtccactaccatacacgatgcgtcaatctcanatctgtctaacgtattaacctacannncnnacccaagacaggttgattgatgcantctcgtacccgngatcctatacagtngacctgcatgcacgcaagcttatgcatagcatagagaggcacttggtgtacttgcaactcgccctagagctcgcccaggcaagctgttgcttcactctgaagtaacttggctcacataggtgagctggttactttagccctaagccatttgggggtgcaggtgagttagaggctagcctgtgcgagccagggcctagaaaattggcttaaatgacccttttgccccctccccttgagtagcttccgcatctttgaccaaaacatcgaatgatctttcgtcttgcgcggtaactggtgttgaacaactcaattcagctatcgagaatcacatatccatgaatgatagtccctgcacgaacttaggcctgacagtgccccttttacttatttctatcggaataaaacgaagtcatattaggcactattctattgagtgcgctgctatcactggtcaccggcaatccatggatatcn

SEQ ID NO: 148300 - DNA, 347 bp, Glycine max
  unsure (1)..(347): unsure at all n locations
gctgctcgcgttatgcgagacggagaccaacatgctagctattatcgccaagtacctttaagagataggtctagccgcggcccacgagcataggattgcgggcgaatatgctcaagtatacgcggaataagaggctagaggaagggtgatcgactctctacaccaagaggcaaccatgtggatggatcaggttgctcttaccttgaacgggagtcaagaacttccncgattgttagccaaggccaaggcgatggcagacacctactccgcccncgaagagattcatgggcttctccgctattgtcngcatatgatacacttaatggcccacatannatagaaatcgt

SEQ ID NO: 148301 - DNA, 461 bp, Glycine max
  unsure (1)..(461): unsure at all n locations
tcccataggaagggcttaattntcttgagcagtttgtaaaacaactttaccttttcgacgaacttcaagaggaacctggacagggatgctagcctaccatttagtatttggacttcttggtcattggtctggctgcacatctccaatatggcattgcattcattggggttggcttcaatccctcggtgagtgatcatgaagccgaggaacttgcctccgcctgccccgaaagtacatttttgaaggttgaggcgcatgtcatactcgcggagctcctcatagacttcttctaggtctgacacatgttgggctatgctttgagacttgacaaccatgtcgtncacatataccttgacgttccatttgatctgctatatanagacttggtccatcagtcgtgggtatgtagcgccttgcattttaaagccgaagggcatgaccctatagcaaanactggcatt

SEQ ID NO: 148302 - DNA, 295 bp, Glycine max
  unsure (1)..(295): unsure at all n locations
cttgcgtcctatccttcaaccacttatgatagccaccaacgacanctgttgctgctcccctaagctccttatctcttctttccactgcattccacgccttgcggattctctgaagtatttttgcgttgccttcattgaaaccncatgcaacgaaaggcgcgatgatctcttccaacggtgcccctctcatagggtaacctagttgtcttatggctagtatgggattataattaatacaaccccttggtcccatcaaggggtcattcgggaatccttcacatgagcacaacacttc

SEQ ID NO: 148303 - DNA, 434 bp, Glycine max
  unsure (1)..(434): unsure at all n locations
atcaatatcatttgtattcttgcatatccttgtatcagatttatttactcagtagtataaataccaagtcagttagaatatgttcatacggaaattgaatccagataatcatattatcaagtccagtcagaagatgaaaataatgtattctccaatggttctatcatgatagataattttaatgtgatgtttgagtcgtcactatcacctagntgaaggattggtccgatacatgtacatacgttcgtcatcatagagagtatatcgcgacgtcatacgcttataatactacatgacggcatgatccggttgactaatggtctgataactctccttatctatttattatcagtcatcgtactagtcggtttacagtgttttataatctgagtgtactgcaagtaactctatccataggatgaggcatgtaacgc

SEQ ID NO: 148304 - DNA, 461 bp, Glycine max
  unsure (1)..(461): unsure at all n locations
ccttgaacgcacataccggtgccaccggagacccccacgtggtccctcgtgtcttgcacgttcaaaccctaatttcaaggctctaccctacgtntttcactgtccgaggctgtcttttgaattttcgcagattacttgggattcgcgtttcgccagacggcttaatattggaaaagccacgaccgttcgacttttcactcagtagcgcttccttaatggttattgggcgctaatgcggcatattcgtttacgcatgagaacgggtattcaaaccactattggtgcactattggtacgtactagattgaagcctgagaggtgaaaaagctcacgggctccgcacaactcgtgtgctcaaatctctagtggcttcttgcgatacatcactgttgacttatgctacactagctacgtctatgagcccttagtcatttccttcttctcgtgctgtgatatgatcg

SEQ ID NO: 148305 - DNA, 244 bp, Glycine max
  unsure (1)..(244): unsure at all n locations
aatgcgcgcataaacccaccatcccctgttgccacctccaactgagctcacgtactcccacgtagcccatatnnctcgttctctcaacaacgggtccccatcaatccttccaagcgttcacaacatccaagcaaaacaacattcatacagcataagctatcacagcccagcaaaacagagcaaaggcagaagactctgctcaacacatcaaccagaatcacagcttttctcacttaaagaccac

SEQ ID NO: 148306 - DNA, 431 bp, Glycine max
  unsure (1)..(431): unsure at all n locations
tatcgagacgctcganatcatcaacggaagctctcgatanattcgaatggtcataacatttcactcggatgtccgattcngngacataatatatcgagacactcgaaagtgaacaacggaagctctcatgatattcgaatgctcataacatttcacacggatgtccgattcggggacataactcatctagacgctcgaaattgaacaacggaagctctcgagagattcgaatggtcataagaattcacacgaatgttcgattcggngacataatatatcgatacgctcgannatgaacaaccgaagctctctagaaattcgaatggtcataacatttcactcggatcggtcgattcgngacataatatatcgagacgctcganattgaacaacggaagctctcgacanattcgaatggcataactttcaca

SEQ ID NO: 148307 - DNA, 452 bp, Glycine max
  unsure (1)..(452): unsure at all n locations
acaattgattttgaatttcaacgttcaaatacactggtaatcaattacaccattttgaaatcaattggaacgttgcaaatttagttgaaaacttttgaaatcaaactttgcccctggtaatcgattacaggaaactagtaatcgaataccagagagtaaaaactctggtaacttataattttttgagaaaaactcttttgaaaaacaaaattgtgctatgtttgttttttgaaaaatctcttcaatacttcccttgtgaagtcttcttgatttcttctctcgaatcttgaattcatcttctcttgaatcttgaaatcaaacttctcttgattcttgaaactttttgatttcttctcatgaaacttgaaattaaacttgatcttgaacttggtgactcaatcttgaaatcattctttgggctttntttcatcatttntggtatcatcacaact

SEQ ID NO: 148308 - DNA, 270 bp, Glycine max
  unsure (1)..(270): unsure at all n locations
ggagatgcagcggaagacanaggagaagaggtgagaggaggcgcatccacaagggaataagccatggaagaaggaacttcggcaccaagaatgtgccttggataagaagcttggagaggatgcttcaatggagganaagaaagagagagagaaagagagaggggggagcatganaatgaaggaagaaaagagggagagaagttgaactttgaagtgtgtctcacaagactctcattcatcanagttaccacaagtggtacacatacttct

SEQ ID NO: 148309 - DNA, 173 bp, Glycine max
tatattgagacacacaatttcgtgctccttctcttcctctccctccactcatgttctccttactttaagctcttatccatgagcttctatggtggtgagcttcttcttgactcatcttctgctagaagggcatctccatcatctttcttctttttattcactgccttaaacta

SEQ ID NO: 148310 - DNA, 375 bp, Glycine max
  unsure (1)..(375): unsure at all n locations
agatttgttctgtgaagatccacagagaccanagctngaagaggaagccgtcctgagagctngagaatgatttgtgagtgaatgtgaggtcctagaggtggaggagacatccncactacttngtattttgaaatctttcatctttcttttctctttgttgtanaggaagcttcccagttatggaaagctaaatcctctgttggatcttccttgtaggtacttgatgtaaatacctgtatatntatntaatgatngtntgtgtgttcactgtgctatcagaacttcattctaccatgctntngccttgatcacgtagatgccatgtgttttaggatcattcaacagtggaaagtggtctgattcttagaacttcat

SEQ ID NO: 148311 - DNA, 453 bp, Glycine max
  unsure (1)..(453): unsure at all n locations
ttagctgttgatctgctttttgaaaacgtaatctttgagaccgattgtttacaacaggtcaaacaatcgatacttaaggaaaagaatggtcatgccctctttcatggaatagtttatgactgtcaaagaacgattcataggactagctccttgtgttttatcaaaagacaaggaaatagaattgcacactctttagcatctctatcattttgctattntgataaatgctggattcaggaggtcccctataaggtggatcanatcatttcaagtaatgtaatttctgccttttctttttgtactggccagggtccataaagtacactcggcaatctacatagcactccattacgcacgtcagccctccatgtcagccctatcacaagagcacggacgtccagtccttattagtcgagctctcaatagacaagttatctccgaccatttaattag

SEQ ID NO: 148312 - DNA, 339 bp, Glycine max
  unsure (1)..(339): unsure at all n locations
cttatgttgagaggtaagtgggaaaacagcaagatataaacaaaccatacactntttcctctgttctctccttttaagactcanaattgagctgtctcctatctnntgttttgctgaatcagagattctctccaccacccttntcaagtcacagaatgaagggtagtgagggaaaataacaatganacaaatctaaaaatgaaagaaaggacaagttggtatgtaatgtgaagagatgagagaggaagagccatatctcatggcatatattttcgcaacataaccccacttatgcttccttatatgggagtgagatcatacaacacctcaactactctc

SEQ ID NO: 148313 - DNA, 458 bp, Glycine max
ttcgaccttggtgatctttgactccatgtcatcgaattgcatgtccacttgtaactcaagagcatcaacctttcaccaacaaaggtttgaagaccatcaaacctatccaaaaccttttgaagaagagaggaatcttctccaccatgtaaatgtccttcttcatcaatgggttgagcaccctttttcacccaagagccatcatgctctttacgataaccaaaggatgcaatcatagtggcaccgattaagaaggatctcttgattggaacataaggttcagaatcaggagggatgttatagtgtttaaggaagagagtgactaggtgtggatatggcaatgtagcatttaatcgcaatgccttatgcatgcgatatcggactaagtgtgcccaatcaatttgtcggcctttatgaaaagcccacatgacaataagatcttcttcagagacctgtgcaag

SEQ ID NO: 148314 - DNA, 384 bp, Glycine max
  unsure (1)..(384): unsure at all n locations
gtcacacctactcattctaaaacttaattccattccanaacgaccatatatagggaccaaagtacaacattccaaatcaccatctaaagaaaagttcaacggtgttctacatatgttccaaccaagcacacacagacaaacatgtcattaacacaaattataagcaaacaaagataggaagaccgcgagggggaatgagcgaggganaatgaaccttacaaacgatgagagagtgaagctattgtgagggcgagggcatgcaatgatgacgacgataacacacacgagcttcgacaacaacactggacaacttcgacatagacgctntntgtaacatcccattttttcgtanaaataaatatagagcanataaataaataaata

SEQ ID NO: 148315 - DNA, 449 bp, Glycine max
  unsure (1)..(449): unsure at all n locations
gaagaagaagaagaagaggaaaagaggaagaaagcctcttgcatatgcaaaatctgaattgtgaggattagggaagggtttatgacccttataattctccttttcacacccatgctttcactcaaaacacccaccccctaacacacatcaagacccatcaactcccaaactcattgaacattatgaaaaaccaattaattaattatgacatcaccacataaataattatttacttcaaccacttaatttaaatttaattacacaggataatttattaaaaccaattaatcaaacattatgaaaaacacggtgttacaattctccccaacaagaaaattttcatcctcgaaattttcttgtgaagaanatatcgtangcactgattaagcacacaactatntcgctttctaggggtatggatctttcctctatgatatnctggatgggan

SEQ ID NO: 148316 - DNA, 179 bp, Glycine max
  unsure (1)..(179): unsure at all n locations
gtcgaagaacgggcgaaaccttcgcgaaattcttcacggaaaacgttacggaaatgtttcggaagcgcctcggcttagattttcttcacggaaacaatctttccaagcanattcgaaagagagagaagtgcctaaggggctgaaccccttccttcttcacttcctcccctatttatagc

SEQ ID NO: 148317 - DNA, 308 bp, Glycine max
  unsure (1)..(308): unsure at all n locations
atcttcagtttcggagttggtcccctagtaatntaattcatgaaatgggtcctnctattntgtanaatcgtgcaatattgatcacccaggccacaattggacgttgaccgttagcaagtgatgttgactgtcacgttcttattagatgatgactgtcaaagtatcgtggtctgtanagctatcttatatgttgaaagcatgatgttctacaaacatgacaccaaccagttaaatcactttcacatgatannaaagtgatatntttcgttntcttaattatgcatggataantcttatcattcactact

SEQ ID NO: 148318 - DNA, 419 bp, Glycine max
  unsure (1)..(419): unsure at all n locations
taatgatggtccgagttatgttggggaacggttacgaacccggactgggtttaggcactcactcacgcaacttaacttgtntgacataggctaaccgtcttgctgggtaaattggatgactgtctacgactacatcttcctttccttttcgctcaatatggcaacgactagttaattgtatcgtaacgctcggcaacctcctacccgaaagttctctcattgcagtaactactctgtccctctcattccacttaatcttgcgtaagtaactgcctgatctcacttcattatccggcacctacactacatcagtgtcggatagcgattctatagacggggttccttggtgcggtattcgtatgtccccctcttttgttttcactatcaaccccactattctctcttctctactgtcttct

SEQ ID NO: 148319 - DNA, 283 bp, Glycine max
  unsure (1)..(283): unsure at all n locations
tctctctctctctctgtactatatatatatatatatatatatatatatatatgtgcgtgtgtgtgtgtgtgtgtgtgtgtgttaataaaaagctaagtgctgagtgtgataattntctccactcatctcaaattaagttggtggtatctcaaatccttaagcaatgtagtcctanattntcaacaggcttaatatgagaganattcctacaaacagaagtatattgtcaataattntattacacataanattagacagatacatactagtggtggtccacacg

SEQ ID NO: 148320 - DNA, 116 bp, Glycine max
  unsure (1)..(116): unsure at all n locations
accgcgatcttagcaccgagctcagctgtggacaaacaatagttcttttttacttaaatgtttccatatnatatatggtaggtcagaatgtgctttgttattaccttaccatatat

SEQ ID NO: 148321 - DNA, 478 bp, Glycine max
caatggcttagtgaggatggagaggtgcaagttaggaagcatgtagagttggatatttccattggaaagtacaatgataaggtgctttgtgatgttgttcctatggagcccagccacttactcttggggagaccatggcaatttgataagagagctaatcatgatggtttcaccaacaagatctctttcacatatcaaggcaaaaagatagtgctcagaccattgagtccacaagaagtgtgtgaggatcaaagaaaaatgagagagaaaattcttcaagagaagagagaaaaataataagagagccatacacttgagagttcaaaaagtcaggactaaattagggaaacacatgacaggaaacggatgactgtatcgcttgtagtgagggacacttcttacctctactacgatatttgcataggatcatgatactactggtcattctgctccccagtattctcattagttaaattcg

SEQ ID NO: 148322 - DNA, 436 bp, Glycine max
  unsure (1)..(436): unsure at all n locations
gtgctccttaaacctccattaattntttgctttaccttctcttccattgttttttcttcattttttctccatgtatctcctcaaatgtcttgtgctaaattctgttaacatgcttctttagatttttcacctattaaacttgctatagaagctaaattttattttctatggctcaaatttcttgctcttgatcttgaaccatgaattgtgttgagtttacgttcctttgagttttgtcttgatattttttgcggctgaaaactaaaccataaaattcttacaataatattacagtagaagaaaacctcaaaaatctagagtgacttgttcacctattgtagttntgtcatagaagtcatgtctagtcatgaaacttgtcacataagaattcttatgttgngctgaatcntattctctctgttctttcgctaactcn

SEQ ID NO: 148323 - DNA, 460 bp, Glycine max
  unsure (1)..(460): unsure at all n locations
ctcctctttcaaaccatgctatgtgctcgcgactagtcnctctcttcccttcgcagcttgagttcactattgctaccccacagagctccgcganatttattccggccataatcttccttgcgagccctcttggtctcttgttcaagggctcttgcggtagttgcattctcttcccgtaatccggaacactccttccgaatgtgtgtagcggccaacttgaacttctccttggcaagtttcgcctttcctaactcactnttgagagcttggacttcttcgtcctcttccggtgcttcaaaactctcttcgctgatgacttntaacttggtgagccaatctaagcctcgtatatgaactntcaaccattcatggtacccaccaatgatgccattacgaatgcccctaagttcttgatctttctttaacnngggttccatgcctttatggatctttgatagtc

SEQ ID NO: 148324 - DNA, 446 bp, Glycine max
  unsure (1)..(446): unsure at all n locations
ctccncctttgtcaagcaaattcttttttgatatcatcaaaacctgcatgatttacattctccccctttttgatgatgacaaccacctgtaggttaggagcaacaagaaagaaaaaatatctatttgcatatagtttactcccccttggtttttcaatgtttgcttatatgagacaattgaagatttcatatttttcatatataaaaagttgtctcataaaaaatagatattttttcttactattttatcttttatcttttctctccccctttgtcaacatcaaaaacaaatcatgaatagagaggagaaaaaaaatgttaccacttgttgtaatgtatgagaatcaagtgataccaaaaggcattaaaccaatcattcaatattgatcaagcaaaaacaagtatagtaacacatcaatcanaaacacaatcaaaagcaatcaact

SEQ ID NO: 148325 - DNA, 469 bp, Glycine max
  unsure (1)..(469): unsure at all n locations
cattgacaacatgattgaccccttggcagccgaagtttaatgtgccaagctatgccttttggggttattgttgcttttgaaattttaaccaaaaatgactaaagtaggtttaaaccaaaaatggctaaaatggctaaagtaggtttaaaccaaaaatggctaaagtaggtttaaaccaaaaatggaaaattttgcttttgttaaaactggtaaaccctatcataatcccgtagatggatgtgctaaccttccttggatgtgtaatcagagtgaaccttgcacaaagtccactctcacaaagttaaattacatagtcactcaatgcacaatgcaattctttgatagatagaaattcagcttagacaattttcatatctctatatcaaacaaaacacatacaccttgttatatatctatgtatagcacgaaattcaaggcttagaattatacaatntataaattaaattct

SEQ ID NO: 148326 - DNA, 451 bp, Glycine max
  unsure (1)..(451): unsure at all n locations
ctaaagaagctagagcttagctacacacatccnctataatagctaagctcacccccaagccaaaatacatgaaaatataaaaaaaagtccctaatacaaagactactcaaaatgccctgaaatacaaggctaaaaccctatactactagaatgaccaaaatacaaggcctaaaagaaggaaaaatctattctaatatttacaaagaagagaggatccaaccttggtccatgggctcagaaatctaccctgggattcatgagaaccncaaggccttctttagcagctctagcccaatcctcttagagtcttctatccaataccccttgtggggtaggatngcttcattcccttcaacttggaaaggatntgacctgaaaatccgaaggtcttcataatttgggctccctccctcgacacctcgaaaaaagaataaaacatatgtattagtgg

SEQ ID NO: 148327 - DNA, 380 bp, Glycine max
  unsure (1)..(380): unsure at all n locations
gctgaatatatagctgcaggaagttgatgtgctcanagtctttggatgaagcaataactntaacactctggagtanaccttgatcacattcctctaaaatgtgacagcacaagtgcgatcaatctaacanaaaaaatcttgtcatgcattctagaactaaacacatagaaataaggcatcattntctcaaagatcatatgttaaaagttgattggtgcattgagttcatagatagtgagcatcaactaacagacgttntcactanaccacttgctagagatagattctntttcgttagaaatgaactagacatattagatgcatctagtatagaatgacattctatttgcatagtgtgtgatgcacattcttactcatat

SEQ ID NO: 148328 - DNA, 114 bp, Glycine max
ctaaaaacttagttagataaaggttatagatttaggcgacagtggcagcggcaattatacaacgcctgcctacataaaactactgattctacatagatatccaggacgatcacg

SEQ ID NO: 148329 - DNA, 393 bp, Glycine max
  unsure (1)..(393): unsure at all n locations
tcagctgaatcacttccctcttcanacactagaatagatattatatnnggtctttataacacaagtcatacctaattcngattggtctgactaaacaatgtanaagtatttatactagtgatttatgaaaaataaattcattntanatntgtgtttaattntaatttattgctggtgtaaataattttaccccatcaactaattaanaatcttaatgtaattataagaatttaattatttagcacccacaatataatatataggaaccagtacaaaaaattctttttaacattagttgnntttaacattntatatatgttttgtaatgtatgctaataagttgatatagaaacactacaagaaaaacacttaaacatgtttgatatatttttt

SEQ ID NO: 148330 - DNA, 241 bp, Glycine max
ttatcctgctttgatgaatatgaagcctcgggaagatggagagataagaaagagggagaatcatgttgtgactgccgcctacatggccaaattccacaactaacaatgcaacacttagctagatagtcatttcatacccaccacctactagtaagacacttatcatcacaaggccaccttaatcagcacaaagtcacctgccgacatctatataaacaccctcttacactaccaaacacta

SEQ ID NO: 148331 - DNA, 246 bp, Glycine max
  unsure (1)..(246): unsure at all n locations
atcatgataacaaccaatatgaattccactcanaggagttgggcatgtaaaagccaaaacttcttcaagctntagccttaagttgttcaccatgttgctcccctatctctaacaacccatgcatgtagtccaagttcaaaggattatagtatgttgatagtgggcgcataaaccatatgataagggactcaagtctgttaaactctttagacaaggctgttagaaccaaagtcaagaatggaaatg

SEQ ID NO: 148332 - DNA, 454 bp, Glycine max
  unsure (1)..(454): unsure at all n locations
gatatccactccacaaggtttgaagtagaggagagcttcaaccctataacgcaacgtggcggacaaaagtgggcagtaaacttgaatgatcgtcattgtcaatgcggaaggtattctgcgcttcactatccatgttcacatattattgcagcttgtggttacgtgagcatgaactactaccaatatatagatgttgtttatacaaacgagcacatcttanaagcttactccgcacaatggtggcctcttgggaatgaagcggctattcctccttctgatgacgcatggacacttatccctgacccaaccacaattcgtgcgaaaggtcggccaaaatcaacaaggataagaaatgagatggattgngtcgaaccatctgagcaccgaacanaatgcagtagatgtggagccgaagggcataacaggcgtcgctgtccaatgcaatctgagcgtg

SEQ ID NO: 148333 - DNA, 304 bp, Glycine max
  unsure (1)..(304): unsure at all n locations
tcagctatatgnggttacttatatttgtcatgttggatannatttagctttatatattgctaattcagcttataggtgagaatgaagctactntagctcctatatatnnaaccatngatnntaatagcaatatggcacttntgagcaagaattactctctataagttntcatatcaagagtcanatgctattgaaatggataaatgcacaatataattggtgtgtatcaaccctaacacaacaacactaccacaaaaacacacacnctatgatccacaattngaaacgaaagggaaaagtcatg

SEQ ID NO: 148334 - DNA, 457 bp, Glycine max
  unsure (1)..(457): unsure at all n locations
aaaggatcgaagtgggtctgaaaagaggcaaatttaatcatcctgcttgggcgaatgagaaaactggggcaattgaagaaggtgaggatgagggagaaacccatgctgtgactgccattcctatacgaccaagtttcccaccaaaccaacaatgtcattactcagccaatgacaaaccctctccttacccaccacccagttatccacaaaggccatccctaaatcaaccacaaagcctgtctaccacacttccaataacgaataacacttttagcacagaccanaacaccaaccaagaaatgaattntgcagcgaanaagcctgtaggttcaccccanattccggtgtcatatgctaaacttgctcccatatctacttgatactgcaatggtagccataacccctactangtttcctcaacctccatttttccgagggtacgactcgaacacaatgg

SEQ ID NO: 148335 - DNA, 254 bp, Glycine max
  unsure (1)..(254): unsure at all n locations
tagatagatgacatcnagcgataactgagccatgtgaatgctcatncgtgtcaggatggcgtacactagctaacacttcggcagggggaggtcggaattatgatcgctgggctggatgttgctgagcagcanaatcatccagatctgagtcagggtggtcatggtggtgcgcatgatccgcacncgtcttccagcagcagtccaggcanaatcctgccccggtatacatagcaactgggcgatggcctctcatc

SEQ ID NO: 148336 - DNA, 455 bp, Glycine max
  unsure (1)..(455): unsure at all n locations
aacctatatttaaaataacttaatgccattaacctagggaattaaaacaaacttaatggctgagtgtaactgatattgtggcaaccaaaagtcacccccaacagccaacaagtcagccaccatttggtctcccaaaaggctgatgcctatgttgccaattgggcccttattacaacttgaactaaagcccttttagttgattaacccaaaacatatttttggtcagccaactttacaaggattgggccattatttagacaaactaaacactctaaaactgaaataaagtggtgtcatttagtcctcctccatttgggccatgatacaactcacaaccttggacttttctccttganacttgngcttgtattcaaatagtatggacagcactttgtgaagagcttccttggctttccttgctctaccccttgtcatangtcctccaaaagtcttan

SEQ ID NO: 148337 - DNA, 352 bp, Glycine max
  unsure (1)..(352): unsure at all n locations
tgaggtacttctctctctctctctcaatagctgaggaaaagtagttccatgaagaagatccaagccgaggcgcttccgtaacgtttccgtgagtaattacgcgaagattctcgaccgttcttcaagattcatcgctcgttcttcgttntcttcggtcttcaacgggtaagtacctcagaccaagctnttcaattcattctatgtactcgtggtggccacattntgttcatgtattttattctcgtttcatttacttttatacccgcttttacgtgcttaagccattattaagcatttctcgctaatctaaaataaataaattccaccgatcgttgaatggtatcatcgtaat

SEQ ID NO: 148338 - DNA, 448 bp, Glycine max
  unsure (1)..(448): unsure at all n locations
gtcaaggcagctgaaggaactagttccgctccggagtatgacagtcaccgctttaggagtgttgtacaccagcagcgcttcgaggccatcaagggatggtcgtttctccgggagcgacgcgtccagctcagggacgatgagtatactgatttccaggaggaaatagggcgccggcggtgggcaccactggttactcctatggccaagtttgatccagaaatagtccttgagttttatgccaatgcttggccaacagaggagggcgtgcgtgacatgagatcctgngtaaggggtcagtggatcccgtttgatgccgacgctatcggccaactcctatgatatccgttggtgttggaagagggccaggaatgtgagtatggccagaggaggaaccggtctgatgggttcgatgaggaggccatcgcccagctgctatgtatacttgggg

SEQ ID NO: 148339 - DNA, 278 bp, Glycine max
  unsure (1)..(278): unsure at all n locations
actggtaatcgattaccanaacattgtaatcgattacagctnntttgaaataatcggaacgttgtaaattcnagttgaaaaacttttcanaacaatattgctactggtaatgtcataccctaatttcgtccggggacctttgcttgatgacatgcgacctttctttggtccttgtgaggtgcttggcatgcatcattangcaatntgtgagattccaggacatgccgacaaaccaacaaaatattgatgcacaaatccgtaagtttccgtgacacacc

SEQ ID NO: 148340 - DNA, 457 bp, Glycine max
  unsure (1)..(457): unsure at all n locations
cgggccattccaagtgttggagaagatcaacgacaatgcctacaagattgacttgcctagtgagtataatgtaagtgccactttcaatgtgtctgatctatctctttttgatgcagatggaggagccttggatttgaggacaaatccttttcaagaaggagggagtgatgaggacataaccaagggcaaggaccatgaagcacttgaaggtcccatgaccagaggcagacttaaacaagcccaacacgtcatagagacaaggctggtcatttgtatagctgccattgatgatgattgaaggcccaagtggagaaagatgaaggcccagaggcagaggcactaccaagactactaattgttgttgaaggcccatactaacttgaaggcccaagttaaataagttnttagttataatttatttntattggaattctggcccatactgtntagaacgccn

SEQ ID NO: 148341 - DNA, 511 bp, Glycine max
  unsure (1)..(511): unsure at all n locations
ngtgtgctcctgctcttacggacctatgaatctcagctntcacaagagtcttcacaaataactatcatgaagcaganaactaacaaaactacccatcatatctcccaaaaccccatacccacaaatttggagcttcaatggagaatgaagaagaagagaatggcaacgtgagggagagagagagctgtctgaaataatgtggggctgagtgaagagagagagagttgctttttgattttaaaaaggctttttcctcatttcttattattttattataaactatgccacatgtctccatttgagtggagcaaaaagggcccactttcccttttgactgtgacccatactcagccacaaaagtgaggaaaatctgacctttgaaatgctaaaatcctgccttggttggcgtgccgtttctctggttccagttcctcgcgtttctctgcgtccatcggngccagttttcgaaagtacgcaatatatatatcanaacgctcagaataaaaccccg

SEQ ID NO: 148342 - DNA, 445 bp, Glycine max
  unsure (1)..(445): unsure at all n locations
attctattagcacggattntatcagctcaacaaaagtttgtagatgcagaacttgttatagatgctgctctagatcaaagtggcaaatgggatcaaggagaattgttgagaactaaagctaaactacggattgcacaaggaaaattaaagaatgcagtggagacatatacttttcttcttgctgttcttcaggttcaaaataaaagtttacgcacagcaagtaaggttgtgaaggtatgtgtcaatgataaatgtagaatatatcacttagattctttaataactcanattatcaacgggaaaggaatattagaagcttcgctcacagtcttanactctaccttttaacatatgtagaataatatattacttttctgatttatctttcatacagaataanggaaaccgtgacagaagactggaaatggaaatatggcttgattat

SEQ ID NO: 148343 - DNA, 480 bp, Glycine max
ctcttatttcttggtaaagctctatctaaataaagttgttattactgcaagaaatcagatttatctcccacccctgtccttctcaatcattccaatccccaccccccaaagtccatgagggtacccttcattatgtggtgcttacggcttatacaaatctaataatttgtggattcaggtagatgtggagtttttgatggtactattgaaaacatgcacttgcactggaagtactgggaactggtcaagaaaattgtgaaggctaaaacctttgaacgagtaaaaaaaattgcactagcacttgaagctgagagtggaggtgttctggtctcagttgacaaagtttcaaaaggatattctgtaattgtttatcggcgtaaggattaccaacgtccttcaacattgagacccacaaatcttttgacatagagaaaggctttagcacgttcaatcgagcttcaacgacatgaggtatgtatt

SEQ ID NO: 148344 - DNA, 460 bp, Glycine max
  unsure (1)..(460): unsure at all n locations
aatggagttgacaagaatatcttcagacttatcaacacatgcacagtggccaaggatgcatgggagatcctgaaaaccactcatgaaggaacatccaaagtaaagatgtccagattgcaactattggctacaaaattcgaaaatctgaagatgaaggaggaagagtgtattcatgacttccacatgaacattcttgaaattgccaatgcttgcactgccttgggagaaagaatgacagacgaaaagctggtgagaaagatcctcagatctttgcctaagagatttgacatgaaagtcactgcaatagaggaggcccaagacatttgcaacatgagagtggatgaactcattggttgccttcaaacctttgagctangactctcggatagggctgaanagaagagcaagaatctggcgttcgtgtccaatgatgaaggagaagaagatgagtatgacctgn

SEQ ID NO: 148345 - DNA, 269 bp, Glycine max
  unsure (1)..(269): unsure at all n locations
accatacagaacctttgccttccatgcagcaacctggagcaattgagcaacctgaagcttatgttgcanatatttacaatagacctnctcaacctcaacagcaaaatcaaccacagcagaacaattatgacctctctagcaacagatacaaccctagatggaggaatcaccctaatctcagatggtccagccctcagcaacaacaacagggggtacggaaagtacccccttgaattgtatattcaagacatttgagaataaacaaacac

SEQ ID NO: 148346 - DNA, 427 bp, Glycine max
  unsure (1)..(427): unsure at all n locations
ctaanaagaggtatatgtgatgtgagagaaaaaaacatactcatactccgattattaacagatgctttctggtgttgcatacgagttgcggcaggatgagccaagctttcaatggacccaatcaaaataagaacattgaagcttctaaagagtgacacgtatattatacaaatataatagttagaaatagatagtatcatattatagctgatatatatcagatgactaacataagatgatcactgctagctggacggcagcaganaattcatgccaggaaacgattaaattttgactttattaattcttctagcaccttataatggaaaaaagagttgatagatttgcgcctaaacattttatttaaaacaaacagagtttccaacatcgattgagagtttttttatatcaaacctgtgaataatgt

SEQ ID NO: 148347 - DNA, 365 bp, Glycine max
  unsure (1)..(365): unsure at all n locations
cactcacacaccgcactctccaatccttagctcanacctatggtcctttgatgctacttcactttggaaaaatgccagttcttggtgtctcaactgctgangctgcacgtgagggtatgaaaacacatgacctcgttntctccaacagaccacatcgtaagatgtttgatatcctcttgtatggttccaaagatgtggcatcttctccatatggcaactattggaggcagataaggagtatatgtgtcttgcatcttctcagtgccaaanaggttcaatcttttggtgcagtgagagaagaagaaatctccataatgatggagaagatanngcagtgtgtcttcttgatgctgtgaattatctga

SEQ ID NO: 148348 - DNA, 448 bp, Glycine max
  unsure (1)..(448): unsure at all n locations
ttcanagttgttttgatgataacaatgatgacaacaaaagatgatgacaaaggtgatgaaaaaaagctcaaagatcaaagaacaactcaagtaaatcaaagaacatctcaagtgaatcaagaacaagtcaagagttctagaatcaagaagaattcaagacttaagaagaaagcctagaatcaagaatcaagattcaagattcaagaatcaagactcatgattcaagaatgaagaaaagactcaatcaagataagtattaaaaagttttttttttaaactttgaatagcacatgagttnttgacaaaacctttaccaaagagttnttactctctggtaatcgattaccagtagcaaaataagtttgaataagttttcagactgaatttacaacgttccaattattntcaaaaggctgtaatcgattacaatgttntggtaatcgantag

SEQ ID NO: 148349 - DNA, 469 bp, Glycine max
  unsure (1)..(469): unsure at all n locations
ccatcaaccccatgccaaaatacatganaatatataaaaaaatccctactacaaagactactcaaaatgccctgaaatacaaggctaaaaccctatactactagaatggccaaaatgcaaggccaaaaagaaggaaaaaacctattctaatatttacaaagaataatggatccaaccttgatccatgggctcaaaaatctaccctaaggttcatgagaaccctagggccttctttagtagctctagcccaagcctcttggagtcttctatccaatacccttggggttaggattgcatcacaccatacaacattggttttgaccatcaatcactatccctttgtggttgattcaccttcaaatcatatttatgtttggaagagagaaattgttgttgtgctgagcgtaacttctcattctttgttgatctttcacactccaccttcaccttcactaatcaactcaaacct

SEQ ID NO: 148350 - DNA, 234 bp, Glycine max
tctgtgacaccatcagacctatgccttcatgcagaacctgagcaataggcagccgaagttatgctgaaatatttacacagacctctcaccttagggcaaatcaccatgcaaacaatatgaccttcagcacagaacaccctgatggggaatacctacctcaaggtcagcctcacacaacagagctgctcttcttcaaatgtgtggccagagacatcattctcacatccacacaca

SEQ ID NO: 148351 - DNA, 418 bp, Glycine max
  unsure (1)..(418): unsure at all n locations
gctacaacaactgcagcaagacccactatccacaatgacagaacaatatttgtntataccttgcatcttgtatgaaagatgttctctctttgtgtttgggttaggtcacaagattgactcccaagtaaccttctgaccattagaagatcaccttcttcataggggtaaatctcttcaatatggtcatcaccattggcttcaccctcacttccactngaggaaggagaagatgtagcctncttttggctactatagatgtcttgaccgctcatgatcatggttttctttgtggggcaatgagaagcaatgtggcctagcaatgcttgttctttcctcctccctaagtctagctctcagaagggagtagtgcatttgtggctatattcttcacactcatactcccttngctaagcttttt

SEQ ID NO: 148352 - DNA, 589 bp, Glycine max
  unsure (1)..(589): unsure at all n locations
ctaacggcttcctccatatgtcataggcgttaaagcggttgtaatatctcgtaacacttcaaaanncctagcactagtttgaatcatgcgtcgctgagacccntagagtcgacctgcagcatgcaagctctgtccttagatccctcttgttggactatactcataccaagcaacattattgtacaacatattataaccaacacttaatcggcagattcctcttagcagactaagattcaattctgcttcattcaaggtctaaggcaacaatacattttccaatgcttaaatcacctaaccgggcacacaaatggttgatcagaccatgagcatacaaaatttaagcactgaaagaagcattgaacacactagaaactcaatcaattagatattaaaataattacatcaggtgttctttagaaatacccaacaagggtgtttagcccaccattacagacaaacccctatcaataatgagataaataaaccgtaagatttcttgaaagctgtccttttgcttctacagagctttttccaaaaggcacttgggtgcttataatttgtgcaaagcgtgttaaatctggagtan

SEQ ID NO: 148353 - DNA, 192 bp, Glycine max
  unsure (1)..(192): unsure at all n locations
caaccaaagatatgaagatgtgagatgtntggttctctgccatcgaataattcatatgaagtnttctntaaaatgggtcttattaaagccctatctaaaatgtagcatgcagtgttaacggcttcagcccataagtattctggaagaggagtatcattcaataaagntctagcaatctcgtccaaagatcta

SEQ ID NO: 148354 - DNA, 526 bp, Glycine max
  unsure (1)..(526): unsure at all n locations
cgttgatcgctcgtgacgagccnnttgagtaacatcgacgcatgcaagcttgcatatgaagaanatgggtggttgggcattaaatgtgtgcattaaatgcatatactttctcatgctaagaaactagtctttgtcgcagcgtattgaacacttaaggaggaaaccacttcttttgtgttagaacaagtttatgcaacaaagttcttcttttgatggcgattgagaaattttagagcttgacttcatttattcctcataggatgtgacaaatcctaggagaatatctctgtaaaatagatctcaaacacaagagtattaaatgaagtcttacatgtcaactttaatgttgtatcagatcatgatttcatcttggctaccattgaaacatcagatgcagactntgcaaaacatgatttgatagcacataagatgcaactntaaaccttcgtatttgttttcatctaacaacatgtcttaagacataaatgtcttttaacctagcaggaatggtattcctatgaatacg

SEQ ID NO: 148355 - DNA, 250 bp, Glycine max
  unsure (1)..(250): unsure at all n locations
acttcatatagcagtctatatggctgggtattgngaaatatcacaattcatatgtcagggaatcttgtcacctagagaaaattgagaaagattntcttagataatagtcgagaatagagagtagagacgttgggaacagagataatatgctctgtcttactgcgaccaaaactacaaagggtgtacaaaggagcactcgtctttcacaccacgatgagtgctcgtcacaacactgtacacatgttattac

SEQ ID NO: 148356 - DNA, 459 bp, Glycine max
  unsure (1)..(459): unsure at all n locations
acatgtggtactaggtggcggtcgggcgatgatgcacaacaagctttccacatccacaatgcgcgcataaacccaccatccccttttgcccacctccaactgagctcacgtactcccacgtagcccatatcctcgtttctctcaacaccgggtacccatcaatcctcccaagcttccacaacatccaagcaaaacaacattcaaacagcacaagctatcacagccaagcaaaacagagcaaaggcagaaaactctgctcaacacatcaaccaaaatcacagcttttctcacttaaagaccacagtaacaattccttcgatccaattcgttaaccggtggatcgactccaaaattntactggaagtctatagtgcataagcctacattntgaccgttgggatctactggcanacatccagaactcattctgcactactctntccacaaccagcanaaacn

SEQ ID NO: 148357 - DNA, 201 bp, Glycine max
  unsure (1)..(201): unsure at all n locations
agctacctagtctataaatagaagcatgtgtaacactagttgtaactntgatgaatgagagtcttgtgagacatacttcanagttccacttctctccctcttttattccttcaatttcgtgcgcccccctctntctttctcttcctctntcttttcctccattgaagcatcctctccaagcttcttatccaaggctcatct

SEQ ID NO: 148358 - DNA, 456 bp, Glycine max
  unsure (1)..(456): unsure at all n locations
gaaacttcctgcttttattcgttgaccacagagtggtacctggagatatgtcgcggnggtcaggagaccttgnggacgtcaggtggggtgctattgcccaaaaccaagcttgaccaatcccgacccaacccgggcatagtcagtcagtgagagcctgtgatgtacctaaacaggcgagctcctggcagtcaacagataaaaggaacaaagaccacaaagcaaggaggcttgtggtggctggccagctgtgaactttgattgatatgtgagatttggcctctggtaatcgattaccaagggtgggtaatcaattacaaggcttanaaatgaagacagaaggctaagatggtctctagtaatcgattaccaagggggtgtaatcgattaccaggcttgaaaacgaggtcaggaagccatganggcttctggtaatcgattaccaagggggtgtaatcg

SEQ ID NO: 148359 - DNA, 318 bp, Glycine max
  unsure (1)..(318): unsure at all n locations
gaataaagagggggagaagtagaactttgaagtgtgtctcataagactctcattcatcanagctacaacaagtgttacacatgcttctatntatagactangtagcttccttgagaagctttcttgagacaacttccttgagaagcttctttgagaaaacttccttgagaagctagagcttagctacacacacccctctcataactaagctcaccttcttgagaagcttncttaagaagattcgtanagaagctagagcttagctacacatacctctctaatagctaagctcacctccttgagatgagaagctagagc

SEQ ID NO: 148360 - DNA, 215 bp, Glycine max
  unsure (1)..(215): unsure at all n locations
tatgtggactaggtggcgatcggacgatggtgcaagtcgactcttcacatccacaaatcacacataaatccatcatccccagntggccaccttcaactgagctcacgtactcccacgtagccncttatcctcgntccttcaacaccgggtgtccatcaatccctgcaagcttccacaacatncaagcaattcaacattcatacatcatgaactat

SEQ ID NO: 148361 - DNA, 308 bp, Glycine max
  unsure (1)..(308): unsure at all n locations
gactganaatgttattcagtntgtcagaatggatgtgaagcttttgatttgttggcagcccaacctcattacanacctagaaagtccttcggattcattntgtgtgtttatttctgtatggtatgagatgatatgcanaagttgggacttctgttagttgtttataatggaatgatcctaaacacttgagcttgagtgaaacaacgactgtgaggctntggttgatgattctttccttgatatctgccattctcactaacttattntagttgtgactctaatgcatatgttcctatcattgaaaagct

SEQ ID NO: 148362 - DNA, 456 bp, Glycine max
actaacgtcgtcttctgcgacctttgtcaatcgcggccgacaagcccgttgacacgtggagatttacgtcatcttccgcgctcacaagatctgtcatactgacttttgagtcacgctgacggccggaaatatccgagtggttatccgtataaactttttgctgtctgtaagacgaaaagcttgatagcacgcagagactaacgtcgtcttctgtgccattcatcaatcgcggccgacaagcccgttgacacgtggagatttacgttatcttccgcgctcacaagatctgtcatactgacttttgagtcacgctgacggccggaaatacccgagtggttatccatataaactttttgctgtctgtaatacgaaaagcctgatagcacgcagagactaacgtcgtcttctgcgaccttcgtcaatcgcggccgacaagcccgttgacacgtggagatt

SEQ ID NO: 148363 - DNA, 254 bp, Glycine max
  unsure (1)..(254): unsure at all n locations
actcanaagtcagtatgacagatcttgtgagcgcggaagatgacgtanatctccacgtgtcaacgggcttgtcggccgcgattgacgaatgtcgcagaagatgacgttagtctctgcgtgttatcaagctcttcgtcttacagaatgcanaaagtttatacggataaccacttcggtatttccgcccgtcagcgtgactcanaagtcagtatgacagatcttttgagcaccgaagatgacgtanatcaccgcgt

SEQ ID NO: 148364 - DNA, 487 bp, Glycine max
  unsure (1)..(487): unsure at all n locations
atgtataataaaataggtaatgtgatacatagaaggatgacaagcaataaaatcgaacataagaaagtattacaaaaagtacgaataatattaagataacctcacataatggagaaacagcattcttgataacaattcacttccatcacaagaaanaagatctgataccgtggactgatcaaacgcatattnganaaagatatagaatagttatatctttgattcagtgtatggccaaaaattgacggtacagaatgtatgaagagagtttagtctaattaactaaacagaatataccaatattgtaaactntagtatggtgttcagctagtacggataangaaacaatacaaaatttgatctaaataatatagctcttatgtcaaagcacaatangatgatttttaacaaatgactgaatcaacacgcatatatttatcaatctccacaaagatagagatcatataaacatctcttatatttatat

SEQ ID NO: 148365 - DNA, 439 bp, Glycine max
ttgtcgtgattaccaagtgacagaacaacattacctgtattgagcaacttcaataagaacctttacagggatgctatcctaccctttaggatttggacttcttggccataggtatcgctgcacatctccaatatggcattgcatttattgtggttggcttcaatccctcggtgagtgacctgaagcccgcgaacgtgccttcgtctgcacctaaagtcattgttgacagtggcagcccatgtatactcccggacatctcatagacctcttttagcgccgcaacatgtagtcctctgctttgtaattcgactcctatctagtgcaaatataccttgacgccacattcgatctgatatttataggcataggctcaacctaccgtgtgtatgtcaccgctgacttatctagccccacgcgctaccctaaacaaccctcgccg

SEQ ID NO: 148366 - DNA, 68 bp, Glycine max
  unsure (1)..(68): unsure at all n locations
gcttctccgagggcatggttatttccagttaactgataatatttataaatctngccaaatggcggtac

SEQ ID NO: 148367 - DNA, 419 bp, Glycine max
  unsure (1)..(419): unsure at all n locations
caacaagtattctncatcatgcacacacacacantcatatcaagagaaaaaggacattaatccttttcccttcctanggtcacaatcaacatggcccttcaagtggaataatccactttaccaaatcacacaccaccacatatccaatcaccaaatcattactagacattcaaagtannatttttctgaaggttggacacnctttgacctaaccctanagtgcgacgaatcttaattaatatcattaataaactcatatacataacacacaacattctttaccaagtggtcacactcaattggtcttaanacatatacaatagcaattcttataatttcatattataaagtctncatcanagtanacaatacattctacaattcacatcattaatttcatgcatttcatatacattcat

SEQ ID NO: 148368 - DNA, 463 bp, Glycine max
  unsure (1)..(463): unsure at all n locations
tcaaagccttgtatggattgaaataagctataagagcttggtatgaaagactaagtttattcttactctagatagttactctagagaaatagtggacacttcactattcagaaaggcttagaaaaaggatctgctgattatacatatatatgtgaatgacatcattttttatgtaacctctgaaaggatgagcaaggagttttctgagctaatgaaaagagaatgtaaaatgagcttgatgggtaagttgaagttctttatangactctaaatccttcaacaagattatggaattttcatgcataaagagaattcctcatggacctattgataatgttattaacggatgaagtcatacatatggttaccgtgccatccttccactatctttactatctaatcattggtatgctatctttatatgaccacttactgtctatatcgctcctttttcttaatcccc

SEQ ID NO: 148369 - DNA, 433 bp, Glycine max
  unsure (1)..(433): unsure at all n locations
aaggttctagttgtagggctctctctctttntttttttttggttttatttttagagtgctactctcaattcgttttagtctcttttcgttttggaagaataattctagttttcttcattttctactgattaatggaaggctaagtctccagcgttattttctcttgaggattaagcacaactctctttgaggttctattattactattaaattctgataagtttttcctcttcaccaattactatgtatttgttgctattaatccatgcatgcttagtgcttgattaattgtctctgtgcttaatttacgttcatgcttactgatcgttcatgattaattggtgtatgtgttggttaatcacataatgaatgccttatgttaaatttcgcttagtaannttaattanggttggattaagtggttgaactgacn

SEQ ID NO: 148370 - DNA, 161 bp, Glycine max
  unsure (1)..(161): unsure at all n locations
tatgaccttcatgttatgggtatcctttgcgacgcatattangntaagagctcttgtgataagcaacactccaccaagaggggaaaatggtgaatggagcattttgttggtgtaacataagtatatgcggaacacgaagaaagcaaggtatgttatggaga

SEQ ID NO: 148371 - DNA, 371 bp, Glycine max
  unsure (1)..(371): unsure at all n locations
ctcagctaataaggaggaagtggagaggttggaagctactttggccaccgcccagagggagaggaatgctgaaaaggaggagaggattgnggttgagcaaaaaacatataacaatgtttatgaagcttatgagtgtgggttgaatcactgcatctaacaattacactttgactatgaggtcccaaatgaatccattttcaacatgaacaaagatgtctataatggagacttaatcttgattgatgacatttcggatgaggtgggatcaaatggtgggcagccaactacccctcttggtgaaacccaaatgaccaattcggctgaggaggatgtggacgatgtcccatatacgagccanaatggcgtctctt

SEQ ID NO: 148372 - DNA, 436 bp, Glycine max
  unsure (1)..(436): unsure at all n locations
tgttcgcacatcgttcgcgtgtatgatatccactcgacaaggtttgaagtagaggagaccttcaatcctataacgcaacgtggcggacaaaaatgggcagttaacttgaataaccattattgtcaatgcggaaggtattctgcgcttcactatccatgttcacacattattgcagcttgtggttacgtgagcatgaactactaccaatatatagatgttgtttacaccaatgagcacatcttaaaagcatactccgcacagtggtggcctcttgggaatgaagcggcaattcctccttctgatgaggcatggacactaatccctgacccaactacaattcgtgcgaaaggtcggccaaaatcaacaaggataaggaatgagatggatngggttgaaccatctgaccaccgacaaaaatgtagtagatgtggagctg

SEQ ID NO: 148373 - DNA, 442 bp, Glycine max
  unsure (1)..(442): unsure at all n locations
agcgcgggtctgggagacaaaggtcaagcgttcgcgatatgcgaggatgatattccgagtactttggatttggtacgaccatgccctcctgatttccagctgggaaattggcgagtggaggaacgccccggcatttacgcaacgagcataatgtaaacctttacggttttaaaagctctatagttgggcctaggctttagagtttttccttttgttaaggctttgtgtcttttgtttttgaatttataatacaaggatctttcttcatctgttcctggtctctacccattctcattcatttgcatgtttacttctttntctgaaacggcagatccgatgacgagtcccccgaaggtactaatacctgggacccgcctatcgacttcgagcgagaaatgaatcanacggaagatgaaggaaatgaggatgtgggacttccccc

SEQ ID NO: 148374 - DNA, 410 bp, Glycine max
  unsure (1)..(410): unsure at all n locations
ngagttgaggaagtgtagaagggtgaaacttcctgctnttattcgttgaccacagagtggtacctggagatatgtcgcggnggtcaggagaccttgnggacgtcaggtggggtgctattgcccaaaaccaagcttgaccaatcccgacccaacccgggcatagtcggtcagtgagaacctgtgatgtacctaaacaggcgagctcctggcagtcaacagataaaaggaacaaagaccacaaagcaaggaggcttgtggtggctggccagttgtgaactttcattgatatgtgggttatggcctctggtaatcgattaccaagggtgggtaatcgattacaaggcttataaatgaagacaagaggctaagatggtctctggtaatcgattaccacggggtgtaatcgatta

SEQ ID NO: 148375 - DNA, 455 bp, Glycine max
  unsure (1)..(455): unsure at all n locations
tagaagaacaaaattgcctcaatcatttccaaatatgcatgtgaattangaagcatcaacaagaatcaagccaaggctattgtgcaagcaatcaatggggcaaaacacaccaaatgattatgatgatggatggctcaaattctcacaaaggtaaactcatcactttcaaattgagctttcaaaactatcattacatgtagaggagaatcaaggatttcaagtcacaaaatgtcaagaacttttattttcaaaacaattacccatttcctgaacatatcccataattcaaagaaaaacatgcaaagtcgtacatgcacacaaaattgacccaaaatattaaactaaaaatccgacgaaactaacaatattaacaaattaacacaactaacaaattaacaaaaccaaccaaactagcanaaccaaagaacactcccccccccatacttaaacaatac

SEQ ID NO: 148376 - DNA, 211 bp, Glycine max
ctacatgtttatgtatgagtgtgtgcatgcttgccagcatattcatagatatctattaaaaaaataaattaaattgaaaacaaataaatttaaagcgtattgttatattaaaacaaatatgtttaaaacgcatatttatactaaaattacatgattttgaatgtttatatttatactacaattatattagagcaacttaaatttgtgtata

SEQ ID NO: 148377 - DNA, 384 bp, Glycine max
  unsure (1)..(384): unsure at all n locations
taatcaagataagtatgaaaagggttnttcataaactaagtagcacatggattnttctcanaacatgtttaccaaagagtttttactctctggtaatcgattaccagattattgtaatcgattaccagtagcaaaatggatttgaaaaagttttcaaactgaatttacaacgttccaatttatttcaaaaagctgtaatcgattacaatgttttggtaatagattaccagtgcctttgaatgttgaaattcaaattcaaatgtgaagagtcacatcctttcacataaaagctttgagtaatcgattacattgatttggtaatcgattaccagtgattgtttctaaataaatcaaaagatgtaactcttcaaaatgggttttgac

SEQ ID NO: 148378 - DNA, 401 bp, Glycine max
  unsure (1)..(401): unsure at all n locations
tggatttccttntagtagggaatctatccttcctaagatggagccaaacccagtcaccctcattaagaactagctcttttcttcctctattgcctttagttgaatacacctttgtttggttctctattttgttcttaaccctctcatgcaacttctttacaaattttgacctagattccccttctttatgtataaaagaagtgtccagtgggaggggaatgaggtctaacagtgttaggggattgaacccatagacaacctcaaaaggggactgcttggtggttctatgaacccccctgttgtaggcaaattctacatgaggaagatactcatcccaagacttatggttgcctttcagaagagcccttataatggtggattaaaacctattcactacctct

SEQ ID NO: 148379 - DNA, 444 bp, Glycine max
  unsure (1)..(444): unsure at all n locations
tcgtgcatgcccttctccatttcttgtatcagtgacttgagttcgtcgtttgaacggcccaacgcattgttgttccgtttcatctcttcgattttcggagctattgctttcaggatattttggaggcagaccaagttttgtttaaagagtgtggctctgcttattgttcctgaaacaaccaattctacgagcatagcctctgccatattaattcacgagctagctagtctcaataacgagaagatgtatatatatagcaaccttagactctgcacaatataaactcatgcatgcaaccaagatgcttcttgtatactattgttaaagggaagtttctttgacacttcattcccaatttcatattgcttcttatantatttgctgacttgtactgggtagcgttaatatcaacgggtgcaaaacgtctttcttttcttttgacct

SEQ ID NO: 148380 - DNA, 453 bp, Glycine max
  unsure (1)..(453): unsure at all n locations
tctttcctaaatcaaagtataaatgattntatattataagtataaacctattaaaaaattccgttcaaaataataagataattttacctgaaattttgaaccactccacttgtttttaatgagccaattccaatcttctggagatacgtattttggtctatcattttctttaagataagcttgatgtaaatgataaagcttattcttgtattgagattgaattttcttcattgcatattctctttcctcgccagataaactaaaagcatccttatatcaaacgttttcaccagcaaaagtaaaaattaaatactatcaagatacattatcaaaccaatttgaagatataactaatattcaaatatataaataaattagatataattaacctaattatatactaacattcatatgtcgccacatttcatctacaccatccttactaatttcact

SEQ ID NO: 148381 - DNA, 442 bp, Glycine max
  unsure (1)..(442): unsure at all n locations
tgttcttagtaagatcgatcagacgatgcttttgttccttggagagcaacccgtcttggccccagaaagtgttgccaatgctctagtggaagtgatgaacgatcctttctcacacttaatcgcctgttgataaaattctgcaccaaatatccaaacaccattaaataaactaaaattcaaataattaattgtatggatggattagtcaaataaaaatttctattagccaagatattataggaatttgtcaagtctatcacgtgagcagtgggcttagtgttcctttcattaggagattcatgaaaattntgtcggccacanaattgtgagacttcttaatcaattaaattaaaaaaaacctagtaaaataaaagttgaccagcatanactaatagtgggaatataattagtatttgaatgccaaaatcaaccacatattttt

SEQ ID NO: 148382 - DNA, 431 bp, Glycine max
  unsure (1)..(431): unsure at all n locations
cgagaaagcccttctgattctgtttatacatttctgactctatggcatgagatgcaatgcacagattggacctcctgttagttgttatcaaagaatagcttatacacttgtgcttgagtgaaacagttgctgtgagactgtggtttgagctactttccttgatacctgtcttatgattaacttcatctaactgtatagttcacattttgttctcctctttgtctagctgcatattctgggaaaacaagtgataggtacacattgcttcatcttttacatcatgcaatcaataaattntaatgcatacacctttgaacataaacactgcatgttntaccacttgaggacaagtgagttgttctcttttgcttgaggacaagcaaaactattaaatttggggagtttgtagtcgatgaatacgactaactttt

SEQ ID NO: 148383 - DNA, 357 bp, Glycine max
  unsure (1)..(357): unsure at all n locations
cttctcggatatctgttattgataaacaagatcaagatgagtatagtttgaggtttatacacagaatctccaagattgtttatagtacaagcggttagtaaacacagcatatatgatacgtggcaagcacatggtgagaggtgaatcggtaatcagtaatcacacagttaagtgaaatactaaagtttatggagatagtccgaaatcttacagaaagtcaaaagttcttataatagtagttaaataaataaataaataaaagtagaatttgactaagaatgaaaaagtaatattttgttcaataactcatggnggtatatatacgagtgttctgacgcgggaatcacaaacagaacc

SEQ ID NO: 148384 - DNA, 479 bp, Glycine max
  unsure (1)..(479): unsure at all n locations
ctattaggactcttgcaactcagctcgtacatatagtttcaatccgaggtccttcaagagacctagtaaaagtatcagcctattgttcattggaaccaacaaagtcagtcatgatttcccctgacaacacctttactcttgcaaagtgacaatctatctatgtgtgtttagtttgttcatggaagaccatattagatgcaatgtgaagagcggtttgattgtcacaaataagcttagtgtcctgagtgcctaagtcttgtaatttcgcatgtagctgctaccatggcacaatgttaagctttgatgctgaatctagcaactatattttgcttcttgtttctccatgagatcaaattccctcaaagcaaaacacaataaccagaggtagatctcccgtccatggntatcgaattgaaagattcgaattgtgaatcagaaaagctatattacgaatcgtgaatcgaatcatatatgaatcg

SEQ ID NO: 148385 - DNA, 456 bp, Glycine max
  unsure (1)..(456): unsure at all n locations
tgtcaaataaatcactgcatattgtgcagtccctatcatccttcagaggaatgtagaagagagtaggcttgcaaacaaggttccaatttggataaaagtgtaaaactacttattaattagaattttatgaatcattgtttggaatattgaagaaaaaagacaacctgacaaccagctgccctgaaggaactaaaatcatggcatccaacaagaactctgcatgcttcctgcatggatatcatcaataacttgaatagctgcaagattgagaatctagtaagtataaggagctgttaactaacttgcatagctggaagactaagctcctcaggtacatgccatgctcgatctttctcgaaggttgacaaaggctctggcccagaaagcaaccgatagaagtatctgaatagtagttccaaataactatcaattactgcanatggtcataaacaaaac

SEQ ID NO: 148386 - DNA, 470 bp, Glycine max
  unsure (1)..(470): unsure at all n locations
tcagaccaaagcaactcanaatctaggtatctaaaacccctcaatttagtggattttcaaggtttgagaagtgaaaatgagaatggggtaaacttggagcaaactctcatctcaaacaagtctatatcatcaatctaaactcgctcaaactggttttacgacgaaaactctaccgaatcaaaatttgactcctcaacacccaattttaccctagaaatggctcttgttttcactttggtcactcatattcctcatttgcacagtctaagctttctcataagtcctaaatgacatttcaaactaggattaactccctttaacctccaaataccactaaatccagatttggccttccaactctcaagcctcactctttttccactcataacaccacattctcactntctaaccctaggttaactctacccttcatctctagcagttgtccataagcaatttcagcacataaa

SEQ ID NO: 148387 - DNA, 248 bp, Glycine max
  unsure (1)..(248): unsure at all n locations
tctacttatgtggcagggcgggcttnctttactttctgtctcaacgcgagctttgaacactgttcttccttcccgcgatgcttcttttcatgtccgcctgagtgggcttatagcctaaaccatacttcccacgatttccttgggtatttatcacgctagttatgccgccattgtctttgcctaaacccatcccgggttcataaccgttccccaacataactcgggccatcattaccgctgcgtcggac

SEQ ID NO: 148388 - DNA, 216 bp, Glycine max
taataaaaatattatttaaaatcattaattgagtattatgaattaatataattgttaaaaaattatagagtattagaagacaacatttgtattaaaagcgactctattatattgtagataaggtcaaagctgttattgtgaggttcgtatatattgttaggaagttataaatttattacctcattaagtatatttactatgaaaaaagtgactcta

SEQ ID NO: 148389 - DNA, 449 bp, Glycine max
  unsure (1)..(449): unsure at all n locations
tctagccaaatggacttaccttgacttaattcctttgatagcccttttgagccttgtttccctttccttgttttgaagctcactacaagccttaagtgaaaaaccatgatatcactatatccttaaggaattttggagctttggaattgttttgggaataagtgtgggggattttgtttcattggataacatgttttgttggccatgcttcattatatattttgagccatacttgatacacattgcatattggttaaatgttggacatgctgaatatgatgttgtttctcaaaaggctacagaaaaaaaaatattataaaaaaaatcgaaaaagaaaaacagtaaagttgagtgaataagaaaagaatgatgagactctnggttctactctnntatgttaaaatntatctttacttctttttattttcttatggtttcttaatatgcac

SEQ ID NO: 148390 - DNA, 432 bp, Glycine max
ttcaggataaggatgaaagaaggcaagattgcacgtgtatttgtctgcatcatatgtcatagctagcgataaatcgtagacagtagcgatgaagcgggcaatgtctgttcagaaatatgtcgggttgggacagttgggtctcatttcaggcatttgtcaggctggcttgcgtctcctattctcttcataggaaataattaattcccaattagcaaagaagattaattaattgaatgcttcagaaatttcctttaatcttgagtcacagctttattattattaattatattatttcttctgtctatatattatatatcgctgtaacgcgtatcattcattcatcaaggaatggtatctctcactgttaatagaaaactaccaacagtacagtttcttatctaaccctttgaagtgcggagtacagttcttatc

SEQ ID NO: 148391 - DNA, 442 bp, Glycine max
  unsure (1)..(442): unsure at all n locations
ngaagtactcaagggatttgcattaggtagttcgagcaatactccttgcagaatatcagatcttgctgcaaattcagaaagactgaagcgactcagcatacatataggaagtggggctgtgatctaagaaggagaggttgaaagcttgagagaactgtcatcacttgagcatctcaaaatatcatggggtgtgtcagacacaaggtacggtgatattccaatcagtttgccttcagagttaaaaatgttgcaacttgaaggctttcctggaaagaattttccagaatggttgaatattcatagtaagctatccagaaaatttatgtcactatctacgatagggggaaaacttgaaagtatggatattctcaaatatgtttaccagtacatggggatcctangtttcaagcatttgattcttgacacaccacnatttggaaac

SEQ ID NO: 148392 - DNA, 347 bp, Glycine max
  unsure (1)..(347): unsure at all n locations
tgcttggcaactggttactgctgaatcctcttgggctcttttgataagggctagattttttagagggaaccacagagttgctttccacgtttcttcttctatatggtatagnttatgccccttcttagatgttataactgataactctcaatggcaaattggttggtaaaaacattgcgctttggactgacaaatggctctcccaacccctaagtgcatttgttgcatattcctgaatcctatcataccaatttaaattccacagtggcagactatatttataatggtgtgtagcgcattcctcaatctttgcagcaattatatccgactttgatgaatgaaattca

SEQ ID NO: 148393 - DNA, 415 bp, Glycine max
  unsure (1)..(415): unsure at all n locations
ntataagcgcgggtctgggagacgaaggtcaagtggtcgcgatatacgaagatgatgttccgagtacattggatttggtacgaccatgccctcctaatttccagctgggaaattggcgagtggaggaacgccccggcatttacgcaacgagcataatgtaaacctttacggttttaaaagctctatagttgggcctaggctttagagtttttccttttgttaaggctttgtgtcttttgttttgaatttataatacaaggatctttcttcatctgttcctacgtctctacccattctcattcatttgcatgtttacttctttttctganaatggcagatccgatgacgagtcccctgaaggtactaatacctgggacccgcctatcgacttcgagcaagaaatgagtcaaacgga

SEQ ID NO: 148394 - DNA, 329 bp, Glycine max
  unsure (1)..(329): unsure at all n locations
ntacagcagaatttagtaatgacccactaacctagaattaaatataacttaatgccattaacctagggaattaaaacaaactaaatggctgagtgtaactgaaattgttggcaaccaaaagtcacccccaacagccaacaagtcagccaccatttggtctcccaaaaggctgatgcctaggttgccaattgggcccttattacaacttgaactaaagcccttttagttgattaacccaaaacatatttttggtcagccaactttacaaggattgggccattatttagacaaactaaacactctaaaantgaaataaagtggtgtcattt

SEQ ID NO: 148395 - DNA, 359 bp, Glycine max
  unsure (1)..(359): unsure at all n locations
agtcggcacattctggccaattgcatgtctccctttccctttccctctgctcattcgatcagctcttaaatctaagaacatccaagtttgaacgtgaggggtgatcagaaccaaaatggccaatcttagtagtcctggatttaacctctttttggtgtctctcttggttacgttggtccaaatccaaaccaaggtgcaatgctaccagtacaaagttggagatctagattcctgggggatccccatttcaccaagttcacacctctacgacaaatggtccaaatatcacaacctcaggatcggtgattcgcttcgtaagtcctcccttgatgtccattnntttattgagacatgttaat

SEQ ID NO: 148396 - DNA, 454 bp, Glycine max
  unsure (1)..(454): unsure at all n locations
cttggagtttccaagtgccaattcgtcttcttctttagtccagtcttcttctggcttcaattcatcagtgggctttccttctgtgtccagcatcttgggatgttcccagcctttgatgacagctttccaggttctgctatccagtgatttgagaaaggccaccatccttgctttccagtattcatagttggtcccatccagaattggtggtctgttcactggtccgccttctttctccatgttcatcagaatttatctccctagatctcactcagtgatttcgagtgcctgctctgataccaattgaaattctgatactgnggacagatgtcgtacaggatgtcacgacatcacgcttcagaacatgcagattatatttgacagtgtgaacaaattaaacaagttaataacacaagagaattgtaacccagttcggtgaacctcactacatctg

SEQ ID NO: 148397 - DNA, 426 bp, Glycine max
  unsure (1)..(426): unsure at all n locations
ggctntgcanaatatatacttcattcagtggaaggatgagaaatactaactctntattcttacaagttagaacatacaagaatgcaatcagatgttcatagaaatatttgctgtaccttctacatcctcaaatacactatctctgattcaataaaactagagaatatcattatacccatctctgaattgataaggaaaaaggagttaagagcttgattaacatcggcctcatttattagcaatttctcgcaatatcaaggatcacgatgaaaccaaaatcgcggccacaatttaaaaccttagcacagatgaaatctcaagtaaacacataacaataagcaaacacctacagcatgattaacatttcaacattcaaagatcctcccatcacaacccacataaaactcatacctcacanaacacatc

SEQ ID NO: 148398 - DNA, 453 bp, Glycine max
  unsure (1)..(453): unsure at all n locations
gttgaatgcattaaaggtaaacaaaccaaaagcaagaaattgtgtgcatatagagctacagacgtcttggaattgagacatacaaacatttgtgggccatttcatacactttcatggaatggtcaacaatattttatatcattcatagacgattactccagatatgcatacttgtttcttatacatgaaaagtcacaatctttggatgtattcaaaacatttaaagttgaagttgaaaatcaactccacaaaagaataaagtgtgtcagatctaaccatggtggtgaatactatggcagatatgacggttcaggtgaacaacatccggngccttttgccaggtacctagaggaatgtggaatcgtcccacagtacaccatgtcggngtcacctagcatgaatggtgtggctgaaagatgaaatagaactcttaacgatatggtaagaagcatg

SEQ ID NO: 148399 - DNA, 432 bp, Glycine max
  unsure (1)..(432): unsure at all n locations
ntgagcaaattcaaacgaacaataacttttactcggatgtcagattgagtcccgtaatatatcgaaaagctcgaaattgaatgttgaagctctaagcaaattcaaacgacaaaaactttttactcggatgtctgattgagtcccgtaatatatcgaaaagctcgaatgtgaatgtagaagctctgagcatattcaaacgacaataactttttactcggatgtctgattgagtcccgtaatatatcgagatgctcgaaatggaataccgaagctctgagcaaattcaaacaataataactttntactcggatgtccgattgagtcccgtaatatatctgaacgctcganattgaatgtcgaagctctgagcaaattcaaacgacaataacattttactcggatgtctgattgagtcccgtatatatcttgacg

SEQ ID NO: 148400 - DNA, 368 bp, Glycine max
  unsure (1)..(368): unsure at all n locations
tccaccggttgtgattgcgagataatattcgtggagggagaataaggaatcgtatgaagacagtacaagtggaggtttcaatctcttctccgtctctctgacttttgggaattctatcggagtagtcggatgaataattgaaagaatttctgggaaccgctagagatgttgttatcgctggctgaagacacgtgagcccgcttagaggtaagggatgagtttatcgcaaatgggattagaatgaacatgtgtanggatccttagagaactaaatttgggttaatttgcgatggttattgaaatataatttctctttatgattataaatataatattaatggggtctatgtaccaatgatgttctgatg

SEQ ID NO: 148401 - DNA, 409 bp, Glycine max
  unsure (1)..(409): unsure at all n locations
ntgagccaaaatcctgactcaccatanaccttgacccagggtgagaatgtcaatccttaccctcggaagcgaaaagaatagaagggaaatttccaatcaaagaaaaggaaagaaggaagatttccaatcaaagagaaagcaaaaaaagaaaagaaggaaaattcccaatcaaagagtgggagaaagcaaaaagaaaagaaagaaaattcccaatcaaagaatgggagaaagtaaaaaaggaagaagaagaaggaaagatagctcctgatcagggatcgaaagaaaacagaagaaatgtgcagaaaggtctttggaccggacaatatctgaataatacagagttgtcaccaaatgaacaaaaagaaggaaaggaaaccacgacctanaatggtcttctccctttgattac

SEQ ID NO: 148402 - DNA, 434 bp, Glycine max
  unsure (1)..(434): unsure at all n locations
tgagtgtccacatgggtgcatgcatgatcaattntgtataagtttctaaatcatcgttgttatatacgtgtcatggaaataatgtggggcacttccttttatccctgaaccgctggccaaagcaaataccctgacatacgtcatgtcttgccttctttaaagcctctttgggacaaaacctcaatccttcagccctaagcctcgacccaaggtaggaatttttacccttatcctcgaaaaaaagaagaacaggaggatctaaaaaaaacgagaggaagaaaaagtttcatttacttttaagttatgaatgtgccttacaaggaaaataaaaagagaaaatccccaatcaaagattggaggatagcaaaagaaaaagaaaaagaacaattcccgatcaaagatcggaagaaagcataagaaaaatatacagaaag

SEQ ID NO: 148403 - DNA, 426 bp, Glycine max
tgctcgttaagcctgtgctttcttcttgagtggttgcgctaagctcggcttgccgcactaagcgctaatctttctttgtcttaaaaaattgtggaattaggcttagcgagcaggcttcctaagcctattctgcagaaaaaaagattttatgtgttcttgcgctaagagcatggctatcacgcttagcttatgagtaaaatttcataaggcgcactaagtgcatctgctgcgctaagcgcccaatcttaattctagatttattttttgcttttcttttggaataattcttgtctagtcttggcttttgattcttttgtttttcagatggcttcatgaaagaggaagacaacagctgcagtaccccaggccggatatgacatatctagatttacatcccaagaggcatgtgactgctacacatataat

SEQ ID NO: 148404 - DNA, 514 bp, Glycine max
  unsure (1)..(514): unsure at all n locations
atgtctctgggcccttggacctgtanancctcttttgnncccttgaacccccgcggctatttaaaaaaaccccgccctgacaagaaagcactgtggagatgcttaccacctcttatgactggaaagcgggttctaatgactcctctgcggtctccacataaggcatataggaagggcagctcaccaagatgtcttactcgcctgatacgatgaccagatgcccttncactacaaatatcaacttttggtggagcggagagggaacaactaccactgagtggattcacggacgccccaacagacagctgtagaggaggttaatatccattatttggaaagtcacttgacaggtgggagggcctattcagtctgggagaactattctcttcccaaaccttctcggggtggtctcctggcacaacccacttttgaccatatttgtatgagaacaaagtcgctggtcactctttgggttaacccatgaattgattaatgattgtgaatatatcgagag

SEQ ID NO: 148405 - DNA, 456 bp, Glycine max
  unsure (1)..(456): unsure at all n locations
ctattacgtgacactatgaaactaagctntaacanatgtcttcacaaataatcatcacacagcagaaacctagcaagactacccatcatatctccccaaaccccatacccacaaaaattaaaggagaaagaagtccacccaaacctgaattttcgaagtcccactcgtagccacgcacttcacgaccccgaaaatgccctcctttcgcgatttggggcagaaatgatggccaaaggttgaagctttgcttggagcttcaatggagaatgaagaagaagaaaatggcaacgtgagagagaaagagagctttctgaaaagtgtgggggctgagtgaagagagagaaaagctttttggttntaaataaatggggtntctctttttctattattntatttaagcaaatgccacatgtctncatttgagtggagcaaaaagggcccacttttccttttgac

SEQ ID NO: 148406 - DNA, 519 bp, Glycine max
  unsure (1)..(519): unsure at all n locations
tcccaccgttttttgaagcatgctattaggacctatgaaactaagctgtgcttanaggaaaacttanataaagataactntcatttcacatgttaggtgtagctggtgtattcggcggctcctgtataaggataaggggcgaaaagtaatcaaatagaaattaaactaagaaggcaaagtgtgaatgtgttaaattgtcaataatctcacttcaaccattcaacacagatacataagattatttcagcctaatcgataatttttaatttaaatataagtatataattgtattaaatattcaaaaagaaaattttgttacacaatcatattacaatcaaataaaattgtgtctccgggtagagatacatatagtccctactcaaaaaatcccatttcaaaagtaaataaggcaaattactaatgttgaaaagttttgtaatcatgaaatatgtcgcttccttactagacctgacaggtcatttaatatattattatcaagnattgtttacgcctatgaga

SEQ ID NO: 148407 - DNA, 245 bp, Glycine max
  unsure (1)..(245): unsure at all n locations
tgagctgcanatgttgcctcaccatctgtcaactgtcacctgtacaactctggcacgtgcccaagtgaaatgcacatgtgccttatctgtaactacacatggcttctttaacgtcatcacgagaaagagcatgtacgtgtagggcttcccaattaacaatggaagatgtaggaggcatgacatataatccantgtgtgatggagggagaggggttgggaaagaaatgaggggtggtggtaggggg

SEQ ID NO: 148408 - DNA, 451 bp, Glycine max
  unsure (1)..(451): unsure at all n locations
ctgcccatttaagttttgccagcgaanaaatcgaagtgggtctgagaagaggcaaatttgattatcctgctttgatgaataggaagcttggggcaaatggagagaataagaaggagggaaaatcagtccttctcattacccaccaccctaccagccatgaacgcctaatcatccacaaaggccatccccaaatcagccaaaaatccacccgatgcacatccaagaccaaataccacccctaataccaatcaaaacaccaactagggaaggaattttccagaaaagaagcctgtagaattcaccccaattccaatgccatatgttgacttactcccctacctgctcgacaatgcaatggtagttataagcccaacaaaaatttctcaacctctgtttcccagaggatacaaccncaacgtgacatgttcttatcatggggganngtttgggc

SEQ ID NO: 148409 - DNA, 449 bp, Glycine max
  unsure (1)..(449): unsure at all n locations
tctataaaaggttcgttcctaatttctctacaattgcatcacctctcaatgagctggtgaagaagaatgtggcatttacctgnggtgaaaaacaagagcaagcctttgctttgctccaagaaaagcttactaaggcacctgttctagctcttcctgatttttctaaaacttttgataatattagggacttgtatgctttagatgaacatttctctcccatttacgaaagttgtgggaaaaaggcccaaaatggattctatttggctaaggggtatttgttcaaagagggaaagctttgcataccccaaggatccattaggaaattacttgttaaagatagccatgagggtgggctcatgggccactttgggatagacaagacgctcgtcttactcaaagaanagttttattggccccatatgaagaaaaatgtccttaagcattgcact

SEQ ID NO: 148410 - DNA, 405 bp, Glycine max
  unsure (1)..(405): unsure at all n locations
actctcttatcgaatggtgtgccacaataacatcaacatcgatttgatgattgcatgctcccttttctgatcttataggcacgttacagggacgaaatcattatttaaatatttaagtgcccaaagattttgattntaagagcaaaataaaataaaaaaaatactgaatcatgtggagtttattgaacttcatatgcccgagtagagtgtcatgcatgttaatttaaactgaatcaaactaaactgtacctttcacattagtaatgtaattagtaagactagaagcatcttaatgaggtggcagaatntaattaattatttagaaacatcctaatgaggtggcagaatttaattaattatttgatttcaatatttttcatactaatttcttctnctttatccctt

SEQ ID NO: 148411 - DNA, 398 bp, Glycine max
  unsure (1)..(398): unsure at all n locations
tgaagagagttcttccatgccagcacgcgcccaacgtgtatgtagctcgctaagcgagatggttgtctcttctgcgctaagcgcgagattgccgctaagccaaatctcacttactcgcacttagcgcgagaatggcattaaacgcgccttcatggacaggaagccctttcttaagcctgacttacagaaaatgaaggggagggctggaagagagcgctgaatagccgtcagagtttgaagagtgaaatacacaaaggcaaataacagagcanaggagccaagttttgatcttttaggaagatttgtgagtctttgagtgattgtgagattcctagaggtggaggagacatcctcactccttttgtagcaagcaatntctcttaattcctcttctttca

SEQ ID NO: 148412 - DNA, 382 bp, Glycine max
  unsure (1)..(382): unsure at all n locations
tcattgatcaattctgaagttcacaattgtcataagttcatgaaaggagcaaaatgttggatcaagtggcctcagaataattaagaaggggggttgaattaattattaatgagcctttactaatcaaaaacttatccttcttaatgttactagattcaattaggcttttactactaagttaagaaagtaaagaacagaaatagaaacttaatcaaatgtaaaagcaataattaaagtgcacagcggaaattaaagagtatagggaagaacaagacaaacgcaagaattntatactggttcggcaaaactcatgcctacatccaatccccaagcaacctgcggttcttgagatttctttcaaccttgtaaaatcctttacaag

SEQ ID NO: 148413 - DNA, 399 bp, Glycine max
  unsure (1)..(399): unsure at all n locations
nttggtcttagaattaatcatcaaaagtctcatttcattgtgtctaagaatattccgagaaggaaaactcanaaatttgctatattttgggtttccaatatatactcatgatattggtaaatatttgggtttacctataattagtggaagagttaaaaaaaaccacttctcgtttattctggataaagtaaatgatcgctgagctggttggaaatcgaagcttctcaatagacttggtcgggttacactttgcaaatatgtcctcaattttatccttacatatgtcatgcaaaacatgtggctccttcaaggcatttgtgattcccttgatattgctactagacaattcatctgcggatcaacttcatctcattgggtgagttggaagactnatcattc

SEQ ID NO: 148414 - DNA, 396 bp, Glycine max
  unsure (1)..(396): unsure at all n locations
tcttggcaatcctcattccagcgatcagtttggttnttgcgtaagagtttgaacaacggctcacaaatggcggtgagctgcgatatgaatctggcaatataattcaagcgtcccaggaaacctcggacttgcctctctgtacggngttctggcatctcaaggatagccttcaccttttcggggtctacctctatccctttctggcttacaacgaaaccaagcaatttccctgatttgaccccaaaggtacacttagcggggttcaaccttaattgatatttcttaagcctttcgaacaacttccgctggttgacaaggtgttcttcctcggatttagatttagcaattatgtcgtccacgtagacctcgatctcttgatgcatcatatcatggaac

SEQ ID NO: 148415 - DNA, 383 bp, Glycine max
  unsure (1)..(383): unsure at all n locations
tcatggtgaatcaaaggtgattcanaggtgttttgatgataacaatgatgataacaaaagatgatgacaaaggtgatgacaaaaagctcaaagatcaatcaagaacaattcaagagttcaagataagaatcaagaagaattcaagactcaataagaaagtctagagacaagaatcaagattcaaggttcaagatctcaagaatcaagaacaagattcaagactcaagattcaagaatgaagagaagactcaatcaagataagtattaaaaagtttttcaaaactttgaatagcacatgagtttttgacaaaaacttttaccagagtttttactctctggtaatcgattaccatatagttgtaatcgattaccagtagcaaaat

SEQ ID NO: 148416 - DNA, 346 bp, Glycine max
tctacttatgtggtagggcgggcttccttcactttcttgtctccaacgcgagctttgaccactgttcttccttcccgcgatgcttcttttcatgtccgcctgagtgggcttatagcctaaaccatacttcccacgatttccttgggtatttatcaggctagttatgccgccgttgtctttgcctaaacccatcccgggttcataaccgttccccaacataactcgggccatcattactgctgcaacggacagacaaggttgcccagagagggagtccacggaggaaatgctgaccacctcataagactggaaagcgggttctaacgattcttctgcggcttccaca

SEQ ID NO: 148417 - DNA, 391 bp, Glycine max
  unsure (1)..(391): unsure at all n locations
tgaaggtaaaaggtttacacagtttcatgttaaaagttactgacatcctgctgctaatagacattagacgtagctntactcttagtaagaatattagaacaacacagcaaacaaaacactttctatgcattgagcaaatgtattcaaaaaataattatggattagaactaagttttcacaaatcttaagcaagcatcagtaacatctttacctgcagcactagaaagaacccaattgtcatcataaggaacttgccacacagcatagccaagtaacttattttcccttgcataagaaaccttcattntgacaacctcaacatcatcataacctatccaagtcgatccattggagaagtaattaactacataagtagcattgtacttgacat

SEQ ID NO: 148418 - DNA, 454 bp, Glycine max
  unsure (1)..(454): unsure at all n locations
ctcagcttanatatgttttccctcanatgannactaatttagttntaacccatcaattaaaaatttgctttctacaaatcctcaaattcactttgaggcactgaaatcaacagtttacgaatttgagtgatttaaaacataaattatgctcatgtaacctttcatgaataaagactaaattattcattcaaaaagaataaatactgaaacagtatgaagttaatgaattcattgactaagtaaatatagaaggacaaattaaatacaaaaattatattatatgcaagtaatcttttaattttaatataaaattaattagcacacactatcacttttgaaaatgatatatatatatatatatatatatatatatattaattctaacattagtattcgtatagtatacacggattgttaataataacaagtgaacaacaataacagtaataataaa

SEQ ID NO: 148419 - DNA, 386 bp, Glycine max
tgcacttcaggacgtgcaatgctggtaaagaattgtggcactgaactacttgagttgtcctcaagggtaaccctttgttggtgttcatcatccatggtaatggcctctggtaagtttgaagctgattcccttgataatggtgagtcagatgatgaagaatcagaaaaatgagtttcttcctcaagaatggatgctactgtcctgtcttgcagtaattttcttctccttttggctctgttccttcttaatgtagcttcaatctccaagtccaaaggaactaaattgcctgtgggagatctatgcatttaaaacactaacagaaacaacagttatccagttcaagaggaaaaaaaatatgaattaaaagcaaatattcacagttaatc

SEQ ID NO: 148420 - DNA, 443 bp, Glycine max
  unsure (1)..(443): unsure at all n locations
tagccgaattcatattgaattgaagttagcttagctcaaccttggccagcttagtggaccaaatcaaccttatgcaagggttgggcgctaagcacttgagactcacaacttagcgcatgaaccgagatgcgcttagcgtaaggcttgcgcttagcgaaaggactatttttcagagaaaagttttctgttatttttcagtcctttttccaagaaattgaaacctttatgttaaacattcaaagataggttgatatactcctatgtacagatccgacagcaagttccaaatgattaaatgcatgaaaaacaaagataacaaaatttaaaactgggttgcctcccaggaagcgcttctttaacgttattagcttgacgctnttaccttactggatgatcttatgttttggttcttactttcagaacctcttgacctccttccatta

SEQ ID NO: 148421 - DNA, 369 bp, Glycine max
  unsure (1)..(369): unsure at all n locations
nttagcttctctaggaatcttctcaaggaagtttctcaaggaagcttcttaatgaggtgagcttagttattaggtgtgtgtagctaagtctagcttctcaaggaagcttctcaaagaagcttctcaaggaagtttcttaaggaagcttctcaaggaagtttctcatggaagtttctcaagaaattttctcaaggatgctacctaggctataaataaaagcatgtgtaacacttgttgcaactttgatgaatgagagtcttgtgagacacacttcaaagttcaacttctctccctcttttacaccttcaatttcatgctcccccctctctctttctctctctctttctttttctccattgaagcttccta

SEQ ID NO: 148422 - DNA, 372 bp, Glycine max
  unsure (1)..(372): unsure at all n locations
nggatgaagttcgaaatctcttccttcttcatctctaaatttcatccaccaccacttgcatcaccaaggagagctccaaaactgtgctttcctcaagctcttactctactttctcttaaactctctactatgagtgtttttaagtgtgttaaacccaaataatccttgtggtatttatagggtaaatgtgaggcataggtagtaaataagaccaatgagtgttaaggatcatataggtctttaggttacaaattaattgttcttatcttttaattntatttttttcttttcttttattaattagatattctagatgcttcatgggttattagagtagagattggaatgtatgtatacatgattttgatgatg

SEQ ID NO: 148423 - DNA, 387 bp, Glycine max
  unsure (1)..(387): unsure at all n locations
tttcgcanagcttacggtaaaatctaggacatagccatggcaaaggtctacacagaggccattgcctccctcgcccagtattatgactagctgttgaggtgcttcacctttggggacttccagctatcacccatggtggaagaatttgaagagatcctaggatgccctctatggggaaggaagccatacctcttctcaggattctatccctctttagctagaatttctaagatagtccaaatctcggcgtaggaattagaccacagaaagcaagtcgaaaatggggtggttggagtaccgagaaaatgtttagaggcaaaagcaagaatcttggcaggtagaggcaaatgggccccgttcatagacatcctcgcacttttgatcttc

SEQ ID NO: 148424 - DNA, 446 bp, Glycine max
  unsure (1)..(446): unsure at all n locations
tcagcatcttaaacagaggctaaaaatctgaagtaaagacaacatatgagacctgtgcagcatagtcaaacagcttcaatagaaactaaatgacttggagaattctatgccagttcaaccttctgaacaacaagtgaaggacctcaagaaaacccaagctgacctttgggaaaaagctactatgcaggagtctattgtgaggcagaaatcaagatgtagacggatcatagagggggacagcaacacatcctattttcatagagttattaatttgaggaggaagagaaatgctctgagggggttgcagattggtgacacctgtgtggaaaatcctaacattatanaagctgaaacctttcatcattttagaacaggttcaatgagcctcacttgaccagacctaacttggatgggggtttcatttaaagtctgacttattctcacag

SEQ ID NO: 148425 - DNA, 402 bp, Glycine max
  unsure (1)..(402): unsure at all n locations
tcaacatgaagcaatcagctcgcctgggcaagcatgttgcttctaaactaagccaccagcttgccgggtgagctgggcggcaagatcctcccctattttggctataaaagggtgtgggaggctaaggggaaggggttcagcacccttggtcacttgcagcagacaaggaaagtgtcgttgacactgtatgcaaaaagtacgacattggcaatgagaagtgggctcaattttgtcagacccgcagagacccttcgtgggaggcaacgtttttattttcattgttntaaactctaaattcacttagtataatacattgtaatgataactttcaataatggttaacttttacaggatatgcgaaaaaaggcataagccatctaaaaacaaaacactgtccctcac

SEQ ID NO: 148426 - DNA, 449 bp, Glycine max
  unsure (1)..(449): unsure at all n locations
tgcttgtggngcttctatggaggctggatctttgagcttcaatgaggtccttcaatggtgattttcgaccatggagatgtagcagaaggcaaaggagaagaggagagaggaggcaccatccacaagggaataagccaaggaagaaggagcttcgccaccaagatgagcattggataagaagcttggagatgatgcttcaatggaggaaaagaaagagggagagaaagagagagtgaggagcacgaaattgaaggaagaaaaagggagagaagttgaactttgagttgtgtttcacaagactctcatccatcaaagttacaacaagtgttacacatgtttctatttatagactangtagcttccttgagaagctntcttgagaaaacttccttgagaagcttctttgagaaaacttccttgagaagctagagcttagctacacacacccc

SEQ ID NO: 148427 - DNA, 373 bp, Glycine max
tgagtttaacgatgacaaatattcaagaagcaaacattaagttatccgaaccaagctatctagtattgattgctttaggtgttctttataacatacgactaaacttataagaatggggaagatgtggagcagtagcctatggtagaaattttccagacatagattctgcgtaatcaaaagcaaaactactagaaagagagtggtcctaatttagatggaaaggaacacacgttttatgagtgaaactgaaaatataacaagctatatatgatcagaagcatgatgttaggtatctttggtaaagggacatatattagaagctacgcatgactaagggatcatccaaagtattctaattcaaaagtcatgagaa

SEQ ID NO: 148428 - DNA, 320 bp, Glycine max
  unsure (1)..(320): unsure at all n locations
ntngagatcaaactntaccactggtaatcgattacaggaaactggtaatcgattaccagagagtaaatactctggtaacttagaaaaatttggaaaaacttttcttgtaaaacaaaattgtgctatgtttggtttttgaaaaatctttttcaatacttcccttgcgaagtcttgacttggtgctttttggtttcttctcttgaatcttgaatcttcttgatgacttttctttaatcttgatcttgaacttgttgactcaatcatgacattattcttttggcatttttgaaatcatcaaaactacttgaattattcttgat

SEQ ID NO: 148429 - DNA, 430 bp, Glycine max
  unsure (1)..(430): unsure at all n locations
tgggtggtaaaaananaaatataagaaaaaggtgtatgtgtattttgggaggagccctgccgattcctaaatcctcttttcagaggaaaacgttaaagaaatgctactggaataagataagataaaaaatggagatgagagcatgctccactgattagattctgtaagcgttagctactaaacttcatcaacaacatggtaagtaattatggcaacagtgatcgaaccaaaggaatatgcagacaagatagatagagagaaagggaaaaaaagtcaagttaagtgagtgtcatcgttgaaaatcaatatagatgccagggacggctctgtaaattcagtagcccaccttacaaataagtgccctaattatctgaacactcttctcaaataatacattcacaaattaaacagttccattagtaaaaatatg

SEQ ID NO: 148430 - DNA, 463 bp, Glycine max
  unsure (1)..(463): unsure at all n locations
tattggccgttggatgaaactccacacagtgcagttctatgttcacttgtagaggatctgaatcccagtttaccagttggttgttgccgttaaccaacaaatcttattttatgttctctntaatatttctttntaattgaagatgcttcttttacccacagaaattgtatatttttcatgcaagtataacagttaaatgaatagtagttagtttaattgtatttcgaatttttttttataattaaattataagtgattttttagtttctatggaaaaaattaagttggttaagttttttattttaaaaattaactaaatttattcattntgtcaaattnttacttaaaaattntcaaatttttaattttatctacatatttaggagtttatgaataaattgagttagaaaataattntaaaaattatangtaactttattagaaaaattagtaaatattaatg

SEQ ID NO: 148431 - DNA, 406 bp, Glycine max
  unsure (1)..(406): unsure at all n locations
tcttcacctttgctcagagctggtaattgaacttattctaaaattntgtcccttggtccaaaattatgggtgaattttcattagattattttttcgcttcacataaaatgattctttgatcatgtgagaagagaatgaagcctcagttaggacagttgattaaattaagaatagactaataattacaggtagaggaagaccaagaaagactttggattctgctattattagaattggtttagatttaaatggcttctatgaaaaatgaaaaattgttttttaacagaatacaatggcattgtttgattgatataggttgtagatgacctcagtgggaaaaaaaactntggttatcactgctatgtataaatcattgatattatttggtagcaactcttatggtaaa

SEQ ID NO: 148432 - DNA, 460 bp, Glycine max
  unsure (1)..(460): unsure at all n locations
tagcccctaacgaaagatgaaccgtgtcaagttgtacactatgtggagatcattgtaggagtagaagggtccgaggagttagagttggacctgagaaccaatgacgacaatcgggttaaaccaattgaagaaacatgtaactttcagctcgacattaaagaggaataggttacttgacttgggaaccaactctcaatggaatataagaatgacttacaacaaattatctgagcacatgccgacctgtttgcatggttcgaggtcaacatgctaggcatagatccgaccttccattgccataaattatccataatttaagatgccaaattatatctcagaggaagagaaagattgngaaagaaaggtgttaggtagtgcggcaagaggtttccaaactggtggcctaattatcanagaggtagagtacaccacatggctatcanatctattcctagtaaaa

SEQ ID NO: 148433 - DNA, 459 bp, Glycine max
  unsure (1)..(459): unsure at all n locations
ggcagtanaaacaacatttgttttcaattgttatgtcaattctctgtaatatacaaagttatcattggttcatttgatgttggtgaattggaagtagaataaacacaactacagatgttattttactttgtaattatatatactagattttcaagacattcaagctttcaatgccgtcatttcctctgcacctactccttcgatttcacaacagtgtcagtagaaatgatgctaaacccggctcgtatttcctttccttatgatcttttgccccaacaatccattctcatactgagggtgaaaaatatccttaacagcatgcccatgattttatttttcctgcaagtttgtcacaacattaacaaagtagtaccttattattcattatggtgggcctacctaattcagtatggaatcaaccatagagatagatagtgaagtgggaaaacagcaagataa

SEQ ID NO: 148434 - DNA, 413 bp, Glycine max
  unsure (1)..(413): unsure at all n locations
tgatatctcggcccaatctttcagttaaaatactccaaatcattattgtttctaccttctagtatatttcttgttggtagtgtattggaatctgaattctcagcttcacaatgactaaacttttttcttgtattgacagagcaatgaggatattaaccacacgcttgtctgtgccaagcttgaactgatagcagcataaatggaagccaatgctaagataaagaaatatgaggagacagttaaacacttgtataaacttttaaagaaagtttgccaggaaagagatgaagcaagagaccagcttcaattgataaggaatttccaagcatctactccagctgagacaagcagtactggtccacaagttgatcatcatgcatgcctncaataccaaacaaagccatcattgaata

SEQ ID NO: 148435 - DNA, 363 bp, Glycine max
  unsure (1)..(363): unsure at all n locations
tattggaatcagccaattgctcagtgactgttcttaattctgtcatcttgaaggtgtatagttgttgcttcaagcataaccgatttgcaagagactttgtcatatacaaggattccagtttcaaccacattgaggttggtgtcctttctcttgcaacttctcttatagctttatttccaaggcatagtatgattgcacttctggctctatccatcatttcttatttctcctttgaacttagagattcagacatcctttcttcttctttaagagcttctacacagccatgctgaatcaagattgcttncatcttgatcctccataacccgaagtcattttccctgagaactctcatatcatact

SEQ ID NO: 148436 - DNA, 418 bp, Glycine max
  unsure (1)..(418): unsure at all n locations
tgattaccctggtgacactntacttccaggaatgaaaattggagtgaacttcaaaaccggtcaacatcgagctctaagatcatggagatcctttacggatcctactccaggtaatttttcacttggtgttgatactcgtggccttcctcaattagttattacaaatgagaatactaatagtaatgacatagcttatagaccagggtcatggaatggtcttagtatcacggngcttcctggagaaataactgaccaattaacaaaatccctttttgttatgaatcaagatgaggtcttctatgagattcagctcttgaatagttcaactaaactcatgagaagcagaatgcttccagaagggtatcaagtacgttttatatggtcagatgaaaaaaaatatgggattctcaaattccta

SEQ ID NO: 148437 - DNA, 435 bp, Glycine max
  unsure (1)..(435): unsure at all n locations
tagaagcaaatgctggcatggtatcgcagattcgtgtagcaagaccacctgctgaaggacggngaaggaatcaattgcttccacgttattggcctaggattactgatcaagagttgcaacaaatatcaggagagtatccaacattgtaatctgtcctataaattattatgaatcactgacaggatacttactggttgatacacttattattattttgatagctaatctttaccttagtatttccttaaccatgattcatgatatgttcaagttcaaattctacaatcgtgccactctttgaaaagatgcttagtgcaagtgatgctggtcgaattggtcgcttggttttaccaaaagcatgtgctgaagtaatttatcttaactcatctgttgaactggcatttactgttgtcattttatattaactaacaattc

SEQ ID NO: 148438 - DNA, 395 bp, Glycine max
  unsure (1)..(395): unsure at all n locations
tgtgaatntatagtgtttggtgactaattgtcacaaaaaagcaaagtaaagcccaaagaagcaaaattaaagatctaaaattactcgctcagcatttctcaggtgctcagcgcaacgcagatgcttagcggacaacgcacgcttaacgccagaaagtatgaagacgtctgaatcatgaatatgtgcttagcgcgagtcactcgctaagcgcgagattactatcatactcgctaagcatgaaattgcacttagcgtgaaggttacgtaaaaatcaaactgaactacacctataaaagaaggagagagaaaaagaaaaaaaatacacttaaaattcaagagaatacaattccttacagaaggcaaaggtcgaaagcaggagaagcaaccattcggag

SEQ ID NO: 148439 - DNA, 412 bp, Glycine max
  unsure (1)..(412): unsure at all n locations
tggtaaagaaaatgatggcatgacttttatccaatcttattatgttgaaaagctattgaagaagtttaattattttgatgcgaaacatgctcttactccttatgactcatccatcaagttaaagaaaaatttgagtaaatgaatttctttacataaatattctcaaagtatcggttctttgttgcatttgacaaacttctctatgcctgtctgatattgcacatgcagttggtagattggaaagtaattgagggatttagtgatataaaattgaagttctgattntgatgaaataaaaatgagaagtggttatgtctttgctttagctagttgtgcagtatcatgaaaatctactagacaagttattatttcacatganagcaaaaattattgctttaaatactgctactag

SEQ ID NO: 148440 - DNA, 320 bp, Glycine max
  unsure (1)..(320): unsure at all n locations
cttgtgtgggacacccattgtgagtgtagtttccaaacccttatagaaaagttgacgatgactcctgtgttagttttgcttaacccaagagaaccctttgaggtgtattgtgatgcatcaaagatgggtttaggaggagtgttgatgcaaaatggacaagtagtggtttatgcttctagacaactcaagactcatgagaggaattatcctacccatgatctggagttagctgctgtnagttttgctcttaacgcgtggaggcattacctattcgactccagtttgaagtgtttagcgatcataaaagccttaagtatttg

SEQ ID NO: 148441 - DNA, 371 bp, Glycine max
  unsure (1)..(371): unsure at all n locations
taggaacccanacttgtagcttcaatgcaaggaaacgtgcttatggctaggaatccaaaaatttggttttagaattagaaaagaatgaaaatagggacttgtttgtaagaatttgggctgccccatgattggtactttgcacctaaataacatgggaaatgattttcaatgctgtgtagatatatgtgtaaatatgaagggcatgaaattctttgcaaaggatgaaggaatattgaggtcacttcctaaatgaatgtatgatagcatgggattcccttttgaatgcaagtatgtgcataatgttaaatatcttgccaataggcataagtgtgagtgaaacaatgaaaagttgtatggtatatatatcttga

SEQ ID NO: 148442 - DNA, 455 bp, Glycine max
tagccccctaacgaaagatgaaccgtgtcaagttgtacactatgtggagatcattgtaggagtagaagggtccgaggagttagagttggacctgagaaccaatgacgacaatcgggttaaaccaattgaagaaacatgtaactttcagctcgacattaaagaggaataggttacttgacttgggaaccaactctcaatggaatataagaatgacttacaacaaattatctgagcacatgccgacctgtttgcatggttcgaggtcaacatgctaggcatagatccgaccttccattgccataaattatccataatttaagatgccaaattatatctcagaggaagagaaagattgggaaagaaaggtgttaggtagtgcggcaagaggtttcaaactggtggctaattatcaaagagtagagtcaccacatggtatcaatctattctagaaaaaa

SEQ ID NO: 148443 - DNA, 461 bp, Glycine max
tgcttgtggagcttctatggaggctggatctttgatcttcaatgaggtcctttaatggtgattttccaccatggagatgcagcggaagacaaaggagaagaggtaagaggcggcgccatccactatggaataagccttggaagaaggagcttcaccaccaagatgagccttggataagaagcttggagaggatgcttcaatggagagaaagagaggggggggagcacgaaattgaaggaagaaaaagggagagaagttgaactttgagttgtgtctcacaagactctcattcatcaaagttacaacaagtgttacacatgcttctatttatagactaggtagcttccttgagaagctttcttgagaaaacttccttgagaagcttctttgagaaaacttccttgagaagctagagcttagctacacacacccctctaataactaagctcaccttcttgata

SEQ ID NO: 148444 - DNA, 460 bp, Glycine max
  unsure (1)..(460): unsure at all n locations
tggagaggatgcttcaatggagganaagannaaaggagagaaagagagaggggggaggacgaaattgaaggaagaaaaagggagagaagttgaactttgagttgtgtctcacaagactctcattcatcaaagttacaacaagtgttacacatgcttctatttatagactaggtagctttcttgagaagctttcttgagaaaacttccttgagaagcttctttgagaaaacttccttgagaagcttctttgagaaaacttccttgagaagctagagcttagctacacacacccctctcataactaagctcacctccttgagaagcttccttaagaagattcttaaagaagctagagcttagctacacatacctctctaatagctaagctcacctccttgagatgagaagctagagcttagctacacaccccgtataatagctaagctcacatgaaaataac

SEQ ID NO: 148445 - DNA, 405 bp, Glycine max
  unsure (1)..(405): unsure at all n locations
ntgagccaaaatcctgactcaccataaaccttgacccagggtgagaatgtcaatccttaccctcggaagcaaaaaaagaatagaggggaaatttccaatcaaagaaaaagagaaggaaaatttccaatgaaagcaaaaaaagaaaagaaggaaaattccccaatcaaagagtgggagaaagcaaaaaaagaaaagaaggaaaattccccaatcaaagagtgggagaaagcaaaaagaaaagaaaggaaaattcccaatcaaagaatgagagaaagtaaaaaaggaagaagaagaaggaaagaaagctcctgatcagggatcgaaggaaaaacagaagaaatgtgcagagaggtctttggaccggacaatatatgaacaatacagaattgtcaccaaatgaacaaa

SEQ ID NO: 148446 - DNA, 452 bp, Glycine max
  unsure (1)..(452): unsure at all n locations
acaattatctaatcattccaatccactcaaatcatacagttgctcattcaaatcattctcaaacactcatttcatacaaaacaatccactgcatatcgttttcaatcagttctctgttcaaacaagcttttttgtacatgcaaacaactcatagtactaaaatttaaagaacggaaacataaaaactgaaatttaaatgactgaacataaatcataaaataattcaagtaaactaaaatgttcaaaatgcacaaatttaaatgtcctgcttctgtggttgctcttgtgcatgcttattaagatccaacacctgagcaactggtaaatcctgagaggtaggtttctctaactcacatgttggtgaagatggtatggcatcatcaggtataggtgctggggatggctctgggatctggtctgtggaagtctncttctcttgagccatgtgtaca

SEQ ID NO: 148447 - DNA, 391 bp, Glycine max
tcattctctatcttgagactcttgtgttattaattactgtataaaccttagggttttctcattcctatcttctgcaaattctcctacaaggctagaaatatttctgagcaaatataccagattttgattttgattcttttagcatgcaactctatattaatgctgctgcattgtaatgatcacatttgcaacttactaaaatgcggcgcagcttaagcatttgaatgctttttgaatcactgtatttggcgtatttggtttggccgttagccaattcaatgcgtggatatatatcgcacacctacaccggagatatatatcagttatggctttgtgttcaagttttctcaatcttcatcttctggtttttgtttggttgacgatagaagcg

SEQ ID NO: 148448 - DNA, 418 bp, Glycine max
  unsure (1)..(418): unsure at all n locations
tcatttgcaattcagtgtaatcagtgccagccatattcgaatgaattggatactttgaaccagtttatgtacaaaagaaaaaaaaagtttaatttttatgtatcaagtatacgaaattttataccatcaaccaattaaaagttatatataattggaataactattataataattatcataaaaatcaataaatttatcattcatatatttcaataccaatagccactatataattactgcatgctcaatgagaattaaattgacatgtacctctgatcgtatagtgtgtatgaatctgccatctcttctgattgaagtagtgctaaccacgttaagcccttctttaagcagaatgtccaacactcttgacatgggaaacaaacttttcccanagctgtaactgcacataatctcaagt

SEQ ID NO: 148449 - DNA, 393 bp, Glycine max
  unsure (1)..(393): unsure at all n locations
tcaggctgttcaattgctntaaattgttgcatagaagggcaaaggtctgtgtggtggtcggcagaggagcacaaaccacagagtctggcgacaggtgcagattttttattcatggccagttgggttaccaggttaaccaatgcatctagtttaccttcaagcttcttagtctcacctgatgaattcgtggctacttcatgcactcctctaatgacaatagcatcacttctggcactaaatgtgtgggagtttgaagccatcttcttaattaaatttcttgcttcagcaggggtcatgtctccaagggctccaccactagcagcatctatcatacttctctccatgttgctgagtccttcataaaaatattggagaagaagctgctttgaaatc

SEQ ID NO: 148450 - DNA, 392 bp, Glycine max
  unsure (1)..(392): unsure at all n locations
tctaaactntaaacaaaaatgaagctaaactntaaacaagaatgaagcttcgataccacttgttagacaagtggcctcagatatcttaagaaggggggttgaattaagatattacaaactattttcccaattaaaattctactttgattttaatgcaagttcaaagttcccttaaagattaatttctaaatgatgattcaaaataaccaaactgaatgtaaaagtaaagcaacaataaataaaagagtttaagggaagagagagtgcaaactcagttttatactggttcggccacacccttgtgcctacgtccagtccccaagcaacccacttgagagttccactaacttgcaaaaaccctttacaagttctgaaccacacaaggacaaccc

SEQ ID NO: 148451 - DNA, 209 bp, Glycine max
ggagaatttgtaagacttaattcacccctctcttaagttattgaggtcacttggcgcgcacacagatcaagaataaagctaagtcttactctatctttgttaaaagagtctcttagtgattggaaagaattggcctcacaacattgttcttaaattgattataaaaaggttctagaatacttttaacaatttttggataagacattttt

SEQ ID NO: 148452 - DNA, 431 bp, Glycine max
  unsure (1)..(431): unsure at all n locations
tgagcatagcagctntgttaattaccttgtgagagtgaacaccaaggccacccaaatccgtaggcaaacaaacctttttccaaaaaacaataacaagttttgatcagttatccctttcccctgtccagatgaagttttgaatccaagagtcaattatgttcaataatgtaatcggccatgcataaatgtgaaacgaataaagcaacaagctctaaataacaaatttgatgagaaagctattgtgtgatcaacgctcttacaaacaaaattatccacactcacaacggatcgtgagaatacaacaaagattataccatagaaaaataataacaaataanaatttaacatgattcgacacatcttgcctatatctacggagctggttcaaaaatattgttttatcatataaataattacaagaatggaattca

SEQ ID NO: 148453 - DNA, 330 bp, Glycine max
  unsure (1)..(330): unsure at all n locations
tgttgcagacaaaaatctntggctagaatgccgcanaaatggtctacaaaacatccatcggttttcttggcctgaacactgccgcaactacctctcccatgttgagtatggcaggaaccgccactccacatcccgcttggaaattacaccaatgactgaagaatcaataagtgactcattgagagatgtagaagacatttcttttagattctccacagaaggagactccaagcagaatggagagatggacactgcagcaaggcagaagcaaattatggaagcaatcatgtgcagggtctcttccactggcaagtctaatgccagttactt

SEQ ID NO: 148454 - DNA, 450 bp, Glycine max
  unsure (1)..(450): unsure at all n locations
tatcaaaccatatacaaggatcaggatcccttttatatctaaagtaattatgttcccactgccatcgaacaaattaaaggaatacccaagaaaaaattgtagagcttaagttgatgttactttttcatttgataataagatttatttgttaaattgaatagatacttatggttaatctaatactctttatataacacaaaacccatcaatttgcaggaacttaatgttcctgagcatgatgttgagcagctattggtgtcactgattttggataatagaatccaagggcatattgatcaagtgaaccggttcttagaacgctctgataggtcttgccgttatattttgatttgttaaattaaattcgtcatattcatctttcttttatataaaacataatatntactaacatattcacggtccaggtcgaaaggaatgaagaagtacact

SEQ ID NO: 148455 - DNA, 416 bp, Glycine max
  unsure (1)..(416): unsure at all n locations
aggatagacaaacagcgctagnccaatcaattgtggggctccaaactcgatggtggaggatgcatgaatgacaagcaattcatggggctccggataagatttgaaggtagaggatagatgaacagcactaggcaatcaattcgtggggctccagacttgatggtggatgatgcatgaatgacaagaaattcatggggctttggataatatttgagggtggaggatagacgaacagcgctaggcaatcaattcgtggggctccagactcgatggtggaggatgcatgaatgacaagcaattcatggngctccggataagatttgttggcaggactgaatggtccaccggtttttttcccaccctaaaggcgaacatgttttatcaaggaanaataaatcattcatgagagcactata

SEQ ID NO: 148456 - DNA, 221 bp, Glycine max
gcagaatttagtaatgacccactaacctagaattaatataacttaatgccattaacctagggaattaaaacaaacttaatggctgagtgtaactgaaattgtggcaaccaaaagtcacccccaacagccaacaagtcagccaccatttggtctcccaaaaggctgatgcctaggttgccaattgggcccttattacaactcgaactaaagcccttttagtt

SEQ ID NO: 148457 - DNA, 440 bp, Glycine max
  unsure (1)..(440): unsure at all n locations
tctgaacattagctagagccaggtcaagaggtgagctcggaatccctgctagaaggtactgttctgatgctaanactatctacttgctccttttaataatatggaagaactttagaatctagttcaatgatcggcgccattatattgaaaaacatgaatgctctctttctttatctctcccttgtatataatctctaataactaatttgccaatatgtatcttgccatttattgatcttttagatttgcattaaattgggtaccacttgcgtgaaagggtatttgggtcttttgtttttgttggtatcttattgctatctaattcgatgctctcataaagaactagtgctccaattgcatcatgtctaactgctattatttatagccattgcgaaacatgaatgctctctttctttatctctcccttgtatataatctct

SEQ ID NO: 148458 - DNA, 403 bp, Glycine max
tagacggcaatttcgagcgtctccatatattacgggactcaatcagacatccgagtaaaaagttattgtcgcttgaattggcctacaggttctacattcaatatcgagcgtcccgatatattacgtcactgaatcggacatccgagtaaaaagttattgtcgtttgaatttgctctgagcttcaacattcaatttcgagcgtctcgatatattacgggactcaatcagacatccgagtaaaaagttattgtcgttggaattggctcataagttcaacattcaatttcgagcgtctcgatatattacgggactcaatcagacatcgcgagaaaaagttattgtcgcttgaattggctaaaggttcaacatataatttcgagcgtctcgatatatttcgggactc

SEQ ID NO: 148459 - DNA, 448 bp, Glycine max
  unsure (1)..(448): unsure at all n locations
tattaagggatcatttgtcctttggagtgttatagctcactttgaactgcctaaagtgcacaagaagtgagatcaaaactaaatgcatgagcatgtcttcgcccagctctagcttaagcgtttaagttttgatgccaagctagacatttccattatgtactcccttatattattcttttccttatacttcggagattcatgatcataaatgttattatctctgccttcttgtttttggcaaagtattgttcaatttcctcaagaaatttctttacattttcaccctcacaaatagagccccgaaacgcttatggaatagaacacttcatggtcataatgcacattctattggaacgatccaatttctcaattttggcctcattagaggttntcgaagtggatcgttcacttactaaaaatagactttcaacatcggttattaatcgat

SEQ ID NO: 148460 - DNA, 398 bp, Glycine max
ctgatgcaacatttggagaggttaatgaaacaacgagatgatgcacttcatgagaggttggatcaaatggagaatatagatcataatggagaagaaaggaggagaagagggaataatggtgttcatagacaaaaccgaattgatggtattaaactcaacattcctccctttaaaggaaagaatgatccggaggcctacttgtagtgggagatgaaaatagagcatgttttctcatgcaacaactatgaggaggaccaaaaggtgaagcttgtcgccgcggagttttccgactatgctcttgtgtggtgaaacaagctacaaaaggagagagcaagaaatgaagagccaatggttgatacatgggcggagatgaaaaggatcatgaggaagcggtatgt

SEQ ID NO: 148461 - DNA, 405 bp, Glycine max
tcgtatggtctgaaacaggtaaaagggcatggtataaggaaattgacagttattttctaaaaagaaggttttaagaagagtgaaaatgaagtcactttatatgtgaagtgataaaaaaatgaagtgcaactcattgtttccttatatgttgatgatttattttttatatatagggaatcaaattccttaaaccaattcaagaatagtggaaccttggagaatctttatgatagatacaattaatgtataagaaaatgatggagagctaccatgtcgaagatcaatacaataaatataaacaacatttgacagcttctagaaagagaaaacaatcaaaaggcaattggtgtaagtgggttacaaaaccaaagtaattctaatggttcgcgaacaactcactagatg

SEQ ID NO: 148462 - DNA, 405 bp, Glycine max
  unsure (1)..(405): unsure at all n locations
tcggctntcaatgtcgagcatctcgatatattacgggactcaatcaaacatccgagtaaaaatttattgttgtcagaatttgcactgagcttctgttttcaatttcgagtgtctcgatatattacgagactcaatcggacatctgagttaaaagctattgctctttgtatttgctacgagcttccgatttcaattacgagcgtctcgatacattatgggtctcaatcggacatccgactaaaaagttattgtcgttagaatttactcatagcctttattttaaattntcaacgtgtcgatatattacgggactcaatcggacatccgagtaaaaagttattatcatttgaatttgctcagagcttctgttttcaatttggagtggtgtcgataaatgtgggactc

SEQ ID NO: 148463 - DNA, 452 bp, Glycine max
  unsure (1)..(452): unsure at all n locations
tgaagagcctcctcaatcaaactgaaaaacctatattcctcaatgaagttagcacccatcttttcataaaacttgatggtgagaatattccaatcaagcataacccacttgacccttttgcaccccatttttagggcttgctttgccaccacagagagcaacattctcccaagccccttcgtcttataacactccctcaagaacaagttctccatgtaaaaccctcgcttctctagaacgagagagaagttcggaaaaaacaagacaaacccaacaatggaaacacctttgagggttnttaaattgtagtttctcgagataactattacttaatgggaataataaatgaataattaataattatggactaaattataattgggttaaattggaagcagttttagagaaaactattatttgattggagtagtnggtataagggtcaatactca

SEQ ID NO: 148464 - DNA, 390 bp, Glycine max
  unsure (1)..(390): unsure at all n locations
ngaggagacgctgaatcagttgatgcagatatccatgtccaactataggagcacggagtcctccaacaggaacctagagatacaagtgggacaattagccaaacaaatggctgaaagacccactggcaactttagagccaacacagagaagaatccgaagaaggaatgtagggcggtgttgacacgaagccaaatgagagtgcaaggagaagcagagaaagctgaaggagaccagtctgaggaaggaagggcagacaaagaagaagagaaggaggaagaagagaagaatgtcttaatctctatgaccaanatccagctagcccaagaggctagaaagaagaaccaccagccccttctaaggagcctncatatcctttagtactatcgaag

SEQ ID NO: 148465 - DNA, 334 bp, Glycine max
  unsure (1)..(334): unsure at all n locations
tgttcttgtgtgctctcctccacctagatccttaattgagccagtaaacaagtcaaagcagtttggattgcaattgttgaagatctgatcttatggaaattgttgaagagattgtctgaggcggatgaatttttcgatgaccgtgattttcttgattaatggcactgtaaggtctatgtcttaatagtgacagctttattttattntatttaaaaaaattgtgcatcaatgtctcattgacataggacttttccttgtttgcataaaactcctttacatttacgtagaactctctcgcatttgcataaaatgttagcatatataactattatgt

SEQ ID NO: 148466 - DNA, 259 bp, Glycine max
ttattcccagaaatgggcaatatttatatggacgggcatatatctacaagggcatcacaatcattggttcaagaacctcaaaattgaccaaatgaatataacatggatgaccaatttatcatgatatcgacaatagtaaaaaaataaaataaaactttagcgggaacagtcttgacatgcctaatctattggctataaataattgtggcaggatcaagctctactgactggtattacaataagcatttttttcaaggaa

SEQ ID NO: 148467 - DNA, 383 bp, Glycine max
  unsure (1)..(383): unsure at all n locations
ggcttattccctagtggatggtgcctcccctctcctcttctcctttgcttgacactgcatcttcatggtgaaaaatcaccattgaaggacctcattgaagctcaaagatccatcctccatataagctccacaagcaagcttccatcattgagtatataaagggaaaataaacaaagaatatgcaattcaggtgttgaaagaaacatgtatgtattagttctaatttgttatttattttccctttatatactcaatgtagactataaggccaaccaatatatatgatccagaatttcctataacacaacattaaaattctctattaagagtgacataagcnngttatgttataaaatgatcgaaatctaattaaatgtaagttt

SEQ ID NO: 148468 - DNA, 344 bp, Glycine max
agcttatatatatcgagatgttcgaaattgaataacggaagctcttgataatttcaaatggtcataagttgtcacactcgggtccgatataagcttataatatatcgagacgctcaaaattaaacatcgaaagctctcgagaaattcaattgatcattatttttcacacggatgtccgattcgggcgcatagtatgtcgagacgctcgaaattgaacatcggaagctctcgagatattcaaatggtcataacttttcacacggatgtccgattcgggcgcataatatgtcgagaggctcgaaattgccaacggaagctctggaaaattcaaaggtcataacttt

SEQ ID NO: 148469 - DNA, 306 bp, Glycine max
gcctctcgacatatgatgcgcttttatcggacatccatgagaaaagctatgaccatttgaatttcacgagagcttctgatgttcaattttgagcctctcgacatattgagcgcccgaatcggacatccgtgtgaaaagctatgaccatttaaatttcgcgagagcttccgatgtttaattttgagcgtatcgatatattataagcctgaatcggacatccgagtgaaatgctatgaccatttgaatttgcgagagtctccgttggttaattccgagcggatcgaccttttataagcctgaatccga

SEQ ID NO: 148470 - DNA, 393 bp, Glycine max
tcttcaacaattatatgatgaatatgtggctttaagaaatgaagaatcatcctcaaatgaaaggaatgttgggggcataaactccctaactatccatgtgcctgatacattttctatgactaagtttgatcaattaatgagtcttgtgcatgaaaaggaagcagtcccaccaatgaaatcagaactagatgcttatcttgaggagaaaaatacttatatctctaataatgaaaactccacttttattgccttggagtggtggaggaataatattttcaaatataaagattttatcaaagatggcaaagagatatactagttgctctaatgtcaaccgttgtatcagaatctacatttaacgctggaggtagagaaattgatgagtatcgctct

SEQ ID NO: 148471 - DNA, 374 bp, Glycine max
  unsure (1)..(374): unsure at all n locations
aacagagcaaaagcagttttctctgccaaaacacctccctcaatcacagcttttctcactcaaagaccccagtaacaatgccttcgttccaattcgntaaccgtaggatcgactccaaaattttactggaagtctctagtacatgagcctacattttgaccgtagggatctactagaaaacatccagaactcattctgcactactcttttcacagccaatcacacacaagcatttttctgcacaaagccaaaatcctgctgcacctattttgacagcaaaattctgcataagtgcagatttcgaaaatcacacttcccctcatccaatcttgcccaaatcaattcctacaagtcccatatcatgtatcaatcat

SEQ ID NO: 148472 - DNA, 361 bp, Glycine max
ttatacacaagattttctacacacatgtctgggccaaagactggctcgagtgtctagatgaaagaatgaaaagcaaagagagatctgtaaatgacagcactatgcttgctgaaagaattggaaatgtcctgattcagaggaaagatggtagagaaacttgcatagaggatgtactttatgttccaagcataagcagcaatcttctaagccttggtcagttacttcagaaaggctttaagataactatgaaggacatgatgatgctggtatatgacaaaaccagaaatctaatgataaaaacaccattgaccgaaaatagaactttcaaagttggaacgcaagcacttgagcatgaatgtct

SEQ ID NO: 148473 - DNA, 383 bp, Glycine max
atgttgcattaaaatacatgatcgccaagcgtgatgtctctatgcaacacttaacttctttttcgattcaccactataatggatacccatgacttgctcttttaatgccacaaacgtaatagggcactcaattaatatcattcgacagaaaataaagaaattgcaacataattattttttaggaataaaaaagaaatatcacaatcaaatatgctgacaaatgaccctcaagaatatagctttctatatattgttaggaccatctgtttaatgccaaaatatacatgtgtgtccatcaaactccaaagcctgtaatgcaggtgagaaattatgaacaaaatatgcatactaaagcttttatcagtcacatgaacagtatgatg

SEQ ID NO: 148474 - DNA, 398 bp, Glycine max
  unsure (1)..(398): unsure at all n locations
tagtatgataatatagaaacaccatttcttaatgaaccaactctgccaattgntctttttatgggtgatttttatgaatttttataaactcttaaatatgtatgtatcttacacttattgnatcctatatattttttaaataattgtatcgccatatcagatatgtatcggatctgngtatcatagatgtatgataataataactataaatatttacttagcgtacaacaatgtttataaacgtagctacgagacttacttacagtattttgcgagccaaatatgtaattctgatgtgatatattactgcagnatagcgggccatcaaaatatgctatgacgtatgtcaactggntaagaaaagataacaagttttctgacatcttggttcagatatc

SEQ ID NO: 148475 - DNA, 378 bp, Glycine max
  unsure (1)..(378): unsure at all n locations
aatagatgcctttgaaaatatgagaattccactccatcgaaatctcatcagataaaagaaattttgtttgatgaaaaagaaatttaatgtttgtctggttctttggatttaaattttcaaggttgattgataaatacgaaaaggaaacttaatgtttgtctggttctttggatttaaatgtcttgctgttctataccacttcgtgcaattatgaaaactacttttctaccaattattgttttccctctaaatgagcggttgattggagtattttacaatangatgtgatctggtgtgtgtggattcattatctgaaacatttganatagtaatttccattacattaataggctctaaatggttgaattattttgtctg

SEQ ID NO: 148476 - DNA, 303 bp, Glycine max
gattcaaaacaaattgatgttggcgcttagagcatcctttcccgctaagcatagcttgaaagctcaacttacagaatgaatctgcggcttagcgcaagatggcgcgcttagcgcagctataataaattttcacagagaggaagtggagcttagtgcatcatccacactaagcccactacttaaagagcaacttatagagaagatgttgggcttagagcagcgatgagcgcttagctaaaccattcagccaatcaatcaagggtctttgcacttagtgcgagcaagctcagcttagcgcgtgaa

SEQ ID NO: 148477 - DNA, 322 bp, Glycine max
tgaaaatacagttgaaattgctgaaaaacaagttactgtgatacaacatactcgtcctcgtcattattcaaaaactgatgtatgggatctttttgaggaattaaaagtcacagatccatttcgcatgaaggtttataaccatttatgtgattatgagcacaaaaaacgtaagctttgtggcgtaccacctcatatgagaggagaagctctcattcaaatgatgactgatgcatgtatattttgttaagagcattggtagtgctccttgtttggtcctatatatttatgacataatgtgatgcctttactaatgacagcctat

SEQ ID NO: 148478 - DNA, 423 bp, Glycine max
  unsure (1)..(423): unsure at all n locations
tgagctctaagaacattaagatggagaaagacacctccattataaaggaaacagaatcataaaagaattgtggtcgagacgactcgcgttctccgncaaattntatgacatttttgtcaccctacaaaaatcagaaacaatgattagatattttggctaccaatggaaaaatggagcagatcgctttcaaaaaatttcattctcaaagattaggaatagattaatactgcataagcttcagagatgagatcagaatggagaagctgaatgaatnagcatcgcttgcatgccaaataaaacaagaatgaatgtcttcggagcaacctgtggattttaaaagaattaatttaagataagcatggaaagataatgattctacttaaaaatttgttaatccagataataatacctatcatgctcaga

SEQ ID NO: 148479 - DNA, 275 bp, Glycine max
gtctatttttttaataatgcttgtttgttataaaaaccaaacatcttttttgttgttcaatggataattatattttggagctctatatttgaagccactattacttaatgtcaatggaatatcaatgtgctatcacatacacttggggggcgtgaacgaagatataattaagtatgaatttagatttgagtctagatataaaacaataatgcttgttatcacgtatttgagagtcttcatcaaattcatctgggtcttgggtggaggtataaata

SEQ ID NO: 148480 - DNA, 346 bp, Glycine max
  unsure (1)..(346): unsure at all n locations
cgacaaatataatatgaggaggacctcattttccacttagaaaaagcgaaaagccatgtgagaatgtatntgttcccactcccaaccaacagacattttcttacatacccattcctcatgaatgagtaaaaaattcaacttttgccaagattatatcccaacacaaattaaaataggtattaatcttatccctcgaaataaagtgaatatatctttcatcatgcaaagaaaaaattaaatgatgcctacaataggcttgtattttaggagagtaaagcagaatatgctaatagcctaattgtgctaataactatgctaaacacgtataaatgggaaaaccaaagca

SEQ ID NO: 148481 - DNA, 450 bp, Glycine max
  unsure (1)..(450): unsure at all n locations
gcttacgtcatgattataaaaaaaaacattttatctgtcatcataaataaaggggacccaaccaacgaaatgaagaacgcttaaaataagggtgaatggttgatttggttaccctcgggctcaaaatatttaatccgattaaaagtgaacattactattttcgaatcatttcttatatatattggattttaaataataatgttggccttacaacttatgtaaaatataacaaagtcgtttcatccaaataattacccactgggagagggtagatgaaaaggttcgaaggtgttaatacttttctacattttattgacgctatatataatttttgtatccacattgctttatctgtaattataacattaatccaataagtgatgatcgattgcttgagtggttattattgtttggttaataattnttatggatattaaatctgatcaatct

SEQ ID NO: 148482 - DNA, 387 bp, Glycine max
  unsure (1)..(387): unsure at all n locations
agacacnannagaaactcaagctagaaagctagtagccaaccatcttttctagnagatctttataacgtgtctactatcattggtatcatctctttctccatcattgggggagctacttgagtagccatatccctccacctttgggcgtatcctttgaaagattcatgctctttttgcacatgttctgtagttgcattctatccgaagccatatcagaattgtactgatactgcctaatgaaagcaaccattaagtccttccaagaatggactcaagaaagttctagattagtgtaccaagagacagctgccccagtaagactttcttggaagagatgcatcaataatttttcatctttcgcatatgctcccattttcctgcaggac

SEQ ID NO: 148483 - DNA, 323 bp, Glycine max
tctcttatcaattgtgtctacgttactgcaaatcccaactctgcttcagttgtgcagcctaactaacttacggtttgttctaaccaacaaccttgctaactgactaatgaccatgcatgcaacaatacgtgagagatgtcttgctgctgcatcatcttcctaacacaatgtcatatgttctttcattaacgggggacggaagtcaacggatgaattaatttttcacactctctttcacttttgatgactaaaatttaaatgtttatcttttaagaataaatgtgttatcactctacatattgacggatgcaagtaaatctaaa

SEQ ID NO: 148484 - DNA, 361 bp, Glycine max
  unsure (1)..(361): unsure at all n locations
tggagttttgggagattagaaaccttttttggcttccttggatcgcattcaatccacatatatatatatacacacacgtttagaagtcaacattnaattntttttattaatattttatatatactttacaagncatcgctaaaaaattattattaaaatattntttacttttctaaaaatctaaaattcaaaaaatatgattagaatattntatttttttatcatcattaaataatgcaaattaactattgttattgattagatagntgtttttaataaaattaaagnatttaaaattttcaccacataaatgntatcttataagggattagaaattaaaaaatgaaagctaataaaaata

SEQ ID NO: 148485 - DNA, 360 bp, Glycine max
cgaatttggctgaaacatacttagacacttcctgagcaggtacgagcagttatgcaagtgggatcagcatctttcattatcagagtaatcaatcacagcggaatctgtagtgtagacaaattgcaagtcgtttccaggatgtcaagacatctcacatgacatctgctgtttgcttctgctccccctgtctccatgcttactgcagcatcttctaacagctactagtcttctccaggatgtcaagacatctcctgtgacatcagctatctgctccccctgtctccatgctcttactgcagcatcttctagtagcttccatcagtcatcatcagcagcagcagtctccccctcataatcgta

SEQ ID NO: 148486 - DNA, 420 bp, Glycine max
  unsure (1)..(420): unsure at all n locations
gaccttagaatactacctncagattattnagtgatgccattgtatttcaaatatctttcaagatgaattncaaagatgaagaaagcaagatgtcaagcaaagcaaagatctcaacaaaagaatttagatagactcttagaaaagtttttgaaaagcgcaaatgataggccaagtgagnntctatcttaacaaaaacttttccaagcattttactctatgagaatcgattactagaggtttgaatcgattaccagtggccacaatgctttctggaaatgttntcaaagntattttcaaaggtttcaaagcttgaatcgattaccaaaactatgtaatcgattaccaatgctctaaaatgggtaaaaatgaatntagaagagtggaatcgattacacatcatatgnttttgattaccagagc

SEQ ID NO: 148487 - DNA, 394 bp, Glycine max
tgcttctacatgaatagtgtgggctggtgggggattttccatgtatgaatggtagtcgcaacatgggtttctccttcattctcaccctcttcatttgccccaattttcgtattcatcaaagcaggatgatcagatttgcctctttccaaatccacaaagcttgaaggtgtgtaacccaccatttttccatataaaggttgtggttgggggcaaaattgatgcccctccaaagtgttttgcatgggtataccaccaactgcttgcccttcattggcatatccgaggcaaggctcgaagtcggctagattgtggtggggaatttcatgtgtctcaatgagtataggagtggagttattgacattatcactgggaagttacgacacattgggtggtg

SEQ ID NO: 148488 - DNA, 289 bp, Glycine max
  unsure (1)..(289): unsure at all n locations
agaaagaggccaagagacgagccgaaggacacgcaganacaanagaagagagggggcaaggagcaacacaaagggacagcgagacaagcgaacaggaaaagaagacacgcagaacaaacaccagaaagcaagcaaaaaggaaggagaaccgaaagcaaagaagaagcagagccaagacaagaggagcaagtcgaaatcacaaagtccaccgaagtccaagaaaacagagactccaaccacagtcaccacgaaagccgaaagagaaagagattaagaggaaaggaaaccg

SEQ ID NO: 148489 - DNA, 402 bp, Glycine max
  unsure (1)..(402): unsure at all n locations
gcccgctcgaatcttaacgtcagaatttctcttctttttcatatagncataactttccacacagatgtccgattcgggcgcatcatatgtcgagagagctccaaattgaacaacagaagctcttgagaaattcaaatggtgtaacctttcacacggatgttccattccagccaatcatatattgagaccctccaaattgtacaacagaagcctctgagaaattcaaatgggcctaacgtttaactcgaatggcccaatgaagcgcatcccatattgngacactctcaattgaacaacagaaactctcgagaaattcaaatcagcataactgttcacactgagatccgattccggcttattatatatcgatacgcacgagatttaactacggaaactctggag

SEQ ID NO: 148490 - DNA, 297 bp, Glycine max
cacattggatgtctgttatgccttttaaaggcctgaaaagtgcaagaaaatgagccgtattttctggaaaacgcgatgaactcgcttatcgagcatgctacgctaaacgagttcatcaatgctcattgtatgtaacggtatctgaagaactcgctaagcgcgcttaccgcgctaagcgagttcatcttttgaagatgaacactcatcctcttgctgaactacctgtggctaagcgaggttgaatcgctaagcccaggtaacttaaatcattgttttgttgatggtcgtgcgctaaac

SEQ ID NO: 148491 - DNA, 423 bp, Glycine max
  unsure (1)..(423): unsure at all n locations
gcttgttctttggccttctaaaaacaagctattgcttttttctttgtctatctgtttcactactactattcaatcaaatgtaatttgaactgcaatgattcaaaatacttattgccattttaacaagtgattcttaagaaattgaaaaagtagccaaagcaaagcatgagtttcactggctaaagttatcatttgcaaccaaacttttcactatggcttaaggtacaacaaaagaaaagtttcactagctacgttccatggatacattgtaaatattggtaagggtatgggaatttgaaaaaatctanggtacgactttggtaatataaaatatgcctgttgtatatatgacttttttattatttatataaacacttttatatatatgtatatttttttgaagttatattaacatactcatac

SEQ ID NO: 148492 - DNA, 394 bp, Glycine max
  unsure (1)..(394): unsure at all n locations
cttgccacccatctcgcccagacgagctatgtttcttcctccagaatgcaccgccttctatggaacttcctggaaggaccaagtgggcctgattgctatttgcaccccctgtttactaaatacacccctgcccttttttgctgattcttcttccgtaacgttatggaactttacgaatttcgcgatgatactcgttttctttctgtaatgtcacgaaaccttacggattacgcaatcctcccttctttggcttccggaatgttacggaactttacagattgcgcattaacatttccttttgacttccggcatgtcacgaaacttcacggattgtgcaacaatgctttcttttgacttccggcatgtcacggaacttcacgaatngcctaatgat

SEQ ID NO: 148493 - DNA, 240 bp, Glycine max
tcaaaacaaagtcacatgtttagctaaaaaataacaaattctgcaaggctattaaatgaactaatataagaatccaatcttacaaaaaaaagagggaaattagacattacgggctattaacaaataacattacttaaaatgccacacccaaatagaacccttcaaagttctattcgacattatggaaggaaaaccatattttggggccatttagataaatatttctataaatacaaattt

SEQ ID NO: 148494 - DNA, 428 bp, Glycine max
ttgggttctattgtgattgggaatggcaagactcggatcctgtgtcaaacgatggaacgaaatttttttttacacaattgtttaaatattgaactctaataaatacttattgaataaataaaaacaatatttattgttaattttaagtgtaaaactaaagataagttccattagtagaaaaaaattaagtaaatattaactcaaaaatgtatgagatgagtcattaattgtaaaacaaaaaaagagagtaaactggtagtaaagatggaaaatgtgagaaaaatattacttataaagaacaatatacacatagtgttccaaatatgtccttatctctattaactgtactttcgttgggggaaaataaactatttctttctgcttgcaattgaggaatatatgttgatttcctttgcattgttgaatat

SEQ ID NO: 148495 - DNA, 451 bp, Glycine max
  unsure (1)..(451): unsure at all n locations
tcacgatgatgattcaagagtgattcaaggagnnttgatgttctcaaagatgatgacaaaaagctctagagtatgtgttcaagattgagtcaagtacacttcaagtatcaagagaaatttgaattcaagattcaagtatcaagtttcaagattcatgtttcaagtatcaagtataatcaagttgaagtttctagtatcaagtttcaagattctagtatctagtataatcaagttgaagattcaagtatcaagaaaagtctcaatcaagataagtactaaaaagtctttcaaaacattgagtagcacatgaatttttcacaaaaccttttaccaaagagtgtttactctctgggaatcgattaccagcttattagaatcgattaccagtagcaaagagtgctttcaaaaagctntcaactgaacttacattggtccaactgatttcaaaatg

SEQ ID NO: 148496 - DNA, 355 bp, Glycine max
  unsure (1)..(355): unsure at all n locations
attaccattgtttacataacacattctcatgaaatcatgcataaatggcggaaattgatccaacatggggatcatccttgctggcttcggtggttcaaaaaatgatgcactgggtctgactgatgtgttgctgttttgaaccgaatgataatcatcaacatactcccaataagatggatcacgctttgtcgatctttcgcttcttttcattacctttttcggggcacctttcgtcttaaccttttttggagtatggcacatagaggtctcatcgagaaacgcaaattctcggagtttactcttgaaagaactgtcccgcanacatcaagttcctcgaatcttttatgtatggact

SEQ ID NO: 148497 - DNA, 405 bp, Glycine max
  unsure (1)..(405): unsure at all n locations
tcagctagcatgctgcgctaagcgctcagctctatnnnctgttttatcttnctgttttcttgagaataaacctgtactaatctcttgagtttagtcttatattttgcagatggcttctaagaaaaagaaagcaccgtctacacctacccaagtcagatttgatagatccagattcacttcccaagaagcttgggaaaaatacactgacattgtggagcctcataagctcttaccagaaaagaatgtggtggnctactatacagagtttgatgagttcaatggggatctcgagagattccactgggatgaagagttgactgattttgttgacgacaacattgatgttgccattgagaaagaattctatgcagacctctctgaccccgaagacatctcacctaagca

SEQ ID NO: 148498 - DNA, 394 bp, Glycine max
gccacctattattggattgtgttaatattttttttatttgtcgtttccgcgttgcctggaattgaattattattacaaaatggaaaatatgctatgatggacgtttcaatattgtgggggaacgaagtaacggttgaaatggtttgaatatggggcaaattccagttttgtgcccccattgatatactcgctgcttggaagttctaaacatcttggtgttgggcctgtttccattgcctctttggttatgggatcaatgttaagtgagaaaatttcttacactcaaagaacctattctctatctgggattggctttcaccgccactttctttgctggtgtattccaagcttctctcggtatattaaggtattaattcaaaacactcaaaaaaaa

SEQ ID NO: 148499 - DNA, 464 bp, Glycine max
  unsure (1)..(464): unsure at all n locations
gacctataaaactcagcttaggaaagatgagctctgagttttctatacaactgttatctcagtagccgacaacttacctgtaagatggcatttaaatcatcctcagcatgtgtggtttgaagttcaacttttgggaagtccttccatttgatctgaccactgggtttcttcaatttgtcatctgttgtagcatatgattccatctttccatttttcttcaatggaggtttcacctagctcgaatactcttcagaggggctaaaatcatccccttcattttcatcaagccatccatctgtcacgcgatcctcataagctgacccagnaacagaagataaaggaactgcacttgattctttaagggtgaaatttgacgataaaacatccttctttgaattgttccctttcgataagctntttaccctgagtagaacagcgaaactatgatatttcttttctttatc

SEQ ID NO: 148500 - DNA, 117 bp, Glycine max
ctttccttgtgttgaaactcactacaatccttaaatgataaaccatgatatcaccatatccttaaggaattttggagctttggaattggtttgggaataaatgtggggggggggggg

SEQ ID NO: 148501 - DNA, 384 bp, Glycine max
  unsure (1)..(384): unsure at all n locations
aggactggatgtctcaactatgctcttaagagaaatgcttctaaatatttgaaagaagcctatatagatgaagtcaaagcttccctttgaagatctaatcttatcatattctaaagacatcaataaggccttacatagaagatttttcaaaagctacaatgagcatacaggatcagaatgaagtttcatcagagtctgcatcaaaatgatgaagattttgactttaaacactgaagttcataattggtctctactatacctcaaagacaatatcatgtctttcatatgctgccacacatacagaggacacattagaagactgatgntgatagcatctcactttccatatgctgccacacacagagatgacaagtggaaagctga

SEQ ID NO: 148502 - DNA, 454 bp, Glycine max
  unsure (1)..(454): unsure at all n locations
agctntctcataagtcctaaatgaaatttttttctatgattaactcactttaacctccaattaccactaaatccagatttagcttttcaaacccttaaagcatcacacttttccactcatatcactacattctcactttttaaccctatgttaactctacccttcatctctatcagttttccatcagcaatctcagcacacaaacatcacaaagcatcatcatataaccctaaaacagaatgggttagcttgactcacaccaaacatgacaagtttagcatgcttttaacaaattccttcacaaataactaccataaggcataaacctagtcaaactacccatcatatctgccaaacacccaatacccacgaaatcatgtgagaaagaagtctacccaaacctgaaattttgagtcccacaacgtatatgttcgctgcacgactccgaaaatgg

SEQ ID NO: 148503 - DNA, 291 bp, Glycine max
  unsure (1)..(291): unsure at all n locations
aactaagctagaatcttagtaacaaatgagtcaaaaccaaattatattttttaatttagcatatnaatactatagacctaaaagccataaactcgttcctagaagagcctactaagaggtgatttaaataccaaaaatacaaaggctcacatataagcccaaacaatatacccaatatcacacagattaaaaaaagataccaaataattatttgagtctctagatatacaaagaggagataaacgcgcttatagagataaaaacacaaatttgggccccaaaagtaaaata

SEQ ID NO: 148504 - DNA, 309 bp, Glycine max
gagaaaagggcaaccatatgccttctctctgatctaatttgctggataatggtatcgtaaaaaatccagccgtgtgcttccaatcgttttcgaatgttgtcggagaatttccgaagtttcatcgtcttcgacgtcttattcgttcttctcgttcttcatcttcaatgggtaagacttcaaaccaagctttcgattcattctatgtacccgtggtggcccattggttcggatttttattctcgttatttacttcttcccctttgacggctaacctttattaatatttctccttaactaaataataatttc

SEQ ID NO: 148505 - DNA, 358 bp, Glycine max
  unsure (1)..(358): unsure at all n locations
tcaacanaccggatctgagcttgaatacctacaacaatttttatccctctccaaccgagtcaccggtctctcacccacctcccttctcaacagttttctttcaggccttcgaaaagatatccaccatgaactcagcatactcaaaccatcctccctgacccaagcaatcgatttagctaaactgattgaaaccaaaaacctagccacaaaatacccagcctcacggncaaccaaaccaccattccctccaaacaacccacaaccctctctgttaagaccgcctccgaccgttccgattcgtcgcctcacgccggcagaacaaaacgagcgccgctctaaaaggctctgnttcaactga

SEQ ID NO: 148506 - DNA, 304 bp, Glycine max
  unsure (1)..(304): unsure at all n locations
tagcataccccaaagatccattaagttattactagntatatatagcccagaaggtgggctcatgggccactttgggatagacaagatcgctcgcttactcaaagaaaagttttatatggcccatatgaagaaaaatgtccttaagcattgcactaagtgtggagctggtttacaagccaagtctaaggtgacgcctcatgggctatacacacccttacccatcccctctgcaccttgggtagacattagtatggactttagccttgggcttcctagaacccaaagaggtgtagactctatcttt

SEQ ID NO: 148507 - DNA, 367 bp, Glycine max
  unsure (1)..(367): unsure at all n locations
aaaaagcccggggaaatggttactatgtaggtcaattttcttaattaattaaaaatactccacacattcataacatcaatttgttcactgatatatacattaattatatttctttctggcctttcaagataattaaccactcgttttgattttgcctggttgttaatttataattttgtgaaatgatattacggaaatttattgtttcaactctttcaagagctgtaaaaactaatatttcttttgtgatgtacaagtgaagctaattgcatttattaacctgcgattgtctccaatgttgagtcatgtttaatcatcttattcatngtgactactaattaactatatattcatttgtattatatct

SEQ ID NO: 148508 - DNA, 400 bp, Glycine max
  unsure (1)..(400): unsure at all n locations
gcgatatgcgaagatgatattccgagtactttggatttggtacgaccatgctctcctgatttccagctgggaaattggcgagtggaggaacgccccggcatttacgcaacaagcataatgtaaacctttacggttttaaaagctctatagttgggcctaggctttaaagttttcattttgctaaggctttgtgtcttttgtgtttgaatttataatacaaagatctttcttcatctgttcctggtctctacccattctcattcatttgcatgtntacttctttntctaaaacggcagattcgatgacgagtcccccgaatgtactaatacctgcgacccgtctatctactntgagcaagaaatgaatcaaacggaagatgaaggagatgaggatgtggga

SEQ ID NO: 148509 - DNA, 352 bp, Glycine max
  unsure (1)..(352): unsure at all n locations
catacataaaacagccccaccatcccaattntgcaaaaatcatattcatatatcattggggaatttcaccgagcactaggagggcgcacgttaggacacaaattgccagagattggggacaatgtggcaagccccattgcttcagaatacaacataagcctaaggccttctcattcaaatccttaactgaagaaatcaagcatggattcagatgcaaattgcttcacgaattctgcagaaaatgagcatctaaagcaccagaacacatcaatggagagccaaataaccaaaggaaattgcacttacttggggggagtgatattaagcgtgaaaagggaagcaaaaactcaac

SEQ ID NO: 148510 - DNA, 338 bp, Glycine max
  unsure (1)..(338): unsure at all n locations
agaggccgaagatgcatgggagatcctcaaaaccactcatgaaagaacctccaaagagaagatgtccagatagcaactattggctacaaaattcgaatatctgaagatgaaagaagaagagtgtattcatgacttccacatgaacattcttgaaattgccaaagcttgcactgccttgggagaaaagatgacagacgaaaagctggtgagaaagatcctcagatcgttgcctaagagatttgacatgaaagtcactgcaatagaagaggcccaagacatttgcaacatgagagtagatgaactcattggntcccttcatacccttgagctaagactct

SEQ ID NO: 148511 - DNA, 428 bp, Glycine max
agcttgtataatggctagacatgatacatgtcatggttttgtttggctcaaggataaaagggatgccccacattatttccatgacacaaatgcaaaaatgatgatttggaaattttatgcaaaactggtcatgcatgcacctatgtggacactcaagtgtcaattttttatggtcatgtgatgctagggctcaagattcatttcctctattttaaatcaacccaatgtttccaaaatatgttcttttatcaatttgtgcattcatccgagtccatttctggcgtccggggaaaacttcacagcattcacccttcaggtgtatacacattgttttcaaaaactagttatgatcaatgaattgttttcaaagaaaagatggaaatcatctcttttcaaaagcatgtcgggttttatctatacaacttatg

SEQ ID NO: 148512 - DNA, 428 bp, Glycine max
  unsure (1)..(428): unsure at all n locations
tccttaacagcacaaagctctaatatnagttatgtcctctttggaacctncacctgacgaagacactgacaaaaacttatcttctccttctaggacaaagtatggcaagctgggggcaagtaaattttcttcccatcagaccttggatgcaactgagatcttatacccatatcagctagatcttgacaggtattcaagccatccttcgtcttgccttaaatgttaaagagcgtcccaatcacactgtcacaaacatttttctccacatgcataacatcaatacaatgtctaacgtcaagatcacaccagtacggaagatcaaagaaaatggacctcttcttccatatgcaactctgactnttatccttctttagggtcttcccaaatacaatagtcaagtgtagaacccgctgatatacctgctcacc

SEQ ID NO: 148513 - DNA, 341 bp, Glycine max
acgcagagactaacgtcttcttctgcgaccttcgtcaatcgcggccgacaagcccgttgacacgtggagatttacgtcatcttccgcgctcacaagatctgtcatactgacttttgagtcacgctgacgagcggaaatacccgagtggttatccgtataaactttttgcattctgtaagatgaaaagcctgattgcaagcagatactaacgtcgtcttctgcgcccttcgtcaatcgcgatcgacaagcccgttggcacgcggagattacgtcatcttccgcgctcacaagatctgtcatactgacttttgagtcacgctgacgggccgaaatacccgagt

SEQ ID NO: 148514 - DNA, 365 bp, Glycine max
  unsure (1)..(365): unsure at all n locations
tcaagaatgaatctgtgatacgcacttgttatatcttgtggcctcagatatctnaagaaagggggttgaattaagatattgcaaactgtttcccctaattaaaaatctatttcactttttacacaagttatgaattcccttaatgacaatcttcttaaatgttaattcaaatgaagcaacttgaatatgaatatgaaacaataataaataaaggagatttaaggaagagaaaatgcaaactcagttttatactggttcggccacacccttgtgcctacgtccagtccccaagcaacccgcttgagagtgccactatcttagaaattccttttacaagttctaaacacacaaagacaatccttcct

SEQ ID NO: 148515 - DNA, 395 bp, Glycine max
tgtacaaaaccaaacataagaaatttatttttcccgttagcagttctcattctctttctccctttgctttaatacatgttgatatttggggtccctgttcaaccacttctatacatggtcataaatattttcttactattgttgatgatcatactaaatttgtttgggttttaccaatgtcttctaaagctgaaactcaatctcttttacaaggttttattaaatctgctgaaaggcaatttgatacaaaagttaaagttatttgctcaaataatggtgatgaatttatcattagtcatttctttcaagccactggtattattcatcaaacaacatgtgttgaaactccccaacaaaatgggattggcgaataaaaacataacatttacttaatg

SEQ ID NO: 148516 - DNA, 399 bp, Glycine max
ttggcttagcgagcaagctcgctaagccttattcaaaaatagagaagaaattgagcttagcgacaacgactcgcttagtgcatgaaaaaaatttcaaaacaacttaattgccttgggcttagcgagactaactcgtttagcccaggcttattcaaacatcagatgcatggaggcttagcgagtgtggctcgcttagccgcaaccagaataccaaaatcctcatagacacaaacctaactaaactaactcgcttagcgcggcatgctggcttagcaagttcatacgaactcagaaattaaaatagggaatttaaatgctcgctaagccgaagtgcagaggcttagcaagttcatacatataagatataattcaaacagaaatgatgaacacacttagcgg

SEQ ID NO: 148517 - DNA, 390 bp, Glycine max
cttatttctgacaaaatagaagaaccttttcttatcttttcaaggacgactcacattctccatttggatttatgtattggcctataggccctgcacaaggaagatgtgtcaagttagcacaaaaatccaaaaataagccacaattattaattaagcttaatcatttgcctaagaccaaaactaagttaaactaagaaaataaggatcaaagatatgttaattgagataagaagaatagaaaaatattaaactacaaatgctcaatcaataatttcatattctttatgtttccaatcaaaaaggggagtgagtataagaacatcgttaggagaaatatcaaatgggagtaagcatatcaagttgatatgcttatcaagaagctaacacaaa

SEQ ID NO: 148518 - DNA, 400 bp, Glycine max
  unsure (1)..(400): unsure at all n locations
caataataatgcctataagtagaaccttccaagagagtatggagtcagcaccacttttaatatttctaatttaattccttttgtaagaggagctgatatagaagaagaagaaccaacagatttgaagtcaaatcctcttcaaaggggaagggatgatgcaatcctccctaagaaaggactagttaccaaagccatgagcaagaagctccaagaagattcggctagagctgatgcgctttccaaaagaagaaagattcgcagattcgccaccaacgttgttttgtggaaaacgtcggataaaccgaaagaaaccggncaaaatgaaaattctaagttcgagagtagatntacatttgaagaaanattagcacctctcacgtttgtctcaaaagacaacaac

SEQ ID NO: 148519 - DNA, 398 bp, Glycine max
atttcattgattggtgtgagagtacgtctaagttatataagaccatgaatgtactaaatagaaataatttgagttcatctatggaagatgaaagttttttccatgggttaaagcatatgtgctcccagtcacttccaattggggagtatagattgatagtactgtatatagagggttaagatgtgataactagataaacacttggtacctcaaagattctagtcaattgtatgattgacagtagtcattctaccatcaacacatagataagttcgaaataagattctcactcttctatcttcatgtcccatatctcctttatagtcatgcctgatgatcaagcattgttgctattgctgatattataaagaatgcaaagactataaaggagatattgg

SEQ ID NO: 148520 - DNA, 407 bp, Glycine max
  unsure (1)..(407): unsure at all n locations
tgncaaatattccaacctctcatggtagaagcaatctcttatttcaaagntncactatcttaagattcaagtgaacaaagagaaattgaaactggagtaatgttgcacatttgatcaacttgctgatattttaaccaaacccctcaaatgggagaggtttaaaatgttaagggacagaattggcttgatgaacctaagatatcagaattaaaggacagagcgagagtttaactctatcattttttttctctagagctattcctagatagtaagagtgcaattctttgcttgaaacaatgagtgatacacgagtgaatgtgtgaaggagtgaattgcatctcttgcaattcagagaagaacagagtgtgttccaacaagtttatccaaccttgctatatcagcactct

SEQ ID NO: 148521 - DNA, 294 bp, Glycine max
  unsure (1)..(294): unsure at all n locations
aattcctaaaccacaataatgctataagcggtaaatgacaaccgtccttcaaattaacctggtttacgttaacaaacattattaactcaaatgaacacaaatgattgcctgaatataaaaattaaactaactatcttcaatgtacctgaacaaaatgattttcaaacgcgtgactgacacatataatgcggngcatataagaatctggtgatgggtgacttctaagaaaaaaaaatgtcatgccttgttggcgggacaacgatacaatgattacattataccttgatgcaatga

SEQ ID NO: 148522 - DNA, 397 bp, Glycine max
  unsure (1)..(397): unsure at all n locations
atgaagctaaagtagcaacttacagagaacgagagtagtcactgggcagttaagcctcgatatttagttgtcaaagtgatgagctcattccaacaatatgatgggcctgaagactccaaccttcaccatcaaaatccataaatacaataaaatgtcagcagaatattattatggcatagctgattgagttacaaatatgaagtatcaagagaaaacatccgaaaattaattctaaaaaagcaaaagaaagtagctataatagagaataatcagcaaaagaaatctcaagccatgataattatttgattcagtaatcagcacatcagtagatactagcaaagtaaattttatactataaaagcgagncataggagatacatataccagcaaatagctc

SEQ ID NO: 148523 - DNA, 456 bp, Glycine max
  unsure (1)..(456): unsure at all n locations
cagtcacctgctgcatgcaagcttcatggtgaaaaccatcaactaagtgttgttgatgttaatcccctgctttcaaaccatcatttttaaagattaaagtcttaagttcctccctcactactatggtttccagcttttcatgagcaacctctctgctacattcagatttacttaaattgatattaactgattgaccatcaagatgaatggtagttgatgcaacagcatgccttcctgaatcttcttttttcttcattacttcctggctagttacattctggaaaagattcacatcctgacttctgaatccatcacgctcattatccaacactttagaagaaatactcttcatgtctccattaatcttatattcttttgcacgagaactggcttccagatcatgtttattcctatagcgccntgaagtagcattcatgtcagattcattgtgaatgt

SEQ ID NO: 148524 - DNA, 407 bp, Glycine max
  unsure (1)..(407): unsure at all n locations
agacctataaaactcagcttagatccctaaatacagatctgtcacaagnaggttgttcttgttggaaaagaagatgaaatggaacatggaacaactgaaatgttagaattcccttatttgaagaatttgcttctttatgagctgtcactgcttagttgcttttatcctgagaaacaccatctggaatgccccttattagaaagagtaggatgtgtcctattgtcctaagttgaagctattcacatcagattttggagatagtcccaaacaagcagttatagaggctccaattagccaactacaacaacaacctctgttctcgatagaaaaggagacaaaacattatcagntaagcttcttttttttttttaattncatattatattttcctccttctaactaccacc

SEQ ID NO: 148525 - DNA, 230 bp, Glycine max
  unsure (1)..(230): unsure at all n locations
actcctcctactctatcattagctnttatttcagaggtagactttctgcgttgcagcttcggtgagtgtgcactcagatctgttaggcgcctggacgacaatcctgggggatgatgatgattatgaagtgagctgtcccgctttgcattatcctaactgcggaaacgatgatcagagtctcgaattcgatattatcctttgagcagggactattttggatccaaagatgc

SEQ ID NO: 148526 - DNA, 349 bp, Glycine max
cacttgctgtcaccctgatgaatgagagtctggtgaaacatacttcaaagtttcacttatctacctgtttattacttctatttcgtgctccccgctctctctttctctacctctttcttttcctccattgaagcatcctctccaagcttcttatccaaggttcatcttggtggtgaagctccttcttccatggcttattccctaatggatggcgccttctctcacctcttctcctttgtcttccgctgcatctccatggtggaaaatcaccattaaaggacctcatggaagctcaaatatccagcctccacagaagccccacaagcaagcttccatcaagtggtattat

SEQ ID NO: 148527 - DNA, 436 bp, Glycine max
  unsure (1)..(436): unsure at all n locations
gcttgcataagctattcatataaggtatcttacagaacttgaaaaaataagttaaaaacatcttatatatggattagttataacataagttcgtaagttctcgctaacactttcacaaaaacttaacatatgatcttagtcataagatatttttataagtccaacaaagttttttataataagtttttccaattggaaccttagttatttgatttaagggtgtgcttaataaattgatattgaaaatttttgaacgatatgaagttatctacaactaacatgtgaaaatattcaaaatgtaaggagtttttgttataagtaggttgttgccaacttttgtatttttcatctttgcgggtaaaaagtttagtcttctttgtccatacttgtaccccactgtgaatatgattttangggggtttacaatagaatgaat

SEQ ID NO: 148528 - DNA, 360 bp, Glycine max
  unsure (1)..(360): unsure at all n locations
gcaaactctcacctcacacaagtccataacatcaatttaaacttgctcaaactggatttacacctaaaattccaccgaatcaaaatttgactcctcaacacccaaattttaccctagaaatggctctttgttcactttggtcatttgtttttctctctagcacagcccaaactttctcataagtcctaaatgacatttcaagctaagattaactcactttaacctccaaataccactaaatccagatttggccttccaactctcaaaacctcactctttttccactcataacaccatattctcactttctaaccctaaggtaattctacccttcatctctaacaattntccataagcaat

SEQ ID NO: 148529 - DNA, 457 bp, Glycine max
tgcatgtcaagctgcatgatttacatctccctctttctcaagcaaattcttcttgatatcatcaaaatcttcgtgatttacattctccccctttttgatgatgacaaccaccttgttgttgggagcaacaacaaagaaaatatctatttgcatatagtttactcccccttggttttacaatgattgcttatatgagacaattgaagatttcatatttttcatatataaaaagttgtctcataaaacaatagataatttttcttactattttatcttttatctttctctccccctttgtcaacatcaaaaacaaatcatgaatagaaaggagaaagatgttaccacttgttgcaatgtatgagaataagtgataccaaaaggcattaaaacaatcattcaatattaatcaagcaaatacaagtacaataacacatcaatcatacacaatcaaacacaa

SEQ ID NO: 148530 - DNA, 344 bp, Glycine max
attgactttttataccccatttagacgagcttaagccatccacttaagccactcctcgcttaatctaaaaacagaaaaaatctccaccgatcgctagaataggatcatccgtcaatttcgggtaaaacgaattccgacagctcggtcgagccagaaccacgtaggaaatcaaaaaaagagagaaaataataatataacaataaaaaatatcttttagtaaaataaagcggaaaaatcaatcggacgtttctcttagggattgctcgttcttaatagaatagactaataactaaagagaaattaaagctaaaatcaactcgccttgtcaagctcagccacaaaaa

SEQ ID NO: 148531 - DNA, 262 bp, Glycine max
  unsure (1)..(262): unsure at all n locations
tcataaaatntatttgtgacttattgngtttttggactacaattcaaaatgtaaagtttgcatgaacaactttgtaaacttaagtttaattaaaagtaggtttaatggtacttgatttatgcttgaagttctctacgctcaatggaaaagccaaataggagtggctatcacacaaatccactcattgcaacaagaaaactctatcaagatcacatgctggagtggcaagtttgacaatatagtgtttttggatatgttttct

SEQ ID NO: 148532 - DNA, 338 bp, Glycine max
atatctcaagattagatattaagatagactcttagaaaattttttgaaaagcacaaatgataggccaagtgagtttctatcttgacaataatttttccaagcattttactctctgataatcgattactagaaaggtgtaatcgattacgagaagcccaaacatttctaaacaaggtttctcaaaagagtaatcgattaccatggcattgtaatcgattaccagagcttataacgttcaaaaatatttagaaaaccttagaatcgattatacaaacatgtaatcgattatcagaggctctgaatgtaaaattcaatattttcaaatgataaacacatct

SEQ ID NO: 148533 - DNA, 446 bp, Glycine max
gcaagctttcagtgaaactcgatttagacagtcttcttttttccaaatggagttcatatgccggtattattattactattattattatttcccgtgtggtgttcgtagtatgtaatgcatgcattgtgatgcaagatgtttttggttaaataaattctcctatgaatatttgttgaaaaaaaaaggaaaatcaagttatttttataacctaaaattaacttaacaacttattgctttgagagaacttaaacgaaagaattattataaaatttatgtacattttagtttatatgggagatttataatagcactccatatgtattaattatgaagtctaatttgttgattttcctaaatattaaaatactctatcaacatctttaatttgtctttatctctgtacctatcatattacattatttatcatatcaataattttatcttta

SEQ ID NO: 148534 - DNA, 368 bp, Glycine max
  unsure (1)..(368): unsure at all n locations
caattctccatctataaaaatagagccgaacacattatttaaaactaaaaatnactnnaaaacagagggaagaaagnactcattggattctgcagtgatcntactcataaatgttgnaaatacatttataactttcatgcattaaataacataaaaatacatatatgaaatactcaacaaatagcatcaaatgcatatattaaatactcaataaatagcattaaatacatatgtgaaataaccaccgattagaaagaagaactttgtccaatagtatacaatgcgatgtntgataaaaattatctgtcgaagctagcagatanaaatatctagaagaaatcttgagattgcatgatcatcatacctaa

SEQ ID NO: 148535 - DNA, 358 bp, Glycine max
gaagtattattatgaggaaaaccattatttctacaacacttgtcaacaatgtgattgtctttaccacactatgtgcacaaatcttttgagttaaatgaattagtgttgaccacattaatcagacttgtgtttctcattacatcattattggtaagttgtctttcttgctgagcaacatatgataaaaccttatctatgctatgcaatggatccatcatcaatacattagatctaatagtgttaaattgataatttaggcttctaagaaaatgcataacccgatcttgtttcttcctctccataatactagtaagagcatcatacatacactgttgatcaaatgaacacactggatcat

SEQ ID NO: 148536 - DNA, 380 bp, Glycine max
  unsure (1)..(380): unsure at all n locations
gccacccagctcgcccatgctatgctaagtagcttcctctattatcaaccgctttctgaaagaattntctggaaagcccaagtaagcctgattgctatttgcacccccatttttactaaatacacctcccttgctctttttttggagattttttttagaacgntacgaaactttacgaatttcgtaacgatgcttgttttctttacgcaatgttacgaaaccttacagattacgtaatcatcccttttttgccttccagaacgttacggaactttacagatagcacactaacacttccttttaattctcggcatgtcacagaacttcacagattgtgctacaaagctttcttttgacttccagcatgtcacggaacttca

SEQ ID NO: 148537 - DNA, 396 bp, Glycine max
catacagacacatatgtgtgttattgacattagcaataatttttctaattctattatattaagtatttgattcgaaatttaaaattgattttgagttggtacatccaaatatgaacatccaaatatattttaagttttactctaacttatttttaaaatatcaacattcaaatgtaaataagattactttaaaattaattttaacaaaaagaatttaacttaaatcaattttccaaatgttcaccaaacagtcattcaaagagaaacaataattttaatttataaaagaacataaagataataatggatttggcatttattattattattattattataacatcaacccttatggctaactaattactagcaacctttttgatacatttactattt

SEQ ID NO: 148538 - DNA, 462 bp, Glycine max
  unsure (1)..(462): unsure at all n locations
gaaactcacgctaggccatagagggtctaggaatttcctaattctccttctaatcaccctacctncacacaaactcattcttttaactaagctatgaacaatatgattgataaccctataaaccaacttccatgtgcttgagtcaaaagtgactccttttccatcgagatattggaggagcaatataggctaaagtaggaaggtagaaaaaataacctacatgaatgccttattataggcaaggatgatcgaccaatcaaagagcatgatttgcgtgcacaattgactatactttgaaaaccccttaagcaatgacagatgatttcattgggaaagggtttctataggtctagttctgcagagtctaagcagagagtgcatctaagtcttctttgtctactaccatggacacctaacttcaaccctaataagcaaaaacaaacacatgcctagtgcattgag

SEQ ID NO: 148539 - DNA, 332 bp, Glycine max
tttttgcagaccatagtgaccgtgatagatatcaatattttgcaaaccgcaaaccttaaaatttatcaatatattcatgttaaacaaggagcaattaccaaaatgtagcaatatattcatgttttaaacaaggaagaatatattcatgttttacctttagtttaaatgtgaggatataatccagttcctttgttaatcgaacggcgggaggctgtttacttatatcgattccatgcctttctggtcttgttactcctgctgagctcacatgcacaaaccttaatgtgacacaaaaagggtgtcaacaaaagatttaagtatatgacggtaaa

SEQ ID NO: 148540 - DNA, 341 bp, Glycine max
aatatggaagtaaccatcccgcataattggggcaaaagatgaatcgagtcacatcactgcttcgtctactgccaaacatatttaagattattgatgtccttgttacttccaatttcaccttgacaaaaatgtcatggaccatgttgaaaatctaaattgattcaaccccatatcctgcataaaaattcgcaatacttcgactgtacatcattcgcatgcatccatgcttttcattagttgcattgctcattgcattctttccttgaaaaataaaataaaataaaatgaacttatcaaaaagaaaaggaaacgctgtacggcgcccttaccgaactcgtgct

SEQ ID NO: 148541 - DNA, 405 bp, Glycine max
  unsure (1)..(405): unsure at all n locations
gaccttagaaactcaagctcctcatgcttcctttggactccttacatcatcatttttttcaacaccttncagatnntaagggattagactcataaaaaacaacatggataaattcttcaatctttaatgaattcttatagaaaactctatatctctagctagtagatgagtatcctagaaataaaccttcataagcttttgcatcaaattcaccaatagattccttgccattttttagcacaaaacatagctaattcttctagagatctatttttcctctccataacaccattttgttgaagaatttttggagaggaaatattgagattaatatcattctcctaaaaaaaatcaaattcctcattttgaaattcacctccatgataacttctcaaagctttgaaa

SEQ ID NO: 148542 - DNA, 341 bp, Glycine max
taactatgatgataatcactaaacactttttattgtcgattttttaagggcaaaacttaacttcctctcctcataggtaccccaaattcctaggttatcgaacacataacctaattgttaacattttatatgggcgctttttcaatgtgatgaatgactataaaaaaaagtttatcagaaaataaaaaaattagggcgaaccaaagctttacctgcggtggaattaataatgaataatctgtactgaattggacataatgacttctcctacatcatctcttttattttctctctttactgctgtatgtaatatctatctgaatacaagaacttttttactt

SEQ ID NO: 148543 - DNA, 415 bp, Glycine max
  unsure (1)..(415): unsure at all n locations
acactataaaactcagctnttacatcgaagaacttgaagagcagatgaagaatcttttgatgaccttgcctcagccattttagaaagataaaccactaacaatgatgatgaaaagatcgaagaggaagcagctgtaaaagctgtaaagtcagttttaaacaagaaaggtaacaatatggaggctgccaaatctgctgctcaagaagcatttgctgctgtaagaaaacaaaaagatctgccagagaagttagatgaattaggtagagatttaaatcttgagaaacgaatgcaaatgaaagttaaggctgaagctcatcaatgcaagaagtcacaagcacttaattctaataagctggcatccatggaattggatgatcctaaaatagatggtgaatcaagcactgatgagagtgat

SEQ ID NO: 148544 - DNA, 374 bp, Glycine max
  unsure (1)..(374): unsure at all n locations
tggagatctgtagaagaacataatacacaaactcttgcaacatgtgtagatttctgattcatggcaagctgagttactatgttgaccaaagcatcaagttttccttcaagctttttattttcagtaaatgaagatgaattcgtggccacctcatggactcctctaagaacaataacatcatttcttgcactgaattgttgggagttggaagccatcttctcaatcaaattcatagcctcagcaggggtcatatcactaagagctccaccactggcagcatcaatcatactcctctctatgttgctaagtccctcatagaaatattgaagaagaaagtgctcaaaaatctggtggtgagggcagctngcacacaa

SEQ ID NO: 148545 - DNA, 309 bp, Glycine max
  unsure (1)..(309): unsure at all n locations
nnaggtcaatctaaagagtggagtctncatgcagcattaagattgagtnnctttgtggaaaancctaattnagttaagcctgaaattctgcagcatttgcaaagcagattcaaattaattgaagttatgtacgagcactgtagcttttacaaaaataagcactgcaacttatttaaagcaaaaattctgcagcatctgtagcatctgcagtatgtgggagagtttcagagtgtgtgtgtgtttctgtctgtgtgtgagtgtgtgtgcttttgtgtgtgtgagattctgtgtgtgtgtgtgtgtgtgtgt

SEQ ID NO: 148546 - DNA, 257 bp, Glycine max
aagccccccgaaggttaatgtttgctaaaccacctccaatgttgcacctagaaggcccaaaagcttccgaaagttagaaacgttcgtgtaggacgtgctgcccatttaattccccgttcggacgtacacacacgctcagcctaatgataaagcgctcactaggagagatctaatttagagaatctgccgcatgactcctgggatcatgcttgtacctagttcctgattatctagctggcccgagagaggcaaatgct

SEQ ID NO: 148547 - DNA, 351 bp, Glycine max
agtagacaacattgaggctgcaacattctttgtagactttttccaacctctatcaccctagttgcccaaattcctttggtctctcattacatcaactaatacatgttccatctccaaattccatgtaaaataacttcttgtttcctcattattttttcctaaaaattttcttttgctcgccattttttcattagatgactccattgaagttaatgtcacttatttaacctacacataacaaatattagatacaacctactttagtcatttgattagtccactagacaatcatagaaaatatttcaagcaaagtttttatgcaatagcaaatgacgtaaaagtctatcttca

SEQ ID NO: 148548 - DNA, 229 bp, Glycine max
  unsure (1)..(229): unsure at all n locations
gtacttgctccatcacccacaaccaccattatgccaccacaaactgccgttgttctccgttgcaaccccatactgagagaaatccttcaaccgaagcggaatcttccaacttggctcgtggtttcggtagagtacgattccctaattggacctttcatntcctttgaggtgaccatgattccatgtttagtccttgtgcatttcagctagtctttgcatctttgctgac

SEQ ID NO: 148549 - DNA, 358 bp, Glycine max
  unsure (1)..(358): unsure at all n locations
gatatgtgggattcacaatcatgaattggtcaagtccttaattggacatccatacgctgtctattcccctacctaatgaacgacgtaaacctctcattctaaccatgatctgcaaatcatgatgaacatgtttttttttgtcaaattcaatattcatatatttataaacctacataaccctaagtcatcagccctacattataaaccctaatcacactaccctaaacaccccattaaaaaaatgttggggttgaaaaacacttaaattaaattgaatgactttntttttctttccttatcgtatacccataataagtatgtctaaaccctaaacactaccgcctatgcactacataag

SEQ ID NO: 148550 - DNA, 347 bp, Glycine max
gattcatcctcacgcatcaaccatttcattcattgtgaatccatatcgtctgcgatttgctgaatctgattagacacttattgttgatatgatgaattcaatggtcaaaccaataaacattctgctgtctctgaatgagcacaacgccgatagttgttcgaccatcaatcaaatatactatgcccgaagtgcatatcgttcttcataacatgaagtgattctgagatgcaacatctaatgaaactcctggaatgggatcaatttattcattggcacaacatattggatgaagacgtggttcgtgatactcttttggcgtcacccccatgtagtgaaattaggcaaca

SEQ ID NO: 148551 - DNA, 391 bp, Glycine max
agaatgtcaatccttaccctcggaagcaaaaaagaatagaaggaaaatttccaatcaaaaaagaatagaaggaaaatttccaatgaaagcaaaaaaagaaaagaaggaaaattccccaatcaaagagtgggagaaagcaaaaagaaaagaaaggaaattcccaatcaaagaatgggagaaagtaaaaaaggaagaagaagaaggaaagaaagctcctgatcagggatcgaatgaaaaacagaagaaatgtgcagagaggtctttataccatacaatatctgaacaatacagaattgtcaccaaatgaacgaatagaatgataggaaaccacgacctataatggtcttctccctttgattaccaaccaaaatcccgtgcgctatcgactttt

SEQ ID NO: 148552 - DNA, 389 bp, Glycine max
  unsure (1)..(389): unsure at all n locations
tttctttacccactcctcacgttaggttttttagaggaaaacactataactaaacgcgccgcaagggatccctatcgcaccagatccaaatctagaacgatgggtgatctagaggagacacaggaacagatgaaagccgacatgtcggctctgaaagatcaaatggcctccatgatggaagccatgttaagtatgaagcagctcatagagtagtacgcggccaccgccgccgctgtcagttcggctgccgaagcagacccgactcccttggaactacgcaccatcctccctcaaacatagnaagacggagaaaggacgcactgggacacgatggcagccctcacctgagatacaaccgagcggcttacccttatgganatgcgccaact

SEQ ID NO: 148553 - DNA, 241 bp, Glycine max
  unsure (1)..(241): unsure at all n locations
gagcttggactgaaccctattgataaatcgacaggccggtcgatacccacgaattaccgagcgtgttatagaaatctcatctctcaaggtgaggactagactaactcaaggttggggtgaaccattataaaacctttgtacactcttcccttntctctttctttaccttgctttgcatagatcttaaaactggttttggccaaatcattaaatctgttatctttctatcttaacaacaaaa

SEQ ID NO: 148554 - DNA, 388 bp, Glycine max
  unsure (1)..(388): unsure at all n locations
tcgatccaagacatgccttctccctacacgattcttatattacaaaacccctcacataattagctcatccctttctctctcgccacctcatcattatttccctgcatcttattcttccagacctatactctccataccataagcttatgctgctggtttgcaatctgaccaattgccatattctcatttaaaggcctaacaaacacttttatcgatgaaaatggaaaccagtcaaattaccatactatgagttacgactaaccacatattcagcaagaccatatgtaaaattcttatccatcatgaacccatctagattntaagttttcaatgtagaagccactagcagntcttgccaaaaatgagaattataaacaaacacccgatg

SEQ ID NO: 148555 - DNA, 293 bp, Glycine max
cttggaagcggcagaccattaagaatcttcttgggaaagacatttgtaaattcctgcaactaaggttgaacactttaattatcaaactctctctcttgtgtatcactccatctctcaaatgtatcactcttccattttctatttctctatgatgcctcactattttctctctcttgttctctcttgtctctccttctgatttggtcatcacacacttctctgagggatagaggattatgaataattttctggtcatggtgctggaaaaaaatcttgttggtgaaaccatcatg

SEQ ID NO: 148556 - DNA, 407 bp, Glycine max
  unsure (1)..(407): unsure at all n locations
actcaagctaggatttcctttagtaaagaatctatactnnctaatattaatctcaacccaatccccctcattaagaactagctcatttcttcctctatagtctttagttgaatacaccttagttaggttctctcctctcatgcaacttctttacaaactctgacctagattccccttctttatgtataaaagaagtgtcaagtaagaagggaatgagatctaaaggagttaagggattgaacccatagaatacttcaaaagagggattagcttggtggctctatgaacccccctattgtaggcaaattatacatgaagaagatactcatcccaagacttatggttgcctttcagaagatcccttaanaagagggataaagacctattcattacctctatttgcccat

SEQ ID NO: 148557 - DNA, 354 bp, Glycine max
  unsure (1)..(354): unsure at all n locations
aagatactaggaatagaggggcatctgcntagaaagctccttccaacttagtagccctctaaaagaagctaagccctagcaggataggcatagttcaaaagtccaccctaggctcagccgaactgattaccagagagagacctccactagccttggagacataaggaccctgcaggaagcctgaaaatcttcctagggtataccctctgaaattctgataccagaggacagatgtcngacaagaagtcacgacatcatgccttagaacatgcagctcatgagagcccgatgaacagacaaacaagtaaccacacaagataatagttacccaggtcagagcacctcacctacatc

SEQ ID NO: 148558 - DNA, 310 bp, Glycine max
  unsure (1)..(310): unsure at all n locations
ncctgaatcaaaggcaagtatgcgccgccagttcgtgtatttatattgaagcgccgnagnttgacacgctggttagaggattagagcaagcgagaaaatcgtagcaagtgggaccggggatgtcacctgtngcacagattaaccctttggtttctcgtgcgcactgcgacaaagagagttcattcctcgacgatgcgcaagcacagcaagcagagctgattcgcgggtcgaatggaccagccggagaggggtattatgttgcgccaacgctggtgagaaatcccgatgctaaattgcgctcaactcgaga

SEQ ID NO: 148559 - DNA, 428 bp, Glycine max
gctagcttcactttgatatgccatgagcttctttttatgatccatatggctttcaacaagtctacagttctgcatacctgtttcttctaaaatatcaagagcatacttcctttgagaaataacaataccatctcctgattgagccacttcaataccaaggaaatactttaaagatcccagatctttggtctggaaatgactgaataagtgctctttcaactgggcaatcttagtagtatcattccctgtaatcactatatcatcaacatagaccattagatagacacattttccaggagaagtatgatattaaaatacagagtgatcaacttcacttcgttttagtccaaacatttgaacaacatgactaaatgtaccaaatcatgctcaatgagattgtttcaacccataaagagatcgacaaagct

SEQ ID NO: 148560 - DNA, 353 bp, Glycine max
tggagaggatgcttcactggaagaaaagaaagatggttgtattgatatatgggggagctcgaaattgaagaaagaaaaaaggagagaagttgaactttgagttgagtctcacaagactctcattcatcaaagttacaacaagtgttacacatacttctatttatagactaaggagcttcctcgagaagctttcttgagaaaacttccttgagaagcttctttgagaaaacttccttgagaagctagagcttagctacacacacccctctcataactaagctcacctccttgagaagcttccttgaaaagattcctaaagaagctagagcttagctacacacacctctctaata

SEQ ID NO: 148561 - DNA, 364 bp, Glycine max
tgttggtgcttgtgcacttaacgcgaatctgggccgcttaatgcacataagtgaatttcggcttaacgctcgtattctcgcttatcggatgcatgcaagcggtgtgcttatcgggatgaacccccgcttaacgcgtgtgtccagctcatccttcttccatattcttcctcgcgctcatccaaaggagtgttgcgctcaatggatggctcgctaagccagcaaattggtttagcgagcagatgataattagcgcttcacaaacttgcctaacaacctggaatggagaggaaatgattattatatacaaaaaatgggagtactaagtatgtattacctatatgtaacaataaagtatttacaacac

SEQ ID NO: 148562 - DNA, 363 bp, Glycine max
gagagaaagagagaggggggagcaccaaattgaaggaagaaaaagggagagaagttgaactttgagttgtgtctcacaagactctcatttatcaaagttacagcaagtgtttcacatgcttctatttatagactaagtagcttccttgagaagctttcttgagaaaacttccttgagaagcttctttgagaaaacttccctgagaagcttctttgagaaaaactccctgagaagctagaacatatctacacacacccctctcataactaagctcaccttcttgagaaggttccttaagaagattcctaaagaagctagagcttatctacacatacctctctaatagctaatctctcctccttg

SEQ ID NO: 148563 - DNA, 325 bp, Glycine max
  unsure (1)..(325): unsure at all n locations
ctagttccgctcctgaatatgacagtcaccgctttaagagcgctgnacaccagcagcgcttcgaagccatcaaaggatggtcgtttctccaggatcgacgcgtccagctcaaggacgacgtgtatactgatttccaggaagagataaggcgccggcggaggacatcactggttacccccatggccaagttcgatccagaaatagtccttgagttttatgccaatgcttggccaacagaagaaggcgtgcgggacatgaagtcctgagtaaagagtcagaggatcccgttcgatgcagatgctatcggccagctcttgagatatcc

SEQ ID NO: 148564 - DNA, 404 bp, Glycine max
  unsure (1)..(404): unsure at all n locations
caaagtgagtcaaaatagaagcaaatttggtcatcctgctgtggctgccattcctatatggccaaatttcccaccaacccaacaatgtcattactcagccaataacaacccattttcttacccaccacccagttatccacaaaagccatccctaaatcaaaccacaaaacccacctaccacacgaccaatgctaaacaccacctttagcacaaaccaaagcactaaccaagaaatgagttttgcagcgaaaaaaaaacctgtagaattcaccccaattccggtgtcttatgctgacttgctcccatatccactcgataatgcaatggtagccataacccctgctaggtttcctcaacctncattttttcgaggatacaactcgaacgcaacatgtgcttgtcat

SEQ ID NO: 148565 - DNA, 398 bp, Glycine max
atatctataacttggtaaagttagtggaacttggtggtttgtcaagagctgaacatattctcaatggtagaaacaaaccaatataaatctttatgtcttacatgcttttcttttcttgtttttctcctttaaactgacctagggtttggatttgattttgtttggaaaaccctgtctattttacaaaatgtattttcatcatttgaaagtgttatccatcttacaaagtttattttcagatgataactttgttttcttcgaaaaaggcttgaaaaatttctaaaatcataattcaaccccccccccttttgtgatatttgcatttacacgaagcttttgtttatcctcatggtgacaacttttgatgtgccacatatacagcctatgaattttgatct

SEQ ID NO: 148566 - DNA, 311 bp, Glycine max
  unsure (1)..(311): unsure at all n locations
agccagcttagatcagaaagaaagcccagaaggagacacgcagcccaaggaaaccgaaagggccactctcaagaataaagaggtcagcaaaagaatgacaggtaactaacccaccctagaaaagaccaaacactagaagaccatgcaggtcccttagagaatcaggaaaacacaagcgagagttccagaggaaggagaggcnattcttaacatcaagcctgcaaccactctaaaaaaccagagaaaaggcaagaagatcagagtcccaccaacatgaagaagaccaagctcactagaagagctacagaagc

SEQ ID NO: 148567 - DNA, 417 bp, Glycine max
agcttgttcttgatttttcctaagttctttaacaagcttataaaaatattcttggccttcgtttaattgtctttgggcttggcgaccatgatcaacaaagtactttcggcacctactatatgttgacttgaccaacgttgttattggaatgctgcgacaatctttcaacaccttattcacacattctgataggttggttgtcatctgaccatatcttcgtccagatgtatcgtaagccatgctccatttttcctttgaaatgcgatcaatccatcttgctatggctggactcaattgacgaaatgtttctaagttttgatcaaacacatgcttgcaaggagtgtacgctgcatcaaatttgttaccatcaaaagttgtaggtagatatgaaactcaaattaacttaatgtataaaat

SEQ ID NO: 148568 - DNA, 324 bp, Glycine max
  unsure (1)..(324): unsure at all n locations
atcctgcttggacgaaagagaaaactggagcacatgaagaagatgagaatgaagaaagaacccatgttgaggctgccattcctacatggccaaacttcctaccagcccaacaatgtcatcgctcagccaatatcggcccttctcattacccaccacctagtcatccacaaaggctatccccaaatcatccacaaagttagctggccgcacatccaatactaagcgaaaaccaaaacacaaaccaaaaaagaattttgcagcanaaagcctagaagagtcaccccaaattccgagagaatatgctaactagctcccatatctact

SEQ ID NO: 148569 - DNA, 439 bp, Glycine max
gctgaaatcattgagttccaacaaatactatccgtttcatacattcttctgaaaaattcataagcaagatccagtcttccacactttgcatacatgtctgtgatggcagatcccacattaactatattctccaattggttctttagaatatcacaatgcaactccttccctaatttcagagcagccaaagcagcacaagctggcaaaacactagccatggttagggaattatgcaccattccctcttgaattaaccacctaaaagtgtttatagcatcgatattcagcccatgaagcacataacctgagatcatagctgtgcaaactgcaacatcaaccaaagtattctgctggaaaatcttgcgtgccatctccacattctactccttgaagtatatgtcaataagagcactcttcaaatagacatcgaaaggcaccc

SEQ ID NO: 148570 - DNA, 382 bp, Glycine max
  unsure (1)..(382): unsure at all n locations
cttctccttgaagaggagnntnctctctctcttccttctccattccgctgccatttatcttccaagaagcaaaggaatccattgatgaagaagatcctaagcctacaagctccaatggagcttacatcacgtctcaaatgtaagaattgaggcagagctaaaggaagtttcccttgatatgaaaaggtagaagaattgtttaagaaagagagctattttgatatcacctttagttgcaaaataattntccttcttaacaatcttcttggaagaatctttttcctctttttccttccccttggcctttgaagacaaagccttactatccttctttntcttctagatatctagnntttcttcctcatccctcttatctttcata

SEQ ID NO: 148571 - DNA, 328 bp, Glycine max
  unsure (1)..(328): unsure at all n locations
ctgctatcagaagctggatctttgagcttctttgtagtcctttaaaggtgaattccctccatggagatgccgcggaagactttagatattacgtgagaagatgcgccatccactatggaattagccatggataaaagtgcttcaccaccaagatgagccttggataagaatcttggaaagatgcttcantggatgttaagatagaaagagagatagagagaagggggtgcncgttattgatagaattttagatggtgagaagtggaactttgaagtatgtctcacaagactctcattcatcaaaggtacaacaagagttacacatgct

SEQ ID NO: 148572 - DNA, 280 bp, Glycine max
aaacaaagctagttacaatgctctgggtcaaacacccacatcactacatgaaaaagccgaaagtatttcgggttttacaaaggaacgtaatttggaaattccgaccacgccaatgtgaccggggttcagtgtaggttacgaaaataacatacatttcatgaaaggataatgtttacaaagtctctttctctaaggtttttcaaaggaagcataagacaagcaatggcggttccaaagtcagaatagatgctaagacaagatgaaacttacatgaaacaat

SEQ ID NO: 148573 - DNA, 404 bp, Glycine max
  unsure (1)..(404): unsure at all n locations
agaatcggacctccgagtgaatagatatgacctttttttacttttgagagggnncgnagnnnaatttcgagcgtctcgatatctgatgtgcctgaatcagacatccgagtgaaaacttatgaccatttaaatttctcgaaagctttcgctgttcaatttcgaccatctcaatatattatgcgcttgaatcggacatccgagagaaaagtgatgaccatttgaatttctccagatcttccgtggttcaatttcgggactctccatatttgatgtgcttgaatcggacctccttgagaaaagtctctaccatttgaatttctcgagaggttncgctgttaatttcgagcgtctcgatatctgatgtgcctgaatcgggctccgagcaaaagtttgatcatttaatt

SEQ ID NO: 148574 - DNA, 301 bp, Glycine max
tggtactcttccacgttaatgggctcactacttgtccccttttttatatagcaaaatccatgaagcaaaactaataaggcaggataattttcaattttttaaaattaaaatcaaatttaaatacaacacaaaaatgataacaaatctgactattgtcagtatgttttaattgtttcaagacacaatgacaatagcccaaaaaaaacacagaaggaggcataagtctacaaaaatacttcttgcacaagcattcttgtatgtaaaagcaataaggttgcaaatatatatgtatttcactggc

SEQ ID NO: 148575 - DNA, 466 bp, Glycine max
  unsure (1)..(466): unsure at all n locations
actatacacaacncaagcccaaaaacaaatnnnctttttcagataaagaatatatatttcatcttacatgcacatnaagagaaaacttaagcatacaattcgatttaagatcattaaagcaaaaaataaaatacatgttctttatgatgaatatagaattaatcttacagtcacttttaaggacaattgaagcatacaattcaatttaaggtcattaagtctaaaaaaaccgtctctttttctgatgatgaatataaaattcatcttagaactacattatggaataacttaagtatatatattagatttaagattattaagtcggaaaaaaccatctcttttttcaatggagagtataaaattcttctcacaaccacattaatggacaactgaagcatgtcattcaatttagattcattaagcctaaaaattataggactttctctgaaatgaataataaccatct

SEQ ID NO: 148576 - DNA, 190 bp, Glycine max
gatggattgtttgccattgaatgaatttactttcaacaatagcttccaatccagttttggtatggctccttttgaagctctatatggacggaagtgcaaaactcctattttgtggtatgatgatggagaagcagtacttcttggacctgaaatgcttcaacagattaacgaacaagtgaggttgattcga

SEQ ID NO: 148577 - DNA, 348 bp, Glycine max
  unsure (1)..(348): unsure at all n locations
gaccatagaaactcagctaggaagatagaggtgacccggagngagagaaactatatatgggctacgagggagtacgtgagctcagttggaagtgggcaacaagggatggagggtttatgcgcgcattgaggatgtggaaaaacttgtagagcaccatcgcccgaccgccacctagtaccaaagctgagtaatcgattaccagagatggaaagccttaaaataccccttttacttgcatgtagaggtgatgagacaaatcgtgtgcagcgcagttagattcttgagaaagagtctacccctttctcttctttcttgtagatcgagatggcggcgcagctaattcgagat

SEQ ID NO: 148578 - DNA, 370 bp, Glycine max
ccgcaaaagaacatagaccacagactcctcccacacgtgtagaattttgattaatggcaaaactgaattactatgttgaacaaagcatcaaagtttccttcaagctttttattttcagtaaatgaaaatgaatccggggccacctcatggactcctctaaaaacaatagcatcatttcttgcactgaattgttgggagttggaagccatcttctcaatcaaattcctaacttcagcaggggtcatatcaccaagaactccaccactggcagcatcaatcatactcctctccatgttgctaagtccctcatataaatattgaaaaaagagttggtcggaaaattggtggtgatggcagcttgcacacaatt

SEQ ID NO: 148579 - DNA, 344 bp, Glycine max
  unsure (1)..(344): unsure at all n locations
aatagcagcataatatagagactacctnagcccctatctcttgttgtgtgacattataaagaagagaatcgaacgtctcacataaagctcaccagagctcatgtatgtgagagtgtcatattcgattttgataaaagagcattcacccttaaccgctgaggcggcggtgcatgatcactgtataatcgctcccccatggtgatataacacgagtactattccgacttagagattatngatgtgggggtggagggtggaattatcctgagccaatagaaggaggcagataatagagctgttcacgataacgctccaatacaacttaggatttatttgtataactc

SEQ ID NO: 148580 - DNA, 379 bp, Glycine max
cccggaaaggaaaacaccagagtactgaacaccactctaaaccaagtaacttgtaaagcaacataagttaaacaactaatacagttcaaaatcatacttaacaaccactgcagcagccacaattttataagttattataatgattatccactccttaagcttcaagtgcctgcttgtttcatccttcatttcttttgctgctgctaaaggggggatatctattgctcctttttatgtacttctcttatgataaaatccctctcttgttttattcataacatctaacacatacaccatttattattttccttgagcagacacatgaaatatcaaaaccaaagtgtatgatgcaaaatctacaaaaaaaattgattaagga

SEQ ID NO: 148581 - DNA, 334 bp, Glycine max
  unsure (1)..(334): unsure at all n locations
ctaatcaatctataagatnattatatatgctnaaatcactttctttncttcttgccatnatgccaaaagggacacgcatcatttataagcctcatttacctttatattcaagtttaagtattcaacacattcttttttggagattacgacacattcttattagtagaaatgttcgagtattcgtttaccttcttttagatattttaaattttagaaataatttattcattacgtagtatcaagactaaaccaagtgatttagattcaactttaggcattttataaataaataaaaaatcaaataaagtacaaagtatactgcaatataaaatac

SEQ ID NO: 148582 - DNA, 409 bp, Glycine max
  unsure (1)..(409): unsure at all n locations
tcaaatggctagagagtattagagatttgtaaagagattattaagcagatcttgaatgaaaaacaaagacacttgaaactagaaagtcaaatgaagtaccaatttaagacttcaaattgagaatataagagataaatgacaaaaaagagaaaagaagagagtactctctatggaatctggcgataacttatggcttgcggtggagaagatatgaaaaagaatattgtgatattcaactcactttatttgtcttatttcaggtatatatagactaaatataaaattatttctatatattaactaatcaagtaacatgttcacctataattccaatgaaaatctttctatcaagtgctctaaaaggtaatagnnatgaaatacttaaaggatctattaaatatctaatata

SEQ ID NO: 148583 - DNA, 316 bp, Glycine max
tctcgtcaattctatcatttcactcacacttaccttctaaagtttctgaagtggcaactgatctcattattcaacaaccaccagaagcaagggaaatgtagactactctcctgcacaaataaaaatgggagcatctcttatatgcattacaaaaacagacccttttatagcacgaattaacctcactatatttttaaaatgtcataagaggattttgagcactcactcttattctttctaccaacaagaccaccaaatattagagaatgctatgaacaaaaaaagatctccttttgaagttacatgaagtttgcgt

SEQ ID NO: 148584 - DNA, 313 bp, Glycine max
  unsure (1)..(313): unsure at all n locations
canatactagcagatcaacctcggatagagcctctctacttgattnatcttcgnnatactncatgggatcttgagccttgagttgcttgcgtccgaagagggcgtatatttcctccctcgtggtgagcaccgcatcatctgctncgttgcgggaataacctcgaaagtagctgtgaatcgaaagaagaagtttgccatagactacctcataaaggagaagcccagagcccgagtgttgcaaggagttatacgaccattccattaaaggtaagagatgcattcctaccccgcaaaggccttggattgaaaactc

SEQ ID NO: 148585 - DNA, 398 bp, Glycine max
  unsure (1)..(398): unsure at all n locations
ttggaccgaaaagatacttgtatgtacaatgtaagcttattcacatttttcacaangcatatttatgtctctggtgagcctaaactcttcgctctaaaggacacgaagctgtgcaaggaaagcatcacattgatccaataaaagaaactgtggaccctgcaccctttgaaaatcaagcagatacttttcttcccgggttttgtaaagctgttgatgtgactgtaagaattagagaatattctggaaaagaattataactacccaataataacagaagaattagtttattgagacaatctgtcttataattggttataacactgtaaagaaacagcaatgatttaaacgtgtatactgtctagtattataaacatggagggagggaagcaaaataatca

SEQ ID NO: 148586 - DNA, 275 bp, Glycine max
  unsure (1)..(275): unsure at all n locations
acaacaggnccggagctcttgttcgacagaactctttccatagaacccgctaggcaagatcatcaaaccatttgcacacacatgatggagttgcaattagctcgagattccaattcaaattatgaaatactaaggaatatcctatcttcactcataagccctttaggacatagacaactagctgagagtatgcatcggnactgctccgagagaatgattgccttcacatatagccaccaaagattaattatcaggtcataactagtctccggaga

SEQ ID NO: 148587 - DNA, 343 bp, Glycine max
actcctttcatagcaaaaacattgtttctacttcaaaaccccttgaactacttcacattgatttatttggtccctcaaaaactatgaatttaggtggaaattactatgttttagtaatagtagaagattactcaagattcacttggactttgtttttgaaaaccaaaaatgaagcttttgatgcttttcacaaacttgccaaggtgattcaaaatgaaaaaaggtctcaacattgtttcaattggaagtgatcatggaggtgaatttcaaaatgagttttttgaaaacttttgtgaagaaaatggaattcaccacaatttttattccccaagaacacctcaac

SEQ ID NO: 148588 - DNA, 378 bp, Glycine max
  unsure (1)..(378): unsure at all n locations
ccttgcacaattatgcagactgatctatatcctaaaaccacgaaatcggcaatcaaaaatcttgaagttcaagtaagccaacttgcaaagcaacttgcggagaagtccaatgggaattttgaggctaacacagagaaaaaccacaaagagaaatctaaagagagacttacaataagaaaaaagatggatggccttgttagagataatttagaggaaagagtagtaaaagatatgggtgattgcgaagaaagtgtaagagagagagacatagctgagaataaagagaaacaaataagtgttgaaaatgtagaaaaaaccagataagtggagaaaaaaagataaacactnttaaagaaagagtagacgaagcatatcttc

SEQ ID NO: 148589 - DNA, 221 bp, Glycine max
gtgatgctagccctcaacatacataaagtcatattataaatagtactattttgtgtctcacctaccccatttagatgtggagatctatgaaccgttagagggcgacgaataccatatttttcacaaaattcattaaattgttttgatgtgaattcgacacctctatcggatattaaagctttgattacataaccactctccttttgcacaagagctttaaa

SEQ ID NO: 148590 - DNA, 404 bp, Glycine max
gcttgtgcatccaatacccttatgaggatttcccatatgttcttaaaactggactgattcatttgcttccaaagtttcatggccttgcaggtgaagacccccacatacatttgaaggaatttcatattgtctgctccaccatgaaacccccagatgcccattatgaacacacattattctaagaacatgcagcgacttcctcaattgccccatatcttaagcatagtatcgcttgacaacatcaaagttcacgggtgaaggtagctcctcgccatccatgttggtaaacaccagggcccctccgaaaaaacccttttacaacgaaaggcccttcgtattcaggcccacttcctcgattatcttaatagcggggaatctttttataaaaaagtcgccctatggaa

SEQ ID NO: 148591 - DNA, 437 bp, Glycine max
  unsure (1)..(437): unsure at all n locations
gatatatcttagtcctttagaagagactttgtatgataactaatccncnagnaaaaatcttacaaagatactatngaatatatggcttaagaagctactaaaaagaataccagatttaaggtagagtagaatctatttttatcttttgagcatatgagtagagggagcttctaaactttgaaaatagtttgagaaaacttcttattatcttatatcaaagatagaacattgtaaaacatgttttttcaagtaaaagatacaaaaacaacaaattaaaatcgataaagaaagataaatcacatacaaaatttatattgattcacctataaccttaagctacatccaatccatacacctataggatttccattaacacaagcacaactataggattctttctttcctaaagcctctactagctcccacatcagtattcc

SEQ ID NO: 148592 - DNA, 462 bp, Glycine max
  unsure (1)..(462): unsure at all n locations
agaccttagaaactcagctaggcaatcaatactcccgcatctatctctacactattctttctttctttacccactcctcacgttaggttttttaaggaaaaacaccataactaaacgcgccacaaagcatccctatcgcaccagatccaaatctagaacgatgggtgatcaagaggagacacaggaacaaatgaaagccgacatgtcggctttgaaagatcagatggcttccatgatggaagccatgttaagaatgaagcagctcatggagaaaaatgtggccaccgctgccgctagcagttcagctgccgaagcagacccaactctctaggcaactgcgcaccatcctccctcaaacatagnaagacagagaaaggacacactgnggcatgatggcaaccctcacctaagatacaaccgagcgagctacccttatagagaggcagccaactactcaccacc

SEQ ID NO: 148593 - DNA, 322 bp, Glycine max
tttatttcataaaagaagtcgtatccagtcaaagtctgagaaaccatacaagtttcttaacgatttctaattatgtgggccattaagtctatcatatgctgacaatatccgaaaagcccatgagtctcttcgggggtggagtaggtgtctgccatcaccttggccttggctaacaaacggggaagttcttgactcccgttcaatgtaaaagcaaaccggtccatccacatggttgcctcttggtgtaaagaatcgatcacccttcctctatcctctttttccgcatatacttgagcatactcatccgcgattctatgctcgt

SEQ ID NO: 148594 - DNA, 346 bp, Glycine max
  unsure (1)..(346): unsure at all n locations
tctccttccttttccttaaataggggatggagggttgctcttttatgttcaaccctcctggtatatgagattctcttaaaagtagagagttttattgtttccgngatagttatccaagcctaagcgcttccgtgacatttccgtgggtgatttcgcgtagtttttctaccgttcttcgtcgttcttcgttcgttcttcgtcattcttgggtcttcaactaggaagttcccgaaatcgatcttttcaattcattctgtacccatagaggtcctcatttgtctcacatgctcttattttcatttcatttactttctgtaccccctctttacgtgcttttgtcatttat

SEQ ID NO: 148595 - DNA, 342 bp, Glycine max
atgggtgatggagaattccaagatgaatggagcaagagtagatgctcttcatccatgcacgttacttttcctacaggaaaatatgatccatatctaccagctctccctgcaagtataaatgcattctatgcaaccaagaacaacatattattcatatatacaggacatatttgcccaagcctccaggcattcataaaataacaaataatatctattagaacactgaatcatttgatgatagtagtaagtttttcgaatccaaagtgaattccacatcaattcttaaataatgtaataaacattgaaattgaatcaattaatatctcaaaaatacacaaaaac

SEQ ID NO: 148596 - DNA, 347 bp, Glycine max
  unsure (1)..(347): unsure at all n locations
tcttctgttccaaagaaagtgatatagaaatatccttatcttttagaggtatatncaagnnnnaattctgnagcaaaacaaaactaagtttaaagtttttagtcctgccaaacttagacttagaaaattttctatagagcttctaatcttgtcattcttgcttctaaattattcttattctaatatagatagagtgatccaggacatatcatgtatcaaggacctaacatttctatatgaagttgctactattgaagatatatatcttgcatatgaacagntgaaagtggatgagaattctctatattcatgcattggaatagctggagctcagattgcacaagata

SEQ ID NO: 148597 - DNA, 379 bp, Glycine max
  unsure (1)..(379): unsure at all n locations
cctccaattatggcatattgaccgaaatccacaatgacaattaagaaaacgtgattagaaatttgtttatttctatattgaactgtncaaaaatattaattggtctctcgtgtatttggctaacctttaataaaatggcatcaccacttggaacactttctaacataatctcttccaatatgctctacaccttcatgcaaaaatgagtgcttgctaattaatatatttggcaaaactttttcaaatatttgtagtttagaagtaaataacacaaaatggggattgaattgtatctttataaattaaaaaaaaaattaagactgaaaacacatgtatcgtctgatgcatatatacttaaaaacacttagagagttttgat

SEQ ID NO: 148598 - DNA, 321 bp, Glycine max
  unsure (1)..(321): unsure at all n locations
agtatctggattccgnagagctgcctttctacacaggtttatgtgcactcatgtcctcaacattttcaagagagtgagcatcttgagtgagcaagaaagatgccttgnttgtgggatggaaactagtgaggtataagggttggtcaatgaccacattttttgtagagggggtttagagttagaagatagtgtgcaaaatctcaagagaaaactatgcaaggaaatttctgttcatcaaagccttgatggaaaggtttagctggatcttaataactagggattgagttacctcacactaaactcaccaccagaaagagtgat

SEQ ID NO: 148599 - DNA, 428 bp, Glycine max
  unsure (1)..(428): unsure at all n locations
cttggcgtccttgcgagagactntgtcatattgtagtattttggatattccatnctcaattnctatttttccttaattnaaaaaaaatcaattttcattttttctttattcactcttaatttcaatttttaggtctaatttttattttctgcgatagcatgcacggtagaggtttttttttctcttgtatgcgagaaaacaatattggcccttgaatatctcattttttcataaaataaattaaaaatgattctatttaaaataaatagaattttaggaaaataatgagcattttggaattaaataaataataaaaatagggctatctattaaaatactaggcaaggagaaaaaataaatatatggnnatagagaacaatatttattactcattgagaagagnaaatagatttttttatataaagctt

SEQ ID NO: 148600 - DNA, 336 bp, Glycine max
cctcagagtggaccataaaatgtgttgtgttatagacccacctttgagcaaaaattttatctttatttgcagcatcaagaacaaaaatataattctcagcatgctttctgttccaaatcatagcttaaatttgatgcagacaaaaaatattgaaataatagaatccctgcaatattataatgatcacacttcactaaaccaggtaatggctacagtaatattactcttaaccagttgcttctggttacgatactaatgagaagcagcaactacactgtgcatgcaatattaaggtataaaacactctcaaacagttggtgtttggagttgaatcat

SEQ ID NO: 148601 - DNA, 295 bp, Glycine max
  unsure (1)..(295): unsure at all n locations
aactcagctaggtaccactacttgactccactttctgtacctgtttttcataccccnncttggagtagcttcgcatatctatgaacaatgccttaccaagatgttgaccagctatgggaaaatctccagttccatctcctctcagagactctatagttcagncttatagtataccttgacaccgtttactttatgagccgcccaatgggtgtctactctggggattttgcgtgttacaagccagagcccgattgcacctgcgcgaaggagatctctctgaacagggctgtggaaa

SEQ ID NO: 148602 - DNA, 397 bp, Glycine max
ttgtcatatgccactgggaaattccatacgtttgctccattgttcattctctcttgctgccccaccactatccgtaaatcctcatttaaaaccttttgtagatgaaacatttaaacacacaatttacacattttggagagggcaaagatgccatttatttatggacaaaacttgcatcaagtttttcatgttcttgttattagcttctcaaattgaatgatggcatgtggatttttattttgcaccatattgctatccacatatcataatttgagttgagaacttgatagtaaagacataatgagaacatgatcatttttgtagagttatgtctttcatttaactagggtactttaataaataatcaatactaaaaattcaaatcatattgaattat

SEQ ID NO: 148603 - DNA, 406 bp, Glycine max
tccttctcatattcccttattcagctaaatatgtaccgtcaaaaattgaactttcaacccgagtgcacatacttgatctaaaagatactgtcataccctaatttcgtccggggattattatttgatgatatacaacctttgattggccgcttcaatatactatgcacccttttttgcacaatatgtgaagtcccgagacgtgccgaaaatcaaaaggaagcatgcttacgcgatctgtgaaaattccataatgtgacggaaatcgaaagcaggtgtttttcgcaatccgtgagttttcataacttcttcgaaagctaaaaaagagtaaatacataatcgcgtaggattcgtaaccttgctgaagggatataagtatcgttacgaaattcgtaaagtttcgtaacgt

SEQ ID NO: 148604 - DNA, 406 bp, Glycine max
  unsure (1)..(406): unsure at all n locations
ttctttgacttctcaagataaacctccttcataccatatgctagtttcagatttttacaccgttagaaaccctttttccttcttcatagcttctttggtttattcctagaggctagaatcttgagttcttttataggggtttagtaggtagaagctgaaatattgatcatcgatatgttgactatgagtcnggatgctagggtagccattatggagtaaaaaactctgattatgcagattatgcagttttagctaagctaaaatttttagtgtcagctaatttcgttagatttgggtctacatgtatttaaaccaagctaaaaattttggctaagctaaatagagactgagctaaaatctttagctatgctaatttgaaggtgagctataatttctagctttagct

SEQ ID NO: 148605 - DNA, 407 bp, Glycine max
agcttaacaatcagggtcttctattcatcttttcaaaaaacgacacaacgcaaataataaaatacattattcaacagtggggcaagacgaaagttgtatccaaccacttgtgcatttttatagttataataataaccctaataagtgtgaagacgaaaactattacagtaacgtagattccttttgtcatttgaatccaacaggttatgcatatctaataatggaggaaaataatccaaaccacaaatgtgtatgttatatatccagatacgaaaaacgcgaaaccataaccaccaagaacataaacttccttattactgtgacttaagtaaaccctttggccttcaaatacttttggcatattcaacgatgacattgttatggcaactcaacacattaataatcac

SEQ ID NO: 148606 - DNA, 349 bp, Glycine max
  unsure (1)..(349): unsure at all n locations
agttcttgattttcctcaatctttttctgctnagataatatactagagccttcattaactgtctttgggcttggcggccacgctcaacaaattacttttgacacctattgtacgttgatttcaccaatgctgttataggaatgttgcgacaatcctttaaaaccttattgatacattctaagaagttcgntgncatgtggccatatcgacgtccttctctatcgnaagccatcagccatttntcttttgagattcgatcaatccatgttgctatggctggactcagntcacgataattttctaaattctgatcaaaaatgtgctagcaaagagtgtaagctgcataaaa

SEQ ID NO: 148607 - DNA, 254 bp, Glycine max
cagatatcttaagaaggcggggtgaattaaaatattgcaaactatttccccaattaaaaattctatttcaatttcaatgcaagttgcaaggtcccttaaaaatgaactcttaaataataattcaaatagaaaaatctgaatataaatataaatcaataataaatgaaattctgataccgatgacagatgtcgtaccggatgtcacgacatcacacttcagaacatgcagattatatttgacagtatgaacagat

SEQ ID NO: 148608 - DNA, 380 bp, Glycine max
  unsure (1)..(380): unsure at all n locations
nctagccaaatggacttacctagaataatncctctattgttcctttgagcctatnnncccctttcttagttttgaatctcattacaagccttaagagaaaaaccatgatatcaccttacccttaaagaattttggagcttaggaatagcttagggaataagagagggggggtatgtttcattggaaaatatgattttcggccatggttaaagttttattttggccattcttgatgtatacatatatagcttagttctttctttaatcttcaatttcgtactgttcaataaaaaagataaagtattaattaaataattgtataatgaaataaatattaaataaattcagttgctgcaaattctgcaatttcgctcttttct

SEQ ID NO: 148609 - DNA, 359 bp, Glycine max
ccttatctctaacaatctccctctttttggctttggtgatgccaaacttcaatatgacattgagtgcatttggagagtcttgagattggattggaaacatgattcttaatcttattctgaaaaattctcaatacttaataaaggattaattcatcatcatcatcatagatgtgaaaattacaactaatatatattaccatgctcaacatgctatgcaatgcagtcaatatgtactatgcaatatgcaatgtcttcttctcccccttttggcattaacaatgccaataagttgagttaacgcttatcgaaacacactatttaatagagaaataaaccataattcattaacacttaataac

SEQ ID NO: 148610 - DNA, 397 bp, Glycine max
  unsure (1)..(397): unsure at all n locations
ntacatcagatnttagtaatgatccactagcctatattttaaagaacttaaaggctgagtgtaactgaaatagaggcaaccaaaagtcacccccaacatccatcaagtcagccaccatttggtctcccaaaagagctaaagcttaagttgccaatagggaccttattagaacttgaactaaacctaactaaagcccttttagttgattaacctaaaacatattttaggtcagccaaatttacaaagattgggccattatttagacaaactaaacactctaaaatagagacaaagaggagccatttagtcctcctccatttgggccatgatacaactcacaaccttggacttttctccttgaaacttgggctagtattcaaatagtatggaaaacact

SEQ ID NO: 148611 - DNA, 386 bp, Glycine max
  unsure (1)..(386): unsure at all n locations
atcgatgtgggtccgaaaagatgcaaatttgatcatcctactangacgactgagaaaactggggcaaatgaaaaaggtgagaaaaaaggagaaacccatgctgtgactgccattcctatactggcaagtttcccaccaaacccaacaatgtcattactcagtcaataacaaacctcctccttacccaccacccagttatccacaaaggccatccctaaatcaaccacaaagcctgtctaccgcacttccaatgacgaagaccacctttatcacataccaaaataacaccaacataaaggaattttgcagcaaaaagcctgtatggttcaccccaaattccgttgtcatatgctaaactngatcccatatccactcaataattcaat

SEQ ID NO: 148612 - DNA, 453 bp, Glycine max
  unsure (1)..(453): unsure at all n locations
agctgagtttaagaaccatttttgcaattnagacttttgtggatgacctaagagatcatgcaaaagtttaagagacgaagatgccaaacaagacatagaaaggctggtttcaagatagtagagacctctggtttcatgtcctatgccaatcaaccgagccataccacgttcctgcataacaaaggaatcaacatcaaatgttacagaacaatttaatgattttgtcagttgactaagagaaactaagntgaaaggacaattaggaacaaaaagacttggattcaagtttaaagaagaagaaatggagactgccaacttctttagaagcaattttggagccatttcctatggtggncagatgaagaaattntggagtagacatagatgtgaatagagtcattaccagatatatgataagaagcacctgaattaattacccatggaccttgacta

SEQ ID NO: 148613 - DNA, 336 bp, Glycine max
cacagccatgaccattcacaagccggaatcaaacataattcattcataattaactaaggtccaaatattgaaatataacccaagttcaaaaaataatgtcataaagcatagccaaatacacggcttaaaataaaatataataataatctaaatctatgaagatggtggtggaaagttgaagcattgacgaacataacttatatcctcctcaagctgagtgatacaggtatccatgcctgcaaagcgagcatcaatggcatcgatacgaccatccaatgaatcaaagcgctcaccaatataggtgctgaggcctcgcaactccgaaagaacttcatg

SEQ ID NO: 148614 - DNA, 402 bp, Glycine max
  unsure (1)..(402): unsure at all n locations
ncaagtttgagaagcatgctctcgatctcttctcttttattactcttctctcatgcgctnngnncctccatgctcctattgacgctcctctatgacctgttctcgaacgcccctgttgggaaaagaagttccgatgctgggggcctaaggttaagttttgagagagatgttagacaccgagaatgccgccgccagaagttaatgcaaagacgttgtccactagttccgcgacatctgtaagtttgccaacactgatttctccatggctgtcatccaggcctacctagtcctcgatgacctgagccagattgagtccgtcacctttggcattgagatggtggattagatataagttcatgcgggtaagatattgnctagagtttgatatgagatgaattcgat

SEQ ID NO: 148615 - DNA, 256 bp, Glycine max
  unsure (1)..(256): unsure at all n locations
gcttattcccgagtggatggcgcctcctctcaactcttctactttgtcttccgctacatctccatggtggaaaatcaccattaataagacctcattgaagctcaaagattcatcctccatataagccctacaagcaagctttcataaaaaaatatatgatcgtaaaaaaattctcaatgaatttttcctattatgattacctacgtgacacaatgatataaagatgaattctctgcccatcncatgaacatataat

SEQ ID NO: 148616 - DNA, 287 bp, Glycine max
  unsure (1)..(287): unsure at all n locations
ctatataagctctgaatgagcgacgttgtgcttatcaccttcctcgcgctnagcgcgagtaagaggatttgagctcagcgtccggcatgtgttgagcctggctgaagataactgttgcgcttagcgcactgatggcgcgcttagcgcgcgaccttgatattgatgctctgccaaattcttctgtcgcactgaagctgcgcttatcggaggatgcgcgcttagcccactgatgagctaagctcaactgtcacttttggcagtncatgatttatcctctttttcacttg

SEQ ID NO: 148617 - DNA, 229 bp, Glycine max
aacatgcattctttctttctttacccactcctcacctttggttttttatggaaaaacaccataacttaacgcgccacaatgcatccctatcgcaccaaatccaaatctataacgatgggtgatcaataggagacacatgaacagatgaaagccgacatgtcggctctgaaaaaacaaatggcttccatgatggaggccatgttaggaataaggcagctcatggagaaaa

SEQ ID NO: 148618 - DNA, 292 bp, Glycine max
  unsure (1)..(292): unsure at all n locations
taagagaatntcatatggagatnattcttcgcacggatgtccgatnagggcgcctaatatgttgagatgctcagaattgaacaacgaagctctcgagaatttcaaatgggcataatattttcactcggatgtccaattcaagcgcatcacatatcgagacgctcgaaatagaacaacggaatctctcgagaatttcaaatggtcataactcttcacaagagtgtccgattcatgcgcatcacatatcgagacgctagaaatttaacaatggaagctctggagatattaaaat

SEQ ID NO: 148619 - DNA, 380 bp, Glycine max
gctttcaattagccaatcatatctatggagcattttcttgtaccagtagcctggcctgaaactcaacttccattggtgaaaaccaatgatgctgttcttgctgatcccacacctgcgcaggtgaattcaaaaccatcttacccacaatctccattggtgaatccacctttttcgcctgagcttgaaacagttcccccatctcctcctctgattgtcatttttgatgcatcatcaaatgaagcaactgcccctcctgattcaccaactgcagaaatagttgacccctctgtttccccaattggaggaattgctaatctttctaattcatcatcaggaaaagctattgctctcaccgattccccttgtaaacttttgacatt

SEQ ID NO: 148620 - DNA, 390 bp, Glycine max
  unsure (1)..(390): unsure at all n locations
tattcaagggacagtcgatgatcgtatataactagcaagtgttggctcacaacaagccaatcatatctatggagcagnttctggaaaaagtggcttggcctgaagctcagctccctctggaaagatcccatgaagtagttcctcccaagcctgtagcatctaagactgtagttcctcccgggcctgtaccagctaagactattattcctcctgagcctgtaccagctaagactgagccaacatcagctgagccacaacctcctttagtagatccacctgcttttctagaactagagatattgtctcctccagcaccacctatgataatcatccccgatgacttagctgatgaagctgctgctcctcctgattcacaccgncttgcaacat

SEQ ID NO: 148621 - DNA, 310 bp, Glycine max
ccgcagctgcaagcctactcaatgagagagagtgtttcttatctgacctagccatcagaagaatgtgttctctacatgcatttttctgcatcatgcatattgtcttttctttaactaagtacaatcggtagcgcactaaattaattctctccaatattatatgatgcaaagaatttataggatttgtttctgatccaggtcctattcaagccctatccattggaattccctcctacttacactactgacgatcattgcgcggcgcagaaagcccgattgttcttatcttaagagactctttcgggaccta

SEQ ID NO: 148622 - DNA, 414 bp, Glycine max
agcttctacttatgtggcagggcgggcttccttcactttcttgtctccaatgcgagctttgaccacaggtcttccttcccgcgatgcttcttttcatgtccgcctgagtgggcttatagcctaaaccatacttcccacggtttccttgagcatttatcaggctagttatgccgccgttgtctttgcctaaacccatcccgggttcataaccgttccccaacataactcgggccatcattaccgctgcatcggacagacaaggctgcccaaagagggagtccacagaggaaatgctgaccacctcaaaagactagaaagcagtctctaacgattcttctgcggcttccacataaggcatggaagatgggtagcttaccaagatgtcttcctcgcctgatacgatgaccaagtgcc

SEQ ID NO: 148623 - DNA, 408 bp, Glycine max
agcttgtagaatggctagacatgatacatgtcatggtttggtttggctcaaggataaaagggatgccccacattatttccatgacacaaatgtaaaaatgatgattgggaaattttatgcaaaactggtcatgcatgcacctatgcggacactcaagtgtcaaatttttatggtcatgtgatgctagggctcaggattcatttcctctattttagtcaacccaatgtttccaaaatatgttggtttttcagctagacaacttatttttctttttccatctttttccttacttgctctcttttttctcatttcctctcttttccatttcattttttttttctttactattcttatttctatcatgatttttgtttggtttacatatatttttttttgacgatgttctta

SEQ ID NO: 148624 - DNA, 391 bp, Glycine max
tcttagtttcagctgatgaagatgaattcgtggctacttcattcactcctctaatgacaatagcatcatttctggcactaaattgctgggagttggaagccatcttcttaattaaattcctggcttccgcaggggtcatgtctccaagggctccacccctggcagcatcaatcatacttttctccatgttactgagtccttcataaaaatattggagaagaaactgctcacaaatctgctcctggacatctggtggtttcatggtggagcatacaatatggagttttgtcatatgtttgtgcgggtcttcacctgcaggccattaaactattgaagccaatggatcaatccatttttaaaacatatgggacatcctcatatggtgtttgat

SEQ ID NO: 148625 - DNA, 427 bp, Glycine max
  unsure (1)..(427): unsure at all n locations
cgcgatccttnagtcaccgcggctgcagctaagctctataactgcacaagctcttttatttgaagagtatccttgtggaaccttcacccgatgaagacattgacaaaaacttatcttctttttggacaaagtatgacaagctaggggcatgtaaattttcttcccatcagaccttggatgcaactgtgatcgtattcccatctcagctagatcttgacgggtattcaagccatccttcatcttgccctgaatgttaagaagcatcccaatcacactgtcacatacatttttctcgacatgcataacatcaatacaatgactaacatctagatcaaaccagtacggaagatcaaagaaaatggacctcttcttccatatgcaagtctgacttttatccatcttttggctctttccaaatacagtattc

SEQ ID NO: 148626 - DNA, 215 bp, Glycine max
aagctcgtcgttggagctgacgccatcaactgccctaagtcctttatactggtgatacctaagctcttgaccttgacttgaaagaacctacttttaagcgaaggtgtttgacttgatcccatgtatttctctatttaaacaaaatctaatgcgaatcgaaactctgacttctatcatgggtggaagtgatgaatgcatgaagaaatgctttaatg

SEQ ID NO: 148627 - DNA, 413 bp, Glycine max
agcttgctgctcgagcaataaaatgtgttttccttggatattccaagttacaaaaaggttaccgatgttactctcctgttcacaatcattattatctctttgcagatgtaactttttttgaagaaaaaccatactttgctccctccatggttgagtccaatactcttcaagaagtttttcctattccatatcttggttcatcaccttctttgcaggaatcagagtcaaatttagattctaccataaatattcctaacaatcttccacttgaacagattcaaagatcacccatcgtatatcgacgtcgtcctcaaattgctgatgtagaacttgaaggtaatgaaagactagttgaatcatgtcctactccagcagacaacccgaccatggacctatctgaagagaatcttgac

SEQ ID NO: 148628 - DNA, 349 bp, Glycine max
  unsure (1)..(349): unsure at all n locations
tttcgtgccttcaatctcagcttaataagtccttacgacccacattgtgtatatatgattgcatggaatgagatgaagtgcaaaattgggaactgattgttagtngtttggatgaattgacacttgcctgaaacacttgtgtgcttgagagaaacattggcttgtgaggaaagaagcttagtcaatcttgcttgatgtttgtcatgcttgctaactganttcatctctttagctcaattgcacatgcttctatcttgaaatgtgacaaatactaatttgggggagatattgatngatagatgtgcagttatctcagttactgtggttggtacttactaaacatgccatt

SEQ ID NO: 148629 - DNA, 397 bp, Glycine max
agcttcaagaacatgaaatgggacttatgagactccatcaacatgaagagaatgataaaaagaggaaaggaatagcattcaaagcctcatcatcttctattcaagaagaaagtgacaaagaagacttgaatgaaatagaagaagatgatgatttcagattttttgtgaagagattcaataagtttctgagaaacaaaagaaaccaaagaaaattaaacaccaatccaaagaagaaaggagaagattcctccttagccccaaaatgttatgaatgcgatcaacctgggcacttgagattcgattgtcctgtccttaaatgaagaatggaaaaatccgacaagagaaatttcaaagaaaagaaggcatacatcacttgggaagacaataacatagattc

SEQ ID NO: 148630 - DNA, 456 bp, Glycine max
  unsure (1)..(456): unsure at all n locations
ggtcaatctggatcttgaatatggtttgccactgtgtttgatggaaaagtgtcaaacaaacaattttttatttcatgaaaaaattataggtagggcaggaagttttacttntttattatgtgtggttgaatgaaataaaaaatctttgatttgttttgtgctgaatttgatgagtatggttttctattttttaaaacattttcttgcatttcttagttgtcaaaaatcatttaacacattttaaacaagtcaaacaattatattttaaaaaatcttaacggtcaaaaaattaatcgcaacaaaatgcaattaaagtttaaggatttagattaattaaattcttgttttagaattaaaaatcaaaattttataaacgtaatggattaaaaaccgtgtttatcttattttatattattaataccaagatatttttaactattttattggaattaatta

SEQ ID NO: 148631 - DNA, 408 bp, Glycine max
agcttagccaaatgcacgtcacttaattcatagacaatgttcattgcatagtcttcatccagggctgggcttgcgtgccattagagtcaatgcaactattagaataagccaatttaagtagtgacattatgttaactacaagattcatttgactattaaaataacattgattaattcttaggtgtttgctcacatgtagtagttgtgcaataatatcttattagaattagtagctaataattagattattgacatgaagaaaatagatcttaattagatgtattgtaagatttggacggtccaatatgatatatctagacgatataaaatactcataattttgatgataatagaaatataaattatcgatggactaatgctttatataaagtgaaatagaacatactt

SEQ ID NO: 148632 - DNA, 82 bp, Glycine max
agaggaccgagccagcgcttcattgtcttaagagagccaccgcttgctcaagagcaaaagaacttgactcgactcatcgaga

SEQ ID NO: 148633 - DNA, 409 bp, Glycine max
  unsure (1)..(409): unsure at all n locations
agcttgaagtcagaaagcccttaccacttcttangtatagtctgtcgccaatcatctagctttgtgaataacctcggcattcgacagattttgctggaaaatataggtgttcctcctccaccaagtaagtgattccaaggggactcatatacgacatgctcgcaagatagattggccttcaaccaactcttccaatcaccacaagaataaaaatcactaccatgattgattcaaatgaagaattgccaaattaattggacatatacacaatatctaaacatatgaaaatgagattcctcatgatcttcacagatactacacatactgcttctagagaaacctatcctcctcctcttcgcattcatcaacattgattcatggaaaatcttccacaagaaatgtcttacct

SEQ ID NO: 148634 - DNA, 421 bp, Glycine max
  unsure (1)..(421): unsure at all n locations
ntntggagtagaaacatgggacgcactcattttatttcataatggaagtcgtatctagtcaaggtctgagagaccatacaagtttcctaacgatttctaattatgtgggccattaagtctatcatatgctgacaatagcctagaagcccatgaatctcttctggggcggagtaggtgtctgccatcaccttggccttggctaacaatctgggaagttcttgactcccgttcaaggtaagagcaaaccgatccatccacatggttgcctcttggtgtaaagagtcgatcacccttcctctagcctcttattccgcgtatacttgggcatattcatccgcaatcctatgctcgtgggccgcgctagacctaactcttatgggacttggcgatgatagctagcatggtggtcttcgtctcgcat

SEQ ID NO: 148635 - DNA, 407 bp, Glycine max
agcttgagatgaggaagtgtagaagggtgaaacttccttcttttattcgttgactacagagtggtaccaggagatatgtcgcgagggtcaggagaccttggggacgtcaggtggggtgctattgcccaaaaccaagcttgaccaatcccgacccaacccgggcatagtcagtcagtgagacctgtgatgtacctaaacaggcgagctcctggcagtcaacagataaaaggaacaaacaccacaaagcaaggaggcttgtgtggtggctggccagctgtgaactttgtttgatatatgggatatgggctctggtaatcgattaccaaggtgtcgcaacctacccttccgcgggagggcgacgcgagactcgcgggatgcgtgttccacgaatggaatacgcgcggagt

SEQ ID NO: 148636 - DNA, 368 bp, Glycine max
tgaattcaagcctaaatagggggccttgttcgtgctcctgcccctaacacaaatctgggccgcttaacacacattaatgaatatcggcttaacgtgggcctttctcacttagcggatggactgaagccgtgcacttaatgagatgaaaccgggggcttaacaaaacttgccaactcatcttcttccagattctttcttgtgcttaaccaaagagcgttgcgcttagcggacgctcgcttaaccagcggattggcttaacgagaatgagaaaaacaacactttttgagccttccaaataacctggaattgaaaaaaatgattttaaacacaccaatggcggactaagttttattacctatctaacaaaa

SEQ ID NO: 148637 - DNA, 349 bp, Glycine max
ggacacataaaactcagctgtggatagggcacccgtatatgggactagtggtatcggcgatgccaaataactctcccttcacaaataaacatgaacccccatccagtgcccccttaactgagctcacgtctctacgtgcctatcttgttctctcacatcggtcccatcaatccctccagcttcatatatcaagcattcaattcacttctgaactccctaaccaaaaacaggcaatgcgaaactttcccaaaatttacatttacagtttctactaaaacccaatacttctttcgtccatatgaaacgtggacgactgaatttatgggggtgtgtcatagtacattgccgt

SEQ ID NO: 148638 - DNA, 403 bp, Glycine max
agcttgtcaccctcgtacttgtcaaggctactaccctggacaccagacttcaacactagacaacctctttttcctgcaagccaactcaaagcttggggggcttatgtactatccaaggtccaaaaaatacatgtggcatcctacatggcggcactctaagacacctgtccaccctctatgttagccctaacataggagcacagatgtctgacccttagtagtcgggctctccaatattatccctaacctcttaattatttgaatataccgtaaccactttatctcttgacaggtattcaattatctacaagttacacattatctgtaagtacaaaattatctactagatttcatctctaaactctatattactttatctataagctaccttctattatctata

SEQ ID NO: 148639 - DNA, 329 bp, Glycine max
  unsure (1)..(329): unsure at all n locations
nganatgaggaagtgtagaagggtggaactttctgcttttattcgttgaccacagagtggtacctggagatatgtcgcgggggtcaagagactatggggacgtcaggtggggtgctattgcccacaaccaagcttgatcaatcccgacccaacccgggcatagtcagtcagtgagaacctgtgatgtacctaagcaggcgagctcttggcaatcaacagataaaaggaacaaagaccacaaagcaaggaggcttgtgtggtggctggccaactgtgaatcttgtgtgatatatgggttatggcctctggtaatcaaataccaacggtgg

SEQ ID NO: 148640 - DNA, 405 bp, Glycine max
  unsure (1)..(405): unsure at all n locations
agcttccatcaagtggtatcagagcacattagcttcaagtaggtgctctttaaacctccattaattattttgctttaccttctcttccattgctgattcttcatttgtttctccatgtatctcctcacatgtcttgtgataaatgttttaaacatgattctttagagtttccaccgattaaacttgctatagaagctagatttgattttctatgcttcaaatttcttgttcttgttcttgaaccatgaattgtgttgagtttgggttcctttgagttttgtcttgatattttttgtggctganacctaaaccataaaactcttacaaaaatattaaagtataagaaaacctcanaaatctaaagtgacttgttcacctattggtattttgtcatagaagacatgt

SEQ ID NO: 148641 - DNA, 417 bp, Glycine max
agcctatatctaattctaacttctggatttggggaattcatctttttcttggccttcaaacgatagcacttaagctcatttagacagttttgctactatggttgacatctaggaagcagacttcccacttttctttgatgaggataatggagacgcaaacttcatttactgtttagataagatgcatatttatctcctaaatcgtaatacaatataaaaagactatatccctataaaaagttatcaacagctaaaagcaatgtgtgaggttgtgagcattgggttatttatattctattaagtatgcattacgttatgtcatatgatctatattatatatctatctttaacttttggattggcgaagtgagaagatatgaagctgattctacagtagccctaaatatctcaaactca

SEQ ID NO: 148642 - DNA, 161 bp, Glycine max
ttcaatctaagctgaagaattgctaggagaatgtggagaaggggcggtgtgttcttctacactcatacgacgaccaggtggctcttagaaatgaatagtcatgctcaaatgaaacgaatgctggtggcgtaaactacctaactatccatgtgcctgatgcg

SEQ ID NO: 148643 - DNA, 177 bp, Glycine max
  unsure (1)..(177): unsure at all n locations
cgtgaccaaacgtgtcgataaggtgcggtnttcacgtccttaaaggcctcaattttttaagtcatttgacagagaactccagttagcacaatttattgccatttaatatgtcgtttgaacaaagatgcgtggcttaatgttgatgtccataacggacgtcgaactaaaatgattttt

SEQ ID NO: 148644 - DNA, 405 bp, Glycine max
  unsure (1)..(405): unsure at all n locations
agcnttttggagaagaattccttgagaagctagagcttagctacacacacccctctcataactaagctcacctccttgagaagcttccttaagaagattcctaaagaagctagagcttagctacacatacctctctaatagctaagctcacctccttgagatgagaagctagagcttagctacacaccccctataatagctaagctcacccctatgacaaaatacatgaaaatacaaaaaaaaaaaaatccctactacaatgactactcaaaatgcctcgaaatacaaggctaaaaccctatattactagaatggccaaaatacaaggcccaaacgaaggaaaaacctattctaatatttacaaagataagcgggctcatacttagcccatgggctcgaaatcta

SEQ ID NO: 148645 - DNA, 471 bp, Glycine max
  unsure (1)..(471): unsure at all n locations
tgtttctacacttagcgcaactactaaactagacagcacatgcttggtgagcagtctcgctaagcccaattctaagaaatttaaaaacagaggcataatagcgcttagcatgacatgcatgcttagcgcccaacaaaaacacaaaaatcctaagtgtctaatacacaatactcgcttagcgcatagctgcgcttcgcgagttcaacggataactgaacagaaaagatgaacgtgcttagagagacagatgggcttatcgcgttcatctagaaatccaaaatctntaacagaaacgatgaactcgcttagcgcagcaaggctcttagtgcgttcatcgcgattntcagaanaataagggcttctcaccccttctcataggcccctatngggccatcaaaccctaatcaaaacatgcacattgtgactacagtacaaacctaaagctattctaactaacaactaacctaacat

SEQ ID NO: 148646 - DNA, 401 bp, Glycine max
agctatgaagtgtgttttcccggtcactaacttattatcgacatctgtagtataacaccaaatggcccaatgggtgtagctcaattaacacttagcaacacatgcttagtttgtgggaggagacatggacttgattcccgcataatacactcatggggagggataatgagcttcaagtgtggctaagccccaaccaaggattagtctcatagctggtccaaggatcgaaacttgtagggataccttgacgtaccactggggagtccaagaccctgattatagtagtaccaaaccaaaaaaaaaaagtataataccaaatgatcaagtgttttctgaatttaatgccaatatctaagagggtgttttgcgttctcaatattggcgcatgtatctataatttg

SEQ ID NO: 148647 - DNA, 314 bp, Glycine max
  unsure (1)..(314): unsure at all n locations
cgatcaattggttaatattcataacataaatgatagtacaagtcttaaatttaaattaaaaatatacaaaaaaaatntaaatactaaaaagaaaatcaattgtcttgatgtctgtgatgacataacgatgtgccgcatggatgatcccatcctcgtgcctgtctatcaggatttcttctgtcatgatggcccccctcttcatgctagttagcctcaagagaaaattggtgacgcacatcaacacctaataattcatccatattatgtattgctctgggtacattccattgagtacctaatgaagcattatgtgt

SEQ ID NO: 148648 - DNA, 384 bp, Glycine max
  unsure (1)..(384): unsure at all n locations
aaagcgactaacatgtataacactaattgtcgtagagagtggacgccatttagttttagcgtgttggatgttgaatagataggtaacagagcaatccttcttagatgatacatcctatcattaagtcctttaggaaataaaatttttccacttgtcaaaaactcattagaatattattgatttacactttttgtaattcataaaaatccaaggtagatgagacgagtggtcgtccagacctaacaattatgggtctactatgatgcgaaaaatagtttaaaaaatttatgtggaaaccattgaagatctatgagaattntcactccaatgatttctcatatactacctattaccaacggaaattgattattaaactatcaccaa

SEQ ID NO: 148649 - DNA, 156 bp, Glycine max
ttattgatacagcctcatacatactatgttttatggattattaatcaagagtattcaatctttcaaatcattaaaaattaaatttttaaaaatatctaatatataaatatctttaatctaattttgtctcattgtatgtatgtctctctaatagtt

SEQ ID NO: 148650 - DNA, 396 bp, Glycine max
agcttgggctaagcgagtcagtctctctaatcccaaggcaatttagtgttctgaaattttgttcatgcactaagcgagtcatgctcgctaagcgcaatttcttctctgtctttgaataaggcttagcgagccagactccctaagccaattatgttctagtggtcaagttgggctaagcgcctgctggcactaagcctgtgtaatgtgttgcactaagcgagtctgtctcgctaaacgcaattagctctatgttatagaataaggcttagcgagccatgctcgcttagccattgtgttgtgtcagctaagagagggtgtctcgcttagctagagtctttgttttcctgtagtcacgctaagtgtgccctgtgcgcttagcataccctgttattttct

SEQ ID NO: 148651 - DNA, 382 bp, Glycine max
  unsure (1)..(382): unsure at all n locations
tacgtgacctatgaatctaagcttctaaggaggtgagcttagttattagaggggtgtgtgtatctaanctctagcttctcaaggaagttttctcaaagaagcttctcaaggaagttntctcaagaaagcttctcaaggaagctacctagtctataaatagaaacatgtgtaacacttgttgtaactttgatgaatgggagtcttgtgagacacaactcaaagttcaacttcactccctttttcttccttcaatttcgtgctcccccctctctctatctcttcctctttcttttcctccattgaagcatcctctccaagcttcttatccaaggctcatcttggtggtgaagctccttctntcatggcttattccctaatggat

SEQ ID NO: 148652 - DNA, 393 bp, Glycine max
  unsure (1)..(393): unsure at all n locations
accttaaatatgtttggattagtggtgtcggttaaaggtagganaagtagaaaacagaaaatgaagtacaacaatagttacaaaatagtgggaaaaacataggtgtagggtgtaaaagtgaaattacttttgcatcctataganaatttgaaaaaaacaacgcctgatttttttccgttggatatgaaaattaaaatatttaatgattgagatgtgtcaaggattaccagagttgatagaagaattatgaatcgtgtccgtcgaattaaaatattaaaaaattaaatggttgggatctgttgaagatgaaagtatgagtgaagtttttttttttatcattgaaaattttgtatcagtaggagcaaagatggaaaaacatgagttgggaagtta

SEQ ID NO: 148653 - DNA, 255 bp, Glycine max
gagatttttctgataccaagtgactccaagggttattgcttctattcttgcacagattcctgaaagcaaggaagggcgaaaatagtgaggttgaagtgaaactgtgttgcactccattttcactgtccaacaatttgattgtcacaactaacaatcaatatgcttattttattacactctcacaatgtatcacttcctcatttagatctgaactaagcatgcttacctaacacattgtgggtgcaaaaatttttc

SEQ ID NO: 148654 - DNA, 408 bp, Glycine max
agcttcctcggtgccattcctgcgaatgttaacatttggaaagttagtttttgtgggacattactcttaaagcaaaaatggcatataacctcctcccataaatacaaacatcaatgtaaatttagagcaagcttatgcgcatgtttccttacgaacgttcacttgcggaagatatcctattaaccgaaaaaatgcacccatatacaatcaaggcagctttgttacctagattatttacacgtacttccaaggtgtatttgttacttacatcacacacatctccttggctaaattcacatacatgcatactccaagcatttggggtaccaaaaattgcacatgtgcacatcttggtatttctaatacctatacatacacgaacttcatgatgaatcatgactatctaca

SEQ ID NO: 148655 - DNA, 295 bp, Glycine max
  unsure (1)..(295): unsure at all n locations
acacatnaatagcctgctcctatatatcgcatgatcgaacttgatgcataagctcttgccaattacacatggtcataacttgtcacactctgttcccattcgcgctattatgattctcatacacttggaaatgattatctgaagctatgcacataaactcttgggcatagctacacaaaccgatgttccagcctggcacatcgtatggagcgacactctaaattctacagaaaaagttcttgccttttacatatcgctaggactttccctttgatgtccgacccacacttattaa

SEQ ID NO: 148656 - DNA, 401 bp, Glycine max
  unsure (1)..(401): unsure at all n locations
agcttgtaagaagtatagcaatatatgattatgtttttggttgattgataaggacttagattttaatcatgggttaaggagttgtacaactgatggagatatattacacttagttagagatgcttttgaaaatgaaaatgagataaatgtttattttcatcatgaagtagatccaattttagaagaagtcccacagatgttgtacttggaatgtgatccaattccagaagcggttgagaatgaggatgatttatattatgtacctgttactggccatgaggaaggtaagttttaattcatctatacttggtccgacattgttaccataattaattaatatgattaatntttacttgatcatcattaatgcagatgttggtgctggtgagcatgtttgggtt

SEQ ID NO: 148657 - DNA, 459 bp, Glycine max
cacatagaatactaagcttattcattagtagctagagactgaggttaaactagttataaattattgacgtagcataagatataaaatatgaatatgtatgcggatcgatgattatgcaaaaaatagacatgctataactataacgcgtattattggatgattattgccgccgctgggacaagtcagcatattggtatggtcaaagctaaatacatatattatcctttattcaatttttccccacagtattttagaaatttgtacccacttaaatgtgtttcttttataggaacccaactaaatattatgatatatgtataagatgcaaaaagtggttacacaaatgaaactacacacgtgcttgaaaatatatagcaattcctatcgacaaagtgatttgaaaaataaacatgttggcagccctatttacgattaacatcatattgtgcttataacacc

SEQ ID NO: 148658 - DNA, 415 bp, Glycine max
agcttttctggaagtgacttattgtttttcacagaggaaataaatccttataagctcaacataaacaataaaatacaatgtattaaaagttgattttatgtttaagaaaatattcctttaaattaatgttttagaaaatattaacgtagttttcctgttcaaatataatttaaatttaatttttttgcataaaaaataatttttttattttgttaattcaaaaggtgttactatttagagtttgatttatataccttatacacgtagaacatctttatacagaaatctaataagatttaaccattttattttaattaatataataatttaattcttatatattgttaatataaaaaagagttacataagcaattaattaaacataatcagtaatataatttttaaaactactatc

SEQ ID NO: 148659 - DNA, 308 bp, Glycine max
tccagaatggtgtaccacgccactactgctccagtctttctgtcttgaaagaagtgcatataatatgcccccatataatatgcccccatccttctgcaatacatccgaagatgaccttttggacacgtcctccctttgtatttatcaaaatctggcactttaaacttggaaggaatgatgatgtcaagtaccagacacaaatccgctaaattcgagaacggatagttgccgaggccttctaccgcactcagcctctcttcaagtagatcaatctttcccttgtcttttgcaatgggaacgagttcctt

SEQ ID NO: 148660 - DNA, 365 bp, Glycine max
  unsure (1)..(365): unsure at all n locations
agcttatgcaaacaggcacttaatcttttgtatgtggnctctgcttgtgcaatattttacagctgtgggtcttaatattgctttgaacatattaaggtctaatttatggtacgagtacttatcctttatggcattttattatgcagactttacgaagtcaggttcttgtcaaggttgtgaaaaacaagcatgcccctccatttaaaactgcacacgttgagattgagtttggctagggtataattatagaagccgagatcatagagttgagcgtaaaatacaaaatcataaacaaaagtggttcgtttttgaatataatggcaggaatttccatggcaaagatgctctaaagagattcctggctg

SEQ ID NO: 148661 - DNA, 340 bp, Glycine max
  unsure (1)..(340): unsure at all n locations
tcttgcgngcccctcttaatgctcagataatctccattttaaatccctcttatggcaagctgctaatgcctatgaatctatgttgatgcaaaacgctatagtgaaatggttaaaggaaggggacagaaattcatcttacttccacaagctgataaatcattgaagaagacatatatggtatttcaagggattgatcacttgatggggaatgggttcacgaccctaataaggttaaatttgacgctttcatcatttaaagaaagatttctgatctaatttcatatacaaccatggatgtggcagctacctccattggtcaagtgagaatgaacccttgtgt

SEQ ID NO: 148662 - DNA, 318 bp, Glycine max
  unsure (1)..(318): unsure at all n locations
agcttattgccaggattgggtacattagtttgttgaccactcttactttctccggttcgagctcaatcagacggtccaaaaccccgaacacttcgtccatcttacgtggtttgattttgacctccatgagtgtgtggagcgcgtcagtatcacacgggttggtgctgagacactctntgagaatcctcccggcttcctccttggtgaaggaggtgtcagtttccacgacgaggaagtgagctaggcaacgatgatggcgagcgtgtggtggaagcgcatgaagaagaaggcaatatcggcgatgacgatgcaggtggt

SEQ ID NO: 148663 - DNA, 397 bp, Glycine max
  unsure (1)..(397): unsure at all n locations
tgagaattaattggtttgagaatattgttctaatttcatttgtttntaaattgagttctatatatagaactgcattaaatattctgataaaaggatgtaaaattgtgttaaatagtcaaatgaagagtttttggtataactataaatatattgaccctattcaactcaagtagatttagtagatttatttccatgaaatatatttgttatcttaaactataagaacactataatttcttacaaataaatttgtatcttcacatatnttatctaaaaatgagtcaaatatgtntntctattgatcctatttgatttctaaaaatggctataagcatattttatcttctaaagtgttcttttttttaaatgagtccaatatgtgctccctatattttaa

SEQ ID NO: 148664 - DNA, 416 bp, Glycine max
  unsure (1)..(416): unsure at all n locations
gcttaaacttacttgagtcatctctaacaaggggtaaagttaacttaaggaatcatagaataacttcctggttcgactactactcaagggtgtctaatctcaatcttaagttcccccccatcctaaagcaacttctacctaaaaaggatctatagctacctctcatctagacatagcatactctaagggatatcatcactaactagaatgcatactaaaacgcctaacacgaaaggtgattcccaagggtttttaacaaccttaagatattccacatactccaacttaactcgaaacacactaagcactaatcaccaaaaccactacaagagctaactcagggtgggagatcctgtccatgcatcccatgaacacacaacgacattgattntgtcaagacatgaccatgtacatgt

SEQ ID NO: 148665 - DNA, 157 bp, Glycine max
atgtctttggatgctctgcgtcgatttctaagtcgtagttattatgattatggattggaaccacacgctcattgtctttgtgtgaggggaatctacttgtaacaccctctgcatatacataacgtcgcaaattacaatggtgtgaatgagcgaatat

SEQ ID NO: 148666 - DNA, 430 bp, Glycine max
  unsure (1)..(430): unsure at all n locations
ttaagtcacctgcggcatgcaagcttggattgattcagtctcactagggatcatggtttantaatttaggctacaacatagaacacaaaagcatgatcaattagagaaacatcgttatatgcatcagctggtctgttaaaaagacccaacacttgtacctactgttgtcaattttacttactcgcatttttactgtgtttatcctagacctagtttaattctgtttgaaaccatcaattatcaatgtttctttcaacaatgccttattttttaatttaacccggtcttagactagtttccctgagtttgatactcggattcatccgttttaatttttaaatacttgatgatctggtgcgctttccagcaaactggatttcccttgaatatatttttacgaaggaaaagtggaacaaaaaagtaaccgcag

SEQ ID NO: 148667 - DNA, 344 bp, Glycine max
acgtgacctataaaactaagccttcactggtcgcaatatatgaggctcttcaaatctcctttatcaccacatattagacatatatgttcctgtcaagttcattgaaacaattatggacacacattctaatattaggccatgaaacaagctataagtttaaatgttcttaagataaaggaaaaacattgtctatcaatagtcatagatgaattctaacttgactgaatatatacagtgaactgcacacaaagtcaacaaaacaatcacaagacccagttttcattattgcttacatattcactaaacatattaagaaaataagggcgacacaacaatcaacaaaa

SEQ ID NO: 148668 - DNA, 395 bp, Glycine max
agcttgactagtttgcaaaatggcatacttgatatatatatgttggatcaagtggcctcggaataattaagaagggggggttgaattaattattgatgtgccttgactaattaaaaatctatccttcttaatgttactagatttaattaagtttttactacaaagttaagaaagtaaagaacagtaattgaaacttaaccaaaagtaaaaacgataattaaaagagcacaacgaaaattaaaagtgtagggaagaagaagacaaacactataattttatactggttcggcaacaacctgtgcctacatccagtccccaagcgacctgcggtccttgagatttcttttcaaccttgtaaaaacctttacaagcaaagatccacaagggatgtaccc

SEQ ID NO: 148669 - DNA, 358 bp, Glycine max
  unsure (1)..(358): unsure at all n locations
ccatggcttaaaacaagcccaaggtattggtttttctngtagaaatctactttacttcagtttggttttgtgggaagcaaatgtcattcttctctgtttatctacagacataaggatcatactgtctatcttttagactatgtggatgatatcatcatctcatcacaaacagttttgtctctcttattcagcaactaacattcaaactaaacactaccttctctcttaagcaactgggtcatttggataatttttcgggactcgagatcaaataccttcccaatgactctatactaatgactcagagcaaaaatattcgtgatttacatcacacaactcaaatgactgaatcacattc

SEQ ID NO: 148670 - DNA, 423 bp, Glycine max
agcttctttgagaaaacgtgcttgagaagctagagcttatctacacacacccctctaataactaagctcacctccttgagaagcttccttgaaaagattcctaaagaagctagagcttagctacacacacttctctaatagctaagctcaccttcttgagatgagaagctagaacttagctacacaccccctataatagctaagctcacccccaagaaaaaatacatgaaaatacaaaaaaagtccctactacaaagactactcaacatgcctcgaaatacaaggctaaaaccctatactactacaatggccaaaatacaaggcctaaacgaaggaaaaaacctattctaatatttacaaagataagtgggctcatacttagcccatgggctcaaaatctaccctaaggctcatgataaccct

SEQ ID NO: 148671 - DNA, 209 bp, Glycine max
  unsure (1)..(209): unsure at all n locations
cttcagagaaagttactgcgaatggctatatactatnggtgggatagtggacncacagaagagccagccagtcaatatagtcaccatctatgcaccttgcgatatccataataaaagacttctatggggctctgtgaggcatctaaaagaagcagcaccttgggggctgtggtgtatactgtgagatttaactcaatcatggacacgaa

SEQ ID NO: 148672 - DNA, 415 bp, Glycine max
  unsure (1)..(415): unsure at all n locations
agcttgagatgaggaagtgtagaatggtgaaacttcctgcttttattcgttgaccacagagtggtacctggagatatgtcgcgggggtcaggagaccttggggacgtcaggtggggtgctattgcccaaaaccaagcttgaccaatcccgacccaacccgggcatagtcggtcagtgagaacctgtgatgtacctaaacaggcgagctcttggcagtcaacagataaaaggaacaaagaccacaaagcaaggaggcttgtggtggctggccaactgtgaaacttgattgatatgtgagatatggcctctggtaatcgattaccaagggtgggtaatcgattacaaggcttaanaatgaacacacgacgctaagatggtctctggtaatcccttaccactgggtgttatctatttc

SEQ ID NO: 148673 - DNA, 462 bp, Glycine max
  unsure (1)..(462): unsure at all n locations
tcaagaaaaagatggcctcagcaaattccttatttccataatggaattctatcaatagacctccaatctttaatggagagggttaccactactggaaaacccgaatgcaaatntttatcgaggcaatagatctaaatatctgggaagccatagaaatagggccttatatacctaccacagtagaaagaagttcaatagatggtagttcatcaagtgaaagcataaccatagaaaaacctanagatagatggtctgaagaggatagaaaacgagttcaatacaacttaaaagccaaaaacataataacatctgccctaggaatggatgaatatttcacggtntcaaatngtaagagtgctaangggaatgtggacactcttcgataacacatgaaggactacagatgtaaaagactaggataacgcactactctgagatgattattaaatgatgcaatgaaat

SEQ ID NO: 148674 - DNA, 411 bp, Glycine max
agctttgactacaatacaagtgcttcctgataatttgaagcattttcaattttcaatttcaaaagatatatacaaaaagagctatcattattttactgaaaaattatgggtgaataatttaccagcaatgttccatcggttgtgtccatgttgtggcagaggctcttcatggttattttctgcatttgacatctctggaaaacaaaacataagtatcatgtgaatttcattttttgccttcgctcgttaaaatgtatcactatgaaattctattcaagggacacaaaacagaaccctgctataaggccacttaaccaacatttcaaaggatactctaaaaaaccaataacagctcttgtgaaggaaattaacaaatagcagtattttcatttaaaattacatacagaacta

SEQ ID NO: 148675 - DNA, 327 bp, Glycine max
  unsure (1)..(327): unsure at all n locations
cttttatccaaagtggtngttaaccaaaccacagaagaactgtcctcgttatgtatgggcagagacagagtcatggatgctttattcaactaggcctgaagactattgtgaccattatggggtttgtggagccaatgcatattgcagcactactgcatcaccaatctgtgagtgtntaaaagggtacacgcctaagtctcctgaaaaatggatatcaatggacaggacccaacgatgtgtcctcaaacatccattgagttgcaagtatgatgggtttgcccacgttgatgacttgaaagtgcctgatacttaaagaacacatgtgga

SEQ ID NO: 148676 - DNA, 397 bp, Glycine max
  unsure (1)..(397): unsure at all n locations
agctnntaaaattttctaactaaattatctaaaatataaaactaaaactaaaaacataaactgtatctaaagcagaaaaataaatcatagccctatcatcactcgtcctgtgttggtgtctgctcatcctgggctggtgcaggctcgtcatgaggtgaaaaaggagtatcctgngctggctgaggtctctcttgtgcagctgtaggctagggatcctaggtactctgcaccacctgtaaatctactgcatagtctgtgtcctcgatgccttcttcaccctcaacgacatccataataggtgaagtagcaggtgaaacctgtggagttgtctctagtgtggcctcgcttgtgacctctagctctggctgaggctcctgngctgtggaagcctcacctc

SEQ ID NO: 148677 - DNA, 423 bp, Glycine max
  unsure (1)..(423): unsure at all n locations
ntcaccagatcatataagataaatgcattcaggctgcttattatcctcccaaacgtcaaattctctgcctatatattcaacctttccatcactggcacgtggagtgaatcttcctccatggtgcaatactaaagttatattgtcattcattctacacaatcagaaaccacaaacattgtcatatattaggaaataaaaaacctacctcatactcaaacatatgcacatcacacaacaacatacaatgtcatctataaaaacagagcatcataaacaaaaataataaaggatcataaacctccctacaaagcgcaaagacaatgcaaatgaaaccccttgaacatataataccccaaatcaaaccaccaaacaatgcatacgaaatgaatgcaataaaacaccaacctggcaaaagtgtgactc

SEQ ID NO: 148678 - DNA, 406 bp, Glycine max
  unsure (1)..(406): unsure at all n locations
agcttcacacggtttatctttctcaaacttgagttttgaaagaccaattactaagtctttcctaaatagatgattcaaatgatgcatattaatgtgtgcagtcctacaatgccataaccatgtgtcatctattttacttaccaagcaactttgttcatgaaatgatgcttgcttaatattcaacatatagatgttacctagtctcttaccaatgtagatgacttcattagatttggcttcacttataagacaacaatttttgttaaactcaatcttgaaacctttatcacatagttgactaatgcttagtagattatgctttagtccatccacatataacacattctntatctagattttgtattggattcctatatntccttctcccatcatctttcctttgtat

SEQ ID NO: 148679 - DNA, 351 bp, Glycine max
aagctcgtggcctaggatctacttcatcaatggattcctttgcttcttataagatgaatggccctggaatggagaaggatgagagagaggagatgccacttcaaggagaagatgagtctagaggacgttcaccaccatatgaggccacatctgagagcatataacaataacgagatgaatgaaatgagatgaagagaaggagcacgaaatttattgcctcaaaagaggtcttaactttgaattataattatcacatgatcaaagttgaaaaaatgcacacacattgcctctatttatagcctaagtgtcacacaaaattggacggaaatttgtatatctattcaaattcac

SEQ ID NO: 148680 - DNA, 392 bp, Glycine max
agcttaaaaaggactagagatgttgttatccttgaaggaacacacaattttgaggagcttcgtttcgcatttgagacaactgctgtcaaccttcaacactgacttcttaaccatggagaaataatcactcacctggttctgatcacactataacgatagaatgttcagtaaataatccaaccggctttgtgaacttaacaacaacggtgttgatgttcagatattaagagattattatttcttgtgaaccacccaaaacaaggaggaaataacagtctctctcttttgacatcgttttcttgtatggatatacaccgctctcagcaaagctagaacaatattttgtcttttgctttgttggcgcctataattcttacctgaaggctctattg

SEQ ID NO: 148681 - DNA, 217 bp, Glycine max
gagaaatatgacggccctctttccacttgaaaagaaatggcatgcatctgcaatgaaacagcataacaaacttacatggtaccaggccaatgtacaatagatatgttgaagtctctcttgtcctcctgataaagcactgtattggagaatcacgaggaccaggcttttctttctctagagaaacattacttaagaaacagaaatccccatatggaaa

SEQ ID NO: 148682 - DNA, 399 bp, Glycine max
agcttctaactaacgaggaaggttacatttttctatttctcttttttccattttaaaatcccaacaatggtgcaaaatgcccaatatatactattaatcactgtgaatattttactattatttcgatccaagatgctcccttttaacctacattcggaaccttaatttgattaagaaaataatgtcccacattgcaagcatttgatccactgatgttatggattgctacccatttgtcacaaaacatgggaaacacgcgtgagccaatagtagtacaaaacatcgaagttcataagtaaaaaaccaataacgctcagcaaaaatgattaacgtggcctattatataaattacatgcacaacagagaatggggagtgtgtgagaactaaccctataacat

SEQ ID NO: 148683 - DNA, 388 bp, Glycine max
aaaactagctgcggatgtacaatacgaaaagatttctgtattgaattatcctctatatatacgtttatttatctgctctctcttacttactattacatttgttttacaaggcaaatgaacatgaagttaaaaagagcacaaagagtgtcttaacctatatacagaacacaaccttcaaggactccctgataaatccgccgaaaaggcgtctcattaataggatttatacacctatcaaatataactgtacttatatgaccgaaaacccctcgatcatatattataaagaccttcaaacatatagtcaaatagatgtctgtgctttgaaaacataactattcatacaaaggttgaagaatctagtttatcctaatttaatcattatatc

SEQ ID NO: 148684 - DNA, 404 bp, Glycine max
  unsure (1)..(404): unsure at all n locations
agcttctgacaataactcatagattgtttaacccacatcccttattttctttgtatactcaatcacaatatccctgcaaaaaagtataaactcatcaaggataaataatccaatcaactaaactggatccgttactgagatacttgcaatcatgatctgtaactaaatttcggtaacaaatgtttttcatgtaaagtataatgaaaaagaaccaaggccgttctccttagctnttcttattcacaacaagatggggtacataagcagataatgtaaaagttttttatattcttcaaatcatagattacagttttgttgaaaattgttaacttagcataaaagtgaaaacatgatttctgattagacaacgatgtaagaatctctgacagataattatcaaatta

SEQ ID NO: 148685 - DNA, 465 bp, Glycine max
  unsure (1)..(465): unsure at all n locations
gtctatatatatattggagtagaagtgtgatgtgtaattttatctcgcatagaagtaaaaaagttaagcactatatgattggagagaaaatttatgaacttataatttaaaattttatattacaatgcggtgttgagttctcttgaatattttttatcatctaatattttaatctttctttgactgaaaatatgggaatgtgaaggttcaattcccaacaacatgattctttcttaaatcgatctaataacacctgtttcaaatttccatgacatgctttaataacaaagttattatatcatataaatcgtaaatgacaaatttatagttcatattacatgaaacagacataaaaagaaacgaagatatatgggactataaactatattgtaactttgtagagaaccttggaaggngtccttcttcctctttgcttctgcatgtgggcacataatcaattagtac

SEQ ID NO: 148686 - DNA, 447 bp, Glycine max
gaccggatcttaagtcacctgcggcatgcaagcttgcagggcatgtagcacttctgccaatgtgatttttgacagatcctttgtgttctccaacgaagctatagatgcttcatacctctctggcaccgttagcaaaattttctttataattctcaaatcagcaaaatcactccccaacaactttatcttactgccaatacccaacaatttgtttgagtattcttttattgtctctgactctttcatcctttgaagctcaaattccctccttaaattaagcactcgcatgcttcatattctatcatctccagcatattcctctttcagataatcccaaattactttgggtgttttgagagtcatgattctggtgaatatcatttgtgaaacaccagtgaacaaacatgacctcgcctttgcctttttcatctttttttccttgtgatt

SEQ ID NO: 148687 - DNA, 370 bp, Glycine max
  unsure (1)..(370): unsure at all n locations
aagctggctgagtaaaacctattatnttcactcatactgtcattatatttctaagcacttcaatntggcgtttcctcctaaaccaaatttagctcaaaacgtgctctacttattacttctgtaatatctcaaaacttaagcaagatgagtgttattcccctgtaattataaggagaaaaagctatgtttctatctttctattacggtgagaagctaaatcatcaagaacttgtcacaatagtatataaatcggaaatgaattcacaatcgcatattttaattatttgagttcttcttcagtctgaacaaaataatgctagtgccgttttgtgtaattatatatgtgtgtgagtatgaaccatcagaacaa

SEQ ID NO: 148688 - DNA, 421 bp, Glycine max
  unsure (1)..(421): unsure at all n locations
cgcctgcaaccttgattagtggctgggttgaggataaattttgctaaaagtaaattcagggcaattagcaagtcacatcagcggattcaaaatgcggcaaattaccttagttgcagagtattggccattcccttcttgtatttgggtatccctattgaggcaaacccaaagcgtagtgtgatatgagaccctatagttgagagatttgagagaaaactatcaaagtggaaccaaagacatctatcttttgggggaaggatcactcttataaagtcagctttaaattcaatccctgttttttctttctttctttnttcagggtcccaaagaacgtggccatcatattggtgaggctgcaacgatggttcttatgggatgaaaattcagaccanaggaagatngcttanggagataatttgtc

SEQ ID NO: 148689 - DNA, 410 bp, Glycine max
agctccgaaggatgcttcaatggaggacaagaaagatggagagaattattagatggcggagcaccatattgaaggagtaaatgagggagagaagtcgaactatgaagcatgtctcacaagactcgcattcattaatgttgcaacaagtgttacacatgcttctatttatagactaggtagcttccttgagaaaagttgcttgagaagcttccttgacaaaacttccttaagaagctagagctcatctgcacacacccctctcatgactaagctcacctgcctattaagattcctaaagaagcttgagcgtaggttcaccacctctctttatctcactcaactcttgagatgagagctgagctagctcacacccctatatagctaatggccccctgacaaatcattacatc

SEQ ID NO: 148690 - DNA, 412 bp, Glycine max
agcttctaagcatttaacgacagtgctttcatttattttgagatactcatcaacactattgacaggtaattcgtatgccaatattcgaattgctgcaatgcatttctgcagagatgaaagaccttctaccaaatgcataagatcacatttggaaatatggataatggttattaatagtgtctataattcgaaggaacaattgttttcccattcggaacctctgtcgaattgactctctgtgtatatgctattttcagagaagtagtcattcatcaagtgactatgtccgtcttcacagttctgatttatgtttcttctttttcgtatgggttgattgctactctctgcttcttcgtgtaattggcgtaaatatctcatgattccttcatcaatgttgtcttcagtgcttcat

SEQ ID NO: 148691 - DNA, 376 bp, Glycine max
  unsure (1)..(376): unsure at all n locations
cttaactactnttataagttagttttactaattaaacactatgtggcattcaatacgaatgatagataaagaggaatagaattgaaaacatgtattatttggatagataaaataaaataaaaataaaataagtggagaatttatttttgcttattttgatgagtgaaatagtgagtcaaaaaaatacacaaatgaattatataaataagctttatatactaattgaaaaattgattaaaaaaaactttntacgatattatttttgcacaacataatttttttactatgtgttattctataaagaattatttaatttttaaaaaatgcaacacataccactcatgtttactattctcaatacaagaacctcaaaact

SEQ ID NO: 148692 - DNA, 374 bp, Glycine max
agcttcacaagatgatgccgatcgaacttttttttatccgacatcatgcaaatttggttcatggattgaattgaaaactcaatagccgacatcggtcgtgaaatagccccggctgatatttttcagccgacattgagcaatttttttttaaaaactctcgccggcagataatggttcttttacggtagaggaagttttcttgttttggtgttgcataaaaaatttacaacgcatgtcggctaggtttttttgtgcgagctcaaccgaccttttgtttgggcctaaactggcatgttcccatttattcggcctggaaaactttagcccatctcggcaaaaaaaaattattcacccatattgactccaaaaaatga

SEQ ID NO: 148693 - DNA, 222 bp, Glycine max
tagtgagagtgatatctctaaattctgagtgattcaagaacactctggctgtatcaaatgactattactacctctgtgtgttggactcgctggaaagagtgaatgcttacttcctatcatcttccacccttgctctttcagaccacaattcctgaaaattcacccctgtcctaaattatctagtgccgtaacttccatttccacacatcaaattattgattc

SEQ ID NO: 148694 - DNA, 418 bp, Glycine max
  unsure (1)..(418): unsure at all n locations
agctgtctcttttctctctttttctctctttttctctcaattgttcttcattcttctttctcttttcactgttgttctcccattttcttgcacaaaatcttgtggcttttccattggtgatgaaaatggagggctaaacacttcatcaatccaagtctgaatttgagttctggtttagtatttctaaattttgtgaatgttcatctatctccccaatcctattttcaattttcatgattatgattatgcttgggattgaaaacatattaggttatggattcatttcctaatttcaaaaattaatcacagattgtttggatgatcttccaacctaatttgtgatctccaacaatntaacgagattgatttgattgaactatctctaatgcatttgagtgaactccacactgtacattat

SEQ ID NO: 148695 - DNA, 231 bp, Glycine max
  unsure (1)..(231): unsure at all n locations
tctcagcttcggtgaacttgttgacaaactgcttactgttattcagtntatacaaatgaccttggtgcaaatcttctagacttggagtgataacatgcagtcctcttgaacccttaccttccactcttttgtcattcctagactccggaagccaaacaagatttgtcttttcaatatactctgaacaaaacataaatgccttttcttcaatggtacttttgacaattgatg

SEQ ID NO: 148696 - DNA, 403 bp, Glycine max
aagcgcggcggctgcagcttaacgctgtgcgagacttttattgtgattgcaggaaggaattggagtatattcgtcaatcaaacaacacatatatagttgccaaattccacaaggtcaatgaattggcgcctcacagcaaaaatgttcgggttgaaagatggggaaaaacaatattagctccaaatatttacatatatttgctagtgcaaggagaaaatccctcactaaggataatggaactcaagtttttggtcataatgaattgcgtgatgttgcaatttcttacttcaacaatttgttccaagaagaacaacactactgagggtcctcccattatcaataaaattccagtcaatgcttctgcttatgacaatgactcactactaccacatccactatggaa

SEQ ID NO: 148697 - DNA, 291 bp, Glycine max
aaacacatacttccagttattattgagaacatccctccctggtgtgaggagaagttatacttaagtgtatatattcatgtggtcacttattaaaagtgctgcaataatgtcgattagaaagaaaataaagattttcaatactcatatttggttaatttaaacgataataatactttttggtttggaggaatagtgttaaattatttttttataattaaagatgatcttttttaaggactaatattggatagtctgctctgacaaaaattagtctattaccaaaaaaaattt

SEQ ID NO: 148698 - DNA, 385 bp, Glycine max
  unsure (1)..(385): unsure at all n locations
cgaataccaaatgacttgcttagccgaaaatagaatatatttagtgttgagtctatcgtccactcaattatgcagagtatcgcttcgaagaacatttgcttgttttacactctattgtcttgtctattattctaaaggagagacaccttttatagacttcactgaaggatttattaagggatcggtcttcaaccttgatatgaccattgtctcacaactggaggtgaaaacatgtggcatgctcttaatggcaaggacaggaataaaagtacacaaagtngcctgtgttcctcttcgataatgaaaaccaccattgatgaatatttatgccaagcattctactctcttcattgtgttctttccttaatttcaatggtaccattca

SEQ ID NO: 148699 - DNA, 395 bp, Glycine max
agcttcaccttgtggtcctcctcatagttgttgcatgagaaaacatgctctattttcatctcccactccaagtaggcctccggatcattctttcctttaaatggaggaatgttgagtttaataccatcaatttggttttgtctaggaacaccatcattccctcttctcctcctttcttcttcattatgatctctattctccatttgatccaacctctcatggagcgcatcatctcgttgtttcattaacctctccaaatgttgcatcgaagcttgcatttggaattgcgaaagccccactccatcattaggattagtacctgacatctcaaacaaacaaatcaaatgtaacaagacaattatagttgttgtttgaatacctcacccactcaagtg

SEQ ID NO: 148700 - DNA, 340 bp, Glycine max
  unsure (1)..(340): unsure at all n locations
ctctcgctgctacacattgaatctatgcgacattataaagcttccgtatctgtcataattatttgtacttatctaaatgatgtgaactctaaccacaatgacgaccatcaatttcattcaaggtggatgaatcaaaattcagctctccttgacagattatatagcctgacacacatgaattgcaagatatttttttaaaagtgtgaagctactactatctcaagctgctcaatatttntgccaatgatctcacgactgtatgcatgaacgtggtaaaacaccacgtgtgtatagaccactcctaatttaaaatgatctcacgtaatgttaaaatgcctaa

SEQ ID NO: 148701 - DNA, 393 bp, Glycine max
  unsure (1)..(393): unsure at all n locations
agctntaatacagagataagcagatntggtatataagatccccgtaggatcagctccccacacccaagtatccttcaaactagcatttaagtttatagcagcagtttgatcaataaaaaatgaagctatccccatctcattgtcgaacatatttcgcctccaagaaaacttccattcccatccagtttcacaaaaggagcccatatctgccactgtctgaagtttttcagatgaaatttgatataattctggaaattttcctttaagggttatcccaccatcaacccaagagtcttcgcagaacagaatttgatcacccttacccactttcaaatgaactgcttggagacatcaaccacacttttatgatggtttaaggacctcaagtcacac

SEQ ID NO: 148702 - DNA, 412 bp, Glycine max
ttgagcacaaatcctgactcacacaatccttacctgtatctaaaaaatgaagggaatttcaatcaaaaaagagatgaaaatttccaatgaaagcaaaaaaagaaaagaaggaaaattccccaatcaaagaatgggagaaagttaaaaatgaagaataagaatgaaagaaagctcctgatcatggatcgaaggaaaaacaaaagaaatgtgcagagaggtctttggaccggacaatatctgaacaatacagaattgtcaccaaatgaacaataaagaatgagaggagaccacgacctaagatggtcttctccctttgattaccaaccaaaatcccgtgcgctatcgactttttctccccgccctttactaaaatacagaataaagaaaaagctccacaaaattcaaaagccaa

SEQ ID NO: 148703 - DNA, 399 bp, Glycine max
agcttcatgatgaagtaagagtgattcttagaagttttgatgatgacacaggtgatgacaaaaagctcaaagatcaagaacaattcatgataacagagacgatgatctcaagaatcaacgaatcaagtttcaagattcaagttccaagaatcaaaatcaagattcaagactcaagattcaagaatcaagagaaggttcaattaagagaagtattagaaagttttttcaaaaactgagtagcacatgagtgtttctcaaaaccttttaccaaagagtttttactctctagtaatcgattaccagattattgtaatcgattaccagtagcaaaatgggtttcaaaaagctttcaactgaatttacaacgttccaattgatttcgaaatgttgaatcgatta

SEQ ID NO: 148704 - DNA, 301 bp, Glycine max
tccttgataagcaaggaaggtagcttccttgggaagctttatgaaaaaacttccttgagaagcaaggaaggtagcttccttgggaagctagaggaagatagcttccttgagaagctaggggttactcacacccctccaatagctaagctcaccccatgccaaaatatatgaaagtacaatatgaaacttccttgagaagctagaggggggctactctcaccccttcaatagctaagctcattccatgccaaaatacatgagaatacaaaaaagtctctactacaaagactacttaaaatgc

SEQ ID NO: 148705 - DNA, 410 bp, Glycine max
  unsure (1)..(410): unsure at all n locations
agcttcatgatgaatcaatattgattcttatatgtnnngatgataacaaaggtgatgacaaaaagctcaaaggtcaattcatgataatcaaagaatgggttcaagatgtttaagaggttcaacatgttcaacattgaatcaagaacacttcaaggttcaagaggaaatttgattccaataatcaagaatcaagatttaaggttcaagcttccaagaatcaagatcaagattcaagactcaagattcaagaatcaagagaagacttaatcaagataagtatgaaaaggtntttttcaaaaactgagtagcacatggatttatctcaaaacatgtctaccaaagagtttctactctctggtaatcgattaccagattattgtaatcaattaccagtaccaaaaatgtttttc

SEQ ID NO: 148706 - DNA, 328 bp, Glycine max
  unsure (1)..(328): unsure at all n locations
tatcccagcggactagacgaggattttgntctttcagccactctaggctctaaacaaagtaacaagatttgttggaagattgcacactgactaaacacgtgatcgtgttgtatacgaatatatcactcaatacttttagtcttttctctcaatgtatatagagtgtgttgagagcttactatctttattagaatttaaagatagctttacaagaaagaatgaaagaattattcgcatagatgagtcctgtcttgtttttaaaagcctcttattattactctcatctccaagtttccttgtctcacaagggtggatctttacttgttct

SEQ ID NO: 148707 - DNA, 332 bp, Glycine max
agcttgcatatccataagcaatgaataatgtatctgtagcagtcaaattcaagagttactacatatacaaaacaattgatactttgaaacaactgacctttcaactttcttgtgagaaactggatccagctcatatgtcgataaactagtctgaccccttttgtagaattcaaaaccaagttctcttgctgcaatcacaaatgctgcttcatctggggattcagcctcatatgagacatttcctgtgccttcatccacttcgggtatggctgtatgacagactgccaataggcgaaaaaacttctggataacatctgcatgaggctcattaa

SEQ ID NO: 148708 - DNA, 392 bp, Glycine max
  unsure (1)..(392): unsure at all n locations
tctatagaagggtcattcctaatttctctaaatttcatcacctctcaatgagctggtgaagaagaatatggcatttacctggggtgaaaaacaagagcaagcctttgctttgctcaaagaaaagcttactaaggcacctgttctagctcttcctgacttttctaaaacttttgagctagaatgtgatgcctctaaagtgggagttggagctgtattgttacaaggtgggcaccctatttcttattttagtgaaaaacttcatagtgccaccctcaactaccccacctatgataaagagcntttatgcctaatcagagccctccaaacttgagaacattaccttgtttcccaggaatttgtcattcatagtgatcatcaatcacttaaataca

SEQ ID NO: 148709 - DNA, 413 bp, Glycine max
agcttacattacttaagaagataatgatatggattcattcgaagactcagaaagtgaagtcgtgaatctaagtctcatggctaaaaactatgaaagtgaagaagaggtaacatcttctaacaataacttatctatttcctttgatgaacttcaagatgcattcaatgacttgcagaaagaattagtcaaacttgccaaactagtttcattttctaagaaaactatttcaaatttagaacaggaagttttgaaattaaatgaagaattataaaatcttagaactgaagtcaaaactttagaacccaattgatacaaatcaatcttctaccataaaattgatacaatatagtaatgaagcatctaactcatgtaaatgtcgtacaagtttaaagaagaaatcaagatctgaaaat

SEQ ID NO: 148710 - DNA, 413 bp, Glycine max
agcttcaagctgatagtgaaactggatgttctctcttactacatatttagatgaaccaaccatggattttgatttaaggaagcaaatgcaattgcggaagaataatagccaacatttttcagatctttcgttaatggccgggacttgttacgcatcctcattaatatagtagcatcgaaatttgcatatagcattgattctcggattcttaataagtataaagaccgtctcttgccagaaaacgtagaagcaattatttttacttccaattgaaagcatggcttttgtgattgtaattcatttaatctaaaaaatattaatattaaaattaaatttcattggacgaaaatatataataaaaaggtttaccgtggtgaatttaatgtaattatcgtacttgtgtgtacccaaaa

SEQ ID NO: 148711 - DNA, 453 bp, Glycine max
ctgctgtggagtcaaaagtgacaatgagcagtcgtgttatttgtttatttagagaaaacttaatgggttgctaaggactagaaatagtgtcagtagttaagatgaaccaatataaatctttttgtttctgatttatttcccttattttccttaactaactaagagggtttgaatttgaattcgtctttcagaaggatatgcaaaatctattatgtatcatcggactatgttttaaaaactgttttaatttctaaaacttttagatgataactctttctctaatcacaattcaatatcccttcttatcttttcaagaagttttcttggcaaatagactttctcaacttctatattaaatctacccaaattagtattaacataacttttcttggcctagaaatctccaatacttttactgccttcataacacgattaggataaaaccttaatttt

SEQ ID NO: 148712 - DNA, 409 bp, Glycine max
caagcttcagtctgcttgagcagctctattaacttgtccatttctcttttatttgccaagatggaagttattatcccaaaagaaatcccgagactgaagagaaatgtttcatctgatgattatgtacgtgtcaacaagagtagataaagcaaaacacaccacacaacaagcaccaaagacttgatataaactcatgaaataaatagcaacctacttcatcaagaagtcaacatatgccgtaaccaacacagatgacttgattgggttataaagctagctgtgatcagcatgttaggcctggataataaaaccattttttaattagtgttaggaatgccattttacgtcctgaagcaattttcccctccggaccaaaacaacctccatttgtaaaggaacagtgagattg

SEQ ID NO: 148713 - DNA, 351 bp, Glycine max
  unsure (1)..(351): unsure at all n locations
actcaagcctttctttttcattcatctcanaggaaaagagggttatattagacctcatgtgacaccccaaggatctgccacaagggaagcacttgccgcagaacttgcacgcgtgtttcaattcttgatgaattcgatgatctccttccatcgaatttcgatacgaatctcagaataaggagaaaaacattatggttgtttgtctttgcgacggtgaatcatagagttctcaagaatgctgaattcatcgatctcgtatcgcgcatcagaagaagaagaagatgaaaccttcgagacccagatcagataattgatggtggactgcgataaagctgcaccctgctacctttt

SEQ ID NO: 148714 - DNA, 403 bp, Glycine max
  unsure (1)..(403): unsure at all n locations
agctttctttgaataattaaccaataagttagattacatacatttatggcgggaagaattagcaatcattgacagctcattagagaaatcagaaatgttgggcctggagtattgatggatattgttttggcagcataacttatgctaggaagaattgatggttaatcttaaaccactgcaaattctttttctgattgagtgttacaaatcaaatacttagaatatgagtaaagcttgaataccctttcaggaataaagataccaaatagatgggtgttaagtgggtaactgtgttagctgtgtgactggttagtcattattgtctctctttgggttcctaacattttnattatttgtttttggtaaaaatttgtttccatagattcaaatgctatcttaagct

SEQ ID NO: 148715 - DNA, 425 bp, Glycine max
tgacacgtatcaaggatgtcgccagtgttattggcgatttgttgtccattggactcgccagtttgactggcgagttgagctatgggtgctgttgtacacagtctatggttgcaagaagcgttgcacgaggaggcaactttattatgttgaaactgctagtgctactggcgaattgcgctgtacttggagttgctagtagcactagcgaattgtggttggagtagccattacgaatggcgagttcatctgcttatatatggacgcatcttcgacattatatgtgcgtttttttaaaaaatactcagttcttgattgcctactatccatatttgtttggtcatgcttaaccgttgtgaagtcagctttaaggtttgaagtcttaatgaaatgtgtgtgcatgaaagtagtttctatgaagatatttt

SEQ ID NO: 148716 - DNA, 417 bp, Glycine max
agcttcttagtttcagatgatgcagatggttttgtatctacctcatacactcctctaatgactatggcatcatttctggcgctaaactgctgggagttggaggccatcttctcaattaaatatctggcttcaacaagagtcgtgtctccaaaggctccaccactggcagcatctatcataattctctccatattactgagtccttcataaaaatattggagaagaagctgttctgaaatctgatggtgggggcaactggcacatattttcttaaatctctcccagtactcattcacgctctctccactgagttgtctaatacctgagatatccttcctgatggtctgggtcctggaagtatggataattttttctaagaatactctcttaaggtcatcccaactcgtgatggacctt

SEQ ID NO: 148717 - DNA, 288 bp, Glycine max
acaatgtggcaccaactagttggcagtataaagttagggcacttgtcaatcatgtgagggcgaccacgatcaacacaaccgtagaaattactacctaatactataatttaaagtgctttcttgtaggcatcaacatatttatattggtgcttcctattatacagaagcaaacttgcataacttcgatgctagattccaatatacataccccagaaaccctaaataaatcaattcccagaaagcaagctataaacatcattgaggcattgtttgcgacattcataatca

SEQ ID NO: 148718 - DNA, 411 bp, Glycine max
agcttcccaatatcttcaagcattttatctatacaatgagctgcacaaggagtccaataaatatgtttccttttctcctccaacaacttacccgctaaaacatagttgctcccattatcggttacaacttgaacaacattctcttctccaacttcctccacaatggcatcaagcaactcaaaaagcttttcacctgtttttacaaaatcagagccatcaacagacttcaaaaacatggtaccagcttgagagttaataaaaaaattaatgatgcatctttgtttccgatcagtccatgcatcggacataatagtacaaccatacttgacccattgctccctatggcctttcatcaaattttcagtatattcaacttccttcttcaagagtggaactctgatgtcatgatag
